United States Patent Application Publication US 2005/0244851 A1 - sequence listing, part 16

SEQ ID NO: 598993 - DNA, 25 bp, Homo sapien
catcttgggataagctaaggcgtta

SEQ ID NO: 598994 - DNA, 25 bp, Homo sapien
taataccaatctgtagctatccctg

SEQ ID NO: 598995 - DNA, 25 bp, Homo sapien
tcctcttccctaaaaataatgatta

SEQ ID NO: 598996 - DNA, 25 bp, Homo sapien
tggattatgtcaaagagaccaagcc

SEQ ID NO: 598997 - DNA, 25 bp, Homo sapien
tctacatctctaatccactcctgga

SEQ ID NO: 598998 - DNA, 25 bp, Homo sapien
actttttacactactattcctcaga

SEQ ID NO: 598999 - DNA, 25 bp, Homo sapien
aaagtagcatattaaagggcaggct

SEQ ID NO: 599000 - DNA, 25 bp, Homo sapien
catattaaagggcaggctgctctac

SEQ ID NO: 599001 - DNA, 25 bp, Homo sapien
cagaccaacaagtaatgctggagaa

SEQ ID NO: 599002 - DNA, 25 bp, Homo sapien
actgactctcctattttcaccagct

SEQ ID NO: 599003 - DNA, 25 bp, Homo sapien
cccactgactctcctattttcacca

SEQ ID NO: 599004 - DNA, 25 bp, Homo sapien
cactgactctcctattttcaccagc

SEQ ID NO: 599005 - DNA, 25 bp, Homo sapien
tgactctcctattttcaccagctcc

SEQ ID NO: 599006 - DNA, 25 bp, Homo sapien
gtggtggtggtcgtgaaggtcttgg

SEQ ID NO: 599007 - DNA, 25 bp, Homo sapien
ggtggtggtcgtgaaggtcttggag

SEQ ID NO: 599008 - DNA, 25 bp, Homo sapien
tggtggtggtcgtgaaggtcttgga

SEQ ID NO: 599009 - DNA, 25 bp, Homo sapien
gtggtggtcgtgaaggtcttggagg

SEQ ID NO: 599010 - DNA, 25 bp, Homo sapien
tgtatttgtatttgtcggcggcaga

SEQ ID NO: 599011 - DNA, 25 bp, Homo sapien
gcagagagcctgtactagacccatc

SEQ ID NO: 599012 - DNA, 25 bp, Homo sapien
caagggagcttgagttacaggattt

SEQ ID NO: 599013 - DNA, 25 bp, Homo sapien
gcctgagcctccagatatagtaaga

SEQ ID NO: 599014 - DNA, 25 bp, Homo sapien
tggtctatcccatgttgttcttttc

SEQ ID NO: 599015 - DNA, 25 bp, Homo sapien
ggaggtagaggttctggtctatccc

SEQ ID NO: 599016 - DNA, 25 bp, Homo sapien
tacatagtaaactcgcccgtgctgg

SEQ ID NO: 599017 - DNA, 25 bp, Homo sapien
tgttcttttctcaacatgatctaca

SEQ ID NO: 599018 - DNA, 25 bp, Homo sapien
ttttaatatatgactgggctctaat

SEQ ID NO: 599019 - DNA, 25 bp, Homo sapien
ttaatatatgactgggctctaattc

SEQ ID NO: 599020 - DNA, 25 bp, Homo sapien
tgttaatgttaaaggcttaacacca

SEQ ID NO: 599021 - DNA, 25 bp, Homo sapien
ttaatgttaaaggcttaacaccatg

SEQ ID NO: 599022 - DNA, 25 bp, Homo sapien
tgaagctgactacgctgtagctgcc

SEQ ID NO: 599023 - DNA, 25 bp, Homo sapien
tccggacggattccagtgttggcct

SEQ ID NO: 599024 - DNA, 25 bp, Homo sapien
atctctggttaaactgctgcattgc

SEQ ID NO: 599025 - DNA, 25 bp, Homo sapien
gccattgttcatagttccggacgga

SEQ ID NO: 599026 - DNA, 25 bp, Homo sapien
tagtttattaaacaacaggctgctc

SEQ ID NO: 599027 - DNA, 25 bp, Homo sapien
tattagtttattaaacaacaggctg

SEQ ID NO: 599028 - DNA, 25 bp, Homo sapien
gtttattaaacaacaggctgctcac

SEQ ID NO: 599029 - DNA, 25 bp, Homo sapien
ttagtttattaaacaacaggctgct

SEQ ID NO: 599030 - DNA, 25 bp, Homo sapien
gtgatgtagcaaataaatcttgatt

SEQ ID NO: 599031 - DNA, 25 bp, Homo sapien
caatggaccaagaggatcaaattct

SEQ ID NO: 599032 - DNA, 25 bp, Homo sapien
ggaccaagaggatcaaattctttac

SEQ ID NO: 599033 - DNA, 25 bp, Homo sapien
atccaggtggcaatggaccaagagg

SEQ ID NO: 599034 - DNA, 25 bp, Homo sapien
tgtcctcctgttgttataagctaat

SEQ ID NO: 599035 - DNA, 25 bp, Homo sapien
aacagtaacagttatatgtatagcc

SEQ ID NO: 599036 - DNA, 25 bp, Homo sapien
gtaacagttatatgtatagcctaat

SEQ ID NO: 599037 - DNA, 25 bp, Homo sapien
tataagctaataacagtaacagtta

SEQ ID NO: 599038 - DNA, 25 bp, Homo sapien
gcctctcatgacacaggttttgctg

SEQ ID NO: 599039 - DNA, 25 bp, Homo sapien
tcttcagtgcataagcttatcacca

SEQ ID NO: 599040 - DNA, 25 bp, Homo sapien
ataagcttatcaccaactcaaaggc

SEQ ID NO: 599041 - DNA, 25 bp, Homo sapien
ggtcaaggcatcttcagtgcataag

SEQ ID NO: 599042 - DNA, 25 bp, Homo sapien
ttgacgaaatatactctgccattgc

SEQ ID NO: 599043 - DNA, 25 bp, Homo sapien
taattcgtgtgttgtggttgacgaa

SEQ ID NO: 599044 - DNA, 25 bp, Homo sapien
gggtcttcccattgtgtaattcgtg

SEQ ID NO: 599045 - DNA, 25 bp, Homo sapien
tgttgtggttgacgaaatatactct

SEQ ID NO: 599046 - DNA, 25 bp, Homo sapien
atctcatttcccaaccttcaggtaa

SEQ ID NO: 599047 - DNA, 25 bp, Homo sapien
gtagttcttctattgtggtccacaa

SEQ ID NO: 599048 - DNA, 25 bp, Homo sapien
ctcatttcccaaccttcaggtaagg

SEQ ID NO: 599049 - DNA, 25 bp, Homo sapien
tcctgtgcggggatctatataggtg

SEQ ID NO: 599050 - DNA, 25 bp, Homo sapien
ttccacaacgaaaaaccctgccaga

SEQ ID NO: 599051 - DNA, 25 bp, Homo sapien
gaagctaagatcttttacgaagaaa

SEQ ID NO: 599052 - DNA, 25 bp, Homo sapien
tacttaggaattaatcaagaaggca

SEQ ID NO: 599053 - DNA, 25 bp, Homo sapien
ccacactaccccagattgatacaga

SEQ ID NO: 599054 - DNA, 25 bp, Homo sapien
caaattgtgatatgtggtgttttaa

SEQ ID NO: 599055 - DNA, 25 bp, Homo sapien
agtttcccgctgaagactactttag

SEQ ID NO: 599056 - DNA, 25 bp, Homo sapien
caaaagtttcccgctgaagactact

SEQ ID NO: 599057 - DNA, 25 bp, Homo sapien
tcccacaaattgtgatatgtggtgt

SEQ ID NO: 599058 - DNA, 25 bp, Homo sapien
tcttgtgtccattttggtgacatat

SEQ ID NO: 599059 - DNA, 25 bp, Homo sapien
gctatagggatatttagacttacta

SEQ ID NO: 599060 - DNA, 25 bp, Homo sapien
gatttatcagctatagggatattta

SEQ ID NO: 599061 - DNA, 25 bp, Homo sapien
tgtgtccattttggtgacatatctt

SEQ ID NO: 599062 - DNA, 25 bp, Homo sapien
accatgaggtcactttgaagaatga

SEQ ID NO: 599063 - DNA, 25 bp, Homo sapien
ttttagatcactatgacaccatggg

SEQ ID NO: 599064 - DNA, 25 bp, Homo sapien
cctggagtgtgaccctgatagctta

SEQ ID NO: 599065 - DNA, 25 bp, Homo sapien
gggtttctcagctagccttggactt

SEQ ID NO: 599066 - DNA, 25 bp, Homo sapien
caccagaaccggaaatactgaacct

SEQ ID NO: 599067 - DNA, 25 bp, Homo sapien
gaaatactgaacctttgctttgaag

SEQ ID NO: 599068 - DNA, 25 bp, Homo sapien
cataggctatctgaggtccattgtc

SEQ ID NO: 599069 - DNA, 25 bp, Homo sapien
ttgctttgaagtcccgaacataggc

SEQ ID NO: 599070 - DNA, 25 bp, Homo sapien
tacagaaacaagtagactatgaata

SEQ ID NO: 599071 - DNA, 25 bp, Homo sapien
ttatctttccttacagaaacaagta

SEQ ID NO: 599072 - DNA, 25 bp, Homo sapien
ttccttacagaaacaagtagactat

SEQ ID NO: 599073 - DNA, 25 bp, Homo sapien
cagaaacaagtagactatgaatata

SEQ ID NO: 599074 - DNA, 25 bp, Homo sapien
tagaagaatgacttaagtcaactct

SEQ ID NO: 599075 - DNA, 25 bp, Homo sapien
agaatgacttaagtcaactctcatc

SEQ ID NO: 599076 - DNA, 25 bp, Homo sapien
gaagaatgacttaagtcaactctca

SEQ ID NO: 599077 - DNA, 25 bp, Homo sapien
gaatgacttaagtcaactctcatca

SEQ ID NO: 599078 - DNA, 25 bp, Homo sapien
taatctttatgtgctgtggcatggc

SEQ ID NO: 599079 - DNA, 25 bp, Homo sapien
aatctttatgtgctgtggcatggcc

SEQ ID NO: 599080 - DNA, 25 bp, Homo sapien
gtaatctttatgtgctgtggcatgg

SEQ ID NO: 599081 - DNA, 25 bp, Homo sapien
atctttatgtgctgtggcatggcca

SEQ ID NO: 599082 - DNA, 25 bp, Homo sapien
tgtgacacttacatcagatcaaggg

SEQ ID NO: 599083 - DNA, 25 bp, Homo sapien
gcttcaagaaactcgtccaacagag

SEQ ID NO: 599084 - DNA, 25 bp, Homo sapien
tagttgctacaataccactggtgct

SEQ ID NO: 599085 - DNA, 25 bp, Homo sapien
tacatagcaggatgccaactggctt

SEQ ID NO: 599086 - DNA, 25 bp, Homo sapien
tatgtttgtttagcgactttagcaa

SEQ ID NO: 599087 - DNA, 25 bp, Homo sapien
cctggcttgtttagggccataccac

SEQ ID NO: 599088 - DNA, 25 bp, Homo sapien
ctagaagataggttaaggaaatata

SEQ ID NO: 599089 - DNA, 25 bp, Homo sapien
tttaattgctcagtaaactgcttaa

SEQ ID NO: 599090 - DNA, 25 bp, Homo sapien
tataggctaggtatacagcaacgca

SEQ ID NO: 599091 - DNA, 25 bp, Homo sapien
tccagagaggatcagtaagtatacc

SEQ ID NO: 599092 - DNA, 25 bp, Homo sapien
tttgagttcccgaccgcgggcgatg

SEQ ID NO: 599093 - DNA, 25 bp, Homo sapien
gaattcacatcccactcaagccaga

SEQ ID NO: 599094 - DNA, 25 bp, Homo sapien
taggtaactgaaatctcccatgaca

SEQ ID NO: 599095 - DNA, 25 bp, Homo sapien
aaagctattgaaacactgtctacca

SEQ ID NO: 599096 - DNA, 25 bp, Homo sapien
ggtttgacatctccttcgttatagg

SEQ ID NO: 599097 - DNA, 25 bp, Homo sapien
gaaaggtgttcatggtctagtcaaa

SEQ ID NO: 599098 - DNA, 25 bp, Homo sapien
gctacacctccataatctaaacctt

SEQ ID NO: 599099 - DNA, 25 bp, Homo sapien
gatcttggggactgaagctcattat

SEQ ID NO: 599100 - DNA, 25 bp, Homo sapien
cacaaacgtcttcgcagatcttggg

SEQ ID NO: 599101 - DNA, 25 bp, Homo sapien
cttcttctcctggaaaaatcaccca

SEQ ID NO: 599102 - DNA, 25 bp, Homo sapien
ttggaggaaaggaactaagttctga

SEQ ID NO: 599103 - DNA, 25 bp, Homo sapien
gaaaggaactaagttctgagtattc

SEQ ID NO: 599104 - DNA, 25 bp, Homo sapien
ggaactaagttctgagtattcatat

SEQ ID NO: 599105 - DNA, 25 bp, Homo sapien
ttctgagtattcatattatcactac

SEQ ID NO: 599106 - DNA, 25 bp, Homo sapien
gaactactaaaatgtagccaccaat

SEQ ID NO: 599107 - DNA, 25 bp, Homo sapien
tagccaccaattagcgtgcacacaa

SEQ ID NO: 599108 - DNA, 25 bp, Homo sapien
tcctcttcaattgcctttaacttat

SEQ ID NO: 599109 - DNA, 25 bp, Homo sapien
aagacacaggctctgaactaggtca

SEQ ID NO: 599110 - DNA, 25 bp, Homo sapien
ctgcatattcaaacaggcaatacat

SEQ ID NO: 599111 - DNA, 25 bp, Homo sapien
tattcaaacaggcaatacattgggt

SEQ ID NO: 599112 - DNA, 25 bp, Homo sapien
gcatattcaaacaggcaatacattg

SEQ ID NO: 599113 - DNA, 25 bp, Homo sapien
catattcaaacaggcaatacattgg

SEQ ID NO: 599114 - DNA, 25 bp, Homo sapien
tgatctggattgatgtaagaagcgg

SEQ ID NO: 599115 - DNA, 25 bp, Homo sapien
ggtgatctggattgatgtaagaagc

SEQ ID NO: 599116 - DNA, 25 bp, Homo sapien
tctgccaataaaacgaaaatatttc

SEQ ID NO: 599117 - DNA, 25 bp, Homo sapien
atctgcaagcagtagttatccttcc

SEQ ID NO: 599118 - DNA, 25 bp, Homo sapien
ttcaagatacgcttatagaatggta

SEQ ID NO: 599119 - DNA, 25 bp, Homo sapien
ttaacccagatgagagaattgtaaa

SEQ ID NO: 599120 - DNA, 25 bp, Homo sapien
tctaaatccttgagtccaactggtt

SEQ ID NO: 599121 - DNA, 25 bp, Homo sapien
aacccgtgtctatgaatttcccatg

SEQ ID NO: 599122 - DNA, 25 bp, Homo sapien
gatcatgactcttaatttcacctag

SEQ ID NO: 599123 - DNA, 25 bp, Homo sapien
ctttgtcaacggagaagtacatttc

SEQ ID NO: 599124 - DNA, 25 bp, Homo sapien
tacaagaatattgccaccattaggt

SEQ ID NO: 599125 - DNA, 25 bp, Homo sapien
accattaggtttcagatcatgactc

SEQ ID NO: 599126 - DNA, 25 bp, Homo sapien
caccaagagatgcacactaagtgaa

SEQ ID NO: 599127 - DNA, 25 bp, Homo sapien
tgacaacaacaccacaaagagctgg

SEQ ID NO: 599128 - DNA, 25 bp, Homo sapien
caagaagtagtgtttgggtcaacag

SEQ ID NO: 599129 - DNA, 25 bp, Homo sapien
tcagtcagttcttgtgcatcagcct

SEQ ID NO: 599130 - DNA, 25 bp, Homo sapien
cctatcaggaagtttagatcttatc

SEQ ID NO: 599131 - DNA, 25 bp, Homo sapien
aaacctatcaggaagtttagatctt

SEQ ID NO: 599132 - DNA, 25 bp, Homo sapien
aaaacctatcaggaagtttagatct

SEQ ID NO: 599133 - DNA, 25 bp, Homo sapien
aacctatcaggaagtttagatctta

SEQ ID NO: 599134 - DNA, 25 bp, Homo sapien
ctgttcttcaacacctcgagacaac

SEQ ID NO: 599135 - DNA, 25 bp, Homo sapien
gttcttcaacacctcgagacaacct

SEQ ID NO: 599136 - DNA, 25 bp, Homo sapien
cctcgagacaacctccactcagcta

SEQ ID NO: 599137 - DNA, 25 bp, Homo sapien
gagacaacctccactcagctaccat

SEQ ID NO: 599138 - DNA, 25 bp, Homo sapien
gatgggaaagtgagttaaaagcaga

SEQ ID NO: 599139 - DNA, 25 bp, Homo sapien
cattatttactagcatggtacaggg

SEQ ID NO: 599140 - DNA, 25 bp, Homo sapien
taaaagcagacaacttaaggcatta

SEQ ID NO: 599141 - DNA, 25 bp, Homo sapien
caacttaaggcattatttactagca

SEQ ID NO: 599142 - DNA, 25 bp, Homo sapien
gatggcatgtctttgccagtcattc

SEQ ID NO: 599143 - DNA, 25 bp, Homo sapien
cataatgacggtagatggcatgtct

SEQ ID NO: 599144 - DNA, 25 bp, Homo sapien
gctggtccttgcataatgacggtag

SEQ ID NO: 599145 - DNA, 25 bp, Homo sapien
tggcatgtctttgccagtcattcaa

SEQ ID NO: 599146 - DNA, 25 bp, Homo sapien
agcaaatcctcctactggcaatcgg

SEQ ID NO: 599147 - DNA, 25 bp, Homo sapien
caatcggcaggttccagtaacaaac

SEQ ID NO: 599148 - DNA, 25 bp, Homo sapien
tcctactggcaatcggcaggttcca

SEQ ID NO: 599149 - DNA, 25 bp, Homo sapien
gcaggttccagtaacaaactgcaga

SEQ ID NO: 599150 - DNA, 25 bp, Homo sapien
taggaaaagtgatcctgtatacata

SEQ ID NO: 599151 - DNA, 25 bp, Homo sapien
ctgtataggaaaagtgatcctgtat

SEQ ID NO: 599152 - DNA, 25 bp, Homo sapien
tataggaaaagtgatcctgtataca

SEQ ID NO: 599153 - DNA, 25 bp, Homo sapien
aggaaaagtgatcctgtatacatac

SEQ ID NO: 599154 - DNA, 25 bp, Homo sapien
catggtaattaaacgtgctccagaa

SEQ ID NO: 599155 - DNA, 25 bp, Homo sapien
cactcttagcactggatagatcatc

SEQ ID NO: 599156 - DNA, 25 bp, Homo sapien
aagacagactccaatactagttggg

SEQ ID NO: 599157 - DNA, 25 bp, Homo sapien
gaacctaacagtcattcatagaaca

SEQ ID NO: 599158 - DNA, 25 bp, Homo sapien
caggtatgacttctgggtagccaat

SEQ ID NO: 599159 - DNA, 25 bp, Homo sapien
cagaatttctgtggtccattgctcc

SEQ ID NO: 599160 - DNA, 25 bp, Homo sapien
tgacttctgggtagccaattttctt

SEQ ID NO: 599161 - DNA, 25 bp, Homo sapien
tatgacttctgggtagccaattttc

SEQ ID NO: 599162 - DNA, 25 bp, Homo sapien
tgcaaagaatcaaatgagtagtgta

SEQ ID NO: 599163 - DNA, 25 bp, Homo sapien
tcaaatgagtagtgtagtatactac

SEQ ID NO: 599164 - DNA, 25 bp, Homo sapien
gaatcaaatgagtagtgtagtatac

SEQ ID NO: 599165 - DNA, 25 bp, Homo sapien
gtagtgtagtatactactttataca

SEQ ID NO: 599166 - DNA, 25 bp, Homo sapien
cttctatggcaaacaacagcttttc

SEQ ID NO: 599167 - DNA, 25 bp, Homo sapien
tccttcagttgctcatagctcttgt

SEQ ID NO: 599168 - DNA, 25 bp, Homo sapien
ctcttgtatggtggcaggtccaggc

SEQ ID NO: 599169 - DNA, 25 bp, Homo sapien
tgtttcttctatggcaaacaacagc

SEQ ID NO: 599170 - DNA, 25 bp, Homo sapien
tttacaagatgtgcaacaggcagag

SEQ ID NO: 599171 - DNA, 25 bp, Homo sapien
gagccattgtccaattttacaagat

SEQ ID NO: 599172 - DNA, 25 bp, Homo sapien
cattcatggtgcaagttctcagaag

SEQ ID NO: 599173 - DNA, 25 bp, Homo sapien
tctctaaagagccattgtccaattt

SEQ ID NO: 599174 - DNA, 25 bp, Homo sapien
tactcccaagtgagacttttgacac

SEQ ID NO: 599175 - DNA, 25 bp, Homo sapien
tggaaacgctgagtagaaatcactg

SEQ ID NO: 599176 - DNA, 25 bp, Homo sapien
tgttaagcaaggttctgactagtca

SEQ ID NO: 599177 - DNA, 25 bp, Homo sapien
taaactagtggaataagacaaggca

SEQ ID NO: 599178 - DNA, 25 bp, Homo sapien
ttaccaaaggacttccctgcatgtc

SEQ ID NO: 599179 - DNA, 25 bp, Homo sapien
gaaaatcttgtatattgcagttacc

SEQ ID NO: 599180 - DNA, 25 bp, Homo sapien
agaggcttaataggaaaatcttgta

SEQ ID NO: 599181 - DNA, 25 bp, Homo sapien
tattgcagttaccaaaggacttccc

SEQ ID NO: 599182 - DNA, 25 bp, Homo sapien
gatacatgagctatgaggctgtcct

SEQ ID NO: 599183 - DNA, 25 bp, Homo sapien
aagagtcttgcctcacttccaggaa

SEQ ID NO: 599184 - DNA, 25 bp, Homo sapien
caccttgacagtcgaagctaggcca

SEQ ID NO: 599185 - DNA, 25 bp, Homo sapien
ttttgctcacatccccagaagcagg

SEQ ID NO: 599186 - DNA, 25 bp, Homo sapien
tttacactgagctgcttgatgaggc

SEQ ID NO: 599187 - DNA, 25 bp, Homo sapien
tagggccagggctacttcaaatata

SEQ ID NO: 599188 - DNA, 25 bp, Homo sapien
tataatgaacgggtagttggcagac

SEQ ID NO: 599189 - DNA, 25 bp, Homo sapien
ggcagacattcgctctgtaagacaa

SEQ ID NO: 599190 - DNA, 25 bp, Homo sapien
gtaatatacaatccagtgctgccaa

SEQ ID NO: 599191 - DNA, 25 bp, Homo sapien
tgtaggaaaacgcaagtgaggcaac

SEQ ID NO: 599192 - DNA, 25 bp, Homo sapien
taagttacatccacaacaggaaagg

SEQ ID NO: 599193 - DNA, 25 bp, Homo sapien
tggagataccaacaatactaaatag

SEQ ID NO: 599194 - DNA, 25 bp, Homo sapien
gccgtgtgccccgataaaaatgcgt

SEQ ID NO: 599195 - DNA, 25 bp, Homo sapien
acgttatctccggtagcttcaggga

SEQ ID NO: 599196 - DNA, 25 bp, Homo sapien
gccgtttagtgaaccctgtgccaca

SEQ ID NO: 599197 - DNA, 25 bp, Homo sapien
tgactttactgcgaagaaacctagc

SEQ ID NO: 599198 - DNA, 25 bp, Homo sapien
tctcaatggaggtctaagctggttc

SEQ ID NO: 599199 - DNA, 25 bp, Homo sapien
cgctttgcgcccagactgagccaga

SEQ ID NO: 599200 - DNA, 25 bp, Homo sapien
cggttgctgagacccgctttgcgcc

SEQ ID NO: 599201 - DNA, 25 bp, Homo sapien
tcagtgctggttctcggtatcggaa

SEQ ID NO: 599202 - DNA, 25 bp, Homo sapien
tccactgtggcaaagcgaaaagcta

SEQ ID NO: 599203 - DNA, 25 bp, Homo sapien
tggctccgccaggattcttggaaaa

SEQ ID NO: 599204 - DNA, 25 bp, Homo sapien
gtgcgctaagctgtggaaaattccc

SEQ ID NO: 599205 - DNA, 25 bp, Homo sapien
cgaaaagctaaggagcagtgcgcta

SEQ ID NO: 599206 - DNA, 25 bp, Homo sapien
cggtagccccgcgtagcgaacactt

SEQ ID NO: 599207 - DNA, 25 bp, Homo sapien
cccgcgtagcgaacacttagcgagt

SEQ ID NO: 599208 - DNA, 25 bp, Homo sapien
agcgaacacttagcgagtcctgtgc

SEQ ID NO: 599209 - DNA, 25 bp, Homo sapien
cgaccgatccggtagccccgcgtag

SEQ ID NO: 599210 - DNA, 25 bp, Homo sapien
cgggttccaccctcaagtcggctgg

SEQ ID NO: 599211 - DNA, 25 bp, Homo sapien
tgagatcccctcatcctcggaagac

SEQ ID NO: 599212 - DNA, 25 bp, Homo sapien
tccctgtccggagctctgagatccc

SEQ ID NO: 599213 - DNA, 25 bp, Homo sapien
ggccccgcctcggtcaggctttaga

SEQ ID NO: 599214 - DNA, 25 bp, Homo sapien
aacgttgccagggttgccatcgcgc

SEQ ID NO: 599215 - DNA, 25 bp, Homo sapien
tgccacaaactgagctcccgggaaa

SEQ ID NO: 599216 - DNA, 25 bp, Homo sapien
ggaggcggaggaaatacaagataca

SEQ ID NO: 599217 - DNA, 25 bp, Homo sapien
atcgcgcaccaaggccccaaaactc

SEQ ID NO: 599218 - DNA, 25 bp, Homo sapien
ctcctgggctcaggcgatctctcca

SEQ ID NO: 599219 - DNA, 25 bp, Homo sapien
tcctgggctcaggcgatctctccac

SEQ ID NO: 599220 - DNA, 25 bp, Homo sapien
gggctcaggcgatctctccacttca

SEQ ID NO: 599221 - DNA, 25 bp, Homo sapien
ctgggctcaggcgatctctccactt

SEQ ID NO: 599222 - DNA, 25 bp, Homo sapien
agtctgggcaacagagtgagactcc

SEQ ID NO: 599223 - DNA, 25 bp, Homo sapien
tgagattgagccactgaactccagt

SEQ ID NO: 599224 - DNA, 25 bp, Homo sapien
tctgggcaacagagtgagactccat

SEQ ID NO: 599225 - DNA, 25 bp, Homo sapien
tgggcaacagagtgagactccatct

SEQ ID NO: 599226 - DNA, 25 bp, Homo sapien
cctgctcgccctcctggaaattcat

SEQ ID NO: 599227 - DNA, 25 bp, Homo sapien
gtactcattctaccctgctcgccct

SEQ ID NO: 599228 - DNA, 25 bp, Homo sapien
tggacagtactcattctaccctgct

SEQ ID NO: 599229 - DNA, 25 bp, Homo sapien
gacagtactcattctaccctgctcg

SEQ ID NO: 599230 - DNA, 25 bp, Homo sapien
tatttggcatagctgggggatggga

SEQ ID NO: 599231 - DNA, 25 bp, Homo sapien
atttggcatagctgggggatgggac

SEQ ID NO: 599232 - DNA, 25 bp, Homo sapien
atatttggcatagctgggggatggg

SEQ ID NO: 599233 - DNA, 25 bp, Homo sapien
tttggcatagctgggggatgggact

SEQ ID NO: 599234 - DNA, 25 bp, Homo sapien
tctgcagtcgcttcagtgtctcctc

SEQ ID NO: 599235 - DNA, 25 bp, Homo sapien
cttctgtgttcacgacgatgattcc

SEQ ID NO: 599236 - DNA, 25 bp, Homo sapien
gctctgcagtcgcttcagtgtctcc

SEQ ID NO: 599237 - DNA, 25 bp, Homo sapien
ttcacgacgatgattccctgcactc

SEQ ID NO: 599238 - DNA, 25 bp, Homo sapien
gcatctaacatgcttgcaaaaattt

SEQ ID NO: 599239 - DNA, 25 bp, Homo sapien
actgattatggcatctaacatgctt

SEQ ID NO: 599240 - DNA, 25 bp, Homo sapien
acgcccagccattataacaattatt

SEQ ID NO: 599241 - DNA, 25 bp, Homo sapien
cgcccagccattataacaattatta

SEQ ID NO: 599242 - DNA, 25 bp, Homo sapien
cacagtgtcccaagggctcccagcc

SEQ ID NO: 599243 - DNA, 25 bp, Homo sapien
gaatgagggcctctcctttgtgagt

SEQ ID NO: 599244 - DNA, 25 bp, Homo sapien
caggtcttagagcaagaagtgccca

SEQ ID NO: 599245 - DNA, 25 bp, Homo sapien
ccatcacaggactcgaggcagttga

SEQ ID NO: 599246 - DNA, 25 bp, Homo sapien
ggtaagcagctagggcttcccagtg

SEQ ID NO: 599247 - DNA, 25 bp, Homo sapien
taagtagggcccagattcaaagcca

SEQ ID NO: 599248 - DNA, 25 bp, Homo sapien
tctcagctatggtgcaatcagcccc

SEQ ID NO: 599249 - DNA, 25 bp, Homo sapien
gaatgggacgcaagttaaagacaca

SEQ ID NO: 599250 - DNA, 25 bp, Homo sapien
tcactgtgtgagatgtaaacgagac

SEQ ID NO: 599251 - DNA, 25 bp, Homo sapien
aatggaatgaaacttcccttgcgtt

SEQ ID NO: 599252 - DNA, 25 bp, Homo sapien
acacaagagaccaatctttgccttc

SEQ ID NO: 599253 - DNA, 25 bp, Homo sapien
tattctgcctgtgtgggtagcagca

SEQ ID NO: 599254 - DNA, 25 bp, Homo sapien
tcctaagtactacagacagcagtga

SEQ ID NO: 599255 - DNA, 25 bp, Homo sapien
gagccaccgcaggtcatgattgggc

SEQ ID NO: 599256 - DNA, 25 bp, Homo sapien
gccaccgcaggtcatgattgggcca

SEQ ID NO: 599257 - DNA, 25 bp, Homo sapien
accgcaggtcatgattgggccagca

SEQ ID NO: 599258 - DNA, 25 bp, Homo sapien
ccaccgcaggtcatgattgggccag

SEQ ID NO: 599259 - DNA, 25 bp, Homo sapien
ccgcgcccggccacaaacttctaca

SEQ ID NO: 599260 - DNA, 25 bp, Homo sapien
caccgcgcccggccacaaacttcta

SEQ ID NO: 599261 - DNA, 25 bp, Homo sapien
gcgcccggccacaaacttctacaca

SEQ ID NO: 599262 - DNA, 25 bp, Homo sapien
ccaccgcgcccggccacaaacttct

SEQ ID NO: 599263 - DNA, 25 bp, Homo sapien
tgtcacgcacggtgctccgtgcctt

SEQ ID NO: 599264 - DNA, 25 bp, Homo sapien
atgaagctgtgcatgaggctggcat

SEQ ID NO: 599265 - DNA, 25 bp, Homo sapien
catttttcttggagcgaattcgaag

SEQ ID NO: 599266 - DNA, 25 bp, Homo sapien
tcgttctgggggtcgatgtcacgca

SEQ ID NO: 599267 - DNA, 25 bp, Homo sapien
tcctccccactcacatcctgatgcc

SEQ ID NO: 599268 - DNA, 25 bp, Homo sapien
tcccactcctccccactcacatcct

SEQ ID NO: 599269 - DNA, 25 bp, Homo sapien
ccactcctccccactcacatcctga

SEQ ID NO: 599270 - DNA, 25 bp, Homo sapien
actcctccccactcacatcctgatg

SEQ ID NO: 599271 - DNA, 25 bp, Homo sapien
ttttggggagtgaagctttgtcctc

SEQ ID NO: 599272 - DNA, 25 bp, Homo sapien
caacccaggtcaacacactcaacca

SEQ ID NO: 599273 - DNA, 25 bp, Homo sapien
agtcacacaacatgacaacctggga

SEQ ID NO: 599274 - DNA, 25 bp, Homo sapien
actgcgctccatcccggcccgactt

SEQ ID NO: 599275 - DNA, 25 bp, Homo sapien
tggccaggagctttcagatgacact

SEQ ID NO: 599276 - DNA, 25 bp, Homo sapien
tcaggagctttatgccaagggacac

SEQ ID NO: 599277 - DNA, 25 bp, Homo sapien
tgccgctgccaagttgagacctgaa

SEQ ID NO: 599278 - DNA, 25 bp, Homo sapien
ggccaaattggagacgctgccgctg

SEQ ID NO: 599279 - DNA, 25 bp, Homo sapien
ttgtgttaaaatgtcttggccgggc

SEQ ID NO: 599280 - DNA, 25 bp, Homo sapien
ccatgtccagctaacaaaagtttgt

SEQ ID NO: 599281 - DNA, 25 bp, Homo sapien
ctgggaatactggtgccaccatgtc

SEQ ID NO: 599282 - DNA, 25 bp, Homo sapien
caaaagtttgtgttaaaatgtcttg

SEQ ID NO: 599283 - DNA, 25 bp, Homo sapien
tgtaggctgagttagttacctcagc

SEQ ID NO: 599284 - DNA, 25 bp, Homo sapien
taatactagtgaagttaataagtga

SEQ ID NO: 599285 - DNA, 25 bp, Homo sapien
aggttgtgtaggctgagttagttac

SEQ ID NO: 599286 - DNA, 25 bp, Homo sapien
gagttagttacctcagctttaatac

SEQ ID NO: 599287 - DNA, 25 bp, Homo sapien
ccgtttcactgaagaggtaactgga

SEQ ID NO: 599288 - DNA, 25 bp, Homo sapien
cctcagagagttaaagggcttgccc

SEQ ID NO: 599289 - DNA, 25 bp, Homo sapien
gtcactctgagaacacggagcctca

SEQ ID NO: 599290 - DNA, 25 bp, Homo sapien
gggtttgaccccatactctgaactg

SEQ ID NO: 599291 - DNA, 25 bp, Homo sapien
acagagcaagagctctgtcacccag

SEQ ID NO: 599292 - DNA, 25 bp, Homo sapien
cgtggtggctcacgtagcactttgg

SEQ ID NO: 599293 - DNA, 25 bp, Homo sapien
caggcacaccccaccaaacctgggt

SEQ ID NO: 599294 - DNA, 25 bp, Homo sapien
agttttttgtagaaggtcaggcgtg

SEQ ID NO: 599295 - DNA, 25 bp, Homo sapien
caaaaagcatcaacgttcagcatct

SEQ ID NO: 599296 - DNA, 25 bp, Homo sapien
agcatcaacgttcagcatctccaaa

SEQ ID NO: 599297 - DNA, 25 bp, Homo sapien
aataaaccattaaatcactaaccat

SEQ ID NO: 599298 - DNA, 25 bp, Homo sapien
agcaacaaaaagcatcaacgttcag

SEQ ID NO: 599299 - DNA, 25 bp, Homo sapien
ttattcggttggattctgaatcaca

SEQ ID NO: 599300 - DNA, 25 bp, Homo sapien
tattcggttggattctgaatcacaa

SEQ ID NO: 599301 - DNA, 25 bp, Homo sapien
atgacacagggagccaagagagtgg

SEQ ID NO: 599302 - DNA, 25 bp, Homo sapien
gaatgacacagggagccaagagagt

SEQ ID NO: 599303 - DNA, 25 bp, Homo sapien
aatgacacagggagccaagagagtg

SEQ ID NO: 599304 - DNA, 25 bp, Homo sapien
tgacacagggagccaagagagtggc

SEQ ID NO: 599305 - DNA, 25 bp, Homo sapien
tctccaagggcgacaaagtgaactg

SEQ ID NO: 599306 - DNA, 25 bp, Homo sapien
tgtgagtgggttccaagcgactgcc

SEQ ID NO: 599307 - DNA, 25 bp, Homo sapien
gcccacacacggtcactggattggt

SEQ ID NO: 599308 - DNA, 25 bp, Homo sapien
tgggtgcgggcttcctgcaagctct

SEQ ID NO: 599309 - DNA, 25 bp, Homo sapien
gctcacagaggaggatcagaattcc

SEQ ID NO: 599310 - DNA, 25 bp, Homo sapien
cacagaggaggatcagaattccagg

SEQ ID NO: 599311 - DNA, 25 bp, Homo sapien
cagaggaggatcagaattccaggga

SEQ ID NO: 599312 - DNA, 25 bp, Homo sapien
tcacagaggaggatcagaattccag

SEQ ID NO: 599313 - DNA, 25 bp, Homo sapien
tctgctgggaatgtggtctataaag

SEQ ID NO: 599314 - DNA, 25 bp, Homo sapien
aaggcatattctctgggccgattgc

SEQ ID NO: 599315 - DNA, 25 bp, Homo sapien
cctggactgtgacaccaggtggtcc

SEQ ID NO: 599316 - DNA, 25 bp, Homo sapien
tggtcccaagcgagctcacacttct

SEQ ID NO: 599317 - DNA, 25 bp, Homo sapien
tggcttccatgcagtcaggagtggc

SEQ ID NO: 599318 - DNA, 25 bp, Homo sapien
ggcttccatgcagtcaggagtggca

SEQ ID NO: 599319 - DNA, 25 bp, Homo sapien
ctccttgcacctggcttccatgcag

SEQ ID NO: 599320 - DNA, 25 bp, Homo sapien
ggtcagtcagcaactcggaagccat

SEQ ID NO: 599321 - DNA, 25 bp, Homo sapien
tcagcaactcggaagccatggagtc

SEQ ID NO: 599322 - DNA, 25 bp, Homo sapien
tggagggtcagtcagcaactcggaa

SEQ ID NO: 599323 - DNA, 25 bp, Homo sapien
tcagaactacctctgaggtggaggg

SEQ ID NO: 599324 - DNA, 25 bp, Homo sapien
cacatggagaactgaagaatctcat

SEQ ID NO: 599325 - DNA, 25 bp, Homo sapien
tataattgaaaagtagagccatcga

SEQ ID NO: 599326 - DNA, 25 bp, Homo sapien
cacaggatagaacaggatgctagaa

SEQ ID NO: 599327 - DNA, 25 bp, Homo sapien
gatgctagaaatgaacgcccaggtt

SEQ ID NO: 599328 - DNA, 25 bp, Homo sapien
cagaagagaaatcgtggacctggag

SEQ ID NO: 599329 - DNA, 25 bp, Homo sapien
tgtgtcaggactgacgcggttctgg

SEQ ID NO: 599330 - DNA, 25 bp, Homo sapien
tgtcaggactgacgcggttctgggc

SEQ ID NO: 599331 - DNA, 25 bp, Homo sapien
ttctgggcgccgtgggaaacagccg

SEQ ID NO: 599332 - DNA, 25 bp, Homo sapien
gccgtgggaaacagccggagccaaa

SEQ ID NO: 599333 - DNA, 25 bp, Homo sapien
ctaggccgatggagcgggcgggcca

SEQ ID NO: 599334 - DNA, 25 bp, Homo sapien
cgcagcccgaactcaaggtaaggcc

SEQ ID NO: 599335 - DNA, 25 bp, Homo sapien
cacagtcccgtgacgtcatgggcag

SEQ ID NO: 599336 - DNA, 25 bp, Homo sapien
gtgcgccgctcccattgggccgacg

SEQ ID NO: 599337 - DNA, 25 bp, Homo sapien
gggctcgcgctgagcacggcggctg

SEQ ID NO: 599338 - DNA, 25 bp, Homo sapien
ccgcgcctcgcgctcaagggctccg

SEQ ID NO: 599339 - DNA, 25 bp, Homo sapien
cggctgcgggaggtaactcgcccgg

SEQ ID NO: 599340 - DNA, 25 bp, Homo sapien
ccggtgacgtcaggtcacaacattc

SEQ ID NO: 599341 - DNA, 25 bp, Homo sapien
ctgcttgaaaggccggtctgagggc

SEQ ID NO: 599342 - DNA, 25 bp, Homo sapien
ccgccgctgcttgaaaggccggtct

SEQ ID NO: 599343 - DNA, 25 bp, Homo sapien
tgcttgaaaggccggtctgagggca

SEQ ID NO: 599344 - DNA, 25 bp, Homo sapien
ccgctgcttgaaaggccggtctgag

SEQ ID NO: 599345 - DNA, 25 bp, Homo sapien
gccagaccgtgaggccgggtcgggc

SEQ ID NO: 599346 - DNA, 25 bp, Homo sapien
gcggacagcggccagaccgtgaggc

SEQ ID NO: 599347 - DNA, 25 bp, Homo sapien
gcggccagaccgtgaggccgggtcg

SEQ ID NO: 599348 - DNA, 25 bp, Homo sapien
acagcggccagaccgtgaggccggg

SEQ ID NO: 599349 - DNA, 25 bp, Homo sapien
gcggatctgctgtacctccttacag

SEQ ID NO: 599350 - DNA, 25 bp, Homo sapien
tggtcgcggatctgctgtacctcct

SEQ ID NO: 599351 - DNA, 25 bp, Homo sapien
gtgctggtcgcggatctgctgtacc

SEQ ID NO: 599352 - DNA, 25 bp, Homo sapien
tgctgtacctccttacagcggtcgg

SEQ ID NO: 599353 - DNA, 25 bp, Homo sapien
gaccaactcgctcatgttgacatgg

SEQ ID NO: 599354 - DNA, 25 bp, Homo sapien
cggatgatcttgaccaactcgctca

SEQ ID NO: 599355 - DNA, 25 bp, Homo sapien
tcttgaccaactcgctcatgttgac

SEQ ID NO: 599356 - DNA, 25 bp, Homo sapien
gatgatcttgaccaactcgctcatg

SEQ ID NO: 599357 - DNA, 25 bp, Homo sapien
ctcctggcggcggctgcccacgcac

SEQ ID NO: 599358 - DNA, 25 bp, Homo sapien
gggcttggctgcgggacggacatag

SEQ ID NO: 599359 - DNA, 25 bp, Homo sapien
aggggcttggctgcgggacggacat

SEQ ID NO: 599360 - DNA, 25 bp, Homo sapien
gcttggctgcgggacggacatagcc

SEQ ID NO: 599361 - DNA, 25 bp, Homo sapien
tgaggggcttggctgcgggacggac

SEQ ID NO: 599362 - DNA, 25 bp, Homo sapien
catatagaggaagccgtcctcgtct

SEQ ID NO: 599363 - DNA, 25 bp, Homo sapien
tccgcgatgggcgtggacacactca

SEQ ID NO: 599364 - DNA, 25 bp, Homo sapien
ttctcctgctcgtagatgtccgcga

SEQ ID NO: 599365 - DNA, 25 bp, Homo sapien
ggtttcctgggaggcgtagaccata

SEQ ID NO: 599366 - DNA, 25 bp, Homo sapien
gaggcagctcagttcaggaaccagg

SEQ ID NO: 599367 - DNA, 25 bp, Homo sapien
cagagggacaaccctaacacgaccg

SEQ ID NO: 599368 - DNA, 25 bp, Homo sapien
gccctctgactaggggggcacatgc

SEQ ID NO: 599369 - DNA, 25 bp, Homo sapien
taggtgggttggtgccctctgacta

SEQ ID NO: 599370 - DNA, 25 bp, Homo sapien
cacagatccatacaccacgtggaga

SEQ ID NO: 599371 - DNA, 25 bp, Homo sapien
tgaggggcagatgggcagacaggca

SEQ ID NO: 599372 - DNA, 25 bp, Homo sapien
tgcagagggacaatgaccacagatc

SEQ ID NO: 599373 - DNA, 25 bp, Homo sapien
gcaatctttattctgcagagggaca

SEQ ID NO: 599374 - DNA, 25 bp, Homo sapien
tgatgttaacctccaccacgtggtt

SEQ ID NO: 599375 - DNA, 25 bp, Homo sapien
aagaataccccaggcaaagtgccct

SEQ ID NO: 599376 - DNA, 25 bp, Homo sapien
gaagtgagtaaccaagtctagaccc

SEQ ID NO: 599377 - DNA, 25 bp, Homo sapien
cacgtggttaagatagtgttggcca

SEQ ID NO: 599378 - DNA, 25 bp, Homo sapien
gatagaacagagttcctgtaagccc

SEQ ID NO: 599379 - DNA, 25 bp, Homo sapien
ttctctaccaggaccccatcgagag

SEQ ID NO: 599380 - DNA, 25 bp, Homo sapien
cattacatgtaaggtcacatctccc

SEQ ID NO: 599381 - DNA, 25 bp, Homo sapien
ccatcgagaggtccacattacatgt

SEQ ID NO: 599382 - DNA, 25 bp, Homo sapien
ccccgacaaaactctggaagctaat

SEQ ID NO: 599383 - DNA, 25 bp, Homo sapien
catagctctagctggactcagaggg

SEQ ID NO: 599384 - DNA, 25 bp, Homo sapien
tccggtttccaggtgatgccagtgc

SEQ ID NO: 599385 - DNA, 25 bp, Homo sapien
tggcctgctggtttagggaacacac

SEQ ID NO: 599386 - DNA, 25 bp, Homo sapien
gatgactgtgcaagcttagccctcc

SEQ ID NO: 599387 - DNA, 25 bp, Homo sapien
tcctgtctgggcctgtaggtagatg

SEQ ID NO: 599388 - DNA, 25 bp, Homo sapien
tctggttaggccagcgtgatgccct

SEQ ID NO: 599389 - DNA, 25 bp, Homo sapien
gcccacatgaggctgccatttcaga

SEQ ID NO: 599390 - DNA, 25 bp, Homo sapien
tgcaaagtattctgaggcccgtagg

SEQ ID NO: 599391 - DNA, 25 bp, Homo sapien
gttgagctgtacactccgtcggaga

SEQ ID NO: 599392 - DNA, 25 bp, Homo sapien
aaatgtcagtatcaagcagcagctt

SEQ ID NO: 599393 - DNA, 25 bp, Homo sapien
aaagtgaaatggtagttggcgtaga

SEQ ID NO: 599394 - DNA, 25 bp, Homo sapien
catgctggggtaactctggagtctc

SEQ ID NO: 599395 - DNA, 25 bp, Homo sapien
agagggtgccattcctatgcacaca

SEQ ID NO: 599396 - DNA, 25 bp, Homo sapien
catggataatcatgggtatctgtgc

SEQ ID NO: 599397 - DNA, 25 bp, Homo sapien
acaatgaaggcatccatatataaac

SEQ ID NO: 599398 - DNA, 25 bp, Homo sapien
tgcggcggggctcacggcacaaatt

SEQ ID NO: 599399 - DNA, 25 bp, Homo sapien
ggcggggctcacggcacaaattgga

SEQ ID NO: 599400 - DNA, 25 bp, Homo sapien
cggcggggctcacggcacaaattgg

SEQ ID NO: 599401 - DNA, 25 bp, Homo sapien
ctgcggcggggctcacggcacaaat

SEQ ID NO: 599402 - DNA, 25 bp, Homo sapien
gccgcggtcgctccgggctgctgag

SEQ ID NO: 599403 - DNA, 25 bp, Homo sapien
cacggcgttgaggtagttgtgcggc

SEQ ID NO: 599404 - DNA, 25 bp, Homo sapien
gcgtcccagggtcgccggccgctca

SEQ ID NO: 599405 - DNA, 25 bp, Homo sapien
cgcggggctttgagtctgtgcggcc

SEQ ID NO: 599406 - DNA, 25 bp, Homo sapien
tagaacgacgtcatggtctaccggg

SEQ ID NO: 599407 - DNA, 25 bp, Homo sapien
gtctaccgggcgtgcggcaaccaat

SEQ ID NO: 599408 - DNA, 25 bp, Homo sapien
gcaaccaatcgggagccgggaacgc

SEQ ID NO: 599409 - DNA, 25 bp, Homo sapien
taccggccttggtgacgtctcaatg

SEQ ID NO: 599410 - DNA, 25 bp, Homo sapien
tgtgacctcgagagagctaatcctc

SEQ ID NO: 599411 - DNA, 25 bp, Homo sapien
ctaaggcgctgcacacaaatcaggg

SEQ ID NO: 599412 - DNA, 25 bp, Homo sapien
caaaccgtgataaggctgagcccaa

SEQ ID NO: 599413 - DNA, 25 bp, Homo sapien
gataagcctaggaaatcgccgatcc

SEQ ID NO: 599414 - DNA, 25 bp, Homo sapien
ctgggaggcagcgattttattggac

SEQ ID NO: 599415 - DNA, 25 bp, Homo sapien
ttcaaggtacagtgaggacagaagg

SEQ ID NO: 599416 - DNA, 25 bp, Homo sapien
tattggactctaggacttcaaggta

SEQ ID NO: 599417 - DNA, 25 bp, Homo sapien
ggaggcagcgattttattggactct

SEQ ID NO: 599418 - DNA, 25 bp, Homo sapien
tagctgacgacctaggaagttggga

SEQ ID NO: 599419 - DNA, 25 bp, Homo sapien
tagcatgcatttactgaagacccac

SEQ ID NO: 599420 - DNA, 25 bp, Homo sapien
caattgtctgcactaggccaggtca

SEQ ID NO: 599421 - DNA, 25 bp, Homo sapien
gaaaaagaccttgacctagccacac

SEQ ID NO: 599422 - DNA, 25 bp, Homo sapien
acatggctagatagtggcagggcag

SEQ ID NO: 599423 - DNA, 25 bp, Homo sapien
atacatggctagatagtggcagggc

SEQ ID NO: 599424 - DNA, 25 bp, Homo sapien
aatacatggctagatagtggcaggg

SEQ ID NO: 599425 - DNA, 25 bp, Homo sapien
tacatggctagatagtggcagggca

SEQ ID NO: 599426 - DNA, 25 bp, Homo sapien
caggctcctgttcaagggcagcatc

SEQ ID NO: 599427 - DNA, 25 bp, Homo sapien
ggaggccccctactgcagaaatgga

SEQ ID NO: 599428 - DNA, 25 bp, Homo sapien
ccaggagcccttaaggatgagcact

SEQ ID NO: 599429 - DNA, 25 bp, Homo sapien
gttgcttgggctcagtgagacagca

SEQ ID NO: 599430 - DNA, 25 bp, Homo sapien
accatgtgatttggcacacctcggt

SEQ ID NO: 599431 - DNA, 25 bp, Homo sapien
catgtgatttggcacacctcggttg

SEQ ID NO: 599432 - DNA, 25 bp, Homo sapien
ccatgtgatttggcacacctcggtt

SEQ ID NO: 599433 - DNA, 25 bp, Homo sapien
aagcgcctcacgggggcgccctatg

SEQ ID NO: 599434 - DNA, 25 bp, Homo sapien
gggcgaagcgcctcacgggggcgcc

SEQ ID NO: 599435 - DNA, 25 bp, Homo sapien
cgaagcgcctcacgggggcgcccta

SEQ ID NO: 599436 - DNA, 25 bp, Homo sapien
cctcacgggggcgccctatggcagt

SEQ ID NO: 599437 - DNA, 25 bp, Homo sapien
ggcaggtcaatgatgagccagccgt

SEQ ID NO: 599438 - DNA, 25 bp, Homo sapien
cggcaggtcaatgatgagccagccg

SEQ ID NO: 599439 - DNA, 25 bp, Homo sapien
ttcatcctcctccgacacgaaggcg

SEQ ID NO: 599440 - DNA, 25 bp, Homo sapien
cctccgacacgaaggcgcgggggca

SEQ ID NO: 599441 - DNA, 25 bp, Homo sapien
acaaaccagctctcgtccatcaagg

SEQ ID NO: 599442 - DNA, 25 bp, Homo sapien
gaggggtaacaaaccagctctcgtc

SEQ ID NO: 599443 - DNA, 25 bp, Homo sapien
gggtaacaaaccagctctcgtccat

SEQ ID NO: 599444 - DNA, 25 bp, Homo sapien
accagctctcgtccatcaaggaggg

SEQ ID NO: 599445 - DNA, 25 bp, Homo sapien
cttcgctgaggtcgccgtcaggcag

SEQ ID NO: 599446 - DNA, 25 bp, Homo sapien
tgccggtgacgtaaacggacatgct

SEQ ID NO: 599447 - DNA, 25 bp, Homo sapien
gggactgctctggaggcgggcggga

SEQ ID NO: 599448 - DNA, 25 bp, Homo sapien
gggacccgggctctagcactatggt

SEQ ID NO: 599449 - DNA, 25 bp, Homo sapien
ccggaggtgcctcctcggttctagc

SEQ ID NO: 599450 - DNA, 25 bp, Homo sapien
cggaggtgcctcctcggttctagcc

SEQ ID NO: 599451 - DNA, 25 bp, Homo sapien
tgggagaggagcggcgtggcgcgcg

SEQ ID NO: 599452 - DNA, 25 bp, Homo sapien
gcgcgcggcccgcggctcgcggcgg

SEQ ID NO: 599453 - DNA, 25 bp, Homo sapien
gcgtggcgcgcggcccgcggctcgc

SEQ ID NO: 599454 - DNA, 25 bp, Homo sapien
ctgggagaggagcggcgtggcgcgc

SEQ ID NO: 599455 - DNA, 25 bp, Homo sapien
cttggcgctcagcgcgtggcgctct

SEQ ID NO: 599456 - DNA, 25 bp, Homo sapien
tcgcgggctcggttctgccgctgca

SEQ ID NO: 599457 - DNA, 25 bp, Homo sapien
ctctggttcttggaccggcgcggac

SEQ ID NO: 599458 - DNA, 25 bp, Homo sapien
cagtagttgaactggcgctggcacg

SEQ ID NO: 599459 - DNA, 25 bp, Homo sapien
cattcatacacggtgccctgctggg

SEQ ID NO: 599460 - DNA, 25 bp, Homo sapien
ggttctagaatacaggagcctccag

SEQ ID NO: 599461 - DNA, 25 bp, Homo sapien
aattgatacaaactcctctagggcc

SEQ ID NO: 599462 - DNA, 25 bp, Homo sapien
gttcctaggaagagtgagcacacac

SEQ ID NO: 599463 - DNA, 25 bp, Homo sapien
cacataaagccacatggatctaggg

SEQ ID NO: 599464 - DNA, 25 bp, Homo sapien
ggtgtgtctgcattcagtcccctca

SEQ ID NO: 599465 - DNA, 25 bp, Homo sapien
gacattataggtcagagcaagttgc

SEQ ID NO: 599466 - DNA, 25 bp, Homo sapien
ggtccgtgttgcacctaagacatta

SEQ ID NO: 599467 - DNA, 25 bp, Homo sapien
ggcatgccacatgacccagttgagg

SEQ ID NO: 599468 - DNA, 25 bp, Homo sapien
cacgtcacatggtcaaagtctcctc

SEQ ID NO: 599469 - DNA, 25 bp, Homo sapien
cccatagaggaatagcattacagtc

SEQ ID NO: 599470 - DNA, 25 bp, Homo sapien
tccttgagtctgttgacacgtcaca

SEQ ID NO: 599471 - DNA, 25 bp, Homo sapien
gccgtggaagtactgtgtgtgaata

SEQ ID NO: 599472 - DNA, 25 bp, Homo sapien
tcctaagcagcctagagtacagggt

SEQ ID NO: 599473 - DNA, 25 bp, Homo sapien
tcttgtattgaaaggagctaatgcc

SEQ ID NO: 599474 - DNA, 25 bp, Homo sapien
ctaatgatgtattgtgccgtggaag

SEQ ID NO: 599475 - DNA, 25 bp, Homo sapien
gagtgaggtcagttctaacgttgca

SEQ ID NO: 599476 - DNA, 25 bp, Homo sapien
tgcaccaagcatccctccagtaatg

SEQ ID NO: 599477 - DNA, 25 bp, Homo sapien
tgtgcatcccgaattgagtgaggtc

SEQ ID NO: 599478 - DNA, 25 bp, Homo sapien
cagttgtcacaatgcccaatgcggg

SEQ ID NO: 599479 - DNA, 25 bp, Homo sapien
tcaagaggcataaatgaagagtctc

SEQ ID NO: 599480 - DNA, 25 bp, Homo sapien
taatctctggaatgatcctttggca

SEQ ID NO: 599481 - DNA, 25 bp, Homo sapien
gctttgccgctctaccgaggatgaa

SEQ ID NO: 599482 - DNA, 25 bp, Homo sapien
gatttttagcaacctgtgatcgtcc

SEQ ID NO: 599483 - DNA, 25 bp, Homo sapien
tgctgattatttggggcctcatggg

SEQ ID NO: 599484 - DNA, 25 bp, Homo sapien
acagcaaataccacctggctatcag

SEQ ID NO: 599485 - DNA, 25 bp, Homo sapien
atcagtgctgattatttggggcctc

SEQ ID NO: 599486 - DNA, 25 bp, Homo sapien
tctagaatggggacttcaggactct

SEQ ID NO: 599487 - DNA, 25 bp, Homo sapien
tctcttcaatgcatatgctgagaaa

SEQ ID NO: 599488 - DNA, 25 bp, Homo sapien
gtctcttcaatgcatatgctgagaa

SEQ ID NO: 599489 - DNA, 25 bp, Homo sapien
atcggcatagcctagatgggtcttc

SEQ ID NO: 599490 - DNA, 25 bp, Homo sapien
tccaaactaacttggttggtgacag

SEQ ID NO: 599491 - DNA, 25 bp, Homo sapien
tggtgtctcatcttagcgcttggct

SEQ ID NO: 599492 - DNA, 25 bp, Homo sapien
cacaggaggtagtcaaggtgtcagc

SEQ ID NO: 599493 - DNA, 25 bp, Homo sapien
cctttcttctatgggatcagtagga

SEQ ID NO: 599494 - DNA, 25 bp, Homo sapien
tgggtatctactacaccagtccaag

SEQ ID NO: 599495 - DNA, 25 bp, Homo sapien
tttaattagtttacaatccacctgc

SEQ ID NO: 599496 - DNA, 25 bp, Homo sapien
tagaaacattactctgacagcaggg

SEQ ID NO: 599497 - DNA, 25 bp, Homo sapien
tggcagccgaaggaccaacaacttc

SEQ ID NO: 599498 - DNA, 25 bp, Homo sapien
tcatcatcgctgttaaggaccctcg

SEQ ID NO: 599499 - DNA, 25 bp, Homo sapien
gcttagcaaacccaatcccagagta

SEQ ID NO: 599500 - DNA, 25 bp, Homo sapien
gtagatgtcttatcctgggtccatg

SEQ ID NO: 599501 - DNA, 25 bp, Homo sapien
tctggggattggaaccagtcttgcc

SEQ ID NO: 599502 - DNA, 25 bp, Homo sapien
gggaaatccatgtctcaactctgag

SEQ ID NO: 599503 - DNA, 25 bp, Homo sapien
agcaccaactgccagtgaagtttgg

SEQ ID NO: 599504 - DNA, 25 bp, Homo sapien
tctattggagcagtgaacgatctgg

SEQ ID NO: 599505 - DNA, 25 bp, Homo sapien
tggctaccacaggttctgctgaatg

SEQ ID NO: 599506 - DNA, 25 bp, Homo sapien
ttggctaccacaggttctgctgaat

SEQ ID NO: 599507 - DNA, 25 bp, Homo sapien
cttggctaccacaggttctgctgaa

SEQ ID NO: 599508 - DNA, 25 bp, Homo sapien
ggctaccacaggttctgctgaatgt

SEQ ID NO: 599509 - DNA, 25 bp, Homo sapien
gtaccttcagctagaaagagcaggg

SEQ ID NO: 599510 - DNA, 25 bp, Homo sapien
tttgtaactgtgtgatgctggagca

SEQ ID NO: 599511 - DNA, 25 bp, Homo sapien
taaagagttcgtactaagtgctggg

SEQ ID NO: 599512 - DNA, 25 bp, Homo sapien
tccggcccaagtgctaccaatttgt

SEQ ID NO: 599513 - DNA, 25 bp, Homo sapien
cgaggagggaatataacaactggcc

SEQ ID NO: 599514 - DNA, 25 bp, Homo sapien
ccagctcctcatagtgccaaaaaga

SEQ ID NO: 599515 - DNA, 25 bp, Homo sapien
tcaagacagtcatagacccagctcc

SEQ ID NO: 599516 - DNA, 25 bp, Homo sapien
taggagagccagatcacatcaagcc

SEQ ID NO: 599517 - DNA, 25 bp, Homo sapien
ttagggtggctgagtctgtgaatcc

SEQ ID NO: 599518 - DNA, 25 bp, Homo sapien
tgctggtacatgacatccgacgaaa

SEQ ID NO: 599519 - DNA, 25 bp, Homo sapien
tccgacgaaatgagagccacctaat

SEQ ID NO: 599520 - DNA, 25 bp, Homo sapien
caggatagaagaggtccatggaccc

SEQ ID NO: 599521 - DNA, 25 bp, Homo sapien
aatccgataacaacttgggcccgca

SEQ ID NO: 599522 - DNA, 25 bp, Homo sapien
cctggcgtggaatagaagctgcttc

SEQ ID NO: 599523 - DNA, 25 bp, Homo sapien
gatgaaaagccttgcaccctctgtc

SEQ ID NO: 599524 - DNA, 25 bp, Homo sapien
cacaggtggaggtatactgtcatca

SEQ ID NO: 599525 - DNA, 25 bp, Homo sapien
gattcttaaatatctaactccaaga

SEQ ID NO: 599526 - DNA, 25 bp, Homo sapien
tcaccacaaagaagtgcccacctca

SEQ ID NO: 599527 - DNA, 25 bp, Homo sapien
tcacagactggctgtcaaggcagga

SEQ ID NO: 599528 - DNA, 25 bp, Homo sapien
aggattcttaaatatctaactccaa

SEQ ID NO: 599529 - DNA, 25 bp, Homo sapien
ggcgggtgccgggactgagaaaaca

SEQ ID NO: 599530 - DNA, 25 bp, Homo sapien
aaccgcggccgcctttgcggtcgcg

SEQ ID NO: 599531 - DNA, 25 bp, Homo sapien
cgggtgccgggactgagaaaacagg

SEQ ID NO: 599532 - DNA, 25 bp, Homo sapien
cacgtcaagttcctagaaccgcggc

SEQ ID NO: 599533 - DNA, 25 bp, Homo sapien
gggacgtgcgcggagcggctgacct

SEQ ID NO: 599534 - DNA, 25 bp, Homo sapien
gccggtgcagctcgcggtagcgctg

SEQ ID NO: 599535 - DNA, 25 bp, Homo sapien
ctccggacccgctcctcaggaagcc

SEQ ID NO: 599536 - DNA, 25 bp, Homo sapien
tcgggcggcggagaccaactccgcg

SEQ ID NO: 599537 - DNA, 25 bp, Homo sapien
caccacggaccctccaagtctgcag

SEQ ID NO: 599538 - DNA, 25 bp, Homo sapien
cgcgtctcctcgcaaaaacccgcat

SEQ ID NO: 599539 - DNA, 25 bp, Homo sapien
tccattttcaaagaaccgcaattct

SEQ ID NO: 599540 - DNA, 25 bp, Homo sapien
acttcttccctcacggaatcccgcg

SEQ ID NO: 599541 - DNA, 25 bp, Homo sapien
tagagaccctcttttcgcctcagga

SEQ ID NO: 599542 - DNA, 25 bp, Homo sapien
gaaagttctattcgtggccctcctc

SEQ ID NO: 599543 - DNA, 25 bp, Homo sapien
cattactaatctgaggaccccaaga

SEQ ID NO: 599544 - DNA, 25 bp, Homo sapien
acagttcacaggttaagggtctcag

SEQ ID NO: 599545 - DNA, 25 bp, Homo sapien
gtcttccagtaaaattccttggcaa

SEQ ID NO: 599546 - DNA, 25 bp, Homo sapien
cacatcaaagttgtaccgaaggaat

SEQ ID NO: 599547 - DNA, 25 bp, Homo sapien
ccctttagtcacatcaaagttgtac

SEQ ID NO: 599548 - DNA, 25 bp, Homo sapien
agttgtaccgaaggaatgggccagg

SEQ ID NO: 599549 - DNA, 25 bp, Homo sapien
ttttctcatggacatttcgatccag

SEQ ID NO: 599550 - DNA, 25 bp, Homo sapien
cagatgttggtagttgctcctttca

SEQ ID NO: 599551 - DNA, 25 bp, Homo sapien
gacatttcgatccagtacattgtag

SEQ ID NO: 599552 - DNA, 25 bp, Homo sapien
cagtacattgtagcagatgttggta

SEQ ID NO: 599553 - DNA, 25 bp, Homo sapien
gtactttcctaagagcaccatttcc

SEQ ID NO: 599554 - DNA, 25 bp, Homo sapien
tatatcaattggagcgaatcacaga

SEQ ID NO: 599555 - DNA, 25 bp, Homo sapien
tgagctccaagagggagaactttgg

SEQ ID NO: 599556 - DNA, 25 bp, Homo sapien
gccaccatagctgtctaaatgacat

SEQ ID NO: 599557 - DNA, 25 bp, Homo sapien
gacagcatgagaaagttggaaccaa

SEQ ID NO: 599558 - DNA, 25 bp, Homo sapien
tgttgatgacaaccgtaactcctct

SEQ ID NO: 599559 - DNA, 25 bp, Homo sapien
gcagagcttctgtcctagggtcaat

SEQ ID NO: 599560 - DNA, 25 bp, Homo sapien
ccttggagcagatgaacgtgtgcct

SEQ ID NO: 599561 - DNA, 25 bp, Homo sapien
aaatccagatgttgtattaggactc

SEQ ID NO: 599562 - DNA, 25 bp, Homo sapien
tgttgtattaggactccctaacttc

SEQ ID NO: 599563 - DNA, 25 bp, Homo sapien
tccagatgttgtattaggactccct

SEQ ID NO: 599564 - DNA, 25 bp, Homo sapien
cagatgttgtattaggactccctaa

SEQ ID NO: 599565 - DNA, 25 bp, Homo sapien
caagtacagcatggctatccatata

SEQ ID NO: 599566 - DNA, 25 bp, Homo sapien
gagtcatcagactagattgtttacc

SEQ ID NO: 599567 - DNA, 25 bp, Homo sapien
tgtttacccctaattcaatgtataa

SEQ ID NO: 599568 - DNA, 25 bp, Homo sapien
gcctattcttgtggtcttagcaagt

SEQ ID NO: 599569 - DNA, 25 bp, Homo sapien
gggataagataggatacagataaac

SEQ ID NO: 599570 - DNA, 25 bp, Homo sapien
tgtttcttgagatcctacagtgggc

SEQ ID NO: 599571 - DNA, 25 bp, Homo sapien
tctgcttatatgaccagctggatcc

SEQ ID NO: 599572 - DNA, 25 bp, Homo sapien
tcagtctgggactctgtgaagaggc

SEQ ID NO: 599573 - DNA, 25 bp, Homo sapien
ctagcactagagtcctatgtagaca

SEQ ID NO: 599574 - DNA, 25 bp, Homo sapien
tgtttccctcactggattatgagtt

SEQ ID NO: 599575 - DNA, 25 bp, Homo sapien
tatgagttccttaatggcagacagg

SEQ ID NO: 599576 - DNA, 25 bp, Homo sapien
ggcagacaggatatctttttatatg

SEQ ID NO: 599577 - DNA, 25 bp, Homo sapien
cagctcttcttgttattcatcataa

SEQ ID NO: 599578 - DNA, 25 bp, Homo sapien
tccctgaccaccctaagtagatcag

SEQ ID NO: 599579 - DNA, 25 bp, Homo sapien
gtagatcagctcttcttgttattca

SEQ ID NO: 599580 - DNA, 25 bp, Homo sapien
tgaccaccctaagtagatcagctct

SEQ ID NO: 599581 - DNA, 25 bp, Homo sapien
cacccggccacagaatgatctatta

SEQ ID NO: 599582 - DNA, 25 bp, Homo sapien
gccacagaatgatctattaaaaaca

SEQ ID NO: 599583 - DNA, 25 bp, Homo sapien
ccggccacagaatgatctattaaaa

SEQ ID NO: 599584 - DNA, 25 bp, Homo sapien
gcacccggccacagaatgatctatt

SEQ ID NO: 599585 - DNA, 25 bp, Homo sapien
ccccggtcaagctaccttcatctct

SEQ ID NO: 599586 - DNA, 25 bp, Homo sapien
tctccaccccggtcaagctaccttc

SEQ ID NO: 599587 - DNA, 25 bp, Homo sapien
tcattgtctccaccccggtcaagct

SEQ ID NO: 599588 - DNA, 25 bp, Homo sapien
tccaccccggtcaagctaccttcat

SEQ ID NO: 599589 - DNA, 25 bp, Homo sapien
tcgagggtcatggttgaataattga

SEQ ID NO: 599590 - DNA, 25 bp, Homo sapien
gaaagactggtaattgactaatgac

SEQ ID NO: 599591 - DNA, 25 bp, Homo sapien
aatgacagggaagactggtgctacc

SEQ ID NO: 599592 - DNA, 25 bp, Homo sapien
gcacaattggcacaataggtattcg

SEQ ID NO: 599593 - DNA, 25 bp, Homo sapien
ggccatatggttggtgtgacaaccc

SEQ ID NO: 599594 - DNA, 25 bp, Homo sapien
ccatatggttggtgtgacaacccat

SEQ ID NO: 599595 - DNA, 25 bp, Homo sapien
gccatatggttggtgtgacaaccca

SEQ ID NO: 599596 - DNA, 25 bp, Homo sapien
aagtatatctgtaggatgaattacc

SEQ ID NO: 599597 - DNA, 25 bp, Homo sapien
caagtatatctgtaggatgaattac

SEQ ID NO: 599598 - DNA, 25 bp, Homo sapien
gcaagtatatctgtaggatgaatta

SEQ ID NO: 599599 - DNA, 25 bp, Homo sapien
ctgcaagtatatctgtaggatgaat

SEQ ID NO: 599600 - DNA, 25 bp, Homo sapien
gccaagcttaaagagctatttcatt

SEQ ID NO: 599601 - DNA, 25 bp, Homo sapien
gcaaaatattccactatttgtatgt

SEQ ID NO: 599602 - DNA, 25 bp, Homo sapien
gccacggtgccaagcttaaagagct

SEQ ID NO: 599603 - DNA, 25 bp, Homo sapien
cagctgcaaaatattccactatttg

SEQ ID NO: 599604 - DNA, 25 bp, Homo sapien
tatgtgatctgagtggtctcccctg

SEQ ID NO: 599605 - DNA, 25 bp, Homo sapien
ctgatggtatgtgatctgagtggtc

SEQ ID NO: 599606 - DNA, 25 bp, Homo sapien
cctgttttcggagaacattgctgaa

SEQ ID NO: 599607 - DNA, 25 bp, Homo sapien
ctgacacacttggaccagaagctga

SEQ ID NO: 599608 - DNA, 25 bp, Homo sapien
tgcaaagccccaatgcgggcacatg

SEQ ID NO: 599609 - DNA, 25 bp, Homo sapien
acaatggagtgcaaagccccaatgc

SEQ ID NO: 599610 - DNA, 25 bp, Homo sapien
taggcatgtagatggccactcggtc

SEQ ID NO: 599611 - DNA, 25 bp, Homo sapien
gcacatgccagcatggccaccacaa

SEQ ID NO: 599612 - DNA, 25 bp, Homo sapien
gatccgttcacatagagactctgaa

SEQ ID NO: 599613 - DNA, 25 bp, Homo sapien
tccaagatccgttcacatagagact

SEQ ID NO: 599614 - DNA, 25 bp, Homo sapien
cagctggaatccaagatccgttcac

SEQ ID NO: 599615 - DNA, 25 bp, Homo sapien
gagaagactgcagctggaatccaag

SEQ ID NO: 599616 - DNA, 25 bp, Homo sapien
cagctgattcgagctgacagagggt

SEQ ID NO: 599617 - DNA, 25 bp, Homo sapien
acaatgtccatagggcccttcctga

SEQ ID NO: 599618 - DNA, 25 bp, Homo sapien
tgagtaggcctcttaactctggctc

SEQ ID NO: 599619 - DNA, 25 bp, Homo sapien
cccatgctgcctagtgggcacaatg

SEQ ID NO: 599620 - DNA, 25 bp, Homo sapien
tttggggagcaacagacattccagg

SEQ ID NO: 599621 - DNA, 25 bp, Homo sapien
ctttggggagcaacagacattccag

SEQ ID NO: 599622 - DNA, 25 bp, Homo sapien
ttggggagcaacagacattccaggc

SEQ ID NO: 599623 - DNA, 25 bp, Homo sapien
ttctcctgacacttctgcagggcct

SEQ ID NO: 599624 - DNA, 25 bp, Homo sapien
cccaggtgcttgaccacaatgcagc

SEQ ID NO: 599625 - DNA, 25 bp, Homo sapien
tgcttgaccacaatgcagcatctta

SEQ ID NO: 599626 - DNA, 25 bp, Homo sapien
caggtgcttgaccacaatgcagcat

SEQ ID NO: 599627 - DNA, 25 bp, Homo sapien
ccgccccaggtgcttgaccacaatg

SEQ ID NO: 599628 - DNA, 25 bp, Homo sapien
catgacctcttaattgggggggact

SEQ ID NO: 599629 - DNA, 25 bp, Homo sapien
atctgggcatgacctcttaattggg

SEQ ID NO: 599630 - DNA, 25 bp, Homo sapien
gggactggctggtggagtcacccat

SEQ ID NO: 599631 - DNA, 25 bp, Homo sapien
gcacatctgggcatgacctcttaat

SEQ ID NO: 599632 - DNA, 25 bp, Homo sapien
gctgaacacgcttggatttctcttt

SEQ ID NO: 599633 - DNA, 25 bp, Homo sapien
ggggctgaacacgcttggatttctc

SEQ ID NO: 599634 - DNA, 25 bp, Homo sapien
ggctgaacacgcttggatttctctt

SEQ ID NO: 599635 - DNA, 25 bp, Homo sapien
gggctgaacacgcttggatttctct

SEQ ID NO: 599636 - DNA, 25 bp, Homo sapien
ggcccttcaaggatggaatggaaca

SEQ ID NO: 599637 - DNA, 25 bp, Homo sapien
tatctcccaacacctagcaaagtgc

SEQ ID NO: 599638 - DNA, 25 bp, Homo sapien
ggagcagaacccaagcttactgagt

SEQ ID NO: 599639 - DNA, 25 bp, Homo sapien
tactgtctccccatctagatagcga

SEQ ID NO: 599640 - DNA, 25 bp, Homo sapien
gagctcatgccaccacaagtcaatc

SEQ ID NO: 599641 - DNA, 25 bp, Homo sapien
agctcatgccaccacaagtcaatcc

SEQ ID NO: 599642 - DNA, 25 bp, Homo sapien
ctcggcatcacaccactcgggctca

SEQ ID NO: 599643 - DNA, 25 bp, Homo sapien
cttgggtttgcctgtggagccactg

SEQ ID NO: 599644 - DNA, 25 bp, Homo sapien
aagagtgggtcctcggcatcacacc

SEQ ID NO: 599645 - DNA, 25 bp, Homo sapien
cggcatcacaccactcgggctcaca

SEQ ID NO: 599646 - DNA, 25 bp, Homo sapien
cccataggtgacgtaggaatgacca

SEQ ID NO: 599647 - DNA, 25 bp, Homo sapien
caaccaatgtctgccgtgcaccaga

SEQ ID NO: 599648 - DNA, 25 bp, Homo sapien
gaatgaccagtgatccaaccaatgt

SEQ ID NO: 599649 - DNA, 25 bp, Homo sapien
catacttgaaggttgtggctacata

SEQ ID NO: 599650 - DNA, 25 bp, Homo sapien
gacccatgaaggctggtcattccca

SEQ ID NO: 599651 - DNA, 25 bp, Homo sapien
aagccaagataccatcctagtcagg

SEQ ID NO: 599652 - DNA, 25 bp, Homo sapien
ccttgggaggtagtcacccaggata

SEQ ID NO: 599653 - DNA, 25 bp, Homo sapien
aaaacagatgattgtataagtcccc

SEQ ID NO: 599654 - DNA, 25 bp, Homo sapien
tcacgtccggatatgtgggaatccc

SEQ ID NO: 599655 - DNA, 25 bp, Homo sapien
tccaaacttcatgagcagacggatg

SEQ ID NO: 599656 - DNA, 25 bp, Homo sapien
tccacaggcggttcacgtccggata

SEQ ID NO: 599657 - DNA, 25 bp, Homo sapien
tgtatttgtccacaatgctccacag

SEQ ID NO: 599658 - DNA, 25 bp, Homo sapien
tctgagtactactggaagacacaca

SEQ ID NO: 599659 - DNA, 25 bp, Homo sapien
gagactgtacaaaggccagcaccca

SEQ ID NO: 599660 - DNA, 25 bp, Homo sapien
cagagagttgggacaatggaaaaga

SEQ ID NO: 599661 - DNA, 25 bp, Homo sapien
gacacacatacccaggcttttctct

SEQ ID NO: 599662 - DNA, 25 bp, Homo sapien
cactgtgcctaacacctgcaaggat

SEQ ID NO: 599663 - DNA, 25 bp, Homo sapien
cagggttgatgggttcacccactgt

SEQ ID NO: 599664 - DNA, 25 bp, Homo sapien
taccacccggtggtaccatagccag

SEQ ID NO: 599665 - DNA, 25 bp, Homo sapien
tgcctaacacctgcaaggatgcccg

SEQ ID NO: 599666 - DNA, 25 bp, Homo sapien
gccccagccttctgtacccttcact

SEQ ID NO: 599667 - DNA, 25 bp, Homo sapien
ccagccttctgtacccttcactcac

SEQ ID NO: 599668 - DNA, 25 bp, Homo sapien
gggccccagccttctgtacccttca

SEQ ID NO: 599669 - DNA, 25 bp, Homo sapien
cccagccttctgtacccttcactca

SEQ ID NO: 599670 - DNA, 25 bp, Homo sapien
caggaaggggagtcaacatgtggcc

SEQ ID NO: 599671 - DNA, 25 bp, Homo sapien
agcagaaccgggtttcatgggtgtg

SEQ ID NO: 599672 - DNA, 25 bp, Homo sapien
caccaggaaggggagtcaacatgtg

SEQ ID NO: 599673 - DNA, 25 bp, Homo sapien
gcagaaccgggtttcatgggtgtgg

SEQ ID NO: 599674 - DNA, 25 bp, Homo sapien
agttctccactatctaactaggcca

SEQ ID NO: 599675 - DNA, 25 bp, Homo sapien
gaagcaaacgggagacagaacccaa

SEQ ID NO: 599676 - DNA, 25 bp, Homo sapien
gcaactctgactcaactcccaaggg

SEQ ID NO: 599677 - DNA, 25 bp, Homo sapien
aaattcttcacacatgtcagtccag

SEQ ID NO: 599678 - DNA, 25 bp, Homo sapien
cattcaggattgcaggagctacacc

SEQ ID NO: 599679 - DNA, 25 bp, Homo sapien
aactcttccccggactcattcagga

SEQ ID NO: 599680 - DNA, 25 bp, Homo sapien
gagctacaccaaagaatgggaaagt

SEQ ID NO: 599681 - DNA, 25 bp, Homo sapien
ttccccggactcattcaggattgca

SEQ ID NO: 599682 - DNA, 25 bp, Homo sapien
gatgcaggcaaagtatcgagggtcc

SEQ ID NO: 599683 - DNA, 25 bp, Homo sapien
gggtgactccagatcctacgtgatt

SEQ ID NO: 599684 - DNA, 25 bp, Homo sapien
cttatggcccaaaaggaagagatgc

SEQ ID NO: 599685 - DNA, 25 bp, Homo sapien
gtgagcaaacctccaaccatgaagt

SEQ ID NO: 599686 - DNA, 25 bp, Homo sapien
taactttacccctctgagcttcagg

SEQ ID NO: 599687 - DNA, 25 bp, Homo sapien
cattctttggcagcagatcgatgga

SEQ ID NO: 599688 - DNA, 25 bp, Homo sapien
gcctggatgtaagccctgtccctgt

SEQ ID NO: 599689 - DNA, 25 bp, Homo sapien
gaggctcctgcaagtatgaatacaa

SEQ ID NO: 599690 - DNA, 25 bp, Homo sapien
tcgtggttcccatagactgtgcgca

SEQ ID NO: 599691 - DNA, 25 bp, Homo sapien
ggttgtctcaaagcgttcgtggttc

SEQ ID NO: 599692 - DNA, 25 bp, Homo sapien
actgtgcgcatgatccctggccagg

SEQ ID NO: 599693 - DNA, 25 bp, Homo sapien
tctcctgtaacatagtatccaggaa

SEQ ID NO: 599694 - DNA, 25 bp, Homo sapien
ctttgtagctctgcgtagaaaccag

SEQ ID NO: 599695 - DNA, 25 bp, Homo sapien
tactagaatccccatgagggaggag

SEQ ID NO: 599696 - DNA, 25 bp, Homo sapien
catcaaagttcggatggcaccattc

SEQ ID NO: 599697 - DNA, 25 bp, Homo sapien
cacagtgctcagatcttatggatga

SEQ ID NO: 599698 - DNA, 25 bp, Homo sapien
cattgagcatgtcatcaatcctgcc

SEQ ID NO: 599699 - DNA, 25 bp, Homo sapien
gagcatgtcatcaatcctgccagtg

SEQ ID NO: 599700 - DNA, 25 bp, Homo sapien
tgccagtgatccagtaatagccatc

SEQ ID NO: 599701 - DNA, 25 bp, Homo sapien
cagtgatccagtaatagccatcctg

SEQ ID NO: 599702 - DNA, 25 bp, Homo sapien
gaggcattcacccttcacaggatga

SEQ ID NO: 599703 - DNA, 25 bp, Homo sapien
tgaaggtgtggccatcacacaaggt

SEQ ID NO: 599704 - DNA, 25 bp, Homo sapien
cacaaggtgacaaagcagtagaggc

SEQ ID NO: 599705 - DNA, 25 bp, Homo sapien
catgttccacaagtgctgactccac

SEQ ID NO: 599706 - DNA, 25 bp, Homo sapien
tctgtttcatggaggtgactctagg

SEQ ID NO: 599707 - DNA, 25 bp, Homo sapien
gagcctgctagagtttaaatgccac

SEQ ID NO: 599708 - DNA, 25 bp, Homo sapien
aagcacttagcctagcggtggcaca

SEQ ID NO: 599709 - DNA, 25 bp, Homo sapien
catctttagcatgaaggtaacaata

SEQ ID NO: 599710 - DNA, 25 bp, Homo sapien
ctgagcgggttttaggcaagccagg

SEQ ID NO: 599711 - DNA, 25 bp, Homo sapien
gcaatggggccaatcttttctctaa

SEQ ID NO: 599712 - DNA, 25 bp, Homo sapien
cgggttttaggcaagccaggtgcat

SEQ ID NO: 599713 - DNA, 25 bp, Homo sapien
cattctggatgtagtctggtgtggc

SEQ ID NO: 599714 - DNA, 25 bp, Homo sapien
ggtcattctgagcaatcttccgaag

SEQ ID NO: 599715 - DNA, 25 bp, Homo sapien
tgactgatgacagatgggtcagcca

SEQ ID NO: 599716 - DNA, 25 bp, Homo sapien
aggtcatggtcattctgagcaatct

SEQ ID NO: 599717 - DNA, 25 bp, Homo sapien
cgaagcactcgcctcatgattttcc

SEQ ID NO: 599718 - DNA, 25 bp, Homo sapien
caggaggaatcctaggtaaaggtca

SEQ ID NO: 599719 - DNA, 25 bp, Homo sapien
agtgcatgcccaatataagtactgg

SEQ ID NO: 599720 - DNA, 25 bp, Homo sapien
caaagctggtttccggtcccagaca

SEQ ID NO: 599721 - DNA, 25 bp, Homo sapien
tagtgtgggtcaacactggccctca

SEQ ID NO: 599722 - DNA, 25 bp, Homo sapien
cctggagccaatgggcagacagtac

SEQ ID NO: 599723 - DNA, 25 bp, Homo sapien
ccctggagccaatgggcagacagta

SEQ ID NO: 599724 - DNA, 25 bp, Homo sapien
ctcctctggccctaggaacaaaaca

SEQ ID NO: 599725 - DNA, 25 bp, Homo sapien
gaaaacagagtttcatctgagaatg

SEQ ID NO: 599726 - DNA, 25 bp, Homo sapien
ctgagaatgtctcttatgggctggg

SEQ ID NO: 599727 - DNA, 25 bp, Homo sapien
aagacaagctcctctggccctagga

SEQ ID NO: 599728 - DNA, 25 bp, Homo sapien
tcacaggctttattcctacaaccac

SEQ ID NO: 599729 - DNA, 25 bp, Homo sapien
atcacaggctttattcctacaacca

SEQ ID NO: 599730 - DNA, 25 bp, Homo sapien
agatcacaggctttattcctacaac

SEQ ID NO: 599731 - DNA, 25 bp, Homo sapien
gatcacaggctttattcctacaacc

SEQ ID NO: 599732 - DNA, 25 bp, Homo sapien
gaggtaaaggtccatgaaccctgcc

SEQ ID NO: 599733 - DNA, 25 bp, Homo sapien
cagaaaagttgtgtctcccttagat

SEQ ID NO: 599734 - DNA, 25 bp, Homo sapien
tatagctcagggtaagctgctctga

SEQ ID NO: 599735 - DNA, 25 bp, Homo sapien
tggacaacccataccctgtgtgagg

SEQ ID NO: 599736 - DNA, 25 bp, Homo sapien
tctatagtagcctcgggccacctgt

SEQ ID NO: 599737 - DNA, 25 bp, Homo sapien
gaagaacaagttctatagtagcctc

SEQ ID NO: 599738 - DNA, 25 bp, Homo sapien
caagttctatagtagcctcgggcca

SEQ ID NO: 599739 - DNA, 25 bp, Homo sapien
gaacaagttctatagtagcctcggg

SEQ ID NO: 599740 - DNA, 25 bp, Homo sapien
tcagcttaacatcacatctgacctc

SEQ ID NO: 599741 - DNA, 25 bp, Homo sapien
caaagccaagactcagcttaacatc

SEQ ID NO: 599742 - DNA, 25 bp, Homo sapien
ctaagacctatattttggctaagca

SEQ ID NO: 599743 - DNA, 25 bp, Homo sapien
gagaggggacttactaagacctata

SEQ ID NO: 599744 - DNA, 25 bp, Homo sapien
gaacccaaggaatttggctcctgag

SEQ ID NO: 599745 - DNA, 25 bp, Homo sapien
gcatagcaaggacccaaaagtagga

SEQ ID NO: 599746 - DNA, 25 bp, Homo sapien
tattcagtacagagtaagtcccctt

SEQ ID NO: 599747 - DNA, 25 bp, Homo sapien
tagatcagagctgcaaactagccat

SEQ ID NO: 599748 - DNA, 25 bp, Homo sapien
tccactctgaatggccaaagcagtg

SEQ ID NO: 599749 - DNA, 25 bp, Homo sapien
gcagaccatgtgtgatgcagaccct

SEQ ID NO: 599750 - DNA, 25 bp, Homo sapien
ggagatggcctcataaacaacagta

SEQ ID NO: 599751 - DNA, 25 bp, Homo sapien
cagtatgaggcagggtgatatcact

SEQ ID NO: 599752 - DNA, 25 bp, Homo sapien
caggcggacacatcacttaagctca

SEQ ID NO: 599753 - DNA, 25 bp, Homo sapien
aggcggacacatcacttaagctcag

SEQ ID NO: 599754 - DNA, 25 bp, Homo sapien
gcccaggcggacacatcacttaagc

SEQ ID NO: 599755 - DNA, 25 bp, Homo sapien
gaggcccaggcggacacatcactta

SEQ ID NO: 599756 - DNA, 25 bp, Homo sapien
gcaggaagctctgctacccctttta

SEQ ID NO: 599757 - DNA, 25 bp, Homo sapien
gggcaggaagctctgctaccccttt

SEQ ID NO: 599758 - DNA, 25 bp, Homo sapien
ggaagctctgctaccccttttattg

SEQ ID NO: 599759 - DNA, 25 bp, Homo sapien
gaagctctgctaccccttttattgc

SEQ ID NO: 599760 - DNA, 25 bp, Homo sapien
cactccagattcagaagactcgcgg

SEQ ID NO: 599761 - DNA, 25 bp, Homo sapien
tccagattcagaagactcgcggcca

SEQ ID NO: 599762 - DNA, 25 bp, Homo sapien
tcctccactccagattcagaagact

SEQ ID NO: 599763 - DNA, 25 bp, Homo sapien
attcagaagactcgcggccacccat

SEQ ID NO: 599764 - DNA, 25 bp, Homo sapien
ctggaggttcaaggcggcccaaggc

SEQ ID NO: 599765 - DNA, 25 bp, Homo sapien
tcaaggcggcccaaggcagcaggca

SEQ ID NO: 599766 - DNA, 25 bp, Homo sapien
ggaggttcaaggcggcccaaggcag

SEQ ID NO: 599767 - DNA, 25 bp, Homo sapien
gttcaaggcggcccaaggcagcagg

SEQ ID NO: 599768 - DNA, 25 bp, Homo sapien
ggtgaaggaggaggagctggaaacc

SEQ ID NO: 599769 - DNA, 25 bp, Homo sapien
gggtgaaggaggaggagctggaaac

SEQ ID NO: 599770 - DNA, 25 bp, Homo sapien
ctggggtgaaggaggaggagctgga

SEQ ID NO: 599771 - DNA, 25 bp, Homo sapien
ggcagtggcactggggtgaaggagg

SEQ ID NO: 599772 - DNA, 25 bp, Homo sapien
gaggtagcgggcagactccccaagt

SEQ ID NO: 599773 - DNA, 25 bp, Homo sapien
cgtcccatgggatagtgtgcacctt

SEQ ID NO: 599774 - DNA, 25 bp, Homo sapien
cttcgtcatctcctggtagccctgg

SEQ ID NO: 599775 - DNA, 25 bp, Homo sapien
agcgggcagactccccaagttcact

SEQ ID NO: 599776 - DNA, 25 bp, Homo sapien
ttcataaactgcagctccggaaggc

SEQ ID NO: 599777 - DNA, 25 bp, Homo sapien
gggctccagcctgagtcttcataaa

SEQ ID NO: 599778 - DNA, 25 bp, Homo sapien
ggcagcctgcacacatgccgatcag

SEQ ID NO: 599779 - DNA, 25 bp, Homo sapien
cacagtgatatacagtgtccctggg

SEQ ID NO: 599780 - DNA, 25 bp, Homo sapien
tcatcaggcacccagactcgcttct

SEQ ID NO: 599781 - DNA, 25 bp, Homo sapien
ttgacctcggcctccacgtaggcgt

SEQ ID NO: 599782 - DNA, 25 bp, Homo sapien
cggtagcctccgacttgacctcggc

SEQ ID NO: 599783 - DNA, 25 bp, Homo sapien
ccacgtaggcgtcctgttcatcagg

SEQ ID NO: 599784 - DNA, 25 bp, Homo sapien
tcaaccagagggcagatcctgttgg

SEQ ID NO: 599785 - DNA, 25 bp, Homo sapien
accagagggcagatcctgttggcca

SEQ ID NO: 599786 - DNA, 25 bp, Homo sapien
ccagacccccttcaaccagagggca

SEQ ID NO: 599787 - DNA, 25 bp, Homo sapien
cccttcaaccagagggcagatcctg

SEQ ID NO: 599788 - DNA, 25 bp, Homo sapien
catgtcctccagtaagtcgaagcga

SEQ ID NO: 599789 - DNA, 25 bp, Homo sapien
ggcctcgttcaggtgcgtcatcatg

SEQ ID NO: 599790 - DNA, 25 bp, Homo sapien
tcatccagcgggcatagcgctggcg

SEQ ID NO: 599791 - DNA, 25 bp, Homo sapien
tcatgggctgcagctcggcttcacg

SEQ ID NO: 599792 - DNA, 25 bp, Homo sapien
gaaccctgcgatattcctcaaggag

SEQ ID NO: 599793 - DNA, 25 bp, Homo sapien
tttgggagggatacgcaagttccca

SEQ ID NO: 599794 - DNA, 25 bp, Homo sapien
tcaaggagctacttgacttgccaca

SEQ ID NO: 599795 - DNA, 25 bp, Homo sapien
tagtccgcaggtgagttctagaccc

SEQ ID NO: 599796 - DNA, 25 bp, Homo sapien
ttgtaagcagccactacggaggccg

SEQ ID NO: 599797 - DNA, 25 bp, Homo sapien
tgcgcagcatgtcgttgtaggcgtt

SEQ ID NO: 599798 - DNA, 25 bp, Homo sapien
cgttgtccgccaccgcatatatatg

SEQ ID NO: 599799 - DNA, 25 bp, Homo sapien
gagcggcgctttcccttgtaagcag

SEQ ID NO: 599800 - DNA, 25 bp, Homo sapien
gcggttggggaggagtccaggcggc

SEQ ID NO: 599801 - DNA, 25 bp, Homo sapien
gggtctgcggttggggaggagtcca

SEQ ID NO: 599802 - DNA, 25 bp, Homo sapien
tgcggttggggaggagtccaggcgg

SEQ ID NO: 599803 - DNA, 25 bp, Homo sapien
tctgcggttggggaggagtccaggc

SEQ ID NO: 599804 - DNA, 25 bp, Homo sapien
atcagcatggactggttgtctcggt

SEQ ID NO: 599805 - DNA, 25 bp, Homo sapien
cctaatttagcttcagctgggacac

SEQ ID NO: 599806 - DNA, 25 bp, Homo sapien
gaaatgactgtggtaccgccctctt

SEQ ID NO: 599807 - DNA, 25 bp, Homo sapien
agaggaatctttccgctgcccctga

SEQ ID NO: 599808 - DNA, 25 bp, Homo sapien
ttagaaccccagaggatcaaggtgg

SEQ ID NO: 599809 - DNA, 25 bp, Homo sapien
gtctcccagggcagcgacgatggca

SEQ ID NO: 599810 - DNA, 25 bp, Homo sapien
atgacccgcttggtgttaaccgtct

SEQ ID NO: 599811 - DNA, 25 bp, Homo sapien
gatggcaaagtactgaatgacccgc

SEQ ID NO: 599812 - DNA, 25 bp, Homo sapien
ccagggcagcgacgatggcaaagta

SEQ ID NO: 599813 - DNA, 25 bp, Homo sapien
gaggccagagccacccgtggcccct

SEQ ID NO: 599814 - DNA, 25 bp, Homo sapien
acccgtggcccctctgttgtgcaga

SEQ ID NO: 599815 - DNA, 25 bp, Homo sapien
agccacccgtggcccctctgttgtg

SEQ ID NO: 599816 - DNA, 25 bp, Homo sapien
aggccagagccacccgtggcccctc

SEQ ID NO: 599817 - DNA, 25 bp, Homo sapien
agcgggaggagttatcattcctcag

SEQ ID NO: 599818 - DNA, 25 bp, Homo sapien
gggaggagttatcattcctcagggt

SEQ ID NO: 599819 - DNA, 25 bp, Homo sapien
ctccatggcagggttggcctcgatg

SEQ ID NO: 599820 - DNA, 25 bp, Homo sapien
gttggcctcgatgatttgatcctca

SEQ ID NO: 599821 - DNA, 25 bp, Homo sapien
agctgtcaatatccgcggatgccag

SEQ ID NO: 599822 - DNA, 25 bp, Homo sapien
ggaccaaagtgaatgcggatgaact

SEQ ID NO: 599823 - DNA, 25 bp, Homo sapien
gcttcccagagggaccaaagtgaat

SEQ ID NO: 599824 - DNA, 25 bp, Homo sapien
tcaatatccgcggatgccagcttcc

SEQ ID NO: 599825 - DNA, 25 bp, Homo sapien
gatctggtagtagacatggtagctg

SEQ ID NO: 599826 - DNA, 25 bp, Homo sapien
tcaccaggcaactggaagatcaccc

SEQ ID NO: 599827 - DNA, 25 bp, Homo sapien
gcaactggaagatcacccgcgactt

SEQ ID NO: 599828 - DNA, 25 bp, Homo sapien
atggtagctgcgctcaccaggcaac

SEQ ID NO: 599829 - DNA, 25 bp, Homo sapien
gtccacggtgatgacgccctggctg

SEQ ID NO: 599830 - DNA, 25 bp, Homo sapien
cgccctggctgcagaagtggtagtc

SEQ ID NO: 599831 - DNA, 25 bp, Homo sapien
tcataggggttcatagacagaagca

SEQ ID NO: 599832 - DNA, 25 bp, Homo sapien
tcattcatgttgtccacggtgatga

SEQ ID NO: 599833 - DNA, 25 bp, Homo sapien
acatttctcatccacgctgaagcct

SEQ ID NO: 599834 - DNA, 25 bp, Homo sapien
gggcgcccacgatcttatagcaggc

SEQ ID NO: 599835 - DNA, 25 bp, Homo sapien
tctcagtgccatcggcctccgcctg

SEQ ID NO: 599836 - DNA, 25 bp, Homo sapien
catccacgctgaagcctaggatgtc

SEQ ID NO: 599837 - DNA, 25 bp, Homo sapien
ctggcagggcacgagtggggtaagg

SEQ ID NO: 599838 - DNA, 25 bp, Homo sapien
catgcgcactcaggggctctactgc

SEQ ID NO: 599839 - DNA, 25 bp, Homo sapien
ggacaccaccatgcgcactcagggg

SEQ ID NO: 599840 - DNA, 25 bp, Homo sapien
cagggcacgagtggggtaagggagg

SEQ ID NO: 599841 - DNA, 25 bp, Homo sapien
ctggcccttggtcacgtactcgttc

SEQ ID NO: 599842 - DNA, 25 bp, Homo sapien
cttggtcacgtactcgttccctaca

SEQ ID NO: 599843 - DNA, 25 bp, Homo sapien
tccctacacgcacccgggggtgcaa

SEQ ID NO: 599844 - DNA, 25 bp, Homo sapien
tggtcacgtactcgttccctacacg

SEQ ID NO: 599845 - DNA, 25 bp, Homo sapien
ccgatgaagaactgccggggcagct

SEQ ID NO: 599846 - DNA, 25 bp, Homo sapien
cagcgatgtccagaaccccgatgaa

SEQ ID NO: 599847 - DNA, 25 bp, Homo sapien
tctggttgatccgagacaccagcca

SEQ ID NO: 599848 - DNA, 25 bp, Homo sapien
cctgaacagccggtcataggtggcc

SEQ ID NO: 599849 - DNA, 25 bp, Homo sapien
tcgatgaggtcgatgcaaggctgca

SEQ ID NO: 599850 - DNA, 25 bp, Homo sapien
ggccgaagtcgatgaagacccagtc

SEQ ID NO: 599851 - DNA, 25 bp, Homo sapien
gttgatgcacagctgttcgaagctg

SEQ ID NO: 599852 - DNA, 25 bp, Homo sapien
tgaagacccagtcgatgccctcccg

SEQ ID NO: 599853 - DNA, 25 bp, Homo sapien
caaagtgaccttgccgcggcaccca

SEQ ID NO: 599854 - DNA, 25 bp, Homo sapien
tcaaagtgaccttgccgcggcaccc

SEQ ID NO: 599855 - DNA, 25 bp, Homo sapien
aaagtgaccttgccgcggcacccac

SEQ ID NO: 599856 - DNA, 25 bp, Homo sapien
ttgaaaagccaccatcaagccagtc

SEQ ID NO: 599857 - DNA, 25 bp, Homo sapien
acagaacgagcttgaaaagccacca

SEQ ID NO: 599858 - DNA, 25 bp, Homo sapien
aaaagccaccatcaagccagtccat

SEQ ID NO: 599859 - DNA, 25 bp, Homo sapien
ctgggaacagaacgagcttgaaaag

SEQ ID NO: 599860 - DNA, 25 bp, Homo sapien
tacttgcgcttcttgtcaggccgag

SEQ ID NO: 599861 - DNA, 25 bp, Homo sapien
ttgtcgtagagcttggcccggaagc

SEQ ID NO: 599862 - DNA, 25 bp, Homo sapien
tcgaagtgggcctggtacttgcgct

SEQ ID NO: 599863 - DNA, 25 bp, Homo sapien
gacttccccgcgtggttgtcgtaga

SEQ ID NO: 599864 - DNA, 25 bp, Homo sapien
tagagagtcgccaggagcctattct

SEQ ID NO: 599865 - DNA, 25 bp, Homo sapien
gcaggagcccgcataattctcatag

SEQ ID NO: 599866 - DNA, 25 bp, Homo sapien
gaagatggggaccacggtctcattc

SEQ ID NO: 599867 - DNA, 25 bp, Homo sapien
gagcctattctgtgacttctggaag

SEQ ID NO: 599868 - DNA, 25 bp, Homo sapien
gctgggacaccgtctggaacgatgc

SEQ ID NO: 599869 - DNA, 25 bp, Homo sapien
gatgctgccttcttacgcttctctt

SEQ ID NO: 599870 - DNA, 25 bp, Homo sapien
tggaacgatgctgccttcttacgct

SEQ ID NO: 599871 - DNA, 25 bp, Homo sapien
gacaccgtctggaacgatgctgcct

SEQ ID NO: 599872 - DNA, 25 bp, Homo sapien
ctgtgtggcccgcaggttggtcatc

SEQ ID NO: 599873 - DNA, 25 bp, Homo sapien
tgtgtggcccgcaggttggtcatca

SEQ ID NO: 599874 - DNA, 25 bp, Homo sapien
tgcagcggacgaagtggggctgtgt

SEQ ID NO: 599875 - DNA, 25 bp, Homo sapien
gacaatgcagcggacgaagtggggc

SEQ ID NO: 599876 - DNA, 25 bp, Homo sapien
cgctgccggaagtcggtgtagagca

SEQ ID NO: 599877 - DNA, 25 bp, Homo sapien
cttggcggcagatccggatcccctc

SEQ ID NO: 599878 - DNA, 25 bp, Homo sapien
aagtcggtgtagagcaacctgttgg

SEQ ID NO: 599879 - DNA, 25 bp, Homo sapien
tgccggaagtcggtgtagagcaacc

SEQ ID NO: 599880 - DNA, 25 bp, Homo sapien
ctggagcagcaggcagggggaaggg

SEQ ID NO: 599881 - DNA, 25 bp, Homo sapien
cagcaggcagggggaaggggtcacc

SEQ ID NO: 599882 - DNA, 25 bp, Homo sapien
gagcagcaggcagggggaaggggtc

SEQ ID NO: 599883 - DNA, 25 bp, Homo sapien
gcaggcagggggaaggggtcaccca

SEQ ID NO: 599884 - DNA, 25 bp, Homo sapien
cctggggataaggaacgatctccag

SEQ ID NO: 599885 - DNA, 25 bp, Homo sapien
tggggataaggaacgatctccaggc

SEQ ID NO: 599886 - DNA, 25 bp, Homo sapien
gcctggggataaggaacgatctcca

SEQ ID NO: 599887 - DNA, 25 bp, Homo sapien
ctggggataaggaacgatctccagg

SEQ ID NO: 599888 - DNA, 25 bp, Homo sapien
tgaaggtgtcatccgggatggcact

SEQ ID NO: 599889 - DNA, 25 bp, Homo sapien
ccatgaaggtgtcatccgggatggc

SEQ ID NO: 599890 - DNA, 25 bp, Homo sapien
tggtactgggtgtgatccaagtcca

SEQ ID NO: 599891 - DNA, 25 bp, Homo sapien
ctggtactgggtgtgatccaagtcc

SEQ ID NO: 599892 - DNA, 25 bp, Homo sapien
ggagctcttccaggacgcctagaag

SEQ ID NO: 599893 - DNA, 25 bp, Homo sapien
gtactcaaggcgcatgaggcggcca

SEQ ID NO: 599894 - DNA, 25 bp, Homo sapien
gccaggcgctggtcacggagctctt

SEQ ID NO: 599895 - DNA, 25 bp, Homo sapien
ccagcaggcgctggtactcaaggcg

SEQ ID NO: 599896 - DNA, 25 bp, Homo sapien
gcattgaaggcacggatgttccact

SEQ ID NO: 599897 - DNA, 25 bp, Homo sapien
cggcttcatcttgaaaaagagcttc

SEQ ID NO: 599898 - DNA, 25 bp, Homo sapien
tgaccagttcttgacggcattgaag

SEQ ID NO: 599899 - DNA, 25 bp, Homo sapien
agcagcggcttcatcttgaaaaaga

SEQ ID NO: 599900 - DNA, 25 bp, Homo sapien
cggccaggtcagcgttcacctcctc

SEQ ID NO: 599901 - DNA, 25 bp, Homo sapien
ttcttgagctccgtgcactcgtcct

SEQ ID NO: 599902 - DNA, 25 bp, Homo sapien
agcttgcgccggcgggcggccaggt

SEQ ID NO: 599903 - DNA, 25 bp, Homo sapien
agtggcagcgctcctcggcatctgc

SEQ ID NO: 599904 - DNA, 25 bp, Homo sapien
cagaatggggacgcccttccccgca

SEQ ID NO: 599905 - DNA, 25 bp, Homo sapien
agggccagggccagaatggggacgc

SEQ ID NO: 599906 - DNA, 25 bp, Homo sapien
ggccagggccagaatggggacgccc

SEQ ID NO: 599907 - DNA, 25 bp, Homo sapien
ccagggccagaatggggacgccctt

SEQ ID NO: 599908 - DNA, 25 bp, Homo sapien
gtccagcgcagccatctcttccgtc

SEQ ID NO: 599909 - DNA, 25 bp, Homo sapien
ctccagccggagcttggccttggtc

SEQ ID NO: 599910 - DNA, 25 bp, Homo sapien
ttggtcagcgcgctcacacggtcct

SEQ ID NO: 599911 - DNA, 25 bp, Homo sapien
tctccttggtcagccgggccactga

SEQ ID NO: 599912 - DNA, 25 bp, Homo sapien
cgccacccagtctcggggtggccct

SEQ ID NO: 599913 - DNA, 25 bp, Homo sapien
gccacccagtctcggggtggccctg

SEQ ID NO: 599914 - DNA, 25 bp, Homo sapien
caggggtcagccatggcccaagcca

SEQ ID NO: 599915 - DNA, 25 bp, Homo sapien
ggggtcagccatggcccaagccagc

SEQ ID NO: 599916 - DNA, 25 bp, Homo sapien
ctccgtgtccatgcgcagcttcttc

SEQ ID NO: 599917 - DNA, 25 bp, Homo sapien
cgctccgtgtccatgcgcagcttct

SEQ ID NO: 599918 - DNA, 25 bp, Homo sapien
ctgcttgtcttgagcagcatcagcc

SEQ ID NO: 599919 - DNA, 25 bp, Homo sapien
tgcgcttggcccgctccgtgtccat

SEQ ID NO: 599920 - DNA, 25 bp, Homo sapien
gccagcacaggccttaactcccacc

SEQ ID NO: 599921 - DNA, 25 bp, Homo sapien
tggccagcacaggccttaactccca

SEQ ID NO: 599922 - DNA, 25 bp, Homo sapien
cagcacaggccttaactcccaccca

SEQ ID NO: 599923 - DNA, 25 bp, Homo sapien
ccagcacaggccttaactcccaccc

SEQ ID NO: 599924 - DNA, 25 bp, Homo sapien
gctcgtcttccacccgcaggctcag

SEQ ID NO: 599925 - DNA, 25 bp, Homo sapien
ccccaagagctgctcgtcttccacc

SEQ ID NO: 599926 - DNA, 25 bp, Homo sapien
cagctggctcagctcggagtccttc

SEQ ID NO: 599927 - DNA, 25 bp, Homo sapien
ttcttctgcatctgggcccccaaga

SEQ ID NO: 599928 - DNA, 25 bp, Homo sapien
acgttggcagccaggtcgtccacct

SEQ ID NO: 599929 - DNA, 25 bp, Homo sapien
cgcagtgccgccactgtggcctcgt

SEQ ID NO: 599930 - DNA, 25 bp, Homo sapien
ctccgcctgcttgcgccgcagtgcc

SEQ ID NO: 599931 - DNA, 25 bp, Homo sapien
tctgcacgctgcttctccacgcggg

SEQ ID NO: 599932 - DNA, 25 bp, Homo sapien
tgtgggaacagtattggctgctggg

SEQ ID NO: 599933 - DNA, 25 bp, Homo sapien
aggtcagggctcaggataaggtact

SEQ ID NO: 599934 - DNA, 25 bp, Homo sapien
ggataaggtactgggtggaggctgg

SEQ ID NO: 599935 - DNA, 25 bp, Homo sapien
tgggatcgggattggtttaaagtca

SEQ ID NO: 599936 - DNA, 25 bp, Homo sapien
ataggtccggcacagcttctctgca

SEQ ID NO: 599937 - DNA, 25 bp, Homo sapien
tttccgtctgtagtcgcccacgctg

SEQ ID NO: 599938 - DNA, 25 bp, Homo sapien
tagtcgcccacgctgcgtgcttgcg

SEQ ID NO: 599939 - DNA, 25 bp, Homo sapien
ttgatcttggcctcgcttagctgat

SEQ ID NO: 599940 - DNA, 25 bp, Homo sapien
gccagggcctttccacggctcagct

SEQ ID NO: 599941 - DNA, 25 bp, Homo sapien
cagctgactgatcagacactccttc

SEQ ID NO: 599942 - DNA, 25 bp, Homo sapien
tagctggcgccgcaactcttccagg

SEQ ID NO: 599943 - DNA, 25 bp, Homo sapien
tcctctagcaggcgactcagctccc

SEQ ID NO: 599944 - DNA, 25 bp, Homo sapien
tggatggcatctgcttcgtacttgc

SEQ ID NO: 599945 - DNA, 25 bp, Homo sapien
tgttgctcccgcaggaggtcacagt

SEQ ID NO: 599946 - DNA, 25 bp, Homo sapien
aggtcacagtcgtgccgcagagcct

SEQ ID NO: 599947 - DNA, 25 bp, Homo sapien
cactgggccacctcggcattggcct

SEQ ID NO: 599948 - DNA, 25 bp, Homo sapien
gactctgtctgtagccgcagcttgg

SEQ ID NO: 599949 - DNA, 25 bp, Homo sapien
ttggccttctccaacgatgagcact

SEQ ID NO: 599950 - DNA, 25 bp, Homo sapien
cagggcttcaagtgcctcctcgtgg

SEQ ID NO: 599951 - DNA, 25 bp, Homo sapien
tgagcacttggcgttggcagcctcc

SEQ ID NO: 599952 - DNA, 25 bp, Homo sapien
cacctggtctgtgaggtcgctgatc

SEQ ID NO: 599953 - DNA, 25 bp, Homo sapien
tggtctgtgaggtcgctgatctcct

SEQ ID NO: 599954 - DNA, 25 bp, Homo sapien
tcacctggtctgtgaggtcgctgat

SEQ ID NO: 599955 - DNA, 25 bp, Homo sapien
cctggtctgtgaggtcgctgatctc

SEQ ID NO: 599956 - DNA, 25 bp, Homo sapien
ggttagcgcactcctcgtctttctc

SEQ ID NO: 599957 - DNA, 25 bp, Homo sapien
tcaggttagcgcactcctcgtcttt

SEQ ID NO: 599958 - DNA, 25 bp, Homo sapien
aggttagcgcactcctcgtctttct

SEQ ID NO: 599959 - DNA, 25 bp, Homo sapien
caggttagcgcactcctcgtctttc

SEQ ID NO: 599960 - DNA, 25 bp, Homo sapien
aatgcagaaggttgaggcgctcggt

SEQ ID NO: 599961 - DNA, 25 bp, Homo sapien
tgtgcctgcatcagccgcgtggcag

SEQ ID NO: 599962 - DNA, 25 bp, Homo sapien
ttcttgagccgcagcgcctcattgc

SEQ ID NO: 599963 - DNA, 25 bp, Homo sapien
attgcgggcccgtgtctctgcatcc

SEQ ID NO: 599964 - DNA, 25 bp, Homo sapien
ctccccgctcagctgggccaagtcc

SEQ ID NO: 599965 - DNA, 25 bp, Homo sapien
tccccgctcagctgggccaagtccg

SEQ ID NO: 599966 - DNA, 25 bp, Homo sapien
ccccgctcagctgggccaagtccgc

SEQ ID NO: 599967 - DNA, 25 bp, Homo sapien
tgcttcttcccgccacggagggcgg

SEQ ID NO: 599968 - DNA, 25 bp, Homo sapien
caggtgtgcacttgtgtcctgctcc

SEQ ID NO: 599969 - DNA, 25 bp, Homo sapien
cagcgtcttcttcatccgttccagg

SEQ ID NO: 599970 - DNA, 25 bp, Homo sapien
cgcgcaccgtctgctccagcgtctt

SEQ ID NO: 599971 - DNA, 25 bp, Homo sapien
ctcatgcttgcgcacgcccttaagg

SEQ ID NO: 599972 - DNA, 25 bp, Homo sapien
gagctccttgacacggcgctcatgc

SEQ ID NO: 599973 - DNA, 25 bp, Homo sapien
gggcctcggcgtgcttcttctgctc

SEQ ID NO: 599974 - DNA, 25 bp, Homo sapien
ttgcgcacgcccttaagggcctcgg

SEQ ID NO: 599975 - DNA, 25 bp, Homo sapien
tccccagggagaccctgtcgcccac

SEQ ID NO: 599976 - DNA, 25 bp, Homo sapien
ggcttgcttgggctgggccagctcc

SEQ ID NO: 599977 - DNA, 25 bp, Homo sapien
agctccagggccactccccagggag

SEQ ID NO: 599978 - DNA, 25 bp, Homo sapien
ctgggcgggcaagggggactcaggg

SEQ ID NO: 599979 - DNA, 25 bp, Homo sapien
caggtcctgcatgcgagccaggttc

SEQ ID NO: 599980 - DNA, 25 bp, Homo sapien
aaactggcgcttgtagctcttgacc

SEQ ID NO: 599981 - DNA, 25 bp, Homo sapien
cctcctcaaactggcgcttgtagct

SEQ ID NO: 599982 - DNA, 25 bp, Homo sapien
ctcaaactggcgcttgtagctcttg

SEQ ID NO: 599983 - DNA, 25 bp, Homo sapien
gcagagctggggtgcccggtccagg

SEQ ID NO: 599984 - DNA, 25 bp, Homo sapien
cagagctggggtgcccggtccaggt

SEQ ID NO: 599985 - DNA, 25 bp, Homo sapien
gagctggggtgcccggtccaggtgt

SEQ ID NO: 599986 - DNA, 25 bp, Homo sapien
ctggggtgcccggtccaggtgtcca

SEQ ID NO: 599987 - DNA, 25 bp, Homo sapien
cacacacagggccttggttccgctt

SEQ ID NO: 599988 - DNA, 25 bp, Homo sapien
tccgcttgggtgactgagatgctta

SEQ ID NO: 599989 - DNA, 25 bp, Homo sapien
gatgcttattctggtccctgcccca

SEQ ID NO: 599990 - DNA, 25 bp, Homo sapien
caactttgttcctattgccactgtc

SEQ ID NO: 599991 - DNA, 25 bp, Homo sapien
tgcccgcagcttgttggcctgggtt

SEQ ID NO: 599992 - DNA, 25 bp, Homo sapien
cgtgctgggccttgcgatacttggc

SEQ ID NO: 599993 - DNA, 25 bp, Homo sapien
tggcctgggtttccgccatgtctgc

SEQ ID NO: 599994 - DNA, 25 bp, Homo sapien
cgtcccgggtccgtgcccgcagctt

SEQ ID NO: 599995 - DNA, 25 bp, Homo sapien
cctgcacagagagcaatgcccctgc

SEQ ID NO: 599996 - DNA, 25 bp, Homo sapien
cagtactacctgtcagcccccacag

SEQ ID NO: 599997 - DNA, 25 bp, Homo sapien
ctgagtgagcagtactacctgtcag

SEQ ID NO: 599998 - DNA, 25 bp, Homo sapien
gagcagtactacctgtcagccccca

SEQ ID NO: 599999 - DNA, 25 bp, Homo sapien
cagcagacattcctctttagagccc

SEQ ID NO: 600000 - DNA, 25 bp, Homo sapien
agacattcctctttagagcccaggg

SEQ ID NO: 600001 - DNA, 25 bp, Homo sapien
cagccagatgtgcaacagcagacat

SEQ ID NO: 600002 - DNA, 25 bp, Homo sapien
gcaacagcagacattcctctttaga

SEQ ID NO: 600003 - DNA, 25 bp, Homo sapien
cctgaaccccaaagaaaagaatgag

SEQ ID NO: 600004 - DNA, 25 bp, Homo sapien
tgtggacctggcttttgtccctagg

SEQ ID NO: 600005 - DNA, 25 bp, Homo sapien
aagaatgagaaggaaactggctgtg

SEQ ID NO: 600006 - DNA, 25 bp, Homo sapien
tggcttttgtccctaggactgtgtt

SEQ ID NO: 600007 - DNA, 25 bp, Homo sapien
gagaagctggtattgttaagagaaa

SEQ ID NO: 600008 - DNA, 25 bp, Homo sapien
ccggccgagaagctggtattgttaa

SEQ ID NO: 600009 - DNA, 25 bp, Homo sapien
ccgagaagctggtattgttaagaga

SEQ ID NO: 600010 - DNA, 25 bp, Homo sapien
atgcccggccgagaagctggtattg

SEQ ID NO: 600011 - DNA, 25 bp, Homo sapien
caagatcacgaacttagaagcaggt

SEQ ID NO: 600012 - DNA, 25 bp, Homo sapien
ttcttagcagccaacacaaataggg

SEQ ID NO: 600013 - DNA, 25 bp, Homo sapien
cttgtgggtgtatgcaaaatctacc

SEQ ID NO: 600014 - DNA, 25 bp, Homo sapien
tacggatgggcacaaatttggcttc

SEQ ID NO: 600015 - DNA, 25 bp, Homo sapien
gaacaaccgataccaactactgcaa

SEQ ID NO: 600016 - DNA, 25 bp, Homo sapien
acaaccgataccaactactgcaaaa

SEQ ID NO: 600017 - DNA, 25 bp, Homo sapien
ccgataccaactactgcaaaaacat

SEQ ID NO: 600018 - DNA, 25 bp, Homo sapien
aaggaacaaccgataccaactactg

SEQ ID NO: 600019 - DNA, 25 bp, Homo sapien
tggtaggtggcataacaaactttgt

SEQ ID NO: 600020 - DNA, 25 bp, Homo sapien
tctctggtaggtggcataacaaact

SEQ ID NO: 600021 - DNA, 25 bp, Homo sapien
ctgtttctctggtaggtggcataac

SEQ ID NO: 600022 - DNA, 25 bp, Homo sapien
tagttatactaccttttggtatatg

SEQ ID NO: 600023 - DNA, 25 bp, Homo sapien
ggaacactcttctcaccagaaaacc

SEQ ID NO: 600024 - DNA, 25 bp, Homo sapien
tgatgagggaattctactctctcaa

SEQ ID NO: 600025 - DNA, 25 bp, Homo sapien
cggagcaggtcgaaatttcagaaaa

SEQ ID NO: 600026 - DNA, 25 bp, Homo sapien
tagttcggggccatgggaacctcca

SEQ ID NO: 600027 - DNA, 25 bp, Homo sapien
ggaaacctcaagagtgacagcatcg

SEQ ID NO: 600028 - DNA, 25 bp, Homo sapien
cccaaattgggaggagagaagtgtc

SEQ ID NO: 600029 - DNA, 25 bp, Homo sapien
tcatgaattcctagaactgacggga

SEQ ID NO: 600030 - DNA, 25 bp, Homo sapien
tgaaatcagtagtcagacagcccgg

SEQ ID NO: 600031 - DNA, 25 bp, Homo sapien
ctgcatcgatctcactgggagctgc

SEQ ID NO: 600032 - DNA, 25 bp, Homo sapien
tgcatcgatctcactgggagctgca

SEQ ID NO: 600033 - DNA, 25 bp, Homo sapien
catcgatctcactgggagctgcaga

SEQ ID NO: 600034 - DNA, 25 bp, Homo sapien
atcgatctcactgggagctgcagac

SEQ ID NO: 600035 - DNA, 25 bp, Homo sapien
caatggcggacaacccctcccacca

SEQ ID NO: 600036 - DNA, 25 bp, Homo sapien
gaactgaatatatgcaagagcttcc

SEQ ID NO: 600037 - DNA, 25 bp, Homo sapien
aaactaagcacccattctctgaact

SEQ ID NO: 600038 - DNA, 25 bp, Homo sapien
aatctgggacaaactctggacataa

SEQ ID NO: 600039 - DNA, 25 bp, Homo sapien
ttctccccggagagctgacgtcata

SEQ ID NO: 600040 - DNA, 25 bp, Homo sapien
ttctagcctgggtcatgcggcaaga

SEQ ID NO: 600041 - DNA, 25 bp, Homo sapien
agcctgggtcatgcggcaagattct

SEQ ID NO: 600042 - DNA, 25 bp, Homo sapien
ctagcctgggtcatgcggcaagatt

SEQ ID NO: 600043 - DNA, 25 bp, Homo sapien
cattctagcctgggtcatgcggcaa

SEQ ID NO: 600044 - DNA, 25 bp, Homo sapien
gctttaaagtcactcctccgagcat

SEQ ID NO: 600045 - DNA, 25 bp, Homo sapien
tagaaaagctttaaagtcactcctc

SEQ ID NO: 600046 - DNA, 25 bp, Homo sapien
gcaagtagaaaagctttaaagtcac

SEQ ID NO: 600047 - DNA, 25 bp, Homo sapien
tctaggaagcaagtagaaaagcttt

SEQ ID NO: 600048 - DNA, 25 bp, Homo sapien
ccttgggctgcttcctaggaaccag

SEQ ID NO: 600049 - DNA, 25 bp, Homo sapien
gcttcctaggaaccaggaacaggga

SEQ ID NO: 600050 - DNA, 25 bp, Homo sapien
ctccttgggctgcttcctaggaacc

SEQ ID NO: 600051 - DNA, 25 bp, Homo sapien
tcctaggaaccaggaacagggagcg

SEQ ID NO: 600052 - DNA, 25 bp, Homo sapien
aagtgaggaccgtctgggaggggcg

SEQ ID NO: 600053 - DNA, 25 bp, Homo sapien
gagaagtgaggaccgtctgggaggg

SEQ ID NO: 600054 - DNA, 25 bp, Homo sapien
gaagtgaggaccgtctgggaggggc

SEQ ID NO: 600055 - DNA, 25 bp, Homo sapien
tgaggaccgtctgggaggggcggag

SEQ ID NO: 600056 - DNA, 25 bp, Homo sapien
tgggttcctggctcgggccggctgc

SEQ ID NO: 600057 - DNA, 25 bp, Homo sapien
gggttcctggctcgggccggctgcg

SEQ ID NO: 600058 - DNA, 25 bp, Homo sapien
gaggctccggacctgggttcctggc

SEQ ID NO: 600059 - DNA, 25 bp, Homo sapien
ctgggttcctggctcgggccggctg

SEQ ID NO: 600060 - DNA, 25 bp, Homo sapien
cagacagcagcagtatcggcagcaa

SEQ ID NO: 600061 - DNA, 25 bp, Homo sapien
cagccagacagcagcagtatcggca

SEQ ID NO: 600062 - DNA, 25 bp, Homo sapien
cagcagcagtatcggcagcaatgtt

SEQ ID NO: 600063 - DNA, 25 bp, Homo sapien
gacagcagcagtatcggcagcaatg

SEQ ID NO: 600064 - DNA, 25 bp, Homo sapien
accacacgtgataggggtcgcggaa

SEQ ID NO: 600065 - DNA, 25 bp, Homo sapien
ctggagcatatgaagtctttggagg

SEQ ID NO: 600066 - DNA, 25 bp, Homo sapien
gggtcgcggaagtaggagatctgga

SEQ ID NO: 600067 - DNA, 25 bp, Homo sapien
ctggtaccacacgtgataggggtcg

SEQ ID NO: 600068 - DNA, 25 bp, Homo sapien
ccttccagcacgtgcgttaggtgtc

SEQ ID NO: 600069 - DNA, 25 bp, Homo sapien
taggtgtccccccagcgacgcgttg

SEQ ID NO: 600070 - DNA, 25 bp, Homo sapien
tgcaggccactctgcgtgcgcgccc

SEQ ID NO: 600071 - DNA, 25 bp, Homo sapien
ggccactctgcgtgcgcgcccagct

SEQ ID NO: 600072 - DNA, 25 bp, Homo sapien
tctccggccggaaactcacaaagga

SEQ ID NO: 600073 - DNA, 25 bp, Homo sapien
ccacttcgaagaagacatgggctct

SEQ ID NO: 600074 - DNA, 25 bp, Homo sapien
tgaaggtgaccactccggaggtgac

SEQ ID NO: 600075 - DNA, 25 bp, Homo sapien
gaattcccgcagttcataccgagtg

SEQ ID NO: 600076 - DNA, 25 bp, Homo sapien
gaacatgcaaagagttagcccgaag

SEQ ID NO: 600077 - DNA, 25 bp, Homo sapien
taccaactgactgaagctgcgtgtg

SEQ ID NO: 600078 - DNA, 25 bp, Homo sapien
tgtgggcctcttgttgctctaggca

SEQ ID NO: 600079 - DNA, 25 bp, Homo sapien
cccaaggagtccatgatttgagtca

SEQ ID NO: 600080 - DNA, 25 bp, Homo sapien
accaggacgcccaggaccagcgaag

SEQ ID NO: 600081 - DNA, 25 bp, Homo sapien
aggacgcccaggaccagcgaagtgt

SEQ ID NO: 600082 - DNA, 25 bp, Homo sapien
gtgtaggagcggcttgtttggctcc

SEQ ID NO: 600083 - DNA, 25 bp, Homo sapien
cccaggaccagcgaagtgtaggagc

SEQ ID NO: 600084 - DNA, 25 bp, Homo sapien
gagctgtcactccaaaccttctggt

SEQ ID NO: 600085 - DNA, 25 bp, Homo sapien
ccctcaaatcttcagtgggcagatg

SEQ ID NO: 600086 - DNA, 25 bp, Homo sapien
tcagcaaagcatacacgttcttagg

SEQ ID NO: 600087 - DNA, 25 bp, Homo sapien
gcttcacagtgagctgaaactttcc

SEQ ID NO: 600088 - DNA, 25 bp, Homo sapien
tatatcttttgaacgcctcaggtga

SEQ ID NO: 600089 - DNA, 25 bp, Homo sapien
tctttggaggatgggccataggctt

SEQ ID NO: 600090 - DNA, 25 bp, Homo sapien
ctgtctttggaggatgggccatagg

SEQ ID NO: 600091 - DNA, 25 bp, Homo sapien
tttggttatatcttttgaacgcctc

SEQ ID NO: 600092 - DNA, 25 bp, Homo sapien
tgatcactgccatatgacttggatt

SEQ ID NO: 600093 - DNA, 25 bp, Homo sapien
aattgattaataattgatcactgcc

SEQ ID NO: 600094 - DNA, 25 bp, Homo sapien
taccctattatatcagcgtcccatc

SEQ ID NO: 600095 - DNA, 25 bp, Homo sapien
gacacacctggaagtattgaatgtt

SEQ ID NO: 600096 - DNA, 25 bp, Homo sapien
ttggggccacattgtgcaaggcctt

SEQ ID NO: 600097 - DNA, 25 bp, Homo sapien
gttggggccacattgtgcaaggcct

SEQ ID NO: 600098 - DNA, 25 bp, Homo sapien
ctgaatttaactcaatgagaaattt

SEQ ID NO: 600099 - DNA, 25 bp, Homo sapien
gaactcactcaacactaaaggatgg

SEQ ID NO: 600100 - DNA, 25 bp, Homo sapien
taacaatggaggtcacgttccaaca

SEQ ID NO: 600101 - DNA, 25 bp, Homo sapien
ggagcaggcatataagatgagacag

SEQ ID NO: 600102 - DNA, 25 bp, Homo sapien
gataaacgcaagttacagaattcca

SEQ ID NO: 600103 - DNA, 25 bp, Homo sapien
gacagagtctcacagtctcgctctg

SEQ ID NO: 600104 - DNA, 25 bp, Homo sapien
gtgacagagtctcacagtctcgctc

SEQ ID NO: 600105 - DNA, 25 bp, Homo sapien
tgacagagtctcacagtctcgctct

SEQ ID NO: 600106 - DNA, 25 bp, Homo sapien
caaagtgctataccattgccaccag

SEQ ID NO: 600107 - DNA, 25 bp, Homo sapien
tcttgggcatatactaggagcggac

SEQ ID NO: 600108 - DNA, 25 bp, Homo sapien
ggagatttgtggcacccgtcaccca

SEQ ID NO: 600109 - DNA, 25 bp, Homo sapien
gacttgctgggccacacaataactc

SEQ ID NO: 600110 - DNA, 25 bp, Homo sapien
aattagacaagattaggtgcattca

SEQ ID NO: 600111 - DNA, 25 bp, Homo sapien
tcaaaaattagacaagattaggtgc

SEQ ID NO: 600112 - DNA, 25 bp, Homo sapien
aaaaattagacaagattaggtgcat

SEQ ID NO: 600113 - DNA, 25 bp, Homo sapien
aaattagacaagattaggtgcattc

SEQ ID NO: 600114 - DNA, 25 bp, Homo sapien
tctagaccacttcagtaaagtgaat

SEQ ID NO: 600115 - DNA, 25 bp, Homo sapien
cactgacatctcacaactacaggca

SEQ ID NO: 600116 - DNA, 25 bp, Homo sapien
attgcaacaaagtgaatcacacaag

SEQ ID NO: 600117 - DNA, 25 bp, Homo sapien
tgaatcacacaaggtttttggtttc

SEQ ID NO: 600118 - DNA, 25 bp, Homo sapien
tatgtaatttccctatatttatatc

SEQ ID NO: 600119 - DNA, 25 bp, Homo sapien
ataggtttccttaacatttgagaag

SEQ ID NO: 600120 - DNA, 25 bp, Homo sapien
ttatcattatgtaatttccctatat

SEQ ID NO: 600121 - DNA, 25 bp, Homo sapien
tatatttcagtgtttatcttcttgg

SEQ ID NO: 600122 - DNA, 25 bp, Homo sapien
gcccggccagagtgacattcttagt

SEQ ID NO: 600123 - DNA, 25 bp, Homo sapien
cggccagagtgacattcttagtaga

SEQ ID NO: 600124 - DNA, 25 bp, Homo sapien
cccggccagagtgacattcttagta

SEQ ID NO: 600125 - DNA, 25 bp, Homo sapien
gccagagtgacattcttagtagaga

SEQ ID NO: 600126 - DNA, 25 bp, Homo sapien
cggcgcacgtgcaggagccaccagt

SEQ ID NO: 600127 - DNA, 25 bp, Homo sapien
aggagccggcgcacgtgcaggagcc

SEQ ID NO: 600128 - DNA, 25 bp, Homo sapien
acgtgcaggagccaccagtggtgca

SEQ ID NO: 600129 - DNA, 25 bp, Homo sapien
cgcacgtgcaggagccaccagtggt

SEQ ID NO: 600130 - DNA, 25 bp, Homo sapien
acagcagctgcacgcccctttgcag

SEQ ID NO: 600131 - DNA, 25 bp, Homo sapien
agctgcacgcccctttgcagacaca

SEQ ID NO: 600132 - DNA, 25 bp, Homo sapien
gctgcacgcccctttgcagacacag

SEQ ID NO: 600133 - DNA, 25 bp, Homo sapien
gcagctgcacgcccctttgcagaca

SEQ ID NO: 600134 - DNA, 25 bp, Homo sapien
gacctgcgagggcagtggctccccg

SEQ ID NO: 600135 - DNA, 25 bp, Homo sapien
ctgcgagggcagtggctccccgacc

SEQ ID NO: 600136 - DNA, 25 bp, Homo sapien
acctgcgagggcagtggctccccga

SEQ ID NO: 600137 - DNA, 25 bp, Homo sapien
gcgagggcagtggctccccgaccag

SEQ ID NO: 600138 - DNA, 25 bp, Homo sapien
gccaccgctgcccggttccctgccc

SEQ ID NO: 600139 - DNA, 25 bp, Homo sapien
ctgcccggcgaagggcgcctccgcc

SEQ ID NO: 600140 - DNA, 25 bp, Homo sapien
ctccgcctcgtccgcccgcgccacc

SEQ ID NO: 600141 - DNA, 25 bp, Homo sapien
caccgccaccgctgcccggttccct

SEQ ID NO: 600142 - DNA, 25 bp, Homo sapien
cgcctccgcgacctcggcagtaggt

SEQ ID NO: 600143 - DNA, 25 bp, Homo sapien
acctcggcagtaggtgcggcccggc

SEQ ID NO: 600144 - DNA, 25 bp, Homo sapien
cgcgacctcggcagtaggtgcggcc

SEQ ID NO: 600145 - DNA, 25 bp, Homo sapien
gcctccgcgacctcggcagtaggtg

SEQ ID NO: 600146 - DNA, 25 bp, Homo sapien
caagtgatccttgtgggtgctgcgt

SEQ ID NO: 600147 - DNA, 25 bp, Homo sapien
gactcctgagtggactgattgattg

SEQ ID NO: 600148 - DNA, 25 bp, Homo sapien
tataggcttcagatataactgactc

SEQ ID NO: 600149 - DNA, 25 bp, Homo sapien
taagagtcattttaagccaggtgag

SEQ ID NO: 600150 - DNA, 25 bp, Homo sapien
gggatgtccaagttttgcagttctg

SEQ ID NO: 600151 - DNA, 25 bp, Homo sapien
tccaagttttgcagttctggggagg

SEQ ID NO: 600152 - DNA, 25 bp, Homo sapien
ttttgggtcagcactgggatgtcca

SEQ ID NO: 600153 - DNA, 25 bp, Homo sapien
gatgtccaagttttgcagttctggg

SEQ ID NO: 600154 - DNA, 25 bp, Homo sapien
aggccaccacaagccagatgatcac

SEQ ID NO: 600155 - DNA, 25 bp, Homo sapien
taatggcgcagcattgcctgttggc

SEQ ID NO: 600156 - DNA, 25 bp, Homo sapien
ccatcggctcttgagtgggtggtaa

SEQ ID NO: 600157 - DNA, 25 bp, Homo sapien
ggtaagtgcactagcgggaattccc

SEQ ID NO: 600158 - DNA, 25 bp, Homo sapien
gcccagcttagcttcttgacaaaca

SEQ ID NO: 600159 - DNA, 25 bp, Homo sapien
cacaatgcccagcttagcttcttga

SEQ ID NO: 600160 - DNA, 25 bp, Homo sapien
agggccctcaggatcgcccacaatg

SEQ ID NO: 600161 - DNA, 25 bp, Homo sapien
aaagggccctcaggatcgcccacaa

SEQ ID NO: 600162 - DNA, 25 bp, Homo sapien
atcatttgaccccagtgactcctgg

SEQ ID NO: 600163 - DNA, 25 bp, Homo sapien
cattggatttctactggccacagaa

SEQ ID NO: 600164 - DNA, 25 bp, Homo sapien
gcagcttttattggtgtcccctcct

SEQ ID NO: 600165 - DNA, 25 bp, Homo sapien
cagagatgtgccttgaacacgaggg

SEQ ID NO: 600166 - DNA, 25 bp, Homo sapien
ttgtctgatccaacacaccggtgac

SEQ ID NO: 600167 - DNA, 25 bp, Homo sapien
accgggatcccgtaaaactgctgca

SEQ ID NO: 600168 - DNA, 25 bp, Homo sapien
gcagatgcccgtgagtcatagggaa

SEQ ID NO: 600169 - DNA, 25 bp, Homo sapien
tgctgcatagtggagactgccgact

SEQ ID NO: 600170 - DNA, 25 bp, Homo sapien
tcgagatattctttcccaggatggc

SEQ ID NO: 600171 - DNA, 25 bp, Homo sapien
atcgagatattctttcccaggatgg

SEQ ID NO: 600172 - DNA, 25 bp, Homo sapien
cgagatattctttcccaggatggca

SEQ ID NO: 600173 - DNA, 25 bp, Homo sapien
cagggacaccacatcggggtttctt

SEQ ID NO: 600174 - DNA, 25 bp, Homo sapien
cttgtttctccgcctacggcttaag

SEQ ID NO: 600175 - DNA, 25 bp, Homo sapien
gggtgatcagggacaccacatcggg

SEQ ID NO: 600176 - DNA, 25 bp, Homo sapien
tgtttctccgcctacggcttaagtg

SEQ ID NO: 600177 - DNA, 25 bp, Homo sapien
taggtgatgtgtttttgcctccact

SEQ ID NO: 600178 - DNA, 25 bp, Homo sapien
acttctgtccagtcagggcatagcg

SEQ ID NO: 600179 - DNA, 25 bp, Homo sapien
tccacttctgtccagtcagggcata

SEQ ID NO: 600180 - DNA, 25 bp, Homo sapien
aggtgatgtgtttttgcctccactt

SEQ ID NO: 600181 - DNA, 25 bp, Homo sapien
tactccacacgtaaggaaactgaag

SEQ ID NO: 600182 - DNA, 25 bp, Homo sapien
gaagctggccggtatctgatttaat

SEQ ID NO: 600183 - DNA, 25 bp, Homo sapien
tctaccccttcaagagacccaagag

SEQ ID NO: 600184 - DNA, 25 bp, Homo sapien
gacagcttatcagcagaagagccct

SEQ ID NO: 600185 - DNA, 25 bp, Homo sapien
tcatggtatggcacctcttcaaagg

SEQ ID NO: 600186 - DNA, 25 bp, Homo sapien
ttctgccacacatcgaaagcctggc

SEQ ID NO: 600187 - DNA, 25 bp, Homo sapien
gtctgcctccttccggtcacttttg

SEQ ID NO: 600188 - DNA, 25 bp, Homo sapien
aaagcctggcgaatagctttccgcg

SEQ ID NO: 600189 - DNA, 25 bp, Homo sapien
ctccatcaaatggggagctgtcgcc

SEQ ID NO: 600190 - DNA, 25 bp, Homo sapien
tctccatcaaatggggagctgtcgc

SEQ ID NO: 600191 - DNA, 25 bp, Homo sapien
tggcatttcctagcgtccatggctc

SEQ ID NO: 600192 - DNA, 25 bp, Homo sapien
catggttggcatttcctagcgtcca

SEQ ID NO: 600193 - DNA, 25 bp, Homo sapien
cgtcatggttggcatttcctagcgt

SEQ ID NO: 600194 - DNA, 25 bp, Homo sapien
ggttggcatttcctagcgtccatgg

SEQ ID NO: 600195 - DNA, 25 bp, Homo sapien
tcttgggatttgggggctgggtcca

SEQ ID NO: 600196 - DNA, 25 bp, Homo sapien
gctcttgggatttgggggctgggtc

SEQ ID NO: 600197 - DNA, 25 bp, Homo sapien
ccggctcttgggatttgggggctgg

SEQ ID NO: 600198 - DNA, 25 bp, Homo sapien
tgggatttgggggctgggtccaaca

SEQ ID NO: 600199 - DNA, 25 bp, Homo sapien
tgtggagaggagtgtggggaggtgc

SEQ ID NO: 600200 - DNA, 25 bp, Homo sapien
agaggagtgtggggaggtgcccagg

SEQ ID NO: 600201 - DNA, 25 bp, Homo sapien
ggagtgtggggaggtgcccagggca

SEQ ID NO: 600202 - DNA, 25 bp, Homo sapien
ggagaggagtgtggggaggtgccca

SEQ ID NO: 600203 - DNA, 25 bp, Homo sapien
tccatgtactggtagaagggcgcca

SEQ ID NO: 600204 - DNA, 25 bp, Homo sapien
tgtactggtagaagggcgccatgat

SEQ ID NO: 600205 - DNA, 25 bp, Homo sapien
aagttgtgcgtctccatgtactggt

SEQ ID NO: 600206 - DNA, 25 bp, Homo sapien
agcttgaagttgtgcgtctccatgt

SEQ ID NO: 600207 - DNA, 25 bp, Homo sapien
agaacaagaacctcacataccagtg

SEQ ID NO: 600208 - DNA, 25 bp, Homo sapien
caagaacctcacataccagtgtgaa

SEQ ID NO: 600209 - DNA, 25 bp, Homo sapien
gaacctcacataccagtgtgaacag

SEQ ID NO: 600210 - DNA, 25 bp, Homo sapien
ttgaccagaacaagaacctcacata

SEQ ID NO: 600211 - DNA, 25 bp, Homo sapien
tcagagctgtccagtagagtgttct

SEQ ID NO: 600212 - DNA, 25 bp, Homo sapien
ggctcatggctttacagacctgcat

SEQ ID NO: 600213 - DNA, 25 bp, Homo sapien
tagttcttagtgtgactgagaccca

SEQ ID NO: 600214 - DNA, 25 bp, Homo sapien
caaagggcagccaagttgagaatca

SEQ ID NO: 600215 - DNA, 25 bp, Homo sapien
acggggagtgtagggagtggccttg

SEQ ID NO: 600216 - DNA, 25 bp, Homo sapien
gagtgtagggagtggccttgtgggc

SEQ ID NO: 600217 - DNA, 25 bp, Homo sapien
gcggacggggagtgtagggagtggc

SEQ ID NO: 600218 - DNA, 25 bp, Homo sapien
ctgcggacggggagtgtagggagtg

SEQ ID NO: 600219 - DNA, 25 bp, Homo sapien
tttcctctccgatggtgagtggatc

SEQ ID NO: 600220 - DNA, 25 bp, Homo sapien
gctggcgctcgtgtttcctctccga

SEQ ID NO: 600221 - DNA, 25 bp, Homo sapien
cctgggctggcgctcgtgtttcctc

SEQ ID NO: 600222 - DNA, 25 bp, Homo sapien
gctcgtgtttcctctccgatggtga

SEQ ID NO: 600223 - DNA, 25 bp, Homo sapien
gttgaagttgccgtcacagatgttg

SEQ ID NO: 600224 - DNA, 25 bp, Homo sapien
ccgtcacagatgttgggtttggtgc

SEQ ID NO: 600225 - DNA, 25 bp, Homo sapien
tgtgttgaagttgccgtcacagatg

SEQ ID NO: 600226 - DNA, 25 bp, Homo sapien
ctgtgttgaagttgccgtcacagat

SEQ ID NO: 600227 - DNA, 25 bp, Homo sapien
agacaaacatctcgccccggaagag

SEQ ID NO: 600228 - DNA, 25 bp, Homo sapien
aacatctcgccccggaagagggcca

SEQ ID NO: 600229 - DNA, 25 bp, Homo sapien
taaagacaaacatctcgccccggaa

SEQ ID NO: 600230 - DNA, 25 bp, Homo sapien
caaacatctcgccccggaagagggc

SEQ ID NO: 600231 - DNA, 25 bp, Homo sapien
ttattgcgcagacgccagaaccagc

SEQ ID NO: 600232 - DNA, 25 bp, Homo sapien
ctcctgcactcggttattgcgcaga

SEQ ID NO: 600233 - DNA, 25 bp, Homo sapien
ccatcggccctttcataggctgcgt

SEQ ID NO: 600234 - DNA, 25 bp, Homo sapien
ttcataggctgcgtcgatgcgggca

SEQ ID NO: 600235 - DNA, 25 bp, Homo sapien
tccttaaacacccaatacttgtcac

SEQ ID NO: 600236 - DNA, 25 bp, Homo sapien
tcccagcgcagagctgtgtcaatgc

SEQ ID NO: 600237 - DNA, 25 bp, Homo sapien
gccagtaccgctcgcctttgaaaaa

SEQ ID NO: 600238 - DNA, 25 bp, Homo sapien
tgaaaaagtaggtcttgcccacagg

SEQ ID NO: 600239 - DNA, 25 bp, Homo sapien
tccttgctgatgaaggctccttggg

SEQ ID NO: 600240 - DNA, 25 bp, Homo sapien
atgggcttagggtagccagggtccg

SEQ ID NO: 600241 - DNA, 25 bp, Homo sapien
ctgtgggatgcccttccacacggtg

SEQ ID NO: 600242 - DNA, 25 bp, Homo sapien
ggatgcccttccacacggtgatggg

SEQ ID NO: 600243 - DNA, 25 bp, Homo sapien
agaaatacagcccagcatcaccact

SEQ ID NO: 600244 - DNA, 25 bp, Homo sapien
agacacttccggcacctgctctggg

SEQ ID NO: 600245 - DNA, 25 bp, Homo sapien
cagtgtgaaaaggagggcacaggca

SEQ ID NO: 600246 - DNA, 25 bp, Homo sapien
cagcccagcatcaccactcccagac

SEQ ID NO: 600247 - DNA, 25 bp, Homo sapien
agtttctggttgtcaaacttccagt

SEQ ID NO: 600248 - DNA, 25 bp, Homo sapien
gcccatccagtcacgcaggatgttg

SEQ ID NO: 600249 - DNA, 25 bp, Homo sapien
cagtagtcccggcccttgtagaaat

SEQ ID NO: 600250 - DNA, 25 bp, Homo sapien
atgttgcgcgggtagcctggctcca

SEQ ID NO: 600251 - DNA, 25 bp, Homo sapien
acggagcccggcacatcgttgatgg

SEQ ID NO: 600252 - DNA, 25 bp, Homo sapien
tgagggcctgtcttgttcttgaact

SEQ ID NO: 600253 - DNA, 25 bp, Homo sapien
gtcaccatgatgtccacgtcgtcct

SEQ ID NO: 600254 - DNA, 25 bp, Homo sapien
gactggccgcttatagtaggtgaca

SEQ ID NO: 600255 - DNA, 25 bp, Homo sapien
tctccgaagagaccctgacaagtgg

SEQ ID NO: 600256 - DNA, 25 bp, Homo sapien
tagagtggccttagcagcaccttgg

SEQ ID NO: 600257 - DNA, 25 bp, Homo sapien
tattcacgatgtgacagctgggtcc

SEQ ID NO: 600258 - DNA, 25 bp, Homo sapien
cagaccaagtggatagagagggctc

SEQ ID NO: 600259 - DNA, 25 bp, Homo sapien
tcctggatcgtaaggaggcatcatc

SEQ ID NO: 600260 - DNA, 25 bp, Homo sapien
tgcacttcctggtactgacggcgtc

SEQ ID NO: 600261 - DNA, 25 bp, Homo sapien
tattgctgataaccgtgctcttgac

SEQ ID NO: 600262 - DNA, 25 bp, Homo sapien
tagcagagaattcgaagaggtcgcc

SEQ ID NO: 600263 - DNA, 25 bp, Homo sapien
caatctgtaccggatgctggcaggg

SEQ ID NO: 600264 - DNA, 25 bp, Homo sapien
attactgcaaaaacctgctctgttg

SEQ ID NO: 600265 - DNA, 25 bp, Homo sapien
cattccgcccaatctgtaccggatg

SEQ ID NO: 600266 - DNA, 25 bp, Homo sapien
cacctgtgcttatcgcctggatcta

SEQ ID NO: 600267 - DNA, 25 bp, Homo sapien
ccattgccaccagcatgcgggattc

SEQ ID NO: 600268 - DNA, 25 bp, Homo sapien
tgggatggtggtgaatgactggtgt

SEQ ID NO: 600269 - DNA, 25 bp, Homo sapien
attgccaccagcatgcgggattccc

SEQ ID NO: 600270 - DNA, 25 bp, Homo sapien
ggatggtggtgaatgactggtgtgc

SEQ ID NO: 600271 - DNA, 25 bp, Homo sapien
atctcattcgtcagcactccactcc

SEQ ID NO: 600272 - DNA, 25 bp, Homo sapien
ctcttctagtccacccgtcttcagc

SEQ ID NO: 600273 - DNA, 25 bp, Homo sapien
ttctgtccctcaaggcacagctgga

SEQ ID NO: 600274 - DNA, 25 bp, Homo sapien
gctgggctccagacatggacttctg

SEQ ID NO: 600275 - DNA, 25 bp, Homo sapien
tttctccagcctcggtctggccgca

SEQ ID NO: 600276 - DNA, 25 bp, Homo sapien
ccgtctctggctgcgctctttctcc

SEQ ID NO: 600277 - DNA, 25 bp, Homo sapien
tctttctccagcctcggtctggccg

SEQ ID NO: 600278 - DNA, 25 bp, Homo sapien
tctctggctgcgctctttctccagc

SEQ ID NO: 600279 - DNA, 25 bp, Homo sapien
ggccgtgcgagaggcacatcgtgga

SEQ ID NO: 600280 - DNA, 25 bp, Homo sapien
gtgatagaggccgtgcgagaggcac

SEQ ID NO: 600281 - DNA, 25 bp, Homo sapien
gagaggcacatcgtggaagccaacc

SEQ ID NO: 600282 - DNA, 25 bp, Homo sapien
gagtgagtgatagaggccgtgcgag

SEQ ID NO: 600283 - DNA, 25 bp, Homo sapien
attctacaaaatgtgggccaagttc

SEQ ID NO: 600284 - DNA, 25 bp, Homo sapien
caagttcatcctgtccaagtgtgca

SEQ ID NO: 600285 - DNA, 25 bp, Homo sapien
gagaacccggggcttttgcagattc

SEQ ID NO: 600286 - DNA, 25 bp, Homo sapien
caaaatgtgggccaagttcatcctg

SEQ ID NO: 600287 - DNA, 25 bp, Homo sapien
cctgaactttgaggagttatgggag

SEQ ID NO: 600288 - DNA, 25 bp, Homo sapien
aatcacagcgcctggtgtatcctga

SEQ ID NO: 600289 - DNA, 25 bp, Homo sapien
gaggagggtgaatgccgaaggagga

SEQ ID NO: 600290 - DNA, 25 bp, Homo sapien
cattcaggccaattatggggaaacc

SEQ ID NO: 600291 - DNA, 25 bp, Homo sapien
ctgggttgggagtgcaaggagcatt

SEQ ID NO: 600292 - DNA, 25 bp, Homo sapien
agcttccagaaggagactcggagca

SEQ ID NO: 600293 - DNA, 25 bp, Homo sapien
gttgggagtgcaaggagcattcaca

SEQ ID NO: 600294 - DNA, 25 bp, Homo sapien
tgtcttgggtatagagatcctgaag

SEQ ID NO: 600295 - DNA, 25 bp, Homo sapien
aaacttgcctgagatggtggacgca

SEQ ID NO: 600296 - DNA, 25 bp, Homo sapien
tggcttagttgtagcagacccagac

SEQ ID NO: 600297 - DNA, 25 bp, Homo sapien
tattccagggacttagaaacttgcc

SEQ ID NO: 600298 - DNA, 25 bp, Homo sapien
tgttcaggccaagatacagccagcc

SEQ ID NO: 600299 - DNA, 25 bp, Homo sapien
tagaaatatcagtgtctgggccctg

SEQ ID NO: 600300 - DNA, 25 bp, Homo sapien
tggttcaacaagtcacccgaaggtg

SEQ ID NO: 600301 - DNA, 25 bp, Homo sapien
gcatgtgagtcacctagaggaccta

SEQ ID NO: 600302 - DNA, 25 bp, Homo sapien
tacaattcagtaggagtgctgcctg

SEQ ID NO: 600303 - DNA, 25 bp, Homo sapien
tgtggttacctccagatttaatgca

SEQ ID NO: 600304 - DNA, 25 bp, Homo sapien
tctttttgggtagtgcaatgcctac

SEQ ID NO: 600305 - DNA, 25 bp, Homo sapien
ttaatgcaagcatgacccctcctgg

SEQ ID NO: 600306 - DNA, 25 bp, Homo sapien
tgttaaaatagggtctcctgattcc

SEQ ID NO: 600307 - DNA, 25 bp, Homo sapien
tcaggacctttcagctctcctttac

SEQ ID NO: 600308 - DNA, 25 bp, Homo sapien
agacacacctacctttggcttcaga

SEQ ID NO: 600309 - DNA, 25 bp, Homo sapien
acacctacctttggcttcagatgtc

SEQ ID NO: 600310 - DNA, 25 bp, Homo sapien
aagagctcaggacctttcagctctc

SEQ ID NO: 600311 - DNA, 25 bp, Homo sapien
gagctgtcactaagccaggcccttc

SEQ ID NO: 600312 - DNA, 25 bp, Homo sapien
ttggcaaaagaggcagcacttgctg

SEQ ID NO: 600313 - DNA, 25 bp, Homo sapien
cagagctgtcactaagccaggccct

SEQ ID NO: 600314 - DNA, 25 bp, Homo sapien
tttggcaaaagaggcagcacttgct

SEQ ID NO: 600315 - DNA, 25 bp, Homo sapien
gtctggtgtggggagctcttctttc

SEQ ID NO: 600316 - DNA, 25 bp, Homo sapien
ctctgtacaccgcagtagtttggtg

SEQ ID NO: 600317 - DNA, 25 bp, Homo sapien
agtacttctctgtacaccgcagtag

SEQ ID NO: 600318 - DNA, 25 bp, Homo sapien
taactcttgaagtacttctctgtac

SEQ ID NO: 600319 - DNA, 25 bp, Homo sapien
acaccgcagtagtttggtgtcaggg

SEQ ID NO: 600320 - DNA, 25 bp, Homo sapien
tgttagatgggataaggattcttgg

SEQ ID NO: 600321 - DNA, 25 bp, Homo sapien
ggataaggattcttggatttctggt

SEQ ID NO: 600322 - DNA, 25 bp, Homo sapien
ggtgtgctcatggtttatgtaggtc

SEQ ID NO: 600323 - DNA, 25 bp, Homo sapien
tatgtaggtcactcctgttagatgg

SEQ ID NO: 600324 - DNA, 25 bp, Homo sapien
tattcacttatgttgactgtcttcc

SEQ ID NO: 600325 - DNA, 25 bp, Homo sapien
ggatcacgtacatctgtctccaaag

SEQ ID NO: 600326 - DNA, 25 bp, Homo sapien
cctgtggtgcaggatcacgtacatc

SEQ ID NO: 600327 - DNA, 25 bp, Homo sapien
tgcccctttcctgaataggtgccca

SEQ ID NO: 600328 - DNA, 25 bp, Homo sapien
tagatcacgttttagtagcttgtag

SEQ ID NO: 600329 - DNA, 25 bp, Homo sapien
tggtttctttcattacagggcaaag

SEQ ID NO: 600330 - DNA, 25 bp, Homo sapien
ggaagcatttcattgcctcccagct

SEQ ID NO: 600331 - DNA, 25 bp, Homo sapien
tgattggtgcaagtatccacccgac

SEQ ID NO: 600332 - DNA, 25 bp, Homo sapien
gcctggtgcacagccgagaaaacaa

SEQ ID NO: 600333 - DNA, 25 bp, Homo sapien
gagaaaacaacagcgcgtgcgcgta

SEQ ID NO: 600334 - DNA, 25 bp, Homo sapien
tcttcacccggaaatggttattgag

SEQ ID NO: 600335 - DNA, 25 bp, Homo sapien
gcgtagcgacctctttgcgcctgcg

SEQ ID NO: 600336 - DNA, 25 bp, Homo sapien
ccctgggtcccgagctctatttgct

SEQ ID NO: 600337 - DNA, 25 bp, Homo sapien
tcttgagattccttagtcaagtttg

SEQ ID NO: 600338 - DNA, 25 bp, Homo sapien
tcttcttgagattccttagtcaagt

SEQ ID NO: 600339 - DNA, 25 bp, Homo sapien
ctctatttgctccattggggcctgg

SEQ ID NO: 600340 - DNA, 25 bp, Homo sapien
tcaacttcaaggacatgggctggga

SEQ ID NO: 600341 - DNA, 25 bp, Homo sapien
gaaccttaaggctcgctgcagtcgg

SEQ ID NO: 600342 - DNA, 25 bp, Homo sapien
tgtttggccgcaccaagaaacggga

SEQ ID NO: 600343 - DNA, 25 bp, Homo sapien
gagtacgaggctttccactgcgagg

SEQ ID NO: 600344 - DNA, 25 bp, Homo sapien
tcaggatgtagagtgcttcctccag

SEQ ID NO: 600345 - DNA, 25 bp, Homo sapien
cagcgtgaaaagtgttgttgtagag

SEQ ID NO: 600346 - DNA, 25 bp, Homo sapien
agcctatctgactattgcttctccc

SEQ ID NO: 600347 - DNA, 25 bp, Homo sapien
ttttcagctaaacttctcaggatgt

SEQ ID NO: 600348 - DNA, 25 bp, Homo sapien
acacgggggacccagggacgctgtg

SEQ ID NO: 600349 - DNA, 25 bp, Homo sapien
caagtttgacattaatattgctgac

SEQ ID NO: 600350 - DNA, 25 bp, Homo sapien
agggacgctgtgtcccagtaattaa

SEQ ID NO: 600351 - DNA, 25 bp, Homo sapien
tattgctgacaggagagggggaggt

SEQ ID NO: 600352 - DNA, 25 bp, Homo sapien
tcggctcccgcagacgcccggctag

SEQ ID NO: 600353 - DNA, 25 bp, Homo sapien
tagttgctccgcgattgagctgcgg

SEQ ID NO: 600354 - DNA, 25 bp, Homo sapien
agacgcccggctagttgctccgcga

SEQ ID NO: 600355 - DNA, 25 bp, Homo sapien
tgctccgcgattgagctgcggcagc

SEQ ID NO: 600356 - DNA, 25 bp, Homo sapien
ctggcggcagcaagaagctgaggca

SEQ ID NO: 600357 - DNA, 25 bp, Homo sapien
agcaagaagctgaggcaagcgggcc

SEQ ID NO: 600358 - DNA, 25 bp, Homo sapien
gcaagaagctgaggcaagcgggccc

SEQ ID NO: 600359 - DNA, 25 bp, Homo sapien
gcggcagcaagaagctgaggcaagc

SEQ ID NO: 600360 - DNA, 25 bp, Homo sapien
gaagctctccttcggcgccgactgg

SEQ ID NO: 600361 - DNA, 25 bp, Homo sapien
cacgagggtcgggaagctctccttc

SEQ ID NO: 600362 - DNA, 25 bp, Homo sapien
ggctactggacacgagggtcgggaa

SEQ ID NO: 600363 - DNA, 25 bp, Homo sapien
ccagcctgggattgcggctactgga

SEQ ID NO: 600364 - DNA, 25 bp, Homo sapien
gattacgtgcaaatccgccaggaca

SEQ ID NO: 600365 - DNA, 25 bp, Homo sapien
aatgggagctccagagtcgggtggc

SEQ ID NO: 600366 - DNA, 25 bp, Homo sapien
ggactgggctttcggatagattacg

SEQ ID NO: 600367 - DNA, 25 bp, Homo sapien
ccagagtcgggtggcgggtgggact

SEQ ID NO: 600368 - DNA, 25 bp, Homo sapien
tgagaagcgatacttcagcagggtc

SEQ ID NO: 600369 - DNA, 25 bp, Homo sapien
ggccgggaaagtaactcggtgcaca

SEQ ID NO: 600370 - DNA, 25 bp, Homo sapien
tcggtgcacagcgagtgcaaaaacc

SEQ ID NO: 600371 - DNA, 25 bp, Homo sapien
aaccgagaagcgaatgcagctgcgc

SEQ ID NO: 600372 - DNA, 25 bp, Homo sapien
tgctaaggatcagacagggaagaca

SEQ ID NO: 600373 - DNA, 25 bp, Homo sapien
ggaagacagcacccttactaaagac

SEQ ID NO: 600374 - DNA, 25 bp, Homo sapien
aagacagcacccttactaaagacca

SEQ ID NO: 600375 - DNA, 25 bp, Homo sapien
gacagcacccttactaaagaccaac

SEQ ID NO: 600376 - DNA, 25 bp, Homo sapien
ggtgctatgaaatgttggctctgtt

SEQ ID NO: 600377 - DNA, 25 bp, Homo sapien
atgaagctcaatccctctctgctgg

SEQ ID NO: 600378 - DNA, 25 bp, Homo sapien
gctggttggaggcacagatcttcca

SEQ ID NO: 600379 - DNA, 25 bp, Homo sapien
gaaactattctcttatcccaggatt

SEQ ID NO: 600380 - DNA, 25 bp, Homo sapien
ggtctctaaccattgccatgccact

SEQ ID NO: 600381 - DNA, 25 bp, Homo sapien
tctctaaccattgccatgccacttc

SEQ ID NO: 600382 - DNA, 25 bp, Homo sapien
tctaaccattgccatgccacttcaa

SEQ ID NO: 600383 - DNA, 25 bp, Homo sapien
ccagagggtgttcacgcccagcagg

SEQ ID NO: 600384 - DNA, 25 bp, Homo sapien
caccaggtggtaggcccacaggtcc

SEQ ID NO: 600385 - DNA, 25 bp, Homo sapien
tcatgttgttcaacccagggcttct

SEQ ID NO: 600386 - DNA, 25 bp, Homo sapien
gcttcatgttgttcaacccagggct

SEQ ID NO: 600387 - DNA, 25 bp, Homo sapien
ttcatgttgttcaacccagggcttc

SEQ ID NO: 600388 - DNA, 25 bp, Homo sapien
cttcatgttgttcaacccagggctt

SEQ ID NO: 600389 - DNA, 25 bp, Homo sapien
tcctcacaagggttgcttgtctctg

SEQ ID NO: 600390 - DNA, 25 bp, Homo sapien
cagcttcctcacaagggttgcttgt

SEQ ID NO: 600391 - DNA, 25 bp, Homo sapien
gcttcctcacaagggttgcttgtct

SEQ ID NO: 600392 - DNA, 25 bp, Homo sapien
ctcacaagggttgcttgtctctgct

SEQ ID NO: 600393 - DNA, 25 bp, Homo sapien
ttggcaccagcttcggtactgcagc

SEQ ID NO: 600394 - DNA, 25 bp, Homo sapien
ggcaccagcttcggtactgcagcac

SEQ ID NO: 600395 - DNA, 25 bp, Homo sapien
ctcttggcaccagcttcggtactgc

SEQ ID NO: 600396 - DNA, 25 bp, Homo sapien
tcttggcaccagcttcggtactgca

SEQ ID NO: 600397 - DNA, 25 bp, Homo sapien
cctggactgcattgagggtgctcaa

SEQ ID NO: 600398 - DNA, 25 bp, Homo sapien
gcagacatgctgtaggctcgcaaag

SEQ ID NO: 600399 - DNA, 25 bp, Homo sapien
tatcagtgtgataaacctctcagag

SEQ ID NO: 600400 - DNA, 25 bp, Homo sapien
ttggaatctgacaggccagctaggt

SEQ ID NO: 600401 - DNA, 25 bp, Homo sapien
ttaacagtgagttcgggccagatgc

SEQ ID NO: 600402 - DNA, 25 bp, Homo sapien
aacagtgagttcgggccagatgcag

SEQ ID NO: 600403 - DNA, 25 bp, Homo sapien
cttaacagtgagttcgggccagatg

SEQ ID NO: 600404 - DNA, 25 bp, Homo sapien
taacagtgagttcgggccagatgca

SEQ ID NO: 600405 - DNA, 25 bp, Homo sapien
gctcctcctccaatcggaccagcag

SEQ ID NO: 600406 - DNA, 25 bp, Homo sapien
cctcctccaatcggaccagcagctc

SEQ ID NO: 600407 - DNA, 25 bp, Homo sapien
tcctcctccaatcggaccagcagct

SEQ ID NO: 600408 - DNA, 25 bp, Homo sapien
ctcctcctccaatcggaccagcagc

SEQ ID NO: 600409 - DNA, 25 bp, Homo sapien
tccatgtgcagtcgaagctgggtgt

SEQ ID NO: 600410 - DNA, 25 bp, Homo sapien
agtcgaagctgggtgttcacctctg

SEQ ID NO: 600411 - DNA, 25 bp, Homo sapien
tccacatcttccctaagggctttat

SEQ ID NO: 600412 - DNA, 25 bp, Homo sapien
agggctttattcaccacgtcagctt

SEQ ID NO: 600413 - DNA, 25 bp, Homo sapien
caacctcccgccatagactgagaag

SEQ ID NO: 600414 - DNA, 25 bp, Homo sapien
atttccaggaagtggcgtcggaatg

SEQ ID NO: 600415 - DNA, 25 bp, Homo sapien
ggcgaccgtgctcccctttcaggta

SEQ ID NO: 600416 - DNA, 25 bp, Homo sapien
gtggcgtcggaatgtcacaacctcc

SEQ ID NO: 600417 - DNA, 25 bp, Homo sapien
tacaagcaaggaaaacagcagactc

SEQ ID NO: 600418 - DNA, 25 bp, Homo sapien
ctgagtacaagcaaggaaaacagca

SEQ ID NO: 600419 - DNA, 25 bp, Homo sapien
agtacaagcaaggaaaacagcagac

SEQ ID NO: 600420 - DNA, 25 bp, Homo sapien
caagcaaggaaaacagcagactcca

SEQ ID NO: 600421 - DNA, 25 bp, Homo sapien
cagtcaagcgcagacaacaggtcaa

SEQ ID NO: 600422 - DNA, 25 bp, Homo sapien
tcttcagctgtattaactcctggct

SEQ ID NO: 600423 - DNA, 25 bp, Homo sapien
gaccctgaaagcctcacatgctcag

SEQ ID NO: 600424 - DNA, 25 bp, Homo sapien
tcttccagatccgttgggttcccga

SEQ ID NO: 600425 - DNA, 25 bp, Homo sapien
tcttgaagtcaagcaccctgaagcc

SEQ ID NO: 600426 - DNA, 25 bp, Homo sapien
tccaggcctcgcttgatcttgaagt

SEQ ID NO: 600427 - DNA, 25 bp, Homo sapien
catctcaaggctggaacacgtgttt

SEQ ID NO: 600428 - DNA, 25 bp, Homo sapien
cagaattgcacttgggatagtccca

SEQ ID NO: 600429 - DNA, 25 bp, Homo sapien
agaagagcatagcactgtcaccaga

SEQ ID NO: 600430 - DNA, 25 bp, Homo sapien
acatgatgctatagccttgaagtgg

SEQ ID NO: 600431 - DNA, 25 bp, Homo sapien
tggacagagctacgatgcagcacac

SEQ ID NO: 600432 - DNA, 25 bp, Homo sapien
gtctgcactccctgaataccacatg

SEQ ID NO: 600433 - DNA, 25 bp, Homo sapien
caacagagcagagagctcggtcacc

SEQ ID NO: 600434 - DNA, 25 bp, Homo sapien
tcaacagagcagagagctcggtcac

SEQ ID NO: 600435 - DNA, 25 bp, Homo sapien
ggtcaacagagcagagagctcggtc

SEQ ID NO: 600436 - DNA, 25 bp, Homo sapien
tgggtcaacagagcagagagctcgg

SEQ ID NO: 600437 - DNA, 25 bp, Homo sapien
aactcctttccagagcaaaggatca

SEQ ID NO: 600438 - DNA, 25 bp, Homo sapien
agcccacgcccaactcctttccaga

SEQ ID NO: 600439 - DNA, 25 bp, Homo sapien
ctttccagagcaaaggatcatgtac

SEQ ID NO: 600440 - DNA, 25 bp, Homo sapien
ctcctttccagagcaaaggatcatg

SEQ ID NO: 600441 - DNA, 25 bp, Homo sapien
tttttagctttagaggatttcatca

SEQ ID NO: 600442 - DNA, 25 bp, Homo sapien
gctttagaggatttcatcatggaat

SEQ ID NO: 600443 - DNA, 25 bp, Homo sapien
tgcactatctgtccataaagcacaa

SEQ ID NO: 600444 - DNA, 25 bp, Homo sapien
tattttttagctttagaggatttca

SEQ ID NO: 600445 - DNA, 25 bp, Homo sapien
tgagccccatggatattctgaattg

SEQ ID NO: 600446 - DNA, 25 bp, Homo sapien
ttatctgagccccatggatattctg

SEQ ID NO: 600447 - DNA, 25 bp, Homo sapien
ccatggatattctgaattggcaagt

SEQ ID NO: 600448 - DNA, 25 bp, Homo sapien
gccccatggatattctgaattggca

SEQ ID NO: 600449 - DNA, 25 bp, Homo sapien
tccttgatcacctgctgtaaagaca

SEQ ID NO: 600450 - DNA, 25 bp, Homo sapien
tgctgtaaagacaacttctcctctt

SEQ ID NO: 600451 - DNA, 25 bp, Homo sapien
cctcttgcgcattcctactaagaga

SEQ ID NO: 600452 - DNA, 25 bp, Homo sapien
tctcctcttgcgcattcctactaag

SEQ ID NO: 600453 - DNA, 25 bp, Homo sapien
ctgggagaagatactagagtccaat

SEQ ID NO: 600454 - DNA, 25 bp, Homo sapien
cagagccttgggctatattgtcccc

SEQ ID NO: 600455 - DNA, 25 bp, Homo sapien
caattccaaagagttctcatgacca

SEQ ID NO: 600456 - DNA, 25 bp, Homo sapien
gccttgggctatattgtccccttct

SEQ ID NO: 600457 - DNA, 25 bp, Homo sapien
actgaacgcaccagagtaagagcct

SEQ ID NO: 600458 - DNA, 25 bp, Homo sapien
tccgagtcagcactgaacgcaccag

SEQ ID NO: 600459 - DNA, 25 bp, Homo sapien
ggcgtctccgagtcagcactgaacg

SEQ ID NO: 600460 - DNA, 25 bp, Homo sapien
gcacagcctggcgtctccgagtcag

SEQ ID NO: 600461 - DNA, 25 bp, Homo sapien
gcaaaggagggatgtcagaaccccg

SEQ ID NO: 600462 - DNA, 25 bp, Homo sapien
atgtcagaaccccgaaagtggggct

SEQ ID NO: 600463 - DNA, 25 bp, Homo sapien
aggagggatgtcagaaccccgaaag

SEQ ID NO: 600464 - DNA, 25 bp, Homo sapien
agggatgtcagaaccccgaaagtgg

SEQ ID NO: 600465 - DNA, 25 bp, Homo sapien
ttgctgagagagtccacctctccct

SEQ ID NO: 600466 - DNA, 25 bp, Homo sapien
cttctgcagccgctgtctcaaggct

SEQ ID NO: 600467 - DNA, 25 bp, Homo sapien
tctgcagccgctgtctcaaggcttt

SEQ ID NO: 600468 - DNA, 25 bp, Homo sapien
ctgttgcaacaagttcacagcctct

SEQ ID NO: 600469 - DNA, 25 bp, Homo sapien
acatttacccttcgcaggcgccatg

SEQ ID NO: 600470 - DNA, 25 bp, Homo sapien
ccacatttacccttcgcaggcgcca

SEQ ID NO: 600471 - DNA, 25 bp, Homo sapien
tttacccttcgcaggcgccatgcct

SEQ ID NO: 600472 - DNA, 25 bp, Homo sapien
atttacccttcgcaggcgccatgcc

SEQ ID NO: 600473 - DNA, 25 bp, Homo sapien
gcggtcacttccgtttgctcttgcc

SEQ ID NO: 600474 - DNA, 25 bp, Homo sapien
gccagcgctgcggtcacttccgttt

SEQ ID NO: 600475 - DNA, 25 bp, Homo sapien
ggcttcccgaagagtgatcagttca

SEQ ID NO: 600476 - DNA, 25 bp, Homo sapien
tcactgagtgattctgactgtttgg

SEQ ID NO: 600477 - DNA, 25 bp, Homo sapien
gctggttcagcccaactttatctaa

SEQ ID NO: 600478 - DNA, 25 bp, Homo sapien
ggtgttttcagaactcgacagctct

SEQ ID NO: 600479 - DNA, 25 bp, Homo sapien
tttatctaacgccaaagcctcattt

SEQ ID NO: 600480 - DNA, 25 bp, Homo sapien
gcagcccgaagatcagctacttctg

SEQ ID NO: 600481 - DNA, 25 bp, Homo sapien
gcctccaggtgagtgttcttttccc

SEQ ID NO: 600482 - DNA, 25 bp, Homo sapien
tgagcctccaggtgagtgttctttt

SEQ ID NO: 600483 - DNA, 25 bp, Homo sapien
tccgccaggtcgacctgcaaagcat

SEQ ID NO: 600484 - DNA, 25 bp, Homo sapien
tcgacctgcaaagcatttctcgcct

SEQ ID NO: 600485 - DNA, 25 bp, Homo sapien
ctttgcctcctgatgtagctgctcc

SEQ ID NO: 600486 - DNA, 25 bp, Homo sapien
tgagcccctgtagttgttcagcgag

SEQ ID NO: 600487 - DNA, 25 bp, Homo sapien
tagctgctccagctgagtcgtggct

SEQ ID NO: 600488 - DNA, 25 bp, Homo sapien
tagagccgctttctctcgtactagg

SEQ ID NO: 600489 - DNA, 25 bp, Homo sapien
tccttggcttgagtgacagtttgaa

SEQ ID NO: 600490 - DNA, 25 bp, Homo sapien
gctctccagtagctccttggctgag

SEQ ID NO: 600491 - DNA, 25 bp, Homo sapien
cccttggtgacctctatcacagaat

SEQ ID NO: 600492 - DNA, 25 bp, Homo sapien
tgttgggcttcaaacagactgctct

SEQ ID NO: 600493 - DNA, 25 bp, Homo sapien
tggagtgcatcccatcccagttggg

SEQ ID NO: 600494 - DNA, 25 bp, Homo sapien
ggaatggagtgcatcccatcccagt

SEQ ID NO: 600495 - DNA, 25 bp, Homo sapien
tttcaacatctccatggaatggagt

SEQ ID NO: 600496 - DNA, 25 bp, Homo sapien
caacatctccatggaatggagtgca

SEQ ID NO: 600497 - DNA, 25 bp, Homo sapien
ctgctctgcctgactccgttcagtg

SEQ ID NO: 600498 - DNA, 25 bp, Homo sapien
tgactccgttcagtgtccagttcca

SEQ ID NO: 600499 - DNA, 25 bp, Homo sapien
gcctgactccgttcagtgtccagtt

SEQ ID NO: 600500 - DNA, 25 bp, Homo sapien
ctgcctgactccgttcagtgtccag

SEQ ID NO: 600501 - DNA, 25 bp, Homo sapien
tgcctgggtccgttcttcttccctc

SEQ ID NO: 600502 - DNA, 25 bp, Homo sapien
ctgtctgctgctcctttagcctcat

SEQ ID NO: 600503 - DNA, 25 bp, Homo sapien
tgtctgctgctcctttagcctcatt

SEQ ID NO: 600504 - DNA, 25 bp, Homo sapien
tctctgcctgggtccgttcttcttc

SEQ ID NO: 600505 - DNA, 25 bp, Homo sapien
tccaggagggatactctctccttct

SEQ ID NO: 600506 - DNA, 25 bp, Homo sapien
gtctccaggagggatactctctcct

SEQ ID NO: 600507 - DNA, 25 bp, Homo sapien
tgtcctgcctcagtcgttccagttg

SEQ ID NO: 600508 - DNA, 25 bp, Homo sapien
ctccaggagggatactctctccttc

SEQ ID NO: 600509 - DNA, 25 bp, Homo sapien
cctccttcagctcccgttgagcctc

SEQ ID NO: 600510 - DNA, 25 bp, Homo sapien
tctgcaggtccatcttatcctgcag

SEQ ID NO: 600511 - DNA, 25 bp, Homo sapien
tcctggagctgggtctgtagtatcc

SEQ ID NO: 600512 - DNA, 25 bp, Homo sapien
ggtccatcttatcctgcagcaggga

SEQ ID NO: 600513 - DNA, 25 bp, Homo sapien
tgtgttggggaaggaccatgggact

SEQ ID NO: 600514 - DNA, 25 bp, Homo sapien
cagcagggccaaggttctccctgtc

SEQ ID NO: 600515 - DNA, 25 bp, Homo sapien
ctgtcctgcaagaggaagtgggaaa

SEQ ID NO: 600516 - DNA, 25 bp, Homo sapien
ggttctccctgtcctgcaagaggaa

SEQ ID NO: 600517 - DNA, 25 bp, Homo sapien
ttaagggcatgaagaccaagatggc

SEQ ID NO: 600518 - DNA, 25 bp, Homo sapien
tttaccatagtcagtggccatttcc

SEQ ID NO: 600519 - DNA, 25 bp, Homo sapien
ctggaaaattaagggcatgaagacc

SEQ ID NO: 600520 - DNA, 25 bp, Homo sapien
tcagggtccttcgaggtttaccata

SEQ ID NO: 600521 - DNA, 25 bp, Homo sapien
gcctctgggagtcatcctgggccac

SEQ ID NO: 600522 - DNA, 25 bp, Homo sapien
cttctgaattcggttatactcctgg

SEQ ID NO: 600523 - DNA, 25 bp, Homo sapien
ctgaattcggttatactcctgggtc

SEQ ID NO: 600524 - DNA, 25 bp, Homo sapien
aattcggttatactcctgggtctct

SEQ ID NO: 600525 - DNA, 25 bp, Homo sapien
cagggcactcagctcttgttgtcga

SEQ ID NO: 600526 - DNA, 25 bp, Homo sapien
gcttcttgtaaaacaaggagtctct

SEQ ID NO: 600527 - DNA, 25 bp, Homo sapien
cagctcttgttgtcgaatagagtca

SEQ ID NO: 600528 - DNA, 25 bp, Homo sapien
ttgtcgaatagagtcagcttcttgt

SEQ ID NO: 600529 - DNA, 25 bp, Homo sapien
gctgctgctccgtgatatgagacgc

SEQ ID NO: 600530 - DNA, 25 bp, Homo sapien
ctctgtgctgcgcagtcgcagctgt

SEQ ID NO: 600531 - DNA, 25 bp, Homo sapien
tgggcccacaaggaggctcgcagct

SEQ ID NO: 600532 - DNA, 25 bp, Homo sapien
tccgtgatatgagacgcctccagct

SEQ ID NO: 600533 - DNA, 25 bp, Homo sapien
acggaaggagcagagtctcccccac

SEQ ID NO: 600534 - DNA, 25 bp, Homo sapien
cagacggaaggagcagagtctcccc

SEQ ID NO: 600535 - DNA, 25 bp, Homo sapien
ccccagacggaaggagcagagtctc

SEQ ID NO: 600536 - DNA, 25 bp, Homo sapien
ctggctcaaggccccagacggaagg

SEQ ID NO: 600537 - DNA, 25 bp, Homo sapien
tggagggcagatgctactgcctcag

SEQ ID NO: 600538 - DNA, 25 bp, Homo sapien
ggccctctcttaaagaggctcctag

SEQ ID NO: 600539 - DNA, 25 bp, Homo sapien
gtcttgatgaagcttgtggagggca

SEQ ID NO: 600540 - DNA, 25 bp, Homo sapien
cctcagcggagagagcagtcagcag

SEQ ID NO: 600541 - DNA, 25 bp, Homo sapien
ctgattctgggagagctgtctctgc

SEQ ID NO: 600542 - DNA, 25 bp, Homo sapien
tcctgattctgggagagctgtctct

SEQ ID NO: 600543 - DNA, 25 bp, Homo sapien
tcagttagacgctcttccagtttct

SEQ ID NO: 600544 - DNA, 25 bp, Homo sapien
tcagcctcagtatcagttagacgct

SEQ ID NO: 600545 - DNA, 25 bp, Homo sapien
tgggcttccattcgctgtagctctg

SEQ ID NO: 600546 - DNA, 25 bp, Homo sapien
ccgcaggcgactctgtaaggatgcc

SEQ ID NO: 600547 - DNA, 25 bp, Homo sapien
ctgtagctctgctctccgcaggcga

SEQ ID NO: 600548 - DNA, 25 bp, Homo sapien
gatgccatagtttcatgtagttcca

SEQ ID NO: 600549 - DNA, 25 bp, Homo sapien
ctctgctatgcccaggggagacgct

SEQ ID NO: 600550 - DNA, 25 bp, Homo sapien
ccaggactctgctatgcccagggga

SEQ ID NO: 600551 - DNA, 25 bp, Homo sapien
tctgctatgcccaggggagacgctg

SEQ ID NO: 600552 - DNA, 25 bp, Homo sapien
ggactctgctatgcccaggggagac

SEQ ID NO: 600553 - DNA, 25 bp, Homo sapien
gatgccgggaggactgactttctgc

SEQ ID NO: 600554 - DNA, 25 bp, Homo sapien
gctcaattctgcctgctcgaggaga

SEQ ID NO: 600555 - DNA, 25 bp, Homo sapien
cagttcctggatttgtccccgcaga

SEQ ID NO: 600556 - DNA, 25 bp, Homo sapien
tctaggtccagcgtaaggtgggtca

SEQ ID NO: 600557 - DNA, 25 bp, Homo sapien
tggtatcggagatcctggtcctgga

SEQ ID NO: 600558 - DNA, 25 bp, Homo sapien
gtagctcccttacactctgatgaag

SEQ ID NO: 600559 - DNA, 25 bp, Homo sapien
tgatgaaggccccttatctcctcct

SEQ ID NO: 600560 - DNA, 25 bp, Homo sapien
ttttagagattgttcctccattggg

SEQ ID NO: 600561 - DNA, 25 bp, Homo sapien
tggtctgcgctagggagagtgccaa

SEQ ID NO: 600562 - DNA, 25 bp, Homo sapien
ggcttgtaggaacatggctacctcc

SEQ ID NO: 600563 - DNA, 25 bp, Homo sapien
tctgtctcagggctgcctgtagccg

SEQ ID NO: 600564 - DNA, 25 bp, Homo sapien
gagtcccgctccaggacagaggctt

SEQ ID NO: 600565 - DNA, 25 bp, Homo sapien
cgatgttgaggtgctcatgatctca

SEQ ID NO: 600566 - DNA, 25 bp, Homo sapien
ggtgctcatgatctcagctttctca

SEQ ID NO: 600567 - DNA, 25 bp, Homo sapien
gatgttgaggtgctcatgatctcag

SEQ ID NO: 600568 - DNA, 25 bp, Homo sapien
tgaggtgctcatgatctcagctttc

SEQ ID NO: 600569 - DNA, 25 bp, Homo sapien
cagagcccgtctggtgagctccagt

SEQ ID NO: 600570 - DNA, 25 bp, Homo sapien
tccagagcccgtctggtgagctcca

SEQ ID NO: 600571 - DNA, 25 bp, Homo sapien
ctgggctgtgtagccgctccttctc

SEQ ID NO: 600572 - DNA, 25 bp, Homo sapien
gcccgtctggtgagctccagttcat

SEQ ID NO: 600573 - DNA, 25 bp, Homo sapien
tccattccatcaggactaggctcag

SEQ ID NO: 600574 - DNA, 25 bp, Homo sapien
cattccatcaggactaggctcagcc

SEQ ID NO: 600575 - DNA, 25 bp, Homo sapien
tctccattccatcaggactaggctc

SEQ ID NO: 600576 - DNA, 25 bp, Homo sapien
ttccatcaggactaggctcagcctc

SEQ ID NO: 600577 - DNA, 25 bp, Homo sapien
ctgctccaaggtactccgcagctgg

SEQ ID NO: 600578 - DNA, 25 bp, Homo sapien
gctggacattgtggcgctgcagcct

SEQ ID NO: 600579 - DNA, 25 bp, Homo sapien
aggtactccgcagctggacattgtg

SEQ ID NO: 600580 - DNA, 25 bp, Homo sapien
cctgctcctgtcaatctccagccgg

SEQ ID NO: 600581 - DNA, 25 bp, Homo sapien
ctgccaaggtgcaaataagaaatca

SEQ ID NO: 600582 - DNA, 25 bp, Homo sapien
agaaatcagggctcggcttggctct

SEQ ID NO: 600583 - DNA, 25 bp, Homo sapien
gccaaggtgcaaataagaaatcagg

SEQ ID NO: 600584 - DNA, 25 bp, Homo sapien
aataagaaatcagggctcggcttgg

SEQ ID NO: 600585 - DNA, 25 bp, Homo sapien
gggccgcacgcatggcctccctctt

SEQ ID NO: 600586 - DNA, 25 bp, Homo sapien
ctgcctgggccgcacgcatggcctc

SEQ ID NO: 600587 - DNA, 25 bp, Homo sapien
tgtgtgggtgaagaagccgtggcct

SEQ ID NO: 600588 - DNA, 25 bp, Homo sapien
cttcagcttcctccgttctcgctcc

SEQ ID NO: 600589 - DNA, 25 bp, Homo sapien
tctgagttcttctgtcctctcccat

SEQ ID NO: 600590 - DNA, 25 bp, Homo sapien
tgcagttcagccacacacttggcat

SEQ ID NO: 600591 - DNA, 25 bp, Homo sapien
cacacttggcatctgagttcttctg

SEQ ID NO: 600592 - DNA, 25 bp, Homo sapien
ctgcagttcagccacacacttggca

SEQ ID NO: 600593 - DNA, 25 bp, Homo sapien
tgcttccgctccaaagtcagctgag

SEQ ID NO: 600594 - DNA, 25 bp, Homo sapien
tcagggactcatccagcctgcgggt

SEQ ID NO: 600595 - DNA, 25 bp, Homo sapien
ggtgatgtagtcctgcttctgcttc

SEQ ID NO: 600596 - DNA, 25 bp, Homo sapien
tagctcacggctggtctgtgctgag

SEQ ID NO: 600597 - DNA, 25 bp, Homo sapien
gcggcttgggtagtgctggggctgg

SEQ ID NO: 600598 - DNA, 25 bp, Homo sapien
tgcaatttgcctcattcccaggtga

SEQ ID NO: 600599 - DNA, 25 bp, Homo sapien
cctctgggtgattccatagggagca

SEQ ID NO: 600600 - DNA, 25 bp, Homo sapien
tacatgtccctcagccagggcaagg

SEQ ID NO: 600601 - DNA, 25 bp, Homo sapien
ctagatgagaggcagtacatgtccc

SEQ ID NO: 600602 - DNA, 25 bp, Homo sapien
agtctacacttgaactgaaggccag

SEQ ID NO: 600603 - DNA, 25 bp, Homo sapien
ggaagatcatccacaagctcgagtg

SEQ ID NO: 600604 - DNA, 25 bp, Homo sapien
gaggcaatcctgctactgggcaagg

SEQ ID NO: 600605 - DNA, 25 bp, Homo sapien
cctaggccgaggtctataatggagc

SEQ ID NO: 600606 - DNA, 25 bp, Homo sapien
ttaaagcaccccgaatactcatggc

SEQ ID NO: 600607 - DNA, 25 bp, Homo sapien
catgctgtgggtgtcgaagcctcca

SEQ ID NO: 600608 - DNA, 25 bp, Homo sapien
gaagcctccagacctagtgtggact

SEQ ID NO: 600609 - DNA, 25 bp, Homo sapien
tttatcaggcggtatgaccagtggg

SEQ ID NO: 600610 - DNA, 25 bp, Homo sapien
gaaggtatcatctaccccaaggcca

SEQ ID NO: 600611 - DNA, 25 bp, Homo sapien
tcttggtttggagcacactggcagc

SEQ ID NO: 600612 - DNA, 25 bp, Homo sapien
tttgatcagcacttcagatgggccc

SEQ ID NO: 600613 - DNA, 25 bp, Homo sapien
gaatgtgagactactcctggccagc

SEQ ID NO: 600614 - DNA, 25 bp, Homo sapien
cagcctttagcagggcacccttgag

SEQ ID NO: 600615 - DNA, 25 bp, Homo sapien
tacaacatgccagctttggcacagg

SEQ ID NO: 600616 - DNA, 25 bp, Homo sapien
gaccctgggctgaacgccaagatga

SEQ ID NO: 600617 - DNA, 25 bp, Homo sapien
tgaaggactctattgggcatcgacc

SEQ ID NO: 600618 - DNA, 25 bp, Homo sapien
gatgacaagaaagtctaccaaagaa

SEQ ID NO: 600619 - DNA, 25 bp, Homo sapien
aaatgtcttaaccacgtacatgcac

SEQ ID NO: 600620 - DNA, 25 bp, Homo sapien
gcacgcaccatcattcctagctaaa

SEQ ID NO: 600621 - DNA, 25 bp, Homo sapien
tagctaaaatgtcttaaccacgtac

SEQ ID NO: 600622 - DNA, 25 bp, Homo sapien
ttacaaagtacattttctccctctg

SEQ ID NO: 600623 - DNA, 25 bp, Homo sapien
tgaacagccataacactccattagc

SEQ ID NO: 600624 - DNA, 25 bp, Homo sapien
tgtgcaatcataacctcattgaact

SEQ ID NO: 600625 - DNA, 25 bp, Homo sapien
tagcaacgatcagccctgcaatcca

SEQ ID NO: 600626 - DNA, 25 bp, Homo sapien
gccagccggcccgcccctacagact

SEQ ID NO: 600627 - DNA, 25 bp, Homo sapien
cagccggcccgcccctacagactcc

SEQ ID NO: 600628 - DNA, 25 bp, Homo sapien
ggacgccagccggcccgcccctaca

SEQ ID NO: 600629 - DNA, 25 bp, Homo sapien
acgccagccggcccgcccctacaga

SEQ ID NO: 600630 - DNA, 25 bp, Homo sapien
ctccaaagtcttggggtaggcatcg

SEQ ID NO: 600631 - DNA, 25 bp, Homo sapien
agtcttggggtaggcatcgaactgc

SEQ ID NO: 600632 - DNA, 25 bp, Homo sapien
ttggggtaggcatcgaactgcttca

SEQ ID NO: 600633 - DNA, 25 bp, Homo sapien
caaagtcttggggtaggcatcgaac

SEQ ID NO: 600634 - DNA, 25 bp, Homo sapien
gggtcagaatggcctcgaatccgct

SEQ ID NO: 600635 - DNA, 25 bp, Homo sapien
ggtcagaatggcctcgaatccgctc

SEQ ID NO: 600636 - DNA, 25 bp, Homo sapien
cgaatccgctccctcagacaccggc

SEQ ID NO: 600637 - DNA, 25 bp, Homo sapien
gcctcgaatccgctccctcagacac

SEQ ID NO: 600638 - DNA, 25 bp, Homo sapien
atgagaaggccactgacaatggtca

SEQ ID NO: 600639 - DNA, 25 bp, Homo sapien
catgagaaggccactgacaatggtc

SEQ ID NO: 600640 - DNA, 25 bp, Homo sapien
tccgtggtgaggtaatactgcagct

SEQ ID NO: 600641 - DNA, 25 bp, Homo sapien
ctccgtggtgaggtaatactgcagc

SEQ ID NO: 600642 - DNA, 25 bp, Homo sapien
gcagctcggacaggaacagtagcag

SEQ ID NO: 600643 - DNA, 25 bp, Homo sapien
tgaggtaatactgcagctcggacag

SEQ ID NO: 600644 - DNA, 25 bp, Homo sapien
tacctcagtaagacttagccccaaa

SEQ ID NO: 600645 - DNA, 25 bp, Homo sapien
tcagtaagacttagccccaaacctc

SEQ ID NO: 600646 - DNA, 25 bp, Homo sapien
gggcagcgctacctcagtaagactt

SEQ ID NO: 600647 - DNA, 25 bp, Homo sapien
gcgctacctcagtaagacttagccc

SEQ ID NO: 600648 - DNA, 25 bp, Homo sapien
aggcacaaggcatgtgcggaaaaag

SEQ ID NO: 600649 - DNA, 25 bp, Homo sapien
ttcagtttatctccccgcgacttgt

SEQ ID NO: 600650 - DNA, 25 bp, Homo sapien
catcgatgttgatcttcagtttatc

SEQ ID NO: 600651 - DNA, 25 bp, Homo sapien
tgtgcggaaaaagtacatcgatgtt

SEQ ID NO: 600652 - DNA, 25 bp, Homo sapien
gcaggaaaatcaggctaaggtactg

SEQ ID NO: 600653 - DNA, 25 bp, Homo sapien
agcaggaaaatcaggctaaggtact

SEQ ID NO: 600654 - DNA, 25 bp, Homo sapien
tgaacaggttgtgttccacatccag

SEQ ID NO: 600655 - DNA, 25 bp, Homo sapien
tgttctccggccacatccatggcat

SEQ ID NO: 600656 - DNA, 25 bp, Homo sapien
agtcgttgcttgaacaggttgtgtt

SEQ ID NO: 600657 - DNA, 25 bp, Homo sapien
agctgctgttctccggccacatcca

SEQ ID NO: 600658 - DNA, 25 bp, Homo sapien
catgccgctcagcctctgagctcac

SEQ ID NO: 600659 - DNA, 25 bp, Homo sapien
gcagataggcttgggtacatccagc

SEQ ID NO: 600660 - DNA, 25 bp, Homo sapien
tagacagttctaccaaggcaagagc

SEQ ID NO: 600661 - DNA, 25 bp, Homo sapien
aagaagcctgggtccatctagacag

SEQ ID NO: 600662 - DNA, 25 bp, Homo sapien
taccatctgcaggtattgaggacct

SEQ ID NO: 600663 - DNA, 25 bp, Homo sapien
cattaagggctgaattaagccaatg

SEQ ID NO: 600664 - DNA, 25 bp, Homo sapien
agagcattaagggctgaattaagcc

SEQ ID NO: 600665 - DNA, 25 bp, Homo sapien
gagcattaagggctgaattaagcca

SEQ ID NO: 600666 - DNA, 25 bp, Homo sapien
agcattaagggctgaattaagccaa

SEQ ID NO: 600667 - DNA, 25 bp, Homo sapien
caattccatgtggttggtactactg

SEQ ID NO: 600668 - DNA, 25 bp, Homo sapien
gaatgataaaactccccaccagagt

SEQ ID NO: 600669 - DNA, 25 bp, Homo sapien
gacaaagctagatgtgaacccaggc

SEQ ID NO: 600670 - DNA, 25 bp, Homo sapien
ggcaatctgacttgagaacctaaat

SEQ ID NO: 600671 - DNA, 25 bp, Homo sapien
caaattatgttggttccactggtgt

SEQ ID NO: 600672 - DNA, 25 bp, Homo sapien
ggctgaaagcgttggaatcaacaac

SEQ ID NO: 600673 - DNA, 25 bp, Homo sapien
actccacatccagtcctatagcaaa

SEQ ID NO: 600674 - DNA, 25 bp, Homo sapien
gcgttggaatcaacaaccatgactt

SEQ ID NO: 600675 - DNA, 25 bp, Homo sapien
tattgtatcaaactactaacttttg

SEQ ID NO: 600676 - DNA, 25 bp, Homo sapien
attgtatcaaactactaacttttgg

SEQ ID NO: 600677 - DNA, 25 bp, Homo sapien
tgtatcaaactactaacttttggag

SEQ ID NO: 600678 - DNA, 25 bp, Homo sapien
tatcaaactactaacttttggagta

SEQ ID NO: 600679 - DNA, 25 bp, Homo sapien
gatagatagtagattcttcagtgcc

SEQ ID NO: 600680 - DNA, 25 bp, Homo sapien
tagatgactgcaacctcgtgagata

SEQ ID NO: 600681 - DNA, 25 bp, Homo sapien
caaacaagccactcctaaattcctg

SEQ ID NO: 600682 - DNA, 25 bp, Homo sapien
cgtgagataccctaatcccgaatca

SEQ ID NO: 600683 - DNA, 25 bp, Homo sapien
gagcggcacgccatggtgttactca

SEQ ID NO: 600684 - DNA, 25 bp, Homo sapien
gacgcacatccgcactaagaggagg

SEQ ID NO: 600685 - DNA, 25 bp, Homo sapien
tccgagaggtgtgtggtttcgcccc

SEQ ID NO: 600686 - DNA, 25 bp, Homo sapien
ccaaacaccaaattcatgtgggaca

SEQ ID NO: 600687 - DNA, 25 bp, Homo sapien
gccagttgccgtgatacaaggacac

SEQ ID NO: 600688 - DNA, 25 bp, Homo sapien
caaccctactgagaggcccatgtgg

SEQ ID NO: 600689 - DNA, 25 bp, Homo sapien
aaagcagatcccctgctgggcgtgg

SEQ ID NO: 600690 - DNA, 25 bp, Homo sapien
ccacagctgccattggagagcagca

SEQ ID NO: 600691 - DNA, 25 bp, Homo sapien
tgaatactgacctcccgactcatga

SEQ ID NO: 600692 - DNA, 25 bp, Homo sapien
tagatcctgtcactgccaataactg

SEQ ID NO: 600693 - DNA, 25 bp, Homo sapien
tgacactgctgacactatcacgtcc

SEQ ID NO: 600694 - DNA, 25 bp, Homo sapien
caacttcaagtgtctgagtcttcaa

SEQ ID NO: 600695 - DNA, 25 bp, Homo sapien
taattccaacgtgtatgccactaac

SEQ ID NO: 600696 - DNA, 25 bp, Homo sapien
caatgactctttgagggtggcggta

SEQ ID NO: 600697 - DNA, 25 bp, Homo sapien
tgcccaatgcaaccgaggaaacaga

SEQ ID NO: 600698 - DNA, 25 bp, Homo sapien
cactgatgagaagtgactttgccca

SEQ ID NO: 600699 - DNA, 25 bp, Homo sapien
accgtcacctcgactttcccaagct

SEQ ID NO: 600700 - DNA, 25 bp, Homo sapien
tcagggtcaaacaccgtcacctcga

SEQ ID NO: 600701 - DNA, 25 bp, Homo sapien
acaccgtcacctcgactttcccaag

SEQ ID NO: 600702 - DNA, 25 bp, Homo sapien
gagtcagggtcaaacaccgtcacct

SEQ ID NO: 600703 - DNA, 25 bp, Homo sapien
gatatcttctgcctcagcaccatag

SEQ ID NO: 600704 - DNA, 25 bp, Homo sapien
tatcttctgcctcagcaccatagca

SEQ ID NO: 600705 - DNA, 25 bp, Homo sapien
ttgatatcttctgcctcagcaccat

SEQ ID NO: 600706 - DNA, 25 bp, Homo sapien
atcttctgcctcagcaccatagcag

SEQ ID NO: 600707 - DNA, 25 bp, Homo sapien
aatagtatctgggttcttgaaggcc

SEQ ID NO: 600708 - DNA, 25 bp, Homo sapien
aaggcccagcctctacggcgatatg

SEQ ID NO: 600709 - DNA, 25 bp, Homo sapien
ctctcgccggcactgctcaatagta

SEQ ID NO: 600710 - DNA, 25 bp, Homo sapien
tatgcctcccgcacatcttcacagg

SEQ ID NO: 600711 - DNA, 25 bp, Homo sapien
ccatacacctggcagccttcattct

SEQ ID NO: 600712 - DNA, 25 bp, Homo sapien
acttccaagaagccatacacctggc

SEQ ID NO: 600713 - DNA, 25 bp, Homo sapien
ggaagctcttcccaggggcaaagtg

SEQ ID NO: 600714 - DNA, 25 bp, Homo sapien
cgtgcacatgggactgctggaagct

SEQ ID NO: 600715 - DNA, 25 bp, Homo sapien
gcacatgggactgctggaagctctt

SEQ ID NO: 600716 - DNA, 25 bp, Homo sapien
ggactgctggaagctcttcccaggg

SEQ ID NO: 600717 - DNA, 25 bp, Homo sapien
tgcccaagacaaatgagcagcaggc

SEQ ID NO: 600718 - DNA, 25 bp, Homo sapien
tctaaatctccccagctagtgcaga

SEQ ID NO: 600719 - DNA, 25 bp, Homo sapien
cagtaaggtctgaaactggtatctg

SEQ ID NO: 600720 - DNA, 25 bp, Homo sapien
gcagtctggctcctcggcctgtgct

SEQ ID NO: 600721 - DNA, 25 bp, Homo sapien
ccaggctccgtgctatcatctttaa

SEQ ID NO: 600722 - DNA, 25 bp, Homo sapien
caggctccgtgctatcatctttaac

SEQ ID NO: 600723 - DNA, 25 bp, Homo sapien
aggctccgtgctatcatctttaacc

SEQ ID NO: 600724 - DNA, 25 bp, Homo sapien
ggctccgtgctatcatctttaacct

SEQ ID NO: 600725 - DNA, 25 bp, Homo sapien
caacagccctgtgagtgggtactat

SEQ ID NO: 600726 - DNA, 25 bp, Homo sapien
caaatatgacatagcccaggtgtgg

SEQ ID NO: 600727 - DNA, 25 bp, Homo sapien
tgagggcacagattgttcactactg

SEQ ID NO: 600728 - DNA, 25 bp, Homo sapien
caggtgtggcagaacctgtgctcca

SEQ ID NO: 600729 - DNA, 25 bp, Homo sapien
tgcaagccctgcatgatacggccct

SEQ ID NO: 600730 - DNA, 25 bp, Homo sapien
gctggagagcttttaagtcagatca

SEQ ID NO: 600731 - DNA, 25 bp, Homo sapien
tctcatctcatgcagagtaacggcc

SEQ ID NO: 600732 - DNA, 25 bp, Homo sapien
tgcaactgcctcctaatgggcctct

SEQ ID NO: 600733 - DNA, 25 bp, Homo sapien
agaaggcgtcattagtaggagcagc

SEQ ID NO: 600734 - DNA, 25 bp, Homo sapien
cctgcttaaggacagccagaaaggg

SEQ ID NO: 600735 - DNA, 25 bp, Homo sapien
cctcctggtcctgcttaaggacagc

SEQ ID NO: 600736 - DNA, 25 bp, Homo sapien
tagtaggagcagcactggcctcctc

SEQ ID NO: 600737 - DNA, 25 bp, Homo sapien
gccctccatggtttccatctggtac

SEQ ID NO: 600738 - DNA, 25 bp, Homo sapien
ctgccctccatggtttccatctggt

SEQ ID NO: 600739 - DNA, 25 bp, Homo sapien
tgccctccatggtttccatctggta

SEQ ID NO: 600740 - DNA, 25 bp, Homo sapien
aagtcactctcgcttaaccctcagg

SEQ ID NO: 600741 - DNA, 25 bp, Homo sapien
tatgtcgtgatcctgcttaaagaag

SEQ ID NO: 600742 - DNA, 25 bp, Homo sapien
tctgagtccggtgtggtctggtccc

SEQ ID NO: 600743 - DNA, 25 bp, Homo sapien
aaagatgtgattcctcagcgtggcc

SEQ ID NO: 600744 - DNA, 25 bp, Homo sapien
aacaccatccagagctcatccaaag

SEQ ID NO: 600745 - DNA, 25 bp, Homo sapien
ctgtaaacaacaccatccagagctc

SEQ ID NO: 600746 - DNA, 25 bp, Homo sapien
aacaacaccatccagagctcatcca

SEQ ID NO: 600747 - DNA, 25 bp, Homo sapien
taaacaacaccatccagagctcatc

SEQ ID NO: 600748 - DNA, 25 bp, Homo sapien
gttcacaatgcctggatagtcctcc

SEQ ID NO: 600749 - DNA, 25 bp, Homo sapien
ctggatagtcctccccaaatgacag

SEQ ID NO: 600750 - DNA, 25 bp, Homo sapien
ggcgcagtgacattggtgtggtcca

SEQ ID NO: 600751 - DNA, 25 bp, Homo sapien
gtggtccagggggttcacaatgcct

SEQ ID NO: 600752 - DNA, 25 bp, Homo sapien
tccgtccaccttcatgtacacagtg

SEQ ID NO: 600753 - DNA, 25 bp, Homo sapien
ctctccgtccaccttcatgtacaca

SEQ ID NO: 600754 - DNA, 25 bp, Homo sapien
tctccgtccaccttcatgtacacag

SEQ ID NO: 600755 - DNA, 25 bp, Homo sapien
cgtccaccttcatgtacacagtggg

SEQ ID NO: 600756 - DNA, 25 bp, Homo sapien
ccatgtgaggacgaggcagctttca

SEQ ID NO: 600757 - DNA, 25 bp, Homo sapien
ccagtgcttggcaccgcgcaggaga

SEQ ID NO: 600758 - DNA, 25 bp, Homo sapien
gtgcctcagtcttttattcgccatg

SEQ ID NO: 600759 - DNA, 25 bp, Homo sapien
tggcaccgcgcaggagactctggta

SEQ ID NO: 600760 - DNA, 25 bp, Homo sapien
tgggtgttctcacgggggtccaggc

SEQ ID NO: 600761 - DNA, 25 bp, Homo sapien
ctgccctcagcccctcgcatcctgc

SEQ ID NO: 600762 - DNA, 25 bp, Homo sapien
tccaaagacgcaccaaggctgacct

SEQ ID NO: 600763 - DNA, 25 bp, Homo sapien
gctctccaaagacgcaccaaggctg

SEQ ID NO: 600764 - DNA, 25 bp, Homo sapien
gccttcccctccaggtgccaagtct

SEQ ID NO: 600765 - DNA, 25 bp, Homo sapien
acacagcaccgtgctagtggcctgc

SEQ ID NO: 600766 - DNA, 25 bp, Homo sapien
caccgtgctagtggcctgcactgca

SEQ ID NO: 600767 - DNA, 25 bp, Homo sapien
ccctctcctagtcttggcctcagcc

SEQ ID NO: 600768 - DNA, 25 bp, Homo sapien
cagggctagggctaggacctggctc

SEQ ID NO: 600769 - DNA, 25 bp, Homo sapien
ctgggccagggctagggctaggacc

SEQ ID NO: 600770 - DNA, 25 bp, Homo sapien
gacctggctccagccaccatcagcc

SEQ ID NO: 600771 - DNA, 25 bp, Homo sapien
gggctagggctaggacctggctcca

SEQ ID NO: 600772 - DNA, 25 bp, Homo sapien
gcaaccttctcatgtctggtcacag

SEQ ID NO: 600773 - DNA, 25 bp, Homo sapien
ttggtcgcccaacagcccattggca

SEQ ID NO: 600774 - DNA, 25 bp, Homo sapien
cgggaaggccttggtcgcccaacag

SEQ ID NO: 600775 - DNA, 25 bp, Homo sapien
acagcccattggcaaccttctcatg

SEQ ID NO: 600776 - DNA, 25 bp, Homo sapien
tcaccatcatgggcgagagctcata

SEQ ID NO: 600777 - DNA, 25 bp, Homo sapien
ttctccgtcagcttcaccatcatgg

SEQ ID NO: 600778 - DNA, 25 bp, Homo sapien
accatcatgggcgagagctcataga

SEQ ID NO: 600779 - DNA, 25 bp, Homo sapien
tcatgggcgagagctcatagaggac

SEQ ID NO: 600780 - DNA, 25 bp, Homo sapien
ctgtgaacatgcccccaatgatggc

SEQ ID NO: 600781 - DNA, 25 bp, Homo sapien
tgaacatgcccccaatgatggcgca

SEQ ID NO: 600782 - DNA, 25 bp, Homo sapien
tgtgaacatgcccccaatgatggcg

SEQ ID NO: 600783 - DNA, 25 bp, Homo sapien
aacatgcccccaatgatggcgcaca

SEQ ID NO: 600784 - DNA, 25 bp, Homo sapien
tggctcgtgctgagtggtagatgag

SEQ ID NO: 600785 - DNA, 25 bp, Homo sapien
tttcttctggatggctcgtgctgag

SEQ ID NO: 600786 - DNA, 25 bp, Homo sapien
tcaattttcttctggatggctcgtg

SEQ ID NO: 600787 - DNA, 25 bp, Homo sapien
ggctcgtgctgagtggtagatgagc

SEQ ID NO: 600788 - DNA, 25 bp, Homo sapien
ggagacagaggaagcaccgagggtg

SEQ ID NO: 600789 - DNA, 25 bp, Homo sapien
atcaatagatttatcaacctggggc

SEQ ID NO: 600790 - DNA, 25 bp, Homo sapien
atagatttatcaacctggggctggg

SEQ ID NO: 600791 - DNA, 25 bp, Homo sapien
gagacagaggaagcaccgagggtga

SEQ ID NO: 600792 - DNA, 25 bp, Homo sapien
gaagactgcttaggagcctgtcaca

SEQ ID NO: 600793 - DNA, 25 bp, Homo sapien
atgaaaacatcgcaaggcatggtgg

SEQ ID NO: 600794 - DNA, 25 bp, Homo sapien
cacaattgtctagccaagagtgggt

SEQ ID NO: 600795 - DNA, 25 bp, Homo sapien
aagacaacattgcagctgacaccca

SEQ ID NO: 600796 - DNA, 25 bp, Homo sapien
aaacgatgacgtttcctttgtcatc

SEQ ID NO: 600797 - DNA, 25 bp, Homo sapien
catagagccacagtggcggcacaaa

SEQ ID NO: 600798 - DNA, 25 bp, Homo sapien
ccaaacgatgacgtttcctttgtca

SEQ ID NO: 600799 - DNA, 25 bp, Homo sapien
atagagccacagtggcggcacaaag

SEQ ID NO: 600800 - DNA, 25 bp, Homo sapien
ttgtcttttagccagttatacttcc

SEQ ID NO: 600801 - DNA, 25 bp, Homo sapien
tatacttcctctagtgcttggcggg

SEQ ID NO: 600802 - DNA, 25 bp, Homo sapien
ctcattcgatcagtcccagtggtat

SEQ ID NO: 600803 - DNA, 25 bp, Homo sapien
aggtgcctcattcgatcagtcccag

SEQ ID NO: 600804 - DNA, 25 bp, Homo sapien
tcatcttagataatccaatttgtta

SEQ ID NO: 600805 - DNA, 25 bp, Homo sapien
ttataacttcatcttagataatcca

SEQ ID NO: 600806 - DNA, 25 bp, Homo sapien
atgagttacgaagtgttcctccctc

SEQ ID NO: 600807 - DNA, 25 bp, Homo sapien
agaatgagttacgaagtgttcctcc

SEQ ID NO: 600808 - DNA, 25 bp, Homo sapien
cttttcggtgtgctcttcgaggcca

SEQ ID NO: 600809 - DNA, 25 bp, Homo sapien
agccgaacccctgagtgccatttca

SEQ ID NO: 600810 - DNA, 25 bp, Homo sapien
catcagcttcgagatctccattggt

SEQ ID NO: 600811 - DNA, 25 bp, Homo sapien
catttcagaccttagaaccctggaa

SEQ ID NO: 600812 - DNA, 25 bp, Homo sapien
tcaggcattaaacaccacgacaggg

SEQ ID NO: 600813 - DNA, 25 bp, Homo sapien
cacatgggctctggtatatgcacac

SEQ ID NO: 600814 - DNA, 25 bp, Homo sapien
gctccgggatagtcttcaaggtctc

SEQ ID NO: 600815 - DNA, 25 bp, Homo sapien
cgaagagtgaggtgtgtgcccacat

SEQ ID NO: 600816 - DNA, 25 bp, Homo sapien
gatggaggcagcaagacatgacctg

SEQ ID NO: 600817 - DNA, 25 bp, Homo sapien
tccagtcacttgctcataggcatag

SEQ ID NO: 600818 - DNA, 25 bp, Homo sapien
tcactacagcgtcccagtgcttggg

SEQ ID NO: 600819 - DNA, 25 bp, Homo sapien
catgaatgaatggtttcgggctcca

SEQ ID NO: 600820 - DNA, 25 bp, Homo sapien
cagtccaaggctccaggaagtcaag

SEQ ID NO: 600821 - DNA, 25 bp, Homo sapien
cagggtcttgggtcagaactgaatc

SEQ ID NO: 600822 - DNA, 25 bp, Homo sapien
tgagtcagtcttggagttaggagcc

SEQ ID NO: 600823 - DNA, 25 bp, Homo sapien
gtcagccacaaggtcaataactggt

SEQ ID NO: 600824 - DNA, 25 bp, Homo sapien
tgacgtcacctggagccgtagccat

SEQ ID NO: 600825 - DNA, 25 bp, Homo sapien
cggctgctgacgtcacagaggagcc

SEQ ID NO: 600826 - DNA, 25 bp, Homo sapien
ccggccggctgctgacgtcacagag

SEQ ID NO: 600827 - DNA, 25 bp, Homo sapien
cgtcacggagctggccgtgacgtca

SEQ ID NO: 600828 - DNA, 25 bp, Homo sapien
accccacggaccctgcgtgaagtcg

SEQ ID NO: 600829 - DNA, 25 bp, Homo sapien
gaccctgcgtgaagtcggcaggccc

SEQ ID NO: 600830 - DNA, 25 bp, Homo sapien
cccacggaccctgcgtgaagtcggc

SEQ ID NO: 600831 - DNA, 25 bp, Homo sapien
cacggaccctgcgtgaagtcggcag

SEQ ID NO: 600832 - DNA, 25 bp, Homo sapien
cctgctgcctagtcactgacgctaa

SEQ ID NO: 600833 - DNA, 25 bp, Homo sapien
gctgcctagtcactgacgctaaagc

SEQ ID NO: 600834 - DNA, 25 bp, Homo sapien
tgctgcctagtcactgacgctaaag

SEQ ID NO: 600835 - DNA, 25 bp, Homo sapien
cccctgctgcctagtcactgacgct

SEQ ID NO: 600836 - DNA, 25 bp, Homo sapien
gtgtgcttgcgcgaggacgaggccg

SEQ ID NO: 600837 - DNA, 25 bp, Homo sapien
ctcgctgaaaaagttgggcgtgtgc

SEQ ID NO: 600838 - DNA, 25 bp, Homo sapien
gctcattgagctgttctcgctgaaa

SEQ ID NO: 600839 - DNA, 25 bp, Homo sapien
tccgctgaccggagccctttgctgt

SEQ ID NO: 600840 - DNA, 25 bp, Homo sapien
cctccgggcactcccgcgctcaagg

SEQ ID NO: 600841 - DNA, 25 bp, Homo sapien
ggcactcccgcgctcaaggcgggct

SEQ ID NO: 600842 - DNA, 25 bp, Homo sapien
actcccgcgctcaaggcgggctcac

SEQ ID NO: 600843 - DNA, 25 bp, Homo sapien
ccgggcactcccgcgctcaaggcgg

SEQ ID NO: 600844 - DNA, 25 bp, Homo sapien
cgcccctcacggttgccgcgccaca

SEQ ID NO: 600845 - DNA, 25 bp, Homo sapien
ttgtggctccgaggcgctggcttct

SEQ ID NO: 600846 - DNA, 25 bp, Homo sapien
gctccgaggcgctggcttctgctga

SEQ ID NO: 600847 - DNA, 25 bp, Homo sapien
gctgtctgccagttgtggctccgag

SEQ ID NO: 600848 - DNA, 25 bp, Homo sapien
cttgcggaccacagacctattttcc

SEQ ID NO: 600849 - DNA, 25 bp, Homo sapien
ttgcggaccacagacctattttccc

SEQ ID NO: 600850 - DNA, 25 bp, Homo sapien
accgggccgcagattgctcagtcca

SEQ ID NO: 600851 - DNA, 25 bp, Homo sapien
tttcccctcgagaccgggccgcaga

SEQ ID NO: 600852 - DNA, 25 bp, Homo sapien
ggtcgagcggctcctcagagactac

SEQ ID NO: 600853 - DNA, 25 bp, Homo sapien
tcgggagaaggtcgagcggctcctc

SEQ ID NO: 600854 - DNA, 25 bp, Homo sapien
gagcggctcctcagagactactgga

SEQ ID NO: 600855 - DNA, 25 bp, Homo sapien
cagggtcgggagaaggtcgagcggc

SEQ ID NO: 600856 - DNA, 25 bp, Homo sapien
cagaaagctcttgaacacccgcggg

SEQ ID NO: 600857 - DNA, 25 bp, Homo sapien
tgaacacccgcgggggaggcatctc

SEQ ID NO: 600858 - DNA, 25 bp, Homo sapien
tcagaaagctcttgaacacccgcgg

SEQ ID NO: 600859 - DNA, 25 bp, Homo sapien
acacccgcgggggaggcatctcctg

SEQ ID NO: 600860 - DNA, 25 bp, Homo sapien
gagagggtcggctaggataattgga

SEQ ID NO: 600861 - DNA, 25 bp, Homo sapien
tcagcctgcgtggtgtccgggttca

SEQ ID NO: 600862 - DNA, 25 bp, Homo sapien
ctaggaatgagttgaggctcggaga

SEQ ID NO: 600863 - DNA, 25 bp, Homo sapien
ctcagagagaactggagttcggaga

SEQ ID NO: 600864 - DNA, 25 bp, Homo sapien
ctgccagggataacaacacgctcag

SEQ ID NO: 600865 - DNA, 25 bp, Homo sapien
ctgtacatgctgaccagcacgtctc

SEQ ID NO: 600866 - DNA, 25 bp, Homo sapien
gatctgaatcggctcaagcgccagc

SEQ ID NO: 600867 - DNA, 25 bp, Homo sapien
tgactcaatcagatctgaatcggct

SEQ ID NO: 600868 - DNA, 25 bp, Homo sapien
aagcgccagcaaggttccggccctg

SEQ ID NO: 600869 - DNA, 25 bp, Homo sapien
cagctcttgccaacatgactcaatc

SEQ ID NO: 600870 - DNA, 25 bp, Homo sapien
cacagccgtgaacaggaagcggatg

SEQ ID NO: 600871 - DNA, 25 bp, Homo sapien
acacagccgtgaacaggaagcggat

SEQ ID NO: 600872 - DNA, 25 bp, Homo sapien
cagccgtgaacaggaagcggatgga

SEQ ID NO: 600873 - DNA, 25 bp, Homo sapien
gccgtgaacaggaagcggatggaac

SEQ ID NO: 600874 - DNA, 25 bp, Homo sapien
ttctccaaaggagagaccaggtaca

SEQ ID NO: 600875 - DNA, 25 bp, Homo sapien
ggagagaccaggtacagaagcccca

SEQ ID NO: 600876 - DNA, 25 bp, Homo sapien
attctccaaaggagagaccaggtac

SEQ ID NO: 600877 - DNA, 25 bp, Homo sapien
gagaccaggtacagaagccccagcc

SEQ ID NO: 600878 - DNA, 25 bp, Homo sapien
ttagagtcagcatctccttaggttc

SEQ ID NO: 600879 - DNA, 25 bp, Homo sapien
cttagagtcagcatctccttaggtt

SEQ ID NO: 600880 - DNA, 25 bp, Homo sapien
aagaagcaactttgagccccccaat

SEQ ID NO: 600881 - DNA, 25 bp, Homo sapien
caaagaagcaactttgagcccccca

SEQ ID NO: 600882 - DNA, 25 bp, Homo sapien
tctcaaagaagcaactttgagcccc

SEQ ID NO: 600883 - DNA, 25 bp, Homo sapien
ttctcaaagaagcaactttgagccc

SEQ ID NO: 600884 - DNA, 25 bp, Homo sapien
cgaacagtggacacctccttgtgga

SEQ ID NO: 600885 - DNA, 25 bp, Homo sapien
ggagcgcacgcgctcgtggtactca

SEQ ID NO: 600886 - DNA, 25 bp, Homo sapien
gtggagtttatccagctcggcctgg

SEQ ID NO: 600887 - DNA, 25 bp, Homo sapien
ctcgctgttggctgcccgaacagtg

SEQ ID NO: 600888 - DNA, 25 bp, Homo sapien
cgtgggcaccgggagaaatcccgca

SEQ ID NO: 600889 - DNA, 25 bp, Homo sapien
tgggcggagcttaagtctcaggacc

SEQ ID NO: 600890 - DNA, 25 bp, Homo sapien
ccgcagggctctgggcggagcttaa

SEQ ID NO: 600891 - DNA, 25 bp, Homo sapien
ggctctgggcggagcttaagtctca

SEQ ID NO: 600892 - DNA, 25 bp, Homo sapien
tcaaagcatagtcgggcttccgcac

SEQ ID NO: 600893 - DNA, 25 bp, Homo sapien
cacagagctcaaagcatagtcgggc

SEQ ID NO: 600894 - DNA, 25 bp, Homo sapien
ggcttccgcacaaaatcctcattca

SEQ ID NO: 600895 - DNA, 25 bp, Homo sapien
gcatagtcgggcttccgcacaaaat

SEQ ID NO: 600896 - DNA, 25 bp, Homo sapien
gctgaagcgattccagaagtaggca

SEQ ID NO: 600897 - DNA, 25 bp, Homo sapien
tgtcttctgcaggtcgatggaggct

SEQ ID NO: 600898 - DNA, 25 bp, Homo sapien
agtgttcctgtctgcgtaatcgtgg

SEQ ID NO: 600899 - DNA, 25 bp, Homo sapien
gcggccgtgcgtagttccagaagct

SEQ ID NO: 600900 - DNA, 25 bp, Homo sapien
ggcagttggatcaccacctggcctt

SEQ ID NO: 600901 - DNA, 25 bp, Homo sapien
gatgctgcagagtgatgtcgctcag

SEQ ID NO: 600902 - DNA, 25 bp, Homo sapien
ttcaaaagcccagcaattcccaggg

SEQ ID NO: 600903 - DNA, 25 bp, Homo sapien
acctggccttggtcgccttcaaaag

SEQ ID NO: 600904 - DNA, 25 bp, Homo sapien
ggtgggtgaagaatgaaaggaggaa

SEQ ID NO: 600905 - DNA, 25 bp, Homo sapien
tggtgggtgaagaatgaaaggagga

SEQ ID NO: 600906 - DNA, 25 bp, Homo sapien
ctggtgggtgaagaatgaaaggagg

SEQ ID NO: 600907 - DNA, 25 bp, Homo sapien
gcaggtggaaagtctgaatctccga

SEQ ID NO: 600908 - DNA, 25 bp, Homo sapien
acatcgaaggtgaatttccccaagg

SEQ ID NO: 600909 - DNA, 25 bp, Homo sapien
gaaagtctgaatctccgatttctca

SEQ ID NO: 600910 - DNA, 25 bp, Homo sapien
tccgatttctcaacatcgaaggtga

SEQ ID NO: 600911 - DNA, 25 bp, Homo sapien
gccccagttgcttagaatctggatc

SEQ ID NO: 600912 - DNA, 25 bp, Homo sapien
actcgatacaagcacgtgaaacggg

SEQ ID NO: 600913 - DNA, 25 bp, Homo sapien
accgtgggcacggactcgatacaag

SEQ ID NO: 600914 - DNA, 25 bp, Homo sapien
gggcacggactcgatacaagcacgt

SEQ ID NO: 600915 - DNA, 25 bp, Homo sapien
tgccctctgccccctctgaggttcg

SEQ ID NO: 600916 - DNA, 25 bp, Homo sapien
cctctgccccctctgaggttcgcac

SEQ ID NO: 600917 - DNA, 25 bp, Homo sapien
ttaatggggcccctgtgcactgccc

SEQ ID NO: 600918 - DNA, 25 bp, Homo sapien
tgcactgccctctgccccctctgag

SEQ ID NO: 600919 - DNA, 25 bp, Homo sapien
tgatcccacctttgctcctgacaac

SEQ ID NO: 600920 - DNA, 25 bp, Homo sapien
tggaggctgtggcaagtcctcaatc

SEQ ID NO: 600921 - DNA, 25 bp, Homo sapien
tcctcaatcctgtgtcccagaggtc

SEQ ID NO: 600922 - DNA, 25 bp, Homo sapien
tgggccacaacccaacccttctcac

SEQ ID NO: 600923 - DNA, 25 bp, Homo sapien
gactgaacgggtgcggaactgctca

SEQ ID NO: 600924 - DNA, 25 bp, Homo sapien
tgctcaagccctgagttctccaaga

SEQ ID NO: 600925 - DNA, 25 bp, Homo sapien
tacagcttgagtaccgctttgagac

SEQ ID NO: 600926 - DNA, 25 bp, Homo sapien
tgagacagtccagaagctacgcttt

SEQ ID NO: 600927 - DNA, 25 bp, Homo sapien
tgcgtccttttacaggatgtgggag

SEQ ID NO: 600928 - DNA, 25 bp, Homo sapien
aagtctgacccactctgcgtccttt

SEQ ID NO: 600929 - DNA, 25 bp, Homo sapien
tgaccatctcattgacaaggacatc

SEQ ID NO: 600930 - DNA, 25 bp, Homo sapien
aggacatcggctccaagtctgaccc

SEQ ID NO: 600931 - DNA, 25 bp, Homo sapien
atgcagcttcgggacagatgcatgt

SEQ ID NO: 600932 - DNA, 25 bp, Homo sapien
gggagcactcgtatatccttgacca

SEQ ID NO: 600933 - DNA, 25 bp, Homo sapien
ggtcgtcttcaatcgagcatgcagc

SEQ ID NO: 600934 - DNA, 25 bp, Homo sapien
ctctcagggatggtcgtcttcaatc

SEQ ID NO: 600935 - DNA, 25 bp, Homo sapien
ggaagtttgttaatgccacactcca

SEQ ID NO: 600936 - DNA, 25 bp, Homo sapien
ccttctgtggtttggcctgtgggac

SEQ ID NO: 600937 - DNA, 25 bp, Homo sapien
gatgagctgctttacttctatgacc

SEQ ID NO: 600938 - DNA, 25 bp, Homo sapien
gggtccctgtgctgtaactctgact

SEQ ID NO: 600939 - DNA, 25 bp, Homo sapien
gagatggtcttgctctgctgcccag

SEQ ID NO: 600940 - DNA, 25 bp, Homo sapien
agtgcagtggtacagtcagctcact

SEQ ID NO: 600941 - DNA, 25 bp, Homo sapien
tggagtgcagtggtacagtcagctc

SEQ ID NO: 600942 - DNA, 25 bp, Homo sapien
gctggagtgcagtggtacagtcagc

SEQ ID NO: 600943 - DNA, 25 bp, Homo sapien
ggtatgggccaagtgtaaaatctca

SEQ ID NO: 600944 - DNA, 25 bp, Homo sapien
ggtggaaatagtcagccttgcataa

SEQ ID NO: 600945 - DNA, 25 bp, Homo sapien
taaaaacaaggatgcgtgaaagcct

SEQ ID NO: 600946 - DNA, 25 bp, Homo sapien
catcaattttaagaacactcgggaa

SEQ ID NO: 600947 - DNA, 25 bp, Homo sapien
aatgtagttcctagctttgtactcc

SEQ ID NO: 600948 - DNA, 25 bp, Homo sapien
caatgaaaattcgattaggaaactt

SEQ ID NO: 600949 - DNA, 25 bp, Homo sapien
tattcagtgtagttaaggccagtct

SEQ ID NO: 600950 - DNA, 25 bp, Homo sapien
ggccagtcttaacccactggatgaa

SEQ ID NO: 600951 - DNA, 25 bp, Homo sapien
gtgctaactgctaaggatactgttt

SEQ ID NO: 600952 - DNA, 25 bp, Homo sapien
taaagctttgctcaaagttgtgtgc

SEQ ID NO: 600953 - DNA, 25 bp, Homo sapien
tttatatgaatcacaacagtgctcg

SEQ ID NO: 600954 - DNA, 25 bp, Homo sapien
cctgcgaattttctcctaagaacta

SEQ ID NO: 600955 - DNA, 25 bp, Homo sapien
cttttgaagaggtataataccaagg

SEQ ID NO: 600956 - DNA, 25 bp, Homo sapien
gtgaagttctgacttgtagcatcaa

SEQ ID NO: 600957 - DNA, 25 bp, Homo sapien
ttctgacttgtagcatcaactttct

SEQ ID NO: 600958 - DNA, 25 bp, Homo sapien
taccaagggttgtgaagttctgact

SEQ ID NO: 600959 - DNA, 25 bp, Homo sapien
ttcggaggccttcgagcccgcggca

SEQ ID NO: 600960 - DNA, 25 bp, Homo sapien
ccgcgcagctttccccggtaagact

SEQ ID NO: 600961 - DNA, 25 bp, Homo sapien
tggctgcgttgggctccgggaagcc

SEQ ID NO: 600962 - DNA, 25 bp, Homo sapien
ctgagcgggccgacggccattttgt

SEQ ID NO: 600963 - DNA, 25 bp, Homo sapien
gccactagcccaaggtcggtcctgt

SEQ ID NO: 600964 - DNA, 25 bp, Homo sapien
tgtgcgccaacagtcgcaagcaggg

SEQ ID NO: 600965 - DNA, 25 bp, Homo sapien
taacttccgggagatcgcccgagac

SEQ ID NO: 600966 - DNA, 25 bp, Homo sapien
tcgcaagcagggactgaatatcccc

SEQ ID NO: 600967 - DNA, 25 bp, Homo sapien
catactgggctagcaccagtccagt

SEQ ID NO: 600968 - DNA, 25 bp, Homo sapien
ttttggcatactgggctagcaccag

SEQ ID NO: 600969 - DNA, 25 bp, Homo sapien
gctgtttttggcatactgggctagc

SEQ ID NO: 600970 - DNA, 25 bp, Homo sapien
ggcatactgggctagcaccagtcca

SEQ ID NO: 600971 - DNA, 25 bp, Homo sapien
ttacctacacagagcaaacctataa

SEQ ID NO: 600972 - DNA, 25 bp, Homo sapien
ctacacagagcaaacctataaaaac

SEQ ID NO: 600973 - DNA, 25 bp, Homo sapien
cctacacagagcaaacctataaaaa

SEQ ID NO: 600974 - DNA, 25 bp, Homo sapien
tacctacacagagcaaacctataaa

SEQ ID NO: 600975 - DNA, 25 bp, Homo sapien
cccgtgtgcgtgtggaggccctgca

SEQ ID NO: 600976 - DNA, 25 bp, Homo sapien
tcgccggccccgtgtgcgtgtggag

SEQ ID NO: 600977 - DNA, 25 bp, Homo sapien
gtatgcggtctgggacagtgcccac

SEQ ID NO: 600978 - DNA, 25 bp, Homo sapien
ggagcggggtatgcggtctgggaca

SEQ ID NO: 600979 - DNA, 25 bp, Homo sapien
ttcccagtgtcttgctatagctcag

SEQ ID NO: 600980 - DNA, 25 bp, Homo sapien
tccttagcaagcatgtagatcttaa

SEQ ID NO: 600981 - DNA, 25 bp, Homo sapien
gcagttactatacatcaggccattc

SEQ ID NO: 600982 - DNA, 25 bp, Homo sapien
gcagagcaactatttgagtccctca

SEQ ID NO: 600983 - DNA, 25 bp, Homo sapien
caggtcacggaaaaagcacttgatc

SEQ ID NO: 600984 - DNA, 25 bp, Homo sapien
ggtggcccgattctacaggtcacgg

SEQ ID NO: 600985 - DNA, 25 bp, Homo sapien
tacgattgagcccttaacccatggg

SEQ ID NO: 600986 - DNA, 25 bp, Homo sapien
tatgggtagcttgagacccctggga

SEQ ID NO: 600987 - DNA, 25 bp, Homo sapien
cactggcacctagaaaattacttgg

SEQ ID NO: 600988 - DNA, 25 bp, Homo sapien
cttgggatactggaggtgctaaata

SEQ ID NO: 600989 - DNA, 25 bp, Homo sapien
ttccaataatatagagtagaactct

SEQ ID NO: 600990 - DNA, 25 bp, Homo sapien
aacagtaatacctactcatgacttg

SEQ ID NO: 600991 - DNA, 25 bp, Homo sapien
ggcccgatgaatcgcttccggagcg

SEQ ID NO: 600992 - DNA, 25 bp, Homo sapien
tcgcggcccgatgaatcgcttccgg

SEQ ID NO: 600993 - DNA, 25 bp, Homo sapien
gagcgccgggcagcacttccgggag

SEQ ID NO: 600994 - DNA, 25 bp, Homo sapien
ctgcagcggcttcggaaggtgggct

SEQ ID NO: 600995 - DNA, 25 bp, Homo sapien
ctacgtctctcacggaaaacgacgg

SEQ ID NO: 600996 - DNA, 25 bp, Homo sapien
cgcgggctgggtcgctcagctctac

SEQ ID NO: 600997 - DNA, 25 bp, Homo sapien
tcagctctacgtctctcacggaaaa

SEQ ID NO: 600998 - DNA, 25 bp, Homo sapien
gggtcgctcagctctacgtctctca

SEQ ID NO: 600999 - DNA, 25 bp, Homo sapien
aggcgctggcccaagagtcgggcgg

SEQ ID NO: 601000 - DNA, 25 bp, Homo sapien
gacggaagcggtaggctgggaagtg

SEQ ID NO: 601001 - DNA, 25 bp, Homo sapien
tccaccaccctcttcgcgttccggc

SEQ ID NO: 601002 - DNA, 25 bp, Homo sapien
aaatcagtgggtagcccgactccac

SEQ ID NO: 601003 - DNA, 25 bp, Homo sapien
gaagcccattttgacacggtcgaag

SEQ ID NO: 601004 - DNA, 25 bp, Homo sapien
ttgacacggtcgaagcagcttggct

SEQ ID NO: 601005 - DNA, 25 bp, Homo sapien
gcaacccatcacgaagcccattttg

SEQ ID NO: 601006 - DNA, 25 bp, Homo sapien
catcacgaagcccattttgacacgg

SEQ ID NO: 601007 - DNA, 25 bp, Homo sapien
tgacgcttccaacctgactttacag

SEQ ID NO: 601008 - DNA, 25 bp, Homo sapien
tctacacttaaggaaacccagtctc

SEQ ID NO: 601009 - DNA, 25 bp, Homo sapien
caaagtgtgctgatcgaatttttac

SEQ ID NO: 601010 - DNA, 25 bp, Homo sapien
cttgcctaaagtcaccgaaccagta

SEQ ID NO: 601011 - DNA, 25 bp, Homo sapien
taactgccttcagtttgtgggaggc

SEQ ID NO: 601012 - DNA, 25 bp, Homo sapien
tctggtggatgtcgtattaactgcc

SEQ ID NO: 601013 - DNA, 25 bp, Homo sapien
gctaacactagtctagcaaccccta

SEQ ID NO: 601014 - DNA, 25 bp, Homo sapien
tggatattatatcttactacctggg

SEQ ID NO: 601015 - DNA, 25 bp, Homo sapien
aaaggtgccgccactctgcatcatg

SEQ ID NO: 601016 - DNA, 25 bp, Homo sapien
atcagctctcgaccccgcattccga

SEQ ID NO: 601017 - DNA, 25 bp, Homo sapien
catcccaatggccatgaatgtgcca

SEQ ID NO: 601018 - DNA, 25 bp, Homo sapien
tggccatgaatgtgccaaaggtgcc

SEQ ID NO: 601019 - DNA, 25 bp, Homo sapien
ttcttttattagtacatgggctggg

SEQ ID NO: 601020 - DNA, 25 bp, Homo sapien
ttattagtacatgggctgggattga

SEQ ID NO: 601021 - DNA, 25 bp, Homo sapien
tgggctgggattgatgggaagggac

SEQ ID NO: 601022 - DNA, 25 bp, Homo sapien
gaagggacagatgtagttggcaacc

SEQ ID NO: 601023 - DNA, 25 bp, Homo sapien
ttttcaataccagactgcagagttc

SEQ ID NO: 601024 - DNA, 25 bp, Homo sapien
tttccaaagtatctcctgctatcag

SEQ ID NO: 601025 - DNA, 25 bp, Homo sapien
catctgtgccaaaatttagttgcta

SEQ ID NO: 601026 - DNA, 25 bp, Homo sapien
ggaactggaccagcaaatgtggcct

SEQ ID NO: 601027 - DNA, 25 bp, Homo sapien
aaagggctgtttggttagcatctca

SEQ ID NO: 601028 - DNA, 25 bp, Homo sapien
taaacgtgagagtctggtaggcaaa

SEQ ID NO: 601029 - DNA, 25 bp, Homo sapien
attctgatcaattggcaagaaaggg

SEQ ID NO: 601030 - DNA, 25 bp, Homo sapien
ggaaatacaagacagctaaagggct

SEQ ID NO: 601031 - DNA, 25 bp, Homo sapien
tatgcctagctagtgattagaatgc

SEQ ID NO: 601032 - DNA, 25 bp, Homo sapien
tttcggccaggtgcggaaactatgc

SEQ ID NO: 601033 - DNA, 25 bp, Homo sapien
tatgcctagctagtgattaggatgc

SEQ ID NO: 601034 - DNA, 25 bp, Homo sapien
aactgcatagttttgatccttttaa

SEQ ID NO: 601035 - DNA, 25 bp, Homo sapien
ggccccaaagccttctcaatgagga

SEQ ID NO: 601036 - DNA, 25 bp, Homo sapien
tattcccagctgtatagtagtgtag

SEQ ID NO: 601037 - DNA, 25 bp, Homo sapien
cccattatgggctagatttgacaag

SEQ ID NO: 601038 - DNA, 25 bp, Homo sapien
ctcaagatcagggtttttcactcat

SEQ ID NO: 601039 - DNA, 25 bp, Homo sapien
tccctgagatgccaattttgagcac

SEQ ID NO: 601040 - DNA, 25 bp, Homo sapien
tatggattcctgacaatagtgtccc

SEQ ID NO: 601041 - DNA, 25 bp, Homo sapien
gattgtttgaatgtagccagctaaa

SEQ ID NO: 601042 - DNA, 25 bp, Homo sapien
tcaagttccttcagtatacaccagt

SEQ ID NO: 601043 - DNA, 25 bp, Homo sapien
actgcgttcggccctcatttcttaa

SEQ ID NO: 601044 - DNA, 25 bp, Homo sapien
ctgcgttcggccctcatttcttaat

SEQ ID NO: 601045 - DNA, 25 bp, Homo sapien
cactgcgttcggccctcatttctta

SEQ ID NO: 601046 - DNA, 25 bp, Homo sapien
caaggtgtatattgtttgatcgaaa

SEQ ID NO: 601047 - DNA, 25 bp, Homo sapien
ctgcaccccagtttttagtcgaaat

SEQ ID NO: 601048 - DNA, 25 bp, Homo sapien
tagggtagaattaaccatgcatcaa

SEQ ID NO: 601049 - DNA, 25 bp, Homo sapien
tgagttgtcaggacagttttaaacc

SEQ ID NO: 601050 - DNA, 25 bp, Homo sapien
agcagcacagcaagctctacagatg

SEQ ID NO: 601051 - DNA, 25 bp, Homo sapien
caggtacaggtttgcagattccgcc

SEQ ID NO: 601052 - DNA, 25 bp, Homo sapien
aagactattcttttacaggtacagg

SEQ ID NO: 601053 - DNA, 25 bp, Homo sapien
gctagctaagttacaggcgtcaacc

SEQ ID NO: 601054 - DNA, 25 bp, Homo sapien
ccagcacggagaaaccctatctctg

SEQ ID NO: 601055 - DNA, 25 bp, Homo sapien
agatggggtttctgccgggtgcggt

SEQ ID NO: 601056 - DNA, 25 bp, Homo sapien
tggggtttctgccgggtgcggtagc

SEQ ID NO: 601057 - DNA, 25 bp, Homo sapien
cgggtgcggtagcttacaactgtaa

SEQ ID NO: 601058 - DNA, 25 bp, Homo sapien
gcacttccagtactttaaggtcaag

SEQ ID NO: 601059 - DNA, 25 bp, Homo sapien
aactttgcagcagacgacgttcccg

SEQ ID NO: 601060 - DNA, 25 bp, Homo sapien
cagtgccatccgaggaaagattggg

SEQ ID NO: 601061 - DNA, 25 bp, Homo sapien
aaagattgggttgcctcatagcatc

SEQ ID NO: 601062 - DNA, 25 bp, Homo sapien
cagttttgcaaagtctaaatcagcg

SEQ ID NO: 601063 - DNA, 25 bp, Homo sapien
tctgaagagctgtaaacctgagttt

SEQ ID NO: 601064 - DNA, 25 bp, Homo sapien
taaatcagcgtccattccgttaagc

SEQ ID NO: 601065 - DNA, 25 bp, Homo sapien
agtgcttgagcttgccctcatggga

SEQ ID NO: 601066 - DNA, 25 bp, Homo sapien
gttagccagaattgaccttgtgatc

SEQ ID NO: 601067 - DNA, 25 bp, Homo sapien
gtgttagccagaattgaccttgtga

SEQ ID NO: 601068 - DNA, 25 bp, Homo sapien
ttagccagaattgaccttgtgatcc

SEQ ID NO: 601069 - DNA, 25 bp, Homo sapien
tgttagccagaattgaccttgtgat

SEQ ID NO: 601070 - DNA, 25 bp, Homo sapien
gcaacaaagtggttaaacacatacc

SEQ ID NO: 601071 - DNA, 25 bp, Homo sapien
atgttcttctatcaaccctgcttag

SEQ ID NO: 601072 - DNA, 25 bp, Homo sapien
gatgagaacaagttgagcagtgcca

SEQ ID NO: 601073 - DNA, 25 bp, Homo sapien
gaaatgttaccacttcgtcctcatg

SEQ ID NO: 601074 - DNA, 25 bp, Homo sapien
gccacttggggcttaggcagaaata

SEQ ID NO: 601075 - DNA, 25 bp, Homo sapien
ggccacttggggcttaggcagaaat

SEQ ID NO: 601076 - DNA, 25 bp, Homo sapien
tcaggaatggcatcggtcacaggaa

SEQ ID NO: 601077 - DNA, 25 bp, Homo sapien
ccctccaacggaaatgggcgaagat

SEQ ID NO: 601078 - DNA, 25 bp, Homo sapien
cggaaatgggcgaagatctcaggaa

SEQ ID NO: 601079 - DNA, 25 bp, Homo sapien
gatctcaggaatggcatcggtcaca

SEQ ID NO: 601080 - DNA, 25 bp, Homo sapien
gaataacaaagcatgaccagtctgt

SEQ ID NO: 601081 - DNA, 25 bp, Homo sapien
gtggtcccctaggtaaaatgactca

SEQ ID NO: 601082 - DNA, 25 bp, Homo sapien
acttcagcgtgatgaataaatgccc

SEQ ID NO: 601083 - DNA, 25 bp, Homo sapien
tgagtgacttatcgctgtaccgtgg

SEQ ID NO: 601084 - DNA, 25 bp, Homo sapien
tgtctccttcgaggcctgggccggc

SEQ ID NO: 601085 - DNA, 25 bp, Homo sapien
gtagaatggtgacctgtctccttcg

SEQ ID NO: 601086 - DNA, 25 bp, Homo sapien
cgagaggccgcggtagaatggtgac

SEQ ID NO: 601087 - DNA, 25 bp, Homo sapien
ctgtctccttcgaggcctgggccgg

SEQ ID NO: 601088 - DNA, 25 bp, Homo sapien
agtgaccgcgcccttattttccagt

SEQ ID NO: 601089 - DNA, 25 bp, Homo sapien
cgcttttggaggtctttagcgaccg

SEQ ID NO: 601090 - DNA, 25 bp, Homo sapien
gaaatcggccctgtttcagtgaccg

SEQ ID NO: 601091 - DNA, 25 bp, Homo sapien
tcagctttctcgaggtttggctcca

SEQ ID NO: 601092 - DNA, 25 bp, Homo sapien
ttttagattctctcgggcctagccg

SEQ ID NO: 601093 - DNA, 25 bp, Homo sapien
tgctctcccgcgtgggcttctctaa

SEQ ID NO: 601094 - DNA, 25 bp, Homo sapien
ttggaacccgatattcgggctgggc

SEQ ID NO: 601095 - DNA, 25 bp, Homo sapien
tcccgcgtgggcttctctaattcca

SEQ ID NO: 601096 - DNA, 25 bp, Homo sapien
gctttacaactcgatccagagcatc

SEQ ID NO: 601097 - DNA, 25 bp, Homo sapien
gagcatctatcgctaccactacctg

SEQ ID NO: 601098 - DNA, 25 bp, Homo sapien
aactcgatccagagcatctatcgct

SEQ ID NO: 601099 - DNA, 25 bp, Homo sapien
ctacctggaactcttaactaggtgg

SEQ ID NO: 601100 - DNA, 25 bp, Homo sapien
cattcagtgcagtgaagtgcagaac

SEQ ID NO: 601101 - DNA, 25 bp, Homo sapien
gcatgggttttgttccctcaggaca

SEQ ID NO: 601102 - DNA, 25 bp, Homo sapien
tcaatccgtggtgttctgcaaccag

SEQ ID NO: 601103 - DNA, 25 bp, Homo sapien
cagtgatgtctgatcctcaaaaggt

SEQ ID NO: 601104 - DNA, 25 bp, Homo sapien
catatgaatccttccataagttgta

SEQ ID NO: 601105 - DNA, 25 bp, Homo sapien
atatgaatccttccataagttgtac

SEQ ID NO: 601106 - DNA, 25 bp, Homo sapien
ctacatatgaatccttccataagtt

SEQ ID NO: 601107 - DNA, 25 bp, Homo sapien
tacatatgaatccttccataagttg

SEQ ID NO: 601108 - DNA, 25 bp, Homo sapien
tatcctttctgcaggtcacttcttc

SEQ ID NO: 601109 - DNA, 25 bp, Homo sapien
aggtcacttcttcaaccccttcatt

SEQ ID NO: 601110 - DNA, 25 bp, Homo sapien
cctggtttgtagtttgcttatcttc

SEQ ID NO: 601111 - DNA, 25 bp, Homo sapien
ctcctggtcttctgttatcctttct

SEQ ID NO: 601112 - DNA, 25 bp, Homo sapien
gaaaggtccaagacctcaacaaggc

SEQ ID NO: 601113 - DNA, 25 bp, Homo sapien
caccaagctgagtgtgagaactcag

SEQ ID NO: 601114 - DNA, 25 bp, Homo sapien
tcaccaaacttgagcatgtcagtcc

SEQ ID NO: 601115 - DNA, 25 bp, Homo sapien
cagtctgggctccacggaaagttcc

SEQ ID NO: 601116 - DNA, 25 bp, Homo sapien
ccagcagccactgtcgattggccaa

SEQ ID NO: 601117 - DNA, 25 bp, Homo sapien
tgtcgattggccaatctcaggtcac

SEQ ID NO: 601118 - DNA, 25 bp, Homo sapien
ccactgtcgattggccaatctcagg

SEQ ID NO: 601119 - DNA, 25 bp, Homo sapien
gcagccactgtcgattggccaatct

SEQ ID NO: 601120 - DNA, 25 bp, Homo sapien
ccgacagaaggactctgcgtgctct

SEQ ID NO: 601121 - DNA, 25 bp, Homo sapien
gaccaaccgacagaaggactctgcg

SEQ ID NO: 601122 - DNA, 25 bp, Homo sapien
aaggactctgcgtgctctgcaccac

SEQ ID NO: 601123 - DNA, 25 bp, Homo sapien
ctccaggaccaaccgacagaaggac

SEQ ID NO: 601124 - DNA, 25 bp, Homo sapien
aatccctcggcatccttaagaagca

SEQ ID NO: 601125 - DNA, 25 bp, Homo sapien
taggccccattaatctctccaggtt

SEQ ID NO: 601126 - DNA, 25 bp, Homo sapien
ggtgcttagcaaacatccagtttcc

SEQ ID NO: 601127 - DNA, 25 bp, Homo sapien
ttattaggtactgctcagacagacc

SEQ ID NO: 601128 - DNA, 25 bp, Homo sapien
aagaacgctgaagttgggttgagaa

SEQ ID NO: 601129 - DNA, 25 bp, Homo sapien
gaaatacagcatggaactggaagaa

SEQ ID NO: 601130 - DNA, 25 bp, Homo sapien
gctgaagttgggttgagaacaagct

SEQ ID NO: 601131 - DNA, 25 bp, Homo sapien
agacttctttgaggatttcaggtag

SEQ ID NO: 601132 - DNA, 25 bp, Homo sapien
catgcagcctggacatgaaaagtga

SEQ ID NO: 601133 - DNA, 25 bp, Homo sapien
tgcagcctggacatgaaaagtgacc

SEQ ID NO: 601134 - DNA, 25 bp, Homo sapien
tgcagtcagctctgagatgatgtca

SEQ ID NO: 601135 - DNA, 25 bp, Homo sapien
tcagctctgagatgatgtcactgca

SEQ ID NO: 601136 - DNA, 25 bp, Homo sapien
tctaatcttgattactccagcagct

SEQ ID NO: 601137 - DNA, 25 bp, Homo sapien
tgccaagtggatgcccagttcagcc

SEQ ID NO: 601138 - DNA, 25 bp, Homo sapien
taggacctgcttctaagtctcagcc

SEQ ID NO: 601139 - DNA, 25 bp, Homo sapien
tcggacaacattttgtaggacctgc

SEQ ID NO: 601140 - DNA, 25 bp, Homo sapien
ctttctcaatcctgtctcgtgtact

SEQ ID NO: 601141 - DNA, 25 bp, Homo sapien
tgcctttgaatctgaagtcacaatt

SEQ ID NO: 601142 - DNA, 25 bp, Homo sapien
agtcacaatttgaatctctcctttc

SEQ ID NO: 601143 - DNA, 25 bp, Homo sapien
ctcaatcctgtctcgtgtactcgtg

SEQ ID NO: 601144 - DNA, 25 bp, Homo sapien
catcaacggggctgcctttattctc

SEQ ID NO: 601145 - DNA, 25 bp, Homo sapien
ttcagtcatcaacggggctgccttt

SEQ ID NO: 601146 - DNA, 25 bp, Homo sapien
agtcatcaacggggctgcctttatt

SEQ ID NO: 601147 - DNA, 25 bp, Homo sapien
tttcagtcatcaacggggctgcctt

SEQ ID NO: 601148 - DNA, 25 bp, Homo sapien
caaagctgattcctcgtctgttagg

SEQ ID NO: 601149 - DNA, 25 bp, Homo sapien
gctgattcctcgtctgttaggtgga

SEQ ID NO: 601150 - DNA, 25 bp, Homo sapien
attcctcgtctgttaggtggatgct

SEQ ID NO: 601151 - DNA, 25 bp, Homo sapien
aagctgattcctcgtctgttaggtg

SEQ ID NO: 601152 - DNA, 25 bp, Homo sapien
tactgaagggctttaattaacagaa

SEQ ID NO: 601153 - DNA, 25 bp, Homo sapien
ttactgaagggctttaattaacaga

SEQ ID NO: 601154 - DNA, 25 bp, Homo sapien
cttccaacaatctcataaatgtcat

SEQ ID NO: 601155 - DNA, 25 bp, Homo sapien
taaccaatcaatgttcaaacttcca

SEQ ID NO: 601156 - DNA, 25 bp, Homo sapien
tccacatactgaatttggttaacaa

SEQ ID NO: 601157 - DNA, 25 bp, Homo sapien
ggttaacaatattccttcatgccag

SEQ ID NO: 601158 - DNA, 25 bp, Homo sapien
agggtgaaaacataaccactttcag

SEQ ID NO: 601159 - DNA, 25 bp, Homo sapien
cagggtgaaaacataaccactttca

SEQ ID NO: 601160 - DNA, 25 bp, Homo sapien
tatccaagtgatacacggaacagtg

SEQ ID NO: 601161 - DNA, 25 bp, Homo sapien
cagtgggacgacctagctttatgtg

SEQ ID NO: 601162 - DNA, 25 bp, Homo sapien
gaaacacacggcattaccactgaaa

SEQ ID NO: 601163 - DNA, 25 bp, Homo sapien
tgtcccccgatgtgatgcaatatga

SEQ ID NO: 601164 - DNA, 25 bp, Homo sapien
gaatacatgattaacgacccttggc

SEQ ID NO: 601165 - DNA, 25 bp, Homo sapien
tcatagcacctagtgtaccacctga

SEQ ID NO: 601166 - DNA, 25 bp, Homo sapien
tgtgagtcactagcaaagacataag

SEQ ID NO: 601167 - DNA, 25 bp, Homo sapien
tgactcgtctctgaacatcttgaag

SEQ ID NO: 601168 - DNA, 25 bp, Homo sapien
tgtatttttagtacatgtcagccag

SEQ ID NO: 601169 - DNA, 25 bp, Homo sapien
atttttagtacatgtcagccaggct

SEQ ID NO: 601170 - DNA, 25 bp, Homo sapien
caggcgcccaccaacactccaggct

SEQ ID NO: 601171 - DNA, 25 bp, Homo sapien
acaggcgcccaccaacactccaggc

SEQ ID NO: 601172 - DNA, 25 bp, Homo sapien
ctttttgagcatcaagttgtctttt

SEQ ID NO: 601173 - DNA, 25 bp, Homo sapien
ttttactatgggttgagcatctcaa

SEQ ID NO: 601174 - DNA, 25 bp, Homo sapien
ctgaaaaagagcgaattttactatg

SEQ ID NO: 601175 - DNA, 25 bp, Homo sapien
gtacacatatggattttgataaatg

SEQ ID NO: 601176 - DNA, 25 bp, Homo sapien
ttttttgagagacgaagtcccatta

SEQ ID NO: 601177 - DNA, 25 bp, Homo sapien
agtcccattatgttgcttaggcttg

SEQ ID NO: 601178 - DNA, 25 bp, Homo sapien
tgagtcaccattcccggcccatatc

SEQ ID NO: 601179 - DNA, 25 bp, Homo sapien
gcgtgaactgtcaaatttggcaaaa

SEQ ID NO: 601180 - DNA, 25 bp, Homo sapien
cagcggtacaatcacagcttgctgc

SEQ ID NO: 601181 - DNA, 25 bp, Homo sapien
gctaaaactatagacacacaccacc

SEQ ID NO: 601182 - DNA, 25 bp, Homo sapien
tgagtagctaaaactatagacacac

SEQ ID NO: 601183 - DNA, 25 bp, Homo sapien
tgcagcggtacaatcacagcttgct

SEQ ID NO: 601184 - DNA, 25 bp, Homo sapien
ctgcgtgttggtgaacacagagctg

SEQ ID NO: 601185 - DNA, 25 bp, Homo sapien
cactgcgtgttggtgaacacagagc

SEQ ID NO: 601186 - DNA, 25 bp, Homo sapien
cagagctgctggtccacaaggtctc

SEQ ID NO: 601187 - DNA, 25 bp, Homo sapien
agctgctggtccacaaggtctccat

SEQ ID NO: 601188 - DNA, 25 bp, Homo sapien
ggatgacaggccctacgttacaaca

SEQ ID NO: 601189 - DNA, 25 bp, Homo sapien
cacagcaactggcagaggatgacag

SEQ ID NO: 601190 - DNA, 25 bp, Homo sapien
cctacgttacaacacacagtagact

SEQ ID NO: 601191 - DNA, 25 bp, Homo sapien
tattaagatgcatgatcacagcaac

SEQ ID NO: 601192 - DNA, 25 bp, Homo sapien
tgcctcccggaaggggaactggata

SEQ ID NO: 601193 - DNA, 25 bp, Homo sapien
ctgtttttaaatgcgtgggctacct

SEQ ID NO: 601194 - DNA, 25 bp, Homo sapien
ctacctcgggaaggaggatcaagta

SEQ ID NO: 601195 - DNA, 25 bp, Homo sapien
taaatgcgtgggctacctcgggaag

SEQ ID NO: 601196 - DNA, 25 bp, Homo sapien
gctcaaaaatattaacaaaagacat

SEQ ID NO: 601197 - DNA, 25 bp, Homo sapien
ttacttgctcaaaaatattaacaaa

SEQ ID NO: 601198 - DNA, 25 bp, Homo sapien
cttacttgctcaaaaatattaacaa

SEQ ID NO: 601199 - DNA, 25 bp, Homo sapien
cttgctcaaaaatattaacaaaaga

SEQ ID NO: 601200 - DNA, 25 bp, Homo sapien
caatgtcttctatgtgagctggata

SEQ ID NO: 601201 - DNA, 25 bp, Homo sapien
ccaacgcttgaaatggatgagtact

SEQ ID NO: 601202 - DNA, 25 bp, Homo sapien
ctctaaagggcgtaaataaggactg

SEQ ID NO: 601203 - DNA, 25 bp, Homo sapien
tcatcataacgatggttccaacgct

SEQ ID NO: 601204 - DNA, 25 bp, Homo sapien
agaacttcccagatttgttactcac

SEQ ID NO: 601205 - DNA, 25 bp, Homo sapien
tactacagaacttcccagatttgtt

SEQ ID NO: 601206 - DNA, 25 bp, Homo sapien
acagaacttcccagatttgttactc

SEQ ID NO: 601207 - DNA, 25 bp, Homo sapien
ttgcatactacagaacttcccagat

SEQ ID NO: 601208 - DNA, 25 bp, Homo sapien
aaaacgacaatcagaccagcaagca

SEQ ID NO: 601209 - DNA, 25 bp, Homo sapien
gcaagcaaggacctgctcatttatt

SEQ ID NO: 601210 - DNA, 25 bp, Homo sapien
tggccgggtaaaaacgacaatcaga

SEQ ID NO: 601211 - DNA, 25 bp, Homo sapien
aagcaaggacctgctcatttatttg

SEQ ID NO: 601212 - DNA, 25 bp, Homo sapien
tacactgaaacagcaactgggaaca

SEQ ID NO: 601213 - DNA, 25 bp, Homo sapien
tagaaatgcaagttaccagtcccac

SEQ ID NO: 601214 - DNA, 25 bp, Homo sapien
cagtcccacctcagatacactgaaa

SEQ ID NO: 601215 - DNA, 25 bp, Homo sapien
gcaactcctgggaactcattagaaa

SEQ ID NO: 601216 - DNA, 25 bp, Homo sapien
tactccatcataaaatttcacagtg

SEQ ID NO: 601217 - DNA, 25 bp, Homo sapien
ctgatctttggaaaaagctttgaca

SEQ ID NO: 601218 - DNA, 25 bp, Homo sapien
atctttggaaaaagctttgacatga

SEQ ID NO: 601219 - DNA, 25 bp, Homo sapien
tgatctttggaaaaagctttgacat

SEQ ID NO: 601220 - DNA, 25 bp, Homo sapien
gatctttggaaaaagctttgacatg

SEQ ID NO: 601221 - DNA, 25 bp, Homo sapien
tattcataacacaaagcacaaaacc

SEQ ID NO: 601222 - DNA, 25 bp, Homo sapien
actacaatgttagcattattcataa

SEQ ID NO: 601223 - DNA, 25 bp, Homo sapien
cattattcataacacaaagcacaaa

SEQ ID NO: 601224 - DNA, 25 bp, Homo sapien
ttgaggaaacaaaactacaatgtta

SEQ ID NO: 601225 - DNA, 25 bp, Homo sapien
cttttcagaacagattaactttcct

SEQ ID NO: 601226 - DNA, 25 bp, Homo sapien
tactctctgtcattttcggaaatgt

SEQ ID NO: 601227 - DNA, 25 bp, Homo sapien
taaacttctctcgtttatcaggaga

SEQ ID NO: 601228 - DNA, 25 bp, Homo sapien
atgaaagacttttgtgatctgtttc

SEQ ID NO: 601229 - DNA, 25 bp, Homo sapien
aatgtcattttcaggtttcttatcc

SEQ ID NO: 601230 - DNA, 25 bp, Homo sapien
tgtcattttcaggtttcttatccac

SEQ ID NO: 601231 - DNA, 25 bp, Homo sapien
atgtcattttcaggtttcttatcca

SEQ ID NO: 601232 - DNA, 25 bp, Homo sapien
tcaagttttcttgtggactcttcac

SEQ ID NO: 601233 - DNA, 25 bp, Homo sapien
ttccctcaagttttcttgtggactc

SEQ ID NO: 601234 - DNA, 25 bp, Homo sapien
ccctcaagttttcttgtggactctt

SEQ ID NO: 601235 - DNA, 25 bp, Homo sapien
ctcaagttttcttgtggactcttca

SEQ ID NO: 601236 - DNA, 25 bp, Homo sapien
ctatggaagggggtctgcctcgttt

SEQ ID NO: 601237 - DNA, 25 bp, Homo sapien
agctatggaagggggtctgcctcgt

SEQ ID NO: 601238 - DNA, 25 bp, Homo sapien
gctatggaagggggtctgcctcgtt

SEQ ID NO: 601239 - DNA, 25 bp, Homo sapien
tatgctagttaacagtcaatgtttc

SEQ ID NO: 601240 - DNA, 25 bp, Homo sapien
gggagactatgctagttaacagtca

SEQ ID NO: 601241 - DNA, 25 bp, Homo sapien
tagttaacagtcaatgtttcaggca

SEQ ID NO: 601242 - DNA, 25 bp, Homo sapien
aattcttgggagactatgctagtta

SEQ ID NO: 601243 - DNA, 25 bp, Homo sapien
ttggttgcaaagtttgagagtttga

SEQ ID NO: 601244 - DNA, 25 bp, Homo sapien
ttctcagttccaatgttattggttg

SEQ ID NO: 601245 - DNA, 25 bp, Homo sapien
tcttctcagttccaatgttattggt

SEQ ID NO: 601246 - DNA, 25 bp, Homo sapien
tggttgcaaagtttgagagtttgaa

SEQ ID NO: 601247 - DNA, 25 bp, Homo sapien
ttgtcaagccgaggacgttttaatg

SEQ ID NO: 601248 - DNA, 25 bp, Homo sapien
tcaagccgaggacgttttaatggga

SEQ ID NO: 601249 - DNA, 25 bp, Homo sapien
tgtcaagccgaggacgttttaatgg

SEQ ID NO: 601250 - DNA, 25 bp, Homo sapien
tgaatttttgtcaagccgaggacgt

SEQ ID NO: 601251 - DNA, 25 bp, Homo sapien
atcaaatgtgatttatggatatgga

SEQ ID NO: 601252 - DNA, 25 bp, Homo sapien
ccacagaacccaacattagtacagt

SEQ ID NO: 601253 - DNA, 25 bp, Homo sapien
gagatgataccacagaacccaacat

SEQ ID NO: 601254 - DNA, 25 bp, Homo sapien
acattagtacagtttgtgctttggg

SEQ ID NO: 601255 - DNA, 25 bp, Homo sapien
gtctcaatctcccgtcctcatgatc

SEQ ID NO: 601256 - DNA, 25 bp, Homo sapien
tgcccacctcagcctcccaaagtgc

SEQ ID NO: 601257 - DNA, 25 bp, Homo sapien
tctcaatctcccgtcctcatgatct

SEQ ID NO: 601258 - DNA, 25 bp, Homo sapien
aatctcccgtcctcatgatctgccc

SEQ ID NO: 601259 - DNA, 25 bp, Homo sapien
ggatctaggatctcatgggtcccat

SEQ ID NO: 601260 - DNA, 25 bp, Homo sapien
tgatacaaccaagtcaggatctagg

SEQ ID NO: 601261 - DNA, 25 bp, Homo sapien
tcagattccttggtactagacaacg

SEQ ID NO: 601262 - DNA, 25 bp, Homo sapien
ggaacgtctcctcgataagtctttg

SEQ ID NO: 601263 - DNA, 25 bp, Homo sapien
ggagaagtcggttctgttttcatcg

SEQ ID NO: 601264 - DNA, 25 bp, Homo sapien
tgatgggcagttcaactccaagcct

SEQ ID NO: 601265 - DNA, 25 bp, Homo sapien
tccccaaaggagtggcaagtcagtg

SEQ ID NO: 601266 - DNA, 25 bp, Homo sapien
cacagtcgaaatctcttgtaattcc

SEQ ID NO: 601267 - DNA, 25 bp, Homo sapien
catcatatgaattcagaaagggaaa

SEQ ID NO: 601268 - DNA, 25 bp, Homo sapien
tctgtgtttgtcgacatagtgattg

SEQ ID NO: 601269 - DNA, 25 bp, Homo sapien
gggaaacatctgtgtttgtcgacat

SEQ ID NO: 601270 - DNA, 25 bp, Homo sapien
ttcatcatatgaattcagaaaggga

SEQ ID NO: 601271 - DNA, 25 bp, Homo sapien
ctgcaaaaccttctattccaacaag

SEQ ID NO: 601272 - DNA, 25 bp, Homo sapien
attccaacaagtacgaatggtgcct

SEQ ID NO: 601273 - DNA, 25 bp, Homo sapien
atataacaacagtcattgctcctac

SEQ ID NO: 601274 - DNA, 25 bp, Homo sapien
gatataacaacagtcattgctccta

SEQ ID NO: 601275 - DNA, 25 bp, Homo sapien
atgatataacaacagtcattgctcc

SEQ ID NO: 601276 - DNA, 25 bp, Homo sapien
tgatataacaacagtcattgctcct

SEQ ID NO: 601277 - DNA, 25 bp, Homo sapien
aggcttaggttttgcccagaattct

SEQ ID NO: 601278 - DNA, 25 bp, Homo sapien
aggttttgcccagaattctcgatac

SEQ ID NO: 601279 - DNA, 25 bp, Homo sapien
cttaggttttgcccagaattctcga

SEQ ID NO: 601280 - DNA, 25 bp, Homo sapien
ctaaggcttaggttttgcccagaat

SEQ ID NO: 601281 - DNA, 25 bp, Homo sapien
cagtttaatgtttacgattgttaca

SEQ ID NO: 601282 - DNA, 25 bp, Homo sapien
tgcaattactaaagaactaaactag

SEQ ID NO: 601283 - DNA, 25 bp, Homo sapien
gcagctgtattgtaagttttccaga

SEQ ID NO: 601284 - DNA, 25 bp, Homo sapien
tactaccattatgcagctgtattgt

SEQ ID NO: 601285 - DNA, 25 bp, Homo sapien
ctgacagtctcagaaatcgccctat

SEQ ID NO: 601286 - DNA, 25 bp, Homo sapien
gacagtctcagaaatcgccctatgg

SEQ ID NO: 601287 - DNA, 25 bp, Homo sapien
agtctcagaaatcgccctatggtca

SEQ ID NO: 601288 - DNA, 25 bp, Homo sapien
cagtctcagaaatcgccctatggtc

SEQ ID NO: 601289 - DNA, 25 bp, Homo sapien
catactgtgcaatgcccctaaaggc

SEQ ID NO: 601290 - DNA, 25 bp, Homo sapien
tcctggagtactgacatcacttgta

SEQ ID NO: 601291 - DNA, 25 bp, Homo sapien
ggatcgtcctgtactcacaccacta

SEQ ID NO: 601292 - DNA, 25 bp, Homo sapien
cactgctttaatgagtgccccgaga

SEQ ID NO: 601293 - DNA, 25 bp, Homo sapien
ggctggatgcttctgaagatggtca

SEQ ID NO: 601294 - DNA, 25 bp, Homo sapien
tggctggatgcttctgaagatggtc

SEQ ID NO: 601295 - DNA, 25 bp, Homo sapien
ctggctggatgcttctgaagatggt

SEQ ID NO: 601296 - DNA, 25 bp, Homo sapien
gctggatgcttctgaagatggtcat

SEQ ID NO: 601297 - DNA, 25 bp, Homo sapien
aaaggtcacaacatcacttacgtgg

SEQ ID NO: 601298 - DNA, 25 bp, Homo sapien
cataagaatccatgagcccatgcag

SEQ ID NO: 601299 - DNA, 25 bp, Homo sapien
tcaccagtaaatgggacaaacaggt

SEQ ID NO: 601300 - DNA, 25 bp, Homo sapien
tgcttcctgatagaatgcacctgaa

SEQ ID NO: 601301 - DNA, 25 bp, Homo sapien
agaaggactgaatgccgccaaccat

SEQ ID NO: 601302 - DNA, 25 bp, Homo sapien
caacccttggattgtaagcttgcag

SEQ ID NO: 601303 - DNA, 25 bp, Homo sapien
tccccagtagagtgctcagatgaga

SEQ ID NO: 601304 - DNA, 25 bp, Homo sapien
tatggcgaaggagacagtatgtcac

SEQ ID NO: 601305 - DNA, 25 bp, Homo sapien
tgtcactttggtgtattgggaaaat

SEQ ID NO: 601306 - DNA, 25 bp, Homo sapien
gccaacctatgttgtaagttgtcac

SEQ ID NO: 601307 - DNA, 25 bp, Homo sapien
aaaaattgccattgccaacctatgt

SEQ ID NO: 601308 - DNA, 25 bp, Homo sapien
ctttgtagacatgtcaaaaattgcc

SEQ ID NO: 601309 - DNA, 25 bp, Homo sapien
ctgtgtggacggaaatagggaacat

SEQ ID NO: 601310 - DNA, 25 bp, Homo sapien
acaagagcaagactttgactcaaac

SEQ ID NO: 601311 - DNA, 25 bp, Homo sapien
agacaagagcaagactttgactcaa

SEQ ID NO: 601312 - DNA, 25 bp, Homo sapien
tgggagacaagagcaagactttgac

SEQ ID NO: 601313 - DNA, 25 bp, Homo sapien
ggagacaagagcaagactttgactc

SEQ ID NO: 601314 - DNA, 25 bp, Homo sapien
caaaatcatctgttttcttaaaagt

SEQ ID NO: 601315 - DNA, 25 bp, Homo sapien
ctggtgcattagatgacccaaaatc

SEQ ID NO: 601316 - DNA, 25 bp, Homo sapien
tcatctgttttcttaaaagtatttg

SEQ ID NO: 601317 - DNA, 25 bp, Homo sapien
gtgcattagatgacccaaaatcatc

SEQ ID NO: 601318 - DNA, 25 bp, Homo sapien
tcatgtgatagtgcaacagtttggc

SEQ ID NO: 601319 - DNA, 25 bp, Homo sapien
ggcagagacccgcttcctggtcagg

SEQ ID NO: 601320 - DNA, 25 bp, Homo sapien
tttggacatgcctctttcccgggct

SEQ ID NO: 601321 - DNA, 25 bp, Homo sapien
tctaaacttatggtctaggtcgaca

SEQ ID NO: 601322 - DNA, 25 bp, Homo sapien
gtaaactccagtggcagaacttgca

SEQ ID NO: 601323 - DNA, 25 bp, Homo sapien
tatctggctaaagatagtggtcatt

SEQ ID NO: 601324 - DNA, 25 bp, Homo sapien
aaactccagtggcagaacttgcagg

SEQ ID NO: 601325 - DNA, 25 bp, Homo sapien
taaactccagtggcagaacttgcag

SEQ ID NO: 601326 - DNA, 25 bp, Homo sapien
caataaaggtaggaacagcaggccg

SEQ ID NO: 601327 - DNA, 25 bp, Homo sapien
aggagccagacaaaacaagtgcgca

SEQ ID NO: 601328 - DNA, 25 bp, Homo sapien
gaaaaattcagtcgtagccgggcac

SEQ ID NO: 601329 - DNA, 25 bp, Homo sapien
gcagttttagttgtaatcgccccaa

SEQ ID NO: 601330 - DNA, 25 bp, Homo sapien
ggcccatggcccgtcattgtaaatg

SEQ ID NO: 601331 - DNA, 25 bp, Homo sapien
cctaagcaagcatgtccgatgggtc

SEQ ID NO: 601332 - DNA, 25 bp, Homo sapien
cacttagcctttcagtccagctcag

SEQ ID NO: 601333 - DNA, 25 bp, Homo sapien
gaggacagagacctttcaaccccaa

SEQ ID NO: 601334 - DNA, 25 bp, Homo sapien
tcttctttggcttcactctcacaaa

SEQ ID NO: 601335 - DNA, 25 bp, Homo sapien
ctttggcttcactctcacaaactcc

SEQ ID NO: 601336 - DNA, 25 bp, Homo sapien
aactccttgaatttcttctctttat

SEQ ID NO: 601337 - DNA, 25 bp, Homo sapien
tggcttcactctcacaaactccttg

SEQ ID NO: 601338 - DNA, 25 bp, Homo sapien
ctttccctttgtggtgtccagattc

SEQ ID NO: 601339 - DNA, 25 bp, Homo sapien
tgaagctgcgggctcatatggaccc

SEQ ID NO: 601340 - DNA, 25 bp, Homo sapien
cctggtaacagcaaatgccttgggt

SEQ ID NO: 601341 - DNA, 25 bp, Homo sapien
gacccctggcttgtgtgaggaccca

SEQ ID NO: 601342 - DNA, 25 bp, Homo sapien
gtcatagcggtcatccccatcaagt

SEQ ID NO: 601343 - DNA, 25 bp, Homo sapien
ttggccatactcatcatcactccag

SEQ ID NO: 601344 - DNA, 25 bp, Homo sapien
agatgcagcggaccacctcgaagtc

SEQ ID NO: 601345 - DNA, 25 bp, Homo sapien
tcatcatcactccagagaaagctct

SEQ ID NO: 601346 - DNA, 25 bp, Homo sapien
ctgaatcatgaagtcattttcctcc

SEQ ID NO: 601347 - DNA, 25 bp, Homo sapien
aagtcattttcctcctggacctcac

SEQ ID NO: 601348 - DNA, 25 bp, Homo sapien
tgaagtcattttcctcctggacctc

SEQ ID NO: 601349 - DNA, 25 bp, Homo sapien
catgaagtcattttcctcctggacc

SEQ ID NO: 601350 - DNA, 25 bp, Homo sapien
cacttgactgggtgccctgggttca

SEQ ID NO: 601351 - DNA, 25 bp, Homo sapien
taaggccgcatagggaaagagcact

SEQ ID NO: 601352 - DNA, 25 bp, Homo sapien
tatcaggtacccttgaatcccagag

SEQ ID NO: 601353 - DNA, 25 bp, Homo sapien
atgtaaatccccgtagctaaggccg

SEQ ID NO: 601354 - DNA, 25 bp, Homo sapien
tctaatagtagtccacagggcttca

SEQ ID NO: 601355 - DNA, 25 bp, Homo sapien
tgacaatggccatgtgcatcacgct

SEQ ID NO: 601356 - DNA, 25 bp, Homo sapien
tatgttaagacaatgaagcccgcca

SEQ ID NO: 601357 - DNA, 25 bp, Homo sapien
gttgacctcaaaacggagcttgtcc

SEQ ID NO: 601358 - DNA, 25 bp, Homo sapien
tcttggcaaacataacaggtgtatt

SEQ ID NO: 601359 - DNA, 25 bp, Homo sapien
cttggcaaacataacaggtgtattt

SEQ ID NO: 601360 - DNA, 25 bp, Homo sapien
ggtgtatttctcgggcacattttct

SEQ ID NO: 601361 - DNA, 25 bp, Homo sapien
caggtgtatttctcgggcacatttt

SEQ ID NO: 601362 - DNA, 25 bp, Homo sapien
atactgttatatccctgactccaga

SEQ ID NO: 601363 - DNA, 25 bp, Homo sapien
ttatatccctgactccagaaatctc

SEQ ID NO: 601364 - DNA, 25 bp, Homo sapien
actgttatatccctgactccagaaa

SEQ ID NO: 601365 - DNA, 25 bp, Homo sapien
tgttatatccctgactccagaaatc

SEQ ID NO: 601366 - DNA, 25 bp, Homo sapien
tgatctcagttgattcacccgcctt

SEQ ID NO: 601367 - DNA, 25 bp, Homo sapien
ctgatctcagttgattcacccgcct

SEQ ID NO: 601368 - DNA, 25 bp, Homo sapien
agtattggcgattaaagtcgtagaa

SEQ ID NO: 601369 - DNA, 25 bp, Homo sapien
ttcagtaagtgcacaggatttgatg

SEQ ID NO: 601370 - DNA, 25 bp, Homo sapien
aagtcgtagaagttcagtaagtgca

SEQ ID NO: 601371 - DNA, 25 bp, Homo sapien
cgattaaagtcgtagaagttcagta

SEQ ID NO: 601372 - DNA, 25 bp, Homo sapien
tcttatcaattttcccgtcacggca

SEQ ID NO: 601373 - DNA, 25 bp, Homo sapien
ccaacccaattaagagccgaaagag

SEQ ID NO: 601374 - DNA, 25 bp, Homo sapien
cgtcacggcattcatcactacctta

SEQ ID NO: 601375 - DNA, 25 bp, Homo sapien
gagcatcatcagtgcctcaagtcgt

SEQ ID NO: 601376 - DNA, 25 bp, Homo sapien
cctaagcctttgcagggttggctcc

SEQ ID NO: 601377 - DNA, 25 bp, Homo sapien
cagcactattccctaagcctttgca

SEQ ID NO: 601378 - DNA, 25 bp, Homo sapien
caaagccccaactctctaactctgg

SEQ ID NO: 601379 - DNA, 25 bp, Homo sapien
acttgcgcatcccttctgtctgcag

SEQ ID NO: 601380 - DNA, 25 bp, Homo sapien
cagtgacaacaagagggttaaaaca

SEQ ID NO: 601381 - DNA, 25 bp, Homo sapien
agcagtgacaacaagagggttaaaa

SEQ ID NO: 601382 - DNA, 25 bp, Homo sapien
gcagtgacaacaagagggttaaaac

SEQ ID NO: 601383 - DNA, 25 bp, Homo sapien
cataccagtacttgaagccaggcct

SEQ ID NO: 601384 - DNA, 25 bp, Homo sapien
tcatcttgagctgcaggccatgcag

SEQ ID NO: 601385 - DNA, 25 bp, Homo sapien
tggcattctgatgggagtagttctc

SEQ ID NO: 601386 - DNA, 25 bp, Homo sapien
gaaatgccaggccatgcatatgtcc

SEQ ID NO: 601387 - DNA, 25 bp, Homo sapien
cagaccatgccaaacagactgctcc

SEQ ID NO: 601388 - DNA, 25 bp, Homo sapien
tttctcagatttactcagcccccag

SEQ ID NO: 601389 - DNA, 25 bp, Homo sapien
ttatgatttgattgctttggtagct

SEQ ID NO: 601390 - DNA, 25 bp, Homo sapien
atttgattgctttggtagctttcca

SEQ ID NO: 601391 - DNA, 25 bp, Homo sapien
tctcgcaagcatgaccctgccattt

SEQ ID NO: 601392 - DNA, 25 bp, Homo sapien
tccaactgcgatctgaaggtgctac

SEQ ID NO: 601393 - DNA, 25 bp, Homo sapien
cagtcatgaagaaggtaagcacagc

SEQ ID NO: 601394 - DNA, 25 bp, Homo sapien
ccttgtaagccctgtcagtcatgaa

SEQ ID NO: 601395 - DNA, 25 bp, Homo sapien
tgtttccaaggctggcaccacagcg

SEQ ID NO: 601396 - DNA, 25 bp, Homo sapien
gctggcaccacagcggcagatcagg

SEQ ID NO: 601397 - DNA, 25 bp, Homo sapien
cggcagatcaggatgctcccggctt

SEQ ID NO: 601398 - DNA, 25 bp, Homo sapien
caaggctggcaccacagcggcagat

SEQ ID NO: 601399 - DNA, 25 bp, Homo sapien
tcctgtcttggtctagaggccagcc

SEQ ID NO: 601400 - DNA, 25 bp, Homo sapien
gctcactggtgatataggattcctc

SEQ ID NO: 601401 - DNA, 25 bp, Homo sapien
gaatcatcgccgttctcatggaggg

SEQ ID NO: 601402 - DNA, 25 bp, Homo sapien
tgctccacggcagggtaataggcgc

SEQ ID NO: 601403 - DNA, 25 bp, Homo sapien
tagacatagtcaagggcacaaggat

SEQ ID NO: 601404 - DNA, 25 bp, Homo sapien
gaagtaacccgctcagaatcacaca

SEQ ID NO: 601405 - DNA, 25 bp, Homo sapien
ggcttgtaatctaggatccccttgg

SEQ ID NO: 601406 - DNA, 25 bp, Homo sapien
gaaactgcgtctgtctcaaaagact

SEQ ID NO: 601407 - DNA, 25 bp, Homo sapien
ccacagtaactgagggggcttcact

SEQ ID NO: 601408 - DNA, 25 bp, Homo sapien
tccacagtaactgagggggcttcac

SEQ ID NO: 601409 - DNA, 25 bp, Homo sapien
gttccacagtaactgagggggcttc

SEQ ID NO: 601410 - DNA, 25 bp, Homo sapien
ttccacagtaactgagggggcttca

SEQ ID NO: 601411 - DNA, 25 bp, Homo sapien
atttagtacttactatgtgcaaaac

SEQ ID NO: 601412 - DNA, 25 bp, Homo sapien
tccacaggaccacaaaccttttcta

SEQ ID NO: 601413 - DNA, 25 bp, Homo sapien
gaaatgaaatagattctagccaata

SEQ ID NO: 601414 - DNA, 25 bp, Homo sapien
caggaccacaaaccttttctaggat

SEQ ID NO: 601415 - DNA, 25 bp, Homo sapien
caagggttagtacacgggagtcaca

SEQ ID NO: 601416 - DNA, 25 bp, Homo sapien
gggagtcacaccaacgcgtttcaag

SEQ ID NO: 601417 - DNA, 25 bp, Homo sapien
ccacttaggaactgggcaggagctt

SEQ ID NO: 601418 - DNA, 25 bp, Homo sapien
ttactgaatggagatagcccctggc

SEQ ID NO: 601419 - DNA, 25 bp, Homo sapien
gcctttttggagacatattccttca

SEQ ID NO: 601420 - DNA, 25 bp, Homo sapien
cctttttggagacatattccttcac

SEQ ID NO: 601421 - DNA, 25 bp, Homo sapien
tgtccagcagcttccgagcaggggc

SEQ ID NO: 601422 - DNA, 25 bp, Homo sapien
tccacatgggtcagcaggttaaact

SEQ ID NO: 601423 - DNA, 25 bp, Homo sapien
ttctcaatggagtccatcctgtgcg

SEQ ID NO: 601424 - DNA, 25 bp, Homo sapien
tcctgtgcgtaacttcatcctgaag

SEQ ID NO: 601425 - DNA, 25 bp, Homo sapien
agagggcgatctgctgcaccttgcc

SEQ ID NO: 601426 - DNA, 25 bp, Homo sapien
gcagctgcttgatacaatgcttgag

SEQ ID NO: 601427 - DNA, 25 bp, Homo sapien
tgatacaatgcttgagctgcggaag

SEQ ID NO: 601428 - DNA, 25 bp, Homo sapien
gctccagttccccagtgtagtccag

SEQ ID NO: 601429 - DNA, 25 bp, Homo sapien
gtgccccaggattgtgcccccatga

SEQ ID NO: 601430 - DNA, 25 bp, Homo sapien
atttatttaaatatgcgaagctcct

SEQ ID NO: 601431 - DNA, 25 bp, Homo sapien
tttatttaaatatgcgaagctcctc

SEQ ID NO: 601432 - DNA, 25 bp, Homo sapien
ccccaggattgtgcccccatgagtt

SEQ ID NO: 601433 - DNA, 25 bp, Homo sapien
ggtttccagtgctccaacatagggt

SEQ ID NO: 601434 - DNA, 25 bp, Homo sapien
catgtgccccaacgtgatagaaaag

SEQ ID NO: 601435 - DNA, 25 bp, Homo sapien
gagtcttgcagttgtcgcccgagct

SEQ ID NO: 601436 - DNA, 25 bp, Homo sapien
caggaattgggaatggagcccctca

SEQ ID NO: 601437 - DNA, 25 bp, Homo sapien
gacaaatccacgcattagcctaggc

SEQ ID NO: 601438 - DNA, 25 bp, Homo sapien
aacactaagacaaatccacgcatta

SEQ ID NO: 601439 - DNA, 25 bp, Homo sapien
cctaggcctatgcagtaggaccatc

SEQ ID NO: 601440 - DNA, 25 bp, Homo sapien
tgcagtaggaccatcaggacatcac

SEQ ID NO: 601441 - DNA, 25 bp, Homo sapien
cctagtttgaccaagcgagaggact

SEQ ID NO: 601442 - DNA, 25 bp, Homo sapien
ccttcgcgccagacggtgtgttgta

SEQ ID NO: 601443 - DNA, 25 bp, Homo sapien
cagcaaagggttctcgagcatctcc

SEQ ID NO: 601444 - DNA, 25 bp, Homo sapien
ttgtcatcgtcgcagtaaggccggt

SEQ ID NO: 601445 - DNA, 25 bp, Homo sapien
aggggattccaccaaggtagcctca

SEQ ID NO: 601446 - DNA, 25 bp, Homo sapien
gtagctcagagatagcaagcagttt

SEQ ID NO: 601447 - DNA, 25 bp, Homo sapien
caactctgagctgggtatcgtcaaa

SEQ ID NO: 601448 - DNA, 25 bp, Homo sapien
ctttctctccaacggcttaatttat

SEQ ID NO: 601449 - DNA, 25 bp, Homo sapien
tccccaaaaatccagtaatactaga

SEQ ID NO: 601450 - DNA, 25 bp, Homo sapien
ggcaaatggcacaactagccccttt

SEQ ID NO: 601451 - DNA, 25 bp, Homo sapien
tcctcagtaacaaggcaagagctcc

SEQ ID NO: 601452 - DNA, 25 bp, Homo sapien
gaaacaaatagatttcctcagtaac

SEQ ID NO: 601453 - DNA, 25 bp, Homo sapien
gcataagttaccatatgtctcctca

SEQ ID NO: 601454 - DNA, 25 bp, Homo sapien
gctgccaggcataagttaccatatg

SEQ ID NO: 601455 - DNA, 25 bp, Homo sapien
caggcataagttaccatatgtctcc

SEQ ID NO: 601456 - DNA, 25 bp, Homo sapien
ggagctgccaggcataagttaccat

SEQ ID NO: 601457 - DNA, 25 bp, Homo sapien
tagggtgcttccagtgagcagtctc

SEQ ID NO: 601458 - DNA, 25 bp, Homo sapien
caatgatttgatattcccggaatcc

SEQ ID NO: 601459 - DNA, 25 bp, Homo sapien
ccctgaggccttggcggaacatttt

SEQ ID NO: 601460 - DNA, 25 bp, Homo sapien
tttacacactcggatcattatgatg

SEQ ID NO: 601461 - DNA, 25 bp, Homo sapien
tgaaaatgcccctgcaccgaagtag

SEQ ID NO: 601462 - DNA, 25 bp, Homo sapien
ggaaactttgaagccctgagcaaca

SEQ ID NO: 601463 - DNA, 25 bp, Homo sapien
gaaatctagaaacctggtcaccagg

SEQ ID NO: 601464 - DNA, 25 bp, Homo sapien
tctactgaagcagtctagggctccc

SEQ ID NO: 601465 - DNA, 25 bp, Homo sapien
tttgttaaatgtctttaatgagcca

SEQ ID NO: 601466 - DNA, 25 bp, Homo sapien
ttaaatgtctttaatgagccaagca

SEQ ID NO: 601467 - DNA, 25 bp, Homo sapien
tgttaaatgtctttaatgagccaag

SEQ ID NO: 601468 - DNA, 25 bp, Homo sapien
aaatgtctttaatgagccaagcaca

SEQ ID NO: 601469 - DNA, 25 bp, Homo sapien
atgtgactcggctttgcatcttttt

SEQ ID NO: 601470 - DNA, 25 bp, Homo sapien
tcaaatgtgactcggctttgcatct

SEQ ID NO: 601471 - DNA, 25 bp, Homo sapien
tatcaaatgtgactcggctttgcat

SEQ ID NO: 601472 - DNA, 25 bp, Homo sapien
aaatgtgactcggctttgcatcttt

SEQ ID NO: 601473 - DNA, 25 bp, Homo sapien
acaagtcacacagtccaaagctccc

SEQ ID NO: 601474 - DNA, 25 bp, Homo sapien
cattctctcatcaaaatgagaggac

SEQ ID NO: 601475 - DNA, 25 bp, Homo sapien
agctcccatggatataaaagcattc

SEQ ID NO: 601476 - DNA, 25 bp, Homo sapien
gtgtcaacagctgcgctgcacctga

SEQ ID NO: 601477 - DNA, 25 bp, Homo sapien
caagatgttacagacggcctggatc

SEQ ID NO: 601478 - DNA, 25 bp, Homo sapien
tccgatagctatccagaacctgcaa

SEQ ID NO: 601479 - DNA, 25 bp, Homo sapien
aagcgcatgactttggccaggagca

SEQ ID NO: 601480 - DNA, 25 bp, Homo sapien
tctgcatgatctgaatggcctttgg

SEQ ID NO: 601481 - DNA, 25 bp, Homo sapien
tggccttgtgattctgtggcaaact

SEQ ID NO: 601482 - DNA, 25 bp, Homo sapien
ggccttgtgattctgtggcaaactc

SEQ ID NO: 601483 - DNA, 25 bp, Homo sapien
aataaaagctgttgcccttctgccc

SEQ ID NO: 601484 - DNA, 25 bp, Homo sapien
ccaaaacagctacccttgtgcagca

SEQ ID NO: 601485 - DNA, 25 bp, Homo sapien
ctgccatcctcgtccttggttattg

SEQ ID NO: 601486 - DNA, 25 bp, Homo sapien
tgcaactgtgcccaggtagatgaaa

SEQ ID NO: 601487 - DNA, 25 bp, Homo sapien
ctgaagcatgcagaacgtccatttc

SEQ ID NO: 601488 - DNA, 25 bp, Homo sapien
caggaactccgtttcttccatacag

SEQ ID NO: 601489 - DNA, 25 bp, Homo sapien
agcaaagaagtcctcccggtcaaca

SEQ ID NO: 601490 - DNA, 25 bp, Homo sapien
cctggtccagcttattagcaaagaa

SEQ ID NO: 601491 - DNA, 25 bp, Homo sapien
caaaccgatactgagcatccttctg

SEQ ID NO: 601492 - DNA, 25 bp, Homo sapien
tatcttcgccatggctaccagctgc

SEQ ID NO: 601493 - DNA, 25 bp, Homo sapien
taaacatgatgaagggtgactctcc

SEQ ID NO: 601494 - DNA, 25 bp, Homo sapien
ctctccaaaatcttttgagatcagc

SEQ ID NO: 601495 - DNA, 25 bp, Homo sapien
tgcccatacgagaacctctctatct

SEQ ID NO: 601496 - DNA, 25 bp, Homo sapien
cagatccatctacggtaggaagggg

SEQ ID NO: 601497 - DNA, 25 bp, Homo sapien
ccagatccatctacggtaggaaggg

SEQ ID NO: 601498 - DNA, 25 bp, Homo sapien
gccagatccatctacggtaggaagg

SEQ ID NO: 601499 - DNA, 25 bp, Homo sapien
tgccagatccatctacggtaggaag

SEQ ID NO: 601500 - DNA, 25 bp, Homo sapien
catgccagtactgagcaggaggtaa

SEQ ID NO: 601501 - DNA, 25 bp, Homo sapien
agtggggggaagcatgccagtactg

SEQ ID NO: 601502 - DNA, 25 bp, Homo sapien
ctggggtccttgacccaagtgggtg

SEQ ID NO: 601503 - DNA, 25 bp, Homo sapien
tactgagcaggaggtaagagataag

SEQ ID NO: 601504 - DNA, 25 bp, Homo sapien
caaggagctaaagtcttgcagagga

SEQ ID NO: 601505 - DNA, 25 bp, Homo sapien
gagatgtggaagtttcaaggagcta

SEQ ID NO: 601506 - DNA, 25 bp, Homo sapien
gatctggaattccttaaatctttcc

SEQ ID NO: 601507 - DNA, 25 bp, Homo sapien
tgaggttctgatcttcctgctgaag

SEQ ID NO: 601508 - DNA, 25 bp, Homo sapien
gtgaagtggcccttgtaggaatgca

SEQ ID NO: 601509 - DNA, 25 bp, Homo sapien
taggaatgcagggattgtgacactg

SEQ ID NO: 601510 - DNA, 25 bp, Homo sapien
tgcagggattgtgacactggtgcca

SEQ ID NO: 601511 - DNA, 25 bp, Homo sapien
tggcccttgtaggaatgcagggatt

SEQ ID NO: 601512 - DNA, 25 bp, Homo sapien
gctcgagtgcactgatgggatctct

SEQ ID NO: 601513 - DNA, 25 bp, Homo sapien
taacgtctcaaaagtcacagggtgc

SEQ ID NO: 601514 - DNA, 25 bp, Homo sapien
cacagggtgctcgttatggaggcca

SEQ ID NO: 601515 - DNA, 25 bp, Homo sapien
tcttcagaaggattatccataacgt

SEQ ID NO: 601516 - DNA, 25 bp, Homo sapien
tattgatcatggcacatttgatcga

SEQ ID NO: 601517 - DNA, 25 bp, Homo sapien
ggagctcaccaggcttgatattgat

SEQ ID NO: 601518 - DNA, 25 bp, Homo sapien
ggcacatttgatcgactgagcaggc

SEQ ID NO: 601519 - DNA, 25 bp, Homo sapien
cacagtgtgcaccttcacgtaggcc

SEQ ID NO: 601520 - DNA, 25 bp, Homo sapien
catggtgaacagagctcttggcaca

SEQ ID NO: 601521 - DNA, 25 bp, Homo sapien
tactccatggtgaacagagctcttg

SEQ ID NO: 601522 - DNA, 25 bp, Homo sapien
actccatggtgaacagagctcttgg

SEQ ID NO: 601523 - DNA, 25 bp, Homo sapien
tccatggtgaacagagctcttggca

SEQ ID NO: 601524 - DNA, 25 bp, Homo sapien
ccacatcttacattggtatgtcttt

SEQ ID NO: 601525 - DNA, 25 bp, Homo sapien
cccacatcttacattggtatgtctt

SEQ ID NO: 601526 - DNA, 25 bp, Homo sapien
cctgttccttggcttgaattcctac

SEQ ID NO: 601527 - DNA, 25 bp, Homo sapien
tgttccttggcttgaattcctactt

SEQ ID NO: 601528 - DNA, 25 bp, Homo sapien
tccttggcttgaattcctactttgt

SEQ ID NO: 601529 - DNA, 25 bp, Homo sapien
agacttcggtggccacaggtcctcc

SEQ ID NO: 601530 - DNA, 25 bp, Homo sapien
cctctgtttctcctccatccctcac

SEQ ID NO: 601531 - DNA, 25 bp, Homo sapien
cccacactttcctgcaggcctctgt

SEQ ID NO: 601532 - DNA, 25 bp, Homo sapien
gcctctgtttctcctccatccctca

SEQ ID NO: 601533 - DNA, 25 bp, Homo sapien
acactttcctgcaggcctctgtttc

SEQ ID NO: 601534 - DNA, 25 bp, Homo sapien
ggtctgcccgcagattttcattctt

SEQ ID NO: 601535 - DNA, 25 bp, Homo sapien
cacagaaagttagacctcagagact

SEQ ID NO: 601536 - DNA, 25 bp, Homo sapien
aggtctgcccgcagattttcattct

SEQ ID NO: 601537 - DNA, 25 bp, Homo sapien
gaaagttagacctcagagactggcc

SEQ ID NO: 601538 - DNA, 25 bp, Homo sapien
tcaggatcaagggtcgtgtgtcgca

SEQ ID NO: 601539 - DNA, 25 bp, Homo sapien
gggaatgcaatattgagctttaaca

SEQ ID NO: 601540 - DNA, 25 bp, Homo sapien
tccttatccgtatcaactcatttcc

SEQ ID NO: 601541 - DNA, 25 bp, Homo sapien
tcaagggtcgtgtgtcgcattcacc

SEQ ID NO: 601542 - DNA, 25 bp, Homo sapien
cttgaagccaggaggcagagtttgc

SEQ ID NO: 601543 - DNA, 25 bp, Homo sapien
ttgggaggctgaggcagaagaatca

SEQ ID NO: 601544 - DNA, 25 bp, Homo sapien
tggcggcgcctgtaatcccatctac

SEQ ID NO: 601545 - DNA, 25 bp, Homo sapien
tctctactaaaagtagtcaggtgtg

SEQ ID NO: 601546 - DNA, 25 bp, Homo sapien
gaacagttgactttggcaaggctcc

SEQ ID NO: 601547 - DNA, 25 bp, Homo sapien
ttcttgggccggtttggagtgaaca

SEQ ID NO: 601548 - DNA, 25 bp, Homo sapien
tgttgatgctgcacaaatccaggac

SEQ ID NO: 601549 - DNA, 25 bp, Homo sapien
gctgcaacaggtccttccgaaagat

SEQ ID NO: 601550 - DNA, 25 bp, Homo sapien
aaataaggacccctgtgctcttaca

SEQ ID NO: 601551 - DNA, 25 bp, Homo sapien
cctaaataaggacccctgtgctctt

SEQ ID NO: 601552 - DNA, 25 bp, Homo sapien
ttgtcctaaataaggacccctgtgc

SEQ ID NO: 601553 - DNA, 25 bp, Homo sapien
tcctaaataaggacccctgtgctct

SEQ ID NO: 601554 - DNA, 25 bp, Homo sapien
cacacaggatctagaagaatatgtc

SEQ ID NO: 601555 - DNA, 25 bp, Homo sapien
taaactgcttgtgattgtgaatgac

SEQ ID NO: 601556 - DNA, 25 bp, Homo sapien
tacagtctcagtcccataaaattgg

SEQ ID NO: 601557 - DNA, 25 bp, Homo sapien
tggatgttgtgcctacacacaggat

SEQ ID NO: 601558 - DNA, 25 bp, Homo sapien
gaagggctctttgctagtatctcca

SEQ ID NO: 601559 - DNA, 25 bp, Homo sapien
tagacatcctgtacttagtcacggg

SEQ ID NO: 601560 - DNA, 25 bp, Homo sapien
taaatcagtccctttgtgaatgtcc

SEQ ID NO: 601561 - DNA, 25 bp, Homo sapien
tgatgcttaggagcgaatgcagact

SEQ ID NO: 601562 - DNA, 25 bp, Homo sapien
taaaagtgtacaacggcctgtcgca

SEQ ID NO: 601563 - DNA, 25 bp, Homo sapien
agtgtacaacggcctgtcgcagtgg

SEQ ID NO: 601564 - DNA, 25 bp, Homo sapien
aaagtgtacaacggcctgtcgcagt

SEQ ID NO: 601565 - DNA, 25 bp, Homo sapien
ttaaaagtgtacaacggcctgtcgc

SEQ ID NO: 601566 - DNA, 25 bp, Homo sapien
caaatcacctgttgagtaatactca

SEQ ID NO: 601567 - DNA, 25 bp, Homo sapien
ttagaggtagcaaaatcacattttg

SEQ ID NO: 601568 - DNA, 25 bp, Homo sapien
aaaattagaggtagcaaaatcacat

SEQ ID NO: 601569 - DNA, 25 bp, Homo sapien
aatggccaaatcacctgttgagtaa

SEQ ID NO: 601570 - DNA, 25 bp, Homo sapien
gcccgtcgggctcggacagaaccag

SEQ ID NO: 601571 - DNA, 25 bp, Homo sapien
cctctctccgggcagagagttgctg

SEQ ID NO: 601572 - DNA, 25 bp, Homo sapien
tctgggcggagcgttggctggaggc

SEQ ID NO: 601573 - DNA, 25 bp, Homo sapien
agaaccagtcgggtcgcagctgtcg

SEQ ID NO: 601574 - DNA, 25 bp, Homo sapien
gctgccaggcaagccgagctagcca

SEQ ID NO: 601575 - DNA, 25 bp, Homo sapien
cagcggcggccaccaacacgtccct

SEQ ID NO: 601576 - DNA, 25 bp, Homo sapien
cagacacagacgctgccaggcaagc

SEQ ID NO: 601577 - DNA, 25 bp, Homo sapien
ctgcagggggacagatgcggccagc

SEQ ID NO: 601578 - DNA, 25 bp, Homo sapien
gatctgaggtctgcgggatgaccct

SEQ ID NO: 601579 - DNA, 25 bp, Homo sapien
ttaattaattcgggaagagatctga

SEQ ID NO: 601580 - DNA, 25 bp, Homo sapien
gaagagatctgaggtctgcgggatg

SEQ ID NO: 601581 - DNA, 25 bp, Homo sapien
taattaattcgggaagagatctgag

SEQ ID NO: 601582 - DNA, 25 bp, Homo sapien
tccacttgcatgttcgtttgcccag

SEQ ID NO: 601583 - DNA, 25 bp, Homo sapien
caaaatcattaacctggcatccaag

SEQ ID NO: 601584 - DNA, 25 bp, Homo sapien
gatacaagttggataagacatagtc

SEQ ID NO: 601585 - DNA, 25 bp, Homo sapien
gaaatctgcctgatacccactctaa

SEQ ID NO: 601586 - DNA, 25 bp, Homo sapien
cacacccggccaaaatgcttaattt

SEQ ID NO: 601587 - DNA, 25 bp, Homo sapien
gccaaaatgcttaattttaacaagc

SEQ ID NO: 601588 - DNA, 25 bp, Homo sapien
ccatcacacccggccaaaatgctta

SEQ ID NO: 601589 - DNA, 25 bp, Homo sapien
atcacacccggccaaaatgcttaat

SEQ ID NO: 601590 - DNA, 25 bp, Homo sapien
ctttcatcgttttgaatccactgac

SEQ ID NO: 601591 - DNA, 25 bp, Homo sapien
acagaggttttgaatccactttcat

SEQ ID NO: 601592 - DNA, 25 bp, Homo sapien
ctgctcttgtaaatcacaggaccat

SEQ ID NO: 601593 - DNA, 25 bp, Homo sapien
ttgcagccctaagagaataaaagag

SEQ ID NO: 601594 - DNA, 25 bp, Homo sapien
tcctgctcaaaagcaggatgccagc

SEQ ID NO: 601595 - DNA, 25 bp, Homo sapien
aatgttgtgtcttggatagggcctg

SEQ ID NO: 601596 - DNA, 25 bp, Homo sapien
tgttgtgtcttggatagggcctgca

SEQ ID NO: 601597 - DNA, 25 bp, Homo sapien
tgtgtcttggatagggcctgcacct

SEQ ID NO: 601598 - DNA, 25 bp, Homo sapien
gaaatgttgtgtcttggatagggcc

SEQ ID NO: 601599 - DNA, 25 bp, Homo sapien
tcacatagcttctaaagtggcagag

SEQ ID NO: 601600 - DNA, 25 bp, Homo sapien
caaagacatcacatagcttctaaag

SEQ ID NO: 601601 - DNA, 25 bp, Homo sapien
ttatgcatgctgaaacagaaacaca

SEQ ID NO: 601602 - DNA, 25 bp, Homo sapien
tattcttattcccacattatgcatg

SEQ ID NO: 601603 - DNA, 25 bp, Homo sapien
ttgtctcacttaagtggcagctggg

SEQ ID NO: 601604 - DNA, 25 bp, Homo sapien
ggcagcacagagccaagatgaagcc

SEQ ID NO: 601605 - DNA, 25 bp, Homo sapien
tgtctcacttaagtggcagctggga

SEQ ID NO: 601606 - DNA, 25 bp, Homo sapien
gcagcacagagccaagatgaagccc

SEQ ID NO: 601607 - DNA, 25 bp, Homo sapien
ttcagcgagcccaagatagcatctg

SEQ ID NO: 601608 - DNA, 25 bp, Homo sapien
cgtgttcagcgagcccaagatagca

SEQ ID NO: 601609 - DNA, 25 bp, Homo sapien
ccgtgttcagcgagcccaagatagc

SEQ ID NO: 601610 - DNA, 25 bp, Homo sapien
tgttcagcgagcccaagatagcatc

SEQ ID NO: 601611 - DNA, 25 bp, Homo sapien
ctagagctgcgcagaaatgccccgc

SEQ ID NO: 601612 - DNA, 25 bp, Homo sapien
tctggctcgcggtcctggtgtccgg

SEQ ID NO: 601613 - DNA, 25 bp, Homo sapien
ctccgaggcgcgctagagctgcgca

SEQ ID NO: 601614 - DNA, 25 bp, Homo sapien
tccgggagctgtctggctcgcggtc

SEQ ID NO: 601615 - DNA, 25 bp, Homo sapien
gtgcccaaagatcgggaatcgagcc

SEQ ID NO: 601616 - DNA, 25 bp, Homo sapien
aaagatcgggaatcgagcccgccgc

SEQ ID NO: 601617 - DNA, 25 bp, Homo sapien
ccaaagatcgggaatcgagcccgcc

SEQ ID NO: 601618 - DNA, 25 bp, Homo sapien
tgtcagtgcccaaagatcgggaatc

SEQ ID NO: 601619 - DNA, 25 bp, Homo sapien
cgcgacagtccccacacacacgaac

SEQ ID NO: 601620 - DNA, 25 bp, Homo sapien
ccgcgacagtccccacacacacgaa

SEQ ID NO: 601621 - DNA, 25 bp, Homo sapien
tatgaggaagactctagactttcta

SEQ ID NO: 601622 - DNA, 25 bp, Homo sapien
ctagactttctaattctaggtggcc

SEQ ID NO: 601623 - DNA, 25 bp, Homo sapien
tctatctttagacctctaatctggg

SEQ ID NO: 601624 - DNA, 25 bp, Homo sapien
agtgggcctggagactctatcttta

SEQ ID NO: 601625 - DNA, 25 bp, Homo sapien
aatggcggcatcatgagtcatcact

SEQ ID NO: 601626 - DNA, 25 bp, Homo sapien
tctcaatggcggcatcatgagtcat

SEQ ID NO: 601627 - DNA, 25 bp, Homo sapien
tggcggcatcatgagtcatcactcc

SEQ ID NO: 601628 - DNA, 25 bp, Homo sapien
tcaatggcggcatcatgagtcatca

SEQ ID NO: 601629 - DNA, 25 bp, Homo sapien
tgctcctgcaacctcgaatggtggc

SEQ ID NO: 601630 - DNA, 25 bp, Homo sapien
aatggaatttatctttgcctgatca

SEQ ID NO: 601631 - DNA, 25 bp, Homo sapien
tgcctgatcacttgcagaaaggaat

SEQ ID NO: 601632 - DNA, 25 bp, Homo sapien
ggctccaataccaccacgacagggg

SEQ ID NO: 601633 - DNA, 25 bp, Homo sapien
tagatatgtgtggatagtcttcaaa

SEQ ID NO: 601634 - DNA, 25 bp, Homo sapien
tccgtggatatccagaaagtagata

SEQ ID NO: 601635 - DNA, 25 bp, Homo sapien
gcccatggtctctccgtggatatcc

SEQ ID NO: 601636 - DNA, 25 bp, Homo sapien
gaatcagacatagaagaaggatttg

SEQ ID NO: 601637 - DNA, 25 bp, Homo sapien
cgggggcaagaacttctgtcagtca

SEQ ID NO: 601638 - DNA, 25 bp, Homo sapien
tccccgggggcaagaacttctgtca

SEQ ID NO: 601639 - DNA, 25 bp, Homo sapien
gcaagaacttctgtcagtcaggcac

SEQ ID NO: 601640 - DNA, 25 bp, Homo sapien
gggcaagaacttctgtcagtcaggc

SEQ ID NO: 601641 - DNA, 25 bp, Homo sapien
cacctcctctgtccggctgtgctgt

SEQ ID NO: 601642 - DNA, 25 bp, Homo sapien
cctcctctgtccggctgtgctgtgg

SEQ ID NO: 601643 - DNA, 25 bp, Homo sapien
acctcctctgtccggctgtgctgtg

SEQ ID NO: 601644 - DNA, 25 bp, Homo sapien
ggactgttgctgcaattaaatgaga

SEQ ID NO: 601645 - DNA, 25 bp, Homo sapien
gatggatttgtatggaggtagacat

SEQ ID NO: 601646 - DNA, 25 bp, Homo sapien
gacatctcctgaaacacctaacaca

SEQ ID NO: 601647 - DNA, 25 bp, Homo sapien
ggcacaatgtaagtaatgtgactta

SEQ ID NO: 601648 - DNA, 25 bp, Homo sapien
acatctcacccccatgcgtgaacac

SEQ ID NO: 601649 - DNA, 25 bp, Homo sapien
gacaggtaatgcgttcacattgtac

SEQ ID NO: 601650 - DNA, 25 bp, Homo sapien
ttgaaggcggcacatctcaccccca

SEQ ID NO: 601651 - DNA, 25 bp, Homo sapien
ggtaatgcgttcacattgtacattg

SEQ ID NO: 601652 - DNA, 25 bp, Homo sapien
caggagacccctcgggcttcagtgt

SEQ ID NO: 601653 - DNA, 25 bp, Homo sapien
ttgctggaacctgttccgtcagctc

SEQ ID NO: 601654 - DNA, 25 bp, Homo sapien
aagctgatgagctactcagcccagt

SEQ ID NO: 601655 - DNA, 25 bp, Homo sapien
gatgagctactcagcccagtggtca

SEQ ID NO: 601656 - DNA, 25 bp, Homo sapien
aaaggtagaaaaggcggcagaagtg

SEQ ID NO: 601657 - DNA, 25 bp, Homo sapien
tgagaaaggtagaaaaggcggcaga

SEQ ID NO: 601658 - DNA, 25 bp, Homo sapien
agaaaggtagaaaaggcggcagaag

SEQ ID NO: 601659 - DNA, 25 bp, Homo sapien
cttgagaaaggtagaaaaggcggca

SEQ ID NO: 601660 - DNA, 25 bp, Homo sapien
aggactagaagtctgcgtggcttct

SEQ ID NO: 601661 - DNA, 25 bp, Homo sapien
ggactagaagtctgcgtggcttctg

SEQ ID NO: 601662 - DNA, 25 bp, Homo sapien
ctgagcgctcagtaggtgctaggct

SEQ ID NO: 601663 - DNA, 25 bp, Homo sapien
tgctaagccctttgcaggttctacc

SEQ ID NO: 601664 - DNA, 25 bp, Homo sapien
accatgaggcaggtacgaacagcag

SEQ ID NO: 601665 - DNA, 25 bp, Homo sapien
gcaggttctacctcattgatcctcc

SEQ ID NO: 601666 - DNA, 25 bp, Homo sapien
caacaactaggtctgaagcgctgag

SEQ ID NO: 601667 - DNA, 25 bp, Homo sapien
gaaagcaaattacaggcctcccgct

SEQ ID NO: 601668 - DNA, 25 bp, Homo sapien
ctatcatgcaaaccgtaagtctggc

SEQ ID NO: 601669 - DNA, 25 bp, Homo sapien
caaggcaatcaccacaagaggctga

SEQ ID NO: 601670 - DNA, 25 bp, Homo sapien
aacatgttaccagacgttgttttat

SEQ ID NO: 601671 - DNA, 25 bp, Homo sapien
taccagacgttgttttatgatagtg

SEQ ID NO: 601672 - DNA, 25 bp, Homo sapien
catgttaccagacgttgttttatga

SEQ ID NO: 601673 - DNA, 25 bp, Homo sapien
cagacgttgttttatgatagtggaa

SEQ ID NO: 601674 - DNA, 25 bp, Homo sapien
atgatccaatttctacaaaatacgt

SEQ ID NO: 601675 - DNA, 25 bp, Homo sapien
tgagatggagtttttgctctattgc

SEQ ID NO: 601676 - DNA, 25 bp, Homo sapien
acaaatgatccaatttctacaaaat

SEQ ID NO: 601677 - DNA, 25 bp, Homo sapien
gagatggagtttttgctctattgcc

SEQ ID NO: 601678 - DNA, 25 bp, Homo sapien
tcttaagtacacaaatcctcaggcc

SEQ ID NO: 601679 - DNA, 25 bp, Homo sapien
ttctaacgcacactggagtttcagg

SEQ ID NO: 601680 - DNA, 25 bp, Homo sapien
aactaggaggtttggaacagcaaca

SEQ ID NO: 601681 - DNA, 25 bp, Homo sapien
tctgccagcatagaggctaggagcc

SEQ ID NO: 601682 - DNA, 25 bp, Homo sapien
acagggactgttatgaagacctcat

SEQ ID NO: 601683 - DNA, 25 bp, Homo sapien
agccgctgcatcactggttaatccg

SEQ ID NO: 601684 - DNA, 25 bp, Homo sapien
gagaagtcgtctgtgtatgtaaaca

SEQ ID NO: 601685 - DNA, 25 bp, Homo sapien
taatccgcaacttcacaaggcagcc

SEQ ID NO: 601686 - DNA, 25 bp, Homo sapien
gtcgcggcgggctctgcggagcagc

SEQ ID NO: 601687 - DNA, 25 bp, Homo sapien
gagcagcctgttcggcgacaccccc

SEQ ID NO: 601688 - DNA, 25 bp, Homo sapien
ccatgtcgggcaggttgggcgaggg

SEQ ID NO: 601689 - DNA, 25 bp, Homo sapien
cacccccgcccgctgatggatgccg

SEQ ID NO: 601690 - DNA, 25 bp, Homo sapien
gacctgggctgcattcaccttggga

SEQ ID NO: 601691 - DNA, 25 bp, Homo sapien
tgtccaaagtcataaggctgtgcca

SEQ ID NO: 601692 - DNA, 25 bp, Homo sapien
ttactaatgaggatgcacacgtgca

SEQ ID NO: 601693 - DNA, 25 bp, Homo sapien
tccgatctgatcagctttgggcagg

SEQ ID NO: 601694 - DNA, 25 bp, Homo sapien
tagggtggcggaggggcatcagatg

SEQ ID NO: 601695 - DNA, 25 bp, Homo sapien
tggcggaggggcatcagatgcaccc

SEQ ID NO: 601696 - DNA, 25 bp, Homo sapien
gtggcggaggggcatcagatgcacc

SEQ ID NO: 601697 - DNA, 25 bp, Homo sapien
aggtagggtggcggaggggcatcag

SEQ ID NO: 601698 - DNA, 25 bp, Homo sapien
gcattggcatgaaggagatcatgtg

SEQ ID NO: 601699 - DNA, 25 bp, Homo sapien
tgcattggcatgaaggagatcatgt

SEQ ID NO: 601700 - DNA, 25 bp, Homo sapien
cattggcatgaaggagatcatgtga

SEQ ID NO: 601701 - DNA, 25 bp, Homo sapien
ctgcattggcatgaaggagatcatg

SEQ ID NO: 601702 - DNA, 25 bp, Homo sapien
agcaggccgcgtgtcctgctgggat

SEQ ID NO: 601703 - DNA, 25 bp, Homo sapien
ctgttcagcaggccgcgtgtcctgc

SEQ ID NO: 601704 - DNA, 25 bp, Homo sapien
tcacctcagagtcggggcctgtctc

SEQ ID NO: 601705 - DNA, 25 bp, Homo sapien
agtcggggcctgtctctgttgtcat

SEQ ID NO: 601706 - DNA, 25 bp, Homo sapien
aggtacgcccatgctctcgggcaca

SEQ ID NO: 601707 - DNA, 25 bp, Homo sapien
gcaggaaaggtacgcccatgctctc

SEQ ID NO: 601708 - DNA, 25 bp, Homo sapien
aaaggtacgcccatgctctcgggca

SEQ ID NO: 601709 - DNA, 25 bp, Homo sapien
ggaaaggtacgcccatgctctcggg

SEQ ID NO: 601710 - DNA, 25 bp, Homo sapien
gacccggcagatggcactcttgtat

SEQ ID NO: 601711 - DNA, 25 bp, Homo sapien
tggtcctctccgaaaggccatcggc

SEQ ID NO: 601712 - DNA, 25 bp, Homo sapien
tcacactcatactccgaggcatcaa

SEQ ID NO: 601713 - DNA, 25 bp, Homo sapien
ttgctgggcgtggtcctctccgaaa

SEQ ID NO: 601714 - DNA, 25 bp, Homo sapien
cacagaccaggtcaaacagcacctg

SEQ ID NO: 601715 - DNA, 25 bp, Homo sapien
ggccgaagtagtccttctctaggag

SEQ ID NO: 601716 - DNA, 25 bp, Homo sapien
gtcaggccgaagtagtccttctcta

SEQ ID NO: 601717 - DNA, 25 bp, Homo sapien
ctctaggaggttgaggtgttcacag

SEQ ID NO: 601718 - DNA, 25 bp, Homo sapien
ttgatctccttggaggggtccagcc

SEQ ID NO: 601719 - DNA, 25 bp, Homo sapien
tcttgatctccttggaggggtccag

SEQ ID NO: 601720 - DNA, 25 bp, Homo sapien
cttcttgatctccttggaggggtcc

SEQ ID NO: 601721 - DNA, 25 bp, Homo sapien
tccggatctgcttcttgatctcctt

SEQ ID NO: 601722 - DNA, 25 bp, Homo sapien
tccccaaacacaacaagccactcac

SEQ ID NO: 601723 - DNA, 25 bp, Homo sapien
acctccccaaacacaacaagccact

SEQ ID NO: 601724 - DNA, 25 bp, Homo sapien
ctccccaaacacaacaagccactca

SEQ ID NO: 601725 - DNA, 25 bp, Homo sapien
ccacctccccaaacacaacaagcca

SEQ ID NO: 601726 - DNA, 25 bp, Homo sapien
aggatcaggcgggtagaacttgact

SEQ ID NO: 601727 - DNA, 25 bp, Homo sapien
gtagaacttgactgtgaaggcaaaa

SEQ ID NO: 601728 - DNA, 25 bp, Homo sapien
gctgggcaggatcaggcgggtagaa

SEQ ID NO: 601729 - DNA, 25 bp, Homo sapien
caggcgggtagaacttgactgtgaa

SEQ ID NO: 601730 - DNA, 25 bp, Homo sapien
tcggtaggcgactgcatttgcagct

SEQ ID NO: 601731 - DNA, 25 bp, Homo sapien
ctcggtaggcgactgcatttgcagc

SEQ ID NO: 601732 - DNA, 25 bp, Homo sapien
cggtaggcgactgcatttgcagctg

SEQ ID NO: 601733 - DNA, 25 bp, Homo sapien
ctaggactaatgacgccaaagccca

SEQ ID NO: 601734 - DNA, 25 bp, Homo sapien
ctgacctcagggctcagaactagga

SEQ ID NO: 601735 - DNA, 25 bp, Homo sapien
caggcctgatctgttccaggaacat

SEQ ID NO: 601736 - DNA, 25 bp, Homo sapien
cctcagggctcagaactaggactaa

SEQ ID NO: 601737 - DNA, 25 bp, Homo sapien
cagccggcccgtgatgatgtctgcc

SEQ ID NO: 601738 - DNA, 25 bp, Homo sapien
agcggagctcgctgacatagttgcc

SEQ ID NO: 601739 - DNA, 25 bp, Homo sapien
tatgtcttatgcagctccatgatcc

SEQ ID NO: 601740 - DNA, 25 bp, Homo sapien
tgcgtgacaaaggagcatggcagcc

SEQ ID NO: 601741 - DNA, 25 bp, Homo sapien
tacatggaaagcttcttggcattct

SEQ ID NO: 601742 - DNA, 25 bp, Homo sapien
tctctaagaagtggatttctgcttc

SEQ ID NO: 601743 - DNA, 25 bp, Homo sapien
ggtgcaggtctactccgtacatgga

SEQ ID NO: 601744 - DNA, 25 bp, Homo sapien
ttggcatggtgcaggtctactccgt

SEQ ID NO: 601745 - DNA, 25 bp, Homo sapien
ttgggccaggcaaagcggttgattc

SEQ ID NO: 601746 - DNA, 25 bp, Homo sapien
taacatgatgtcgatgccctcagag

SEQ ID NO: 601747 - DNA, 25 bp, Homo sapien
gtcccggtagatgagcaggccattg

SEQ ID NO: 601748 - DNA, 25 bp, Homo sapien
ggttgattctcagccggtcccggta

SEQ ID NO: 601749 - DNA, 25 bp, Homo sapien
gctgaccggtggtttgggagcttaa

SEQ ID NO: 601750 - DNA, 25 bp, Homo sapien
gccaattgtgctctcaaattgctca

SEQ ID NO: 601751 - DNA, 25 bp, Homo sapien
agaccttccacagtctcttggctga

SEQ ID NO: 601752 - DNA, 25 bp, Homo sapien
gaagaatgtatgatgctcgatgcag

SEQ ID NO: 601753 - DNA, 25 bp, Homo sapien
ttgctggaagaacgctcaaagaagg

SEQ ID NO: 601754 - DNA, 25 bp, Homo sapien
tgtaccggaacttggagcccatcac

SEQ ID NO: 601755 - DNA, 25 bp, Homo sapien
gtgcctgggtcctcccactgtaccg

SEQ ID NO: 601756 - DNA, 25 bp, Homo sapien
tgcaggccggtcaatgagggcgctg

SEQ ID NO: 601757 - DNA, 25 bp, Homo sapien
ctccatcaaggctgcgggacatggt

SEQ ID NO: 601758 - DNA, 25 bp, Homo sapien
tccatcaaggctgcgggacatggtg

SEQ ID NO: 601759 - DNA, 25 bp, Homo sapien
tcaaggctgcgggacatggtgtacc

SEQ ID NO: 601760 - DNA, 25 bp, Homo sapien
catcaaggctgcgggacatggtgta

SEQ ID NO: 601761 - DNA, 25 bp, Homo sapien
tttaagccactctctacaaacctaa

SEQ ID NO: 601762 - DNA, 25 bp, Homo sapien
gaatattttctaggcatgatctcat

SEQ ID NO: 601763 - DNA, 25 bp, Homo sapien
tgatgggtacaatttcttaaggtgc

SEQ ID NO: 601764 - DNA, 25 bp, Homo sapien
ttaaggtgctactatgtgccacaga

SEQ ID NO: 601765 - DNA, 25 bp, Homo sapien
atcccgcttgtcaccgtcaggccct

SEQ ID NO: 601766 - DNA, 25 bp, Homo sapien
tgatcttggttggagtcctgacctc

SEQ ID NO: 601767 - DNA, 25 bp, Homo sapien
tcgccatcctcatcccgcttgtcac

SEQ ID NO: 601768 - DNA, 25 bp, Homo sapien
tgcatcatggttctcgctgaccgag

SEQ ID NO: 601769 - DNA, 25 bp, Homo sapien
acgcacactcgaccaagtggaggcc

SEQ ID NO: 601770 - DNA, 25 bp, Homo sapien
gcacgcacactcgaccaagtggagg

SEQ ID NO: 601771 - DNA, 25 bp, Homo sapien
cagagcacgcacactcgaccaagtg

SEQ ID NO: 601772 - DNA, 25 bp, Homo sapien
aggagcccagagcacgcacactcga

SEQ ID NO: 601773 - DNA, 25 bp, Homo sapien
gtctcggcgtggtttcctgctccgg

SEQ ID NO: 601774 - DNA, 25 bp, Homo sapien
ttgtgtctcggcgtggtttcctgct

SEQ ID NO: 601775 - DNA, 25 bp, Homo sapien
tgcttgtgtctcggcgtggtttcct

SEQ ID NO: 601776 - DNA, 25 bp, Homo sapien
gtgtctcggcgtggtttcctgctcc

SEQ ID NO: 601777 - DNA, 25 bp, Homo sapien
aacaggtgcacatcccaaggcacag

SEQ ID NO: 601778 - DNA, 25 bp, Homo sapien
agagacaaaccagggcaaggagaac

SEQ ID NO: 601779 - DNA, 25 bp, Homo sapien
gagaaccaccccaacaggtgcacat

SEQ ID NO: 601780 - DNA, 25 bp, Homo sapien
gccccagagacaaaccagggcaagg

SEQ ID NO: 601781 - DNA, 25 bp, Homo sapien
gatcccggtggatgagtttgctgtt

SEQ ID NO: 601782 - DNA, 25 bp, Homo sapien
gttcccagtctcgatcccggtggat

SEQ ID NO: 601783 - DNA, 25 bp, Homo sapien
cattggctttctcaggggtgccctt

SEQ ID NO: 601784 - DNA, 25 bp, Homo sapien
tgagctcattgatgctggcctggtg

SEQ ID NO: 601785 - DNA, 25 bp, Homo sapien
aacagaggcccttcatggatgcaga

SEQ ID NO: 601786 - DNA, 25 bp, Homo sapien
ttggccagcccacatcaggattgat

SEQ ID NO: 601787 - DNA, 25 bp, Homo sapien
ggactatacttcttgcggctgagca

SEQ ID NO: 601788 - DNA, 25 bp, Homo sapien
gaatggtccatagctccagggtgag

SEQ ID NO: 601789 - DNA, 25 bp, Homo sapien
gtgaacacttccaagcctgcggctg

SEQ ID NO: 601790 - DNA, 25 bp, Homo sapien
cccgctgagagatgtcctgggtcct

SEQ ID NO: 601791 - DNA, 25 bp, Homo sapien
aggctcaggtaccaagtcccgctga

SEQ ID NO: 601792 - DNA, 25 bp, Homo sapien
gagatgctgcgaggcttttctgagt

SEQ ID NO: 601793 - DNA, 25 bp, Homo sapien
gggaccgtcggtgccttgctcagag

SEQ ID NO: 601794 - DNA, 25 bp, Homo sapien
tggagccaggggaccgtcggtgcct

SEQ ID NO: 601795 - DNA, 25 bp, Homo sapien
accgtcggtgccttgctcagagcgc

SEQ ID NO: 601796 - DNA, 25 bp, Homo sapien
ccaggggaccgtcggtgccttgctc

SEQ ID NO: 601797 - DNA, 25 bp, Homo sapien
ctctttctataaatacccaatgctc

SEQ ID NO: 601798 - DNA, 25 bp, Homo sapien
tttctataaatacccaatgctctga

SEQ ID NO: 601799 - DNA, 25 bp, Homo sapien
ctttctataaatacccaatgctctg

SEQ ID NO: 601800 - DNA, 25 bp, Homo sapien
tctttctataaatacccaatgctct

SEQ ID NO: 601801 - DNA, 25 bp, Homo sapien
cttttaggagaccgagctcttctgg

SEQ ID NO: 601802 - DNA, 25 bp, Homo sapien
ggtcacttttaggagaccgagctct

SEQ ID NO: 601803 - DNA, 25 bp, Homo sapien
ggtggtcacttttaggagaccgagc

SEQ ID NO: 601804 - DNA, 25 bp, Homo sapien
ttttaggagaccgagctcttctggc

SEQ ID NO: 601805 - DNA, 25 bp, Homo sapien
aaggataccagcaaggcctgcctgc

SEQ ID NO: 601806 - DNA, 25 bp, Homo sapien
gagtctgccgttggcaaggatacca

SEQ ID NO: 601807 - DNA, 25 bp, Homo sapien
ctaccttggagagtctgccgttggc

SEQ ID NO: 601808 - DNA, 25 bp, Homo sapien
cttgtccaccagaacgtctaccttg

SEQ ID NO: 601809 - DNA, 25 bp, Homo sapien
ttctgccaatgtgcggccggaagcc

SEQ ID NO: 601810 - DNA, 25 bp, Homo sapien
catgcagcggttcctgatggttgcc

SEQ ID NO: 601811 - DNA, 25 bp, Homo sapien
caatagaaacgactggagtcctccc

SEQ ID NO: 601812 - DNA, 25 bp, Homo sapien
tggcttctgcgtgggctggatccaa

SEQ ID NO: 601813 - DNA, 25 bp, Homo sapien
cactcccctctctttgggtgggaag

SEQ ID NO: 601814 - DNA, 25 bp, Homo sapien
ctccatgtgaagaaatgctgaagcc

SEQ ID NO: 601815 - DNA, 25 bp, Homo sapien
aacgtctgtcctgcgggagatccct

SEQ ID NO: 601816 - DNA, 25 bp, Homo sapien
tctaaggaattcagcgtcggcctgg

SEQ ID NO: 601817 - DNA, 25 bp, Homo sapien
catgtctaagaaagggctccctgag

SEQ ID NO: 601818 - DNA, 25 bp, Homo sapien
ggctttcgaaagatggacatgtcta

SEQ ID NO: 601819 - DNA, 25 bp, Homo sapien
tcccctgacccatgggaggttgggc

SEQ ID NO: 601820 - DNA, 25 bp, Homo sapien
ctgccaggtcctcagaatgaccagg

SEQ ID NO: 601821 - DNA, 25 bp, Homo sapien
agggactactctgggctttctgctg

SEQ ID NO: 601822 - DNA, 25 bp, Homo sapien
cttcagggactactctgggctttct

SEQ ID NO: 601823 - DNA, 25 bp, Homo sapien
agaggtatgcgcccctcagcttctt

SEQ ID NO: 601824 - DNA, 25 bp, Homo sapien
aaccccagaggtatgcgcccctcag

SEQ ID NO: 601825 - DNA, 25 bp, Homo sapien
tcttctagggagccctcttggtccc

SEQ ID NO: 601826 - DNA, 25 bp, Homo sapien
atcttctagggagccctcttggtcc

SEQ ID NO: 601827 - DNA, 25 bp, Homo sapien
tatcttctagggagccctcttggtc

SEQ ID NO: 601828 - DNA, 25 bp, Homo sapien
gctccgtgggtctcaaatatccgaa

SEQ ID NO: 601829 - DNA, 25 bp, Homo sapien
aatatccgaattttgttggccactg

SEQ ID NO: 601830 - DNA, 25 bp, Homo sapien
cactcattcggcgagtttcagctcc

SEQ ID NO: 601831 - DNA, 25 bp, Homo sapien
aattttgttggccactgaggtcttg

SEQ ID NO: 601832 - DNA, 25 bp, Homo sapien
tcccacgggtgcctctgaagatacg

SEQ ID NO: 601833 - DNA, 25 bp, Homo sapien
tgccagcgtggtttcacagcctgaa

SEQ ID NO: 601834 - DNA, 25 bp, Homo sapien
ggatgcagaagtgtcctccctgaag

SEQ ID NO: 601835 - DNA, 25 bp, Homo sapien
tctggtagccagaggtatcactgtg

SEQ ID NO: 601836 - DNA, 25 bp, Homo sapien
ctaaaaactacagagcatgcggcca

SEQ ID NO: 601837 - DNA, 25 bp, Homo sapien
gccagcccccatgggcggggagcag

SEQ ID NO: 601838 - DNA, 25 bp, Homo sapien
aaaaactacagagcatgcggccagc

SEQ ID NO: 601839 - DNA, 25 bp, Homo sapien
aaactacagagcatgcggccagccc

SEQ ID NO: 601840 - DNA, 25 bp, Homo sapien
ggggctggcaaatctcaggcgcccc

SEQ ID NO: 601841 - DNA, 25 bp, Homo sapien
gggtgttggctgctaagttggtgga

SEQ ID NO: 601842 - DNA, 25 bp, Homo sapien
ctaagttggtggagcgcttctcttc

SEQ ID NO: 601843 - DNA, 25 bp, Homo sapien
ttccctgaccgcatctccggatttg

SEQ ID NO: 601844 - DNA, 25 bp, Homo sapien
tggccgggtgaaggtgactgggtca

SEQ ID NO: 601845 - DNA, 25 bp, Homo sapien
catcctggccgggtgaaggtgactg

SEQ ID NO: 601846 - DNA, 25 bp, Homo sapien
tgactgggtcatcagggcacagagg

SEQ ID NO: 601847 - DNA, 25 bp, Homo sapien
ctaaggcggcgatgcatcctggccg

SEQ ID NO: 601848 - DNA, 25 bp, Homo sapien
ctagggattcagtgggcttagacat

SEQ ID NO: 601849 - DNA, 25 bp, Homo sapien
gaggtgtgagggagacattccagac

SEQ ID NO: 601850 - DNA, 25 bp, Homo sapien
cattcacttgctaagcgagcctcca

SEQ ID NO: 601851 - DNA, 25 bp, Homo sapien
cccatgaaagatttgtaaagaactt

SEQ ID NO: 601852 - DNA, 25 bp, Homo sapien
gacgtggtggtttgactttctcctc

SEQ ID NO: 601853 - DNA, 25 bp, Homo sapien
cgtggtggtttgactttctcctcgg

SEQ ID NO: 601854 - DNA, 25 bp, Homo sapien
gtttgactttctcctcggagccctc

SEQ ID NO: 601855 - DNA, 25 bp, Homo sapien
ggtggtttgactttctcctcggagc

SEQ ID NO: 601856 - DNA, 25 bp, Homo sapien
gagaagtcttcgaaggcgctgccat

SEQ ID NO: 601857 - DNA, 25 bp, Homo sapien
gcttttgtcccggtcgagctcaggc

SEQ ID NO: 601858 - DNA, 25 bp, Homo sapien
gcctccaggctagacgtagagctga

SEQ ID NO: 601859 - DNA, 25 bp, Homo sapien
tagagctgaccgtgatgctggagca

SEQ ID NO: 601860 - DNA, 25 bp, Homo sapien
agggccctctgagcatgcggtgccc

SEQ ID NO: 601861 - DNA, 25 bp, Homo sapien
gggccctctgagcatgcggtgccca

SEQ ID NO: 601862 - DNA, 25 bp, Homo sapien
ggccctctgagcatgcggtgcccag

SEQ ID NO: 601863 - DNA, 25 bp, Homo sapien
tctggtctgcagtacggcctccggc

SEQ ID NO: 601864 - DNA, 25 bp, Homo sapien
tatccatagcggagactctggtctg

SEQ ID NO: 601865 - DNA, 25 bp, Homo sapien
ggcctccggctcaatcttctttcta

SEQ ID NO: 601866 - DNA, 25 bp, Homo sapien
tctaatggccagactgctgacagtc

SEQ ID NO: 601867 - DNA, 25 bp, Homo sapien
atggagggagtggttgctatgaact

SEQ ID NO: 601868 - DNA, 25 bp, Homo sapien
gagggagtggttgctatgaactccc

SEQ ID NO: 601869 - DNA, 25 bp, Homo sapien
catggtggtcgatatggtctccgtg

SEQ ID NO: 601870 - DNA, 25 bp, Homo sapien
gagtggttgctatgaactccctccc

SEQ ID NO: 601871 - DNA, 25 bp, Homo sapien
tagccctacaagcatcccaatgaca

SEQ ID NO: 601872 - DNA, 25 bp, Homo sapien
ggatttaaatttagccctacaagca

SEQ ID NO: 601873 - DNA, 25 bp, Homo sapien
ttaaatttagccctacaagcatccc

SEQ ID NO: 601874 - DNA, 25 bp, Homo sapien
catatgaacggatttaaatttagcc

SEQ ID NO: 601875 - DNA, 25 bp, Homo sapien
gaaagagaacggatttccgtggcca

SEQ ID NO: 601876 - DNA, 25 bp, Homo sapien
aacggatttccgtggccaccgtctg

SEQ ID NO: 601877 - DNA, 25 bp, Homo sapien
tttccgtggccaccgtctgtgggcc

SEQ ID NO: 601878 - DNA, 25 bp, Homo sapien
agctgcccccttcccggacttgaga

SEQ ID NO: 601879 - DNA, 25 bp, Homo sapien
cggtggggagggccactcatgagat

SEQ ID NO: 601880 - DNA, 25 bp, Homo sapien
ggcggtggggagggccactcatgag

SEQ ID NO: 601881 - DNA, 25 bp, Homo sapien
tgggcggtggggagggccactcatg

SEQ ID NO: 601882 - DNA, 25 bp, Homo sapien
ggtggggagggccactcatgagatt

SEQ ID NO: 601883 - DNA, 25 bp, Homo sapien
caagaatactagaatcttcagaaaa

SEQ ID NO: 601884 - DNA, 25 bp, Homo sapien
ggtgacgtttcgaagccaagatgct

SEQ ID NO: 601885 - DNA, 25 bp, Homo sapien
gatgctttcagccattaagaattca

SEQ ID NO: 601886 - DNA, 25 bp, Homo sapien
gaaaactagacccatcaaattctca

SEQ ID NO: 601887 - DNA, 25 bp, Homo sapien
ccacccagggtgtcaggtaaggaca

SEQ ID NO: 601888 - DNA, 25 bp, Homo sapien
tgctggtgaggacatctttcccgat

SEQ ID NO: 601889 - DNA, 25 bp, Homo sapien
cgtaggtgctggtgaggacatcttt

SEQ ID NO: 601890 - DNA, 25 bp, Homo sapien
tggtgaggacatctttcccgatgat

SEQ ID NO: 601891 - DNA, 25 bp, Homo sapien
gtaggtgctggtgaggacatctttc

SEQ ID NO: 601892 - DNA, 25 bp, Homo sapien
tttggtgacatgggtggtggtggag

SEQ ID NO: 601893 - DNA, 25 bp, Homo sapien
aggttgagagggtttccgcagtggc

SEQ ID NO: 601894 - DNA, 25 bp, Homo sapien
gtggaggttgagagggtttccgcag

SEQ ID NO: 601895 - DNA, 25 bp, Homo sapien
gttgagagggtttccgcagtggcgc

SEQ ID NO: 601896 - DNA, 25 bp, Homo sapien
cgcttctcgatccttgtctcagaaa

SEQ ID NO: 601897 - DNA, 25 bp, Homo sapien
catcttcatccccagtaatgatgat

SEQ ID NO: 601898 - DNA, 25 bp, Homo sapien
tccccagtaatgatgattcgcttct

SEQ ID NO: 601899 - DNA, 25 bp, Homo sapien
gatgattcgcttctcgatccttgtc

SEQ ID NO: 601900 - DNA, 25 bp, Homo sapien
ctttggttaccagcatatcaggatg

SEQ ID NO: 601901 - DNA, 25 bp, Homo sapien
gtctgtttctctgtatacgacagct

SEQ ID NO: 601902 - DNA, 25 bp, Homo sapien
atcaggatgctgcagtttggcctcc

SEQ ID NO: 601903 - DNA, 25 bp, Homo sapien
tgcagtttggcctccttgatggcca

SEQ ID NO: 601904 - DNA, 25 bp, Homo sapien
gagtgactttccacgctcatagcaa

SEQ ID NO: 601905 - DNA, 25 bp, Homo sapien
tcatagcaagaacttcaagaaggaa

SEQ ID NO: 601906 - DNA, 25 bp, Homo sapien
gtgtgacatgagtgactttccacgc

SEQ ID NO: 601907 - DNA, 25 bp, Homo sapien
cacgctcatagcaagaacttcaaga

SEQ ID NO: 601908 - DNA, 25 bp, Homo sapien
tcctttctgttgtccgtgggcttgc

SEQ ID NO: 601909 - DNA, 25 bp, Homo sapien
tttctgttgtccgtgggcttgctgt

SEQ ID NO: 601910 - DNA, 25 bp, Homo sapien
tctgttgtccgtgggcttgctgtgt

SEQ ID NO: 601911 - DNA, 25 bp, Homo sapien
cctttctgttgtccgtgggcttgct

SEQ ID NO: 601912 - DNA, 25 bp, Homo sapien
gcttgggttggaccagaaatgccag

SEQ ID NO: 601913 - DNA, 25 bp, Homo sapien
gtcggagaatccagaatgaaggccc

SEQ ID NO: 601914 - DNA, 25 bp, Homo sapien
gtcgcagctgggacgtcagtgttgc

SEQ ID NO: 601915 - DNA, 25 bp, Homo sapien
tgaaggccccttcttaatggttctc

SEQ ID NO: 601916 - DNA, 25 bp, Homo sapien
cccagtctctcatcagtgacagtac

SEQ ID NO: 601917 - DNA, 25 bp, Homo sapien
tatatatatatgcttttcccttccc

SEQ ID NO: 601918 - DNA, 25 bp, Homo sapien
cttcccagtctctcatcagtgacag

SEQ ID NO: 601919 - DNA, 25 bp, Homo sapien
tatatatatgcttttcccttcccag

SEQ ID NO: 601920 - DNA, 25 bp, Homo sapien
tctgcaaaggaaatgtaggtgttca

SEQ ID NO: 601921 - DNA, 25 bp, Homo sapien
taggtgttcagatgtcggttgttgc

SEQ ID NO: 601922 - DNA, 25 bp, Homo sapien
gtgttcagatgtcggttgttgctgt

SEQ ID NO: 601923 - DNA, 25 bp, Homo sapien
tcagatgtcggttgttgctgtcagc

SEQ ID NO: 601924 - DNA, 25 bp, Homo sapien
aggtaggttttgcagcccagtgtca

SEQ ID NO: 601925 - DNA, 25 bp, Homo sapien
caaatggaattgctcgtctgctaac

SEQ ID NO: 601926 - DNA, 25 bp, Homo sapien
tacaatcatcgtggtctggcttgcg

SEQ ID NO: 601927 - DNA, 25 bp, Homo sapien
ggcgggagggacttctacaatcatc

SEQ ID NO: 601928 - DNA, 25 bp, Homo sapien
tcaaaggagagtcatctgcagtggc

SEQ ID NO: 601929 - DNA, 25 bp, Homo sapien
caaaggagagtcatctgcagtggcc

SEQ ID NO: 601930 - DNA, 25 bp, Homo sapien
ttcaaagcacatccgtacaaacctc

SEQ ID NO: 601931 - DNA, 25 bp, Homo sapien
caatgtctacttcccttcctgtggc

SEQ ID NO: 601932 - DNA, 25 bp, Homo sapien
tatgtaatatacataacttcaaagc

SEQ ID NO: 601933 - DNA, 25 bp, Homo sapien
caagctgcaccttcataatgagaaa

SEQ ID NO: 601934 - DNA, 25 bp, Homo sapien
gataaggactaagccagggacctct

SEQ ID NO: 601935 - DNA, 25 bp, Homo sapien
tagctgggccagttcagtgagatct

SEQ ID NO: 601936 - DNA, 25 bp, Homo sapien
gagaagactgaaaaccaaggcaagc

SEQ ID NO: 601937 - DNA, 25 bp, Homo sapien
tgtggcaacttcagcagcagagtcc

SEQ ID NO: 601938 - DNA, 25 bp, Homo sapien
tggagcctatgagcaacatcacccg

SEQ ID NO: 601939 - DNA, 25 bp, Homo sapien
tcagagaagtagcttgtggcagaca

SEQ ID NO: 601940 - DNA, 25 bp, Homo sapien
tgatctttcagggtctgccccatga

SEQ ID NO: 601941 - DNA, 25 bp, Homo sapien
ggtcttatgcagagctggagcctat

SEQ ID NO: 601942 - DNA, 25 bp, Homo sapien
ccttcttcagcctgagaatagtccc

SEQ ID NO: 601943 - DNA, 25 bp, Homo sapien
ctcaggtggctcctcaggttccgcc

SEQ ID NO: 601944 - DNA, 25 bp, Homo sapien
ttcagcctgagaatagtccctggca

SEQ ID NO: 601945 - DNA, 25 bp, Homo sapien
gagaatagtccctggcacaagcagg

SEQ ID NO: 601946 - DNA, 25 bp, Homo sapien
tccctgggctatgccccgataggtt

SEQ ID NO: 601947 - DNA, 25 bp, Homo sapien
catccctgggctatgccccgatagg

SEQ ID NO: 601948 - DNA, 25 bp, Homo sapien
tatgccccgataggttggcgagagt

SEQ ID NO: 601949 - DNA, 25 bp, Homo sapien
gctatgccccgataggttggcgaga

SEQ ID NO: 601950 - DNA, 25 bp, Homo sapien
tagcaaagtagaaaaagaccctgga

SEQ ID NO: 601951 - DNA, 25 bp, Homo sapien
tgacaagccaaagggacgcatctaa

SEQ ID NO: 601952 - DNA, 25 bp, Homo sapien
cacatggtgagttaggagctgagcc

SEQ ID NO: 601953 - DNA, 25 bp, Homo sapien
tgagttcctagaccgaagtggccca

SEQ ID NO: 601954 - DNA, 25 bp, Homo sapien
catgttctaagttgggatgtctcca

SEQ ID NO: 601955 - DNA, 25 bp, Homo sapien
taacggactgtttgcctgtgttggc

SEQ ID NO: 601956 - DNA, 25 bp, Homo sapien
aaggcctggaccaccttgagttcca

SEQ ID NO: 601957 - DNA, 25 bp, Homo sapien
actagcctgtgggttcatgaagggc

SEQ ID NO: 601958 - DNA, 25 bp, Homo sapien
gaaagtatacggaaatgctcaggat

SEQ ID NO: 601959 - DNA, 25 bp, Homo sapien
aataaaaggaaagtgtggtgtgtgc

SEQ ID NO: 601960 - DNA, 25 bp, Homo sapien
cctcaggtggtccaagggatgagtt

SEQ ID NO: 601961 - DNA, 25 bp, Homo sapien
cacatggaaaagactcgctggtgag

SEQ ID NO: 601962 - DNA, 25 bp, Homo sapien
cacgttccggtacagcggaaacgca

SEQ ID NO: 601963 - DNA, 25 bp, Homo sapien
gaagttctccagctttggcgtctga

SEQ ID NO: 601964 - DNA, 25 bp, Homo sapien
caggttccgccggatgcaaggttgc

SEQ ID NO: 601965 - DNA, 25 bp, Homo sapien
agctttggcgtctgactggagcgac

SEQ ID NO: 601966 - DNA, 25 bp, Homo sapien
agcgtcccacaaacagagaaccagc

SEQ ID NO: 601967 - DNA, 25 bp, Homo sapien
gaaaaccgcgacgtaactctggcga

SEQ ID NO: 601968 - DNA, 25 bp, Homo sapien
cgaggtgggcctagttcaaggcact

SEQ ID NO: 601969 - DNA, 25 bp, Homo sapien
cagagccaggtcgagtgcaatcagg

SEQ ID NO: 601970 - DNA, 25 bp, Homo sapien
tcatcgccacgagacttgagtcctg

SEQ ID NO: 601971 - DNA, 25 bp, Homo sapien
tccgtctcaatgatcacaactgcag

SEQ ID NO: 601972 - DNA, 25 bp, Homo sapien
tttggatgtttgattgaaggctgtc

SEQ ID NO: 601973 - DNA, 25 bp, Homo sapien
tcaatgatcacaactgcagttttgg

SEQ ID NO: 601974 - DNA, 25 bp, Homo sapien
ggtcaggtctcctgtgatataatct

SEQ ID NO: 601975 - DNA, 25 bp, Homo sapien
caggtctcctgtgatataatctggg

SEQ ID NO: 601976 - DNA, 25 bp, Homo sapien
gctaggtcaggtctcctgtgatata

SEQ ID NO: 601977 - DNA, 25 bp, Homo sapien
gggctaggtcaggtctcctgtgata

SEQ ID NO: 601978 - DNA, 25 bp, Homo sapien
gccagtggtgggtgaccaaaagaac

SEQ ID NO: 601979 - DNA, 25 bp, Homo sapien
gggccagtggtgggtgaccaaaaga

SEQ ID NO: 601980 - DNA, 25 bp, Homo sapien
agaaccctttttctttgatgaacag

SEQ ID NO: 601981 - DNA, 25 bp, Homo sapien
ggccagtggtgggtgaccaaaagaa

SEQ ID NO: 601982 - DNA, 25 bp, Homo sapien
cacaggtagcacatcggaaaaggca

SEQ ID NO: 601983 - DNA, 25 bp, Homo sapien
catacgagggcctacttccttcgga

SEQ ID NO: 601984 - DNA, 25 bp, Homo sapien
ttggttatctcagctggcgtggcac

SEQ ID NO: 601985 - DNA, 25 bp, Homo sapien
tgagaagcggatctctgtcccggct

SEQ ID NO: 601986 - DNA, 25 bp, Homo sapien
gacagatagaaactgcggaagcccc

SEQ ID NO: 601987 - DNA, 25 bp, Homo sapien
cagggctaagggtaaagacacacct

SEQ ID NO: 601988 - DNA, 25 bp, Homo sapien
tccaaaacacctctgctaatatcct

SEQ ID NO: 601989 - DNA, 25 bp, Homo sapien
gactaacacaagatgtactccctat

SEQ ID NO: 601990 - DNA, 25 bp, Homo sapien
taggactgggctctatcagtggttc

SEQ ID NO: 601991 - DNA, 25 bp, Homo sapien
tgcactataccatgtaaccctcagc

SEQ ID NO: 601992 - DNA, 25 bp, Homo sapien
cagactgctagagaagaggtattcc

SEQ ID NO: 601993 - DNA, 25 bp, Homo sapien
gggccttcgtatctgtagctctaac

SEQ ID NO: 601994 - DNA, 25 bp, Homo sapien
gcccaactccacaaggcgatcagga

SEQ ID NO: 601995 - DNA, 25 bp, Homo sapien
ggtgtggtgcttcatcatggctgct

SEQ ID NO: 601996 - DNA, 25 bp, Homo sapien
gatctcaccaagctggtggtacagg

SEQ ID NO: 601997 - DNA, 25 bp, Homo sapien
gcttctgaccggcacaggaggttca

SEQ ID NO: 601998 - DNA, 25 bp, Homo sapien
gagacaatgtctacgaagaagtcag

SEQ ID NO: 601999 - DNA, 25 bp, Homo sapien
caaatccaagtaccccagtgttagg

SEQ ID NO: 602000 - DNA, 25 bp, Homo sapien
ggcatagaggcacttacaattgagt

SEQ ID NO: 602001 - DNA, 25 bp, Homo sapien
catgtgcatcagctcagtcagaaag

SEQ ID NO: 602002 - DNA, 25 bp, Homo sapien
gctgagtaaaccaaagcagtgggag

SEQ ID NO: 602003 - DNA, 25 bp, Homo sapien
ttagaaaagcgttctgtacctctga

SEQ ID NO: 602004 - DNA, 25 bp, Homo sapien
caacagtaggttggctttagaaaag

SEQ ID NO: 602005 - DNA, 25 bp, Homo sapien
gggactcatccaacagtaggttggc

SEQ ID NO: 602006 - DNA, 25 bp, Homo sapien
tctgagaaacaggacctcgatgaag

SEQ ID NO: 602007 - DNA, 25 bp, Homo sapien
ctgctggttgtgctaacaatggtct

SEQ ID NO: 602008 - DNA, 25 bp, Homo sapien
caatggtctggacagccagcaacac

SEQ ID NO: 602009 - DNA, 25 bp, Homo sapien
tgctaacaatggtctggacagccag

SEQ ID NO: 602010 - DNA, 25 bp, Homo sapien
gtctggacagccagcaacaccgtgg

SEQ ID NO: 602011 - DNA, 25 bp, Homo sapien
tctaatcatatacaggagcccacca

SEQ ID NO: 602012 - DNA, 25 bp, Homo sapien
gcagcataaatgagatcacctgagg

SEQ ID NO: 602013 - DNA, 25 bp, Homo sapien
gaccaggaaggtaaaaagcagcata

SEQ ID NO: 602014 - DNA, 25 bp, Homo sapien
aagattttgtttccacttgcagcag

SEQ ID NO: 602015 - DNA, 25 bp, Homo sapien
taaatagtacttagtttccaagcaa

SEQ ID NO: 602016 - DNA, 25 bp, Homo sapien
tacgccttcttcaggaaacttaaca

SEQ ID NO: 602017 - DNA, 25 bp, Homo sapien
ccttaatctcagcatatcaatactg

SEQ ID NO: 602018 - DNA, 25 bp, Homo sapien
tcaacactttttaacgtcactggga

SEQ ID NO: 602019 - DNA, 25 bp, Homo sapien
gcaaccaccatatgatacatgttca

SEQ ID NO: 602020 - DNA, 25 bp, Homo sapien
catatgatacatgttcacagtgttt

SEQ ID NO: 602021 - DNA, 25 bp, Homo sapien
ccatgcaaccaccatatgatacatg

SEQ ID NO: 602022 - DNA, 25 bp, Homo sapien
tatatatatacccccatgcaaccac

SEQ ID NO: 602023 - DNA, 25 bp, Homo sapien
ctaaacacaggagtgggaagcgcag

SEQ ID NO: 602024 - DNA, 25 bp, Homo sapien
caaacagttttagctctggaggccc

SEQ ID NO: 602025 - DNA, 25 bp, Homo sapien
gagccattccgttggagtagcagca

SEQ ID NO: 602026 - DNA, 25 bp, Homo sapien
tgttggatcatacgggaactccctg

SEQ ID NO: 602027 - DNA, 25 bp, Homo sapien
ggataagtcactcctgagaagacgg

SEQ ID NO: 602028 - DNA, 25 bp, Homo sapien
caccagtcggtactaaggtcctaag

SEQ ID NO: 602029 - DNA, 25 bp, Homo sapien
ggaaaattactatctgggcagaggc

SEQ ID NO: 602030 - DNA, 25 bp, Homo sapien
ggttctactggacacccgggcagta

SEQ ID NO: 602031 - DNA, 25 bp, Homo sapien
cagcaaagtcccaccggaacttctt

SEQ ID NO: 602032 - DNA, 25 bp, Homo sapien
cagtcctcaggttccgcagcaaagt

SEQ ID NO: 602033 - DNA, 25 bp, Homo sapien
agtcctcaggttccgcagcaaagtc

SEQ ID NO: 602034 - DNA, 25 bp, Homo sapien
aacttcttggtcaggtgagcttgga

SEQ ID NO: 602035 - DNA, 25 bp, Homo sapien
tcgatggagaaagctgaagctgacc

SEQ ID NO: 602036 - DNA, 25 bp, Homo sapien
gaagctgaccacctgctagattgaa

SEQ ID NO: 602037 - DNA, 25 bp, Homo sapien
gatgggtacagcctctttggcaatg

SEQ ID NO: 602038 - DNA, 25 bp, Homo sapien
caggcggcaattcgggctgatctcc

SEQ ID NO: 602039 - DNA, 25 bp, Homo sapien
tacttgtctagagaggaaccctgcc

SEQ ID NO: 602040 - DNA, 25 bp, Homo sapien
ggtgtgagccccagtcttggaaaag

SEQ ID NO: 602041 - DNA, 25 bp, Homo sapien
gaaacagtcacggtggctctggtga

SEQ ID NO: 602042 - DNA, 25 bp, Homo sapien
attactccggtgactgacagctcca

SEQ ID NO: 602043 - DNA, 25 bp, Homo sapien
attctcctgccacagcctgtagctg

SEQ ID NO: 602044 - DNA, 25 bp, Homo sapien
tgccacagcctgtagctgggactac

SEQ ID NO: 602045 - DNA, 25 bp, Homo sapien
cttgatctccggacttcatgatcca

SEQ ID NO: 602046 - DNA, 25 bp, Homo sapien
atctccggacttcatgatccaccca

SEQ ID NO: 602047 - DNA, 25 bp, Homo sapien
agcttccagatgatcaggactccca

SEQ ID NO: 602048 - DNA, 25 bp, Homo sapien
ttccagatgatcaggactcccacgg

SEQ ID NO: 602049 - DNA, 25 bp, Homo sapien
tcccacggcaaggaggctgatccag

SEQ ID NO: 602050 - DNA, 25 bp, Homo sapien
atgatcaggactcccacggcaagga

SEQ ID NO: 602051 - DNA, 25 bp, Homo sapien
taggaagcccgtgggcggctggaag

SEQ ID NO: 602052 - DNA, 25 bp, Homo sapien
ttaggaagcccgtgggcggctggaa

SEQ ID NO: 602053 - DNA, 25 bp, Homo sapien
gctggaagcagcttgtgagcagagc

SEQ ID NO: 602054 - DNA, 25 bp, Homo sapien
tgagcagagctggaaccggctgaga

SEQ ID NO: 602055 - DNA, 25 bp, Homo sapien
caggcagtgagaggtgaaagctggg

SEQ ID NO: 602056 - DNA, 25 bp, Homo sapien
tcaggcagtgagaggtgaaagctgg

SEQ ID NO: 602057 - DNA, 25 bp, Homo sapien
caaagcgtggtgtagtcatatgcaa

SEQ ID NO: 602058 - DNA, 25 bp, Homo sapien
tggacacaagctaaaacgctgggca

SEQ ID NO: 602059 - DNA, 25 bp, Homo sapien
gcaaggtgccatgcagccactaaaa

SEQ ID NO: 602060 - DNA, 25 bp, Homo sapien
taatatgtgctgagtcctaagactg

SEQ ID NO: 602061 - DNA, 25 bp, Homo sapien
catagaaagactttatccctacaat

SEQ ID NO: 602062 - DNA, 25 bp, Homo sapien
agataaaagtgatgccgtgggccgg

SEQ ID NO: 602063 - DNA, 25 bp, Homo sapien
cgtgggccgggtgtggcgactcacg

SEQ ID NO: 602064 - DNA, 25 bp, Homo sapien
caacatagaaagactttatccctac

SEQ ID NO: 602065 - DNA, 25 bp, Homo sapien
gtggtggattccgaactgttgccag

SEQ ID NO: 602066 - DNA, 25 bp, Homo sapien
ggccttgggcctgagcgccactgac

SEQ ID NO: 602067 - DNA, 25 bp, Homo sapien
gggcctgagcgccactgacaaagaa

SEQ ID NO: 602068 - DNA, 25 bp, Homo sapien
gattccgaactgttgccagggttgg

SEQ ID NO: 602069 - DNA, 25 bp, Homo sapien
aacaagagtggccactggccctgcc

SEQ ID NO: 602070 - DNA, 25 bp, Homo sapien
ttctcttggcccagacggtccagga

SEQ ID NO: 602071 - DNA, 25 bp, Homo sapien
taatgatgagaacccaacaagagtg

SEQ ID NO: 602072 - DNA, 25 bp, Homo sapien
tcttggcccagacggtccaggacac

SEQ ID NO: 602073 - DNA, 25 bp, Homo sapien
gggccgtgcggctgcgcccaaaacc

SEQ ID NO: 602074 - DNA, 25 bp, Homo sapien
gtgcggctgcgcccaaaaccaggcg

SEQ ID NO: 602075 - DNA, 25 bp, Homo sapien
ccaggcgcggatcgggccgcgggcg

SEQ ID NO: 602076 - DNA, 25 bp, Homo sapien
cgcccaaaaccaggcgcggatcggg

SEQ ID NO: 602077 - DNA, 25 bp, Homo sapien
cgccgcctctcgggtccgctcgcag

SEQ ID NO: 602078 - DNA, 25 bp, Homo sapien
ctctcgggtccgctcgcaggtccgc

SEQ ID NO: 602079 - DNA, 25 bp, Homo sapien
cgcctctcgggtccgctcgcaggtc

SEQ ID NO: 602080 - DNA, 25 bp, Homo sapien
ccgcctctcgggtccgctcgcaggt

SEQ ID NO: 602081 - DNA, 25 bp, Homo sapien
cgcggggcgccgcacgtgggggcct

SEQ ID NO: 602082 - DNA, 25 bp, Homo sapien
cacctggtccatccgccaccagctc

SEQ ID NO: 602083 - DNA, 25 bp, Homo sapien
agctctgaacgcgaacccctgtctc

SEQ ID NO: 602084 - DNA, 25 bp, Homo sapien
tccccgcggccacctggtccatccg

SEQ ID NO: 602085 - DNA, 25 bp, Homo sapien
tcttcccctcgttttctgacagcat

SEQ ID NO: 602086 - DNA, 25 bp, Homo sapien
gctgggagcagacgctcaataggca

SEQ ID NO: 602087 - DNA, 25 bp, Homo sapien
tcccctcgttttctgacagcatggg

SEQ ID NO: 602088 - DNA, 25 bp, Homo sapien
cctcgttttctgacagcatgggtcc

SEQ ID NO: 602089 - DNA, 25 bp, Homo sapien
atgattttcacctccaatagacacg

SEQ ID NO: 602090 - DNA, 25 bp, Homo sapien
gctcaggcgggaggcatgattttca

SEQ ID NO: 602091 - DNA, 25 bp, Homo sapien
tccaatagacacgtcggtcccagat

SEQ ID NO: 602092 - DNA, 25 bp, Homo sapien
tagacacgtcggtcccagatacagg

SEQ ID NO: 602093 - DNA, 25 bp, Homo sapien
ctgtcatccttcactcgacaatatt

SEQ ID NO: 602094 - DNA, 25 bp, Homo sapien
cactcgacaatattcctctctgatc

SEQ ID NO: 602095 - DNA, 25 bp, Homo sapien
cttcactcgacaatattcctctctg

SEQ ID NO: 602096 - DNA, 25 bp, Homo sapien
tcatccttcactcgacaatattcct

SEQ ID NO: 602097 - DNA, 25 bp, Homo sapien
gcccacagcacagggcagacccagc

SEQ ID NO: 602098 - DNA, 25 bp, Homo sapien
cagggcagacccagccctctcaggc

SEQ ID NO: 602099 - DNA, 25 bp, Homo sapien
acagggcagacccagccctctcagg

SEQ ID NO: 602100 - DNA, 25 bp, Homo sapien
acagcacagggcagacccagccctc

SEQ ID NO: 602101 - DNA, 25 bp, Homo sapien
cagactggcgattgtggcaagcccc

SEQ ID NO: 602102 - DNA, 25 bp, Homo sapien
tttcctgcctgagccgacccactcc

SEQ ID NO: 602103 - DNA, 25 bp, Homo sapien
gacagactggcgattgtggcaagcc

SEQ ID NO: 602104 - DNA, 25 bp, Homo sapien
actggcgattgtggcaagcccctgg

SEQ ID NO: 602105 - DNA, 25 bp, Homo sapien
aaagtcgaatgaagtgtgcctgggg

SEQ ID NO: 602106 - DNA, 25 bp, Homo sapien
gagaaagtcgaatgaagtgtgcctg

SEQ ID NO: 602107 - DNA, 25 bp, Homo sapien
agaaagtcgaatgaagtgtgcctgg

SEQ ID NO: 602108 - DNA, 25 bp, Homo sapien
ggagaaagtcgaatgaagtgtgcct

SEQ ID NO: 602109 - DNA, 25 bp, Homo sapien
ccccgacaccccgatccaacagcct

SEQ ID NO: 602110 - DNA, 25 bp, Homo sapien
ttgtccccgacaccccgatccaaca

SEQ ID NO: 602111 - DNA, 25 bp, Homo sapien
ctcttgtccccgacaccccgatcca

SEQ ID NO: 602112 - DNA, 25 bp, Homo sapien
ccgacaccccgatccaacagcctgc

SEQ ID NO: 602113 - DNA, 25 bp, Homo sapien
agctgtagccacgggccagcagcca

SEQ ID NO: 602114 - DNA, 25 bp, Homo sapien
tcagctgtagccacgggccagcagc

SEQ ID NO: 602115 - DNA, 25 bp, Homo sapien
caccagtgcccttgccagcaggcat

SEQ ID NO: 602116 - DNA, 25 bp, Homo sapien
ccagcagccactcggggcccaccag

SEQ ID NO: 602117 - DNA, 25 bp, Homo sapien
cctgcaccactttgtgggctctgtt

SEQ ID NO: 602118 - DNA, 25 bp, Homo sapien
gcaccactttgtgggctctgttccc

SEQ ID NO: 602119 - DNA, 25 bp, Homo sapien
tgcctgcaccactttgtgggctctg

SEQ ID NO: 602120 - DNA, 25 bp, Homo sapien
ctgcctgcaccactttgtgggctct

SEQ ID NO: 602121 - DNA, 25 bp, Homo sapien
gcacgtcatatccatcgcccttttt

SEQ ID NO: 602122 - DNA, 25 bp, Homo sapien
tcgccctttttatcctcacgatgac

SEQ ID NO: 602123 - DNA, 25 bp, Homo sapien
caggatgaatgctgggcacgtcata

SEQ ID NO: 602124 - DNA, 25 bp, Homo sapien
gttgaacaaccaggatgaatgctgg

SEQ ID NO: 602125 - DNA, 25 bp, Homo sapien
tacttcaggcacagttgaatcaggg

SEQ ID NO: 602126 - DNA, 25 bp, Homo sapien
tacaaaaacaggctgcccataggcc

SEQ ID NO: 602127 - DNA, 25 bp, Homo sapien
gtgtcaattacatcctaaagctggc

SEQ ID NO: 602128 - DNA, 25 bp, Homo sapien
tgaatcagggttcaagcttcttagc

SEQ ID NO: 602129 - DNA, 25 bp, Homo sapien
gctccaagccagtcacacccactgg

SEQ ID NO: 602130 - DNA, 25 bp, Homo sapien
caactgctccaagccagtcacaccc

SEQ ID NO: 602131 - DNA, 25 bp, Homo sapien
ccagtgcccgatgaactcccagcat

SEQ ID NO: 602132 - DNA, 25 bp, Homo sapien
tggccactgctccagatcagccccc

SEQ ID NO: 602133 - DNA, 25 bp, Homo sapien
acttgatcagaggtgccggcaggaa

SEQ ID NO: 602134 - DNA, 25 bp, Homo sapien
agcgggcactggaccgagggctggc

SEQ ID NO: 602135 - DNA, 25 bp, Homo sapien
gcacaggaaacacggcaagctgtcg

SEQ ID NO: 602136 - DNA, 25 bp, Homo sapien
gcaggagtcagctcaggagcgggca

SEQ ID NO: 602137 - DNA, 25 bp, Homo sapien
ggcactggccaaaaggccaggaggc

SEQ ID NO: 602138 - DNA, 25 bp, Homo sapien
gcactggccaaaaggccaggaggcg

SEQ ID NO: 602139 - DNA, 25 bp, Homo sapien
ggccaaaaggccaggaggcgctcag

SEQ ID NO: 602140 - DNA, 25 bp, Homo sapien
ctggccaaaaggccaggaggcgctc

SEQ ID NO: 602141 - DNA, 25 bp, Homo sapien
ccagctcgtgccaaggaatcccgtt

SEQ ID NO: 602142 - DNA, 25 bp, Homo sapien
ggaatcccgttctccgtcactgggc

SEQ ID NO: 602143 - DNA, 25 bp, Homo sapien
tgggcactggatggcagtaattttc

SEQ ID NO: 602144 - DNA, 25 bp, Homo sapien
acacgccaggggctgtctgctctgc

SEQ ID NO: 602145 - DNA, 25 bp, Homo sapien
taccctcggacgctattcttatctg

SEQ ID NO: 602146 - DNA, 25 bp, Homo sapien
ggatgcaagcctggtactgccctag

SEQ ID NO: 602147 - DNA, 25 bp, Homo sapien
taccctaggcaagatggtgggaacc

SEQ ID NO: 602148 - DNA, 25 bp, Homo sapien
tcacacagtcaaagggatgacccag

SEQ ID NO: 602149 - DNA, 25 bp, Homo sapien
tgcttgccaacatccagtgctggat

SEQ ID NO: 602150 - DNA, 25 bp, Homo sapien
tgatggcttcccttccccccagcat

SEQ ID NO: 602151 - DNA, 25 bp, Homo sapien
agaaaaggagtgtaaggctgggcat

SEQ ID NO: 602152 - DNA, 25 bp, Homo sapien
cttccccattagcactgatggcttc

SEQ ID NO: 602153 - DNA, 25 bp, Homo sapien
ccccagcatcccctggcctgtgagc

SEQ ID NO: 602154 - DNA, 25 bp, Homo sapien
taatattgctacaaacaatggtgtc

SEQ ID NO: 602155 - DNA, 25 bp, Homo sapien
tattccatcctgcatatatagtaca

SEQ ID NO: 602156 - DNA, 25 bp, Homo sapien
atggctgcatcatattccatcctgc

SEQ ID NO: 602157 - DNA, 25 bp, Homo sapien
cgtagcataatgtttgttttctaag

SEQ ID NO: 602158 - DNA, 25 bp, Homo sapien
aggggccttcaccctagcagggcgc

SEQ ID NO: 602159 - DNA, 25 bp, Homo sapien
ggcggctgtcaccgaggcctttcat

SEQ ID NO: 602160 - DNA, 25 bp, Homo sapien
ggggcggctgtcaccgaggcctttc

SEQ ID NO: 602161 - DNA, 25 bp, Homo sapien
gggcggctgtcaccgaggcctttca

SEQ ID NO: 602162 - DNA, 25 bp, Homo sapien
aatggtaggctagaccctggtggca

SEQ ID NO: 602163 - DNA, 25 bp, Homo sapien
caccagcctgagatgttggagcggc

SEQ ID NO: 602164 - DNA, 25 bp, Homo sapien
tcctctggcacctcgaagtgggagt

SEQ ID NO: 602165 - DNA, 25 bp, Homo sapien
aaaagccgctggactgagtggacca

SEQ ID NO: 602166 - DNA, 25 bp, Homo sapien
acccctgaccctgccagagacccac

SEQ ID NO: 602167 - DNA, 25 bp, Homo sapien
ccagagccctcatcccacccctgac

SEQ ID NO: 602168 - DNA, 25 bp, Homo sapien
ctaggcctcaaaactggtgccgtcc

SEQ ID NO: 602169 - DNA, 25 bp, Homo sapien
ctcaaaactggtgccgtccccagag

SEQ ID NO: 602170 - DNA, 25 bp, Homo sapien
actcagtggggccaccgcagaaaat

SEQ ID NO: 602171 - DNA, 25 bp, Homo sapien
aaaatgagcagatggcgagaacccc

SEQ ID NO: 602172 - DNA, 25 bp, Homo sapien
gaaaatgagcagatggcgagaaccc

SEQ ID NO: 602173 - DNA, 25 bp, Homo sapien
ggggccaccgcagaaaatgagcaga

SEQ ID NO: 602174 - DNA, 25 bp, Homo sapien
tgcgtggccctcagatagctctggc

SEQ ID NO: 602175 - DNA, 25 bp, Homo sapien
cgccgcgccgcggtcttgggtgagg

SEQ ID NO: 602176 - DNA, 25 bp, Homo sapien
atccgtctcgcgtggggacagcagc

SEQ ID NO: 602177 - DNA, 25 bp, Homo sapien
cctcgtcgcccatggccttgatgta

SEQ ID NO: 602178 - DNA, 25 bp, Homo sapien
gtccacacctgtgatgcccgctgca

SEQ ID NO: 602179 - DNA, 25 bp, Homo sapien
cttgaccatctgtgatgcacaggtg

SEQ ID NO: 602180 - DNA, 25 bp, Homo sapien
agcttttggaggccttgaccatctg

SEQ ID NO: 602181 - DNA, 25 bp, Homo sapien
tccacacctgtgatgcccgctgcag

SEQ ID NO: 602182 - DNA, 25 bp, Homo sapien
ctcggacacttggagggcagcagca

SEQ ID NO: 602183 - DNA, 25 bp, Homo sapien
tgacgggggtgtagtcctcttccca

SEQ ID NO: 602184 - DNA, 25 bp, Homo sapien
tccactgaatccaggcggtccagac

SEQ ID NO: 602185 - DNA, 25 bp, Homo sapien
ctgatgcagctggagtcgttgaggc

SEQ ID NO: 602186 - DNA, 25 bp, Homo sapien
tgctcatggccaaacaactggggga

SEQ ID NO: 602187 - DNA, 25 bp, Homo sapien
ctgctcatggccaaacaactggggg

SEQ ID NO: 602188 - DNA, 25 bp, Homo sapien
gctgctcatggccaaacaactgggg

SEQ ID NO: 602189 - DNA, 25 bp, Homo sapien
gaagcgtgcgactattgctgaggct

SEQ ID NO: 602190 - DNA, 25 bp, Homo sapien
cgcttcactgcaggctgactcgcag

SEQ ID NO: 602191 - DNA, 25 bp, Homo sapien
gtctctgccgctgtggactccgctt

SEQ ID NO: 602192 - DNA, 25 bp, Homo sapien
cagtggcaagtcaagcgtctctgcc

SEQ ID NO: 602193 - DNA, 25 bp, Homo sapien
aggtattccctgattgtgtatatga

SEQ ID NO: 602194 - DNA, 25 bp, Homo sapien
caagaatccagaaggtattccctga

SEQ ID NO: 602195 - DNA, 25 bp, Homo sapien
gaatccagaaggtattccctgattg

SEQ ID NO: 602196 - DNA, 25 bp, Homo sapien
tccagaaggtattccctgattgtgt

SEQ ID NO: 602197 - DNA, 25 bp, Homo sapien
gaggaggcagactgccagatggaga

SEQ ID NO: 602198 - DNA, 25 bp, Homo sapien
aagaagctgagtggcgaggaggcag

SEQ ID NO: 602199 - DNA, 25 bp, Homo sapien
aagctgagtggcgaggaggcagact

SEQ ID NO: 602200 - DNA, 25 bp, Homo sapien
aggaggcagactgccagatggagaa

SEQ ID NO: 602201 - DNA, 25 bp, Homo sapien
gcgcgcgtcgtcagggactcccggg

SEQ ID NO: 602202 - DNA, 25 bp, Homo sapien
gtcagccgcgcgcgcgtcgtcaggg

SEQ ID NO: 602203 - DNA, 25 bp, Homo sapien
cgcgcgcgcgtcgtcagggactccc

SEQ ID NO: 602204 - DNA, 25 bp, Homo sapien
agccgcgcgcgcgtcgtcagggact

SEQ ID NO: 602205 - DNA, 25 bp, Homo sapien
tcctccctcacgcagcccggcccga

SEQ ID NO: 602206 - DNA, 25 bp, Homo sapien
cctcacgcagcccggcccgaggctc

SEQ ID NO: 602207 - DNA, 25 bp, Homo sapien
ccctcacgcagcccggcccgaggct

SEQ ID NO: 602208 - DNA, 25 bp, Homo sapien
ctccctcacgcagcccggcccgagg

SEQ ID NO: 602209 - DNA, 25 bp, Homo sapien
gaggaggcggcagcgacgacgtgga

SEQ ID NO: 602210 - DNA, 25 bp, Homo sapien
cgacgtggaccggacagacggacgg

SEQ ID NO: 602211 - DNA, 25 bp, Homo sapien
cagcgacgacgtggaccggacagac

SEQ ID NO: 602212 - DNA, 25 bp, Homo sapien
aggcggcagcgacgacgtggaccgg

SEQ ID NO: 602213 - DNA, 25 bp, Homo sapien
gcggctggacaggacggaagcgcgg

SEQ ID NO: 602214 - DNA, 25 bp, Homo sapien
gacacgggctggaggactggcggct

SEQ ID NO: 602215 - DNA, 25 bp, Homo sapien
cgagccggggagagacaaagcgggc

SEQ ID NO: 602216 - DNA, 25 bp, Homo sapien
gagacaaagagacagcgagccgggg

SEQ ID NO: 602217 - DNA, 25 bp, Homo sapien
cccaaaagatctgggggcgctctga

SEQ ID NO: 602218 - DNA, 25 bp, Homo sapien
tctgagggggagtcccgaagagtgg

SEQ ID NO: 602219 - DNA, 25 bp, Homo sapien
cgctctgagggggagtcccgaagag

SEQ ID NO: 602220 - DNA, 25 bp, Homo sapien
tggggtcgcccagaaagggcggctc

SEQ ID NO: 602221 - DNA, 25 bp, Homo sapien
ccccaaaggatgtgcaagaaactca

SEQ ID NO: 602222 - DNA, 25 bp, Homo sapien
gacctaggagctcccagtggatatg

SEQ ID NO: 602223 - DNA, 25 bp, Homo sapien
gagagaacaaggagagacagcgaca

SEQ ID NO: 602224 - DNA, 25 bp, Homo sapien
agaggaggcgagaccccagcgactt

SEQ ID NO: 602225 - DNA, 25 bp, Homo sapien
gtggcgagaccaccgagacagatgt

SEQ ID NO: 602226 - DNA, 25 bp, Homo sapien
gcacagagtggcgagaccaccgaga

SEQ ID NO: 602227 - DNA, 25 bp, Homo sapien
gcaaagcaggggaccccgatcccga

SEQ ID NO: 602228 - DNA, 25 bp, Homo sapien
agaggcacagagtggcgagaccacc

SEQ ID NO: 602229 - DNA, 25 bp, Homo sapien
gacccagagacccggcaaagacaga

SEQ ID NO: 602230 - DNA, 25 bp, Homo sapien
tcagagacccagagacccggcaaag

SEQ ID NO: 602231 - DNA, 25 bp, Homo sapien
agggggctagggctgaaaaagcaag

SEQ ID NO: 602232 - DNA, 25 bp, Homo sapien
acccagagacccggcaaagacagaa

SEQ ID NO: 602233 - DNA, 25 bp, Homo sapien
tcaagagctccagacacaaagccat

SEQ ID NO: 602234 - DNA, 25 bp, Homo sapien
attgcttcaagagctccagacacaa

SEQ ID NO: 602235 - DNA, 25 bp, Homo sapien
ttcaagagctccagacacaaagcca

SEQ ID NO: 602236 - DNA, 25 bp, Homo sapien
tgcttcaagagctccagacacaaag

SEQ ID NO: 602237 - DNA, 25 bp, Homo sapien
gagcctggctgattacacaatgcct

SEQ ID NO: 602238 - DNA, 25 bp, Homo sapien
aacagggagaactccactggcttcc

SEQ ID NO: 602239 - DNA, 25 bp, Homo sapien
gagaacaatggtcgggaaagagcct

SEQ ID NO: 602240 - DNA, 25 bp, Homo sapien
cttccaggcctgttggtggagaaca

SEQ ID NO: 602241 - DNA, 25 bp, Homo sapien
aggcagaagccataaacctggagaa

SEQ ID NO: 602242 - DNA, 25 bp, Homo sapien
tacagaaccacgatgacagccttcc

SEQ ID NO: 602243 - DNA, 25 bp, Homo sapien
tctgggtgtgtctggttgctgctca

SEQ ID NO: 602244 - DNA, 25 bp, Homo sapien
aattcaagatgagctcagagactgg

SEQ ID NO: 602245 - DNA, 25 bp, Homo sapien
gtgctacctctgctctaaaaccttc

SEQ ID NO: 602246 - DNA, 25 bp, Homo sapien
ccagcctgattcatcctctggaaag

SEQ ID NO: 602247 - DNA, 25 bp, Homo sapien
ttgtgctacctctgctctaaaacct

SEQ ID NO: 602248 - DNA, 25 bp, Homo sapien
gcctgattcatcctctggaaagtct

SEQ ID NO: 602249 - DNA, 25 bp, Homo sapien
tcaatttcctggctgtacactggga

SEQ ID NO: 602250 - DNA, 25 bp, Homo sapien
tggacatgcctactatcagactgga

SEQ ID NO: 602251 - DNA, 25 bp, Homo sapien
taaggaattctaaactggcaccctg

SEQ ID NO: 602252 - DNA, 25 bp, Homo sapien
gagaattccaacagacccagtggtg

SEQ ID NO: 602253 - DNA, 25 bp, Homo sapien
tgtccagattttggtatgacgaaca

SEQ ID NO: 602254 - DNA, 25 bp, Homo sapien
cactgggctcagagtatctgccaaa

SEQ ID NO: 602255 - DNA, 25 bp, Homo sapien
cagttacaattgtaccctgcatacc

SEQ ID NO: 602256 - DNA, 25 bp, Homo sapien
cgaacacggttacagttacaattgt

SEQ ID NO: 602257 - DNA, 25 bp, Homo sapien
ctgttccaaaggagcaaaaaatctc

SEQ ID NO: 602258 - DNA, 25 bp, Homo sapien
cacctctgttccaaaggagcaaaaa

SEQ ID NO: 602259 - DNA, 25 bp, Homo sapien
tagcatttctcaggccacctctgtt

SEQ ID NO: 602260 - DNA, 25 bp, Homo sapien
caaatagcatttctcaggccacctc

SEQ ID NO: 602261 - DNA, 25 bp, Homo sapien
tgctccaggataagggctcacgggc

SEQ ID NO: 602262 - DNA, 25 bp, Homo sapien
ctcacgggctgcaacagtctagacc

SEQ ID NO: 602263 - DNA, 25 bp, Homo sapien
gtctagacctaagccacaggcccaa

SEQ ID NO: 602264 - DNA, 25 bp, Homo sapien
agttcggtttgcagagacttatgcc

SEQ ID NO: 602265 - DNA, 25 bp, Homo sapien
ctgtgcagagtgtaatcaaatattt

SEQ ID NO: 602266 - DNA, 25 bp, Homo sapien
tgtgcagagtgtaatcaaatatttg

SEQ ID NO: 602267 - DNA, 25 bp, Homo sapien
gtgcagagtgtaatcaaatatttgg

SEQ ID NO: 602268 - DNA, 25 bp, Homo sapien
gaatgctgaccatgtacagctggga

SEQ ID NO: 602269 - DNA, 25 bp, Homo sapien
tagactgaggaagcctggacactgt

SEQ ID NO: 602270 - DNA, 25 bp, Homo sapien
tctcctcaagggctgctggtctagc

SEQ ID NO: 602271 - DNA, 25 bp, Homo sapien
tccagcaaaacgtatccagagatgc

SEQ ID NO: 602272 - DNA, 25 bp, Homo sapien
aacctagggcagagcaaattccggg

SEQ ID NO: 602273 - DNA, 25 bp, Homo sapien
caagagtatagcagccaagccagca

SEQ ID NO: 602274 - DNA, 25 bp, Homo sapien
tcacgatgtcttcctactggctggt

SEQ ID NO: 602275 - DNA, 25 bp, Homo sapien
tccgggagcccctaagtatgatctt

SEQ ID NO: 602276 - DNA, 25 bp, Homo sapien
cagggaaagtgaaatgctctgtgaa

SEQ ID NO: 602277 - DNA, 25 bp, Homo sapien
cttcagggaaagtgaaatgctctgt

SEQ ID NO: 602278 - DNA, 25 bp, Homo sapien
gggaaagtgaaatgctctgtgaaag

SEQ ID NO: 602279 - DNA, 25 bp, Homo sapien
tcagggaaagtgaaatgctctgtga

SEQ ID NO: 602280 - DNA, 25 bp, Homo sapien
gaaatacaatgcaggtgcacgtgca

SEQ ID NO: 602281 - DNA, 25 bp, Homo sapien
agtggcccatggcacacgagtctat

SEQ ID NO: 602282 - DNA, 25 bp, Homo sapien
aggtctggtttcaggctcttggcac

SEQ ID NO: 602283 - DNA, 25 bp, Homo sapien
tctcagttccggctgggtgaaagca

SEQ ID NO: 602284 - DNA, 25 bp, Homo sapien
catttcccgagggatgcggaggaca

SEQ ID NO: 602285 - DNA, 25 bp, Homo sapien
tgtgactccatttcccgagggatgc

SEQ ID NO: 602286 - DNA, 25 bp, Homo sapien
ttattgtaaaggttataagctggcc

SEQ ID NO: 602287 - DNA, 25 bp, Homo sapien
aggttataagctggccaaacagagc

SEQ ID NO: 602288 - DNA, 25 bp, Homo sapien
tagatcagaaaacggaagccaacct

SEQ ID NO: 602289 - DNA, 25 bp, Homo sapien
ccaatggaagacaacaggactgccc

SEQ ID NO: 602290 - DNA, 25 bp, Homo sapien
tcttgaaatctatggccaccagcag

SEQ ID NO: 602291 - DNA, 25 bp, Homo sapien
tcatcagagggaaagtaacccagcc

SEQ ID NO: 602292 - DNA, 25 bp, Homo sapien
cattgcagaagctaaggctgggcca

SEQ ID NO: 602293 - DNA, 25 bp, Homo sapien
cctcatttctggtacagacacaact

SEQ ID NO: 602294 - DNA, 25 bp, Homo sapien
tgattacataggttgcattgcagaa

SEQ ID NO: 602295 - DNA, 25 bp, Homo sapien
cctccttgtaaaatgggtgtgatta

SEQ ID NO: 602296 - DNA, 25 bp, Homo sapien
tggtctgcctccctgttctccactg

SEQ ID NO: 602297 - DNA, 25 bp, Homo sapien
ttctccactggtccaactccctgtt

SEQ ID NO: 602298 - DNA, 25 bp, Homo sapien
gtccaactccctgttctccactttc

SEQ ID NO: 602299 - DNA, 25 bp, Homo sapien
cactttctccactgagattcccaga

SEQ ID NO: 602300 - DNA, 25 bp, Homo sapien
gactgcaatgaccaagacagacaca

SEQ ID NO: 602301 - DNA, 25 bp, Homo sapien
cattccgtccgcaaggatttctgga

SEQ ID NO: 602302 - DNA, 25 bp, Homo sapien
tagctctgggcttagccattccgtc

SEQ ID NO: 602303 - DNA, 25 bp, Homo sapien
gagaacgagggtcaagactgcaatg

SEQ ID NO: 602304 - DNA, 25 bp, Homo sapien
tgaagtggtgcgtggagggaccggt

SEQ ID NO: 602305 - DNA, 25 bp, Homo sapien
gggtcttcttatacgccactaggca

SEQ ID NO: 602306 - DNA, 25 bp, Homo sapien
gtactgctctggactgtgactgaga

SEQ ID NO: 602307 - DNA, 25 bp, Homo sapien
tgaacggctttgaagtggtgcgtgg

SEQ ID NO: 602308 - DNA, 25 bp, Homo sapien
cggtcgggtactgctgtccaggctg

SEQ ID NO: 602309 - DNA, 25 bp, Homo sapien
ttgctcaggcccgactggctagtca

SEQ ID NO: 602310 - DNA, 25 bp, Homo sapien
ccgtgtcacgctgggcggtcgggta

SEQ ID NO: 602311 - DNA, 25 bp, Homo sapien
tccaggctgtccgacgagttgctca

SEQ ID NO: 602312 - DNA, 25 bp, Homo sapien
gctggtcagcgtcccttgttcactt

SEQ ID NO: 602313 - DNA, 25 bp, Homo sapien
cagagctggtcagcgtcccttgttc

SEQ ID NO: 602314 - DNA, 25 bp, Homo sapien
gagctggtcagcgtcccttgttcac

SEQ ID NO: 602315 - DNA, 25 bp, Homo sapien
ctcagagctggtcagcgtcccttgt

SEQ ID NO: 602316 - DNA, 25 bp, Homo sapien
acacagagtgcaaaaggagccccta

SEQ ID NO: 602317 - DNA, 25 bp, Homo sapien
tagagaactgttaggccagtcccgc

SEQ ID NO: 602318 - DNA, 25 bp, Homo sapien
taattacacacaggcaggtgcacgg

SEQ ID NO: 602319 - DNA, 25 bp, Homo sapien
gacagacagtggacaggcaaacagt

SEQ ID NO: 602320 - DNA, 25 bp, Homo sapien
tccccaaggcccgagagggctctgg

SEQ ID NO: 602321 - DNA, 25 bp, Homo sapien
tctgggcaaagttcccctcgagcaa

SEQ ID NO: 602322 - DNA, 25 bp, Homo sapien
ggcccaacagcgtctatgctccatg

SEQ ID NO: 602323 - DNA, 25 bp, Homo sapien
gccaagcggggctatggcctccgca

SEQ ID NO: 602324 - DNA, 25 bp, Homo sapien
tggaccctatcccatggagggaggc

SEQ ID NO: 602325 - DNA, 25 bp, Homo sapien
atgggcctggtacctcaagccacct

SEQ ID NO: 602326 - DNA, 25 bp, Homo sapien
ccttctcaatgacatgggcctggta

SEQ ID NO: 602327 - DNA, 25 bp, Homo sapien
ggaggcagtgagaccggcatcaccc

SEQ ID NO: 602328 - DNA, 25 bp, Homo sapien
caatctagggcatgaggcaccaagg

SEQ ID NO: 602329 - DNA, 25 bp, Homo sapien
caaaagccggctcaaggaatgcagc

SEQ ID NO: 602330 - DNA, 25 bp, Homo sapien
ctttccgggaagataagagcgtctg

SEQ ID NO: 602331 - DNA, 25 bp, Homo sapien
ccaaagatatgggtggtcaggacca

SEQ ID NO: 602332 - DNA, 25 bp, Homo sapien
aagtggaaagctgtcactccctcca

SEQ ID NO: 602333 - DNA, 25 bp, Homo sapien
gtggaaagctgtcactccctccact

SEQ ID NO: 602334 - DNA, 25 bp, Homo sapien
gccaagtggaaagctgtcactccct

SEQ ID NO: 602335 - DNA, 25 bp, Homo sapien
agggccaagtggaaagctgtcactc

SEQ ID NO: 602336 - DNA, 25 bp, Homo sapien
cctggacggcagttctagattcaga

SEQ ID NO: 602337 - DNA, 25 bp, Homo sapien
aaagccacagccgttatctggtgta

SEQ ID NO: 602338 - DNA, 25 bp, Homo sapien
tagattcagaaactgccacccacag

SEQ ID NO: 602339 - DNA, 25 bp, Homo sapien
tgaaccctgtggcagaaacctggag

SEQ ID NO: 602340 - DNA, 25 bp, Homo sapien
ggagggtgccatcacatcgatcgct

SEQ ID NO: 602341 - DNA, 25 bp, Homo sapien
gctttgggtccgttgtcctccgaga

SEQ ID NO: 602342 - DNA, 25 bp, Homo sapien
catcgatcgctttgggtccgttgtc

SEQ ID NO: 602343 - DNA, 25 bp, Homo sapien
catcacatcgatcgctttgggtccg

SEQ ID NO: 602344 - DNA, 25 bp, Homo sapien
atggggtggagatgactggctttcc

SEQ ID NO: 602345 - DNA, 25 bp, Homo sapien
ggtggagatgactggctttccctac

SEQ ID NO: 602346 - DNA, 25 bp, Homo sapien
tgggatggggtggagatgactggct

SEQ ID NO: 602347 - DNA, 25 bp, Homo sapien
gggtggagatgactggctttcccta

SEQ ID NO: 602348 - DNA, 25 bp, Homo sapien
acaacgacagcaacggcacggagac

SEQ ID NO: 602349 - DNA, 25 bp, Homo sapien
ttgaaggacaacgacagcaacggca

SEQ ID NO: 602350 - DNA, 25 bp, Homo sapien
cttattgaaggacaacgacagcaac

SEQ ID NO: 602351 - DNA, 25 bp, Homo sapien
acagcaacggcacggagacaaagac

SEQ ID NO: 602352 - DNA, 25 bp, Homo sapien
tgaaccccgatggactggaatttgg

SEQ ID NO: 602353 - DNA, 25 bp, Homo sapien
atttggtagcgggactgggctcctc

SEQ ID NO: 602354 - DNA, 25 bp, Homo sapien
agtcgtcctctacctgaaccccgat

SEQ ID NO: 602355 - DNA, 25 bp, Homo sapien
ggactgggctcctcttttggcactg

SEQ ID NO: 602356 - DNA, 25 bp, Homo sapien
tcagggcagctgacgccatgtcctg

SEQ ID NO: 602357 - DNA, 25 bp, Homo sapien
gagcaaatgctcatctgtccacccg

SEQ ID NO: 602358 - DNA, 25 bp, Homo sapien
gagaaacggatgcatcatctgctca

SEQ ID NO: 602359 - DNA, 25 bp, Homo sapien
gggtgactggtctcacagagcaaat

SEQ ID NO: 602360 - DNA, 25 bp, Homo sapien
tatccgagtctgtgtcccgtcggga

SEQ ID NO: 602361 - DNA, 25 bp, Homo sapien
cattggcatcctgggtatccgagtc

SEQ ID NO: 602362 - DNA, 25 bp, Homo sapien
agtctgtgtcccgtcgggaggacat

SEQ ID NO: 602363 - DNA, 25 bp, Homo sapien
catcctgggtatccgagtctgtgtc

SEQ ID NO: 602364 - DNA, 25 bp, Homo sapien
gggaggctcctctcagatgacttac

SEQ ID NO: 602365 - DNA, 25 bp, Homo sapien
ggtacagtccgggaggctcctctca

SEQ ID NO: 602366 - DNA, 25 bp, Homo sapien
tccgggaggctcctctcagatgact

SEQ ID NO: 602367 - DNA, 25 bp, Homo sapien
agtccgggaggctcctctcagatga

SEQ ID NO: 602368 - DNA, 25 bp, Homo sapien
ttgatctgggcaatcttgggggcct

SEQ ID NO: 602369 - DNA, 25 bp, Homo sapien
ggaccggcatcgatgctgatggagt

SEQ ID NO: 602370 - DNA, 25 bp, Homo sapien
gggcagggtcgctgttgtctccata

SEQ ID NO: 602371 - DNA, 25 bp, Homo sapien
taggagaggttgcgcttgatctggg

SEQ ID NO: 602372 - DNA, 25 bp, Homo sapien
ggagctggaggaggtctcgagccag

SEQ ID NO: 602373 - DNA, 25 bp, Homo sapien
gaggtctcgagccaggggtcgggtg

SEQ ID NO: 602374 - DNA, 25 bp, Homo sapien
gcccctggctgtgccggctctgctg

SEQ ID NO: 602375 - DNA, 25 bp, Homo sapien
ggcccctggctgtgccggctctgct

SEQ ID NO: 602376 - DNA, 25 bp, Homo sapien
ccttccagccgctctgtttctgcct

SEQ ID NO: 602377 - DNA, 25 bp, Homo sapien
ctgcctgcagtagctttaggaacca

SEQ ID NO: 602378 - DNA, 25 bp, Homo sapien
tgcctgcagtagctttaggaaccag

SEQ ID NO: 602379 - DNA, 25 bp, Homo sapien
tccagccgctctgtttctgcctgca

SEQ ID NO: 602380 - DNA, 25 bp, Homo sapien
attacaggtgcccacgatgacaccc

SEQ ID NO: 602381 - DNA, 25 bp, Homo sapien
cagcctcagaagtagccgagattac

SEQ ID NO: 602382 - DNA, 25 bp, Homo sapien
tgcccacgatgacacccagctgatt

SEQ ID NO: 602383 - DNA, 25 bp, Homo sapien
aggtgcccacgatgacacccagctg

SEQ ID NO: 602384 - DNA, 25 bp, Homo sapien
caggagaatcgctttgctctgttgt

SEQ ID NO: 602385 - DNA, 25 bp, Homo sapien
gtgaggcactgcgtccagccttttc

SEQ ID NO: 602386 - DNA, 25 bp, Homo sapien
tttgaggtcaacctggccaacacgt

SEQ ID NO: 602387 - DNA, 25 bp, Homo sapien
ggtcaacctggccaacacgttgaaa

SEQ ID NO: 602388 - DNA, 25 bp, Homo sapien
gctatgatggcactattgttaattt

SEQ ID NO: 602389 - DNA, 25 bp, Homo sapien
gccacatgatcaaccaattccactt

SEQ ID NO: 602390 - DNA, 25 bp, Homo sapien
gatagctatcaaggctcctgcctgt

SEQ ID NO: 602391 - DNA, 25 bp, Homo sapien
ggttcctcagaaagcgagacataga

SEQ ID NO: 602392 - DNA, 25 bp, Homo sapien
ccaaggtgaggtcggcagttcaaga

SEQ ID NO: 602393 - DNA, 25 bp, Homo sapien
ggccaaggtgaggtcggcagttcaa

SEQ ID NO: 602394 - DNA, 25 bp, Homo sapien
ggaggccaaggtgaggtcggcagtt

SEQ ID NO: 602395 - DNA, 25 bp, Homo sapien
aaggtgaggtcggcagttcaagacc

SEQ ID NO: 602396 - DNA, 25 bp, Homo sapien
gaggccccggaactgctggaatttc

SEQ ID NO: 602397 - DNA, 25 bp, Homo sapien
aagccgcgctgtgtgtgttacagag

SEQ ID NO: 602398 - DNA, 25 bp, Homo sapien
tgtgcccggccgatacagaatatat

SEQ ID NO: 602399 - DNA, 25 bp, Homo sapien
gatattagagatctgatagggccac

SEQ ID NO: 602400 - DNA, 25 bp, Homo sapien
taattgactttaccatccatgtggc

SEQ ID NO: 602401 - DNA, 25 bp, Homo sapien
tggggcgtgggttggcatcagggtt

SEQ ID NO: 602402 - DNA, 25 bp, Homo sapien
tgtggggcgtgggttggcatcaggg

SEQ ID NO: 602403 - DNA, 25 bp, Homo sapien
gtggggcgtgggttggcatcagggt

SEQ ID NO: 602404 - DNA, 25 bp, Homo sapien
ctgtggggcgtgggttggcatcagg

SEQ ID NO: 602405 - DNA, 25 bp, Homo sapien
tgctgatatcctcgatggacagctg

SEQ ID NO: 602406 - DNA, 25 bp, Homo sapien
gaacttcatgctgatatcctcgatg

SEQ ID NO: 602407 - DNA, 25 bp, Homo sapien
gccttgaggtggtagagttcatcga

SEQ ID NO: 602408 - DNA, 25 bp, Homo sapien
ggtagagttcatcgaacttcatgct

SEQ ID NO: 602409 - DNA, 25 bp, Homo sapien
tattgccgaccaggaatttgtccct

SEQ ID NO: 602410 - DNA, 25 bp, Homo sapien
ttattgccgaccaggaatttgtccc

SEQ ID NO: 602411 - DNA, 25 bp, Homo sapien
tgccgaccaggaatttgtccctgga

SEQ ID NO: 602412 - DNA, 25 bp, Homo sapien
ccgaccaggaatttgtccctggact

SEQ ID NO: 602413 - DNA, 25 bp, Homo sapien
tggaatcaggaagccacgagaagcg

SEQ ID NO: 602414 - DNA, 25 bp, Homo sapien
taaaggtgccacgttttgtgtggca

SEQ ID NO: 602415 - DNA, 25 bp, Homo sapien
tagactccgagagcgctcgagcagc

SEQ ID NO: 602416 - DNA, 25 bp, Homo sapien
cagaaagcaagcctagactccgaga

SEQ ID NO: 602417 - DNA, 25 bp, Homo sapien
ggtggctgagttctgccgcacagaa

SEQ ID NO: 602418 - DNA, 25 bp, Homo sapien
tgggcctccgggacataaatctcga

SEQ ID NO: 602419 - DNA, 25 bp, Homo sapien
tcctggcgctgcttgtcgctggcgt

SEQ ID NO: 602420 - DNA, 25 bp, Homo sapien
actgccggcttggatttggctggct

SEQ ID NO: 602421 - DNA, 25 bp, Homo sapien
ttaaaatcgtttctttcctcctgca

SEQ ID NO: 602422 - DNA, 25 bp, Homo sapien
agaaagccgcttgccacaatggtga

SEQ ID NO: 602423 - DNA, 25 bp, Homo sapien
tcataacctaaagctgggagggacc

SEQ ID NO: 602424 - DNA, 25 bp, Homo sapien
gagttgccgacgtccatctatctag

SEQ ID NO: 602425 - DNA, 25 bp, Homo sapien
taaaaagaccgcagtatggaggctg

SEQ ID NO: 602426 - DNA, 25 bp, Homo sapien
tctcggatgccagagaggcgcatac

SEQ ID NO: 602427 - DNA, 25 bp, Homo sapien
actcgggagtcctagattttgctga

SEQ ID NO: 602428 - DNA, 25 bp, Homo sapien
aaaaaagggctgcttacacacaagg

SEQ ID NO: 602429 - DNA, 25 bp, Homo sapien
ccattgcagctcagggctcgtgaca

SEQ ID NO: 602430 - DNA, 25 bp, Homo sapien
cagggactgtccccgttttacagag

SEQ ID NO: 602431 - DNA, 25 bp, Homo sapien
gcagggactgtccccgttttacaga

SEQ ID NO: 602432 - DNA, 25 bp, Homo sapien
ccgttttacagaggaggaagttgag

SEQ ID NO: 602433 - DNA, 25 bp, Homo sapien
atttattctcacaacatgcctgtga

SEQ ID NO: 602434 - DNA, 25 bp, Homo sapien
ttattctcacaacatgcctgtgagg

SEQ ID NO: 602435 - DNA, 25 bp, Homo sapien
caacatgcctgtgaggtagggaggg

SEQ ID NO: 602436 - DNA, 25 bp, Homo sapien
acacgttacctcatttattctcaca

SEQ ID NO: 602437 - DNA, 25 bp, Homo sapien
gatatatatgtctacccttttgcca

SEQ ID NO: 602438 - DNA, 25 bp, Homo sapien
cactgttgtctaaagtcagttgtcc

SEQ ID NO: 602439 - DNA, 25 bp, Homo sapien
tatgttgcaaggtaagggtccagct

SEQ ID NO: 602440 - DNA, 25 bp, Homo sapien
gatatccagttacattagcaccatt

SEQ ID NO: 602441 - DNA, 25 bp, Homo sapien
gttatgaatgtttacacttgtgttt

SEQ ID NO: 602442 - DNA, 25 bp, Homo sapien
gcctgatccaaggttatgaatgttt

SEQ ID NO: 602443 - DNA, 25 bp, Homo sapien
cattgcctgatccaaggttatgaat

SEQ ID NO: 602444 - DNA, 25 bp, Homo sapien
ttgcctgatccaaggttatgaatgt

SEQ ID NO: 602445 - DNA, 25 bp, Homo sapien
caaagctatgtaattatcggcacta

SEQ ID NO: 602446 - DNA, 25 bp, Homo sapien
tccctctctatcagtttgtttactg

SEQ ID NO: 602447 - DNA, 25 bp, Homo sapien
cattggttttagtgtatctacaaag

SEQ ID NO: 602448 - DNA, 25 bp, Homo sapien
ccagcccctggagactatggatcta

SEQ ID NO: 602449 - DNA, 25 bp, Homo sapien
gctcgctgggtgcgtggaactgggc

SEQ ID NO: 602450 - DNA, 25 bp, Homo sapien
tcgctgggtgcgtggaactgggccg

SEQ ID NO: 602451 - DNA, 25 bp, Homo sapien
ggtgcggagaaggcgcttgggctcg

SEQ ID NO: 602452 - DNA, 25 bp, Homo sapien
ctggtgcggagaaggcgcttgggct

SEQ ID NO: 602453 - DNA, 25 bp, Homo sapien
gtgcccaacagaccctaccacgtcc

SEQ ID NO: 602454 - DNA, 25 bp, Homo sapien
agtccgtgcccaacagaccctacca

SEQ ID NO: 602455 - DNA, 25 bp, Homo sapien
ccctcagtccgtgcccaacagaccc

SEQ ID NO: 602456 - DNA, 25 bp, Homo sapien
agaccctaccacgtcccagtccgtg

SEQ ID NO: 602457 - DNA, 25 bp, Homo sapien
ttaactgactcagtgcccgagagct

SEQ ID NO: 602458 - DNA, 25 bp, Homo sapien
gagacatgaggagtgcccagcagta

SEQ ID NO: 602459 - DNA, 25 bp, Homo sapien
tgcccagcagtagggattaactgac

SEQ ID NO: 602460 - DNA, 25 bp, Homo sapien
cttcatctgggactggagacatgag

SEQ ID NO: 602461 - DNA, 25 bp, Homo sapien
cttggcttctggtgggtggggcttc

SEQ ID NO: 602462 - DNA, 25 bp, Homo sapien
ttggcttctggtgggtggggcttcc

SEQ ID NO: 602463 - DNA, 25 bp, Homo sapien
tcaaacattgcgaagacattggatg

SEQ ID NO: 602464 - DNA, 25 bp, Homo sapien
ccagcatgtcgtgcaggtcctcctt

SEQ ID NO: 602465 - DNA, 25 bp, Homo sapien
ccgctgtggccgcttcttggtggtc

SEQ ID NO: 602466 - DNA, 25 bp, Homo sapien
tctgggactggtcaaacattgcgaa

SEQ ID NO: 602467 - DNA, 25 bp, Homo sapien
tgttgaatggactaagttaatggca

SEQ ID NO: 602468 - DNA, 25 bp, Homo sapien
cccggcccagtttccctgttgaatg

SEQ ID NO: 602469 - DNA, 25 bp, Homo sapien
tcactacacaggaggtgccctgtaa

SEQ ID NO: 602470 - DNA, 25 bp, Homo sapien
taaggtggacaccacgcgtctcact

SEQ ID NO: 602471 - DNA, 25 bp, Homo sapien
gaactggaaagcatggctctagcgc

SEQ ID NO: 602472 - DNA, 25 bp, Homo sapien
cacaggcctatggactggaatcaac

SEQ ID NO: 602473 - DNA, 25 bp, Homo sapien
cagataagaaccctggagttggcca

SEQ ID NO: 602474 - DNA, 25 bp, Homo sapien
ggatatgagctacaaacacagtgca

SEQ ID NO: 602475 - DNA, 25 bp, Homo sapien
tcctcggggtccgtgccgttcagct

SEQ ID NO: 602476 - DNA, 25 bp, Homo sapien
tgaggcttcctcgtcgaagcaggca

SEQ ID NO: 602477 - DNA, 25 bp, Homo sapien
tccaggtattcgtctgtggggttct

SEQ ID NO: 602478 - DNA, 25 bp, Homo sapien
aggcgttgcgaatcacatcctcggg

SEQ ID NO: 602479 - DNA, 25 bp, Homo sapien
tcccggtacatctcgtccacttcct

SEQ ID NO: 602480 - DNA, 25 bp, Homo sapien
agtcgtctttatccttggcgccatg

SEQ ID NO: 602481 - DNA, 25 bp, Homo sapien
tcgtctttatccttggcgccatgtt

SEQ ID NO: 602482 - DNA, 25 bp, Homo sapien
ctagtcgtctttatccttggcgcca

SEQ ID NO: 602483 - DNA, 25 bp, Homo sapien
ctgggtgggtgtgcggcagtggccg

SEQ ID NO: 602484 - DNA, 25 bp, Homo sapien
ggcagggagctggtatggacgggtg

SEQ ID NO: 602485 - DNA, 25 bp, Homo sapien
agcacactcccatggcgggtggcgt

SEQ ID NO: 602486 - DNA, 25 bp, Homo sapien
atccctgagcgagggtcatgggcag

SEQ ID NO: 602487 - DNA, 25 bp, Homo sapien
tctgccccctctgggacagatgtcc

SEQ ID NO: 602488 - DNA, 25 bp, Homo sapien
attggagattctgccccctctggga

SEQ ID NO: 602489 - DNA, 25 bp, Homo sapien
ggagattctgccccctctgggacag

SEQ ID NO: 602490 - DNA, 25 bp, Homo sapien
agattctgccccctctgggacagat

SEQ ID NO: 602491 - DNA, 25 bp, Homo sapien
caggatgaggagtttcagccgagct

SEQ ID NO: 602492 - DNA, 25 bp, Homo sapien
catcgaatgggtggccagactgaga

SEQ ID NO: 602493 - DNA, 25 bp, Homo sapien
catgtgtggccagtaccctgggaca

SEQ ID NO: 602494 - DNA, 25 bp, Homo sapien
tgctgagaggaccttatgaccctgg

SEQ ID NO: 602495 - DNA, 25 bp, Homo sapien
aggaattctgagcatcgcggcccaa

SEQ ID NO: 602496 - DNA, 25 bp, Homo sapien
ttcgctgggtgaccttcgtcgtccc

SEQ ID NO: 602497 - DNA, 25 bp, Homo sapien
ccaaagaggccatccgttgtctggg

SEQ ID NO: 602498 - DNA, 25 bp, Homo sapien
aggccatccgttgtctgggaaagca

SEQ ID NO: 602499 - DNA, 25 bp, Homo sapien
cttgcctggcctattctgcagcttc

SEQ ID NO: 602500 - DNA, 25 bp, Homo sapien
gttgcccgggcactccactcactgc

SEQ ID NO: 602501 - DNA, 25 bp, Homo sapien
cttttgttgtccagtgcaatggcgt

SEQ ID NO: 602502 - DNA, 25 bp, Homo sapien
tggcattgcagctgtgagccgcctt

SEQ ID NO: 602503 - DNA, 25 bp, Homo sapien
ccttggaacgcgcaacccgaaatgg

SEQ ID NO: 602504 - DNA, 25 bp, Homo sapien
ttggaacgcgcaacccgaaatggcc

SEQ ID NO: 602505 - DNA, 25 bp, Homo sapien
gacggccttggaacgcgcaacccga

SEQ ID NO: 602506 - DNA, 25 bp, Homo sapien
tcagacggccttggaacgcgcaacc

SEQ ID NO: 602507 - DNA, 25 bp, Homo sapien
cggagcgcgacgagctgcgcccacc

SEQ ID NO: 602508 - DNA, 25 bp, Homo sapien
tgacactcggcctgacagctcgcgg

SEQ ID NO: 602509 - DNA, 25 bp, Homo sapien
tggaaagcacctcgcggcctgacgt

SEQ ID NO: 602510 - DNA, 25 bp, Homo sapien
ctgacagctcgcggctggaaagcac

SEQ ID NO: 602511 - DNA, 25 bp, Homo sapien
gcggcctgacgtcagatcccctctc

SEQ ID NO: 602512 - DNA, 25 bp, Homo sapien
cccagcggctttcgggtccacgcgg

SEQ ID NO: 602513 - DNA, 25 bp, Homo sapien
ttcccagcggctttcgggtccacgc

SEQ ID NO: 602514 - DNA, 25 bp, Homo sapien
cagcggctttcgggtccacgcggcc

SEQ ID NO: 602515 - DNA, 25 bp, Homo sapien
tcccagcggctttcgggtccacgcg

SEQ ID NO: 602516 - DNA, 25 bp, Homo sapien
cagaccgagtcggagcacatggctc

SEQ ID NO: 602517 - DNA, 25 bp, Homo sapien
ggcgaggaatcgtccggcgctcggg

SEQ ID NO: 602518 - DNA, 25 bp, Homo sapien
ccagcagttcagacaaagcgcgcaa

SEQ ID NO: 602519 - DNA, 25 bp, Homo sapien
catggctcctgggtcggcgaggaat

SEQ ID NO: 602520 - DNA, 25 bp, Homo sapien
ctagcccaacttctgtacccgccca

SEQ ID NO: 602521 - DNA, 25 bp, Homo sapien
tctgtacccgcccacccacgaactc

SEQ ID NO: 602522 - DNA, 25 bp, Homo sapien
caacttctgtacccgcccacccacg

SEQ ID NO: 602523 - DNA, 25 bp, Homo sapien
tgtacccgcccacccacgaactcca

SEQ ID NO: 602524 - DNA, 25 bp, Homo sapien
caattccccaataagggagaagcta

SEQ ID NO: 602525 - DNA, 25 bp, Homo sapien
acaattccccaataagggagaagct

SEQ ID NO: 602526 - DNA, 25 bp, Homo sapien
tacaattccccaataagggagaagc

SEQ ID NO: 602527 - DNA, 25 bp, Homo sapien
aattccccaataagggagaagctat

SEQ ID NO: 602528 - DNA, 25 bp, Homo sapien
ctaggggctaggctggaccttgggt

SEQ ID NO: 602529 - DNA, 25 bp, Homo sapien
tgcctaggggctaggctggaccttg

SEQ ID NO: 602530 - DNA, 25 bp, Homo sapien
taggggctaggctggaccttgggta

SEQ ID NO: 602531 - DNA, 25 bp, Homo sapien
ggtgcctaggggctaggctggacct

SEQ ID NO: 602532 - DNA, 25 bp, Homo sapien
ggatcttcaccgactccttgggcag

SEQ ID NO: 602533 - DNA, 25 bp, Homo sapien
gaggccttcgtcctcacctagatca

SEQ ID NO: 602534 - DNA, 25 bp, Homo sapien
cgttgtagcggtgcaagtacagcca

SEQ ID NO: 602535 - DNA, 25 bp, Homo sapien
agtacagccagtcccggaggatctt

SEQ ID NO: 602536 - DNA, 25 bp, Homo sapien
agaactatccaaagtctgggccagg

SEQ ID NO: 602537 - DNA, 25 bp, Homo sapien
caaactggaggcaaagcaatggtgg

SEQ ID NO: 602538 - DNA, 25 bp, Homo sapien
cgggtcagcaataggcgcgattcaa

SEQ ID NO: 602539 - DNA, 25 bp, Homo sapien
tattcgtcacaacagatccaccagg

SEQ ID NO: 602540 - DNA, 25 bp, Homo sapien
tttctccctacactcatgaaagtgc

SEQ ID NO: 602541 - DNA, 25 bp, Homo sapien
gggccccagtgagccttgaattctt

SEQ ID NO: 602542 - DNA, 25 bp, Homo sapien
gagccactgtgaagggccccagtga

SEQ ID NO: 602543 - DNA, 25 bp, Homo sapien
gggaataatgaggctcacagagaag

SEQ ID NO: 602544 - DNA, 25 bp, Homo sapien
caggtggaatgtcacggtttttaca

SEQ ID NO: 602545 - DNA, 25 bp, Homo sapien
cattttcagttaacacagtcaggtg

SEQ ID NO: 602546 - DNA, 25 bp, Homo sapien
cagttttatgttttacctaagtgat

SEQ ID NO: 602547 - DNA, 25 bp, Homo sapien
tacatttatctactttggaaacagt

SEQ ID NO: 602548 - DNA, 25 bp, Homo sapien
gctgagggcaatgaactaactggga

SEQ ID NO: 602549 - DNA, 25 bp, Homo sapien
cagtttccatcaaggagggctgggt

SEQ ID NO: 602550 - DNA, 25 bp, Homo sapien
tctgctgagtctgtgcctttgccac

SEQ ID NO: 602551 - DNA, 25 bp, Homo sapien
catgactctagagcaggtggccacc

SEQ ID NO: 602552 - DNA, 25 bp, Homo sapien
aggtcacaagtgcaaaagctgggtt

SEQ ID NO: 602553 - DNA, 25 bp, Homo sapien
ggcctcaggcactattcacatttca

SEQ ID NO: 602554 - DNA, 25 bp, Homo sapien
tcagcatctgtgtgggcacctagcc

SEQ ID NO: 602555 - DNA, 25 bp, Homo sapien
tcccttgaagaaacagatcggagag

SEQ ID NO: 602556 - DNA, 25 bp, Homo sapien
tgagatcggaagatagctggagccc

SEQ ID NO: 602557 - DNA, 25 bp, Homo sapien
agcctgagatcggaagatagctgga

SEQ ID NO: 602558 - DNA, 25 bp, Homo sapien
ttgggagcctgagatcggaagatag

SEQ ID NO: 602559 - DNA, 25 bp, Homo sapien
ctgtttctacaaaagaagttagcca

SEQ ID NO: 602560 - DNA, 25 bp, Homo sapien
tacaagaccgatcaatttgcttaat

SEQ ID NO: 602561 - DNA, 25 bp, Homo sapien
tggaatgaatatacaagaccgatca

SEQ ID NO: 602562 - DNA, 25 bp, Homo sapien
gatcaatttgcttaatctaaaacag

SEQ ID NO: 602563 - DNA, 25 bp, Homo sapien
gaatatacaagaccgatcaatttgc

SEQ ID NO: 602564 - DNA, 25 bp, Homo sapien
catccttccgaagcatgtctgggag

SEQ ID NO: 602565 - DNA, 25 bp, Homo sapien
ccgaagcatgtctgggagaagccgc

SEQ ID NO: 602566 - DNA, 25 bp, Homo sapien
gattagggtctttgccatccttccg

SEQ ID NO: 602567 - DNA, 25 bp, Homo sapien
aatggtaaactgattagggtctttg

SEQ ID NO: 602568 - DNA, 25 bp, Homo sapien
tggcgtgttgaagagtccacctgtg

SEQ ID NO: 602569 - DNA, 25 bp, Homo sapien
ctaaagggatgggagtgtgcagtaa

SEQ ID NO: 602570 - DNA, 25 bp, Homo sapien
atctcagcagccctctgtagcgcca

SEQ ID NO: 602571 - DNA, 25 bp, Homo sapien
cagagtaagtgtgctaccaggggtc

SEQ ID NO: 602572 - DNA, 25 bp, Homo sapien
tggagccttcagcacccttcttggc

SEQ ID NO: 602573 - DNA, 25 bp, Homo sapien
gctggagccttcagcacccttcttg

SEQ ID NO: 602574 - DNA, 25 bp, Homo sapien
gctggctggagccttcagcaccctt

SEQ ID NO: 602575 - DNA, 25 bp, Homo sapien
gagccttcagcacccttcttggcag

SEQ ID NO: 602576 - DNA, 25 bp, Homo sapien
atgatcccaatgtttggcagtgatc

SEQ ID NO: 602577 - DNA, 25 bp, Homo sapien
ttggcagtgatccatagaaaaccct

SEQ ID NO: 602578 - DNA, 25 bp, Homo sapien
gagagggcccccatcacagtgcagt

SEQ ID NO: 602579 - DNA, 25 bp, Homo sapien
agagggcccccatcacagtgcagtg

SEQ ID NO: 602580 - DNA, 25 bp, Homo sapien
gagggcccccatcacagtgcagtgg

SEQ ID NO: 602581 - DNA, 25 bp, Homo sapien
agggcccccatcacagtgcagtggt

SEQ ID NO: 602582 - DNA, 25 bp, Homo sapien
accaggctggaacaaaggtgtccca

SEQ ID NO: 602583 - DNA, 25 bp, Homo sapien
tcttggtctcatcactgagcggagg

SEQ ID NO: 602584 - DNA, 25 bp, Homo sapien
ctggcttgacagaaacagcacaggg

SEQ ID NO: 602585 - DNA, 25 bp, Homo sapien
gcttggacccaacataggactgaat

SEQ ID NO: 602586 - DNA, 25 bp, Homo sapien
tatgggcccctctaatccaagttgc

SEQ ID NO: 602587 - DNA, 25 bp, Homo sapien
cacccaagttagtcagtatccagga

SEQ ID NO: 602588 - DNA, 25 bp, Homo sapien
taactactgccgtgaatgcaaacca

SEQ ID NO: 602589 - DNA, 25 bp, Homo sapien
tactgcagagacttagctggtcccc

SEQ ID NO: 602590 - DNA, 25 bp, Homo sapien
agtttttgctcaaataattcaatgg

SEQ ID NO: 602591 - DNA, 25 bp, Homo sapien
tagtttttgctcaaataattcaatg

SEQ ID NO: 602592 - DNA, 25 bp, Homo sapien
gtttttgctcaaataattcaatggg

SEQ ID NO: 602593 - DNA, 25 bp, Homo sapien
aagagttgctactttcccagcccag

SEQ ID NO: 602594 - DNA, 25 bp, Homo sapien
gaaggtctctggagcaagatcatca

SEQ ID NO: 602595 - DNA, 25 bp, Homo sapien
aagacgtcagatggttcagagaccc

SEQ ID NO: 602596 - DNA, 25 bp, Homo sapien
ggtagggctacacttgaccttcaag

SEQ ID NO: 602597 - DNA, 25 bp, Homo sapien
tttttcctggtaatcaatctgcctc

SEQ ID NO: 602598 - DNA, 25 bp, Homo sapien
aaagaagcttctgtaccttattggg

SEQ ID NO: 602599 - DNA, 25 bp, Homo sapien
gaagactcctgtgtatacacgttaa

SEQ ID NO: 602600 - DNA, 25 bp, Homo sapien
cagactccctgctggcatgtagttc

SEQ ID NO: 602601 - DNA, 25 bp, Homo sapien
tgggtgcactccttttgtcctaagt

SEQ ID NO: 602602 - DNA, 25 bp, Homo sapien
tgatcacgttactgtctggaactgg

SEQ ID NO: 602603 - DNA, 25 bp, Homo sapien
aaggtgaaacatactgtgatcacgt

SEQ ID NO: 602604 - DNA, 25 bp, Homo sapien
tggaagggccgtatacgttatatgg

SEQ ID NO: 602605 - DNA, 25 bp, Homo sapien
ctagggtcgcaggtcacggcgcggg

SEQ ID NO: 602606 - DNA, 25 bp, Homo sapien
gcgcgctgcggttcctcacaacctg

SEQ ID NO: 602607 - DNA, 25 bp, Homo sapien
ggttcctcacaacctggccaagcta

SEQ ID NO: 602608 - DNA, 25 bp, Homo sapien
ttccgccggctctacagagcaggcg

SEQ ID NO: 602609 - DNA, 25 bp, Homo sapien
gcgggctgagccaaagggagtcggg

SEQ ID NO: 602610 - DNA, 25 bp, Homo sapien
cgcgcgggctgagccaaagggagtc

SEQ ID NO: 602611 - DNA, 25 bp, Homo sapien
cgggctgagccaaagggagtcgggg

SEQ ID NO: 602612 - DNA, 25 bp, Homo sapien
cgcgggctgagccaaagggagtcgg

SEQ ID NO: 602613 - DNA, 25 bp, Homo sapien
cagacggagactttgagggccccgt

SEQ ID NO: 602614 - DNA, 25 bp, Homo sapien
gccccgttggccagctgcggctgag

SEQ ID NO: 602615 - DNA, 25 bp, Homo sapien
cgcagcaccttactccagacggaga

SEQ ID NO: 602616 - DNA, 25 bp, Homo sapien
tactccagacggagactttgagggc

SEQ ID NO: 602617 - DNA, 25 bp, Homo sapien
tgtcggaaccagtagatcacatcta

SEQ ID NO: 602618 - DNA, 25 bp, Homo sapien
ggaccacagcaatgatctgtcggaa

SEQ ID NO: 602619 - DNA, 25 bp, Homo sapien
tcgtaatggcaaaactccccaaatg

SEQ ID NO: 602620 - DNA, 25 bp, Homo sapien
tattcccaagaaccctcgtaatggc

SEQ ID NO: 602621 - DNA, 25 bp, Homo sapien
catgaaaatataagatacccaagac

SEQ ID NO: 602622 - DNA, 25 bp, Homo sapien
taaaaagaaatgataccatgaaaat

SEQ ID NO: 602623 - DNA, 25 bp, Homo sapien
tgaaaatataagatacccaagactt

SEQ ID NO: 602624 - DNA, 25 bp, Homo sapien
gaaatgataccatgaaaatataaga

SEQ ID NO: 602625 - DNA, 25 bp, Homo sapien
cacacagctccagagcagcaatggc

SEQ ID NO: 602626 - DNA, 25 bp, Homo sapien
cacacacagctccagagcagcaatg

SEQ ID NO: 602627 - DNA, 25 bp, Homo sapien
acacacacagctccagagcagcaat

SEQ ID NO: 602628 - DNA, 25 bp, Homo sapien
acacacacacagctccagagcagca

SEQ ID NO: 602629 - DNA, 25 bp, Homo sapien
aggagtggtgcaccagacccaggag

SEQ ID NO: 602630 - DNA, 25 bp, Homo sapien
tgcaccagacccaggagtgccactg

SEQ ID NO: 602631 - DNA, 25 bp, Homo sapien
ctgaggagtggtgcaccagacccag

SEQ ID NO: 602632 - DNA, 25 bp, Homo sapien
caggagtgccactgtagggctgctt

SEQ ID NO: 602633 - DNA, 25 bp, Homo sapien
aagtagaggtacaggactcctgcat

SEQ ID NO: 602634 - DNA, 25 bp, Homo sapien
gctcccacgtgccaccatattcttc

SEQ ID NO: 602635 - DNA, 25 bp, Homo sapien
agaggtcataaacccttccttcgtg

SEQ ID NO: 602636 - DNA, 25 bp, Homo sapien
ggactcctgcattgatcaggcagaa

SEQ ID NO: 602637 - DNA, 25 bp, Homo sapien
ctgttgtaaaactatcagctacaca

SEQ ID NO: 602638 - DNA, 25 bp, Homo sapien
gttgtaaaactatcagctacacata

SEQ ID NO: 602639 - DNA, 25 bp, Homo sapien
tgttgtaaaactatcagctacacat

SEQ ID NO: 602640 - DNA, 25 bp, Homo sapien
ttgtaaaactatcagctacacatac

SEQ ID NO: 602641 - DNA, 25 bp, Homo sapien
cagatgtagaagctgacgatgggcc

SEQ ID NO: 602642 - DNA, 25 bp, Homo sapien
tcagatgtagaagctgacgatgggc

SEQ ID NO: 602643 - DNA, 25 bp, Homo sapien
tcttatccattcatcaagtgatggt

SEQ ID NO: 602644 - DNA, 25 bp, Homo sapien
tctactgtatggatacatagtatct

SEQ ID NO: 602645 - DNA, 25 bp, Homo sapien
tacatagtatcttatccattcatca

SEQ ID NO: 602646 - DNA, 25 bp, Homo sapien
tgatggtcatttggactgtttgtac

SEQ ID NO: 602647 - DNA, 25 bp, Homo sapien
gaggatcacttgagcatgggaggca

SEQ ID NO: 602648 - DNA, 25 bp, Homo sapien
ggatcacttgagcatgggaggcaga

SEQ ID NO: 602649 - DNA, 25 bp, Homo sapien
gggaggatcacttgagcatgggagg

SEQ ID NO: 602650 - DNA, 25 bp, Homo sapien
cacttgagcatgggaggcagaggct

SEQ ID NO: 602651 - DNA, 25 bp, Homo sapien
tggtttgggttagagtctggacaca

SEQ ID NO: 602652 - DNA, 25 bp, Homo sapien
cctgctgggactcaacaggtacaca

SEQ ID NO: 602653 - DNA, 25 bp, Homo sapien
tagagtctggacacataaggttttg

SEQ ID NO: 602654 - DNA, 25 bp, Homo sapien
gtcctgctgggactcaacaggtaca

SEQ ID NO: 602655 - DNA, 25 bp, Homo sapien
tggatggcagtgtaaaagatgatcc

SEQ ID NO: 602656 - DNA, 25 bp, Homo sapien
aatggatggcagtgtaaaagatgat

SEQ ID NO: 602657 - DNA, 25 bp, Homo sapien
gatggcagtgtaaaagatgatccaa

SEQ ID NO: 602658 - DNA, 25 bp, Homo sapien
cagtgtaaaagatgatccaaatgac

SEQ ID NO: 602659 - DNA, 25 bp, Homo sapien
gggagcacttgggagctgtacacca

SEQ ID NO: 602660 - DNA, 25 bp, Homo sapien
atagggagcacttgggagctgtaca

SEQ ID NO: 602661 - DNA, 25 bp, Homo sapien
gtcctttggactggatagggagcac

SEQ ID NO: 602662 - DNA, 25 bp, Homo sapien
ctttggactggatagggagcacttg

SEQ ID NO: 602663 - DNA, 25 bp, Homo sapien
gttccccaacgatcaagttcctgtg

SEQ ID NO: 602664 - DNA, 25 bp, Homo sapien
gatgcccaacacactgattcgcggt

SEQ ID NO: 602665 - DNA, 25 bp, Homo sapien
gaaaacactgatgcccaacacactg

SEQ ID NO: 602666 - DNA, 25 bp, Homo sapien
tcaggtcacaacccttgcagaaaac

SEQ ID NO: 602667 - DNA, 25 bp, Homo sapien
aaattcagaaatgcttccccaaagg

SEQ ID NO: 602668 - DNA, 25 bp, Homo sapien
aattcagaaatgcttccccaaaggt

SEQ ID NO: 602669 - DNA, 25 bp, Homo sapien
atccagaggtgcatcaaattaaatg

SEQ ID NO: 602670 - DNA, 25 bp, Homo sapien
ttcatctgaatccagaggtgcatca

SEQ ID NO: 602671 - DNA, 25 bp, Homo sapien
gaagacttgaaatgccattgatagt

SEQ ID NO: 602672 - DNA, 25 bp, Homo sapien
tggaccacgcacatacagccatgct

SEQ ID NO: 602673 - DNA, 25 bp, Homo sapien
catgtactgtgctatggaccacgca

SEQ ID NO: 602674 - DNA, 25 bp, Homo sapien
ggaaactcttattagatgctgcatg

SEQ ID NO: 602675 - DNA, 25 bp, Homo sapien
cagggtgggaggtcctacttctcca

SEQ ID NO: 602676 - DNA, 25 bp, Homo sapien
tgtttccaaggtggctcgtactaat

SEQ ID NO: 602677 - DNA, 25 bp, Homo sapien
taaggtacgtgcatgttcagctcat

SEQ ID NO: 602678 - DNA, 25 bp, Homo sapien
tactcttgagcacaaacgggctgtt

SEQ ID NO: 602679 - DNA, 25 bp, Homo sapien
agcaaatccttttttcgactctgct

SEQ ID NO: 602680 - DNA, 25 bp, Homo sapien
ccttttttcgactctgcttgtcttc

SEQ ID NO: 602681 - DNA, 25 bp, Homo sapien
caaatccttttttcgactctgcttg

SEQ ID NO: 602682 - DNA, 25 bp, Homo sapien
aatccttttttcgactctgcttgtc

SEQ ID NO: 602683 - DNA, 25 bp, Homo sapien
tcaccagcatagttaccagcgccaa

SEQ ID NO: 602684 - DNA, 25 bp, Homo sapien
taagcaggctcaccatcattgatgc

SEQ ID NO: 602685 - DNA, 25 bp, Homo sapien
cgactacttaccatccagcaggcta

SEQ ID NO: 602686 - DNA, 25 bp, Homo sapien
cagccccgtctactgctataagcag

SEQ ID NO: 602687 - DNA, 25 bp, Homo sapien
gatgtgcgtatcataagaagacggg

SEQ ID NO: 602688 - DNA, 25 bp, Homo sapien
tgccaaggcccacatccctgagtgg

SEQ ID NO: 602689 - DNA, 25 bp, Homo sapien
tctgtcaccgaggaaattagaaggg

SEQ ID NO: 602690 - DNA, 25 bp, Homo sapien
cgggcattacagttgtatggcagca

SEQ ID NO: 602691 - DNA, 25 bp, Homo sapien
ggttacacagttccaaatcttggga

SEQ ID NO: 602692 - DNA, 25 bp, Homo sapien
tggagaccaactaccacatagcaag

SEQ ID NO: 602693 - DNA, 25 bp, Homo sapien
gataaggaatgcatcactctgccag

SEQ ID NO: 602694 - DNA, 25 bp, Homo sapien
tgctcccagccattagaaagattgt

SEQ ID NO: 602695 - DNA, 25 bp, Homo sapien
ccatacccagctaagttatgtattt

SEQ ID NO: 602696 - DNA, 25 bp, Homo sapien
accatacccagctaagttatgtatt

SEQ ID NO: 602697 - DNA, 25 bp, Homo sapien
tcagtagatgtaatggaagccaaat

SEQ ID NO: 602698 - DNA, 25 bp, Homo sapien
gccaaattaaattgatacagaaccc

SEQ ID NO: 602699 - DNA, 25 bp, Homo sapien
tcatgtttaacaagtatagccttga

SEQ ID NO: 602700 - DNA, 25 bp, Homo sapien
aattgatacagaacccatttctcag

SEQ ID NO: 602701 - DNA, 25 bp, Homo sapien
tcaccagcaatcagtcagatggaac

SEQ ID NO: 602702 - DNA, 25 bp, Homo sapien
ctcaagaatcctgtgagtcccctga

SEQ ID NO: 602703 - DNA, 25 bp, Homo sapien
gcatggccactgaacctctctctag

SEQ ID NO: 602704 - DNA, 25 bp, Homo sapien
tctgtgtgtgcgagcacgcgtgtct

SEQ ID NO: 602705 - DNA, 25 bp, Homo sapien
catggccatggcttgctgcagtctc

SEQ ID NO: 602706 - DNA, 25 bp, Homo sapien
ttgctgcagtctctaccacctgggt

SEQ ID NO: 602707 - DNA, 25 bp, Homo sapien
tacttgggaggctaccttagcctcc

SEQ ID NO: 602708 - DNA, 25 bp, Homo sapien
tgatctccagcaagcggttgaccct

SEQ ID NO: 602709 - DNA, 25 bp, Homo sapien
tgcttaggattgtagtaaggctcat

SEQ ID NO: 602710 - DNA, 25 bp, Homo sapien
tgaccctcactaggctaatacctgg

SEQ ID NO: 602711 - DNA, 25 bp, Homo sapien
taatacctggggaaatgcttaggat

SEQ ID NO: 602712 - DNA, 25 bp, Homo sapien
aaaggtgattgactccgcccctaga

SEQ ID NO: 602713 - DNA, 25 bp, Homo sapien
tagaatactagctagcggcctggtg

SEQ ID NO: 602714 - DNA, 25 bp, Homo sapien
tcttgccaaaatcaaaggtgattga

SEQ ID NO: 602715 - DNA, 25 bp, Homo sapien
ggttgtctgtctgcaatcttgccaa

SEQ ID NO: 602716 - DNA, 25 bp, Homo sapien
agaacccaggagtgacacaacagga

SEQ ID NO: 602717 - DNA, 25 bp, Homo sapien
aaaatatgaggggtgtgaatggccc

SEQ ID NO: 602718 - DNA, 25 bp, Homo sapien
aaggtgggcctattgcaggggttgc

SEQ ID NO: 602719 - DNA, 25 bp, Homo sapien
tacaaacctctcatttaccacctgc

SEQ ID NO: 602720 - DNA, 25 bp, Homo sapien
cttctagccccttgagggcatggtc

SEQ ID NO: 602721 - DNA, 25 bp, Homo sapien
tgcggacttctagccccttgagggc

SEQ ID NO: 602722 - DNA, 25 bp, Homo sapien
cctgcggacttctagccccttgagg

SEQ ID NO: 602723 - DNA, 25 bp, Homo sapien
gacttctagccccttgagggcatgg

SEQ ID NO: 602724 - DNA, 25 bp, Homo sapien
tgcatcattgggatacatatgtcac

SEQ ID NO: 602725 - DNA, 25 bp, Homo sapien
caatttgaaggaaataccactcatt

SEQ ID NO: 602726 - DNA, 25 bp, Homo sapien
atgtcacttcacaagatgttcaatt

SEQ ID NO: 602727 - DNA, 25 bp, Homo sapien
catattgagttgacctaaatcctgg

SEQ ID NO: 602728 - DNA, 25 bp, Homo sapien
ttggattccgattgtaaaggaatga

SEQ ID NO: 602729 - DNA, 25 bp, Homo sapien
ttagtggccaagttggattccgatt

SEQ ID NO: 602730 - DNA, 25 bp, Homo sapien
tcatttaggaccaagtctaaggaaa

SEQ ID NO: 602731 - DNA, 25 bp, Homo sapien
aaggaatgatactaattttctagca

SEQ ID NO: 602732 - DNA, 25 bp, Homo sapien
tgtgagccatcctgcctgttcttat

SEQ ID NO: 602733 - DNA, 25 bp, Homo sapien
gtgagccatcctgcctgttcttatt

SEQ ID NO: 602734 - DNA, 25 bp, Homo sapien
gtgtgagccatcctgcctgttctta

SEQ ID NO: 602735 - DNA, 25 bp, Homo sapien
tctactgggccctggtatcctggct

SEQ ID NO: 602736 - DNA, 25 bp, Homo sapien
gacaccaggctgctcagaatgaggt

SEQ ID NO: 602737 - DNA, 25 bp, Homo sapien
tcagccagtggttcttgtattgcat

SEQ ID NO: 602738 - DNA, 25 bp, Homo sapien
aatgaggtgactgcgggcaccattc

SEQ ID NO: 602739 - DNA, 25 bp, Homo sapien
gtaaatctaactggtgtaattccca

SEQ ID NO: 602740 - DNA, 25 bp, Homo sapien
ttggccccaggagacgaactcttct

SEQ ID NO: 602741 - DNA, 25 bp, Homo sapien
tatgggaagcaagcatgttggcccc

SEQ ID NO: 602742 - DNA, 25 bp, Homo sapien
actgagcagggacttaagggatcga

SEQ ID NO: 602743 - DNA, 25 bp, Homo sapien
tctctcttcaaccaaagtcccaagg

SEQ ID NO: 602744 - DNA, 25 bp, Homo sapien
ccccatagaccacttggcttgggtc

SEQ ID NO: 602745 - DNA, 25 bp, Homo sapien
ccagttggcatgatggccctaaact

SEQ ID NO: 602746 - DNA, 25 bp, Homo sapien
ttccagagccaaatcagcccctttt

SEQ ID NO: 602747 - DNA, 25 bp, Homo sapien
aacatgaggcctctaacagcacggg

SEQ ID NO: 602748 - DNA, 25 bp, Homo sapien
cagccccagcggtcagtctataaat

SEQ ID NO: 602749 - DNA, 25 bp, Homo sapien
ctattaagagtgtggagatccctcc

SEQ ID NO: 602750 - DNA, 25 bp, Homo sapien
tgtttacatcctgcagctggtcggg

SEQ ID NO: 602751 - DNA, 25 bp, Homo sapien
gacaagacgggcatccgagtctact

SEQ ID NO: 602752 - DNA, 25 bp, Homo sapien
tcggtggctctgcaacttctcacgg

SEQ ID NO: 602753 - DNA, 25 bp, Homo sapien
gcaagatcattatcgagcccggctt

SEQ ID NO: 602754 - DNA, 25 bp, Homo sapien
cggagtccctgtggttcatgacaaa

SEQ ID NO: 602755 - DNA, 25 bp, Homo sapien
tcaaccaggttattccacgggcaac

SEQ ID NO: 602756 - DNA, 25 bp, Homo sapien
gcttagagtcatcccaccacaagga

SEQ ID NO: 602757 - DNA, 25 bp, Homo sapien
tatctctagcttcggtttgggcgtg

SEQ ID NO: 602758 - DNA, 25 bp, Homo sapien
gccgataaaaggagcttcaaccagg

SEQ ID NO: 602759 - DNA, 25 bp, Homo sapien
tcacatacctgccatcagcatgcag

SEQ ID NO: 602760 - DNA, 25 bp, Homo sapien
taggctcacatacctgccatcagca

SEQ ID NO: 602761 - DNA, 25 bp, Homo sapien
ccagctggtattgacacaactccta

SEQ ID NO: 602762 - DNA, 25 bp, Homo sapien
gtattgacacaactcctaggctcac

SEQ ID NO: 602763 - DNA, 25 bp, Homo sapien
gacaacgagtgtgctgacttccggc

SEQ ID NO: 602764 - DNA, 25 bp, Homo sapien
tcagtaaggccatcgatgtcctggt

SEQ ID NO: 602765 - DNA, 25 bp, Homo sapien
gctcagactttcaggtaaggtgcct

SEQ ID NO: 602766 - DNA, 25 bp, Homo sapien
cttcacgcggaaggcagatgcagtc

SEQ ID NO: 602767 - DNA, 25 bp, Homo sapien
gcatcccaagttgttgggactatag

SEQ ID NO: 602768 - DNA, 25 bp, Homo sapien
gagatggggtctctcactatgttgc

SEQ ID NO: 602769 - DNA, 25 bp, Homo sapien
gcgcacgccaccacacctggctaat

SEQ ID NO: 602770 - DNA, 25 bp, Homo sapien
taatttcgtatttttgaaagagatg

SEQ ID NO: 602771 - DNA, 25 bp, Homo sapien
ggttgtttaggatcattaataagat

SEQ ID NO: 602772 - DNA, 25 bp, Homo sapien
taagattatgtagccatagaatact

SEQ ID NO: 602773 - DNA, 25 bp, Homo sapien
taaagcaggatgataactgtacgca

SEQ ID NO: 602774 - DNA, 25 bp, Homo sapien
tacgcagcctatgaggttgtttagg

SEQ ID NO: 602775 - DNA, 25 bp, Homo sapien
cacaaataagcctatgatatatgcc

SEQ ID NO: 602776 - DNA, 25 bp, Homo sapien
cagacaaataaaacgctgagtatca

SEQ ID NO: 602777 - DNA, 25 bp, Homo sapien
catttcagtggagacttgaggcaga

SEQ ID NO: 602778 - DNA, 25 bp, Homo sapien
ttaagatggacgtaatgggcctgga

SEQ ID NO: 602779 - DNA, 25 bp, Homo sapien
ctacagggccctaacctgggagcgg

SEQ ID NO: 602780 - DNA, 25 bp, Homo sapien
gagctgcgctcggagaacgactatc

SEQ ID NO: 602781 - DNA, 25 bp, Homo sapien
aactttatttgggaagcgcgctcct

SEQ ID NO: 602782 - DNA, 25 bp, Homo sapien
aaagaccttggaactggctacaggg

SEQ ID NO: 602783 - DNA, 25 bp, Homo sapien
ataggcactgccactgcgaccagca

SEQ ID NO: 602784 - DNA, 25 bp, Homo sapien
ctagtggtccctgctccgggggagg

SEQ ID NO: 602785 - DNA, 25 bp, Homo sapien
cctagtggtccctgctccgggggag

SEQ ID NO: 602786 - DNA, 25 bp, Homo sapien
actataggcactgccactgcgacca

SEQ ID NO: 602787 - DNA, 25 bp, Homo sapien
gccgtgggcagtgagtgaatcctca

SEQ ID NO: 602788 - DNA, 25 bp, Homo sapien
gagtgtaacgccagcggaggcctct

SEQ ID NO: 602789 - DNA, 25 bp, Homo sapien
tgtccctgctcagccggccgtgggc

SEQ ID NO: 602790 - DNA, 25 bp, Homo sapien
ggaaggaagcgctgataggtgaggc

SEQ ID NO: 602791 - DNA, 25 bp, Homo sapien
tccccagacagggtgtcctccacct

SEQ ID NO: 602792 - DNA, 25 bp, Homo sapien
ctcctccccagacagggtgtcctcc

SEQ ID NO: 602793 - DNA, 25 bp, Homo sapien
agacagggtgtcctccacctggctg

SEQ ID NO: 602794 - DNA, 25 bp, Homo sapien
cccagacagggtgtcctccacctgg

SEQ ID NO: 602795 - DNA, 25 bp, Homo sapien
gtctggagctgcctcctcctcctct

SEQ ID NO: 602796 - DNA, 25 bp, Homo sapien
ctgggtctggagctgcctcctcctc

SEQ ID NO: 602797 - DNA, 25 bp, Homo sapien
tctggagctgcctcctcctcctctt

SEQ ID NO: 602798 - DNA, 25 bp, Homo sapien
gggtctggagctgcctcctcctcct

SEQ ID NO: 602799 - DNA, 25 bp, Homo sapien
ggggcaccgtgggatcctcaggagc

SEQ ID NO: 602800 - DNA, 25 bp, Homo sapien
gcaccgtgggatcctcaggagcagc

SEQ ID NO: 602801 - DNA, 25 bp, Homo sapien
ctggggcaccgtgggatcctcagga

SEQ ID NO: 602802 - DNA, 25 bp, Homo sapien
ggcaccgtgggatcctcaggagcag

SEQ ID NO: 602803 - DNA, 25 bp, Homo sapien
atctctgaggcactcaaaacctggc

SEQ ID NO: 602804 - DNA, 25 bp, Homo sapien
gtgaatggaggagttctcctcgcgc

SEQ ID NO: 602805 - DNA, 25 bp, Homo sapien
aatggaggagttctcctcgcgccct

SEQ ID NO: 602806 - DNA, 25 bp, Homo sapien
aggtgaatggaggagttctcctcgc

SEQ ID NO: 602807 - DNA, 25 bp, Homo sapien
ggaggtgaatggaggagttctcctc

SEQ ID NO: 602808 - DNA, 25 bp, Homo sapien
ccttgacgtgcagaagaccagactc

SEQ ID NO: 602809 - DNA, 25 bp, Homo sapien
atccgccggtacaggctctgcaggc

SEQ ID NO: 602810 - DNA, 25 bp, Homo sapien
gctctgcaggctgaaaccgtccctt

SEQ ID NO: 602811 - DNA, 25 bp, Homo sapien
actccagggatggccggtgactctt

SEQ ID NO: 602812 - DNA, 25 bp, Homo sapien
gcctttgctgagtcggatagccgag

SEQ ID NO: 602813 - DNA, 25 bp, Homo sapien
gaagcctttgctgagtcggatagcc

SEQ ID NO: 602814 - DNA, 25 bp, Homo sapien
gaagaggaatgtctcgccagtacca

SEQ ID NO: 602815 - DNA, 25 bp, Homo sapien
tctcgccagtaccatagaagccttt

SEQ ID NO: 602816 - DNA, 25 bp, Homo sapien
aaaagtagtatgctctgtgccaagc

SEQ ID NO: 602817 - DNA, 25 bp, Homo sapien
tataccagtcatcttgtgcctgtca

SEQ ID NO: 602818 - DNA, 25 bp, Homo sapien
ttgggactattattctcacccagct

SEQ ID NO: 602819 - DNA, 25 bp, Homo sapien
gatggaaggtgtttgggactattat

SEQ ID NO: 602820 - DNA, 25 bp, Homo sapien
tcccttcacaaagaaagagttgctt

SEQ ID NO: 602821 - DNA, 25 bp, Homo sapien
ctcccttcacaaagaaagagttgct

SEQ ID NO: 602822 - DNA, 25 bp, Homo sapien
agttgcttccagtccacttaaagac

SEQ ID NO: 602823 - DNA, 25 bp, Homo sapien
gtgaatccaagtctcccttcacaaa

SEQ ID NO: 602824 - DNA, 25 bp, Homo sapien
acctcgttgttgaaggtcgggcaag

SEQ ID NO: 602825 - DNA, 25 bp, Homo sapien
gcttcccccgcggaacaagtctcca

SEQ ID NO: 602826 - DNA, 25 bp, Homo sapien
ggaacaagtctccatccaaccacag

SEQ ID NO: 602827 - DNA, 25 bp, Homo sapien
cctgccgggccagcacctcgttgtt

SEQ ID NO: 602828 - DNA, 25 bp, Homo sapien
ttcaaagtcacctctgcaaaagagc

SEQ ID NO: 602829 - DNA, 25 bp, Homo sapien
tgttagcttagggtctctgtgctgc

SEQ ID NO: 602830 - DNA, 25 bp, Homo sapien
cgttcagtagctggcgaggaacagc

SEQ ID NO: 602831 - DNA, 25 bp, Homo sapien
catgaatcagttgtagaacctctaa

SEQ ID NO: 602832 - DNA, 25 bp, Homo sapien
tagagagttactgaacgtggttacc

SEQ ID NO: 602833 - DNA, 25 bp, Homo sapien
tgtttccattatgagaacgctgtgc

SEQ ID NO: 602834 - DNA, 25 bp, Homo sapien
tgttacatgtaacgcagctgtactt

SEQ ID NO: 602835 - DNA, 25 bp, Homo sapien
aacgctgtgctatttacaaggttac

SEQ ID NO: 602836 - DNA, 25 bp, Homo sapien
tccgagaagcatccaaaagcagagt

SEQ ID NO: 602837 - DNA, 25 bp, Homo sapien
gagcctatgctgatgggaccaacgt

SEQ ID NO: 602838 - DNA, 25 bp, Homo sapien
ccaacgttagagctttgatgcagag

SEQ ID NO: 602839 - DNA, 25 bp, Homo sapien
aataggatggcgatgttatagcccc

SEQ ID NO: 602840 - DNA, 25 bp, Homo sapien
gattttgagataggcctttaagtac

SEQ ID NO: 602841 - DNA, 25 bp, Homo sapien
gacaaataaatactgttgattttga

SEQ ID NO: 602842 - DNA, 25 bp, Homo sapien
gtatcatgacaataggatgactttt

SEQ ID NO: 602843 - DNA, 25 bp, Homo sapien
ggcctttaagtacaagtatcatgac

SEQ ID NO: 602844 - DNA, 25 bp, Homo sapien
ttgataaatgataactgtctatttt

SEQ ID NO: 602845 - DNA, 25 bp, Homo sapien
aaattgataaatgataactgtctat

SEQ ID NO: 602846 - DNA, 25 bp, Homo sapien
gataaatgataactgtctattttca

SEQ ID NO: 602847 - DNA, 25 bp, Homo sapien
catagtgtatataaatgtcagatca

SEQ ID NO: 602848 - DNA, 25 bp, Homo sapien
tcttgtagcccaggctgtaatgcaa

SEQ ID NO: 602849 - DNA, 25 bp, Homo sapien
tggaggggggtggacagagttttgc

SEQ ID NO: 602850 - DNA, 25 bp, Homo sapien
tgtcagccaggctggtctggaactc

SEQ ID NO: 602851 - DNA, 25 bp, Homo sapien
ttgtagcccaggctgtaatgcaatg

SEQ ID NO: 602852 - DNA, 25 bp, Homo sapien
catacctggactaatattgaacacc

SEQ ID NO: 602853 - DNA, 25 bp, Homo sapien
tgcccagacttgtcattatttaact

SEQ ID NO: 602854 - DNA, 25 bp, Homo sapien
tgaacaccaaaaaactgacttggcc

SEQ ID NO: 602855 - DNA, 25 bp, Homo sapien
cattatttaactcatacctggacta

SEQ ID NO: 602856 - DNA, 25 bp, Homo sapien
gcctgtcatggaacaatatggtctc

SEQ ID NO: 602857 - DNA, 25 bp, Homo sapien
gctcccaatgggctagaatctttaa

SEQ ID NO: 602858 - DNA, 25 bp, Homo sapien
gtaggaccacttgaatcacctgtcg

SEQ ID NO: 602859 - DNA, 25 bp, Homo sapien
gataattttgttagtcagggctccc

SEQ ID NO: 602860 - DNA, 25 bp, Homo sapien
gcctaacagagcttataactgcacg

SEQ ID NO: 602861 - DNA, 25 bp, Homo sapien
cagagcttataactgcacgtgttca

SEQ ID NO: 602862 - DNA, 25 bp, Homo sapien
tggtagtgcctaacagagcttataa

SEQ ID NO: 602863 - DNA, 25 bp, Homo sapien
tataactgcacgtgttcaaaggctg

SEQ ID NO: 602864 - DNA, 25 bp, Homo sapien
cctggccctagtggattttcttgaa

SEQ ID NO: 602865 - DNA, 25 bp, Homo sapien
tgtccatttatcaagccctgtgtgg

SEQ ID NO: 602866 - DNA, 25 bp, Homo sapien
gtaaaacctggtgactggagactgc

SEQ ID NO: 602867 - DNA, 25 bp, Homo sapien
gcagtgcataatgatcatgcttgtg

SEQ ID NO: 602868 - DNA, 25 bp, Homo sapien
cattgtgcaaccaatcgattgccaa

SEQ ID NO: 602869 - DNA, 25 bp, Homo sapien
caaaaagataacaatcgcctctgtc

SEQ ID NO: 602870 - DNA, 25 bp, Homo sapien
gaagcatttttagttaggcacaaca

SEQ ID NO: 602871 - DNA, 25 bp, Homo sapien
ggcacaacatgtgtctatactcaaa

SEQ ID NO: 602872 - DNA, 25 bp, Homo sapien
caatcgatttgagcatagtctaggg

SEQ ID NO: 602873 - DNA, 25 bp, Homo sapien
tcgatacatcaaacagctgggaggt

SEQ ID NO: 602874 - DNA, 25 bp, Homo sapien
tacacctcaatttcaacgtcttcga

SEQ ID NO: 602875 - DNA, 25 bp, Homo sapien
tctcctcgtccgaatcattgataca

SEQ ID NO: 602876 - DNA, 25 bp, Homo sapien
gctgggggcgccgaggaaaggaaga

SEQ ID NO: 602877 - DNA, 25 bp, Homo sapien
aggcgggggagggagccctgcggcg

SEQ ID NO: 602878 - DNA, 25 bp, Homo sapien
gggttcccaggagggcctgcggcat

SEQ ID NO: 602879 - DNA, 25 bp, Homo sapien
ctgcgctgggggcgccgaggaaagg

SEQ ID NO: 602880 - DNA, 25 bp, Homo sapien
aagaacatccgaggtagcggctccg

SEQ ID NO: 602881 - DNA, 25 bp, Homo sapien
tgctgaagaacatccgaggtagcgg

SEQ ID NO: 602882 - DNA, 25 bp, Homo sapien
gcggtggctttgaagagccggtgct

SEQ ID NO: 602883 - DNA, 25 bp, Homo sapien
aacatccgaggtagcggctccggag

SEQ ID NO: 602884 - DNA, 25 bp, Homo sapien
tccggcgccgaggttcttgactgct

SEQ ID NO: 602885 - DNA, 25 bp, Homo sapien
ccaagcgtccccgttgcgatgacag

SEQ ID NO: 602886 - DNA, 25 bp, Homo sapien
atgcagcgagccgattccgagcagc

SEQ ID NO: 602887 - DNA, 25 bp, Homo sapien
acgccaggtgtagccatgcagcgag

SEQ ID NO: 602888 - DNA, 25 bp, Homo sapien
cagggccctctagttgaccagcaat

SEQ ID NO: 602889 - DNA, 25 bp, Homo sapien
tgtggacaccagacaacaggtatcc

SEQ ID NO: 602890 - DNA, 25 bp, Homo sapien
taccaggcaattgcatggaccagta

SEQ ID NO: 602891 - DNA, 25 bp, Homo sapien
tatagggaagtttgagccctgccgc

SEQ ID NO: 602892 - DNA, 25 bp, Homo sapien
ggatataatgccacatctagcaaga

SEQ ID NO: 602893 - DNA, 25 bp, Homo sapien
tgactctggcaattctggttcccat

SEQ ID NO: 602894 - DNA, 25 bp, Homo sapien
cattaacgtatgtactccttggcga

SEQ ID NO: 602895 - DNA, 25 bp, Homo sapien
tccttggcgatttgggaggactatg

SEQ ID NO: 602896 - DNA, 25 bp, Homo sapien
taagtatctgccaaagaaacttggg

SEQ ID NO: 602897 - DNA, 25 bp, Homo sapien
gataatagacgatgtcgttttctgt

SEQ ID NO: 602898 - DNA, 25 bp, Homo sapien
tgagctacaagagcagtgaagttcc

SEQ ID NO: 602899 - DNA, 25 bp, Homo sapien
tataggtttcagatcaaattctgct

SEQ ID NO: 602900 - DNA, 25 bp, Homo sapien
aaccatatcactaagctaaatacct

SEQ ID NO: 602901 - DNA, 25 bp, Homo sapien
aaaaacaagataagtgtattagcct

SEQ ID NO: 602902 - DNA, 25 bp, Homo sapien
tcactaagctaaatacctacttttc

SEQ ID NO: 602903 - DNA, 25 bp, Homo sapien
acaagataagtgtattagcctgttc

SEQ ID NO: 602904 - DNA, 25 bp, Homo sapien
ttgagggtgatggttttccctgtaa

SEQ ID NO: 602905 - DNA, 25 bp, Homo sapien
accttgagggtgatggttttccctg

SEQ ID NO: 602906 - DNA, 25 bp, Homo sapien
attttctgtcgtatccgagggttca

SEQ ID NO: 602907 - DNA, 25 bp, Homo sapien
tttctgtcgtatccgagggttcaac

SEQ ID NO: 602908 - DNA, 25 bp, Homo sapien
aatattagtctttgccgatcaggag

SEQ ID NO: 602909 - DNA, 25 bp, Homo sapien
aaatattagtctttgccgatcagga

SEQ ID NO: 602910 - DNA, 25 bp, Homo sapien
tattagtctttgccgatcaggagga

SEQ ID NO: 602911 - DNA, 25 bp, Homo sapien
atattagtctttgccgatcaggagg

SEQ ID NO: 602912 - DNA, 25 bp, Homo sapien
gccgttctcatctaccttataatat

SEQ ID NO: 602913 - DNA, 25 bp, Homo sapien
cgaaagcaactaattttgccgttct

SEQ ID NO: 602914 - DNA, 25 bp, Homo sapien
ggcactctcgacgaaagcaactaat

SEQ ID NO: 602915 - DNA, 25 bp, Homo sapien
ttgccgttctcatctaccttataat

SEQ ID NO: 602916 - DNA, 25 bp, Homo sapien
cacaccggctaattttgtatgttta

SEQ ID NO: 602917 - DNA, 25 bp, Homo sapien
agctgctattacagggacccaccac

SEQ ID NO: 602918 - DNA, 25 bp, Homo sapien
caagtagctgctattacagggaccc

SEQ ID NO: 602919 - DNA, 25 bp, Homo sapien
gtagctgctattacagggacccacc

SEQ ID NO: 602920 - DNA, 25 bp, Homo sapien
cagcattatagaacttagggtcagg

SEQ ID NO: 602921 - DNA, 25 bp, Homo sapien
ttttgccaatgcgattatgtgccca

SEQ ID NO: 602922 - DNA, 25 bp, Homo sapien
tgtgcccaaatagacaagacttgct

SEQ ID NO: 602923 - DNA, 25 bp, Homo sapien
tactgctgactttacggcttctgaa

SEQ ID NO: 602924 - DNA, 25 bp, Homo sapien
gtcatttagcgaaccactcactggg

SEQ ID NO: 602925 - DNA, 25 bp, Homo sapien
gaagccctggacgactttactgcca

SEQ ID NO: 602926 - DNA, 25 bp, Homo sapien
cagattatgtttggcgcccagggac

SEQ ID NO: 602927 - DNA, 25 bp, Homo sapien
tagaggaggcatctcactacgctgc

SEQ ID NO: 602928 - DNA, 25 bp, Homo sapien
gagggagagcgccaaccaaattctt

SEQ ID NO: 602929 - DNA, 25 bp, Homo sapien
agagggagagcgccaaccaaattct

SEQ ID NO: 602930 - DNA, 25 bp, Homo sapien
ggagagcgccaaccaaattcttaac

SEQ ID NO: 602931 - DNA, 25 bp, Homo sapien
gggagagcgccaaccaaattcttaa

SEQ ID NO: 602932 - DNA, 25 bp, Homo sapien
gacgttttatctgatttgcagagca

SEQ ID NO: 602933 - DNA, 25 bp, Homo sapien
gactcatagagaacatattaggcca

SEQ ID NO: 602934 - DNA, 25 bp, Homo sapien
gatttgcagagcaatgcagtgactc

SEQ ID NO: 602935 - DNA, 25 bp, Homo sapien
ttttacaggctcaacatggaggtgg

SEQ ID NO: 602936 - DNA, 25 bp, Homo sapien
gggatcccagtcctcccgctcacag

SEQ ID NO: 602937 - DNA, 25 bp, Homo sapien
tgagcttcgacgcttccagcagccg

SEQ ID NO: 602938 - DNA, 25 bp, Homo sapien
acagggccttgcagttcccgaggac

SEQ ID NO: 602939 - DNA, 25 bp, Homo sapien
ttggaaccgaccgtctcgcaacgct

SEQ ID NO: 602940 - DNA, 25 bp, Homo sapien
tcctccgagcaggtcccgccggagt

SEQ ID NO: 602941 - DNA, 25 bp, Homo sapien
gctgacttccgctcgggaaagtggc

SEQ ID NO: 602942 - DNA, 25 bp, Homo sapien
aaagtggctccaagagcccgccaca

SEQ ID NO: 602943 - DNA, 25 bp, Homo sapien
cgccggagtccgagccgcgggctga

SEQ ID NO: 602944 - DNA, 25 bp, Homo sapien
ttctctgtcctctaagaagccaggt

SEQ ID NO: 602945 - DNA, 25 bp, Homo sapien
tgtcctctaagaagccaggttcttt

SEQ ID NO: 602946 - DNA, 25 bp, Homo sapien
gcttcccgctatctgttgctctctg

SEQ ID NO: 602947 - DNA, 25 bp, Homo sapien
agcctctcaaccagatctcctccct

SEQ ID NO: 602948 - DNA, 25 bp, Homo sapien
gatccagcgaggcttttagtctctc

SEQ ID NO: 602949 - DNA, 25 bp, Homo sapien
cacgatggagtagaaggcagattcc

SEQ ID NO: 602950 - DNA, 25 bp, Homo sapien
tctccacgtcatgcttggtgaggta

SEQ ID NO: 602951 - DNA, 25 bp, Homo sapien
aaatttgtgaaagggcgatccagcg

SEQ ID NO: 602952 - DNA, 25 bp, Homo sapien
atgccattactggtttaaaggtgga

SEQ ID NO: 602953 - DNA, 25 bp, Homo sapien
catgccattactggtttaaaggtgg

SEQ ID NO: 602954 - DNA, 25 bp, Homo sapien
tgccattactggtttaaaggtggag

SEQ ID NO: 602955 - DNA, 25 bp, Homo sapien
ctggtttaaaggtggaggggccatg

SEQ ID NO: 602956 - DNA, 25 bp, Homo sapien
gcagtagtgtatgcctaaagtccct

SEQ ID NO: 602957 - DNA, 25 bp, Homo sapien
caggtgaaccctttaatagcagttt

SEQ ID NO: 602958 - DNA, 25 bp, Homo sapien
ttctaaagacattcatactcctccc

SEQ ID NO: 602959 - DNA, 25 bp, Homo sapien
agtcagctgaccttacaattcagag

SEQ ID NO: 602960 - DNA, 25 bp, Homo sapien
ggttagatctgatgtaggtacatgc

SEQ ID NO: 602961 - DNA, 25 bp, Homo sapien
ggatcaaggttagatctgatgtagg

SEQ ID NO: 602962 - DNA, 25 bp, Homo sapien
cctgggcagcgtagaagagggaatc

SEQ ID NO: 602963 - DNA, 25 bp, Homo sapien
aatccacattgctgggatcaaggtt

SEQ ID NO: 602964 - DNA, 25 bp, Homo sapien
tggcaggcatggcaaagacagaatg

SEQ ID NO: 602965 - DNA, 25 bp, Homo sapien
gaaagaattggcagacacagagttt

SEQ ID NO: 602966 - DNA, 25 bp, Homo sapien
gacagaatgcggagcagctgccaaa

SEQ ID NO: 602967 - DNA, 25 bp, Homo sapien
tgtttgcaaaacttcggtacaacac

SEQ ID NO: 602968 - DNA, 25 bp, Homo sapien
gctgccagaagcagatctttggtct

SEQ ID NO: 602969 - DNA, 25 bp, Homo sapien
gggaaggccaaagccacttagagct

SEQ ID NO: 602970 - DNA, 25 bp, Homo sapien
tgctgagacgagcagtaagggcact

SEQ ID NO: 602971 - DNA, 25 bp, Homo sapien
gctgcaactgcatggtagatctggg

SEQ ID NO: 602972 - DNA, 25 bp, Homo sapien
gaatgagccctcttcggataggacc

SEQ ID NO: 602973 - DNA, 25 bp, Homo sapien
gataggacccgagacaaatgaagcc

SEQ ID NO: 602974 - DNA, 25 bp, Homo sapien
gactgtgtccatgtgagctccacga

SEQ ID NO: 602975 - DNA, 25 bp, Homo sapien
gcacctggcacacggaagtatttac

SEQ ID NO: 602976 - DNA, 25 bp, Homo sapien
gcagtgaaacggtgaacacaaataa

SEQ ID NO: 602977 - DNA, 25 bp, Homo sapien
ggtttgcagtgaaacggtgaacaca

SEQ ID NO: 602978 - DNA, 25 bp, Homo sapien
agggtttgcagtgaaacggtgaaca

SEQ ID NO: 602979 - DNA, 25 bp, Homo sapien
tttgcagtgaaacggtgaacacaaa

SEQ ID NO: 602980 - DNA, 25 bp, Homo sapien
gggattccagaacggtgctccacac

SEQ ID NO: 602981 - DNA, 25 bp, Homo sapien
tgctaaacaacgaacgggattccag

SEQ ID NO: 602982 - DNA, 25 bp, Homo sapien
ctcttgctaaacaacgaacgggatt

SEQ ID NO: 602983 - DNA, 25 bp, Homo sapien
caacgaacgggattccagaacggtg

SEQ ID NO: 602984 - DNA, 25 bp, Homo sapien
gatggtgactggagaagcattcccc

SEQ ID NO: 602985 - DNA, 25 bp, Homo sapien
tatgtcacctgaaatcaaaggccca

SEQ ID NO: 602986 - DNA, 25 bp, Homo sapien
gaaggtagcatcaaagtaaggcaca

SEQ ID NO: 602987 - DNA, 25 bp, Homo sapien
caaaagggccaagcactggacaaag

SEQ ID NO: 602988 - DNA, 25 bp, Homo sapien
tctctggagcatagtactgtattcg

SEQ ID NO: 602989 - DNA, 25 bp, Homo sapien
gcgggctaaacaacccactcatggt

SEQ ID NO: 602990 - DNA, 25 bp, Homo sapien
taaggcaacctaccagttggatttc

SEQ ID NO: 602991 - DNA, 25 bp, Homo sapien
gttggatttcacaatgaccctacga

SEQ ID NO: 602992 - DNA, 25 bp, Homo sapien
caatacagtgagacctcatctttac

SEQ ID NO: 602993 - DNA, 25 bp, Homo sapien
atacagtgagacctcatctttacaa

SEQ ID NO: 602994 - DNA, 25 bp, Homo sapien
aggatcacttaagcctgggggttcg

SEQ ID NO: 602995 - DNA, 25 bp, Homo sapien
ttgagctagggaggttgaggcttca

SEQ ID NO: 602996 - DNA, 25 bp, Homo sapien
acgatgctcctcaggtcagcctgct

SEQ ID NO: 602997 - DNA, 25 bp, Homo sapien
cacgatgctcctcaggtcagcctgc

SEQ ID NO: 602998 - DNA, 25 bp, Homo sapien
cgatgctcctcaggtcagcctgctg

SEQ ID NO: 602999 - DNA, 25 bp, Homo sapien
tcttcaaactggagatacacgcccc

SEQ ID NO: 603000 - DNA, 25 bp, Homo sapien
ctccttaatggatggctcagtcccc

SEQ ID NO: 603001 - DNA, 25 bp, Homo sapien
agtccccacatgatccatgagcttg

SEQ ID NO: 603002 - DNA, 25 bp, Homo sapien
gttcatccaggcgagcaacaaggtc

SEQ ID NO: 603003 - DNA, 25 bp, Homo sapien
gaagatcgcgttcatcagctggatg

SEQ ID NO: 603004 - DNA, 25 bp, Homo sapien
cacaactggcacgtggtagcgatta

SEQ ID NO: 603005 - DNA, 25 bp, Homo sapien
caagatagcctgttcatgagtgtcg

SEQ ID NO: 603006 - DNA, 25 bp, Homo sapien
tagcgattatgcgagagcacagcag

SEQ ID NO: 603007 - DNA, 25 bp, Homo sapien
gaagcaacagatttagcatgttcta

SEQ ID NO: 603008 - DNA, 25 bp, Homo sapien
tggctctggaagcaacagatttagc

SEQ ID NO: 603009 - DNA, 25 bp, Homo sapien
tgaaggatgtcttctggaggacagt

SEQ ID NO: 603010 - DNA, 25 bp, Homo sapien
tttagcatgttctagtttaacagtg

SEQ ID NO: 603011 - DNA, 25 bp, Homo sapien
tcgacaaggaagtcataataaccac

SEQ ID NO: 603012 - DNA, 25 bp, Homo sapien
gcaatataccggttgtcaccttcaa

SEQ ID NO: 603013 - DNA, 25 bp, Homo sapien
ctctacggtatttgcaatataccgg

SEQ ID NO: 603014 - DNA, 25 bp, Homo sapien
cactggaaaatttgacgttcatgaa

SEQ ID NO: 603015 - DNA, 25 bp, Homo sapien
ggtggcacgatctcagctcactgca

SEQ ID NO: 603016 - DNA, 25 bp, Homo sapien
ctggagtgcggtggcacgatctcag

SEQ ID NO: 603017 - DNA, 25 bp, Homo sapien
tgagacagagtctggctccattgcc

SEQ ID NO: 603018 - DNA, 25 bp, Homo sapien
acagagtctggctccattgcccagg

SEQ ID NO: 603019 - DNA, 25 bp, Homo sapien
cgggtagttttgggtgcaatgctct

SEQ ID NO: 603020 - DNA, 25 bp, Homo sapien
gctctgatccttatccacggtggaa

SEQ ID NO: 603021 - DNA, 25 bp, Homo sapien
acggtggaaagatcaacatttgtga

SEQ ID NO: 603022 - DNA, 25 bp, Homo sapien
caacttcagtggagatcttgactct

SEQ ID NO: 603023 - DNA, 25 bp, Homo sapien
gttcagcaccagtgttcacatctac

SEQ ID NO: 603024 - DNA, 25 bp, Homo sapien
cgaagttctggtggctgtctgcgat

SEQ ID NO: 603025 - DNA, 25 bp, Homo sapien
taccagctggaagaacaaggcgaag

SEQ ID NO: 603026 - DNA, 25 bp, Homo sapien
tgtctgcgatgaatgtgcccttggc

SEQ ID NO: 603027 - DNA, 25 bp, Homo sapien
tggactgtcagggttcggtcaaaac

SEQ ID NO: 603028 - DNA, 25 bp, Homo sapien
gagaactgtctaggtgtcttcctga

SEQ ID NO: 603029 - DNA, 25 bp, Homo sapien
tgtgggagaacctgatggactgtca

SEQ ID NO: 603030 - DNA, 25 bp, Homo sapien
tatcccaggtaaaggactacaacca

SEQ ID NO: 603031 - DNA, 25 bp, Homo sapien
taaaggcaggttattctccatcaag

SEQ ID NO: 603032 - DNA, 25 bp, Homo sapien
ttgctaaagcatcggtacagggtac

SEQ ID NO: 603033 - DNA, 25 bp, Homo sapien
caagtctgctggtccttgctaaagc

SEQ ID NO: 603034 - DNA, 25 bp, Homo sapien
taccaaactaggtcccgcattcctg

SEQ ID NO: 603035 - DNA, 25 bp, Homo sapien
ctggggcacaagtccaacagctgca

SEQ ID NO: 603036 - DNA, 25 bp, Homo sapien
tggccatagaggaacgtgctcctgg

SEQ ID NO: 603037 - DNA, 25 bp, Homo sapien
aagaagctgggaaatgctaagaggc

SEQ ID NO: 603038 - DNA, 25 bp, Homo sapien
ttggcaaatgtcattctgggaagaa

SEQ ID NO: 603039 - DNA, 25 bp, Homo sapien
tgctatttggttggcaaatgtcatt

SEQ ID NO: 603040 - DNA, 25 bp, Homo sapien
tgaagtactcaaaggtcagttaggc

SEQ ID NO: 603041 - DNA, 25 bp, Homo sapien
gtctggctcggcaacaaacaccact

SEQ ID NO: 603042 - DNA, 25 bp, Homo sapien
gccagtcttctggttatggagtcgg

SEQ ID NO: 603043 - DNA, 25 bp, Homo sapien
tcttctggttatggagtcggacaaa

SEQ ID NO: 603044 - DNA, 25 bp, Homo sapien
cagttcaaacttgtacacgttcttg

SEQ ID NO: 603045 - DNA, 25 bp, Homo sapien
aaagtggcatctccaatgattaagt

SEQ ID NO: 603046 - DNA, 25 bp, Homo sapien
tccaatgattaagtagagagtgtag

SEQ ID NO: 603047 - DNA, 25 bp, Homo sapien
tggcatctccaatgattaagtagag

SEQ ID NO: 603048 - DNA, 25 bp, Homo sapien
gattaagtagagagtgtaggtgcca

SEQ ID NO: 603049 - DNA, 25 bp, Homo sapien
gaataccacacgagaaaacgcagct

SEQ ID NO: 603050 - DNA, 25 bp, Homo sapien
gattcaggtgctctggcaaaacaca

SEQ ID NO: 603051 - DNA, 25 bp, Homo sapien
tacgtaaccccaatagtgcctgcta

SEQ ID NO: 603052 - DNA, 25 bp, Homo sapien
tgtcttgcaaagtgagtcaaccacc

SEQ ID NO: 603053 - DNA, 25 bp, Homo sapien
gaaaaaagctccaggcagtcccaat

SEQ ID NO: 603054 - DNA, 25 bp, Homo sapien
ctgaaaaaagctccaggcagtccca

SEQ ID NO: 603055 - DNA, 25 bp, Homo sapien
aaaaaagctccaggcagtcccaatc

SEQ ID NO: 603056 - DNA, 25 bp, Homo sapien
aaaagctccaggcagtcccaatcac

SEQ ID NO: 603057 - DNA, 25 bp, Homo sapien
ggggcagagaagtgggtgaaactca

SEQ ID NO: 603058 - DNA, 25 bp, Homo sapien
aactcaatagataatattctctgac

SEQ ID NO: 603059 - DNA, 25 bp, Homo sapien
tgaaactcaatagataatattctct

SEQ ID NO: 603060 - DNA, 25 bp, Homo sapien
gaaactcaatagataatattctctg

SEQ ID NO: 603061 - DNA, 25 bp, Homo sapien
gaaaaggttctgggacaagacagtc

SEQ ID NO: 603062 - DNA, 25 bp, Homo sapien
aaaggttctgggacaagacagtcga

SEQ ID NO: 603063 - DNA, 25 bp, Homo sapien
aggttctgggacaagacagtcgagg

SEQ ID NO: 603064 - DNA, 25 bp, Homo sapien
caagacagtcgagggagcttcttcc

SEQ ID NO: 603065 - DNA, 25 bp, Homo sapien
caaagcaagattcgcgtgagccacc

SEQ ID NO: 603066 - DNA, 25 bp, Homo sapien
aactgaaacgtatggctgtgtgacc

SEQ ID NO: 603067 - DNA, 25 bp, Homo sapien
gttaaaccagaaggctcgacaagca

SEQ ID NO: 603068 - DNA, 25 bp, Homo sapien
gatagtgtgacctagcagaagcagc

SEQ ID NO: 603069 - DNA, 25 bp, Homo sapien
tgaatgtattggacaccacggtggg

SEQ ID NO: 603070 - DNA, 25 bp, Homo sapien
cgaagagcagaagcaacggcgagag

SEQ ID NO: 603071 - DNA, 25 bp, Homo sapien
agaagcaacggcgagaggatcaggg

SEQ ID NO: 603072 - DNA, 25 bp, Homo sapien
tcttctcaggctcgcggaacaggtg

SEQ ID NO: 603073 - DNA, 25 bp, Homo sapien
gtgaagttggagacattggcaccaa

SEQ ID NO: 603074 - DNA, 25 bp, Homo sapien
tcgtgctaggagcaaaagtgaagtt

SEQ ID NO: 603075 - DNA, 25 bp, Homo sapien
tgaaatataatcgtgctaggagcaa

SEQ ID NO: 603076 - DNA, 25 bp, Homo sapien
aagtgaagttggagacattggcacc

SEQ ID NO: 603077 - DNA, 25 bp, Homo sapien
ttgccagccagaaacgtcacactgc

SEQ ID NO: 603078 - DNA, 25 bp, Homo sapien
acatgttgagctgagtccagtagac

SEQ ID NO: 603079 - DNA, 25 bp, Homo sapien
tgctgggccagcatccgattgccag

SEQ ID NO: 603080 - DNA, 25 bp, Homo sapien
tacttcaaggtctggaacatgttga

SEQ ID NO: 603081 - DNA, 25 bp, Homo sapien
ttcaaagagctaggccggcagagct

SEQ ID NO: 603082 - DNA, 25 bp, Homo sapien
tggttgtaatacattcaaagctgac

SEQ ID NO: 603083 - DNA, 25 bp, Homo sapien
tactctagatccctggctcatgtct

SEQ ID NO: 603084 - DNA, 25 bp, Homo sapien
tagattagggtgtcagacttgcccc

SEQ ID NO: 603085 - DNA, 25 bp, Homo sapien
tcaatgagaaacacctttgtgacat

SEQ ID NO: 603086 - DNA, 25 bp, Homo sapien
tgagaaacacctttgtgacatttaa

SEQ ID NO: 603087 - DNA, 25 bp, Homo sapien
caatgagaaacacctttgtgacatt

SEQ ID NO: 603088 - DNA, 25 bp, Homo sapien
aatgagaaacacctttgtgacattt

SEQ ID NO: 603089 - DNA, 25 bp, Homo sapien
agggtggcaaaatgaaccagctgcc

SEQ ID NO: 603090 - DNA, 25 bp, Homo sapien
ccaggaaaaggctactggagggtgg

SEQ ID NO: 603091 - DNA, 25 bp, Homo sapien
tcaggtacaatgcagaaccaccagg

SEQ ID NO: 603092 - DNA, 25 bp, Homo sapien
gagggtggcaaaatgaaccagctgc

SEQ ID NO: 603093 - DNA, 25 bp, Homo sapien
caccatggcgggcagatttcattct

SEQ ID NO: 603094 - DNA, 25 bp, Homo sapien
cccaggcaggtgctgcaagggaaca

SEQ ID NO: 603095 - DNA, 25 bp, Homo sapien
tgcaaaagcaactgagtcctggctc

SEQ ID NO: 603096 - DNA, 25 bp, Homo sapien
tcttctcgagtgagcaacttccaga

SEQ ID NO: 603097 - DNA, 25 bp, Homo sapien
cgtagtgtcctatattttgccaatc

SEQ ID NO: 603098 - DNA, 25 bp, Homo sapien
tattttgccaatctactgctctgct

SEQ ID NO: 603099 - DNA, 25 bp, Homo sapien
ttttgccaatctactgctctgctct

SEQ ID NO: 603100 - DNA, 25 bp, Homo sapien
attttgccaatctactgctctgctc

SEQ ID NO: 603101 - DNA, 25 bp, Homo sapien
gaaacagtgacaaggtgtgccagga

SEQ ID NO: 603102 - DNA, 25 bp, Homo sapien
gatttgccatgggaccgtcatttaa

SEQ ID NO: 603103 - DNA, 25 bp, Homo sapien
gccatgggaccgtcatttaatgaat

SEQ ID NO: 603104 - DNA, 25 bp, Homo sapien
ctagaaacagtgacaaggtgtgcca

SEQ ID NO: 603105 - DNA, 25 bp, Homo sapien
tgccgtgtggccgtgttcttgccaa

SEQ ID NO: 603106 - DNA, 25 bp, Homo sapien
cctaactggtgacaacagagagact

SEQ ID NO: 603107 - DNA, 25 bp, Homo sapien
tgcagtgagtaactgatcccagcag

SEQ ID NO: 603108 - DNA, 25 bp, Homo sapien
gactaaggtactctcccgctctaag

SEQ ID NO: 603109 - DNA, 25 bp, Homo sapien
tgttcttgactccttttcttgacat

SEQ ID NO: 603110 - DNA, 25 bp, Homo sapien
aaagcaacatctgggtaagttagga

SEQ ID NO: 603111 - DNA, 25 bp, Homo sapien
tatctgagctcaccaggtatctgct

SEQ ID NO: 603112 - DNA, 25 bp, Homo sapien
aaaagtataactacaatctggactt

SEQ ID NO: 603113 - DNA, 25 bp, Homo sapien
aaagagactatctgagctcaccagg

SEQ ID NO: 603114 - DNA, 25 bp, Homo sapien
caactaagtcctcatgtcatatacc

SEQ ID NO: 603115 - DNA, 25 bp, Homo sapien
ctaagtcctcatgtcatatacccaa

SEQ ID NO: 603116 - DNA, 25 bp, Homo sapien
aagtcctcatgtcatatacccaagg

SEQ ID NO: 603117 - DNA, 25 bp, Homo sapien
aactaagtcctcatgtcatataccc

SEQ ID NO: 603118 - DNA, 25 bp, Homo sapien
ggccttcagataccaacagggctcc

SEQ ID NO: 603119 - DNA, 25 bp, Homo sapien
cttggacccctagaggtccaaatgg

SEQ ID NO: 603120 - DNA, 25 bp, Homo sapien
ccaacagggctcctatgcagacagc

SEQ ID NO: 603121 - DNA, 25 bp, Homo sapien
ttcagataccaacagggctcctatg

SEQ ID NO: 603122 - DNA, 25 bp, Homo sapien
tctttgaagacaagcactgtgtcca

SEQ ID NO: 603123 - DNA, 25 bp, Homo sapien
ttgaagacaagcactgtgtccaaac

SEQ ID NO: 603124 - DNA, 25 bp, Homo sapien
gaagacaagcactgtgtccaaacac

SEQ ID NO: 603125 - DNA, 25 bp, Homo sapien
tgtccaaacactctgcgttcctcat

SEQ ID NO: 603126 - DNA, 25 bp, Homo sapien
ggccttagaagaggttccagcttca

SEQ ID NO: 603127 - DNA, 25 bp, Homo sapien
caggttctgggccttagaagaggtt

SEQ ID NO: 603128 - DNA, 25 bp, Homo sapien
ctgggtgtggaggctgctcttcctt

SEQ ID NO: 603129 - DNA, 25 bp, Homo sapien
agaggttccagcttcaacagggccc

SEQ ID NO: 603130 - DNA, 25 bp, Homo sapien
ggatggctttaattacctccacatt

SEQ ID NO: 603131 - DNA, 25 bp, Homo sapien
gcatctggatggctttaattacctc

SEQ ID NO: 603132 - DNA, 25 bp, Homo sapien
ccagcatctggatggctttaattac

SEQ ID NO: 603133 - DNA, 25 bp, Homo sapien
tctggatggctttaattacctccac

SEQ ID NO: 603134 - DNA, 25 bp, Homo sapien
tcagctccagcatgaagccaagaat

SEQ ID NO: 603135 - DNA, 25 bp, Homo sapien
agaatgctgagtgcggtggatccca

SEQ ID NO: 603136 - DNA, 25 bp, Homo sapien
ccaagaatgctgagtgcggtggatc

SEQ ID NO: 603137 - DNA, 25 bp, Homo sapien
tgaagccaagaatgctgagtgcggt

SEQ ID NO: 603138 - DNA, 25 bp, Homo sapien
tgaggcaccgctgggttttgtcgac

SEQ ID NO: 603139 - DNA, 25 bp, Homo sapien
gcactgagcaaccaaccggctctgt

SEQ ID NO: 603140 - DNA, 25 bp, Homo sapien
ttccctgcgaccctgagtcccggaa

SEQ ID NO: 603141 - DNA, 25 bp, Homo sapien
tgttccgcccgcgttgccaggtttc

SEQ ID NO: 603142 - DNA, 25 bp, Homo sapien
tgttgtgtactgtgctggtaggcca

SEQ ID NO: 603143 - DNA, 25 bp, Homo sapien
tgtgtactgtgctggtaggccattc

SEQ ID NO: 603144 - DNA, 25 bp, Homo sapien
actgtgctggtaggccattcttggc

SEQ ID NO: 603145 - DNA, 25 bp, Homo sapien
tgtactgtgctggtaggccattctt

SEQ ID NO: 603146 - DNA, 25 bp, Homo sapien
tccaagtgcagtgaatcaggtggca

SEQ ID NO: 603147 - DNA, 25 bp, Homo sapien
tcactggaagaaatgtaacagcctc

SEQ ID NO: 603148 - DNA, 25 bp, Homo sapien
ctgaagtgaattccaaggcggctgc

SEQ ID NO: 603149 - DNA, 25 bp, Homo sapien
tccgcagttgcacctcataaagtgt

SEQ ID NO: 603150 - DNA, 25 bp, Homo sapien
gaatcctcagagctggcagatcttc

SEQ ID NO: 603151 - DNA, 25 bp, Homo sapien
ggatggccacttttcacatcagctc

SEQ ID NO: 603152 - DNA, 25 bp, Homo sapien
gatcttcatcctcccaggaaggatt

SEQ ID NO: 603153 - DNA, 25 bp, Homo sapien
tctgtctaccatgggaatggccttc

SEQ ID NO: 603154 - DNA, 25 bp, Homo sapien
ctggaataggcaaattcagagacag

SEQ ID NO: 603155 - DNA, 25 bp, Homo sapien
tgcagtgagccaatgagtcgtgatt

SEQ ID NO: 603156 - DNA, 25 bp, Homo sapien
tgagccaatgagtcgtgattgcgcc

SEQ ID NO: 603157 - DNA, 25 bp, Homo sapien
atgagtcgtgattgcgccaccctga

SEQ ID NO: 603158 - DNA, 25 bp, Homo sapien
gccaatgagtcgtgattgcgccacc

SEQ ID NO: 603159 - DNA, 25 bp, Homo sapien
catggtgggttacgcccaaagtgta

SEQ ID NO: 603160 - DNA, 25 bp, Homo sapien
ctgggcatggtgggttacgcccaaa

SEQ ID NO: 603161 - DNA, 25 bp, Homo sapien
tacgcccaaagtgtaagcccaacac

SEQ ID NO: 603162 - DNA, 25 bp, Homo sapien
aatacacgtaaaaaataattggctg

SEQ ID NO: 603163 - DNA, 25 bp, Homo sapien
atgcaaagggtcagtgtcatatttc

SEQ ID NO: 603164 - DNA, 25 bp, Homo sapien
taaatgcaaagggtcagtgtcatat

SEQ ID NO: 603165 - DNA, 25 bp, Homo sapien
gcaaagggtcagtgtcatatttctg

SEQ ID NO: 603166 - DNA, 25 bp, Homo sapien
cttgtaaatgcaaagggtcagtgtc

SEQ ID NO: 603167 - DNA, 25 bp, Homo sapien
ggcccaagtcgcttgctgcctgacg

SEQ ID NO: 603168 - DNA, 25 bp, Homo sapien
aagtcgcttgctgcctgacgtctct

SEQ ID NO: 603169 - DNA, 25 bp, Homo sapien
gcttgctgcctgacgtctcttctga

SEQ ID NO: 603170 - DNA, 25 bp, Homo sapien
tctgactcaccactctttagaacca

SEQ ID NO: 603171 - DNA, 25 bp, Homo sapien
caggaaagtgggctcgggcacctcc

SEQ ID NO: 603172 - DNA, 25 bp, Homo sapien
gctcccaggaagagtccgtaccgta

SEQ ID NO: 603173 - DNA, 25 bp, Homo sapien
tgggtacgatgatggccagcacaca

SEQ ID NO: 603174 - DNA, 25 bp, Homo sapien
cctccggaggtgagaagtctaggtc

SEQ ID NO: 603175 - DNA, 25 bp, Homo sapien
gaatggaatcaggcctctacatgga

SEQ ID NO: 603176 - DNA, 25 bp, Homo sapien
ggaatcaggcctctacatggaactc

SEQ ID NO: 603177 - DNA, 25 bp, Homo sapien
ggaatggaatcaggcctctacatgg

SEQ ID NO: 603178 - DNA, 25 bp, Homo sapien
atggaatcaggcctctacatggaac

SEQ ID NO: 603179 - DNA, 25 bp, Homo sapien
ccgcttaggtgaaagactgaccgga

SEQ ID NO: 603180 - DNA, 25 bp, Homo sapien
cctgcttgttgatgccacacagtag

SEQ ID NO: 603181 - DNA, 25 bp, Homo sapien
ggatctaagcaacgaccatcaatgg

SEQ ID NO: 603182 - DNA, 25 bp, Homo sapien
cacacagtagggagtacatagcacc

SEQ ID NO: 603183 - DNA, 25 bp, Homo sapien
ttataataccgaatagcatgccacg

SEQ ID NO: 603184 - DNA, 25 bp, Homo sapien
ttatttataataccgaatagcatgc

SEQ ID NO: 603185 - DNA, 25 bp, Homo sapien
tataataccgaatagcatgccacgt

SEQ ID NO: 603186 - DNA, 25 bp, Homo sapien
atttataataccgaatagcatgcca

SEQ ID NO: 603187 - DNA, 25 bp, Homo sapien
tgcgccagtaaaaagttagatcaac

SEQ ID NO: 603188 - DNA, 25 bp, Homo sapien
tatttttttgctactgatccattga

SEQ ID NO: 603189 - DNA, 25 bp, Homo sapien
aaagttagatcaacagtactgtatt

SEQ ID NO: 603190 - DNA, 25 bp, Homo sapien
catttgctcccctgatgcgccagta

SEQ ID NO: 603191 - DNA, 25 bp, Homo sapien
agggccagcaagcagagaagcaggg

SEQ ID NO: 603192 - DNA, 25 bp, Homo sapien
ggccagcaagcagagaagcagggtc

SEQ ID NO: 603193 - DNA, 25 bp, Homo sapien
cacagggccagcaagcagagaagca

SEQ ID NO: 603194 - DNA, 25 bp, Homo sapien
acagggccagcaagcagagaagcag

SEQ ID NO: 603195 - DNA, 25 bp, Homo sapien
caccacgagccacactccactggca

SEQ ID NO: 603196 - DNA, 25 bp, Homo sapien
ccacgagccacactccactggcaag

SEQ ID NO: 603197 - DNA, 25 bp, Homo sapien
ctggcaaggccactcaggctccctg

SEQ ID NO: 603198 - DNA, 25 bp, Homo sapien
acgagccacactccactggcaaggc

SEQ ID NO: 603199 - DNA, 25 bp, Homo sapien
acccaggaaccttataatgccacca

SEQ ID NO: 603200 - DNA, 25 bp, Homo sapien
cccaggaaccttataatgccaccat

SEQ ID NO: 603201 - DNA, 25 bp, Homo sapien
tactcactgtctagccttccttccc

SEQ ID NO: 603202 - DNA, 25 bp, Homo sapien
ctgtccatgaatacactcctactca

SEQ ID NO: 603203 - DNA, 25 bp, Homo sapien
caggaatacctgtttccttggccac

SEQ ID NO: 603204 - DNA, 25 bp, Homo sapien
ttggccacccggcaaactgctccca

SEQ ID NO: 603205 - DNA, 25 bp, Homo sapien
cagagcttccgctggtcaccttcat

SEQ ID NO: 603206 - DNA, 25 bp, Homo sapien
cttcatcaacaggaatacctgtttc

SEQ ID NO: 603207 - DNA, 25 bp, Homo sapien
attcctcatgcacccacgaaaggaa

SEQ ID NO: 603208 - DNA, 25 bp, Homo sapien
tccaccttaaagcttccagtggctg

SEQ ID NO: 603209 - DNA, 25 bp, Homo sapien
cagctaagcaaagtgcctgctgtct

SEQ ID NO: 603210 - DNA, 25 bp, Homo sapien
aactattctaaagtgcaggtctgac

SEQ ID NO: 603211 - DNA, 25 bp, Homo sapien
caggtgggcagtcccacactgtgtt

SEQ ID NO: 603212 - DNA, 25 bp, Homo sapien
tggctgccattcttgtcctcccatt

SEQ ID NO: 603213 - DNA, 25 bp, Homo sapien
gtgttctgcggagcctgtcagaggt

SEQ ID NO: 603214 - DNA, 25 bp, Homo sapien
cattcaacccacagaatgccaggac

SEQ ID NO: 603215 - DNA, 25 bp, Homo sapien
acttctgggctcagacggttcagcc

SEQ ID NO: 603216 - DNA, 25 bp, Homo sapien
ccttgggcttcctcgtcacctcagc

SEQ ID NO: 603217 - DNA, 25 bp, Homo sapien
tgggcctcttgttcacagaaggaac

SEQ ID NO: 603218 - DNA, 25 bp, Homo sapien
ctaccgcttcttcttagtctctttc

SEQ ID NO: 603219 - DNA, 25 bp, Homo sapien
gaatgcgggggaacacaatgtagat

SEQ ID NO: 603220 - DNA, 25 bp, Homo sapien
acacaatgtagattcccaggagggc

SEQ ID NO: 603221 - DNA, 25 bp, Homo sapien
ctggaatgcgggggaacacaatgta

SEQ ID NO: 603222 - DNA, 25 bp, Homo sapien
aacacaatgtagattcccaggaggg

SEQ ID NO: 603223 - DNA, 25 bp, Homo sapien
tctatgctcacagtgtgtttcagcc

SEQ ID NO: 603224 - DNA, 25 bp, Homo sapien
cttgactctaaaccgtcacagaagc

SEQ ID NO: 603225 - DNA, 25 bp, Homo sapien
gggactgttacgactgtctagatct

SEQ ID NO: 603226 - DNA, 25 bp, Homo sapien
tagatctctgcggtcatagggcgtc

SEQ ID NO: 603227 - DNA, 25 bp, Homo sapien
ggtctgaaattgacgagcctcccat

SEQ ID NO: 603228 - DNA, 25 bp, Homo sapien
tcttggcctaaacaaacaggtgagg

SEQ ID NO: 603229 - DNA, 25 bp, Homo sapien
gcaactcaaggagggacacatgact

SEQ ID NO: 603230 - DNA, 25 bp, Homo sapien
gatcactaacgctgcatgtccatgg

SEQ ID NO: 603231 - DNA, 25 bp, Homo sapien
aacacatagcttacgtcctgaccca

SEQ ID NO: 603232 - DNA, 25 bp, Homo sapien
gaagcattcagtcaacttggataac

SEQ ID NO: 603233 - DNA, 25 bp, Homo sapien
aaacactagttggatgtggtagcac

SEQ ID NO: 603234 - DNA, 25 bp, Homo sapien
tctgtaaggcagagacaataatatc

SEQ ID NO: 603235 - DNA, 25 bp, Homo sapien
ctttctacgtccacacacgttcccg

SEQ ID NO: 603236 - DNA, 25 bp, Homo sapien
tcaaggcggctggtcatgcacttgg

SEQ ID NO: 603237 - DNA, 25 bp, Homo sapien
gatgctctgtgacatccgttgtgca

SEQ ID NO: 603238 - DNA, 25 bp, Homo sapien
caaagtcctcaaggcggctggtcat

SEQ ID NO: 603239 - DNA, 25 bp, Homo sapien
tttccgcacccgctctgggctggtc

SEQ ID NO: 603240 - DNA, 25 bp, Homo sapien
cttctgttcctgttcaggaattacc

SEQ ID NO: 603241 - DNA, 25 bp, Homo sapien
cagctgagtgtcacttgtacagctt

SEQ ID NO: 603242 - DNA, 25 bp, Homo sapien
tcaggaattacccaggcagggctct

SEQ ID NO: 603243 - DNA, 25 bp, Homo sapien
tgagtgtcacttgtacagcttcctc

SEQ ID NO: 603244 - DNA, 25 bp, Homo sapien
ggttgtgctagatgaatggtagctc

SEQ ID NO: 603245 - DNA, 25 bp, Homo sapien
ctgtaaaaccggagtgaacatggcc

SEQ ID NO: 603246 - DNA, 25 bp, Homo sapien
cctgggctggtgaaatggccgcact

SEQ ID NO: 603247 - DNA, 25 bp, Homo sapien
tagctcttgcggtgataaactgagg

SEQ ID NO: 603248 - DNA, 25 bp, Homo sapien
gcgggacgggcagacggcggcctgg

SEQ ID NO: 603249 - DNA, 25 bp, Homo sapien
gctcccaggccggaatggattccgg

SEQ ID NO: 603250 - DNA, 25 bp, Homo sapien
gggctcaccggcagacggacgcacg

SEQ ID NO: 603251 - DNA, 25 bp, Homo sapien
gcggaccgcgggacgtccagcggga

SEQ ID NO: 603252 - DNA, 25 bp, Homo sapien
gctttatggagatgaccgtacccag

SEQ ID NO: 603253 - DNA, 25 bp, Homo sapien
taagagactgaggagacacactggc

SEQ ID NO: 603254 - DNA, 25 bp, Homo sapien
ggaagcaactgacccatagtcccag

SEQ ID NO: 603255 - DNA, 25 bp, Homo sapien
cacactggcgggataagatggaact

SEQ ID NO: 603256 - DNA, 25 bp, Homo sapien
gctgcaaatggccaactggtaacca

SEQ ID NO: 603257 - DNA, 25 bp, Homo sapien
taagatccaggccaggtatcacctc

SEQ ID NO: 603258 - DNA, 25 bp, Homo sapien
cactgagtcctattttgcccgcgat

SEQ ID NO: 603259 - DNA, 25 bp, Homo sapien
caaggcccagatatcaccggtggat

SEQ ID NO: 603260 - DNA, 25 bp, Homo sapien
tctgtctctcatagctgggcaagtt

SEQ ID NO: 603261 - DNA, 25 bp, Homo sapien
gctctgtctctcatagctgggcaag

SEQ ID NO: 603262 - DNA, 25 bp, Homo sapien
cctggctctgtctctcatagctggg

SEQ ID NO: 603263 - DNA, 25 bp, Homo sapien
tgtctctcatagctgggcaagttgc

SEQ ID NO: 603264 - DNA, 25 bp, Homo sapien
tgtgtcccatgctcccacggcgtgt

SEQ ID NO: 603265 - DNA, 25 bp, Homo sapien
cccatggtgtgtcccatgctcccac

SEQ ID NO: 603266 - DNA, 25 bp, Homo sapien
catggtgtgtcccatgctcccacgg

SEQ ID NO: 603267 - DNA, 25 bp, Homo sapien
tggtgtgtcccatgctcccacggcg

SEQ ID NO: 603268 - DNA, 25 bp, Homo sapien
gcagcctggggtcttggcacaaaca

SEQ ID NO: 603269 - DNA, 25 bp, Homo sapien
gtggagtcaggggtctcgaaataga

SEQ ID NO: 603270 - DNA, 25 bp, Homo sapien
gcctggggtcttggcacaaacacca

SEQ ID NO: 603271 - DNA, 25 bp, Homo sapien
aggggtctcgaaatagaggccctgc

SEQ ID NO: 603272 - DNA, 25 bp, Homo sapien
ctttttgggagagttagcctctcaa

SEQ ID NO: 603273 - DNA, 25 bp, Homo sapien
tttgggagagttagcctctcaaaac

SEQ ID NO: 603274 - DNA, 25 bp, Homo sapien
ttttgggagagttagcctctcaaaa

SEQ ID NO: 603275 - DNA, 25 bp, Homo sapien
tttttgggagagttagcctctcaaa

SEQ ID NO: 603276 - DNA, 25 bp, Homo sapien
ctccgaacagcttgggctcggcggc

SEQ ID NO: 603277 - DNA, 25 bp, Homo sapien
cagcgccgtgcacgttctcggcggg

SEQ ID NO: 603278 - DNA, 25 bp, Homo sapien
cgcggtggccgtcggccgaggctgg

SEQ ID NO: 603279 - DNA, 25 bp, Homo sapien
gtgtccgaggagttgaagcctccga

SEQ ID NO: 603280 - DNA, 25 bp, Homo sapien
agtgaaggagtgaagtctgcgtgga

SEQ ID NO: 603281 - DNA, 25 bp, Homo sapien
gagagtgaacgggtctgagtgaagg

SEQ ID NO: 603282 - DNA, 25 bp, Homo sapien
gggtgtagccgtgtgtgtggcccag

SEQ ID NO: 603283 - DNA, 25 bp, Homo sapien
cctccaccccgcatgtgtgcgtgtc

SEQ ID NO: 603284 - DNA, 25 bp, Homo sapien
gagggccacaaaggtggtcactcca

SEQ ID NO: 603285 - DNA, 25 bp, Homo sapien
agagggccacaaaggtggtcactcc

SEQ ID NO: 603286 - DNA, 25 bp, Homo sapien
agggccacaaaggtggtcactccac

SEQ ID NO: 603287 - DNA, 25 bp, Homo sapien
gacaggtctgtctccgtcctagact

SEQ ID NO: 603288 - DNA, 25 bp, Homo sapien
aggtctgtctccgtcctagactcat

SEQ ID NO: 603289 - DNA, 25 bp, Homo sapien
gtctccgtcctagactcatagtcat

SEQ ID NO: 603290 - DNA, 25 bp, Homo sapien
tctgtctccgtcctagactcatagt

SEQ ID NO: 603291 - DNA, 25 bp, Homo sapien
aggagccgactctgggctcgcccac

SEQ ID NO: 603292 - DNA, 25 bp, Homo sapien
cacccaggctatccccatcacagca

SEQ ID NO: 603293 - DNA, 25 bp, Homo sapien
ggagccgactctgggctcgcccact

SEQ ID NO: 603294 - DNA, 25 bp, Homo sapien
ctccacccaggctatccccatcaca

SEQ ID NO: 603295 - DNA, 25 bp, Homo sapien
cagctgttagatctggatttagcta

SEQ ID NO: 603296 - DNA, 25 bp, Homo sapien
gctgttagatctggatttagctaaa

SEQ ID NO: 603297 - DNA, 25 bp, Homo sapien
gttagatctggatttagctaaaaaa

SEQ ID NO: 603298 - DNA, 25 bp, Homo sapien
ctgttagatctggatttagctaaaa

SEQ ID NO: 603299 - DNA, 25 bp, Homo sapien
agggagccgtcagccacaagcccgg

SEQ ID NO: 603300 - DNA, 25 bp, Homo sapien
gaagggagccgtcagccacaagccc

SEQ ID NO: 603301 - DNA, 25 bp, Homo sapien
gagaagggagccgtcagccacaagc

SEQ ID NO: 603302 - DNA, 25 bp, Homo sapien
gaaaggagaagggagccgtcagcca

SEQ ID NO: 603303 - DNA, 25 bp, Homo sapien
tgctgagcgagtgggccagccacca

SEQ ID NO: 603304 - DNA, 25 bp, Homo sapien
cctgtctgtcctgtgctgagcgagt

SEQ ID NO: 603305 - DNA, 25 bp, Homo sapien
gtcggagggcgccacgtagttgctg

SEQ ID NO: 603306 - DNA, 25 bp, Homo sapien
tgctggggatgtagcctgtctgtcc

SEQ ID NO: 603307 - DNA, 25 bp, Homo sapien
aggcactctgcaccggcagtgtcca

SEQ ID NO: 603308 - DNA, 25 bp, Homo sapien
gcagtgtccagggacgacgggtaga

SEQ ID NO: 603309 - DNA, 25 bp, Homo sapien
ccctggatatggctggggcgctgga

SEQ ID NO: 603310 - DNA, 25 bp, Homo sapien
cagggacgacgggtagaggcagcca

SEQ ID NO: 603311 - DNA, 25 bp, Homo sapien
tctgactcccgtctggtgatcttgc

SEQ ID NO: 603312 - DNA, 25 bp, Homo sapien
ccctctcgggttctctgcattgagc

SEQ ID NO: 603313 - DNA, 25 bp, Homo sapien
cgtctggtgatcttgccaaaatacc

SEQ ID NO: 603314 - DNA, 25 bp, Homo sapien
tcgcacgaggaaggtccctctcggg

SEQ ID NO: 603315 - DNA, 25 bp, Homo sapien
caggctgttgaactgggtgcgggag

SEQ ID NO: 603316 - DNA, 25 bp, Homo sapien
gatcttgtagtgcttcacgttgagg

SEQ ID NO: 603317 - DNA, 25 bp, Homo sapien
aagccgccgctgtccagcttgcgga

SEQ ID NO: 603318 - DNA, 25 bp, Homo sapien
cacgttgaggcccttggcgttgtcg

SEQ ID NO: 603319 - DNA, 25 bp, Homo sapien
gcagtgggacactgcgtggagcagg

SEQ ID NO: 603320 - DNA, 25 bp, Homo sapien
gggcagccccctccataccagccag

SEQ ID NO: 603321 - DNA, 25 bp, Homo sapien
ctggggctcctcagggcagccccct

SEQ ID NO: 603322 - DNA, 25 bp, Homo sapien
ctcagggcagccccctccataccag

SEQ ID NO: 603323 - DNA, 25 bp, Homo sapien
cagggcagccccctccataccagcc

SEQ ID NO: 603324 - DNA, 25 bp, Homo sapien
cctctttgctgcaatcgatctggcc

SEQ ID NO: 603325 - DNA, 25 bp, Homo sapien
cagcaaccggttcagaccggtccta

SEQ ID NO: 603326 - DNA, 25 bp, Homo sapien
tctttgctgcaatcgatctggccgc

SEQ ID NO: 603327 - DNA, 25 bp, Homo sapien
ggtcctagggctacagagacaaatg

SEQ ID NO: 603328 - DNA, 25 bp, Homo sapien
gccctgagtctgcggcttggacgtg

SEQ ID NO: 603329 - DNA, 25 bp, Homo sapien
ggcggtggcacaggccatcggcgtg

SEQ ID NO: 603330 - DNA, 25 bp, Homo sapien
tggggcacacggtggtgaggcggtg

SEQ ID NO: 603331 - DNA, 25 bp, Homo sapien
cagccgcagcgactcccgagggatc

SEQ ID NO: 603332 - DNA, 25 bp, Homo sapien
gaaaccacagcatacaactgcacca

SEQ ID NO: 603333 - DNA, 25 bp, Homo sapien
cttgctcatgtactccgtgacgatg

SEQ ID NO: 603334 - DNA, 25 bp, Homo sapien
aggcttcagggttttgatggccacc

SEQ ID NO: 603335 - DNA, 25 bp, Homo sapien
tggagacatcgtgccaggcttcagg

SEQ ID NO: 603336 - DNA, 25 bp, Homo sapien
accagctgaggcagccgcaggtact

SEQ ID NO: 603337 - DNA, 25 bp, Homo sapien
gtccaccagctgaggcagccgcagg

SEQ ID NO: 603338 - DNA, 25 bp, Homo sapien
cccttgagaaagtccagcaaactcc

SEQ ID NO: 603339 - DNA, 25 bp, Homo sapien
tgtctcccccttgagaaagtccagc

SEQ ID NO: 603340 - DNA, 25 bp, Homo sapien
gtggggaggcgggaggggctgactc

SEQ ID NO: 603341 - DNA, 25 bp, Homo sapien
cttgaggaccaagggtgtggggagg

SEQ ID NO: 603342 - DNA, 25 bp, Homo sapien
ggggaggcgggaggggctgactcac

SEQ ID NO: 603343 - DNA, 25 bp, Homo sapien
gtgtggggaggcgggaggggctgac

SEQ ID NO: 603344 - DNA, 25 bp, Homo sapien
cagaactggctgcaccagatgggtc

SEQ ID NO: 603345 - DNA, 25 bp, Homo sapien
tgtggaggcaatcaaggcaggcttc

SEQ ID NO: 603346 - DNA, 25 bp, Homo sapien
agcagacctggtaaatacgtgcggc

SEQ ID NO: 603347 - DNA, 25 bp, Homo sapien
atacgtgcggcaagatcagtgagtg

SEQ ID NO: 603348 - DNA, 25 bp, Homo sapien
gacctttacagagacgacaactgag

SEQ ID NO: 603349 - DNA, 25 bp, Homo sapien
catgaacacgtctgctaagcgacta

SEQ ID NO: 603350 - DNA, 25 bp, Homo sapien
cactcctggtcgtgatgaggattaa

SEQ ID NO: 603351 - DNA, 25 bp, Homo sapien
cacgagatccgatgcagccaggaaa

SEQ ID NO: 603352 - DNA, 25 bp, Homo sapien
aggcggaaccgtgggagcctggctc

SEQ ID NO: 603353 - DNA, 25 bp, Homo sapien
caggatgttggctgcacgaaggtcc

SEQ ID NO: 603354 - DNA, 25 bp, Homo sapien
cggtggacgtagttcatccgctcca

SEQ ID NO: 603355 - DNA, 25 bp, Homo sapien
ttgccgcgccgtgtactcattgtct

SEQ ID NO: 603356 - DNA, 25 bp, Homo sapien
ttgtcttcaatgagccgagccagcc

SEQ ID NO: 603357 - DNA, 25 bp, Homo sapien
tctgttagataagcaccatgaggaa

SEQ ID NO: 603358 - DNA, 25 bp, Homo sapien
tgacctcctgtcatgaccgctctgt

SEQ ID NO: 603359 - DNA, 25 bp, Homo sapien
aaaggtcagggcagctctgacctcc

SEQ ID NO: 603360 - DNA, 25 bp, Homo sapien
ctgcaggaacgagaaaggtcagggc

SEQ ID NO: 603361 - DNA, 25 bp, Homo sapien
tccctttgtggtgagctcagtcagc

SEQ ID NO: 603362 - DNA, 25 bp, Homo sapien
tagggcacccgtccctttgtggtga

SEQ ID NO: 603363 - DNA, 25 bp, Homo sapien
tgatggtgaagcggccatagagggc

SEQ ID NO: 603364 - DNA, 25 bp, Homo sapien
gtgaagcggccatagagggcagctt

SEQ ID NO: 603365 - DNA, 25 bp, Homo sapien
gcccagcaggagtcatgacttgccc

SEQ ID NO: 603366 - DNA, 25 bp, Homo sapien
ccagcaggagtcatgacttgcccaa

SEQ ID NO: 603367 - DNA, 25 bp, Homo sapien
cccagcaggagtcatgacttgccca

SEQ ID NO: 603368 - DNA, 25 bp, Homo sapien
gagcctaacatcagacgctcaactt

SEQ ID NO: 603369 - DNA, 25 bp, Homo sapien
ctgagagcatggaccatcgagagag

SEQ ID NO: 603370 - DNA, 25 bp, Homo sapien
gagcatggaccatcgagagagccta

SEQ ID NO: 603371 - DNA, 25 bp, Homo sapien
gaccatcgagagagcctaacatcag

SEQ ID NO: 603372 - DNA, 25 bp, Homo sapien
cggctccggtgaggaaagtggggtg

SEQ ID NO: 603373 - DNA, 25 bp, Homo sapien
tggtccagcacctcgcggttcacca

SEQ ID NO: 603374 - DNA, 25 bp, Homo sapien
gcagggactcgggacactccggcgg

SEQ ID NO: 603375 - DNA, 25 bp, Homo sapien
ctcaggctccttccgccagcactgg

SEQ ID NO: 603376 - DNA, 25 bp, Homo sapien
gctcggtggacgtgaagtagtcctc

SEQ ID NO: 603377 - DNA, 25 bp, Homo sapien
catgatgcctccgacgaattgttgg

SEQ ID NO: 603378 - DNA, 25 bp, Homo sapien
gaaaggctctttggccagctctcga

SEQ ID NO: 603379 - DNA, 25 bp, Homo sapien
tcctcatgagttaaagggtgccgac

SEQ ID NO: 603380 - DNA, 25 bp, Homo sapien
tgaaatttcataggcaggcactgct

SEQ ID NO: 603381 - DNA, 25 bp, Homo sapien
tcaggacttttgtggatcgacccag

SEQ ID NO: 603382 - DNA, 25 bp, Homo sapien
ccagagttgactccggtgcacaggt

SEQ ID NO: 603383 - DNA, 25 bp, Homo sapien
cacgaagagcacacacaacggtatt

SEQ ID NO: 603384 - DNA, 25 bp, Homo sapien
gaacttgtcatgctcagggaagtcc

SEQ ID NO: 603385 - DNA, 25 bp, Homo sapien
gaggtggggattgagagctgtcggg

SEQ ID NO: 603386 - DNA, 25 bp, Homo sapien
ctgatgggagcggaagcagaggcca

SEQ ID NO: 603387 - DNA, 25 bp, Homo sapien
cacagaggaagccagcagggtcctt

SEQ ID NO: 603388 - DNA, 25 bp, Homo sapien
tgtggaggggagttcaggagtcctc

SEQ ID NO: 603389 - DNA, 25 bp, Homo sapien
actacctcgatctgggggcaagtct

SEQ ID NO: 603390 - DNA, 25 bp, Homo sapien
ctgcagccggttccccttgaaacta

SEQ ID NO: 603391 - DNA, 25 bp, Homo sapien
tccccttgaaactacctcgatctgg

SEQ ID NO: 603392 - DNA, 25 bp, Homo sapien
tccagggttaggttgggctgcagcc

SEQ ID NO: 603393 - DNA, 25 bp, Homo sapien
ccctgtactgagctggaggccttgg

SEQ ID NO: 603394 - DNA, 25 bp, Homo sapien
tcctgccctgtactgagctggaggc

SEQ ID NO: 603395 - DNA, 25 bp, Homo sapien
ccatgcccctctctgatgtcctcct

SEQ ID NO: 603396 - DNA, 25 bp, Homo sapien
aaatccacactccatgcccctctct

SEQ ID NO: 603397 - DNA, 25 bp, Homo sapien
aatcctcgagatactccatgaggaa

SEQ ID NO: 603398 - DNA, 25 bp, Homo sapien
caccagcttcgttaacggacacggg

SEQ ID NO: 603399 - DNA, 25 bp, Homo sapien
acatgtcgtcaccagcttcgttaac

SEQ ID NO: 603400 - DNA, 25 bp, Homo sapien
cctcgagatactccatgaggaacat

SEQ ID NO: 603401 - DNA, 25 bp, Homo sapien
gtgaagcgcatctctgcagccctgg

SEQ ID NO: 603402 - DNA, 25 bp, Homo sapien
atgagcaccgtctgcgtgaagcgca

SEQ ID NO: 603403 - DNA, 25 bp, Homo sapien
agcaccgtctgcgtgaagcgcatct

SEQ ID NO: 603404 - DNA, 25 bp, Homo sapien
ctctgcagccctggtcagggacagc

SEQ ID NO: 603405 - DNA, 25 bp, Homo sapien
gaatctgatatttctcacaggagca

SEQ ID NO: 603406 - DNA, 25 bp, Homo sapien
gatccttagccccagttgaagcctt

SEQ ID NO: 603407 - DNA, 25 bp, Homo sapien
tcatgttaagctgattgcatgggcg

SEQ ID NO: 603408 - DNA, 25 bp, Homo sapien
caaagaattttgacctcggaaactg

SEQ ID NO: 603409 - DNA, 25 bp, Homo sapien
caaggggctcaggctccaccatcat

SEQ ID NO: 603410 - DNA, 25 bp, Homo sapien
ccttcaaggggctcaggctccacca

SEQ ID NO: 603411 - DNA, 25 bp, Homo sapien
ccccttcaaggggctcaggctccac

SEQ ID NO: 603412 - DNA, 25 bp, Homo sapien
ttcaaggggctcaggctccaccatc

SEQ ID NO: 603413 - DNA, 25 bp, Homo sapien
ccaatggctcagtccaagccgtcat

SEQ ID NO: 603414 - DNA, 25 bp, Homo sapien
tgaccaatggctcagtccaagccgt

SEQ ID NO: 603415 - DNA, 25 bp, Homo sapien
ggctcagtccaagccgtcatctctt

SEQ ID NO: 603416 - DNA, 25 bp, Homo sapien
catcatgaccaatggctcagtccaa

SEQ ID NO: 603417 - DNA, 25 bp, Homo sapien
tccttgtgggtagtcagtgttctgg

SEQ ID NO: 603418 - DNA, 25 bp, Homo sapien
tgtgggtagtcagtgttctgggagc

SEQ ID NO: 603419 - DNA, 25 bp, Homo sapien
ttctccttgtgggtagtcagtgttc

SEQ ID NO: 603420 - DNA, 25 bp, Homo sapien
gtgggtagtcagtgttctgggagct

SEQ ID NO: 603421 - DNA, 25 bp, Homo sapien
gatttccaagaaggattggcgcagt

SEQ ID NO: 603422 - DNA, 25 bp, Homo sapien
aagtgggttgtgcaataaatgagaa

SEQ ID NO: 603423 - DNA, 25 bp, Homo sapien
tagacaaaagcttccattggcccag

SEQ ID NO: 603424 - DNA, 25 bp, Homo sapien
cacctctggcaaatcaatgatggcc

SEQ ID NO: 603425 - DNA, 25 bp, Homo sapien
ttggtatctgtgaagtcaaatgcca

SEQ ID NO: 603426 - DNA, 25 bp, Homo sapien
tggtatctgtgaagtcaaatgccat

SEQ ID NO: 603427 - DNA, 25 bp, Homo sapien
tttggtatctgtgaagtcaaatgcc

SEQ ID NO: 603428 - DNA, 25 bp, Homo sapien
cttttggtatctgtgaagtcaaatg

SEQ ID NO: 603429 - DNA, 25 bp, Homo sapien
taccaggatggctgaagtctgtgtc

SEQ ID NO: 603430 - DNA, 25 bp, Homo sapien
ttcatgccagcagtatgtgtgtcca

SEQ ID NO: 603431 - DNA, 25 bp, Homo sapien
attgatgggtcatagagtctacaca

SEQ ID NO: 603432 - DNA, 25 bp, Homo sapien
acattttaaccaatctggtgggtga

SEQ ID NO: 603433 - DNA, 25 bp, Homo sapien
ttttagagagtaacttgatctccat

SEQ ID NO: 603434 - DNA, 25 bp, Homo sapien
cttttagagagtaacttgatctcca

SEQ ID NO: 603435 - DNA, 25 bp, Homo sapien
agaattctatttcttcgctatttgg

SEQ ID NO: 603436 - DNA, 25 bp, Homo sapien
ggccttgtgccatccccgataggac

SEQ ID NO: 603437 - DNA, 25 bp, Homo sapien
tatttggacagaagtcaaagtccag

SEQ ID NO: 603438 - DNA, 25 bp, Homo sapien
ctggctgagcttgggccttgtgcca

SEQ ID NO: 603439 - DNA, 25 bp, Homo sapien
gacgggcaaagtcctcacactgagt

SEQ ID NO: 603440 - DNA, 25 bp, Homo sapien
gggcgggcctcacatactcatggta

SEQ ID NO: 603441 - DNA, 25 bp, Homo sapien
cagataccctggtgcctagagcagt

SEQ ID NO: 603442 - DNA, 25 bp, Homo sapien
ttttgtggtcaagattcgacgggca

SEQ ID NO: 603443 - DNA, 25 bp, Homo sapien
caccctcagagccatttttatgaac

SEQ ID NO: 603444 - DNA, 25 bp, Homo sapien
cctcagagccatttttatgaacgcc

SEQ ID NO: 603445 - DNA, 25 bp, Homo sapien
tcagagccatttttatgaacgccat

SEQ ID NO: 603446 - DNA, 25 bp, Homo sapien
gagccatttttatgaacgccatatg

SEQ ID NO: 603447 - DNA, 25 bp, Homo sapien
gggagtaacccagtcagaacagcct

SEQ ID NO: 603448 - DNA, 25 bp, Homo sapien
aacaggacagcatttgagtggtgac

SEQ ID NO: 603449 - DNA, 25 bp, Homo sapien
tgggaaccatcacaaacgaggatct

SEQ ID NO: 603450 - DNA, 25 bp, Homo sapien
gaaggctactggcttctctagatga

SEQ ID NO: 603451 - DNA, 25 bp, Homo sapien
cattactgtgaggagtctgggtcca

SEQ ID NO: 603452 - DNA, 25 bp, Homo sapien
taacggccttgatccccttgataga

SEQ ID NO: 603453 - DNA, 25 bp, Homo sapien
tccgaggtggttcagacaagacaga

SEQ ID NO: 603454 - DNA, 25 bp, Homo sapien
cgttcctgcgcatatagactgtaca

SEQ ID NO: 603455 - DNA, 25 bp, Homo sapien
cctggaacggaagccttgcacaatt

SEQ ID NO: 603456 - DNA, 25 bp, Homo sapien
cctgcccggcagagatcatgtattg

SEQ ID NO: 603457 - DNA, 25 bp, Homo sapien
tgccttggtgatcccgggctgacag

SEQ ID NO: 603458 - DNA, 25 bp, Homo sapien
ttaggtcggttcctgcagcggtgcc

SEQ ID NO: 603459 - DNA, 25 bp, Homo sapien
tgtttgtctgttgtgttgacttttc

SEQ ID NO: 603460 - DNA, 25 bp, Homo sapien
ctgtttgtctgttgtgttgactttt

SEQ ID NO: 603461 - DNA, 25 bp, Homo sapien
ttgtctgttgtgttgacttttctct

SEQ ID NO: 603462 - DNA, 25 bp, Homo sapien
tttgtctgttgtgttgacttttctc

SEQ ID NO: 603463 - DNA, 25 bp, Homo sapien
tctgggccccttgaggacgggctgc

SEQ ID NO: 603464 - DNA, 25 bp, Homo sapien
ctttggcaaccactgggcggtattg

SEQ ID NO: 603465 - DNA, 25 bp, Homo sapien
accactgggcggtattgtgaggtct

SEQ ID NO: 603466 - DNA, 25 bp, Homo sapien
gagcccttggtcgtcctttggcaac

SEQ ID NO: 603467 - DNA, 25 bp, Homo sapien
ggtagccagccgaaagcacctcttt

SEQ ID NO: 603468 - DNA, 25 bp, Homo sapien
gtttgtgagtgtggtccccgcgcac

SEQ ID NO: 603469 - DNA, 25 bp, Homo sapien
agtcttgtgggtccctcgcacagcg

SEQ ID NO: 603470 - DNA, 25 bp, Homo sapien
cacagcgcggattttcgggcgggaa

SEQ ID NO: 603471 - DNA, 25 bp, Homo sapien
tactgtagggagctgagccagagca

SEQ ID NO: 603472 - DNA, 25 bp, Homo sapien
tttgggcgcaaaagcagtagtcacc

SEQ ID NO: 603473 - DNA, 25 bp, Homo sapien
cttcatgagggtgcctgagcgcgta

SEQ ID NO: 603474 - DNA, 25 bp, Homo sapien
ggattggcgcccttcgtatgcacgg

SEQ ID NO: 603475 - DNA, 25 bp, Homo sapien
ggtcatctgccccatagagcaaaaa

SEQ ID NO: 603476 - DNA, 25 bp, Homo sapien
ggggtcatctgccccatagagcaaa

SEQ ID NO: 603477 - DNA, 25 bp, Homo sapien
tcatctgccccatagagcaaaaaac

SEQ ID NO: 603478 - DNA, 25 bp, Homo sapien
gaggggtcatctgccccatagagca

SEQ ID NO: 603479 - DNA, 25 bp, Homo sapien
tgggtggtcgagaaagagggtttgc

SEQ ID NO: 603480 - DNA, 25 bp, Homo sapien
ggtcgagaaagagggtttgccgaga

SEQ ID NO: 603481 - DNA, 25 bp, Homo sapien
ccaagaatggtaggtgggtggtcga

SEQ ID NO: 603482 - DNA, 25 bp, Homo sapien
tggtaggtgggtggtcgagaaagag

SEQ ID NO: 603483 - DNA, 25 bp, Homo sapien
agcacgcggaagatgtaccagccga

SEQ ID NO: 603484 - DNA, 25 bp, Homo sapien
ccgatgatgagcagttcagccgagg

SEQ ID NO: 603485 - DNA, 25 bp, Homo sapien
taccagccgatgatgagcagttcag

SEQ ID NO: 603486 - DNA, 25 bp, Homo sapien
gaagatgtaccagccgatgatgagc

SEQ ID NO: 603487 - DNA, 25 bp, Homo sapien
tccgggaagcggcaatcgcgacgca

SEQ ID NO: 603488 - DNA, 25 bp, Homo sapien
caaggatcgcggcaatcggaatagg

SEQ ID NO: 603489 - DNA, 25 bp, Homo sapien
aggaggacggcgcagggaatgggca

SEQ ID NO: 603490 - DNA, 25 bp, Homo sapien
cgcgacgcagtcttgcgggttctag

SEQ ID NO: 603491 - DNA, 25 bp, Homo sapien
tcgtccgcagcggtcgcccgccgcg

SEQ ID NO: 603492 - DNA, 25 bp, Homo sapien
cgcgtaggtcgctaaatgcctgggt

SEQ ID NO: 603493 - DNA, 25 bp, Homo sapien
ggtgatcgtccgcagcggtcgcccg

SEQ ID NO: 603494 - DNA, 25 bp, Homo sapien
ctgggtgatcgtccgcagcggtcgc

SEQ ID NO: 603495 - DNA, 25 bp, Homo sapien
tctgcagtgcgtttttaatctaatg

SEQ ID NO: 603496 - DNA, 25 bp, Homo sapien
aaataaaatttctccgcaatgcgca

SEQ ID NO: 603497 - DNA, 25 bp, Homo sapien
cactctgcgagctgtaaagtctttc

SEQ ID NO: 603498 - DNA, 25 bp, Homo sapien
tgccaagtgcttttctccgatttat

SEQ ID NO: 603499 - DNA, 25 bp, Homo sapien
gcgaatcctacccagtaaatgcagc

SEQ ID NO: 603500 - DNA, 25 bp, Homo sapien
tgtccctggaggatttcgaaaagcg

SEQ ID NO: 603501 - DNA, 25 bp, Homo sapien
tcctacccagtaaatgcagcattcc

SEQ ID NO: 603502 - DNA, 25 bp, Homo sapien
atttcgaaaagcgaatcctacccag

SEQ ID NO: 603503 - DNA, 25 bp, Homo sapien
tgcgacgagaaacccaggacccacc

SEQ ID NO: 603504 - DNA, 25 bp, Homo sapien
ctgcgacgagaaacccaggacccac

SEQ ID NO: 603505 - DNA, 25 bp, Homo sapien
gctgcctgcgctcccccaacacctg

SEQ ID NO: 603506 - DNA, 25 bp, Homo sapien
tccgcgacaccgtgtatgccagctt

SEQ ID NO: 603507 - DNA, 25 bp, Homo sapien
cgcgacaccgtgtatgccagcttct

SEQ ID NO: 603508 - DNA, 25 bp, Homo sapien
ttgggggctcgctgcctgcgctccc

SEQ ID NO: 603509 - DNA, 25 bp, Homo sapien
gactttgtccagatcagaatgcggt

SEQ ID NO: 603510 - DNA, 25 bp, Homo sapien
gagagggccccactgtatttcttaa

SEQ ID NO: 603511 - DNA, 25 bp, Homo sapien
gaatgcggtgcctatgcccagatct

SEQ ID NO: 603512 - DNA, 25 bp, Homo sapien
tgcaccaagattcagggcgtcggct

SEQ ID NO: 603513 - DNA, 25 bp, Homo sapien
tgattgccgtgattggacctagcct

SEQ ID NO: 603514 - DNA, 25 bp, Homo sapien
aggtcagcgcccttgcaggatgaga

SEQ ID NO: 603515 - DNA, 25 bp, Homo sapien
ttctgggtcaccttaggcgtcgccg

SEQ ID NO: 603516 - DNA, 25 bp, Homo sapien
ggtcatagtactcctgggtgctggc

SEQ ID NO: 603517 - DNA, 25 bp, Homo sapien
gcctaagggcgcgtcatcgacagtg

SEQ ID NO: 603518 - DNA, 25 bp, Homo sapien
gcgcgtcatcgacagtgatgtcaaa

SEQ ID NO: 603519 - DNA, 25 bp, Homo sapien
taagggcgcgtcatcgacagtgatg

SEQ ID NO: 603520 - DNA, 25 bp, Homo sapien
ggagtaggggcctaagggcgcgtca

SEQ ID NO: 603521 - DNA, 25 bp, Homo sapien
ttaaccaaatcctttctctccagtg

SEQ ID NO: 603522 - DNA, 25 bp, Homo sapien
caaatcctttctctccagtgctcac

SEQ ID NO: 603523 - DNA, 25 bp, Homo sapien
aattctgtgaaagcaggaaaccttt

SEQ ID NO: 603524 - DNA, 25 bp, Homo sapien
tctgtgaaagcaggaaaccttttaa

SEQ ID NO: 603525 - DNA, 25 bp, Homo sapien
catcagatttctccccacagatgga

SEQ ID NO: 603526 - DNA, 25 bp, Homo sapien
catttaccacggacaagatgccagg

SEQ ID NO: 603527 - DNA, 25 bp, Homo sapien
atcatcagatttctccccacagatg

SEQ ID NO: 603528 - DNA, 25 bp, Homo sapien
ttctcatcatcagatttctccccac

SEQ ID NO: 603529 - DNA, 25 bp, Homo sapien
cgctccatggcctccacgatcttca

SEQ ID NO: 603530 - DNA, 25 bp, Homo sapien
aaagcgctccatggcctccacgatc

SEQ ID NO: 603531 - DNA, 25 bp, Homo sapien
agcgctccatggcctccacgatctt

SEQ ID NO: 603532 - DNA, 25 bp, Homo sapien
gctccatggcctccacgatcttcat

SEQ ID NO: 603533 - DNA, 25 bp, Homo sapien
caagtcaaacttattggagttgtct

SEQ ID NO: 603534 - DNA, 25 bp, Homo sapien
agtcaaacttattggagttgtctac

SEQ ID NO: 603535 - DNA, 25 bp, Homo sapien
aagattctaggatactgggagcaaa

SEQ ID NO: 603536 - DNA, 25 bp, Homo sapien
tactgggagcaaatggggtggaagg

SEQ ID NO: 603537 - DNA, 25 bp, Homo sapien
ctgcgggagcggaacggaaagagca

SEQ ID NO: 603538 - DNA, 25 bp, Homo sapien
aaagagcaggccgggctctcgtcgc

SEQ ID NO: 603539 - DNA, 25 bp, Homo sapien
gagctgtctgaaggcggagggcggc

SEQ ID NO: 603540 - DNA, 25 bp, Homo sapien
cgtctcctcccaggcgccgggaggc

SEQ ID NO: 603541 - DNA, 25 bp, Homo sapien
tcaggcggcccgagcgtggtctctg

SEQ ID NO: 603542 - DNA, 25 bp, Homo sapien
cggcccgagcgtggtctctggggcc

SEQ ID NO: 603543 - DNA, 25 bp, Homo sapien
ggcggcccgagcgtggtctctgggg

SEQ ID NO: 603544 - DNA, 25 bp, Homo sapien
caggcggcccgagcgtggtctctgg

SEQ ID NO: 603545 - DNA, 25 bp, Homo sapien
acctagaagaggaagacgggagtca

SEQ ID NO: 603546 - DNA, 25 bp, Homo sapien
ctgggtctggccacctagaagagga

SEQ ID NO: 603547 - DNA, 25 bp, Homo sapien
aagaggaagacgggagtcaccacag

SEQ ID NO: 603548 - DNA, 25 bp, Homo sapien
tctggccacctagaagaggaagacg

SEQ ID NO: 603549 - DNA, 25 bp, Homo sapien
aggctgaaggccaaggcccaccctg

SEQ ID NO: 603550 - DNA, 25 bp, Homo sapien
cccagtgggatcatgatggggctca

SEQ ID NO: 603551 - DNA, 25 bp, Homo sapien
tggtccccactatggaaggagtgag

SEQ ID NO: 603552 - DNA, 25 bp, Homo sapien
agacaggcactggtccccactatgg

SEQ ID NO: 603553 - DNA, 25 bp, Homo sapien
tgctgctgacaggtgctgccgcagg

SEQ ID NO: 603554 - DNA, 25 bp, Homo sapien
tgatgaggttgtctccagacaggca

SEQ ID NO: 603555 - DNA, 25 bp, Homo sapien
ccatcactgggacagcgttaaggtg

SEQ ID NO: 603556 - DNA, 25 bp, Homo sapien
caggcaccgctattgccagggaggc

SEQ ID NO: 603557 - DNA, 25 bp, Homo sapien
ctgggctggatgccgtgccagggac

SEQ ID NO: 603558 - DNA, 25 bp, Homo sapien
gctggatgccgtgccagggacccaa

SEQ ID NO: 603559 - DNA, 25 bp, Homo sapien
gggctggatgccgtgccagggaccc

SEQ ID NO: 603560 - DNA, 25 bp, Homo sapien
ctctgggctggatgccgtgccaggg

SEQ ID NO: 603561 - DNA, 25 bp, Homo sapien
cccgctccacgacgtcctcacacca

SEQ ID NO: 603562 - DNA, 25 bp, Homo sapien
ccccgctccacgacgtcctcacacc

SEQ ID NO: 603563 - DNA, 25 bp, Homo sapien
ctccccgctccacgacgtcctcaca

SEQ ID NO: 603564 - DNA, 25 bp, Homo sapien
tccccgctccacgacgtcctcacac

SEQ ID NO: 603565 - DNA, 25 bp, Homo sapien
cacaaaaccatctgagaaaccgatg

SEQ ID NO: 603566 - DNA, 25 bp, Homo sapien
cgcacatccaaatccttcagagcag

SEQ ID NO: 603567 - DNA, 25 bp, Homo sapien
tgtggcacgcacatccaaatccttc

SEQ ID NO: 603568 - DNA, 25 bp, Homo sapien
ccatctgagaaaccgatgtctgccc

SEQ ID NO: 603569 - DNA, 25 bp, Homo sapien
cttgtctgtggtcaactgaaatttc

SEQ ID NO: 603570 - DNA, 25 bp, Homo sapien
gaacccacacttgtctgtggtcaac

SEQ ID NO: 603571 - DNA, 25 bp, Homo sapien
tgaccctgctggaacccacacttgt

SEQ ID NO: 603572 - DNA, 25 bp, Homo sapien
ggtcaccaatggaaccactgaccct

SEQ ID NO: 603573 - DNA, 25 bp, Homo sapien
cactgccattgagcaggagccactc

SEQ ID NO: 603574 - DNA, 25 bp, Homo sapien
gccattgagcaggagccactcccat

SEQ ID NO: 603575 - DNA, 25 bp, Homo sapien
gccactgccattgagcaggagccac

SEQ ID NO: 603576 - DNA, 25 bp, Homo sapien
ctgccactgccattgagcaggagcc

SEQ ID NO: 603577 - DNA, 25 bp, Homo sapien
tctggaagtagtagtagtagctgtc

SEQ ID NO: 603578 - DNA, 25 bp, Homo sapien
ctggaagtagtagtagtagctgtca

SEQ ID NO: 603579 - DNA, 25 bp, Homo sapien
ttctgagagcccctgaatgtccaag

SEQ ID NO: 603580 - DNA, 25 bp, Homo sapien
gagtttctgagagcccctgaatgtc

SEQ ID NO: 603581 - DNA, 25 bp, Homo sapien
tttctgagagcccctgaatgtccaa

SEQ ID NO: 603582 - DNA, 25 bp, Homo sapien
gctcaggtgattctctcatcgcagc

SEQ ID NO: 603583 - DNA, 25 bp, Homo sapien
caggtgattctctcatcgcagcctc

SEQ ID NO: 603584 - DNA, 25 bp, Homo sapien
gctgggactacaggcacatgcgacc

SEQ ID NO: 603585 - DNA, 25 bp, Homo sapien
tcaggtgattctctcatcgcagcct

SEQ ID NO: 603586 - DNA, 25 bp, Homo sapien
gcccggctcgataccctcttcttca

SEQ ID NO: 603587 - DNA, 25 bp, Homo sapien
aatggttttgtgtcggtggttggca

SEQ ID NO: 603588 - DNA, 25 bp, Homo sapien
aatctgtcaccagggtactccactg

SEQ ID NO: 603589 - DNA, 25 bp, Homo sapien
tcggtggttggcagtgctaatctgt

SEQ ID NO: 603590 - DNA, 25 bp, Homo sapien
gtgtctgacagctccaggcagcaat

SEQ ID NO: 603591 - DNA, 25 bp, Homo sapien
tgacgcgtgtctgacagctccaggc

SEQ ID NO: 603592 - DNA, 25 bp, Homo sapien
gcgtgtctgacagctccaggcagca

SEQ ID NO: 603593 - DNA, 25 bp, Homo sapien
cttgacgcgtgtctgacagctccag

SEQ ID NO: 603594 - DNA, 25 bp, Homo sapien
ttcctccaccaagaacgctggagct

SEQ ID NO: 603595 - DNA, 25 bp, Homo sapien
cctgcggaccctcggcacgtggttt

SEQ ID NO: 603596 - DNA, 25 bp, Homo sapien
caccaagaacgctggagctccagga

SEQ ID NO: 603597 - DNA, 25 bp, Homo sapien
gagactgtgtccttgaccttccaca

SEQ ID NO: 603598 - DNA, 25 bp, Homo sapien
atgttgatctcgttggccaggtatg

SEQ ID NO: 603599 - DNA, 25 bp, Homo sapien
gttggccaggtatgccagagcatca

SEQ ID NO: 603600 - DNA, 25 bp, Homo sapien
ggccaggtatgccagagcatcattg

SEQ ID NO: 603601 - DNA, 25 bp, Homo sapien
gatctcgttggccaggtatgccaga

SEQ ID NO: 603602 - DNA, 25 bp, Homo sapien
tccaactcgatctgagggaggctct

SEQ ID NO: 603603 - DNA, 25 bp, Homo sapien
cccgggtgaggactagccttctgca

SEQ ID NO: 603604 - DNA, 25 bp, Homo sapien
tcttgctcaatgaagagcccggctg

SEQ ID NO: 603605 - DNA, 25 bp, Homo sapien
caggcctggtctcgtgtatcgtccc

SEQ ID NO: 603606 - DNA, 25 bp, Homo sapien
ggcagggcgtgtgggcaaaagtcta

SEQ ID NO: 603607 - DNA, 25 bp, Homo sapien
ccagcaccaaggagcaacctgagtt

SEQ ID NO: 603608 - DNA, 25 bp, Homo sapien
agcaagtctggtggcccaagctgga

SEQ ID NO: 603609 - DNA, 25 bp, Homo sapien
gagttagtccctgaaagaagtagtg

SEQ ID NO: 603610 - DNA, 25 bp, Homo sapien
tgctgggactgcgtcaaccagagcc

SEQ ID NO: 603611 - DNA, 25 bp, Homo sapien
acctgctgggactgcgtcaaccaga

SEQ ID NO: 603612 - DNA, 25 bp, Homo sapien
ggactgcgtcaaccagagccaccag

SEQ ID NO: 603613 - DNA, 25 bp, Homo sapien
ctgggactgcgtcaaccagagccac

SEQ ID NO: 603614 - DNA, 25 bp, Homo sapien
aagcctgcaggttgccaccgctggt

SEQ ID NO: 603615 - DNA, 25 bp, Homo sapien
agcctgcaggttgccaccgctggtt

SEQ ID NO: 603616 - DNA, 25 bp, Homo sapien
ccagcccccggtagtgtccaccaga

SEQ ID NO: 603617 - DNA, 25 bp, Homo sapien
cccccggtagtgtccaccagatgaa

SEQ ID NO: 603618 - DNA, 25 bp, Homo sapien
gttccctgtttccagtccagatgcc

SEQ ID NO: 603619 - DNA, 25 bp, Homo sapien
tggttccctgtttccagtccagatg

SEQ ID NO: 603620 - DNA, 25 bp, Homo sapien
ggttccctgtttccagtccagatgc

SEQ ID NO: 603621 - DNA, 25 bp, Homo sapien
ttccctgtttccagtccagatgcct

SEQ ID NO: 603622 - DNA, 25 bp, Homo sapien
tggctgcctggagcgttggcacacg

SEQ ID NO: 603623 - DNA, 25 bp, Homo sapien
ggcacacggtcaggaagaggcggct

SEQ ID NO: 603624 - DNA, 25 bp, Homo sapien
gaggacgaagagaattcgattttca

SEQ ID NO: 603625 - DNA, 25 bp, Homo sapien
gggcacggagccttgtcctctaagc

SEQ ID NO: 603626 - DNA, 25 bp, Homo sapien
tgcacaatcaaatcccaattatcca

SEQ ID NO: 603627 - DNA, 25 bp, Homo sapien
aatagcagttagaggataaatgccc

SEQ ID NO: 603628 - DNA, 25 bp, Homo sapien
tcctctgggtgaacaattctgagat

SEQ ID NO: 603629 - DNA, 25 bp, Homo sapien
gatgacttctgcataatactcagag

SEQ ID NO: 603630 - DNA, 25 bp, Homo sapien
tagaggataaatgccccagccttct

SEQ ID NO: 603631 - DNA, 25 bp, Homo sapien
tccgccgcggtagacctgaagatgg

SEQ ID NO: 603632 - DNA, 25 bp, Homo sapien
gaggcttcatccgccgcggtagacc

SEQ ID NO: 603633 - DNA, 25 bp, Homo sapien
ctgtatctgttctgcgtgaggcttc

SEQ ID NO: 603634 - DNA, 25 bp, Homo sapien
tgtatctgttctgcgtgaggcttca

SEQ ID NO: 603635 - DNA, 25 bp, Homo sapien
gccaagctgtttgtcatgcctctga

SEQ ID NO: 603636 - DNA, 25 bp, Homo sapien
cctcgcccgacattggtgatcttga

SEQ ID NO: 603637 - DNA, 25 bp, Homo sapien
ttacaagcaccaaagggcaaagttg

SEQ ID NO: 603638 - DNA, 25 bp, Homo sapien
tcagcaaacattagtgaacacccgt

SEQ ID NO: 603639 - DNA, 25 bp, Homo sapien
ttatgacaagcgtccccaacccatt

SEQ ID NO: 603640 - DNA, 25 bp, Homo sapien
agttatgacaagcgtccccaaccca

SEQ ID NO: 603641 - DNA, 25 bp, Homo sapien
acccattctttcagccgtcgcctcc

SEQ ID NO: 603642 - DNA, 25 bp, Homo sapien
caacccattctttcagccgtcgcct

SEQ ID NO: 603643 - DNA, 25 bp, Homo sapien
catggggcacttggatatgtcattt

SEQ ID NO: 603644 - DNA, 25 bp, Homo sapien
tctcctcttcaagcttcggtttcct

SEQ ID NO: 603645 - DNA, 25 bp, Homo sapien
ttcatggggcacttggatatgtcat

SEQ ID NO: 603646 - DNA, 25 bp, Homo sapien
gtttggagaatcaaggtagacagtg

SEQ ID NO: 603647 - DNA, 25 bp, Homo sapien
gaacaacgtagctgccatcatctgg

SEQ ID NO: 603648 - DNA, 25 bp, Homo sapien
tgcagggcaggatccaataacagtg

SEQ ID NO: 603649 - DNA, 25 bp, Homo sapien
tgccttgactcatcagactctagaa

SEQ ID NO: 603650 - DNA, 25 bp, Homo sapien
gaacagcttgtaaccaccagatttt

SEQ ID NO: 603651 - DNA, 25 bp, Homo sapien
gaagaggatgatgcgacagctgcct

SEQ ID NO: 603652 - DNA, 25 bp, Homo sapien
ggatgatgcgacagctgcctcctgg

SEQ ID NO: 603653 - DNA, 25 bp, Homo sapien
ggatgtagcggatgtgcagggaaag

SEQ ID NO: 603654 - DNA, 25 bp, Homo sapien
tcagtaggaccaagggatgtagcgg

SEQ ID NO: 603655 - DNA, 25 bp, Homo sapien
tcttcccgcctgtgaagcaggtcag

SEQ ID NO: 603656 - DNA, 25 bp, Homo sapien
taactgtcgaggcaggaaatgcttg

SEQ ID NO: 603657 - DNA, 25 bp, Homo sapien
cagtgtaacctgctcgataaccctt

SEQ ID NO: 603658 - DNA, 25 bp, Homo sapien
taacgttggacatagaggaaacggc

SEQ ID NO: 603659 - DNA, 25 bp, Homo sapien
tcaggcgctgcgttggcatctgcag

SEQ ID NO: 603660 - DNA, 25 bp, Homo sapien
gtcttatgtatactcctctccaggg

SEQ ID NO: 603661 - DNA, 25 bp, Homo sapien
gcccagctgtcatgaacaaccgtgt

SEQ ID NO: 603662 - DNA, 25 bp, Homo sapien
tctgacccaagagcttccacatgca

SEQ ID NO: 603663 - DNA, 25 bp, Homo sapien
cctggtccaggtaatcaacctctct

SEQ ID NO: 603664 - DNA, 25 bp, Homo sapien
ctggtccaggtaatcaacctctctc

SEQ ID NO: 603665 - DNA, 25 bp, Homo sapien
ccaatagggcaaaagtgcgagcgac

SEQ ID NO: 603666 - DNA, 25 bp, Homo sapien
cacactgccgtaaagtgcggcgagc

SEQ ID NO: 603667 - DNA, 25 bp, Homo sapien
taaagcgcgctgcatttggaacagg

SEQ ID NO: 603668 - DNA, 25 bp, Homo sapien
gaacagggttgcttccgcctggagc

SEQ ID NO: 603669 - DNA, 25 bp, Homo sapien
ggtacccggcccagcaaatactcca

SEQ ID NO: 603670 - DNA, 25 bp, Homo sapien
ccagcaaatactccacttccctgca

SEQ ID NO: 603671 - DNA, 25 bp, Homo sapien
ggcccagcaaatactccacttccct

SEQ ID NO: 603672 - DNA, 25 bp, Homo sapien
acccggcccagcaaatactccactt

SEQ ID NO: 603673 - DNA, 25 bp, Homo sapien
gtagctcagaagttcgcccacgtcc

SEQ ID NO: 603674 - DNA, 25 bp, Homo sapien
ggtagctcagaagttcgcccacgtc

SEQ ID NO: 603675 - DNA, 25 bp, Homo sapien
tagctcagaagttcgcccacgtcca

SEQ ID NO: 603676 - DNA, 25 bp, Homo sapien
agctcagaagttcgcccacgtccat

SEQ ID NO: 603677 - DNA, 25 bp, Homo sapien
tttcaagcaatcaacagcctatgtg

SEQ ID NO: 603678 - DNA, 25 bp, Homo sapien
tggctagtggctacgacattcggca

SEQ ID NO: 603679 - DNA, 25 bp, Homo sapien
gcagctctactgctcctcgcaatga

SEQ ID NO: 603680 - DNA, 25 bp, Homo sapien
gcaatcaacagcctatgtggctagt

SEQ ID NO: 603681 - DNA, 25 bp, Homo sapien
tttgcatccataaactcatgacttt

SEQ ID NO: 603682 - DNA, 25 bp, Homo sapien
tcaaagaacttttgcatccataaac

SEQ ID NO: 603683 - DNA, 25 bp, Homo sapien
aagaacttttgcatccataaactca

SEQ ID NO: 603684 - DNA, 25 bp, Homo sapien
gaacttttgcatccataaactcatg

SEQ ID NO: 603685 - DNA, 25 bp, Homo sapien
gcagaaacttctcagccaaggcact

SEQ ID NO: 603686 - DNA, 25 bp, Homo sapien
cagaaacttctcagccaaggcactg

SEQ ID NO: 603687 - DNA, 25 bp, Homo sapien
agaaacttctcagccaaggcactgc

SEQ ID NO: 603688 - DNA, 25 bp, Homo sapien
ctggccatgtggatgatcaaaagaa

SEQ ID NO: 603689 - DNA, 25 bp, Homo sapien
aaattctccctgcaagctctatcca

SEQ ID NO: 603690 - DNA, 25 bp, Homo sapien
gcgtcttggccacctacaaattctc

SEQ ID NO: 603691 - DNA, 25 bp, Homo sapien
gcagcctgggcaaatgcgtcttggc

SEQ ID NO: 603692 - DNA, 25 bp, Homo sapien
caatggttctgcacgttacaagaca

SEQ ID NO: 603693 - DNA, 25 bp, Homo sapien
aatggttctgcacgttacaagacat

SEQ ID NO: 603694 - DNA, 25 bp, Homo sapien
acaatggttctgcacgttacaagac

SEQ ID NO: 603695 - DNA, 25 bp, Homo sapien
tggttctgcacgttacaagacatac

SEQ ID NO: 603696 - DNA, 25 bp, Homo sapien
tcatttcttcttcccgatagcggcc

SEQ ID NO: 603697 - DNA, 25 bp, Homo sapien
gccgcgttctcgagtaccagtttgt

SEQ ID NO: 603698 - DNA, 25 bp, Homo sapien
cagtttgtttccgacgcatcttctg

SEQ ID NO: 603699 - DNA, 25 bp, Homo sapien
tctgtcaataatctgcagcagcctt

SEQ ID NO: 603700 - DNA, 25 bp, Homo sapien
cactgagctttcatccaatggctcc

SEQ ID NO: 603701 - DNA, 25 bp, Homo sapien
tctgaaatgatctccacagtaaagc

SEQ ID NO: 603702 - DNA, 25 bp, Homo sapien
caggcacgatcagtcttctttgggc

SEQ ID NO: 603703 - DNA, 25 bp, Homo sapien
gtaaagctatcactaacggcaggca

SEQ ID NO: 603704 - DNA, 25 bp, Homo sapien
tatcactaacggcaggcacgatcag

SEQ ID NO: 603705 - DNA, 25 bp, Homo sapien
ctgacaaactgctatgggtccttct

SEQ ID NO: 603706 - DNA, 25 bp, Homo sapien
acaaactgctatgggtccttctcct

SEQ ID NO: 603707 - DNA, 25 bp, Homo sapien
gacaaactgctatgggtccttctcc

SEQ ID NO: 603708 - DNA, 25 bp, Homo sapien
aaactgctatgggtccttctccttc

SEQ ID NO: 603709 - DNA, 25 bp, Homo sapien
tccaccagaaggtggtacaggtctg

SEQ ID NO: 603710 - DNA, 25 bp, Homo sapien
cagcattcagctccaccagaaggtg

SEQ ID NO: 603711 - DNA, 25 bp, Homo sapien
caccagaaggtggtacaggtctggc

SEQ ID NO: 603712 - DNA, 25 bp, Homo sapien
accagaaggtggtacaggtctggca

SEQ ID NO: 603713 - DNA, 25 bp, Homo sapien
ctgtattatcgtgtccgagcaagcc

SEQ ID NO: 603714 - DNA, 25 bp, Homo sapien
tcgtgtccgagcaagccgagaagcg

SEQ ID NO: 603715 - DNA, 25 bp, Homo sapien
tgtattatcgtgtccgagcaagccg

SEQ ID NO: 603716 - DNA, 25 bp, Homo sapien
gtgtccgagcaagccgagaagcgac

SEQ ID NO: 603717 - DNA, 25 bp, Homo sapien
gctgttaatgtatgaacagatatat

SEQ ID NO: 603718 - DNA, 25 bp, Homo sapien
gaacagatatatcacgatgaattct

SEQ ID NO: 603719 - DNA, 25 bp, Homo sapien
cagatatatcacgatgaattctagt

SEQ ID NO: 603720 - DNA, 25 bp, Homo sapien
tgtatgaacagatatatcacgatga

SEQ ID NO: 603721 - DNA, 25 bp, Homo sapien
tctgtctggctttgcccccataagg

SEQ ID NO: 603722 - DNA, 25 bp, Homo sapien
catggttcactatctctagtctcaa

SEQ ID NO: 603723 - DNA, 25 bp, Homo sapien
tccactggaccatcagtcagcagaa

SEQ ID NO: 603724 - DNA, 25 bp, Homo sapien
tatctctagtctcaactccactgga

SEQ ID NO: 603725 - DNA, 25 bp, Homo sapien
aaaagcctttgcaataaagctactg

SEQ ID NO: 603726 - DNA, 25 bp, Homo sapien
cacaggcacatcaaaagcctttgca

SEQ ID NO: 603727 - DNA, 25 bp, Homo sapien
acaggcacatcaaaagcctttgcaa

SEQ ID NO: 603728 - DNA, 25 bp, Homo sapien
caaagatgacctgtgcttgctggga

SEQ ID NO: 603729 - DNA, 25 bp, Homo sapien
tgagcatactgttcccaaggcactt

SEQ ID NO: 603730 - DNA, 25 bp, Homo sapien
gcagtgatgcagagcgccagaataa

SEQ ID NO: 603731 - DNA, 25 bp, Homo sapien
tgtagtgactacatgggcagccagc

SEQ ID NO: 603732 - DNA, 25 bp, Homo sapien
tgacaactctgtaagttctcctggt

SEQ ID NO: 603733 - DNA, 25 bp, Homo sapien
acaactctgtaagttctcctggttt

SEQ ID NO: 603734 - DNA, 25 bp, Homo sapien
ttgacaactctgtaagttctcctgg

SEQ ID NO: 603735 - DNA, 25 bp, Homo sapien
gacaactctgtaagttctcctggtt

SEQ ID NO: 603736 - DNA, 25 bp, Homo sapien
tcagacccagactactcaagttcag

SEQ ID NO: 603737 - DNA, 25 bp, Homo sapien
gataacacggtaagtctcagtcagt

SEQ ID NO: 603738 - DNA, 25 bp, Homo sapien
tgtctcctccgtattttccgaattc

SEQ ID NO: 603739 - DNA, 25 bp, Homo sapien
caagttcagttgatccctgttggtc

SEQ ID NO: 603740 - DNA, 25 bp, Homo sapien
tgatgactaaagtactgaacatgat

SEQ ID NO: 603741 - DNA, 25 bp, Homo sapien
aaaggccaatccattcttcattctg

SEQ ID NO: 603742 - DNA, 25 bp, Homo sapien
tactgaacatgataaaggccaatcc

SEQ ID NO: 603743 - DNA, 25 bp, Homo sapien
tattgaatgcccatgatgactaaag

SEQ ID NO: 603744 - DNA, 25 bp, Homo sapien
acctctgtcccttcaaatgtcacac

SEQ ID NO: 603745 - DNA, 25 bp, Homo sapien
caacctctgtcccttcaaatgtcac

SEQ ID NO: 603746 - DNA, 25 bp, Homo sapien
ctctgtcccttcaaatgtcacactg

SEQ ID NO: 603747 - DNA, 25 bp, Homo sapien
aacctctgtcccttcaaatgtcaca

SEQ ID NO: 603748 - DNA, 25 bp, Homo sapien
ttgaaggcagtaataatttctgaga

SEQ ID NO: 603749 - DNA, 25 bp, Homo sapien
tttgaaggcagtaataatttctgag

SEQ ID NO: 603750 - DNA, 25 bp, Homo sapien
cctcttcactctcatggagggtgtc

SEQ ID NO: 603751 - DNA, 25 bp, Homo sapien
ctcatggagggtgtctatatctgtt

SEQ ID NO: 603752 - DNA, 25 bp, Homo sapien
cactctcatggagggtgtctatatc

SEQ ID NO: 603753 - DNA, 25 bp, Homo sapien
tcttcactctcatggagggtgtcta

SEQ ID NO: 603754 - DNA, 25 bp, Homo sapien
ggtttcgggatcatctgggacccca

SEQ ID NO: 603755 - DNA, 25 bp, Homo sapien
gaagaacaatccacagagccttgag

SEQ ID NO: 603756 - DNA, 25 bp, Homo sapien
tatattcggtcataaatggccctgc

SEQ ID NO: 603757 - DNA, 25 bp, Homo sapien
tcttgggtaggactagaaagtagcc

SEQ ID NO: 603758 - DNA, 25 bp, Homo sapien
gatatttactgatgacttccgactg

SEQ ID NO: 603759 - DNA, 25 bp, Homo sapien
aagtaaatggaagaccaccgctggt

SEQ ID NO: 603760 - DNA, 25 bp, Homo sapien
taagtaacagcagtggatatgaacc

SEQ ID NO: 603761 - DNA, 25 bp, Homo sapien
tctgctcgtgcaattctaggcctca

SEQ ID NO: 603762 - DNA, 25 bp, Homo sapien
catctttggagaggtaagccagaga

SEQ ID NO: 603763 - DNA, 25 bp, Homo sapien
tagcacatggcaagtttggggactg

SEQ ID NO: 603764 - DNA, 25 bp, Homo sapien
tcatcattctcaagaagtccaaagt

SEQ ID NO: 603765 - DNA, 25 bp, Homo sapien
gagcgaaggcatgggactacctagc

SEQ ID NO: 603766 - DNA, 25 bp, Homo sapien
ctagaacaacacatcctgctgaggt

SEQ ID NO: 603767 - DNA, 25 bp, Homo sapien
ttatcaggtgtttactctgtgccag

SEQ ID NO: 603768 - DNA, 25 bp, Homo sapien
caatgtgacaagtgccagaatgtac

SEQ ID NO: 603769 - DNA, 25 bp, Homo sapien
gctaaatgcttaatatctgccaggc

SEQ ID NO: 603770 - DNA, 25 bp, Homo sapien
gatttttctaggctctcctttatgc

SEQ ID NO: 603771 - DNA, 25 bp, Homo sapien
agatttttctaggctctcctttatg

SEQ ID NO: 603772 - DNA, 25 bp, Homo sapien
ggtcaacggttcattcaagccaaaa

SEQ ID NO: 603773 - DNA, 25 bp, Homo sapien
caaaacacgtctttaggccaatgca

SEQ ID NO: 603774 - DNA, 25 bp, Homo sapien
tctatggtttacaaggtgctctccc

SEQ ID NO: 603775 - DNA, 25 bp, Homo sapien
gagtcaactggagctcaagcagaca

SEQ ID NO: 603776 - DNA, 25 bp, Homo sapien
tctgtaccagcagtgctaccacctg

SEQ ID NO: 603777 - DNA, 25 bp, Homo sapien
catccaggcgctccagattctgtac

SEQ ID NO: 603778 - DNA, 25 bp, Homo sapien
ccagagtgttgtggacgccatctgc

SEQ ID NO: 603779 - DNA, 25 bp, Homo sapien
cagagtgttgtggacgccatctgcc

SEQ ID NO: 603780 - DNA, 25 bp, Homo sapien
ctatgatacgaaaaaggagatctct

SEQ ID NO: 603781 - DNA, 25 bp, Homo sapien
gaagagcactacgacaccctgaatt

SEQ ID NO: 603782 - DNA, 25 bp, Homo sapien
tggcagaggtaactcccaggtacta

SEQ ID NO: 603783 - DNA, 25 bp, Homo sapien
ggcaagttaaaggatgaccaggcag

SEQ ID NO: 603784 - DNA, 25 bp, Homo sapien
caccctctgtacacatctcaggccg

SEQ ID NO: 603785 - DNA, 25 bp, Homo sapien
ccactgtagaagaccctgctgggca

SEQ ID NO: 603786 - DNA, 25 bp, Homo sapien
cactgtagaagaccctgctgggcac

SEQ ID NO: 603787 - DNA, 25 bp, Homo sapien
tctgtacacatctcaggccggaact

SEQ ID NO: 603788 - DNA, 25 bp, Homo sapien
tggtccaaactgttctgagaggagc

SEQ ID NO: 603789 - DNA, 25 bp, Homo sapien
ttttctcatttactctattagacaa

SEQ ID NO: 603790 - DNA, 25 bp, Homo sapien
aactgttctgagaggagctcttgcc

SEQ ID NO: 603791 - DNA, 25 bp, Homo sapien
catttactctattagacaatactaa

SEQ ID NO: 603792 - DNA, 25 bp, Homo sapien
ggttatatctgtagctcacctctgc

SEQ ID NO: 603793 - DNA, 25 bp, Homo sapien
ccagaagctgcaggttatatctgta

SEQ ID NO: 603794 - DNA, 25 bp, Homo sapien
tatatctgtagctcacctctgctac

SEQ ID NO: 603795 - DNA, 25 bp, Homo sapien
gctgcaggttatatctgtagctcac

SEQ ID NO: 603796 - DNA, 25 bp, Homo sapien
acaaaacaattatgctaccactcac

SEQ ID NO: 603797 - DNA, 25 bp, Homo sapien
gtacaaaacaattatgctaccactc

SEQ ID NO: 603798 - DNA, 25 bp, Homo sapien
aagtacaaaacaattatgctaccac

SEQ ID NO: 603799 - DNA, 25 bp, Homo sapien
tacaaaacaattatgctaccactca

SEQ ID NO: 603800 - DNA, 25 bp, Homo sapien
aatacatgaaactcatatcagatga

SEQ ID NO: 603801 - DNA, 25 bp, Homo sapien
tcaatacatgaaactcatatcagat

SEQ ID NO: 603802 - DNA, 25 bp, Homo sapien
caatacatgaaactcatatcagatg

SEQ ID NO: 603803 - DNA, 25 bp, Homo sapien
atacatgaaactcatatcagatgat

SEQ ID NO: 603804 - DNA, 25 bp, Homo sapien
tgagaaaaatgttaaggggtcttgc

SEQ ID NO: 603805 - DNA, 25 bp, Homo sapien
atgagaaaaatgttaaggggtcttg

SEQ ID NO: 603806 - DNA, 25 bp, Homo sapien
tggccagcacttcactgcaatacag

SEQ ID NO: 603807 - DNA, 25 bp, Homo sapien
gagcaatatggccagcacttcactg

SEQ ID NO: 603808 - DNA, 25 bp, Homo sapien
gtcctggagcaatatggccagcact

SEQ ID NO: 603809 - DNA, 25 bp, Homo sapien
cacttcactgcaatacagtttgttg

SEQ ID NO: 603810 - DNA, 25 bp, Homo sapien
aagaagcacatcgattccatccagc

SEQ ID NO: 603811 - DNA, 25 bp, Homo sapien
gaagcacatcgattccatccagctc

SEQ ID NO: 603812 - DNA, 25 bp, Homo sapien
tgctgaagaagcacatcgattccat

SEQ ID NO: 603813 - DNA, 25 bp, Homo sapien
tgaagaagcacatcgattccatcca

SEQ ID NO: 603814 - DNA, 25 bp, Homo sapien
caggaagcgctcacgattggaacta

SEQ ID NO: 603815 - DNA, 25 bp, Homo sapien
ttggaactaagcattagacaggagc

SEQ ID NO: 603816 - DNA, 25 bp, Homo sapien
gcgctcacgattggaactaagcatt

SEQ ID NO: 603817 - DNA, 25 bp, Homo sapien
tgctcctcagccgtgctgggattgt

SEQ ID NO: 603818 - DNA, 25 bp, Homo sapien
tctaaggttcccaagtccaggctct

SEQ ID NO: 603819 - DNA, 25 bp, Homo sapien
gcctttgggccatgaatgaacacag

SEQ ID NO: 603820 - DNA, 25 bp, Homo sapien
ggtgccagctcagtcgcaatagagt

SEQ ID NO: 603821 - DNA, 25 bp, Homo sapien
gacttgccacctgttgactgtagag

SEQ ID NO: 603822 - DNA, 25 bp, Homo sapien
caaaaattccgtgggccaatgatcc

SEQ ID NO: 603823 - DNA, 25 bp, Homo sapien
ctttgggtctatgaacacggtttgc

SEQ ID NO: 603824 - DNA, 25 bp, Homo sapien
cagccgtacaacttaccatgcatgg

SEQ ID NO: 603825 - DNA, 25 bp, Homo sapien
caagagactgagttctcggcaacag

SEQ ID NO: 603826 - DNA, 25 bp, Homo sapien
tagtgcttcacaaacagctcctgga

SEQ ID NO: 603827 - DNA, 25 bp, Homo sapien
gaaatccagacagtttgaacacagg

SEQ ID NO: 603828 - DNA, 25 bp, Homo sapien
gactacaaatctgcatgaaggactt

SEQ ID NO: 603829 - DNA, 25 bp, Homo sapien
gagcccaggactcgagtggactcct

SEQ ID NO: 603830 - DNA, 25 bp, Homo sapien
ttcggggccaatcatggcatggtcc

SEQ ID NO: 603831 - DNA, 25 bp, Homo sapien
cttcctgggagatttcataaagagg

SEQ ID NO: 603832 - DNA, 25 bp, Homo sapien
ggttcgtaagccaagaatgtcaaca

SEQ ID NO: 603833 - DNA, 25 bp, Homo sapien
tttcagggcactgctccgggagatc

SEQ ID NO: 603834 - DNA, 25 bp, Homo sapien
tgttgccacctcattactcttttca

SEQ ID NO: 603835 - DNA, 25 bp, Homo sapien
attttgctgggagcgtgcaccatca

SEQ ID NO: 603836 - DNA, 25 bp, Homo sapien
aaatagtttatttcggcaattcctg

SEQ ID NO: 603837 - DNA, 25 bp, Homo sapien
tctggaggtgacatgtgttgccacc

SEQ ID NO: 603838 - DNA, 25 bp, Homo sapien
agagccgaacaccacagtcccaatg

SEQ ID NO: 603839 - DNA, 25 bp, Homo sapien
agtcccaatgcaaagaaggtgttca

SEQ ID NO: 603840 - DNA, 25 bp, Homo sapien
aatgcaaagaaggtgttcacactcc

SEQ ID NO: 603841 - DNA, 25 bp, Homo sapien
cctggtgcaggagagccgaacacca

SEQ ID NO: 603842 - DNA, 25 bp, Homo sapien
gcagaaggcatgaagtttcctaggt

SEQ ID NO: 603843 - DNA, 25 bp, Homo sapien
gttgaaggagaggtccacgaagcct

SEQ ID NO: 603844 - DNA, 25 bp, Homo sapien
tcaagtgtttgtatattagggaagg

SEQ ID NO: 603845 - DNA, 25 bp, Homo sapien
ttgcgatgtgtgtacaccgccgcct

SEQ ID NO: 603846 - DNA, 25 bp, Homo sapien
tcagccctggtcatcctgactggct

SEQ ID NO: 603847 - DNA, 25 bp, Homo sapien
cttccatactgcaacctgatcacat

SEQ ID NO: 603848 - DNA, 25 bp, Homo sapien
cactgaacatgtttcagtcagccct

SEQ ID NO: 603849 - DNA, 25 bp, Homo sapien
gatcacatgtctgccactgaacatg

SEQ ID NO: 603850 - DNA, 25 bp, Homo sapien
gaatttattcagaagccgggtccgc

SEQ ID NO: 603851 - DNA, 25 bp, Homo sapien
ggaagccaggatcgaacagacatgc

SEQ ID NO: 603852 - DNA, 25 bp, Homo sapien
gggtccgctgctgccctctcaggtt

SEQ ID NO: 603853 - DNA, 25 bp, Homo sapien
gctgccctctcaggttccgcaggag

SEQ ID NO: 603854 - DNA, 25 bp, Homo sapien
acagcaagagaacagtggcactcct

SEQ ID NO: 603855 - DNA, 25 bp, Homo sapien
aaagagagatttcacaggcttgagt

SEQ ID NO: 603856 - DNA, 25 bp, Homo sapien
agaaggaaagacaacgcacagcaag

SEQ ID NO: 603857 - DNA, 25 bp, Homo sapien
ttcacaggcttgagtgagaaggaaa

SEQ ID NO: 603858 - DNA, 25 bp, Homo sapien
tcaatcttcttgtccgccacctgca

SEQ ID NO: 603859 - DNA, 25 bp, Homo sapien
ccttcaatcttcttgtccgccacct

SEQ ID NO: 603860 - DNA, 25 bp, Homo sapien
gtccgccacctgcattgcacccaga

SEQ ID NO: 603861 - DNA, 25 bp, Homo sapien
ttccccttcaatcttcttgtccgcc

SEQ ID NO: 603862 - DNA, 25 bp, Homo sapien
gggtgatgggaggaacacaagggac

SEQ ID NO: 603863 - DNA, 25 bp, Homo sapien
gatgggaggaacacaagggacccaa

SEQ ID NO: 603864 - DNA, 25 bp, Homo sapien
gtgatgggaggaacacaagggaccc

SEQ ID NO: 603865 - DNA, 25 bp, Homo sapien
gacccaaacggagggcaagtcaata

SEQ ID NO: 603866 - DNA, 25 bp, Homo sapien
tactgatctgatagtcaaagtcttc

SEQ ID NO: 603867 - DNA, 25 bp, Homo sapien
gatctgatagtcaaagtcttcaaaa

SEQ ID NO: 603868 - DNA, 25 bp, Homo sapien
cactactgatctgatagtcaaagtc

SEQ ID NO: 603869 - DNA, 25 bp, Homo sapien
ttattcactactgatctgatagtca

SEQ ID NO: 603870 - DNA, 25 bp, Homo sapien
tttcattacaaggagtccatctttt

SEQ ID NO: 603871 - DNA, 25 bp, Homo sapien
tgtttcattacaaggagtccatctt

SEQ ID NO: 603872 - DNA, 25 bp, Homo sapien
gtttcattacaaggagtccatcttt

SEQ ID NO: 603873 - DNA, 25 bp, Homo sapien
tgtttccctgatccggtgctcttga

SEQ ID NO: 603874 - DNA, 25 bp, Homo sapien
gatccggtgctcttgaaggtccttt

SEQ ID NO: 603875 - DNA, 25 bp, Homo sapien
ggctttgataatctgtggcatgtct

SEQ ID NO: 603876 - DNA, 25 bp, Homo sapien
tctagccagctgtaacggatttcta

SEQ ID NO: 603877 - DNA, 25 bp, Homo sapien
tcaaatgtagatctgagatacgact

SEQ ID NO: 603878 - DNA, 25 bp, Homo sapien
caaactcaagagagcaatgccaaac

SEQ ID NO: 603879 - DNA, 25 bp, Homo sapien
tcaatgcgacattctacttttagcc

SEQ ID NO: 603880 - DNA, 25 bp, Homo sapien
agactctgacaatgttcaatgcgac

SEQ ID NO: 603881 - DNA, 25 bp, Homo sapien
catcggcttagagcatcgagaggca

SEQ ID NO: 603882 - DNA, 25 bp, Homo sapien
tgaacagctaactgtgccaggtgct

SEQ ID NO: 603883 - DNA, 25 bp, Homo sapien
cagggcatcagcctacgtgagaagg

SEQ ID NO: 603884 - DNA, 25 bp, Homo sapien
tgatggtaggcatacaggctggcca

SEQ ID NO: 603885 - DNA, 25 bp, Homo sapien
ttggcattgcagatctcggccatga

SEQ ID NO: 603886 - DNA, 25 bp, Homo sapien
tccaggcgccggaggtagaactcct

SEQ ID NO: 603887 - DNA, 25 bp, Homo sapien
aactcctcctcggtgtcattgtcga

SEQ ID NO: 603888 - DNA, 25 bp, Homo sapien
agaacaaagagccccgcatccaggc

SEQ ID NO: 603889 - DNA, 25 bp, Homo sapien
tatgcctgacaattttgatggagct

SEQ ID NO: 603890 - DNA, 25 bp, Homo sapien
gcttcctcgcatgtttaggatctgg

SEQ ID NO: 603891 - DNA, 25 bp, Homo sapien
tgcctgacaattttgatggagcttc

SEQ ID NO: 603892 - DNA, 25 bp, Homo sapien
atgcctgacaattttgatggagctt

SEQ ID NO: 603893 - DNA, 25 bp, Homo sapien
agattccaatgcctcatactctcca

SEQ ID NO: 603894 - DNA, 25 bp, Homo sapien
aattcacgcgaatctgacactgaga

SEQ ID NO: 603895 - DNA, 25 bp, Homo sapien
ggctctgagcagtaattcacgcgaa

SEQ ID NO: 603896 - DNA, 25 bp, Homo sapien
gtgtcaccccggaaggcatgagtgg

SEQ ID NO: 603897 - DNA, 25 bp, Homo sapien
ccagggtgtcaccccggaaggcatg

SEQ ID NO: 603898 - DNA, 25 bp, Homo sapien
taactgtgagttaactgtgccgtct

SEQ ID NO: 603899 - DNA, 25 bp, Homo sapien
tctgctttgcgctatggtcagtcac

SEQ ID NO: 603900 - DNA, 25 bp, Homo sapien
catgtccagccggattaactgtgag

SEQ ID NO: 603901 - DNA, 25 bp, Homo sapien
tgtgccgtcttcattccccttgtac

SEQ ID NO: 603902 - DNA, 25 bp, Homo sapien
ttgtcaaggccgctggctacagggc

SEQ ID NO: 603903 - DNA, 25 bp, Homo sapien
tactcgcaaatcaaagggccatggg

SEQ ID NO: 603904 - DNA, 25 bp, Homo sapien
tgggacaccgtatccatgaccaggc

SEQ ID NO: 603905 - DNA, 25 bp, Homo sapien
catggtcttagcacagttggttctc

SEQ ID NO: 603906 - DNA, 25 bp, Homo sapien
tgttcaaataacaaacgtccaggga

SEQ ID NO: 603907 - DNA, 25 bp, Homo sapien
gactctggacttcctgcggtggctc

SEQ ID NO: 603908 - DNA, 25 bp, Homo sapien
tgcccttgggtggtcccctctgaaa

SEQ ID NO: 603909 - DNA, 25 bp, Homo sapien
tagctctgactcacaactgtgccct

SEQ ID NO: 603910 - DNA, 25 bp, Homo sapien
ggcgtggatgctactaaggtctgaa

SEQ ID NO: 603911 - DNA, 25 bp, Homo sapien
tcaacgcatcgaaggcctttatggg

SEQ ID NO: 603912 - DNA, 25 bp, Homo sapien
cacagaggtgcaagtcgccctaatg

SEQ ID NO: 603913 - DNA, 25 bp, Homo sapien
ttcactcaacacacatggcgtggat

SEQ ID NO: 603914 - DNA, 25 bp, Homo sapien
ggccgtccccgatgttctctgcata

SEQ ID NO: 603915 - DNA, 25 bp, Homo sapien
ggctccggccgtccccgatgttctc

SEQ ID NO: 603916 - DNA, 25 bp, Homo sapien
agcaagcccaggatgcgcttttgct

SEQ ID NO: 603917 - DNA, 25 bp, Homo sapien
ccaggatgcgcttttgctcgttctc

SEQ ID NO: 603918 - DNA, 25 bp, Homo sapien
aaagccacacagagttgtgtagaaa

SEQ ID NO: 603919 - DNA, 25 bp, Homo sapien
catgatgcgcagggccaaggtgcct

SEQ ID NO: 603920 - DNA, 25 bp, Homo sapien
tccatgatgcgcagggccaaggtgc

SEQ ID NO: 603921 - DNA, 25 bp, Homo sapien
ccatgatgcgcagggccaaggtgcc

SEQ ID NO: 603922 - DNA, 25 bp, Homo sapien
gttgtcactgctacaccctctgagc

SEQ ID NO: 603923 - DNA, 25 bp, Homo sapien
cgtagccacagtggcgaagttgtca

SEQ ID NO: 603924 - DNA, 25 bp, Homo sapien
tcttgcaggcggagtgaggctgccc

SEQ ID NO: 603925 - DNA, 25 bp, Homo sapien
agcaccacctgcgtagccacagtgg

SEQ ID NO: 603926 - DNA, 25 bp, Homo sapien
ggtgactgagaaacgcctgccattt

SEQ ID NO: 603927 - DNA, 25 bp, Homo sapien
gacaatgcgtctccctagataagga

SEQ ID NO: 603928 - DNA, 25 bp, Homo sapien
tctgtgaattagagacggcccatct

SEQ ID NO: 603929 - DNA, 25 bp, Homo sapien
aaattgacgccctcagtaatggcag

SEQ ID NO: 603930 - DNA, 25 bp, Homo sapien
gttttggacttctgacctgaagtta

SEQ ID NO: 603931 - DNA, 25 bp, Homo sapien
ggacttctgacctgaagttatccac

SEQ ID NO: 603932 - DNA, 25 bp, Homo sapien
ttggacttctgacctgaagttatcc

SEQ ID NO: 603933 - DNA, 25 bp, Homo sapien
ggttggttttggacttctgacctga

SEQ ID NO: 603934 - DNA, 25 bp, Homo sapien
acgaatcacgttgtagtccagtggg

SEQ ID NO: 603935 - DNA, 25 bp, Homo sapien
tagtctcatcttacggtatttcagg

SEQ ID NO: 603936 - DNA, 25 bp, Homo sapien
cagttgttctggtataagtaatgac

SEQ ID NO: 603937 - DNA, 25 bp, Homo sapien
tccagtggggaacagtctagtctca

SEQ ID NO: 603938 - DNA, 25 bp, Homo sapien
tgtggctcatgactaccatagcgga

SEQ ID NO: 603939 - DNA, 25 bp, Homo sapien
acagagctagatgcctctaagggag

SEQ ID NO: 603940 - DNA, 25 bp, Homo sapien
caaatcctcgtgacaaggatgggac

SEQ ID NO: 603941 - DNA, 25 bp, Homo sapien
tttcagtgctcaatggtccgtgtgg

SEQ ID NO: 603942 - DNA, 25 bp, Homo sapien
cccggcttcggggagcgagcgcacg

SEQ ID NO: 603943 - DNA, 25 bp, Homo sapien
cgctgtccccggacccggcccagct

SEQ ID NO: 603944 - DNA, 25 bp, Homo sapien
ggagaccgcagaaccggcgccagct

SEQ ID NO: 603945 - DNA, 25 bp, Homo sapien
tgcgggactcttcccttccgcggaa

SEQ ID NO: 603946 - DNA, 25 bp, Homo sapien
gtggttgtcccagggcgcgtggccg

SEQ ID NO: 603947 - DNA, 25 bp, Homo sapien
gtggagggcgcccagcgctacggcg

SEQ ID NO: 603948 - DNA, 25 bp, Homo sapien
cgccgccgagttgcaggaaaagtgc

SEQ ID NO: 603949 - DNA, 25 bp, Homo sapien
cgtggccggagacgtggttgtccca

SEQ ID NO: 603950 - DNA, 25 bp, Homo sapien
tgctgatgggcaaggtgtcaaaacc

SEQ ID NO: 603951 - DNA, 25 bp, Homo sapien
tgtcaccatggcaaggagccaaatt

SEQ ID NO: 603952 - DNA, 25 bp, Homo sapien
gagccaaattccctgcgtcctgctg

SEQ ID NO: 603953 - DNA, 25 bp, Homo sapien
ttgtttgccgcaggcgactttgccc

SEQ ID NO: 603954 - DNA, 25 bp, Homo sapien
tagtctcatcctaagcaatcatatg

SEQ ID NO: 603955 - DNA, 25 bp, Homo sapien
tctaggttctgcctaaaatcatctc

SEQ ID NO: 603956 - DNA, 25 bp, Homo sapien
gcaccgcctgcgctattatgtcctt

SEQ ID NO: 603957 - DNA, 25 bp, Homo sapien
tcatctctccggtaggacccaatct

SEQ ID NO: 603958 - DNA, 25 bp, Homo sapien
agaaccagagaattcatggctgaag

SEQ ID NO: 603959 - DNA, 25 bp, Homo sapien
ggaccttggcgcttagtgttcccag

SEQ ID NO: 603960 - DNA, 25 bp, Homo sapien
gaaccagagaattcatggctgaagg

SEQ ID NO: 603961 - DNA, 25 bp, Homo sapien
caccccaggaccttggcgcttagtg

SEQ ID NO: 603962 - DNA, 25 bp, Homo sapien
gcctggctctacttgaagaagctcc

SEQ ID NO: 603963 - DNA, 25 bp, Homo sapien
cctggctctacttgaagaagctcct

SEQ ID NO: 603964 - DNA, 25 bp, Homo sapien
aagccgaggcgcatagccatcctct

SEQ ID NO: 603965 - DNA, 25 bp, Homo sapien
aaagccgaggcgcatagccatcctc

SEQ ID NO: 603966 - DNA, 25 bp, Homo sapien
agccgaggcgcatagccatcctctg

SEQ ID NO: 603967 - DNA, 25 bp, Homo sapien
accggtcctctagctcttctctgtg

SEQ ID NO: 603968 - DNA, 25 bp, Homo sapien
atttcctctggtgctcccatggctc

SEQ ID NO: 603969 - DNA, 25 bp, Homo sapien
tctctgtgctcatttcctctggtgc

SEQ ID NO: 603970 - DNA, 25 bp, Homo sapien
ccaccggtcctctagctcttctctg

SEQ ID NO: 603971 - DNA, 25 bp, Homo sapien
tgccgctggcagttgcgggcgcaga

SEQ ID NO: 603972 - DNA, 25 bp, Homo sapien
cagagcagctgctcggcggatggaa

SEQ ID NO: 603973 - DNA, 25 bp, Homo sapien
ggaatgggtacggaattctccacca

SEQ ID NO: 603974 - DNA, 25 bp, Homo sapien
gctgctcggcggatggaatgggtac

SEQ ID NO: 603975 - DNA, 25 bp, Homo sapien
atgagatggcgatgagggagtaggt

SEQ ID NO: 603976 - DNA, 25 bp, Homo sapien
acccaagaagctcagcaaggcaggc

SEQ ID NO: 603977 - DNA, 25 bp, Homo sapien
tgggcacccaagaagctcagcaagg

SEQ ID NO: 603978 - DNA, 25 bp, Homo sapien
gcccgctggtgggagtggtctggct

SEQ ID NO: 603979 - DNA, 25 bp, Homo sapien
ctgcaagcccgctggtgggagtggt

SEQ ID NO: 603980 - DNA, 25 bp, Homo sapien
agggggaagaatggcggggctcagg

SEQ ID NO: 603981 - DNA, 25 bp, Homo sapien
cagggggaagaatggcggggctcag

SEQ ID NO: 603982 - DNA, 25 bp, Homo sapien
gggggaagaatggcggggctcagga

SEQ ID NO: 603983 - DNA, 25 bp, Homo sapien
acagggggaagaatggcggggctca

SEQ ID NO: 603984 - DNA, 25 bp, Homo sapien
cccgtccgtgctgtcatgtcatggg

SEQ ID NO: 603985 - DNA, 25 bp, Homo sapien
ctcgcccgtccgtgctgtcatgtca

SEQ ID NO: 603986 - DNA, 25 bp, Homo sapien
cgcccgtccgtgctgtcatgtcatg

SEQ ID NO: 603987 - DNA, 25 bp, Homo sapien
gtcctcgcccgtccgtgctgtcatg

SEQ ID NO: 603988 - DNA, 25 bp, Homo sapien
ccagtcccggtggctccgtacatac

SEQ ID NO: 603989 - DNA, 25 bp, Homo sapien
ccacgcctgcttgtcggtccagtcc

SEQ ID NO: 603990 - DNA, 25 bp, Homo sapien
cgcctgcttgtcggtccagtcccgg

SEQ ID NO: 603991 - DNA, 25 bp, Homo sapien
tccagtcccggtggctccgtacata

SEQ ID NO: 603992 - DNA, 25 bp, Homo sapien
cctgcgtcttcctgctgagatgctt

SEQ ID NO: 603993 - DNA, 25 bp, Homo sapien
cgtcttcctgctgagatgcttttag

SEQ ID NO: 603994 - DNA, 25 bp, Homo sapien
cttattttggttgcctccttccctg

SEQ ID NO: 603995 - DNA, 25 bp, Homo sapien
cttccctgcgtcttcctgctgagat

SEQ ID NO: 603996 - DNA, 25 bp, Homo sapien
agccctttcgagaagtcattatcaa

SEQ ID NO: 603997 - DNA, 25 bp, Homo sapien
gagccctttcgagaagtcattatca

SEQ ID NO: 603998 - DNA, 25 bp, Homo sapien
agagccctttcgagaagtcattatc

SEQ ID NO: 603999 - DNA, 25 bp, Homo sapien
ttagagccctttcgagaagtcatta

SEQ ID NO: 604000 - DNA, 25 bp, Homo sapien
atagcctaatccatggcactttaca

SEQ ID NO: 604001 - DNA, 25 bp, Homo sapien
ttacagtttccaaagcgttttcata

SEQ ID NO: 604002 - DNA, 25 bp, Homo sapien
agcgttttcatatatgccttcaaca

SEQ ID NO: 604003 - DNA, 25 bp, Homo sapien
tagcctaatccatggcactttacag

SEQ ID NO: 604004 - DNA, 25 bp, Homo sapien
acacattatgcagaaagcccttcag

SEQ ID NO: 604005 - DNA, 25 bp, Homo sapien
ccagccctccagggcgactggagag

SEQ ID NO: 604006 - DNA, 25 bp, Homo sapien
tggagagcccacgaagaaagggacc

SEQ ID NO: 604007 - DNA, 25 bp, Homo sapien
ggagcagcccgttggatttcatcca

SEQ ID NO: 604008 - DNA, 25 bp, Homo sapien
gatgacgcggcactcgtaggtgcct

SEQ ID NO: 604009 - DNA, 25 bp, Homo sapien
tcgtccgtgggcttcacccgggaca

SEQ ID NO: 604010 - DNA, 25 bp, Homo sapien
cgggacaggcgcagcttgtgggaga

SEQ ID NO: 604011 - DNA, 25 bp, Homo sapien
gggccttgccgtcgctgaagtcgat

SEQ ID NO: 604012 - DNA, 25 bp, Homo sapien
ggcagatgcaggacggagttctccc

SEQ ID NO: 604013 - DNA, 25 bp, Homo sapien
tgcaggacggagttctcccctggct

SEQ ID NO: 604014 - DNA, 25 bp, Homo sapien
gatgcaggacggagttctcccctgg

SEQ ID NO: 604015 - DNA, 25 bp, Homo sapien
gcctcctggtccaccgagcgcttcc

SEQ ID NO: 604016 - DNA, 25 bp, Homo sapien
ctgaacaggaaggactcgccaggag

SEQ ID NO: 604017 - DNA, 25 bp, Homo sapien
ttctgactcgccgtgtgacagggca

SEQ ID NO: 604018 - DNA, 25 bp, Homo sapien
tggatcccctgcatccctggagggt

SEQ ID NO: 604019 - DNA, 25 bp, Homo sapien
ggtcctgctggtgcaaaactctgcc

SEQ ID NO: 604020 - DNA, 25 bp, Homo sapien
ccgaggagaattgggtccaatagaa

SEQ ID NO: 604021 - DNA, 25 bp, Homo sapien
atatttacaaataaccagggggcag

SEQ ID NO: 604022 - DNA, 25 bp, Homo sapien
tgtgcccgtgatcgggaatcgtgag

SEQ ID NO: 604023 - DNA, 25 bp, Homo sapien
ccaattccgaggagaattgggtcca

SEQ ID NO: 604024 - DNA, 25 bp, Homo sapien
cagggcaacccacccctaggcaaag

SEQ ID NO: 604025 - DNA, 25 bp, Homo sapien
ccacctcccccacgtcatcactgag

SEQ ID NO: 604026 - DNA, 25 bp, Homo sapien
ctaggcaaagccctcggcctctccc

SEQ ID NO: 604027 - DNA, 25 bp, Homo sapien
acgtcatcactgagctgcggcagcc

SEQ ID NO: 604028 - DNA, 25 bp, Homo sapien
tattcaggttggctggtagtcacag

SEQ ID NO: 604029 - DNA, 25 bp, Homo sapien
ttcaggttggctggtagtcacagac

SEQ ID NO: 604030 - DNA, 25 bp, Homo sapien
tggtagtcacagactggatcatgta

SEQ ID NO: 604031 - DNA, 25 bp, Homo sapien
ttattcaggttggctggtagtcaca

SEQ ID NO: 604032 - DNA, 25 bp, Homo sapien
caagagcccagggtgtagtatggga

SEQ ID NO: 604033 - DNA, 25 bp, Homo sapien
ggtgtagtatgggatggcagggacc

SEQ ID NO: 604034 - DNA, 25 bp, Homo sapien
tgtagtatgggatggcagggaccgg

SEQ ID NO: 604035 - DNA, 25 bp, Homo sapien
cccagggtgtagtatgggatggcag

SEQ ID NO: 604036 - DNA, 25 bp, Homo sapien
tgagtaatgggtgggtagcattgcc

SEQ ID NO: 604037 - DNA, 25 bp, Homo sapien
tgttcaatacccgagaggtgggcct

SEQ ID NO: 604038 - DNA, 25 bp, Homo sapien
ggctgtacatctggcgggcacccaa

SEQ ID NO: 604039 - DNA, 25 bp, Homo sapien
cacccaataggtgcgtgagtaatgg

SEQ ID NO: 604040 - DNA, 25 bp, Homo sapien
aggagagctaaacagggcaagttcg

SEQ ID NO: 604041 - DNA, 25 bp, Homo sapien
gctaaacagggcaagttcgtgtgag

SEQ ID NO: 604042 - DNA, 25 bp, Homo sapien
gagagctaaacagggcaagttcgtg

SEQ ID NO: 604043 - DNA, 25 bp, Homo sapien
gagctaaacagggcaagttcgtgtg

SEQ ID NO: 604044 - DNA, 25 bp, Homo sapien
ttctgacagttttacccagagtaca

SEQ ID NO: 604045 - DNA, 25 bp, Homo sapien
ctagattaggagctgttctaccttt

SEQ ID NO: 604046 - DNA, 25 bp, Homo sapien
agttttacccagagtacaaagccag

SEQ ID NO: 604047 - DNA, 25 bp, Homo sapien
agattaggagctgttctaccttttc

SEQ ID NO: 604048 - DNA, 25 bp, Homo sapien
tgattggaagccaggtgcccgtact

SEQ ID NO: 604049 - DNA, 25 bp, Homo sapien
aatagaggccaaatttcagaaaata

SEQ ID NO: 604050 - DNA, 25 bp, Homo sapien
tggactctgtggaagcgttgattgc

SEQ ID NO: 604051 - DNA, 25 bp, Homo sapien
tcctccagagtaaggaatagaggcc

SEQ ID NO: 604052 - DNA, 25 bp, Homo sapien
caaccccgaactgtttgacatgctg

SEQ ID NO: 604053 - DNA, 25 bp, Homo sapien
taggaatattcatctcgtggcagca

SEQ ID NO: 604054 - DNA, 25 bp, Homo sapien
ggttcatgggcaacttgaggcacat

SEQ ID NO: 604055 - DNA, 25 bp, Homo sapien
tagaaatgattttccgcagctccag

SEQ ID NO: 604056 - DNA, 25 bp, Homo sapien
tattaggtacttactgatagccgtc

SEQ ID NO: 604057 - DNA, 25 bp, Homo sapien
ccccatactgatcacgaaggaagga

SEQ ID NO: 604058 - DNA, 25 bp, Homo sapien
gctgaccagattccaggagcacgtt

SEQ ID NO: 604059 - DNA, 25 bp, Homo sapien
gccgtcagttgtagatagggctgaa

SEQ ID NO: 604060 - DNA, 25 bp, Homo sapien
ccaggttgggagcagaatgttctcg

SEQ ID NO: 604061 - DNA, 25 bp, Homo sapien
cagcaccgcctgcacaaagtgggtt

SEQ ID NO: 604062 - DNA, 25 bp, Homo sapien
cgatgacagatcgagcctggtcgca

SEQ ID NO: 604063 - DNA, 25 bp, Homo sapien
aaagtgggttttggtcatcagaggc

SEQ ID NO: 604064 - DNA, 25 bp, Homo sapien
tttccagttgcatgaatcttcacag

SEQ ID NO: 604065 - DNA, 25 bp, Homo sapien
tgtggatcctaaagggcctctttgt

SEQ ID NO: 604066 - DNA, 25 bp, Homo sapien
tgcttaaaacactttgacggctccc

SEQ ID NO: 604067 - DNA, 25 bp, Homo sapien
agtcttcctcatcacggtttccagt

SEQ ID NO: 604068 - DNA, 25 bp, Homo sapien
aaatagtaattcacccatgcggcag

SEQ ID NO: 604069 - DNA, 25 bp, Homo sapien
tcatacatattggagaaaggctgtc

SEQ ID NO: 604070 - DNA, 25 bp, Homo sapien
cctactcggtgcaaaaccctgctga

SEQ ID NO: 604071 - DNA, 25 bp, Homo sapien
catgcggcagatacgtgttgggtac

SEQ ID NO: 604072 - DNA, 25 bp, Homo sapien
cagccttaccaacattggctatttc

SEQ ID NO: 604073 - DNA, 25 bp, Homo sapien
ccttcggcagtgcaggatgaatact

SEQ ID NO: 604074 - DNA, 25 bp, Homo sapien
gttcaggctagttgaagctctggcc

SEQ ID NO: 604075 - DNA, 25 bp, Homo sapien
accagtgaggttgaatgtctttata

SEQ ID NO: 604076 - DNA, 25 bp, Homo sapien
gtcctcaactctgtggcccatctcc

SEQ ID NO: 604077 - DNA, 25 bp, Homo sapien
tcctcgcctaatgaactcccaagat

SEQ ID NO: 604078 - DNA, 25 bp, Homo sapien
ccaagatgaccagggcaaattctct

SEQ ID NO: 604079 - DNA, 25 bp, Homo sapien
gaaagcctgcattcccttgccacat

SEQ ID NO: 604080 - DNA, 25 bp, Homo sapien
ccttattagagtatggtcctccagg

SEQ ID NO: 604081 - DNA, 25 bp, Homo sapien
ctttcagttgaaagcctaataggct

SEQ ID NO: 604082 - DNA, 25 bp, Homo sapien
ttggttcatccttattagagtatgg

SEQ ID NO: 604083 - DNA, 25 bp, Homo sapien
taataggctatttgtctccttagac

SEQ ID NO: 604084 - DNA, 25 bp, Homo sapien
tacggcgcgctacttagcgcgtcac

SEQ ID NO: 604085 - DNA, 25 bp, Homo sapien
ggcgcagtggatctcgccggaaccc

SEQ ID NO: 604086 - DNA, 25 bp, Homo sapien
tccctcggaacctttctggcgcgat

SEQ ID NO: 604087 - DNA, 25 bp, Homo sapien
gtcacttccggcgaggcagaggagg

SEQ ID NO: 604088 - DNA, 25 bp, Homo sapien
agcgaggcaaggagagtagttcccc

SEQ ID NO: 604089 - DNA, 25 bp, Homo sapien
ggaaagagctttgaccgctcgagcc

SEQ ID NO: 604090 - DNA, 25 bp, Homo sapien
ccccggaaagagctttgaccgctcg

SEQ ID NO: 604091 - DNA, 25 bp, Homo sapien
gagctttgaccgctcgagcctgcac

SEQ ID NO: 604092 - DNA, 25 bp, Homo sapien
ccgcgagagcgaggtcaaagggcaa

SEQ ID NO: 604093 - DNA, 25 bp, Homo sapien
gtcaaagggcaagggccggagcaga

SEQ ID NO: 604094 - DNA, 25 bp, Homo sapien
gcggccgctctgaacctcgcgcaga

SEQ ID NO: 604095 - DNA, 25 bp, Homo sapien
caccgagaggcgtcggagctctaga

SEQ ID NO: 604096 - DNA, 25 bp, Homo sapien
gaggggatgggtctccgcagtaaca

SEQ ID NO: 604097 - DNA, 25 bp, Homo sapien
cacaagatggccacccgacctctca

SEQ ID NO: 604098 - DNA, 25 bp, Homo sapien
atgggtctccgcagtaacagccgcc

SEQ ID NO: 604099 - DNA, 25 bp, Homo sapien
gggatgggtctccgcagtaacagcc

SEQ ID NO: 604100 - DNA, 25 bp, Homo sapien
gtgcggcgggaagagcgacggcacg

SEQ ID NO: 604101 - DNA, 25 bp, Homo sapien
gcgggactttttaccgactgacaga

SEQ ID NO: 604102 - DNA, 25 bp, Homo sapien
ctgggccgcccagtgcggcgggaag

SEQ ID NO: 604103 - DNA, 25 bp, Homo sapien
gcctcacctgacaggctgcgggact

SEQ ID NO: 604104 - DNA, 25 bp, Homo sapien
ggtggcggcagtgaggcccggcagg

SEQ ID NO: 604105 - DNA, 25 bp, Homo sapien
gcagtgaggcccggcagggagcggc

SEQ ID NO: 604106 - DNA, 25 bp, Homo sapien
gcggcagtgaggcccggcagggagc

SEQ ID NO: 604107 - DNA, 25 bp, Homo sapien
tggcggcagtgaggcccggcaggga

SEQ ID NO: 604108 - DNA, 25 bp, Homo sapien
ctttgcggagctcgcggtgccacac

SEQ ID NO: 604109 - DNA, 25 bp, Homo sapien
gtgccacacggagacgatgggtccc

SEQ ID NO: 604110 - DNA, 25 bp, Homo sapien
ctccagcgccgactcagagaaggag

SEQ ID NO: 604111 - DNA, 25 bp, Homo sapien
agagttgctcagctccgagagcttc

SEQ ID NO: 604112 - DNA, 25 bp, Homo sapien
ttggatgacatcattcgctaaatac

SEQ ID NO: 604113 - DNA, 25 bp, Homo sapien
ctgttttggatgacatcattcgcta

SEQ ID NO: 604114 - DNA, 25 bp, Homo sapien
catcattcgctaaatacagaaaagt

SEQ ID NO: 604115 - DNA, 25 bp, Homo sapien
gatgacatcattcgctaaatacaga

SEQ ID NO: 604116 - DNA, 25 bp, Homo sapien
gatgttcagcaatctttctaaaggt

SEQ ID NO: 604117 - DNA, 25 bp, Homo sapien
tggagtcctccatagacagcttcag

SEQ ID NO: 604118 - DNA, 25 bp, Homo sapien
gctgctgtatgaactcgccgccata

SEQ ID NO: 604119 - DNA, 25 bp, Homo sapien
cacttcgttcttgccagatgttcag

SEQ ID NO: 604120 - DNA, 25 bp, Homo sapien
tatttgattcgaaagtaggcaaaga

SEQ ID NO: 604121 - DNA, 25 bp, Homo sapien
tttcatatttgattcgaaagtaggc

SEQ ID NO: 604122 - DNA, 25 bp, Homo sapien
tgtaaacatgtggtgatgtttctac

SEQ ID NO: 604123 - DNA, 25 bp, Homo sapien
aaagaccaagagctgtaaacatgtg

SEQ ID NO: 604124 - DNA, 25 bp, Homo sapien
tggaaataaacttctcgagaactca

SEQ ID NO: 604125 - DNA, 25 bp, Homo sapien
caacatttgaaaggactgtggtaaa

SEQ ID NO: 604126 - DNA, 25 bp, Homo sapien
gctgggactaacacacatgttgaaa

SEQ ID NO: 604127 - DNA, 25 bp, Homo sapien
ctttagattagcattatcctctacc

SEQ ID NO: 604128 - DNA, 25 bp, Homo sapien
tgacaggtcggagtttgaaaccgct

SEQ ID NO: 604129 - DNA, 25 bp, Homo sapien
gaaaccgcttgaagggaggagtcac

SEQ ID NO: 604130 - DNA, 25 bp, Homo sapien
tggcaagcgttcttctccgacagga

SEQ ID NO: 604131 - DNA, 25 bp, Homo sapien
aatatgtagctggttgcatccacag

SEQ ID NO: 604132 - DNA, 25 bp, Homo sapien
agctgccagggtagtcgtcatcctc

SEQ ID NO: 604133 - DNA, 25 bp, Homo sapien
agaaggatcctgaggagagtagctg

SEQ ID NO: 604134 - DNA, 25 bp, Homo sapien
agtagctgccagggtagtcgtcatc

SEQ ID NO: 604135 - DNA, 25 bp, Homo sapien
aaggatcctgaggagagtagctgcc

SEQ ID NO: 604136 - DNA, 25 bp, Homo sapien
cataggctttaagcatgaccatgtg

SEQ ID NO: 604137 - DNA, 25 bp, Homo sapien
gaaaacaatgctaacaggccactcc

SEQ ID NO: 604138 - DNA, 25 bp, Homo sapien
cataatcaccaaggagtagctagct

SEQ ID NO: 604139 - DNA, 25 bp, Homo sapien
gatatatgacctaacactgctgtca

SEQ ID NO: 604140 - DNA, 25 bp, Homo sapien
ccccagaggttgagtttgcagtgaa

SEQ ID NO: 604141 - DNA, 25 bp, Homo sapien
cagaggttgagtttgcagtgaacta

SEQ ID NO: 604142 - DNA, 25 bp, Homo sapien
ttgagccccagaggttgagtttgca

SEQ ID NO: 604143 - DNA, 25 bp, Homo sapien
acttgagccccagaggttgagtttg

SEQ ID NO: 604144 - DNA, 25 bp, Homo sapien
tagagaaacatcttgcacttcctgg

SEQ ID NO: 604145 - DNA, 25 bp, Homo sapien
cctgatgcggcattttccagatcct

SEQ ID NO: 604146 - DNA, 25 bp, Homo sapien
gcaaagctttgattagttcctcagt

SEQ ID NO: 604147 - DNA, 25 bp, Homo sapien
tgtcggacagtagcatcccctgatg

SEQ ID NO: 604148 - DNA, 25 bp, Homo sapien
tgacattccctatggatacaggctg

SEQ ID NO: 604149 - DNA, 25 bp, Homo sapien
ccaattaatgggttgtaactcatgc

SEQ ID NO: 604150 - DNA, 25 bp, Homo sapien
agagactccggcagtaccgtgggac

SEQ ID NO: 604151 - DNA, 25 bp, Homo sapien
aaaactgttggtcattagctaccag

SEQ ID NO: 604152 - DNA, 25 bp, Homo sapien
tcacacaggtatgactacaaacatt

SEQ ID NO: 604153 - DNA, 25 bp, Homo sapien
tacaaatcacacaggtatgactaca

SEQ ID NO: 604154 - DNA, 25 bp, Homo sapien
acaggtatgactacaaacatttctg

SEQ ID NO: 604155 - DNA, 25 bp, Homo sapien
caaatcacacaggtatgactacaaa

SEQ ID NO: 604156 - DNA, 25 bp, Homo sapien
aacagacatgcttcatctactgttt

SEQ ID NO: 604157 - DNA, 25 bp, Homo sapien
gaaagacgttcagctgcctctttgt

SEQ ID NO: 604158 - DNA, 25 bp, Homo sapien
ccttctccgacaaaacatctttctg

SEQ ID NO: 604159 - DNA, 25 bp, Homo sapien
ctttctgattctgggtatactccac

SEQ ID NO: 604160 - DNA, 25 bp, Homo sapien
gggtatactccaccaacatccgagc

SEQ ID NO: 604161 - DNA, 25 bp, Homo sapien
tggcgacggtcctccagttctgctg

SEQ ID NO: 604162 - DNA, 25 bp, Homo sapien
cttaaaccacaatcagaaccgccaa

SEQ ID NO: 604163 - DNA, 25 bp, Homo sapien
aaccacaatcagaaccgccaaatgc

SEQ ID NO: 604164 - DNA, 25 bp, Homo sapien
taaaccacaatcagaaccgccaaat

SEQ ID NO: 604165 - DNA, 25 bp, Homo sapien
ccacaatcagaaccgccaaatgcct

SEQ ID NO: 604166 - DNA, 25 bp, Homo sapien
tctaacctcctctttgggctgccat

SEQ ID NO: 604167 - DNA, 25 bp, Homo sapien
gctttattcacgctgacaagacagg

SEQ ID NO: 604168 - DNA, 25 bp, Homo sapien
tgtttaagggccaacatcataggcc

SEQ ID NO: 604169 - DNA, 25 bp, Homo sapien
taatgtagtcacctctgtcaaccac

SEQ ID NO: 604170 - DNA, 25 bp, Homo sapien
cctagagatctagaggtaggccatc

SEQ ID NO: 604171 - DNA, 25 bp, Homo sapien
tgaagtacatggaagaggtctgacc

SEQ ID NO: 604172 - DNA, 25 bp, Homo sapien
catactgtctgaggtgtctgtggaa

SEQ ID NO: 604173 - DNA, 25 bp, Homo sapien
tctgattttgatggatggcactgcc

SEQ ID NO: 604174 - DNA, 25 bp, Homo sapien
ggaataatgagaagctacttaaatg

SEQ ID NO: 604175 - DNA, 25 bp, Homo sapien
gctgcattctgaacacatcataggg

SEQ ID NO: 604176 - DNA, 25 bp, Homo sapien
ttatagggcctaagagcagatgtag

SEQ ID NO: 604177 - DNA, 25 bp, Homo sapien
ggccactgggcccatattcgaagaa

SEQ ID NO: 604178 - DNA, 25 bp, Homo sapien
gacaaaattatctgtacgccaaata

SEQ ID NO: 604179 - DNA, 25 bp, Homo sapien
tacaatgccaattacctggatgaca

SEQ ID NO: 604180 - DNA, 25 bp, Homo sapien
aatacctgtgacacacaatgtaccc

SEQ ID NO: 604181 - DNA, 25 bp, Homo sapien
tatcctacacttccatgtgcctagg

SEQ ID NO: 604182 - DNA, 25 bp, Homo sapien
aatggctattaaagagtcaagaaat

SEQ ID NO: 604183 - DNA, 25 bp, Homo sapien
cttataaagggctagtgagaatgta

SEQ ID NO: 604184 - DNA, 25 bp, Homo sapien
aacacttataaagggctagtgagaa

SEQ ID NO: 604185 - DNA, 25 bp, Homo sapien
aaggaacacttataaagggctagtg

SEQ ID NO: 604186 - DNA, 25 bp, Homo sapien
cctaatatctacaatctatgaggaa

SEQ ID NO: 604187 - DNA, 25 bp, Homo sapien
aaggcctaatatctacaatctatga

SEQ ID NO: 604188 - DNA, 25 bp, Homo sapien
ggcctaatatctacaatctatgagg

SEQ ID NO: 604189 - DNA, 25 bp, Homo sapien
taatatctacaatctatgaggaact

SEQ ID NO: 604190 - DNA, 25 bp, Homo sapien
ggggtgtcacagcacggcgggagct

SEQ ID NO: 604191 - DNA, 25 bp, Homo sapien
tccacgctcccatatgacctagtgg

SEQ ID NO: 604192 - DNA, 25 bp, Homo sapien
cagctgtgacgtttcgaaatgacac

SEQ ID NO: 604193 - DNA, 25 bp, Homo sapien
tcccatatgacctagtggcagctgt

SEQ ID NO: 604194 - DNA, 25 bp, Homo sapien
tgacctagtggcagctgtgacgttt

SEQ ID NO: 604195 - DNA, 25 bp, Homo sapien
tggattgaaaataagagtgccattt

SEQ ID NO: 604196 - DNA, 25 bp, Homo sapien
tatttggattgaaaataagagtgcc

SEQ ID NO: 604197 - DNA, 25 bp, Homo sapien
tccctcattatgtttctggaaaata

SEQ ID NO: 604198 - DNA, 25 bp, Homo sapien
tcattccctcattatgtttctggaa

SEQ ID NO: 604199 - DNA, 25 bp, Homo sapien
ccaagtaccactcaggtagaaaaat

SEQ ID NO: 604200 - DNA, 25 bp, Homo sapien
acaccaagtaccactcaggtagaaa

SEQ ID NO: 604201 - DNA, 25 bp, Homo sapien
gtacaccaagtaccactcaggtaga

SEQ ID NO: 604202 - DNA, 25 bp, Homo sapien
agtacaccaagtaccactcaggtag

SEQ ID NO: 604203 - DNA, 25 bp, Homo sapien
taaaaaccaactccaacgtgatgag

SEQ ID NO: 604204 - DNA, 25 bp, Homo sapien
actcagattcttccaccttgtctaa

SEQ ID NO: 604205 - DNA, 25 bp, Homo sapien
cttccaccttgtctaagtgtgctgc

SEQ ID NO: 604206 - DNA, 25 bp, Homo sapien
tccaacgtgatgagacccactcaga

SEQ ID NO: 604207 - DNA, 25 bp, Homo sapien
agttcacgagctctgctgccacggg

SEQ ID NO: 604208 - DNA, 25 bp, Homo sapien
gcctgtcttctcacacaagtgtagt

SEQ ID NO: 604209 - DNA, 25 bp, Homo sapien
cacaagtgtagttcacgagctctgc

SEQ ID NO: 604210 - DNA, 25 bp, Homo sapien
ttctcacacaagtgtagttcacgag

SEQ ID NO: 604211 - DNA, 25 bp, Homo sapien
tggttcttaagctctctcagttggg

SEQ ID NO: 604212 - DNA, 25 bp, Homo sapien
gaccctcactagctgactttccagg

SEQ ID NO: 604213 - DNA, 25 bp, Homo sapien
agctctctcagttgggtcttgcaga

SEQ ID NO: 604214 - DNA, 25 bp, Homo sapien
tgggtcttgcagaccctcactagct

SEQ ID NO: 604215 - DNA, 25 bp, Homo sapien
actgggacagtcaaatgacccagat

SEQ ID NO: 604216 - DNA, 25 bp, Homo sapien
gggacagtcaaatgacccagattaa

SEQ ID NO: 604217 - DNA, 25 bp, Homo sapien
tgggacagtcaaatgacccagatta

SEQ ID NO: 604218 - DNA, 25 bp, Homo sapien
gacagtcaaatgacccagattaatt

SEQ ID NO: 604219 - DNA, 25 bp, Homo sapien
tccgcagtgtccagcaaacagtagg

SEQ ID NO: 604220 - DNA, 25 bp, Homo sapien
gcagggacgcctattgtaagagcag

SEQ ID NO: 604221 - DNA, 25 bp, Homo sapien
gttatcatcagaccaacgtggcaag

SEQ ID NO: 604222 - DNA, 25 bp, Homo sapien
cactctggaagtggacggatcctgc

SEQ ID NO: 604223 - DNA, 25 bp, Homo sapien
tctccccattactgcaggcaatcag

SEQ ID NO: 604224 - DNA, 25 bp, Homo sapien
atcagtctcccacccgcaatgagag

SEQ ID NO: 604225 - DNA, 25 bp, Homo sapien
aggcaatcagtctcccacccgcaat

SEQ ID NO: 604226 - DNA, 25 bp, Homo sapien
gaaccaggcatatcctctccccatt

SEQ ID NO: 604227 - DNA, 25 bp, Homo sapien
gctaagccccctgtgacgttgggca

SEQ ID NO: 604228 - DNA, 25 bp, Homo sapien
tgcggacctgggttactcgtgcaag

SEQ ID NO: 604229 - DNA, 25 bp, Homo sapien
ggatttcagttccttgcggacctgg

SEQ ID NO: 604230 - DNA, 25 bp, Homo sapien
cctgggttactcgtgcaagcttctg

SEQ ID NO: 604231 - DNA, 25 bp, Homo sapien
gacaagtgccttagtggaagcccac

SEQ ID NO: 604232 - DNA, 25 bp, Homo sapien
ttaacagtgacagaacgacaggcag

SEQ ID NO: 604233 - DNA, 25 bp, Homo sapien
tagtgtgtaccctactcccagaaga

SEQ ID NO: 604234 - DNA, 25 bp, Homo sapien
gatgtcacctatggcctctggaaga

SEQ ID NO: 604235 - DNA, 25 bp, Homo sapien
caatgagggtaaaactatggcggca

SEQ ID NO: 604236 - DNA, 25 bp, Homo sapien
tatggcggcacctctcatgggtact

SEQ ID NO: 604237 - DNA, 25 bp, Homo sapien
aaaatcaaatcgctctcaggaggcc

SEQ ID NO: 604238 - DNA, 25 bp, Homo sapien
catgggtactgtgtggactgcctaa

SEQ ID NO: 604239 - DNA, 25 bp, Homo sapien
tcccactagggagatgccaaacaca

SEQ ID NO: 604240 - DNA, 25 bp, Homo sapien
ggcgctgctgggcaaaagtttaaca

SEQ ID NO: 604241 - DNA, 25 bp, Homo sapien
tcatcaaacacttagccagcactgg

SEQ ID NO: 604242 - DNA, 25 bp, Homo sapien
gagataaagtgtaggtggcacccac

SEQ ID NO: 604243 - DNA, 25 bp, Homo sapien
actgaggcaccacatccatcatgct

SEQ ID NO: 604244 - DNA, 25 bp, Homo sapien
cttcctcgaagcagctcccccaaac

SEQ ID NO: 604245 - DNA, 25 bp, Homo sapien
aaaccactgaggcaccacatccatc

SEQ ID NO: 604246 - DNA, 25 bp, Homo sapien
ccccaaaccactgaggcaccacatc

SEQ ID NO: 604247 - DNA, 25 bp, Homo sapien
tccttggacgctacaacctggtgct

SEQ ID NO: 604248 - DNA, 25 bp, Homo sapien
ccacccttgggaagtcatgtagaaa

SEQ ID NO: 604249 - DNA, 25 bp, Homo sapien
catgacatcacgtgttctgggtgcc

SEQ ID NO: 604250 - DNA, 25 bp, Homo sapien
tagactgcgattccgtggatgtgca

SEQ ID NO: 604251 - DNA, 25 bp, Homo sapien
gaagccttaagccataggcccagga

SEQ ID NO: 604252 - DNA, 25 bp, Homo sapien
ggaacccatgagttgtcagctttga

SEQ ID NO: 604253 - DNA, 25 bp, Homo sapien
tctgaaccgcaaggagcaaacactg

SEQ ID NO: 604254 - DNA, 25 bp, Homo sapien
gctggtcactaaccaacaaggttgg

SEQ ID NO: 604255 - DNA, 25 bp, Homo sapien
gcccgttttccactaagagatgctg

SEQ ID NO: 604256 - DNA, 25 bp, Homo sapien
tttccactaagagatgctgtggagg

SEQ ID NO: 604257 - DNA, 25 bp, Homo sapien
caaggcccgttttccactaagagat

SEQ ID NO: 604258 - DNA, 25 bp, Homo sapien
ccctagccaggaggccgggaccaag

SEQ ID NO: 604259 - DNA, 25 bp, Homo sapien
ttctggctgaccctgcactttgagg

SEQ ID NO: 604260 - DNA, 25 bp, Homo sapien
tttgagggccgcaactacgaggcca

SEQ ID NO: 604261 - DNA, 25 bp, Homo sapien
agctggagaccaatggccgagacca

SEQ ID NO: 604262 - DNA, 25 bp, Homo sapien
acacggccgacctgtgccgggagaa

SEQ ID NO: 604263 - DNA, 25 bp, Homo sapien
ggctataagttagcgccgctctccg

SEQ ID NO: 604264 - DNA, 25 bp, Homo sapien
ccagtggtcgcacttggagggtctc

SEQ ID NO: 604265 - DNA, 25 bp, Homo sapien
ccccaaagcgggctataagttagcg

SEQ ID NO: 604266 - DNA, 25 bp, Homo sapien
gtctcgccgccagtggaaggagcca

SEQ ID NO: 604267 - DNA, 25 bp, Homo sapien
tgtgcccagccagggacccacattt

SEQ ID NO: 604268 - DNA, 25 bp, Homo sapien
agtggcgcgatctgcctcccggctt

SEQ ID NO: 604269 - DNA, 25 bp, Homo sapien
gcccagccagggacccacattttaa

SEQ ID NO: 604270 - DNA, 25 bp, Homo sapien
gccagggacccacattttaattaca

SEQ ID NO: 604271 - DNA, 25 bp, Homo sapien
ggctttcaaggaaccccaagtcagc

SEQ ID NO: 604272 - DNA, 25 bp, Homo sapien
tttgcccaaatatgcccacagtagg

SEQ ID NO: 604273 - DNA, 25 bp, Homo sapien
ccctgttgctgatggcctggtcacc

SEQ ID NO: 604274 - DNA, 25 bp, Homo sapien
cagagattccctgcgagtgatgaca

SEQ ID NO: 604275 - DNA, 25 bp, Homo sapien
aggagaatcgcttgaacccaggagg

SEQ ID NO: 604276 - DNA, 25 bp, Homo sapien
agctgggcgtgttggcaggtgcccg

SEQ ID NO: 604277 - DNA, 25 bp, Homo sapien
tgggcgtgttggcaggtgcccgtaa

SEQ ID NO: 604278 - DNA, 25 bp, Homo sapien
tcccagctacctgggaggctgaggc

SEQ ID NO: 604279 - DNA, 25 bp, Homo sapien
aggagcccatctctggccgcgtcct

SEQ ID NO: 604280 - DNA, 25 bp, Homo sapien
tatggatggagtaagattgtacttg

SEQ ID NO: 604281 - DNA, 25 bp, Homo sapien
atgtgtgtgtatggatggagtaaga

SEQ ID NO: 604282 - DNA, 25 bp, Homo sapien
tggagtaagattgtacttgtaaact

SEQ ID NO: 604283 - DNA, 25 bp, Homo sapien
acagaccccgcgcccaggagaggag

SEQ ID NO: 604284 - DNA, 25 bp, Homo sapien
cgcggacccacagaccccgcgccca

SEQ ID NO: 604285 - DNA, 25 bp, Homo sapien
gcccgccgctggcagcccgtcacca

SEQ ID NO: 604286 - DNA, 25 bp, Homo sapien
cccgccgctggcagcccgtcaccat

SEQ ID NO: 604287 - DNA, 25 bp, Homo sapien
tatgtcccctgacttggagtatcca

SEQ ID NO: 604288 - DNA, 25 bp, Homo sapien
gagatgaaggacttctccagaggct

SEQ ID NO: 604289 - DNA, 25 bp, Homo sapien
tcctacaataacaagaaagggctgg

SEQ ID NO: 604290 - DNA, 25 bp, Homo sapien
gaaacccaagtcctgaatgagtcat

SEQ ID NO: 604291 - DNA, 25 bp, Homo sapien
gctgcctccccagatgatgaggggc

SEQ ID NO: 604292 - DNA, 25 bp, Homo sapien
gccagcaaggttcttggctgcctcc

SEQ ID NO: 604293 - DNA, 25 bp, Homo sapien
ccagccagcaaggttcttggctgcc

SEQ ID NO: 604294 - DNA, 25 bp, Homo sapien
ctccccagatgatgaggggcgaggc

SEQ ID NO: 604295 - DNA, 25 bp, Homo sapien
caacaaagatgtattaggcacctgc

SEQ ID NO: 604296 - DNA, 25 bp, Homo sapien
tccccaggatgagtggtctagcctc

SEQ ID NO: 604297 - DNA, 25 bp, Homo sapien
gctggatagcatgcgcctaaaggca

SEQ ID NO: 604298 - DNA, 25 bp, Homo sapien
gatcaggtgtttggaagcagcctca

SEQ ID NO: 604299 - DNA, 25 bp, Homo sapien
gaggaggatgacttggcttctgaaa

SEQ ID NO: 604300 - DNA, 25 bp, Homo sapien
ctgaaaaatgctgaagtcttgacct

SEQ ID NO: 604301 - DNA, 25 bp, Homo sapien
gtgaggaggatgacttggcttctga

SEQ ID NO: 604302 - DNA, 25 bp, Homo sapien
aggaggatgacttggcttctgaaaa

SEQ ID NO: 604303 - DNA, 25 bp, Homo sapien
aatatactggatcttagggctgacc

SEQ ID NO: 604304 - DNA, 25 bp, Homo sapien
tatgctggaaatcactccctgtagg

SEQ ID NO: 604305 - DNA, 25 bp, Homo sapien
tatgtttcccgaggacatgtgttgg

SEQ ID NO: 604306 - DNA, 25 bp, Homo sapien
aaaattctcatatgtgccaggccca

SEQ ID NO: 604307 - DNA, 25 bp, Homo sapien
aataggtgtggtaactctgttgatg

SEQ ID NO: 604308 - DNA, 25 bp, Homo sapien
cccagagctctgaagtggggccata

SEQ ID NO: 604309 - DNA, 25 bp, Homo sapien
ccccagagctctgaagtggggccat

SEQ ID NO: 604310 - DNA, 25 bp, Homo sapien
caacagctagatccatgaagaccca

SEQ ID NO: 604311 - DNA, 25 bp, Homo sapien
cgcagacccgagactctgctttata

SEQ ID NO: 604312 - DNA, 25 bp, Homo sapien
aaagcagcacgtgtaggctcctgga

SEQ ID NO: 604313 - DNA, 25 bp, Homo sapien
taagaaaccaggtgaaagcagcacg

SEQ ID NO: 604314 - DNA, 25 bp, Homo sapien
ctggatatcagccacagacacggag

SEQ ID NO: 604315 - DNA, 25 bp, Homo sapien
ggaagaagccttgcatctggatatc

SEQ ID NO: 604316 - DNA, 25 bp, Homo sapien
ccattcccagggatgcccggaagaa

SEQ ID NO: 604317 - DNA, 25 bp, Homo sapien
catcttcagtaaaggtgtagaggct

SEQ ID NO: 604318 - DNA, 25 bp, Homo sapien
atcttaaagtcaggcttggcgtggt

SEQ ID NO: 604319 - DNA, 25 bp, Homo sapien
ccactggattggcaaaaatcttaaa

SEQ ID NO: 604320 - DNA, 25 bp, Homo sapien
aaaatcttaaagtcaggcttggcgt

SEQ ID NO: 604321 - DNA, 25 bp, Homo sapien
ctggattggcaaaaatcttaaagtc

SEQ ID NO: 604322 - DNA, 25 bp, Homo sapien
tattggaaagaattcggagcccgca

SEQ ID NO: 604323 - DNA, 25 bp, Homo sapien
aattgggagtcgatctagtgggcac

SEQ ID NO: 604324 - DNA, 25 bp, Homo sapien
gataacgtttggctagagggacctc

SEQ ID NO: 604325 - DNA, 25 bp, Homo sapien
catgtaaatggtaccaggcgtggct

SEQ ID NO: 604326 - DNA, 25 bp, Homo sapien
cagagctgccaaaacctcaaggcct

SEQ ID NO: 604327 - DNA, 25 bp, Homo sapien
cagggagctataaaagagtcggctg

SEQ ID NO: 604328 - DNA, 25 bp, Homo sapien
ccagggagctataaaagagtcggct

SEQ ID NO: 604329 - DNA, 25 bp, Homo sapien
gctgccaaaacctcaaggccttgag

SEQ ID NO: 604330 - DNA, 25 bp, Homo sapien
cctatggcgaccagcaccatcaggg

SEQ ID NO: 604331 - DNA, 25 bp, Homo sapien
agggacgcccatctcggcgcgttgc

SEQ ID NO: 604332 - DNA, 25 bp, Homo sapien
atctcggcgcgttgcaagggcccct

SEQ ID NO: 604333 - DNA, 25 bp, Homo sapien
ctgtcacggcggtgcctatggcgac

SEQ ID NO: 604334 - DNA, 25 bp, Homo sapien
agatcctgaccacgacgccagggtt

SEQ ID NO: 604335 - DNA, 25 bp, Homo sapien
accacgacgccagggttgacggccg

SEQ ID NO: 604336 - DNA, 25 bp, Homo sapien
gcccttctgggagatcctgaccacg

SEQ ID NO: 604337 - DNA, 25 bp, Homo sapien
ttctgggagatcctgaccacgacgc

SEQ ID NO: 604338 - DNA, 25 bp, Homo sapien
tcttaaagctgtctgagtagtcagg

SEQ ID NO: 604339 - DNA, 25 bp, Homo sapien
agtagtcaggaatcttgatcctctt

SEQ ID NO: 604340 - DNA, 25 bp, Homo sapien
tcaggaatcttgatcctcttcagct

SEQ ID NO: 604341 - DNA, 25 bp, Homo sapien
tgccccttcccaagatgcttgatct

SEQ ID NO: 604342 - DNA, 25 bp, Homo sapien
cattgggcaccatgcttatctggga

SEQ ID NO: 604343 - DNA, 25 bp, Homo sapien
gatattggcgttgctgatggagaac

SEQ ID NO: 604344 - DNA, 25 bp, Homo sapien
tgatcttgatattggcgttgctgat

SEQ ID NO: 604345 - DNA, 25 bp, Homo sapien
tgccttccatttcccgctgatcttg

SEQ ID NO: 604346 - DNA, 25 bp, Homo sapien
gggttactgcccagcttcagatcag

SEQ ID NO: 604347 - DNA, 25 bp, Homo sapien
cagccgaaatggacatgccttctat

SEQ ID NO: 604348 - DNA, 25 bp, Homo sapien
ctttgagatgtgcacgtggacactg

SEQ ID NO: 604349 - DNA, 25 bp, Homo sapien
tctatgctcaggtcaaaattgccgc

SEQ ID NO: 604350 - DNA, 25 bp, Homo sapien
gtttcgaagcgcagactcaattttt

SEQ ID NO: 604351 - DNA, 25 bp, Homo sapien
catcttgtttcgaagcgcagactca

SEQ ID NO: 604352 - DNA, 25 bp, Homo sapien
tgttcatcttgtttcgaagcgcaga

SEQ ID NO: 604353 - DNA, 25 bp, Homo sapien
tggctgttcatcttgtttcgaagcg

SEQ ID NO: 604354 - DNA, 25 bp, Homo sapien
tttcaaagggccataaggactacca

SEQ ID NO: 604355 - DNA, 25 bp, Homo sapien
tgggaagtgattgtctcttggtctc

SEQ ID NO: 604356 - DNA, 25 bp, Homo sapien
ggtggactcttcagcaaaacataca

SEQ ID NO: 604357 - DNA, 25 bp, Homo sapien
agtgacagcagagtgtccgtagaag

SEQ ID NO: 604358 - DNA, 25 bp, Homo sapien
aacagagagagacttcatcaccaaa

SEQ ID NO: 604359 - DNA, 25 bp, Homo sapien
gaaggagggaagacagcagtgagaa

SEQ ID NO: 604360 - DNA, 25 bp, Homo sapien
aaggagggaagacagcagtgagaag

SEQ ID NO: 604361 - DNA, 25 bp, Homo sapien
agagagagacttcatcaccaaaaaa

SEQ ID NO: 604362 - DNA, 25 bp, Homo sapien
gagtctgtgaacttgccactagaat

SEQ ID NO: 604363 - DNA, 25 bp, Homo sapien
tggagtctgtgaacttgccactaga

SEQ ID NO: 604364 - DNA, 25 bp, Homo sapien
gtctgtgaacttgccactagaatct

SEQ ID NO: 604365 - DNA, 25 bp, Homo sapien
ggagtctgtgaacttgccactagaa

SEQ ID NO: 604366 - DNA, 25 bp, Homo sapien
cacacactgactttgacactgagga

SEQ ID NO: 604367 - DNA, 25 bp, Homo sapien
aatacgaggtagtcaatggccagcc

SEQ ID NO: 604368 - DNA, 25 bp, Homo sapien
taggtgggcaccctcatgtttggta

SEQ ID NO: 604369 - DNA, 25 bp, Homo sapien
gaaaatctgacttgggccacacact

SEQ ID NO: 604370 - DNA, 25 bp, Homo sapien
tcggaggatacagaattggtcactt

SEQ ID NO: 604371 - DNA, 25 bp, Homo sapien
ttgcagctcggaggatacagaattg

SEQ ID NO: 604372 - DNA, 25 bp, Homo sapien
gctcggaggatacagaattggtcac

SEQ ID NO: 604373 - DNA, 25 bp, Homo sapien
cagctcggaggatacagaattggtc

SEQ ID NO: 604374 - DNA, 25 bp, Homo sapien
tatccttgatcttcatccagccctc

SEQ ID NO: 604375 - DNA, 25 bp, Homo sapien
gggcacagagagacctaggcttgaa

SEQ ID NO: 604376 - DNA, 25 bp, Homo sapien
ccaacagccctgagatgagtcgcta

SEQ ID NO: 604377 - DNA, 25 bp, Homo sapien
taggcttgaaccaaactctggatga

SEQ ID NO: 604378 - DNA, 25 bp, Homo sapien
tcctagtgacctcacagatgctggg

SEQ ID NO: 604379 - DNA, 25 bp, Homo sapien
tgagctggctcccacggcagcatcg

SEQ ID NO: 604380 - DNA, 25 bp, Homo sapien
gagaaagaaaatggaccatgagctg

SEQ ID NO: 604381 - DNA, 25 bp, Homo sapien
ccatgagctggctcccacggcagca

SEQ ID NO: 604382 - DNA, 25 bp, Homo sapien
agaaagaaaatggaccatgagctgg

SEQ ID NO: 604383 - DNA, 25 bp, Homo sapien
tccagggtctcagccgtggttgctg

SEQ ID NO: 604384 - DNA, 25 bp, Homo sapien
catctgtacatccagggtctcagcc

SEQ ID NO: 604385 - DNA, 25 bp, Homo sapien
gttgctggaggtgccaccagaccat

SEQ ID NO: 604386 - DNA, 25 bp, Homo sapien
accagaccatagttgattccagcca

SEQ ID NO: 604387 - DNA, 25 bp, Homo sapien
ggagggatctacacttatttattga

SEQ ID NO: 604388 - DNA, 25 bp, Homo sapien
ttattgatgatgcttatctctaggt

SEQ ID NO: 604389 - DNA, 25 bp, Homo sapien
taggttgtagactcgggtaattctc

SEQ ID NO: 604390 - DNA, 25 bp, Homo sapien
ttggagggatctacacttatttatt

SEQ ID NO: 604391 - DNA, 25 bp, Homo sapien
gtggattgtggtggttctcactgta

SEQ ID NO: 604392 - DNA, 25 bp, Homo sapien
attgtggtggttctcactgtaaaac

SEQ ID NO: 604393 - DNA, 25 bp, Homo sapien
gattgtggtggttctcactgtaaaa

SEQ ID NO: 604394 - DNA, 25 bp, Homo sapien
aagggaggtggattgtggtggttct

SEQ ID NO: 604395 - DNA, 25 bp, Homo sapien
tcttggtatacaagcccggctgtgt

SEQ ID NO: 604396 - DNA, 25 bp, Homo sapien
tgagaggcccaggtataccatgcgg

SEQ ID NO: 604397 - DNA, 25 bp, Homo sapien
tgtcatctctaagggtcatcttcaa

SEQ ID NO: 604398 - DNA, 25 bp, Homo sapien
cggtcatgggcagcgggaaactcca

SEQ ID NO: 604399 - DNA, 25 bp, Homo sapien
agatgagaaaaggatctcggaggat

SEQ ID NO: 604400 - DNA, 25 bp, Homo sapien
tgtagcaagagatgagaaaaggatc

SEQ ID NO: 604401 - DNA, 25 bp, Homo sapien
caagagatgagaaaaggatctcgga

SEQ ID NO: 604402 - DNA, 25 bp, Homo sapien
ctgtagcaagagatgagaaaaggat

SEQ ID NO: 604403 - DNA, 25 bp, Homo sapien
cttggttgtcagtcgaaatttggac

SEQ ID NO: 604404 - DNA, 25 bp, Homo sapien
aggttccaaagaacttggttgtcag

SEQ ID NO: 604405 - DNA, 25 bp, Homo sapien
caaagaacttggttgtcagtcgaaa

SEQ ID NO: 604406 - DNA, 25 bp, Homo sapien
gtcagtcgaaatttggactcctttg

SEQ ID NO: 604407 - DNA, 25 bp, Homo sapien
tgagacatggatctgtatcttcatg

SEQ ID NO: 604408 - DNA, 25 bp, Homo sapien
ggctgagacatggatctgtatcttc

SEQ ID NO: 604409 - DNA, 25 bp, Homo sapien
gctgagacatggatctgtatcttca

SEQ ID NO: 604410 - DNA, 25 bp, Homo sapien
gaggctgagacatggatctgtatct

SEQ ID NO: 604411 - DNA, 25 bp, Homo sapien
catgccaatcaggaagagggaagcc

SEQ ID NO: 604412 - DNA, 25 bp, Homo sapien
cggcaaaggcctggacatccacggc

SEQ ID NO: 604413 - DNA, 25 bp, Homo sapien
gcctggacatccacggcagggtaga

SEQ ID NO: 604414 - DNA, 25 bp, Homo sapien
aaaggcctggacatccacggcaggg

SEQ ID NO: 604415 - DNA, 25 bp, Homo sapien
aggctccggagtgacacagtccagg

SEQ ID NO: 604416 - DNA, 25 bp, Homo sapien
caggagtcggcaccattgagtacag

SEQ ID NO: 604417 - DNA, 25 bp, Homo sapien
cagtccaggtttgaatccagacagg

SEQ ID NO: 604418 - DNA, 25 bp, Homo sapien
caaacgcactagtgaatggctgggt

SEQ ID NO: 604419 - DNA, 25 bp, Homo sapien
tccaacaagcctgttggactcggcg

SEQ ID NO: 604420 - DNA, 25 bp, Homo sapien
agcctgttggactcggcgctgacct

SEQ ID NO: 604421 - DNA, 25 bp, Homo sapien
cttgagctctccaacaagcctgttg

SEQ ID NO: 604422 - DNA, 25 bp, Homo sapien
tgagctctccaacaagcctgttgga

SEQ ID NO: 604423 - DNA, 25 bp, Homo sapien
tatttgagtgcttcagttccaggag

SEQ ID NO: 604424 - DNA, 25 bp, Homo sapien
atttgagtgcttcagttccaggagc

SEQ ID NO: 604425 - DNA, 25 bp, Homo sapien
cgggaaggggccaatatttgagtgc

SEQ ID NO: 604426 - DNA, 25 bp, Homo sapien
caatatttgagtgcttcagttccag

SEQ ID NO: 604427 - DNA, 25 bp, Homo sapien
tggtgttgaacagcatgggcgacta

SEQ ID NO: 604428 - DNA, 25 bp, Homo sapien
tgggcgactacttactactaacagg

SEQ ID NO: 604429 - DNA, 25 bp, Homo sapien
tgtagcaagacgctggacaggatca

SEQ ID NO: 604430 - DNA, 25 bp, Homo sapien
gcttctgacgttagacacagggcag

SEQ ID NO: 604431 - DNA, 25 bp, Homo sapien
gcaaatctgtaggttctgattgccc

SEQ ID NO: 604432 - DNA, 25 bp, Homo sapien
ttaaataggcatagcaaaaggtcag

SEQ ID NO: 604433 - DNA, 25 bp, Homo sapien
tagtgtaaaaccctcaagatgcttg

SEQ ID NO: 604434 - DNA, 25 bp, Homo sapien
gaaagccttggaaccagtaagtcca

SEQ ID NO: 604435 - DNA, 25 bp, Homo sapien
caagaatgggtacaatgtagttcat

SEQ ID NO: 604436 - DNA, 25 bp, Homo sapien
cagcacaagaatgggtacaatgtag

SEQ ID NO: 604437 - DNA, 25 bp, Homo sapien
gcagcacaagaatgggtacaatgta

SEQ ID NO: 604438 - DNA, 25 bp, Homo sapien
agcacaagaatgggtacaatgtagt

SEQ ID NO: 604439 - DNA, 25 bp, Homo sapien
ctgtgacagagaccgatggtgagga

SEQ ID NO: 604440 - DNA, 25 bp, Homo sapien
accgatggtgaggaccaggagaaaa

SEQ ID NO: 604441 - DNA, 25 bp, Homo sapien
gcatgcctggccctaggtagggact

SEQ ID NO: 604442 - DNA, 25 bp, Homo sapien
catgcctggccctaggtagggactg

SEQ ID NO: 604443 - DNA, 25 bp, Homo sapien
gtagagctggactctggccggcgtc

SEQ ID NO: 604444 - DNA, 25 bp, Homo sapien
agcactacgttgtagagctggactc

SEQ ID NO: 604445 - DNA, 25 bp, Homo sapien
actctggccggcgtcgggagaggga

SEQ ID NO: 604446 - DNA, 25 bp, Homo sapien
ctgaagcactacgttgtagagctgg

SEQ ID NO: 604447 - DNA, 25 bp, Homo sapien
agacaacgtctgcaccgaacagcag

SEQ ID NO: 604448 - DNA, 25 bp, Homo sapien
tcatttatagacaacgtctgcaccg

SEQ ID NO: 604449 - DNA, 25 bp, Homo sapien
acaacgtctgcaccgaacagcagga

SEQ ID NO: 604450 - DNA, 25 bp, Homo sapien
tatagacaacgtctgcaccgaacag

SEQ ID NO: 604451 - DNA, 25 bp, Homo sapien
ggaggaaatatctctgcagccttag

SEQ ID NO: 604452 - DNA, 25 bp, Homo sapien
ggttacaattgaaacacgattcctg

SEQ ID NO: 604453 - DNA, 25 bp, Homo sapien
gaatctgagtcgaagaagtttgcaa

SEQ ID NO: 604454 - DNA, 25 bp, Homo sapien
taatccctaaaatacacaccatgca

SEQ ID NO: 604455 - DNA, 25 bp, Homo sapien
aaaaagatgcatactactggtggac

SEQ ID NO: 604456 - DNA, 25 bp, Homo sapien
tagcccctggctagtggagaaaaag

SEQ ID NO: 604457 - DNA, 25 bp, Homo sapien
gtgtgtgtccatatctaccagctag

SEQ ID NO: 604458 - DNA, 25 bp, Homo sapien
tctgttctattcagggcctccatag

SEQ ID NO: 604459 - DNA, 25 bp, Homo sapien
tcccagctgtggattgggcccaggt

SEQ ID NO: 604460 - DNA, 25 bp, Homo sapien
ccaggtcccttaagtagccaaggct

SEQ ID NO: 604461 - DNA, 25 bp, Homo sapien
ttaagtagccaaggctcgatggctg

SEQ ID NO: 604462 - DNA, 25 bp, Homo sapien
cagctgtggattgggcccaggtccc

SEQ ID NO: 604463 - DNA, 25 bp, Homo sapien
caatgccagcagtatggacggcagg

SEQ ID NO: 604464 - DNA, 25 bp, Homo sapien
gcagcaatgccagcagtatggacgg

SEQ ID NO: 604465 - DNA, 25 bp, Homo sapien
agcaatgccagcagtatggacggca

SEQ ID NO: 604466 - DNA, 25 bp, Homo sapien
ctctggggtggacgtaagcagcaat

SEQ ID NO: 604467 - DNA, 25 bp, Homo sapien
atactgcagtcccttgtcggtgatc

SEQ ID NO: 604468 - DNA, 25 bp, Homo sapien
cacggccgacgtgggggatcctcaa

SEQ ID NO: 604469 - DNA, 25 bp, Homo sapien
gccgacgtgggggatcctcaagtcc

SEQ ID NO: 604470 - DNA, 25 bp, Homo sapien
tcaagtccccggtgaagtcaggcag

SEQ ID NO: 604471 - DNA, 25 bp, Homo sapien
gtcaggcagcgtgatcctgagcagc

SEQ ID NO: 604472 - DNA, 25 bp, Homo sapien
agagacatggaaggaggtgtcagcc

SEQ ID NO: 604473 - DNA, 25 bp, Homo sapien
cctcagcgcagagtgaagcagctca

SEQ ID NO: 604474 - DNA, 25 bp, Homo sapien
ggagtcggagatgctgagactcagg

SEQ ID NO: 604475 - DNA, 25 bp, Homo sapien
acctgccctggacccggatggagga

SEQ ID NO: 604476 - DNA, 25 bp, Homo sapien
gaatgacttgcgcaccttccacctg

SEQ ID NO: 604477 - DNA, 25 bp, Homo sapien
tctgtccatcacgtggcctttctga

SEQ ID NO: 604478 - DNA, 25 bp, Homo sapien
caggcccgtcccctttgggagatga

SEQ ID NO: 604479 - DNA, 25 bp, Homo sapien
gcctttctgataagctaggaacacc

SEQ ID NO: 604480 - DNA, 25 bp, Homo sapien
acctccgggcttggactccatctgt

SEQ ID NO: 604481 - DNA, 25 bp, Homo sapien
gccaacgtgcatggcctcagaaatg

SEQ ID NO: 604482 - DNA, 25 bp, Homo sapien
ggatttcttgagcacagaggaaaga

SEQ ID NO: 604483 - DNA, 25 bp, Homo sapien
ccaacgtgcatggcctcagaaatgg

SEQ ID NO: 604484 - DNA, 25 bp, Homo sapien
tgggatttcttgagcacagaggaaa

SEQ ID NO: 604485 - DNA, 25 bp, Homo sapien
aagtctcccgacatgtccacctcca

SEQ ID NO: 604486 - DNA, 25 bp, Homo sapien
gttgaccgaaatgctgatgcccttg

SEQ ID NO: 604487 - DNA, 25 bp, Homo sapien
cgaaatgctgatgcccttgacactg

SEQ ID NO: 604488 - DNA, 25 bp, Homo sapien
tgcccaacaggaggttgaccgaaat

SEQ ID NO: 604489 - DNA, 25 bp, Homo sapien
atctggttgtggaagaggttcaaca

SEQ ID NO: 604490 - DNA, 25 bp, Homo sapien
gtactttctggaacttggactcaat

SEQ ID NO: 604491 - DNA, 25 bp, Homo sapien
gttgtggaagaggttcaacagccac

SEQ ID NO: 604492 - DNA, 25 bp, Homo sapien
ccagtactttctggaacttggactc

SEQ ID NO: 604493 - DNA, 25 bp, Homo sapien
ttgcaggcgcctgaggaatggtttc

SEQ ID NO: 604494 - DNA, 25 bp, Homo sapien
cttgcaggcgcctgaggaatggttt

SEQ ID NO: 604495 - DNA, 25 bp, Homo sapien
tgggagaggagtttagcagcgatga

SEQ ID NO: 604496 - DNA, 25 bp, Homo sapien
tctgggagaggagtttagcagcgat

SEQ ID NO: 604497 - DNA, 25 bp, Homo sapien
gggagaggagtttagcagcgatgag

SEQ ID NO: 604498 - DNA, 25 bp, Homo sapien
ttctgggagaggagtttagcagcga

SEQ ID NO: 604499 - DNA, 25 bp, Homo sapien
tagatcggaggacaccgatttctgg

SEQ ID NO: 604500 - DNA, 25 bp, Homo sapien
gacaccgatttctggatcatttcgc

SEQ ID NO: 604501 - DNA, 25 bp, Homo sapien
aaggctgtagatcggaggacaccga

SEQ ID NO: 604502 - DNA, 25 bp, Homo sapien
gagataaggctgtagatcggaggac

SEQ ID NO: 604503 - DNA, 25 bp, Homo sapien
tcggcgaaactgtcaatctctgttg

SEQ ID NO: 604504 - DNA, 25 bp, Homo sapien
gcccgaggggcttccactaagctat

SEQ ID NO: 604505 - DNA, 25 bp, Homo sapien
gctataatcaatgtcggcgaaactg

SEQ ID NO: 604506 - DNA, 25 bp, Homo sapien
gggcttccactaagctataatcaat

SEQ ID NO: 604507 - DNA, 25 bp, Homo sapien
ctggagagggaaatagggtccaatt

SEQ ID NO: 604508 - DNA, 25 bp, Homo sapien
tggagagggaaatagggtccaattg

SEQ ID NO: 604509 - DNA, 25 bp, Homo sapien
gagagggaaatagggtccaattgga

SEQ ID NO: 604510 - DNA, 25 bp, Homo sapien
cggtggttacgatgaaagatttcac

SEQ ID NO: 604511 - DNA, 25 bp, Homo sapien
gctggccgtgttgaagacataatcc

SEQ ID NO: 604512 - DNA, 25 bp, Homo sapien
gacataatccgagatggcaaagtag

SEQ ID NO: 604513 - DNA, 25 bp, Homo sapien
tcctcatgataaaccaggctggccg

SEQ ID NO: 604514 - DNA, 25 bp, Homo sapien
agaagttttagggtgctcccgctgg

SEQ ID NO: 604515 - DNA, 25 bp, Homo sapien
gacatgaagaagttttagggtgctc

SEQ ID NO: 604516 - DNA, 25 bp, Homo sapien
agttttagggtgctcccgctggagc

SEQ ID NO: 604517 - DNA, 25 bp, Homo sapien
tgaagaagttttagggtgctcccgc

SEQ ID NO: 604518 - DNA, 25 bp, Homo sapien
cttggtggtcagtcggatattagag

SEQ ID NO: 604519 - DNA, 25 bp, Homo sapien
tggtcagtcggatattagagtcagg

SEQ ID NO: 604520 - DNA, 25 bp, Homo sapien
aaggacttggtggtcagtcggatat

SEQ ID NO: 604521 - DNA, 25 bp, Homo sapien
ggtggtcagtcggatattagagtca

SEQ ID NO: 604522 - DNA, 25 bp, Homo sapien
cttggtcaagctgagagatgcagag

SEQ ID NO: 604523 - DNA, 25 bp, Homo sapien
agtgggagtctcatcccggccttct

SEQ ID NO: 604524 - DNA, 25 bp, Homo sapien
tatttaggctttgaaaggagcagca

SEQ ID NO: 604525 - DNA, 25 bp, Homo sapien
tagtaggctcggtctgcactcatgg

SEQ ID NO: 604526 - DNA, 25 bp, Homo sapien
tctatctccatataggggtccacag

SEQ ID NO: 604527 - DNA, 25 bp, Homo sapien
actgagccggaagacaggctccttg

SEQ ID NO: 604528 - DNA, 25 bp, Homo sapien
agccggaagacaggctccttgctgg

SEQ ID NO: 604529 - DNA, 25 bp, Homo sapien
cacactgagccggaagacaggctcc

SEQ ID NO: 604530 - DNA, 25 bp, Homo sapien
ttgctggtattgaaggtcaaggtgg

SEQ ID NO: 604531 - DNA, 25 bp, Homo sapien
attgaaggtcaaggtggcggacaca

SEQ ID NO: 604532 - DNA, 25 bp, Homo sapien
ggtattgaaggtcaaggtggcggac

SEQ ID NO: 604533 - DNA, 25 bp, Homo sapien
ctggtattgaaggtcaaggtggcgg

SEQ ID NO: 604534 - DNA, 25 bp, Homo sapien
attgaatagtccaactttggattct

SEQ ID NO: 604535 - DNA, 25 bp, Homo sapien
taaggatgtaatagttgaggagcgc

SEQ ID NO: 604536 - DNA, 25 bp, Homo sapien
tgtaatagttgaggagcgcttccaa

SEQ ID NO: 604537 - DNA, 25 bp, Homo sapien
aaggtgttaaggatgtaatagttga

SEQ ID NO: 604538 - DNA, 25 bp, Homo sapien
aatagttgaggagcgcttccaacag

SEQ ID NO: 604539 - DNA, 25 bp, Homo sapien
agcccaaggtcgtagagctgaacac

SEQ ID NO: 604540 - DNA, 25 bp, Homo sapien
aggtcgtagagctgaacacgcttca

SEQ ID NO: 604541 - DNA, 25 bp, Homo sapien
atctgcagcccaaggtcgtagagct

SEQ ID NO: 604542 - DNA, 25 bp, Homo sapien
gagctgaacacgcttcagcagagga

SEQ ID NO: 604543 - DNA, 25 bp, Homo sapien
aaattgcgagtgtgcctcagtcccc

SEQ ID NO: 604544 - DNA, 25 bp, Homo sapien
tgtgaactgctagggtgtactctcc

SEQ ID NO: 604545 - DNA, 25 bp, Homo sapien
cgattgaaagggagcccacgtctca

SEQ ID NO: 604546 - DNA, 25 bp, Homo sapien
caggaattctgaaccgaaggccaag

SEQ ID NO: 604547 - DNA, 25 bp, Homo sapien
catgtattggacattggcacccaag

SEQ ID NO: 604548 - DNA, 25 bp, Homo sapien
ttggacattggcacccaagaacagg

SEQ ID NO: 604549 - DNA, 25 bp, Homo sapien
caaactctcatgtattggacattgg

SEQ ID NO: 604550 - DNA, 25 bp, Homo sapien
cattggcacccaagaacaggaagtc

SEQ ID NO: 604551 - DNA, 25 bp, Homo sapien
gaatctctgagacgtgctgcacagc

SEQ ID NO: 604552 - DNA, 25 bp, Homo sapien
acccccggagctgagagcagaaatg

SEQ ID NO: 604553 - DNA, 25 bp, Homo sapien
tgcaacaagcagatccagctgtgac

SEQ ID NO: 604554 - DNA, 25 bp, Homo sapien
tcagagagggcatgcatgcacctgg

SEQ ID NO: 604555 - DNA, 25 bp, Homo sapien
gtgccagcactctgctaggcatggg

SEQ ID NO: 604556 - DNA, 25 bp, Homo sapien
gcatggggatcagatggcgaataaa

SEQ ID NO: 604557 - DNA, 25 bp, Homo sapien
gatcagatggcgaataaaaaaatac

SEQ ID NO: 604558 - DNA, 25 bp, Homo sapien
tgcttgtaaagatatcccaggccag

SEQ ID NO: 604559 - DNA, 25 bp, Homo sapien
gatgtggctgactatccaaagaccc

SEQ ID NO: 604560 - DNA, 25 bp, Homo sapien
ccagggctacatgatgtacagaatc

SEQ ID NO: 604561 - DNA, 25 bp, Homo sapien
gaatccctggttctctcattgaggc

SEQ ID NO: 604562 - DNA, 25 bp, Homo sapien
gctcccatagcagcggcgatgagaa

SEQ ID NO: 604563 - DNA, 25 bp, Homo sapien
tctcagacggggcggttgccaggcg

SEQ ID NO: 604564 - DNA, 25 bp, Homo sapien
tcagacggggcggttgccaggcgga

SEQ ID NO: 604565 - DNA, 25 bp, Homo sapien
ctcagacggggcggttgccaggcgg

SEQ ID NO: 604566 - DNA, 25 bp, Homo sapien
agcctcattagaaatatcatgtatt

SEQ ID NO: 604567 - DNA, 25 bp, Homo sapien
gagcctcattagaaatatcatgtat

SEQ ID NO: 604568 - DNA, 25 bp, Homo sapien
agagcctcattagaaatatcatgta

SEQ ID NO: 604569 - DNA, 25 bp, Homo sapien
gcctcattagaaatatcatgtattc

SEQ ID NO: 604570 - DNA, 25 bp, Homo sapien
caaaggcactcttaccaggcaagca

SEQ ID NO: 604571 - DNA, 25 bp, Homo sapien
tgaacaaaagccctgccgtggctcc

SEQ ID NO: 604572 - DNA, 25 bp, Homo sapien
gtggctccccttgttagactatctg

SEQ ID NO: 604573 - DNA, 25 bp, Homo sapien
agactatctgttatggaccaatgcc

SEQ ID NO: 604574 - DNA, 25 bp, Homo sapien
ggaaatcgttttcttctggcccata

SEQ ID NO: 604575 - DNA, 25 bp, Homo sapien
tagtggcctcaagtgggaaatcgtt

SEQ ID NO: 604576 - DNA, 25 bp, Homo sapien
tgtgttttactaccagcgttcctct

SEQ ID NO: 604577 - DNA, 25 bp, Homo sapien
agggaaagtagagaattgagccctg

SEQ ID NO: 604578 - DNA, 25 bp, Homo sapien
tcaaagccccagtgggcagcttaga

SEQ ID NO: 604579 - DNA, 25 bp, Homo sapien
gcagcttagaaccatcatcagtgag

SEQ ID NO: 604580 - DNA, 25 bp, Homo sapien
aacagggtgagatatcctttgcggg

SEQ ID NO: 604581 - DNA, 25 bp, Homo sapien
tgagatatcctttgcgggcggctct

SEQ ID NO: 604582 - DNA, 25 bp, Homo sapien
caagattcggggtccagacatggga

SEQ ID NO: 604583 - DNA, 25 bp, Homo sapien
atttttgaatttgtagctgtcgttc

SEQ ID NO: 604584 - DNA, 25 bp, Homo sapien
tctgtccatgcctggaatgacttta

SEQ ID NO: 604585 - DNA, 25 bp, Homo sapien
tagctgtcgttcactttttacccac

SEQ ID NO: 604586 - DNA, 25 bp, Homo sapien
tatggatagtaagtccaggcctggc

SEQ ID NO: 604587 - DNA, 25 bp, Homo sapien
accacaggtacgtgctgctgcaccc

SEQ ID NO: 604588 - DNA, 25 bp, Homo sapien
gcctggccgacgtgtggatagtatc

SEQ ID NO: 604589 - DNA, 25 bp, Homo sapien
tgcttgggctcgttttgaattcctg

SEQ ID NO: 604590 - DNA, 25 bp, Homo sapien
tagtgcccctggatggcgggaaaca

SEQ ID NO: 604591 - DNA, 25 bp, Homo sapien
acactggcgggtgagtcgcgccctt

SEQ ID NO: 604592 - DNA, 25 bp, Homo sapien
gattcgcgtgtcctcgggaaagaca

SEQ ID NO: 604593 - DNA, 25 bp, Homo sapien
tgtctcgtcctctttgccggagtga

SEQ ID NO: 604594 - DNA, 25 bp, Homo sapien
tttcccacgctgtctgtcaggtctc

SEQ ID NO: 604595 - DNA, 25 bp, Homo sapien
tctctcgaaatctgcagacatcttg

SEQ ID NO: 604596 - DNA, 25 bp, Homo sapien
cccatctctcgaaatctgcagacat

SEQ ID NO: 604597 - DNA, 25 bp, Homo sapien
tccgccgccactcgacgccagggcg

SEQ ID NO: 604598 - DNA, 25 bp, Homo sapien
catcccgtgtactttgaggctggag

SEQ ID NO: 604599 - DNA, 25 bp, Homo sapien
agattgtctccagtatgttgcaggg

SEQ ID NO: 604600 - DNA, 25 bp, Homo sapien
gagcgtagcttccttgtcgtgtggc

SEQ ID NO: 604601 - DNA, 25 bp, Homo sapien
gacagatgcctttggacccttgcag

SEQ ID NO: 604602 - DNA, 25 bp, Homo sapien
caggctagctgatgatcactttcaa

SEQ ID NO: 604603 - DNA, 25 bp, Homo sapien
tcgatgacgaagacacaggctagct

SEQ ID NO: 604604 - DNA, 25 bp, Homo sapien
caccggcctgtactatcgatgacga

SEQ ID NO: 604605 - DNA, 25 bp, Homo sapien
aaatgctttgcgcagttcaccggcc

SEQ ID NO: 604606 - DNA, 25 bp, Homo sapien
gcaggcactatccagcatggcagtg

SEQ ID NO: 604607 - DNA, 25 bp, Homo sapien
cagcatggcagtgtatgtggtaggg

SEQ ID NO: 604608 - DNA, 25 bp, Homo sapien
ccagcatggcagtgtatgtggtagg

SEQ ID NO: 604609 - DNA, 25 bp, Homo sapien
ccggcaggcactatccagcatggca

SEQ ID NO: 604610 - DNA, 25 bp, Homo sapien
gccaggacggatggcggcgggtaca

SEQ ID NO: 604611 - DNA, 25 bp, Homo sapien
tctctagtgctcagcgcccgcggaa

SEQ ID NO: 604612 - DNA, 25 bp, Homo sapien
cctgcccaagcagacgtgcctgcag

SEQ ID NO: 604613 - DNA, 25 bp, Homo sapien
gcagccacaagacgctctctctagt

SEQ ID NO: 604614 - DNA, 25 bp, Homo sapien
ggaagaccactcctcgggccctgcc

SEQ ID NO: 604615 - DNA, 25 bp, Homo sapien
tgggaagaccactcctcgggccctg

SEQ ID NO: 604616 - DNA, 25 bp, Homo sapien
gggaagaccactcctcgggccctgc

SEQ ID NO: 604617 - DNA, 25 bp, Homo sapien
cttttgtcggggaggaggtacacag

SEQ ID NO: 604618 - DNA, 25 bp, Homo sapien
tgggcctgacgtccagccggctctt

SEQ ID NO: 604619 - DNA, 25 bp, Homo sapien
ctgggcctgacgtccagccggctct

SEQ ID NO: 604620 - DNA, 25 bp, Homo sapien
ttgtcggggaggaggtacacagcac

SEQ ID NO: 604621 - DNA, 25 bp, Homo sapien
tctctttcccgaggacacgcgaaac

SEQ ID NO: 604622 - DNA, 25 bp, Homo sapien
agtctctttcccgaggacacgcgaa

SEQ ID NO: 604623 - DNA, 25 bp, Homo sapien
ccgccagtctctttcccgaggacac

SEQ ID NO: 604624 - DNA, 25 bp, Homo sapien
gccagtctctttcccgaggacacgc

SEQ ID NO: 604625 - DNA, 25 bp, Homo sapien
cccagcgaaggccgagggcgcggct

SEQ ID NO: 604626 - DNA, 25 bp, Homo sapien
ttagcccagcgaaggccgagggcgc

SEQ ID NO: 604627 - DNA, 25 bp, Homo sapien
tagcccagcgaaggccgagggcgcg

SEQ ID NO: 604628 - DNA, 25 bp, Homo sapien
agcgaaggccgagggcgcggctcac

SEQ ID NO: 604629 - DNA, 25 bp, Homo sapien
gggggtttgacgtctgcatggggtc

SEQ ID NO: 604630 - DNA, 25 bp, Homo sapien
ctaggggggtttgacgtctgcatgg

SEQ ID NO: 604631 - DNA, 25 bp, Homo sapien
taggggggtttgacgtctgcatggg

SEQ ID NO: 604632 - DNA, 25 bp, Homo sapien
ggtttgacgtctgcatggggtcggc

SEQ ID NO: 604633 - DNA, 25 bp, Homo sapien
tgtaggcaaccgaaaagcagctttg

SEQ ID NO: 604634 - DNA, 25 bp, Homo sapien
gtaaaagtcgcgaggtctctagccc

SEQ ID NO: 604635 - DNA, 25 bp, Homo sapien
caaggacgtggcacaatgaccgaca

SEQ ID NO: 604636 - DNA, 25 bp, Homo sapien
caaaggagtctggaattcgcccctc

SEQ ID NO: 604637 - DNA, 25 bp, Homo sapien
aagccatccaagggagagctgtcat

SEQ ID NO: 604638 - DNA, 25 bp, Homo sapien
atctgtctccaggatagccgcacag

SEQ ID NO: 604639 - DNA, 25 bp, Homo sapien
ggctggtgcggaaccagcaaagcca

SEQ ID NO: 604640 - DNA, 25 bp, Homo sapien
aggatagccgcacagcccacgaggc

SEQ ID NO: 604641 - DNA, 25 bp, Homo sapien
ggacatcctcacaccgcggacagtg

SEQ ID NO: 604642 - DNA, 25 bp, Homo sapien
agggacatcctcacaccgcggacag

SEQ ID NO: 604643 - DNA, 25 bp, Homo sapien
gacatcctcacaccgcggacagtgg

SEQ ID NO: 604644 - DNA, 25 bp, Homo sapien
ccagggacatcctcacaccgcggac

SEQ ID NO: 604645 - DNA, 25 bp, Homo sapien
agttctcggaattcatgaccatgcc

SEQ ID NO: 604646 - DNA, 25 bp, Homo sapien
acagagctttcgcagtttccctaca

SEQ ID NO: 604647 - DNA, 25 bp, Homo sapien
caagaaaaacgtgcaagatctcccc

SEQ ID NO: 604648 - DNA, 25 bp, Homo sapien
aatgaaagaacttagccaggctctc

SEQ ID NO: 604649 - DNA, 25 bp, Homo sapien
gagctgcctggagattgccaaagcg

SEQ ID NO: 604650 - DNA, 25 bp, Homo sapien
aagcccaaaggacctgagcgctatc

SEQ ID NO: 604651 - DNA, 25 bp, Homo sapien
gctatccacttaatgcagtacaaag

SEQ ID NO: 604652 - DNA, 25 bp, Homo sapien
tgcagtacaaagatctcatctgccc

SEQ ID NO: 604653 - DNA, 25 bp, Homo sapien
gggtgaagatgtggaccctccaaac

SEQ ID NO: 604654 - DNA, 25 bp, Homo sapien
caggacacgggcagcccgtgatcac

SEQ ID NO: 604655 - DNA, 25 bp, Homo sapien
aaacacagcaacctttcccgcattt

SEQ ID NO: 604656 - DNA, 25 bp, Homo sapien
ctccaaacacagcaacctttcccgc

SEQ ID NO: 604657 - DNA, 25 bp, Homo sapien
taccagacagtaaacactcctaagc

SEQ ID NO: 604658 - DNA, 25 bp, Homo sapien
tgccatgagtgagcacccagcttgt

SEQ ID NO: 604659 - DNA, 25 bp, Homo sapien
aggtttacagcagtgtgccatggct

SEQ ID NO: 604660 - DNA, 25 bp, Homo sapien
tcatgatataacacacacggcagcc

SEQ ID NO: 604661 - DNA, 25 bp, Homo sapien
tgttcccaacatgacaactcccatg

SEQ ID NO: 604662 - DNA, 25 bp, Homo sapien
atgttcccaacatgacaactcccat

SEQ ID NO: 604663 - DNA, 25 bp, Homo sapien
gatactgaggtctagcatgttccca

SEQ ID NO: 604664 - DNA, 25 bp, Homo sapien
actgaggtctagcatgttcccaaca

SEQ ID NO: 604665 - DNA, 25 bp, Homo sapien
cagcagcttgtggactaggtccagt

SEQ ID NO: 604666 - DNA, 25 bp, Homo sapien
gatcccaaaagtggccctgctttcc

SEQ ID NO: 604667 - DNA, 25 bp, Homo sapien
gaatcacagagaagtcacatggggc

SEQ ID NO: 604668 - DNA, 25 bp, Homo sapien
aacttccttgccaggaggaatcaca

SEQ ID NO: 604669 - DNA, 25 bp, Homo sapien
caggcagcccgtgatcatttttgaa

SEQ ID NO: 604670 - DNA, 25 bp, Homo sapien
cagcatttgaaagggacaggtgtga

SEQ ID NO: 604671 - DNA, 25 bp, Homo sapien
gtgtgaaagcgccagcatttgaaag

SEQ ID NO: 604672 - DNA, 25 bp, Homo sapien
cacgggaaacggctttcagcaattc

SEQ ID NO: 604673 - DNA, 25 bp, Homo sapien
tctgataacaggaggctaagctgaa

SEQ ID NO: 604674 - DNA, 25 bp, Homo sapien
ggtgggactagacactcttgctcat

SEQ ID NO: 604675 - DNA, 25 bp, Homo sapien
taaggcagtgactgtatgccaccca

SEQ ID NO: 604676 - DNA, 25 bp, Homo sapien
cctgcaatgctcctgagaccagaag

SEQ ID NO: 604677 - DNA, 25 bp, Homo sapien
gtctccagtgttctgtcgtctttct

SEQ ID NO: 604678 - DNA, 25 bp, Homo sapien
caggtcattgtcctgagaggctcag

SEQ ID NO: 604679 - DNA, 25 bp, Homo sapien
tgcctgcacctcttggggtttcctc

SEQ ID NO: 604680 - DNA, 25 bp, Homo sapien
gcctgcacctcttggggtttcctct

SEQ ID NO: 604681 - DNA, 25 bp, Homo sapien
ggaccccaggtcattgtcctgagag

SEQ ID NO: 604682 - DNA, 25 bp, Homo sapien
acttaacctcttggcattcacttac

SEQ ID NO: 604683 - DNA, 25 bp, Homo sapien
tttccacctcggaaacacaggccaa

SEQ ID NO: 604684 - DNA, 25 bp, Homo sapien
aacacaggccaacttaacctcttgg

SEQ ID NO: 604685 - DNA, 25 bp, Homo sapien
tggaatttccacctcggaaacacag

SEQ ID NO: 604686 - DNA, 25 bp, Homo sapien
gacatcactcgtcactcttggtctg

SEQ ID NO: 604687 - DNA, 25 bp, Homo sapien
cgtcactcttggtctgtgatcaacc

SEQ ID NO: 604688 - DNA, 25 bp, Homo sapien
gggcaagaaggtccagccatgagtc

SEQ ID NO: 604689 - DNA, 25 bp, Homo sapien
cagggtgacatcactcgtcactctt

SEQ ID NO: 604690 - DNA, 25 bp, Homo sapien
gccatggcactctgtggcactggca

SEQ ID NO: 604691 - DNA, 25 bp, Homo sapien
aactctggatcccaagtccccagag

SEQ ID NO: 604692 - DNA, 25 bp, Homo sapien
gagggaaaagtcgaataatgttgtg

SEQ ID NO: 604693 - DNA, 25 bp, Homo sapien
gcccacccacgctgagggaaaagtc

SEQ ID NO: 604694 - DNA, 25 bp, Homo sapien
gaggacaatggtccatagcacagaa

SEQ ID NO: 604695 - DNA, 25 bp, Homo sapien
gtgggtgagaggacaatggtccata

SEQ ID NO: 604696 - DNA, 25 bp, Homo sapien
gagaggacaatggtccatagcacag

SEQ ID NO: 604697 - DNA, 25 bp, Homo sapien
ggtgagaggacaatggtccatagca

SEQ ID NO: 604698 - DNA, 25 bp, Homo sapien
cagggtgttgagtagaggtgaaggc

SEQ ID NO: 604699 - DNA, 25 bp, Homo sapien
tgagtagaggtgaaggcacggttgt

SEQ ID NO: 604700 - DNA, 25 bp, Homo sapien
ggtcagggtgttgagtagaggtgaa

SEQ ID NO: 604701 - DNA, 25 bp, Homo sapien
tgttgagtagaggtgaaggcacggt

SEQ ID NO: 604702 - DNA, 25 bp, Homo sapien
gctgcgcctgcgcagctatcccaga

SEQ ID NO: 604703 - DNA, 25 bp, Homo sapien
tgaaccggtggcgtcaaataattcc

SEQ ID NO: 604704 - DNA, 25 bp, Homo sapien
agctatcccagatcgccgcgcggga

SEQ ID NO: 604705 - DNA, 25 bp, Homo sapien
aaataattcccgagacacagagccg

SEQ ID NO: 604706 - DNA, 25 bp, Homo sapien
ccaggggcggcggcgtcaaataact

SEQ ID NO: 604707 - DNA, 25 bp, Homo sapien
cggcggcgtcaaataactccccagc

SEQ ID NO: 604708 - DNA, 25 bp, Homo sapien
ggcggcggcgtcaaataactcccca

SEQ ID NO: 604709 - DNA, 25 bp, Homo sapien
caggggcggcggcgtcaaataactc

SEQ ID NO: 604710 - DNA, 25 bp, Homo sapien
ggccgtcctcaggcggtccgtcagt

SEQ ID NO: 604711 - DNA, 25 bp, Homo sapien
agggctggcgctttcaccgccctgg

SEQ ID NO: 604712 - DNA, 25 bp, Homo sapien
tcccagggcgccaagggacgacgaa

SEQ ID NO: 604713 - DNA, 25 bp, Homo sapien
gacgacgaaggccactcgagccagc

SEQ ID NO: 604714 - DNA, 25 bp, Homo sapien
cgccgccgccggccgtcctcggcct

SEQ ID NO: 604715 - DNA, 25 bp, Homo sapien
aggcgacgggcggggcccgcatcgc

SEQ ID NO: 604716 - DNA, 25 bp, Homo sapien
ctgaggcgacgggcggggcccgcat

SEQ ID NO: 604717 - DNA, 25 bp, Homo sapien
gggcccgcatcgccggggcgggcgc

SEQ ID NO: 604718 - DNA, 25 bp, Homo sapien
agaggacggactacagcatttgcca

SEQ ID NO: 604719 - DNA, 25 bp, Homo sapien
tgcagtgacctccactcagagtaca

SEQ ID NO: 604720 - DNA, 25 bp, Homo sapien
tcgtccaacgctctctggatagctg

SEQ ID NO: 604721 - DNA, 25 bp, Homo sapien
tcattctgaatcaccaaatgcagtg

SEQ ID NO: 604722 - DNA, 25 bp, Homo sapien
aacaaattctcactaccagccactg

SEQ ID NO: 604723 - DNA, 25 bp, Homo sapien
tttaacaaattctcactaccagcca

SEQ ID NO: 604724 - DNA, 25 bp, Homo sapien
acaaattctcactaccagccactga

SEQ ID NO: 604725 - DNA, 25 bp, Homo sapien
tttttaacaaattctcactaccagc

SEQ ID NO: 604726 - DNA, 25 bp, Homo sapien
agcaaattacttccatggtccattt

SEQ ID NO: 604727 - DNA, 25 bp, Homo sapien
caatggaagggtcagtccatagcaa

SEQ ID NO: 604728 - DNA, 25 bp, Homo sapien
ggctctttaataactggcaatggaa

SEQ ID NO: 604729 - DNA, 25 bp, Homo sapien
tccagtctgtatatacatcaacgca

SEQ ID NO: 604730 - DNA, 25 bp, Homo sapien
ttggtacaaaaagattctgtaggtg

SEQ ID NO: 604731 - DNA, 25 bp, Homo sapien
tggtacaaaaagattctgtaggtgt

SEQ ID NO: 604732 - DNA, 25 bp, Homo sapien
cttggtacaaaaagattctgtaggt

SEQ ID NO: 604733 - DNA, 25 bp, Homo sapien
tattatgatatttaaggcccttgcc

SEQ ID NO: 604734 - DNA, 25 bp, Homo sapien
gagcagcactcacgcagaattcaga

SEQ ID NO: 604735 - DNA, 25 bp, Homo sapien
tcaccgtatgacagaccaaaagctc

SEQ ID NO: 604736 - DNA, 25 bp, Homo sapien
gtttacacctgagcctacagaccag

SEQ ID NO: 604737 - DNA, 25 bp, Homo sapien
tgtggaagcctaaaatagagacaac

SEQ ID NO: 604738 - DNA, 25 bp, Homo sapien
aacaacacgcatttaattgacacct

SEQ ID NO: 604739 - DNA, 25 bp, Homo sapien
tattgcaccagatactgtggaagcc

SEQ ID NO: 604740 - DNA, 25 bp, Homo sapien
tgacacctaagataagtactaagta

SEQ ID NO: 604741 - DNA, 25 bp, Homo sapien
tcgaatctgactggaaccctgttcc

SEQ ID NO: 604742 - DNA, 25 bp, Homo sapien
tcccaagtttctcgggccatgagag

SEQ ID NO: 604743 - DNA, 25 bp, Homo sapien
gactcacgggccagtttctgaatgg

SEQ ID NO: 604744 - DNA, 25 bp, Homo sapien
gacctgtaagcatagtcgaatctga

SEQ ID NO: 604745 - DNA, 25 bp, Homo sapien
ggtggggccagaagtatgtcgttaa

SEQ ID NO: 604746 - DNA, 25 bp, Homo sapien
gtggggccagaagtatgtcgttaat

SEQ ID NO: 604747 - DNA, 25 bp, Homo sapien
gaaggaatcacaacaaacacccatg

SEQ ID NO: 604748 - DNA, 25 bp, Homo sapien
tattgaaggccttaatcctccagca

SEQ ID NO: 604749 - DNA, 25 bp, Homo sapien
tctccgacttcatgcagccagtaag

SEQ ID NO: 604750 - DNA, 25 bp, Homo sapien
gatgactgcctatgatgactgacta

SEQ ID NO: 604751 - DNA, 25 bp, Homo sapien
gaagcaccgagtacaagctagtaac

SEQ ID NO: 604752 - DNA, 25 bp, Homo sapien
gaagtgagtgcacaaatgaccttgc

SEQ ID NO: 604753 - DNA, 25 bp, Homo sapien
ggtgatgcctccagttagccaccat

SEQ ID NO: 604754 - DNA, 25 bp, Homo sapien
tggctgttttccaataaggaggtgt

SEQ ID NO: 604755 - DNA, 25 bp, Homo sapien
taaagtacagtaataacagacccag

SEQ ID NO: 604756 - DNA, 25 bp, Homo sapien
cagacccagcctttgttataatgta

SEQ ID NO: 604757 - DNA, 25 bp, Homo sapien
ccagaaagctgcctaaggtcagaca

SEQ ID NO: 604758 - DNA, 25 bp, Homo sapien
gaaggcagggcaatgacaataacct

SEQ ID NO: 604759 - DNA, 25 bp, Homo sapien
gaggtgtgttctacaggcgcaagcc

SEQ ID NO: 604760 - DNA, 25 bp, Homo sapien
caaggcaagcgcaaatttaacatta

SEQ ID NO: 604761 - DNA, 25 bp, Homo sapien
taagggccctaggatattccaaatg

SEQ ID NO: 604762 - DNA, 25 bp, Homo sapien
catcattcttagtatataggctgcc

SEQ ID NO: 604763 - DNA, 25 bp, Homo sapien
tgcaaatggtatcatgtatatagtc

SEQ ID NO: 604764 - DNA, 25 bp, Homo sapien
agtaaatgatacaagactagcatgt

SEQ ID NO: 604765 - DNA, 25 bp, Homo sapien
gattagtgtcacatggagttttcag

SEQ ID NO: 604766 - DNA, 25 bp, Homo sapien
ttcacaacacctgagctcattgcaa

SEQ ID NO: 604767 - DNA, 25 bp, Homo sapien
catttctggagggatcagactggca

SEQ ID NO: 604768 - DNA, 25 bp, Homo sapien
aaggaccatatgtaaagcgtagcaa

SEQ ID NO: 604769 - DNA, 25 bp, Homo sapien
taaatgcaggaaatgaaggaccata

SEQ ID NO: 604770 - DNA, 25 bp, Homo sapien
tgtgtaaaaagcgaaaccatgtctg

SEQ ID NO: 604771 - DNA, 25 bp, Homo sapien
gacagctgattccacgcatggcacg

SEQ ID NO: 604772 - DNA, 25 bp, Homo sapien
tagctgggttactcaaatccacagg

SEQ ID NO: 604773 - DNA, 25 bp, Homo sapien
ggcagatgtttaaggcagggatact

SEQ ID NO: 604774 - DNA, 25 bp, Homo sapien
gcggcattccgctcacattcaagaa

SEQ ID NO: 604775 - DNA, 25 bp, Homo sapien
cagcagcactttgaggcatacttaa

SEQ ID NO: 604776 - DNA, 25 bp, Homo sapien
gagcactgtctgatcggggtctaga

SEQ ID NO: 604777 - DNA, 25 bp, Homo sapien
gcactgtctgatcggggtctagaaa

SEQ ID NO: 604778 - DNA, 25 bp, Homo sapien
tacttaatctattcacgggtgttgg

SEQ ID NO: 604779 - DNA, 25 bp, Homo sapien
acagtaacagcccggtgcctccggt

SEQ ID NO: 604780 - DNA, 25 bp, Homo sapien
gcttgtcttcatggtggccttattc

SEQ ID NO: 604781 - DNA, 25 bp, Homo sapien
tgtgcttgtcttcatggtggcctta

SEQ ID NO: 604782 - DNA, 25 bp, Homo sapien
cagcccggtgcctccggttatgtgg

SEQ ID NO: 604783 - DNA, 25 bp, Homo sapien
tatatagcataacaatggtgatgta

SEQ ID NO: 604784 - DNA, 25 bp, Homo sapien
cttatatagcataacaatggtgatg

SEQ ID NO: 604785 - DNA, 25 bp, Homo sapien
cataacaatggtgatgtaaactctt

SEQ ID NO: 604786 - DNA, 25 bp, Homo sapien
taacaatggtgatgtaaactcttac

SEQ ID NO: 604787 - DNA, 25 bp, Homo sapien
gaactttagaggcatgagcagtact

SEQ ID NO: 604788 - DNA, 25 bp, Homo sapien
taaccatgatccaaagagattcaag

SEQ ID NO: 604789 - DNA, 25 bp, Homo sapien
gaagtttacagtgaacaaatgctgc

SEQ ID NO: 604790 - DNA, 25 bp, Homo sapien
gatgctgttaacctttggtctccga

SEQ ID NO: 604791 - DNA, 25 bp, Homo sapien
tattaatcttgcaggtaggaaagac

SEQ ID NO: 604792 - DNA, 25 bp, Homo sapien
gaatggctgtcaaaatcgaaaacac

SEQ ID NO: 604793 - DNA, 25 bp, Homo sapien
cctggctgacatgaagggaacttcc

SEQ ID NO: 604794 - DNA, 25 bp, Homo sapien
caagacattgcttggtcagaaacag

SEQ ID NO: 604795 - DNA, 25 bp, Homo sapien
atcctgcaccctatgccattacttt

SEQ ID NO: 604796 - DNA, 25 bp, Homo sapien
tacctggccaatagtaacagcagct

SEQ ID NO: 604797 - DNA, 25 bp, Homo sapien
tagaagagtggtttcttaccaaaca

SEQ ID NO: 604798 - DNA, 25 bp, Homo sapien
cagggttgagttattaattctccac

SEQ ID NO: 604799 - DNA, 25 bp, Homo sapien
tttatccttggaactgacagtctcc

SEQ ID NO: 604800 - DNA, 25 bp, Homo sapien
cattgtattagttttatccttggaa

SEQ ID NO: 604801 - DNA, 25 bp, Homo sapien
gagaaagcagagacccttctggtca

SEQ ID NO: 604802 - DNA, 25 bp, Homo sapien
cagctaagaattcatttctgagaga

SEQ ID NO: 604803 - DNA, 25 bp, Homo sapien
caaaataattacgagtataatgttc

SEQ ID NO: 604804 - DNA, 25 bp, Homo sapien
aaataattacgagtataatgttcac

SEQ ID NO: 604805 - DNA, 25 bp, Homo sapien
taattacgagtataatgttcacaga

SEQ ID NO: 604806 - DNA, 25 bp, Homo sapien
ttcaaaataattacgagtataatgt

SEQ ID NO: 604807 - DNA, 25 bp, Homo sapien
gaagaatataaagtgtctgaatttg

SEQ ID NO: 604808 - DNA, 25 bp, Homo sapien
gcaaagacatccctaaactcaacca

SEQ ID NO: 604809 - DNA, 25 bp, Homo sapien
tggaagaatataaagtgtctgaatt

SEQ ID NO: 604810 - DNA, 25 bp, Homo sapien
atccctaaactcaaccatggcattc

SEQ ID NO: 604811 - DNA, 25 bp, Homo sapien
ggttgagccattctagattcacaga

SEQ ID NO: 604812 - DNA, 25 bp, Homo sapien
tatttggacacctcatatctcctgg

SEQ ID NO: 604813 - DNA, 25 bp, Homo sapien
gcagaattccttgatggcagccagt

SEQ ID NO: 604814 - DNA, 25 bp, Homo sapien
tgagacctcaagattggcacctagc

SEQ ID NO: 604815 - DNA, 25 bp, Homo sapien
aagattatcatggtcatttgttatc

SEQ ID NO: 604816 - DNA, 25 bp, Homo sapien
agattatcatggtcatttgttatca

SEQ ID NO: 604817 - DNA, 25 bp, Homo sapien
aaaaagattatcatggtcatttgtt

SEQ ID NO: 604818 - DNA, 25 bp, Homo sapien
aattggattgataaaaaagattatc

SEQ ID NO: 604819 - DNA, 25 bp, Homo sapien
aaaatcctacacagtgtcccacaag

SEQ ID NO: 604820 - DNA, 25 bp, Homo sapien
ggacatttgtgaccctttccgtcga

SEQ ID NO: 604821 - DNA, 25 bp, Homo sapien
tttccgtcgaaactccatgctagct

SEQ ID NO: 604822 - DNA, 25 bp, Homo sapien
gaaattcacttgcatcaaacatagg

SEQ ID NO: 604823 - DNA, 25 bp, Homo sapien
ggttcagtcggccaaccaacaatgg

SEQ ID NO: 604824 - DNA, 25 bp, Homo sapien
catctgtaggtatttcagaccaaca

SEQ ID NO: 604825 - DNA, 25 bp, Homo sapien
gatttcaggcaaatgtcgatcactt

SEQ ID NO: 604826 - DNA, 25 bp, Homo sapien
caacaatggcttcactatcaaaact

SEQ ID NO: 604827 - DNA, 25 bp, Homo sapien
tgttgcttaaaccaagcgccgatag

SEQ ID NO: 604828 - DNA, 25 bp, Homo sapien
cagtgtcaagaagaacgggaggcca

SEQ ID NO: 604829 - DNA, 25 bp, Homo sapien
aaatgactcttcgtttctggcctga

SEQ ID NO: 604830 - DNA, 25 bp, Homo sapien
tctcctgagaacctagcaagtatgc

SEQ ID NO: 604831 - DNA, 25 bp, Homo sapien
ctgcaaaccttgaattaaaagcatg

SEQ ID NO: 604832 - DNA, 25 bp, Homo sapien
gcaaaccttgaattaaaagcatgta

SEQ ID NO: 604833 - DNA, 25 bp, Homo sapien
caaaccttgaattaaaagcatgtaa

SEQ ID NO: 604834 - DNA, 25 bp, Homo sapien
accttgaattaaaagcatgtaaaat

SEQ ID NO: 604835 - DNA, 25 bp, Homo sapien
gtaaggaaccacaacatcaatccct

SEQ ID NO: 604836 - DNA, 25 bp, Homo sapien
aggcaaaatggtttcaagagctgaa

SEQ ID NO: 604837 - DNA, 25 bp, Homo sapien
caagacaggatggcacacataatca

SEQ ID NO: 604838 - DNA, 25 bp, Homo sapien
tagaataacgctggccaagacagga

SEQ ID NO: 604839 - DNA, 25 bp, Homo sapien
gcaattctgttggatttacatagct

SEQ ID NO: 604840 - DNA, 25 bp, Homo sapien
ggaggatcttcgcaattctgttgga

SEQ ID NO: 604841 - DNA, 25 bp, Homo sapien
caggatattaatggaggatcttcgc

SEQ ID NO: 604842 - DNA, 25 bp, Homo sapien
agcaggatattaatggaggatcttc

SEQ ID NO: 604843 - DNA, 25 bp, Homo sapien
cttcagggacagaaaagttattggt

SEQ ID NO: 604844 - DNA, 25 bp, Homo sapien
gcaaggcacctattaatatattcac

SEQ ID NO: 604845 - DNA, 25 bp, Homo sapien
gaagagctgtcatcgttactaaact

SEQ ID NO: 604846 - DNA, 25 bp, Homo sapien
gggtccgtttcagtttgcaaggcac

SEQ ID NO: 604847 - DNA, 25 bp, Homo sapien
ctactcagggaattggcatcactaa

SEQ ID NO: 604848 - DNA, 25 bp, Homo sapien
aagttatatgtggatctcaactact

SEQ ID NO: 604849 - DNA, 25 bp, Homo sapien
ttatatgtggatctcaactactcag

SEQ ID NO: 604850 - DNA, 25 bp, Homo sapien
actactcagggaattggcatcacta

SEQ ID NO: 604851 - DNA, 25 bp, Homo sapien
ccaaaagtgctgaatcttgaacaat

SEQ ID NO: 604852 - DNA, 25 bp, Homo sapien
aagtgctgaatcttgaacaatattt

SEQ ID NO: 604853 - DNA, 25 bp, Homo sapien
gctgaatcttgaacaatatttaaca

SEQ ID NO: 604854 - DNA, 25 bp, Homo sapien
caaaagtgctgaatcttgaacaata

SEQ ID NO: 604855 - DNA, 25 bp, Homo sapien
ttccaccacttgctgaactaatacc

SEQ ID NO: 604856 - DNA, 25 bp, Homo sapien
tattggtgcgactatgactcttcag

SEQ ID NO: 604857 - DNA, 25 bp, Homo sapien
ggagtcgtgggctccgtgcttccac

SEQ ID NO: 604858 - DNA, 25 bp, Homo sapien
gagcaggtctctcactatcgggagt

SEQ ID NO: 604859 - DNA, 25 bp, Homo sapien
agtcattctattaaactttgaattt

SEQ ID NO: 604860 - DNA, 25 bp, Homo sapien
aaatgtaagcattaaagtcattcta

SEQ ID NO: 604861 - DNA, 25 bp, Homo sapien
aagtcattctattaaactttgaatt

SEQ ID NO: 604862 - DNA, 25 bp, Homo sapien
atgtaagcattaaagtcattctatt

SEQ ID NO: 604863 - DNA, 25 bp, Homo sapien
tgtgtcaaatatccacataatggct

SEQ ID NO: 604864 - DNA, 25 bp, Homo sapien
tgacatgcctcatgaacctcatgaa

SEQ ID NO: 604865 - DNA, 25 bp, Homo sapien
catgaacatggctcatgacatgcct

SEQ ID NO: 604866 - DNA, 25 bp, Homo sapien
catgaactctccagatgattaaagg

SEQ ID NO: 604867 - DNA, 25 bp, Homo sapien
tgaatgctgcgaatcaggagcccag

SEQ ID NO: 604868 - DNA, 25 bp, Homo sapien
tgccagtgatatgctcatgtcttgg

SEQ ID NO: 604869 - DNA, 25 bp, Homo sapien
tggcgccactgggagttgagtcttt

SEQ ID NO: 604870 - DNA, 25 bp, Homo sapien
gaggagctctagagctgccagtgat

SEQ ID NO: 604871 - DNA, 25 bp, Homo sapien
tctcagccaattcatagatccggtg

SEQ ID NO: 604872 - DNA, 25 bp, Homo sapien
tccagagtagtcaccttctgcaagc

SEQ ID NO: 604873 - DNA, 25 bp, Homo sapien
caagcttctgagtgaagaattcgct

SEQ ID NO: 604874 - DNA, 25 bp, Homo sapien
tatcctggttggcataacttggacc

SEQ ID NO: 604875 - DNA, 25 bp, Homo sapien
cttttcagcataaagctttccctgc

SEQ ID NO: 604876 - DNA, 25 bp, Homo sapien
gcataaagctttccctgccctcaag

SEQ ID NO: 604877 - DNA, 25 bp, Homo sapien
ttcagcataaagctttccctgccct

SEQ ID NO: 604878 - DNA, 25 bp, Homo sapien
agcataaagctttccctgccctcaa

SEQ ID NO: 604879 - DNA, 25 bp, Homo sapien
tgtctgggcaatggcatagagaatt

SEQ ID NO: 604880 - DNA, 25 bp, Homo sapien
tacagcacagactctgtctgggcaa

SEQ ID NO: 604881 - DNA, 25 bp, Homo sapien
caatggcatagagaattattttagg

SEQ ID NO: 604882 - DNA, 25 bp, Homo sapien
actctgtctgggcaatggcatagag

SEQ ID NO: 604883 - DNA, 25 bp, Homo sapien
gcacactacagaaggctctcctcac

SEQ ID NO: 604884 - DNA, 25 bp, Homo sapien
tgacaccatgacctcgtagctcttg

SEQ ID NO: 604885 - DNA, 25 bp, Homo sapien
tgtccttagagtttcgctgacacca

SEQ ID NO: 604886 - DNA, 25 bp, Homo sapien
tgccccactctccataatgaaccac

SEQ ID NO: 604887 - DNA, 25 bp, Homo sapien
agtatcaatgcagtagttaacaagg

SEQ ID NO: 604888 - DNA, 25 bp, Homo sapien
acttgggcccaggacgcatgagctt

SEQ ID NO: 604889 - DNA, 25 bp, Homo sapien
cgcatgagcttcactttgatgccca

SEQ ID NO: 604890 - DNA, 25 bp, Homo sapien
ggtggatggcagtatcaatgcagta

SEQ ID NO: 604891 - DNA, 25 bp, Homo sapien
ggcgaatagtatctcatctttaggg

SEQ ID NO: 604892 - DNA, 25 bp, Homo sapien
tagggtctacagtgctcacgtggtc

SEQ ID NO: 604893 - DNA, 25 bp, Homo sapien
ggtagagcatggcttcctaaccatc

SEQ ID NO: 604894 - DNA, 25 bp, Homo sapien
tcctgagatgggcatggcgaatagt

SEQ ID NO: 604895 - DNA, 25 bp, Homo sapien
tgtaaaggagctggccgactacact

SEQ ID NO: 604896 - DNA, 25 bp, Homo sapien
caatgtaggtgcacacagaactgat

SEQ ID NO: 604897 - DNA, 25 bp, Homo sapien
gcttccggtctcctgagtcaaccat

SEQ ID NO: 604898 - DNA, 25 bp, Homo sapien
cagaactgatggctcgcttccggtc

SEQ ID NO: 604899 - DNA, 25 bp, Homo sapien
tgccactatcatggagtgcagatcc

SEQ ID NO: 604900 - DNA, 25 bp, Homo sapien
catcaagcatatcagggtgctctgt

SEQ ID NO: 604901 - DNA, 25 bp, Homo sapien
aaagctgccactatcatggagtgca

SEQ ID NO: 604902 - DNA, 25 bp, Homo sapien
cactgaaaagctgccactatcatgg

SEQ ID NO: 604903 - DNA, 25 bp, Homo sapien
tcttgctcattgttcttggacttac

SEQ ID NO: 604904 - DNA, 25 bp, Homo sapien
ggacttacttcctgagatacccagt

SEQ ID NO: 604905 - DNA, 25 bp, Homo sapien
tttgtacttgacctcttgctcattg

SEQ ID NO: 604906 - DNA, 25 bp, Homo sapien
atctcctttgtacttgacctcttgc

SEQ ID NO: 604907 - DNA, 25 bp, Homo sapien
gggtggcttcagcagcatcctttac

SEQ ID NO: 604908 - DNA, 25 bp, Homo sapien
agggtggcttcagcagcatccttta

SEQ ID NO: 604909 - DNA, 25 bp, Homo sapien
catgttagggtggcttcagcagcat

SEQ ID NO: 604910 - DNA, 25 bp, Homo sapien
gttagggtggcttcagcagcatcct

SEQ ID NO: 604911 - DNA, 25 bp, Homo sapien
ccactaggtgaaggaaatgcgccga

SEQ ID NO: 604912 - DNA, 25 bp, Homo sapien
atttaatcaaagtggtctcattcac

SEQ ID NO: 604913 - DNA, 25 bp, Homo sapien
ttggcagcctggagtatttaatcaa

SEQ ID NO: 604914 - DNA, 25 bp, Homo sapien
cagcctggagtatttaatcaaagtg

SEQ ID NO: 604915 - DNA, 25 bp, Homo sapien
ggagtatttaatcaaagtggtctca

SEQ ID NO: 604916 - DNA, 25 bp, Homo sapien
ggatgacactgttatccaagacaaa

SEQ ID NO: 604917 - DNA, 25 bp, Homo sapien
caagacaaagtaccggaaactatgc

SEQ ID NO: 604918 - DNA, 25 bp, Homo sapien
actgttatccaagacaaagtaccgg

SEQ ID NO: 604919 - DNA, 25 bp, Homo sapien
caagaggttgttccagcattgccag

SEQ ID NO: 604920 - DNA, 25 bp, Homo sapien
gacctgcacttggatgtattgggaa

SEQ ID NO: 604921 - DNA, 25 bp, Homo sapien
gaatctgtaggctgtccttccctga

SEQ ID NO: 604922 - DNA, 25 bp, Homo sapien
caggtgctattgtcccacagctaga

SEQ ID NO: 604923 - DNA, 25 bp, Homo sapien
tctagcctgtgtaggtagcaccaac

SEQ ID NO: 604924 - DNA, 25 bp, Homo sapien
tggatagtttgggtcgcagtgataa

SEQ ID NO: 604925 - DNA, 25 bp, Homo sapien
tagtttgggtcgcagtgataatcac

SEQ ID NO: 604926 - DNA, 25 bp, Homo sapien
ttgtggatagtttgggtcgcagtga

SEQ ID NO: 604927 - DNA, 25 bp, Homo sapien
gtttgggtcgcagtgataatcacat

SEQ ID NO: 604928 - DNA, 25 bp, Homo sapien
gccaagcaagctccatgtctagggt

SEQ ID NO: 604929 - DNA, 25 bp, Homo sapien
cagatatgggagtcaaacgccttca

SEQ ID NO: 604930 - DNA, 25 bp, Homo sapien
caataagggtctgagaacatgcttc

SEQ ID NO: 604931 - DNA, 25 bp, Homo sapien
tcaaactgcagggaaatgtctcact

SEQ ID NO: 604932 - DNA, 25 bp, Homo sapien
gacattccccggaccagcacagtga

SEQ ID NO: 604933 - DNA, 25 bp, Homo sapien
acattccccggaccagcacagtgac

SEQ ID NO: 604934 - DNA, 25 bp, Homo sapien
agacattccccggaccagcacagtg

SEQ ID NO: 604935 - DNA, 25 bp, Homo sapien
ctgggcgaggttcaggtacaaaaag

SEQ ID NO: 604936 - DNA, 25 bp, Homo sapien
atgcaaatctggaatgctgagatct

SEQ ID NO: 604937 - DNA, 25 bp, Homo sapien
ttcaggaaatggccgatgtttcaca

SEQ ID NO: 604938 - DNA, 25 bp, Homo sapien
gaaatggccgatgtttcacagaata

SEQ ID NO: 604939 - DNA, 25 bp, Homo sapien
caaatctggaatgctgagatctgct

SEQ ID NO: 604940 - DNA, 25 bp, Homo sapien
gctgggccatgccactccttaattt

SEQ ID NO: 604941 - DNA, 25 bp, Homo sapien
ggcttgcaatccgtaactgggtcag

SEQ ID NO: 604942 - DNA, 25 bp, Homo sapien
aaaggcgggctgtttggaattcctg

SEQ ID NO: 604943 - DNA, 25 bp, Homo sapien
aaggtgtatttcataagcaatctgc

SEQ ID NO: 604944 - DNA, 25 bp, Homo sapien
ttattgattttcttacggttgtcaa

SEQ ID NO: 604945 - DNA, 25 bp, Homo sapien
cttacggttgtcaaactagaagtca

SEQ ID NO: 604946 - DNA, 25 bp, Homo sapien
tcatttccaatgatttttacctctt

SEQ ID NO: 604947 - DNA, 25 bp, Homo sapien
gtcatactacctacaaactgtcttc

SEQ ID NO: 604948 - DNA, 25 bp, Homo sapien
tatacacttgtcaaaccccagagac

SEQ ID NO: 604949 - DNA, 25 bp, Homo sapien
taaccaaaacgtggaagcaatcaag

SEQ ID NO: 604950 - DNA, 25 bp, Homo sapien
gagaaacagtacaaagaccagtggc

SEQ ID NO: 604951 - DNA, 25 bp, Homo sapien
caccgacttcggtgagtaatgcacc

SEQ ID NO: 604952 - DNA, 25 bp, Homo sapien
caaaaaatccaggtatcgtggaatc

SEQ ID NO: 604953 - DNA, 25 bp, Homo sapien
tgtgtcaaaaggacgacatggcaag

SEQ ID NO: 604954 - DNA, 25 bp, Homo sapien
ggaatcaagtgcaataaggtgagga

SEQ ID NO: 604955 - DNA, 25 bp, Homo sapien
gaggtagacgactatttgcaggttc

SEQ ID NO: 604956 - DNA, 25 bp, Homo sapien
ccacatctactgaccagccaaggga

SEQ ID NO: 604957 - DNA, 25 bp, Homo sapien
tggtagaaacatgcccagtccaacc

SEQ ID NO: 604958 - DNA, 25 bp, Homo sapien
acatctactgaccagccaagggaaa

SEQ ID NO: 604959 - DNA, 25 bp, Homo sapien
tcacaacaattaatagaccaactgg

SEQ ID NO: 604960 - DNA, 25 bp, Homo sapien
ttctgtaagggcatcagcataatac

SEQ ID NO: 604961 - DNA, 25 bp, Homo sapien
gggcatcagcataatacagcacctt

SEQ ID NO: 604962 - DNA, 25 bp, Homo sapien
gcaatttctgtaagggcatcagcat

SEQ ID NO: 604963 - DNA, 25 bp, Homo sapien
tgtccattgaaaatgctagctccaa

SEQ ID NO: 604964 - DNA, 25 bp, Homo sapien
tatttgaatcactatcttggtccga

SEQ ID NO: 604965 - DNA, 25 bp, Homo sapien
gaaaagctcaagtgtcagggatggc

SEQ ID NO: 604966 - DNA, 25 bp, Homo sapien
gagatgttactttccaatgaatcag

SEQ ID NO: 604967 - DNA, 25 bp, Homo sapien
cagaattcctggcataagatccata

SEQ ID NO: 604968 - DNA, 25 bp, Homo sapien
gctaacctaaaatcctgtacaatgg

SEQ ID NO: 604969 - DNA, 25 bp, Homo sapien
ccacaaaggctgtctcagaatgaac

SEQ ID NO: 604970 - DNA, 25 bp, Homo sapien
aaaaagctcctcttgtagtaggtgc

SEQ ID NO: 604971 - DNA, 25 bp, Homo sapien
tgagagaatcaagtacgggaccaga

SEQ ID NO: 604972 - DNA, 25 bp, Homo sapien
taggcccctcctctaccatgttgaa

SEQ ID NO: 604973 - DNA, 25 bp, Homo sapien
ggagaggacactgtacacaggcaaa

SEQ ID NO: 604974 - DNA, 25 bp, Homo sapien
aacaccctggcgtttttcctgcaat

SEQ ID NO: 604975 - DNA, 25 bp, Homo sapien
tagccctagatttaaagagctcctg

SEQ ID NO: 604976 - DNA, 25 bp, Homo sapien
catggcaagtccccccggataatta

SEQ ID NO: 604977 - DNA, 25 bp, Homo sapien
atgaccagagtccatggcaagtccc

SEQ ID NO: 604978 - DNA, 25 bp, Homo sapien
caagtccccccggataattatatct

SEQ ID NO: 604979 - DNA, 25 bp, Homo sapien
agaaaatgtccagaccaagagattt

SEQ ID NO: 604980 - DNA, 25 bp, Homo sapien
tcatcagtcttaacctaggacaagg

SEQ ID NO: 604981 - DNA, 25 bp, Homo sapien
tgtggctcccctttagcaaactggt

SEQ ID NO: 604982 - DNA, 25 bp, Homo sapien
gagtctatctctgttagggccagaa

SEQ ID NO: 604983 - DNA, 25 bp, Homo sapien
cagagctaagtttgtgctaaagccc

SEQ ID NO: 604984 - DNA, 25 bp, Homo sapien
caaggggaggaacagggcgaccctg

SEQ ID NO: 604985 - DNA, 25 bp, Homo sapien
gcgaccctgaggcagcttcctcatt

SEQ ID NO: 604986 - DNA, 25 bp, Homo sapien
atcatagcgttccacccagactaca

SEQ ID NO: 604987 - DNA, 25 bp, Homo sapien
ccagactacagaaactcttgtctca

SEQ ID NO: 604988 - DNA, 25 bp, Homo sapien
tttagcaagtcactgtcatatattg

SEQ ID NO: 604989 - DNA, 25 bp, Homo sapien
tagcaagtcactgtcatatattgcc

SEQ ID NO: 604990 - DNA, 25 bp, Homo sapien
tttatttatggacaaagtcctcata

SEQ ID NO: 604991 - DNA, 25 bp, Homo sapien
ttatttatggacaaagtcctcatac

SEQ ID NO: 604992 - DNA, 25 bp, Homo sapien
atcgctttacataagtgagtggcaa

SEQ ID NO: 604993 - DNA, 25 bp, Homo sapien
tttctaatcgctttacataagtgag

SEQ ID NO: 604994 - DNA, 25 bp, Homo sapien
cccaaacagataataggaaatctaa

SEQ ID NO: 604995 - DNA, 25 bp, Homo sapien
caaatatatggactgtgctgtcctg

SEQ ID NO: 604996 - DNA, 25 bp, Homo sapien
gaagtgctactatttgcagtagttt

SEQ ID NO: 604997 - DNA, 25 bp, Homo sapien
gctactatttgcagtagtttccaca

SEQ ID NO: 604998 - DNA, 25 bp, Homo sapien
tactatttgcagtagtttccacacc

SEQ ID NO: 604999 - DNA, 25 bp, Homo sapien
agtgctactatttgcagtagtttcc

SEQ ID NO: 605000 - DNA, 25 bp, Homo sapien
ccttatttattaagctgcaatcaat

SEQ ID NO: 605001 - DNA, 25 bp, Homo sapien
tattaagctgcaatcaatatgttaa

SEQ ID NO: 605002 - DNA, 25 bp, Homo sapien
tgaacttcaagcaaatagagtgtac

SEQ ID NO: 605003 - DNA, 25 bp, Homo sapien
tgttaaaaaaagacacgctgatgaa

SEQ ID NO: 605004 - DNA, 25 bp, Homo sapien
tattgctgccctactattacggtct

SEQ ID NO: 605005 - DNA, 25 bp, Homo sapien
ccagaggaactgaaaccaggatctc

SEQ ID NO: 605006 - DNA, 25 bp, Homo sapien
gagatagcacctcattccaggtagg

SEQ ID NO: 605007 - DNA, 25 bp, Homo sapien
cacttcagggtgtatatccagagga

SEQ ID NO: 605008 - DNA, 25 bp, Homo sapien
aaaatatcaagtttcagggtagctc

SEQ ID NO: 605009 - DNA, 25 bp, Homo sapien
tgagagagatgcagggtcaatgcat

SEQ ID NO: 605010 - DNA, 25 bp, Homo sapien
gctttctcctgcatttactggatgt

SEQ ID NO: 605011 - DNA, 25 bp, Homo sapien
ggtcaaaggcctagattcaggtagc

SEQ ID NO: 605012 - DNA, 25 bp, Homo sapien
taacatggtgataccttgtgcccag

SEQ ID NO: 605013 - DNA, 25 bp, Homo sapien
ggcgagttactcattacacaccagg

SEQ ID NO: 605014 - DNA, 25 bp, Homo sapien
tatataggtaaggtgattttggcca

SEQ ID NO: 605015 - DNA, 25 bp, Homo sapien
tgagtaattctgtccccaagacaaa

SEQ ID NO: 605016 - DNA, 25 bp, Homo sapien
ccaaagccctcacagcctctggcaa

SEQ ID NO: 605017 - DNA, 25 bp, Homo sapien
caaagccctcacagcctctggcaag

SEQ ID NO: 605018 - DNA, 25 bp, Homo sapien
aaagccctcacagcctctggcaagg

SEQ ID NO: 605019 - DNA, 25 bp, Homo sapien
gccggccagagtacaaggaatttca

SEQ ID NO: 605020 - DNA, 25 bp, Homo sapien
caaatgtccttctcggctatggtga

SEQ ID NO: 605021 - DNA, 25 bp, Homo sapien
gacacccaagagttgaagtccccga

SEQ ID NO: 605022 - DNA, 25 bp, Homo sapien
taaaggtccattactgggtcaagct

SEQ ID NO: 605023 - DNA, 25 bp, Homo sapien
agagctcgcctgctgacaatcatcc

SEQ ID NO: 605024 - DNA, 25 bp, Homo sapien
taatccagtgtttaaagggtggatg

SEQ ID NO: 605025 - DNA, 25 bp, Homo sapien
gggatgaccatattaaattttccag

SEQ ID NO: 605026 - DNA, 25 bp, Homo sapien
ttgaatttttatccggaataatcca

SEQ ID NO: 605027 - DNA, 25 bp, Homo sapien
tgttgacaatgtcggtgattttctg

SEQ ID NO: 605028 - DNA, 25 bp, Homo sapien
ggggactgtaggagtcactttccag

SEQ ID NO: 605029 - DNA, 25 bp, Homo sapien
tgttccggtacttgttgacaatgtc

SEQ ID NO: 605030 - DNA, 25 bp, Homo sapien
tgattttctgtttccggcggacatg

SEQ ID NO: 605031 - DNA, 25 bp, Homo sapien
aagtgaagtataaaactctggctcc

SEQ ID NO: 605032 - DNA, 25 bp, Homo sapien
agtgaagtataaaactctggctcca

SEQ ID NO: 605033 - DNA, 25 bp, Homo sapien
taagaactgcagttcttgagtccaa

SEQ ID NO: 605034 - DNA, 25 bp, Homo sapien
ctaagaactgcagttcttgagtcca

SEQ ID NO: 605035 - DNA, 25 bp, Homo sapien
aagaactgcagttcttgagtccaac

SEQ ID NO: 605036 - DNA, 25 bp, Homo sapien
tcaaactgttctgctgtgttatagt

SEQ ID NO: 605037 - DNA, 25 bp, Homo sapien
agtgatcacctatcaaactgttctg

SEQ ID NO: 605038 - DNA, 25 bp, Homo sapien
gttcccaaactggagttcaacagtc

SEQ ID NO: 605039 - DNA, 25 bp, Homo sapien
gctgtgttatagttcccaaactgga

SEQ ID NO: 605040 - DNA, 25 bp, Homo sapien
taccaatgcacgtgtttaactgaga

SEQ ID NO: 605041 - DNA, 25 bp, Homo sapien
tacaactgagtagaaggctgtgact

SEQ ID NO: 605042 - DNA, 25 bp, Homo sapien
taactgagatgcataaaagcctttc

SEQ ID NO: 605043 - DNA, 25 bp, Homo sapien
tgcatccccattaaaggacaaggcc

SEQ ID NO: 605044 - DNA, 25 bp, Homo sapien
ctgtcattatgtcaccccgctggac

SEQ ID NO: 605045 - DNA, 25 bp, Homo sapien
gagagtggggtatcactgctgtctt

SEQ ID NO: 605046 - DNA, 25 bp, Homo sapien
accccgctggacaataatggagaga

SEQ ID NO: 605047 - DNA, 25 bp, Homo sapien
tatgtcaccccgctggacaataatg

SEQ ID NO: 605048 - DNA, 25 bp, Homo sapien
aatatttaatcaatgaatcacaaat

SEQ ID NO: 605049 - DNA, 25 bp, Homo sapien
aataatatttaatcaatgaatcaca

SEQ ID NO: 605050 - DNA, 25 bp, Homo sapien
tatttaatcaatgaatcacaaatat

SEQ ID NO: 605051 - DNA, 25 bp, Homo sapien
ttaatcaatgaatcacaaatattta

SEQ ID NO: 605052 - DNA, 25 bp, Homo sapien
agagacaatggatgaaaccaaataa

SEQ ID NO: 605053 - DNA, 25 bp, Homo sapien
aaataagagacaatggatgaaacca

SEQ ID NO: 605054 - DNA, 25 bp, Homo sapien
gagacaatggatgaaaccaaataat

SEQ ID NO: 605055 - DNA, 25 bp, Homo sapien
ctgaaataagagacaatggatgaaa

SEQ ID NO: 605056 - DNA, 25 bp, Homo sapien
gagcaaggctaacttccactttggg

SEQ ID NO: 605057 - DNA, 25 bp, Homo sapien
tctaacagtagccacccaaagaggt

SEQ ID NO: 605058 - DNA, 25 bp, Homo sapien
ttccctggaagacgaggaagtctcc

SEQ ID NO: 605059 - DNA, 25 bp, Homo sapien
taactgacattactggccaaaggtg

SEQ ID NO: 605060 - DNA, 25 bp, Homo sapien
cctaaccgacgaagatgaaacacag

SEQ ID NO: 605061 - DNA, 25 bp, Homo sapien
gcttcttctggacaaaggatcggca

SEQ ID NO: 605062 - DNA, 25 bp, Homo sapien
ggtgaatagagaactactgccagca

SEQ ID NO: 605063 - DNA, 25 bp, Homo sapien
tactgggcgcctactatatgcaagg

SEQ ID NO: 605064 - DNA, 25 bp, Homo sapien
ctcagcctgtatccaaaagcacaca

SEQ ID NO: 605065 - DNA, 25 bp, Homo sapien
ttataaagggcagccaaagccgagc

SEQ ID NO: 605066 - DNA, 25 bp, Homo sapien
taatgttcatttaaactacagatct

SEQ ID NO: 605067 - DNA, 25 bp, Homo sapien
cagtgtaggagtaaagcctcagcct

SEQ ID NO: 605068 - DNA, 25 bp, Homo sapien
ctgttgaaaaggcaaaccaggtcca

SEQ ID NO: 605069 - DNA, 25 bp, Homo sapien
ggtccaggcgggggagcagctgcag

SEQ ID NO: 605070 - DNA, 25 bp, Homo sapien
cagctgcaggaagggggtggtaaac

SEQ ID NO: 605071 - DNA, 25 bp, Homo sapien
tgaaaaggcaaaccaggtccaggcg

SEQ ID NO: 605072 - DNA, 25 bp, Homo sapien
ctcagcccaactgtgactaagctgt

SEQ ID NO: 605073 - DNA, 25 bp, Homo sapien
cccaactgtgactaagctgtgacat

SEQ ID NO: 605074 - DNA, 25 bp, Homo sapien
tcagcccaactgtgactaagctgtg

SEQ ID NO: 605075 - DNA, 25 bp, Homo sapien
agcccaactgtgactaagctgtgac

SEQ ID NO: 605076 - DNA, 25 bp, Homo sapien
cttggctaagtaagaagcgtagcca

SEQ ID NO: 605077 - DNA, 25 bp, Homo sapien
aagaaaatgtgaggtcgttcaccag

SEQ ID NO: 605078 - DNA, 25 bp, Homo sapien
taagtaagaagcgtagccagatgat

SEQ ID NO: 605079 - DNA, 25 bp, Homo sapien
ccagcggcatcaaagggtacttcat

SEQ ID NO: 605080 - DNA, 25 bp, Homo sapien
tcctgtcgggtattccacgcttaac

SEQ ID NO: 605081 - DNA, 25 bp, Homo sapien
aggagttgagctgcccattatcatt

SEQ ID NO: 605082 - DNA, 25 bp, Homo sapien
acttgggaaagtgcatcctgtcggg

SEQ ID NO: 605083 - DNA, 25 bp, Homo sapien
cacgcttaaccctctgtattctgag

SEQ ID NO: 605084 - DNA, 25 bp, Homo sapien
agagtcacaccacatggagacccgg

SEQ ID NO: 605085 - DNA, 25 bp, Homo sapien
tgatgaaacacgcacacacgaacaa

SEQ ID NO: 605086 - DNA, 25 bp, Homo sapien
tgactaagctgtgggagagtcacac

SEQ ID NO: 605087 - DNA, 25 bp, Homo sapien
caatgatctccactgtagccctgtt

SEQ ID NO: 605088 - DNA, 25 bp, Homo sapien
cctgtgacttggaaaatggccgtat

SEQ ID NO: 605089 - DNA, 25 bp, Homo sapien
aaagaaggctgctcctgtgacttgg

SEQ ID NO: 605090 - DNA, 25 bp, Homo sapien
gctgctcctgtgacttggaaaatgg

SEQ ID NO: 605091 - DNA, 25 bp, Homo sapien
cttcagggccttaaagggtgaccag

SEQ ID NO: 605092 - DNA, 25 bp, Homo sapien
ctcttggccgtggagtgtccccttc

SEQ ID NO: 605093 - DNA, 25 bp, Homo sapien
cctggaagggcctcacctggcacag

SEQ ID NO: 605094 - DNA, 25 bp, Homo sapien
ccctggaagggcctcacctggcaca

SEQ ID NO: 605095 - DNA, 25 bp, Homo sapien
cccctggaagggcctcacctggcac

SEQ ID NO: 605096 - DNA, 25 bp, Homo sapien
gctttgggtgggccttgaggctccc

SEQ ID NO: 605097 - DNA, 25 bp, Homo sapien
tcacatgtcggtctgaagaggagat

SEQ ID NO: 605098 - DNA, 25 bp, Homo sapien
acaccctccggcccagccctgcttt

SEQ ID NO: 605099 - DNA, 25 bp, Homo sapien
taagacccctctgaattaaattggc

SEQ ID NO: 605100 - DNA, 25 bp, Homo sapien
tgccctcccagacttgagcggctcc

SEQ ID NO: 605101 - DNA, 25 bp, Homo sapien
catgccctcccagacttgagcggct

SEQ ID NO: 605102 - DNA, 25 bp, Homo sapien
agcgcctggcaatgcgggcccgcgg

SEQ ID NO: 605103 - DNA, 25 bp, Homo sapien
gcgggcccgcgggatccgaggacac

SEQ ID NO: 605104 - DNA, 25 bp, Homo sapien
ggatccgaggacacggtgaggctag

SEQ ID NO: 605105 - DNA, 25 bp, Homo sapien
tgggcgcagcgcctggcaatgcggg

SEQ ID NO: 605106 - DNA, 25 bp, Homo sapien
tttcatctgttcattcaaccagtag

SEQ ID NO: 605107 - DNA, 25 bp, Homo sapien
tatttttcatctgttcattcaacca

SEQ ID NO: 605108 - DNA, 25 bp, Homo sapien
atttttcatctgttcattcaaccag

SEQ ID NO: 605109 - DNA, 25 bp, Homo sapien
ttaagtatttttcatctgttcattc

SEQ ID NO: 605110 - DNA, 25 bp, Homo sapien
tcaatttgggaagagtcggtgacgc

SEQ ID NO: 605111 - DNA, 25 bp, Homo sapien
cactccagtggaacagccagcagag

SEQ ID NO: 605112 - DNA, 25 bp, Homo sapien
gctggccttcattcccgccactgtc

SEQ ID NO: 605113 - DNA, 25 bp, Homo sapien
gggtgtagtcgcaggagattcttct

SEQ ID NO: 605114 - DNA, 25 bp, Homo sapien
tctctgttggatctgttccacctcc

SEQ ID NO: 605115 - DNA, 25 bp, Homo sapien
aggccaccaaggaggcccgacaggc

SEQ ID NO: 605116 - DNA, 25 bp, Homo sapien
catagatgtccagccggcggcacac

SEQ ID NO: 605117 - DNA, 25 bp, Homo sapien
cttgtgttgtcttcgcactgagcga

SEQ ID NO: 605118 - DNA, 25 bp, Homo sapien
cacacagcggccacctgggtctgtg

SEQ ID NO: 605119 - DNA, 25 bp, Homo sapien
tcataccggagtcgccattctctga

SEQ ID NO: 605120 - DNA, 25 bp, Homo sapien
taccggagtcgccattctctgacga

SEQ ID NO: 605121 - DNA, 25 bp, Homo sapien
cccttcataccggagtcgccattct

SEQ ID NO: 605122 - DNA, 25 bp, Homo sapien
gagtcgccattctctgacgacattt

SEQ ID NO: 605123 - DNA, 25 bp, Homo sapien
cagagtccatgttgaaggcttcttc

SEQ ID NO: 605124 - DNA, 25 bp, Homo sapien
aggagcaccgcagcttgttctgagt

SEQ ID NO: 605125 - DNA, 25 bp, Homo sapien
cctctgcaggagcaccgcagcttgt

SEQ ID NO: 605126 - DNA, 25 bp, Homo sapien
aggtgcctccccgggatggcctgct

SEQ ID NO: 605127 - DNA, 25 bp, Homo sapien
gcagcttcaacctccaggtacaagt

SEQ ID NO: 605128 - DNA, 25 bp, Homo sapien
catcacacctggctatttcaaaaat

SEQ ID NO: 605129 - DNA, 25 bp, Homo sapien
cccaagtggctaagactacaggcct

SEQ ID NO: 605130 - DNA, 25 bp, Homo sapien
caagtggctaagactacaggcctgc

SEQ ID NO: 605131 - DNA, 25 bp, Homo sapien
acagagcgcggtcagctctatgagg

SEQ ID NO: 605132 - DNA, 25 bp, Homo sapien
tcgtcacgccaagtctgcctttggg

SEQ ID NO: 605133 - DNA, 25 bp, Homo sapien
tcatatcctgcagggacaagtctcc

SEQ ID NO: 605134 - DNA, 25 bp, Homo sapien
cttcaggtccaagccgaggatgtca

SEQ ID NO: 605135 - DNA, 25 bp, Homo sapien
cttgaaggaccagcgggacctgtgt

SEQ ID NO: 605136 - DNA, 25 bp, Homo sapien
aggggcacaccaaagaggcgagttt

SEQ ID NO: 605137 - DNA, 25 bp, Homo sapien
ggtcagcttctagcaggctgtcaag

SEQ ID NO: 605138 - DNA, 25 bp, Homo sapien
ctgtcaaggggcacaccaaagaggc

SEQ ID NO: 605139 - DNA, 25 bp, Homo sapien
gaatgccttccatgtccagtcctct

SEQ ID NO: 605140 - DNA, 25 bp, Homo sapien
gatccgggcaccctgagaatgcctt

SEQ ID NO: 605141 - DNA, 25 bp, Homo sapien
tgagaatgccttccatgtccagtcc

SEQ ID NO: 605142 - DNA, 25 bp, Homo sapien
ttgaccctggcctgggatccgggca

SEQ ID NO: 605143 - DNA, 25 bp, Homo sapien
tcattgtgatgaacctcgtcccagc

SEQ ID NO: 605144 - DNA, 25 bp, Homo sapien
tactcagccgtgagcaaaggtgtcg

SEQ ID NO: 605145 - DNA, 25 bp, Homo sapien
taaaaaggccagcatagaagtctct

SEQ ID NO: 605146 - DNA, 25 bp, Homo sapien
tccggatgaaccttttgagcaaatc

SEQ ID NO: 605147 - DNA, 25 bp, Homo sapien
cctgcaggcgctgcttcaggttggg

SEQ ID NO: 605148 - DNA, 25 bp, Homo sapien
aagaacctgcaggcgctgcttcagg

SEQ ID NO: 605149 - DNA, 25 bp, Homo sapien
agaacctgcaggcgctgcttcaggt

SEQ ID NO: 605150 - DNA, 25 bp, Homo sapien
aacctgcaggcgctgcttcaggttg

SEQ ID NO: 605151 - DNA, 25 bp, Homo sapien
tggtagtgcaccattatctgcacca

SEQ ID NO: 605152 - DNA, 25 bp, Homo sapien
gcagaaagaggttaggggccatcac

SEQ ID NO: 605153 - DNA, 25 bp, Homo sapien
ttgttgtgctgttcccgggccacca

SEQ ID NO: 605154 - DNA, 25 bp, Homo sapien
ttcctcagagtcatcttgttgtgct

SEQ ID NO: 605155 - DNA, 25 bp, Homo sapien
aagtcttgaggcctgcgtcgcagag

SEQ ID NO: 605156 - DNA, 25 bp, Homo sapien
tgcatcctccgcagccaagtcttga

SEQ ID NO: 605157 - DNA, 25 bp, Homo sapien
gggcgcctgctgctactgtcgttca

SEQ ID NO: 605158 - DNA, 25 bp, Homo sapien
tgctactgtcgttcagttttcgcac

SEQ ID NO: 605159 - DNA, 25 bp, Homo sapien
gggtgagaggcaccttcaaggggtc

SEQ ID NO: 605160 - DNA, 25 bp, Homo sapien
cttcaaggggtccttgataggccag

SEQ ID NO: 605161 - DNA, 25 bp, Homo sapien
ccttcaaggggtccttgataggcca

SEQ ID NO: 605162 - DNA, 25 bp, Homo sapien
ccttgataggccagaccacctggat

SEQ ID NO: 605163 - DNA, 25 bp, Homo sapien
gaggtgctctgtgaactgcctcagg

SEQ ID NO: 605164 - DNA, 25 bp, Homo sapien
ctgcctcaggacgtgggccactttg

SEQ ID NO: 605165 - DNA, 25 bp, Homo sapien
tcttgacccttggaaccagggctga

SEQ ID NO: 605166 - DNA, 25 bp, Homo sapien
tcttcttgacccttggaaccagggc

SEQ ID NO: 605167 - DNA, 25 bp, Homo sapien
gtagaaggaggctgtccatgtcctc

SEQ ID NO: 605168 - DNA, 25 bp, Homo sapien
tagaaggaggctgtccatgtcctca

SEQ ID NO: 605169 - DNA, 25 bp, Homo sapien
tgtagaaggaggctgtccatgtcct

SEQ ID NO: 605170 - DNA, 25 bp, Homo sapien
agaaggaggctgtccatgtcctcac

SEQ ID NO: 605171 - DNA, 25 bp, Homo sapien
tcatgattattacttggagccaaga

SEQ ID NO: 605172 - DNA, 25 bp, Homo sapien
aacagtatgtgtaaccccctggtgg

SEQ ID NO: 605173 - DNA, 25 bp, Homo sapien
gaaactctctaagattggagaaccc

SEQ ID NO: 605174 - DNA, 25 bp, Homo sapien
gagtgagtggtggtcatcatgatta

SEQ ID NO: 605175 - DNA, 25 bp, Homo sapien
attccctccaacttcatagaggagg

SEQ ID NO: 605176 - DNA, 25 bp, Homo sapien
gttggctgactccatggacctatgg

SEQ ID NO: 605177 - DNA, 25 bp, Homo sapien
tgatattccctccaacttcatagag

SEQ ID NO: 605178 - DNA, 25 bp, Homo sapien
cctccaacttcatagaggaggatgt

SEQ ID NO: 605179 - DNA, 25 bp, Homo sapien
gcctttgaggtcgaagaactcccag

SEQ ID NO: 605180 - DNA, 25 bp, Homo sapien
tgaggtcgaagaactcccagggacc

SEQ ID NO: 605181 - DNA, 25 bp, Homo sapien
agtgagcctttgaggtcgaagaact

SEQ ID NO: 605182 - DNA, 25 bp, Homo sapien
tttgaggtcgaagaactcccaggga

SEQ ID NO: 605183 - DNA, 25 bp, Homo sapien
taggagatgctgttcccctgcacag

SEQ ID NO: 605184 - DNA, 25 bp, Homo sapien
gctccgctgagggaagatgccttgc

SEQ ID NO: 605185 - DNA, 25 bp, Homo sapien
tgtcccctggctgtatgcatcttga

SEQ ID NO: 605186 - DNA, 25 bp, Homo sapien
gggaagcccacggtcgatgactgac

SEQ ID NO: 605187 - DNA, 25 bp, Homo sapien
catgcgggttggcacggtacagatc

SEQ ID NO: 605188 - DNA, 25 bp, Homo sapien
gggttggcacggtacagatctaaga

SEQ ID NO: 605189 - DNA, 25 bp, Homo sapien
cacggtacagatctaagaggtaggc

SEQ ID NO: 605190 - DNA, 25 bp, Homo sapien
cagatctaagaggtaggcatctggg

SEQ ID NO: 605191 - DNA, 25 bp, Homo sapien
tgtgcacggttaaaacatgagagct

SEQ ID NO: 605192 - DNA, 25 bp, Homo sapien
tgggtacatggacacagagccagca

SEQ ID NO: 605193 - DNA, 25 bp, Homo sapien
gctgctcctgagactcgcagggttt

SEQ ID NO: 605194 - DNA, 25 bp, Homo sapien
gcaccacccctgagtctatttctga

SEQ ID NO: 605195 - DNA, 25 bp, Homo sapien
caagcttggtgtaggaagcaactct

SEQ ID NO: 605196 - DNA, 25 bp, Homo sapien
cagcaagcttggtgtaggaagcaac

SEQ ID NO: 605197 - DNA, 25 bp, Homo sapien
tggtgtaggaagcaactctctggag

SEQ ID NO: 605198 - DNA, 25 bp, Homo sapien
tcatacagcaagcttggtgtaggaa

SEQ ID NO: 605199 - DNA, 25 bp, Homo sapien
aactacctcttgataaaggtactgc

SEQ ID NO: 605200 - DNA, 25 bp, Homo sapien
agcccatggagatccaagcgcccca

SEQ ID NO: 605201 - DNA, 25 bp, Homo sapien
atggagatccaagcgccccaagtgg

SEQ ID NO: 605202 - DNA, 25 bp, Homo sapien
agaccccaactacctcttgataaag

SEQ ID NO: 605203 - DNA, 25 bp, Homo sapien
actacacattgtagggccactttcg

SEQ ID NO: 605204 - DNA, 25 bp, Homo sapien
cacattgtagggccactttcgaaac

SEQ ID NO: 605205 - DNA, 25 bp, Homo sapien
tacacattgtagggccactttcgaa

SEQ ID NO: 605206 - DNA, 25 bp, Homo sapien
gtgctgctgctactacacattgtag

SEQ ID NO: 605207 - DNA, 25 bp, Homo sapien
gattgtacaaatcaacatgtaaagc

SEQ ID NO: 605208 - DNA, 25 bp, Homo sapien
gggctggtcatggctacaatcttgg

SEQ ID NO: 605209 - DNA, 25 bp, Homo sapien
ggctggtcatggctacaatcttggc

SEQ ID NO: 605210 - DNA, 25 bp, Homo sapien
acatgtaaagcatgagagctgtgaa

SEQ ID NO: 605211 - DNA, 25 bp, Homo sapien
gaggattcccagagaggctgtccct

SEQ ID NO: 605212 - DNA, 25 bp, Homo sapien
aataagcgaagcctcacctggcctg

SEQ ID NO: 605213 - DNA, 25 bp, Homo sapien
aagctcccacgtcaactcgctggaa

SEQ ID NO: 605214 - DNA, 25 bp, Homo sapien
ggttcaaggcgtggctggatcacat

SEQ ID NO: 605215 - DNA, 25 bp, Homo sapien
tcctgccagccaacgtacaggaaca

SEQ ID NO: 605216 - DNA, 25 bp, Homo sapien
ccagccaacgtacaggaacaatgac

SEQ ID NO: 605217 - DNA, 25 bp, Homo sapien
tgccagccaacgtacaggaacaatg

SEQ ID NO: 605218 - DNA, 25 bp, Homo sapien
tgcagattttctattggggagcccc

SEQ ID NO: 605219 - DNA, 25 bp, Homo sapien
tcagggcccaattgttctccaggcc

SEQ ID NO: 605220 - DNA, 25 bp, Homo sapien
aattgttctccaggcctccggtcca

SEQ ID NO: 605221 - DNA, 25 bp, Homo sapien
ggcctccggtccaaagctcttgatg

SEQ ID NO: 605222 - DNA, 25 bp, Homo sapien
gctcttgatggatttagtaattggg

SEQ ID NO: 605223 - DNA, 25 bp, Homo sapien
cagggcggcaggactttggcatcat

SEQ ID NO: 605224 - DNA, 25 bp, Homo sapien
ggactttggcatcattggaagacca

SEQ ID NO: 605225 - DNA, 25 bp, Homo sapien
ttggcatcattggaagaccaagaac

SEQ ID NO: 605226 - DNA, 25 bp, Homo sapien
gcggcaggactttggcatcattgga

SEQ ID NO: 605227 - DNA, 25 bp, Homo sapien
tggaccacggcagttacctcgtcct

SEQ ID NO: 605228 - DNA, 25 bp, Homo sapien
ggaccacggcagttacctcgtcctc

SEQ ID NO: 605229 - DNA, 25 bp, Homo sapien
cctctggactccagtctcagtctcc

SEQ ID NO: 605230 - DNA, 25 bp, Homo sapien
tacctcgtcctccttggtcctctgg

SEQ ID NO: 605231 - DNA, 25 bp, Homo sapien
tgtgcatacattcaaccgctcctct

SEQ ID NO: 605232 - DNA, 25 bp, Homo sapien
ctctgggcgttgtgcatacattcaa

SEQ ID NO: 605233 - DNA, 25 bp, Homo sapien
agctcagccgcaattacccgggtct

SEQ ID NO: 605234 - DNA, 25 bp, Homo sapien
acctcggacagctcagccgcaatta

SEQ ID NO: 605235 - DNA, 25 bp, Homo sapien
ctggggcacccagataagttgctag

SEQ ID NO: 605236 - DNA, 25 bp, Homo sapien
tccgacctgcgtatcctgctttagc

SEQ ID NO: 605237 - DNA, 25 bp, Homo sapien
aaacagcacttgagcgctaaaggga

SEQ ID NO: 605238 - DNA, 25 bp, Homo sapien
tgttcttggccttatctccgacctg

SEQ ID NO: 605239 - DNA, 25 bp, Homo sapien
tagcttcacatttggtccctgtggg

SEQ ID NO: 605240 - DNA, 25 bp, Homo sapien
cattcacattcgccacatctgtcca

SEQ ID NO: 605241 - DNA, 25 bp, Homo sapien
tcattcacattcgccacatctgtcc

SEQ ID NO: 605242 - DNA, 25 bp, Homo sapien
attcacattcgccacatctgtccag

SEQ ID NO: 605243 - DNA, 25 bp, Homo sapien
caccacagaggggtctttattcatg

SEQ ID NO: 605244 - DNA, 25 bp, Homo sapien
tcccaccacagaggggtctttattc

SEQ ID NO: 605245 - DNA, 25 bp, Homo sapien
cacagaggggtctttattcatgcag

SEQ ID NO: 605246 - DNA, 25 bp, Homo sapien
agaggggtctttattcatgcagtac

SEQ ID NO: 605247 - DNA, 25 bp, Homo sapien
gaatgagttgtggagccatatagct

SEQ ID NO: 605248 - DNA, 25 bp, Homo sapien
tagctgacaggactttgcaagcctc

SEQ ID NO: 605249 - DNA, 25 bp, Homo sapien
tgtaggaatgagttgtggagccata

SEQ ID NO: 605250 - DNA, 25 bp, Homo sapien
tgtggagccatatagctgacaggac

SEQ ID NO: 605251 - DNA, 25 bp, Homo sapien
tgtcatggcttatagaagtctctct

SEQ ID NO: 605252 - DNA, 25 bp, Homo sapien
ctgatgtcagagtgattacgccttc

SEQ ID NO: 605253 - DNA, 25 bp, Homo sapien
cagcccacatttgtcaattacaaat

SEQ ID NO: 605254 - DNA, 25 bp, Homo sapien
tgattacgccttccccaatgtcatg

SEQ ID NO: 605255 - DNA, 25 bp, Homo sapien
ggctgctttgtctatcaacacgaag

SEQ ID NO: 605256 - DNA, 25 bp, Homo sapien
catcaaaaggttaggaggcctttca

SEQ ID NO: 605257 - DNA, 25 bp, Homo sapien
tatcaacacgaaggtcatcaaaagg

SEQ ID NO: 605258 - DNA, 25 bp, Homo sapien
caaatgaatgtgctcatcaaagact

SEQ ID NO: 605259 - DNA, 25 bp, Homo sapien
ggcgcaaagtcgctatctccgcttg

SEQ ID NO: 605260 - DNA, 25 bp, Homo sapien
tggcgttcgaggctctctcagggct

SEQ ID NO: 605261 - DNA, 25 bp, Homo sapien
tcagagcagctacgcgaagctggcg

SEQ ID NO: 605262 - DNA, 25 bp, Homo sapien
aaaggacagaaggacccgaggatgc

SEQ ID NO: 605263 - DNA, 25 bp, Homo sapien
gaacatgccgctcatcttggcctgg

SEQ ID NO: 605264 - DNA, 25 bp, Homo sapien
tccgctgcctcgctgataatggatg

SEQ ID NO: 605265 - DNA, 25 bp, Homo sapien
gacttgttggacacggacgtggcca

SEQ ID NO: 605266 - DNA, 25 bp, Homo sapien
aagtcgaggtcgtcgcaatgcgcga

SEQ ID NO: 605267 - DNA, 25 bp, Homo sapien
tcgggggcagagcccggcacgctga

SEQ ID NO: 605268 - DNA, 25 bp, Homo sapien
cccagtgatagtgcgctccagggac

SEQ ID NO: 605269 - DNA, 25 bp, Homo sapien
cgatacatggaacaacccctgggag

SEQ ID NO: 605270 - DNA, 25 bp, Homo sapien
tccctatgtaggagtcctgcgccgc

SEQ ID NO: 605271 - DNA, 25 bp, Homo sapien
gctagctcggaggtcgttgccaaga

SEQ ID NO: 605272 - DNA, 25 bp, Homo sapien
gatcttgccggtgtagcagcacaca

SEQ ID NO: 605273 - DNA, 25 bp, Homo sapien
tacaggcacgcgatgaggatcttgc

SEQ ID NO: 605274 - DNA, 25 bp, Homo sapien
acataaatggccatgagcagcgtga

SEQ ID NO: 605275 - DNA, 25 bp, Homo sapien
gactgaacttggacacggccttgag

SEQ ID NO: 605276 - DNA, 25 bp, Homo sapien
gcttcgttgaaggaaattgcccacc

SEQ ID NO: 605277 - DNA, 25 bp, Homo sapien
aatggctggacgctgtagattccga

SEQ ID NO: 605278 - DNA, 25 bp, Homo sapien
gctgcagggttgaaacgtctccgga

SEQ ID NO: 605279 - DNA, 25 bp, Homo sapien
tttagattcctgaaaaccggcaggc

SEQ ID NO: 605280 - DNA, 25 bp, Homo sapien
cccattctggctgcgaaattctacg

SEQ ID NO: 605281 - DNA, 25 bp, Homo sapien
cacgccgcgcgattcaggcctttaa

SEQ ID NO: 605282 - DNA, 25 bp, Homo sapien
tcaaggctgctttcaggatcgctga

SEQ ID NO: 605283 - DNA, 25 bp, Homo sapien
gatcgctgagacgtacccattctgg

SEQ ID NO: 605284 - DNA, 25 bp, Homo sapien
agcgcggacttggaacgacccgttg

SEQ ID NO: 605285 - DNA, 25 bp, Homo sapien
ttgtccagcaccagcggtaccggca

SEQ ID NO: 605286 - DNA, 25 bp, Homo sapien
actgggtccggtgcggcacgggcgt

SEQ ID NO: 605287 - DNA, 25 bp, Homo sapien
agtggcccgtgtgccaccgggccgg

SEQ ID NO: 605288 - DNA, 25 bp, Homo sapien
tgcgggcccgacgcgccccgtgccc

SEQ ID NO: 605289 - DNA, 25 bp, Homo sapien
ctgcgggcccgacgcgccccgtgcc

SEQ ID NO: 605290 - DNA, 25 bp, Homo sapien
gagcgcagcatccagcgcagtggct

SEQ ID NO: 605291 - DNA, 25 bp, Homo sapien
gaagctccaggttgaccggcacgtt

SEQ ID NO: 605292 - DNA, 25 bp, Homo sapien
tgctggaagctgtagtccagcagca

SEQ ID NO: 605293 - DNA, 25 bp, Homo sapien
cggtcgaagggcgagcgcagcatcc

SEQ ID NO: 605294 - DNA, 25 bp, Homo sapien
gatgggtaaaacatgcgtacactgg

SEQ ID NO: 605295 - DNA, 25 bp, Homo sapien
aaactatgggatgatcaacacagcc

SEQ ID NO: 605296 - DNA, 25 bp, Homo sapien
cagacatcatttgccgtgaatacag

SEQ ID NO: 605297 - DNA, 25 bp, Homo sapien
gggaatcccgtagcactcaaaaaga

SEQ ID NO: 605298 - DNA, 25 bp, Homo sapien
cacaactatgggcaaagggacttac

SEQ ID NO: 605299 - DNA, 25 bp, Homo sapien
cagtgaggtagttcaaagctaagcc

SEQ ID NO: 605300 - DNA, 25 bp, Homo sapien
gggacttacccagtcacacagtgag

SEQ ID NO: 605301 - DNA, 25 bp, Homo sapien
caacggctcagttcacaggctagta

SEQ ID NO: 605302 - DNA, 25 bp, Homo sapien
ttccacataatcctcagcgatgtag

SEQ ID NO: 605303 - DNA, 25 bp, Homo sapien
tgcgcttgcagtttttagcatctaa

SEQ ID NO: 605304 - DNA, 25 bp, Homo sapien
tcctcagcgatgtagctgtgctcat

SEQ ID NO: 605305 - DNA, 25 bp, Homo sapien
cctccaagattgatgcgcttgcagt

SEQ ID NO: 605306 - DNA, 25 bp, Homo sapien
taaaagctaccatttgtgaagggaa

SEQ ID NO: 605307 - DNA, 25 bp, Homo sapien
tgagcaagcaaagaatcatgctggc

SEQ ID NO: 605308 - DNA, 25 bp, Homo sapien
tccaagttctgtattaaaggcaagt

SEQ ID NO: 605309 - DNA, 25 bp, Homo sapien
aggtagacaacacccaaaagctgca

SEQ ID NO: 605310 - DNA, 25 bp, Homo sapien
ttttgaaagttatgaaatggaaaca

SEQ ID NO: 605311 - DNA, 25 bp, Homo sapien
atatagcagtcggtccagacgctcc

SEQ ID NO: 605312 - DNA, 25 bp, Homo sapien
gctgcatcttgtggacattattctc

SEQ ID NO: 605313 - DNA, 25 bp, Homo sapien
tcaggacaccgccatttgtgtaatt

SEQ ID NO: 605314 - DNA, 25 bp, Homo sapien
ataatcaggacaccgccatttgtgt

SEQ ID NO: 605315 - DNA, 25 bp, Homo sapien
gattttctgcttagcctgctccact

SEQ ID NO: 605316 - DNA, 25 bp, Homo sapien
tttgtgaaactgatccatctggcca

SEQ ID NO: 605317 - DNA, 25 bp, Homo sapien
gcttctggatgtaggactgcagctc

SEQ ID NO: 605318 - DNA, 25 bp, Homo sapien
cacctcgaggttgacttccgcttgg

SEQ ID NO: 605319 - DNA, 25 bp, Homo sapien
agacacacacgaagtggtgaggaca

SEQ ID NO: 605320 - DNA, 25 bp, Homo sapien
tgggagagacacacacgaagtggtg

SEQ ID NO: 605321 - DNA, 25 bp, Homo sapien
agagacacacacgaagtggtgagga

SEQ ID NO: 605322 - DNA, 25 bp, Homo sapien
ggagagacacacacgaagtggtgag

SEQ ID NO: 605323 - DNA, 25 bp, Homo sapien
accggcttctccactccaggtgttt

SEQ ID NO: 605324 - DNA, 25 bp, Homo sapien
aacaagggatcaaaatcattcatgc

SEQ ID NO: 605325 - DNA, 25 bp, Homo sapien
ctgaacagtggtgaccggcttctcc

SEQ ID NO: 605326 - DNA, 25 bp, Homo sapien
catcttccaaagacggctccagctg

SEQ ID NO: 605327 - DNA, 25 bp, Homo sapien
aagaaacagactagcccagccattt

SEQ ID NO: 605328 - DNA, 25 bp, Homo sapien
aagaataagcatgttctgggctgta

SEQ ID NO: 605329 - DNA, 25 bp, Homo sapien
gccatttaggtcaacaccttcaaag

SEQ ID NO: 605330 - DNA, 25 bp, Homo sapien
gaataagcatgttctgggctgtaga

SEQ ID NO: 605331 - DNA, 25 bp, Homo sapien
ccaatcgatcaatcaccgggggaaa

SEQ ID NO: 605332 - DNA, 25 bp, Homo sapien
caatcgatcaatcaccgggggaaaa

SEQ ID NO: 605333 - DNA, 25 bp, Homo sapien
tacaagccagtattcagatctcaag

SEQ ID NO: 605334 - DNA, 25 bp, Homo sapien
acaagccagtattcagatctcaagt

SEQ ID NO: 605335 - DNA, 25 bp, Homo sapien
tagaggacaagtctcctgctcagtg

SEQ ID NO: 605336 - DNA, 25 bp, Homo sapien
cagtaaaaggccgagtctagaggac

SEQ ID NO: 605337 - DNA, 25 bp, Homo sapien
cctatccctgcacggcaaggaagct

SEQ ID NO: 605338 - DNA, 25 bp, Homo sapien
tcatgaaatggtccccgagttgcag

SEQ ID NO: 605339 - DNA, 25 bp, Homo sapien
ctcaaactgcgtttcttaatcccaa

SEQ ID NO: 605340 - DNA, 25 bp, Homo sapien
atatttttaggccaaatgacaaaca

SEQ ID NO: 605341 - DNA, 25 bp, Homo sapien
ccagttgctagtttcctcaaactgc

SEQ ID NO: 605342 - DNA, 25 bp, Homo sapien
ttttaggccaaatgacaaacattcc

SEQ ID NO: 605343 - DNA, 25 bp, Homo sapien
ttctgtcccaacaaatagctgatga

SEQ ID NO: 605344 - DNA, 25 bp, Homo sapien
tcttctcctatgagagatggctgga

SEQ ID NO: 605345 - DNA, 25 bp, Homo sapien
tgtccagaatgtactgaagagtctc

SEQ ID NO: 605346 - DNA, 25 bp, Homo sapien
tctctggagctcgaattctttctgt

SEQ ID NO: 605347 - DNA, 25 bp, Homo sapien
gatacatcgtgttgccgccagtgag

SEQ ID NO: 605348 - DNA, 25 bp, Homo sapien
gctttcatgccaggatacatcgtgt

SEQ ID NO: 605349 - DNA, 25 bp, Homo sapien
gttgccgccagtgaggaaaacgttc

SEQ ID NO: 605350 - DNA, 25 bp, Homo sapien
tcatgccaggatacatcgtgttgcc

SEQ ID NO: 605351 - DNA, 25 bp, Homo sapien
aattggaacattagggcttagtgac

SEQ ID NO: 605352 - DNA, 25 bp, Homo sapien
ggtgacaccataacagcaaaagcag

SEQ ID NO: 605353 - DNA, 25 bp, Homo sapien
cttaggtggttggtatgtttgagcc

SEQ ID NO: 605354 - DNA, 25 bp, Homo sapien
taatgatcacggagggccttaggtg

SEQ ID NO: 605355 - DNA, 25 bp, Homo sapien
gggacatagatgttggaagcacagt

SEQ ID NO: 605356 - DNA, 25 bp, Homo sapien
catactctttcctggtgatccaaac

SEQ ID NO: 605357 - DNA, 25 bp, Homo sapien
taggtggttcaaggcccagtcacga

SEQ ID NO: 605358 - DNA, 25 bp, Homo sapien
tccagcacagggttcgaggcaagtt

SEQ ID NO: 605359 - DNA, 25 bp, Homo sapien
caagtgaaccgaattctgaagggca

SEQ ID NO: 605360 - DNA, 25 bp, Homo sapien
gaaggccagttagtctctaccacag

SEQ ID NO: 605361 - DNA, 25 bp, Homo sapien
gacttgggcaggtacatctagcaca

SEQ ID NO: 605362 - DNA, 25 bp, Homo sapien
tgtgcccggcaataaacattacctt

SEQ ID NO: 605363 - DNA, 25 bp, Homo sapien
ttcccttccggtctgcagtttctaa

SEQ ID NO: 605364 - DNA, 25 bp, Homo sapien
cctttgtttacggtcagctgtggtc

SEQ ID NO: 605365 - DNA, 25 bp, Homo sapien
tttcctttgtttacggtcagctgtg

SEQ ID NO: 605366 - DNA, 25 bp, Homo sapien
tcccttccggtctgcagtttctaag

SEQ ID NO: 605367 - DNA, 25 bp, Homo sapien
cttgcagcggaagaaggaacatctc

SEQ ID NO: 605368 - DNA, 25 bp, Homo sapien
caaagagccaaagccgaggtgctgc

SEQ ID NO: 605369 - DNA, 25 bp, Homo sapien
gaagttgtcaatcgggagaatctgc

SEQ ID NO: 605370 - DNA, 25 bp, Homo sapien
taagtcctctccgtgtgagtaaacc

SEQ ID NO: 605371 - DNA, 25 bp, Homo sapien
catcatcacgattggctagttttgt

SEQ ID NO: 605372 - DNA, 25 bp, Homo sapien
gtgtgcatcatcacgattggctagt

SEQ ID NO: 605373 - DNA, 25 bp, Homo sapien
tgcatcatcacgattggctagtttt

SEQ ID NO: 605374 - DNA, 25 bp, Homo sapien
gacccacccatctgatcctcctgag

SEQ ID NO: 605375 - DNA, 25 bp, Homo sapien
gtttcaggaaaagcaattagacagt

SEQ ID NO: 605376 - DNA, 25 bp, Homo sapien
taataatccagttgtgaatgacact

SEQ ID NO: 605377 - DNA, 25 bp, Homo sapien
cattgttctccgaagaatgtttcca

SEQ ID NO: 605378 - DNA, 25 bp, Homo sapien
aataacccaagggaatcattgttct

SEQ ID NO: 605379 - DNA, 25 bp, Homo sapien
gacgccctttgagatgtgcaggatg

SEQ ID NO: 605380 - DNA, 25 bp, Homo sapien
acgtctgacgccctttgagatgtgc

SEQ ID NO: 605381 - DNA, 25 bp, Homo sapien
ctctgctgacgtctgacgccctttg

SEQ ID NO: 605382 - DNA, 25 bp, Homo sapien
tgctgacgtctgacgccctttgaga

SEQ ID NO: 605383 - DNA, 25 bp, Homo sapien
tggcctgcggtgtggactcgcatca

SEQ ID NO: 605384 - DNA, 25 bp, Homo sapien
ggtgtggactcgcatcatttcctct

SEQ ID NO: 605385 - DNA, 25 bp, Homo sapien
cctgcgcggcctgagtctgaaggct

SEQ ID NO: 605386 - DNA, 25 bp, Homo sapien
ttcctagcttgaaggcctgcgcggc

SEQ ID NO: 605387 - DNA, 25 bp, Homo sapien
tcccgaccccggctgtgtctgtggg

SEQ ID NO: 605388 - DNA, 25 bp, Homo sapien
ggcggctcccgaccccggctgtgtc

SEQ ID NO: 605389 - DNA, 25 bp, Homo sapien
cccggctgtgtctgtgggtccccga

SEQ ID NO: 605390 - DNA, 25 bp, Homo sapien
tgtgtctgtgggtccccgagccgca

SEQ ID NO: 605391 - DNA, 25 bp, Homo sapien
attcagaggcggcacctggtgtcca

SEQ ID NO: 605392 - DNA, 25 bp, Homo sapien
ttcctagaagcgctgatgaagccac

SEQ ID NO: 605393 - DNA, 25 bp, Homo sapien
ggctcaattatcctccaagggctgg

SEQ ID NO: 605394 - DNA, 25 bp, Homo sapien
gaaatgcaatcacatgggcgcgcag

SEQ ID NO: 605395 - DNA, 25 bp, Homo sapien
gagtcaatcagtctgcccacctctg

SEQ ID NO: 605396 - DNA, 25 bp, Homo sapien
tgcagaggtgcacgcaatcatggct

SEQ ID NO: 605397 - DNA, 25 bp, Homo sapien
ctcctggagtcaatcagtctgccca

SEQ ID NO: 605398 - DNA, 25 bp, Homo sapien
agtgcagaggtgcacgcaatcatgg

SEQ ID NO: 605399 - DNA, 25 bp, Homo sapien
aagcgatgtcttcccgttggccaag

SEQ ID NO: 605400 - DNA, 25 bp, Homo sapien
aatgaattggacacagtcacggacc

SEQ ID NO: 605401 - DNA, 25 bp, Homo sapien
ggagttaagtagacagcacctggct

SEQ ID NO: 605402 - DNA, 25 bp, Homo sapien
caagtttgtggatacgccctagatc

SEQ ID NO: 605403 - DNA, 25 bp, Homo sapien
aaggaaatctcaggttcacatagga

SEQ ID NO: 605404 - DNA, 25 bp, Homo sapien
caaggaaatctcaggttcacatagg

SEQ ID NO: 605405 - DNA, 25 bp, Homo sapien
aaaggatcggctttgttccaggcct

SEQ ID NO: 605406 - DNA, 25 bp, Homo sapien
tccagcagtggaacaataacagacc

SEQ ID NO: 605407 - DNA, 25 bp, Homo sapien
gactataaccccatttagcaggact

SEQ ID NO: 605408 - DNA, 25 bp, Homo sapien
catattgggagcagaccaggtgtta

SEQ ID NO: 605409 - DNA, 25 bp, Homo sapien
tgggcaagccactgtatctaggata

SEQ ID NO: 605410 - DNA, 25 bp, Homo sapien
gagtgggtgacctgctccaaggata

SEQ ID NO: 605411 - DNA, 25 bp, Homo sapien
caagccttgacgtaacatggaccca

SEQ ID NO: 605412 - DNA, 25 bp, Homo sapien
taagtgactgatatttgggaaaccc

SEQ ID NO: 605413 - DNA, 25 bp, Homo sapien
tacagtggccctgtaagtatcagca

SEQ ID NO: 605414 - DNA, 25 bp, Homo sapien
gtatcagcaaggtctggctatgctg

SEQ ID NO: 605415 - DNA, 25 bp, Homo sapien
gggagacacagatgaacacatgtgt

SEQ ID NO: 605416 - DNA, 25 bp, Homo sapien
gagaagtgcaaatccttacagtggc

SEQ ID NO: 605417 - DNA, 25 bp, Homo sapien
gctgggggctagcacggtgcaccgg

SEQ ID NO: 605418 - DNA, 25 bp, Homo sapien
tgggggctagcacggtgcaccgggg

SEQ ID NO: 605419 - DNA, 25 bp, Homo sapien
ctgggggctagcacggtgcaccggg

SEQ ID NO: 605420 - DNA, 25 bp, Homo sapien
tggctgggggctagcacggtgcacc

SEQ ID NO: 605421 - DNA, 25 bp, Homo sapien
aggacactttcttgcggcggccgcc

SEQ ID NO: 605422 - DNA, 25 bp, Homo sapien
tcggcgtcgttcctcagcgaggcct

SEQ ID NO: 605423 - DNA, 25 bp, Homo sapien
cttccgctcatgctttcgcttgcgg

SEQ ID NO: 605424 - DNA, 25 bp, Homo sapien
tgcggtgctgcaagtcctgctcgta

SEQ ID NO: 605425 - DNA, 25 bp, Homo sapien
cacgtctactgcacagaacctggat

SEQ ID NO: 605426 - DNA, 25 bp, Homo sapien
acgtccacttcctaagaggaatggg

SEQ ID NO: 605427 - DNA, 25 bp, Homo sapien
acctgccttgcccacacgtctactg

SEQ ID NO: 605428 - DNA, 25 bp, Homo sapien
ctaggaacgtccacttcctaagagg

SEQ ID NO: 605429 - DNA, 25 bp, Homo sapien
cttggctcacaatgagcaggcgaga

SEQ ID NO: 605430 - DNA, 25 bp, Homo sapien
tgagcaggcgagaccgcctctgaac

SEQ ID NO: 605431 - DNA, 25 bp, Homo sapien
tcacaatgagcaggcgagaccgcct

SEQ ID NO: 605432 - DNA, 25 bp, Homo sapien
aggcgagaccgcctctgaacaagcc

SEQ ID NO: 605433 - DNA, 25 bp, Homo sapien
gtggaattacacttctcagagggtt

SEQ ID NO: 605434 - DNA, 25 bp, Homo sapien
cagccaggtggaagtggaattacac

SEQ ID NO: 605435 - DNA, 25 bp, Homo sapien
cagctcccagcagagtggttccagg

SEQ ID NO: 605436 - DNA, 25 bp, Homo sapien
gatgcctcttggctcgtttcctaga

SEQ ID NO: 605437 - DNA, 25 bp, Homo sapien
gataacatatgtaaggcaagctgcc

SEQ ID NO: 605438 - DNA, 25 bp, Homo sapien
ccaacaacgttatgaagcgggtaca

SEQ ID NO: 605439 - DNA, 25 bp, Homo sapien
tcactgtggcaaaagcgaagctact

SEQ ID NO: 605440 - DNA, 25 bp, Homo sapien
tgagcatagcccagtgaggtcaagg

SEQ ID NO: 605441 - DNA, 25 bp, Homo sapien
aagatgccagcagaaacaccaggat

SEQ ID NO: 605442 - DNA, 25 bp, Homo sapien
gatgccagcagaaacaccaggatgc

SEQ ID NO: 605443 - DNA, 25 bp, Homo sapien
tcaaagggcccaagatgccagcaga

SEQ ID NO: 605444 - DNA, 25 bp, Homo sapien
ccaagatgccagcagaaacaccagg

SEQ ID NO: 605445 - DNA, 25 bp, Homo sapien
gtggcaaggcccaggtgtccagcac

SEQ ID NO: 605446 - DNA, 25 bp, Homo sapien
caaggcccaggtgtccagcactgtg

SEQ ID NO: 605447 - DNA, 25 bp, Homo sapien
ttaagatggtggtggcaaggcccag

SEQ ID NO: 605448 - DNA, 25 bp, Homo sapien
gcaaggcccaggtgtccagcactgt

SEQ ID NO: 605449 - DNA, 25 bp, Homo sapien
ctttaagaaatctacggagttgtgt

SEQ ID NO: 605450 - DNA, 25 bp, Homo sapien
gaaatctacggagttgtgtgggctt

SEQ ID NO: 605451 - DNA, 25 bp, Homo sapien
aagaaatctacggagttgtgtgggc

SEQ ID NO: 605452 - DNA, 25 bp, Homo sapien
ttaagaaatctacggagttgtgtgg

SEQ ID NO: 605453 - DNA, 25 bp, Homo sapien
tcatctaacacttgggcctggacgt

SEQ ID NO: 605454 - DNA, 25 bp, Homo sapien
ggcagagtatgaagagtgaagcctc

SEQ ID NO: 605455 - DNA, 25 bp, Homo sapien
gggccccaggatcatctaacacttg

SEQ ID NO: 605456 - DNA, 25 bp, Homo sapien
gcctggacgtgggtagaatttgcct

SEQ ID NO: 605457 - DNA, 25 bp, Homo sapien
gtaaactggggcccaggtgtgaatc

SEQ ID NO: 605458 - DNA, 25 bp, Homo sapien
ctgcggtaaactggggcccaggtgt

SEQ ID NO: 605459 - DNA, 25 bp, Homo sapien
gcggtaaactggggcccaggtgtga

SEQ ID NO: 605460 - DNA, 25 bp, Homo sapien
aactggggcccaggtgtgaatcact

SEQ ID NO: 605461 - DNA, 25 bp, Homo sapien
gagatgcaggcatccgagccctgtt

SEQ ID NO: 605462 - DNA, 25 bp, Homo sapien
gcaggcatccgagccctgtttaaag

SEQ ID NO: 605463 - DNA, 25 bp, Homo sapien
tgagggtacacacgggtcagggaga

SEQ ID NO: 605464 - DNA, 25 bp, Homo sapien
tcagggagatgcaggcatccgagcc

SEQ ID NO: 605465 - DNA, 25 bp, Homo sapien
cctcagcagccatgcacagttttct

SEQ ID NO: 605466 - DNA, 25 bp, Homo sapien
aatagcagcaccagatacagttatc

SEQ ID NO: 605467 - DNA, 25 bp, Homo sapien
caggcacccctcaggaatgtagggc

SEQ ID NO: 605468 - DNA, 25 bp, Homo sapien
gcaccagatacagttatctttggag

SEQ ID NO: 605469 - DNA, 25 bp, Homo sapien
ctcaggaatgtagggcccagtcttc

SEQ ID NO: 605470 - DNA, 25 bp, Homo sapien
tacccatcttctgcccgtgcagcag

SEQ ID NO: 605471 - DNA, 25 bp, Homo sapien
cctgcatgctgcacaatctcctgtg

SEQ ID NO: 605472 - DNA, 25 bp, Homo sapien
cctgtgacttccagatacccatctt

SEQ ID NO: 605473 - DNA, 25 bp, Homo sapien
ccctgtcctgctactctccctgcat

SEQ ID NO: 605474 - DNA, 25 bp, Homo sapien
aaggtgaaccctgggatcgtggcca

SEQ ID NO: 605475 - DNA, 25 bp, Homo sapien
gatacagactcggttcccatgtcaa

SEQ ID NO: 605476 - DNA, 25 bp, Homo sapien
gaagtgaaaggtgcacgaacctccc

SEQ ID NO: 605477 - DNA, 25 bp, Homo sapien
gccacatttcctgtcaagagcgtga

SEQ ID NO: 605478 - DNA, 25 bp, Homo sapien
tgacctcgagatggttagcaacatg

SEQ ID NO: 605479 - DNA, 25 bp, Homo sapien
tgctggttcacagaccactgtaagg

SEQ ID NO: 605480 - DNA, 25 bp, Homo sapien
ggcagggccctactgagatggcaaa

SEQ ID NO: 605481 - DNA, 25 bp, Homo sapien
tagcaacatgcgaccataggcgtgg

SEQ ID NO: 605482 - DNA, 25 bp, Homo sapien
ggtgccctgagcattacagatggct

SEQ ID NO: 605483 - DNA, 25 bp, Homo sapien
ggagcagtggccactatatccctga

SEQ ID NO: 605484 - DNA, 25 bp, Homo sapien
actaggatgggtttctggatggttc

SEQ ID NO: 605485 - DNA, 25 bp, Homo sapien
gatggttctgctcacattagctagg

SEQ ID NO: 605486 - DNA, 25 bp, Homo sapien
cacatcatggtttataagactggca

SEQ ID NO: 605487 - DNA, 25 bp, Homo sapien
tgcacaattctaggtggcaccatcc

SEQ ID NO: 605488 - DNA, 25 bp, Homo sapien
caagttcttgcgtgatgtgagccct

SEQ ID NO: 605489 - DNA, 25 bp, Homo sapien
tcagtttcaagtggttggtggctac

SEQ ID NO: 605490 - DNA, 25 bp, Homo sapien
gggaaacaaattagaagtgagctgg

SEQ ID NO: 605491 - DNA, 25 bp, Homo sapien
cagggtgaagagaagactatccctt

SEQ ID NO: 605492 - DNA, 25 bp, Homo sapien
tgggcagggtgaagagaagactatc

SEQ ID NO: 605493 - DNA, 25 bp, Homo sapien
gaaacaaattagaagtgagctgggc

SEQ ID NO: 605494 - DNA, 25 bp, Homo sapien
tggacactatctccacgctacggtt

SEQ ID NO: 605495 - DNA, 25 bp, Homo sapien
gaggtggtttcctcgttgatttctg

SEQ ID NO: 605496 - DNA, 25 bp, Homo sapien
gctgaggtggtttcctcgttgattt

SEQ ID NO: 605497 - DNA, 25 bp, Homo sapien
tacggttcatgccatagggcagggc

SEQ ID NO: 605498 - DNA, 25 bp, Homo sapien
gggtgtcaaatgccccttctttggc

SEQ ID NO: 605499 - DNA, 25 bp, Homo sapien
tgtcaaatgccccttctttggccct

SEQ ID NO: 605500 - DNA, 25 bp, Homo sapien
gtcaaatgccccttctttggcccta

SEQ ID NO: 605501 - DNA, 25 bp, Homo sapien
ctatgggtgtcaaatgccccttctt

SEQ ID NO: 605502 - DNA, 25 bp, Homo sapien
gatgagacaactgacgcccagaatt

SEQ ID NO: 605503 - DNA, 25 bp, Homo sapien
gaatttccaagaggtagatgccact

SEQ ID NO: 605504 - DNA, 25 bp, Homo sapien
gaaggtgaactcctgctctggcaga

SEQ ID NO: 605505 - DNA, 25 bp, Homo sapien
tcattgaaagcatacactctggagg

SEQ ID NO: 605506 - DNA, 25 bp, Homo sapien
agggtacaggagtgagcttcccgtt

SEQ ID NO: 605507 - DNA, 25 bp, Homo sapien
gtacaggagtgagcttcccgttgca

SEQ ID NO: 605508 - DNA, 25 bp, Homo sapien
gcaataggagggtacaggagtgagc

SEQ ID NO: 605509 - DNA, 25 bp, Homo sapien
ctgcaataggagggtacaggagtga

SEQ ID NO: 605510 - DNA, 25 bp, Homo sapien
tggtgtagggctgtgagtccgtcct

SEQ ID NO: 605511 - DNA, 25 bp, Homo sapien
ggctgtgagtccgtcctcattgcac

SEQ ID NO: 605512 - DNA, 25 bp, Homo sapien
gagtccgtcctcattgcacaaatca

SEQ ID NO: 605513 - DNA, 25 bp, Homo sapien
gtagggctgtgagtccgtcctcatt

SEQ ID NO: 605514 - DNA, 25 bp, Homo sapien
tggagccccaacgagcccggcctta

SEQ ID NO: 605515 - DNA, 25 bp, Homo sapien
agtgccgagaaacagggtacctgtc

SEQ ID NO: 605516 - DNA, 25 bp, Homo sapien
tgagcaggaaagtgccgagaaacag

SEQ ID NO: 605517 - DNA, 25 bp, Homo sapien
cgagaaacagggtacctgtccaggt

SEQ ID NO: 605518 - DNA, 25 bp, Homo sapien
caagagcctttcagatgggccagct

SEQ ID NO: 605519 - DNA, 25 bp, Homo sapien
gagcccactgggtacaaggacctga

SEQ ID NO: 605520 - DNA, 25 bp, Homo sapien
tgggatggcagtaacagacacgcgt

SEQ ID NO: 605521 - DNA, 25 bp, Homo sapien
tagaagattggtcatgagcccagcc

SEQ ID NO: 605522 - DNA, 25 bp, Homo sapien
gagtctgggagtttccaatggcaga

SEQ ID NO: 605523 - DNA, 25 bp, Homo sapien
tttctggcacgcagtaggaggtagc

SEQ ID NO: 605524 - DNA, 25 bp, Homo sapien
catttcagggcaagctatagcagcc

SEQ ID NO: 605525 - DNA, 25 bp, Homo sapien
ccctctagggttcatggagctggga

SEQ ID NO: 605526 - DNA, 25 bp, Homo sapien
atataactgaagtaatttgcaggga

SEQ ID NO: 605527 - DNA, 25 bp, Homo sapien
tatataactgaagtaatttgcaggg

SEQ ID NO: 605528 - DNA, 25 bp, Homo sapien
aatatataactgaagtaatttgcag

SEQ ID NO: 605529 - DNA, 25 bp, Homo sapien
tataactgaagtaatttgcagggaa

SEQ ID NO: 605530 - DNA, 25 bp, Homo sapien
tgaaataatccagctcaacgtgagc

SEQ ID NO: 605531 - DNA, 25 bp, Homo sapien
tccaaagcggtttcaagatcatagc

SEQ ID NO: 605532 - DNA, 25 bp, Homo sapien
tctgacttaggaacctctgaccagg

SEQ ID NO: 605533 - DNA, 25 bp, Homo sapien
tcctgatagtccctgcgaggagaca

SEQ ID NO: 605534 - DNA, 25 bp, Homo sapien
gcatggagaggtgtccacagctcgt

SEQ ID NO: 605535 - DNA, 25 bp, Homo sapien
tttcctcaaagttgtcgatgcagca

SEQ ID NO: 605536 - DNA, 25 bp, Homo sapien
cgttcacattggcaccatgggagag

SEQ ID NO: 605537 - DNA, 25 bp, Homo sapien
tgtccttggcgttcacattggcacc

SEQ ID NO: 605538 - DNA, 25 bp, Homo sapien
gaattagccatactcaggttcccat

SEQ ID NO: 605539 - DNA, 25 bp, Homo sapien
tggttcctaagaatggccctggatg

SEQ ID NO: 605540 - DNA, 25 bp, Homo sapien
gtaataccgatcagctttgggaccc

SEQ ID NO: 605541 - DNA, 25 bp, Homo sapien
ggttcccatcagagacataggcaca

SEQ ID NO: 605542 - DNA, 25 bp, Homo sapien
ccatgcaggtctcgatgacatccag

SEQ ID NO: 605543 - DNA, 25 bp, Homo sapien
tcctcgcagaggtcatatggcatgt

SEQ ID NO: 605544 - DNA, 25 bp, Homo sapien
ttcccatccgagttgacagcaagca

SEQ ID NO: 605545 - DNA, 25 bp, Homo sapien
ccagggtgggttcatcctcgcagag

SEQ ID NO: 605546 - DNA, 25 bp, Homo sapien
tcacttcatagcaggctgccctccc

SEQ ID NO: 605547 - DNA, 25 bp, Homo sapien
cttcatagcaggctgccctccctta

SEQ ID NO: 605548 - DNA, 25 bp, Homo sapien
ttcatagcaggctgccctcccttac

SEQ ID NO: 605549 - DNA, 25 bp, Homo sapien
cacttcatagcaggctgccctccct

SEQ ID NO: 605550 - DNA, 25 bp, Homo sapien
tggatgtccgcaatcatctgctgct

SEQ ID NO: 605551 - DNA, 25 bp, Homo sapien
atctatccagtccaggtcctggccc

SEQ ID NO: 605552 - DNA, 25 bp, Homo sapien
ggagccacccgcatctcgttgattt

SEQ ID NO: 605553 - DNA, 25 bp, Homo sapien
gtcctggcccgctgcgatcatgcag

SEQ ID NO: 605554 - DNA, 25 bp, Homo sapien
cttcacatccacacgcactccatgg

SEQ ID NO: 605555 - DNA, 25 bp, Homo sapien
tcagctgcccgcaggtatccattgg

SEQ ID NO: 605556 - DNA, 25 bp, Homo sapien
atccacacgcactccatggtccagg

SEQ ID NO: 605557 - DNA, 25 bp, Homo sapien
acatccacacgcactccatggtcca

SEQ ID NO: 605558 - DNA, 25 bp, Homo sapien
cactgagactagctccatgggacac

SEQ ID NO: 605559 - DNA, 25 bp, Homo sapien
atgtccttgcactgagactagctcc

SEQ ID NO: 605560 - DNA, 25 bp, Homo sapien
tccttgcactgagactagctccatg

SEQ ID NO: 605561 - DNA, 25 bp, Homo sapien
tgcactgagactagctccatgggac

SEQ ID NO: 605562 - DNA, 25 bp, Homo sapien
tgggcacagtcacaattcctaagct

SEQ ID NO: 605563 - DNA, 25 bp, Homo sapien
tgaaaactccaagcatctttcaggg

SEQ ID NO: 605564 - DNA, 25 bp, Homo sapien
tgatagtttccaagaagagtcccca

SEQ ID NO: 605565 - DNA, 25 bp, Homo sapien
taagcttcccagctatgaccgaggg

SEQ ID NO: 605566 - DNA, 25 bp, Homo sapien
ctgcgctggaggtcctccggctcaa

SEQ ID NO: 605567 - DNA, 25 bp, Homo sapien
catcatgcttgtgttttagctccag

SEQ ID NO: 605568 - DNA, 25 bp, Homo sapien
ttgtgttttagctccagcagcagga

SEQ ID NO: 605569 - DNA, 25 bp, Homo sapien
ccggctcaaggatgacttgtgcctc

SEQ ID NO: 605570 - DNA, 25 bp, Homo sapien
tcatactccttcctatacaggttgg

SEQ ID NO: 605571 - DNA, 25 bp, Homo sapien
ttgtaggtggaggtccgctgatcct

SEQ ID NO: 605572 - DNA, 25 bp, Homo sapien
tacaggttggtcctgtccgacaggc

SEQ ID NO: 605573 - DNA, 25 bp, Homo sapien
gctgcactccgctgccacaggatgg

SEQ ID NO: 605574 - DNA, 25 bp, Homo sapien
aaaaagaagttgtagcaccctcagc

SEQ ID NO: 605575 - DNA, 25 bp, Homo sapien
ttgctagcaagagccaaagaacgcc

SEQ ID NO: 605576 - DNA, 25 bp, Homo sapien
taaaggaccattggctgctacagga

SEQ ID NO: 605577 - DNA, 25 bp, Homo sapien
gaggcgtggaacagaatccccttga

SEQ ID NO: 605578 - DNA, 25 bp, Homo sapien
tggctcgtgcctataatcccagcac

SEQ ID NO: 605579 - DNA, 25 bp, Homo sapien
aaaacaagaatgaggccaggtacag

SEQ ID NO: 605580 - DNA, 25 bp, Homo sapien
aagattccatctctaaaaaattttg

SEQ ID NO: 605581 - DNA, 25 bp, Homo sapien
gcaagattccatctctaaaaaattt

SEQ ID NO: 605582 - DNA, 25 bp, Homo sapien
atgttgtccagtaactcctaggctc

SEQ ID NO: 605583 - DNA, 25 bp, Homo sapien
tggtctctttcaccagttgttcaca

SEQ ID NO: 605584 - DNA, 25 bp, Homo sapien
tatagaacaccaatctgaaagcatc

SEQ ID NO: 605585 - DNA, 25 bp, Homo sapien
aataccagggctgtttagtgggaca

SEQ ID NO: 605586 - DNA, 25 bp, Homo sapien
gaggaagcgtaagtagaataccagg

SEQ ID NO: 605587 - DNA, 25 bp, Homo sapien
aaaaacatgtacaggccgagcgtgg

SEQ ID NO: 605588 - DNA, 25 bp, Homo sapien
gggcctgcaatttggcacttctaag

SEQ ID NO: 605589 - DNA, 25 bp, Homo sapien
gcaaagatctgagacactgatccca

SEQ ID NO: 605590 - DNA, 25 bp, Homo sapien
tcttggtggtcctagtcagtgcttc

SEQ ID NO: 605591 - DNA, 25 bp, Homo sapien
gaacactttccatagtaagtttcca

SEQ ID NO: 605592 - DNA, 25 bp, Homo sapien
gacactgtggccagtacttctattg

SEQ ID NO: 605593 - DNA, 25 bp, Homo sapien
gaaaagattgtatactttgcaccag

SEQ ID NO: 605594 - DNA, 25 bp, Homo sapien
tctccttttagagtcagggcctcac

SEQ ID NO: 605595 - DNA, 25 bp, Homo sapien
aaattcggagagtagcacgggcttc

SEQ ID NO: 605596 - DNA, 25 bp, Homo sapien
cgcatactggtaggcactgaccgga

SEQ ID NO: 605597 - DNA, 25 bp, Homo sapien
taggagatacggcaacagccatgca

SEQ ID NO: 605598 - DNA, 25 bp, Homo sapien
gtgaagttctgcctccgatcaaggg

SEQ ID NO: 605599 - DNA, 25 bp, Homo sapien
catgcatgtactgatccggagaagc

SEQ ID NO: 605600 - DNA, 25 bp, Homo sapien
gaagtctttagtagccctgggccta

SEQ ID NO: 605601 - DNA, 25 bp, Homo sapien
tattacaaagccagcaaaccggtgg

SEQ ID NO: 605602 - DNA, 25 bp, Homo sapien
tctaggagccgaaaagcaaagggtc

SEQ ID NO: 605603 - DNA, 25 bp, Homo sapien
taacagcgaattctgtcacaggcct

SEQ ID NO: 605604 - DNA, 25 bp, Homo sapien
tacgtggaagttacctcagtacgat

SEQ ID NO: 605605 - DNA, 25 bp, Homo sapien
tgagccacagttttggacccaaggc

SEQ ID NO: 605606 - DNA, 25 bp, Homo sapien
gaagcaactccagggacatgtgccc

SEQ ID NO: 605607 - DNA, 25 bp, Homo sapien
tggccgcacctccccgcctcggctc

SEQ ID NO: 605608 - DNA, 25 bp, Homo sapien
tccccgcctcggctctcccattggc

SEQ ID NO: 605609 - DNA, 25 bp, Homo sapien
cctccccgcctcggctctcccattg

SEQ ID NO: 605610 - DNA, 25 bp, Homo sapien
gccgcacctccccgcctcggctctc

SEQ ID NO: 605611 - DNA, 25 bp, Homo sapien
tttgaatcaaacaggcccgcgccat

SEQ ID NO: 605612 - DNA, 25 bp, Homo sapien
cctcggacaaaaaccggcgtgcagt

SEQ ID NO: 605613 - DNA, 25 bp, Homo sapien
gcagtcccgctttataggcaacctt

SEQ ID NO: 605614 - DNA, 25 bp, Homo sapien
tcggactcgacagccctcggacaaa

SEQ ID NO: 605615 - DNA, 25 bp, Homo sapien
ctcgctgaacagctcggtcgggttg

SEQ ID NO: 605616 - DNA, 25 bp, Homo sapien
ttcaggaaacgagccaggcgctcgc

SEQ ID NO: 605617 - DNA, 25 bp, Homo sapien
gagccaggcgccgtgactcgctgaa

SEQ ID NO: 605618 - DNA, 25 bp, Homo sapien
tcgcgtcgcaggaaggccgcgaagg

SEQ ID NO: 605619 - DNA, 25 bp, Homo sapien
ctctccgccgcgcgcagaatggcgt

SEQ ID NO: 605620 - DNA, 25 bp, Homo sapien
tctccgccgcgcgcagaatggcgtg

SEQ ID NO: 605621 - DNA, 25 bp, Homo sapien
cgaagagcagtcgtgcgaggagccg

SEQ ID NO: 605622 - DNA, 25 bp, Homo sapien
agtcgtgcgaggagccgaacgagtc

SEQ ID NO: 605623 - DNA, 25 bp, Homo sapien
aagtaggtgcccgaagagcagtcgt

SEQ ID NO: 605624 - DNA, 25 bp, Homo sapien
gggaagtaggtgcccgaagagcagt

SEQ ID NO: 605625 - DNA, 25 bp, Homo sapien
cgcagagcgtccttgcagccgtagg

SEQ ID NO: 605626 - DNA, 25 bp, Homo sapien
ctctcgcgccgagcggagctgctgg

SEQ ID NO: 605627 - DNA, 25 bp, Homo sapien
gctggaagtgcgtctcgacacgcgt

SEQ ID NO: 605628 - DNA, 25 bp, Homo sapien
gaaggcgggccagccaagctccaac

SEQ ID NO: 605629 - DNA, 25 bp, Homo sapien
tctcccgtgcgacccagggccctgg

SEQ ID NO: 605630 - DNA, 25 bp, Homo sapien
ttcttgaagggggtctcccgtgcga

SEQ ID NO: 605631 - DNA, 25 bp, Homo sapien
cgcgcttccggtagggcgcagagga

SEQ ID NO: 605632 - DNA, 25 bp, Homo sapien
cgcgcgcttccggtagggcgcagag

SEQ ID NO: 605633 - DNA, 25 bp, Homo sapien
ccaactcatgactcgaaagcaatcg

SEQ ID NO: 605634 - DNA, 25 bp, Homo sapien
caccaactcatgactcgaaagcaat

SEQ ID NO: 605635 - DNA, 25 bp, Homo sapien
actcatgactcgaaagcaatcgaag

SEQ ID NO: 605636 - DNA, 25 bp, Homo sapien
tcatgactcgaaagcaatcgaagca

SEQ ID NO: 605637 - DNA, 25 bp, Homo sapien
gatgaactttcagatccatgcacat

SEQ ID NO: 605638 - DNA, 25 bp, Homo sapien
ccagaaggatatacacagcaactcc

SEQ ID NO: 605639 - DNA, 25 bp, Homo sapien
tgcacatatccagaaattgagagag

SEQ ID NO: 605640 - DNA, 25 bp, Homo sapien
gatgtcgatgtctgtgaacacgtcc

SEQ ID NO: 605641 - DNA, 25 bp, Homo sapien
gaggatctggacacctatgaaggca

SEQ ID NO: 605642 - DNA, 25 bp, Homo sapien
cttgtaaacagggataccgccacca

SEQ ID NO: 605643 - DNA, 25 bp, Homo sapien
caaagcacttgtgagcgcctgcaca

SEQ ID NO: 605644 - DNA, 25 bp, Homo sapien
gcagacatacaaggaggcagaccct

SEQ ID NO: 605645 - DNA, 25 bp, Homo sapien
cagacagttctcaagcctcaagtga

SEQ ID NO: 605646 - DNA, 25 bp, Homo sapien
tatacatggtacactagccagacag

SEQ ID NO: 605647 - DNA, 25 bp, Homo sapien
caggacaggccttctctagtacagg

SEQ ID NO: 605648 - DNA, 25 bp, Homo sapien
catatgcgtggcttagggtcaccat

SEQ ID NO: 605649 - DNA, 25 bp, Homo sapien
aatcttagttcctgaccttgcatag

SEQ ID NO: 605650 - DNA, 25 bp, Homo sapien
tttcctgtgatagtccgaactgtca

SEQ ID NO: 605651 - DNA, 25 bp, Homo sapien
tgtaggagcctgttgccacgcggat

SEQ ID NO: 605652 - DNA, 25 bp, Homo sapien
cgcggatgccatcaatcaacgtgaa

SEQ ID NO: 605653 - DNA, 25 bp, Homo sapien
taatatagtacaggtatcttaccac

SEQ ID NO: 605654 - DNA, 25 bp, Homo sapien
ctcactgtccatctgaataatatag

SEQ ID NO: 605655 - DNA, 25 bp, Homo sapien
ggtaaggatgagcaattttgtttta

SEQ ID NO: 605656 - DNA, 25 bp, Homo sapien
ggtatcttaccacataagggtcaca

SEQ ID NO: 605657 - DNA, 25 bp, Homo sapien
tgttcaaccacttggccagacagaa

SEQ ID NO: 605658 - DNA, 25 bp, Homo sapien
tgggcatacaggattcggaactcca

SEQ ID NO: 605659 - DNA, 25 bp, Homo sapien
gagctccttggactgtggttttcgg

SEQ ID NO: 605660 - DNA, 25 bp, Homo sapien
gggagtacttgacagcctagccagc

SEQ ID NO: 605661 - DNA, 25 bp, Homo sapien
gagagcttgctatcctggtgatgac

SEQ ID NO: 605662 - DNA, 25 bp, Homo sapien
tgagtcactcaagtacagttccagg

SEQ ID NO: 605663 - DNA, 25 bp, Homo sapien
ccacagagccttgggaagacacaga

SEQ ID NO: 605664 - DNA, 25 bp, Homo sapien
gataccagcgaagtggaattgccgc

SEQ ID NO: 605665 - DNA, 25 bp, Homo sapien
gataaagtgctacatctctaacagc

SEQ ID NO: 605666 - DNA, 25 bp, Homo sapien
cagtaaagagtgttctccttgacag

SEQ ID NO: 605667 - DNA, 25 bp, Homo sapien
tctaacagcaagcaaattaactctg

SEQ ID NO: 605668 - DNA, 25 bp, Homo sapien
tgctgaaattgccagaatgaaggcc

SEQ ID NO: 605669 - DNA, 25 bp, Homo sapien
gactgccaacatatacgtggtctgt

SEQ ID NO: 605670 - DNA, 25 bp, Homo sapien
caatacctggtatatacatgacaaa

SEQ ID NO: 605671 - DNA, 25 bp, Homo sapien
aaaacaaacccctgtatccatagtg

SEQ ID NO: 605672 - DNA, 25 bp, Homo sapien
gaaaaatgcaaaacaggctacaaac

SEQ ID NO: 605673 - DNA, 25 bp, Homo sapien
ttttttctaaataggattttgatca

SEQ ID NO: 605674 - DNA, 25 bp, Homo sapien
tttttctaaataggattttgatcac

SEQ ID NO: 605675 - DNA, 25 bp, Homo sapien
aatttgtgacatactcccagattta

SEQ ID NO: 605676 - DNA, 25 bp, Homo sapien
ttgtgacatactcccagatttaaag

SEQ ID NO: 605677 - DNA, 25 bp, Homo sapien
atttgtgacatactcccagatttaa

SEQ ID NO: 605678 - DNA, 25 bp, Homo sapien
tgtgacatactcccagatttaaaga

SEQ ID NO: 605679 - DNA, 25 bp, Homo sapien
aaaagagcactctgtggtaggtagt

SEQ ID NO: 605680 - DNA, 25 bp, Homo sapien
taattgttggccacactttcagaga

SEQ ID NO: 605681 - DNA, 25 bp, Homo sapien
gtcctgctccacaaaaagagcactc

SEQ ID NO: 605682 - DNA, 25 bp, Homo sapien
gaataatggttttgagtcctgctcc

SEQ ID NO: 605683 - DNA, 25 bp, Homo sapien
tgaaatattcacagctaagtctgcg

SEQ ID NO: 605684 - DNA, 25 bp, Homo sapien
taagtctgcgatggccaaatctgac

SEQ ID NO: 605685 - DNA, 25 bp, Homo sapien
gaactacataggctgccacactcat

SEQ ID NO: 605686 - DNA, 25 bp, Homo sapien
gctcccctgggagtgaaaccagtaa

SEQ ID NO: 605687 - DNA, 25 bp, Homo sapien
tacagttgtggaaagatccactgga

SEQ ID NO: 605688 - DNA, 25 bp, Homo sapien
tttgggtacagttgtggaaagatcc

SEQ ID NO: 605689 - DNA, 25 bp, Homo sapien
cactggaaaggattccgcagccaga

SEQ ID NO: 605690 - DNA, 25 bp, Homo sapien
tggaaagatccactggaaaggattc

SEQ ID NO: 605691 - DNA, 25 bp, Homo sapien
ggacgaggaccatggcacattcaca

SEQ ID NO: 605692 - DNA, 25 bp, Homo sapien
ggcacattcacattcgtagcccagt

SEQ ID NO: 605693 - DNA, 25 bp, Homo sapien
ttcacattcgtagcccagtagcagt

SEQ ID NO: 605694 - DNA, 25 bp, Homo sapien
gacgaggaccatggcacattcacat

SEQ ID NO: 605695 - DNA, 25 bp, Homo sapien
cgtggagggtagatgcttcaggtga

SEQ ID NO: 605696 - DNA, 25 bp, Homo sapien
cttcaggtgaccttttacgagcgtg

SEQ ID NO: 605697 - DNA, 25 bp, Homo sapien
ctcttgagcgtggagggtagatgct

SEQ ID NO: 605698 - DNA, 25 bp, Homo sapien
ttttacgagcgtggcgtgtcctgga

SEQ ID NO: 605699 - DNA, 25 bp, Homo sapien
gggtaaaaggtcacgaggctagctc

SEQ ID NO: 605700 - DNA, 25 bp, Homo sapien
taaaaggtcacgaggctagctccac

SEQ ID NO: 605701 - DNA, 25 bp, Homo sapien
tagctccaccccaccgtcgcgcgct

SEQ ID NO: 605702 - DNA, 25 bp, Homo sapien
accgtcgcgcgctaggcccccaggg

SEQ ID NO: 605703 - DNA, 25 bp, Homo sapien
gaacttcaccggtcccacgggcgca

SEQ ID NO: 605704 - DNA, 25 bp, Homo sapien
tcaccggtcccacgggcgcagccat

SEQ ID NO: 605705 - DNA, 25 bp, Homo sapien
cgccagaacttcaccggtcccacgg

SEQ ID NO: 605706 - DNA, 25 bp, Homo sapien
ggtcgccagaacttcaccggtccca

SEQ ID NO: 605707 - DNA, 25 bp, Homo sapien
cgaaaattcgaacccggacagtctg

SEQ ID NO: 605708 - DNA, 25 bp, Homo sapien
catcagtaacgaggaagacgaggcc

SEQ ID NO: 605709 - DNA, 25 bp, Homo sapien
caaggtcaccctactacaaggcaga

SEQ ID NO: 605710 - DNA, 25 bp, Homo sapien
ctaacgagacacgagagggagcttt

SEQ ID NO: 605711 - DNA, 25 bp, Homo sapien
cagcataagggttgtaaacaaccgt

SEQ ID NO: 605712 - DNA, 25 bp, Homo sapien
ggcagcataagggttgtaaacaacc

SEQ ID NO: 605713 - DNA, 25 bp, Homo sapien
gcagcataagggttgtaaacaaccg

SEQ ID NO: 605714 - DNA, 25 bp, Homo sapien
acacctactcgggtcattccaaggg

SEQ ID NO: 605715 - DNA, 25 bp, Homo sapien
ctactcgggtcattccaagggcatc

SEQ ID NO: 605716 - DNA, 25 bp, Homo sapien
tggccacacctactcgggtcattcc

SEQ ID NO: 605717 - DNA, 25 bp, Homo sapien
acctactcgggtcattccaagggca

SEQ ID NO: 605718 - DNA, 25 bp, Homo sapien
caccaacaatcaccactgtctgata

SEQ ID NO: 605719 - DNA, 25 bp, Homo sapien
cacatcctgtttcaccaacaatcac

SEQ ID NO: 605720 - DNA, 25 bp, Homo sapien
cactgtctgataattttctatcaag

SEQ ID NO: 605721 - DNA, 25 bp, Homo sapien
tcccacatcctgtttcaccaacaat

SEQ ID NO: 605722 - DNA, 25 bp, Homo sapien
cagccaaatcgaagtgtaaagacac

SEQ ID NO: 605723 - DNA, 25 bp, Homo sapien
tccagccaaatcgaagtgtaaagac

SEQ ID NO: 605724 - DNA, 25 bp, Homo sapien
gccaaatcgaagtgtaaagacactt

SEQ ID NO: 605725 - DNA, 25 bp, Homo sapien
tcgaagtgtaaagacacttattaaa

SEQ ID NO: 605726 - DNA, 25 bp, Homo sapien
tattcactggcttggaatatcttct

SEQ ID NO: 605727 - DNA, 25 bp, Homo sapien
caaatgccaattcctttacaaggcc

SEQ ID NO: 605728 - DNA, 25 bp, Homo sapien
tttcttgatccttctttctactcct

SEQ ID NO: 605729 - DNA, 25 bp, Homo sapien
tctactcctatccacatcacatagg

SEQ ID NO: 605730 - DNA, 25 bp, Homo sapien
aatttgattgaacaggcacggcggc

SEQ ID NO: 605731 - DNA, 25 bp, Homo sapien
catgtactacagatgcctcagggaa

SEQ ID NO: 605732 - DNA, 25 bp, Homo sapien
ttatccacaggtcactcaaaacagt

SEQ ID NO: 605733 - DNA, 25 bp, Homo sapien
actaaggcgcaattccagcattctg

SEQ ID NO: 605734 - DNA, 25 bp, Homo sapien
aggctgggtcactcctaccactctt

SEQ ID NO: 605735 - DNA, 25 bp, Homo sapien
cagcagccactcttcgaggctgggt

SEQ ID NO: 605736 - DNA, 25 bp, Homo sapien
tcttccttcagctgtccagccggct

SEQ ID NO: 605737 - DNA, 25 bp, Homo sapien
ctgtccagccggcttctgcaaggta

SEQ ID NO: 605738 - DNA, 25 bp, Homo sapien
attgctctgcctctggtggttgtat

SEQ ID NO: 605739 - DNA, 25 bp, Homo sapien
tctggtggttgtatttcccaatgac

SEQ ID NO: 605740 - DNA, 25 bp, Homo sapien
tctgcctctggtggttgtatttccc

SEQ ID NO: 605741 - DNA, 25 bp, Homo sapien
ggttgtatttcccaatgaccagcat

SEQ ID NO: 605742 - DNA, 25 bp, Homo sapien
agggacaacttttcatctccacgct

SEQ ID NO: 605743 - DNA, 25 bp, Homo sapien
cagggacaacttttcatctccacgc

SEQ ID NO: 605744 - DNA, 25 bp, Homo sapien
catctccacgctcgaaaagaaaacc

SEQ ID NO: 605745 - DNA, 25 bp, Homo sapien
ttctcgtggccagctggtcggtgca

SEQ ID NO: 605746 - DNA, 25 bp, Homo sapien
gccagctggtcggtgcagtcatcaa

SEQ ID NO: 605747 - DNA, 25 bp, Homo sapien
tggtcggtgcagtcatcaaagcgga

SEQ ID NO: 605748 - DNA, 25 bp, Homo sapien
cttaattctcgtggccagctggtcg

SEQ ID NO: 605749 - DNA, 25 bp, Homo sapien
ctatattttgttaacaacggatcaa

SEQ ID NO: 605750 - DNA, 25 bp, Homo sapien
aacggatcaaccatcatttccctga

SEQ ID NO: 605751 - DNA, 25 bp, Homo sapien
gatcaaccatcatttccctgaccag

SEQ ID NO: 605752 - DNA, 25 bp, Homo sapien
tgttaacaacggatcaaccatcatt

SEQ ID NO: 605753 - DNA, 25 bp, Homo sapien
aagaatcaaagagaagctctcagtg

SEQ ID NO: 605754 - DNA, 25 bp, Homo sapien
aatcaaagagaagctctcagtgagc

SEQ ID NO: 605755 - DNA, 25 bp, Homo sapien
gaatcaaagagaagctctcagtgag

SEQ ID NO: 605756 - DNA, 25 bp, Homo sapien
tcaaagagaagctctcagtgagcct

SEQ ID NO: 605757 - DNA, 25 bp, Homo sapien
atggcaatgtcagtgtacaaggtcc

SEQ ID NO: 605758 - DNA, 25 bp, Homo sapien
aggtcctctcgtgggcttcatccag

SEQ ID NO: 605759 - DNA, 25 bp, Homo sapien
ttttagcaagccaatggcaatgtca

SEQ ID NO: 605760 - DNA, 25 bp, Homo sapien
tgtcagtgtacaaggtcctctcgtg

SEQ ID NO: 605761 - DNA, 25 bp, Homo sapien
gggtcattacactattacttccaat

SEQ ID NO: 605762 - DNA, 25 bp, Homo sapien
ccatctatcccattggcaaggattt

SEQ ID NO: 605763 - DNA, 25 bp, Homo sapien
gagaagtgaccaaatgagctacagc

SEQ ID NO: 605764 - DNA, 25 bp, Homo sapien
gacacctgggtctcaagatagtttg

SEQ ID NO: 605765 - DNA, 25 bp, Homo sapien
catccagagtggctgaagctacaat

SEQ ID NO: 605766 - DNA, 25 bp, Homo sapien
cgaagatcccctcgctttttctgaa

SEQ ID NO: 605767 - DNA, 25 bp, Homo sapien
tacaatcaatcgaagatcccctcgc

SEQ ID NO: 605768 - DNA, 25 bp, Homo sapien
tggctgaagctacaatcaatcgaag

SEQ ID NO: 605769 - DNA, 25 bp, Homo sapien
gataagctcttgctagaggtaactt

SEQ ID NO: 605770 - DNA, 25 bp, Homo sapien
tgccaaagataagctcttgctagag

SEQ ID NO: 605771 - DNA, 25 bp, Homo sapien
cataaagaagatagggcattctgcc

SEQ ID NO: 605772 - DNA, 25 bp, Homo sapien
gatatataggacaaaagtgtttgtg

SEQ ID NO: 605773 - DNA, 25 bp, Homo sapien
tgagagaaaccacggcaggtggcct

SEQ ID NO: 605774 - DNA, 25 bp, Homo sapien
tccctacgcctctagatcaaaatgt

SEQ ID NO: 605775 - DNA, 25 bp, Homo sapien
aggtggcctatcagcagccctagct

SEQ ID NO: 605776 - DNA, 25 bp, Homo sapien
gatgagttctggacttccctacgcc

SEQ ID NO: 605777 - DNA, 25 bp, Homo sapien
accaaagcagctattcgatcagccc

SEQ ID NO: 605778 - DNA, 25 bp, Homo sapien
aagcaaccaaagcagctattcgatc

SEQ ID NO: 605779 - DNA, 25 bp, Homo sapien
aaagcagctattcgatcagccccat

SEQ ID NO: 605780 - DNA, 25 bp, Homo sapien
gcaaccaaagcagctattcgatcag

SEQ ID NO: 605781 - DNA, 25 bp, Homo sapien
tgaccccagctgatgctaagttcct

SEQ ID NO: 605782 - DNA, 25 bp, Homo sapien
aaagaaaagcaatatcatcacgtga

SEQ ID NO: 605783 - DNA, 25 bp, Homo sapien
tctgccatgcagttggacgcaaata

SEQ ID NO: 605784 - DNA, 25 bp, Homo sapien
aaactatgggagctaccagcaacca

SEQ ID NO: 605785 - DNA, 25 bp, Homo sapien
tgtatcccttgctggatcactggtt

SEQ ID NO: 605786 - DNA, 25 bp, Homo sapien
cggaaatgttctcccttccactgta

SEQ ID NO: 605787 - DNA, 25 bp, Homo sapien
aggatcacacatgtatcccttgctg

SEQ ID NO: 605788 - DNA, 25 bp, Homo sapien
gaaatgttctcccttccactgtaag

SEQ ID NO: 605789 - DNA, 25 bp, Homo sapien
agaaatgctaaaacgtctccgtctc

SEQ ID NO: 605790 - DNA, 25 bp, Homo sapien
tgtctggtgaattttcaccacagtt

SEQ ID NO: 605791 - DNA, 25 bp, Homo sapien
aatgctaaaacgtctccgtctccct

SEQ ID NO: 605792 - DNA, 25 bp, Homo sapien
cacagtttcgacagttgatttgata

SEQ ID NO: 605793 - DNA, 25 bp, Homo sapien
gacactgcgtgacaccctttcaaac

SEQ ID NO: 605794 - DNA, 25 bp, Homo sapien
tagtgctcgagcctgctcgatgagc

SEQ ID NO: 605795 - DNA, 25 bp, Homo sapien
tcatcccagtgcgagctagtgctcg

SEQ ID NO: 605796 - DNA, 25 bp, Homo sapien
gagaactcggaggtgtctcttcatc

SEQ ID NO: 605797 - DNA, 25 bp, Homo sapien
tcggagtttcacaaagccacagtcg

SEQ ID NO: 605798 - DNA, 25 bp, Homo sapien
cgtcctgctcgctgattagctgatg

SEQ ID NO: 605799 - DNA, 25 bp, Homo sapien
cctgggattgtaggctcggagtttc

SEQ ID NO: 605800 - DNA, 25 bp, Homo sapien
aaaggcgataacattttcccgagcg

SEQ ID NO: 605801 - DNA, 25 bp, Homo sapien
cgtagactgaggcaacttgtcaaag

SEQ ID NO: 605802 - DNA, 25 bp, Homo sapien
gatgacaggtgccaaattactacgc

SEQ ID NO: 605803 - DNA, 25 bp, Homo sapien
acattgtcaattcctagtgctttca

SEQ ID NO: 605804 - DNA, 25 bp, Homo sapien
gctgcatctcaggaaccgtagactg

SEQ ID NO: 605805 - DNA, 25 bp, Homo sapien
ggcctggttgcaaagcagacacaca

SEQ ID NO: 605806 - DNA, 25 bp, Homo sapien
cacagggcctggttgcaaagcagac

SEQ ID NO: 605807 - DNA, 25 bp, Homo sapien
agggcctggttgcaaagcagacaca

SEQ ID NO: 605808 - DNA, 25 bp, Homo sapien
acagggcctggttgcaaagcagaca

SEQ ID NO: 605809 - DNA, 25 bp, Homo sapien
tccaaggcttgaaccatcgactgtg

SEQ ID NO: 605810 - DNA, 25 bp, Homo sapien
ttgaaccatcgactgtgctggaggg

SEQ ID NO: 605811 - DNA, 25 bp, Homo sapien
ggcttgaaccatcgactgtgctgga

SEQ ID NO: 605812 - DNA, 25 bp, Homo sapien
acagtaactccaaggcttgaaccat

SEQ ID NO: 605813 - DNA, 25 bp, Homo sapien
tcagttaggcgacagtctttgtcca

SEQ ID NO: 605814 - DNA, 25 bp, Homo sapien
gcggttcagttaggcgacagtcttt

SEQ ID NO: 605815 - DNA, 25 bp, Homo sapien
gccaagcggttcagttaggcgacag

SEQ ID NO: 605816 - DNA, 25 bp, Homo sapien
gttaggcgacagtctttgtccagac

SEQ ID NO: 605817 - DNA, 25 bp, Homo sapien
ggcaaacatgggattcaaaggaaac

SEQ ID NO: 605818 - DNA, 25 bp, Homo sapien
tttggcaaacatgggattcaaagga

SEQ ID NO: 605819 - DNA, 25 bp, Homo sapien
acatgggattcaaaggaaactctgc

SEQ ID NO: 605820 - DNA, 25 bp, Homo sapien
caaacatgggattcaaaggaaactc

SEQ ID NO: 605821 - DNA, 25 bp, Homo sapien
tcatggcagcgatgcttagaatttc

SEQ ID NO: 605822 - DNA, 25 bp, Homo sapien
tctggatctgcatcatggcagcgat

SEQ ID NO: 605823 - DNA, 25 bp, Homo sapien
aagatattctggatctgcatcatgg

SEQ ID NO: 605824 - DNA, 25 bp, Homo sapien
tgcatcatggcagcgatgcttagaa

SEQ ID NO: 605825 - DNA, 25 bp, Homo sapien
gcttcatatatattgagcatagtga

SEQ ID NO: 605826 - DNA, 25 bp, Homo sapien
acagcaaatttacggtgcactcgaa

SEQ ID NO: 605827 - DNA, 25 bp, Homo sapien
tgagcatagtgaggtggtcgccctc

SEQ ID NO: 605828 - DNA, 25 bp, Homo sapien
ctcctccacagcaaatttacggtgc

SEQ ID NO: 605829 - DNA, 25 bp, Homo sapien
tgaggcggcacttcgagcagtagtt

SEQ ID NO: 605830 - DNA, 25 bp, Homo sapien
tgttgaggcggcacttcgagcagta

SEQ ID NO: 605831 - DNA, 25 bp, Homo sapien
ggtggtgtgttgaggcggcacttcg

SEQ ID NO: 605832 - DNA, 25 bp, Homo sapien
cacttcgagcagtagttgtgcttac

SEQ ID NO: 605833 - DNA, 25 bp, Homo sapien
gaagattcaacccaggactacaagt

SEQ ID NO: 605834 - DNA, 25 bp, Homo sapien
tagtgtaccatatctccaagcaagg

SEQ ID NO: 605835 - DNA, 25 bp, Homo sapien
cagactgcagatgatacattgtgcc

SEQ ID NO: 605836 - DNA, 25 bp, Homo sapien
gacccaccagttagaagtactggca

SEQ ID NO: 605837 - DNA, 25 bp, Homo sapien
gactgctctgcaacctcactcttta

SEQ ID NO: 605838 - DNA, 25 bp, Homo sapien
aagatctaaagatgggaactggccc

SEQ ID NO: 605839 - DNA, 25 bp, Homo sapien
cagatatgttctcgactaaggctat

SEQ ID NO: 605840 - DNA, 25 bp, Homo sapien
cccatgtgctgttcaacggcataag

SEQ ID NO: 605841 - DNA, 25 bp, Homo sapien
tttcaattgttctcttacagtcgca

SEQ ID NO: 605842 - DNA, 25 bp, Homo sapien
tgttctcttacagtcgcagctctga

SEQ ID NO: 605843 - DNA, 25 bp, Homo sapien
tctgacaagacccttgtaattcagg

SEQ ID NO: 605844 - DNA, 25 bp, Homo sapien
gtcgcagctctgacaagacccttgt

SEQ ID NO: 605845 - DNA, 25 bp, Homo sapien
cataaaggtggtactatttccaaag

SEQ ID NO: 605846 - DNA, 25 bp, Homo sapien
gatccaatggaataaagcatgttgg

SEQ ID NO: 605847 - DNA, 25 bp, Homo sapien
cccactattagatgatgtccatagg

SEQ ID NO: 605848 - DNA, 25 bp, Homo sapien
tatctcatgactgctgaaagtatct

SEQ ID NO: 605849 - DNA, 25 bp, Homo sapien
taagctccagtagaatgaaacctcg

SEQ ID NO: 605850 - DNA, 25 bp, Homo sapien
tagaatgaaacctcgctgcattggc

SEQ ID NO: 605851 - DNA, 25 bp, Homo sapien
agacaatgcacctcagaaccagatc

SEQ ID NO: 605852 - DNA, 25 bp, Homo sapien
tgcattggcgaagaagccggagaca

SEQ ID NO: 605853 - DNA, 25 bp, Homo sapien
gtcaaaattgctaactctccaggag

SEQ ID NO: 605854 - DNA, 25 bp, Homo sapien
actccttagggaagatctcgggcca

SEQ ID NO: 605855 - DNA, 25 bp, Homo sapien
tcaagtgctgtgacggaatgcctcg

SEQ ID NO: 605856 - DNA, 25 bp, Homo sapien
ggactcattaacaggagcccaggac

SEQ ID NO: 605857 - DNA, 25 bp, Homo sapien
cagggtgtatgtgcagctcatggtc

SEQ ID NO: 605858 - DNA, 25 bp, Homo sapien
cagctcatggtcatcacggatggtc

SEQ ID NO: 605859 - DNA, 25 bp, Homo sapien
cagcgaggcggcttctctgcataga

SEQ ID NO: 605860 - DNA, 25 bp, Homo sapien
catagaggactgacgcagggtgtat

SEQ ID NO: 605861 - DNA, 25 bp, Homo sapien
catgtagtacttggaggtctgtata

SEQ ID NO: 605862 - DNA, 25 bp, Homo sapien
tccttgttgataaaagtgtggagcc

SEQ ID NO: 605863 - DNA, 25 bp, Homo sapien
ggccgattcaatggcagtcacatct

SEQ ID NO: 605864 - DNA, 25 bp, Homo sapien
ctgtataacttcgttatagatgacc

SEQ ID NO: 605865 - DNA, 25 bp, Homo sapien
ctatgaattaaacgctagagtgctt

SEQ ID NO: 605866 - DNA, 25 bp, Homo sapien
gagtgctttcccagaatgttttggg

SEQ ID NO: 605867 - DNA, 25 bp, Homo sapien
tgttttggggatatggtaatggcct

SEQ ID NO: 605868 - DNA, 25 bp, Homo sapien
atggtaatggcctttccaccctatg

SEQ ID NO: 605869 - DNA, 25 bp, Homo sapien
ctgctttccacctgagaggttttga

SEQ ID NO: 605870 - DNA, 25 bp, Homo sapien
gctgctttccacctgagaggttttg

SEQ ID NO: 605871 - DNA, 25 bp, Homo sapien
aacatcaagccgcatcgcccccaga

SEQ ID NO: 605872 - DNA, 25 bp, Homo sapien
ctacttagcacagccacatggcccc

SEQ ID NO: 605873 - DNA, 25 bp, Homo sapien
catcaagccgcatcgcccccagaga

SEQ ID NO: 605874 - DNA, 25 bp, Homo sapien
cccacaacatcaagccgcatcgccc

SEQ ID NO: 605875 - DNA, 25 bp, Homo sapien
aatgctgagctgttcatgaaacagc

SEQ ID NO: 605876 - DNA, 25 bp, Homo sapien
cagtaaatgctgagctgttcatgaa

SEQ ID NO: 605877 - DNA, 25 bp, Homo sapien
cttcccagtaaatgctgagctgttc

SEQ ID NO: 605878 - DNA, 25 bp, Homo sapien
taaatgctgagctgttcatgaaaca

SEQ ID NO: 605879 - DNA, 25 bp, Homo sapien
accttggcccttttggctttcagag

SEQ ID NO: 605880 - DNA, 25 bp, Homo sapien
ctgcagctgtagctgtgggctcctc

SEQ ID NO: 605881 - DNA, 25 bp, Homo sapien
cagcatggaggagaggacgccagca

SEQ ID NO: 605882 - DNA, 25 bp, Homo sapien
agcagcatggaggagaggacgccag

SEQ ID NO: 605883 - DNA, 25 bp, Homo sapien
ggagaggacgccagcagtccctgca

SEQ ID NO: 605884 - DNA, 25 bp, Homo sapien
aggacctggcactacactctgagag

SEQ ID NO: 605885 - DNA, 25 bp, Homo sapien
aaaggactaatgaacaggccgcagc

SEQ ID NO: 605886 - DNA, 25 bp, Homo sapien
gagacatgcttgttcacacctggca

SEQ ID NO: 605887 - DNA, 25 bp, Homo sapien
gaattcctgctaaagaggaggccct

SEQ ID NO: 605888 - DNA, 25 bp, Homo sapien
caaccccacagatctgtgttctggg

SEQ ID NO: 605889 - DNA, 25 bp, Homo sapien
caggaaaattcatagtgagctgaca

SEQ ID NO: 605890 - DNA, 25 bp, Homo sapien
cagacctgacgctctgatctcgaag

SEQ ID NO: 605891 - DNA, 25 bp, Homo sapien
cttcatcagaaccacccgagatggg

SEQ ID NO: 605892 - DNA, 25 bp, Homo sapien
ctgcatgtctttgactccttggtga

SEQ ID NO: 605893 - DNA, 25 bp, Homo sapien
ggtgattagacaagctctgcggctg

SEQ ID NO: 605894 - DNA, 25 bp, Homo sapien
gggtgtcccaaggagatcatgtatc

SEQ ID NO: 605895 - DNA, 25 bp, Homo sapien
atgtagaataaacacgagttaaaag

SEQ ID NO: 605896 - DNA, 25 bp, Homo sapien
ggcaggccaggtcaataattagaac

SEQ ID NO: 605897 - DNA, 25 bp, Homo sapien
tttgaactgggcctgtaaaatggag

SEQ ID NO: 605898 - DNA, 25 bp, Homo sapien
tctgcaagagccctgatggtggaga

SEQ ID NO: 605899 - DNA, 25 bp, Homo sapien
gagaggttcataccttccttggtga

SEQ ID NO: 605900 - DNA, 25 bp, Homo sapien
ggaaccgacccctggcagctctccc

SEQ ID NO: 605901 - DNA, 25 bp, Homo sapien
ggagcaggggaaccgacccctggca

SEQ ID NO: 605902 - DNA, 25 bp, Homo sapien
aggggaaccgacccctggcagctct

SEQ ID NO: 605903 - DNA, 25 bp, Homo sapien
gcaggggaaccgacccctggcagct

SEQ ID NO: 605904 - DNA, 25 bp, Homo sapien
cattgagcctgtgccgggggagccg

SEQ ID NO: 605905 - DNA, 25 bp, Homo sapien
aagggcagtgtcattgagcctgtgc

SEQ ID NO: 605906 - DNA, 25 bp, Homo sapien
gccgcctccagggaagagggacaca

SEQ ID NO: 605907 - DNA, 25 bp, Homo sapien
gaggaagaagggcagtgtcattgag

SEQ ID NO: 605908 - DNA, 25 bp, Homo sapien
tgttttaccaaggagacatgtgctc

SEQ ID NO: 605909 - DNA, 25 bp, Homo sapien
gttcatgtgtgcactatcacgaggg

SEQ ID NO: 605910 - DNA, 25 bp, Homo sapien
caccatggcctagatctttttgagc

SEQ ID NO: 605911 - DNA, 25 bp, Homo sapien
cataggtacacgtatgtgcacgcgt

SEQ ID NO: 605912 - DNA, 25 bp, Homo sapien
cagtctggaggaaccttgagatttc

SEQ ID NO: 605913 - DNA, 25 bp, Homo sapien
tacaaacttatctctgggtttttgc

SEQ ID NO: 605914 - DNA, 25 bp, Homo sapien
tttcctgccgatgatttaaagggct

SEQ ID NO: 605915 - DNA, 25 bp, Homo sapien
tttttgctcagtttataagctaggg

SEQ ID NO: 605916 - DNA, 25 bp, Homo sapien
gtggtggacaggcagaccctgatga

SEQ ID NO: 605917 - DNA, 25 bp, Homo sapien
aggcagaccctgatgaggacccaga

SEQ ID NO: 605918 - DNA, 25 bp, Homo sapien
atgaggttccgcaggagagacaggt

SEQ ID NO: 605919 - DNA, 25 bp, Homo sapien
gagacaggtgggaagccacgtggaa

SEQ ID NO: 605920 - DNA, 25 bp, Homo sapien
agcagggcatcacccccatcaaagt

SEQ ID NO: 605921 - DNA, 25 bp, Homo sapien
gaaagctctgataaggaaagggctg

SEQ ID NO: 605922 - DNA, 25 bp, Homo sapien
ataaggaaagggctgcaagctccca

SEQ ID NO: 605923 - DNA, 25 bp, Homo sapien
cagggcagctgtactgcacagcagg

SEQ ID NO: 605924 - DNA, 25 bp, Homo sapien
ctgctgagcccacgtgcagggactg

SEQ ID NO: 605925 - DNA, 25 bp, Homo sapien
gcagggactgcagccaggcgcaggt

SEQ ID NO: 605926 - DNA, 25 bp, Homo sapien
gggtggcagaatgtccacagctgct

SEQ ID NO: 605927 - DNA, 25 bp, Homo sapien
tggcagaatgtccacagctgctgag

SEQ ID NO: 605928 - DNA, 25 bp, Homo sapien
tgtccactgcttttagaccaaattg

SEQ ID NO: 605929 - DNA, 25 bp, Homo sapien
gattctttgtccactgcttttagac

SEQ ID NO: 605930 - DNA, 25 bp, Homo sapien
cactgcttttagaccaaattgactc

SEQ ID NO: 605931 - DNA, 25 bp, Homo sapien
gcttttagaccaaattgactcattt

SEQ ID NO: 605932 - DNA, 25 bp, Homo sapien
ctgccactcctgtgctgacacacag

SEQ ID NO: 605933 - DNA, 25 bp, Homo sapien
gaagttcacgccagccttttctgtg

SEQ ID NO: 605934 - DNA, 25 bp, Homo sapien
tggaagttcacgccagccttttctg

SEQ ID NO: 605935 - DNA, 25 bp, Homo sapien
ggaagttcacgccagccttttctgt

SEQ ID NO: 605936 - DNA, 25 bp, Homo sapien
cctggataaaccctgactgggatct

SEQ ID NO: 605937 - DNA, 25 bp, Homo sapien
cccctggataaaccctgactgggat

SEQ ID NO: 605938 - DNA, 25 bp, Homo sapien
ccctggataaaccctgactgggatc

SEQ ID NO: 605939 - DNA, 25 bp, Homo sapien
cagccaatctgtgaaaaggcatgaa

SEQ ID NO: 605940 - DNA, 25 bp, Homo sapien
gcaggctatggagctccgtggaggc

SEQ ID NO: 605941 - DNA, 25 bp, Homo sapien
caggctatggagctccgtggaggct

SEQ ID NO: 605942 - DNA, 25 bp, Homo sapien
aggctatggagctccgtggaggctc

SEQ ID NO: 605943 - DNA, 25 bp, Homo sapien
tcatcatcaaaaggagtgaagtgag

SEQ ID NO: 605944 - DNA, 25 bp, Homo sapien
tctgctggactagtctcatctctgc

SEQ ID NO: 605945 - DNA, 25 bp, Homo sapien
gggatcataatggaggggcatggct

SEQ ID NO: 605946 - DNA, 25 bp, Homo sapien
tggtttctgctggactagtctcatc

SEQ ID NO: 605947 - DNA, 25 bp, Homo sapien
cactgagttcctaataaaggcggca

SEQ ID NO: 605948 - DNA, 25 bp, Homo sapien
ggaatttgtcactctcgaatgcata

SEQ ID NO: 605949 - DNA, 25 bp, Homo sapien
cgaatgcataatttactagtgaaaa

SEQ ID NO: 605950 - DNA, 25 bp, Homo sapien
gcagcggtaatacattgcattttca

SEQ ID NO: 605951 - DNA, 25 bp, Homo sapien
ggagatggtacacgctgtctcctgc

SEQ ID NO: 605952 - DNA, 25 bp, Homo sapien
agatggtacacgctgtctcctgcct

SEQ ID NO: 605953 - DNA, 25 bp, Homo sapien
aggagatggtacacgctgtctcctg

SEQ ID NO: 605954 - DNA, 25 bp, Homo sapien
gatggtacacgctgtctcctgcctc

SEQ ID NO: 605955 - DNA, 25 bp, Homo sapien
catcttagaagctgcagatgggcca

SEQ ID NO: 605956 - DNA, 25 bp, Homo sapien
tgatttgcttccctgctgcacagcc

SEQ ID NO: 605957 - DNA, 25 bp, Homo sapien
tgtccccaaggaggcctcttagctt

SEQ ID NO: 605958 - DNA, 25 bp, Homo sapien
ccttgtccccaaggaggcctcttag

SEQ ID NO: 605959 - DNA, 25 bp, Homo sapien
ccccaaggaggcctcttagcttcat

SEQ ID NO: 605960 - DNA, 25 bp, Homo sapien
ccttttccatggaggtagcgcctgg

SEQ ID NO: 605961 - DNA, 25 bp, Homo sapien
ggaattcgagtgagaagtcctgcca

SEQ ID NO: 605962 - DNA, 25 bp, Homo sapien
tggcacaatgtccaacacatgaacg

SEQ ID NO: 605963 - DNA, 25 bp, Homo sapien
ggtaaatgaaactaccttggcacaa

SEQ ID NO: 605964 - DNA, 25 bp, Homo sapien
atgaggaagcactcccggtccccat

SEQ ID NO: 605965 - DNA, 25 bp, Homo sapien
ctggcgttctcccggtaagcacctt

SEQ ID NO: 605966 - DNA, 25 bp, Homo sapien
ttaaagagctgtgattaatgaggaa

SEQ ID NO: 605967 - DNA, 25 bp, Homo sapien
gcccgctggcgttctcccggtaagc

SEQ ID NO: 605968 - DNA, 25 bp, Homo sapien
tcagcagtccagtgccaatgtccac

SEQ ID NO: 605969 - DNA, 25 bp, Homo sapien
tagcaaattcagttccactcggcct

SEQ ID NO: 605970 - DNA, 25 bp, Homo sapien
cactcggcctacatcaatatccaga

SEQ ID NO: 605971 - DNA, 25 bp, Homo sapien
catccaaccctgatcaggataccag

SEQ ID NO: 605972 - DNA, 25 bp, Homo sapien
agcacggggcatacagccttcttgt

SEQ ID NO: 605973 - DNA, 25 bp, Homo sapien
gcacggggcatacagccttcttgtt

SEQ ID NO: 605974 - DNA, 25 bp, Homo sapien
cacggggcatacagccttcttgtta

SEQ ID NO: 605975 - DNA, 25 bp, Homo sapien
cggggcatacagccttcttgttagg

SEQ ID NO: 605976 - DNA, 25 bp, Homo sapien
gatccctggtctggaagacgtgcat

SEQ ID NO: 605977 - DNA, 25 bp, Homo sapien
tgtagatccctggtctggaagacgt

SEQ ID NO: 605978 - DNA, 25 bp, Homo sapien
ccatgtgtagatccctggtctggaa

SEQ ID NO: 605979 - DNA, 25 bp, Homo sapien
tagatccctggtctggaagacgtgc

SEQ ID NO: 605980 - DNA, 25 bp, Homo sapien
ccatcagcaaggcccacgatggatg

SEQ ID NO: 605981 - DNA, 25 bp, Homo sapien
tcagcaaggcccacgatggatggct

SEQ ID NO: 605982 - DNA, 25 bp, Homo sapien
gcaaggcccacgatggatggctgtc

SEQ ID NO: 605983 - DNA, 25 bp, Homo sapien
aggcccacgatggatggctgtcatt

SEQ ID NO: 605984 - DNA, 25 bp, Homo sapien
tttctgcggggacctatgaggggct

SEQ ID NO: 605985 - DNA, 25 bp, Homo sapien
gaactgcaagtcatatttctgcggg

SEQ ID NO: 605986 - DNA, 25 bp, Homo sapien
aagaactgcaagtcatatttctgcg

SEQ ID NO: 605987 - DNA, 25 bp, Homo sapien
tcaagaactgcaagtcatatttctg

SEQ ID NO: 605988 - DNA, 25 bp, Homo sapien
cagtgtagaggagcacagcaaggct

SEQ ID NO: 605989 - DNA, 25 bp, Homo sapien
ggcagggggactttctcagtgtaga

SEQ ID NO: 605990 - DNA, 25 bp, Homo sapien
ggagcacagcaaggctgcatctgta

SEQ ID NO: 605991 - DNA, 25 bp, Homo sapien
tttctcagtgtagaggagcacagca

SEQ ID NO: 605992 - DNA, 25 bp, Homo sapien
tgtgaagacacgctgaatctttgtg

SEQ ID NO: 605993 - DNA, 25 bp, Homo sapien
caccattaccacctctgtgaagaca

SEQ ID NO: 605994 - DNA, 25 bp, Homo sapien
tggctcagatgaatgtaggcattgg

SEQ ID NO: 605995 - DNA, 25 bp, Homo sapien
cacgctgaatctttgtgctctgccc

SEQ ID NO: 605996 - DNA, 25 bp, Homo sapien
tggggagttgccaatcaagccctgg

SEQ ID NO: 605997 - DNA, 25 bp, Homo sapien
gtttggggagttgccaatcaagccc

SEQ ID NO: 605998 - DNA, 25 bp, Homo sapien
gggagttgccaatcaagccctggaa

SEQ ID NO: 605999 - DNA, 25 bp, Homo sapien
ctggtttggggagttgccaatcaag

SEQ ID NO: 606000 - DNA, 25 bp, Homo sapien
ctggatggcaacacgactgtcgggt

SEQ ID NO: 606001 - DNA, 25 bp, Homo sapien
cactttccgatgagggtgctgtgca

SEQ ID NO: 606002 - DNA, 25 bp, Homo sapien
cacgactgtcgggtgatggatcact

SEQ ID NO: 606003 - DNA, 25 bp, Homo sapien
agctgtgccagtgcagactcccgat

SEQ ID NO: 606004 - DNA, 25 bp, Homo sapien
tatcgactggagcttcttggcaggc

SEQ ID NO: 606005 - DNA, 25 bp, Homo sapien
ttagaacctgtcaatagttcagatc

SEQ ID NO: 606006 - DNA, 25 bp, Homo sapien
tgtttagaggaggagcccgctttgt

SEQ ID NO: 606007 - DNA, 25 bp, Homo sapien
cccagggaagcgtgactgattggaa

SEQ ID NO: 606008 - DNA, 25 bp, Homo sapien
caaagggttaaggcagcaaacatac

SEQ ID NO: 606009 - DNA, 25 bp, Homo sapien
tcaaagggttaaggcagcaaacata

SEQ ID NO: 606010 - DNA, 25 bp, Homo sapien
tgtggcgtagtcatcccaggtttat

SEQ ID NO: 606011 - DNA, 25 bp, Homo sapien
taatgtcagggtgtggcgtagtcat

SEQ ID NO: 606012 - DNA, 25 bp, Homo sapien
tcagggtgtggcgtagtcatcccag

SEQ ID NO: 606013 - DNA, 25 bp, Homo sapien
tgctgtaatgtcagggtgtggcgta

SEQ ID NO: 606014 - DNA, 25 bp, Homo sapien
gtacacgaatccagtgttagggtcc

SEQ ID NO: 606015 - DNA, 25 bp, Homo sapien
cacctgaaacagctacacttggagg

SEQ ID NO: 606016 - DNA, 25 bp, Homo sapien
ccacacctgaaacagctacacttgg

SEQ ID NO: 606017 - DNA, 25 bp, Homo sapien
agagctgggtacacgaatccagtgt

SEQ ID NO: 606018 - DNA, 25 bp, Homo sapien
aacccttcgttgtcatccattgtga

SEQ ID NO: 606019 - DNA, 25 bp, Homo sapien
tagtcccactactgaagtgatagga

SEQ ID NO: 606020 - DNA, 25 bp, Homo sapien
ctatgcatccaggtttagaaaccct

SEQ ID NO: 606021 - DNA, 25 bp, Homo sapien
ttcagccccactataagattcattt

SEQ ID NO: 606022 - DNA, 25 bp, Homo sapien
agcctattagctggtagcacgtggg

SEQ ID NO: 606023 - DNA, 25 bp, Homo sapien
aggcagaacaaggaagtccgcctct

SEQ ID NO: 606024 - DNA, 25 bp, Homo sapien
ttctgaaatacagctgcagcctatt

SEQ ID NO: 606025 - DNA, 25 bp, Homo sapien
gaacaaggaagtccgcctctccttg

SEQ ID NO: 606026 - DNA, 25 bp, Homo sapien
caggaaccttccacatccagatatt

SEQ ID NO: 606027 - DNA, 25 bp, Homo sapien
aaccttccacatccagatatttctc

SEQ ID NO: 606028 - DNA, 25 bp, Homo sapien
ggaaccttccacatccagatatttc

SEQ ID NO: 606029 - DNA, 25 bp, Homo sapien
gcaggaaccttccacatccagatat

SEQ ID NO: 606030 - DNA, 25 bp, Homo sapien
ttataattgcgtgtgctcgtgctgc

SEQ ID NO: 606031 - DNA, 25 bp, Homo sapien
gatggcttttcgtccacctcctctt

SEQ ID NO: 606032 - DNA, 25 bp, Homo sapien
acagcaggatggcttttcgtccacc

SEQ ID NO: 606033 - DNA, 25 bp, Homo sapien
ttgcgtgtgctcgtgctgcttcagg

SEQ ID NO: 606034 - DNA, 25 bp, Homo sapien
tcagccatactcggtggttggtttg

SEQ ID NO: 606035 - DNA, 25 bp, Homo sapien
cagccatactcggtggttggtttga

SEQ ID NO: 606036 - DNA, 25 bp, Homo sapien
agccatactcggtggttggtttgac

SEQ ID NO: 606037 - DNA, 25 bp, Homo sapien
ccatactcggtggttggtttgactt

SEQ ID NO: 606038 - DNA, 25 bp, Homo sapien
tagaccatcttaactgtgggcttca

SEQ ID NO: 606039 - DNA, 25 bp, Homo sapien
aagactggagcgagccccggtagac

SEQ ID NO: 606040 - DNA, 25 bp, Homo sapien
tcacccctgagcagaacattactct

SEQ ID NO: 606041 - DNA, 25 bp, Homo sapien
cacagagctttctatcacccctgag

SEQ ID NO: 606042 - DNA, 25 bp, Homo sapien
ggtcattaggttccatgcgcagtac

SEQ ID NO: 606043 - DNA, 25 bp, Homo sapien
gctatagttcatctgtccgctccct

SEQ ID NO: 606044 - DNA, 25 bp, Homo sapien
cctagtagcactctaaagttcaccc

SEQ ID NO: 606045 - DNA, 25 bp, Homo sapien
cactgagccggtaattgagtgactg

SEQ ID NO: 606046 - DNA, 25 bp, Homo sapien
cagttaattatgagacctgccacag

SEQ ID NO: 606047 - DNA, 25 bp, Homo sapien
cattagcagataagccccaaagtat

SEQ ID NO: 606048 - DNA, 25 bp, Homo sapien
catgaacacactgcatggtcacagt

SEQ ID NO: 606049 - DNA, 25 bp, Homo sapien
tatgcttacagaaatgcgaaggagt

SEQ ID NO: 606050 - DNA, 25 bp, Homo sapien
tatgacctgctcgatttccaacccg

SEQ ID NO: 606051 - DNA, 25 bp, Homo sapien
tcgatttccaacccgggtcagttca

SEQ ID NO: 606052 - DNA, 25 bp, Homo sapien
ggtggtactccacttccagaaggtc

SEQ ID NO: 606053 - DNA, 25 bp, Homo sapien
cctggtggtactccacttccagaag

SEQ ID NO: 606054 - DNA, 25 bp, Homo sapien
gctcagactctagctgctcattgtc

SEQ ID NO: 606055 - DNA, 25 bp, Homo sapien
atcagtctataagaacatccatggg

SEQ ID NO: 606056 - DNA, 25 bp, Homo sapien
tatggagatagtagctcagactcta

SEQ ID NO: 606057 - DNA, 25 bp, Homo sapien
gattccccgacaatcaaactgctgg

SEQ ID NO: 606058 - DNA, 25 bp, Homo sapien
ccttcaggagctcttgtaaggcaga

SEQ ID NO: 606059 - DNA, 25 bp, Homo sapien
tctccatggtctttacattttggca

SEQ ID NO: 606060 - DNA, 25 bp, Homo sapien
ttgtaaggcagacctggtggtgaca

SEQ ID NO: 606061 - DNA, 25 bp, Homo sapien
tcttgtaaggcagacctggtggtga

SEQ ID NO: 606062 - DNA, 25 bp, Homo sapien
cctcacttcccagtgccccattgtc

SEQ ID NO: 606063 - DNA, 25 bp, Homo sapien
cacttcccagtgccccattgtccat

SEQ ID NO: 606064 - DNA, 25 bp, Homo sapien
tcacttcccagtgccccattgtcca

SEQ ID NO: 606065 - DNA, 25 bp, Homo sapien
cctgccgccagctcctcacttccca

SEQ ID NO: 606066 - DNA, 25 bp, Homo sapien
ctatggcaggtcaccatcataggtg

SEQ ID NO: 606067 - DNA, 25 bp, Homo sapien
tatggcaggtcaccatcataggtgt

SEQ ID NO: 606068 - DNA, 25 bp, Homo sapien
tggcaggtcaccatcataggtgtca

SEQ ID NO: 606069 - DNA, 25 bp, Homo sapien
ggcaggtcaccatcataggtgtcat

SEQ ID NO: 606070 - DNA, 25 bp, Homo sapien
ggactgactgtagccggcagagtcc

SEQ ID NO: 606071 - DNA, 25 bp, Homo sapien
gaaagtttgacaatccaacatattg

SEQ ID NO: 606072 - DNA, 25 bp, Homo sapien
gaaactttagagttctccgcagacc

SEQ ID NO: 606073 - DNA, 25 bp, Homo sapien
gcagagtcccggaaggtagccttta

SEQ ID NO: 606074 - DNA, 25 bp, Homo sapien
cctgatgctcgtcctggctgaacca

SEQ ID NO: 606075 - DNA, 25 bp, Homo sapien
cgtcctggctgaaccaggatcctgg

SEQ ID NO: 606076 - DNA, 25 bp, Homo sapien
gcaggcctgatgctcgtcctggctg

SEQ ID NO: 606077 - DNA, 25 bp, Homo sapien
gtcctggctgaaccaggatcctggt

SEQ ID NO: 606078 - DNA, 25 bp, Homo sapien
catgatccttattgcaaagtgtctc

SEQ ID NO: 606079 - DNA, 25 bp, Homo sapien
tgctttgcttcaaccgctgacatga

SEQ ID NO: 606080 - DNA, 25 bp, Homo sapien
tcagaggctgagtcgtttcagctgc

SEQ ID NO: 606081 - DNA, 25 bp, Homo sapien
ggctgagtcgtttcagctgctttgc

SEQ ID NO: 606082 - DNA, 25 bp, Homo sapien
tgcaactcctggaccagcctatacc

SEQ ID NO: 606083 - DNA, 25 bp, Homo sapien
tggaccagcctataccaggtggctt

SEQ ID NO: 606084 - DNA, 25 bp, Homo sapien
tcctggaccagcctataccaggtgg

SEQ ID NO: 606085 - DNA, 25 bp, Homo sapien
cagcctataccaggtggcttgtacc

SEQ ID NO: 606086 - DNA, 25 bp, Homo sapien
ctctgaactatatctgtcaggaact

SEQ ID NO: 606087 - DNA, 25 bp, Homo sapien
ctctttgacaattctgacatataaa

SEQ ID NO: 606088 - DNA, 25 bp, Homo sapien
acacacaatgtgtcgttgtatcctg

SEQ ID NO: 606089 - DNA, 25 bp, Homo sapien
tctgacatataaatagcatctttcc

SEQ ID NO: 606090 - DNA, 25 bp, Homo sapien
tgtgagtgctaccttctgtttctgc

SEQ ID NO: 606091 - DNA, 25 bp, Homo sapien
tgcttctgagattcacccgtgttgt

SEQ ID NO: 606092 - DNA, 25 bp, Homo sapien
tgtcagtagctcctttccgttgctg

SEQ ID NO: 606093 - DNA, 25 bp, Homo sapien
tccgttgctgagtaatggttcactg

SEQ ID NO: 606094 - DNA, 25 bp, Homo sapien
ctctcattgttattgagcagccaga

SEQ ID NO: 606095 - DNA, 25 bp, Homo sapien
tttggtgtaaatttacaacactctc

SEQ ID NO: 606096 - DNA, 25 bp, Homo sapien
aggaagtctgggctctgagtagcat

SEQ ID NO: 606097 - DNA, 25 bp, Homo sapien
gtagcattcacaggaatatttatct

SEQ ID NO: 606098 - DNA, 25 bp, Homo sapien
cttgggtgtatgaacactgtggcag

SEQ ID NO: 606099 - DNA, 25 bp, Homo sapien
ccttgggtgtatgaacactgtggca

SEQ ID NO: 606100 - DNA, 25 bp, Homo sapien
gggagcagtgcaagaagaaacacca

SEQ ID NO: 606101 - DNA, 25 bp, Homo sapien
gctcattattgatcttaaccttgtt

SEQ ID NO: 606102 - DNA, 25 bp, Homo sapien
tccgttcctttaatctgcagatgaa

SEQ ID NO: 606103 - DNA, 25 bp, Homo sapien
ccactaagatatgggtgggagcagt

SEQ ID NO: 606104 - DNA, 25 bp, Homo sapien
cctcattaactcttttctcctcgtt

SEQ ID NO: 606105 - DNA, 25 bp, Homo sapien
tcaatctttctcacatctcctcttt

SEQ ID NO: 606106 - DNA, 25 bp, Homo sapien
tcttcctgccctcattaactctttt

SEQ ID NO: 606107 - DNA, 25 bp, Homo sapien
cattaactcttttctcctcgttgac

SEQ ID NO: 606108 - DNA, 25 bp, Homo sapien
ttctacgactgcctctgtgcacaca

SEQ ID NO: 606109 - DNA, 25 bp, Homo sapien
cagactctgagctcagttcgtcact

SEQ ID NO: 606110 - DNA, 25 bp, Homo sapien
cacacaaagggctttgacagtccct

SEQ ID NO: 606111 - DNA, 25 bp, Homo sapien
ttcttagcctgcagtcaaatgagct

SEQ ID NO: 606112 - DNA, 25 bp, Homo sapien
tggccactctcatcgaattcagagg

SEQ ID NO: 606113 - DNA, 25 bp, Homo sapien
tctctacgctaggtgcacaggtgtc

SEQ ID NO: 606114 - DNA, 25 bp, Homo sapien
caaaaagctggttcgtctcggctac

SEQ ID NO: 606115 - DNA, 25 bp, Homo sapien
gaaagatgccagactgaatgcccgt

SEQ ID NO: 606116 - DNA, 25 bp, Homo sapien
agcagtttgggaccccatctccatt

SEQ ID NO: 606117 - DNA, 25 bp, Homo sapien
acagccctggcaatagcaatcgctg

SEQ ID NO: 606118 - DNA, 25 bp, Homo sapien
aagcagtttgggaccccatctccat

SEQ ID NO: 606119 - DNA, 25 bp, Homo sapien
cctggcaatagcaatcgctgtcagg

SEQ ID NO: 606120 - DNA, 25 bp, Homo sapien
ccacagtcttctcgtcctgctgcat

SEQ ID NO: 606121 - DNA, 25 bp, Homo sapien
gccacagtcttctcgtcctgctgca

SEQ ID NO: 606122 - DNA, 25 bp, Homo sapien
agccacagtcttctcgtcctgctgc

SEQ ID NO: 606123 - DNA, 25 bp, Homo sapien
tgacgagctgctgcatctcggtaga

SEQ ID NO: 606124 - DNA, 25 bp, Homo sapien
gaccccaacggccttgggcagaaca

SEQ ID NO: 606125 - DNA, 25 bp, Homo sapien
tgttgatctctgtcggaccccaacg

SEQ ID NO: 606126 - DNA, 25 bp, Homo sapien
tgcatctcggtagaaacactgttga

SEQ ID NO: 606127 - DNA, 25 bp, Homo sapien
tatgcctacatgcacacagaagaat

SEQ ID NO: 606128 - DNA, 25 bp, Homo sapien
tacctctgggaagcaagattcatag

SEQ ID NO: 606129 - DNA, 25 bp, Homo sapien
ctactgaatatgacagatgtgaacc

SEQ ID NO: 606130 - DNA, 25 bp, Homo sapien
tgtgaaccaataatgataaaccctg

SEQ ID NO: 606131 - DNA, 25 bp, Homo sapien
taacctcttctattacttcactgta

SEQ ID NO: 606132 - DNA, 25 bp, Homo sapien
gaaaaagatccaaggtgaaatgaac

SEQ ID NO: 606133 - DNA, 25 bp, Homo sapien
actgtactctcgttcctcctcatca

SEQ ID NO: 606134 - DNA, 25 bp, Homo sapien
aaagatccaaggtgaaatgaaccag

SEQ ID NO: 606135 - DNA, 25 bp, Homo sapien
gagatttatgcctcgttctctcttt

SEQ ID NO: 606136 - DNA, 25 bp, Homo sapien
gctggaaaggacagattcccaagca

SEQ ID NO: 606137 - DNA, 25 bp, Homo sapien
aacttgttttcaagagctggagcca

SEQ ID NO: 606138 - DNA, 25 bp, Homo sapien
gcagaaggccagagatttatgcctc

SEQ ID NO: 606139 - DNA, 25 bp, Homo sapien
tatctatgacgaagttgtgagtgct

SEQ ID NO: 606140 - DNA, 25 bp, Homo sapien
tatgacgaagttgtgagtgctttca

SEQ ID NO: 606141 - DNA, 25 bp, Homo sapien
gacgaagttgtgagtgctttcatct

SEQ ID NO: 606142 - DNA, 25 bp, Homo sapien
aacatttatctatgacgaagttgtg

SEQ ID NO: 606143 - DNA, 25 bp, Homo sapien
tagggctcggtggaaagatcatctc

SEQ ID NO: 606144 - DNA, 25 bp, Homo sapien
gctagagccaggacaagaacacctt

SEQ ID NO: 606145 - DNA, 25 bp, Homo sapien
cttccacaattgatgctgactgaga

SEQ ID NO: 606146 - DNA, 25 bp, Homo sapien
aatctgcagtttgactagggctcgg

SEQ ID NO: 606147 - DNA, 25 bp, Homo sapien
taaatgacatgccatagtgaggaga

SEQ ID NO: 606148 - DNA, 25 bp, Homo sapien
tagtcgaataaaagctcacagaggg

SEQ ID NO: 606149 - DNA, 25 bp, Homo sapien
cagaacagggtttgaacatgggcat

SEQ ID NO: 606150 - DNA, 25 bp, Homo sapien
aacacttatgtaggccttaacccag

SEQ ID NO: 606151 - DNA, 25 bp, Homo sapien
cagtgacccgcagccgtgtgtgacg

SEQ ID NO: 606152 - DNA, 25 bp, Homo sapien
tttccaagcagtgacccgcagccgt

SEQ ID NO: 606153 - DNA, 25 bp, Homo sapien
tccaagcagtgacccgcagccgtgt

SEQ ID NO: 606154 - DNA, 25 bp, Homo sapien
agcagtgacccgcagccgtgtgtga

SEQ ID NO: 606155 - DNA, 25 bp, Homo sapien
tgagagcaccaggagtccttccttt

SEQ ID NO: 606156 - DNA, 25 bp, Homo sapien
agagcaccaggagtccttcctttct

SEQ ID NO: 606157 - DNA, 25 bp, Homo sapien
gagagcaccaggagtccttcctttc

SEQ ID NO: 606158 - DNA, 25 bp, Homo sapien
ggatgagagcaccaggagtccttcc

SEQ ID NO: 606159 - DNA, 25 bp, Homo sapien
gatgcctgtcacataagctggcttt

SEQ ID NO: 606160 - DNA, 25 bp, Homo sapien
cactggacaatgtacaatcgctgtg

SEQ ID NO: 606161 - DNA, 25 bp, Homo sapien
ttttcaatggaacccaaagcatgct

SEQ ID NO: 606162 - DNA, 25 bp, Homo sapien
tcatcagtcattgtcaagagtaggc

SEQ ID NO: 606163 - DNA, 25 bp, Homo sapien
caatctctgagtaacccctaaccct

SEQ ID NO: 606164 - DNA, 25 bp, Homo sapien
catgaagaatccatgaagcagacac

SEQ ID NO: 606165 - DNA, 25 bp, Homo sapien
atgaagaatccatgaagcagacaca

SEQ ID NO: 606166 - DNA, 25 bp, Homo sapien
ttcatgaagaatccatgaagcagac

SEQ ID NO: 606167 - DNA, 25 bp, Homo sapien
tgcacagtccctgacgctatagttg

SEQ ID NO: 606168 - DNA, 25 bp, Homo sapien
cagagaaccagctggcctttgcact

SEQ ID NO: 606169 - DNA, 25 bp, Homo sapien
ggagctaatggcctcaacctcaggg

SEQ ID NO: 606170 - DNA, 25 bp, Homo sapien
gcttctaatgaaccaactgcacagt

SEQ ID NO: 606171 - DNA, 25 bp, Homo sapien
tccacctggaactccctaagaggtc

SEQ ID NO: 606172 - DNA, 25 bp, Homo sapien
tgatgaactcatttggtcccctttt

SEQ ID NO: 606173 - DNA, 25 bp, Homo sapien
tctggtgatgaactcatttggtccc

SEQ ID NO: 606174 - DNA, 25 bp, Homo sapien
ggcctgcttctggtgatgaactcat

SEQ ID NO: 606175 - DNA, 25 bp, Homo sapien
tgagaagcagagataggcttactgc

SEQ ID NO: 606176 - DNA, 25 bp, Homo sapien
gctgagaagcagagataggcttact

SEQ ID NO: 606177 - DNA, 25 bp, Homo sapien
agcagagataggcttactgcagcat

SEQ ID NO: 606178 - DNA, 25 bp, Homo sapien
agaagcagagataggcttactgcag

SEQ ID NO: 606179 - DNA, 25 bp, Homo sapien
agttgttcaggatgcgtttgaaatg

SEQ ID NO: 606180 - DNA, 25 bp, Homo sapien
caggatgcgtttgaaatgaacatct

SEQ ID NO: 606181 - DNA, 25 bp, Homo sapien
ttgaaatgaacatctggatatgagt

SEQ ID NO: 606182 - DNA, 25 bp, Homo sapien
gatgcgtttgaaatgaacatctgga

SEQ ID NO: 606183 - DNA, 25 bp, Homo sapien
ttttagtctgtattgagttctttcc

SEQ ID NO: 606184 - DNA, 25 bp, Homo sapien
tttccactgcttgactaatagtggg

SEQ ID NO: 606185 - DNA, 25 bp, Homo sapien
aaagacatcgcacttgtaaaacagg

SEQ ID NO: 606186 - DNA, 25 bp, Homo sapien
gtatatggcatgtggcaagctcttc

SEQ ID NO: 606187 - DNA, 25 bp, Homo sapien
tgtagaatttgacattgcaggcctt

SEQ ID NO: 606188 - DNA, 25 bp, Homo sapien
caataggtgtataatattttatgca

SEQ ID NO: 606189 - DNA, 25 bp, Homo sapien
tgcatgtgtagaatttgacattgca

SEQ ID NO: 606190 - DNA, 25 bp, Homo sapien
ttgtttcagcaataggtgtataata

SEQ ID NO: 606191 - DNA, 25 bp, Homo sapien
gctttctgactgagtattggttgaa

SEQ ID NO: 606192 - DNA, 25 bp, Homo sapien
gtatcgcagtcaaaactgtaaccaa

SEQ ID NO: 606193 - DNA, 25 bp, Homo sapien
ccaaaggaggtattatgcttcccaa

SEQ ID NO: 606194 - DNA, 25 bp, Homo sapien
caacagtagtggtagttacgtctgg

SEQ ID NO: 606195 - DNA, 25 bp, Homo sapien
ttgtgcttctgccagcatgccatgc

SEQ ID NO: 606196 - DNA, 25 bp, Homo sapien
tatcctcttctggatcttgtgcttc

SEQ ID NO: 606197 - DNA, 25 bp, Homo sapien
ccttctatcctcttctggatcttgt

SEQ ID NO: 606198 - DNA, 25 bp, Homo sapien
gtgcttctgccagcatgccatgctc

SEQ ID NO: 606199 - DNA, 25 bp, Homo sapien
ctggtgctgccaggtatgagggatt

SEQ ID NO: 606200 - DNA, 25 bp, Homo sapien
gccagtcttcagtttacaaagctca

SEQ ID NO: 606201 - DNA, 25 bp, Homo sapien
cctggtgctgccaggtatgagggat

SEQ ID NO: 606202 - DNA, 25 bp, Homo sapien
tgtgggcaggactgcttgcatatag

SEQ ID NO: 606203 - DNA, 25 bp, Homo sapien
ggctcagcaacaggatatgggacac

SEQ ID NO: 606204 - DNA, 25 bp, Homo sapien
gataagccagttgctcatcactctc

SEQ ID NO: 606205 - DNA, 25 bp, Homo sapien
gcatataggctaccccttccattgg

SEQ ID NO: 606206 - DNA, 25 bp, Homo sapien
tgaatttccaggagagagcacatgg

SEQ ID NO: 606207 - DNA, 25 bp, Homo sapien
catggctccattctgaatttccagg

SEQ ID NO: 606208 - DNA, 25 bp, Homo sapien
attctgaatttccaggagagagcac

SEQ ID NO: 606209 - DNA, 25 bp, Homo sapien
tcatggctccattctgaatttccag

SEQ ID NO: 606210 - DNA, 25 bp, Homo sapien
cacattccgagctggaaaaaggagg

SEQ ID NO: 606211 - DNA, 25 bp, Homo sapien
ggctgatggcacattccgagctgga

SEQ ID NO: 606212 - DNA, 25 bp, Homo sapien
tgatggcacattccgagctggaaaa

SEQ ID NO: 606213 - DNA, 25 bp, Homo sapien
tggcacattccgagctggaaaaagg

SEQ ID NO: 606214 - DNA, 25 bp, Homo sapien
caggaagacttgggaattgcacctt

SEQ ID NO: 606215 - DNA, 25 bp, Homo sapien
ctatgaaaggcgagctcaggaagac

SEQ ID NO: 606216 - DNA, 25 bp, Homo sapien
tatgaaaggcgagctcaggaagact

SEQ ID NO: 606217 - DNA, 25 bp, Homo sapien
tgaaaggcgagctcaggaagacttg

SEQ ID NO: 606218 - DNA, 25 bp, Homo sapien
ctggggctgcgggatcatctcattg

SEQ ID NO: 606219 - DNA, 25 bp, Homo sapien
gaaacctagtcccagacgtagcagg

SEQ ID NO: 606220 - DNA, 25 bp, Homo sapien
aaacctagtcccagacgtagcaggg

SEQ ID NO: 606221 - DNA, 25 bp, Homo sapien
tgcgggatcatctcattgctgagca

SEQ ID NO: 606222 - DNA, 25 bp, Homo sapien
cactggatctcggaggtaggaatcc

SEQ ID NO: 606223 - DNA, 25 bp, Homo sapien
cagaagtctccattccatcctttgg

SEQ ID NO: 606224 - DNA, 25 bp, Homo sapien
catcctttggtatagtatgaatatc

SEQ ID NO: 606225 - DNA, 25 bp, Homo sapien
agtatgaatatctgggatgaagcat

SEQ ID NO: 606226 - DNA, 25 bp, Homo sapien
tgggaaaagttatcttccacaggcc

SEQ ID NO: 606227 - DNA, 25 bp, Homo sapien
tgtacatttgactgaaataagcact

SEQ ID NO: 606228 - DNA, 25 bp, Homo sapien
tgtagctctgatgtaataaatttct

SEQ ID NO: 606229 - DNA, 25 bp, Homo sapien
taagcacttggtgggaaaagttatc

SEQ ID NO: 606230 - DNA, 25 bp, Homo sapien
tctgccaagcactggtaaaggtgca

SEQ ID NO: 606231 - DNA, 25 bp, Homo sapien
acttctgccaagcactggtaaaggt

SEQ ID NO: 606232 - DNA, 25 bp, Homo sapien
agagtacctgcacttctgccaagca

SEQ ID NO: 606233 - DNA, 25 bp, Homo sapien
gggttacagagtacctgcacttctg

SEQ ID NO: 606234 - DNA, 25 bp, Homo sapien
caaacaggcaaagcgccctttcgac

SEQ ID NO: 606235 - DNA, 25 bp, Homo sapien
gcgccctttcgacagcagccgagag

SEQ ID NO: 606236 - DNA, 25 bp, Homo sapien
aggcaaagcgccctttcgacagcag

SEQ ID NO: 606237 - DNA, 25 bp, Homo sapien
aacaaacaggcaaagcgccctttcg

SEQ ID NO: 606238 - DNA, 25 bp, Homo sapien
caggtgttcagcttagtggcaggcc

SEQ ID NO: 606239 - DNA, 25 bp, Homo sapien
gacacagatgggtgaattacaggtg

SEQ ID NO: 606240 - DNA, 25 bp, Homo sapien
gctggcgggttttggctgggtgcca

SEQ ID NO: 606241 - DNA, 25 bp, Homo sapien
ttggcacagtttaatatgagctccc

SEQ ID NO: 606242 - DNA, 25 bp, Homo sapien
ttcccataagtggatatttaacttg

SEQ ID NO: 606243 - DNA, 25 bp, Homo sapien
tgtctccattgctaccatcctagtc

SEQ ID NO: 606244 - DNA, 25 bp, Homo sapien
ctgttcccataagtggatatttaac

SEQ ID NO: 606245 - DNA, 25 bp, Homo sapien
gtctgtctccattgctaccatccta

SEQ ID NO: 606246 - DNA, 25 bp, Homo sapien
tatttccaatcaggtactatgtgct

SEQ ID NO: 606247 - DNA, 25 bp, Homo sapien
ccttaatgttgactgttatgctgac

SEQ ID NO: 606248 - DNA, 25 bp, Homo sapien
tactatgtgctgttgattcaacccc

SEQ ID NO: 606249 - DNA, 25 bp, Homo sapien
gattcaacccccttaatgttgactg

SEQ ID NO: 606250 - DNA, 25 bp, Homo sapien
catagggtaatgataacgtatccac

SEQ ID NO: 606251 - DNA, 25 bp, Homo sapien
tcttcagggcaatgatcagattctt

SEQ ID NO: 606252 - DNA, 25 bp, Homo sapien
tgccctcagggtaatgatcacatat

SEQ ID NO: 606253 - DNA, 25 bp, Homo sapien
taatgataagtattcctataggcca

SEQ ID NO: 606254 - DNA, 25 bp, Homo sapien
cacctcagttgggatgactggaaca

SEQ ID NO: 606255 - DNA, 25 bp, Homo sapien
cagtcagttggcagctctactaggc

SEQ ID NO: 606256 - DNA, 25 bp, Homo sapien
taacaggtaataggtcttccagcaa

SEQ ID NO: 606257 - DNA, 25 bp, Homo sapien
gatggcctcaatcacaagtctggca

SEQ ID NO: 606258 - DNA, 25 bp, Homo sapien
gaagagatctcatgttatcagcctc

SEQ ID NO: 606259 - DNA, 25 bp, Homo sapien
tgggttgctcattcttacagcgaca

SEQ ID NO: 606260 - DNA, 25 bp, Homo sapien
cccattagcaatggatgagacttag

SEQ ID NO: 606261 - DNA, 25 bp, Homo sapien
tatttcaggcagcatactgtctatg

SEQ ID NO: 606262 - DNA, 25 bp, Homo sapien
gaatccaagtgggtatgtctagcga

SEQ ID NO: 606263 - DNA, 25 bp, Homo sapien
taggaggatctccaaccccagttgt

SEQ ID NO: 606264 - DNA, 25 bp, Homo sapien
aacaagtaggactcccagtgtcaca

SEQ ID NO: 606265 - DNA, 25 bp, Homo sapien
taagtccaaggtcagtttgcagaac

SEQ ID NO: 606266 - DNA, 25 bp, Homo sapien
cagctgattaggcttctcacatctg

SEQ ID NO: 606267 - DNA, 25 bp, Homo sapien
tatggagcaatcagctgattaggct

SEQ ID NO: 606268 - DNA, 25 bp, Homo sapien
ttatggagcaatcagctgattaggc

SEQ ID NO: 606269 - DNA, 25 bp, Homo sapien
tgctttcatattctccatcaaaaag

SEQ ID NO: 606270 - DNA, 25 bp, Homo sapien
tgctctgaatggtctgcatcatctc

SEQ ID NO: 606271 - DNA, 25 bp, Homo sapien
ttcttcccccaggatgctttcatat

SEQ ID NO: 606272 - DNA, 25 bp, Homo sapien
ctgctctgaatggtctgcatcatct

SEQ ID NO: 606273 - DNA, 25 bp, Homo sapien
cggctttggttgaccaaatgacttc

SEQ ID NO: 606274 - DNA, 25 bp, Homo sapien
tccttctatagtttgtgccagcatt

SEQ ID NO: 606275 - DNA, 25 bp, Homo sapien
ctctttgccagatcgatttactttg

SEQ ID NO: 606276 - DNA, 25 bp, Homo sapien
tatagtttgtgccagcattgatctt

SEQ ID NO: 606277 - DNA, 25 bp, Homo sapien
aaagggataaagtgggctagactgt

SEQ ID NO: 606278 - DNA, 25 bp, Homo sapien
aagggataaagtgggctagactgtt

SEQ ID NO: 606279 - DNA, 25 bp, Homo sapien
atgatactgatgtccttacttaaaa

SEQ ID NO: 606280 - DNA, 25 bp, Homo sapien
gtaatgatactgatgtccttactta

SEQ ID NO: 606281 - DNA, 25 bp, Homo sapien
cagacagaatgaagcgttagcccct

SEQ ID NO: 606282 - DNA, 25 bp, Homo sapien
aagcccaccaagtctgctactagag

SEQ ID NO: 606283 - DNA, 25 bp, Homo sapien
taaacctgatttgcagtagtcgcca

SEQ ID NO: 606284 - DNA, 25 bp, Homo sapien
tgggccatcagttctcttaaacctg

SEQ ID NO: 606285 - DNA, 25 bp, Homo sapien
ttcctgcatcagtggcagacctatg

SEQ ID NO: 606286 - DNA, 25 bp, Homo sapien
tatgccagttgattcaggattcctc

SEQ ID NO: 606287 - DNA, 25 bp, Homo sapien
gctgcagctgccaggttcaacttcc

SEQ ID NO: 606288 - DNA, 25 bp, Homo sapien
gcagacctatgccagttgattcagg

SEQ ID NO: 606289 - DNA, 25 bp, Homo sapien
cttgtcaccttgttgtccaagatag

SEQ ID NO: 606290 - DNA, 25 bp, Homo sapien
tcatcagggacacaggatactatct

SEQ ID NO: 606291 - DNA, 25 bp, Homo sapien
tccaagatagttgctgcatctccag

SEQ ID NO: 606292 - DNA, 25 bp, Homo sapien
tgtcaaattaagcttcttgtcacct

SEQ ID NO: 606293 - DNA, 25 bp, Homo sapien
gaggtttccattgggtctccatata

SEQ ID NO: 606294 - DNA, 25 bp, Homo sapien
tattcctaggcaatgtaataagaca

SEQ ID NO: 606295 - DNA, 25 bp, Homo sapien
gacaaaagactgttatcactagttc

SEQ ID NO: 606296 - DNA, 25 bp, Homo sapien
cagctgttagcacacttaatagtaa

SEQ ID NO: 606297 - DNA, 25 bp, Homo sapien
gaaaaatgttaagatactagggcca

SEQ ID NO: 606298 - DNA, 25 bp, Homo sapien
gatcctgctataaggtgacaccaag

SEQ ID NO: 606299 - DNA, 25 bp, Homo sapien
tatcaataccagactaaggcaaggg

SEQ ID NO: 606300 - DNA, 25 bp, Homo sapien
tcccaagataagtgtcagcaagtca

SEQ ID NO: 606301 - DNA, 25 bp, Homo sapien
ctatttacactgaacagaggtttgg

SEQ ID NO: 606302 - DNA, 25 bp, Homo sapien
ctggagtaactatttacactgaaca

SEQ ID NO: 606303 - DNA, 25 bp, Homo sapien
ttttagttgaatcaggtgaagacag

SEQ ID NO: 606304 - DNA, 25 bp, Homo sapien
aagacagagttaaaatcacatagga

SEQ ID NO: 606305 - DNA, 25 bp, Homo sapien
cagctccaagccacatcttaggcat

SEQ ID NO: 606306 - DNA, 25 bp, Homo sapien
agccacatcttaggcatactatgca

SEQ ID NO: 606307 - DNA, 25 bp, Homo sapien
gagatttcctggtctttactgaaaa

SEQ ID NO: 606308 - DNA, 25 bp, Homo sapien
agagatttcctggtctttactgaaa

SEQ ID NO: 606309 - DNA, 25 bp, Homo sapien
ctgatccatgaggaatctgtagaca

SEQ ID NO: 606310 - DNA, 25 bp, Homo sapien
cacagctggcttatagccagggtag

SEQ ID NO: 606311 - DNA, 25 bp, Homo sapien
agctggcttatagccagggtagccc

SEQ ID NO: 606312 - DNA, 25 bp, Homo sapien
ctgtagacaactgtgcctttggagc

SEQ ID NO: 606313 - DNA, 25 bp, Homo sapien
aaggctggtctactcctaggatggg

SEQ ID NO: 606314 - DNA, 25 bp, Homo sapien
gagtaatatttctgctagccaggaa

SEQ ID NO: 606315 - DNA, 25 bp, Homo sapien
taatatttctgctagccaggaaggc

SEQ ID NO: 606316 - DNA, 25 bp, Homo sapien
tagccaggaaggctggtctactcct

SEQ ID NO: 606317 - DNA, 25 bp, Homo sapien
gaaagtcttccagcaactgcggaca

SEQ ID NO: 606318 - DNA, 25 bp, Homo sapien
tgcggacactggcaataaagatgat

SEQ ID NO: 606319 - DNA, 25 bp, Homo sapien
tccctcctggacgtttatgaatgtt

SEQ ID NO: 606320 - DNA, 25 bp, Homo sapien
tgatatatgtgactcctacaaggag

SEQ ID NO: 606321 - DNA, 25 bp, Homo sapien
catagtgaagttcagaggaagtcca

SEQ ID NO: 606322 - DNA, 25 bp, Homo sapien
gggcctgggccactataagatcagt

SEQ ID NO: 606323 - DNA, 25 bp, Homo sapien
tgtgtatcacaagccctactgctct

SEQ ID NO: 606324 - DNA, 25 bp, Homo sapien
tccaaatccacaaggtttaactgag

SEQ ID NO: 606325 - DNA, 25 bp, Homo sapien
atctggcaatagaaccatcctgaac

SEQ ID NO: 606326 - DNA, 25 bp, Homo sapien
tggcaatagaaccatcctgaacata

SEQ ID NO: 606327 - DNA, 25 bp, Homo sapien
aatagaaccatcctgaacatatggc

SEQ ID NO: 606328 - DNA, 25 bp, Homo sapien
gcaatagaaccatcctgaacatatg

SEQ ID NO: 606329 - DNA, 25 bp, Homo sapien
aagcagcattgtaggatgccagtgt

SEQ ID NO: 606330 - DNA, 25 bp, Homo sapien
agaagcagcattgtaggatgccagt

SEQ ID NO: 606331 - DNA, 25 bp, Homo sapien
cagcattgtaggatgccagtgtatt

SEQ ID NO: 606332 - DNA, 25 bp, Homo sapien
gcagcattgtaggatgccagtgtat

SEQ ID NO: 606333 - DNA, 25 bp, Homo sapien
ttaggcccaaatggcagaaaaactg

SEQ ID NO: 606334 - DNA, 25 bp, Homo sapien
ctctccttggtcgtgattactgtca

SEQ ID NO: 606335 - DNA, 25 bp, Homo sapien
tcaaggttgcgtgtggtttctattt

SEQ ID NO: 606336 - DNA, 25 bp, Homo sapien
tcagtgccacataaatagatgtgcg

SEQ ID NO: 606337 - DNA, 25 bp, Homo sapien
cccaatccattgagcaaagtgaatg

SEQ ID NO: 606338 - DNA, 25 bp, Homo sapien
caatccattgagcaaagtgaatgac

SEQ ID NO: 606339 - DNA, 25 bp, Homo sapien
cttactgagcccatcactggcttct

SEQ ID NO: 606340 - DNA, 25 bp, Homo sapien
tccattgagcaaagtgaatgactga

SEQ ID NO: 606341 - DNA, 25 bp, Homo sapien
gcacacggctgcacctgtcatctgg

SEQ ID NO: 606342 - DNA, 25 bp, Homo sapien
tcatctggatgaaactgcattggaa

SEQ ID NO: 606343 - DNA, 25 bp, Homo sapien
atctccaggattgaaacatagctcc

SEQ ID NO: 606344 - DNA, 25 bp, Homo sapien
tccaggattgaaacatagctccatt

SEQ ID NO: 606345 - DNA, 25 bp, Homo sapien
gacctgcttaacctcctcctgcttc

SEQ ID NO: 606346 - DNA, 25 bp, Homo sapien
cagacctgcttaacctcctcctgct

SEQ ID NO: 606347 - DNA, 25 bp, Homo sapien
gccagacctgcttaacctcctcctg

SEQ ID NO: 606348 - DNA, 25 bp, Homo sapien
gggccagacctgcttaacctcctcc

SEQ ID NO: 606349 - DNA, 25 bp, Homo sapien
tgattcaggtctgcactttgttgat

SEQ ID NO: 606350 - DNA, 25 bp, Homo sapien
attcaggtctgcactttgttgattt

SEQ ID NO: 606351 - DNA, 25 bp, Homo sapien
gtgattcaggtctgcactttgttga

SEQ ID NO: 606352 - DNA, 25 bp, Homo sapien
gattcaggtctgcactttgttgatt

SEQ ID NO: 606353 - DNA, 25 bp, Homo sapien
tctttcccgaactcatggtccataa

SEQ ID NO: 606354 - DNA, 25 bp, Homo sapien
gctatgagacgtcactcagggaatc

SEQ ID NO: 606355 - DNA, 25 bp, Homo sapien
caaagaccagcctccagaatactgc

SEQ ID NO: 606356 - DNA, 25 bp, Homo sapien
tatgggtggataaaggccttgaaga

SEQ ID NO: 606357 - DNA, 25 bp, Homo sapien
tgcaccaaagtgtctcagtgagtct

SEQ ID NO: 606358 - DNA, 25 bp, Homo sapien
cagtgagtcttaaagcggccattca

SEQ ID NO: 606359 - DNA, 25 bp, Homo sapien
actgctgaattaaaactactccttc

SEQ ID NO: 606360 - DNA, 25 bp, Homo sapien
tccttcagagcactctgagccgtgc

SEQ ID NO: 606361 - DNA, 25 bp, Homo sapien
accaaaggtttgctatatgacaaag

SEQ ID NO: 606362 - DNA, 25 bp, Homo sapien
cacttattaatgtatgtatcagtaa

SEQ ID NO: 606363 - DNA, 25 bp, Homo sapien
ggagaacgctatagatgcagaagag

SEQ ID NO: 606364 - DNA, 25 bp, Homo sapien
tatcaaaattgtgagatgtagcaac

SEQ ID NO: 606365 - DNA, 25 bp, Homo sapien
cctcaagggtaaccattgaagccct

SEQ ID NO: 606366 - DNA, 25 bp, Homo sapien
cattgaagccctagagataatgttc

SEQ ID NO: 606367 - DNA, 25 bp, Homo sapien
tacaggatttaacgtattgattatc

SEQ ID NO: 606368 - DNA, 25 bp, Homo sapien
agttacaggatttaacgtattgatt

SEQ ID NO: 606369 - DNA, 25 bp, Homo sapien
gtgtcaccctcactggaccatgtga

SEQ ID NO: 606370 - DNA, 25 bp, Homo sapien
cttatacatagctccagtgtcaccc

SEQ ID NO: 606371 - DNA, 25 bp, Homo sapien
tatacatagctccagtgtcaccctc

SEQ ID NO: 606372 - DNA, 25 bp, Homo sapien
cagtgtcaccctcactggaccatgt

SEQ ID NO: 606373 - DNA, 25 bp, Homo sapien
cgttggcttgatggtgaggaatttt

SEQ ID NO: 606374 - DNA, 25 bp, Homo sapien
tgctcttggttggctggtcacatgc

SEQ ID NO: 606375 - DNA, 25 bp, Homo sapien
tcctcaggattatgacgttggcttg

SEQ ID NO: 606376 - DNA, 25 bp, Homo sapien
cctgactgctagaacagtaatccac

SEQ ID NO: 606377 - DNA, 25 bp, Homo sapien
tggagccagtcctgctggacagcgg

SEQ ID NO: 606378 - DNA, 25 bp, Homo sapien
tcctggagccagtcctgctggacag

SEQ ID NO: 606379 - DNA, 25 bp, Homo sapien
ctcctggagccagtcctgctggaca

SEQ ID NO: 606380 - DNA, 25 bp, Homo sapien
gccagtcctgctggacagcggacat

SEQ ID NO: 606381 - DNA, 25 bp, Homo sapien
cattagaatggggtttatctgtaat

SEQ ID NO: 606382 - DNA, 25 bp, Homo sapien
ggtttatctgtaattcctcggtgtg

SEQ ID NO: 606383 - DNA, 25 bp, Homo sapien
tatctgtaattcctcggtgtgatct

SEQ ID NO: 606384 - DNA, 25 bp, Homo sapien
tctgtaattcctcggtgtgatcttt

SEQ ID NO: 606385 - DNA, 25 bp, Homo sapien
aagacccggaacattcctcattcca

SEQ ID NO: 606386 - DNA, 25 bp, Homo sapien
caggaagacccggaacattcctcat

SEQ ID NO: 606387 - DNA, 25 bp, Homo sapien
ggaagacccggaacattcctcattc

SEQ ID NO: 606388 - DNA, 25 bp, Homo sapien
tttgcaggaagacccggaacattcc

SEQ ID NO: 606389 - DNA, 25 bp, Homo sapien
cgggtccatattctaatctgaggct

SEQ ID NO: 606390 - DNA, 25 bp, Homo sapien
ggcattgacttgattccctggcaac

SEQ ID NO: 606391 - DNA, 25 bp, Homo sapien
gcttacaagtttctccgggtccata

SEQ ID NO: 606392 - DNA, 25 bp, Homo sapien
gcctgagctttccaataaggttgaa

SEQ ID NO: 606393 - DNA, 25 bp, Homo sapien
ctggtgccagctctttagccgatgc

SEQ ID NO: 606394 - DNA, 25 bp, Homo sapien
gacatgtcactctaagtgtgctctg

SEQ ID NO: 606395 - DNA, 25 bp, Homo sapien
tcacaggcaggcggtttggaatgtt

SEQ ID NO: 606396 - DNA, 25 bp, Homo sapien
ctaagtgtgctctgatctggtgtca

SEQ ID NO: 606397 - DNA, 25 bp, Homo sapien
taatataggcaaaaatattttggtc

SEQ ID NO: 606398 - DNA, 25 bp, Homo sapien
cccctgtgtgactccttatgaccat

SEQ ID NO: 606399 - DNA, 25 bp, Homo sapien
tgactccctctgttcccctgtgtga

SEQ ID NO: 606400 - DNA, 25 bp, Homo sapien
tgttcccctgtgtgactccttatga

SEQ ID NO: 606401 - DNA, 25 bp, Homo sapien
ctctgttcccctgtgtgactcctta

SEQ ID NO: 606402 - DNA, 25 bp, Homo sapien
tggactgtggtccctgttcccactg

SEQ ID NO: 606403 - DNA, 25 bp, Homo sapien
gaacaccttgaatgctaaagcaacc

SEQ ID NO: 606404 - DNA, 25 bp, Homo sapien
agaacaccttgaatgctaaagcaac

SEQ ID NO: 606405 - DNA, 25 bp, Homo sapien
tttgatgttatcctcgcctgtgtct

SEQ ID NO: 606406 - DNA, 25 bp, Homo sapien
ccacagaaatcctttgatgttatcc

SEQ ID NO: 606407 - DNA, 25 bp, Homo sapien
cagaaagtggcttatccacagtagc

SEQ ID NO: 606408 - DNA, 25 bp, Homo sapien
gccattatgttgtgcaaacagctcc

SEQ ID NO: 606409 - DNA, 25 bp, Homo sapien
tctgggcacttgacataaagccacc

SEQ ID NO: 606410 - DNA, 25 bp, Homo sapien
aaacagctcccttgcggctttggga

SEQ ID NO: 606411 - DNA, 25 bp, Homo sapien
acatatctggttgtgctgggtgctg

SEQ ID NO: 606412 - DNA, 25 bp, Homo sapien
cctgctgctgggtcatgcattcagt

SEQ ID NO: 606413 - DNA, 25 bp, Homo sapien
tgctgctctataggagaagggctga

SEQ ID NO: 606414 - DNA, 25 bp, Homo sapien
tgagcctgctgctgggtcatgcatt

SEQ ID NO: 606415 - DNA, 25 bp, Homo sapien
catcaaggttaagccagaggtcaga

SEQ ID NO: 606416 - DNA, 25 bp, Homo sapien
tgcaagctgccacacattgaagtca

SEQ ID NO: 606417 - DNA, 25 bp, Homo sapien
catgccaactggagacagagttata

SEQ ID NO: 606418 - DNA, 25 bp, Homo sapien
gcttggtcggatgaggccatgctct

SEQ ID NO: 606419 - DNA, 25 bp, Homo sapien
gatgaagagatctttccagttggaa

SEQ ID NO: 606420 - DNA, 25 bp, Homo sapien
ctgtggagtccggttcatgagactc

SEQ ID NO: 606421 - DNA, 25 bp, Homo sapien
cagctgtggagtccggttcatgaga

SEQ ID NO: 606422 - DNA, 25 bp, Homo sapien
agctgtggagtccggttcatgagac

SEQ ID NO: 606423 - DNA, 25 bp, Homo sapien
gtggagtccggttcatgagactcat

SEQ ID NO: 606424 - DNA, 25 bp, Homo sapien
gaatcgctcttatgaaattgatctg

SEQ ID NO: 606425 - DNA, 25 bp, Homo sapien
cacagatgttgacgttaaggagcgc

SEQ ID NO: 606426 - DNA, 25 bp, Homo sapien
cccagcattttattccagagccgtt

SEQ ID NO: 606427 - DNA, 25 bp, Homo sapien
cattgcaaagcttggtgtttcatcc

SEQ ID NO: 606428 - DNA, 25 bp, Homo sapien
cctggaggatggtgctgggggtgtc

SEQ ID NO: 606429 - DNA, 25 bp, Homo sapien
ttggtgcctggaggatggtgctggg

SEQ ID NO: 606430 - DNA, 25 bp, Homo sapien
gaggatggtgctgggggtgtcttac

SEQ ID NO: 606431 - DNA, 25 bp, Homo sapien
ctggaggatggtgctgggggtgtct

SEQ ID NO: 606432 - DNA, 25 bp, Homo sapien
aacatgcattatctcttaggtgtcc

SEQ ID NO: 606433 - DNA, 25 bp, Homo sapien
tagcactattaaggaatagtctttt

SEQ ID NO: 606434 - DNA, 25 bp, Homo sapien
cattatctcttaggtgtccaaagac

SEQ ID NO: 606435 - DNA, 25 bp, Homo sapien
tctcttaggtgtccaaagacaaggt

SEQ ID NO: 606436 - DNA, 25 bp, Homo sapien
ctctaagatagtggttctgtctttc

SEQ ID NO: 606437 - DNA, 25 bp, Homo sapien
tgtctttccctgtaactggaaaatg

SEQ ID NO: 606438 - DNA, 25 bp, Homo sapien
actctaagatagtggttctgtcttt

SEQ ID NO: 606439 - DNA, 25 bp, Homo sapien
cactctaagatagtggttctgtctt

SEQ ID NO: 606440 - DNA, 25 bp, Homo sapien
taaaaggttaattatcctgtcctgc

SEQ ID NO: 606441 - DNA, 25 bp, Homo sapien
aaaaggttaattatcctgtcctgca

SEQ ID NO: 606442 - DNA, 25 bp, Homo sapien
aaaggttaattatcctgtcctgcat

SEQ ID NO: 606443 - DNA, 25 bp, Homo sapien
ataaaaggttaattatcctgtcctg

SEQ ID NO: 606444 - DNA, 25 bp, Homo sapien
aaatgcatgtgggctcaaataatca

SEQ ID NO: 606445 - DNA, 25 bp, Homo sapien
tgcaaatgcatgtgggctcaaataa

SEQ ID NO: 606446 - DNA, 25 bp, Homo sapien
ctgtgcaaatgcatgtgggctcaaa

SEQ ID NO: 606447 - DNA, 25 bp, Homo sapien
aatgcatgtgggctcaaataatcat

SEQ ID NO: 606448 - DNA, 25 bp, Homo sapien
gaaccaggcggtagacacagtttat

SEQ ID NO: 606449 - DNA, 25 bp, Homo sapien
tgctgccagaaccaggcggtagaca

SEQ ID NO: 606450 - DNA, 25 bp, Homo sapien
tggccacctgggcaagctccagcag

SEQ ID NO: 606451 - DNA, 25 bp, Homo sapien
ggtctggagtccgaacctcctctgg

SEQ ID NO: 606452 - DNA, 25 bp, Homo sapien
tcccctgcagggctctgcagcattt

SEQ ID NO: 606453 - DNA, 25 bp, Homo sapien
gcatttcccagggcctgaccatggc

SEQ ID NO: 606454 - DNA, 25 bp, Homo sapien
tttcccagggcctgaccatggcagg

SEQ ID NO: 606455 - DNA, 25 bp, Homo sapien
gcagcatttcccagggcctgaccat

SEQ ID NO: 606456 - DNA, 25 bp, Homo sapien
agccactctcatgccgtagggccaa

SEQ ID NO: 606457 - DNA, 25 bp, Homo sapien
tgccgtagggccaatgtattgaacg

SEQ ID NO: 606458 - DNA, 25 bp, Homo sapien
ttttctgcccaaactaattcacagc

SEQ ID NO: 606459 - DNA, 25 bp, Homo sapien
tgaacgggtgtttatgaacttccat

SEQ ID NO: 606460 - DNA, 25 bp, Homo sapien
cgaggcctaagtcagcagcagcggt

SEQ ID NO: 606461 - DNA, 25 bp, Homo sapien
tctgtgaagctgcgagagacggcat

SEQ ID NO: 606462 - DNA, 25 bp, Homo sapien
aagtcagcagcagcggtctgtgaag

SEQ ID NO: 606463 - DNA, 25 bp, Homo sapien
agagtcagagccgaggcctaagtca

SEQ ID NO: 606464 - DNA, 25 bp, Homo sapien
gaagctgttgacttcggaaatggga

SEQ ID NO: 606465 - DNA, 25 bp, Homo sapien
tgttgacttcggaaatgggaaaatc

SEQ ID NO: 606466 - DNA, 25 bp, Homo sapien
tggggaagctgttgacttcggaaat

SEQ ID NO: 606467 - DNA, 25 bp, Homo sapien
agctgttgacttcggaaatgggaaa

SEQ ID NO: 606468 - DNA, 25 bp, Homo sapien
cctctgcagacccatttccattgtg

SEQ ID NO: 606469 - DNA, 25 bp, Homo sapien
tgctgtttggcgtctgagttatgac

SEQ ID NO: 606470 - DNA, 25 bp, Homo sapien
gcagacccatttccattgtgttcct

SEQ ID NO: 606471 - DNA, 25 bp, Homo sapien
ctgctgtttggcgtctgagttatga

SEQ ID NO: 606472 - DNA, 25 bp, Homo sapien
cgcagggctgacttctgaacgacca

SEQ ID NO: 606473 - DNA, 25 bp, Homo sapien
tcagcgtgaatctccatgggctttc

SEQ ID NO: 606474 - DNA, 25 bp, Homo sapien
ggatccgttttgtgtaatcagcgtg

SEQ ID NO: 606475 - DNA, 25 bp, Homo sapien
cactgctaatgctatggatccgttt

SEQ ID NO: 606476 - DNA, 25 bp, Homo sapien
caggagccatcccactccttgggcc

SEQ ID NO: 606477 - DNA, 25 bp, Homo sapien
caaatctccatacgcaagcttgtcc

SEQ ID NO: 606478 - DNA, 25 bp, Homo sapien
ccatacgcaagcttgtcctggagat

SEQ ID NO: 606479 - DNA, 25 bp, Homo sapien
agggacaaatctccatacgcaagct

SEQ ID NO: 606480 - DNA, 25 bp, Homo sapien
gttttagaagcccatgctgtagcag

SEQ ID NO: 606481 - DNA, 25 bp, Homo sapien
ggttttagaagcccatgctgtagca

SEQ ID NO: 606482 - DNA, 25 bp, Homo sapien
aggttttagaagcccatgctgtagc

SEQ ID NO: 606483 - DNA, 25 bp, Homo sapien
tggtcgtatacctggaagtcacagg

SEQ ID NO: 606484 - DNA, 25 bp, Homo sapien
tctggtcgtatacctggaagtcaca

SEQ ID NO: 606485 - DNA, 25 bp, Homo sapien
atctggtcgtatacctggaagtcac

SEQ ID NO: 606486 - DNA, 25 bp, Homo sapien
ctggtcgtatacctggaagtcacag

SEQ ID NO: 606487 - DNA, 25 bp, Homo sapien
tctggagagtccgtgagtcagaatc

SEQ ID NO: 606488 - DNA, 25 bp, Homo sapien
ggagagtccgtgagtcagaatccat

SEQ ID NO: 606489 - DNA, 25 bp, Homo sapien
gcagcttagcgtctccctctctctg

SEQ ID NO: 606490 - DNA, 25 bp, Homo sapien
cctctctctggagagtccgtgagtc

SEQ ID NO: 606491 - DNA, 25 bp, Homo sapien
ttaatcatgtgttatctttatatcc

SEQ ID NO: 606492 - DNA, 25 bp, Homo sapien
taatcatgtgttatctttatatccc

SEQ ID NO: 606493 - DNA, 25 bp, Homo sapien
agcttagtctcatccctgtagtggg

SEQ ID NO: 606494 - DNA, 25 bp, Homo sapien
tatggaggaaacttgcccagttgga

SEQ ID NO: 606495 - DNA, 25 bp, Homo sapien
tccaagaggttccagcttagtctca

SEQ ID NO: 606496 - DNA, 25 bp, Homo sapien
tggaggaaacttgcccagttggaaa

SEQ ID NO: 606497 - DNA, 25 bp, Homo sapien
tctttttcggggaagtgtgaacatg

SEQ ID NO: 606498 - DNA, 25 bp, Homo sapien
gtctccagaagctatactgctgatt

SEQ ID NO: 606499 - DNA, 25 bp, Homo sapien
cagaagctatactgctgattttttc

SEQ ID NO: 606500 - DNA, 25 bp, Homo sapien
tctccagaagctatactgctgattt

SEQ ID NO: 606501 - DNA, 25 bp, Homo sapien
tccttttaggttgtacattctctcc

SEQ ID NO: 606502 - DNA, 25 bp, Homo sapien
cctgtgtgtttgcagagcctgatgg

SEQ ID NO: 606503 - DNA, 25 bp, Homo sapien
gcctgtgtgtttgcagagcctgatg

SEQ ID NO: 606504 - DNA, 25 bp, Homo sapien
agaagctccttttaggttgtacatt

SEQ ID NO: 606505 - DNA, 25 bp, Homo sapien
ttagcttcaggcctaaagcagaaaa

SEQ ID NO: 606506 - DNA, 25 bp, Homo sapien
taaagcagaaaatctctgaagtgcc

SEQ ID NO: 606507 - DNA, 25 bp, Homo sapien
cagaaaatctctgaagtgccaaggg

SEQ ID NO: 606508 - DNA, 25 bp, Homo sapien
caggcctaaagcagaaaatctctga

SEQ ID NO: 606509 - DNA, 25 bp, Homo sapien
acccttgcgcagttgatctttcaga

SEQ ID NO: 606510 - DNA, 25 bp, Homo sapien
tataagaagaaactgggcagggacc

SEQ ID NO: 606511 - DNA, 25 bp, Homo sapien
ccatgttgttcaggcaggcaagcac

SEQ ID NO: 606512 - DNA, 25 bp, Homo sapien
tgtgcctcatagatcaacccttgcg

SEQ ID NO: 606513 - DNA, 25 bp, Homo sapien
tgggtaatcgcgtttgggagcctga

SEQ ID NO: 606514 - DNA, 25 bp, Homo sapien
actgggccaggccatccctttacca

SEQ ID NO: 606515 - DNA, 25 bp, Homo sapien
ggtgtgggtaatcgcgtttgggagc

SEQ ID NO: 606516 - DNA, 25 bp, Homo sapien
agctggtggtgtgggtaatcgcgtt

SEQ ID NO: 606517 - DNA, 25 bp, Homo sapien
gcagagcctccgatgagaattattt

SEQ ID NO: 606518 - DNA, 25 bp, Homo sapien
ggcagagcctccgatgagaattatt

SEQ ID NO: 606519 - DNA, 25 bp, Homo sapien
gacactaggtccatgataatgaata

SEQ ID NO: 606520 - DNA, 25 bp, Homo sapien
ctctttggtaagacactaggtccat

SEQ ID NO: 606521 - DNA, 25 bp, Homo sapien
ttagagttatgactctttggtaaga

SEQ ID NO: 606522 - DNA, 25 bp, Homo sapien
gataatgaatattccttggcactga

SEQ ID NO: 606523 - DNA, 25 bp, Homo sapien
caagataccagagggatatttgcca

SEQ ID NO: 606524 - DNA, 25 bp, Homo sapien
ctgttaacaagataccagagggata

SEQ ID NO: 606525 - DNA, 25 bp, Homo sapien
taccagagggatatttgccagcagt

SEQ ID NO: 606526 - DNA, 25 bp, Homo sapien
agagggatatttgccagcagtgact

SEQ ID NO: 606527 - DNA, 25 bp, Homo sapien
tctttcaatgaaaggctcagggtta

SEQ ID NO: 606528 - DNA, 25 bp, Homo sapien
gtaaactgtctgaggaatataatga

SEQ ID NO: 606529 - DNA, 25 bp, Homo sapien
cattcaacctccgtcgcccatttaa

SEQ ID NO: 606530 - DNA, 25 bp, Homo sapien
ctccgtcgcccatttaacccctgtg

SEQ ID NO: 606531 - DNA, 25 bp, Homo sapien
ccctgtgtaaactgtctgaggaata

SEQ ID NO: 606532 - DNA, 25 bp, Homo sapien
tggggtccaggtacacttccaactc

SEQ ID NO: 606533 - DNA, 25 bp, Homo sapien
gagatgaacctcttatctgtttggg

SEQ ID NO: 606534 - DNA, 25 bp, Homo sapien
tgtttggggtccaggtacacttcca

SEQ ID NO: 606535 - DNA, 25 bp, Homo sapien
gttctccactgagatgaacctctta

SEQ ID NO: 606536 - DNA, 25 bp, Homo sapien
gggaccaagtcttccaatagcatag

SEQ ID NO: 606537 - DNA, 25 bp, Homo sapien
tagtctccaattccttacatagtca

SEQ ID NO: 606538 - DNA, 25 bp, Homo sapien
aaagcatgctgaaaatagagagggc

SEQ ID NO: 606539 - DNA, 25 bp, Homo sapien
actgcaagtatggagaaaccatcag

SEQ ID NO: 606540 - DNA, 25 bp, Homo sapien
tcaatatatcataatttaataacat

SEQ ID NO: 606541 - DNA, 25 bp, Homo sapien
caatatatcataatttaataacata

SEQ ID NO: 606542 - DNA, 25 bp, Homo sapien
tggctgcgggatcagagcattgccc

SEQ ID NO: 606543 - DNA, 25 bp, Homo sapien
gacgctggtaaagtcccatggcagg

SEQ ID NO: 606544 - DNA, 25 bp, Homo sapien
tattatgaatgctatgcgaggacgc

SEQ ID NO: 606545 - DNA, 25 bp, Homo sapien
gcattttacagacaccagcaaagcc

SEQ ID NO: 606546 - DNA, 25 bp, Homo sapien
actgtcctgacgtggcagacagaca

SEQ ID NO: 606547 - DNA, 25 bp, Homo sapien
gacgtggcagacagacacttacttg

SEQ ID NO: 606548 - DNA, 25 bp, Homo sapien
gcagacagacacttacttgccagcc

SEQ ID NO: 606549 - DNA, 25 bp, Homo sapien
caagggtctcactgtcctgacgtgg

SEQ ID NO: 606550 - DNA, 25 bp, Homo sapien
aggcagcccattagcgagagctgcc

SEQ ID NO: 606551 - DNA, 25 bp, Homo sapien
ggcagcccattagcgagagctgcct

SEQ ID NO: 606552 - DNA, 25 bp, Homo sapien
aaggcagcccattagcgagagctgc

SEQ ID NO: 606553 - DNA, 25 bp, Homo sapien
tctgggccacttgactgcctatgct

SEQ ID NO: 606554 - DNA, 25 bp, Homo sapien
ggccacttgactgcctatgctgctg

SEQ ID NO: 606555 - DNA, 25 bp, Homo sapien
cacttgactgcctatgctgctgggt

SEQ ID NO: 606556 - DNA, 25 bp, Homo sapien
tgatctgggccacttgactgcctat

SEQ ID NO: 606557 - DNA, 25 bp, Homo sapien
gttttggagagtccgattgcatgca

SEQ ID NO: 606558 - DNA, 25 bp, Homo sapien
gtccgattgcatgcaaaaagttaaa

SEQ ID NO: 606559 - DNA, 25 bp, Homo sapien
agttaaaggtgctaagaagtctggt

SEQ ID NO: 606560 - DNA, 25 bp, Homo sapien
aagaaggtgttttggagagtccgat

SEQ ID NO: 606561 - DNA, 25 bp, Homo sapien
gtcaccctgaatttcttcacgttcc

SEQ ID NO: 606562 - DNA, 25 bp, Homo sapien
gattcagtccctacgcctttgcaca

SEQ ID NO: 606563 - DNA, 25 bp, Homo sapien
tgtagtcaccctgaatttcttcacg

SEQ ID NO: 606564 - DNA, 25 bp, Homo sapien
gttcctcagattcagtccctacgcc

SEQ ID NO: 606565 - DNA, 25 bp, Homo sapien
gttaatgagacttttcttaatgtag

SEQ ID NO: 606566 - DNA, 25 bp, Homo sapien
atgagacttttcttaatgtagcaac

SEQ ID NO: 606567 - DNA, 25 bp, Homo sapien
aatgagacttttcttaatgtagcaa

SEQ ID NO: 606568 - DNA, 25 bp, Homo sapien
taatgagacttttcttaatgtagca

SEQ ID NO: 606569 - DNA, 25 bp, Homo sapien
ttgggccattactgggcactgtgtt

SEQ ID NO: 606570 - DNA, 25 bp, Homo sapien
tgtggttgggctttccctctgcatt

SEQ ID NO: 606571 - DNA, 25 bp, Homo sapien
tttgtgtggttgggctttccctctg

SEQ ID NO: 606572 - DNA, 25 bp, Homo sapien
ttattgggccattactgggcactgt

SEQ ID NO: 606573 - DNA, 25 bp, Homo sapien
ctaattgtgggcatgatgctcgagt

SEQ ID NO: 606574 - DNA, 25 bp, Homo sapien
catccgagtaaatcctctccttcag

SEQ ID NO: 606575 - DNA, 25 bp, Homo sapien
ggcctgaatttcatccgagtaaatc

SEQ ID NO: 606576 - DNA, 25 bp, Homo sapien
gatgctcgagttccccttgggcctg

SEQ ID NO: 606577 - DNA, 25 bp, Homo sapien
ctgcttgatggacttagcctgtctc

SEQ ID NO: 606578 - DNA, 25 bp, Homo sapien
tgcttgatggacttagcctgtctca

SEQ ID NO: 606579 - DNA, 25 bp, Homo sapien
gcttgatggacttagcctgtctcat

SEQ ID NO: 606580 - DNA, 25 bp, Homo sapien
cattgttgtcaaaaactggctctgg

SEQ ID NO: 606581 - DNA, 25 bp, Homo sapien
gatctgtcactaagtgaccttcaaa

SEQ ID NO: 606582 - DNA, 25 bp, Homo sapien
ctgtcactaagtgaccttcaaaagc

SEQ ID NO: 606583 - DNA, 25 bp, Homo sapien
caaaaactggctctggatctgtcac

SEQ ID NO: 606584 - DNA, 25 bp, Homo sapien
gggagcacgaagtgctcctgctctg

SEQ ID NO: 606585 - DNA, 25 bp, Homo sapien
tgcgggtaagtttcagagtatgaga

SEQ ID NO: 606586 - DNA, 25 bp, Homo sapien
tgctctgcaattccagaagggagat

SEQ ID NO: 606587 - DNA, 25 bp, Homo sapien
acagcagggagcacgaagtgctcct

SEQ ID NO: 606588 - DNA, 25 bp, Homo sapien
ttcgtctgccagtcattcccttgag

SEQ ID NO: 606589 - DNA, 25 bp, Homo sapien
ccttcaggcttcgtctgccagtcat

SEQ ID NO: 606590 - DNA, 25 bp, Homo sapien
tcaggcttcgtctgccagtcattcc

SEQ ID NO: 606591 - DNA, 25 bp, Homo sapien
gaattttgaaattgcaccatcccct

SEQ ID NO: 606592 - DNA, 25 bp, Homo sapien
tgccatgggactgcgtaatacagag

SEQ ID NO: 606593 - DNA, 25 bp, Homo sapien
ctgaaggggcaagggaaatctgttt

SEQ ID NO: 606594 - DNA, 25 bp, Homo sapien
tcattcttcaactgaaggggcaagg

SEQ ID NO: 606595 - DNA, 25 bp, Homo sapien
caccctagtcattggcaagtcaaag

SEQ ID NO: 606596 - DNA, 25 bp, Homo sapien
agagggccaagcattccaaaggagc

SEQ ID NO: 606597 - DNA, 25 bp, Homo sapien
cattccaaaggagctgttagcatag

SEQ ID NO: 606598 - DNA, 25 bp, Homo sapien
ctttctggctatattctagagggcc

SEQ ID NO: 606599 - DNA, 25 bp, Homo sapien
ggctttctggctatattctagaggg

SEQ ID NO: 606600 - DNA, 25 bp, Homo sapien
tagactccgaaacatgagctgacct

SEQ ID NO: 606601 - DNA, 25 bp, Homo sapien
tgctttaggcattattagactccga

SEQ ID NO: 606602 - DNA, 25 bp, Homo sapien
gaaaagctccagcacatgccctttg

SEQ ID NO: 606603 - DNA, 25 bp, Homo sapien
gaacaagctgtggtttcccatgcct

SEQ ID NO: 606604 - DNA, 25 bp, Homo sapien
caacatcaggttgtcttcgaggaag

SEQ ID NO: 606605 - DNA, 25 bp, Homo sapien
tcaatacttgttgcgaacctttcct

SEQ ID NO: 606606 - DNA, 25 bp, Homo sapien
cctctcatgtatcttcctgggaagc

SEQ ID NO: 606607 - DNA, 25 bp, Homo sapien
caaaattgagattgtcttcgaccat

SEQ ID NO: 606608 - DNA, 25 bp, Homo sapien
tgctctttctttggcccccaaactg

SEQ ID NO: 606609 - DNA, 25 bp, Homo sapien
tctttggcccccaaactggacgcat

SEQ ID NO: 606610 - DNA, 25 bp, Homo sapien
tgttgacatatctccctgctctttc

SEQ ID NO: 606611 - DNA, 25 bp, Homo sapien
tctgttgacatatctccctgctctt

SEQ ID NO: 606612 - DNA, 25 bp, Homo sapien
acctgtcctgggaaccttattcctg

SEQ ID NO: 606613 - DNA, 25 bp, Homo sapien
tacccttttcatgcttatctcccat

SEQ ID NO: 606614 - DNA, 25 bp, Homo sapien
tctgcaactaggtaaggtctgtgtc

SEQ ID NO: 606615 - DNA, 25 bp, Homo sapien
ttctgcgttttgcatacccttttca

SEQ ID NO: 606616 - DNA, 25 bp, Homo sapien
ctgcgttagtcttcagaagcacaga

SEQ ID NO: 606617 - DNA, 25 bp, Homo sapien
tcgcagtctccatttgacaaaggtg

SEQ ID NO: 606618 - DNA, 25 bp, Homo sapien
catttggatgctggaagcaatgccc

SEQ ID NO: 606619 - DNA, 25 bp, Homo sapien
gacagatgggttgatagtagcagtt

SEQ ID NO: 606620 - DNA, 25 bp, Homo sapien
taggcgttctgtgggatttcctgaa

SEQ ID NO: 606621 - DNA, 25 bp, Homo sapien
tgatggctctcagcaatggccagac

SEQ ID NO: 606622 - DNA, 25 bp, Homo sapien
tgtttctggtggatgctcccaccag

SEQ ID NO: 606623 - DNA, 25 bp, Homo sapien
tgaacagagacaagggttggcccca

SEQ ID NO: 606624 - DNA, 25 bp, Homo sapien
gctgaggtctgaactagctctagcc

SEQ ID NO: 606625 - DNA, 25 bp, Homo sapien
tttgggaagcaacatgtaaaggcca

SEQ ID NO: 606626 - DNA, 25 bp, Homo sapien
tccaggctccacaaaggctgtgttc

SEQ ID NO: 606627 - DNA, 25 bp, Homo sapien
ctgtatctggattgtgacaggcacc

SEQ ID NO: 606628 - DNA, 25 bp, Homo sapien
cagatcttgaaaggcgaattctgtg

SEQ ID NO: 606629 - DNA, 25 bp, Homo sapien
ggttcctggaacatagcaggtctcc

SEQ ID NO: 606630 - DNA, 25 bp, Homo sapien
ttcctggaacatagcaggtctccat

SEQ ID NO: 606631 - DNA, 25 bp, Homo sapien
gttcctggaacatagcaggtctcca

SEQ ID NO: 606632 - DNA, 25 bp, Homo sapien
tcctaacttcggtgatctggttccc

SEQ ID NO: 606633 - DNA, 25 bp, Homo sapien
cctaacttcggtgatctggttccct

SEQ ID NO: 606634 - DNA, 25 bp, Homo sapien
gcatggttcctcctaacttcggtga

SEQ ID NO: 606635 - DNA, 25 bp, Homo sapien
tgcttggcatggttcctcctaactt

SEQ ID NO: 606636 - DNA, 25 bp, Homo sapien
gagagatgtgcaattcataaaatcc

SEQ ID NO: 606637 - DNA, 25 bp, Homo sapien
tccttctatgtgtctaagtccgtgg

SEQ ID NO: 606638 - DNA, 25 bp, Homo sapien
cataaaatccttctatgtgtctaag

SEQ ID NO: 606639 - DNA, 25 bp, Homo sapien
tgtctaagtccgtggttgctattag

SEQ ID NO: 606640 - DNA, 25 bp, Homo sapien
aagtagaatagaggatgtcacgcat

SEQ ID NO: 606641 - DNA, 25 bp, Homo sapien
gttaggctggttctcttccaaagta

SEQ ID NO: 606642 - DNA, 25 bp, Homo sapien
tctgctgtaaagaactccatctgtg

SEQ ID NO: 606643 - DNA, 25 bp, Homo sapien
gtttcccaaggccaggtgctcatct

SEQ ID NO: 606644 - DNA, 25 bp, Homo sapien
cattgtgatgtgtgctaggaattcc

SEQ ID NO: 606645 - DNA, 25 bp, Homo sapien
aaccgtttgcttgatgtcagggggt

SEQ ID NO: 606646 - DNA, 25 bp, Homo sapien
gttgagcttccttcccgtgaacttc

SEQ ID NO: 606647 - DNA, 25 bp, Homo sapien
cttccttcccgtgaacttccaggtg

SEQ ID NO: 606648 - DNA, 25 bp, Homo sapien
ttggttgtttgagactgaagacatc

SEQ ID NO: 606649 - DNA, 25 bp, Homo sapien
tggataggaatggggccactctgtt

SEQ ID NO: 606650 - DNA, 25 bp, Homo sapien
aggatgcacagtggataggaatggg

SEQ ID NO: 606651 - DNA, 25 bp, Homo sapien
tctgttggttgtttgagactgaaga

SEQ ID NO: 606652 - DNA, 25 bp, Homo sapien
ctccatcagggagctttgttgcctg

SEQ ID NO: 606653 - DNA, 25 bp, Homo sapien
ccactgactccatcagggagctttg

SEQ ID NO: 606654 - DNA, 25 bp, Homo sapien
agggctcatactcccctccacaagc

SEQ ID NO: 606655 - DNA, 25 bp, Homo sapien
cacaagcacgtcctgcccactgact

SEQ ID NO: 606656 - DNA, 25 bp, Homo sapien
catagaaggtaaccctcagaaaaca

SEQ ID NO: 606657 - DNA, 25 bp, Homo sapien
ggcttagtaggagagcttgttcatt

SEQ ID NO: 606658 - DNA, 25 bp, Homo sapien
agaaaacagtgaactactctaggct

SEQ ID NO: 606659 - DNA, 25 bp, Homo sapien
agtgaactactctaggctccaaggg

SEQ ID NO: 606660 - DNA, 25 bp, Homo sapien
tctgccatttgccacctttaagtct

SEQ ID NO: 606661 - DNA, 25 bp, Homo sapien
ccttggatccttaaaatcttagcca

SEQ ID NO: 606662 - DNA, 25 bp, Homo sapien
ccatgtatgccatggctacactagt

SEQ ID NO: 606663 - DNA, 25 bp, Homo sapien
tgatccaatgtcacagccccttgga

SEQ ID NO: 606664 - DNA, 25 bp, Homo sapien
gaggcctgaaatggctccctttggc

SEQ ID NO: 606665 - DNA, 25 bp, Homo sapien
gctccctttggcaatcataatctct

SEQ ID NO: 606666 - DNA, 25 bp, Homo sapien
tccctttggcaatcataatctctgc

SEQ ID NO: 606667 - DNA, 25 bp, Homo sapien
gaaatggctccctttggcaatcata

SEQ ID NO: 606668 - DNA, 25 bp, Homo sapien
ccttgtagttaattggccatagaat

SEQ ID NO: 606669 - DNA, 25 bp, Homo sapien
ttgtagttaattggccatagaatcc

SEQ ID NO: 606670 - DNA, 25 bp, Homo sapien
catcatactcttcaggcttgggtgc

SEQ ID NO: 606671 - DNA, 25 bp, Homo sapien
tgccttgtagttaattggccataga

SEQ ID NO: 606672 - DNA, 25 bp, Homo sapien
agtcatgtgagctcttgtaactgct

SEQ ID NO: 606673 - DNA, 25 bp, Homo sapien
tgtgagctcttgtaactgctattac

SEQ ID NO: 606674 - DNA, 25 bp, Homo sapien
tcagtcatgtgagctcttgtaactg

SEQ ID NO: 606675 - DNA, 25 bp, Homo sapien
tcatgtgagctcttgtaactgctat

SEQ ID NO: 606676 - DNA, 25 bp, Homo sapien
gaggtggtaagccggcagtgttttg

SEQ ID NO: 606677 - DNA, 25 bp, Homo sapien
tgggaggtggtaagccggcagtgtt

SEQ ID NO: 606678 - DNA, 25 bp, Homo sapien
ctgggaggtggtaagccggcagtgt

SEQ ID NO: 606679 - DNA, 25 bp, Homo sapien
aggtggtaagccggcagtgttttgt

SEQ ID NO: 606680 - DNA, 25 bp, Homo sapien
gaagcgcgtctgattgatattgcta

SEQ ID NO: 606681 - DNA, 25 bp, Homo sapien
tttggttccagtgctatgtccctct

SEQ ID NO: 606682 - DNA, 25 bp, Homo sapien
gctgggaagcgcgtctgattgatat

SEQ ID NO: 606683 - DNA, 25 bp, Homo sapien
ctttaaatcattcccacagtgcgtc

SEQ ID NO: 606684 - DNA, 25 bp, Homo sapien
gtgaccccagaatgcagcaaactgg

SEQ ID NO: 606685 - DNA, 25 bp, Homo sapien
tccaggcaggtcctttaaccacagg

SEQ ID NO: 606686 - DNA, 25 bp, Homo sapien
accctcttccctcgaatgagtcatg

SEQ ID NO: 606687 - DNA, 25 bp, Homo sapien
gaccccagaatgcagcaaactggct

SEQ ID NO: 606688 - DNA, 25 bp, Homo sapien
ccttggcaagcaggattcaggctct

SEQ ID NO: 606689 - DNA, 25 bp, Homo sapien
ccaggcttcggaaattgtggcggca

SEQ ID NO: 606690 - DNA, 25 bp, Homo sapien
catgacttgaatccttccgccgtgg

SEQ ID NO: 606691 - DNA, 25 bp, Homo sapien
caagtctcagggatagaacaacagg

SEQ ID NO: 606692 - DNA, 25 bp, Homo sapien
agggctgtcatccagaactgaagct

SEQ ID NO: 606693 - DNA, 25 bp, Homo sapien
agctgtttctgccaggtgcgaccac

SEQ ID NO: 606694 - DNA, 25 bp, Homo sapien
ggctgtcatccagaactgaagctgt

SEQ ID NO: 606695 - DNA, 25 bp, Homo sapien
gctgtcatccagaactgaagctgtt

SEQ ID NO: 606696 - DNA, 25 bp, Homo sapien
taattggcattagtgatgccatttg

SEQ ID NO: 606697 - DNA, 25 bp, Homo sapien
ttccttgagccacacctcactgaag

SEQ ID NO: 606698 - DNA, 25 bp, Homo sapien
gatgccatttggtctgagcacccac

SEQ ID NO: 606699 - DNA, 25 bp, Homo sapien
acctgccgatatcccacttgtcttg

SEQ ID NO: 606700 - DNA, 25 bp, Homo sapien
gatgttcaagatgggggctaccagc

SEQ ID NO: 606701 - DNA, 25 bp, Homo sapien
actgatgcaggtaaaaaccaatctc

SEQ ID NO: 606702 - DNA, 25 bp, Homo sapien
caatctcgacgttgggatgttcaag

SEQ ID NO: 606703 - DNA, 25 bp, Homo sapien
ccagataggcttctgtccatgtgca

SEQ ID NO: 606704 - DNA, 25 bp, Homo sapien
gaggcctgatttgtgatgaaggcca

SEQ ID NO: 606705 - DNA, 25 bp, Homo sapien
gatatccatgcatctgagtttgtct

SEQ ID NO: 606706 - DNA, 25 bp, Homo sapien
tgtcttttgcctgcgtcatcctggg

SEQ ID NO: 606707 - DNA, 25 bp, Homo sapien
tgaaggccagatatccatgcatctg

SEQ ID NO: 606708 - DNA, 25 bp, Homo sapien
taaacttgagcgactgctcctgtgc

SEQ ID NO: 606709 - DNA, 25 bp, Homo sapien
cagtttaacggctgcggtgaccata

SEQ ID NO: 606710 - DNA, 25 bp, Homo sapien
gtgaccataggtggtaactcagcca

SEQ ID NO: 606711 - DNA, 25 bp, Homo sapien
gatgatggtaggtctgcaacctgca

SEQ ID NO: 606712 - DNA, 25 bp, Homo sapien
gagaggccatggaggtttatgccca

SEQ ID NO: 606713 - DNA, 25 bp, Homo sapien
gaattactgcgtatccaccctgtgt

SEQ ID NO: 606714 - DNA, 25 bp, Homo sapien
gtaaacgcaatgctcgtggctcgcc

SEQ ID NO: 606715 - DNA, 25 bp, Homo sapien
ggttgagagccctgtcaatggacga

SEQ ID NO: 606716 - DNA, 25 bp, Homo sapien
cccagtattgtctccaccagcccac

SEQ ID NO: 606717 - DNA, 25 bp, Homo sapien
aaatacttcaaccactgactgccag

SEQ ID NO: 606718 - DNA, 25 bp, Homo sapien
cagcccacagatggatattctttgt

SEQ ID NO: 606719 - DNA, 25 bp, Homo sapien
gttcttatcaacctcctcatcaaat

SEQ ID NO: 606720 - DNA, 25 bp, Homo sapien
acagagaagaccttgggttttatgg

SEQ ID NO: 606721 - DNA, 25 bp, Homo sapien
atccttgtactcacagagaagacct

SEQ ID NO: 606722 - DNA, 25 bp, Homo sapien
tgctccctcatccttgtactcacag

SEQ ID NO: 606723 - DNA, 25 bp, Homo sapien
cagagaagaccttgggttttatggt

SEQ ID NO: 606724 - DNA, 25 bp, Homo sapien
tgggaagatcttgaccttcctcaac

SEQ ID NO: 606725 - DNA, 25 bp, Homo sapien
tcttgaccttcctcaacatagcctg

SEQ ID NO: 606726 - DNA, 25 bp, Homo sapien
gaagatcttgaccttcctcaacata

SEQ ID NO: 606727 - DNA, 25 bp, Homo sapien
ggatgagcactgagtgaggccatgg

SEQ ID NO: 606728 - DNA, 25 bp, Homo sapien
gctagagttacttgtactgctcagg

SEQ ID NO: 606729 - DNA, 25 bp, Homo sapien
cagatgagcctgcatcggggctaga

SEQ ID NO: 606730 - DNA, 25 bp, Homo sapien
gaccagcagctgtcaaggtctcaga

SEQ ID NO: 606731 - DNA, 25 bp, Homo sapien
ttcaggagttggactggcaacatca

SEQ ID NO: 606732 - DNA, 25 bp, Homo sapien
gtggagctgggtgaacaccctcatt

SEQ ID NO: 606733 - DNA, 25 bp, Homo sapien
aaccccacagtgcttcaggcagcag

SEQ ID NO: 606734 - DNA, 25 bp, Homo sapien
taaaggtggaattgcggcaacccca

SEQ ID NO: 606735 - DNA, 25 bp, Homo sapien
tgttctccagtatctcatccatacc

SEQ ID NO: 606736 - DNA, 25 bp, Homo sapien
agctgaggccatacctccttctctc

SEQ ID NO: 606737 - DNA, 25 bp, Homo sapien
cagtaggaggttccctccttccagg

SEQ ID NO: 606738 - DNA, 25 bp, Homo sapien
tagtgccctacaggtgtctccagta

SEQ ID NO: 606739 - DNA, 25 bp, Homo sapien
ccattcctgcttctttgcgggctga

SEQ ID NO: 606740 - DNA, 25 bp, Homo sapien
gaggagtgtatttctgttcccatgt

SEQ ID NO: 606741 - DNA, 25 bp, Homo sapien
gtatttctgttcccatgtcctgcac

SEQ ID NO: 606742 - DNA, 25 bp, Homo sapien
ggagtgtatttctgttcccatgtcc

SEQ ID NO: 606743 - DNA, 25 bp, Homo sapien
gtgtatttctgttcccatgtcctgc

SEQ ID NO: 606744 - DNA, 25 bp, Homo sapien
cttctgaagctctccagaacattct

SEQ ID NO: 606745 - DNA, 25 bp, Homo sapien
gaacattctgactcaccctctgact

SEQ ID NO: 606746 - DNA, 25 bp, Homo sapien
ccagaacattctgactcaccctctg

SEQ ID NO: 606747 - DNA, 25 bp, Homo sapien
ccttctgaagctctccagaacattc

SEQ ID NO: 606748 - DNA, 25 bp, Homo sapien
agggggccaactgtgctgtagggag

SEQ ID NO: 606749 - DNA, 25 bp, Homo sapien
ggccaactgtgctgtagggagggga

SEQ ID NO: 606750 - DNA, 25 bp, Homo sapien
caactgtgctgtagggaggggataa

SEQ ID NO: 606751 - DNA, 25 bp, Homo sapien
ctgccagggggccaactgtgctgta

SEQ ID NO: 606752 - DNA, 25 bp, Homo sapien
gcagacaggtgaagtcaggtgtctc

SEQ ID NO: 606753 - DNA, 25 bp, Homo sapien
ctgcagacaggtgaagtcaggtgtc

SEQ ID NO: 606754 - DNA, 25 bp, Homo sapien
tgcagacaggtgaagtcaggtgtct

SEQ ID NO: 606755 - DNA, 25 bp, Homo sapien
cattggctcgttcatgctgcaagca

SEQ ID NO: 606756 - DNA, 25 bp, Homo sapien
tgccttactcattggctcgttcatg

SEQ ID NO: 606757 - DNA, 25 bp, Homo sapien
gagactggcctgagtgggaaatact

SEQ ID NO: 606758 - DNA, 25 bp, Homo sapien
tgctgggaagctgccttactcattg

SEQ ID NO: 606759 - DNA, 25 bp, Homo sapien
gggcttggctcctaagcccagtctc

SEQ ID NO: 606760 - DNA, 25 bp, Homo sapien
cagtaggatccagtctgcagatgga

SEQ ID NO: 606761 - DNA, 25 bp, Homo sapien
tgagtgaccatttgtctccatagcc

SEQ ID NO: 606762 - DNA, 25 bp, Homo sapien
tctcctggtaacacaagctgtgaag

SEQ ID NO: 606763 - DNA, 25 bp, Homo sapien
gttcctcttgagcagggcatgaagc

SEQ ID NO: 606764 - DNA, 25 bp, Homo sapien
aagcaattttcagccctgatgttga

SEQ ID NO: 606765 - DNA, 25 bp, Homo sapien
tgatgttgacaccaggtcatacccc

SEQ ID NO: 606766 - DNA, 25 bp, Homo sapien
gccaggctctttggacttctgagct

SEQ ID NO: 606767 - DNA, 25 bp, Homo sapien
gcagagcagttgctgagtaagactg

SEQ ID NO: 606768 - DNA, 25 bp, Homo sapien
agagcagttgctgagtaagactggg

SEQ ID NO: 606769 - DNA, 25 bp, Homo sapien
cagagcagttgctgagtaagactgg

SEQ ID NO: 606770 - DNA, 25 bp, Homo sapien
tgcagagcagttgctgagtaagact

SEQ ID NO: 606771 - DNA, 25 bp, Homo sapien
gtgtggacaaaggcgggtttgctca

SEQ ID NO: 606772 - DNA, 25 bp, Homo sapien
ggtgtggacaaaggcgggtttgctc

SEQ ID NO: 606773 - DNA, 25 bp, Homo sapien
tgtggacaaaggcgggtttgctcac

SEQ ID NO: 606774 - DNA, 25 bp, Homo sapien
gctcacactttgtagagatgacttg

SEQ ID NO: 606775 - DNA, 25 bp, Homo sapien
gcagtcttgacctaaccctctgagg

SEQ ID NO: 606776 - DNA, 25 bp, Homo sapien
ttgatgatttacaaacaccagtgag

SEQ ID NO: 606777 - DNA, 25 bp, Homo sapien
cagtgaggtctgacaccaagagaga

SEQ ID NO: 606778 - DNA, 25 bp, Homo sapien
gatgcccgcccatgctgccatcaga

SEQ ID NO: 606779 - DNA, 25 bp, Homo sapien
gcacaggggtgccatgaagaagagg

SEQ ID NO: 606780 - DNA, 25 bp, Homo sapien
ggcacaggggtgccatgaagaagag

SEQ ID NO: 606781 - DNA, 25 bp, Homo sapien
atgcccgcccatgctgccatcagag

SEQ ID NO: 606782 - DNA, 25 bp, Homo sapien
tggttgtttcctacaccagcaaaac

SEQ ID NO: 606783 - DNA, 25 bp, Homo sapien
caaattgaccacttcccaactggag

SEQ ID NO: 606784 - DNA, 25 bp, Homo sapien
tgcgtgagctccaaatagaccaatt

SEQ ID NO: 606785 - DNA, 25 bp, Homo sapien
atttggcttggcaaacatgctgccc

SEQ ID NO: 606786 - DNA, 25 bp, Homo sapien
ctgcggtttgtctgggcagaatgtc

SEQ ID NO: 606787 - DNA, 25 bp, Homo sapien
catcccagagatctgcacacgcaag

SEQ ID NO: 606788 - DNA, 25 bp, Homo sapien
cagaatgtctcccttgcctgggttg

SEQ ID NO: 606789 - DNA, 25 bp, Homo sapien
gctgctacaagtttgtagaggacag

SEQ ID NO: 606790 - DNA, 25 bp, Homo sapien
gcctcagagcaatagaagagatctt

SEQ ID NO: 606791 - DNA, 25 bp, Homo sapien
tactgtccttaatacgtgcagagat

SEQ ID NO: 606792 - DNA, 25 bp, Homo sapien
gctttgggcagttatgatatacaca

SEQ ID NO: 606793 - DNA, 25 bp, Homo sapien
tatacggcagaatggttactgtcct

SEQ ID NO: 606794 - DNA, 25 bp, Homo sapien
agcagtgtgtctattgagcaaagca

SEQ ID NO: 606795 - DNA, 25 bp, Homo sapien
gcagtgtgtctattgagcaaagcat

SEQ ID NO: 606796 - DNA, 25 bp, Homo sapien
ccatgagaacccttgtcaagtggca

SEQ ID NO: 606797 - DNA, 25 bp, Homo sapien
cttggccatgagaacccttgtcaag

SEQ ID NO: 606798 - DNA, 25 bp, Homo sapien
gccatgagaacccttgtcaagtggc

SEQ ID NO: 606799 - DNA, 25 bp, Homo sapien
tggccatgagaacccttgtcaagtg

SEQ ID NO: 606800 - DNA, 25 bp, Homo sapien
tcccaccatttgaggcctccaagaa

SEQ ID NO: 606801 - DNA, 25 bp, Homo sapien
tgacagactcccaccatttgaggcc

SEQ ID NO: 606802 - DNA, 25 bp, Homo sapien
ggtgacagactcccaccatttgagg

SEQ ID NO: 606803 - DNA, 25 bp, Homo sapien
acagactcccaccatttgaggcctc

SEQ ID NO: 606804 - DNA, 25 bp, Homo sapien
agcccaggcctctgagcgagtttgc

SEQ ID NO: 606805 - DNA, 25 bp, Homo sapien
cgagtttgcctcttatgaagaagca

SEQ ID NO: 606806 - DNA, 25 bp, Homo sapien
catcaccgtctccaattaaagtagc

SEQ ID NO: 606807 - DNA, 25 bp, Homo sapien
ggagaacattcagtaccacccatct

SEQ ID NO: 606808 - DNA, 25 bp, Homo sapien
agaaacaggatgacaagcttgtggg

SEQ ID NO: 606809 - DNA, 25 bp, Homo sapien
ttggtggcttcaaggccctgaaaac

SEQ ID NO: 606810 - DNA, 25 bp, Homo sapien
ctgggtctttgttggtggcttcaag

SEQ ID NO: 606811 - DNA, 25 bp, Homo sapien
ctttgttggtggcttcaaggccctg

SEQ ID NO: 606812 - DNA, 25 bp, Homo sapien
gaactggtaggccagaaatgcaaag

SEQ ID NO: 606813 - DNA, 25 bp, Homo sapien
tggaggagtttctgtctttctaagg

SEQ ID NO: 606814 - DNA, 25 bp, Homo sapien
gcaaagatgtgattttcacggcctg

SEQ ID NO: 606815 - DNA, 25 bp, Homo sapien
gcaggaacccagacggaactggtag

SEQ ID NO: 606816 - DNA, 25 bp, Homo sapien
gatcccacgggtttcaacgtgtctg

SEQ ID NO: 606817 - DNA, 25 bp, Homo sapien
agatgagcatggcagcgaattgtgt

SEQ ID NO: 606818 - DNA, 25 bp, Homo sapien
caacgtgtctggaccacggatgggt

SEQ ID NO: 606819 - DNA, 25 bp, Homo sapien
ctcataaggagatgtggacctcgga

SEQ ID NO: 606820 - DNA, 25 bp, Homo sapien
acacttaggtctgaattcagctctt

SEQ ID NO: 606821 - DNA, 25 bp, Homo sapien
gctctctccaattctctatgctgct

SEQ ID NO: 606822 - DNA, 25 bp, Homo sapien
taggtctgaattcagctcttgtatt

SEQ ID NO: 606823 - DNA, 25 bp, Homo sapien
agccctagaggggaccagagcttgc

SEQ ID NO: 606824 - DNA, 25 bp, Homo sapien
gagaaattcgtgtgagtgcctgtga

SEQ ID NO: 606825 - DNA, 25 bp, Homo sapien
gactctgtctgggagggctttcctc

SEQ ID NO: 606826 - DNA, 25 bp, Homo sapien
gggatgcaggactctcacttgtggc

SEQ ID NO: 606827 - DNA, 25 bp, Homo sapien
gactgtgagggttgtatccatggct

SEQ ID NO: 606828 - DNA, 25 bp, Homo sapien
gcatcatcattccacgaggcctgcc

SEQ ID NO: 606829 - DNA, 25 bp, Homo sapien
cctgaagcatgttttgactagtgac

SEQ ID NO: 606830 - DNA, 25 bp, Homo sapien
ctgctctcctaactgtgaacccagg

SEQ ID NO: 606831 - DNA, 25 bp, Homo sapien
tagtgacggccctcgtgccttgcag

SEQ ID NO: 606832 - DNA, 25 bp, Homo sapien
tttgataatctcattcctagctgta

SEQ ID NO: 606833 - DNA, 25 bp, Homo sapien
tctcattcctagctgtagccttggc

SEQ ID NO: 606834 - DNA, 25 bp, Homo sapien
gataatctcattcctagctgtagcc

SEQ ID NO: 606835 - DNA, 25 bp, Homo sapien
aatctcattcctagctgtagccttg

SEQ ID NO: 606836 - DNA, 25 bp, Homo sapien
aggtaaaaacgtgcttatggggctg

SEQ ID NO: 606837 - DNA, 25 bp, Homo sapien
ggtgagtgcgcagtctggtttctat

SEQ ID NO: 606838 - DNA, 25 bp, Homo sapien
ggtttctatagccagcagaaaagga

SEQ ID NO: 606839 - DNA, 25 bp, Homo sapien
cagtggtaagtggtttgaggaggta

SEQ ID NO: 606840 - DNA, 25 bp, Homo sapien
tttctgtggttattgaggtacattc

SEQ ID NO: 606841 - DNA, 25 bp, Homo sapien
tgtggttattgaggtacattcttgg

SEQ ID NO: 606842 - DNA, 25 bp, Homo sapien
ggcctgtttctgtggttattgaggt

SEQ ID NO: 606843 - DNA, 25 bp, Homo sapien
cctgtttctgtggttattgaggtac

SEQ ID NO: 606844 - DNA, 25 bp, Homo sapien
ctttttctcactgcaggaggagctg

SEQ ID NO: 606845 - DNA, 25 bp, Homo sapien
cagtgagtcccagctggacacaaga

SEQ ID NO: 606846 - DNA, 25 bp, Homo sapien
aggagctgccccaaactgtattcca

SEQ ID NO: 606847 - DNA, 25 bp, Homo sapien
gcagagccacatccaaattcacccc

SEQ ID NO: 606848 - DNA, 25 bp, Homo sapien
ctcagcctccctggtcgagggactc

SEQ ID NO: 606849 - DNA, 25 bp, Homo sapien
tcagcctccctggtcgagggactca

SEQ ID NO: 606850 - DNA, 25 bp, Homo sapien
ctccctggtcgagggactcacagaa

SEQ ID NO: 606851 - DNA, 25 bp, Homo sapien
gcctccctggtcgagggactcacag

SEQ ID NO: 606852 - DNA, 25 bp, Homo sapien
cagctggccctgtgctggggctcac

SEQ ID NO: 606853 - DNA, 25 bp, Homo sapien
cacacagctggccctgtgctggggc

SEQ ID NO: 606854 - DNA, 25 bp, Homo sapien
cacagctggccctgtgctggggctc

SEQ ID NO: 606855 - DNA, 25 bp, Homo sapien
acagctggccctgtgctggggctca

SEQ ID NO: 606856 - DNA, 25 bp, Homo sapien
gatcctgacaagtgatgggcctgcc

SEQ ID NO: 606857 - DNA, 25 bp, Homo sapien
taattgagtctgagatgccttgcgg

SEQ ID NO: 606858 - DNA, 25 bp, Homo sapien
gccttcctgtttcgagccactttgg

SEQ ID NO: 606859 - DNA, 25 bp, Homo sapien
cagttacctgggcaatctggctgaa

SEQ ID NO: 606860 - DNA, 25 bp, Homo sapien
gccttgtgcataaggagccacagaa

SEQ ID NO: 606861 - DNA, 25 bp, Homo sapien
ggccttgtgcataaggagccacaga

SEQ ID NO: 606862 - DNA, 25 bp, Homo sapien
ccttgtgcataaggagccacagaaa

SEQ ID NO: 606863 - DNA, 25 bp, Homo sapien
caggccttgtgcataaggagccaca

SEQ ID NO: 606864 - DNA, 25 bp, Homo sapien
caggcttctcggatgatatttctct

SEQ ID NO: 606865 - DNA, 25 bp, Homo sapien
gtggctctcaggcttctcggatgat

SEQ ID NO: 606866 - DNA, 25 bp, Homo sapien
cccaaacgtatctgggagcagccat

SEQ ID NO: 606867 - DNA, 25 bp, Homo sapien
gctgggagcccaaacgtatctggga

SEQ ID NO: 606868 - DNA, 25 bp, Homo sapien
gcggccacatacgtgctggagcaca

SEQ ID NO: 606869 - DNA, 25 bp, Homo sapien
cagcatttgctccatgagggcggcc

SEQ ID NO: 606870 - DNA, 25 bp, Homo sapien
aagcatttcaatgctgccgctgctg

SEQ ID NO: 606871 - DNA, 25 bp, Homo sapien
cagcaaatgtgccaaggtcggtccc

SEQ ID NO: 606872 - DNA, 25 bp, Homo sapien
gagaagggatgtgcttcccattgca

SEQ ID NO: 606873 - DNA, 25 bp, Homo sapien
cagagcatggcacaaatgtcccttt

SEQ ID NO: 606874 - DNA, 25 bp, Homo sapien
attgcagggcttgacacccatcctc

SEQ ID NO: 606875 - DNA, 25 bp, Homo sapien
tcccattgcagggcttgacacccat

SEQ ID NO: 606876 - DNA, 25 bp, Homo sapien
tctctggatctggcaccttcacttc

SEQ ID NO: 606877 - DNA, 25 bp, Homo sapien
tgcccttagctcactcttggtgtcc

SEQ ID NO: 606878 - DNA, 25 bp, Homo sapien
tccatcggattcaggagccacagct

SEQ ID NO: 606879 - DNA, 25 bp, Homo sapien
gacattgatcatagcccaggactcc

SEQ ID NO: 606880 - DNA, 25 bp, Homo sapien
caagattgtatgaaccgcatggtgc

SEQ ID NO: 606881 - DNA, 25 bp, Homo sapien
tatttgtcctgcatcagaaacgagc

SEQ ID NO: 606882 - DNA, 25 bp, Homo sapien
gaactttgcgcgttaagccgggaca

SEQ ID NO: 606883 - DNA, 25 bp, Homo sapien
caaaccgcatagagaacgtggcagc

SEQ ID NO: 606884 - DNA, 25 bp, Homo sapien
ggcgagcaactaccagcagatgaac

SEQ ID NO: 606885 - DNA, 25 bp, Homo sapien
cgaacagaagacacacctcgaggat

SEQ ID NO: 606886 - DNA, 25 bp, Homo sapien
ggatctgtactggatggcgagcaac

SEQ ID NO: 606887 - DNA, 25 bp, Homo sapien
caagttcgacgtgaagaaggagcca

SEQ ID NO: 606888 - DNA, 25 bp, Homo sapien
cagtgacatcaggaggcgataaaag

SEQ ID NO: 606889 - DNA, 25 bp, Homo sapien
agctgcaccgccgagctgcgagcgg

SEQ ID NO: 606890 - DNA, 25 bp, Homo sapien
ggccgtgcagctattggcccgcgca

SEQ ID NO: 606891 - DNA, 25 bp, Homo sapien
ataaaaggctgcggcgccgccggat

SEQ ID NO: 606892 - DNA, 25 bp, Homo sapien
tagcgactccgcatagtacgatccg

SEQ ID NO: 606893 - DNA, 25 bp, Homo sapien
tgaagctggaagtttcccgctcccg

SEQ ID NO: 606894 - DNA, 25 bp, Homo sapien
gagcccaccgagctttgaagctgga

SEQ ID NO: 606895 - DNA, 25 bp, Homo sapien
tccgcatagtacgatccggagccca

SEQ ID NO: 606896 - DNA, 25 bp, Homo sapien
ataatttcctacccctaagtgtgtg

SEQ ID NO: 606897 - DNA, 25 bp, Homo sapien
tgtaactctggctccctactgggac

SEQ ID NO: 606898 - DNA, 25 bp, Homo sapien
ttggaatctgacagcggttgtatgg

SEQ ID NO: 606899 - DNA, 25 bp, Homo sapien
caccaggacccagaaacccaagaat

SEQ ID NO: 606900 - DNA, 25 bp, Homo sapien
tggcagtagggatccattgaaggtt

SEQ ID NO: 606901 - DNA, 25 bp, Homo sapien
gcagtagggatccattgaaggtttt

SEQ ID NO: 606902 - DNA, 25 bp, Homo sapien
ggtggcagtagggatccattgaagg

SEQ ID NO: 606903 - DNA, 25 bp, Homo sapien
ctggtggcagtagggatccattgaa

SEQ ID NO: 606904 - DNA, 25 bp, Homo sapien
gaggttcagagagtggtctctcgtt

SEQ ID NO: 606905 - DNA, 25 bp, Homo sapien
tcagagagtggtctctcgttgggtt

SEQ ID NO: 606906 - DNA, 25 bp, Homo sapien
agagtggtctctcgttgggttgcat

SEQ ID NO: 606907 - DNA, 25 bp, Homo sapien
gtctctcgttgggttgcatgtacat

SEQ ID NO: 606908 - DNA, 25 bp, Homo sapien
caacaacacgtctgagtttcgcagg

SEQ ID NO: 606909 - DNA, 25 bp, Homo sapien
tgtcttagggccataaatcactagg

SEQ ID NO: 606910 - DNA, 25 bp, Homo sapien
tctgagtttcgcagggcctttcctt

SEQ ID NO: 606911 - DNA, 25 bp, Homo sapien
cacagttggctacgacttcctttcc

SEQ ID NO: 606912 - DNA, 25 bp, Homo sapien
tgatttactgacttgcttacggaga

SEQ ID NO: 606913 - DNA, 25 bp, Homo sapien
tcttctttactactcgggccagttg

SEQ ID NO: 606914 - DNA, 25 bp, Homo sapien
gaaagggcccaccttgtgtacgaga

SEQ ID NO: 606915 - DNA, 25 bp, Homo sapien
aaggagtcgtggaaatgtacctggc

SEQ ID NO: 606916 - DNA, 25 bp, Homo sapien
gttaacaatttacagggctgccact

SEQ ID NO: 606917 - DNA, 25 bp, Homo sapien
tgccactaggccttgagagctccac

SEQ ID NO: 606918 - DNA, 25 bp, Homo sapien
tctgcatgctttgcgaaccttctct

SEQ ID NO: 606919 - DNA, 25 bp, Homo sapien
tgacattccttaccagctcaggagc

SEQ ID NO: 606920 - DNA, 25 bp, Homo sapien
cacattgcaggcatttgtgatagca

SEQ ID NO: 606921 - DNA, 25 bp, Homo sapien
tgtgttcccagatatgacagtgaca

SEQ ID NO: 606922 - DNA, 25 bp, Homo sapien
gctggcaggctgatagtgattttaa

SEQ ID NO: 606923 - DNA, 25 bp, Homo sapien
gacgaactcagcattgtcaatgtcc

SEQ ID NO: 606924 - DNA, 25 bp, Homo sapien
aaatatgttaattgaaaacaatcag

SEQ ID NO: 606925 - DNA, 25 bp, Homo sapien
aaaaatgttaatattcagctgggtg

SEQ ID NO: 606926 - DNA, 25 bp, Homo sapien
aaatgttaatattcagctgggtgtg

SEQ ID NO: 606927 - DNA, 25 bp, Homo sapien
aatatgttaattgaaaacaatcaga

SEQ ID NO: 606928 - DNA, 25 bp, Homo sapien
tgaagcgggcattcgaggtacagca

SEQ ID NO: 606929 - DNA, 25 bp, Homo sapien
aggtacagcagtaatttctgtggtg

SEQ ID NO: 606930 - DNA, 25 bp, Homo sapien
ttctgtggtgcagtcaagtgctcgc

SEQ ID NO: 606931 - DNA, 25 bp, Homo sapien
ccttgtctcctctagcaatgagggc

SEQ ID NO: 606932 - DNA, 25 bp, Homo sapien
tgggtccatagatgctagtcctggg

SEQ ID NO: 606933 - DNA, 25 bp, Homo sapien
catagatgctagtcctgggaccagc

SEQ ID NO: 606934 - DNA, 25 bp, Homo sapien
agacctccatgggtccatagatgct

SEQ ID NO: 606935 - DNA, 25 bp, Homo sapien
tccatgggtccatagatgctagtcc

SEQ ID NO: 606936 - DNA, 25 bp, Homo sapien
agactccgtccatgggccttcctgt

SEQ ID NO: 606937 - DNA, 25 bp, Homo sapien
cagccttttcctgaatcattgctgt

SEQ ID NO: 606938 - DNA, 25 bp, Homo sapien
ccttttcctgaatcattgctgtgca

SEQ ID NO: 606939 - DNA, 25 bp, Homo sapien
acgggccggtgccttctgaccggca

SEQ ID NO: 606940 - DNA, 25 bp, Homo sapien
tgggctccagccagcccaagttccc

SEQ ID NO: 606941 - DNA, 25 bp, Homo sapien
ctgggcctgcccaatccgtggccac

SEQ ID NO: 606942 - DNA, 25 bp, Homo sapien
aagttccctcatgcgcctgtctggg

SEQ ID NO: 606943 - DNA, 25 bp, Homo sapien
ctgatgacggcttcttttattgtct

SEQ ID NO: 606944 - DNA, 25 bp, Homo sapien
tctgggcaatctcttggccgctctg

SEQ ID NO: 606945 - DNA, 25 bp, Homo sapien
tccagagcttcgtgaacaatgcggg

SEQ ID NO: 606946 - DNA, 25 bp, Homo sapien
acggcagcctccgagggtgctggac

SEQ ID NO: 606947 - DNA, 25 bp, Homo sapien
tgaaacccgacgtccacatccagag

SEQ ID NO: 606948 - DNA, 25 bp, Homo sapien
tggagaacctatgatgtaccaggca

SEQ ID NO: 606949 - DNA, 25 bp, Homo sapien
ggtgtctgccctgatccctctcatg

SEQ ID NO: 606950 - DNA, 25 bp, Homo sapien
tcagtcaagtcacttaactggaaac

SEQ ID NO: 606951 - DNA, 25 bp, Homo sapien
tacatgtggtcattaaacaaattcc

SEQ ID NO: 606952 - DNA, 25 bp, Homo sapien
cctatggacaagaggttctcaacct

SEQ ID NO: 606953 - DNA, 25 bp, Homo sapien
ccaggcaacctttcaggcaaattga

SEQ ID NO: 606954 - DNA, 25 bp, Homo sapien
taaatggtagagaggccctatggac

SEQ ID NO: 606955 - DNA, 25 bp, Homo sapien
gattgctcattaggattacctgggc

SEQ ID NO: 606956 - DNA, 25 bp, Homo sapien
tttgagagtagacacgcacccctct

SEQ ID NO: 606957 - DNA, 25 bp, Homo sapien
ctcaggtgagtgatggccagagcca

SEQ ID NO: 606958 - DNA, 25 bp, Homo sapien
gcacccctctttttacatggtcagg

SEQ ID NO: 606959 - DNA, 25 bp, Homo sapien
aaggccactgtcctttactggtaga

SEQ ID NO: 606960 - DNA, 25 bp, Homo sapien
gctgccaggttttaggcaggtgacc

SEQ ID NO: 606961 - DNA, 25 bp, Homo sapien
ttgatgggctgccaggttttaggca

SEQ ID NO: 606962 - DNA, 25 bp, Homo sapien
gccttgatgggctgccaggttttag

SEQ ID NO: 606963 - DNA, 25 bp, Homo sapien
ctgccttgatgggctgccaggtttt

SEQ ID NO: 606964 - DNA, 25 bp, Homo sapien
tgctccctctagacccaaagacagg

SEQ ID NO: 606965 - DNA, 25 bp, Homo sapien
gggcttgttcctggccgacccacag

SEQ ID NO: 606966 - DNA, 25 bp, Homo sapien
ttgttcctggccgacccacaggaac

SEQ ID NO: 606967 - DNA, 25 bp, Homo sapien
ctgccctacctctcctgccttgtac

SEQ ID NO: 606968 - DNA, 25 bp, Homo sapien
tccatggatggaccataaaggcctt

SEQ ID NO: 606969 - DNA, 25 bp, Homo sapien
taaaggccttgcagagtgcatggac

SEQ ID NO: 606970 - DNA, 25 bp, Homo sapien
tgtccagcaacatcggatcctgggt

SEQ ID NO: 606971 - DNA, 25 bp, Homo sapien
gaagaattcagtgccccagtctgga

SEQ ID NO: 606972 - DNA, 25 bp, Homo sapien
gagagctcagcctcactagtctctt

SEQ ID NO: 606973 - DNA, 25 bp, Homo sapien
tgaggcctctccctagaggacctgg

SEQ ID NO: 606974 - DNA, 25 bp, Homo sapien
tcagcctcactagtctcttcctgag

SEQ ID NO: 606975 - DNA, 25 bp, Homo sapien
tgctttgggtctggtgcagaagtga

SEQ ID NO: 606976 - DNA, 25 bp, Homo sapien
tctgcgaggcctggtgatttatgag

SEQ ID NO: 606977 - DNA, 25 bp, Homo sapien
acagctctgcgaggcctggtgattt

SEQ ID NO: 606978 - DNA, 25 bp, Homo sapien
catcctgtgtggaggcgcaggcagc

SEQ ID NO: 606979 - DNA, 25 bp, Homo sapien
gacctggggagattgagaggagaaa

SEQ ID NO: 606980 - DNA, 25 bp, Homo sapien
gagactccaagcgagacatccaact

SEQ ID NO: 606981 - DNA, 25 bp, Homo sapien
gggagtcattgattgtcatggagac

SEQ ID NO: 606982 - DNA, 25 bp, Homo sapien
tcatggagactccaagcgagacatc

SEQ ID NO: 606983 - DNA, 25 bp, Homo sapien
tgagatgggccacccaactccagat

SEQ ID NO: 606984 - DNA, 25 bp, Homo sapien
ccaccatctagaattcttgaaacca

SEQ ID NO: 606985 - DNA, 25 bp, Homo sapien
agctgacagccaccatctagaattc

SEQ ID NO: 606986 - DNA, 25 bp, Homo sapien
gattgttttttgagaatcagctgac

SEQ ID NO: 606987 - DNA, 25 bp, Homo sapien
ggtttctgcattcgttgccactggc

SEQ ID NO: 606988 - DNA, 25 bp, Homo sapien
gaattcttctgcgtacttgataatg

SEQ ID NO: 606989 - DNA, 25 bp, Homo sapien
cctgtgcaggtaccaagctgtgata

SEQ ID NO: 606990 - DNA, 25 bp, Homo sapien
gagcttaggcttaatcgagaattct

SEQ ID NO: 606991 - DNA, 25 bp, Homo sapien
tgtgacctgtgctgagaccctcaga

SEQ ID NO: 606992 - DNA, 25 bp, Homo sapien
cctccctcagttatatttgggttct

SEQ ID NO: 606993 - DNA, 25 bp, Homo sapien
gttctttgctatgttacaaacgagg

SEQ ID NO: 606994 - DNA, 25 bp, Homo sapien
accagtgctgcaaactcctcagaca

SEQ ID NO: 606995 - DNA, 25 bp, Homo sapien
caaacgaggtcctcagttgggagct

SEQ ID NO: 606996 - DNA, 25 bp, Homo sapien
aaagcaatatttcccaaggcgaagc

SEQ ID NO: 606997 - DNA, 25 bp, Homo sapien
gactctcaacgtggtgcatgtgcga

SEQ ID NO: 606998 - DNA, 25 bp, Homo sapien
gcaaggatctcgaatctgaagagcc

SEQ ID NO: 606999 - DNA, 25 bp, Homo sapien
cccactgaacaatgaggcttgatga

SEQ ID NO: 607000 - DNA, 25 bp, Homo sapien
tcagagttctgtgccccctgcaaat

SEQ ID NO: 607001 - DNA, 25 bp, Homo sapien
ttctcagcattggtcccctcatccg

SEQ ID NO: 607002 - DNA, 25 bp, Homo sapien
gcaaattgggccagagtcagaagag

SEQ ID NO: 607003 - DNA, 25 bp, Homo sapien
aagagaaatcttgacattctcagca

SEQ ID NO: 607004 - DNA, 25 bp, Homo sapien
agtgcctgaaaagggaaggccccat

SEQ ID NO: 607005 - DNA, 25 bp, Homo sapien
cagtgcctgaaaagggaaggcccca

SEQ ID NO: 607006 - DNA, 25 bp, Homo sapien
ttcatataaattgttcgtaagagaa

SEQ ID NO: 607007 - DNA, 25 bp, Homo sapien
catataaattgttcgtaagagaaaa

SEQ ID NO: 607008 - DNA, 25 bp, Homo sapien
ttcagcagttgtcgctgtttcagca

SEQ ID NO: 607009 - DNA, 25 bp, Homo sapien
cttcttgttttcagcagttgtcgct

SEQ ID NO: 607010 - DNA, 25 bp, Homo sapien
tctcttgacattgatcagcaatggg

SEQ ID NO: 607011 - DNA, 25 bp, Homo sapien
cttgacattgatcagcaatgggtca

SEQ ID NO: 607012 - DNA, 25 bp, Homo sapien
tcttgacattgatcagcaatgggtc

SEQ ID NO: 607013 - DNA, 25 bp, Homo sapien
tgacattgatcagcaatgggtcatg

SEQ ID NO: 607014 - DNA, 25 bp, Homo sapien
cagcaaaggagccttcaatcctgga

SEQ ID NO: 607015 - DNA, 25 bp, Homo sapien
gaacagcaaaggagccttcaatcct

SEQ ID NO: 607016 - DNA, 25 bp, Homo sapien
aaaggagccttcaatcctggaatcc

SEQ ID NO: 607017 - DNA, 25 bp, Homo sapien
atcctggaatcccaaaatagtcctg

SEQ ID NO: 607018 - DNA, 25 bp, Homo sapien
cagataagaacagttttacattggg

SEQ ID NO: 607019 - DNA, 25 bp, Homo sapien
acacagataagaacagttttacatt

SEQ ID NO: 607020 - DNA, 25 bp, Homo sapien
gataagaacagttttacattgggaa

SEQ ID NO: 607021 - DNA, 25 bp, Homo sapien
cattgggaaaggtcaagacgcagag

SEQ ID NO: 607022 - DNA, 25 bp, Homo sapien
cagttgctgaatccgctgtttctga

SEQ ID NO: 607023 - DNA, 25 bp, Homo sapien
aagtgaaatttcagtccctccgctc

SEQ ID NO: 607024 - DNA, 25 bp, Homo sapien
catttccccaatgccagacgaggtg

SEQ ID NO: 607025 - DNA, 25 bp, Homo sapien
tggccgccggacagggcataatagc

SEQ ID NO: 607026 - DNA, 25 bp, Homo sapien
ttctcaaactgaaccctttctggct

SEQ ID NO: 607027 - DNA, 25 bp, Homo sapien
acaccgccccacaactatccctgtg

SEQ ID NO: 607028 - DNA, 25 bp, Homo sapien
gaaatcacatgtttctcagcatttt

SEQ ID NO: 607029 - DNA, 25 bp, Homo sapien
acctcccaattctttctcaaactga

SEQ ID NO: 607030 - DNA, 25 bp, Homo sapien
atttgctttttgtacccttcatcct

SEQ ID NO: 607031 - DNA, 25 bp, Homo sapien
gacgcagacgctaacctgtttattg

SEQ ID NO: 607032 - DNA, 25 bp, Homo sapien
tgacaggctgagagttaataatgac

SEQ ID NO: 607033 - DNA, 25 bp, Homo sapien
gaggccgcctcaagcgatcgcttca

SEQ ID NO: 607034 - DNA, 25 bp, Homo sapien
cgctgatctctttggatcccagagg

SEQ ID NO: 607035 - DNA, 25 bp, Homo sapien
gctgatctctttggatcccagaggc

SEQ ID NO: 607036 - DNA, 25 bp, Homo sapien
ctgatctctttggatcccagaggct

SEQ ID NO: 607037 - DNA, 25 bp, Homo sapien
tcgctgatctctttggatcccagag

SEQ ID NO: 607038 - DNA, 25 bp, Homo sapien
cggcgaacccaaacagagccgtggt

SEQ ID NO: 607039 - DNA, 25 bp, Homo sapien
ggcagccggcgaacccaaacagagc

SEQ ID NO: 607040 - DNA, 25 bp, Homo sapien
ctggctctttccacgggagatggca

SEQ ID NO: 607041 - DNA, 25 bp, Homo sapien
ctctttccacgggagatggcagccg

SEQ ID NO: 607042 - DNA, 25 bp, Homo sapien
agtcctcaaggcatacttggctcta

SEQ ID NO: 607043 - DNA, 25 bp, Homo sapien
caaggcatacttggctctaatttca

SEQ ID NO: 607044 - DNA, 25 bp, Homo sapien
cctcaaggcatacttggctctaatt

SEQ ID NO: 607045 - DNA, 25 bp, Homo sapien
ggaaagtcctcaaggcatacttggc

SEQ ID NO: 607046 - DNA, 25 bp, Homo sapien
ggcagggctccttagaggaattatg

SEQ ID NO: 607047 - DNA, 25 bp, Homo sapien
gcgttgcccactttctatgctgtgg

SEQ ID NO: 607048 - DNA, 25 bp, Homo sapien
ggagggttacataggtggttcacca

SEQ ID NO: 607049 - DNA, 25 bp, Homo sapien
tctgtcccacttccggagagaagct

SEQ ID NO: 607050 - DNA, 25 bp, Homo sapien
agtgggcctcacttctctgttgcca

SEQ ID NO: 607051 - DNA, 25 bp, Homo sapien
gggcagcaccacctggacaccatcc

SEQ ID NO: 607052 - DNA, 25 bp, Homo sapien
ccttcatctgtgtggggcagcacca

SEQ ID NO: 607053 - DNA, 25 bp, Homo sapien
atcccctccagggatgctgtggcct

SEQ ID NO: 607054 - DNA, 25 bp, Homo sapien
cagaagtaggggttttactgcatct

SEQ ID NO: 607055 - DNA, 25 bp, Homo sapien
catcttgttgttccttcgtggttcc

SEQ ID NO: 607056 - DNA, 25 bp, Homo sapien
ggctgtttcagacccatgaagcccc

SEQ ID NO: 607057 - DNA, 25 bp, Homo sapien
tccaggatccaagcttgaagagctc

SEQ ID NO: 607058 - DNA, 25 bp, Homo sapien
cagatatataggatggtgagcccca

SEQ ID NO: 607059 - DNA, 25 bp, Homo sapien
gggcagcttttgtcttcccctgaga

SEQ ID NO: 607060 - DNA, 25 bp, Homo sapien
catggctctgattgccacgctggcc

SEQ ID NO: 607061 - DNA, 25 bp, Homo sapien
gatgctccattaagggactcaaggc

SEQ ID NO: 607062 - DNA, 25 bp, Homo sapien
gggatccctttgaggccaactggcc

SEQ ID NO: 607063 - DNA, 25 bp, Homo sapien
gcttgtggctattaaccaagtagcc

SEQ ID NO: 607064 - DNA, 25 bp, Homo sapien
tgtttgcccttgacaaggcctcctg

SEQ ID NO: 607065 - DNA, 25 bp, Homo sapien
ctgtaaaactccgaaggccactggc

SEQ ID NO: 607066 - DNA, 25 bp, Homo sapien
tctgttctgacaagtagagtgagtg

SEQ ID NO: 607067 - DNA, 25 bp, Homo sapien
gggtgtagccaaaggacaacaggta

SEQ ID NO: 607068 - DNA, 25 bp, Homo sapien
ctgaaacctccctttgaaccattag

SEQ ID NO: 607069 - DNA, 25 bp, Homo sapien
tcccagttagggagacctctgaaac

SEQ ID NO: 607070 - DNA, 25 bp, Homo sapien
tctgaagtcccacatctatggctgc

SEQ ID NO: 607071 - DNA, 25 bp, Homo sapien
cagactctgccgtctggctttgaag

SEQ ID NO: 607072 - DNA, 25 bp, Homo sapien
tatagcccagcaataccatcctctg

SEQ ID NO: 607073 - DNA, 25 bp, Homo sapien
tgtgctccacactctactttgcagg

SEQ ID NO: 607074 - DNA, 25 bp, Homo sapien
taatgcctataagtgaattgaaggg

SEQ ID NO: 607075 - DNA, 25 bp, Homo sapien
acataatccccatgctcccataggg

SEQ ID NO: 607076 - DNA, 25 bp, Homo sapien
gaacataatccccatgctcccatag

SEQ ID NO: 607077 - DNA, 25 bp, Homo sapien
gtgaagagataatgcctataagtga

SEQ ID NO: 607078 - DNA, 25 bp, Homo sapien
cgtgggtgcattcttttcttcctca

SEQ ID NO: 607079 - DNA, 25 bp, Homo sapien
tggcagctgcgacagaggctgtcct

SEQ ID NO: 607080 - DNA, 25 bp, Homo sapien
aaggaataggccacggatggatggt

SEQ ID NO: 607081 - DNA, 25 bp, Homo sapien
ggaataggccacggatggatggtgg

SEQ ID NO: 607082 - DNA, 25 bp, Homo sapien
tgaaggaataggccacggatggatg

SEQ ID NO: 607083 - DNA, 25 bp, Homo sapien
ccaatgcgactacagcaagcctgga

SEQ ID NO: 607084 - DNA, 25 bp, Homo sapien
ctccaatgcgactacagcaagcctg

SEQ ID NO: 607085 - DNA, 25 bp, Homo sapien
tccaatgcgactacagcaagcctgg

SEQ ID NO: 607086 - DNA, 25 bp, Homo sapien
acatgggccccatcttatgcctgga

SEQ ID NO: 607087 - DNA, 25 bp, Homo sapien
tcttatgcctggactttgctctggt

SEQ ID NO: 607088 - DNA, 25 bp, Homo sapien
ctctggtctcagatgtaagccctgg

SEQ ID NO: 607089 - DNA, 25 bp, Homo sapien
caggttgcagggaagattcctgctt

SEQ ID NO: 607090 - DNA, 25 bp, Homo sapien
tcagagaaagacgtttgaaaaccac

SEQ ID NO: 607091 - DNA, 25 bp, Homo sapien
atgagagcaccactaagcacacacg

SEQ ID NO: 607092 - DNA, 25 bp, Homo sapien
acagggtcggaatgtgcaggcttca

SEQ ID NO: 607093 - DNA, 25 bp, Homo sapien
tgcctctgacacagggtcggaatgt

SEQ ID NO: 607094 - DNA, 25 bp, Homo sapien
tcagagtagaaacaggtatttgcta

SEQ ID NO: 607095 - DNA, 25 bp, Homo sapien
cagagtagaaacaggtatttgctac

SEQ ID NO: 607096 - DNA, 25 bp, Homo sapien
ccatcgtgtatgtggagtttagggt

SEQ ID NO: 607097 - DNA, 25 bp, Homo sapien
accactcccatcgtgtatgtggagt

SEQ ID NO: 607098 - DNA, 25 bp, Homo sapien
tttggattttacagaaggaccactc

SEQ ID NO: 607099 - DNA, 25 bp, Homo sapien
gattttacagaaggaccactcccat

SEQ ID NO: 607100 - DNA, 25 bp, Homo sapien
agggctcggagagcccctgtggcat

SEQ ID NO: 607101 - DNA, 25 bp, Homo sapien
gttgagggctcggagagcccctgtg

SEQ ID NO: 607102 - DNA, 25 bp, Homo sapien
tttgtgcaatgaaccacccaagggt

SEQ ID NO: 607103 - DNA, 25 bp, Homo sapien
caggtttgtgcaatgaaccacccaa

SEQ ID NO: 607104 - DNA, 25 bp, Homo sapien
tgtgcaatgaaccacccaagggtct

SEQ ID NO: 607105 - DNA, 25 bp, Homo sapien
tggcccaggtttgtgcaatgaacca

SEQ ID NO: 607106 - DNA, 25 bp, Homo sapien
gaggagtgtgatgaacctaagttca

SEQ ID NO: 607107 - DNA, 25 bp, Homo sapien
ggagtgtgatgaacctaagttcaga

SEQ ID NO: 607108 - DNA, 25 bp, Homo sapien
tgtgatgaacctaagttcagagagc

SEQ ID NO: 607109 - DNA, 25 bp, Homo sapien
atgaacctaagttcagagagccctg

SEQ ID NO: 607110 - DNA, 25 bp, Homo sapien
gctctaaagcttggggaatcttcct

SEQ ID NO: 607111 - DNA, 25 bp, Homo sapien
cagttgcatctatggtggggtaggg

SEQ ID NO: 607112 - DNA, 25 bp, Homo sapien
tttttaggtcttgctctaaagcttg

SEQ ID NO: 607113 - DNA, 25 bp, Homo sapien
tcccatgtacactgacaaggtccca

SEQ ID NO: 607114 - DNA, 25 bp, Homo sapien
cagggacagatgtcaggtattgctt

SEQ ID NO: 607115 - DNA, 25 bp, Homo sapien
ccagggacagatgtcaggtattgct

SEQ ID NO: 607116 - DNA, 25 bp, Homo sapien
tccagggacagatgtcaggtattgc

SEQ ID NO: 607117 - DNA, 25 bp, Homo sapien
actcgccatggtgagctgtgcccag

SEQ ID NO: 607118 - DNA, 25 bp, Homo sapien
tgcatactcgccatggtgagctgtg

SEQ ID NO: 607119 - DNA, 25 bp, Homo sapien
tgtttgcatactcgccatggtgagc

SEQ ID NO: 607120 - DNA, 25 bp, Homo sapien
gtggttgtttgcatactcgccatgg

SEQ ID NO: 607121 - DNA, 25 bp, Homo sapien
taagaccctcaggagcagaatctca

SEQ ID NO: 607122 - DNA, 25 bp, Homo sapien
gatggtccatccacaagcggggaat

SEQ ID NO: 607123 - DNA, 25 bp, Homo sapien
tccacaagcggggaatgagtctggc

SEQ ID NO: 607124 - DNA, 25 bp, Homo sapien
tctcaggtagtgttgaaaagtaggg

SEQ ID NO: 607125 - DNA, 25 bp, Homo sapien
ctaactagggccatccatctgtaat

SEQ ID NO: 607126 - DNA, 25 bp, Homo sapien
aatcagccgctgactttgcggcagg

SEQ ID NO: 607127 - DNA, 25 bp, Homo sapien
ttaaatcagccgctgactttgcggc

SEQ ID NO: 607128 - DNA, 25 bp, Homo sapien
gtagcagcgtccctggttcgtgtct

SEQ ID NO: 607129 - DNA, 25 bp, Homo sapien
ccttcccaggacttgccatcgtggg

SEQ ID NO: 607130 - DNA, 25 bp, Homo sapien
ccaggacttgccatcgtgggcatct

SEQ ID NO: 607131 - DNA, 25 bp, Homo sapien
taccttcccaggacttgccatcgtg

SEQ ID NO: 607132 - DNA, 25 bp, Homo sapien
tctaccttcccaggacttgccatcg

SEQ ID NO: 607133 - DNA, 25 bp, Homo sapien
aggccacacttgatcatgccacctc

SEQ ID NO: 607134 - DNA, 25 bp, Homo sapien
gatcatgccacctctatttggactg

SEQ ID NO: 607135 - DNA, 25 bp, Homo sapien
acttgatcatgccacctctatttgg

SEQ ID NO: 607136 - DNA, 25 bp, Homo sapien
ttggactgcctgtggcgagggccat

SEQ ID NO: 607137 - DNA, 25 bp, Homo sapien
tattcggaatcacacagggattcag

SEQ ID NO: 607138 - DNA, 25 bp, Homo sapien
ttccagcctggtattcggaatcaca

SEQ ID NO: 607139 - DNA, 25 bp, Homo sapien
caaggtacgaggtgatatttccagc

SEQ ID NO: 607140 - DNA, 25 bp, Homo sapien
acggtcagggcccacatacaaggta

SEQ ID NO: 607141 - DNA, 25 bp, Homo sapien
ctgttgtgaaagccgagaaagaaag

SEQ ID NO: 607142 - DNA, 25 bp, Homo sapien
tgttgtgaaagccgagaaagaaagg

SEQ ID NO: 607143 - DNA, 25 bp, Homo sapien
cccacatccacattttgtaggctgt

SEQ ID NO: 607144 - DNA, 25 bp, Homo sapien
gcaaaacattctggggatatggtct

SEQ ID NO: 607145 - DNA, 25 bp, Homo sapien
ggaatttctgccaacgccgtggcca

SEQ ID NO: 607146 - DNA, 25 bp, Homo sapien
ttttggaatttctgccaacgccgtg

SEQ ID NO: 607147 - DNA, 25 bp, Homo sapien
aaatggcttcgttattttcctcagt

SEQ ID NO: 607148 - DNA, 25 bp, Homo sapien
tattttcctcagtgcgtctttctct

SEQ ID NO: 607149 - DNA, 25 bp, Homo sapien
acaaatggcttcgttattttcctca

SEQ ID NO: 607150 - DNA, 25 bp, Homo sapien
tttcctcagtgcgtctttctcttca

SEQ ID NO: 607151 - DNA, 25 bp, Homo sapien
ttgggcaaattattacatcactggg

SEQ ID NO: 607152 - DNA, 25 bp, Homo sapien
gattgggcaaattattacatcactg

SEQ ID NO: 607153 - DNA, 25 bp, Homo sapien
aattattacatcactggggtagaca

SEQ ID NO: 607154 - DNA, 25 bp, Homo sapien
tcaagactgctaaatgcttttaaag

SEQ ID NO: 607155 - DNA, 25 bp, Homo sapien
cagctcctgcctcttagcatataga

SEQ ID NO: 607156 - DNA, 25 bp, Homo sapien
tcagcagttaggatgtgctgggctc

SEQ ID NO: 607157 - DNA, 25 bp, Homo sapien
gcctcttagcatatagagagtgtgg

SEQ ID NO: 607158 - DNA, 25 bp, Homo sapien
tgtgcatgtgcacagttgctgctgt

SEQ ID NO: 607159 - DNA, 25 bp, Homo sapien
actgctccagccttcatataggcgg

SEQ ID NO: 607160 - DNA, 25 bp, Homo sapien
tgctccagccttcatataggcggtc

SEQ ID NO: 607161 - DNA, 25 bp, Homo sapien
gctccagccttcatataggcggtca

SEQ ID NO: 607162 - DNA, 25 bp, Homo sapien
tccactgctccagccttcatatagg

SEQ ID NO: 607163 - DNA, 25 bp, Homo sapien
atatattagggaaggtcaaggcacc

SEQ ID NO: 607164 - DNA, 25 bp, Homo sapien
ggcccacgttaccttgtagcaatat

SEQ ID NO: 607165 - DNA, 25 bp, Homo sapien
gaaggttatactgtcagcaaaaggg

SEQ ID NO: 607166 - DNA, 25 bp, Homo sapien
gcaaacctcgtgaccagcttgatgg

SEQ ID NO: 607167 - DNA, 25 bp, Homo sapien
gtgtagtcttttattgcttacctcc

SEQ ID NO: 607168 - DNA, 25 bp, Homo sapien
gagctcctgcatctctatctttctc

SEQ ID NO: 607169 - DNA, 25 bp, Homo sapien
aacgggatgtggcagctctaaagct

SEQ ID NO: 607170 - DNA, 25 bp, Homo sapien
tgggccaacatactcttgccaggga

SEQ ID NO: 607171 - DNA, 25 bp, Homo sapien
tcttgccagggaagccctagatccc

SEQ ID NO: 607172 - DNA, 25 bp, Homo sapien
tagcctgatgccgtctccattctca

SEQ ID NO: 607173 - DNA, 25 bp, Homo sapien
ctagcctgatgccgtctccattctc

SEQ ID NO: 607174 - DNA, 25 bp, Homo sapien
agcctgatgccgtctccattctcac

SEQ ID NO: 607175 - DNA, 25 bp, Homo sapien
ttgatgtcactcagttctccattca

SEQ ID NO: 607176 - DNA, 25 bp, Homo sapien
tcttattgatgtcactcagttctcc

SEQ ID NO: 607177 - DNA, 25 bp, Homo sapien
aactccagctggactcccgagaaca

SEQ ID NO: 607178 - DNA, 25 bp, Homo sapien
gctggactcccgagaacatatgggc

SEQ ID NO: 607179 - DNA, 25 bp, Homo sapien
tctattggaggaagaggttgatacg

SEQ ID NO: 607180 - DNA, 25 bp, Homo sapien
gaatggagtcttcagctgtctctgt

SEQ ID NO: 607181 - DNA, 25 bp, Homo sapien
cttctgtggcacaggagagccgaga

SEQ ID NO: 607182 - DNA, 25 bp, Homo sapien
tgtctctgtcctctgttgatgtccc

SEQ ID NO: 607183 - DNA, 25 bp, Homo sapien
actgctggccatgtctttggaagcc

SEQ ID NO: 607184 - DNA, 25 bp, Homo sapien
tttgctgatgcccgggatgtgctca

SEQ ID NO: 607185 - DNA, 25 bp, Homo sapien
gaagcctgtggctgacctcaagtcc

SEQ ID NO: 607186 - DNA, 25 bp, Homo sapien
tctttgctgatgcccgggatgtgct

SEQ ID NO: 607187 - DNA, 25 bp, Homo sapien
actctgctgaaaccctgaatcccag

SEQ ID NO: 607188 - DNA, 25 bp, Homo sapien
tgaaaccctgaatcccagaaacgtc

SEQ ID NO: 607189 - DNA, 25 bp, Homo sapien
gaatcccagaaacgtccctttgcat

SEQ ID NO: 607190 - DNA, 25 bp, Homo sapien
ccctttgcatagacatctctggcag

SEQ ID NO: 607191 - DNA, 25 bp, Homo sapien
ctctgcagcctgatttcttccttga

SEQ ID NO: 607192 - DNA, 25 bp, Homo sapien
tttcttccttgagggatgctcctca

SEQ ID NO: 607193 - DNA, 25 bp, Homo sapien
gatttcttccttgagggatgctcct

SEQ ID NO: 607194 - DNA, 25 bp, Homo sapien
gcagcctgatttcttccttgaggga

SEQ ID NO: 607195 - DNA, 25 bp, Homo sapien
catcgtccatacttagagccagcgg

SEQ ID NO: 607196 - DNA, 25 bp, Homo sapien
ccatattcgagagcatgttcttgcc

SEQ ID NO: 607197 - DNA, 25 bp, Homo sapien
tgttcttgcctacatgtgaatggca

SEQ ID NO: 607198 - DNA, 25 bp, Homo sapien
gaatggcaaggctggaacggaaggc

SEQ ID NO: 607199 - DNA, 25 bp, Homo sapien
agggtcacttcgtgcttcttcctgc

SEQ ID NO: 607200 - DNA, 25 bp, Homo sapien
catacacagtgtcactgatactgta

SEQ ID NO: 607201 - DNA, 25 bp, Homo sapien
tgggtgtttccatacacagtgtcac

SEQ ID NO: 607202 - DNA, 25 bp, Homo sapien
tcccaatgctggaagcctcatagca

SEQ ID NO: 607203 - DNA, 25 bp, Homo sapien
aggctggagacgctttcggggctgg

SEQ ID NO: 607204 - DNA, 25 bp, Homo sapien
tttcggggctggtctgagcgtctct

SEQ ID NO: 607205 - DNA, 25 bp, Homo sapien
gttggggcaactggaccctgcggga

SEQ ID NO: 607206 - DNA, 25 bp, Homo sapien
gctttcggggctggtctgagcgtct

SEQ ID NO: 607207 - DNA, 25 bp, Homo sapien
atgcagtagggcacgtccccacact

SEQ ID NO: 607208 - DNA, 25 bp, Homo sapien
tgcccttgtcttgcctgctggaatg

SEQ ID NO: 607209 - DNA, 25 bp, Homo sapien
taaaagagatggtccggagagcaag

SEQ ID NO: 607210 - DNA, 25 bp, Homo sapien
agaaagacctttgctcggcggcccg

SEQ ID NO: 607211 - DNA, 25 bp, Homo sapien
tgggattctcctgttcttaagtcca

SEQ ID NO: 607212 - DNA, 25 bp, Homo sapien
tgctgtctccagttgtccctccttg

SEQ ID NO: 607213 - DNA, 25 bp, Homo sapien
ttgcttcctcgtgaatacctgctgg

SEQ ID NO: 607214 - DNA, 25 bp, Homo sapien
ggctccttgtttccctctgttggct

SEQ ID NO: 607215 - DNA, 25 bp, Homo sapien
ggagagcgcagctattgtgagacat

SEQ ID NO: 607216 - DNA, 25 bp, Homo sapien
gagcgcagctattgtgagacattgc

SEQ ID NO: 607217 - DNA, 25 bp, Homo sapien
cccatggcagtggctttgtggcgta

SEQ ID NO: 607218 - DNA, 25 bp, Homo sapien
ctttgtggcgtagagagagaatctc

SEQ ID NO: 607219 - DNA, 25 bp, Homo sapien
ccactgatatgatgggaggtgcagc

SEQ ID NO: 607220 - DNA, 25 bp, Homo sapien
ccaacaattggatgagcactcacag

SEQ ID NO: 607221 - DNA, 25 bp, Homo sapien
cacaataaggttcgcactcccataa

SEQ ID NO: 607222 - DNA, 25 bp, Homo sapien
caactatatcccttgcatgcacggt

SEQ ID NO: 607223 - DNA, 25 bp, Homo sapien
gctgatagcccagtttcatctcctc

SEQ ID NO: 607224 - DNA, 25 bp, Homo sapien
ccttccactctagggaacagaagag

SEQ ID NO: 607225 - DNA, 25 bp, Homo sapien
gcttcggctcattggcagctccctt

SEQ ID NO: 607226 - DNA, 25 bp, Homo sapien
cttcttagtttcaggcaaaggtcct

SEQ ID NO: 607227 - DNA, 25 bp, Homo sapien
caggcgctggtctaagtgttttaca

SEQ ID NO: 607228 - DNA, 25 bp, Homo sapien
cttattgcgggattggtatgtgcca

SEQ ID NO: 607229 - DNA, 25 bp, Homo sapien
tagttagaattcctgaaagctgcct

SEQ ID NO: 607230 - DNA, 25 bp, Homo sapien
gctgggtggacacaaactggtcctc

SEQ ID NO: 607231 - DNA, 25 bp, Homo sapien
gctcatggggagagaatgcactgct

SEQ ID NO: 607232 - DNA, 25 bp, Homo sapien
ctgctcatggggagagaatgcactg

SEQ ID NO: 607233 - DNA, 25 bp, Homo sapien
tgctcatggggagagaatgcactgc

SEQ ID NO: 607234 - DNA, 25 bp, Homo sapien
gagagagggttgtagccaacagact

SEQ ID NO: 607235 - DNA, 25 bp, Homo sapien
tgtccaggcacattccgaggagaga

SEQ ID NO: 607236 - DNA, 25 bp, Homo sapien
cagacttccagtatctctacagctg

SEQ ID NO: 607237 - DNA, 25 bp, Homo sapien
tggccccgtggaatttatttggctc

SEQ ID NO: 607238 - DNA, 25 bp, Homo sapien
cagtgctgctgagataggcgcaaag

SEQ ID NO: 607239 - DNA, 25 bp, Homo sapien
taggcgcaaagctgggggcttctga

SEQ ID NO: 607240 - DNA, 25 bp, Homo sapien
gggcttctgagctggacttgcctct

SEQ ID NO: 607241 - DNA, 25 bp, Homo sapien
ggcttctgagctggacttgcctctg

SEQ ID NO: 607242 - DNA, 25 bp, Homo sapien
tacagttccaccaacagcgtgtaag

SEQ ID NO: 607243 - DNA, 25 bp, Homo sapien
ccactctgtgtgttatctcttcatg

SEQ ID NO: 607244 - DNA, 25 bp, Homo sapien
tgttttctacaacagctgtactaat

SEQ ID NO: 607245 - DNA, 25 bp, Homo sapien
gataataatggttctaactggagtg

SEQ ID NO: 607246 - DNA, 25 bp, Homo sapien
gattgaatcagcaaggaaacctttt

SEQ ID NO: 607247 - DNA, 25 bp, Homo sapien
gcctgtcaacaagcctcagtgggag

SEQ ID NO: 607248 - DNA, 25 bp, Homo sapien
ttcggagacccggaaatgacaaatc

SEQ ID NO: 607249 - DNA, 25 bp, Homo sapien
agaagtgaactgaggagcccgacag

SEQ ID NO: 607250 - DNA, 25 bp, Homo sapien
tcagtcatagagcttatcacacaga

SEQ ID NO: 607251 - DNA, 25 bp, Homo sapien
ttccatcccatgtgcagcctctggc

SEQ ID NO: 607252 - DNA, 25 bp, Homo sapien
gcacttagtccactctcagtcatag

SEQ ID NO: 607253 - DNA, 25 bp, Homo sapien
tgagggttgtttattccagtgttcc

SEQ ID NO: 607254 - DNA, 25 bp, Homo sapien
actgggccaaactcctgacacgatt

SEQ ID NO: 607255 - DNA, 25 bp, Homo sapien
gacacgattaagaagaggttttgga

SEQ ID NO: 607256 - DNA, 25 bp, Homo sapien
ccttgaagacttggctcactataag

SEQ ID NO: 607257 - DNA, 25 bp, Homo sapien
aagacttggctcactataagcctcc

SEQ ID NO: 607258 - DNA, 25 bp, Homo sapien
gcagtagtgggaaagggtgagtgaa

SEQ ID NO: 607259 - DNA, 25 bp, Homo sapien
ctggaagcagtagtgggaaagggtg

SEQ ID NO: 607260 - DNA, 25 bp, Homo sapien
cagtagtgggaaagggtgagtgaag

SEQ ID NO: 607261 - DNA, 25 bp, Homo sapien
gaagcagtagtgggaaagggtgagt

SEQ ID NO: 607262 - DNA, 25 bp, Homo sapien
tctgtgcttacaaagtccctagtgt

SEQ ID NO: 607263 - DNA, 25 bp, Homo sapien
tacaaagtccctagtgtagtgatgg

SEQ ID NO: 607264 - DNA, 25 bp, Homo sapien
tgcttccttctgtagtactcatggg

SEQ ID NO: 607265 - DNA, 25 bp, Homo sapien
catgggtcccacatctgtgcttaca

SEQ ID NO: 607266 - DNA, 25 bp, Homo sapien
tgtcaagggtatagcccaaagagaa

SEQ ID NO: 607267 - DNA, 25 bp, Homo sapien
ctgggacatcctgcggctgcctgag

SEQ ID NO: 607268 - DNA, 25 bp, Homo sapien
gtatagcccaaagagaagttgtgaa

SEQ ID NO: 607269 - DNA, 25 bp, Homo sapien
ttggcctgtgtcaagggtatagccc

SEQ ID NO: 607270 - DNA, 25 bp, Homo sapien
atacctgaagatagaaagtatctgt

SEQ ID NO: 607271 - DNA, 25 bp, Homo sapien
catttggaatacctgaagatagaaa

SEQ ID NO: 607272 - DNA, 25 bp, Homo sapien
ggaatacctgaagatagaaagtatc

SEQ ID NO: 607273 - DNA, 25 bp, Homo sapien
tttggaatacctgaagatagaaagt

SEQ ID NO: 607274 - DNA, 25 bp, Homo sapien
ttgccaattctttgacagtgatgtc

SEQ ID NO: 607275 - DNA, 25 bp, Homo sapien
cagtgatgtcttctagcagctctcc

SEQ ID NO: 607276 - DNA, 25 bp, Homo sapien
taagaatctgctgccctttcaagat

SEQ ID NO: 607277 - DNA, 25 bp, Homo sapien
acgttttgacccttggatgctggca

SEQ ID NO: 607278 - DNA, 25 bp, Homo sapien
gactcttgatctaggttgtcaccca

SEQ ID NO: 607279 - DNA, 25 bp, Homo sapien
gcgatacttgctgttggaagggcca

SEQ ID NO: 607280 - DNA, 25 bp, Homo sapien
agtatgtagattagggagctgctcc

SEQ ID NO: 607281 - DNA, 25 bp, Homo sapien
ccggactgcaagattatggaggaac

SEQ ID NO: 607282 - DNA, 25 bp, Homo sapien
aatccaggccaatgtgtagagtgga

SEQ ID NO: 607283 - DNA, 25 bp, Homo sapien
cacagagcggacatataagacaaac

SEQ ID NO: 607284 - DNA, 25 bp, Homo sapien
tctccaaaatgtaggcaaacccggc

SEQ ID NO: 607285 - DNA, 25 bp, Homo sapien
caaactccaggaaggctataggcaa

SEQ ID NO: 607286 - DNA, 25 bp, Homo sapien
aaactggtagtgtaggtctgtctcc

SEQ ID NO: 607287 - DNA, 25 bp, Homo sapien
gcgcgctccgctgtgatttgcataa

SEQ ID NO: 607288 - DNA, 25 bp, Homo sapien
cagacgctttttctcggaaccccag

SEQ ID NO: 607289 - DNA, 25 bp, Homo sapien
gcatctccttggagcggcgagtacc

SEQ ID NO: 607290 - DNA, 25 bp, Homo sapien
gacggacctgtctttgcatcgcaag

SEQ ID NO: 607291 - DNA, 25 bp, Homo sapien
ggcgagaacagaccccagcagttgt

SEQ ID NO: 607292 - DNA, 25 bp, Homo sapien
cagaccccagcagttgtgtaacagc

SEQ ID NO: 607293 - DNA, 25 bp, Homo sapien
gggcgggcggcgagaacagacccca

SEQ ID NO: 607294 - DNA, 25 bp, Homo sapien
gagaacagaccccagcagttgtgta

SEQ ID NO: 607295 - DNA, 25 bp, Homo sapien
aggctgctaccacggcggcgacgct

SEQ ID NO: 607296 - DNA, 25 bp, Homo sapien
ctccagaaacggctgaggctgctac

SEQ ID NO: 607297 - DNA, 25 bp, Homo sapien
ctgtgggcccgagactccagaaacg

SEQ ID NO: 607298 - DNA, 25 bp, Homo sapien
ctgaggctgctaccacggcggcgac

SEQ ID NO: 607299 - DNA, 25 bp, Homo sapien
aggaggcgcaggtaagcggcggtga

SEQ ID NO: 607300 - DNA, 25 bp, Homo sapien
gggagacgcagacggcgaaccggcc

SEQ ID NO: 607301 - DNA, 25 bp, Homo sapien
ggaggctcgaggaggcgcaggtaag

SEQ ID NO: 607302 - DNA, 25 bp, Homo sapien
cgaaccggcctgtgcgggcggacgg

SEQ ID NO: 607303 - DNA, 25 bp, Homo sapien
gaatcgttgtggaggtggtccccac

SEQ ID NO: 607304 - DNA, 25 bp, Homo sapien
ctgggaatcgttgtggaggtggtcc

SEQ ID NO: 607305 - DNA, 25 bp, Homo sapien
cgttgtggaggtggtccccactcat

SEQ ID NO: 607306 - DNA, 25 bp, Homo sapien
tcgttgtggaggtggtccccactca

SEQ ID NO: 607307 - DNA, 25 bp, Homo sapien
cattcaatcggaaatccgcttcgat

SEQ ID NO: 607308 - DNA, 25 bp, Homo sapien
ccggagtcggcgcagggggcacact

SEQ ID NO: 607309 - DNA, 25 bp, Homo sapien
ccccggagtcggcgcagggggcaca

SEQ ID NO: 607310 - DNA, 25 bp, Homo sapien
ggccccggagtcggcgcagggggca

SEQ ID NO: 607311 - DNA, 25 bp, Homo sapien
ggagtcggcgcagggggcacactca

SEQ ID NO: 607312 - DNA, 25 bp, Homo sapien
aagaggcggcccgatgggaacaatg

SEQ ID NO: 607313 - DNA, 25 bp, Homo sapien
agcgaggagccgggacttagtctct

SEQ ID NO: 607314 - DNA, 25 bp, Homo sapien
cccctcttgggagggccgggatctg

SEQ ID NO: 607315 - DNA, 25 bp, Homo sapien
ccgaggcccggtggcggacgacacg

SEQ ID NO: 607316 - DNA, 25 bp, Homo sapien
gaaaatggcgcagagactaagtccc

SEQ ID NO: 607317 - DNA, 25 bp, Homo sapien
gatttatacggctttgctctgcaga

SEQ ID NO: 607318 - DNA, 25 bp, Homo sapien
catgaagcataaagggaataacccc

SEQ ID NO: 607319 - DNA, 25 bp, Homo sapien
aagtatgtgatttatacggctttgc

SEQ ID NO: 607320 - DNA, 25 bp, Homo sapien
aaaaacactgcattgggaacctcga

SEQ ID NO: 607321 - DNA, 25 bp, Homo sapien
tgggtgacccacagagaacttgcaa

SEQ ID NO: 607322 - DNA, 25 bp, Homo sapien
tatggttacaggatcagctctagca

SEQ ID NO: 607323 - DNA, 25 bp, Homo sapien
caacagggttgttcgaaagcctgca

SEQ ID NO: 607324 - DNA, 25 bp, Homo sapien
tcagctcatgggatttagagtggcc

SEQ ID NO: 607325 - DNA, 25 bp, Homo sapien
taaatattgcgaagaatgagctcca

SEQ ID NO: 607326 - DNA, 25 bp, Homo sapien
taacaggacctaactcacaagggtc

SEQ ID NO: 607327 - DNA, 25 bp, Homo sapien
tatcactctagcatagtggctcagc

SEQ ID NO: 607328 - DNA, 25 bp, Homo sapien
ctgcagatttcatttggcggtacca

SEQ ID NO: 607329 - DNA, 25 bp, Homo sapien
tactagaaacatccaatccgagcct

SEQ ID NO: 607330 - DNA, 25 bp, Homo sapien
taagccaaccagaatcagcacaaga

SEQ ID NO: 607331 - DNA, 25 bp, Homo sapien
taaaaaggtgcctcaaggagtccag

SEQ ID NO: 607332 - DNA, 25 bp, Homo sapien
tattctggtggaggactaaccttca

SEQ ID NO: 607333 - DNA, 25 bp, Homo sapien
tccaatagccaagaaaagtcctagg

SEQ ID NO: 607334 - DNA, 25 bp, Homo sapien
tgaagcctcctagattagtctcctg

SEQ ID NO: 607335 - DNA, 25 bp, Homo sapien
aaaggtcttagccaatgagatccac

SEQ ID NO: 607336 - DNA, 25 bp, Homo sapien
ggttctccccataagcctatgcaat

SEQ ID NO: 607337 - DNA, 25 bp, Homo sapien
aaggggacatgaaaaggcataaagg

SEQ ID NO: 607338 - DNA, 25 bp, Homo sapien
tctggttctccccataagcctatgc

SEQ ID NO: 607339 - DNA, 25 bp, Homo sapien
ccataagcctatgcaatctatatta

SEQ ID NO: 607340 - DNA, 25 bp, Homo sapien
ttaaatgcatcgaaaagggtcaagt

SEQ ID NO: 607341 - DNA, 25 bp, Homo sapien
taactgttaacacggcatttggtac

SEQ ID NO: 607342 - DNA, 25 bp, Homo sapien
ggcaatgaccactttgctgtaaaca

SEQ ID NO: 607343 - DNA, 25 bp, Homo sapien
tagctagacttatgagccattactg

SEQ ID NO: 607344 - DNA, 25 bp, Homo sapien
tagtgacccctccagcttggttaaa

SEQ ID NO: 607345 - DNA, 25 bp, Homo sapien
gaatttaagtctgcgcctgttgtga

SEQ ID NO: 607346 - DNA, 25 bp, Homo sapien
gccgcaaagtcaaagcaagtcagta

SEQ ID NO: 607347 - DNA, 25 bp, Homo sapien
ggaggccgggagactattcgcattc

SEQ ID NO: 607348 - DNA, 25 bp, Homo sapien
taccaagcccagctgaaaactattt

SEQ ID NO: 607349 - DNA, 25 bp, Homo sapien
agcccagctgaaaactatttttcta

SEQ ID NO: 607350 - DNA, 25 bp, Homo sapien
tgagccattaccaagcccagctgaa

SEQ ID NO: 607351 - DNA, 25 bp, Homo sapien
attaccaagcccagctgaaaactat

SEQ ID NO: 607352 - DNA, 25 bp, Homo sapien
tgcaaaaatgcactgactgtatgat

SEQ ID NO: 607353 - DNA, 25 bp, Homo sapien
atgattaaggcacagtaagtctaac

SEQ ID NO: 607354 - DNA, 25 bp, Homo sapien
actgactgtatgattaaggcacagt

SEQ ID NO: 607355 - DNA, 25 bp, Homo sapien
gactgtatgattaaggcacagtaag

SEQ ID NO: 607356 - DNA, 25 bp, Homo sapien
aatcaattcctaagaagctactgtt

SEQ ID NO: 607357 - DNA, 25 bp, Homo sapien
aatcaagtgtaacaagccagtagtt

SEQ ID NO: 607358 - DNA, 25 bp, Homo sapien
gagcacttgtggtttggaaatcaag

SEQ ID NO: 607359 - DNA, 25 bp, Homo sapien
taaatgcacttcttagggacttctc

SEQ ID NO: 607360 - DNA, 25 bp, Homo sapien
cacccaatccgaaaaagtaacatca

SEQ ID NO: 607361 - DNA, 25 bp, Homo sapien
tgtcacccaatccgaaaaagtaaca

SEQ ID NO: 607362 - DNA, 25 bp, Homo sapien
tcacccaatccgaaaaagtaacatc

SEQ ID NO: 607363 - DNA, 25 bp, Homo sapien
ttttatactccagaagatcctcccc

SEQ ID NO: 607364 - DNA, 25 bp, Homo sapien
tggctaagaccctactcccagagtt

SEQ ID NO: 607365 - DNA, 25 bp, Homo sapien
taagaaagcacaagtaatgaactcc

SEQ ID NO: 607366 - DNA, 25 bp, Homo sapien
gatcacctggtagacactcattaaa

SEQ ID NO: 607367 - DNA, 25 bp, Homo sapien
gacagggcttgaaatgcgcaggcca

SEQ ID NO: 607368 - DNA, 25 bp, Homo sapien
aagaccatactttgtctggccataa

SEQ ID NO: 607369 - DNA, 25 bp, Homo sapien
taaagactttaagtgtgctgacaca

SEQ ID NO: 607370 - DNA, 25 bp, Homo sapien
caagggaccttctttgtctagacaa

SEQ ID NO: 607371 - DNA, 25 bp, Homo sapien
agggcaggcccattcctgtaggctt

SEQ ID NO: 607372 - DNA, 25 bp, Homo sapien
ggcccattcctgtaggcttgtcctc

SEQ ID NO: 607373 - DNA, 25 bp, Homo sapien
gcttccattaaggaacgcttaatgc

SEQ ID NO: 607374 - DNA, 25 bp, Homo sapien
attcctgtaggcttgtcctcctttg

SEQ ID NO: 607375 - DNA, 25 bp, Homo sapien
gaattcttaagacgctgcctagggc

SEQ ID NO: 607376 - DNA, 25 bp, Homo sapien
cagtggtcctcatagtggtcaaagc

SEQ ID NO: 607377 - DNA, 25 bp, Homo sapien
gcgtgcaagtgagaagataacccca

SEQ ID NO: 607378 - DNA, 25 bp, Homo sapien
gataaccccagatggcatacagcag

SEQ ID NO: 607379 - DNA, 25 bp, Homo sapien
aacaactgggtccaagcacaagctg

SEQ ID NO: 607380 - DNA, 25 bp, Homo sapien
gaacaactgggtccaagcacaagct

SEQ ID NO: 607381 - DNA, 25 bp, Homo sapien
tggaacaactgggtccaagcacaag

SEQ ID NO: 607382 - DNA, 25 bp, Homo sapien
ttctggaacaactgggtccaagcac

SEQ ID NO: 607383 - DNA, 25 bp, Homo sapien
tgagcatggccacattctagtgaac

SEQ ID NO: 607384 - DNA, 25 bp, Homo sapien
tgaagggccaggtactaaatacacc

SEQ ID NO: 607385 - DNA, 25 bp, Homo sapien
agagtcctggtgagcttcctgtgat

SEQ ID NO: 607386 - DNA, 25 bp, Homo sapien
tttgggagctagaggctacatacca

SEQ ID NO: 607387 - DNA, 25 bp, Homo sapien
ctgaccgcgccatcccaacagtagc

SEQ ID NO: 607388 - DNA, 25 bp, Homo sapien
tgaccgcgccatcccaacagtagca

SEQ ID NO: 607389 - DNA, 25 bp, Homo sapien
accgcgccatcccaacagtagcagc

SEQ ID NO: 607390 - DNA, 25 bp, Homo sapien
cgcgccatcccaacagtagcagctg

SEQ ID NO: 607391 - DNA, 25 bp, Homo sapien
gattacatcaccacactccacttgg

SEQ ID NO: 607392 - DNA, 25 bp, Homo sapien
agtgtattacatggcaacttcttca

SEQ ID NO: 607393 - DNA, 25 bp, Homo sapien
tcttggtgcacctgtaatactggct

SEQ ID NO: 607394 - DNA, 25 bp, Homo sapien
tgtgtgctgtgaaaggtgtgtcaaa

SEQ ID NO: 607395 - DNA, 25 bp, Homo sapien
gatctttgtgtttatctttgtgttt

SEQ ID NO: 607396 - DNA, 25 bp, Homo sapien
tcgatctttgtgtttatctttgtgt

SEQ ID NO: 607397 - DNA, 25 bp, Homo sapien
ctcgatctttgtgtttatctttgtg

SEQ ID NO: 607398 - DNA, 25 bp, Homo sapien
ctttgtgtttatctttgtgtttatg

SEQ ID NO: 607399 - DNA, 25 bp, Homo sapien
tgctatgcttggacttttcccggtc

SEQ ID NO: 607400 - DNA, 25 bp, Homo sapien
ctgttgctatgcttggacttttccc

SEQ ID NO: 607401 - DNA, 25 bp, Homo sapien
tgttgctatgcttggacttttcccg

SEQ ID NO: 607402 - DNA, 25 bp, Homo sapien
gttgctatgcttggacttttcccgg

SEQ ID NO: 607403 - DNA, 25 bp, Homo sapien
gaatagcactgccaatatggctgga

SEQ ID NO: 607404 - DNA, 25 bp, Homo sapien
gggctttggcaaaccactcacaagg

SEQ ID NO: 607405 - DNA, 25 bp, Homo sapien
ttcccaaagagctgtcatgtgcata

SEQ ID NO: 607406 - DNA, 25 bp, Homo sapien
taagcaccttggatcacgacacgta

SEQ ID NO: 607407 - DNA, 25 bp, Homo sapien
ctgtctactcctcaaggcagcagac

SEQ ID NO: 607408 - DNA, 25 bp, Homo sapien
aggtcacatgaagttggatcatggg

SEQ ID NO: 607409 - DNA, 25 bp, Homo sapien
tgtctactcctcaaggcagcagacc

SEQ ID NO: 607410 - DNA, 25 bp, Homo sapien
gcaggtcacatgaagttggatcatg

SEQ ID NO: 607411 - DNA, 25 bp, Homo sapien
tctttcctaggaatgtgcctgaagg

SEQ ID NO: 607412 - DNA, 25 bp, Homo sapien
acttgtcaggtgctgttaccgtccc

SEQ ID NO: 607413 - DNA, 25 bp, Homo sapien
cagaaacaggatttggccagcatat

SEQ ID NO: 607414 - DNA, 25 bp, Homo sapien
gactttcatggtagctaaagaactg

SEQ ID NO: 607415 - DNA, 25 bp, Homo sapien
tataaatggctaattcaggaatctg

SEQ ID NO: 607416 - DNA, 25 bp, Homo sapien
tgacccgttctctttctcagtgaaa

SEQ ID NO: 607417 - DNA, 25 bp, Homo sapien
cctgctagagtagtaaacccctttg

SEQ ID NO: 607418 - DNA, 25 bp, Homo sapien
aaaagtcaacgatatttcctctgcc

SEQ ID NO: 607419 - DNA, 25 bp, Homo sapien
cttaaacaaacagtaccgacagaag

SEQ ID NO: 607420 - DNA, 25 bp, Homo sapien
acagaaggttcaagtagagggtctt

SEQ ID NO: 607421 - DNA, 25 bp, Homo sapien
agagggtcttggctacatcggactt

SEQ ID NO: 607422 - DNA, 25 bp, Homo sapien
gctacatcggactttatcttgtttg

SEQ ID NO: 607423 - DNA, 25 bp, Homo sapien
ttgtctttatgcttttctgagcttc

SEQ ID NO: 607424 - DNA, 25 bp, Homo sapien
ttttctgagcttccatctttgtgtt

SEQ ID NO: 607425 - DNA, 25 bp, Homo sapien
ttccatctttgtgtttggtcttctc

SEQ ID NO: 607426 - DNA, 25 bp, Homo sapien
gtctttatgcttttctgagcttcca

SEQ ID NO: 607427 - DNA, 25 bp, Homo sapien
tctttatttttgcatccccagaggc

SEQ ID NO: 607428 - DNA, 25 bp, Homo sapien
tttatttttgcatccccagaggctc

SEQ ID NO: 607429 - DNA, 25 bp, Homo sapien
tatttttgcatccccagaggctcga

SEQ ID NO: 607430 - DNA, 25 bp, Homo sapien
tttttgcatccccagaggctcgaac

SEQ ID NO: 607431 - DNA, 25 bp, Homo sapien
tcatctcgaggtctctttaatggct

SEQ ID NO: 607432 - DNA, 25 bp, Homo sapien
catcctcatctcgaggtctctttaa

SEQ ID NO: 607433 - DNA, 25 bp, Homo sapien
cctcatctcgaggtctctttaatgg

SEQ ID NO: 607434 - DNA, 25 bp, Homo sapien
tcatcctcatctcgaggtctcttta

SEQ ID NO: 607435 - DNA, 25 bp, Homo sapien
tcttctccttcttggtatcttctgt

SEQ ID NO: 607436 - DNA, 25 bp, Homo sapien
tccttcttggtatcttctgttttaa

SEQ ID NO: 607437 - DNA, 25 bp, Homo sapien
tctccttcttggtatcttctgtttt

SEQ ID NO: 607438 - DNA, 25 bp, Homo sapien
cttctccttcttggtatcttctgtt

SEQ ID NO: 607439 - DNA, 25 bp, Homo sapien
aattgtaatcatagagtattagaac

SEQ ID NO: 607440 - DNA, 25 bp, Homo sapien
aagcacttaaataaagactgatcac

SEQ ID NO: 607441 - DNA, 25 bp, Homo sapien
gcacttaaataaagactgatcacac

SEQ ID NO: 607442 - DNA, 25 bp, Homo sapien
agaaaaattgtaatcatagagtatt

SEQ ID NO: 607443 - DNA, 25 bp, Homo sapien
tttttcttgttatctggctcaggaa

SEQ ID NO: 607444 - DNA, 25 bp, Homo sapien
ctggctcaggaacttttttatcttt

SEQ ID NO: 607445 - DNA, 25 bp, Homo sapien
gttatctggctcaggaactttttta

SEQ ID NO: 607446 - DNA, 25 bp, Homo sapien
ttttcttgttatctggctcaggaac

SEQ ID NO: 607447 - DNA, 25 bp, Homo sapien
tgctaaattcccacctatacatagg

SEQ ID NO: 607448 - DNA, 25 bp, Homo sapien
gtgtccacctgccataaattgaact

SEQ ID NO: 607449 - DNA, 25 bp, Homo sapien
tactcttgcttcgtaaggatatgca

SEQ ID NO: 607450 - DNA, 25 bp, Homo sapien
ggtggcattttaacccagtgctgag

SEQ ID NO: 607451 - DNA, 25 bp, Homo sapien
ttcccatttaatcccatgatgccat

SEQ ID NO: 607452 - DNA, 25 bp, Homo sapien
ccatagcaacatgcgaatcacatag

SEQ ID NO: 607453 - DNA, 25 bp, Homo sapien
gactctgacctctagaaagaggcag

SEQ ID NO: 607454 - DNA, 25 bp, Homo sapien
aatcacatagctgtcaccgtgtggc

SEQ ID NO: 607455 - DNA, 25 bp, Homo sapien
agttttttcaacaatagtgttggca

SEQ ID NO: 607456 - DNA, 25 bp, Homo sapien
tcagccatggaacaagtccaatatt

SEQ ID NO: 607457 - DNA, 25 bp, Homo sapien
gtatcaaaccatattgtaacaatgg

SEQ ID NO: 607458 - DNA, 25 bp, Homo sapien
ggatatgacacgtaaaacacaggta

SEQ ID NO: 607459 - DNA, 25 bp, Homo sapien
gagatcaacaatgaaggagctcagt

SEQ ID NO: 607460 - DNA, 25 bp, Homo sapien
ttcaaggcctggatcaaaagaacca

SEQ ID NO: 607461 - DNA, 25 bp, Homo sapien
ggagctcagtaacaagtgagggact

SEQ ID NO: 607462 - DNA, 25 bp, Homo sapien
aaagccaacgctcacaagtaagatg

SEQ ID NO: 607463 - DNA, 25 bp, Homo sapien
gaatttccacttgatgccttcagga

SEQ ID NO: 607464 - DNA, 25 bp, Homo sapien
aagaggctcatatggtggggcaaat

SEQ ID NO: 607465 - DNA, 25 bp, Homo sapien
gccttcaggatagcgctcttcttcc

SEQ ID NO: 607466 - DNA, 25 bp, Homo sapien
tatggtggggcaaatactggacctt

SEQ ID NO: 607467 - DNA, 25 bp, Homo sapien
gagtttgcgacacactgctctggaa

SEQ ID NO: 607468 - DNA, 25 bp, Homo sapien
ggtaccatgatgctgcctctttcag

SEQ ID NO: 607469 - DNA, 25 bp, Homo sapien
aacaagacttggatgcacactagag

SEQ ID NO: 607470 - DNA, 25 bp, Homo sapien
tatatatccatactaggcaagccca

SEQ ID NO: 607471 - DNA, 25 bp, Homo sapien
aacgtagctacttcctctgctttgg

SEQ ID NO: 607472 - DNA, 25 bp, Homo sapien
tttccttggtagtatattcatggtc

SEQ ID NO: 607473 - DNA, 25 bp, Homo sapien
gcatttttgcaaagaacgtagctac

SEQ ID NO: 607474 - DNA, 25 bp, Homo sapien
tattcatggtcgagcatttttgcaa

SEQ ID NO: 607475 - DNA, 25 bp, Homo sapien
gatattaacacatgggctacagtac

SEQ ID NO: 607476 - DNA, 25 bp, Homo sapien
gattgttttgcaaggtactaggata

SEQ ID NO: 607477 - DNA, 25 bp, Homo sapien
ttttgcaaggtactaggatattaac

SEQ ID NO: 607478 - DNA, 25 bp, Homo sapien
ttacttagtacttgattgttttgca

SEQ ID NO: 607479 - DNA, 25 bp, Homo sapien
tgtttccgagcttccgtctgggctt

SEQ ID NO: 607480 - DNA, 25 bp, Homo sapien
ccgagcttccgtctgggctttgaaa

SEQ ID NO: 607481 - DNA, 25 bp, Homo sapien
tgctcatctgtttccgagcttccgt

SEQ ID NO: 607482 - DNA, 25 bp, Homo sapien
catctgtttccgagcttccgtctgg

SEQ ID NO: 607483 - DNA, 25 bp, Homo sapien
ggctctatcttgaagttagcaatcc

SEQ ID NO: 607484 - DNA, 25 bp, Homo sapien
ttgccgcggccacggaaaagtccag

SEQ ID NO: 607485 - DNA, 25 bp, Homo sapien
ctcgggcatgattcgtctcttcagc

SEQ ID NO: 607486 - DNA, 25 bp, Homo sapien
gttgatgattatatcctcgggcatg

SEQ ID NO: 607487 - DNA, 25 bp, Homo sapien
tggaaccttggatgttctctgtcca

SEQ ID NO: 607488 - DNA, 25 bp, Homo sapien
catgccggacttctttccacttatg

SEQ ID NO: 607489 - DNA, 25 bp, Homo sapien
caagtaaccttgttatcatgccgga

SEQ ID NO: 607490 - DNA, 25 bp, Homo sapien
cttgattcgtgaactagggttaagc

SEQ ID NO: 607491 - DNA, 25 bp, Homo sapien
caggttccagaaggctagctgtcat

SEQ ID NO: 607492 - DNA, 25 bp, Homo sapien
cagtgactgcaagtaggccaatcca

SEQ ID NO: 607493 - DNA, 25 bp, Homo sapien
gacaaccttttcagtacctagagca

SEQ ID NO: 607494 - DNA, 25 bp, Homo sapien
taacaggactaaacgcaatacgatg

SEQ ID NO: 607495 - DNA, 25 bp, Homo sapien
taagcacatacatttttggaacccc

SEQ ID NO: 607496 - DNA, 25 bp, Homo sapien
gtaagcacatacatttttggaaccc

SEQ ID NO: 607497 - DNA, 25 bp, Homo sapien
agattactttgggacagtgtagtaa

SEQ ID NO: 607498 - DNA, 25 bp, Homo sapien
gattactttgggacagtgtagtaaa

SEQ ID NO: 607499 - DNA, 25 bp, Homo sapien
actttgggacagtgtagtaaagaca

SEQ ID NO: 607500 - DNA, 25 bp, Homo sapien
ttactttgggacagtgtagtaaaga

SEQ ID NO: 607501 - DNA, 25 bp, Homo sapien
tcgatactggttccggatcttgtcc

SEQ ID NO: 607502 - DNA, 25 bp, Homo sapien
cagtctcgtatttctgccagtcctt

SEQ ID NO: 607503 - DNA, 25 bp, Homo sapien
ttttcagccgccgagcagtctcgta

SEQ ID NO: 607504 - DNA, 25 bp, Homo sapien
tgtcgatgaagtacagggctacagc

SEQ ID NO: 607505 - DNA, 25 bp, Homo sapien
tcaaactcaaaaagctagtgtgaat

SEQ ID NO: 607506 - DNA, 25 bp, Homo sapien
tgctactctgggcaatcaaactcaa

SEQ ID NO: 607507 - DNA, 25 bp, Homo sapien
gcccagccttttgacccttatgcaa

SEQ ID NO: 607508 - DNA, 25 bp, Homo sapien
cccactcactatgaaatctataggg

SEQ ID NO: 607509 - DNA, 25 bp, Homo sapien
tcctgaccatccaactctgggtgta

SEQ ID NO: 607510 - DNA, 25 bp, Homo sapien
tatctgatggagtccttcccgagga

SEQ ID NO: 607511 - DNA, 25 bp, Homo sapien
ttcccgaggaagtcaaactctacca

SEQ ID NO: 607512 - DNA, 25 bp, Homo sapien
gatgtgctccacacgaagtgagcag

SEQ ID NO: 607513 - DNA, 25 bp, Homo sapien
tccataaatagttgtaggttcttaa

SEQ ID NO: 607514 - DNA, 25 bp, Homo sapien
gagtctatcaaaaagatcatcctcg

SEQ ID NO: 607515 - DNA, 25 bp, Homo sapien
tgcttgttctccataaatagttgta

SEQ ID NO: 607516 - DNA, 25 bp, Homo sapien
aaagatcatcctcgggctgcttgtt

SEQ ID NO: 607517 - DNA, 25 bp, Homo sapien
gatatcagggacaggttttgggtct

SEQ ID NO: 607518 - DNA, 25 bp, Homo sapien
ccttccctattaagatatcagggac

SEQ ID NO: 607519 - DNA, 25 bp, Homo sapien
agatatcagggacaggttttgggtc

SEQ ID NO: 607520 - DNA, 25 bp, Homo sapien
cttccctattaagatatcagggaca

SEQ ID NO: 607521 - DNA, 25 bp, Homo sapien
gctgctgtagcgtgatggaggcatt

SEQ ID NO: 607522 - DNA, 25 bp, Homo sapien
ctgtagcgtgatggaggcattgtat

SEQ ID NO: 607523 - DNA, 25 bp, Homo sapien
gctgctgctgtagcgtgatggaggc

SEQ ID NO: 607524 - DNA, 25 bp, Homo sapien
tagcgtgatggaggcattgtatgta

SEQ ID NO: 607525 - DNA, 25 bp, Homo sapien
ggtggtgccctctgatggttacaaa

SEQ ID NO: 607526 - DNA, 25 bp, Homo sapien
ttggcacggttataagaaaggatct

SEQ ID NO: 607527 - DNA, 25 bp, Homo sapien
cttagtttgcaagttcatcatagac

SEQ ID NO: 607528 - DNA, 25 bp, Homo sapien
caaagaattgcaacagctcgattgg

SEQ ID NO: 607529 - DNA, 25 bp, Homo sapien
gaacactctgctgtcatacatctgg

SEQ ID NO: 607530 - DNA, 25 bp, Homo sapien
tttaaaaggagagcggtcaccaggc

SEQ ID NO: 607531 - DNA, 25 bp, Homo sapien
ccagtactctgggaaggcggtgcca

SEQ ID NO: 607532 - DNA, 25 bp, Homo sapien
gatacttgcatctactgggcaaccc

SEQ ID NO: 607533 - DNA, 25 bp, Homo sapien
gaccttggcatcagccttagcactt

SEQ ID NO: 607534 - DNA, 25 bp, Homo sapien
cccaactttcacaataccaggtaca

SEQ ID NO: 607535 - DNA, 25 bp, Homo sapien
ttttctctaccagccccaactttca

SEQ ID NO: 607536 - DNA, 25 bp, Homo sapien
caactttcacaataccaggtacata

SEQ ID NO: 607537 - DNA, 25 bp, Homo sapien
agccccaactttcacaataccaggt

SEQ ID NO: 607538 - DNA, 25 bp, Homo sapien
aggggccctgacagatgctgcacac

SEQ ID NO: 607539 - DNA, 25 bp, Homo sapien
caggggccctgacagatgctgcaca

SEQ ID NO: 607540 - DNA, 25 bp, Homo sapien
caagccactgtgatcctagggtcca

SEQ ID NO: 607541 - DNA, 25 bp, Homo sapien
agccactgtgatcctagggtccaga

SEQ ID NO: 607542 - DNA, 25 bp, Homo sapien
aagccactgtgatcctagggtccag

SEQ ID NO: 607543 - DNA, 25 bp, Homo sapien
aaatcttctcaattgggacacccca

SEQ ID NO: 607544 - DNA, 25 bp, Homo sapien
ttctcaattgggacaccccacttct

SEQ ID NO: 607545 - DNA, 25 bp, Homo sapien
tcaattgggacaccccacttcttgc

SEQ ID NO: 607546 - DNA, 25 bp, Homo sapien
tgtaaatcttctcaattgggacacc

SEQ ID NO: 607547 - DNA, 25 bp, Homo sapien
acagaactctgcctcttgagactgg

SEQ ID NO: 607548 - DNA, 25 bp, Homo sapien
cacgagggcaagtgaggctcagttt

SEQ ID NO: 607549 - DNA, 25 bp, Homo sapien
tgttcctcttcacagaactctgcct

SEQ ID NO: 607550 - DNA, 25 bp, Homo sapien
ggtttgttaagacttgctgcctctc

SEQ ID NO: 607551 - DNA, 25 bp, Homo sapien
tgacgactctaacaggtgcgctggg

SEQ ID NO: 607552 - DNA, 25 bp, Homo sapien
ctaacaggtgcgctgggttttttgt

SEQ ID NO: 607553 - DNA, 25 bp, Homo sapien
aatagagagtgacgactctaacagg

SEQ ID NO: 607554 - DNA, 25 bp, Homo sapien
gagagtgacgactctaacaggtgcg

SEQ ID NO: 607555 - DNA, 25 bp, Homo sapien
tgggatgcccttcttagttgtgttg

SEQ ID NO: 607556 - DNA, 25 bp, Homo sapien
tgcccttcttagttgtgttgagcag

SEQ ID NO: 607557 - DNA, 25 bp, Homo sapien
cccttcttagttgtgttgagcagca

SEQ ID NO: 607558 - DNA, 25 bp, Homo sapien
gatgcccttcttagttgtgttgagc

SEQ ID NO: 607559 - DNA, 25 bp, Homo sapien
ttgcaacacgcttcacggatgcatc

SEQ ID NO: 607560 - DNA, 25 bp, Homo sapien
gcaacacgcttcacggatgcatcct

SEQ ID NO: 607561 - DNA, 25 bp, Homo sapien
tctctcctccttgcaacacgcttca

SEQ ID NO: 607562 - DNA, 25 bp, Homo sapien
ctccttgcaacacgcttcacggatg

SEQ ID NO: 607563 - DNA, 25 bp, Homo sapien
ttggtgtatctctgctgattggccc

SEQ ID NO: 607564 - DNA, 25 bp, Homo sapien
tggcccccatagtgggacccagatg

SEQ ID NO: 607565 - DNA, 25 bp, Homo sapien
tgattggcccccatagtgggaccca

SEQ ID NO: 607566 - DNA, 25 bp, Homo sapien
gctgtctccattgaccttggtgtat

SEQ ID NO: 607567 - DNA, 25 bp, Homo sapien
ctcccctacgttccaggccccagca

SEQ ID NO: 607568 - DNA, 25 bp, Homo sapien
tccaggccccagcatcccactgcat

SEQ ID NO: 607569 - DNA, 25 bp, Homo sapien
acgttccaggccccagcatcccact

SEQ ID NO: 607570 - DNA, 25 bp, Homo sapien
gttccaggccccagcatcccactgc

SEQ ID NO: 607571 - DNA, 25 bp, Homo sapien
tgcactcagtgctaggccagatccc

SEQ ID NO: 607572 - DNA, 25 bp, Homo sapien
ggcaccggtgactccaaacctgcat

SEQ ID NO: 607573 - DNA, 25 bp, Homo sapien
agatcccaaggcgacctgacctttc

SEQ ID NO: 607574 - DNA, 25 bp, Homo sapien
tagccgctgcctctcgatctcagaa

SEQ ID NO: 607575 - DNA, 25 bp, Homo sapien
gcatgggcctctgcacgctccgtcc

SEQ ID NO: 607576 - DNA, 25 bp, Homo sapien
ttgtgtctgtccctcgcatgggcct

SEQ ID NO: 607577 - DNA, 25 bp, Homo sapien
gcgctgtccagtggtctgacctgca

SEQ ID NO: 607578 - DNA, 25 bp, Homo sapien
cgacaggactcgagtccgattcggg

SEQ ID NO: 607579 - DNA, 25 bp, Homo sapien
gagttccccccaagcgtgagcaccc

SEQ ID NO: 607580 - DNA, 25 bp, Homo sapien
ctggcgacggccagacccacgtctg

SEQ ID NO: 607581 - DNA, 25 bp, Homo sapien
agacccacgtctgtctgttccgccc

SEQ ID NO: 607582 - DNA, 25 bp, Homo sapien
ccacgtctgtctgttccgcccctgc

SEQ ID NO: 607583 - DNA, 25 bp, Homo sapien
acggccagacccacgtctgtctgtt

SEQ ID NO: 607584 - DNA, 25 bp, Homo sapien
tgatggacagccgacatgtcccgcc

SEQ ID NO: 607585 - DNA, 25 bp, Homo sapien
atggcgcgtcctccgggaatgcccg

SEQ ID NO: 607586 - DNA, 25 bp, Homo sapien
gcgggcttcccggacaagggagcca

SEQ ID NO: 607587 - DNA, 25 bp, Homo sapien
caaactcagttacctgggcgggctt

SEQ ID NO: 607588 - DNA, 25 bp, Homo sapien
gcccgggagcaagcgcaacggcggc

SEQ ID NO: 607589 - DNA, 25 bp, Homo sapien
gaccgcccgggagcaagcgcaacgg

SEQ ID NO: 607590 - DNA, 25 bp, Homo sapien
ggcggcagacgagcgggacccggcg

SEQ ID NO: 607591 - DNA, 25 bp, Homo sapien
aggcggcagacgagcgggacccggc

SEQ ID NO: 607592 - DNA, 25 bp, Homo sapien
agaggtgcagcacctcggcgtccga

SEQ ID NO: 607593 - DNA, 25 bp, Homo sapien
gatctggcgcgtctccagcttgacc

SEQ ID NO: 607594 - DNA, 25 bp, Homo sapien
gaacaaagtcatgacggtgcccacc

SEQ ID NO: 607595 - DNA, 25 bp, Homo sapien
tgacctggaaggtcttccgctcggg

SEQ ID NO: 607596 - DNA, 25 bp, Homo sapien
cggggcgggcccaggcaggaagtgg

SEQ ID NO: 607597 - DNA, 25 bp, Homo sapien
gggcccaggcaggaagtgggcgcac

SEQ ID NO: 607598 - DNA, 25 bp, Homo sapien
gcgggcccaggcaggaagtgggcgc

SEQ ID NO: 607599 - DNA, 25 bp, Homo sapien
cgcggggcgggcccaggcaggaagt

SEQ ID NO: 607600 - DNA, 25 bp, Homo sapien
tcaggtgaccgaggacccggatgcc

SEQ ID NO: 607601 - DNA, 25 bp, Homo sapien
gggtgtcctgtcaggtgaccgagga

SEQ ID NO: 607602 - DNA, 25 bp, Homo sapien
tcctgtcaggtgaccgaggacccgg

SEQ ID NO: 607603 - DNA, 25 bp, Homo sapien
cagtgaccacccgagacgaagcggg

SEQ ID NO: 607604 - DNA, 25 bp, Homo sapien
tccagcccgcgaggatttttaggcc

SEQ ID NO: 607605 - DNA, 25 bp, Homo sapien
tttgcaaataagagcccagcctggg

SEQ ID NO: 607606 - DNA, 25 bp, Homo sapien
agggcaaagcgcctggaacactccc

SEQ ID NO: 607607 - DNA, 25 bp, Homo sapien
tttttaggcctcagggcaaagcgcc

SEQ ID NO: 607608 - DNA, 25 bp, Homo sapien
ggcaggcctttatggggcccatctc

SEQ ID NO: 607609 - DNA, 25 bp, Homo sapien
tacccaacatctgcctaagttctac

SEQ ID NO: 607610 - DNA, 25 bp, Homo sapien
acccagctttgggacaaaagtagca

SEQ ID NO: 607611 - DNA, 25 bp, Homo sapien
gcattgagtgtctgcccacccacat

SEQ ID NO: 607612 - DNA, 25 bp, Homo sapien
gacagaggacaaagggctagactca

SEQ ID NO: 607613 - DNA, 25 bp, Homo sapien
aggacaaagggctagactcacaaac

SEQ ID NO: 607614 - DNA, 25 bp, Homo sapien
ctgaagccaccggacagaggacaaa

SEQ ID NO: 607615 - DNA, 25 bp, Homo sapien
gaaactaagagaagccgctcccgct

SEQ ID NO: 607616 - DNA, 25 bp, Homo sapien
cactagagaccagcgcaaaagcagc

SEQ ID NO: 607617 - DNA, 25 bp, Homo sapien
cccactagagaccagcgcaaaagca

SEQ ID NO: 607618 - DNA, 25 bp, Homo sapien
actagagaccagcgcaaaagcagcc

SEQ ID NO: 607619 - DNA, 25 bp, Homo sapien
ccactagagaccagcgcaaaagcag

SEQ ID NO: 607620 - DNA, 25 bp, Homo sapien
ggaacacaaaccacgctagagatct

SEQ ID NO: 607621 - DNA, 25 bp, Homo sapien
tagagatctactgccaccatgaaca

SEQ ID NO: 607622 - DNA, 25 bp, Homo sapien
tgccagagtctaaagccagggaagc

SEQ ID NO: 607623 - DNA, 25 bp, Homo sapien
ccagggaagcacaagtcgtctctca

SEQ ID NO: 607624 - DNA, 25 bp, Homo sapien
catggtccagatcacaagcttctca

SEQ ID NO: 607625 - DNA, 25 bp, Homo sapien
tctcaggatcaaggactgggtcacc

SEQ ID NO: 607626 - DNA, 25 bp, Homo sapien
gaaagctaggacttaagcctgggca

SEQ ID NO: 607627 - DNA, 25 bp, Homo sapien
tcttgggaccatagcctctcttaag

SEQ ID NO: 607628 - DNA, 25 bp, Homo sapien
ggacagctgcttgcccaaactttac

SEQ ID NO: 607629 - DNA, 25 bp, Homo sapien
gaaccaggccatcctcttgtgatca

SEQ ID NO: 607630 - DNA, 25 bp, Homo sapien
ggtgtagaccagttctcaggccaga

SEQ ID NO: 607631 - DNA, 25 bp, Homo sapien
tcccctactgagagagatggctacc

SEQ ID NO: 607632 - DNA, 25 bp, Homo sapien
agtcaacaccgaaaggagggcagcc

SEQ ID NO: 607633 - DNA, 25 bp, Homo sapien
tctcccagagtcaacaccgaaagga

SEQ ID NO: 607634 - DNA, 25 bp, Homo sapien
ccagagtcaacaccgaaaggagggc

SEQ ID NO: 607635 - DNA, 25 bp, Homo sapien
gggtctcccagagtcaacaccgaaa

SEQ ID NO: 607636 - DNA, 25 bp, Homo sapien
gaaagctgggtcctcttgatagcga

SEQ ID NO: 607637 - DNA, 25 bp, Homo sapien
gcaggctcagcgttttcaggcgaaa

SEQ ID NO: 607638 - DNA, 25 bp, Homo sapien
aaagcaatgtgactggtccggccgg

SEQ ID NO: 607639 - DNA, 25 bp, Homo sapien
tgatagcgatcaaagtcccgtgagg

SEQ ID NO: 607640 - DNA, 25 bp, Homo sapien
gtgtgggtgcctgcaatgtatcctc

SEQ ID NO: 607641 - DNA, 25 bp, Homo sapien
ttaagcccttgatccacatgttcac

SEQ ID NO: 607642 - DNA, 25 bp, Homo sapien
ctccatcagccaagttaagcccttg

SEQ ID NO: 607643 - DNA, 25 bp, Homo sapien
ggtgtgggtgcctgcaatgtatcct

SEQ ID NO: 607644 - DNA, 25 bp, Homo sapien
tgagtaaaactgcttccggagccac

SEQ ID NO: 607645 - DNA, 25 bp, Homo sapien
cactgagtaaaactgcttccggagc

SEQ ID NO: 607646 - DNA, 25 bp, Homo sapien
gatcctcacgattccgatccactga

SEQ ID NO: 607647 - DNA, 25 bp, Homo sapien
cacgattccgatccactgagtaaaa

SEQ ID NO: 607648 - DNA, 25 bp, Homo sapien
ctctgacctgtgggtcgagcccacc

SEQ ID NO: 607649 - DNA, 25 bp, Homo sapien
ctgacctgtgggtcgagcccacctg

SEQ ID NO: 607650 - DNA, 25 bp, Homo sapien
tctgacctgtgggtcgagcccacct

SEQ ID NO: 607651 - DNA, 25 bp, Homo sapien
ccgctctcggaggaagcgcatgttg

SEQ ID NO: 607652 - DNA, 25 bp, Homo sapien
cccggtagttgacctgggacagcat

SEQ ID NO: 607653 - DNA, 25 bp, Homo sapien
cagccgctctcggaggaagcgcatg

SEQ ID NO: 607654 - DNA, 25 bp, Homo sapien
gacccggtagttgacctgggacagc

SEQ ID NO: 607655 - DNA, 25 bp, Homo sapien
gcgctgtacatgaggctgcggtaca

SEQ ID NO: 607656 - DNA, 25 bp, Homo sapien
gtcttctgggcgctgtacatgaggc

SEQ ID NO: 607657 - DNA, 25 bp, Homo sapien
ctgcccgtaggtgatgtccccgctg

SEQ ID NO: 607658 - DNA, 25 bp, Homo sapien
cgtaggtgatgtccccgctgcgctg

SEQ ID NO: 607659 - DNA, 25 bp, Homo sapien
aaacagaacctggtcagggcaagac

SEQ ID NO: 607660 - DNA, 25 bp, Homo sapien
caggaaacagaacctggtcagggca

SEQ ID NO: 607661 - DNA, 25 bp, Homo sapien
ggaaacagaacctggtcagggcaag

SEQ ID NO: 607662 - DNA, 25 bp, Homo sapien
gcaggaaacagaacctggtcagggc

SEQ ID NO: 607663 - DNA, 25 bp, Homo sapien
ctggcttccaagaaggggaggtcca

SEQ ID NO: 607664 - DNA, 25 bp, Homo sapien
tggcttccaagaaggggaggtccat

SEQ ID NO: 607665 - DNA, 25 bp, Homo sapien
acagacaacaaggtgccccacggaa

SEQ ID NO: 607666 - DNA, 25 bp, Homo sapien
caagaatcgcccagtggagagatga

SEQ ID NO: 607667 - DNA, 25 bp, Homo sapien
gaatggtccagcatggttccctact

SEQ ID NO: 607668 - DNA, 25 bp, Homo sapien
gctagctagtatggtcaacagacaa

SEQ ID NO: 607669 - DNA, 25 bp, Homo sapien
ggaactcaggaagggacactcggca

SEQ ID NO: 607670 - DNA, 25 bp, Homo sapien
cccctggtagtcaagaaggaactgc

SEQ ID NO: 607671 - DNA, 25 bp, Homo sapien
tcaagaaggaactgctggaactcag

SEQ ID NO: 607672 - DNA, 25 bp, Homo sapien
gacactcggcaaagctccggccgct

SEQ ID NO: 607673 - DNA, 25 bp, Homo sapien
tcctcgatctctcgtaaggggtctc

SEQ ID NO: 607674 - DNA, 25 bp, Homo sapien
gggtctcggaggaagctgagcatga

SEQ ID NO: 607675 - DNA, 25 bp, Homo sapien
tggaggcgatcaacagcccacagct

SEQ ID NO: 607676 - DNA, 25 bp, Homo sapien
gcacctggaggcgatcaacagccca

SEQ ID NO: 607677 - DNA, 25 bp, Homo sapien
atactgcatccagctgcgagttcca

SEQ ID NO: 607678 - DNA, 25 bp, Homo sapien
cgaggaggagatccagtagtgggaa

SEQ ID NO: 607679 - DNA, 25 bp, Homo sapien
gagggttgttcatggtgtccgggca

SEQ ID NO: 607680 - DNA, 25 bp, Homo sapien
gctgcgagttccacacactgttctc

SEQ ID NO: 607681 - DNA, 25 bp, Homo sapien
tggagaactggtccccggtcaggta

SEQ ID NO: 607682 - DNA, 25 bp, Homo sapien
gcaggcagcgagcataggcttccaa

SEQ ID NO: 607683 - DNA, 25 bp, Homo sapien
agcgagcataggcttccaaggagga

SEQ ID NO: 607684 - DNA, 25 bp, Homo sapien
gcataggcttccaaggaggactcac

SEQ ID NO: 607685 - DNA, 25 bp, Homo sapien
ccatccgcaggcagcgagcataggc

SEQ ID NO: 607686 - DNA, 25 bp, Homo sapien
tggtggtaagggtgtgcccatggta

SEQ ID NO: 607687 - DNA, 25 bp, Homo sapien
ctggcatcccatccgggccgtccca

SEQ ID NO: 607688 - DNA, 25 bp, Homo sapien
gctccttgatggtgtgcaggacatc

SEQ ID NO: 607689 - DNA, 25 bp, Homo sapien
ggtgtgcccatggtaaataactggc

SEQ ID NO: 607690 - DNA, 25 bp, Homo sapien
cagtggtcctcaatggacaggatga

SEQ ID NO: 607691 - DNA, 25 bp, Homo sapien
ttggtgaggagtgtgtcccccagca

SEQ ID NO: 607692 - DNA, 25 bp, Homo sapien
ggccatgtttctctgctgggcaatg

SEQ ID NO: 607693 - DNA, 25 bp, Homo sapien
cagagatctccacgggcttggtgag

SEQ ID NO: 607694 - DNA, 25 bp, Homo sapien
caggtttaggcccaacagctgaagc

SEQ ID NO: 607695 - DNA, 25 bp, Homo sapien
tcctcacccaggtttaggcccaaca

SEQ ID NO: 607696 - DNA, 25 bp, Homo sapien
aagtgtggggcttccgcaataagcc

SEQ ID NO: 607697 - DNA, 25 bp, Homo sapien
ttaggcccaacagctgaagccatgg

SEQ ID NO: 607698 - DNA, 25 bp, Homo sapien
tcgttctcagagtacatcatggatg

SEQ ID NO: 607699 - DNA, 25 bp, Homo sapien
gatagagttgctgatgtcgttctca

SEQ ID NO: 607700 - DNA, 25 bp, Homo sapien
gatgccattcttgatagagttgctg

SEQ ID NO: 607701 - DNA, 25 bp, Homo sapien
catggatgtaggcacctcctcgtag

SEQ ID NO: 607702 - DNA, 25 bp, Homo sapien
tcctcagagtagtagatcttgctgc

SEQ ID NO: 607703 - DNA, 25 bp, Homo sapien
gctggtctcctcagagtagtagatc

SEQ ID NO: 607704 - DNA, 25 bp, Homo sapien
ctcatcctcgttgccctggtcactg

SEQ ID NO: 607705 - DNA, 25 bp, Homo sapien
gctgctggtcagaacaaagtagtgg

SEQ ID NO: 607706 - DNA, 25 bp, Homo sapien
cagaaagagagcgtgtagtcgccca

SEQ ID NO: 607707 - DNA, 25 bp, Homo sapien
gcagtactcagtaagcaggcgctca

SEQ ID NO: 607708 - DNA, 25 bp, Homo sapien
tctcattggagtgcagctctgtgct

SEQ ID NO: 607709 - DNA, 25 bp, Homo sapien
ggctccggtctcgatgcagtactca

SEQ ID NO: 607710 - DNA, 25 bp, Homo sapien
gactgaacatacgcatctgcatggg

SEQ ID NO: 607711 - DNA, 25 bp, Homo sapien
aacatacgcatctgcatgggaagtg

SEQ ID NO: 607712 - DNA, 25 bp, Homo sapien
actgaacatacgcatctgcatggga

SEQ ID NO: 607713 - DNA, 25 bp, Homo sapien
tgaacatacgcatctgcatgggaag

SEQ ID NO: 607714 - DNA, 25 bp, Homo sapien
tggaactcaaggagggagcctcaag

SEQ ID NO: 607715 - DNA, 25 bp, Homo sapien
ccaaatgagggtggaactcaaggag

SEQ ID NO: 607716 - DNA, 25 bp, Homo sapien
caagttccaccccaaatgagggtgg

SEQ ID NO: 607717 - DNA, 25 bp, Homo sapien
gtggaactcaaggagggagcctcaa

SEQ ID NO: 607718 - DNA, 25 bp, Homo sapien
atctcaaactcattacagcgcaggg

SEQ ID NO: 607719 - DNA, 25 bp, Homo sapien
catcttgccgggagtggatacggca

SEQ ID NO: 607720 - DNA, 25 bp, Homo sapien
caggctctgaaagtcgcatctcaaa

SEQ ID NO: 607721 - DNA, 25 bp, Homo sapien
ggcagtgctggactttcccgttccg

SEQ ID NO: 607722 - DNA, 25 bp, Homo sapien
tgtgctcagcctgtgctctggtcag

SEQ ID NO: 607723 - DNA, 25 bp, Homo sapien
gttcattccgcttccgcaccaggaa

SEQ ID NO: 607724 - DNA, 25 bp, Homo sapien
tctggtcaggctcgcgtggtaccac

SEQ ID NO: 607725 - DNA, 25 bp, Homo sapien
cgagggacgcgcattagcatgtgct

SEQ ID NO: 607726 - DNA, 25 bp, Homo sapien
tcgttgatgggatagcgcagcttca

SEQ ID NO: 607727 - DNA, 25 bp, Homo sapien
tatagcgggtgtttctcatagtagc

SEQ ID NO: 607728 - DNA, 25 bp, Homo sapien
cagcttcatcttgcggtatagcggg

SEQ ID NO: 607729 - DNA, 25 bp, Homo sapien
tcaacaaggctgtcgaactccgagt

SEQ ID NO: 607730 - DNA, 25 bp, Homo sapien
tcttacatgtaaggcccagcccagg

SEQ ID NO: 607731 - DNA, 25 bp, Homo sapien
cagggatccttcgacctcagtagag

SEQ ID NO: 607732 - DNA, 25 bp, Homo sapien
caaacttgcacctgatccacaggga

SEQ ID NO: 607733 - DNA, 25 bp, Homo sapien
gggatatgttaatgccccagagccc

SEQ ID NO: 607734 - DNA, 25 bp, Homo sapien
gaagccagggttgcgtccctcatac

SEQ ID NO: 607735 - DNA, 25 bp, Homo sapien
atagggtttgcctctacatagaagc

SEQ ID NO: 607736 - DNA, 25 bp, Homo sapien
cctctacatagaagccagggttgcg

SEQ ID NO: 607737 - DNA, 25 bp, Homo sapien
agggttgcgtccctcatacagggcc

SEQ ID NO: 607738 - DNA, 25 bp, Homo sapien
cacacatctctcacaacctcttggg

SEQ ID NO: 607739 - DNA, 25 bp, Homo sapien
gctagggagtgggtcggccctggga

SEQ ID NO: 607740 - DNA, 25 bp, Homo sapien
ccacaggagcagtttaaagggtcac

SEQ ID NO: 607741 - DNA, 25 bp, Homo sapien
gccctgggagacctgcggtcgctca

SEQ ID NO: 607742 - DNA, 25 bp, Homo sapien
gatgatggcgctcttgatgaaggtc

SEQ ID NO: 607743 - DNA, 25 bp, Homo sapien
tgaaggtcagctcgtcctccctctg

SEQ ID NO: 607744 - DNA, 25 bp, Homo sapien
cacattctggatgatggcgctcttg

SEQ ID NO: 607745 - DNA, 25 bp, Homo sapien
aaggtcagctcgtcctccctctggg

SEQ ID NO: 607746 - DNA, 25 bp, Homo sapien
catctcttccacgtagtttgatggg

SEQ ID NO: 607747 - DNA, 25 bp, Homo sapien
tcttccacgtagtttgatgggaacc

SEQ ID NO: 607748 - DNA, 25 bp, Homo sapien
tcttccctccgtagtcccctcgcca

SEQ ID NO: 607749 - DNA, 25 bp, Homo sapien
ccagggccacggggttgaccatctc

SEQ ID NO: 607750 - DNA, 25 bp, Homo sapien
tcccctagggggctgttctcgtcca

SEQ ID NO: 607751 - DNA, 25 bp, Homo sapien
ctagggggctgttctcgtccaagtg

SEQ ID NO: 607752 - DNA, 25 bp, Homo sapien
agaccccccgcagcaagtcccctag

SEQ ID NO: 607753 - DNA, 25 bp, Homo sapien
tctgacaagccggcacatccaagac

SEQ ID NO: 607754 - DNA, 25 bp, Homo sapien
atggagaagacgaagagccggttgt

SEQ ID NO: 607755 - DNA, 25 bp, Homo sapien
gagaagacgaagagccggttgttct

SEQ ID NO: 607756 - DNA, 25 bp, Homo sapien
ttgttcttgccctcaggacggatgg

SEQ ID NO: 607757 - DNA, 25 bp, Homo sapien
agccggttgttcttgccctcaggac

SEQ ID NO: 607758 - DNA, 25 bp, Homo sapien
gcagctcctcctgtgagtcggcagc

SEQ ID NO: 607759 - DNA, 25 bp, Homo sapien
gcaacatccagggaccagtgggcca

SEQ ID NO: 607760 - DNA, 25 bp, Homo sapien
cctcctgtgagtcggcagcaacatc

SEQ ID NO: 607761 - DNA, 25 bp, Homo sapien
gtctgggccacttcacggatctttt

SEQ ID NO: 607762 - DNA, 25 bp, Homo sapien
ggcctcagctgcctgacgggcccac

SEQ ID NO: 607763 - DNA, 25 bp, Homo sapien
tcagctgcctgacgggcccacacac

SEQ ID NO: 607764 - DNA, 25 bp, Homo sapien
tagcataggccatcggctgccccac

SEQ ID NO: 607765 - DNA, 25 bp, Homo sapien
ctagcataggccatcggctgcccca

SEQ ID NO: 607766 - DNA, 25 bp, Homo sapien
caatccctagctaaggcaggggctg

SEQ ID NO: 607767 - DNA, 25 bp, Homo sapien
tgtttcttctcaatccctagctaag

SEQ ID NO: 607768 - DNA, 25 bp, Homo sapien
acattgcatcttatgtgtctgtttc

SEQ ID NO: 607769 - DNA, 25 bp, Homo sapien
accacattgcatcttatgtgtctgt

SEQ ID NO: 607770 - DNA, 25 bp, Homo sapien
gtgacacacacaaggccctgtagcc

SEQ ID NO: 607771 - DNA, 25 bp, Homo sapien
acacacaaggccctgtagccccagg

SEQ ID NO: 607772 - DNA, 25 bp, Homo sapien
ctggtgacacacacaaggccctgta

SEQ ID NO: 607773 - DNA, 25 bp, Homo sapien
acacacacaaggccctgtagcccca

SEQ ID NO: 607774 - DNA, 25 bp, Homo sapien
ccggcagtagacgacaagttcagag

SEQ ID NO: 607775 - DNA, 25 bp, Homo sapien
tctcttcatcaaagggaacaggccg

SEQ ID NO: 607776 - DNA, 25 bp, Homo sapien
cttcatcaaagggaacaggccggca

SEQ ID NO: 607777 - DNA, 25 bp, Homo sapien
ggaacaggccggcagtagacgacaa

SEQ ID NO: 607778 - DNA, 25 bp, Homo sapien
gctgactgccacagatccacatggg

SEQ ID NO: 607779 - DNA, 25 bp, Homo sapien
gacatgtcccggtagcaagcacgtt

SEQ ID NO: 607780 - DNA, 25 bp, Homo sapien
agttgagggccacaagctgactgcc

SEQ ID NO: 607781 - DNA, 25 bp, Homo sapien
gaggaatccagtcgctggcccttgg

SEQ ID NO: 607782 - DNA, 25 bp, Homo sapien
tggctgcagcacgtagccacagtgc

SEQ ID NO: 607783 - DNA, 25 bp, Homo sapien
cagtgcctgcccgtcatgaagaggg

SEQ ID NO: 607784 - DNA, 25 bp, Homo sapien
cctcatcccgcatggtgcttggctg

SEQ ID NO: 607785 - DNA, 25 bp, Homo sapien
tgtcaaaggggtcgaaggcctcatc

SEQ ID NO: 607786 - DNA, 25 bp, Homo sapien
ctgaagcccagatgagcagcaccca

SEQ ID NO: 607787 - DNA, 25 bp, Homo sapien
cctgaagcccagatgagcagcaccc

SEQ ID NO: 607788 - DNA, 25 bp, Homo sapien
tgaagcccagatgagcagcacccac

SEQ ID NO: 607789 - DNA, 25 bp, Homo sapien
ccaattccccactgcggaggctcag

SEQ ID NO: 607790 - DNA, 25 bp, Homo sapien
tccctccaattccccactgcggagg

SEQ ID NO: 607791 - DNA, 25 bp, Homo sapien
caattccccactgcggaggctcagt

SEQ ID NO: 607792 - DNA, 25 bp, Homo sapien
cctccaattccccactgcggaggct

SEQ ID NO: 607793 - DNA, 25 bp, Homo sapien
cattctttggcagatgtcgggcccc

SEQ ID NO: 607794 - DNA, 25 bp, Homo sapien
caaaaggacacacaatgcctcggcc

SEQ ID NO: 607795 - DNA, 25 bp, Homo sapien
ggtgctgtcatactcagctccagcc

SEQ ID NO: 607796 - DNA, 25 bp, Homo sapien
agccacctcaatctccacaaaagga

SEQ ID NO: 607797 - DNA, 25 bp, Homo sapien
ctgtgaaggcaacgacaaaaggctt

SEQ ID NO: 607798 - DNA, 25 bp, Homo sapien
cttcaggtcaccgtgggagaggatg

SEQ ID NO: 607799 - DNA, 25 bp, Homo sapien
gggagaggcttgcagtgccccagca

SEQ ID NO: 607800 - DNA, 25 bp, Homo sapien
gacaaaaggcttcaggtcaccgtgg

SEQ ID NO: 607801 - DNA, 25 bp, Homo sapien
tcatacaccacgaagcgcagaaagg

SEQ ID NO: 607802 - DNA, 25 bp, Homo sapien
catacagggttgagtccattgtcca

SEQ ID NO: 607803 - DNA, 25 bp, Homo sapien
ttttactgggaaagtagcctgagcc

SEQ ID NO: 607804 - DNA, 25 bp, Homo sapien
cgcagaaaggcaaattcagggttac

SEQ ID NO: 607805 - DNA, 25 bp, Homo sapien
aatgtcaatcttgatcagcagggag

SEQ ID NO: 607806 - DNA, 25 bp, Homo sapien
tcctcactgtagttgttcttcaaag

SEQ ID NO: 607807 - DNA, 25 bp, Homo sapien
tggcagggaaaatgtcaatcttgat

SEQ ID NO: 607808 - DNA, 25 bp, Homo sapien
gtcaatcttgatcagcagggaggcc

SEQ ID NO: 607809 - DNA, 25 bp, Homo sapien
gagatgcggaagtcctcaaacggct

SEQ ID NO: 607810 - DNA, 25 bp, Homo sapien
gcagggacgtaccactgaagggact

SEQ ID NO: 607811 - DNA, 25 bp, Homo sapien
tcaaacggctgctggtagcgggatt

SEQ ID NO: 607812 - DNA, 25 bp, Homo sapien
tagcgggattcaaaggagccttccc

SEQ ID NO: 607813 - DNA, 25 bp, Homo sapien
ctggacagaagggaagagtgtcctt

SEQ ID NO: 607814 - DNA, 25 bp, Homo sapien
tggacagaagggaagagtgtcctta

SEQ ID NO: 607815 - DNA, 25 bp, Homo sapien
ctagaggcggttgtctccattgacc

SEQ ID NO: 607816 - DNA, 25 bp, Homo sapien
tccattgacccgagtccttcttggg

SEQ ID NO: 607817 - DNA, 25 bp, Homo sapien
gaggcggttgtctccattgacccga

SEQ ID NO: 607818 - DNA, 25 bp, Homo sapien
ggttgtctccattgacccgagtcct

SEQ ID NO: 607819 - DNA, 25 bp, Homo sapien
aggcttcaggctgcgagacccggaa

SEQ ID NO: 607820 - DNA, 25 bp, Homo sapien
ggcatggaggcccaaaacagtaata

SEQ ID NO: 607821 - DNA, 25 bp, Homo sapien
gcggcattctacaaggcgcacagca

SEQ ID NO: 607822 - DNA, 25 bp, Homo sapien
acctgctgctctccaacgaggctgg

SEQ ID NO: 607823 - DNA, 25 bp, Homo sapien
tccaaggggcttcggccatggtcct

SEQ ID NO: 607824 - DNA, 25 bp, Homo sapien
cctccactcttaggaatgtcagtag

SEQ ID NO: 607825 - DNA, 25 bp, Homo sapien
tgcttaatgcgaaacacagtacagt

SEQ ID NO: 607826 - DNA, 25 bp, Homo sapien
ggtcctggccccacaagatggaagg

SEQ ID NO: 607827 - DNA, 25 bp, Homo sapien
tatctttcaggctgggtcatgttcc

SEQ ID NO: 607828 - DNA, 25 bp, Homo sapien
taagtcctcttaacacagcaggcag

SEQ ID NO: 607829 - DNA, 25 bp, Homo sapien
tttttaccagttagaagctgcagca

SEQ ID NO: 607830 - DNA, 25 bp, Homo sapien
tatgctatgaggcacctttgcgccc

SEQ ID NO: 607831 - DNA, 25 bp, Homo sapien
tagaggcaatcagaatggcacctgg

SEQ ID NO: 607832 - DNA, 25 bp, Homo sapien
catctggcgactgtttctagtgagc

SEQ ID NO: 607833 - DNA, 25 bp, Homo sapien
tggcacctggcagtgttaacgaact

SEQ ID NO: 607834 - DNA, 25 bp, Homo sapien
tggccacaaagaacccaggcaggat

SEQ ID NO: 607835 - DNA, 25 bp, Homo sapien
cacggaaccggatctatcttaaatt

SEQ ID NO: 607836 - DNA, 25 bp, Homo sapien
gaagagaagggcctttcaactgtgt

SEQ ID NO: 607837 - DNA, 25 bp, Homo sapien
ggctatcatcagttcatgtcatcca

SEQ ID NO: 607838 - DNA, 25 bp, Homo sapien
tttgtgtggcgtcatttttgttcca

SEQ ID NO: 607839 - DNA, 25 bp, Homo sapien
cttctctgataggaaacctttctct

SEQ ID NO: 607840 - DNA, 25 bp, Homo sapien
gatgggccctaacagaagggcctac

SEQ ID NO: 607841 - DNA, 25 bp, Homo sapien
cgtggatgggccctaacagaagggc

SEQ ID NO: 607842 - DNA, 25 bp, Homo sapien
caacgtggatgggccctaacagaag

SEQ ID NO: 607843 - DNA, 25 bp, Homo sapien
tggatgggccctaacagaagggcct

SEQ ID NO: 607844 - DNA, 25 bp, Homo sapien
ggtttgtgctgccaaaatcagggtt

SEQ ID NO: 607845 - DNA, 25 bp, Homo sapien
aatgtgctgttagggttgagactcc

SEQ ID NO: 607846 - DNA, 25 bp, Homo sapien
caatacctatgctaaggccccgggt

SEQ ID NO: 607847 - DNA, 25 bp, Homo sapien
ttttcagaagctccccaagtggtgc

SEQ ID NO: 607848 - DNA, 25 bp, Homo sapien
ttgaacccagtctacttgtccctgg

SEQ ID NO: 607849 - DNA, 25 bp, Homo sapien
tgtcactttgaacccagtctacttg

SEQ ID NO: 607850 - DNA, 25 bp, Homo sapien
ggtctgtcactttgaacccagtcta

SEQ ID NO: 607851 - DNA, 25 bp, Homo sapien
aaaggtctgtcactttgaacccagt

SEQ ID NO: 607852 - DNA, 25 bp, Homo sapien
tagtctggtgggataacctgaacct

SEQ ID NO: 607853 - DNA, 25 bp, Homo sapien
tcctttcattcaccgagttagtctg

SEQ ID NO: 607854 - DNA, 25 bp, Homo sapien
ccacagatactcaactgaggtcaga

SEQ ID NO: 607855 - DNA, 25 bp, Homo sapien
tcaagttgaaagacaagtgagtgtc

SEQ ID NO: 607856 - DNA, 25 bp, Homo sapien
gagaagttccaactcactgtcttct

SEQ ID NO: 607857 - DNA, 25 bp, Homo sapien
agaagttccaactcactgtcttctg

SEQ ID NO: 607858 - DNA, 25 bp, Homo sapien
ttcctttccgtaagtggatgattca

SEQ ID NO: 607859 - DNA, 25 bp, Homo sapien
cctttccgtaagtggatgattcaaa

SEQ ID NO: 607860 - DNA, 25 bp, Homo sapien
aattaacgtgacttggctgggcgca

SEQ ID NO: 607861 - DNA, 25 bp, Homo sapien
gatgattcaaaattaacgtgacttg

SEQ ID NO: 607862 - DNA, 25 bp, Homo sapien
gtggggactctaggcaccttccctg

SEQ ID NO: 607863 - DNA, 25 bp, Homo sapien
tggggactctaggcaccttccctgc

SEQ ID NO: 607864 - DNA, 25 bp, Homo sapien
ggggactctaggcaccttccctgct

SEQ ID NO: 607865 - DNA, 25 bp, Homo sapien
tggtggggactctaggcaccttccc

SEQ ID NO: 607866 - DNA, 25 bp, Homo sapien
tgttgctggtccaaagcttccacag

SEQ ID NO: 607867 - DNA, 25 bp, Homo sapien
tagcttgttgttgctggtccaaagc

SEQ ID NO: 607868 - DNA, 25 bp, Homo sapien
cagccctgagaatttggctttcgtg

SEQ ID NO: 607869 - DNA, 25 bp, Homo sapien
gagaatttggctttcgtggctgctc

SEQ ID NO: 607870 - DNA, 25 bp, Homo sapien
tttgggttcgcaggactttgaggat

SEQ ID NO: 607871 - DNA, 25 bp, Homo sapien
tctttgggttcgcaggactttgagg

SEQ ID NO: 607872 - DNA, 25 bp, Homo sapien
ctatctttgggttcgcaggactttg

SEQ ID NO: 607873 - DNA, 25 bp, Homo sapien
tatctttgggttcgcaggactttga

SEQ ID NO: 607874 - DNA, 25 bp, Homo sapien
gaatggggacgcagtccttcaacag

SEQ ID NO: 607875 - DNA, 25 bp, Homo sapien
gtttctatggcaaagaagtttctat

SEQ ID NO: 607876 - DNA, 25 bp, Homo sapien
gagtcatccattctaactgccctga

SEQ ID NO: 607877 - DNA, 25 bp, Homo sapien
gaagtttctatttagctctagatcc

SEQ ID NO: 607878 - DNA, 25 bp, Homo sapien
tgtgaagttaatgggagtacagaga

SEQ ID NO: 607879 - DNA, 25 bp, Homo sapien
agaggggttgagagcctcctttttg

SEQ ID NO: 607880 - DNA, 25 bp, Homo sapien
agtacagagagcgtctggccttgga

SEQ ID NO: 607881 - DNA, 25 bp, Homo sapien
ctgcacttggttgtgaagttaatgg

SEQ ID NO: 607882 - DNA, 25 bp, Homo sapien
gaatgcccatgtaaggagcccagca

SEQ ID NO: 607883 - DNA, 25 bp, Homo sapien
tgttcaggtggaccaaagcaccttg

SEQ ID NO: 607884 - DNA, 25 bp, Homo sapien
aacgccctagttggatggcttgcca

SEQ ID NO: 607885 - DNA, 25 bp, Homo sapien
gaggcagtcatcacgcaggtgctta

SEQ ID NO: 607886 - DNA, 25 bp, Homo sapien
ttcatgcaggacctacagtgaccca

SEQ ID NO: 607887 - DNA, 25 bp, Homo sapien
ctttcaggtggaaaagtacagtgct

SEQ ID NO: 607888 - DNA, 25 bp, Homo sapien
gccatgggcactagctcatctttca

SEQ ID NO: 607889 - DNA, 25 bp, Homo sapien
cagcaaaacacagttggtggacaag

SEQ ID NO: 607890 - DNA, 25 bp, Homo sapien
tgcatgcactggctgaagagttggt

SEQ ID NO: 607891 - DNA, 25 bp, Homo sapien
gggacaccagtgcactaggcagctg

SEQ ID NO: 607892 - DNA, 25 bp, Homo sapien
gattctcgtaaaacgcgcatctggc

SEQ ID NO: 607893 - DNA, 25 bp, Homo sapien
cgcatctggcgtgtgcagttgagaa

SEQ ID NO: 607894 - DNA, 25 bp, Homo sapien
tactcatttgattctcgtaaaacgc

SEQ ID NO: 607895 - DNA, 25 bp, Homo sapien
agatggaaaaaagacatggggtagg

SEQ ID NO: 607896 - DNA, 25 bp, Homo sapien
tttggagtgagagaaagatggaaaa

SEQ ID NO: 607897 - DNA, 25 bp, Homo sapien
tgaccactgcggttttcagagccct

SEQ ID NO: 607898 - DNA, 25 bp, Homo sapien
agacatggggtagggacgtaagtgg

SEQ ID NO: 607899 - DNA, 25 bp, Homo sapien
aagagatctctgctgcattaagtga

SEQ ID NO: 607900 - DNA, 25 bp, Homo sapien
tgaagagatctctgctgcattaagt

SEQ ID NO: 607901 - DNA, 25 bp, Homo sapien
cattaagtgatgaccggctacgttt

SEQ ID NO: 607902 - DNA, 25 bp, Homo sapien
gctgcattaagtgatgaccggctac

SEQ ID NO: 607903 - DNA, 25 bp, Homo sapien
gatgttagggttgcaagttacaaat

SEQ ID NO: 607904 - DNA, 25 bp, Homo sapien
gaatacatatcagaactagacccag

SEQ ID NO: 607905 - DNA, 25 bp, Homo sapien
attggaacagtatgttctggagagc

SEQ ID NO: 607906 - DNA, 25 bp, Homo sapien
ctagacccagctgctattatattgg

SEQ ID NO: 607907 - DNA, 25 bp, Homo sapien
ctgcattccagagcctgggttacag

SEQ ID NO: 607908 - DNA, 25 bp, Homo sapien
ccactgcattccagagcctgggtta

SEQ ID NO: 607909 - DNA, 25 bp, Homo sapien
tgccactgcattccagagcctgggt

SEQ ID NO: 607910 - DNA, 25 bp, Homo sapien
actgcattccagagcctgggttaca

SEQ ID NO: 607911 - DNA, 25 bp, Homo sapien
gtcactggttattgggaacttgatg

SEQ ID NO: 607912 - DNA, 25 bp, Homo sapien
cactttgggatcagctttaggagag

SEQ ID NO: 607913 - DNA, 25 bp, Homo sapien
aggatattgaggctgtcttcagagt

SEQ ID NO: 607914 - DNA, 25 bp, Homo sapien
tcagactcagtggtcactggttatt

SEQ ID NO: 607915 - DNA, 25 bp, Homo sapien
acagcctgacctggtactttttggc

SEQ ID NO: 607916 - DNA, 25 bp, Homo sapien
atcagccctgatcaatgtgttgact

SEQ ID NO: 607917 - DNA, 25 bp, Homo sapien
gagctgcttcacagcctgacctggt

SEQ ID NO: 607918 - DNA, 25 bp, Homo sapien
gatcaatgtgttgactttgaccaca

SEQ ID NO: 607919 - DNA, 25 bp, Homo sapien
ctcagaagcattgtaatcaggagcc

SEQ ID NO: 607920 - DNA, 25 bp, Homo sapien
cattgtaatcaggagccagttgaac

SEQ ID NO: 607921 - DNA, 25 bp, Homo sapien
ttgtaatcaggagccagttgaacat

SEQ ID NO: 607922 - DNA, 25 bp, Homo sapien
gtaatcaggagccagttgaacatac

SEQ ID NO: 607923 - DNA, 25 bp, Homo sapien
ttttcaatacggcaacaacaaaaca

SEQ ID NO: 607924 - DNA, 25 bp, Homo sapien
tcaatacggcaacaacaaaacactc

SEQ ID NO: 607925 - DNA, 25 bp, Homo sapien
caatacggcaacaacaaaacactcc

SEQ ID NO: 607926 - DNA, 25 bp, Homo sapien
ttcaatacggcaacaacaaaacact

SEQ ID NO: 607927 - DNA, 25 bp, Homo sapien
gcaaacacctggtggagcccaaagc

SEQ ID NO: 607928 - DNA, 25 bp, Homo sapien
agcaaacacctggtggagcccaaag

SEQ ID NO: 607929 - DNA, 25 bp, Homo sapien
gagcaaacacctggtggagcccaaa

SEQ ID NO: 607930 - DNA, 25 bp, Homo sapien
gaaatgagccagttcagtgaacaga

SEQ ID NO: 607931 - DNA, 25 bp, Homo sapien
gcaaaagcgattgcccacattcatt

SEQ ID NO: 607932 - DNA, 25 bp, Homo sapien
cagaggagggagctttataaaagaa

SEQ ID NO: 607933 - DNA, 25 bp, Homo sapien
taaactggcatcgtcaaacactgca

SEQ ID NO: 607934 - DNA, 25 bp, Homo sapien
catcgcgggatgacacctgggtttg

SEQ ID NO: 607935 - DNA, 25 bp, Homo sapien
gatgacacctgggtttggctctgtt

SEQ ID NO: 607936 - DNA, 25 bp, Homo sapien
accagcatcgcgggatgacacctgg

SEQ ID NO: 607937 - DNA, 25 bp, Homo sapien
tggccaccagcatcgcgggatgaca

SEQ ID NO: 607938 - DNA, 25 bp, Homo sapien
ctgaaaattggtgcacatccatgtg

SEQ ID NO: 607939 - DNA, 25 bp, Homo sapien
ggtgcacatccatgtgaaggtgacc

SEQ ID NO: 607940 - DNA, 25 bp, Homo sapien
catgtgaaggtgaccacacaatctt

SEQ ID NO: 607941 - DNA, 25 bp, Homo sapien
acatccatgtgaaggtgaccacaca

SEQ ID NO: 607942 - DNA, 25 bp, Homo sapien
tttatagagaatcacaggtcccaag

SEQ ID NO: 607943 - DNA, 25 bp, Homo sapien
gctttatagagaatcacaggtccca

SEQ ID NO: 607944 - DNA, 25 bp, Homo sapien
gagaatcacaggtcccaagatacca

SEQ ID NO: 607945 - DNA, 25 bp, Homo sapien
cacaggtcccaagataccacttagt

SEQ ID NO: 607946 - DNA, 25 bp, Homo sapien
tttttggattaatctaaaaatctgc

SEQ ID NO: 607947 - DNA, 25 bp, Homo sapien
tcataagagtatcctgtgttgtgtc

SEQ ID NO: 607948 - DNA, 25 bp, Homo sapien
ctgttataggttgaccattgagatc

SEQ ID NO: 607949 - DNA, 25 bp, Homo sapien
tctttgatcatctgataggaatctg

SEQ ID NO: 607950 - DNA, 25 bp, Homo sapien
tactcgctttgggaccattttactg

SEQ ID NO: 607951 - DNA, 25 bp, Homo sapien
cattttactgctaatgggcatctca

SEQ ID NO: 607952 - DNA, 25 bp, Homo sapien
gaccttctggtatactcgctttggg

SEQ ID NO: 607953 - DNA, 25 bp, Homo sapien
tacacgtctgttggaagttctgaga

SEQ ID NO: 607954 - DNA, 25 bp, Homo sapien
ctcttgggcacagaacggcaggcct

SEQ ID NO: 607955 - DNA, 25 bp, Homo sapien
aacgctgagccttgactatactgag

SEQ ID NO: 607956 - DNA, 25 bp, Homo sapien
cagagagctactaccacattggatc

SEQ ID NO: 607957 - DNA, 25 bp, Homo sapien
tagctatgtcataaaccccagtgtg

SEQ ID NO: 607958 - DNA, 25 bp, Homo sapien
aattcagagtacaggagtgctggtc

SEQ ID NO: 607959 - DNA, 25 bp, Homo sapien
taactgtagtgggttctctcagcac

SEQ ID NO: 607960 - DNA, 25 bp, Homo sapien
tgcatccaggattgagaactctttg

SEQ ID NO: 607961 - DNA, 25 bp, Homo sapien
tactgattcagttgcattgcggtgg

SEQ ID NO: 607962 - DNA, 25 bp, Homo sapien
tgtgtaggggggttacttcatattc

SEQ ID NO: 607963 - DNA, 25 bp, Homo sapien
tctttcccactccatccgaggctaa

SEQ ID NO: 607964 - DNA, 25 bp, Homo sapien
cacttgctctgggaattggaaagga

SEQ ID NO: 607965 - DNA, 25 bp, Homo sapien
atccgaggctaacacaaccctttgg

SEQ ID NO: 607966 - DNA, 25 bp, Homo sapien
gcatctggaagagccctctgcacat

SEQ ID NO: 607967 - DNA, 25 bp, Homo sapien
cagggcatctggaagagccctctgc

SEQ ID NO: 607968 - DNA, 25 bp, Homo sapien
ggcatctggaagagccctctgcaca

SEQ ID NO: 607969 - DNA, 25 bp, Homo sapien
gggcatctggaagagccctctgcac

SEQ ID NO: 607970 - DNA, 25 bp, Homo sapien
accaaaggaggtcagctgctcctca

SEQ ID NO: 607971 - DNA, 25 bp, Homo sapien
tggttgtcaatgtggtcggtagatc

SEQ ID NO: 607972 - DNA, 25 bp, Homo sapien
ctggggtggttgtcaatgtggtcgg

SEQ ID NO: 607973 - DNA, 25 bp, Homo sapien
ggttgtcaatgtggtcggtagatcc

SEQ ID NO: 607974 - DNA, 25 bp, Homo sapien
gggtggttgtcaatgtggtcggtag

SEQ ID NO: 607975 - DNA, 25 bp, Homo sapien
cacgcgaaaacactacacgtgggcc

SEQ ID NO: 607976 - DNA, 25 bp, Homo sapien
ccccggtgtaaagagcgtcagctcg

SEQ ID NO: 607977 - DNA, 25 bp, Homo sapien
gagtgcatgcccgagtgtgcgttcc

SEQ ID NO: 607978 - DNA, 25 bp, Homo sapien
gtcagctcgaccagtgaaggcggca

SEQ ID NO: 607979 - DNA, 25 bp, Homo sapien
gcgtgccaccatcgtagaaggcgca

SEQ ID NO: 607980 - DNA, 25 bp, Homo sapien
taggggtcagggtagccccgcgtgc

SEQ ID NO: 607981 - DNA, 25 bp, Homo sapien
ccgcgtgccaccatcgtagaaggcg

SEQ ID NO: 607982 - DNA, 25 bp, Homo sapien
caccatcgtagaaggcgcaaaaggg

SEQ ID NO: 607983 - DNA, 25 bp, Homo sapien
caccccatcaactttccaagcagct

SEQ ID NO: 607984 - DNA, 25 bp, Homo sapien
accccatcaactttccaagcagctc

SEQ ID NO: 607985 - DNA, 25 bp, Homo sapien
ccaccccatcaactttccaagcagc

SEQ ID NO: 607986 - DNA, 25 bp, Homo sapien
cccaccccatcaactttccaagcag

SEQ ID NO: 607987 - DNA, 25 bp, Homo sapien
tatcaaaagtatccactgccacccg

SEQ ID NO: 607988 - DNA, 25 bp, Homo sapien
ggaactcatccatgtactaggcctg

SEQ ID NO: 607989 - DNA, 25 bp, Homo sapien
gctttagtagtgcaccctgagccag

SEQ ID NO: 607990 - DNA, 25 bp, Homo sapien
tgggtctccctgaatggccatatgg

SEQ ID NO: 607991 - DNA, 25 bp, Homo sapien
tgcttgggacctttcccatctctgc

SEQ ID NO: 607992 - DNA, 25 bp, Homo sapien
ctgcttgggacctttcccatctctg

SEQ ID NO: 607993 - DNA, 25 bp, Homo sapien
agagcagcaatactggcttctggga

SEQ ID NO: 607994 - DNA, 25 bp, Homo sapien
catcaatcactcctggtggctttgt

SEQ ID NO: 607995 - DNA, 25 bp, Homo sapien
ctcatcaatcactcctggtggcttt

SEQ ID NO: 607996 - DNA, 25 bp, Homo sapien
ccaggcctgtagttgtgatcactca

SEQ ID NO: 607997 - DNA, 25 bp, Homo sapien
tcctctgcttgggtatactcatcgg

SEQ ID NO: 607998 - DNA, 25 bp, Homo sapien
tcggatgagcctatatcactggcag

SEQ ID NO: 607999 - DNA, 25 bp, Homo sapien
ctctgagggtgcaagcagcatggac

SEQ ID NO: 608000 - DNA, 25 bp, Homo sapien
gcatggacacttgtgtttgcccatt

SEQ ID NO: 608001 - DNA, 25 bp, Homo sapien
cattttctgtaacatcaggaaatcc

SEQ ID NO: 608002 - DNA, 25 bp, Homo sapien
ggcggtgatcagccttctggcccag

SEQ ID NO: 608003 - DNA, 25 bp, Homo sapien
ggctcaatactgacactggccagca

SEQ ID NO: 608004 - DNA, 25 bp, Homo sapien
agcggcagcgggctcaatactgaca

SEQ ID NO: 608005 - DNA, 25 bp, Homo sapien
atccctgggacgttctggtcgagcg

SEQ ID NO: 608006 - DNA, 25 bp, Homo sapien
ctaagacagggtgagagcacggctc

SEQ ID NO: 608007 - DNA, 25 bp, Homo sapien
taagacagggtgagagcacggctcc

SEQ ID NO: 608008 - DNA, 25 bp, Homo sapien
aagacagggtgagagcacggctcca

SEQ ID NO: 608009 - DNA, 25 bp, Homo sapien
cagtcacttggcgcttccgggtcct

SEQ ID NO: 608010 - DNA, 25 bp, Homo sapien
gtgcacaggctccacaggtgagtgt

SEQ ID NO: 608011 - DNA, 25 bp, Homo sapien
ggtgagtgtcttcggccctcagtca

SEQ ID NO: 608012 - DNA, 25 bp, Homo sapien
ctcagtcacttggcgcttccgggtc

SEQ ID NO: 608013 - DNA, 25 bp, Homo sapien
gagctcctggactcagagccgccgc

SEQ ID NO: 608014 - DNA, 25 bp, Homo sapien
agctcctggactcagagccgccgcc

SEQ ID NO: 608015 - DNA, 25 bp, Homo sapien
cagccagaccggtctctccagcttt

SEQ ID NO: 608016 - DNA, 25 bp, Homo sapien
agaccggtctctccagctttcccac

SEQ ID NO: 608017 - DNA, 25 bp, Homo sapien
aatcaggccttgggctggcctcagc

SEQ ID NO: 608018 - DNA, 25 bp, Homo sapien
tcccccagccagaccggtctctcca

SEQ ID NO: 608019 - DNA, 25 bp, Homo sapien
ctgtgcgatgggaggtacacctgta

SEQ ID NO: 608020 - DNA, 25 bp, Homo sapien
tacacctgtagatgtgggtctaacc

SEQ ID NO: 608021 - DNA, 25 bp, Homo sapien
agtttacatttgtgtcacgccttgg

SEQ ID NO: 608022 - DNA, 25 bp, Homo sapien
tgtcacgccttggagtgcctttgca

SEQ ID NO: 608023 - DNA, 25 bp, Homo sapien
cagtggcttgcacaaaggtctgctc

SEQ ID NO: 608024 - DNA, 25 bp, Homo sapien
ccagctcctccacaagaagctcctg

SEQ ID NO: 608025 - DNA, 25 bp, Homo sapien
aaggcagtggcttgcacaaaggtct

SEQ ID NO: 608026 - DNA, 25 bp, Homo sapien
gcttgcacaaaggtctgctccagct

SEQ ID NO: 608027 - DNA, 25 bp, Homo sapien
aggacgcccagcttgccaaaacgca

SEQ ID NO: 608028 - DNA, 25 bp, Homo sapien
aggccccggtacagctccttcaccg

SEQ ID NO: 608029 - DNA, 25 bp, Homo sapien
cagcacgtcaatgccgccgctcagt

SEQ ID NO: 608030 - DNA, 25 bp, Homo sapien
aaacgcacgtggaagggtgagcacc

SEQ ID NO: 608031 - DNA, 25 bp, Homo sapien
caagcttcatgtgcaagtccacagg

SEQ ID NO: 608032 - DNA, 25 bp, Homo sapien
cacaggctccccattgagctcaatg

SEQ ID NO: 608033 - DNA, 25 bp, Homo sapien
ggctccccattgagctcaatgtcta

SEQ ID NO: 608034 - DNA, 25 bp, Homo sapien
caggctccccattgagctcaatgtc

SEQ ID NO: 608035 - DNA, 25 bp, Homo sapien
cagacccccccaagggatgggtgag

SEQ ID NO: 608036 - DNA, 25 bp, Homo sapien
gtgcacaggccgggaggcacatgtt

SEQ ID NO: 608037 - DNA, 25 bp, Homo sapien
ggactagaatcagttgccactgcat

SEQ ID NO: 608038 - DNA, 25 bp, Homo sapien
agttcctctggactagaatcagttg

SEQ ID NO: 608039 - DNA, 25 bp, Homo sapien
tgggtttcctcctgcgacgcctctt

SEQ ID NO: 608040 - DNA, 25 bp, Homo sapien
gaatcagttgccactgcatcctctt

SEQ ID NO: 608041 - DNA, 25 bp, Homo sapien
gcctcagcttttccggcagggatag

SEQ ID NO: 608042 - DNA, 25 bp, Homo sapien
ctggcctcagcttttccggcaggga

SEQ ID NO: 608043 - DNA, 25 bp, Homo sapien
cagcttttccggcagggatagctca

SEQ ID NO: 608044 - DNA, 25 bp, Homo sapien
agcttttccggcagggatagctcac

SEQ ID NO: 608045 - DNA, 25 bp, Homo sapien
ctaaggggccacaaggaaatggtca

SEQ ID NO: 608046 - DNA, 25 bp, Homo sapien
gtgaagacttctcttccaactggac

SEQ ID NO: 608047 - DNA, 25 bp, Homo sapien
ctgcagtgaagacttctcttccaac

SEQ ID NO: 608048 - DNA, 25 bp, Homo sapien
cagtgaagacttctcttccaactgg

SEQ ID NO: 608049 - DNA, 25 bp, Homo sapien
tgaagacttctcttccaactggaca

SEQ ID NO: 608050 - DNA, 25 bp, Homo sapien
ggggccactcgccatccgagtaggg

SEQ ID NO: 608051 - DNA, 25 bp, Homo sapien
gccactcgccatccgagtaggggta

SEQ ID NO: 608052 - DNA, 25 bp, Homo sapien
gccatccgagtaggggtagatgtct

SEQ ID NO: 608053 - DNA, 25 bp, Homo sapien
tcgccatccgagtaggggtagatgt

SEQ ID NO: 608054 - DNA, 25 bp, Homo sapien
ccactgcatgtgggactcggctctt

SEQ ID NO: 608055 - DNA, 25 bp, Homo sapien
ggactcggctcttaggggactgggc

SEQ ID NO: 608056 - DNA, 25 bp, Homo sapien
gactgggctccggggtccgcacctc

SEQ ID NO: 608057 - DNA, 25 bp, Homo sapien
gctccgagtcgctcttaggggatgt

SEQ ID NO: 608058 - DNA, 25 bp, Homo sapien
tggattgggagtcccaaagggtcca

SEQ ID NO: 608059 - DNA, 25 bp, Homo sapien
tgtcaggctgaaggtcggcaccagc

SEQ ID NO: 608060 - DNA, 25 bp, Homo sapien
tagagtgggatcctctgtgtcaggc

SEQ ID NO: 608061 - DNA, 25 bp, Homo sapien
agctctgccttcaaggaccactgag

SEQ ID NO: 608062 - DNA, 25 bp, Homo sapien
agtcatccaggtagatgtcactggg

SEQ ID NO: 608063 - DNA, 25 bp, Homo sapien
gagggcaagtcatccaggtagatgt

SEQ ID NO: 608064 - DNA, 25 bp, Homo sapien
agtaaagcgctgcattctcagagtc

SEQ ID NO: 608065 - DNA, 25 bp, Homo sapien
ctttgggggaagtaaagcgctgcat

SEQ ID NO: 608066 - DNA, 25 bp, Homo sapien
aggcccttgatagtggacccttggc

SEQ ID NO: 608067 - DNA, 25 bp, Homo sapien
ggcccttgatagtggacccttggcc

SEQ ID NO: 608068 - DNA, 25 bp, Homo sapien
gcaaaggggccaacaatgacaagaa

SEQ ID NO: 608069 - DNA, 25 bp, Homo sapien
aggcaaaggggccaacaatgacaag

SEQ ID NO: 608070 - DNA, 25 bp, Homo sapien
tgacaagaatacgaggagggcggga

SEQ ID NO: 608071 - DNA, 25 bp, Homo sapien
gacaagaatacgaggagggcgggag

SEQ ID NO: 608072 - DNA, 25 bp, Homo sapien
ggtccctcagggacttctgactgct

SEQ ID NO: 608073 - DNA, 25 bp, Homo sapien
tgggttcactccatcttctggcccc

SEQ ID NO: 608074 - DNA, 25 bp, Homo sapien
ctagggagatgtcccggctgtcagc

SEQ ID NO: 608075 - DNA, 25 bp, Homo sapien
cagagggacagtgctattgtatcca

SEQ ID NO: 608076 - DNA, 25 bp, Homo sapien
tgaggctggcacatcccatgtgacc

SEQ ID NO: 608077 - DNA, 25 bp, Homo sapien
gctcacctcctgtcggttggctttg

SEQ ID NO: 608078 - DNA, 25 bp, Homo sapien
ggataactcacaacttagcgtcaag

SEQ ID NO: 608079 - DNA, 25 bp, Homo sapien
gttcccaccccaggattcacaggat

SEQ ID NO: 608080 - DNA, 25 bp, Homo sapien
ggtaagagacgctgtgctggttgaa

SEQ ID NO: 608081 - DNA, 25 bp, Homo sapien
cctggtaagagacgctgtgctggtt

SEQ ID NO: 608082 - DNA, 25 bp, Homo sapien
agagacgctgtgctggttgaatttc

SEQ ID NO: 608083 - DNA, 25 bp, Homo sapien
taagagacgctgtgctggttgaatt

SEQ ID NO: 608084 - DNA, 25 bp, Homo sapien
cttgggcaagtttttctggaaggct

SEQ ID NO: 608085 - DNA, 25 bp, Homo sapien
ggggcagccacagcccagttataat

SEQ ID NO: 608086 - DNA, 25 bp, Homo sapien
ggaaggcttgcagggagaggatcat

SEQ ID NO: 608087 - DNA, 25 bp, Homo sapien
ggcagccacagcccagttataatgc

SEQ ID NO: 608088 - DNA, 25 bp, Homo sapien
cgttgttcttgggaccctccacgca

SEQ ID NO: 608089 - DNA, 25 bp, Homo sapien
caaccctagggtaaggtgctgtcaa

SEQ ID NO: 608090 - DNA, 25 bp, Homo sapien
gccaaccctagggtaaggtgctgtc

SEQ ID NO: 608091 - DNA, 25 bp, Homo sapien
gttcttgggaccctccacgcatgag

SEQ ID NO: 608092 - DNA, 25 bp, Homo sapien
gatgaaagccatggcagtgtttcct

SEQ ID NO: 608093 - DNA, 25 bp, Homo sapien
ctgtgggcagatgaaagccatggca

SEQ ID NO: 608094 - DNA, 25 bp, Homo sapien
gcagatgaaagccatggcagtgttt

SEQ ID NO: 608095 - DNA, 25 bp, Homo sapien
tgggcagatgaaagccatggcagtg

SEQ ID NO: 608096 - DNA, 25 bp, Homo sapien
gccaggaagtccctgcgtcgccagg

SEQ ID NO: 608097 - DNA, 25 bp, Homo sapien
gaagtccctgcgtcgccaggaaaac

SEQ ID NO: 608098 - DNA, 25 bp, Homo sapien
tcgcccacccttccggggcatcttc

SEQ ID NO: 608099 - DNA, 25 bp, Homo sapien
tgcgtcgccaggaaaaccaccatcg

SEQ ID NO: 608100 - DNA, 25 bp, Homo sapien
ttggctgcagtcttctccttctggg

SEQ ID NO: 608101 - DNA, 25 bp, Homo sapien
gctgctccttggctgcagtcttctc

SEQ ID NO: 608102 - DNA, 25 bp, Homo sapien
tggctgcagtcttctccttctgggc

SEQ ID NO: 608103 - DNA, 25 bp, Homo sapien
ccctgctgctccttggctgcagtct

SEQ ID NO: 608104 - DNA, 25 bp, Homo sapien
gggagatgccaagaggaggctggac

SEQ ID NO: 608105 - DNA, 25 bp, Homo sapien
ctcccgggagatgccaagaggaggc

SEQ ID NO: 608106 - DNA, 25 bp, Homo sapien
cgggagatgccaagaggaggctgga

SEQ ID NO: 608107 - DNA, 25 bp, Homo sapien
cccgggagatgccaagaggaggctg

SEQ ID NO: 608108 - DNA, 25 bp, Homo sapien
catctcctccagccaaagggccttc

SEQ ID NO: 608109 - DNA, 25 bp, Homo sapien
atctcctccagccaaagggccttca

SEQ ID NO: 608110 - DNA, 25 bp, Homo sapien
accacactggctctcaggccatctc

SEQ ID NO: 608111 - DNA, 25 bp, Homo sapien
ctgtggaccacactggctctcaggc

SEQ ID NO: 608112 - DNA, 25 bp, Homo sapien
catcgtcatcactgctcaggacttc

SEQ ID NO: 608113 - DNA, 25 bp, Homo sapien
aggcggagggacttcttgtaggtag

SEQ ID NO: 608114 - DNA, 25 bp, Homo sapien
gctgtctggggcatcgtcatcactg

SEQ ID NO: 608115 - DNA, 25 bp, Homo sapien
gggacttcttgtaggtaggagtgga

SEQ ID NO: 608116 - DNA, 25 bp, Homo sapien
tggtgccgtcgatgtcagagatgac

SEQ ID NO: 608117 - DNA, 25 bp, Homo sapien
ttgtcgtcccatttccacaggtaga

SEQ ID NO: 608118 - DNA, 25 bp, Homo sapien
cacgctgaagaccacatcattggca

SEQ ID NO: 608119 - DNA, 25 bp, Homo sapien
caggtgccctggtactgagtggtca

SEQ ID NO: 608120 - DNA, 25 bp, Homo sapien
agggaggcgagtccacaacccctct

SEQ ID NO: 608121 - DNA, 25 bp, Homo sapien
ccagcacagagggaggcgagtccac

SEQ ID NO: 608122 - DNA, 25 bp, Homo sapien
agcacagagggaggcgagtccacaa

SEQ ID NO: 608123 - DNA, 25 bp, Homo sapien
acagagggaggcgagtccacaaccc

SEQ ID NO: 608124 - DNA, 25 bp, Homo sapien
tgccctggtgtgtccagtctttccc

SEQ ID NO: 608125 - DNA, 25 bp, Homo sapien
tggtgatgccctggtgtgtccagtc

SEQ ID NO: 608126 - DNA, 25 bp, Homo sapien
attttgtgatagagactggtgatgc

SEQ ID NO: 608127 - DNA, 25 bp, Homo sapien
tgtgatagagactggtgatgccctg

SEQ ID NO: 608128 - DNA, 25 bp, Homo sapien
gacttgaagagaacggccaggcagt

SEQ ID NO: 608129 - DNA, 25 bp, Homo sapien
gacagggtggcatagagccatcaga

SEQ ID NO: 608130 - DNA, 25 bp, Homo sapien
ctgatgttccaacctttgcagggag

SEQ ID NO: 608131 - DNA, 25 bp, Homo sapien
tcagctggacggtgcacagagtcct

SEQ ID NO: 608132 - DNA, 25 bp, Homo sapien
tgaggtccgccatgccaatggcccg

SEQ ID NO: 608133 - DNA, 25 bp, Homo sapien
ccgcgccgagcagtacaggaacttg

SEQ ID NO: 608134 - DNA, 25 bp, Homo sapien
gtaccccttggtgaggtccgccatg

SEQ ID NO: 608135 - DNA, 25 bp, Homo sapien
atggcccgcgccgagcagtacagga

SEQ ID NO: 608136 - DNA, 25 bp, Homo sapien
tgggagacagaaggatggggccctt

SEQ ID NO: 608137 - DNA, 25 bp, Homo sapien
tggggaggctacagcccccctcgct

SEQ ID NO: 608138 - DNA, 25 bp, Homo sapien
ggaggctacagcccccctcgctcac

SEQ ID NO: 608139 - DNA, 25 bp, Homo sapien
ggagacagaaggatggggcccttgg

SEQ ID NO: 608140 - DNA, 25 bp, Homo sapien
tccttgccacctgagagcttaatgc

SEQ ID NO: 608141 - DNA, 25 bp, Homo sapien
tgccacctgagagcttaatgccagc

SEQ ID NO: 608142 - DNA, 25 bp, Homo sapien
tgagagcttaatgccagcctgctaa

SEQ ID NO: 608143 - DNA, 25 bp, Homo sapien
gggccacgggcttgtatgtgtaggg

SEQ ID NO: 608144 - DNA, 25 bp, Homo sapien
gaggggatggcaggctcaggtgatg

SEQ ID NO: 608145 - DNA, 25 bp, Homo sapien
gaagggctgtccgtggggcagaaac

SEQ ID NO: 608146 - DNA, 25 bp, Homo sapien
tgtcactcaggcaggcgaccttgaa

SEQ ID NO: 608147 - DNA, 25 bp, Homo sapien
ggcaggcgaccttgaacacctctgg

SEQ ID NO: 608148 - DNA, 25 bp, Homo sapien
tgctggatgtcactcaggcaggcga

SEQ ID NO: 608149 - DNA, 25 bp, Homo sapien
aggaggggcccatggaatggaggcc

SEQ ID NO: 608150 - DNA, 25 bp, Homo sapien
gaggggcccatggaatggaggcctg

SEQ ID NO: 608151 - DNA, 25 bp, Homo sapien
ggaggggcccatggaatggaggcct

SEQ ID NO: 608152 - DNA, 25 bp, Homo sapien
ggatttgtggttctttatgagctcc

SEQ ID NO: 608153 - DNA, 25 bp, Homo sapien
ggttgactgtgaagatgcgtgactc

SEQ ID NO: 608154 - DNA, 25 bp, Homo sapien
ccacctgccggtaggcaaagacatc

SEQ ID NO: 608155 - DNA, 25 bp, Homo sapien
ggttctttatgagctcctggatgag

SEQ ID NO: 608156 - DNA, 25 bp, Homo sapien
cagagtaagggacagactccccggt

SEQ ID NO: 608157 - DNA, 25 bp, Homo sapien
ctgagctgccaccaaacgatggcct

SEQ ID NO: 608158 - DNA, 25 bp, Homo sapien
gtcccagagtaagggacagactccc

SEQ ID NO: 608159 - DNA, 25 bp, Homo sapien
gccaccaaacgatggccttggccat

SEQ ID NO: 608160 - DNA, 25 bp, Homo sapien
gaggagctcgaccacttcaccaagc

SEQ ID NO: 608161 - DNA, 25 bp, Homo sapien
ggaagaggagctcgaccacttcacc

SEQ ID NO: 608162 - DNA, 25 bp, Homo sapien
aagaggagctcgaccacttcaccaa

SEQ ID NO: 608163 - DNA, 25 bp, Homo sapien
gggaagaggagctcgaccacttcac

SEQ ID NO: 608164 - DNA, 25 bp, Homo sapien
tcagtccagggtatcaaggtccaca

SEQ ID NO: 608165 - DNA, 25 bp, Homo sapien
agtggctcccgccagtagcagaagt

SEQ ID NO: 608166 - DNA, 25 bp, Homo sapien
ggctcccgccagtagcagaagttac

SEQ ID NO: 608167 - DNA, 25 bp, Homo sapien
agggtatcaaggtccacagcaggca

SEQ ID NO: 608168 - DNA, 25 bp, Homo sapien
gacaagctaattgccccaggacagt

SEQ ID NO: 608169 - DNA, 25 bp, Homo sapien
tgtctggcttcggagggtacagtcc

SEQ ID NO: 608170 - DNA, 25 bp, Homo sapien
gcatagaaaaccctgcaaggaggcc

SEQ ID NO: 608171 - DNA, 25 bp, Homo sapien
tgtcctatcaagacttacagcaagg

SEQ ID NO: 608172 - DNA, 25 bp, Homo sapien
gccccagctgagtttgggactgtcc

SEQ ID NO: 608173 - DNA, 25 bp, Homo sapien
ggagcaggccaagccggaaccacag

SEQ ID NO: 608174 - DNA, 25 bp, Homo sapien
tttgggactgtccttaagcgaggtc

SEQ ID NO: 608175 - DNA, 25 bp, Homo sapien
ggactgtccttaagcgaggtctgga

SEQ ID NO: 608176 - DNA, 25 bp, Homo sapien
ttcccacagctccttaggcaagagc

SEQ ID NO: 608177 - DNA, 25 bp, Homo sapien
cacagctccttaggcaagagcttac

SEQ ID NO: 608178 - DNA, 25 bp, Homo sapien
ccacagctccttaggcaagagctta

SEQ ID NO: 608179 - DNA, 25 bp, Homo sapien
tcccacagctccttaggcaagagct

SEQ ID NO: 608180 - DNA, 25 bp, Homo sapien
tcaggtacgaaaccatcaatggaca

SEQ ID NO: 608181 - DNA, 25 bp, Homo sapien
tcctggacatttggtattctgccct

SEQ ID NO: 608182 - DNA, 25 bp, Homo sapien
tgttcctcaggcctatgcagttccc

SEQ ID NO: 608183 - DNA, 25 bp, Homo sapien
tcttgacaccggtctctgctgaggc

SEQ ID NO: 608184 - DNA, 25 bp, Homo sapien
aagccttgcttttaacacccctgca

SEQ ID NO: 608185 - DNA, 25 bp, Homo sapien
gaaatccttcctgcgaggtcagggc

SEQ ID NO: 608186 - DNA, 25 bp, Homo sapien
tacaaagtggcctgaatgaggccag

SEQ ID NO: 608187 - DNA, 25 bp, Homo sapien
tccaggcaatctgtttagagacccc

SEQ ID NO: 608188 - DNA, 25 bp, Homo sapien
tctctttattccctttgatcctccc

SEQ ID NO: 608189 - DNA, 25 bp, Homo sapien
gagttctctttattccctttgatcc

SEQ ID NO: 608190 - DNA, 25 bp, Homo sapien
ccaagagttctctttattccctttg

SEQ ID NO: 608191 - DNA, 25 bp, Homo sapien
caagagttctctttattccctttga

SEQ ID NO: 608192 - DNA, 25 bp, Homo sapien
tgttgtatctgaactaaggaccaga

SEQ ID NO: 608193 - DNA, 25 bp, Homo sapien
ggatgttgtatctgaactaaggacc

SEQ ID NO: 608194 - DNA, 25 bp, Homo sapien
gatgttgtatctgaactaaggacca

SEQ ID NO: 608195 - DNA, 25 bp, Homo sapien
atgttgtatctgaactaaggaccag

SEQ ID NO: 608196 - DNA, 25 bp, Homo sapien
tcttcgcagccatcaggactaggtt

SEQ ID NO: 608197 - DNA, 25 bp, Homo sapien
gctgctgtggcaaactggccttgat

SEQ ID NO: 608198 - DNA, 25 bp, Homo sapien
tcagcaaatcagtgtctggacagcc

SEQ ID NO: 608199 - DNA, 25 bp, Homo sapien
tgatcagtgtccgtatgtaaggcct

SEQ ID NO: 608200 - DNA, 25 bp, Homo sapien
gaagagtaccgacactcagtgggcc

SEQ ID NO: 608201 - DNA, 25 bp, Homo sapien
gtccacagcggtcggcttatgccag

SEQ ID NO: 608202 - DNA, 25 bp, Homo sapien
cagtggcttgcgaactggcctcagt

SEQ ID NO: 608203 - DNA, 25 bp, Homo sapien
agtgggcctgggtacatcacagcga

SEQ ID NO: 608204 - DNA, 25 bp, Homo sapien
cacttcatcttcacccacgtccaaa

SEQ ID NO: 608205 - DNA, 25 bp, Homo sapien
ttcatcttcacccacgtccaaaggt

SEQ ID NO: 608206 - DNA, 25 bp, Homo sapien
gcacacttcatcttcacccacgtcc

SEQ ID NO: 608207 - DNA, 25 bp, Homo sapien
atcttcacccacgtccaaaggtttg

SEQ ID NO: 608208 - DNA, 25 bp, Homo sapien
aagagtcatttgttacaacttcctg

SEQ ID NO: 608209 - DNA, 25 bp, Homo sapien
agtcatttgttacaacttcctgtgg

SEQ ID NO: 608210 - DNA, 25 bp, Homo sapien
gagtcatttgttacaacttcctgtg

SEQ ID NO: 608211 - DNA, 25 bp, Homo sapien
gtcatttgttacaacttcctgtggt

SEQ ID NO: 608212 - DNA, 25 bp, Homo sapien
gctgcacatctggaagttgacgcta

SEQ ID NO: 608213 - DNA, 25 bp, Homo sapien
tcagcttggctcacagtgtcctcag

SEQ ID NO: 608214 - DNA, 25 bp, Homo sapien
gcctgtctatgattgtcccctggga

SEQ ID NO: 608215 - DNA, 25 bp, Homo sapien
tatcattcatatggccatgccccgc

SEQ ID NO: 608216 - DNA, 25 bp, Homo sapien
tgcgccggcacaagtaccataatgt

SEQ ID NO: 608217 - DNA, 25 bp, Homo sapien
cacattctcatatggagatgggtct

SEQ ID NO: 608218 - DNA, 25 bp, Homo sapien
gttttaacagctgagagggtaagtc

SEQ ID NO: 608219 - DNA, 25 bp, Homo sapien
agatgggtctactgctcgtgtttcc

SEQ ID NO: 608220 - DNA, 25 bp, Homo sapien
ggctgatgctaggaatctcaagcgc

SEQ ID NO: 608221 - DNA, 25 bp, Homo sapien
tcatgttgccacaaaactttggaat

SEQ ID NO: 608222 - DNA, 25 bp, Homo sapien
taggaatctcaagcgcaggaatgcg

SEQ ID NO: 608223 - DNA, 25 bp, Homo sapien
tatcatcaccgtcgcagctctttct

SEQ ID NO: 608224 - DNA, 25 bp, Homo sapien
acattctccacatctgcccaagggc

SEQ ID NO: 608225 - DNA, 25 bp, Homo sapien
agtcactgtgcaagcgcagacacac

SEQ ID NO: 608226 - DNA, 25 bp, Homo sapien
gcagtcactgtgcaagcgcagacac

SEQ ID NO: 608227 - DNA, 25 bp, Homo sapien
tccacatctgcccaagggctgcagt

SEQ ID NO: 608228 - DNA, 25 bp, Homo sapien
gaagttcagctgactgatgctccca

SEQ ID NO: 608229 - DNA, 25 bp, Homo sapien
gttcagctgactgatgctcccattt

SEQ ID NO: 608230 - DNA, 25 bp, Homo sapien
tggctgaagttcagctgactgatgc

SEQ ID NO: 608231 - DNA, 25 bp, Homo sapien
cagctgactgatgctcccatttaat

SEQ ID NO: 608232 - DNA, 25 bp, Homo sapien
ctggacatgagaccttgagatgctg

SEQ ID NO: 608233 - DNA, 25 bp, Homo sapien
tggacatgagaccttgagatgctgt

SEQ ID NO: 608234 - DNA, 25 bp, Homo sapien
gaggcagacccagggttatccatgg

SEQ ID NO: 608235 - DNA, 25 bp, Homo sapien
ctggtctggggcatcactctgggcc

SEQ ID NO: 608236 - DNA, 25 bp, Homo sapien
gccatgtctgaacccaggcttctgg

SEQ ID NO: 608237 - DNA, 25 bp, Homo sapien
ggagccatgtctgaacccaggcttc

SEQ ID NO: 608238 - DNA, 25 bp, Homo sapien
catgtctgaacccaggcttctggga

SEQ ID NO: 608239 - DNA, 25 bp, Homo sapien
tctgaacccaggcttctgggatcct

SEQ ID NO: 608240 - DNA, 25 bp, Homo sapien
cagcctctttgagggtgtctcgtct

SEQ ID NO: 608241 - DNA, 25 bp, Homo sapien
gcctctttgagggtgtctcgtctgt

SEQ ID NO: 608242 - DNA, 25 bp, Homo sapien
tttgagggtgtctcgtctgtttcca

SEQ ID NO: 608243 - DNA, 25 bp, Homo sapien
gagggtgtctcgtctgtttccagca

SEQ ID NO: 608244 - DNA, 25 bp, Homo sapien
ggtacttgctctgcacagtcaaccg

SEQ ID NO: 608245 - DNA, 25 bp, Homo sapien
cagtcaaccgggggggcacaatgtt

SEQ ID NO: 608246 - DNA, 25 bp, Homo sapien
ctccatccaaagaggtacttgctct

SEQ ID NO: 608247 - DNA, 25 bp, Homo sapien
tacttgctctgcacagtcaaccggg

SEQ ID NO: 608248 - DNA, 25 bp, Homo sapien
tttccagaccggcaaagagcccgga

SEQ ID NO: 608249 - DNA, 25 bp, Homo sapien
gcaaagagcccggaggcacaaggca

SEQ ID NO: 608250 - DNA, 25 bp, Homo sapien
cagactttccagaccggcaaagagc

SEQ ID NO: 608251 - DNA, 25 bp, Homo sapien
cacaaggcaccgtgagtgccttggg

SEQ ID NO: 608252 - DNA, 25 bp, Homo sapien
aggagagctgggccgaggaaggtcc

SEQ ID NO: 608253 - DNA, 25 bp, Homo sapien
gagagctgggccgaggaaggtccac

SEQ ID NO: 608254 - DNA, 25 bp, Homo sapien
gcaggagagctgggccgaggaaggt

SEQ ID NO: 608255 - DNA, 25 bp, Homo sapien
agagctgggccgaggaaggtccacg

SEQ ID NO: 608256 - DNA, 25 bp, Homo sapien
cgccttggggctctttgaaaatcct

SEQ ID NO: 608257 - DNA, 25 bp, Homo sapien
tttgaaaatcctcagggactcccaa

SEQ ID NO: 608258 - DNA, 25 bp, Homo sapien
gggctctttgaaaatcctcagggac

SEQ ID NO: 608259 - DNA, 25 bp, Homo sapien
tttctctgtccccagcgccttgggg

SEQ ID NO: 608260 - DNA, 25 bp, Homo sapien
gcagggagtaggacaactgttcagc

SEQ ID NO: 608261 - DNA, 25 bp, Homo sapien
gagtaggacaactgttcagctagaa

SEQ ID NO: 608262 - DNA, 25 bp, Homo sapien
aaggatggcagggagtaggacaact

SEQ ID NO: 608263 - DNA, 25 bp, Homo sapien
aggacaactgttcagctagaatgac

SEQ ID NO: 608264 - DNA, 25 bp, Homo sapien
gggtagagggatgccaacatcgaat

SEQ ID NO: 608265 - DNA, 25 bp, Homo sapien
ctgggtagagggatgccaacatcga

SEQ ID NO: 608266 - DNA, 25 bp, Homo sapien
tagagggatgccaacatcgaatttg

SEQ ID NO: 608267 - DNA, 25 bp, Homo sapien
gggatgccaacatcgaatttgcctc

SEQ ID NO: 608268 - DNA, 25 bp, Homo sapien
gactactgttggtgtgtgtttgcca

SEQ ID NO: 608269 - DNA, 25 bp, Homo sapien
tcagcacactggactactgttggtg

SEQ ID NO: 608270 - DNA, 25 bp, Homo sapien
gaataggaatagttggttcagcaca

SEQ ID NO: 608271 - DNA, 25 bp, Homo sapien
tgtttgccattagtgacctcatttg

SEQ ID NO: 608272 - DNA, 25 bp, Homo sapien
tggtatgcccatcgcctttccgagg

SEQ ID NO: 608273 - DNA, 25 bp, Homo sapien
tcatcatgagggttgacttggcctg

SEQ ID NO: 608274 - DNA, 25 bp, Homo sapien
ctttccgaggtgtctgatccgtgct

SEQ ID NO: 608275 - DNA, 25 bp, Homo sapien
ctactgagggcttgtcgaatattca

SEQ ID NO: 608276 - DNA, 25 bp, Homo sapien
tgtttaaagagcaccaggaccgaat

SEQ ID NO: 608277 - DNA, 25 bp, Homo sapien
caacgaaaagtggtacggcagtgac

SEQ ID NO: 608278 - DNA, 25 bp, Homo sapien
gctttgccacgatgccaacaggtga

SEQ ID NO: 608279 - DNA, 25 bp, Homo sapien
gaagacaagccgagtagccatgatg

SEQ ID NO: 608280 - DNA, 25 bp, Homo sapien
cgtaggctgcgcattccggccttga

SEQ ID NO: 608281 - DNA, 25 bp, Homo sapien
cctgtctcatgctgctccgtaggct

SEQ ID NO: 608282 - DNA, 25 bp, Homo sapien
tgtgacaagatccattgaagccact

SEQ ID NO: 608283 - DNA, 25 bp, Homo sapien
cgcattccggccttgatggtgacca

SEQ ID NO: 608284 - DNA, 25 bp, Homo sapien
cacacacgtgtgttcttacagccca

SEQ ID NO: 608285 - DNA, 25 bp, Homo sapien
gctgctgctcatttggggcccacca

SEQ ID NO: 608286 - DNA, 25 bp, Homo sapien
tgcccactagtgtgggaaccaacac

SEQ ID NO: 608287 - DNA, 25 bp, Homo sapien
acagccgttcccctcgctgctgagt

SEQ ID NO: 608288 - DNA, 25 bp, Homo sapien
gcagagatttgctaccgctaaagat

SEQ ID NO: 608289 - DNA, 25 bp, Homo sapien
cagaaagaaggtccagcaacgaatt

SEQ ID NO: 608290 - DNA, 25 bp, Homo sapien
cattcatcaaacctcccagtagcag

SEQ ID NO: 608291 - DNA, 25 bp, Homo sapien
gctataccctggattgtaccctgga

SEQ ID NO: 608292 - DNA, 25 bp, Homo sapien
gaacatgcttttcactacacttaac

SEQ ID NO: 608293 - DNA, 25 bp, Homo sapien
cattgtgctagaacctctgtaggta

SEQ ID NO: 608294 - DNA, 25 bp, Homo sapien
tgggtccttcatatacactattgtc

SEQ ID NO: 608295 - DNA, 25 bp, Homo sapien
tacagtcataatggtgaacaaagca

SEQ ID NO: 608296 - DNA, 25 bp, Homo sapien
tatacacatatattcgtgtgttggg

SEQ ID NO: 608297 - DNA, 25 bp, Homo sapien
catatattcgtgtgttgggattttt

SEQ ID NO: 608298 - DNA, 25 bp, Homo sapien
gacgataggcacattggccaccatg

SEQ ID NO: 608299 - DNA, 25 bp, Homo sapien
gtagctaggacgataggcacattgg

SEQ ID NO: 608300 - DNA, 25 bp, Homo sapien
cacggctgtctgttgttatggagtc

SEQ ID NO: 608301 - DNA, 25 bp, Homo sapien
tcctcctggatgctagtgtgtctta

SEQ ID NO: 608302 - DNA, 25 bp, Homo sapien
gcagaattcacactgtatggagcag

SEQ ID NO: 608303 - DNA, 25 bp, Homo sapien
caagagcacattctgggacacggct

SEQ ID NO: 608304 - DNA, 25 bp, Homo sapien
gatggtggttgtagatctttggtag

SEQ ID NO: 608305 - DNA, 25 bp, Homo sapien
gatctttggtagctgccaagtccat

SEQ ID NO: 608306 - DNA, 25 bp, Homo sapien
ggttgtagatctttggtagctgcca

SEQ ID NO: 608307 - DNA, 25 bp, Homo sapien
tgtagatctttggtagctgccaagt

SEQ ID NO: 608308 - DNA, 25 bp, Homo sapien
aatccgattcaggacgactgaaaga

SEQ ID NO: 608309 - DNA, 25 bp, Homo sapien
cagatgaatccgattcaggacgact

SEQ ID NO: 608310 - DNA, 25 bp, Homo sapien
gatgaatccgattcaggacgactga

SEQ ID NO: 608311 - DNA, 25 bp, Homo sapien
tgaatccgattcaggacgactgaaa

SEQ ID NO: 608312 - DNA, 25 bp, Homo sapien
tacgactctaatctcattggggtca

SEQ ID NO: 608313 - DNA, 25 bp, Homo sapien
tctaatctcattggggtcaaacttc

SEQ ID NO: 608314 - DNA, 25 bp, Homo sapien
tgcagacatggcatcgacttcaccc

SEQ ID NO: 608315 - DNA, 25 bp, Homo sapien
gacccaggggtcttatcctgggagc

SEQ ID NO: 608316 - DNA, 25 bp, Homo sapien
tccttagacccttccagtcactagt

SEQ ID NO: 608317 - DNA, 25 bp, Homo sapien
tagacccttccagtcactagttgcc

SEQ ID NO: 608318 - DNA, 25 bp, Homo sapien
cttagacccttccagtcactagttg

SEQ ID NO: 608319 - DNA, 25 bp, Homo sapien
taatccttagacccttccagtcact

SEQ ID NO: 608320 - DNA, 25 bp, Homo sapien
ctgtctattggtggttccttgaggg

SEQ ID NO: 608321 - DNA, 25 bp, Homo sapien
gtttctttctgtctattggtggttc

SEQ ID NO: 608322 - DNA, 25 bp, Homo sapien
ctttctgtctattggtggttccttg

SEQ ID NO: 608323 - DNA, 25 bp, Homo sapien
tgtttctttctgtctattggtggtt

SEQ ID NO: 608324 - DNA, 25 bp, Homo sapien
cacagactgggcagtagtcagtccc

SEQ ID NO: 608325 - DNA, 25 bp, Homo sapien
gactgggcagtagtcagtccccagg

SEQ ID NO: 608326 - DNA, 25 bp, Homo sapien
cagacacagactgggcagtagtcag

SEQ ID NO: 608327 - DNA, 25 bp, Homo sapien
gggcagtagtcagtccccaggagct

SEQ ID NO: 608328 - DNA, 25 bp, Homo sapien
cttggccgctgcactctttgcaaac

SEQ ID NO: 608329 - DNA, 25 bp, Homo sapien
ccttggccgctgcactctttgcaaa

SEQ ID NO: 608330 - DNA, 25 bp, Homo sapien
tccttggccgctgcactctttgcaa

SEQ ID NO: 608331 - DNA, 25 bp, Homo sapien
cccgcttatggccttaggagatatt

SEQ ID NO: 608332 - DNA, 25 bp, Homo sapien
taacatgagatttgccagagtctgc

SEQ ID NO: 608333 - DNA, 25 bp, Homo sapien
tgaacacctattgatgttgatgacg

SEQ ID NO: 608334 - DNA, 25 bp, Homo sapien
gcctcagaggctagccaaggctgat

SEQ ID NO: 608335 - DNA, 25 bp, Homo sapien
tgctcctacggaagcactcatacat

SEQ ID NO: 608336 - DNA, 25 bp, Homo sapien
taaatgccgtgctcctacggaagca

SEQ ID NO: 608337 - DNA, 25 bp, Homo sapien
aagataattaaatgccgtgctccta

SEQ ID NO: 608338 - DNA, 25 bp, Homo sapien
gccgtgctcctacggaagcactcat

SEQ ID NO: 608339 - DNA, 25 bp, Homo sapien
tgccatcccttttaattctcctgag

SEQ ID NO: 608340 - DNA, 25 bp, Homo sapien
gacaggtagcacaaatagctgccta

SEQ ID NO: 608341 - DNA, 25 bp, Homo sapien
tatagctagtcttcaccatgtggca

SEQ ID NO: 608342 - DNA, 25 bp, Homo sapien
gcagacgccatagattgccatccct

SEQ ID NO: 608343 - DNA, 25 bp, Homo sapien
tgcttgttacaaagcggccacccag

SEQ ID NO: 608344 - DNA, 25 bp, Homo sapien
gtgtactgacccactagccttggaa

SEQ ID NO: 608345 - DNA, 25 bp, Homo sapien
ttgaccttagagcagaaatagcccc

SEQ ID NO: 608346 - DNA, 25 bp, Homo sapien
tcaagagaaacgtagcagacagctt

SEQ ID NO: 608347 - DNA, 25 bp, Homo sapien
tcacccaggcataatcacgtctcat

SEQ ID NO: 608348 - DNA, 25 bp, Homo sapien
tgtgtcacccaggcataatcacgtc

SEQ ID NO: 608349 - DNA, 25 bp, Homo sapien
aatcacgtctcattgcaactttgac

SEQ ID NO: 608350 - DNA, 25 bp, Homo sapien
taatcacgtctcattgcaactttga

SEQ ID NO: 608351 - DNA, 25 bp, Homo sapien
gaagcagctggttcagaaggtcaag

SEQ ID NO: 608352 - DNA, 25 bp, Homo sapien
ctgaagcagctggttcagaaggtca

SEQ ID NO: 608353 - DNA, 25 bp, Homo sapien
agcagctggttcagaaggtcaagca

SEQ ID NO: 608354 - DNA, 25 bp, Homo sapien
ctcctgaagcagctggttcagaagg

SEQ ID NO: 608355 - DNA, 25 bp, Homo sapien
tgttgacactgagttttgggacact

SEQ ID NO: 608356 - DNA, 25 bp, Homo sapien
cactgagttttgggacactgcagaa

SEQ ID NO: 608357 - DNA, 25 bp, Homo sapien
cctgttgacactgagttttgggaca

SEQ ID NO: 608358 - DNA, 25 bp, Homo sapien
ctgagttttgggacactgcagaagc

SEQ ID NO: 608359 - DNA, 25 bp, Homo sapien
ttcgagaccccatagcctggtaagg

SEQ ID NO: 608360 - DNA, 25 bp, Homo sapien
ggttgctccaagtgcctctctgtga

SEQ ID NO: 608361 - DNA, 25 bp, Homo sapien
tatgacctaggtggtcctttgcctg

SEQ ID NO: 608362 - DNA, 25 bp, Homo sapien
tctcctctgatggagttggctcagg

SEQ ID NO: 608363 - DNA, 25 bp, Homo sapien
ctctccagcctcatctccttccact

SEQ ID NO: 608364 - DNA, 25 bp, Homo sapien
cagcctcatctccttccactcccat

SEQ ID NO: 608365 - DNA, 25 bp, Homo sapien
tccagcctcatctccttccactccc

SEQ ID NO: 608366 - DNA, 25 bp, Homo sapien
tctccagcctcatctccttccactc

SEQ ID NO: 608367 - DNA, 25 bp, Homo sapien
tgtgagtataacagccatgggcatc

SEQ ID NO: 608368 - DNA, 25 bp, Homo sapien
catttaaatgaactagaggccagca

SEQ ID NO: 608369 - DNA, 25 bp, Homo sapien
tgagcagacagcaaacctgcaggtt

SEQ ID NO: 608370 - DNA, 25 bp, Homo sapien
caaggcagggcagttgttttcaaat

SEQ ID NO: 608371 - DNA, 25 bp, Homo sapien
caagagcattgttccagggttccag

SEQ ID NO: 608372 - DNA, 25 bp, Homo sapien
caaacactagaggaaggtggatgcc

SEQ ID NO: 608373 - DNA, 25 bp, Homo sapien
tagtcacttgctggacactcatgga

SEQ ID NO: 608374 - DNA, 25 bp, Homo sapien
gacagggatttccttccaatgccaa

SEQ ID NO: 608375 - DNA, 25 bp, Homo sapien
ggatccagctaatcttagaaccatg

SEQ ID NO: 608376 - DNA, 25 bp, Homo sapien
tcagagtcaaatgcaggatccagct

SEQ ID NO: 608377 - DNA, 25 bp, Homo sapien
attaattatcagagtcaaatgcagg

SEQ ID NO: 608378 - DNA, 25 bp, Homo sapien
tctccatttgggtaattaattatca

SEQ ID NO: 608379 - DNA, 25 bp, Homo sapien
gaagacatagacagctgtgaaagaa

SEQ ID NO: 608380 - DNA, 25 bp, Homo sapien
ctggaagacatagacagctgtgaaa

SEQ ID NO: 608381 - DNA, 25 bp, Homo sapien
cctggaagacatagacagctgtgaa

SEQ ID NO: 608382 - DNA, 25 bp, Homo sapien
tggaagacatagacagctgtgaaag

SEQ ID NO: 608383 - DNA, 25 bp, Homo sapien
gactcccggagtcaaggtggacatg

SEQ ID NO: 608384 - DNA, 25 bp, Homo sapien
ccaagatctggataaacctctccca

SEQ ID NO: 608385 - DNA, 25 bp, Homo sapien
gaaaagcattgattgccaagatctg

SEQ ID NO: 608386 - DNA, 25 bp, Homo sapien
ccctcattactggagttaaggctgg

SEQ ID NO: 608387 - DNA, 25 bp, Homo sapien
aacagcatgcaaagaatggccacat

SEQ ID NO: 608388 - DNA, 25 bp, Homo sapien
ttaccaacaggaaattacaactcca

SEQ ID NO: 608389 - DNA, 25 bp, Homo sapien
tccatttacatgtgtctctggggaa

SEQ ID NO: 608390 - DNA, 25 bp, Homo sapien
taccaacaggaaattacaactccat

SEQ ID NO: 608391 - DNA, 25 bp, Homo sapien
tagagccttagggaataaaccatta

SEQ ID NO: 608392 - DNA, 25 bp, Homo sapien
taatcaagtcatttgattgcctcat

SEQ ID NO: 608393 - DNA, 25 bp, Homo sapien
tagggaataaaccattaatcaagtc

SEQ ID NO: 608394 - DNA, 25 bp, Homo sapien
ccatgtgctttagagccttagggaa

SEQ ID NO: 608395 - DNA, 25 bp, Homo sapien
tgctgaaaactgtacagagtaaaag

SEQ ID NO: 608396 - DNA, 25 bp, Homo sapien
tctgctgagggataaccaagaggta

SEQ ID NO: 608397 - DNA, 25 bp, Homo sapien
tggaggataatttagggccaatatc

SEQ ID NO: 608398 - DNA, 25 bp, Homo sapien
tgggaaaacgttcatgcgcagcacc

SEQ ID NO: 608399 - DNA, 25 bp, Homo sapien
cagcctgatctaagtacggtgggta

SEQ ID NO: 608400 - DNA, 25 bp, Homo sapien
ctcataaagtgtccgatgagcagca

SEQ ID NO: 608401 - DNA, 25 bp, Homo sapien
tcgagggcggaagtcacagcctgat

SEQ ID NO: 608402 - DNA, 25 bp, Homo sapien
gcagcgccatggtcctttgtaacct

SEQ ID NO: 608403 - DNA, 25 bp, Homo sapien
gcacaaacaacgctagggctaaatg

SEQ ID NO: 608404 - DNA, 25 bp, Homo sapien
tgtcctcaaacgcacaaacaacgct

SEQ ID NO: 608405 - DNA, 25 bp, Homo sapien
caacgctagggctaaatgagcacac

SEQ ID NO: 608406 - DNA, 25 bp, Homo sapien
tcagcgaatgtcctcaaacgcacaa

SEQ ID NO: 608407 - DNA, 25 bp, Homo sapien
gaaaattctataacagcgctcgtga

SEQ ID NO: 608408 - DNA, 25 bp, Homo sapien
caagtatcagaatcagttccacctg

SEQ ID NO: 608409 - DNA, 25 bp, Homo sapien
ccacctgtaccaagttctaacggca

SEQ ID NO: 608410 - DNA, 25 bp, Homo sapien
tctaacggcacttctagctgtatag

SEQ ID NO: 608411 - DNA, 25 bp, Homo sapien
tcatccaccttaggattcacatggg

SEQ ID NO: 608412 - DNA, 25 bp, Homo sapien
cttcatccaccttaggattcacatg

SEQ ID NO: 608413 - DNA, 25 bp, Homo sapien
ccaccttaggattcacatgggcttc

SEQ ID NO: 608414 - DNA, 25 bp, Homo sapien
tccaccttaggattcacatgggctt

SEQ ID NO: 608415 - DNA, 25 bp, Homo sapien
gatgatttccgtaaagtgagtgatt

SEQ ID NO: 608416 - DNA, 25 bp, Homo sapien
gcttgggaacatatgatagatgatt

SEQ ID NO: 608417 - DNA, 25 bp, Homo sapien
gctccaaggactgaatcatccaatt

SEQ ID NO: 608418 - DNA, 25 bp, Homo sapien
cttcctggtgcaggtgctagggctt

SEQ ID NO: 608419 - DNA, 25 bp, Homo sapien
cactatatcatcgacatctggctgt

SEQ ID NO: 608420 - DNA, 25 bp, Homo sapien
tcactatatcatcgacatctggctg

SEQ ID NO: 608421 - DNA, 25 bp, Homo sapien
actcactatatcatcgacatctggc

SEQ ID NO: 608422 - DNA, 25 bp, Homo sapien
ctatatcatcgacatctggctgtgc

SEQ ID NO: 608423 - DNA, 25 bp, Homo sapien
gttcaatagagatatgtccacagca

SEQ ID NO: 608424 - DNA, 25 bp, Homo sapien
agagcagcagttcaatagagatatg

SEQ ID NO: 608425 - DNA, 25 bp, Homo sapien
gtagccacgactagcaggcggcgct

SEQ ID NO: 608426 - DNA, 25 bp, Homo sapien
tagccacgactagcaggcggcgctt

SEQ ID NO: 608427 - DNA, 25 bp, Homo sapien
ttacaattagaatcagctcttccgt

SEQ ID NO: 608428 - DNA, 25 bp, Homo sapien
acaattagaatcagctcttccgtgg

SEQ ID NO: 608429 - DNA, 25 bp, Homo sapien
tacaattagaatcagctcttccgtg

SEQ ID NO: 608430 - DNA, 25 bp, Homo sapien
gctggccgttggctttcctccgcat

SEQ ID NO: 608431 - DNA, 25 bp, Homo sapien
ggtgcttcctgtggctctaccatcc

SEQ ID NO: 608432 - DNA, 25 bp, Homo sapien
ggacccggggtgcttcctgtggctc

SEQ ID NO: 608433 - DNA, 25 bp, Homo sapien
atgcaagtatccatggctggccgtt

SEQ ID NO: 608434 - DNA, 25 bp, Homo sapien
tctgccctgtgcaggtagagtgaca

SEQ ID NO: 608435 - DNA, 25 bp, Homo sapien
ctattcattccatgtgcagttgtcc

SEQ ID NO: 608436 - DNA, 25 bp, Homo sapien
gtctgccctgtgcaggtagagtgac

SEQ ID NO: 608437 - DNA, 25 bp, Homo sapien
tgccctgtgcaggtagagtgacagt

SEQ ID NO: 608438 - DNA, 25 bp, Homo sapien
cttttgagtgcatgtagagagtcat

SEQ ID NO: 608439 - DNA, 25 bp, Homo sapien
ctcatcttttgagtgcatgtagaga

SEQ ID NO: 608440 - DNA, 25 bp, Homo sapien
tcttttgagtgcatgtagagagtca

SEQ ID NO: 608441 - DNA, 25 bp, Homo sapien
tggtactcatcttttgagtgcatgt

SEQ ID NO: 608442 - DNA, 25 bp, Homo sapien
tgctcaattctcaccagaaggacaa

SEQ ID NO: 608443 - DNA, 25 bp, Homo sapien
ttgtctttatgtccacagtatagtg

SEQ ID NO: 608444 - DNA, 25 bp, Homo sapien
tcctgtagaggcaggactagcaggt

SEQ ID NO: 608445 - DNA, 25 bp, Homo sapien
ctagcaggtgcatctctgacctgga

SEQ ID NO: 608446 - DNA, 25 bp, Homo sapien
cgggccgcgaggtccgtgagacgcg

SEQ ID NO: 608447 - DNA, 25 bp, Homo sapien
cgcgaggtccgtgagacgcgcggtg

SEQ ID NO: 608448 - DNA, 25 bp, Homo sapien
caggcgggccgcgaggtccgtgaga

SEQ ID NO: 608449 - DNA, 25 bp, Homo sapien
aggtccgtgagacgcgcggtgcgat

SEQ ID NO: 608450 - DNA, 25 bp, Homo sapien
cgactcgctggacacgctgagcaac

SEQ ID NO: 608451 - DNA, 25 bp, Homo sapien
aagaagaaatgttcagcaggctggc

SEQ ID NO: 608452 - DNA, 25 bp, Homo sapien
aactgcaagaagaaatgttcagcag

SEQ ID NO: 608453 - DNA, 25 bp, Homo sapien
aggctggcaacactggttatcttgg

SEQ ID NO: 608454 - DNA, 25 bp, Homo sapien
gctggcaacactggttatcttggtg

SEQ ID NO: 608455 - DNA, 25 bp, Homo sapien
ccactctttcattcagagacaccat

SEQ ID NO: 608456 - DNA, 25 bp, Homo sapien
tggccaaaactgtctccttggaagc

SEQ ID NO: 608457 - DNA, 25 bp, Homo sapien
gccactctttcattcagagacacca

SEQ ID NO: 608458 - DNA, 25 bp, Homo sapien
tgtctccttggaagccactctttca

SEQ ID NO: 608459 - DNA, 25 bp, Homo sapien
ctttgaaccagagacacctaagctc

SEQ ID NO: 608460 - DNA, 25 bp, Homo sapien
tttgaaccagagacacctaagctca

SEQ ID NO: 608461 - DNA, 25 bp, Homo sapien
tacattccaccagtcagttccagca

SEQ ID NO: 608462 - DNA, 25 bp, Homo sapien
agtaaagcttccctccgattcctgc

SEQ ID NO: 608463 - DNA, 25 bp, Homo sapien
taagaatatgcaactagaggacgga

SEQ ID NO: 608464 - DNA, 25 bp, Homo sapien
ggctccagggcactcctctaagtat

SEQ ID NO: 608465 - DNA, 25 bp, Homo sapien
cgcttatgtcatccacggccatggg

SEQ ID NO: 608466 - DNA, 25 bp, Homo sapien
cagatttcatatatgggaagtccat

SEQ ID NO: 608467 - DNA, 25 bp, Homo sapien
gggaacaatttccaagcatgcttct

SEQ ID NO: 608468 - DNA, 25 bp, Homo sapien
ttcagatttcatatatgggaagtcc

SEQ ID NO: 608469 - DNA, 25 bp, Homo sapien
gtgagctccgggcccaaagggtcaa

SEQ ID NO: 608470 - DNA, 25 bp, Homo sapien
caccatgcttgacatggccgagaat

SEQ ID NO: 608471 - DNA, 25 bp, Homo sapien
ggactggctgcttcattgccattga

SEQ ID NO: 608472 - DNA, 25 bp, Homo sapien
gtggacatcttcaactgcgtgcgtg

SEQ ID NO: 608473 - DNA, 25 bp, Homo sapien
gacactcttgcttcacgatcctgcg

SEQ ID NO: 608474 - DNA, 25 bp, Homo sapien
aaacttgatccctgacaagggtctc

SEQ ID NO: 608475 - DNA, 25 bp, Homo sapien
aagggtctccggacggtcagctgct

SEQ ID NO: 608476 - DNA, 25 bp, Homo sapien
ccggcctttgaacgtggtgctccac

SEQ ID NO: 608477 - DNA, 25 bp, Homo sapien
gtgttcatcgtctttgtgatttttg

SEQ ID NO: 608478 - DNA, 25 bp, Homo sapien
cttcttggtgttcatcgtctttgtg

SEQ ID NO: 608479 - DNA, 25 bp, Homo sapien
tatctgtttaatgcccgtctttgcc

SEQ ID NO: 608480 - DNA, 25 bp, Homo sapien
tttatctgtttaatgcccgtctttg

SEQ ID NO: 608481 - DNA, 25 bp, Homo sapien
ccatcaaaaggaggtgagtctctgc

SEQ ID NO: 608482 - DNA, 25 bp, Homo sapien
gacaacaccgtgaagatggctggcg

SEQ ID NO: 608483 - DNA, 25 bp, Homo sapien
ccagaattctaacactgtggagcca

SEQ ID NO: 608484 - DNA, 25 bp, Homo sapien
attgaggtccggaaatacatgggcc

SEQ ID NO: 608485 - DNA, 25 bp, Homo sapien
tttatttaactcatactctagtacc

SEQ ID NO: 608486 - DNA, 25 bp, Homo sapien
catactctagtacccatggtttaat

SEQ ID NO: 608487 - DNA, 25 bp, Homo sapien
taactcatactctagtacccatggt

SEQ ID NO: 608488 - DNA, 25 bp, Homo sapien
tatttaactcatactctagtaccca

SEQ ID NO: 608489 - DNA, 25 bp, Homo sapien
aggtagaagatggatgtttgatgag

SEQ ID NO: 608490 - DNA, 25 bp, Homo sapien
ggtagaagatggatgtttgatgagg

SEQ ID NO: 608491 - DNA, 25 bp, Homo sapien
ctaggtagaagatggatgtttgatg

SEQ ID NO: 608492 - DNA, 25 bp, Homo sapien
taggtagaagatggatgtttgatga

SEQ ID NO: 608493 - DNA, 25 bp, Homo sapien
tacggtcacttctatgcggatgttg

SEQ ID NO: 608494 - DNA, 25 bp, Homo sapien
tgttgcatgctgacagcatatctga

SEQ ID NO: 608495 - DNA, 25 bp, Homo sapien
acaataactggtgtcaaaataattc

SEQ ID NO: 608496 - DNA, 25 bp, Homo sapien
tgatgatgacaataactggtgtcaa

SEQ ID NO: 608497 - DNA, 25 bp, Homo sapien
tcaagtctgcttccatcaagtgcat

SEQ ID NO: 608498 - DNA, 25 bp, Homo sapien
tctgtccgcaactgcccaaaggtca

SEQ ID NO: 608499 - DNA, 25 bp, Homo sapien
tgcacagctgataaccgatggctct

SEQ ID NO: 608500 - DNA, 25 bp, Homo sapien
ggccccatgagagtttgcatcgctg

SEQ ID NO: 608501 - DNA, 25 bp, Homo sapien
catgaagatcgaaagagtgttctat

SEQ ID NO: 608502 - DNA, 25 bp, Homo sapien
agagtgttctattttggactgtctg

SEQ ID NO: 608503 - DNA, 25 bp, Homo sapien
ttaaatggagcagtcgatggaacat

SEQ ID NO: 608504 - DNA, 25 bp, Homo sapien
gagcagtcgatggaacatgaagatc

SEQ ID NO: 608505 - DNA, 25 bp, Homo sapien
agagaagcccttatcagcccacaca

SEQ ID NO: 608506 - DNA, 25 bp, Homo sapien
cctgaggattccgacaaggcagaga

SEQ ID NO: 608507 - DNA, 25 bp, Homo sapien
catggcagtgaaatgaaggcattga

SEQ ID NO: 608508 - DNA, 25 bp, Homo sapien
gggagcaccagatacccatatgagt

SEQ ID NO: 608509 - DNA, 25 bp, Homo sapien
tggttttggtatatccacagctttc

SEQ ID NO: 608510 - DNA, 25 bp, Homo sapien
ctggttttggtatatccacagcttt

SEQ ID NO: 608511 - DNA, 25 bp, Homo sapien
tggaggagcattagacttgaggatt

SEQ ID NO: 608512 - DNA, 25 bp, Homo sapien
gaataaaccacttgttggaggagca

SEQ ID NO: 608513 - DNA, 25 bp, Homo sapien
tctaggaataaaccacttgttggag

SEQ ID NO: 608514 - DNA, 25 bp, Homo sapien
cacttgttggaggagcattagactt

SEQ ID NO: 608515 - DNA, 25 bp, Homo sapien
agatcagggatccagtctccacagg

SEQ ID NO: 608516 - DNA, 25 bp, Homo sapien
tcagggatccagtctccacagggag

SEQ ID NO: 608517 - DNA, 25 bp, Homo sapien
atcagggatccagtctccacaggga

SEQ ID NO: 608518 - DNA, 25 bp, Homo sapien
ttagatcagggatccagtctccaca

SEQ ID NO: 608519 - DNA, 25 bp, Homo sapien
ttaggagacagtgctccagcacatg

SEQ ID NO: 608520 - DNA, 25 bp, Homo sapien
gagacagtgctccagcacatggaga

SEQ ID NO: 608521 - DNA, 25 bp, Homo sapien
acagtgctccagcacatggagaagg

SEQ ID NO: 608522 - DNA, 25 bp, Homo sapien
taggagacagtgctccagcacatgg

SEQ ID NO: 608523 - DNA, 25 bp, Homo sapien
caccagagatttatgtcagctttca

SEQ ID NO: 608524 - DNA, 25 bp, Homo sapien
gcagcccaccagagatttatgtcag

SEQ ID NO: 608525 - DNA, 25 bp, Homo sapien
gtgttgagtttttatgccagtcatc

SEQ ID NO: 608526 - DNA, 25 bp, Homo sapien
tatgccagtcatcatgtctgggaag

SEQ ID NO: 608527 - DNA, 25 bp, Homo sapien
gttagcctgcaaggtataccctgcc

SEQ ID NO: 608528 - DNA, 25 bp, Homo sapien
tcaataatcaatcagggcatgctct

SEQ ID NO: 608529 - DNA, 25 bp, Homo sapien
cagaatccctttcatcatggcacag

SEQ ID NO: 608530 - DNA, 25 bp, Homo sapien
ggataggtgaagctctgccctcact

SEQ ID NO: 608531 - DNA, 25 bp, Homo sapien
tgtttagcagtcaaaatcaccaagt

SEQ ID NO: 608532 - DNA, 25 bp, Homo sapien
tacacttgcaactgggttaacgaag

SEQ ID NO: 608533 - DNA, 25 bp, Homo sapien
cagacatatgaagcctcccagtaag

SEQ ID NO: 608534 - DNA, 25 bp, Homo sapien
gggaatgagaagaccctaatgaggc

SEQ ID NO: 608535 - DNA, 25 bp, Homo sapien
tattggaacgccaccgtactcattc

SEQ ID NO: 608536 - DNA, 25 bp, Homo sapien
tcagttcataaaccgacttgctcag

SEQ ID NO: 608537 - DNA, 25 bp, Homo sapien
tctgcagatgaaaagcctgatcagc

SEQ ID NO: 608538 - DNA, 25 bp, Homo sapien
gaaaatgggttagcaaactatggcc

SEQ ID NO: 608539 - DNA, 25 bp, Homo sapien
tctgaggggctaccgctccttcaac

SEQ ID NO: 608540 - DNA, 25 bp, Homo sapien
tgtagaataagcatacatcaggcag

SEQ ID NO: 608541 - DNA, 25 bp, Homo sapien
gctaccgctccttcaacctggtttg

SEQ ID NO: 608542 - DNA, 25 bp, Homo sapien
cttcaacctggtttgtagaataagc

SEQ ID NO: 608543 - DNA, 25 bp, Homo sapien
ttgctcatccgccttgtgcagaggt

SEQ ID NO: 608544 - DNA, 25 bp, Homo sapien
caggtttgctcatccgccttgtgca

SEQ ID NO: 608545 - DNA, 25 bp, Homo sapien
ggtgtggccaaaactggcacctgca

SEQ ID NO: 608546 - DNA, 25 bp, Homo sapien
gaggtgtggccaaaactggcacctg

SEQ ID NO: 608547 - DNA, 25 bp, Homo sapien
tctccgtgctgttgatctccttcct

SEQ ID NO: 608548 - DNA, 25 bp, Homo sapien
gtagtctgggtagccctgaccctct

SEQ ID NO: 608549 - DNA, 25 bp, Homo sapien
cctccctggccggtagtctgggtag

SEQ ID NO: 608550 - DNA, 25 bp, Homo sapien
gagacacacacatctccgtgctgtt

SEQ ID NO: 608551 - DNA, 25 bp, Homo sapien
cacatgttgaggtcgaagtccttct

SEQ ID NO: 608552 - DNA, 25 bp, Homo sapien
ggaggatgctctttatctggatcac

SEQ ID NO: 608553 - DNA, 25 bp, Homo sapien
tatctggatcacatgttgaggtcga

SEQ ID NO: 608554 - DNA, 25 bp, Homo sapien
aggttgtgtaggaggatgctcttta

SEQ ID NO: 608555 - DNA, 25 bp, Homo sapien
ccatgtccaccctggatgaaacaag

SEQ ID NO: 608556 - DNA, 25 bp, Homo sapien
tcagttgcagtatgggctagagttt

SEQ ID NO: 608557 - DNA, 25 bp, Homo sapien
cagctgtactggatcttgcattggt

SEQ ID NO: 608558 - DNA, 25 bp, Homo sapien
cctggatgaaacaaggattccagca

SEQ ID NO: 608559 - DNA, 25 bp, Homo sapien
ggattctggcagagccagaccccat

SEQ ID NO: 608560 - DNA, 25 bp, Homo sapien
cggtggattctggcagagccagacc

SEQ ID NO: 608561 - DNA, 25 bp, Homo sapien
tggattctggcagagccagacccca

SEQ ID NO: 608562 - DNA, 25 bp, Homo sapien
ctttcggtggattctggcagagcca

SEQ ID NO: 608563 - DNA, 25 bp, Homo sapien
caataagtaagctacatgacatcac

SEQ ID NO: 608564 - DNA, 25 bp, Homo sapien
tgacatcacagtcagaacctccatg

SEQ ID NO: 608565 - DNA, 25 bp, Homo sapien
gcctgggtcagcacctaacacatct

SEQ ID NO: 608566 - DNA, 25 bp, Homo sapien
cacatctattaagaaggcaaagtca

SEQ ID NO: 608567 - DNA, 25 bp, Homo sapien
tgtcgggggtaatgctcaaatgacc

SEQ ID NO: 608568 - DNA, 25 bp, Homo sapien
tcagtgccacttgtagttcaggatg

SEQ ID NO: 608569 - DNA, 25 bp, Homo sapien
gatgagtggccccatctaatggaaa

SEQ ID NO: 608570 - DNA, 25 bp, Homo sapien
taatcacattgagtgtgagggaaga

SEQ ID NO: 608571 - DNA, 25 bp, Homo sapien
gattggtggctcagtcctaacttcc

SEQ ID NO: 608572 - DNA, 25 bp, Homo sapien
caatgtcttgcgtatccctgctcag

SEQ ID NO: 608573 - DNA, 25 bp, Homo sapien
gcagtcccagtggtcattccgttca

SEQ ID NO: 608574 - DNA, 25 bp, Homo sapien
ccaagatctggcctttacacaggaa

SEQ ID NO: 608575 - DNA, 25 bp, Homo sapien
ttgtgttggttgatcctgtgcccat

SEQ ID NO: 608576 - DNA, 25 bp, Homo sapien
ttctctctcattgtgttggttgatc

SEQ ID NO: 608577 - DNA, 25 bp, Homo sapien
tcattgtgttggttgatcctgtgcc

SEQ ID NO: 608578 - DNA, 25 bp, Homo sapien
tctctcattgtgttggttgatcctg

SEQ ID NO: 608579 - DNA, 25 bp, Homo sapien
ccttctgtataagacaattggagtt

SEQ ID NO: 608580 - DNA, 25 bp, Homo sapien
attagcttgacctcttttgatacca

SEQ ID NO: 608581 - DNA, 25 bp, Homo sapien
gcagatcttgtcaatatggccatat

SEQ ID NO: 608582 - DNA, 25 bp, Homo sapien
tttgataccattgcagatcttgtca

SEQ ID NO: 608583 - DNA, 25 bp, Homo sapien
gcatgatttacatagccttccacat

SEQ ID NO: 608584 - DNA, 25 bp, Homo sapien
ccttggagtcgaagagtacagtggc

SEQ ID NO: 608585 - DNA, 25 bp, Homo sapien
gcatggaattgcagctgtagcggcc

SEQ ID NO: 608586 - DNA, 25 bp, Homo sapien
taacatgagaatggactgatacagg

SEQ ID NO: 608587 - DNA, 25 bp, Homo sapien
cacttcacgtcttagtaacgtttgg

SEQ ID NO: 608588 - DNA, 25 bp, Homo sapien
tcacttcacgtcttagtaacgtttg

SEQ ID NO: 608589 - DNA, 25 bp, Homo sapien
ggctcacttcacgtcttagtaacgt

SEQ ID NO: 608590 - DNA, 25 bp, Homo sapien
caaggctcacttcacgtcttagtaa

SEQ ID NO: 608591 - DNA, 25 bp, Homo sapien
tgatgtcccttttcaggatgatggc

SEQ ID NO: 608592 - DNA, 25 bp, Homo sapien
tgatggccgaagctaaagttaaccg

SEQ ID NO: 608593 - DNA, 25 bp, Homo sapien
gcaactgatgcaggtttactaggca

SEQ ID NO: 608594 - DNA, 25 bp, Homo sapien
cataaccctaagaaaaacgtcagcg

SEQ ID NO: 608595 - DNA, 25 bp, Homo sapien
aggatgtctccttgttagtgaacta

SEQ ID NO: 608596 - DNA, 25 bp, Homo sapien
ggaaaatggatgtaatcgtggttct

SEQ ID NO: 608597 - DNA, 25 bp, Homo sapien
tggatgtaatcgtggttcttgactc

SEQ ID NO: 608598 - DNA, 25 bp, Homo sapien
actattggtgaggaacttgctggga

SEQ ID NO: 608599 - DNA, 25 bp, Homo sapien
gtaataagggtgtagtactgtctgc

SEQ ID NO: 608600 - DNA, 25 bp, Homo sapien
tctgtaataagggtgtagtactgtc

SEQ ID NO: 608601 - DNA, 25 bp, Homo sapien
catctgtaataagggtgtagtactg

SEQ ID NO: 608602 - DNA, 25 bp, Homo sapien
tgtaataagggtgtagtactgtctg

SEQ ID NO: 608603 - DNA, 25 bp, Homo sapien
taacacctgggcttgcgggtaggtg

SEQ ID NO: 608604 - DNA, 25 bp, Homo sapien
tgggagtggtaacacctgggcttgc

SEQ ID NO: 608605 - DNA, 25 bp, Homo sapien
agccacagagcaggcggtattgaca

SEQ ID NO: 608606 - DNA, 25 bp, Homo sapien
cagagcaggcggtattgacacagct

SEQ ID NO: 608607 - DNA, 25 bp, Homo sapien
tggcaggagtacacactgacatgac

SEQ ID NO: 608608 - DNA, 25 bp, Homo sapien
cagacagagtgttgcagatcataaa

SEQ ID NO: 608609 - DNA, 25 bp, Homo sapien
ggtgcccatttgtgaacccatgctg

SEQ ID NO: 608610 - DNA, 25 bp, Homo sapien
catgctgccctggaacaaggtgctc

SEQ ID NO: 608611 - DNA, 25 bp, Homo sapien
tctggaactcttaagatccaaactg

SEQ ID NO: 608612 - DNA, 25 bp, Homo sapien
acagacgtggttgtctctggaactc

SEQ ID NO: 608613 - DNA, 25 bp, Homo sapien
catcctgtgggtgtacagacgtggt

SEQ ID NO: 608614 - DNA, 25 bp, Homo sapien
taagatccaaactggataaggcaag

SEQ ID NO: 608615 - DNA, 25 bp, Homo sapien
gcaaaagtgggacgctaaggtagcc

SEQ ID NO: 608616 - DNA, 25 bp, Homo sapien
gaaagatactgtgccatgggtgcta

SEQ ID NO: 608617 - DNA, 25 bp, Homo sapien
gagggagaccccacagattgtactg

SEQ ID NO: 608618 - DNA, 25 bp, Homo sapien
cctagaagtctgtaggaggagcaca

SEQ ID NO: 608619 - DNA, 25 bp, Homo sapien
tctacagaagcacctagaggcagtg

SEQ ID NO: 608620 - DNA, 25 bp, Homo sapien
tcctctacagaagcacctagaggca

SEQ ID NO: 608621 - DNA, 25 bp, Homo sapien
cttcctctacagaagcacctagagg

SEQ ID NO: 608622 - DNA, 25 bp, Homo sapien
tacagaagcacctagaggcagtgac

SEQ ID NO: 608623 - DNA, 25 bp, Homo sapien
taactctggcttgttgtaggcatct

SEQ ID NO: 608624 - DNA, 25 bp, Homo sapien
tgtgagagtcatgtcaccccagtcc

SEQ ID NO: 608625 - DNA, 25 bp, Homo sapien
ctttctgtccttgcatgcagcgaga

SEQ ID NO: 608626 - DNA, 25 bp, Homo sapien
agcgagagctgacggaatcccacat

SEQ ID NO: 608627 - DNA, 25 bp, Homo sapien
gctggctcgtggaaccatagaggaa

SEQ ID NO: 608628 - DNA, 25 bp, Homo sapien
ccagaaccagggtggaaatcttgca

SEQ ID NO: 608629 - DNA, 25 bp, Homo sapien
aaatttggtgcaattagactgcgct

SEQ ID NO: 608630 - DNA, 25 bp, Homo sapien
tagactgcgctgaacgtctggtgcc

SEQ ID NO: 608631 - DNA, 25 bp, Homo sapien
tgttttgggtgacacctgtcttgtc

SEQ ID NO: 608632 - DNA, 25 bp, Homo sapien
ttttgggtgacacctgtcttgtcca

SEQ ID NO: 608633 - DNA, 25 bp, Homo sapien
gttttgggtgacacctgtcttgtcc

SEQ ID NO: 608634 - DNA, 25 bp, Homo sapien
tagtgtgcacactcataaggtggga

SEQ ID NO: 608635 - DNA, 25 bp, Homo sapien
ctgtgacggaccctatccatggcca

SEQ ID NO: 608636 - DNA, 25 bp, Homo sapien
gacagctggctatggtcactggcac

SEQ ID NO: 608637 - DNA, 25 bp, Homo sapien
taaggtgggatctctgcatccagct

SEQ ID NO: 608638 - DNA, 25 bp, Homo sapien
gttttgagacactgagtgggtgaca

SEQ ID NO: 608639 - DNA, 25 bp, Homo sapien
tttggggctggataagtaggcaagg

SEQ ID NO: 608640 - DNA, 25 bp, Homo sapien
ttagttttgagacactgagtgggtg

SEQ ID NO: 608641 - DNA, 25 bp, Homo sapien
tttgagacactgagtgggtgacatg

SEQ ID NO: 608642 - DNA, 25 bp, Homo sapien
ctactggatcgggaaagctgattcc

SEQ ID NO: 608643 - DNA, 25 bp, Homo sapien
cactgttgtagtcgaagatctgcat

SEQ ID NO: 608644 - DNA, 25 bp, Homo sapien
ctgaattccagggtcagttatctca

SEQ ID NO: 608645 - DNA, 25 bp, Homo sapien
cagggtcagttatctcactgttgta

SEQ ID NO: 608646 - DNA, 25 bp, Homo sapien
gttatctcactgttgtagtcgaaga

SEQ ID NO: 608647 - DNA, 25 bp, Homo sapien
tggtctaccctgataggctgaggct

SEQ ID NO: 608648 - DNA, 25 bp, Homo sapien
gcagggaacatccagtggacaggaa

SEQ ID NO: 608649 - DNA, 25 bp, Homo sapien
caggttattgtggtctaccctgata

SEQ ID NO: 608650 - DNA, 25 bp, Homo sapien
gctgtggaatctggtaacctgtcct

SEQ ID NO: 608651 - DNA, 25 bp, Homo sapien
aaactgataagaagagatactacat

SEQ ID NO: 608652 - DNA, 25 bp, Homo sapien
atcttagccaaaaggctgagaagca

SEQ ID NO: 608653 - DNA, 25 bp, Homo sapien
ttgatcttagccaaaaggctgagaa

SEQ ID NO: 608654 - DNA, 25 bp, Homo sapien
actgataagaagagatactacattt

SEQ ID NO: 608655 - DNA, 25 bp, Homo sapien
tcaaatactctgcttggttccgcat

SEQ ID NO: 608656 - DNA, 25 bp, Homo sapien
tgcttggttccgcattgccaagctt

SEQ ID NO: 608657 - DNA, 25 bp, Homo sapien
cttggttccgcattgccaagcttgt

SEQ ID NO: 608658 - DNA, 25 bp, Homo sapien
tactctgcttggttccgcattgcca

SEQ ID NO: 608659 - DNA, 25 bp, Homo sapien
tggagccaaagctacaaccatgggc

SEQ ID NO: 608660 - DNA, 25 bp, Homo sapien
ttggagccaaagctacaaccatggg

SEQ ID NO: 608661 - DNA, 25 bp, Homo sapien
cttggagccaaagctacaaccatgg

SEQ ID NO: 608662 - DNA, 25 bp, Homo sapien
gagccaaagctacaaccatgggcat

SEQ ID NO: 608663 - DNA, 25 bp, Homo sapien
ccctctcattagaatgtggcaccca

SEQ ID NO: 608664 - DNA, 25 bp, Homo sapien
ccagagatggctttagtccaatttg

SEQ ID NO: 608665 - DNA, 25 bp, Homo sapien
ttagtccaatttggaagccctccat

SEQ ID NO: 608666 - DNA, 25 bp, Homo sapien
taattccctctcattagaatgtggc

SEQ ID NO: 608667 - DNA, 25 bp, Homo sapien
tagacactttggtcttaggcagccc

SEQ ID NO: 608668 - DNA, 25 bp, Homo sapien
tgtctagacactttggtcttaggca

SEQ ID NO: 608669 - DNA, 25 bp, Homo sapien
agacactttggtcttaggcagcccc

SEQ ID NO: 608670 - DNA, 25 bp, Homo sapien
tctagacactttggtcttaggcagc

SEQ ID NO: 608671 - DNA, 25 bp, Homo sapien
cagtctcagtccttccatgtatggc

SEQ ID NO: 608672 - DNA, 25 bp, Homo sapien
taagccttgtaactgcagcccggca

SEQ ID NO: 608673 - DNA, 25 bp, Homo sapien
gcggtcaccacaaggtgttccatta

SEQ ID NO: 608674 - DNA, 25 bp, Homo sapien
cacagccatggcgaacatctggtac

SEQ ID NO: 608675 - DNA, 25 bp, Homo sapien
ctttgactcctcaagtatgctagca

SEQ ID NO: 608676 - DNA, 25 bp, Homo sapien
gccactctgagtgaacttgtgttca

SEQ ID NO: 608677 - DNA, 25 bp, Homo sapien
tatgctagcaacctgggtggaacct

SEQ ID NO: 608678 - DNA, 25 bp, Homo sapien
tgcatttgtcatattctcttggcca

SEQ ID NO: 608679 - DNA, 25 bp, Homo sapien
gctcttatcctgaaatgcagcaaag

SEQ ID NO: 608680 - DNA, 25 bp, Homo sapien
cacttgaacatctttgctgggcagc

SEQ ID NO: 608681 - DNA, 25 bp, Homo sapien
cagaccaaagggtgcctgagattta

SEQ ID NO: 608682 - DNA, 25 bp, Homo sapien
catcatctagcttctgactctcagc

SEQ ID NO: 608683 - DNA, 25 bp, Homo sapien
ccgatatgggctgtaatgtagtaaa

SEQ ID NO: 608684 - DNA, 25 bp, Homo sapien
cacattcgaggtgcttttccaaacg

SEQ ID NO: 608685 - DNA, 25 bp, Homo sapien
aaagcaatgcagatcggcacattcg

SEQ ID NO: 608686 - DNA, 25 bp, Homo sapien
tataactgttgtggctgtaaaccca

SEQ ID NO: 608687 - DNA, 25 bp, Homo sapien
taatcacacgagagcagcctttgtg

SEQ ID NO: 608688 - DNA, 25 bp, Homo sapien
gatccctaaggctaagagcacagct

SEQ ID NO: 608689 - DNA, 25 bp, Homo sapien
taacctggatgcagcaggtggaccc

SEQ ID NO: 608690 - DNA, 25 bp, Homo sapien
tttcatctaggaaggatgggccagc

SEQ ID NO: 608691 - DNA, 25 bp, Homo sapien
gccactgcatctggcgctttgctga

SEQ ID NO: 608692 - DNA, 25 bp, Homo sapien
tacacaacagctgagtgaccctagg

SEQ ID NO: 608693 - DNA, 25 bp, Homo sapien
atgagtgtgaactgtctgcctggag

SEQ ID NO: 608694 - DNA, 25 bp, Homo sapien
tgaccctagggtctcaactcccagt

SEQ ID NO: 608695 - DNA, 25 bp, Homo sapien
tcacctcttccactgttgttatggg

SEQ ID NO: 608696 - DNA, 25 bp, Homo sapien
cttgttttcaattctgtggaaggtt

SEQ ID NO: 608697 - DNA, 25 bp, Homo sapien
cctcttccactgttgttatgggcat

SEQ ID NO: 608698 - DNA, 25 bp, Homo sapien
ttcaattctgtggaaggttttcacc

SEQ ID NO: 608699 - DNA, 25 bp, Homo sapien
cttcccgaagggttcttatgcttgg

SEQ ID NO: 608700 - DNA, 25 bp, Homo sapien
tcattggcttcagggtgtgtcagcc

SEQ ID NO: 608701 - DNA, 25 bp, Homo sapien
tcttcccgaagggttcttatgcttg

SEQ ID NO: 608702 - DNA, 25 bp, Homo sapien
tctttcattggcttcagggtgtgtc

SEQ ID NO: 608703 - DNA, 25 bp, Homo sapien
caccagtacttcaccgactttcaga

SEQ ID NO: 608704 - DNA, 25 bp, Homo sapien
gccaccagtacttcaccgactttca

SEQ ID NO: 608705 - DNA, 25 bp, Homo sapien
accagtacttcaccgactttcagac

SEQ ID NO: 608706 - DNA, 25 bp, Homo sapien
agtacttcaccgactttcagactgt

SEQ ID NO: 608707 - DNA, 25 bp, Homo sapien
gtgaatccgaatcaaaacagttttg

SEQ ID NO: 608708 - DNA, 25 bp, Homo sapien
tgaaatatatctgcagccaaacaag

SEQ ID NO: 608709 - DNA, 25 bp, Homo sapien
tgcggtttgggctgtcatctgatgt

SEQ ID NO: 608710 - DNA, 25 bp, Homo sapien
ggcctggggcttcatgtgaaatata

SEQ ID NO: 608711 - DNA, 25 bp, Homo sapien
cactggttgacctctcactactggt

SEQ ID NO: 608712 - DNA, 25 bp, Homo sapien
ccaagtgagctcttactgcccctga

SEQ ID NO: 608713 - DNA, 25 bp, Homo sapien
aaaatgatggccctggaccatcatt

SEQ ID NO: 608714 - DNA, 25 bp, Homo sapien
catcattttccaagtgagctcttac

SEQ ID NO: 608715 - DNA, 25 bp, Homo sapien
tccttggtggacatcgaaagtcaca

SEQ ID NO: 608716 - DNA, 25 bp, Homo sapien
tttagcttctatggctgctgagatc

SEQ ID NO: 608717 - DNA, 25 bp, Homo sapien
gaaacatcctttccctggtaatagc

SEQ ID NO: 608718 - DNA, 25 bp, Homo sapien
cagcatttgtggcagctgccgtcct

SEQ ID NO: 608719 - DNA, 25 bp, Homo sapien
cagcgtcttccctgaaatagttgca

SEQ ID NO: 608720 - DNA, 25 bp, Homo sapien
tttgtgttgagtggcagcgtcttcc

SEQ ID NO: 608721 - DNA, 25 bp, Homo sapien
tccctgaaatagttgcaggaaggga

SEQ ID NO: 608722 - DNA, 25 bp, Homo sapien
tctcttttgcattgaagcaattggg

SEQ ID NO: 608723 - DNA, 25 bp, Homo sapien
gcttaaacttttcccagatgactgc

SEQ ID NO: 608724 - DNA, 25 bp, Homo sapien
tttatcagaaactagtccggagaga

SEQ ID NO: 608725 - DNA, 25 bp, Homo sapien
catcatcagtaagcactccccaagt

SEQ ID NO: 608726 - DNA, 25 bp, Homo sapien
caagcatttgaatggcagccgccta

SEQ ID NO: 608727 - DNA, 25 bp, Homo sapien
tttcctgttggttgcccagtgcccc

SEQ ID NO: 608728 - DNA, 25 bp, Homo sapien
tcctgttggttgcccagtgccccat

SEQ ID NO: 608729 - DNA, 25 bp, Homo sapien
ctttcctgttggttgcccagtgccc

SEQ ID NO: 608730 - DNA, 25 bp, Homo sapien
ttcctgttggttgcccagtgcccca

SEQ ID NO: 608731 - DNA, 25 bp, Homo sapien
tgagaaaagtctggctatcagctct

SEQ ID NO: 608732 - DNA, 25 bp, Homo sapien
ctgtactctgtgctgctctctgact

SEQ ID NO: 608733 - DNA, 25 bp, Homo sapien
ctggctatcagctctgtactctgtg

SEQ ID NO: 608734 - DNA, 25 bp, Homo sapien
tctgtgctgctctctgactcgacat

SEQ ID NO: 608735 - DNA, 25 bp, Homo sapien
caatgattccgatgtccccatttct

SEQ ID NO: 608736 - DNA, 25 bp, Homo sapien
tttccaggtgcaatgattccgatgt

SEQ ID NO: 608737 - DNA, 25 bp, Homo sapien
ggtgcaatgattccgatgtccccat

SEQ ID NO: 608738 - DNA, 25 bp, Homo sapien
tgattccgatgtccccatttcttag

SEQ ID NO: 608739 - DNA, 25 bp, Homo sapien
atgtggataacatgctgtgcttgcc

SEQ ID NO: 608740 - DNA, 25 bp, Homo sapien
catgtatcgtcaggtcatggcttaa

SEQ ID NO: 608741 - DNA, 25 bp, Homo sapien
ctgtctgataggcaaactgttgcat

SEQ ID NO: 608742 - DNA, 25 bp, Homo sapien
gctgaagatgtggataacatgctgt

SEQ ID NO: 608743 - DNA, 25 bp, Homo sapien
tgactgagcatcttctatgtagcac

SEQ ID NO: 608744 - DNA, 25 bp, Homo sapien
gttgactgagcatcttctatgtagc

SEQ ID NO: 608745 - DNA, 25 bp, Homo sapien
gactgagcatcttctatgtagcact

SEQ ID NO: 608746 - DNA, 25 bp, Homo sapien
tgagcatcttctatgtagcacttac

SEQ ID NO: 608747 - DNA, 25 bp, Homo sapien
cccctgcagtgaagtctttgtgaga

SEQ ID NO: 608748 - DNA, 25 bp, Homo sapien
ctttgtgagaatgtactgcctcagc

SEQ ID NO: 608749 - DNA, 25 bp, Homo sapien
cagtgaagtctttgtgagaatgtac

SEQ ID NO: 608750 - DNA, 25 bp, Homo sapien
ttggctttgcccctgcagtgaagtc

SEQ ID NO: 608751 - DNA, 25 bp, Homo sapien
gcatagtcctgaccgttgttgctgt

SEQ ID NO: 608752 - DNA, 25 bp, Homo sapien
tcttaacaacactgactgtctcatt

SEQ ID NO: 608753 - DNA, 25 bp, Homo sapien
cacctgtactcttaacaacactgac

SEQ ID NO: 608754 - DNA, 25 bp, Homo sapien
tggccagtgcatagtcctgaccgtt

SEQ ID NO: 608755 - DNA, 25 bp, Homo sapien
gcagagctcccttggggtaggcgct

SEQ ID NO: 608756 - DNA, 25 bp, Homo sapien
agcagagctcccttggggtaggcgc

SEQ ID NO: 608757 - DNA, 25 bp, Homo sapien
cagagctcccttggggtaggcgcta

SEQ ID NO: 608758 - DNA, 25 bp, Homo sapien
tgggcaagcggctgtgacagctcgt

SEQ ID NO: 608759 - DNA, 25 bp, Homo sapien
gaaatggatgggcaagcggctgtga

SEQ ID NO: 608760 - DNA, 25 bp, Homo sapien
aaatggatgggcaagcggctgtgac

SEQ ID NO: 608761 - DNA, 25 bp, Homo sapien
gcggctgtgacagctcgtgtgacat

SEQ ID NO: 608762 - DNA, 25 bp, Homo sapien
gttgcagatgcagcgaccaaacaga

SEQ ID NO: 608763 - DNA, 25 bp, Homo sapien
tctgttgcagatgcagcgaccaaac

SEQ ID NO: 608764 - DNA, 25 bp, Homo sapien
tgcagatgcagcgaccaaacagaca

SEQ ID NO: 608765 - DNA, 25 bp, Homo sapien
atgcagcgaccaaacagacacaggc

SEQ ID NO: 608766 - DNA, 25 bp, Homo sapien
agagtttctactataagttgggcgg

SEQ ID NO: 608767 - DNA, 25 bp, Homo sapien
ctcagagtttctactataagttggg

SEQ ID NO: 608768 - DNA, 25 bp, Homo sapien
cagagtttctactataagttgggcg

SEQ ID NO: 608769 - DNA, 25 bp, Homo sapien
tcttgttcactgggtgtatgttctc

SEQ ID NO: 608770 - DNA, 25 bp, Homo sapien
aggctgctgcgatggtttgaataac

SEQ ID NO: 608771 - DNA, 25 bp, Homo sapien
cattgggttgccagcattgagtgaa

SEQ ID NO: 608772 - DNA, 25 bp, Homo sapien
aagtgtagggcaagaacgtatcagc

SEQ ID NO: 608773 - DNA, 25 bp, Homo sapien
aatttcttcctgacatctggtagcg

SEQ ID NO: 608774 - DNA, 25 bp, Homo sapien
gtgacatcttcttctatctagcgga

SEQ ID NO: 608775 - DNA, 25 bp, Homo sapien
ggcaagtgtacgtgtgacaccccat

SEQ ID NO: 608776 - DNA, 25 bp, Homo sapien
gcctgatgggtcctctacaactaga

SEQ ID NO: 608777 - DNA, 25 bp, Homo sapien
tgcccgaagcggatgatgacttgtc

SEQ ID NO: 608778 - DNA, 25 bp, Homo sapien
ctggctgctcttagaacccaggtcc

SEQ ID NO: 608779 - DNA, 25 bp, Homo sapien
tcttctgacttgcaccagcattttc

SEQ ID NO: 608780 - DNA, 25 bp, Homo sapien
cagcattttcactgggttttggttg

SEQ ID NO: 608781 - DNA, 25 bp, Homo sapien
tggctgctcttagaacccaggtccc

SEQ ID NO: 608782 - DNA, 25 bp, Homo sapien
ggctctgatctgaagcccagagtac

SEQ ID NO: 608783 - DNA, 25 bp, Homo sapien
attctgaggctctgatctgaagccc

SEQ ID NO: 608784 - DNA, 25 bp, Homo sapien
ttctgaggctctgatctgaagccca

SEQ ID NO: 608785 - DNA, 25 bp, Homo sapien
gcaagtatagctggccgagagaccg

SEQ ID NO: 608786 - DNA, 25 bp, Homo sapien
agcagaggcaagtatagctggccga

SEQ ID NO: 608787 - DNA, 25 bp, Homo sapien
ccgagagaccggtggtactggctgg

SEQ ID NO: 608788 - DNA, 25 bp, Homo sapien
cagaggcaagtatagctggccgaga

SEQ ID NO: 608789 - DNA, 25 bp, Homo sapien
ccatagttcatagtaaagtgctcag

SEQ ID NO: 608790 - DNA, 25 bp, Homo sapien
cgtggagtaacgtctttacctagca

SEQ ID NO: 608791 - DNA, 25 bp, Homo sapien
gaattcttaaatcagggtttgtgga

SEQ ID NO: 608792 - DNA, 25 bp, Homo sapien
tgattttatggcttacgtggagtaa

SEQ ID NO: 608793 - DNA, 25 bp, Homo sapien
caatgggaacacctattcagcctgg

SEQ ID NO: 608794 - DNA, 25 bp, Homo sapien
gggaacttgcttctctgaagactga

SEQ ID NO: 608795 - DNA, 25 bp, Homo sapien
gaaagtgtgacctccacgtggaaac

SEQ ID NO: 608796 - DNA, 25 bp, Homo sapien
cacagcacttctcttgcaatgggaa

SEQ ID NO: 608797 - DNA, 25 bp, Homo sapien
gaggaagatgccagaatgcttaggt

SEQ ID NO: 608798 - DNA, 25 bp, Homo sapien
tctattttcatcaaacgctggtcgt

SEQ ID NO: 608799 - DNA, 25 bp, Homo sapien
ctattttcatcaaacgctggtcgtc

SEQ ID NO: 608800 - DNA, 25 bp, Homo sapien
gaagatgccagaatgcttaggtcta

SEQ ID NO: 608801 - DNA, 25 bp, Homo sapien
tctcgagctgtactaaggggaatgc

SEQ ID NO: 608802 - DNA, 25 bp, Homo sapien
tagacaaagctccattcagaaactg

SEQ ID NO: 608803 - DNA, 25 bp, Homo sapien
ctgtctctcgagctgtactaagggg

SEQ ID NO: 608804 - DNA, 25 bp, Homo sapien
ggaatgctggagttggattccacag

SEQ ID NO: 608805 - DNA, 25 bp, Homo sapien
taggagccacaaagaggcattgccc

SEQ ID NO: 608806 - DNA, 25 bp, Homo sapien
gagtgtaggagccacaaagaggcat

SEQ ID NO: 608807 - DNA, 25 bp, Homo sapien
tgtaggagccacaaagaggcattgc

SEQ ID NO: 608808 - DNA, 25 bp, Homo sapien
ctgagtgtaggagccacaaagaggc

SEQ ID NO: 608809 - DNA, 25 bp, Homo sapien
ttttcccttgagaatcaacgatctc

SEQ ID NO: 608810 - DNA, 25 bp, Homo sapien
atctatcctctggttaatgtttgca

SEQ ID NO: 608811 - DNA, 25 bp, Homo sapien
acgatctcacactcttggtacttag

SEQ ID NO: 608812 - DNA, 25 bp, Homo sapien
tcccatctatcctctggttaatgtt

SEQ ID NO: 608813 - DNA, 25 bp, Homo sapien
aagagttcacgacatggagacaggg

SEQ ID NO: 608814 - DNA, 25 bp, Homo sapien
tttgcagtctaccagttttggcagg

SEQ ID NO: 608815 - DNA, 25 bp, Homo sapien
ttctacactgcagggagtttgcagt

SEQ ID NO: 608816 - DNA, 25 bp, Homo sapien
caatgatcatcggttctacactgca

SEQ ID NO: 608817 - DNA, 25 bp, Homo sapien
actgagttcacgtccactgttggtt

SEQ ID NO: 608818 - DNA, 25 bp, Homo sapien
actctgggcaaaaattatcaggttc

SEQ ID NO: 608819 - DNA, 25 bp, Homo sapien
gcaaaaattatcaggttcttgcctt

SEQ ID NO: 608820 - DNA, 25 bp, Homo sapien
ttcacgtccactgttggtttccaag

SEQ ID NO: 608821 - DNA, 25 bp, Homo sapien
ttcagaggtgtagggccattttctg

SEQ ID NO: 608822 - DNA, 25 bp, Homo sapien
acatctctataatcatcaagcacag

SEQ ID NO: 608823 - DNA, 25 bp, Homo sapien
tggtcctgcagactcgatgttacac

SEQ ID NO: 608824 - DNA, 25 bp, Homo sapien
gactcgatgttacacacatctctat

SEQ ID NO: 608825 - DNA, 25 bp, Homo sapien
gaacccctggatggcattttacttc

SEQ ID NO: 608826 - DNA, 25 bp, Homo sapien
caaaggaagtagcacttagcagctc

SEQ ID NO: 608827 - DNA, 25 bp, Homo sapien
ctgttggtggcccagaacccctgga

SEQ ID NO: 608828 - DNA, 25 bp, Homo sapien
tacttctagagatgctttgtgacct

SEQ ID NO: 608829 - DNA, 25 bp, Homo sapien
gcaatcgtgaatagggctcagctcc

SEQ ID NO: 608830 - DNA, 25 bp, Homo sapien
caggtaacagcagtagcaatcgtga

SEQ ID NO: 608831 - DNA, 25 bp, Homo sapien
aggcaggtaacagcagtagcaatcg

SEQ ID NO: 608832 - DNA, 25 bp, Homo sapien
cagcagtagcaatcgtgaatagggc

SEQ ID NO: 608833 - DNA, 25 bp, Homo sapien
ctgtaggagtttggagagtcctgac

SEQ ID NO: 608834 - DNA, 25 bp, Homo sapien
agtagccacaccaggcattcccgtg

SEQ ID NO: 608835 - DNA, 25 bp, Homo sapien
cctgactttttctgcagtagccaca

SEQ ID NO: 608836 - DNA, 25 bp, Homo sapien
ctcctggaaggttcgtttgcccttg

SEQ ID NO: 608837 - DNA, 25 bp, Homo sapien
ctttccagccgaaaatgattcttgg

SEQ ID NO: 608838 - DNA, 25 bp, Homo sapien
ttggataggtttactttccagccga

SEQ ID NO: 608839 - DNA, 25 bp, Homo sapien
gattcttggaagaggtagcccttgt

SEQ ID NO: 608840 - DNA, 25 bp, Homo sapien
gaagaggtagcccttgtacgatgat

SEQ ID NO: 608841 - DNA, 25 bp, Homo sapien
tggcggctggattgttgctgctctc

SEQ ID NO: 608842 - DNA, 25 bp, Homo sapien
gcggctggattgttgctgctctcca

SEQ ID NO: 608843 - DNA, 25 bp, Homo sapien
ggctggcggctggattgttgctgct

SEQ ID NO: 608844 - DNA, 25 bp, Homo sapien
ctggcggctggattgttgctgctct

SEQ ID NO: 608845 - DNA, 25 bp, Homo sapien
gggctgagaggtgattggtgttctt

SEQ ID NO: 608846 - DNA, 25 bp, Homo sapien
catggacctggatctagaatggtgg

SEQ ID NO: 608847 - DNA, 25 bp, Homo sapien
agaatgctgcgactgtttgaatttg

SEQ ID NO: 608848 - DNA, 25 bp, Homo sapien
ttaaaagcactgacagaatgctgcg

SEQ ID NO: 608849 - DNA, 25 bp, Homo sapien
cagggtggtggccagctcagtattg

SEQ ID NO: 608850 - DNA, 25 bp, Homo sapien
agggtggtggccagctcagtattgg

SEQ ID NO: 608851 - DNA, 25 bp, Homo sapien
gggtggtggccagctcagtattgga

SEQ ID NO: 608852 - DNA, 25 bp, Homo sapien
tctatcaggggagcgcagatattgg

SEQ ID NO: 608853 - DNA, 25 bp, Homo sapien
gcagatattggtataccctttactg

SEQ ID NO: 608854 - DNA, 25 bp, Homo sapien
tctttgacccactgcgcagcttcag

SEQ ID NO: 608855 - DNA, 25 bp, Homo sapien
aggagggacgcacatcacatggagt

SEQ ID NO: 608856 - DNA, 25 bp, Homo sapien
ctgccttataggagcccgtgggctt

SEQ ID NO: 608857 - DNA, 25 bp, Homo sapien
gtttgactcggtagacattgatgag

SEQ ID NO: 608858 - DNA, 25 bp, Homo sapien
gcagtttggtttgactcggtagaca

SEQ ID NO: 608859 - DNA, 25 bp, Homo sapien
tttggtttgactcggtagacattga

SEQ ID NO: 608860 - DNA, 25 bp, Homo sapien
ttggtgcagtttggtttgactcggt

SEQ ID NO: 608861 - DNA, 25 bp, Homo sapien
ttgaatgccatacaccttgtagagt

SEQ ID NO: 608862 - DNA, 25 bp, Homo sapien
ccttgtagagtttggtgtaggagca

SEQ ID NO: 608863 - DNA, 25 bp, Homo sapien
gatggttgtaaaagaatgagatgtt

SEQ ID NO: 608864 - DNA, 25 bp, Homo sapien
tctgaatagccttgatgctggccca

SEQ ID NO: 608865 - DNA, 25 bp, Homo sapien
catggactcttcctgcagacagcct

SEQ ID NO: 608866 - DNA, 25 bp, Homo sapien
tttgccctggttctgctaccagcac

SEQ ID NO: 608867 - DNA, 25 bp, Homo sapien
ccatgctggtgcttccatgatggga

SEQ ID NO: 608868 - DNA, 25 bp, Homo sapien
tggtatctgtatccacccatgctgg

SEQ ID NO: 608869 - DNA, 25 bp, Homo sapien
tttggggtgataatccccactctgg

SEQ ID NO: 608870 - DNA, 25 bp, Homo sapien
gatccttagtggttatatttcctgt

SEQ ID NO: 608871 - DNA, 25 bp, Homo sapien
gaagattgttaaggatccttagtgg

SEQ ID NO: 608872 - DNA, 25 bp, Homo sapien
ctggaaatttaagcaccttcttgga

SEQ ID NO: 608873 - DNA, 25 bp, Homo sapien
tcagaatgattgagggcagttccca

SEQ ID NO: 608874 - DNA, 25 bp, Homo sapien
tgtcagaatgattgagggcagttcc

SEQ ID NO: 608875 - DNA, 25 bp, Homo sapien
gtcagaatgattgagggcagttccc

SEQ ID NO: 608876 - DNA, 25 bp, Homo sapien
ctgtcagaatgattgagggcagttc

SEQ ID NO: 608877 - DNA, 25 bp, Homo sapien
aagattgttgtctgggacctcaggg

SEQ ID NO: 608878 - DNA, 25 bp, Homo sapien
ctgggacctcagggggtgatgttgt

SEQ ID NO: 608879 - DNA, 25 bp, Homo sapien
gggggtgatgttgtagctggtggca

SEQ ID NO: 608880 - DNA, 25 bp, Homo sapien
caagattgttgtctgggacctcagg

SEQ ID NO: 608881 - DNA, 25 bp, Homo sapien
gactgcaatcactgcattatagcac

SEQ ID NO: 608882 - DNA, 25 bp, Homo sapien
tgcattatagcacttgccgcctatc

SEQ ID NO: 608883 - DNA, 25 bp, Homo sapien
tcacatgactgcaatcactgcatta

SEQ ID NO: 608884 - DNA, 25 bp, Homo sapien
cacttgccgcctatccattgcttta

SEQ ID NO: 608885 - DNA, 25 bp, Homo sapien
tcttggccatgtaggtgacccagga

SEQ ID NO: 608886 - DNA, 25 bp, Homo sapien
agacagaagggtgcactgtcttggc

SEQ ID NO: 608887 - DNA, 25 bp, Homo sapien
catccattggagattttttcaaaga

SEQ ID NO: 608888 - DNA, 25 bp, Homo sapien
ggtgcactgtcttggccatgtaggt

SEQ ID NO: 608889 - DNA, 25 bp, Homo sapien
tagggcaggaatattggaattgggc

SEQ ID NO: 608890 - DNA, 25 bp, Homo sapien
agggcaggaatattggaattgggca

SEQ ID NO: 608891 - DNA, 25 bp, Homo sapien
gggcaggaatattggaattgggcat

SEQ ID NO: 608892 - DNA, 25 bp, Homo sapien
ctagggcaggaatattggaattggg

SEQ ID NO: 608893 - DNA, 25 bp, Homo sapien
gggtccaaatgcacagccagggaaa

SEQ ID NO: 608894 - DNA, 25 bp, Homo sapien
ttaagtctagtctcagcacagcctg

SEQ ID NO: 608895 - DNA, 25 bp, Homo sapien
tggccttggttcctcccgagaagag

SEQ ID NO: 608896 - DNA, 25 bp, Homo sapien
cagggaaagccagcccgggattatt

SEQ ID NO: 608897 - DNA, 25 bp, Homo sapien
tccttttctggctggtgtttgtggc

SEQ ID NO: 608898 - DNA, 25 bp, Homo sapien
gcgtctgcactgagttgtgcctcag

SEQ ID NO: 608899 - DNA, 25 bp, Homo sapien
tgcactgagttgtgcctcagtgtga

SEQ ID NO: 608900 - DNA, 25 bp, Homo sapien
agttgtgcctcagtgtgatggcctg

SEQ ID NO: 608901 - DNA, 25 bp, Homo sapien
gggagtatggaggagagctggaaaa

SEQ ID NO: 608902 - DNA, 25 bp, Homo sapien
aagccacagagagtgaaggcacagg

SEQ ID NO: 608903 - DNA, 25 bp, Homo sapien
tgaaggcacagggagtatggaggag

SEQ ID NO: 608904 - DNA, 25 bp, Homo sapien
agaagccacagagagtgaaggcaca

SEQ ID NO: 608905 - DNA, 25 bp, Homo sapien
gccgatgctgctccacttctaaatc

SEQ ID NO: 608906 - DNA, 25 bp, Homo sapien
ctctgttggtcataatataaatatt

SEQ ID NO: 608907 - DNA, 25 bp, Homo sapien
gttggtcataatataaatattactt

SEQ ID NO: 608908 - DNA, 25 bp, Homo sapien
atataaatattacttaattccttca

SEQ ID NO: 608909 - DNA, 25 bp, Homo sapien
tataaatattacttaattccttcat

SEQ ID NO: 608910 - DNA, 25 bp, Homo sapien
agagaggtcgatgaatgaagctgcc

SEQ ID NO: 608911 - DNA, 25 bp, Homo sapien
ggttttgtagacagctagcagctct

SEQ ID NO: 608912 - DNA, 25 bp, Homo sapien
gggttttgtagacagctagcagctc

SEQ ID NO: 608913 - DNA, 25 bp, Homo sapien
tctgcaaagagaggtcgatgaatga

SEQ ID NO: 608914 - DNA, 25 bp, Homo sapien
tcacatctcacggatgttcacacgt

SEQ ID NO: 608915 - DNA, 25 bp, Homo sapien
cacggatgttcacacgtttcttccc

SEQ ID NO: 608916 - DNA, 25 bp, Homo sapien
ccagatgctgtgcagcagatctggt

SEQ ID NO: 608917 - DNA, 25 bp, Homo sapien
gatgctgtgcagcagatctggtgaa

SEQ ID NO: 608918 - DNA, 25 bp, Homo sapien
cagattaggaatgactccatcttga

SEQ ID NO: 608919 - DNA, 25 bp, Homo sapien
gtgctggatgtcatcagattaggaa

SEQ ID NO: 608920 - DNA, 25 bp, Homo sapien
ggcagtgctggatgtcatcagatta

SEQ ID NO: 608921 - DNA, 25 bp, Homo sapien
atcagattaggaatgactccatctt

SEQ ID NO: 608922 - DNA, 25 bp, Homo sapien
aatgaccgtataacttctttaatga

SEQ ID NO: 608923 - DNA, 25 bp, Homo sapien
taatgaccgtataacttctttaatg

SEQ ID NO: 608924 - DNA, 25 bp, Homo sapien
atgaccgtataacttctttaatgaa

SEQ ID NO: 608925 - DNA, 25 bp, Homo sapien
gcccccacagggcagacgatgcttg

SEQ ID NO: 608926 - DNA, 25 bp, Homo sapien
cgcccccacagggcagacgatgctt

SEQ ID NO: 608927 - DNA, 25 bp, Homo sapien
tgcgcccccacagggcagacgatgc

SEQ ID NO: 608928 - DNA, 25 bp, Homo sapien
ctgcgcccccacagggcagacgatg

SEQ ID NO: 608929 - DNA, 25 bp, Homo sapien
gatggtggcttgttactaatatctt

SEQ ID NO: 608930 - DNA, 25 bp, Homo sapien
aattattgatggtggcttgttacta

SEQ ID NO: 608931 - DNA, 25 bp, Homo sapien
tattgatggtggcttgttactaata

SEQ ID NO: 608932 - DNA, 25 bp, Homo sapien
tggtggcttgttactaatatctttt

SEQ ID NO: 608933 - DNA, 25 bp, Homo sapien
cagatgatttccgtgttcccagatg

SEQ ID NO: 608934 - DNA, 25 bp, Homo sapien
gacaggcttccagataagacagatg

SEQ ID NO: 608935 - DNA, 25 bp, Homo sapien
ttgtcacgccaaggaacaatctcag

SEQ ID NO: 608936 - DNA, 25 bp, Homo sapien
aagttggtaccctcgatccttcacg

SEQ ID NO: 608937 - DNA, 25 bp, Homo sapien
ggtggcatcaatcttggttaatctg

SEQ ID NO: 608938 - DNA, 25 bp, Homo sapien
caatcttggttaatctggggacttt

SEQ ID NO: 608939 - DNA, 25 bp, Homo sapien
tggcatcaatcttggttaatctggg

SEQ ID NO: 608940 - DNA, 25 bp, Homo sapien
catcaatcttggttaatctggggac

SEQ ID NO: 608941 - DNA, 25 bp, Homo sapien
gaaacaggaattatacagagagcgc

SEQ ID NO: 608942 - DNA, 25 bp, Homo sapien
cacaggaaacaggaattatacagag

SEQ ID NO: 608943 - DNA, 25 bp, Homo sapien
caggaaacaggaattatacagagag

SEQ ID NO: 608944 - DNA, 25 bp, Homo sapien
aacaggaattatacagagagcgcac

SEQ ID NO: 608945 - DNA, 25 bp, Homo sapien
acgtgctgcagtccagaattcctgg

SEQ ID NO: 608946 - DNA, 25 bp, Homo sapien
gattgccgtgacgtgctgcagtcca

SEQ ID NO: 608947 - DNA, 25 bp, Homo sapien
cacctgattgccgtgacgtgctgca

SEQ ID NO: 608948 - DNA, 25 bp, Homo sapien
ggacacctgattgccgtgacgtgct

SEQ ID NO: 608949 - DNA, 25 bp, Homo sapien
aaggactcggtgttgatagcaatgt

SEQ ID NO: 608950 - DNA, 25 bp, Homo sapien
tcggtgttgatagcaatgtcgaagg

SEQ ID NO: 608951 - DNA, 25 bp, Homo sapien
gatagcaatgtcgaaggacacagtg

SEQ ID NO: 608952 - DNA, 25 bp, Homo sapien
gttgatagcaatgtcgaaggacaca

SEQ ID NO: 608953 - DNA, 25 bp, Homo sapien
gacccagagtactccatggcctcca

SEQ ID NO: 608954 - DNA, 25 bp, Homo sapien
aacttatcgaagttgtctgcagtca

SEQ ID NO: 608955 - DNA, 25 bp, Homo sapien
ggacccagagtactccatggcctcc

SEQ ID NO: 608956 - DNA, 25 bp, Homo sapien
tgtctgcagtcagcaatgattatct

SEQ ID NO: 608957 - DNA, 25 bp, Homo sapien
ctgagcactgccagggggcagcatg

SEQ ID NO: 608958 - DNA, 25 bp, Homo sapien
ggggcagcatgttcctgtgagcctg

SEQ ID NO: 608959 - DNA, 25 bp, Homo sapien
gcagcatgttcctgtgagcctgcat

SEQ ID NO: 608960 - DNA, 25 bp, Homo sapien
actgccagggggcagcatgttcctg

SEQ ID NO: 608961 - DNA, 25 bp, Homo sapien
ggtagccatactaagaccaccgaga

SEQ ID NO: 608962 - DNA, 25 bp, Homo sapien
ctccacaggctggagcacgaggaat

SEQ ID NO: 608963 - DNA, 25 bp, Homo sapien
tgtgggccattcctaagctctctag

SEQ ID NO: 608964 - DNA, 25 bp, Homo sapien
tcttgccaatgtcagctgctccaca

SEQ ID NO: 608965 - DNA, 25 bp, Homo sapien
tataagtgtgaaagctgggatgata

SEQ ID NO: 608966 - DNA, 25 bp, Homo sapien
tgctgtagggcagcagtataagtgt

SEQ ID NO: 608967 - DNA, 25 bp, Homo sapien
gcctctgctgtagggcagcagtata

SEQ ID NO: 608968 - DNA, 25 bp, Homo sapien
agggcagcagtataagtgtgaaagc

SEQ ID NO: 608969 - DNA, 25 bp, Homo sapien
ttcttcacatttcaccgtgatcagc

SEQ ID NO: 608970 - DNA, 25 bp, Homo sapien
aacttgtccactgctgatccttgga

SEQ ID NO: 608971 - DNA, 25 bp, Homo sapien
catttcaccgtgatcagctctttac

SEQ ID NO: 608972 - DNA, 25 bp, Homo sapien
gttgtatttctcattaacttgtcca

SEQ ID NO: 608973 - DNA, 25 bp, Homo sapien
tcttctgtgcgatgttcacctgggc

SEQ ID NO: 608974 - DNA, 25 bp, Homo sapien
ctttggttgttgtattgcaactgca

SEQ ID NO: 608975 - DNA, 25 bp, Homo sapien
tttttgcatttcttctgtgcgatgt

SEQ ID NO: 608976 - DNA, 25 bp, Homo sapien
tatgcggtcaccaggagcaatgcca

SEQ ID NO: 608977 - DNA, 25 bp, Homo sapien
gactgcggtataacaggatgagtcc

SEQ ID NO: 608978 - DNA, 25 bp, Homo sapien
accagtaggactgcggtataacagg

SEQ ID NO: 608979 - DNA, 25 bp, Homo sapien
ctggagaccagtaggactgcggtat

SEQ ID NO: 608980 - DNA, 25 bp, Homo sapien
tgcggtataacaggatgagtccata

SEQ ID NO: 608981 - DNA, 25 bp, Homo sapien
ttgatcaattaaccccacgcccttg

SEQ ID NO: 608982 - DNA, 25 bp, Homo sapien
ttgcacgggcactggtgttgcttga

SEQ ID NO: 608983 - DNA, 25 bp, Homo sapien
cactggtgttgcttgatcaattaac

SEQ ID NO: 608984 - DNA, 25 bp, Homo sapien
tgcatctgtgaaatgagccattttc

SEQ ID NO: 608985 - DNA, 25 bp, Homo sapien
cactgccttctggataagaccattg

SEQ ID NO: 608986 - DNA, 25 bp, Homo sapien
taagaccattgacacctgagttcat

SEQ ID NO: 608987 - DNA, 25 bp, Homo sapien
tctggcccacgtacactgccttctg

SEQ ID NO: 608988 - DNA, 25 bp, Homo sapien
ttctggataagaccattgacacctg

SEQ ID NO: 608989 - DNA, 25 bp, Homo sapien
cagcttgacttcaaggactggtttc

SEQ ID NO: 608990 - DNA, 25 bp, Homo sapien
caagacctattctatctatctttta

SEQ ID NO: 608991 - DNA, 25 bp, Homo sapien
ctattgatagatgagtagatcttga

SEQ ID NO: 608992 - DNA, 25 bp, Homo sapien
gacttcaaggactggtttcttagtc

SEQ ID NO: 608993 - DNA, 25 bp, Homo sapien
ggcaaggcgatggttcccagacagc

SEQ ID NO: 608994 - DNA, 25 bp, Homo sapien
tgggcaaggcgatggttcccagaca

SEQ ID NO: 608995 - DNA, 25 bp, Homo sapien
cacttgggcaaggcgatggttccca

SEQ ID NO: 608996 - DNA, 25 bp, Homo sapien
cagacagcactccacatcagcactg

SEQ ID NO: 608997 - DNA, 25 bp, Homo sapien
caggctcacctggacgagagtgact

SEQ ID NO: 608998 - DNA, 25 bp, Homo sapien
ctgcgatgtcagtgacgacactttt

SEQ ID NO: 608999 - DNA, 25 bp, Homo sapien
acgagagtgactgcttgagcttcca

SEQ ID NO: 609000 - DNA, 25 bp, Homo sapien
tcagtgacgacacttttcaggctca

SEQ ID NO: 609001 - DNA, 25 bp, Homo sapien
tcaggccccgcctgatgcagttcct

SEQ ID NO: 609002 - DNA, 25 bp, Homo sapien
ctggcgagaaaccaccggttctcag

SEQ ID NO: 609003 - DNA, 25 bp, Homo sapien
gcagttcctccagcaaagattcttt

SEQ ID NO: 609004 - DNA, 25 bp, Homo sapien
tcctccagcaaagattctttggcat

SEQ ID NO: 609005 - DNA, 25 bp, Homo sapien
atccacaggcatggctcggtctcca

SEQ ID NO: 609006 - DNA, 25 bp, Homo sapien
tggctcggtctccagattggagccg

SEQ ID NO: 609007 - DNA, 25 bp, Homo sapien
tctccagattggagccggagctgag

SEQ ID NO: 609008 - DNA, 25 bp, Homo sapien
ttggagccggagctgagaaacagcc

SEQ ID NO: 609009 - DNA, 25 bp, Homo sapien
ctggtggagcggcagcttccaaacc

SEQ ID NO: 609010 - DNA, 25 bp, Homo sapien
tatctttaggccgtggaagaagggc

SEQ ID NO: 609011 - DNA, 25 bp, Homo sapien
cgcacagccctgagcgcatgtctat

SEQ ID NO: 609012 - DNA, 25 bp, Homo sapien
cttccaaaccccactggagaccaca

SEQ ID NO: 609013 - DNA, 25 bp, Homo sapien
caaagccctgtggtgatggtaaacc

SEQ ID NO: 609014 - DNA, 25 bp, Homo sapien
taaaccaggtaggcggctgtgtttc

SEQ ID NO: 609015 - DNA, 25 bp, Homo sapien
caggatggccatattcctcttgcag

SEQ ID NO: 609016 - DNA, 25 bp, Homo sapien
ggccaggatggccatattcctcttg

SEQ ID NO: 609017 - DNA, 25 bp, Homo sapien
ctattttgatcaggcatcaaggaga

SEQ ID NO: 609018 - DNA, 25 bp, Homo sapien
ttgaagtatctattttgatcaggca

SEQ ID NO: 609019 - DNA, 25 bp, Homo sapien
ataaaataggctaaaacacagacag

SEQ ID NO: 609020 - DNA, 25 bp, Homo sapien
taaaacacagacagctgtgcatgct

SEQ ID NO: 609021 - DNA, 25 bp, Homo sapien
cccatgtggaatcttgccatcagct

SEQ ID NO: 609022 - DNA, 25 bp, Homo sapien
gaatcttgccatcagcttgaggcat

SEQ ID NO: 609023 - DNA, 25 bp, Homo sapien
tggaatcttgccatcagcttgaggc

SEQ ID NO: 609024 - DNA, 25 bp, Homo sapien
catgtggaatcttgccatcagcttg

SEQ ID NO: 609025 - DNA, 25 bp, Homo sapien
ctcagagaagttggagacctcccaa

SEQ ID NO: 609026 - DNA, 25 bp, Homo sapien
cagagaagttggagacctcccaaat

SEQ ID NO: 609027 - DNA, 25 bp, Homo sapien
gagaagttggagacctcccaaatac

SEQ ID NO: 609028 - DNA, 25 bp, Homo sapien
tggagacctcccaaatacccaccca

SEQ ID NO: 609029 - DNA, 25 bp, Homo sapien
gggacagacgggactgactggcagt

SEQ ID NO: 609030 - DNA, 25 bp, Homo sapien
acagacgggactgactggcagtact

SEQ ID NO: 609031 - DNA, 25 bp, Homo sapien
ggaattcttggtgctttgcactggg

SEQ ID NO: 609032 - DNA, 25 bp, Homo sapien
ccccatggggaattcttggtgcttt

SEQ ID NO: 609033 - DNA, 25 bp, Homo sapien
gacttgactgcccagggcaacgagg

SEQ ID NO: 609034 - DNA, 25 bp, Homo sapien
gtaaaagagacttgactgcccaggg

SEQ ID NO: 609035 - DNA, 25 bp, Homo sapien
tctttgtaaaagagacttgactgcc

SEQ ID NO: 609036 - DNA, 25 bp, Homo sapien
actgcccagggcaacgaggagcaga

SEQ ID NO: 609037 - DNA, 25 bp, Homo sapien
gaggagggaccatgagcagagcctg

SEQ ID NO: 609038 - DNA, 25 bp, Homo sapien
ggagggaccatgagcagagcctgaa

SEQ ID NO: 609039 - DNA, 25 bp, Homo sapien
aggagggaccatgagcagagcctga

SEQ ID NO: 609040 - DNA, 25 bp, Homo sapien
ggaggagggaccatgagcagagcct

SEQ ID NO: 609041 - DNA, 25 bp, Homo sapien
tagtatatgtactgccgaagtgagg

SEQ ID NO: 609042 - DNA, 25 bp, Homo sapien
tgcagggccatgctaatcctctctg

SEQ ID NO: 609043 - DNA, 25 bp, Homo sapien
tatcgttccaattttagtatatgta

SEQ ID NO: 609044 - DNA, 25 bp, Homo sapien
tatatgtactgccgaagtgaggaca

SEQ ID NO: 609045 - DNA, 25 bp, Homo sapien
attttgtgaaggaattttgtgtcta

SEQ ID NO: 609046 - DNA, 25 bp, Homo sapien
cacttgctcttggtgcattatcttt

SEQ ID NO: 609047 - DNA, 25 bp, Homo sapien
ggtatcagggtgacaataactttgt

SEQ ID NO: 609048 - DNA, 25 bp, Homo sapien
gcagtaatgtattcttagttcaagg

SEQ ID NO: 609049 - DNA, 25 bp, Homo sapien
tgactgtagctggagttatactgcc

SEQ ID NO: 609050 - DNA, 25 bp, Homo sapien
cagtaggcatgaagtgagcgttcgc

SEQ ID NO: 609051 - DNA, 25 bp, Homo sapien
catctgctagctttatgaccctgga

SEQ ID NO: 609052 - DNA, 25 bp, Homo sapien
gaacagcagctagcatacagtaggc

SEQ ID NO: 609053 - DNA, 25 bp, Homo sapien
acaccacaggggcggccgagtccag

SEQ ID NO: 609054 - DNA, 25 bp, Homo sapien
ctggttgtcgaacggcggaccgcaa

SEQ ID NO: 609055 - DNA, 25 bp, Homo sapien
gagtccagccacacaatggcgcgcg

SEQ ID NO: 609056 - DNA, 25 bp, Homo sapien
ggaccgcaagccagtaaccgcggtg

SEQ ID NO: 609057 - DNA, 25 bp, Homo sapien
ttcgaggaggcggccatagccactg

SEQ ID NO: 609058 - DNA, 25 bp, Homo sapien
aggcgtcctatgtagacgcgcggca

SEQ ID NO: 609059 - DNA, 25 bp, Homo sapien
ccatttttgaggtctacttcgagga

SEQ ID NO: 609060 - DNA, 25 bp, Homo sapien
ggcgtcctatgtagacgcgcggcat

SEQ ID NO: 609061 - DNA, 25 bp, Homo sapien
tccttgccgttcagctcgtaaacgg

SEQ ID NO: 609062 - DNA, 25 bp, Homo sapien
cttgccgttcagctcgtaaacggcg

SEQ ID NO: 609063 - DNA, 25 bp, Homo sapien
ttgccgttcagctcgtaaacggcgt

SEQ ID NO: 609064 - DNA, 25 bp, Homo sapien
tgccgttcagctcgtaaacggcgtc

SEQ ID NO: 609065 - DNA, 25 bp, Homo sapien
tccggcgtcccatggctgccccggg

SEQ ID NO: 609066 - DNA, 25 bp, Homo sapien
ggaagaacccgtgacagtgctgaca

SEQ ID NO: 609067 - DNA, 25 bp, Homo sapien
gaatacaacaaatacagccacccct

SEQ ID NO: 609068 - DNA, 25 bp, Homo sapien
tgcactgataggtaagtaaggagaa

SEQ ID NO: 609069 - DNA, 25 bp, Homo sapien
tggtacaataccacattacttaaaa

SEQ ID NO: 609070 - DNA, 25 bp, Homo sapien
ttgtggtacaataccacattactta

SEQ ID NO: 609071 - DNA, 25 bp, Homo sapien
gtggtacaataccacattacttaaa

SEQ ID NO: 609072 - DNA, 25 bp, Homo sapien
ctttgtggtacaataccacattact

SEQ ID NO: 609073 - DNA, 25 bp, Homo sapien
ttgaaacatcaaggacttgttaaaa

SEQ ID NO: 609074 - DNA, 25 bp, Homo sapien
aacatgccccaattagttcaaatac

SEQ ID NO: 609075 - DNA, 25 bp, Homo sapien
ctcccaataacatgccccaattagt

SEQ ID NO: 609076 - DNA, 25 bp, Homo sapien
ttgaattcaacatgcaacaatttaa

SEQ ID NO: 609077 - DNA, 25 bp, Homo sapien
tccggtaaggtcagccaaagggtca

SEQ ID NO: 609078 - DNA, 25 bp, Homo sapien
caaagggtcatagggcaagggtcac

SEQ ID NO: 609079 - DNA, 25 bp, Homo sapien
gcaagggtcacacaatgtatggaaa

SEQ ID NO: 609080 - DNA, 25 bp, Homo sapien
ctaatggcaaaaggctgctgtcgtc

SEQ ID NO: 609081 - DNA, 25 bp, Homo sapien
tcagattaaccagttttgtctaacc

SEQ ID NO: 609082 - DNA, 25 bp, Homo sapien
ttttgtctaacccttggaatcctca

SEQ ID NO: 609083 - DNA, 25 bp, Homo sapien
gcaaggtaacagtcacctagttcag

SEQ ID NO: 609084 - DNA, 25 bp, Homo sapien
ttggccacaaaacacgcaaggtaac

SEQ ID NO: 609085 - DNA, 25 bp, Homo sapien
taaattaagggcaagtcaaatagac

SEQ ID NO: 609086 - DNA, 25 bp, Homo sapien
cacatgaagggaacaattagatgcc

SEQ ID NO: 609087 - DNA, 25 bp, Homo sapien
agatgccttgtaatgataaaaacgc

SEQ ID NO: 609088 - DNA, 25 bp, Homo sapien
gctaaaccttcgacacatttgtgat

SEQ ID NO: 609089 - DNA, 25 bp, Homo sapien
ttgccaactgcaccgactagaaaga

SEQ ID NO: 609090 - DNA, 25 bp, Homo sapien
ataccataataaattcccagaaata

SEQ ID NO: 609091 - DNA, 25 bp, Homo sapien
tgaaagacaagattggtcagactcg

SEQ ID NO: 609092 - DNA, 25 bp, Homo sapien
tactttaaagcattagtcatatcat

SEQ ID NO: 609093 - DNA, 25 bp, Homo sapien
tcagactcggaaatcttaaaacatc

SEQ ID NO: 609094 - DNA, 25 bp, Homo sapien
caaagcacgcttcatgtcagagtag

SEQ ID NO: 609095 - DNA, 25 bp, Homo sapien
tcatgtcagagtaggagcgaaactc

SEQ ID NO: 609096 - DNA, 25 bp, Homo sapien
gtccaaagcacgcttcatgtcagag

SEQ ID NO: 609097 - DNA, 25 bp, Homo sapien
gagtaggagcgaaactcaattacac

SEQ ID NO: 609098 - DNA, 25 bp, Homo sapien
aatgaagtcttaatcccaatccaac

SEQ ID NO: 609099 - DNA, 25 bp, Homo sapien
tccaacttaaatacatccgtgccat

SEQ ID NO: 609100 - DNA, 25 bp, Homo sapien
tacatccgtgccatctggcaaaaat

SEQ ID NO: 609101 - DNA, 25 bp, Homo sapien
acaatgaagtcttaatcccaatcca

SEQ ID NO: 609102 - DNA, 25 bp, Homo sapien
tcgtgaccgtcttctagatcgagac

SEQ ID NO: 609103 - DNA, 25 bp, Homo sapien
ctttttgagatacttcgagatctac

SEQ ID NO: 609104 - DNA, 25 bp, Homo sapien
cttcgagatctactgcggctgctcc

SEQ ID NO: 609105 - DNA, 25 bp, Homo sapien
tgcgactcctacttcgtgaccgtct

SEQ ID NO: 609106 - DNA, 25 bp, Homo sapien
gtgagaatgtacacatactccataa

SEQ ID NO: 609107 - DNA, 25 bp, Homo sapien
taaacaagtacggtaatattcacag

SEQ ID NO: 609108 - DNA, 25 bp, Homo sapien
cacagtgactcaacacaacgttatt

SEQ ID NO: 609109 - DNA, 25 bp, Homo sapien
ctggacaaggaaagaccgattttct

SEQ ID NO: 609110 - DNA, 25 bp, Homo sapien
ccttagatctgcttcgagaatgtga

SEQ ID NO: 609111 - DNA, 25 bp, Homo sapien
ttagatttgctctttgatctagatt

SEQ ID NO: 609112 - DNA, 25 bp, Homo sapien
cccgatcagacttgggcttagattt

SEQ ID NO: 609113 - DNA, 25 bp, Homo sapien
aatgtgaatgggagccccgatcaga

SEQ ID NO: 609114 - DNA, 25 bp, Homo sapien
tcttgactttgagcgagatctagaa

SEQ ID NO: 609115 - DNA, 25 bp, Homo sapien
gaactcgacctggaccttgatcttg

SEQ ID NO: 609116 - DNA, 25 bp, Homo sapien
cggcgaattggaacgggactggctc

SEQ ID NO: 609117 - DNA, 25 bp, Homo sapien
caggtagcggcgaattggaacggga

SEQ ID NO: 609118 - DNA, 25 bp, Homo sapien
aaacaacactaaatgagcttaatct

SEQ ID NO: 609119 - DNA, 25 bp, Homo sapien
gagggtcttcatgccaccatttcct

SEQ ID NO: 609120 - DNA, 25 bp, Homo sapien
tctttacaaaagttacgttagctca

SEQ ID NO: 609121 - DNA, 25 bp, Homo sapien
aaaaaaccctgccagcagatcctgc

SEQ ID NO: 609122 - DNA, 25 bp, Homo sapien
taagataatggaagaagcatccgcc

SEQ ID NO: 609123 - DNA, 25 bp, Homo sapien
gaactacaggcaaggataggccctg

SEQ ID NO: 609124 - DNA, 25 bp, Homo sapien
tactgggtggaacttaactggcaac

SEQ ID NO: 609125 - DNA, 25 bp, Homo sapien
tatacaatgacctgcttactgtggc

SEQ ID NO: 609126 - DNA, 25 bp, Homo sapien
aaggcactacggcatgttcataaac

SEQ ID NO: 609127 - DNA, 25 bp, Homo sapien
tgctccaccttaatactccatctag

SEQ ID NO: 609128 - DNA, 25 bp, Homo sapien
cacaggaatgggaacgtaaaagtca

SEQ ID NO: 609129 - DNA, 25 bp, Homo sapien
ataggtgaacaaatcgggaggaagg

SEQ ID NO: 609130 - DNA, 25 bp, Homo sapien
cacgtttctgggtaagtgaacacaa

SEQ ID NO: 609131 - DNA, 25 bp, Homo sapien
caagtagattccaaggtatggtcca

SEQ ID NO: 609132 - DNA, 25 bp, Homo sapien
gactactactcagggcatgaacact

SEQ ID NO: 609133 - DNA, 25 bp, Homo sapien
tcattcaacagtaaccagccagcca

SEQ ID NO: 609134 - DNA, 25 bp, Homo sapien
tgaagactgtatttgtaacatctaa

SEQ ID NO: 609135 - DNA, 25 bp, Homo sapien
tcagagtctggggtgaagactgtat

SEQ ID NO: 609136 - DNA, 25 bp, Homo sapien
caaattgagttgagttccactgacc

SEQ ID NO: 609137 - DNA, 25 bp, Homo sapien
gaaaaggcctatgaccaaacaagtg

SEQ ID NO: 609138 - DNA, 25 bp, Homo sapien
aatcttaccataccagaaagcgagg

SEQ ID NO: 609139 - DNA, 25 bp, Homo sapien
tatcattgattagaaggccaggcac

SEQ ID NO: 609140 - DNA, 25 bp, Homo sapien
tcagagctgacagtagagcatctcc

SEQ ID NO: 609141 - DNA, 25 bp, Homo sapien
ccagtcagggagtcggcagggctgt

SEQ ID NO: 609142 - DNA, 25 bp, Homo sapien
tgtgctcccttagggagaatccgtt

SEQ ID NO: 609143 - DNA, 25 bp, Homo sapien
tttccttgttccgtggctccgtcca

SEQ ID NO: 609144 - DNA, 25 bp, Homo sapien
taggcaaaatgaaacgactgaactt

SEQ ID NO: 609145 - DNA, 25 bp, Homo sapien
gctgtgtacaccagacactatggcc

SEQ ID NO: 609146 - DNA, 25 bp, Homo sapien
tgccagccttagttaagtctgcggg

SEQ ID NO: 609147 - DNA, 25 bp, Homo sapien
tatctgcagcgtcacaacaggaaac

SEQ ID NO: 609148 - DNA, 25 bp, Homo sapien
tcgttccaattttagtatatatgct

SEQ ID NO: 609149 - DNA, 25 bp, Homo sapien
aggggtcatgctaatcttctctgta

SEQ ID NO: 609150 - DNA, 25 bp, Homo sapien
acaaatttgcgtgccatccttgcgc

SEQ ID NO: 609151 - DNA, 25 bp, Homo sapien
tatatatgctgctgaagcaagcact

SEQ ID NO: 609152 - DNA, 25 bp, Homo sapien
ggcgccgcgcgcctgcgcgttcggg

SEQ ID NO: 609153 - DNA, 25 bp, Homo sapien
gcccagcgcctagctacggtccgag

SEQ ID NO: 609154 - DNA, 25 bp, Homo sapien
tggccgcccagcgcctagctacggt

SEQ ID NO: 609155 - DNA, 25 bp, Homo sapien
agcgcctagctacggtccgagccgg

SEQ ID NO: 609156 - DNA, 25 bp, Homo sapien
gctgaggcctctgttgagactacat

SEQ ID NO: 609157 - DNA, 25 bp, Homo sapien
ttccagagcttccattaggtcaggc

SEQ ID NO: 609158 - DNA, 25 bp, Homo sapien
cccgtcattcccctactggtgatat

SEQ ID NO: 609159 - DNA, 25 bp, Homo sapien
tattcgcaagagcactccgataaac

SEQ ID NO: 609160 - DNA, 25 bp, Homo sapien
ccctgtggaaggccccttcagtgtc

SEQ ID NO: 609161 - DNA, 25 bp, Homo sapien
cctgtggaaggccccttcagtgtcc

SEQ ID NO: 609162 - DNA, 25 bp, Homo sapien
ggcaggtgaggaccagaaccggggc

SEQ ID NO: 609163 - DNA, 25 bp, Homo sapien
cagaaccggggctgtctccggccac

SEQ ID NO: 609164 - DNA, 25 bp, Homo sapien
gatgaaggcagttgcgggcaggtga

SEQ ID NO: 609165 - DNA, 25 bp, Homo sapien
aatgatgaaggcagttgcgggcagg

SEQ ID NO: 609166 - DNA, 25 bp, Homo sapien
tggcagaaactggttcgcagccggc

SEQ ID NO: 609167 - DNA, 25 bp, Homo sapien
aaagcaagacacatccagggcactg

SEQ ID NO: 609168 - DNA, 25 bp, Homo sapien
gggcacccacatggattggctcccg

SEQ ID NO: 609169 - DNA, 25 bp, Homo sapien
gcccggcgctaagctgcggcaggac

SEQ ID NO: 609170 - DNA, 25 bp, Homo sapien
gcggggccgcggcctctgtccattc

SEQ ID NO: 609171 - DNA, 25 bp, Homo sapien
cctctgtccattccagaagccgcac

SEQ ID NO: 609172 - DNA, 25 bp, Homo sapien
gccgcggcctctgtccattccagaa

SEQ ID NO: 609173 - DNA, 25 bp, Homo sapien
gcctctgtccattccagaagccgca

SEQ ID NO: 609174 - DNA, 25 bp, Homo sapien
actccaagctacaccagccaaaccc

SEQ ID NO: 609175 - DNA, 25 bp, Homo sapien
aagcacctgcggggtccagtcccag

SEQ ID NO: 609176 - DNA, 25 bp, Homo sapien
cagtcccagagtgcctcactccaag

SEQ ID NO: 609177 - DNA, 25 bp, Homo sapien
ggcctcaagactccacgccaggggg

SEQ ID NO: 609178 - DNA, 25 bp, Homo sapien
ggtccttgacccatctcggagtcgg

SEQ ID NO: 609179 - DNA, 25 bp, Homo sapien
ctcggagtcggtgccatggccctct

SEQ ID NO: 609180 - DNA, 25 bp, Homo sapien
ctgaggattgcgactcccgtacggg

SEQ ID NO: 609181 - DNA, 25 bp, Homo sapien
gaggattgcgactcccgtacgggtc

SEQ ID NO: 609182 - DNA, 25 bp, Homo sapien
gcggcttatactcgcttatccggaa

SEQ ID NO: 609183 - DNA, 25 bp, Homo sapien
ggccccgccatcttcgtattcggtc

SEQ ID NO: 609184 - DNA, 25 bp, Homo sapien
actcccgccatgttcagcggcttat

SEQ ID NO: 609185 - DNA, 25 bp, Homo sapien
gccatcttcgtattcggtcacgcct

SEQ ID NO: 609186 - DNA, 25 bp, Homo sapien
cttggtgaggcccgcacgcctggca

SEQ ID NO: 609187 - DNA, 25 bp, Homo sapien
gcttggtgaggcccgcacgcctggc

SEQ ID NO: 609188 - DNA, 25 bp, Homo sapien
tggtgaggcccgcacgcctggcact

SEQ ID NO: 609189 - DNA, 25 bp, Homo sapien
ttggtgaggcccgcacgcctggcac

SEQ ID NO: 609190 - DNA, 25 bp, Homo sapien
gctgagggcagccatcattagagga

SEQ ID NO: 609191 - DNA, 25 bp, Homo sapien
ggcagccatcattagaggaaccaag

SEQ ID NO: 609192 - DNA, 25 bp, Homo sapien
gagggcagccatcattagaggaacc

SEQ ID NO: 609193 - DNA, 25 bp, Homo sapien
cagccatcattagaggaaccaagat

SEQ ID NO: 609194 - DNA, 25 bp, Homo sapien
tgaggagttctccactatgactgac

SEQ ID NO: 609195 - DNA, 25 bp, Homo sapien
ctgaggagttctccactatgactga

SEQ ID NO: 609196 - DNA, 25 bp, Homo sapien
tctgatgggctctggtattccctgc

SEQ ID NO: 609197 - DNA, 25 bp, Homo sapien
ttcttcatgggtttgaggagctcag

SEQ ID NO: 609198 - DNA, 25 bp, Homo sapien
tcttcatgggtttgaggagctcaga

SEQ ID NO: 609199 - DNA, 25 bp, Homo sapien
ggctctggtattccctgcgcttcct

SEQ ID NO: 609200 - DNA, 25 bp, Homo sapien
tgatgagtgagtcattatgcgtgtc

SEQ ID NO: 609201 - DNA, 25 bp, Homo sapien
agtcattatgcgtgtcttctctggc

SEQ ID NO: 609202 - DNA, 25 bp, Homo sapien
aattgaggcataggctatagcttcc

SEQ ID NO: 609203 - DNA, 25 bp, Homo sapien
ctccataatctggattgatggaggg

SEQ ID NO: 609204 - DNA, 25 bp, Homo sapien
cagcaggagtgcagctccagcagac

SEQ ID NO: 609205 - DNA, 25 bp, Homo sapien
ctaggccgccagcaggagtgcagct

SEQ ID NO: 609206 - DNA, 25 bp, Homo sapien
ccgccagcaggagtgcagctccagc

SEQ ID NO: 609207 - DNA, 25 bp, Homo sapien
gcaggagtgcagctccagcagacat

SEQ ID NO: 609208 - DNA, 25 bp, Homo sapien
tggccatgtggtgttctgccccaaa

SEQ ID NO: 609209 - DNA, 25 bp, Homo sapien
gccatgtggtgttctgccccaaaca

SEQ ID NO: 609210 - DNA, 25 bp, Homo sapien
ctggccatgtggtgttctgccccaa

SEQ ID NO: 609211 - DNA, 25 bp, Homo sapien
atgtggtgttctgccccaaacaggc

SEQ ID NO: 609212 - DNA, 25 bp, Homo sapien
tggtttgggatgaagccctagggtc

SEQ ID NO: 609213 - DNA, 25 bp, Homo sapien
gatgaagccctagggtctgatcctg

SEQ ID NO: 609214 - DNA, 25 bp, Homo sapien
tagaaggcaagcctgatcccagctt

SEQ ID NO: 609215 - DNA, 25 bp, Homo sapien
tgtagaaggcaagcctgatcccagc

SEQ ID NO: 609216 - DNA, 25 bp, Homo sapien
actctctggggtgctagcagtgggt

SEQ ID NO: 609217 - DNA, 25 bp, Homo sapien
tctggggtgctagcagtgggttgtc

SEQ ID NO: 609218 - DNA, 25 bp, Homo sapien
tgctagcagtgggttgtccctctgg

SEQ ID NO: 609219 - DNA, 25 bp, Homo sapien
gggtgctagcagtgggttgtccctc

SEQ ID NO: 609220 - DNA, 25 bp, Homo sapien
tggagatggtaattgagaaggcctg

SEQ ID NO: 609221 - DNA, 25 bp, Homo sapien
aatgaccagtgcaggcttgccccac

SEQ ID NO: 609222 - DNA, 25 bp, Homo sapien
caaagagtgagaatagggttccaaa

SEQ ID NO: 609223 - DNA, 25 bp, Homo sapien
aaacaggaatgttagaccaatgacc

SEQ ID NO: 609224 - DNA, 25 bp, Homo sapien
gagaagatctatgagacagaaggcc

SEQ ID NO: 609225 - DNA, 25 bp, Homo sapien
actaggtatgtcaggtctgtgggac

SEQ ID NO: 609226 - DNA, 25 bp, Homo sapien
taaactactggagcactccgtcagc

SEQ ID NO: 609227 - DNA, 25 bp, Homo sapien
gacgtgaattgaacagctggccatc

SEQ ID NO: 609228 - DNA, 25 bp, Homo sapien
tcagaaggcttaagtagaaggatcc

SEQ ID NO: 609229 - DNA, 25 bp, Homo sapien
tgaggctacaacgtgctatgactgc

SEQ ID NO: 609230 - DNA, 25 bp, Homo sapien
tcagtaaagctattaagaaccggta

SEQ ID NO: 609231 - DNA, 25 bp, Homo sapien
caaattgggcaccatcaaaacgaac

SEQ ID NO: 609232 - DNA, 25 bp, Homo sapien
cctctacacactagtgaaattgctc

SEQ ID NO: 609233 - DNA, 25 bp, Homo sapien
tcaaccctgctcctcaatggtgcaa

SEQ ID NO: 609234 - DNA, 25 bp, Homo sapien
gctcctcaatggtgcaaacctagaa

SEQ ID NO: 609235 - DNA, 25 bp, Homo sapien
aactcttgatcttcacgtgctccca

SEQ ID NO: 609236 - DNA, 25 bp, Homo sapien
ctgcctgatccagttgggccacaac

SEQ ID NO: 609237 - DNA, 25 bp, Homo sapien
tgcagctgcctaaattcctcagaca

SEQ ID NO: 609238 - DNA, 25 bp, Homo sapien
gctatcaaactctcaaggacctacg

SEQ ID NO: 609239 - DNA, 25 bp, Homo sapien
tcagacactgtaccaaaccttgaga

SEQ ID NO: 609240 - DNA, 25 bp, Homo sapien
aggtaggactcccacgaccagcatt

SEQ ID NO: 609241 - DNA, 25 bp, Homo sapien
ggctgactggagcagtaatggcctt

SEQ ID NO: 609242 - DNA, 25 bp, Homo sapien
gccttctgctcctctaggtaggact

SEQ ID NO: 609243 - DNA, 25 bp, Homo sapien
ctgactggagcagtaatggccttct

SEQ ID NO: 609244 - DNA, 25 bp, Homo sapien
tccatccagccttatccttgcctag

SEQ ID NO: 609245 - DNA, 25 bp, Homo sapien
atccagccttatccttgcctagtgg

SEQ ID NO: 609246 - DNA, 25 bp, Homo sapien
ctgtcaacgcacagagtggagagga

SEQ ID NO: 609247 - DNA, 25 bp, Homo sapien
tcaacgcacagagtggagaggaccc

SEQ ID NO: 609248 - DNA, 25 bp, Homo sapien
gggtcaatgccttccaacttcatgc

SEQ ID NO: 609249 - DNA, 25 bp, Homo sapien
tacatggacgggtgttgagggtcaa

SEQ ID NO: 609250 - DNA, 25 bp, Homo sapien
gatgaagtacatggacgggtgttga

SEQ ID NO: 609251 - DNA, 25 bp, Homo sapien
cgggtgttgagggtcaatgccttcc

SEQ ID NO: 609252 - DNA, 25 bp, Homo sapien
gcaggcgtaggcgatagccacatac

SEQ ID NO: 609253 - DNA, 25 bp, Homo sapien
ttgtggcccgtcttctcgaaccagc

SEQ ID NO: 609254 - DNA, 25 bp, Homo sapien
ccagcagggtgaatgtcaggggagt

SEQ ID NO: 609255 - DNA, 25 bp, Homo sapien
agcttgtggcccgtcttctcgaacc

SEQ ID NO: 609256 - DNA, 25 bp, Homo sapien
gtcttctcgaaccagccagcagggt

SEQ ID NO: 609257 - DNA, 25 bp, Homo sapien
catgaacagagcgccgtgcagaggc

SEQ ID NO: 609258 - DNA, 25 bp, Homo sapien
ggggcatgaacagagcgccgtgcag

SEQ ID NO: 609259 - DNA, 25 bp, Homo sapien
ggcatgaacagagcgccgtgcagag

SEQ ID NO: 609260 - DNA, 25 bp, Homo sapien
atgaacagagcgccgtgcagaggct

SEQ ID NO: 609261 - DNA, 25 bp, Homo sapien
tctggctcacaaacaggtgcttggg

SEQ ID NO: 609262 - DNA, 25 bp, Homo sapien
ggctctggctcacaaacaggtgctt

SEQ ID NO: 609263 - DNA, 25 bp, Homo sapien
gagctcttgtgctgcgcaggtactg

SEQ ID NO: 609264 - DNA, 25 bp, Homo sapien
cagcctgagctcttgtgctgcgcag

SEQ ID NO: 609265 - DNA, 25 bp, Homo sapien
gaggcattgaccttacaccaaagaa

SEQ ID NO: 609266 - DNA, 25 bp, Homo sapien
tgagagaaccagcacatgagctccc

SEQ ID NO: 609267 - DNA, 25 bp, Homo sapien
gaagctcccagaatagaggcattga

SEQ ID NO: 609268 - DNA, 25 bp, Homo sapien
gaggacagggtatctgcagtagcaa

SEQ ID NO: 609269 - DNA, 25 bp, Homo sapien
actgctggataagctgccagctgcc

SEQ ID NO: 609270 - DNA, 25 bp, Homo sapien
aactgctggataagctgccagctgc

SEQ ID NO: 609271 - DNA, 25 bp, Homo sapien
taactgctggataagctgccagctg

SEQ ID NO: 609272 - DNA, 25 bp, Homo sapien
tttaactgctggataagctgccagc

SEQ ID NO: 609273 - DNA, 25 bp, Homo sapien
gaaggaggctatgcgttcgcccaaa

SEQ ID NO: 609274 - DNA, 25 bp, Homo sapien
tctatggcatagaggcagacaggga

SEQ ID NO: 609275 - DNA, 25 bp, Homo sapien
aagtcggcattcgttgtcacaacag

SEQ ID NO: 609276 - DNA, 25 bp, Homo sapien
gaataggttctctaggaaagcctgg

SEQ ID NO: 609277 - DNA, 25 bp, Homo sapien
ggaagcggctgtccaccacatcggt

SEQ ID NO: 609278 - DNA, 25 bp, Homo sapien
acaagggacgggttcatgcggtcaa

SEQ ID NO: 609279 - DNA, 25 bp, Homo sapien
acactggccacgcagacaagggacg

SEQ ID NO: 609280 - DNA, 25 bp, Homo sapien
acatcggtcacactggccacgcaga

SEQ ID NO: 609281 - DNA, 25 bp, Homo sapien
gtcataagtatcatcccagttgtca

SEQ ID NO: 609282 - DNA, 25 bp, Homo sapien
cagtagtcataagtatcatcccagt

SEQ ID NO: 609283 - DNA, 25 bp, Homo sapien
agtcataagtatcatcccagttgtc

SEQ ID NO: 609284 - DNA, 25 bp, Homo sapien
gtagtcataagtatcatcccagttg

SEQ ID NO: 609285 - DNA, 25 bp, Homo sapien
tgcttctggcaccagcccactgggt

SEQ ID NO: 609286 - DNA, 25 bp, Homo sapien
ggcaccagcccactgggtggatgta

SEQ ID NO: 609287 - DNA, 25 bp, Homo sapien
tggcaccagcccactgggtggatgt

SEQ ID NO: 609288 - DNA, 25 bp, Homo sapien
tttccttgcttctggcaccagccca

SEQ ID NO: 609289 - DNA, 25 bp, Homo sapien
tttctcccaacagaagttatcaggg

SEQ ID NO: 609290 - DNA, 25 bp, Homo sapien
tccagatatttctcccaacagaagt

SEQ ID NO: 609291 - DNA, 25 bp, Homo sapien
gatatttctcccaacagaagttatc

SEQ ID NO: 609292 - DNA, 25 bp, Homo sapien
cttccagatatttctcccaacagaa

SEQ ID NO: 609293 - DNA, 25 bp, Homo sapien
gccacgcgaatcagggctgggttcc

SEQ ID NO: 609294 - DNA, 25 bp, Homo sapien
ctccacgctggccacgcgaatcagg

SEQ ID NO: 609295 - DNA, 25 bp, Homo sapien
ggctgggttcctgcggtccacagcc

SEQ ID NO: 609296 - DNA, 25 bp, Homo sapien
gctggccacgcgaatcagggctggg

SEQ ID NO: 609297 - DNA, 25 bp, Homo sapien
aagtcaggcgtttctcatggagccc

SEQ ID NO: 609298 - DNA, 25 bp, Homo sapien
caagatcctggattgaaagaaccaa

SEQ ID NO: 609299 - DNA, 25 bp, Homo sapien
gggccaaccctgcaataatctgtct

SEQ ID NO: 609300 - DNA, 25 bp, Homo sapien
ccaagggcatcactcattaagttac

SEQ ID NO: 609301 - DNA, 25 bp, Homo sapien
gaaatcatagccatgactccagcca

SEQ ID NO: 609302 - DNA, 25 bp, Homo sapien
atgtctgggtggtcagcgtcgatcc

SEQ ID NO: 609303 - DNA, 25 bp, Homo sapien
cagggtggatgtctgggtggtcagc

SEQ ID NO: 609304 - DNA, 25 bp, Homo sapien
ggtcagcgtcgatccagaaatcata

SEQ ID NO: 609305 - DNA, 25 bp, Homo sapien
agatcagagtgccctaggggtacac

SEQ ID NO: 609306 - DNA, 25 bp, Homo sapien
gaaaagatcagagtgccctaggggt

SEQ ID NO: 609307 - DNA, 25 bp, Homo sapien
aaagatcagagtgccctaggggtac

SEQ ID NO: 609308 - DNA, 25 bp, Homo sapien
atcagagtgccctaggggtacacac

SEQ ID NO: 609309 - DNA, 25 bp, Homo sapien
gcacggaaggagcagtttccactgg

SEQ ID NO: 609310 - DNA, 25 bp, Homo sapien
tttccactggggagatcagcactag

SEQ ID NO: 609311 - DNA, 25 bp, Homo sapien
cactggggagatcagcactagaaac

SEQ ID NO: 609312 - DNA, 25 bp, Homo sapien
gagtgtggggcacggaaggagcagt

SEQ ID NO: 609313 - DNA, 25 bp, Homo sapien
agaaaggaggcggtcctcatggagt

SEQ ID NO: 609314 - DNA, 25 bp, Homo sapien
agcagaaaggaggcggtcctcatgg

SEQ ID NO: 609315 - DNA, 25 bp, Homo sapien
gaaaggaggcggtcctcatggagtc

SEQ ID NO: 609316 - DNA, 25 bp, Homo sapien
cagaaaggaggcggtcctcatggag

SEQ ID NO: 609317 - DNA, 25 bp, Homo sapien
aggggaggcagagctgggctctctg

SEQ ID NO: 609318 - DNA, 25 bp, Homo sapien
gaggcagagctgggctctctgggtc

SEQ ID NO: 609319 - DNA, 25 bp, Homo sapien
gggaggcagagctgggctctctggg

SEQ ID NO: 609320 - DNA, 25 bp, Homo sapien
tgagagggggacagcccccagggga

SEQ ID NO: 609321 - DNA, 25 bp, Homo sapien
gctgtatttggaggtcctagtgtgg

SEQ ID NO: 609322 - DNA, 25 bp, Homo sapien
gaaagctgtatttggaggtcctagt

SEQ ID NO: 609323 - DNA, 25 bp, Homo sapien
cggtggtgaaagctgtatttggagg

SEQ ID NO: 609324 - DNA, 25 bp, Homo sapien
atttggaggtcctagtgtggggcag

SEQ ID NO: 609325 - DNA, 25 bp, Homo sapien
atggccagagccgtcgcaaccagga

SEQ ID NO: 609326 - DNA, 25 bp, Homo sapien
gacatggccagagccgtcgcaacca

SEQ ID NO: 609327 - DNA, 25 bp, Homo sapien
ccagagccgtcgcaaccaggagtgg

SEQ ID NO: 609328 - DNA, 25 bp, Homo sapien
tgtgacatggccagagccgtcgcaa

SEQ ID NO: 609329 - DNA, 25 bp, Homo sapien
tcttcttgcgggctgaggcctccga

SEQ ID NO: 609330 - DNA, 25 bp, Homo sapien
agtcagacagctccgctttcagccg

SEQ ID NO: 609331 - DNA, 25 bp, Homo sapien
ggccgtgatggcgaggcttcttcct

SEQ ID NO: 609332 - DNA, 25 bp, Homo sapien
gaggttcttcttgcgggctgaggcc

SEQ ID NO: 609333 - DNA, 25 bp, Homo sapien
tgtctggcccagtccaagaggctac

SEQ ID NO: 609334 - DNA, 25 bp, Homo sapien
ggaatcagtgtctggcccagtccaa

SEQ ID NO: 609335 - DNA, 25 bp, Homo sapien
gtccaagaggctacaaggccccaca

SEQ ID NO: 609336 - DNA, 25 bp, Homo sapien
aggtccatggcagggaatcagtgtc

SEQ ID NO: 609337 - DNA, 25 bp, Homo sapien
ctggaaatcttcctgcggaatcttt

SEQ ID NO: 609338 - DNA, 25 bp, Homo sapien
cctgcggaatctttcgatacttcgg

SEQ ID NO: 609339 - DNA, 25 bp, Homo sapien
tcgatacttcggagggcgtccaatt

SEQ ID NO: 609340 - DNA, 25 bp, Homo sapien
gaatctttcgatacttcggagggcg

SEQ ID NO: 609341 - DNA, 25 bp, Homo sapien
gactctcaggtcagctattcggaat

SEQ ID NO: 609342 - DNA, 25 bp, Homo sapien
tatgccagcactagagggtgatccc

SEQ ID NO: 609343 - DNA, 25 bp, Homo sapien
tcaagagggtgagccgtatctcctg

SEQ ID NO: 609344 - DNA, 25 bp, Homo sapien
gctgtactgagctgatgaccgatgc

SEQ ID NO: 609345 - DNA, 25 bp, Homo sapien
gactgtcgaggctgagatgcccgct

SEQ ID NO: 609346 - DNA, 25 bp, Homo sapien
tgagagtgagcggtcagggtgggcc

SEQ ID NO: 609347 - DNA, 25 bp, Homo sapien
gatggtccacttggcgactgtcgag

SEQ ID NO: 609348 - DNA, 25 bp, Homo sapien
ctgacatgaagagggactggtgcac

SEQ ID NO: 609349 - DNA, 25 bp, Homo sapien
tctttgaagaggcgtgcttggtcct

SEQ ID NO: 609350 - DNA, 25 bp, Homo sapien
gtctttgaagaggcgtgcttggtcc

SEQ ID NO: 609351 - DNA, 25 bp, Homo sapien
ctttgaagaggcgtgcttggtcctc

SEQ ID NO: 609352 - DNA, 25 bp, Homo sapien
aagaggcgtgcttggtcctcacaac

SEQ ID NO: 609353 - DNA, 25 bp, Homo sapien
ttaaggacagtgaccccggctctgt

SEQ ID NO: 609354 - DNA, 25 bp, Homo sapien
ctgcttcctgccgtcttaaggacag

SEQ ID NO: 609355 - DNA, 25 bp, Homo sapien
taaggacagtgaccccggctctgtc

SEQ ID NO: 609356 - DNA, 25 bp, Homo sapien
ttcctgccgtcttaaggacagtgac

SEQ ID NO: 609357 - DNA, 25 bp, Homo sapien
ctggcaaagctaagtttggcaagca

SEQ ID NO: 609358 - DNA, 25 bp, Homo sapien
taatattgactatcactggcaaagc

SEQ ID NO: 609359 - DNA, 25 bp, Homo sapien
cctgaagatgatctgagcacacaag

SEQ ID NO: 609360 - DNA, 25 bp, Homo sapien
cagactagagtcttcccagatacat

SEQ ID NO: 609361 - DNA, 25 bp, Homo sapien
ttcaaaatacactttaattatcaac

SEQ ID NO: 609362 - DNA, 25 bp, Homo sapien
cactttaattatcaactatattgga

SEQ ID NO: 609363 - DNA, 25 bp, Homo sapien
ttatcaactatattggattaaaggg

SEQ ID NO: 609364 - DNA, 25 bp, Homo sapien
gtcattcaaaatacactttaattat

SEQ ID NO: 609365 - DNA, 25 bp, Homo sapien
tgtgttcccaccatagcagtcattt

SEQ ID NO: 609366 - DNA, 25 bp, Homo sapien
tagtgatacacagccatatgctaca

SEQ ID NO: 609367 - DNA, 25 bp, Homo sapien
tttacagacaagaagatgtaggctc

SEQ ID NO: 609368 - DNA, 25 bp, Homo sapien
tagtggaacatatacagaaacctga

SEQ ID NO: 609369 - DNA, 25 bp, Homo sapien
caccaacacagagggcaaggaaagc

SEQ ID NO: 609370 - DNA, 25 bp, Homo sapien
gccagaggccatcgaaaacagggag

SEQ ID NO: 609371 - DNA, 25 bp, Homo sapien
caccccggtgtgttctatgttggcc

SEQ ID NO: 609372 - DNA, 25 bp, Homo sapien
aaacagggagttcagctctggacac

SEQ ID NO: 609373 - DNA, 25 bp, Homo sapien
caggttcttcaaagcaaaggccaga

SEQ ID NO: 609374 - DNA, 25 bp, Homo sapien
aaaggaaggcctcgccgtcaatcat

SEQ ID NO: 609375 - DNA, 25 bp, Homo sapien
aaaaggaaggcctcgccgtcaatca

SEQ ID NO: 609376 - DNA, 25 bp, Homo sapien
ccagcttgacgctcatgatcttcac

SEQ ID NO: 609377 - DNA, 25 bp, Homo sapien
tgggcccagcttgacgctcatgatc

SEQ ID NO: 609378 - DNA, 25 bp, Homo sapien
agcgtttttgaacatgagaatggcg

SEQ ID NO: 609379 - DNA, 25 bp, Homo sapien
tggcgttatagatcttcaaggctgg

SEQ ID NO: 609380 - DNA, 25 bp, Homo sapien
tgaggtccaaagctacagagagtac

SEQ ID NO: 609381 - DNA, 25 bp, Homo sapien
gaaacttggacttggcgtgggacac

SEQ ID NO: 609382 - DNA, 25 bp, Homo sapien
gaatggacacctaaagccctgtggg

SEQ ID NO: 609383 - DNA, 25 bp, Homo sapien
tgtaaacccaaccttcgctgtgtgg

SEQ ID NO: 609384 - DNA, 25 bp, Homo sapien
ctaactgccctaggcctgggctgat

SEQ ID NO: 609385 - DNA, 25 bp, Homo sapien
accccaccaaagtgcatgtgaatga

SEQ ID NO: 609386 - DNA, 25 bp, Homo sapien
gagtcaccttagcttaagccagaag

SEQ ID NO: 609387 - DNA, 25 bp, Homo sapien
gcgctcccaggtcaaggtgcaataa

SEQ ID NO: 609388 - DNA, 25 bp, Homo sapien
cactttcagtgcagacagataccca

SEQ ID NO: 609389 - DNA, 25 bp, Homo sapien
gatctagctacgttacccaggatgg

SEQ ID NO: 609390 - DNA, 25 bp, Homo sapien
aaggatcaggcccttttacacaccg

SEQ ID NO: 609391 - DNA, 25 bp, Homo sapien
tacacaccgatctctgggagttccc

SEQ ID NO: 609392 - DNA, 25 bp, Homo sapien
caactttatcttttgacccttgtgt

SEQ ID NO: 609393 - DNA, 25 bp, Homo sapien
tatcttttgacccttgtgttgaatt

SEQ ID NO: 609394 - DNA, 25 bp, Homo sapien
ctttatcttttgacccttgtgttga

SEQ ID NO: 609395 - DNA, 25 bp, Homo sapien
ctcaactttatcttttgacccttgt

SEQ ID NO: 609396 - DNA, 25 bp, Homo sapien
ccgctgcccaggctggaatgcagtg

SEQ ID NO: 609397 - DNA, 25 bp, Homo sapien
ttacaagcatgagccaccgtgccca

SEQ ID NO: 609398 - DNA, 25 bp, Homo sapien
tctcgatctcttgacttatgatctg

SEQ ID NO: 609399 - DNA, 25 bp, Homo sapien
gatctcttgacttatgatctgccca

SEQ ID NO: 609400 - DNA, 25 bp, Homo sapien
tctggtaattctggtgccttaaaca

SEQ ID NO: 609401 - DNA, 25 bp, Homo sapien
aactttctggtaattctggtgcctt

SEQ ID NO: 609402 - DNA, 25 bp, Homo sapien
tctggtgccttaaacaccggctgct

SEQ ID NO: 609403 - DNA, 25 bp, Homo sapien
taattctggtgccttaaacaccggc

SEQ ID NO: 609404 - DNA, 25 bp, Homo sapien
aggaatgacctgtcacccactcgct

SEQ ID NO: 609405 - DNA, 25 bp, Homo sapien
tctgactggaggcacaatcctgact

SEQ ID NO: 609406 - DNA, 25 bp, Homo sapien
aatcctgacttgtcaagcaaccttc

SEQ ID NO: 609407 - DNA, 25 bp, Homo sapien
ggctcccaaaccggctcaagttcaa

SEQ ID NO: 609408 - DNA, 25 bp, Homo sapien
gagcacttcagaacacttgccagct

SEQ ID NO: 609409 - DNA, 25 bp, Homo sapien
aaccgtggaccagtgacctctatgt

SEQ ID NO: 609410 - DNA, 25 bp, Homo sapien
tgttctcttttgagcccgttccaaa

SEQ ID NO: 609411 - DNA, 25 bp, Homo sapien
tataccgtgtccagatatggtccca

SEQ ID NO: 609412 - DNA, 25 bp, Homo sapien
gcctgtgtatacgaaccctgtgtag

SEQ ID NO: 609413 - DNA, 25 bp, Homo sapien
gactctcctgctgcgtaagaaacgg

SEQ ID NO: 609414 - DNA, 25 bp, Homo sapien
taatgagcacttggtccttttggcc

SEQ ID NO: 609415 - DNA, 25 bp, Homo sapien
cctgtgtagaccatctggagctgaa

SEQ ID NO: 609416 - DNA, 25 bp, Homo sapien
tgtgtcggtttctatgagtctgcgt

SEQ ID NO: 609417 - DNA, 25 bp, Homo sapien
gtctgcgtagatgattgcatgtatg

SEQ ID NO: 609418 - DNA, 25 bp, Homo sapien
catttacatcagcatatgtctgtgc

SEQ ID NO: 609419 - DNA, 25 bp, Homo sapien
tgtcactgtatctcagtgtgtgtgg

SEQ ID NO: 609420 - DNA, 25 bp, Homo sapien
ttctcccaacaagggcctaagtgtc

SEQ ID NO: 609421 - DNA, 25 bp, Homo sapien
ggctagctgatgtcacgcgggatcc

SEQ ID NO: 609422 - DNA, 25 bp, Homo sapien
gaggcctctaggagaaccagcagtt

SEQ ID NO: 609423 - DNA, 25 bp, Homo sapien
accagcagttggaaccgaagacagg

SEQ ID NO: 609424 - DNA, 25 bp, Homo sapien
ccagggtagctccagaagtccaaga

SEQ ID NO: 609425 - DNA, 25 bp, Homo sapien
aagaaatgatatcccctggacccag

SEQ ID NO: 609426 - DNA, 25 bp, Homo sapien
caaacatctcagaagggataaaggg

SEQ ID NO: 609427 - DNA, 25 bp, Homo sapien
ttttcagggcataaagtctgaaccc

SEQ ID NO: 609428 - DNA, 25 bp, Homo sapien
tgccaccgcctgagggtttcctacc

SEQ ID NO: 609429 - DNA, 25 bp, Homo sapien
ctacccgaggtaagcaacccctgca

SEQ ID NO: 609430 - DNA, 25 bp, Homo sapien
tacccgaggtaagcaacccctgcat

SEQ ID NO: 609431 - DNA, 25 bp, Homo sapien
gggtcccagctgggctagagttcat

SEQ ID NO: 609432 - DNA, 25 bp, Homo sapien
tggggtcccagctgggctagagttc

SEQ ID NO: 609433 - DNA, 25 bp, Homo sapien
cttggggtcccagctgggctagagt

SEQ ID NO: 609434 - DNA, 25 bp, Homo sapien
ctgtggacttggggtcccagctggg

SEQ ID NO: 609435 - DNA, 25 bp, Homo sapien
gctgaaggccccaggttgatgttcc

SEQ ID NO: 609436 - DNA, 25 bp, Homo sapien
ggccccaggttgatgttcccattgg

SEQ ID NO: 609437 - DNA, 25 bp, Homo sapien
gaaggccccaggttgatgttcccat

SEQ ID NO: 609438 - DNA, 25 bp, Homo sapien
ccccaggttgatgttcccattggcc

SEQ ID NO: 609439 - DNA, 25 bp, Homo sapien
cttcccgtagttccctttgccgatg

SEQ ID NO: 609440 - DNA, 25 bp, Homo sapien
gtagttccctttgccgatgactttg

SEQ ID NO: 609441 - DNA, 25 bp, Homo sapien
ccgtagttccctttgccgatgactt

SEQ ID NO: 609442 - DNA, 25 bp, Homo sapien
tcccgtagttccctttgccgatgac

SEQ ID NO: 609443 - DNA, 25 bp, Homo sapien
gaacgccccatcagacttgcgcttg

SEQ ID NO: 609444 - DNA, 25 bp, Homo sapien
tttctgtagtaccttcactgcatag

SEQ ID NO: 609445 - DNA, 25 bp, Homo sapien
tagtaccttcactgcatagaacgcc

SEQ ID NO: 609446 - DNA, 25 bp, Homo sapien
ttcactgcatagaacgccccatcag

SEQ ID NO: 609447 - DNA, 25 bp, Homo sapien
ccaccctaggctgcggcttgagaag

SEQ ID NO: 609448 - DNA, 25 bp, Homo sapien
ctttgaaagccaccctaggctgcgg

SEQ ID NO: 609449 - DNA, 25 bp, Homo sapien
aggtgggacccatctttgaaagcca

SEQ ID NO: 609450 - DNA, 25 bp, Homo sapien
ccctctaccctttgttgtgaccact

SEQ ID NO: 609451 - DNA, 25 bp, Homo sapien
tctggaaggagtagcgcaggcccac

SEQ ID NO: 609452 - DNA, 25 bp, Homo sapien
acactgcgctctgccatgatgtggc

SEQ ID NO: 609453 - DNA, 25 bp, Homo sapien
ccccgttgacatagtcgagcacgaa

SEQ ID NO: 609454 - DNA, 25 bp, Homo sapien
aagtagagcttctcaggtgtctgga

SEQ ID NO: 609455 - DNA, 25 bp, Homo sapien
aggaaccggcgctcccgctgcaggt

SEQ ID NO: 609456 - DNA, 25 bp, Homo sapien
agggagtgcaggtagccaatggcgc

SEQ ID NO: 609457 - DNA, 25 bp, Homo sapien
caggtagccaatggcgctggccacc

SEQ ID NO: 609458 - DNA, 25 bp, Homo sapien
gccacctcagcagcgtagaacctgg

SEQ ID NO: 609459 - DNA, 25 bp, Homo sapien
tcatcaggatttagtgtccacacaa

SEQ ID NO: 609460 - DNA, 25 bp, Homo sapien
aggtgtctcagccatttagtgagga

SEQ ID NO: 609461 - DNA, 25 bp, Homo sapien
aaggaccaagtccaccaggatttca

SEQ ID NO: 609462 - DNA, 25 bp, Homo sapien
gagaactattcatggaggttgccag

SEQ ID NO: 609463 - DNA, 25 bp, Homo sapien
agtccaagagaatgttctctggttt

SEQ ID NO: 609464 - DNA, 25 bp, Homo sapien
gcagtccaagagaatgttctctggt

SEQ ID NO: 609465 - DNA, 25 bp, Homo sapien
ctggcagtccaagagaatgttctct

SEQ ID NO: 609466 - DNA, 25 bp, Homo sapien
tggcagtccaagagaatgttctctg

SEQ ID NO: 609467 - DNA, 25 bp, Homo sapien
gtggatgtggtgtcttcaggctcta

SEQ ID NO: 609468 - DNA, 25 bp, Homo sapien
gccaaaatccgtcagcaccacgtgt

SEQ ID NO: 609469 - DNA, 25 bp, Homo sapien
taccacagaatgtggatgtggtgtc

SEQ ID NO: 609470 - DNA, 25 bp, Homo sapien
caggctctacaccttccttgcagag

SEQ ID NO: 609471 - DNA, 25 bp, Homo sapien
ggagcatctcgtagaggactgcccc

SEQ ID NO: 609472 - DNA, 25 bp, Homo sapien
ggctctttccgaagcacttcaggtg

SEQ ID NO: 609473 - DNA, 25 bp, Homo sapien
cactgctcgatcataaggctctttc

SEQ ID NO: 609474 - DNA, 25 bp, Homo sapien
caccagtccactgctcgatcataag

SEQ ID NO: 609475 - DNA, 25 bp, Homo sapien
tggtgcagaatgttctcatacatct

SEQ ID NO: 609476 - DNA, 25 bp, Homo sapien
tctgtagcggctggtgcagaatgtt

SEQ ID NO: 609477 - DNA, 25 bp, Homo sapien
caggaggtcacaggcggccactgtc

SEQ ID NO: 609478 - DNA, 25 bp, Homo sapien
tgggatacatcttggctgtagaagg

SEQ ID NO: 609479 - DNA, 25 bp, Homo sapien
catgggggccagtgctccactggta

SEQ ID NO: 609480 - DNA, 25 bp, Homo sapien
tctgcaggaagctgcgagccccatg

SEQ ID NO: 609481 - DNA, 25 bp, Homo sapien
aaggcagcaggatgcgtgttaatgt

SEQ ID NO: 609482 - DNA, 25 bp, Homo sapien
tgttaatgtgcttctgagctgcctc

SEQ ID NO: 609483 - DNA, 25 bp, Homo sapien
cctggcctagtccattcatcttaac

SEQ ID NO: 609484 - DNA, 25 bp, Homo sapien
acctggcctagtccattcatcttaa

SEQ ID NO: 609485 - DNA, 25 bp, Homo sapien
ggcctagtccattcatcttaaccac

SEQ ID NO: 609486 - DNA, 25 bp, Homo sapien
tggcctagtccattcatcttaacca

SEQ ID NO: 609487 - DNA, 25 bp, Homo sapien
ggtcatcccagtttatggggctgaa

SEQ ID NO: 609488 - DNA, 25 bp, Homo sapien
tatggggctgaagaatacatggttc

SEQ ID NO: 609489 - DNA, 25 bp, Homo sapien
tgaagggtggagttagcctcttgtg

SEQ ID NO: 609490 - DNA, 25 bp, Homo sapien
tagcctcttgtggtacaggtcatcc

SEQ ID NO: 609491 - DNA, 25 bp, Homo sapien
aaggaaatatgccagtggtttccct

SEQ ID NO: 609492 - DNA, 25 bp, Homo sapien
ataataagcatttcgccactgctac

SEQ ID NO: 609493 - DNA, 25 bp, Homo sapien
gtggtttcccttaagtagtgagata

SEQ ID NO: 609494 - DNA, 25 bp, Homo sapien
gataataagcatttcgccactgcta

SEQ ID NO: 609495 - DNA, 25 bp, Homo sapien
ggtgaactctgggtcaaaatgcttc

SEQ ID NO: 609496 - DNA, 25 bp, Homo sapien
tggcgcataagaaaatcccaggaat

SEQ ID NO: 609497 - DNA, 25 bp, Homo sapien
catcctctggcgcataagaaaatcc

SEQ ID NO: 609498 - DNA, 25 bp, Homo sapien
ctagcaatccaagatgtcatcatcc

SEQ ID NO: 609499 - DNA, 25 bp, Homo sapien
tagtcacgtacccagcaaataagcc

SEQ ID NO: 609500 - DNA, 25 bp, Homo sapien
gagtatctgatgacctgtcctgcca

SEQ ID NO: 609501 - DNA, 25 bp, Homo sapien
tctggtaaaagagtgctggctgcct

SEQ ID NO: 609502 - DNA, 25 bp, Homo sapien
tagtttgagtcgctcttcctagcag

SEQ ID NO: 609503 - DNA, 25 bp, Homo sapien
tgataccctatgagcttgttacatc

SEQ ID NO: 609504 - DNA, 25 bp, Homo sapien
caataacaaatgtccagtattaccc

SEQ ID NO: 609505 - DNA, 25 bp, Homo sapien
gaacaataagagatattgataccct

SEQ ID NO: 609506 - DNA, 25 bp, Homo sapien
atgtccagtattacccacaacaaag

SEQ ID NO: 609507 - DNA, 25 bp, Homo sapien
gaccttcaggcaaggaacagcttct

SEQ ID NO: 609508 - DNA, 25 bp, Homo sapien
cccaatgtgcggtggagcacggcat

SEQ ID NO: 609509 - DNA, 25 bp, Homo sapien
gcaactagccaagcataagcaggcg

SEQ ID NO: 609510 - DNA, 25 bp, Homo sapien
gctctaggcatcaagtctgcagcag

SEQ ID NO: 609511 - DNA, 25 bp, Homo sapien
cataccggccgggctggtctacaaa

SEQ ID NO: 609512 - DNA, 25 bp, Homo sapien
ccataccggccgggctggtctacaa

SEQ ID NO: 609513 - DNA, 25 bp, Homo sapien
aagacagtcacactctgtcgcccag

SEQ ID NO: 609514 - DNA, 25 bp, Homo sapien
gacagtcacactctgtcgcccaggc

SEQ ID NO: 609515 - DNA, 25 bp, Homo sapien
aataagacagtcacactctgtcgcc

SEQ ID NO: 609516 - DNA, 25 bp, Homo sapien
taagacagtcacactctgtcgccca

SEQ ID NO: 609517 - DNA, 25 bp, Homo sapien
gctaataaggccacccaggagtatg

SEQ ID NO: 609518 - DNA, 25 bp, Homo sapien
caggagtatgaaccacacatttgta

SEQ ID NO: 609519 - DNA, 25 bp, Homo sapien
tatctttcagcgttcttagcacatg

SEQ ID NO: 609520 - DNA, 25 bp, Homo sapien
tgtttcaccgtccacagctgattgt

SEQ ID NO: 609521 - DNA, 25 bp, Homo sapien
gcatcccgcggccaggtatccaagg

SEQ ID NO: 609522 - DNA, 25 bp, Homo sapien
ccggagaggcgcgtcggtgcgccgg

SEQ ID NO: 609523 - DNA, 25 bp, Homo sapien
tcggtgcgccgggaggcgtggccca

SEQ ID NO: 609524 - DNA, 25 bp, Homo sapien
caaggccgcttagtaaccggagagg

SEQ ID NO: 609525 - DNA, 25 bp, Homo sapien
ctgaggcccagcgaccaccgctcac

SEQ ID NO: 609526 - DNA, 25 bp, Homo sapien
acaggcgcgcgccatagtagagacg

SEQ ID NO: 609527 - DNA, 25 bp, Homo sapien
cctcgctcgactggtttaattattt

SEQ ID NO: 609528 - DNA, 25 bp, Homo sapien
gagccacctcgctcgactggtttaa

SEQ ID NO: 609529 - DNA, 25 bp, Homo sapien
cgctcgactggtttaattattttct

SEQ ID NO: 609530 - DNA, 25 bp, Homo sapien
gaaagatgggatcagaaaatcaata

SEQ ID NO: 609531 - DNA, 25 bp, Homo sapien
aaagatgggatcagaaaatcaataa

SEQ ID NO: 609532 - DNA, 25 bp, Homo sapien
agccattgttggtggtaaatatctc

SEQ ID NO: 609533 - DNA, 25 bp, Homo sapien
ctttttgtaggcattgaaaagaatg

SEQ ID NO: 609534 - DNA, 25 bp, Homo sapien
tgaatcttccaattactccgaagtt

SEQ ID NO: 609535 - DNA, 25 bp, Homo sapien
aagaatggtgctccgcagctctttc

SEQ ID NO: 609536 - DNA, 25 bp, Homo sapien
gctgtaatccacagtttcactccat

SEQ ID NO: 609537 - DNA, 25 bp, Homo sapien
tgcagtaaatttttcccttggccca

SEQ ID NO: 609538 - DNA, 25 bp, Homo sapien
taatccacagtttcactccatttaa

SEQ ID NO: 609539 - DNA, 25 bp, Homo sapien
ttaacttctcagatgtgatttcatc

SEQ ID NO: 609540 - DNA, 25 bp, Homo sapien
caaagacatctccaccagtgtcaag

SEQ ID NO: 609541 - DNA, 25 bp, Homo sapien
tctccaccagtgtcaagatatttct

SEQ ID NO: 609542 - DNA, 25 bp, Homo sapien
cattattaaccatgattccatattc

SEQ ID NO: 609543 - DNA, 25 bp, Homo sapien
tattaaccatgattccatattcttc

SEQ ID NO: 609544 - DNA, 25 bp, Homo sapien
tgttcaagactccactggaaactag

SEQ ID NO: 609545 - DNA, 25 bp, Homo sapien
tcaagactccactggaaactagagc

SEQ ID NO: 609546 - DNA, 25 bp, Homo sapien
ctgttcaagactccactggaaacta

SEQ ID NO: 609547 - DNA, 25 bp, Homo sapien
actagagcttctttaggatggaaat

SEQ ID NO: 609548 - DNA, 25 bp, Homo sapien
ctgctttcctcatcaatgatcccag

SEQ ID NO: 609549 - DNA, 25 bp, Homo sapien
agtgcagagcttctacttttttcct

SEQ ID NO: 609550 - DNA, 25 bp, Homo sapien
catgtggcatcagaaaacacactca

SEQ ID NO: 609551 - DNA, 25 bp, Homo sapien
aattctgattatttttgtaaccaga

SEQ ID NO: 609552 - DNA, 25 bp, Homo sapien
aaagaagactccaaaatgatacatc

SEQ ID NO: 609553 - DNA, 25 bp, Homo sapien
tgagaaatcggatggttgctgtgtc

SEQ ID NO: 609554 - DNA, 25 bp, Homo sapien
agaaagaagtagacacgggagactt

SEQ ID NO: 609555 - DNA, 25 bp, Homo sapien
attgagaaatcggatggttgctgtg

SEQ ID NO: 609556 - DNA, 25 bp, Homo sapien
aagattgagaaatcggatggttgct

SEQ ID NO: 609557 - DNA, 25 bp, Homo sapien
aattttagcctatccagaatacatt

SEQ ID NO: 609558 - DNA, 25 bp, Homo sapien
gccaccgcgtccggcatatgctttc

SEQ ID NO: 609559 - DNA, 25 bp, Homo sapien
aaaattttagcctatccagaataca

SEQ ID NO: 609560 - DNA, 25 bp, Homo sapien
ccgcgtccggcatatgctttcattt

SEQ ID NO: 609561 - DNA, 25 bp, Homo sapien
ttcatgacactcaatgtggcaccaa

SEQ ID NO: 609562 - DNA, 25 bp, Homo sapien
gctggtttcatgacactcaatgtgg

SEQ ID NO: 609563 - DNA, 25 bp, Homo sapien
gtttcatgacactcaatgtggcacc

SEQ ID NO: 609564 - DNA, 25 bp, Homo sapien
actgctggtttcatgacactcaatg

SEQ ID NO: 609565 - DNA, 25 bp, Homo sapien
catctatacccatatctaagaaaag

SEQ ID NO: 609566 - DNA, 25 bp, Homo sapien
tctatacccatatctaagaaaagct

SEQ ID NO: 609567 - DNA, 25 bp, Homo sapien
tacccatatctaagaaaagctgtac

SEQ ID NO: 609568 - DNA, 25 bp, Homo sapien
tatacccatatctaagaaaagctgt

SEQ ID NO: 609569 - DNA, 25 bp, Homo sapien
ccaggagctcgaggttacaatgagc

SEQ ID NO: 609570 - DNA, 25 bp, Homo sapien
gctcgaggttacaatgagctatgac

SEQ ID NO: 609571 - DNA, 25 bp, Homo sapien
ggagctcgaggttacaatgagctat

SEQ ID NO: 609572 - DNA, 25 bp, Homo sapien
cccaggagctcgaggttacaatgag

SEQ ID NO: 609573 - DNA, 25 bp, Homo sapien
tcttctttgtccaaatattgatcac

SEQ ID NO: 609574 - DNA, 25 bp, Homo sapien
tgaacatgtgacatgaaccaagcac

SEQ ID NO: 609575 - DNA, 25 bp, Homo sapien
aacatgtgacatgaaccaagcactg

SEQ ID NO: 609576 - DNA, 25 bp, Homo sapien
aaatattgatcactgaacatgtgac

SEQ ID NO: 609577 - DNA, 25 bp, Homo sapien
ggtggatgtctcctgtcgtgagcca

SEQ ID NO: 609578 - DNA, 25 bp, Homo sapien
cagcatcaatctggtttaggtggat

SEQ ID NO: 609579 - DNA, 25 bp, Homo sapien
ggtttaggtggatgtctcctgtcgt

SEQ ID NO: 609580 - DNA, 25 bp, Homo sapien
tgggtcctcagcatcaatctggttt

SEQ ID NO: 609581 - DNA, 25 bp, Homo sapien
tccttcgttccatctgtcttacaga

SEQ ID NO: 609582 - DNA, 25 bp, Homo sapien
acagatgagttaagacagtcatgta

SEQ ID NO: 609583 - DNA, 25 bp, Homo sapien
gacagtcatgtattccttttgagct

SEQ ID NO: 609584 - DNA, 25 bp, Homo sapien
ggtactgagaagctggactcatttt

SEQ ID NO: 609585 - DNA, 25 bp, Homo sapien
aaggaggtggtatccagctggaaga

SEQ ID NO: 609586 - DNA, 25 bp, Homo sapien
tagggcagcatcatgtagtcagaaa

SEQ ID NO: 609587 - DNA, 25 bp, Homo sapien
tctcctggagacactctcgattccg

SEQ ID NO: 609588 - DNA, 25 bp, Homo sapien
tcgattccgctttgatagggtggct

SEQ ID NO: 609589 - DNA, 25 bp, Homo sapien
tttccaaaccaaacactcagaatgg

SEQ ID NO: 609590 - DNA, 25 bp, Homo sapien
gttcatgtttccaaaccaaacactc

SEQ ID NO: 609591 - DNA, 25 bp, Homo sapien
tcatgtttccaaaccaaacactcag

SEQ ID NO: 609592 - DNA, 25 bp, Homo sapien
ttcccaggttcatgtttccaaacca

SEQ ID NO: 609593 - DNA, 25 bp, Homo sapien
tagccaggactacgagcgagtgtgc

SEQ ID NO: 609594 - DNA, 25 bp, Homo sapien
tgagataaattttgactctgtcacc

SEQ ID NO: 609595 - DNA, 25 bp, Homo sapien
tcctggactctagctagcaatcatc

SEQ ID NO: 609596 - DNA, 25 bp, Homo sapien
aattgatttcctgggaatgagggtc

SEQ ID NO: 609597 - DNA, 25 bp, Homo sapien
gtttcacatttagctgctcgtgagc

SEQ ID NO: 609598 - DNA, 25 bp, Homo sapien
tttcacatttagctgctcgtgagcc

SEQ ID NO: 609599 - DNA, 25 bp, Homo sapien
cgtctcaaactgaggctggatgagc

SEQ ID NO: 609600 - DNA, 25 bp, Homo sapien
gcggcgtctcaaactgaggctggat

SEQ ID NO: 609601 - DNA, 25 bp, Homo sapien
gttggcagcggcgtctcaaactgag

SEQ ID NO: 609602 - DNA, 25 bp, Homo sapien
caggctgaagggttggcagcggcgt

SEQ ID NO: 609603 - DNA, 25 bp, Homo sapien
attggtaatctgagccagccgtgcc

SEQ ID NO: 609604 - DNA, 25 bp, Homo sapien
ttattggtaatctgagccagccgtg

SEQ ID NO: 609605 - DNA, 25 bp, Homo sapien
acttattggtaatctgagccagccg

SEQ ID NO: 609606 - DNA, 25 bp, Homo sapien
agccagccgtgccttctcagaggag

SEQ ID NO: 609607 - DNA, 25 bp, Homo sapien
actgagcccagctgtaattaattta

SEQ ID NO: 609608 - DNA, 25 bp, Homo sapien
ctgagcccagctgtaattaatttat

SEQ ID NO: 609609 - DNA, 25 bp, Homo sapien
gagcccagctgtaattaatttattc

SEQ ID NO: 609610 - DNA, 25 bp, Homo sapien
cactgagcccagctgtaattaattt

SEQ ID NO: 609611 - DNA, 25 bp, Homo sapien
gaataaaactggactggtactggct

SEQ ID NO: 609612 - DNA, 25 bp, Homo sapien
aacaggtgcaacagtaggaaatcaa

SEQ ID NO: 609613 - DNA, 25 bp, Homo sapien
cctagagctctctaatgtgctgctt

SEQ ID NO: 609614 - DNA, 25 bp, Homo sapien
gacttagtgtgtttcaggtatgccc

SEQ ID NO: 609615 - DNA, 25 bp, Homo sapien
ccaagaatatcaccacacttcctga

SEQ ID NO: 609616 - DNA, 25 bp, Homo sapien
tcaaggatatgtttggcatcctgtt

SEQ ID NO: 609617 - DNA, 25 bp, Homo sapien
tggaagaagacgtgctcaaggatat

SEQ ID NO: 609618 - DNA, 25 bp, Homo sapien
ctgttggtcctttggtagtttactg

SEQ ID NO: 609619 - DNA, 25 bp, Homo sapien
ctggttcaatttcttgaactccacc

SEQ ID NO: 609620 - DNA, 25 bp, Homo sapien
ggttcaatttcttgaactccaccac

SEQ ID NO: 609621 - DNA, 25 bp, Homo sapien
tggttcaatttcttgaactccacca

SEQ ID NO: 609622 - DNA, 25 bp, Homo sapien
ctacactgtgccttgtaggctctgt

SEQ ID NO: 609623 - DNA, 25 bp, Homo sapien
acactgtgccttgtaggctctgtac

SEQ ID NO: 609624 - DNA, 25 bp, Homo sapien
tacactgtgccttgtaggctctgta

SEQ ID NO: 609625 - DNA, 25 bp, Homo sapien
taccattttctagcatcctatgtga

SEQ ID NO: 609626 - DNA, 25 bp, Homo sapien
tatataggttccataagtacagggt

SEQ ID NO: 609627 - DNA, 25 bp, Homo sapien
gctgaatcaacgtcataaaacatgg

SEQ ID NO: 609628 - DNA, 25 bp, Homo sapien
tacatcctccagctagtatataggt

SEQ ID NO: 609629 - DNA, 25 bp, Homo sapien
cacttgatccctcttacccagctct

SEQ ID NO: 609630 - DNA, 25 bp, Homo sapien
acttgatccctcttacccagctcta

SEQ ID NO: 609631 - DNA, 25 bp, Homo sapien
gcacacttgatccctcttacccagc

SEQ ID NO: 609632 - DNA, 25 bp, Homo sapien
cacacttgatccctcttacccagct

SEQ ID NO: 609633 - DNA, 25 bp, Homo sapien
tccaacccaaggatcaaattttgat

SEQ ID NO: 609634 - DNA, 25 bp, Homo sapien
ccctaccatggcagggcttgtgacc

SEQ ID NO: 609635 - DNA, 25 bp, Homo sapien
taacaaacagagttgaaagcactgg

SEQ ID NO: 609636 - DNA, 25 bp, Homo sapien
aattttgatccttttgccctaccat

SEQ ID NO: 609637 - DNA, 25 bp, Homo sapien
tttcacttgtatcgatgtcatgttc

SEQ ID NO: 609638 - DNA, 25 bp, Homo sapien
ggaatgctgtttcacttgtatcgat

SEQ ID NO: 609639 - DNA, 25 bp, Homo sapien
tgtttcacttgtatcgatgtcatgt

SEQ ID NO: 609640 - DNA, 25 bp, Homo sapien
tgctgtttcacttgtatcgatgtca

SEQ ID NO: 609641 - DNA, 25 bp, Homo sapien
gtgaaaaatcttatacctatctgag

SEQ ID NO: 609642 - DNA, 25 bp, Homo sapien
gagtattacagaagatgcatatacc

SEQ ID NO: 609643 - DNA, 25 bp, Homo sapien
gaaaaagcttcaagaggcatggtct

SEQ ID NO: 609644 - DNA, 25 bp, Homo sapien
tgcatataccttccagagctcatgg

SEQ ID NO: 609645 - DNA, 25 bp, Homo sapien
aaatcaagactgtttcatagggtat

SEQ ID NO: 609646 - DNA, 25 bp, Homo sapien
caagactgtttcatagggtataaaa

SEQ ID NO: 609647 - DNA, 25 bp, Homo sapien
taattatgtctttgataaaagactc

SEQ ID NO: 609648 - DNA, 25 bp, Homo sapien
tcaagactgtttcatagggtataaa

SEQ ID NO: 609649 - DNA, 25 bp, Homo sapien
gctggcaactctgaataagccgtgt

SEQ ID NO: 609650 - DNA, 25 bp, Homo sapien
gagaatggaagcctatgaacagagc

SEQ ID NO: 609651 - DNA, 25 bp, Homo sapien
tagggatttccagccatttactagt

SEQ ID NO: 609652 - DNA, 25 bp, Homo sapien
gactggacatcttttctaagcctaa

SEQ ID NO: 609653 - DNA, 25 bp, Homo sapien
tgctctatgacatctgggacctcaa

SEQ ID NO: 609654 - DNA, 25 bp, Homo sapien
ggtatgtatttggaacacactgcca

SEQ ID NO: 609655 - DNA, 25 bp, Homo sapien
tatctcccagctttgagctagagcc

SEQ ID NO: 609656 - DNA, 25 bp, Homo sapien
caggagtcatttggaggtatcatca

SEQ ID NO: 609657 - DNA, 25 bp, Homo sapien
ggtgcttttggagcttgcctatgcg

SEQ ID NO: 609658 - DNA, 25 bp, Homo sapien
cttgcctatgcggccatggccatgg

SEQ ID NO: 609659 - DNA, 25 bp, Homo sapien
catggctcacatggccccgaagttt

SEQ ID NO: 609660 - DNA, 25 bp, Homo sapien
gccatggctcacatggccccgaagt

SEQ ID NO: 609661 - DNA, 25 bp, Homo sapien
accaaagtccacaatttgtcaaggc

SEQ ID NO: 609662 - DNA, 25 bp, Homo sapien
gtccacaatttgtcaaggctgacag

SEQ ID NO: 609663 - DNA, 25 bp, Homo sapien
aagtccacaatttgtcaaggctgac

SEQ ID NO: 609664 - DNA, 25 bp, Homo sapien
caaagtccacaatttgtcaaggctg

SEQ ID NO: 609665 - DNA, 25 bp, Homo sapien
gacacaggtccccttgacaccctta

SEQ ID NO: 609666 - DNA, 25 bp, Homo sapien
agcccgattgcaccacatcaatgag

SEQ ID NO: 609667 - DNA, 25 bp, Homo sapien
cttgacacccttaatcttctcagct

SEQ ID NO: 609668 - DNA, 25 bp, Homo sapien
caggtccccttgacacccttaatct

SEQ ID NO: 609669 - DNA, 25 bp, Homo sapien
tggccaaaagaaacggcctctttgc

SEQ ID NO: 609670 - DNA, 25 bp, Homo sapien
gcgtgagctctttccagaatttaaa

SEQ ID NO: 609671 - DNA, 25 bp, Homo sapien
tgcccacaatctgcctgtagacttc

SEQ ID NO: 609672 - DNA, 25 bp, Homo sapien
gggtaaattccttactccacaatca

SEQ ID NO: 609673 - DNA, 25 bp, Homo sapien
tcccacatagcgaagaccgaggaag

SEQ ID NO: 609674 - DNA, 25 bp, Homo sapien
cccacatagcgaagaccgaggaagg

SEQ ID NO: 609675 - DNA, 25 bp, Homo sapien
gcccaggagtatcccacatagcgaa

SEQ ID NO: 609676 - DNA, 25 bp, Homo sapien
cggcccaggagtatcccacatagcg

SEQ ID NO: 609677 - DNA, 25 bp, Homo sapien
gggccgcgctcgaaggcgtcagcgt

SEQ ID NO: 609678 - DNA, 25 bp, Homo sapien
ccgccggcgcgggttgaagcacttt

SEQ ID NO: 609679 - DNA, 25 bp, Homo sapien
tcagcgtgtcagcaggtcccgcgct

SEQ ID NO: 609680 - DNA, 25 bp, Homo sapien
gcgctcctcgctcgcaggaactgca

SEQ ID NO: 609681 - DNA, 25 bp, Homo sapien
ttttgcccttcaacgtgctgggctc

SEQ ID NO: 609682 - DNA, 25 bp, Homo sapien
tccaggacaggggtgagtcagagac

SEQ ID NO: 609683 - DNA, 25 bp, Homo sapien
aggacaggggtgagtcagagacaaa

SEQ ID NO: 609684 - DNA, 25 bp, Homo sapien
agtcagagacaaagcgggaagtggg

SEQ ID NO: 609685 - DNA, 25 bp, Homo sapien
catcatctacaaaggtcagctccac

SEQ ID NO: 609686 - DNA, 25 bp, Homo sapien
gggcccttacactgcaactgcctgt

SEQ ID NO: 609687 - DNA, 25 bp, Homo sapien
acatgggaaaccctcctgtctcggg

SEQ ID NO: 609688 - DNA, 25 bp, Homo sapien
cgttgcttcctagagtcactcctat

SEQ ID NO: 609689 - DNA, 25 bp, Homo sapien
tcctcatgggtccatttgaccttgc

SEQ ID NO: 609690 - DNA, 25 bp, Homo sapien
ccatttgaccttgcacttgctatcc

SEQ ID NO: 609691 - DNA, 25 bp, Homo sapien
tgaatctgtgtcctggtagtgcagc

SEQ ID NO: 609692 - DNA, 25 bp, Homo sapien
tatccctctgctccggcacatctga

SEQ ID NO: 609693 - DNA, 25 bp, Homo sapien
cagcacacatacgtgcagaaaacct

SEQ ID NO: 609694 - DNA, 25 bp, Homo sapien
caggggctcagcacacatacgtgca

SEQ ID NO: 609695 - DNA, 25 bp, Homo sapien
gggctgcccgtgacagagcccaatc

SEQ ID NO: 609696 - DNA, 25 bp, Homo sapien
tcagggctgcccgtgacagagccca

SEQ ID NO: 609697 - DNA, 25 bp, Homo sapien
ggaagtggctggccaggaacttcca

SEQ ID NO: 609698 - DNA, 25 bp, Homo sapien
aagtggctggccaggaacttccagt

SEQ ID NO: 609699 - DNA, 25 bp, Homo sapien
tgctgtccaaactgcctcaccaggg

SEQ ID NO: 609700 - DNA, 25 bp, Homo sapien
aacttccagtcctgctgtccaaact

SEQ ID NO: 609701 - DNA, 25 bp, Homo sapien
ggtccatggccccttgacaaggtct

SEQ ID NO: 609702 - DNA, 25 bp, Homo sapien
ccatggccccttgacaaggtctgga

SEQ ID NO: 609703 - DNA, 25 bp, Homo sapien
tctttggtccatggccccttgacaa

SEQ ID NO: 609704 - DNA, 25 bp, Homo sapien
tcctctttggtccatggccccttga

SEQ ID NO: 609705 - DNA, 25 bp, Homo sapien
tacactggtgggtgaagacccactg

SEQ ID NO: 609706 - DNA, 25 bp, Homo sapien
tcacagtccccaggtacactggtgg

SEQ ID NO: 609707 - DNA, 25 bp, Homo sapien
tgcaaggcactgtcccagcagttac

SEQ ID NO: 609708 - DNA, 25 bp, Homo sapien
gtgaagacccactgtgtgcaaggca

SEQ ID NO: 609709 - DNA, 25 bp, Homo sapien
gagaaaagtctctgggtagccactt

SEQ ID NO: 609710 - DNA, 25 bp, Homo sapien
tgggtagccacttgcaccggcccct

SEQ ID NO: 609711 - DNA, 25 bp, Homo sapien
aaaagtctctgggtagccacttgca

SEQ ID NO: 609712 - DNA, 25 bp, Homo sapien
agtctctgggtagccacttgcaccg

SEQ ID NO: 609713 - DNA, 25 bp, Homo sapien
ccctggcaacatcttggcgatctcg

SEQ ID NO: 609714 - DNA, 25 bp, Homo sapien
ttgaggtggttgtgccagcgttcac

SEQ ID NO: 609715 - DNA, 25 bp, Homo sapien
cggcccttcaggtgcttggcaatca

SEQ ID NO: 609716 - DNA, 25 bp, Homo sapien
tcctcggtccagcaagacttcttca

SEQ ID NO: 609717 - DNA, 25 bp, Homo sapien
gaagccagagtttccaacccaagtg

SEQ ID NO: 609718 - DNA, 25 bp, Homo sapien
ggcaaagcagctaacaccgagtaag

SEQ ID NO: 609719 - DNA, 25 bp, Homo sapien
cacaagtgacagtggatcaaggtga

SEQ ID NO: 609720 - DNA, 25 bp, Homo sapien
tacacaataggcacaagcgggagtg

SEQ ID NO: 609721 - DNA, 25 bp, Homo sapien
ctgcagggggcagcagggggccttt

SEQ ID NO: 609722 - DNA, 25 bp, Homo sapien
ggcagcagggggcctttgaacccca

SEQ ID NO: 609723 - DNA, 25 bp, Homo sapien
gcagcagggggcctttgaaccccag

SEQ ID NO: 609724 - DNA, 25 bp, Homo sapien
cagggggcagcagggggcctttgaa

SEQ ID NO: 609725 - DNA, 25 bp, Homo sapien
tctttggactcgctcaagaagcctc

SEQ ID NO: 609726 - DNA, 25 bp, Homo sapien
tggactcgctcaagaagcctcctgt

SEQ ID NO: 609727 - DNA, 25 bp, Homo sapien
ggggcttgcagtctttggactcgct

SEQ ID NO: 609728 - DNA, 25 bp, Homo sapien
gactcgctcaagaagcctcctgtgt

SEQ ID NO: 609729 - DNA, 25 bp, Homo sapien
cagatctgtaccgatgggctcctgt

SEQ ID NO: 609730 - DNA, 25 bp, Homo sapien
cctgttccttcgatgtggtggctgc

SEQ ID NO: 609731 - DNA, 25 bp, Homo sapien
gcttcagagaggctagaacccacag

SEQ ID NO: 609732 - DNA, 25 bp, Homo sapien
caagggctctggtgttcgcactgcg

SEQ ID NO: 609733 - DNA, 25 bp, Homo sapien
tgggatttccacacacgcagtaact

SEQ ID NO: 609734 - DNA, 25 bp, Homo sapien
tactcattaagcactggctccggca

SEQ ID NO: 609735 - DNA, 25 bp, Homo sapien
gctctgagccggacagcaaggttta

SEQ ID NO: 609736 - DNA, 25 bp, Homo sapien
caatacaagcgagctgtgcctgcca

SEQ ID NO: 609737 - DNA, 25 bp, Homo sapien
tcctcagggaggtcaaatttactca

SEQ ID NO: 609738 - DNA, 25 bp, Homo sapien
cagggaggtcaaatttactcaggtc

SEQ ID NO: 609739 - DNA, 25 bp, Homo sapien
tcaaatttactcaggtcacaccaag

SEQ ID NO: 609740 - DNA, 25 bp, Homo sapien
ttactcaggtcacaccaagcatcag

SEQ ID NO: 609741 - DNA, 25 bp, Homo sapien
agctgcactaggctgttgttgatac

SEQ ID NO: 609742 - DNA, 25 bp, Homo sapien
aggacttgctgctgatgtgacgctt

SEQ ID NO: 609743 - DNA, 25 bp, Homo sapien
tgtgacgcttgcagctgcactaggc

SEQ ID NO: 609744 - DNA, 25 bp, Homo sapien
gacttgctgctgatgtgacgcttgc

SEQ ID NO: 609745 - DNA, 25 bp, Homo sapien
atccaggcggtactcggtcacactg

SEQ ID NO: 609746 - DNA, 25 bp, Homo sapien
cacagagggcggtgtgccaatgcca

SEQ ID NO: 609747 - DNA, 25 bp, Homo sapien
aaggacagactggtgctattctcag

SEQ ID NO: 609748 - DNA, 25 bp, Homo sapien
tgctcttgggcgtgaggctgttaca

SEQ ID NO: 609749 - DNA, 25 bp, Homo sapien
tctactcgagtgctgacgacgcagt

SEQ ID NO: 609750 - DNA, 25 bp, Homo sapien
cgacgcagttaaggcacaggaagcc

SEQ ID NO: 609751 - DNA, 25 bp, Homo sapien
tttgccatctctactcgagtgctga

SEQ ID NO: 609752 - DNA, 25 bp, Homo sapien
tgctgacgacgcagttaaggcacag

SEQ ID NO: 609753 - DNA, 25 bp, Homo sapien
cctgtttgttccagaagttcagaaa

SEQ ID NO: 609754 - DNA, 25 bp, Homo sapien
tggggtggatgtcagcgaggggctc

SEQ ID NO: 609755 - DNA, 25 bp, Homo sapien
tgcagtggtgtggtgaccaccacct

SEQ ID NO: 609756 - DNA, 25 bp, Homo sapien
ctctccagctccaatgtgtcctgtt

SEQ ID NO: 609757 - DNA, 25 bp, Homo sapien
gcccaaaactatatcgataaaaatg

SEQ ID NO: 609758 - DNA, 25 bp, Homo sapien
aaaacagtcttcagtgttattccaa

SEQ ID NO: 609759 - DNA, 25 bp, Homo sapien
aaaatgataaatcgtggtggccaga

SEQ ID NO: 609760 - DNA, 25 bp, Homo sapien
agtggtcccaaggcccatggtctgg

SEQ ID NO: 609761 - DNA, 25 bp, Homo sapien
ggctggcgagcaacctgtacaggct

SEQ ID NO: 609762 - DNA, 25 bp, Homo sapien
gaaaatgtcatgctccgtaagctca

SEQ ID NO: 609763 - DNA, 25 bp, Homo sapien
cactgagccggactttggagactga

SEQ ID NO: 609764 - DNA, 25 bp, Homo sapien
cttccattgtaaaagcaggctggcg

SEQ ID NO: 609765 - DNA, 25 bp, Homo sapien
tagccgagaatgctgctcagtcatg

SEQ ID NO: 609766 - DNA, 25 bp, Homo sapien
ggtgatttccacctgccctagagca

SEQ ID NO: 609767 - DNA, 25 bp, Homo sapien
tgatggacacgtggagggaaccctt

SEQ ID NO: 609768 - DNA, 25 bp, Homo sapien
tatcagatgtagacccaccatgggt

SEQ ID NO: 609769 - DNA, 25 bp, Homo sapien
cgttcttgaacggggttggcgtgtg

SEQ ID NO: 609770 - DNA, 25 bp, Homo sapien
ggcttcaggggtccgtacttctcca

SEQ ID NO: 609771 - DNA, 25 bp, Homo sapien
tcaggggtccgtacttctccagggc

SEQ ID NO: 609772 - DNA, 25 bp, Homo sapien
cgtgtggggagtgttgtccatggag

SEQ ID NO: 609773 - DNA, 25 bp, Homo sapien
tgcagagatccacggcagcgaccac

SEQ ID NO: 609774 - DNA, 25 bp, Homo sapien
tgtgcagagatccacggcagcgacc

SEQ ID NO: 609775 - DNA, 25 bp, Homo sapien
gtgcagagatccacggcagcgacca

SEQ ID NO: 609776 - DNA, 25 bp, Homo sapien
gatttgccctcacacctgtttggag

SEQ ID NO: 609777 - DNA, 25 bp, Homo sapien
gataccaccatgtctctagcaccag

SEQ ID NO: 609778 - DNA, 25 bp, Homo sapien
gacaggccagagtagcaatttgcca

SEQ ID NO: 609779 - DNA, 25 bp, Homo sapien
acacagctgctgaattaggaccccg

SEQ ID NO: 609780 - DNA, 25 bp, Homo sapien
gcttctcgggcctgatgtcgtcctc

SEQ ID NO: 609781 - DNA, 25 bp, Homo sapien
tgtcgtcctcgatgatgagttcgat

SEQ ID NO: 609782 - DNA, 25 bp, Homo sapien
tcagaacgcagcacctccttcaagt

SEQ ID NO: 609783 - DNA, 25 bp, Homo sapien
agttcgatgccagcctcagaacgca

SEQ ID NO: 609784 - DNA, 25 bp, Homo sapien
tcatgaaagctaacgacgcagtggg

SEQ ID NO: 609785 - DNA, 25 bp, Homo sapien
aagggatcgcgcactgtcatgaaag

SEQ ID NO: 609786 - DNA, 25 bp, Homo sapien
caaggtagaccctatcctgccaggt

SEQ ID NO: 609787 - DNA, 25 bp, Homo sapien
catggatggtcacaaaaccaggccc

SEQ ID NO: 609788 - DNA, 25 bp, Homo sapien
tcatccacaatgtcaagagccagag

SEQ ID NO: 609789 - DNA, 25 bp, Homo sapien
caaggatagagacttgggcagtgtg

SEQ ID NO: 609790 - DNA, 25 bp, Homo sapien
gactttcttgatggggctccgccgc

SEQ ID NO: 609791 - DNA, 25 bp, Homo sapien
gagccagagacttccggactttctt

SEQ ID NO: 609792 - DNA, 25 bp, Homo sapien
aagagtttgaaggggcagttgtcgg

SEQ ID NO: 609793 - DNA, 25 bp, Homo sapien
gaagagtttgaaggggcagttgtcg

SEQ ID NO: 609794 - DNA, 25 bp, Homo sapien
ctggaagagtttgaaggggcagttg

SEQ ID NO: 609795 - DNA, 25 bp, Homo sapien
ggaagagtttgaaggggcagttgtc

SEQ ID NO: 609796 - DNA, 25 bp, Homo sapien
ttctttgatacctgacagggtgagg

SEQ ID NO: 609797 - DNA, 25 bp, Homo sapien
tcttctttgatacctgacagggtga

SEQ ID NO: 609798 - DNA, 25 bp, Homo sapien
tgtcttctttgatacctgacagggt

SEQ ID NO: 609799 - DNA, 25 bp, Homo sapien
gttgtcttctttgatacctgacagg

SEQ ID NO: 609800 - DNA, 25 bp, Homo sapien
gggcaggtgtcgtgaagtggcttcg

SEQ ID NO: 609801 - DNA, 25 bp, Homo sapien
ctgcaagaagccctggttgagcaag

SEQ ID NO: 609802 - DNA, 25 bp, Homo sapien
gccttctcgggcttggcctgcaaga

SEQ ID NO: 609803 - DNA, 25 bp, Homo sapien
gccactgctgccttctcgggcttgg

SEQ ID NO: 609804 - DNA, 25 bp, Homo sapien
atccaggcagggactatgtgttccc

SEQ ID NO: 609805 - DNA, 25 bp, Homo sapien
gaggcaagagggttaccatccaggc

SEQ ID NO: 609806 - DNA, 25 bp, Homo sapien
ggactatgtgttcccaacagaccct

SEQ ID NO: 609807 - DNA, 25 bp, Homo sapien
ggcaagagggttaccatccaggcag

SEQ ID NO: 609808 - DNA, 25 bp, Homo sapien
caagatgagggtccgagatgtgtgg

SEQ ID NO: 609809 - DNA, 25 bp, Homo sapien
gacaagatgagggtccgagatgtgt

SEQ ID NO: 609810 - DNA, 25 bp, Homo sapien
gatgagggtccgagatgtgtggctg

SEQ ID NO: 609811 - DNA, 25 bp, Homo sapien
tcaggacaagatgagggtccgagat

SEQ ID NO: 609812 - DNA, 25 bp, Homo sapien
aaacatgagaatgggctcgtgacac

SEQ ID NO: 609813 - DNA, 25 bp, Homo sapien
tttgttgttagcaccaggagccgcc

SEQ ID NO: 609814 - DNA, 25 bp, Homo sapien
cttgggagaagctgacggagctccc

SEQ ID NO: 609815 - DNA, 25 bp, Homo sapien
ccctgcaggaggtcacctgaatgac

SEQ ID NO: 609816 - DNA, 25 bp, Homo sapien
tccgatgactgtgctgtaaaaagcc

SEQ ID NO: 609817 - DNA, 25 bp, Homo sapien
cctttaatggatgcacacgtgtcta

SEQ ID NO: 609818 - DNA, 25 bp, Homo sapien
accctgggcccagagcgtacgtttg

SEQ ID NO: 609819 - DNA, 25 bp, Homo sapien
cccagggcctgataccagagagagc

SEQ ID NO: 609820 - DNA, 25 bp, Homo sapien
ggagtatgttatgggttgttcccaa

SEQ ID NO: 609821 - DNA, 25 bp, Homo sapien
actaggagtatgttatgggttgttc

SEQ ID NO: 609822 - DNA, 25 bp, Homo sapien
aaatatactaggagtatgttatggg

SEQ ID NO: 609823 - DNA, 25 bp, Homo sapien
tgggaatagggccattgcagatata

SEQ ID NO: 609824 - DNA, 25 bp, Homo sapien
acttcattaatgtcaagaacaaaac

SEQ ID NO: 609825 - DNA, 25 bp, Homo sapien
aaattgcctgcgcacacattgccag

SEQ ID NO: 609826 - DNA, 25 bp, Homo sapien
catgatctgtgtaccaggctgcaca

SEQ ID NO: 609827 - DNA, 25 bp, Homo sapien
gtttccacggaacaagacaagcagt

SEQ ID NO: 609828 - DNA, 25 bp, Homo sapien
tgctactttcataaacgctgggtgg

SEQ ID NO: 609829 - DNA, 25 bp, Homo sapien
gcatgagggaagcagtgttgaggct

SEQ ID NO: 609830 - DNA, 25 bp, Homo sapien
atgagggaagcagtgttgaggctga

SEQ ID NO: 609831 - DNA, 25 bp, Homo sapien
catgagggaagcagtgttgaggctg

SEQ ID NO: 609832 - DNA, 25 bp, Homo sapien
tcttcagacttaccactgtgcaggg

SEQ ID NO: 609833 - DNA, 25 bp, Homo sapien
tccaagattctaatgaacagccaag

SEQ ID NO: 609834 - DNA, 25 bp, Homo sapien
tcaggccactgtgcttaagatgaca

SEQ ID NO: 609835 - DNA, 25 bp, Homo sapien
ccaaagctgaggagactttcaagca

SEQ ID NO: 609836 - DNA, 25 bp, Homo sapien
gcttctgaccacaactttccagtct

SEQ ID NO: 609837 - DNA, 25 bp, Homo sapien
ttccagtctccaccaatcaacgttt

SEQ ID NO: 609838 - DNA, 25 bp, Homo sapien
ttctgaccacaactttccagtctcc

SEQ ID NO: 609839 - DNA, 25 bp, Homo sapien
cagtctccaccaatcaacgttttaa

SEQ ID NO: 609840 - DNA, 25 bp, Homo sapien
gattgaggccgcagacagccatgat

SEQ ID NO: 609841 - DNA, 25 bp, Homo sapien
gcactcctgtgcaatagagcaagac

SEQ ID NO: 609842 - DNA, 25 bp, Homo sapien
aggccgcagacagccatgattgtac

SEQ ID NO: 609843 - DNA, 25 bp, Homo sapien
ggagattgaggccgcagacagccat

SEQ ID NO: 609844 - DNA, 25 bp, Homo sapien
ggcacgtggtaacttcaatgggcct

SEQ ID NO: 609845 - DNA, 25 bp, Homo sapien
ggtaacttcaatgggcctgacactt

SEQ ID NO: 609846 - DNA, 25 bp, Homo sapien
gcacgtggtaacttcaatgggcctg

SEQ ID NO: 609847 - DNA, 25 bp, Homo sapien
ctactccaagtagtgaaggcactca

SEQ ID NO: 609848 - DNA, 25 bp, Homo sapien
atgccggctgcacgtagagctctgg

SEQ ID NO: 609849 - DNA, 25 bp, Homo sapien
tactgatgagcctactccaagtagt

SEQ ID NO: 609850 - DNA, 25 bp, Homo sapien
agatgccggctgcacgtagagctct

SEQ ID NO: 609851 - DNA, 25 bp, Homo sapien
ggtggatgggttgttgcccactcca

SEQ ID NO: 609852 - DNA, 25 bp, Homo sapien
aaggtggatgggttgttgcccactc

SEQ ID NO: 609853 - DNA, 25 bp, Homo sapien
caaggtggatgggttgttgcccact

SEQ ID NO: 609854 - DNA, 25 bp, Homo sapien
ccaaggtggatgggttgttgcccac

SEQ ID NO: 609855 - DNA, 25 bp, Homo sapien
tcccaaagcctggtttcctcgtgtg

SEQ ID NO: 609856 - DNA, 25 bp, Homo sapien
agaaaatctcccaatgttcccaaag

SEQ ID NO: 609857 - DNA, 25 bp, Homo sapien
tgaacctgagaaaatctcccaatgt

SEQ ID NO: 609858 - DNA, 25 bp, Homo sapien
ttcctcgtgtgaacaaccagatact

SEQ ID NO: 609859 - DNA, 25 bp, Homo sapien
ctggagatagcgcaccaggaaggat

SEQ ID NO: 609860 - DNA, 25 bp, Homo sapien
ttagagagcactcggtttccccaag

SEQ ID NO: 609861 - DNA, 25 bp, Homo sapien
agggccacacttagagagcactcgg

SEQ ID NO: 609862 - DNA, 25 bp, Homo sapien
tttccccaagcccttcaatactgct

SEQ ID NO: 609863 - DNA, 25 bp, Homo sapien
gaacagcctttgtgcagaccatgga

SEQ ID NO: 609864 - DNA, 25 bp, Homo sapien
tgtggtcacgagcatgggtttcaga

SEQ ID NO: 609865 - DNA, 25 bp, Homo sapien
gagctcagcacttaggatcaatcag

SEQ ID NO: 609866 - DNA, 25 bp, Homo sapien
cagactgggatgttttcggatgcac

SEQ ID NO: 609867 - DNA, 25 bp, Homo sapien
cataattgctatcaatggagtcggc

SEQ ID NO: 609868 - DNA, 25 bp, Homo sapien
gactttctctggatcgtagagccat

SEQ ID NO: 609869 - DNA, 25 bp, Homo sapien
tattggcttctagtgcattgggcag

SEQ ID NO: 609870 - DNA, 25 bp, Homo sapien
atagagagagaactgcgcgtgcccg

SEQ ID NO: 609871 - DNA, 25 bp, Homo sapien
cttgttgatgattaaggagttcaaa

SEQ ID NO: 609872 - DNA, 25 bp, Homo sapien
gattaaggagttcaaatgaggccgg

SEQ ID NO: 609873 - DNA, 25 bp, Homo sapien
gatgattaaggagttcaaatgaggc

SEQ ID NO: 609874 - DNA, 25 bp, Homo sapien
taaggagttcaaatgaggccgggca

SEQ ID NO: 609875 - DNA, 25 bp, Homo sapien
gaagccgaggcaggatgatctcttg

SEQ ID NO: 609876 - DNA, 25 bp, Homo sapien
cgaggcaggatgatctcttgaagcc

SEQ ID NO: 609877 - DNA, 25 bp, Homo sapien
tggccaacatagcgacacctcatct

SEQ ID NO: 609878 - DNA, 25 bp, Homo sapien
cctggccaacatagcgacacctcat

SEQ ID NO: 609879 - DNA, 25 bp, Homo sapien
gtcagcagggctggcgtctggtgag

SEQ ID NO: 609880 - DNA, 25 bp, Homo sapien
tatttctgtcctggaggctgaaagt

SEQ ID NO: 609881 - DNA, 25 bp, Homo sapien
ggcgtctggtgaggcctcacttcct

SEQ ID NO: 609882 - DNA, 25 bp, Homo sapien
gaaagtccaagatcaggagtcagca

SEQ ID NO: 609883 - DNA, 25 bp, Homo sapien
gaaattgataaattcctagacaaat

SEQ ID NO: 609884 - DNA, 25 bp, Homo sapien
tcctagacaaatacaccctcccaaa

SEQ ID NO: 609885 - DNA, 25 bp, Homo sapien
aattgataaattcctagacaaatac

SEQ ID NO: 609886 - DNA, 25 bp, Homo sapien
tgataaattcctagacaaatacacc

SEQ ID NO: 609887 - DNA, 25 bp, Homo sapien
aactaggggctcttctctcatgaga

SEQ ID NO: 609888 - DNA, 25 bp, Homo sapien
caggaagagggttaaagtcctgaga

SEQ ID NO: 609889 - DNA, 25 bp, Homo sapien
aagtcctgagaactaggggctcttc

SEQ ID NO: 609890 - DNA, 25 bp, Homo sapien
tcctgagaactaggggctcttctct

SEQ ID NO: 609891 - DNA, 25 bp, Homo sapien
gatgcatgtcaggagtaagtcctcc

SEQ ID NO: 609892 - DNA, 25 bp, Homo sapien
tcccactgagaaggcggaaggctat

SEQ ID NO: 609893 - DNA, 25 bp, Homo sapien
gactgacccaggttttagggccaga

SEQ ID NO: 609894 - DNA, 25 bp, Homo sapien
tcatatagctggtgaatggcagcca

SEQ ID NO: 609895 - DNA, 25 bp, Homo sapien
ctcgtaatgccaagaatatgataaa

SEQ ID NO: 609896 - DNA, 25 bp, Homo sapien
ggattttcatgaacacccctgggat

SEQ ID NO: 609897 - DNA, 25 bp, Homo sapien
ggatcacttattggtcagaaccttg

SEQ ID NO: 609898 - DNA, 25 bp, Homo sapien
agaaccttgaatgctaaactcgtaa

SEQ ID NO: 609899 - DNA, 25 bp, Homo sapien
gggggacgcaggccagcgccggagg

SEQ ID NO: 609900 - DNA, 25 bp, Homo sapien
ctggggggacgcaggccagcgccgg

SEQ ID NO: 609901 - DNA, 25 bp, Homo sapien
ggacgcaggccagcgccggaggatg

SEQ ID NO: 609902 - DNA, 25 bp, Homo sapien
gggacgcaggccagcgccggaggat

SEQ ID NO: 609903 - DNA, 25 bp, Homo sapien
cttgccgccgtggtaatagtccagg

SEQ ID NO: 609904 - DNA, 25 bp, Homo sapien
ccgccgtggtaatagtccaggtgcg

SEQ ID NO: 609905 - DNA, 25 bp, Homo sapien
ccgaggggtacaggcggacgtccat

SEQ ID NO: 609906 - DNA, 25 bp, Homo sapien
tggtaatagtccaggtgcgccaggc

SEQ ID NO: 609907 - DNA, 25 bp, Homo sapien
gactgtgtggccgtcaggacgatct

SEQ ID NO: 609908 - DNA, 25 bp, Homo sapien
tccctgggtgtgaccgcgtgtgact

SEQ ID NO: 609909 - DNA, 25 bp, Homo sapien
tgtgtctgaggctcaccgtccaggg

SEQ ID NO: 609910 - DNA, 25 bp, Homo sapien
actgtcgggcgacttctttgtgtga

SEQ ID NO: 609911 - DNA, 25 bp, Homo sapien
acggagcccacgcgtctgcgccagg

SEQ ID NO: 609912 - DNA, 25 bp, Homo sapien
cacggagcccacgcgtctgcgccag

SEQ ID NO: 609913 - DNA, 25 bp, Homo sapien
ctggggggcgccgatccagccactg

SEQ ID NO: 609914 - DNA, 25 bp, Homo sapien
gcctgacgaaaagcctgcgaggttg

SEQ ID NO: 609915 - DNA, 25 bp, Homo sapien
taccaggggcctgacgaaaagcctg

SEQ ID NO: 609916 - DNA, 25 bp, Homo sapien
gggaggctttgccagaagccgctcc

SEQ ID NO: 609917 - DNA, 25 bp, Homo sapien
gggacggtcgccaagagcccttcca

SEQ ID NO: 609918 - DNA, 25 bp, Homo sapien
gatcgctaaggggacagtcgccaag

SEQ ID NO: 609919 - DNA, 25 bp, Homo sapien
gaacaaccaatgttcgtgactttgg

SEQ ID NO: 609920 - DNA, 25 bp, Homo sapien
aagaggctgggaatctctgtgtaga

SEQ ID NO: 609921 - DNA, 25 bp, Homo sapien
tgaaaaatcatcctgtaggtttgaa

SEQ ID NO: 609922 - DNA, 25 bp, Homo sapien
taggtttgaatccatgtaaataaga

SEQ ID NO: 609923 - DNA, 25 bp, Homo sapien
tatgtttttactgttgctcccaaac

SEQ ID NO: 609924 - DNA, 25 bp, Homo sapien
catatgtttttactgttgctcccaa

SEQ ID NO: 609925 - DNA, 25 bp, Homo sapien
tctgaaataagagctgcctcttcct

SEQ ID NO: 609926 - DNA, 25 bp, Homo sapien
ctctgaaataagagctgcctcttcc

SEQ ID NO: 609927 - DNA, 25 bp, Homo sapien
gctctgaaataagagctgcctcttc

SEQ ID NO: 609928 - DNA, 25 bp, Homo sapien
tcctaggacctaacgtgcatgcaca

SEQ ID NO: 609929 - DNA, 25 bp, Homo sapien
catgcttgggctgactttgtgctaa

SEQ ID NO: 609930 - DNA, 25 bp, Homo sapien
aagtaacttactagatgtgcacagc

SEQ ID NO: 609931 - DNA, 25 bp, Homo sapien
cagaaattggcggaagctagaccaa

SEQ ID NO: 609932 - DNA, 25 bp, Homo sapien
ttagcaaggcaaatccaaggctgtg

SEQ ID NO: 609933 - DNA, 25 bp, Homo sapien
cctggcaggttggatgactgaggct

SEQ ID NO: 609934 - DNA, 25 bp, Homo sapien
caataaatattcaggtggaggtatt

SEQ ID NO: 609935 - DNA, 25 bp, Homo sapien
caggtgcagtgctcttgccgttgca

SEQ ID NO: 609936 - DNA, 25 bp, Homo sapien
cgagggcctcatgaaaaaggtgtca

SEQ ID NO: 609937 - DNA, 25 bp, Homo sapien
cagtcaagccgagatttggagaagg

SEQ ID NO: 609938 - DNA, 25 bp, Homo sapien
tataaggaagacagtactcaccggt

SEQ ID NO: 609939 - DNA, 25 bp, Homo sapien
gaagctgggtgataccagacaagca

SEQ ID NO: 609940 - DNA, 25 bp, Homo sapien
taaatcatggctctccatagaatgg

SEQ ID NO: 609941 - DNA, 25 bp, Homo sapien
tgacaataaagtccatcgatagagg

SEQ ID NO: 609942 - DNA, 25 bp, Homo sapien
atactatgcggccttgaaaatgatg

SEQ ID NO: 609943 - DNA, 25 bp, Homo sapien
tacttcacataggtcataattccag

SEQ ID NO: 609944 - DNA, 25 bp, Homo sapien
cccgggcactaaggattaaccagca

SEQ ID NO: 609945 - DNA, 25 bp, Homo sapien
tccagactaagcaggaagcgctctg

SEQ ID NO: 609946 - DNA, 25 bp, Homo sapien
tcgggcttgggataaagctggcccc

SEQ ID NO: 609947 - DNA, 25 bp, Homo sapien
aaagtaagtgacagagagaacggcc

SEQ ID NO: 609948 - DNA, 25 bp, Homo sapien
cccatcccattcgtataaggtgaaa

SEQ ID NO: 609949 - DNA, 25 bp, Homo sapien
aatccatctcctattccaatttggg

SEQ ID NO: 609950 - DNA, 25 bp, Homo sapien
tataagccctcctgacaactcttgg

SEQ ID NO: 609951 - DNA, 25 bp, Homo sapien
ccaatttgggcctgcgtgttcggag

SEQ ID NO: 609952 - DNA, 25 bp, Homo sapien
ccgcgacagcctctgtgcgagtctg

SEQ ID NO: 609953 - DNA, 25 bp, Homo sapien
cagtgtcttgcaagtagaaggagcc

SEQ ID NO: 609954 - DNA, 25 bp, Homo sapien
ggagcccgagtctcattccacagaa

SEQ ID NO: 609955 - DNA, 25 bp, Homo sapien
acctgcaatgcaccagtgtcttgca

SEQ ID NO: 609956 - DNA, 25 bp, Homo sapien
tcagcccaggtatcttctgggctcc

SEQ ID NO: 609957 - DNA, 25 bp, Homo sapien
cttggaaggcccctgtcactcttca

SEQ ID NO: 609958 - DNA, 25 bp, Homo sapien
cgtcttgccttcttggaaggcccct

SEQ ID NO: 609959 - DNA, 25 bp, Homo sapien
tgtcactcttcagcccaggtatctt

SEQ ID NO: 609960 - DNA, 25 bp, Homo sapien
aaagccgtggatgtcgtgaccacac

SEQ ID NO: 609961 - DNA, 25 bp, Homo sapien
tggaaagccgtggatgtcgtgacca

SEQ ID NO: 609962 - DNA, 25 bp, Homo sapien
cagagaaggcttctggaaagccgtg

SEQ ID NO: 609963 - DNA, 25 bp, Homo sapien
agacggtgggggcaatcagagaagg

SEQ ID NO: 609964 - DNA, 25 bp, Homo sapien
catcatcgtgggtgatgtcctccca

SEQ ID NO: 609965 - DNA, 25 bp, Homo sapien
ctcccagagcatcacagcactgatg

SEQ ID NO: 609966 - DNA, 25 bp, Homo sapien
tgtgagaataaaggtgcatcatcgt

SEQ ID NO: 609967 - DNA, 25 bp, Homo sapien
acaatgacagaagcgggcacaggga

SEQ ID NO: 609968 - DNA, 25 bp, Homo sapien
ttaacatttctgtgctgtctggcct

SEQ ID NO: 609969 - DNA, 25 bp, Homo sapien
ttctgtgctgtctggccttgcagca

SEQ ID NO: 609970 - DNA, 25 bp, Homo sapien
tttctgtgctgtctggccttgcagc

SEQ ID NO: 609971 - DNA, 25 bp, Homo sapien
acatttctgtgctgtctggccttgc

SEQ ID NO: 609972 - DNA, 25 bp, Homo sapien
acaaaacaacttctcgtcgcagggc

SEQ ID NO: 609973 - DNA, 25 bp, Homo sapien
caagcgaatcaagcaccaggagtca

SEQ ID NO: 609974 - DNA, 25 bp, Homo sapien
gagtcacgtgctagaaggctgtccc

SEQ ID NO: 609975 - DNA, 25 bp, Homo sapien
taaagattacaaagagcctcgcgtc

SEQ ID NO: 609976 - DNA, 25 bp, Homo sapien
acagctctcagccagaactcgtgca

SEQ ID NO: 609977 - DNA, 25 bp, Homo sapien
gctctcagccagaactcgtgcagtt

SEQ ID NO: 609978 - DNA, 25 bp, Homo sapien
tcagccagaactcgtgcagtttcag

SEQ ID NO: 609979 - DNA, 25 bp, Homo sapien
gaactcgtgcagtttcagaatttgt

SEQ ID NO: 609980 - DNA, 25 bp, Homo sapien
aaacaacgggtttcaggctctgcga

SEQ ID NO: 609981 - DNA, 25 bp, Homo sapien
cagaatacggccttgagagtctcag

SEQ ID NO: 609982 - DNA, 25 bp, Homo sapien
gatgagactgaaacccggaatgtgg

SEQ ID NO: 609983 - DNA, 25 bp, Homo sapien
cattcatggaatagtaaggcggtgc

SEQ ID NO: 609984 - DNA, 25 bp, Homo sapien
tgggtccagagtgagcaaaggctgg

SEQ ID NO: 609985 - DNA, 25 bp, Homo sapien
ctgtgaggtagtgggtccagagtga

SEQ ID NO: 609986 - DNA, 25 bp, Homo sapien
tgaggtagtgggtccagagtgagca

SEQ ID NO: 609987 - DNA, 25 bp, Homo sapien
gtagtgggtccagagtgagcaaagg

SEQ ID NO: 609988 - DNA, 25 bp, Homo sapien
aaccaccaaattgttgagtcctgta

SEQ ID NO: 609989 - DNA, 25 bp, Homo sapien
cagggttacaaccaccaaattgttg

SEQ ID NO: 609990 - DNA, 25 bp, Homo sapien
agcatgtccagggttacaaccacca

SEQ ID NO: 609991 - DNA, 25 bp, Homo sapien
gttacaaccaccaaattgttgagtc

SEQ ID NO: 609992 - DNA, 25 bp, Homo sapien
acagtgcagctggaggcctcctctt

SEQ ID NO: 609993 - DNA, 25 bp, Homo sapien
cacagtgcagctggaggcctcctct

SEQ ID NO: 609994 - DNA, 25 bp, Homo sapien
gccacagtgcagctggaggcctcct

SEQ ID NO: 609995 - DNA, 25 bp, Homo sapien
ccgccacagtgcagctggaggcctc

SEQ ID NO: 609996 - DNA, 25 bp, Homo sapien
cagggcagccccctaacatagatag

SEQ ID NO: 609997 - DNA, 25 bp, Homo sapien
cccctaacatagatagcatggaggc

SEQ ID NO: 609998 - DNA, 25 bp, Homo sapien
catagatagcatggaggcctggcag

SEQ ID NO: 609999 - DNA, 25 bp, Homo sapien
actggtagctcacacaccgtctgca

SEQ ID NO: 610000 - DNA, 25 bp, Homo sapien
ccccacgtaggcactgtcaccatca

SEQ ID NO: 610001 - DNA, 25 bp, Homo sapien
cccacgtaggcactgtcaccatcaa

SEQ ID NO: 610002 - DNA, 25 bp, Homo sapien
ctggctggttgacaggagctctggg

SEQ ID NO: 610003 - DNA, 25 bp, Homo sapien
ggagctctgggtttccgtcactcat

SEQ ID NO: 610004 - DNA, 25 bp, Homo sapien
gacaggagctctgggtttccgtcac

SEQ ID NO: 610005 - DNA, 25 bp, Homo sapien
tggttgacaggagctctgggtttcc

SEQ ID NO: 610006 - DNA, 25 bp, Homo sapien
tggagtcttgcccaccagtcttgca

SEQ ID NO: 610007 - DNA, 25 bp, Homo sapien
cagtcttgcatgttggcgcatgtca

SEQ ID NO: 610008 - DNA, 25 bp, Homo sapien
caaaataaccacttccaaggcctgg

SEQ ID NO: 610009 - DNA, 25 bp, Homo sapien
agcagcagcattatgctcacacagg

SEQ ID NO: 610010 - DNA, 25 bp, Homo sapien
ctctgtggctgttcctgaccccgaa

SEQ ID NO: 610011 - DNA, 25 bp, Homo sapien
gtgtgccacgctgccagccacggct

SEQ ID NO: 610012 - DNA, 25 bp, Homo sapien
cccgaaatgcttggatcagggcaga

SEQ ID NO: 610013 - DNA, 25 bp, Homo sapien
tgaccccgaaatgcttggatcaggg

SEQ ID NO: 610014 - DNA, 25 bp, Homo sapien
ggtgtgtgtacagcctgtggcaaca

SEQ ID NO: 610015 - DNA, 25 bp, Homo sapien
aagttactgagcagcggggatagct

SEQ ID NO: 610016 - DNA, 25 bp, Homo sapien
ggtggtggccaattccctgagtgtc

SEQ ID NO: 610017 - DNA, 25 bp, Homo sapien
tacagcctgtggcaacagcagaaag

SEQ ID NO: 610018 - DNA, 25 bp, Homo sapien
tccatggcctgataggagtaggcag

SEQ ID NO: 610019 - DNA, 25 bp, Homo sapien
tcctgtgctagcatgttggacacca

SEQ ID NO: 610020 - DNA, 25 bp, Homo sapien
gatctcatagtcttcgttgttctcg

SEQ ID NO: 610021 - DNA, 25 bp, Homo sapien
caccatgatggctgggaggtccatg

SEQ ID NO: 610022 - DNA, 25 bp, Homo sapien
gcccggagtgcagtgccttttcaca

SEQ ID NO: 610023 - DNA, 25 bp, Homo sapien
gctagtgcagccaactgatttgcat

SEQ ID NO: 610024 - DNA, 25 bp, Homo sapien
gatgcccggagtgcagtgccttttc

SEQ ID NO: 610025 - DNA, 25 bp, Homo sapien
ctgatgccaaagctagtgcagccaa

SEQ ID NO: 610026 - DNA, 25 bp, Homo sapien
aactcttgtcttgaagagtcccttg

SEQ ID NO: 610027 - DNA, 25 bp, Homo sapien
ccctgggtaatagagtttggcttat

SEQ ID NO: 610028 - DNA, 25 bp, Homo sapien
actcttgtcttgaagagtcccttgt

SEQ ID NO: 610029 - DNA, 25 bp, Homo sapien
tgcatgtacatctccttatctggtt

SEQ ID NO: 610030 - DNA, 25 bp, Homo sapien
ctatgtctcaacttgtgagaatcca

SEQ ID NO: 610031 - DNA, 25 bp, Homo sapien
tgtctcaacttgtgagaatccaaca

SEQ ID NO: 610032 - DNA, 25 bp, Homo sapien
gtgagaatccaacagggatagacca

SEQ ID NO: 610033 - DNA, 25 bp, Homo sapien
atccaacagggatagaccatgcctt

SEQ ID NO: 610034 - DNA, 25 bp, Homo sapien
acatcataatgttccagtaaaaggc

SEQ ID NO: 610035 - DNA, 25 bp, Homo sapien
cgtacatcataatgttccagtaaaa

SEQ ID NO: 610036 - DNA, 25 bp, Homo sapien
tcgtacatcataatgttccagtaaa

SEQ ID NO: 610037 - DNA, 25 bp, Homo sapien
tacatcataatgttccagtaaaagg

SEQ ID NO: 610038 - DNA, 25 bp, Homo sapien
catgagcagtgctgcaaggggctgg

SEQ ID NO: 610039 - DNA, 25 bp, Homo sapien
gttcttggggatgctccacatgtca

SEQ ID NO: 610040 - DNA, 25 bp, Homo sapien
tcttggggatgctccacatgtcact

SEQ ID NO: 610041 - DNA, 25 bp, Homo sapien
atgttcttggggatgctccacatgt

SEQ ID NO: 610042 - DNA, 25 bp, Homo sapien
tagggtccccatgtaacttagtctc

SEQ ID NO: 610043 - DNA, 25 bp, Homo sapien
tgtgtctttggacaagccaccttcc

SEQ ID NO: 610044 - DNA, 25 bp, Homo sapien
tcattggcacgtttgattcccacac

SEQ ID NO: 610045 - DNA, 25 bp, Homo sapien
tctgtggagtagacagcatcagctc

SEQ ID NO: 610046 - DNA, 25 bp, Homo sapien
actcccttgtggtacccagccatga

SEQ ID NO: 610047 - DNA, 25 bp, Homo sapien
gccgattgcatggtctggtgcttag

SEQ ID NO: 610048 - DNA, 25 bp, Homo sapien
tagagcagtggaaatggcctggact

SEQ ID NO: 610049 - DNA, 25 bp, Homo sapien
tacccagccatgagcgtggagcatc

SEQ ID NO: 610050 - DNA, 25 bp, Homo sapien
cctgctctggtgtaaaggcgccaac

SEQ ID NO: 610051 - DNA, 25 bp, Homo sapien
tgctctggtgtaaaggcgccaactg

SEQ ID NO: 610052 - DNA, 25 bp, Homo sapien
gctctggtgtaaaggcgccaactgc

SEQ ID NO: 610053 - DNA, 25 bp, Homo sapien
acctgctctggtgtaaaggcgccaa

SEQ ID NO: 610054 - DNA, 25 bp, Homo sapien
tgcccttgtgtaccacttggcccac

SEQ ID NO: 610055 - DNA, 25 bp, Homo sapien
ctgcccttgtgtaccacttggccca

SEQ ID NO: 610056 - DNA, 25 bp, Homo sapien
taaacggtggcggtcaatgagccac

SEQ ID NO: 610057 - DNA, 25 bp, Homo sapien
cacaggccacatggtgtattctcgg

SEQ ID NO: 610058 - DNA, 25 bp, Homo sapien
cacagcctcaggacctaaacggtgg

SEQ ID NO: 610059 - DNA, 25 bp, Homo sapien
taatgggcagcttaggcatttctcc

SEQ ID NO: 610060 - DNA, 25 bp, Homo sapien
tgcacgctgacaaatttctcctgaa

SEQ ID NO: 610061 - DNA, 25 bp, Homo sapien
gatgtcttgttcagaataatagctg

SEQ ID NO: 610062 - DNA, 25 bp, Homo sapien
tttcatgcttggtgggagatccttt

SEQ ID NO: 610063 - DNA, 25 bp, Homo sapien
tgggagatcctttgcacgctgacaa

SEQ ID NO: 610064 - DNA, 25 bp, Homo sapien
gcttaatagcttcgcagggctgcag

SEQ ID NO: 610065 - DNA, 25 bp, Homo sapien
tgaatgtaattaggatcgcagagct

SEQ ID NO: 610066 - DNA, 25 bp, Homo sapien
aggcggctgtgaatgtaattaggat

SEQ ID NO: 610067 - DNA, 25 bp, Homo sapien
taggatcgcagagcttaatagcttc

SEQ ID NO: 610068 - DNA, 25 bp, Homo sapien
catccccgtgatgattctaaaattc

SEQ ID NO: 610069 - DNA, 25 bp, Homo sapien
ctcctccatagacacctacagatag

SEQ ID NO: 610070 - DNA, 25 bp, Homo sapien
tacagataggggcatccccgtgatg

SEQ ID NO: 610071 - DNA, 25 bp, Homo sapien
tcaaaacgtgttttgcttaaagcca

SEQ ID NO: 610072 - DNA, 25 bp, Homo sapien
cccatctgcgagatgagctgggact

SEQ ID NO: 610073 - DNA, 25 bp, Homo sapien
cacttccgagtggaccatctcctgg

SEQ ID NO: 610074 - DNA, 25 bp, Homo sapien
atgctgctccggatgcccatctgcg

SEQ ID NO: 610075 - DNA, 25 bp, Homo sapien
ggccggcccgagtcataggcagcca

SEQ ID NO: 610076 - DNA, 25 bp, Homo sapien
tcctgggtcggctgaaggtctcttt

SEQ ID NO: 610077 - DNA, 25 bp, Homo sapien
ttttcctgggtcggctgaaggtctc

SEQ ID NO: 610078 - DNA, 25 bp, Homo sapien
ttcctgggtcggctgaaggtctctt

SEQ ID NO: 610079 - DNA, 25 bp, Homo sapien
tttcctgggtcggctgaaggtctct

SEQ ID NO: 610080 - DNA, 25 bp, Homo sapien
acacgtcaccgaaagtggcactggg

SEQ ID NO: 610081 - DNA, 25 bp, Homo sapien
tctgaagaagagtgcgtaggccgac

SEQ ID NO: 610082 - DNA, 25 bp, Homo sapien
tgcgtaggccgacacaggcttctgc

SEQ ID NO: 610083 - DNA, 25 bp, Homo sapien
tggcggcctgagtgtctctgaagaa

SEQ ID NO: 610084 - DNA, 25 bp, Homo sapien
ttaatagacatgaaaaccgaggctc

SEQ ID NO: 610085 - DNA, 25 bp, Homo sapien
cagaatggttaagttgcgggaagca

SEQ ID NO: 610086 - DNA, 25 bp, Homo sapien
tgagctcagagaaggagtagccagc

SEQ ID NO: 610087 - DNA, 25 bp, Homo sapien
ctcagagagtttaggtggtcaggct

SEQ ID NO: 610088 - DNA, 25 bp, Homo sapien
ttctgctgcgtttgagtttggtgtg

SEQ ID NO: 610089 - DNA, 25 bp, Homo sapien
tgctgcgtttgagtttggtgtgttc

SEQ ID NO: 610090 - DNA, 25 bp, Homo sapien
gcgtttgagtttggtgtgttctctc

SEQ ID NO: 610091 - DNA, 25 bp, Homo sapien
ctgcgtttgagtttggtgtgttctc

SEQ ID NO: 610092 - DNA, 25 bp, Homo sapien
ttggagacgaggctagcccggtagg

SEQ ID NO: 610093 - DNA, 25 bp, Homo sapien
gagacgaggctagcccggtaggctg

SEQ ID NO: 610094 - DNA, 25 bp, Homo sapien
acgaggctagcccggtaggctgcca

SEQ ID NO: 610095 - DNA, 25 bp, Homo sapien
ctagcccggtaggctgccagggcct

SEQ ID NO: 610096 - DNA, 25 bp, Homo sapien
cattttggctggtgggtttgcctga

SEQ ID NO: 610097 - DNA, 25 bp, Homo sapien
gctcttggtctcaccttgatctggg

SEQ ID NO: 610098 - DNA, 25 bp, Homo sapien
cctgcaggtccgacggcgtcaggaa

SEQ ID NO: 610099 - DNA, 25 bp, Homo sapien
catggcatacatgggctgcttgggt

SEQ ID NO: 610100 - DNA, 25 bp, Homo sapien
gccaggtgagcaggatcccgagctg

SEQ ID NO: 610101 - DNA, 25 bp, Homo sapien
gtgagcaggatcccgagctgctggg

SEQ ID NO: 610102 - DNA, 25 bp, Homo sapien
ggaactcagagatgtgcgggaagtc

SEQ ID NO: 610103 - DNA, 25 bp, Homo sapien
ccaggtgagcaggatcccgagctgc

SEQ ID NO: 610104 - DNA, 25 bp, Homo sapien
ttaggtgaggtagagcgatttgtcc

SEQ ID NO: 610105 - DNA, 25 bp, Homo sapien
gtagagcgatttgtccctggggagc

SEQ ID NO: 610106 - DNA, 25 bp, Homo sapien
tgaggtagagcgatttgtccctggg

SEQ ID NO: 610107 - DNA, 25 bp, Homo sapien
aggtgaggtagagcgatttgtccct

SEQ ID NO: 610108 - DNA, 25 bp, Homo sapien
tgctctctccgatgggccaccctgc

SEQ ID NO: 610109 - DNA, 25 bp, Homo sapien
ggaagagactcagcccccgggcaat

SEQ ID NO: 610110 - DNA, 25 bp, Homo sapien
caatgggtgtgtcactgctctctcc

SEQ ID NO: 610111 - DNA, 25 bp, Homo sapien
gcagtgccttccagcgagcctcagg

SEQ ID NO: 610112 - DNA, 25 bp, Homo sapien
cagcgggcggaaggttcctgcaggt

SEQ ID NO: 610113 - DNA, 25 bp, Homo sapien
tcagcgggcggaaggttcctgcagg

SEQ ID NO: 610114 - DNA, 25 bp, Homo sapien
agcgggcggaaggttcctgcaggtt

SEQ ID NO: 610115 - DNA, 25 bp, Homo sapien
tgtccgttggtaagcgaccccgcca

SEQ ID NO: 610116 - DNA, 25 bp, Homo sapien
ggtaccgtgcgcagggcgaggacag

SEQ ID NO: 610117 - DNA, 25 bp, Homo sapien
gccgggtgtccagacatagggtacc

SEQ ID NO: 610118 - DNA, 25 bp, Homo sapien
tccagacatagggtaccgtgcgcag

SEQ ID NO: 610119 - DNA, 25 bp, Homo sapien
taggtttcgtaatcttttgttcaca

SEQ ID NO: 610120 - DNA, 25 bp, Homo sapien
ttcacactggaaaaccgatgtgcac

SEQ ID NO: 610121 - DNA, 25 bp, Homo sapien
caacagtttctaggtttcgtaatct

SEQ ID NO: 610122 - DNA, 25 bp, Homo sapien
aaccgatgtgcacatctatgccggg

SEQ ID NO: 610123 - DNA, 25 bp, Homo sapien
taaatagacaaaagtcgtcgccggc

SEQ ID NO: 610124 - DNA, 25 bp, Homo sapien
cacacacggtaggataagctgtaac

SEQ ID NO: 610125 - DNA, 25 bp, Homo sapien
tgacgaaacggtttggcagccgctt

SEQ ID NO: 610126 - DNA, 25 bp, Homo sapien
gaaacagctgcaaacgacgtcaaga

SEQ ID NO: 610127 - DNA, 25 bp, Homo sapien
ggcaatgactgggatggcactcagg

SEQ ID NO: 610128 - DNA, 25 bp, Homo sapien
ggatggcactcaggacctggggatg

SEQ ID NO: 610129 - DNA, 25 bp, Homo sapien
tctggggggcaatgactgggatggc

SEQ ID NO: 610130 - DNA, 25 bp, Homo sapien
agctctggggggcaatgactgggat

SEQ ID NO: 610131 - DNA, 25 bp, Homo sapien
cacaagagagaaggatgttggcagt

SEQ ID NO: 610132 - DNA, 25 bp, Homo sapien
ctgtttcaccttctcacaagagaga

SEQ ID NO: 610133 - DNA, 25 bp, Homo sapien
cagtgtggtgctgcggtgttctgag

SEQ ID NO: 610134 - DNA, 25 bp, Homo sapien
tggtgctgcggtgttctgagttctg

SEQ ID NO: 610135 - DNA, 25 bp, Homo sapien
cagatgctgccgctgtttgctggaa

SEQ ID NO: 610136 - DNA, 25 bp, Homo sapien
tgtgtttccaggcagatgctgccgc

SEQ ID NO: 610137 - DNA, 25 bp, Homo sapien
gatgctgccgctgtttgctggaaga

SEQ ID NO: 610138 - DNA, 25 bp, Homo sapien
ccaggcagatgctgccgctgtttgc

SEQ ID NO: 610139 - DNA, 25 bp, Homo sapien
tctggcggcaggaaaggatacaagt

SEQ ID NO: 610140 - DNA, 25 bp, Homo sapien
ttctccatctggcggcaggaaagga

SEQ ID NO: 610141 - DNA, 25 bp, Homo sapien
gcaggaaaggatacaagtggaggca

SEQ ID NO: 610142 - DNA, 25 bp, Homo sapien
caggaaaggatacaagtggaggcac

SEQ ID NO: 610143 - DNA, 25 bp, Homo sapien
gtcttgcccgttagactgcccaggg

SEQ ID NO: 610144 - DNA, 25 bp, Homo sapien
ggcaaaccacgtggcttcaaaccat

SEQ ID NO: 610145 - DNA, 25 bp, Homo sapien
catgtcttgcccgttagactgccca

SEQ ID NO: 610146 - DNA, 25 bp, Homo sapien
tgcccagggcaaaccacgtggcttc

SEQ ID NO: 610147 - DNA, 25 bp, Homo sapien
cagcaatggcattggggccaaacca

SEQ ID NO: 610148 - DNA, 25 bp, Homo sapien
gctgcagcaatggcattggggccaa

SEQ ID NO: 610149 - DNA, 25 bp, Homo sapien
tgcagcaatggcattggggccaaac

SEQ ID NO: 610150 - DNA, 25 bp, Homo sapien
agcaatggcattggggccaaaccag

SEQ ID NO: 610151 - DNA, 25 bp, Homo sapien
ttatccagggtcactatcttgatcg

SEQ ID NO: 610152 - DNA, 25 bp, Homo sapien
gttcacttccaaatgtgggactgtg

SEQ ID NO: 610153 - DNA, 25 bp, Homo sapien
ttgatcgtcaccagctgtgtccagt

SEQ ID NO: 610154 - DNA, 25 bp, Homo sapien
tcacttccaaatgtgggactgtggg

SEQ ID NO: 610155 - DNA, 25 bp, Homo sapien
tgtgtctgagactgggattgcattt

SEQ ID NO: 610156 - DNA, 25 bp, Homo sapien
ttcccttctggaccaatagacgagg

SEQ ID NO: 610157 - DNA, 25 bp, Homo sapien
accagtccagttagcttcccttctg

SEQ ID NO: 610158 - DNA, 25 bp, Homo sapien
ttcccgtgtgcttgggatgctagag

SEQ ID NO: 610159 - DNA, 25 bp, Homo sapien
tttggccaagccgtatccttgtggg

SEQ ID NO: 610160 - DNA, 25 bp, Homo sapien
ccttgtggggacctattgcattgct

SEQ ID NO: 610161 - DNA, 25 bp, Homo sapien
tattgcattgctgctgaagtgcttt

SEQ ID NO: 610162 - DNA, 25 bp, Homo sapien
gggacctattgcattgctgctgaag

SEQ ID NO: 610163 - DNA, 25 bp, Homo sapien
cacgcggcagctcgggtcgccttcg

SEQ ID NO: 610164 - DNA, 25 bp, Homo sapien
gcatccaggacgttgtcagcaggtg

SEQ ID NO: 610165 - DNA, 25 bp, Homo sapien
gtcgccttcgcccaacacatttccc

SEQ ID NO: 610166 - DNA, 25 bp, Homo sapien
ctaaggccacgcggcagctcgggtc

SEQ ID NO: 610167 - DNA, 25 bp, Homo sapien
gaagctgatcatagcttagagttgg

SEQ ID NO: 610168 - DNA, 25 bp, Homo sapien
ctggctctggaaactccgaagctga

SEQ ID NO: 610169 - DNA, 25 bp, Homo sapien
tccgaagctgatcatagcttagagt

SEQ ID NO: 610170 - DNA, 25 bp, Homo sapien
tggaaactccgaagctgatcatagc

SEQ ID NO: 610171 - DNA, 25 bp, Homo sapien
tgtggaatttgtcagcccggaggct

SEQ ID NO: 610172 - DNA, 25 bp, Homo sapien
tcagcccggaggctacgatcaggac

SEQ ID NO: 610173 - DNA, 25 bp, Homo sapien
ccggaggctacgatcaggacatctt

SEQ ID NO: 610174 - DNA, 25 bp, Homo sapien
cctccctccgggctcatgtggaatt

SEQ ID NO: 610175 - DNA, 25 bp, Homo sapien
ggattgtggccatcttccgcaggga

SEQ ID NO: 610176 - DNA, 25 bp, Homo sapien
gaggaaaagcaggattgtggccatc

SEQ ID NO: 610177 - DNA, 25 bp, Homo sapien
gattgtggccatcttccgcagggac

SEQ ID NO: 610178 - DNA, 25 bp, Homo sapien
tgtggccatcttccgcagggactct

SEQ ID NO: 610179 - DNA, 25 bp, Homo sapien
cccaccccagcctgcaagtacctag

SEQ ID NO: 610180 - DNA, 25 bp, Homo sapien
ccccagcctgcaagtacctaggatt

SEQ ID NO: 610181 - DNA, 25 bp, Homo sapien
accccagcctgcaagtacctaggat

SEQ ID NO: 610182 - DNA, 25 bp, Homo sapien
caccccagcctgcaagtacctagga

SEQ ID NO: 610183 - DNA, 25 bp, Homo sapien
aaaaatctgtcttcggtttcagctg

SEQ ID NO: 610184 - DNA, 25 bp, Homo sapien
gaaacgagtgtgtgtcttcaccatc

SEQ ID NO: 610185 - DNA, 25 bp, Homo sapien
tgacagtgtctagccatgttagcaa

SEQ ID NO: 610186 - DNA, 25 bp, Homo sapien
gcatgtgttcagaccatcctgagca

SEQ ID NO: 610187 - DNA, 25 bp, Homo sapien
cataattacttgagactggcagcag

SEQ ID NO: 610188 - DNA, 25 bp, Homo sapien
gatgtacacctgatagcaagaagct

SEQ ID NO: 610189 - DNA, 25 bp, Homo sapien
tcagtttccaagctaaaccagggca

SEQ ID NO: 610190 - DNA, 25 bp, Homo sapien
tacatacacttcaaggcgagcagat

SEQ ID NO: 610191 - DNA, 25 bp, Homo sapien
gggcgttggagaggcgcggccgccg

SEQ ID NO: 610192 - DNA, 25 bp, Homo sapien
cgccgccctgcgtctgcgcagtcgt

SEQ ID NO: 610193 - DNA, 25 bp, Homo sapien
tgcgtctgcgcagtcgtcggctgcc

SEQ ID NO: 610194 - DNA, 25 bp, Homo sapien
acgtgcttctgaggggggcgggtgc

SEQ ID NO: 610195 - DNA, 25 bp, Homo sapien
gaggcaaaccgaagaataacaggaa

SEQ ID NO: 610196 - DNA, 25 bp, Homo sapien
caggcacgccccaaaagcgggtcgg

SEQ ID NO: 610197 - DNA, 25 bp, Homo sapien
actgggaggaggcaaaccgaagaat

SEQ ID NO: 610198 - DNA, 25 bp, Homo sapien
ggagcaaatccacgccactgggagg

SEQ ID NO: 610199 - DNA, 25 bp, Homo sapien
gccccgtggaattcctctgcatagg

SEQ ID NO: 610200 - DNA, 25 bp, Homo sapien
agaaactctggccaagcgctcagcc

SEQ ID NO: 610201 - DNA, 25 bp, Homo sapien
gtgactccacgtagaggaccgagcg

SEQ ID NO: 610202 - DNA, 25 bp, Homo sapien
ggcagtccagattctagcatcacag

SEQ ID NO: 610203 - DNA, 25 bp, Homo sapien
caaacagcagagatatcaaaaccga

SEQ ID NO: 610204 - DNA, 25 bp, Homo sapien
aaaccgaaggcatttcaattcaatt

SEQ ID NO: 610205 - DNA, 25 bp, Homo sapien
ctaattctggcttcacactattgac

SEQ ID NO: 610206 - DNA, 25 bp, Homo sapien
ggaaaagcagttgcctcaagacaaa

SEQ ID NO: 610207 - DNA, 25 bp, Homo sapien
cacgagaatcagtcgaacctggggg

SEQ ID NO: 610208 - DNA, 25 bp, Homo sapien
acgagaatcagtcgaacctgggggc

SEQ ID NO: 610209 - DNA, 25 bp, Homo sapien
agaatcagtcgaacctgggggcgga

SEQ ID NO: 610210 - DNA, 25 bp, Homo sapien
cacaaatcccgggtcttccacagtt

SEQ ID NO: 610211 - DNA, 25 bp, Homo sapien
cttaatgggaatcggcacacaggcg

SEQ ID NO: 610212 - DNA, 25 bp, Homo sapien
tcaaattggtgcaggcttaatggga

SEQ ID NO: 610213 - DNA, 25 bp, Homo sapien
aaagaggccctgcagtcctagggct

SEQ ID NO: 610214 - DNA, 25 bp, Homo sapien
caattttctaagcaggtccgtgtac

SEQ ID NO: 610215 - DNA, 25 bp, Homo sapien
tgaggacctcatggctacagacagg

SEQ ID NO: 610216 - DNA, 25 bp, Homo sapien
aaattccgagcgaccacgtgggagt

SEQ ID NO: 610217 - DNA, 25 bp, Homo sapien
tcagcagaccggcaagaaaagagga

SEQ ID NO: 610218 - DNA, 25 bp, Homo sapien
tattaaataacccaggagccagacg

SEQ ID NO: 610219 - DNA, 25 bp, Homo sapien
catatcagatgctatgagccgggca

SEQ ID NO: 610220 - DNA, 25 bp, Homo sapien
tttacagagcaagaggacaacctgg

SEQ ID NO: 610221 - DNA, 25 bp, Homo sapien
gagggacatccacataggcgactga

SEQ ID NO: 610222 - DNA, 25 bp, Homo sapien
tgagagtaacggttgagaactttcc

SEQ ID NO: 610223 - DNA, 25 bp, Homo sapien
agtgtgttgccggagactttaaacg

SEQ ID NO: 610224 - DNA, 25 bp, Homo sapien
tggccctaatacacacactgctgag

SEQ ID NO: 610225 - DNA, 25 bp, Homo sapien
tgtggtgaggatggccctaatacac

SEQ ID NO: 610226 - DNA, 25 bp, Homo sapien
gggtcccttgagctccatactgtaa

SEQ ID NO: 610227 - DNA, 25 bp, Homo sapien
caatgggcatttacaatcaagggcc

SEQ ID NO: 610228 - DNA, 25 bp, Homo sapien
gaacccagttctctggagtcccagg

SEQ ID NO: 610229 - DNA, 25 bp, Homo sapien
tatcgggcactatgctcaccactgg

SEQ ID NO: 610230 - DNA, 25 bp, Homo sapien
gagtacccagaagattttgcttcca

SEQ ID NO: 610231 - DNA, 25 bp, Homo sapien
aatggccacagatatgggtagggtc

SEQ ID NO: 610232 - DNA, 25 bp, Homo sapien
gggaacatctttcagcccgtaagga

SEQ ID NO: 610233 - DNA, 25 bp, Homo sapien
tgtagcggatgctgaaatggccaca

SEQ ID NO: 610234 - DNA, 25 bp, Homo sapien
cgcgccagaaaagccgccagccctc

SEQ ID NO: 610235 - DNA, 25 bp, Homo sapien
tggcccgcgccagaaaagccgccag

SEQ ID NO: 610236 - DNA, 25 bp, Homo sapien
ccgcgccagaaaagccgccagccct

SEQ ID NO: 610237 - DNA, 25 bp, Homo sapien
cccctggcccgcgccagaaaagccg

SEQ ID NO: 610238 - DNA, 25 bp, Homo sapien
acagcccggaatcagaggcaggaaa

SEQ ID NO: 610239 - DNA, 25 bp, Homo sapien
gacagcccggaatcagaggcaggaa

SEQ ID NO: 610240 - DNA, 25 bp, Homo sapien
gctctctctcgcccagcatcacatg

SEQ ID NO: 610241 - DNA, 25 bp, Homo sapien
ttggccgcatcgctctccagcgcgg

SEQ ID NO: 610242 - DNA, 25 bp, Homo sapien
ggccgcatcgctctccagcgcggag

SEQ ID NO: 610243 - DNA, 25 bp, Homo sapien
ccgcatcgctctccagcgcggagat

SEQ ID NO: 610244 - DNA, 25 bp, Homo sapien
catcgctctccagcgcggagatggg

SEQ ID NO: 610245 - DNA, 25 bp, Homo sapien
tctccctgggccaatgggcggggct

SEQ ID NO: 610246 - DNA, 25 bp, Homo sapien
gtggtacagaaccaggctctccctg

SEQ ID NO: 610247 - DNA, 25 bp, Homo sapien
ggctggccgcctcgggagcgtcggg

SEQ ID NO: 610248 - DNA, 25 bp, Homo sapien
tgggtccagtggtacagaaccaggc

SEQ ID NO: 610249 - DNA, 25 bp, Homo sapien
tgggtgtctgaactggcctctggca

SEQ ID NO: 610250 - DNA, 25 bp, Homo sapien
cagtaagggaaccatgaaccaggct

SEQ ID NO: 610251 - DNA, 25 bp, Homo sapien
gacttgggtctcttgcccctgggat

SEQ ID NO: 610252 - DNA, 25 bp, Homo sapien
cagaggtacatccaagacagggcag

SEQ ID NO: 610253 - DNA, 25 bp, Homo sapien
taggaggcagggactcaagtcctca

SEQ ID NO: 610254 - DNA, 25 bp, Homo sapien
gtgtcctagagtacttcatgcccca

SEQ ID NO: 610255 - DNA, 25 bp, Homo sapien
cctcctgtttggtggatcatgggaa

SEQ ID NO: 610256 - DNA, 25 bp, Homo sapien
tgaccttagagctatcactgcccct

SEQ ID NO: 610257 - DNA, 25 bp, Homo sapien
caggttgagccgcatgaaccagggc

SEQ ID NO: 610258 - DNA, 25 bp, Homo sapien
tgtgaaggtgcgctccacatagtca

SEQ ID NO: 610259 - DNA, 25 bp, Homo sapien
cactgatgatgttgtcgcggtggat

SEQ ID NO: 610260 - DNA, 25 bp, Homo sapien
ccttgtgctcgctctgtggcaggct

SEQ ID NO: 610261 - DNA, 25 bp, Homo sapien
caagctgtccccgagggttagctcc

SEQ ID NO: 610262 - DNA, 25 bp, Homo sapien
tgtccccgagggttagctcctctca

SEQ ID NO: 610263 - DNA, 25 bp, Homo sapien
ctgccaagctgtccccgagggttag

SEQ ID NO: 610264 - DNA, 25 bp, Homo sapien
ctctgccaagctgtccccgagggtt

SEQ ID NO: 610265 - DNA, 25 bp, Homo sapien
caggggattctagtggtggcccggc

SEQ ID NO: 610266 - DNA, 25 bp, Homo sapien
cggacaggggattctagtggtggcc

SEQ ID NO: 610267 - DNA, 25 bp, Homo sapien
ggattctagtggtggcccggccatc

SEQ ID NO: 610268 - DNA, 25 bp, Homo sapien
tggcggacaggggattctagtggtg

SEQ ID NO: 610269 - DNA, 25 bp, Homo sapien
cctgagccccaagatgtctctgccc

SEQ ID NO: 610270 - DNA, 25 bp, Homo sapien
tgagccccaagatgtctctgcccag

SEQ ID NO: 610271 - DNA, 25 bp, Homo sapien
ctgagccccaagatgtctctgccca

SEQ ID NO: 610272 - DNA, 25 bp, Homo sapien
ccctgagccccaagatgtctctgcc

SEQ ID NO: 610273 - DNA, 25 bp, Homo sapien
gcatccatgggcagtgcgtccagca

SEQ ID NO: 610274 - DNA, 25 bp, Homo sapien
cggtactgcagcacccgtgcgtgct

SEQ ID NO: 610275 - DNA, 25 bp, Homo sapien
caggatgcagccatgcgtgtaggca

SEQ ID NO: 610276 - DNA, 25 bp, Homo sapien
tgcggatctcggccgtggcgtactt

SEQ ID NO: 610277 - DNA, 25 bp, Homo sapien
tgtctaaggctgaaactcgtgcggg

SEQ ID NO: 610278 - DNA, 25 bp, Homo sapien
cagagcccttggccacgaagcacag

SEQ ID NO: 610279 - DNA, 25 bp, Homo sapien
cttggccacgaagcacagccctgac

SEQ ID NO: 610280 - DNA, 25 bp, Homo sapien
agcacagccctgactgtctaaggct

SEQ ID NO: 610281 - DNA, 25 bp, Homo sapien
tccgtggtggcattggctaaatgtc

SEQ ID NO: 610282 - DNA, 25 bp, Homo sapien
tgtttagaaaggtagggctcggaga

SEQ ID NO: 610283 - DNA, 25 bp, Homo sapien
catgaggtccgtggtggcattggct

SEQ ID NO: 610284 - DNA, 25 bp, Homo sapien
ccagtttcatgaggtccgtggtggc

SEQ ID NO: 610285 - DNA, 25 bp, Homo sapien
gcctcaatctggtccagcaccatgg

SEQ ID NO: 610286 - DNA, 25 bp, Homo sapien
accatggccagttccccgaggatct

SEQ ID NO: 610287 - DNA, 25 bp, Homo sapien
cagttccccgaggatcttcttcagg

SEQ ID NO: 610288 - DNA, 25 bp, Homo sapien
ccagctccgcctcaatctggtccag

SEQ ID NO: 610289 - DNA, 25 bp, Homo sapien
agacttttgcggaaaaaagaggctg

SEQ ID NO: 610290 - DNA, 25 bp, Homo sapien
catcctcttaaccacctgggaggtc

SEQ ID NO: 610291 - DNA, 25 bp, Homo sapien
gactccatagcccatcctcttaacc

SEQ ID NO: 610292 - DNA, 25 bp, Homo sapien
tatgacttgaaccttagtctgactc

SEQ ID NO: 610293 - DNA, 25 bp, Homo sapien
ggggagaacctgaccacatttacta

SEQ ID NO: 610294 - DNA, 25 bp, Homo sapien
cacatttactaagctaggaagtggc

SEQ ID NO: 610295 - DNA, 25 bp, Homo sapien
gggagaacctgaccacatttactaa

SEQ ID NO: 610296 - DNA, 25 bp, Homo sapien
aaggagccgcctttcaggtaggaga

SEQ ID NO: 610297 - DNA, 25 bp, Homo sapien
gtggtgtccagcaagtcaacttagg

SEQ ID NO: 610298 - DNA, 25 bp, Homo sapien
tgactgcgtttaccgactggcgacc

SEQ ID NO: 610299 - DNA, 25 bp, Homo sapien
tcaacttaggacagggttccgaaga

SEQ ID NO: 610300 - DNA, 25 bp, Homo sapien
gaccctctcaaagaaggactgcagg

SEQ ID NO: 610301 - DNA, 25 bp, Homo sapien
cttggacagtcccaggaacttgagg

SEQ ID NO: 610302 - DNA, 25 bp, Homo sapien
acatcagcgagggtgaaggcacagc

SEQ ID NO: 610303 - DNA, 25 bp, Homo sapien
tttccggaaggcaaagcgtctctgg

SEQ ID NO: 610304 - DNA, 25 bp, Homo sapien
aaagcattggggatgacggccgaca

SEQ ID NO: 610305 - DNA, 25 bp, Homo sapien
cagcagggtggtgtggatgtcaccc

SEQ ID NO: 610306 - DNA, 25 bp, Homo sapien
ggtaccagtaggcaaagtagcccat

SEQ ID NO: 610307 - DNA, 25 bp, Homo sapien
cttgaccagccggaaagcattgggg

SEQ ID NO: 610308 - DNA, 25 bp, Homo sapien
ggtattattactcagaacgaagggc

SEQ ID NO: 610309 - DNA, 25 bp, Homo sapien
gagtcacagcattggcaacgtctac

SEQ ID NO: 610310 - DNA, 25 bp, Homo sapien
tagagccgtggccttgagtcacagc

SEQ ID NO: 610311 - DNA, 25 bp, Homo sapien
tccaagtgttcatgagacagtgagt

SEQ ID NO: 610312 - DNA, 25 bp, Homo sapien
tcagatcctaaccagtctccacagt

SEQ ID NO: 610313 - DNA, 25 bp, Homo sapien
ctcagatcctaaccagtctccacag

SEQ ID NO: 610314 - DNA, 25 bp, Homo sapien
cctggtggacgaaacatcctgggac

SEQ ID NO: 610315 - DNA, 25 bp, Homo sapien
tgggccctggtggacgaaacatcct

SEQ ID NO: 610316 - DNA, 25 bp, Homo sapien
aatctgggccctggtggacgaaaca

SEQ ID NO: 610317 - DNA, 25 bp, Homo sapien
ggtggacgaaacatcctgggactca

SEQ ID NO: 610318 - DNA, 25 bp, Homo sapien
tcttgatgtcggctttgtcctgtgg

SEQ ID NO: 610319 - DNA, 25 bp, Homo sapien
agttgagtcttgatgtcggctttgt

SEQ ID NO: 610320 - DNA, 25 bp, Homo sapien
aggagttgagtcttgatgtcggctt

SEQ ID NO: 610321 - DNA, 25 bp, Homo sapien
gagtcttgatgtcggctttgtcctg

SEQ ID NO: 610322 - DNA, 25 bp, Homo sapien
tactaaggccaaacccaacacatgg

SEQ ID NO: 610323 - DNA, 25 bp, Homo sapien
tggcatggatgcagagacttccccg

SEQ ID NO: 610324 - DNA, 25 bp, Homo sapien
ggtgtgctcatggtatccgtcccca

SEQ ID NO: 610325 - DNA, 25 bp, Homo sapien
tgaaagtcccacctcacagggtaga

SEQ ID NO: 610326 - DNA, 25 bp, Homo sapien
gcaatgagaactagatggacagcac

SEQ ID NO: 610327 - DNA, 25 bp, Homo sapien
gagacaggcagtcaactcttgcttg

SEQ ID NO: 610328 - DNA, 25 bp, Homo sapien
aaagggctgagcctaaatgagctgg

SEQ ID NO: 610329 - DNA, 25 bp, Homo sapien
gttgatgttaaggtcagagccctgg

SEQ ID NO: 610330 - DNA, 25 bp, Homo sapien
cagagatgagttgggtgcaaactcc

SEQ ID NO: 610331 - DNA, 25 bp, Homo sapien
gagatgagttgggtgcaaactccat

SEQ ID NO: 610332 - DNA, 25 bp, Homo sapien
gccagagatgagttgggtgcaaact

SEQ ID NO: 610333 - DNA, 25 bp, Homo sapien
tgccagagatgagttgggtgcaaac

SEQ ID NO: 610334 - DNA, 25 bp, Homo sapien
catcaggctgcccattggctacact

SEQ ID NO: 610335 - DNA, 25 bp, Homo sapien
tgagttccgcatcaggctgcccatt

SEQ ID NO: 610336 - DNA, 25 bp, Homo sapien
ccattggctacacttggctccaggc

SEQ ID NO: 610337 - DNA, 25 bp, Homo sapien
ctggtgagttccgcatcaggctgcc

SEQ ID NO: 610338 - DNA, 25 bp, Homo sapien
actgagaagcactacacctgactgg

SEQ ID NO: 610339 - DNA, 25 bp, Homo sapien
cagtgcctctccgaccaagtattgg

SEQ ID NO: 610340 - DNA, 25 bp, Homo sapien
gcctatgcccataaaccagtggtgg

SEQ ID NO: 610341 - DNA, 25 bp, Homo sapien
tgttagcaatgaaacctgggccagg

SEQ ID NO: 610342 - DNA, 25 bp, Homo sapien
caggaaagcctttatggtgtggcta

SEQ ID NO: 610343 - DNA, 25 bp, Homo sapien
ttcttggcgacatcaccagtgttgc

SEQ ID NO: 610344 - DNA, 25 bp, Homo sapien
tggctaaaggagtggccagagcctt

SEQ ID NO: 610345 - DNA, 25 bp, Homo sapien
ggtaagacttgacctttatctggaa

SEQ ID NO: 610346 - DNA, 25 bp, Homo sapien
gagtcacaggtctgccttgtgcaat

SEQ ID NO: 610347 - DNA, 25 bp, Homo sapien
ttgtgcaatcagagccggctgcctg

SEQ ID NO: 610348 - DNA, 25 bp, Homo sapien
ttggcaaagacctccagatgcagct

SEQ ID NO: 610349 - DNA, 25 bp, Homo sapien
tccaacagtgccgacccagaggatg

SEQ ID NO: 610350 - DNA, 25 bp, Homo sapien
catgtattccatgttggcggcaggt

SEQ ID NO: 610351 - DNA, 25 bp, Homo sapien
agatgtggcgcttccggcggtacct

SEQ ID NO: 610352 - DNA, 25 bp, Homo sapien
taaggcattcatgtctctcacagag

SEQ ID NO: 610353 - DNA, 25 bp, Homo sapien
tatcaaggcgttcactgcctggcca

SEQ ID NO: 610354 - DNA, 25 bp, Homo sapien
gccctggccagccgcttgtcccaga

SEQ ID NO: 610355 - DNA, 25 bp, Homo sapien
ggcccacgtatctcatcagctgtga

SEQ ID NO: 610356 - DNA, 25 bp, Homo sapien
aggttctggcccacgtatctcatca

SEQ ID NO: 610357 - DNA, 25 bp, Homo sapien
tctggcccacgtatctcatcagctg

SEQ ID NO: 610358 - DNA, 25 bp, Homo sapien
catgagatccactacggaccggtac

SEQ ID NO: 610359 - DNA, 25 bp, Homo sapien
cagaccaggacttcatgagatccac

SEQ ID NO: 610360 - DNA, 25 bp, Homo sapien
tggggccggaaacaagtaatgccac

SEQ ID NO: 610361 - DNA, 25 bp, Homo sapien
tgccacttctcctcagaccaggact

SEQ ID NO: 610362 - DNA, 25 bp, Homo sapien
agaaggaagttggatctgtaactga

SEQ ID NO: 610363 - DNA, 25 bp, Homo sapien
gactgtaaacaatcaattgagagaa

SEQ ID NO: 610364 - DNA, 25 bp, Homo sapien
ctgtaaacaatcaattgagagaact

SEQ ID NO: 610365 - DNA, 25 bp, Homo sapien
aaggaagttggatctgtaactgact

SEQ ID NO: 610366 - DNA, 25 bp, Homo sapien
tgctactacaggtgtggatggcaca

SEQ ID NO: 610367 - DNA, 25 bp, Homo sapien
agcccagccgattggaggatgccca

SEQ ID NO: 610368 - DNA, 25 bp, Homo sapien
atagttgcagaccaggtatgccgcc

SEQ ID NO: 610369 - DNA, 25 bp, Homo sapien
gtatgccgcccgatgccaggtgttg

SEQ ID NO: 610370 - DNA, 25 bp, Homo sapien
tcagaaccacgtgaacttgttggat

SEQ ID NO: 610371 - DNA, 25 bp, Homo sapien
tttcccatcttgtacggggactcgc

SEQ ID NO: 610372 - DNA, 25 bp, Homo sapien
tgttggatttcagccccttgaagca

SEQ ID NO: 610373 - DNA, 25 bp, Homo sapien
tgtacggggactcgccaatccagtt

SEQ ID NO: 610374 - DNA, 25 bp, Homo sapien
agctggaggcgcaccaaagcccaga

SEQ ID NO: 610375 - DNA, 25 bp, Homo sapien
aagaaaagaaagatgcaactaggaa

SEQ ID NO: 610376 - DNA, 25 bp, Homo sapien
cgaattaatgaaagatgcagggctc

SEQ ID NO: 610377 - DNA, 25 bp, Homo sapien
cattatgcctggtcccaaggtgcca

SEQ ID NO: 610378 - DNA, 25 bp, Homo sapien
gacctgaggtccactcgggtcctag

SEQ ID NO: 610379 - DNA, 25 bp, Homo sapien
gattcttctaatcacccaaggtggg

SEQ ID NO: 610380 - DNA, 25 bp, Homo sapien
agtcacttagggaacccgcggctgg

SEQ ID NO: 610381 - DNA, 25 bp, Homo sapien
ccaccgcccggttatcttattgatt

SEQ ID NO: 610382 - DNA, 25 bp, Homo sapien
cgaggggcgcgttcacgctgaccat

SEQ ID NO: 610383 - DNA, 25 bp, Homo sapien
gtaagaactctccactggagccccg

SEQ ID NO: 610384 - DNA, 25 bp, Homo sapien
gagccccgaggggcgcgttcacgct

SEQ ID NO: 610385 - DNA, 25 bp, Homo sapien
gaactctccactggagccccgaggg

SEQ ID NO: 610386 - DNA, 25 bp, Homo sapien
catgccccggcttgagagcttaggg

SEQ ID NO: 610387 - DNA, 25 bp, Homo sapien
caatttgccccgcatcgaaacagga

SEQ ID NO: 610388 - DNA, 25 bp, Homo sapien
gagcttagggaagcggtcacattgc

SEQ ID NO: 610389 - DNA, 25 bp, Homo sapien
gaaacaggacggtgcttccaagccc

SEQ ID NO: 610390 - DNA, 25 bp, Homo sapien
tctgagtttcacacgtccgcacaag

SEQ ID NO: 610391 - DNA, 25 bp, Homo sapien
taatgcaccagcaacgtgacctagg

SEQ ID NO: 610392 - DNA, 25 bp, Homo sapien
tgcaatgcacgtggtatcaagggct

SEQ ID NO: 610393 - DNA, 25 bp, Homo sapien
ttatccagagccaacggaggtgcgg

SEQ ID NO: 610394 - DNA, 25 bp, Homo sapien
tatataatgagtatgacacaggagc

SEQ ID NO: 610395 - DNA, 25 bp, Homo sapien
tataatgagtatgacacaggagcag

SEQ ID NO: 610396 - DNA, 25 bp, Homo sapien
tctaataattgctgaatgtttgcta

SEQ ID NO: 610397 - DNA, 25 bp, Homo sapien
ctgtcgatagaagcaaccattctaa

SEQ ID NO: 610398 - DNA, 25 bp, Homo sapien
ggattgtgtcaagtctcgagtcaga

SEQ ID NO: 610399 - DNA, 25 bp, Homo sapien
catatctgtggcctagagcagaggg

SEQ ID NO: 610400 - DNA, 25 bp, Homo sapien
tatttatctcagacagccgtttgga

SEQ ID NO: 610401 - DNA, 25 bp, Homo sapien
tgccccaggacaaaagtgctcattt

SEQ ID NO: 610402 - DNA, 25 bp, Homo sapien
taaagtgcttagagtagtacctggg

SEQ ID NO: 610403 - DNA, 25 bp, Homo sapien
caattggcccctgtactttgtgggt

SEQ ID NO: 610404 - DNA, 25 bp, Homo sapien
tacctgggccatggtgttatacaag

SEQ ID NO: 610405 - DNA, 25 bp, Homo sapien
aaatgagccgggtcccagatctggg

SEQ ID NO: 610406 - DNA, 25 bp, Homo sapien
gagaatacagaggcgttggcagttt

SEQ ID NO: 610407 - DNA, 25 bp, Homo sapien
cgttggcagtttggcggcccaggct

SEQ ID NO: 610408 - DNA, 25 bp, Homo sapien
ctgcctccactgcttgtcccagaga

SEQ ID NO: 610409 - DNA, 25 bp, Homo sapien
aggcccatggcagacagtcgtcaaa

SEQ ID NO: 610410 - DNA, 25 bp, Homo sapien
tgcccttcgtcatgcctgttttgac

SEQ ID NO: 610411 - DNA, 25 bp, Homo sapien
cctctgcccttcgtcatgcctgttt

SEQ ID NO: 610412 - DNA, 25 bp, Homo sapien
ctgcccttcgtcatgcctgttttga

SEQ ID NO: 610413 - DNA, 25 bp, Homo sapien
tctgcccttcgtcatgcctgttttg

SEQ ID NO: 610414 - DNA, 25 bp, Homo sapien
tcaagtgccctcaatacccagagaa

SEQ ID NO: 610415 - DNA, 25 bp, Homo sapien
caagtgccctcaatacccagagaag

SEQ ID NO: 610416 - DNA, 25 bp, Homo sapien
cttttccctaccctcaaggtgtgat

SEQ ID NO: 610417 - DNA, 25 bp, Homo sapien
ggtgtgataatcaaaactatctcca

SEQ ID NO: 610418 - DNA, 25 bp, Homo sapien
gtcctgtacattgtccctggcagca

SEQ ID NO: 610419 - DNA, 25 bp, Homo sapien
tggcagcatgtctggcctctagcca

SEQ ID NO: 610420 - DNA, 25 bp, Homo sapien
ctcctgctgctatggggtcccgcac

SEQ ID NO: 610421 - DNA, 25 bp, Homo sapien
tatggggtcccgcacagtgcacaac

SEQ ID NO: 610422 - DNA, 25 bp, Homo sapien
cctggccccagtccgacatcctcct

SEQ ID NO: 610423 - DNA, 25 bp, Homo sapien
tggccccagtccgacatcctcctcc

SEQ ID NO: 610424 - DNA, 25 bp, Homo sapien
ttgaggtcgtctggattctccttct

SEQ ID NO: 610425 - DNA, 25 bp, Homo sapien
tgttgaggtcgtctggattctcctt

SEQ ID NO: 610426 - DNA, 25 bp, Homo sapien
cttgttgaggtcgtctggattctcc

SEQ ID NO: 610427 - DNA, 25 bp, Homo sapien
gttgaggtcgtctggattctccttc

SEQ ID NO: 610428 - DNA, 25 bp, Homo sapien
tgagtggcattgtgtttgttcaccc

SEQ ID NO: 610429 - DNA, 25 bp, Homo sapien
tgatgggtggccactggcttgtcac

SEQ ID NO: 610430 - DNA, 25 bp, Homo sapien
ggcattgtgtttgttcacccgatga

SEQ ID NO: 610431 - DNA, 25 bp, Homo sapien
cacaggagtatttccgagaggaaga

SEQ ID NO: 610432 - DNA, 25 bp, Homo sapien
cacctgccctaccctgggcgcccac

SEQ ID NO: 610433 - DNA, 25 bp, Homo sapien
ccacctgccctaccctgggcgccca

SEQ ID NO: 610434 - DNA, 25 bp, Homo sapien
tcgacgagggttttggagagtcgca

SEQ ID NO: 610435 - DNA, 25 bp, Homo sapien
gtcgacgagggttttggagagtcgc

SEQ ID NO: 610436 - DNA, 25 bp, Homo sapien
cgacgagggttttggagagtcgcat

SEQ ID NO: 610437 - DNA, 25 bp, Homo sapien
taggctgggtccagtgcagcactgt

SEQ ID NO: 610438 - DNA, 25 bp, Homo sapien
tgcccatcgtcaacacctgcacatt

SEQ ID NO: 610439 - DNA, 25 bp, Homo sapien
tcaaattccagggtggtgtaggctg

SEQ ID NO: 610440 - DNA, 25 bp, Homo sapien
cagcactgtagtcggccatgtccat

SEQ ID NO: 610441 - DNA, 25 bp, Homo sapien
tgctcagagacaaacggacatgttg

SEQ ID NO: 610442 - DNA, 25 bp, Homo sapien
ctgctcagagacaaacggacatgtt

SEQ ID NO: 610443 - DNA, 25 bp, Homo sapien
agatatgctccagtgatgtcggagg

SEQ ID NO: 610444 - DNA, 25 bp, Homo sapien
gggatgcctcaatctggcgagacgc

SEQ ID NO: 610445 - DNA, 25 bp, Homo sapien
ctcaatctggcgagacgcagcggca

SEQ ID NO: 610446 - DNA, 25 bp, Homo sapien
acccctccagatatgctccagtgat

SEQ ID NO: 610447 - DNA, 25 bp, Homo sapien
cagatggcacacagggcgctgacac

SEQ ID NO: 610448 - DNA, 25 bp, Homo sapien
gtcacagctcgaggcaccgtagtgt

SEQ ID NO: 610449 - DNA, 25 bp, Homo sapien
cgcgttgaggttggtgccttctgat

SEQ ID NO: 610450 - DNA, 25 bp, Homo sapien
tacatgtggttcttccgcacgctcc

SEQ ID NO: 610451 - DNA, 25 bp, Homo sapien
gctatccagttgaccccccaacctc

SEQ ID NO: 610452 - DNA, 25 bp, Homo sapien
tcatctcttcatcccgggagttctc

SEQ ID NO: 610453 - DNA, 25 bp, Homo sapien
ctggctatccagttgaccccccaac

SEQ ID NO: 610454 - DNA, 25 bp, Homo sapien
ccctggctatccagttgacccccca

SEQ ID NO: 610455 - DNA, 25 bp, Homo sapien
gatggttggatggagaagacacaac

SEQ ID NO: 610456 - DNA, 25 bp, Homo sapien
gatggagaagacacaacttcctcct

SEQ ID NO: 610457 - DNA, 25 bp, Homo sapien
ggttggatggagaagacacaacttc

SEQ ID NO: 610458 - DNA, 25 bp, Homo sapien
tggatggagaagacacaacttcctc

SEQ ID NO: 610459 - DNA, 25 bp, Homo sapien
tgcagtagcggcactggttcctctt

SEQ ID NO: 610460 - DNA, 25 bp, Homo sapien
gtccaccacgcactgccggctaaat

SEQ ID NO: 610461 - DNA, 25 bp, Homo sapien
cttgtctttgtccaccacgcactgc

SEQ ID NO: 610462 - DNA, 25 bp, Homo sapien
ccagcccggaagcatttcttgagcc

SEQ ID NO: 610463 - DNA, 25 bp, Homo sapien
ctgagtcataaagtgtggctacagt

SEQ ID NO: 610464 - DNA, 25 bp, Homo sapien
ccagccgctccctatggtcagattt

SEQ ID NO: 610465 - DNA, 25 bp, Homo sapien
gtcataaagtgtggctacagttgta

SEQ ID NO: 610466 - DNA, 25 bp, Homo sapien
ttctcagccattagccagtcaccct

SEQ ID NO: 610467 - DNA, 25 bp, Homo sapien
tggttgctgggagcctgaggagcca

SEQ ID NO: 610468 - DNA, 25 bp, Homo sapien
cctgaggagccaagagtgggagctt

SEQ ID NO: 610469 - DNA, 25 bp, Homo sapien
gggtggtggttgctgggagcctgag

SEQ ID NO: 610470 - DNA, 25 bp, Homo sapien
gttgctgggagcctgaggagccaag

SEQ ID NO: 610471 - DNA, 25 bp, Homo sapien
ctcatagcttgaccttcgagtgctg

SEQ ID NO: 610472 - DNA, 25 bp, Homo sapien
gtcctcatagcttgaccttcgagtg

SEQ ID NO: 610473 - DNA, 25 bp, Homo sapien
accttcgagtgctgatccggtcccg

SEQ ID NO: 610474 - DNA, 25 bp, Homo sapien
tgctgatccggtcccgctcattctg

SEQ ID NO: 610475 - DNA, 25 bp, Homo sapien
tggactcacacacatctgcgatgct

SEQ ID NO: 610476 - DNA, 25 bp, Homo sapien
gcagaaagctgggatgtacttggcc

SEQ ID NO: 610477 - DNA, 25 bp, Homo sapien
tacttggcccactcaacgagaacca

SEQ ID NO: 610478 - DNA, 25 bp, Homo sapien
cgaatgtcgccgttgatcccggaga

SEQ ID NO: 610479 - DNA, 25 bp, Homo sapien
cttggtggctccgagcagcaggtgc

SEQ ID NO: 610480 - DNA, 25 bp, Homo sapien
gcagcaggtgctcgccagcatgggc

SEQ ID NO: 610481 - DNA, 25 bp, Homo sapien
gcaggtgctcgccagcatgggctct

SEQ ID NO: 610482 - DNA, 25 bp, Homo sapien
tggtggctccgagcagcaggtgctc

SEQ ID NO: 610483 - DNA, 25 bp, Homo sapien
tccctggagccctggccagggcagg

SEQ ID NO: 610484 - DNA, 25 bp, Homo sapien
tggccagggcaggcagccgcctcac

SEQ ID NO: 610485 - DNA, 25 bp, Homo sapien
cctggccagggcaggcagccgcctc

SEQ ID NO: 610486 - DNA, 25 bp, Homo sapien
cctccctggagccctggccagggca

SEQ ID NO: 610487 - DNA, 25 bp, Homo sapien
tttgaggtaggcatactcattgtca

SEQ ID NO: 610488 - DNA, 25 bp, Homo sapien
caaagaagatgatggctttgaggta

SEQ ID NO: 610489 - DNA, 25 bp, Homo sapien
ggatgcgtatggacacccggctcat

SEQ ID NO: 610490 - DNA, 25 bp, Homo sapien
gcagcaccagctcgtcaaggatgcg

SEQ ID NO: 610491 - DNA, 25 bp, Homo sapien
cctagaaaggaacttaagcggtcat

SEQ ID NO: 610492 - DNA, 25 bp, Homo sapien
ccacatttctagtgggctgtctcca

SEQ ID NO: 610493 - DNA, 25 bp, Homo sapien
cagcctcgtgttgagcactacagag

SEQ ID NO: 610494 - DNA, 25 bp, Homo sapien
cattagttcattcaggccacacatg

SEQ ID NO: 610495 - DNA, 25 bp, Homo sapien
acctgggaacgcagccgcttgatct

SEQ ID NO: 610496 - DNA, 25 bp, Homo sapien
gccgaagagcttgatgaactggatc

SEQ ID NO: 610497 - DNA, 25 bp, Homo sapien
ggttgtcaatcttggccatgccgaa

SEQ ID NO: 610498 - DNA, 25 bp, Homo sapien
catactggcggtcgttgatgtagtc

SEQ ID NO: 610499 - DNA, 25 bp, Homo sapien
gctcactgtgtgaggcctgtctcct

SEQ ID NO: 610500 - DNA, 25 bp, Homo sapien
ccaaagcggcacagtggggaagcca

SEQ ID NO: 610501 - DNA, 25 bp, Homo sapien
gtgagctcactgtgtgaggcctgtc

SEQ ID NO: 610502 - DNA, 25 bp, Homo sapien
gctgaggggtgagctcactgtgtga

SEQ ID NO: 610503 - DNA, 25 bp, Homo sapien
cgcacatacgggcatatacacagat

SEQ ID NO: 610504 - DNA, 25 bp, Homo sapien
cctccccgagggcaaagatcttgtt

SEQ ID NO: 610505 - DNA, 25 bp, Homo sapien
cagtgactggcacgtgctaggttct

SEQ ID NO: 610506 - DNA, 25 bp, Homo sapien
ggtgcctgaacaaatagaccattgc

SEQ ID NO: 610507 - DNA, 25 bp, Homo sapien
taacaattatcacgtgccaggtact

SEQ ID NO: 610508 - DNA, 25 bp, Homo sapien
taaccgcttcaaacatatgtcaggg

SEQ ID NO: 610509 - DNA, 25 bp, Homo sapien
tttggcaacagaccacaggctcctg

SEQ ID NO: 610510 - DNA, 25 bp, Homo sapien
gatggaatttcaacgcttgcaagcg

SEQ ID NO: 610511 - DNA, 25 bp, Homo sapien
tggttcccatatgttcctgcatcag

SEQ ID NO: 610512 - DNA, 25 bp, Homo sapien
tgggcattgtgttggcaacgatgac

SEQ ID NO: 610513 - DNA, 25 bp, Homo sapien
caacgatgacgttggttcccatatg

SEQ ID NO: 610514 - DNA, 25 bp, Homo sapien
catctgtccgttgctgaggtgagtg

SEQ ID NO: 610515 - DNA, 25 bp, Homo sapien
tgcctgtcccctgggtcggggccac

SEQ ID NO: 610516 - DNA, 25 bp, Homo sapien
ctgcctgtcccctgggtcggggcca

SEQ ID NO: 610517 - DNA, 25 bp, Homo sapien
ctgtcccctgggtcggggccactca

SEQ ID NO: 610518 - DNA, 25 bp, Homo sapien
tgtcccctgggtcggggccactcac

SEQ ID NO: 610519 - DNA, 25 bp, Homo sapien
ctggctgtccccagcggcaatggga

SEQ ID NO: 610520 - DNA, 25 bp, Homo sapien
tccccagcggcaatgggatgggtga

SEQ ID NO: 610521 - DNA, 25 bp, Homo sapien
tggctgtccccagcggcaatgggat

SEQ ID NO: 610522 - DNA, 25 bp, Homo sapien
cagcggcaatgggatgggtgacagg

SEQ ID NO: 610523 - DNA, 25 bp, Homo sapien
gcttgacgattgtggcgacggctcc

SEQ ID NO: 610524 - DNA, 25 bp, Homo sapien
acgattgtggcgacggctcccggca

SEQ ID NO: 610525 - DNA, 25 bp, Homo sapien
cccggcaggagcttatagggctcag

SEQ ID NO: 610526 - DNA, 25 bp, Homo sapien
gacggctcccggcaggagcttatag

SEQ ID NO: 610527 - DNA, 25 bp, Homo sapien
taaggcctcaagtcatctccaggcg

SEQ ID NO: 610528 - DNA, 25 bp, Homo sapien
gaggtctccccaagtcaaagtcttg

SEQ ID NO: 610529 - DNA, 25 bp, Homo sapien
tgggactggtcctggcatcacgtct

SEQ ID NO: 610530 - DNA, 25 bp, Homo sapien
ttgtccaaggcagtagaggtctccc

SEQ ID NO: 610531 - DNA, 25 bp, Homo sapien
aaggaggagcaaggtgccccaagtg

SEQ ID NO: 610532 - DNA, 25 bp, Homo sapien
agtgccacaattggacccagcctca

SEQ ID NO: 610533 - DNA, 25 bp, Homo sapien
gaggagcaaggtgccccaagtgcca

SEQ ID NO: 610534 - DNA, 25 bp, Homo sapien
cccaagtgccacaattggacccagc

SEQ ID NO: 610535 - DNA, 25 bp, Homo sapien
tgactgggggaatcgtttccaaggc

SEQ ID NO: 610536 - DNA, 25 bp, Homo sapien
gaatgactgggggaatcgtttccaa

SEQ ID NO: 610537 - DNA, 25 bp, Homo sapien
aatgactgggggaatcgtttccaag

SEQ ID NO: 610538 - DNA, 25 bp, Homo sapien
atgactgggggaatcgtttccaagg

SEQ ID NO: 610539 - DNA, 25 bp, Homo sapien
aggagaaaggcgtcttccctcacca

SEQ ID NO: 610540 - DNA, 25 bp, Homo sapien
ttggaggagaaaggcgtcttccctc

SEQ ID NO: 610541 - DNA, 25 bp, Homo sapien
agaaaggcgtcttccctcaccacag

SEQ ID NO: 610542 - DNA, 25 bp, Homo sapien
gaggatgaggttgggttggaggaga

SEQ ID NO: 610543 - DNA, 25 bp, Homo sapien
tgttgcagtcgccaacctgggtttg

SEQ ID NO: 610544 - DNA, 25 bp, Homo sapien
tcctgttgcagtcgccaacctgggt

SEQ ID NO: 610545 - DNA, 25 bp, Homo sapien
caagttcctgttgcagtcgccaacc

SEQ ID NO: 610546 - DNA, 25 bp, Homo sapien
tcagggatcctcacccaagtaccca

SEQ ID NO: 610547 - DNA, 25 bp, Homo sapien
gtgaattttagtgcagcctcaggcc

SEQ ID NO: 610548 - DNA, 25 bp, Homo sapien
cagaatgcacctggagtgacggtct

SEQ ID NO: 610549 - DNA, 25 bp, Homo sapien
taaggaagagcttgagacaggccct

SEQ ID NO: 610550 - DNA, 25 bp, Homo sapien
tgatgggacccagcccgctttgata

SEQ ID NO: 610551 - DNA, 25 bp, Homo sapien
tcatcactcccctcttcaagaaggg

SEQ ID NO: 610552 - DNA, 25 bp, Homo sapien
tgacccagcaaaaggttctgtcttg

SEQ ID NO: 610553 - DNA, 25 bp, Homo sapien
tgaaatgtccccacagctactcatc

SEQ ID NO: 610554 - DNA, 25 bp, Homo sapien
tccattgctggcagattgaggtgac

SEQ ID NO: 610555 - DNA, 25 bp, Homo sapien
acagcgaatgggtgctctgaagcct

SEQ ID NO: 610556 - DNA, 25 bp, Homo sapien
cttgtactcctcatgtaacgggagc

SEQ ID NO: 610557 - DNA, 25 bp, Homo sapien
ccctagggatcaggtagacagcgaa

SEQ ID NO: 610558 - DNA, 25 bp, Homo sapien
tgaacaaggcctccgttgcaacgtt

SEQ ID NO: 610559 - DNA, 25 bp, Homo sapien
atggagctctgagacagcctggctc

SEQ ID NO: 610560 - DNA, 25 bp, Homo sapien
aagagcaggcatgaagccatggagc

SEQ ID NO: 610561 - DNA, 25 bp, Homo sapien
agcaggcatgaagccatggagctct

SEQ ID NO: 610562 - DNA, 25 bp, Homo sapien
gagctctgagacagcctggctccct

SEQ ID NO: 610563 - DNA, 25 bp, Homo sapien
tcagggcgtgagatttgacctgctc

SEQ ID NO: 610564 - DNA, 25 bp, Homo sapien
cccaccactgatcagggcgtgagat

SEQ ID NO: 610565 - DNA, 25 bp, Homo sapien
caccactgatcagggcgtgagattt

SEQ ID NO: 610566 - DNA, 25 bp, Homo sapien
actgatcagggcgtgagatttgacc

SEQ ID NO: 610567 - DNA, 25 bp, Homo sapien
tacatcttagaaaggacactgggag

SEQ ID NO: 610568 - DNA, 25 bp, Homo sapien
ctgacgaaggacttgcaagggaccc

SEQ ID NO: 610569 - DNA, 25 bp, Homo sapien
gacccctatgaggagagatgcatcc

SEQ ID NO: 610570 - DNA, 25 bp, Homo sapien
tccatggagcccacgacagaaaggg

SEQ ID NO: 610571 - DNA, 25 bp, Homo sapien
ctgtggttcccgcgtgaagacagtg

SEQ ID NO: 610572 - DNA, 25 bp, Homo sapien
gctggcggtgcctggacatacaata

SEQ ID NO: 610573 - DNA, 25 bp, Homo sapien
agccagcaggccaagtacacttgct

SEQ ID NO: 610574 - DNA, 25 bp, Homo sapien
atggtgaagaaagttgaaatcagcc

SEQ ID NO: 610575 - DNA, 25 bp, Homo sapien
cctagttcgcggtgacatggccaaa

SEQ ID NO: 610576 - DNA, 25 bp, Homo sapien
taaaaacgcccagcatggactgagt

SEQ ID NO: 610577 - DNA, 25 bp, Homo sapien
ccagtttgaggtcatgcgttgccca

SEQ ID NO: 610578 - DNA, 25 bp, Homo sapien
gaggcttcgcaaacaccagacatgt

SEQ ID NO: 610579 - DNA, 25 bp, Homo sapien
gaagtgacgatccagggcgtgggag

SEQ ID NO: 610580 - DNA, 25 bp, Homo sapien
cctgcccggcctctcgcgccggaag

SEQ ID NO: 610581 - DNA, 25 bp, Homo sapien
gtccggcagcgcacgcagaaccgac

SEQ ID NO: 610582 - DNA, 25 bp, Homo sapien
cggagcgcgggtcaatcggcggcgg

SEQ ID NO: 610583 - DNA, 25 bp, Homo sapien
gcacatggccttcacaagtattgat

SEQ ID NO: 610584 - DNA, 25 bp, Homo sapien
ggagggcatttgtcaatatcttcag

SEQ ID NO: 610585 - DNA, 25 bp, Homo sapien
tgtaaacctacatgccctttgggtc

SEQ ID NO: 610586 - DNA, 25 bp, Homo sapien
gaaacatcttaactgcctatcaggg

SEQ ID NO: 610587 - DNA, 25 bp, Homo sapien
agtgagcacacatagcccggaggct

SEQ ID NO: 610588 - DNA, 25 bp, Homo sapien
ggcctgcacatctcgaagtctccat

SEQ ID NO: 610589 - DNA, 25 bp, Homo sapien
gtcacgaagggcctgcacatctcga

SEQ ID NO: 610590 - DNA, 25 bp, Homo sapien
ttctgtcagtgagcacacatagccc

SEQ ID NO: 610591 - DNA, 25 bp, Homo sapien
tgcagggcccggtcgtaatcaaact

SEQ ID NO: 610592 - DNA, 25 bp, Homo sapien
gtgaggaacccggaagcaaggacat

SEQ ID NO: 610593 - DNA, 25 bp, Homo sapien
aagttattgaagacttcgggccagc

SEQ ID NO: 610594 - DNA, 25 bp, Homo sapien
aaggcatcgtcgagggatgtgctca

SEQ ID NO: 610595 - DNA, 25 bp, Homo sapien
taaggtcaagtatatggctcggatg

SEQ ID NO: 610596 - DNA, 25 bp, Homo sapien
gaatgagtttttctaaggtcaagta

SEQ ID NO: 610597 - DNA, 25 bp, Homo sapien
taattggatagttgcttggtatcca

SEQ ID NO: 610598 - DNA, 25 bp, Homo sapien
tatggctcggatgttttcagtaatt

SEQ ID NO: 610599 - DNA, 25 bp, Homo sapien
ccaatcacctttttggctataaaag

SEQ ID NO: 610600 - DNA, 25 bp, Homo sapien
caatcacctttttggctataaaagg

SEQ ID NO: 610601 - DNA, 25 bp, Homo sapien
gtctgcaagaattacaattccattc

SEQ ID NO: 610602 - DNA, 25 bp, Homo sapien
tcctttgtagtctgcaagaattaca

SEQ ID NO: 610603 - DNA, 25 bp, Homo sapien
taactaggaagacggacctcaggga

SEQ ID NO: 610604 - DNA, 25 bp, Homo sapien
tctgagtctacagggacagatctgg

SEQ ID NO: 610605 - DNA, 25 bp, Homo sapien
gaccttccagatcagtgttgcccaa

SEQ ID NO: 610606 - DNA, 25 bp, Homo sapien
ggttatataaaacagggctccacag

SEQ ID NO: 610607 - DNA, 25 bp, Homo sapien
catggactgcttttatccgaatggg

SEQ ID NO: 610608 - DNA, 25 bp, Homo sapien
tgcttttatccgaatggggaaacca

SEQ ID NO: 610609 - DNA, 25 bp, Homo sapien
cacatggactgcttttatccgaatg

SEQ ID NO: 610610 - DNA, 25 bp, Homo sapien
ggactgcttttatccgaatggggaa

SEQ ID NO: 610611 - DNA, 25 bp, Homo sapien
gcctttaaatattcgaggttcattc

SEQ ID NO: 610612 - DNA, 25 bp, Homo sapien
tgcctttaaatattcgaggttcatt

SEQ ID NO: 610613 - DNA, 25 bp, Homo sapien
atgcctttaaatattcgaggttcat

SEQ ID NO: 610614 - DNA, 25 bp, Homo sapien
tgtgacttcacagctcgcaaggagt

SEQ ID NO: 610615 - DNA, 25 bp, Homo sapien
gagagttcaagtcagacccatggag

SEQ ID NO: 610616 - DNA, 25 bp, Homo sapien
gcccaggatgctgtcacaggcagga

SEQ ID NO: 610617 - DNA, 25 bp, Homo sapien
tcttctgaagccagcagtaccgcgt

SEQ ID NO: 610618 - DNA, 25 bp, Homo sapien
taaaggcagggctaattggtgacac

SEQ ID NO: 610619 - DNA, 25 bp, Homo sapien
gaattcttatagctacacgggcctg

SEQ ID NO: 610620 - DNA, 25 bp, Homo sapien
tcagccagtaccgtagaggatccag

SEQ ID NO: 610621 - DNA, 25 bp, Homo sapien
tattgcaaacttcaaccagtgggtc

SEQ ID NO: 610622 - DNA, 25 bp, Homo sapien
tgagacagcctgacacaaacatcct

SEQ ID NO: 610623 - DNA, 25 bp, Homo sapien
caaacatcctggtgaagccacaagg

SEQ ID NO: 610624 - DNA, 25 bp, Homo sapien
taaaacaaatgcgactggccaggaa

SEQ ID NO: 610625 - DNA, 25 bp, Homo sapien
ccttgattttcacgcagggaggtct

SEQ ID NO: 610626 - DNA, 25 bp, Homo sapien
gcaatgggccagaacttctccctga

SEQ ID NO: 610627 - DNA, 25 bp, Homo sapien
gaggttcatgggtttgcctcaccag

SEQ ID NO: 610628 - DNA, 25 bp, Homo sapien
ccacactatcttgaatttagggaaa

SEQ ID NO: 610629 - DNA, 25 bp, Homo sapien
tctccctgaaggaacatactcccag

SEQ ID NO: 610630 - DNA, 25 bp, Homo sapien
taacagatcccaatacagagaggtg

SEQ ID NO: 610631 - DNA, 25 bp, Homo sapien
gcagtgaagccaactagataccagg

SEQ ID NO: 610632 - DNA, 25 bp, Homo sapien
cagagaggtgttaccagaactgaca

SEQ ID NO: 610633 - DNA, 25 bp, Homo sapien
tacctgatatgccaagaagccgagg

SEQ ID NO: 610634 - DNA, 25 bp, Homo sapien
cctcagtgttggtgcctagtgtaca

SEQ ID NO: 610635 - DNA, 25 bp, Homo sapien
aattgacaggtgagggctacttagc

SEQ ID NO: 610636 - DNA, 25 bp, Homo sapien
tacagaattagacagaggaacacag

SEQ ID NO: 610637 - DNA, 25 bp, Homo sapien
ttttgccagtgtgaagcagataccc

SEQ ID NO: 610638 - DNA, 25 bp, Homo sapien
ggtttaggaattggagagaactcaa

SEQ ID NO: 610639 - DNA, 25 bp, Homo sapien
gcaaatgagctgacaggtggttata

SEQ ID NO: 610640 - DNA, 25 bp, Homo sapien
gaggctctgccgtcttggactttaa

SEQ ID NO: 610641 - DNA, 25 bp, Homo sapien
gccgtcttggactttaatagcttag

SEQ ID NO: 610642 - DNA, 25 bp, Homo sapien
taagacacttggtagatgagagacg

SEQ ID NO: 610643 - DNA, 25 bp, Homo sapien
ggttttatcacgcttctagtcagga

SEQ ID NO: 610644 - DNA, 25 bp, Homo sapien
ccttccctagaagaatggttgctga

SEQ ID NO: 610645 - DNA, 25 bp, Homo sapien
tgagtgccaaggacaccactggaac

SEQ ID NO: 610646 - DNA, 25 bp, Homo sapien
tctcgccgcctctccgtgcctgggc

SEQ ID NO: 610647 - DNA, 25 bp, Homo sapien
gcggagcccgttgccttggcgacct

SEQ ID NO: 610648 - DNA, 25 bp, Homo sapien
gcactcgcgctacggcggctcggat

SEQ ID NO: 610649 - DNA, 25 bp, Homo sapien
cggctcggatgggaccaggacggtt

SEQ ID NO: 610650 - DNA, 25 bp, Homo sapien
tttgcagacgataaaactgacgcac

SEQ ID NO: 610651 - DNA, 25 bp, Homo sapien
cgaatgaggtcgaccaatggctaca

SEQ ID NO: 610652 - DNA, 25 bp, Homo sapien
cagacaggtgctaccatgattccca

SEQ ID NO: 610653 - DNA, 25 bp, Homo sapien
aagaagtcaatcctctctggcccca

SEQ ID NO: 610654 - DNA, 25 bp, Homo sapien
ctctgtgcattcacagcccccctgt

SEQ ID NO: 610655 - DNA, 25 bp, Homo sapien
ccctgtatgtccaaaatcataaccg

SEQ ID NO: 610656 - DNA, 25 bp, Homo sapien
tgtgcattcacagcccccctgtatg

SEQ ID NO: 610657 - DNA, 25 bp, Homo sapien
agcccccctgtatgtccaaaatcat

SEQ ID NO: 610658 - DNA, 25 bp, Homo sapien
aaatgaggttccctagcaagtggac

SEQ ID NO: 610659 - DNA, 25 bp, Homo sapien
tcagagtatgaacaggatgcttttc

SEQ ID NO: 610660 - DNA, 25 bp, Homo sapien
gcttaaatcatgtgggcctaaacta

SEQ ID NO: 610661 - DNA, 25 bp, Homo sapien
cacaaaatgagtgggagtactaaga

SEQ ID NO: 610662 - DNA, 25 bp, Homo sapien
gaaaagtacaagtccctctcattaa

SEQ ID NO: 610663 - DNA, 25 bp, Homo sapien
gaaggcttgaataatgagcttgaca

SEQ ID NO: 610664 - DNA, 25 bp, Homo sapien
catattgcaagatgcataaaacccc

SEQ ID NO: 610665 - DNA, 25 bp, Homo sapien
atagaatagatagatgcatggcccc

SEQ ID NO: 610666 - DNA, 25 bp, Homo sapien
taaatgtatattaaagctgggcgca

SEQ ID NO: 610667 - DNA, 25 bp, Homo sapien
tttctgcagttctagaaaatgatca

SEQ ID NO: 610668 - DNA, 25 bp, Homo sapien
gacttacaagatggatgcttgctca

SEQ ID NO: 610669 - DNA, 25 bp, Homo sapien
taaggctatacacttttgaatctgc

SEQ ID NO: 610670 - DNA, 25 bp, Homo sapien
gagtaattcctcacaatcccatacc

SEQ ID NO: 610671 - DNA, 25 bp, Homo sapien
ggagaggcagttttgacttcagatg

SEQ ID NO: 610672 - DNA, 25 bp, Homo sapien
taccctaagagatgatcaagatact

SEQ ID NO: 610673 - DNA, 25 bp, Homo sapien
ctgtagaggagaggcagttttgact

SEQ ID NO: 610674 - DNA, 25 bp, Homo sapien
tctgttaagcgtccatacagcacca

SEQ ID NO: 610675 - DNA, 25 bp, Homo sapien
ctgttaagcgtccatacagcaccac

SEQ ID NO: 610676 - DNA, 25 bp, Homo sapien
actttctgttaagcgtccatacagc

SEQ ID NO: 610677 - DNA, 25 bp, Homo sapien
cactttctgttaagcgtccatacag

SEQ ID NO: 610678 - DNA, 25 bp, Homo sapien
tggaagcaatggtagtgtacagtgt

SEQ ID NO: 610679 - DNA, 25 bp, Homo sapien
ggtagtgtacagtgttcaccaatgc

SEQ ID NO: 610680 - DNA, 25 bp, Homo sapien
tagtgtacagtgttcaccaatgccc

SEQ ID NO: 610681 - DNA, 25 bp, Homo sapien
caatggtagtgtacagtgttcacca

SEQ ID NO: 610682 - DNA, 25 bp, Homo sapien
aaagcaccacgtcttctgaactaca

SEQ ID NO: 610683 - DNA, 25 bp, Homo sapien
tgtaaaaagcaccacgtcttctgaa

SEQ ID NO: 610684 - DNA, 25 bp, Homo sapien
taaaaagcaccacgtcttctgaact

SEQ ID NO: 610685 - DNA, 25 bp, Homo sapien
tttgtaaaaagcaccacgtcttctg

SEQ ID NO: 610686 - DNA, 25 bp, Homo sapien
ggtcccctttggactgctgatttgg

SEQ ID NO: 610687 - DNA, 25 bp, Homo sapien
ttgtggtcccctttggactgctgat

SEQ ID NO: 610688 - DNA, 25 bp, Homo sapien
tcccctttggactgctgatttggtg

SEQ ID NO: 610689 - DNA, 25 bp, Homo sapien
ccctttggactgctgatttggtgtg

SEQ ID NO: 610690 - DNA, 25 bp, Homo sapien
tctctgtccacaggagagatccatt

SEQ ID NO: 610691 - DNA, 25 bp, Homo sapien
catttcctttggacaatgagccagg

SEQ ID NO: 610692 - DNA, 25 bp, Homo sapien
ggagagatccatttcctttggacaa

SEQ ID NO: 610693 - DNA, 25 bp, Homo sapien
cctttggacaatgagccagggggct

SEQ ID NO: 610694 - DNA, 25 bp, Homo sapien
gaagcggaggcagaatttaagaaac

SEQ ID NO: 610695 - DNA, 25 bp, Homo sapien
gattctcactttaccctcctctctg

SEQ ID NO: 610696 - DNA, 25 bp, Homo sapien
gaaaccaggattcaaggttagcagt

SEQ ID NO: 610697 - DNA, 25 bp, Homo sapien
ctgtggtgcgggcaggattctcact

SEQ ID NO: 610698 - DNA, 25 bp, Homo sapien
gtgtgaggcattccacatttccact

SEQ ID NO: 610699 - DNA, 25 bp, Homo sapien
ggagtgtgaggcattccacatttcc

SEQ ID NO: 610700 - DNA, 25 bp, Homo sapien
gaggagtgtgaggcattccacattt

SEQ ID NO: 610701 - DNA, 25 bp, Homo sapien
caaagtctaggtaccttccttccag

SEQ ID NO: 610702 - DNA, 25 bp, Homo sapien
gggacatagtaagaatacaccaaat

SEQ ID NO: 610703 - DNA, 25 bp, Homo sapien
ccaaatactttcttcggtgccatga

SEQ ID NO: 610704 - DNA, 25 bp, Homo sapien
actttcttcggtgccatgaagggcc

SEQ ID NO: 610705 - DNA, 25 bp, Homo sapien
ctgggacatagtaagaatacaccaa

SEQ ID NO: 610706 - DNA, 25 bp, Homo sapien
tcagattttccactgttgactaatc

SEQ ID NO: 610707 - DNA, 25 bp, Homo sapien
gattttccactgttgactaatcagt

SEQ ID NO: 610708 - DNA, 25 bp, Homo sapien
agattttccactgttgactaatcag

SEQ ID NO: 610709 - DNA, 25 bp, Homo sapien
cagattttccactgttgactaatca

SEQ ID NO: 610710 - DNA, 25 bp, Homo sapien
ctggccttcggtcagtgtttgctcc

SEQ ID NO: 610711 - DNA, 25 bp, Homo sapien
gccttcggtcagtgtttgctccctc

SEQ ID NO: 610712 - DNA, 25 bp, Homo sapien
ctcccctctgtagaccggtccttct

SEQ ID NO: 610713 - DNA, 25 bp, Homo sapien
tggccttcggtcagtgtttgctccc

SEQ ID NO: 610714 - DNA, 25 bp, Homo sapien
gacttcagtgtccacggtaaaccag

SEQ ID NO: 610715 - DNA, 25 bp, Homo sapien
ccacgttttggttatctgagggctc

SEQ ID NO: 610716 - DNA, 25 bp, Homo sapien
tgttcaactaggcaggattctcact

SEQ ID NO: 610717 - DNA, 25 bp, Homo sapien
gaagtcagagagcacgaactccaga

SEQ ID NO: 610718 - DNA, 25 bp, Homo sapien
tgtatcccagttcatgcctaagcag

SEQ ID NO: 610719 - DNA, 25 bp, Homo sapien
caacactttgggttctctctagacc

SEQ ID NO: 610720 - DNA, 25 bp, Homo sapien
taagcagaaacactagaggcctggt

SEQ ID NO: 610721 - DNA, 25 bp, Homo sapien
gagggaagctacagatactttgccc

SEQ ID NO: 610722 - DNA, 25 bp, Homo sapien
actggcagggcggtgttactacttc

SEQ ID NO: 610723 - DNA, 25 bp, Homo sapien
cagcagctatatcctactggcaggg

SEQ ID NO: 610724 - DNA, 25 bp, Homo sapien
tgcggaacagtccagctgcatcact

SEQ ID NO: 610725 - DNA, 25 bp, Homo sapien
tgcatcactgcttggtggccgggca

SEQ ID NO: 610726 - DNA, 25 bp, Homo sapien
gggtcttacgatgctgcccagccta

SEQ ID NO: 610727 - DNA, 25 bp, Homo sapien
tggcaggcagggtaacgttctcaaa

SEQ ID NO: 610728 - DNA, 25 bp, Homo sapien
caggctccggaatgtctcaccagga

SEQ ID NO: 610729 - DNA, 25 bp, Homo sapien
tgaagccctgcattgacctggccct

SEQ ID NO: 610730 - DNA, 25 bp, Homo sapien
gccctacagggtgctaaagaatgaa

SEQ ID NO: 610731 - DNA, 25 bp, Homo sapien
gggtagcggcttctctctgtgatag

SEQ ID NO: 610732 - DNA, 25 bp, Homo sapien
cttctctgagggacgaaagggccgt

SEQ ID NO: 610733 - DNA, 25 bp, Homo sapien
tgcccaggacaaagggtgaagccct

SEQ ID NO: 610734 - DNA, 25 bp, Homo sapien
tcccacaaggtcaggcactcagact

SEQ ID NO: 610735 - DNA, 25 bp, Homo sapien
agtatcatgttgtaggatggtttcc

SEQ ID NO: 610736 - DNA, 25 bp, Homo sapien
tctgtgtactccaaagggctggccc

SEQ ID NO: 610737 - DNA, 25 bp, Homo sapien
ggtgcttgactcttacttacggaat

SEQ ID NO: 610738 - DNA, 25 bp, Homo sapien
gccacactcaaagaccaatcctaga

SEQ ID NO: 610739 - DNA, 25 bp, Homo sapien
gggagctctccaatcgaaagcagaa

SEQ ID NO: 610740 - DNA, 25 bp, Homo sapien
tccttgggcagtgacttgacagtgt

SEQ ID NO: 610741 - DNA, 25 bp, Homo sapien
aatgagactgtaaacttccaagacc

SEQ ID NO: 610742 - DNA, 25 bp, Homo sapien
agaacaaaacaagtcactcataatt

SEQ ID NO: 610743 - DNA, 25 bp, Homo sapien
gcagaggtaagtccagatgcattct

SEQ ID NO: 610744 - DNA, 25 bp, Homo sapien
ggcttctgtcaaaatgacagttatt

SEQ ID NO: 610745 - DNA, 25 bp, Homo sapien
ccagcacagtggcttctgtcaaaat

SEQ ID NO: 610746 - DNA, 25 bp, Homo sapien
tccgagtaggaggactcgacctcca

SEQ ID NO: 610747 - DNA, 25 bp, Homo sapien
tggatgtcagggaccgcattccgac

SEQ ID NO: 610748 - DNA, 25 bp, Homo sapien
agcttcctcacgctcacagcctctg

SEQ ID NO: 610749 - DNA, 25 bp, Homo sapien
ccgacggcctgtccggtcacaggag

SEQ ID NO: 610750 - DNA, 25 bp, Homo sapien
gccgctaaagtcagccaggtgagag

SEQ ID NO: 610751 - DNA, 25 bp, Homo sapien
cagtctaggacttggaggctagccc

SEQ ID NO: 610752 - DNA, 25 bp, Homo sapien
cagtagtgccaaggacctgctggct

SEQ ID NO: 610753 - DNA, 25 bp, Homo sapien
gctggctgctgcatagagctgaaca

SEQ ID NO: 610754 - DNA, 25 bp, Homo sapien
gccattgactcggtacctccatcat

SEQ ID NO: 610755 - DNA, 25 bp, Homo sapien
accaggcaccgagggcacaagacac

SEQ ID NO: 610756 - DNA, 25 bp, Homo sapien
cagggccattatgctcagtgggctc

SEQ ID NO: 610757 - DNA, 25 bp, Homo sapien
ggtacctccatcatgtgccaaacac

SEQ ID NO: 610758 - DNA, 25 bp, Homo sapien
agagctgagggtgaggacacagaag

SEQ ID NO: 610759 - DNA, 25 bp, Homo sapien
cagagctgagggtgaggacacagaa

SEQ ID NO: 610760 - DNA, 25 bp, Homo sapien
gagctgagggtgaggacacagaagc

SEQ ID NO: 610761 - DNA, 25 bp, Homo sapien
ttaggagagcctgggcacatgggcc

SEQ ID NO: 610762 - DNA, 25 bp, Homo sapien
ggaaaacaggtgttaggagagcctg

SEQ ID NO: 610763 - DNA, 25 bp, Homo sapien
ctgagtcagggaaaacaggtgttag

SEQ ID NO: 610764 - DNA, 25 bp, Homo sapien
ggcacatgggccagcagctacaact

SEQ ID NO: 610765 - DNA, 25 bp, Homo sapien
gtcatgtagccagaggacccatact

SEQ ID NO: 610766 - DNA, 25 bp, Homo sapien
ccctggcaggtgaatgtcatgtagc

SEQ ID NO: 610767 - DNA, 25 bp, Homo sapien
caccctggcaggtgaatgtcatgta

SEQ ID NO: 610768 - DNA, 25 bp, Homo sapien
gcaggtgaatgtcatgtagccagag

SEQ ID NO: 610769 - DNA, 25 bp, Homo sapien
caaatccatcctgtcagacatcttg

SEQ ID NO: 610770 - DNA, 25 bp, Homo sapien
ggtgtggcctgcatcagagtctgtg

SEQ ID NO: 610771 - DNA, 25 bp, Homo sapien
ccggccaatgttcttctaagagagt

SEQ ID NO: 610772 - DNA, 25 bp, Homo sapien
gagagtaaagagcactgaaccaggc

SEQ ID NO: 610773 - DNA, 25 bp, Homo sapien
gctggttgccagcttccttgtctgg

SEQ ID NO: 610774 - DNA, 25 bp, Homo sapien
cgaggtggtcccatcgctgctctgg

SEQ ID NO: 610775 - DNA, 25 bp, Homo sapien
tcaagacgaggtggtcccatcgctg

SEQ ID NO: 610776 - DNA, 25 bp, Homo sapien
gggctggttgccagcttccttgtct

SEQ ID NO: 610777 - DNA, 25 bp, Homo sapien
tgtggagctccatgagggaacctca

SEQ ID NO: 610778 - DNA, 25 bp, Homo sapien
gaacctcagagatgcacaatgacag

SEQ ID NO: 610779 - DNA, 25 bp, Homo sapien
gacagaaggtctctcgtccagcctt

SEQ ID NO: 610780 - DNA, 25 bp, Homo sapien
cacttatcctggtggacagggcaga

SEQ ID NO: 610781 - DNA, 25 bp, Homo sapien
cagaacatcaatgcggccaaatcta

SEQ ID NO: 610782 - DNA, 25 bp, Homo sapien
catcaatgcggccaaatctagtttc

SEQ ID NO: 610783 - DNA, 25 bp, Homo sapien
ccagaacatcaatgcggccaaatct

SEQ ID NO: 610784 - DNA, 25 bp, Homo sapien
caatgcggccaaatctagtttcctc

SEQ ID NO: 610785 - DNA, 25 bp, Homo sapien
agggaccatggtgtctcctgagttc

SEQ ID NO: 610786 - DNA, 25 bp, Homo sapien
gaaatcacaagaaccagggaccatg

SEQ ID NO: 610787 - DNA, 25 bp, Homo sapien
ggtgagcttgtctcccacccatagt

SEQ ID NO: 610788 - DNA, 25 bp, Homo sapien
tgggtcttaaggcttggaactggaa

SEQ ID NO: 610789 - DNA, 25 bp, Homo sapien
acaagcccaaagtgagcgcgcgcgg

SEQ ID NO: 610790 - DNA, 25 bp, Homo sapien
cttcgacaagcccaaagtgagcgcg

SEQ ID NO: 610791 - DNA, 25 bp, Homo sapien
ccgccttcgacaagcccaaagtgag

SEQ ID NO: 610792 - DNA, 25 bp, Homo sapien
ttcgacaagcccaaagtgagcgcgc

SEQ ID NO: 610793 - DNA, 25 bp, Homo sapien
gcgccggggcgcacgagggcaccat

SEQ ID NO: 610794 - DNA, 25 bp, Homo sapien
cagcgccggggcgcacgagggcacc

SEQ ID NO: 610795 - DNA, 25 bp, Homo sapien
agcgccggggcgcacgagggcacca

SEQ ID NO: 610796 - DNA, 25 bp, Homo sapien
gcacagcagcgcccagactgcaggg

SEQ ID NO: 610797 - DNA, 25 bp, Homo sapien
aaggcacgccgctcgaggcttgcga

SEQ ID NO: 610798 - DNA, 25 bp, Homo sapien
ccgcttctagcttgggcctggcgca

SEQ ID NO: 610799 - DNA, 25 bp, Homo sapien
cgctcgaggcttgcgatgctcccgg

SEQ ID NO: 610800 - DNA, 25 bp, Homo sapien
agaactcttgatggcctgcttccca

SEQ ID NO: 610801 - DNA, 25 bp, Homo sapien
cagaactcttgatggcctgcttccc

SEQ ID NO: 610802 - DNA, 25 bp, Homo sapien
ttgatggcctgcttcccatcctcca

SEQ ID NO: 610803 - DNA, 25 bp, Homo sapien
ctcttgatggcctgcttcccatcct

SEQ ID NO: 610804 - DNA, 25 bp, Homo sapien
tgcacaggtgacatgctactaatct

SEQ ID NO: 610805 - DNA, 25 bp, Homo sapien
cacaggtgacatgctactaatcttt

SEQ ID NO: 610806 - DNA, 25 bp, Homo sapien
ccttgcacaggtgacatgctactaa

SEQ ID NO: 610807 - DNA, 25 bp, Homo sapien
ggtgacatgctactaatcttttctc

SEQ ID NO: 610808 - DNA, 25 bp, Homo sapien
tggaggtcccttgcaagtccttcct

SEQ ID NO: 610809 - DNA, 25 bp, Homo sapien
tcaggaatccaacatccaactccag

SEQ ID NO: 610810 - DNA, 25 bp, Homo sapien
gcttcttgctgctaagaccactcca

SEQ ID NO: 610811 - DNA, 25 bp, Homo sapien
aagtccttcctcggccctcaggaat

SEQ ID NO: 610812 - DNA, 25 bp, Homo sapien
tcacagatgtcccacagatggccat

SEQ ID NO: 610813 - DNA, 25 bp, Homo sapien
agctgccgccatcctgctggcttcc

SEQ ID NO: 610814 - DNA, 25 bp, Homo sapien
tgagctgccgccatcctgctggctt

SEQ ID NO: 610815 - DNA, 25 bp, Homo sapien
ttgagctgccgccatcctgctggct

SEQ ID NO: 610816 - DNA, 25 bp, Homo sapien
ctgccgccatcctgctggcttccag

SEQ ID NO: 610817 - DNA, 25 bp, Homo sapien
ccaagagcctgtgacagcttgcaga

SEQ ID NO: 610818 - DNA, 25 bp, Homo sapien
tgacccaaggtctcctaagctccgt

SEQ ID NO: 610819 - DNA, 25 bp, Homo sapien
gttgtgaagccctattccagacccc

SEQ ID NO: 610820 - DNA, 25 bp, Homo sapien
gggtcctagccctgctgtagttgtg

SEQ ID NO: 610821 - DNA, 25 bp, Homo sapien
tcatggctcaaaggatgagcccatt

SEQ ID NO: 610822 - DNA, 25 bp, Homo sapien
tatgttccggcagctgtgaggtcac

SEQ ID NO: 610823 - DNA, 25 bp, Homo sapien
cacaaacacactagctttttcattc

SEQ ID NO: 610824 - DNA, 25 bp, Homo sapien
tgggaggcggacctgtgagtcttta

SEQ ID NO: 610825 - DNA, 25 bp, Homo sapien
gtcccctgcagagccagctttgagc

SEQ ID NO: 610826 - DNA, 25 bp, Homo sapien
aggtgggtcttcggtgtgcctctca

SEQ ID NO: 610827 - DNA, 25 bp, Homo sapien
aggccaggaggtgggtcttcggtgt

SEQ ID NO: 610828 - DNA, 25 bp, Homo sapien
caggaggtgggtcttcggtgtgcct

SEQ ID NO: 610829 - DNA, 25 bp, Homo sapien
ggtgggtcttcggtgtgcctctcat

SEQ ID NO: 610830 - DNA, 25 bp, Homo sapien
accaggggtactcccagcgggcatc

SEQ ID NO: 610831 - DNA, 25 bp, Homo sapien
tcccagcgggcatcggggaggtggc

SEQ ID NO: 610832 - DNA, 25 bp, Homo sapien
aggggtactcccagcgggcatcggg

SEQ ID NO: 610833 - DNA, 25 bp, Homo sapien
cccagcgggcatcggggaggtggcc

SEQ ID NO: 610834 - DNA, 25 bp, Homo sapien
cgtcgcagacgtggagttggtcgca

SEQ ID NO: 610835 - DNA, 25 bp, Homo sapien
tggagttggtcgcagggctccccca

SEQ ID NO: 610836 - DNA, 25 bp, Homo sapien
gccctggctggcgtcgcagacgtgg

SEQ ID NO: 610837 - DNA, 25 bp, Homo sapien
ccccgggctggcagaccaggccctg

SEQ ID NO: 610838 - DNA, 25 bp, Homo sapien
tacctgaagtgagcacccaaggagg

SEQ ID NO: 610839 - DNA, 25 bp, Homo sapien
catgctcgggtgactgctgaataca

SEQ ID NO: 610840 - DNA, 25 bp, Homo sapien
ttagagcccgttggatctggtcccg

SEQ ID NO: 610841 - DNA, 25 bp, Homo sapien
gctagaagtcttaccatgcacagga

SEQ ID NO: 610842 - DNA, 25 bp, Homo sapien
gagggcatcatctccaagacagaat

SEQ ID NO: 610843 - DNA, 25 bp, Homo sapien
taggtgcgacacacagtactgtagg

SEQ ID NO: 610844 - DNA, 25 bp, Homo sapien
taatcgtaacttcaggttccatggg

SEQ ID NO: 610845 - DNA, 25 bp, Homo sapien
catcactgtcaggtcagggcttaac

SEQ ID NO: 610846 - DNA, 25 bp, Homo sapien
tcctcgcagcggcagcggatgctgc

SEQ ID NO: 610847 - DNA, 25 bp, Homo sapien
aggtctccccttcccgatacaggcg

SEQ ID NO: 610848 - DNA, 25 bp, Homo sapien
tcagggcagcacttgcccaggacct

SEQ ID NO: 610849 - DNA, 25 bp, Homo sapien
ctgcacagcggcacgcaggtgaagc

SEQ ID NO: 610850 - DNA, 25 bp, Homo sapien
tccccagtccccctccttggccgca

SEQ ID NO: 610851 - DNA, 25 bp, Homo sapien
gctggaaggggctgggtccccagtc

SEQ ID NO: 610852 - DNA, 25 bp, Homo sapien
tgggctggaaggggctgggtcccca

SEQ ID NO: 610853 - DNA, 25 bp, Homo sapien
ccagtccccctccttggccgcacac

SEQ ID NO: 610854 - DNA, 25 bp, Homo sapien
gagacaaggccagaaaactggggtc

SEQ ID NO: 610855 - DNA, 25 bp, Homo sapien
gggaagagacaaggccagaaaactg

SEQ ID NO: 610856 - DNA, 25 bp, Homo sapien
cagggaagagacaaggccagaaaac

SEQ ID NO: 610857 - DNA, 25 bp, Homo sapien
gaagagacaaggccagaaaactggg

SEQ ID NO: 610858 - DNA, 25 bp, Homo sapien
agaagcggttctggttggacacccg

SEQ ID NO: 610859 - DNA, 25 bp, Homo sapien
gttttgtggactgcgacccctggag

SEQ ID NO: 610860 - DNA, 25 bp, Homo sapien
cgctgggtctccagtcggcagaagc

SEQ ID NO: 610861 - DNA, 25 bp, Homo sapien
ctgttttgtggactgcgacccctgg

SEQ ID NO: 610862 - DNA, 25 bp, Homo sapien
ctgcatggtggacccaagctaaagt

SEQ ID NO: 610863 - DNA, 25 bp, Homo sapien
tgggcacggaccatcttccatcagc

SEQ ID NO: 610864 - DNA, 25 bp, Homo sapien
tggggatggtggacaccgtgtcccc

SEQ ID NO: 610865 - DNA, 25 bp, Homo sapien
aagtgttgcctgcagccaagggcct

SEQ ID NO: 610866 - DNA, 25 bp, Homo sapien
gttgatttcaggctatgctccccag

SEQ ID NO: 610867 - DNA, 25 bp, Homo sapien
catagcaggcgctcaagcaatgtta

SEQ ID NO: 610868 - DNA, 25 bp, Homo sapien
ggagagaaagctcgcccgtgtgcat

SEQ ID NO: 610869 - DNA, 25 bp, Homo sapien
tctctggtcaaaaacgctgggaagc

SEQ ID NO: 610870 - DNA, 25 bp, Homo sapien
ggtagcggagtcctctccagaaagc

SEQ ID NO: 610871 - DNA, 25 bp, Homo sapien
cagccacagctggtagcggagtcct

SEQ ID NO: 610872 - DNA, 25 bp, Homo sapien
ccagaaagcattctgccccgggaca

SEQ ID NO: 610873 - DNA, 25 bp, Homo sapien
cgggacactcagcttgccccgcaga

SEQ ID NO: 610874 - DNA, 25 bp, Homo sapien
atggggaggaccacgggtgtcctgg

SEQ ID NO: 610875 - DNA, 25 bp, Homo sapien
ggggcctgttgatgcccttcactag

SEQ ID NO: 610876 - DNA, 25 bp, Homo sapien
gatggggaggaccacgggtgtcctg

SEQ ID NO: 610877 - DNA, 25 bp, Homo sapien
tggggcctgttgatgcccttcacta

SEQ ID NO: 610878 - DNA, 25 bp, Homo sapien
ccgccgcggtcccaacctgctccgt

SEQ ID NO: 610879 - DNA, 25 bp, Homo sapien
gcagggttgtgacgggcgaggcggg

SEQ ID NO: 610880 - DNA, 25 bp, Homo sapien
ccccacgcggcagggttgtgacggg

SEQ ID NO: 610881 - DNA, 25 bp, Homo sapien
cctgctccgtgtgcccggaccgcgc

SEQ ID NO: 610882 - DNA, 25 bp, Homo sapien
agcagtcgctggcggccgctttccg

SEQ ID NO: 610883 - DNA, 25 bp, Homo sapien
cggtagtcctcggccgagaagccga

SEQ ID NO: 610884 - DNA, 25 bp, Homo sapien
gaagccgaacttcctccggagagcg

SEQ ID NO: 610885 - DNA, 25 bp, Homo sapien
gactcgagcgcgtcgaagacagcag

SEQ ID NO: 610886 - DNA, 25 bp, Homo sapien
tctactgcatgctaggcacgggtca

SEQ ID NO: 610887 - DNA, 25 bp, Homo sapien
cactggctttcggactggtgatcca

SEQ ID NO: 610888 - DNA, 25 bp, Homo sapien
ccaggtttaggctcagcaggtacca

SEQ ID NO: 610889 - DNA, 25 bp, Homo sapien
gatgctccaaaggaactgctctgca

SEQ ID NO: 610890 - DNA, 25 bp, Homo sapien
gtgtagtccccatcaccaaggtcct

SEQ ID NO: 610891 - DNA, 25 bp, Homo sapien
catacatttaaaggcctgtggctgc

SEQ ID NO: 610892 - DNA, 25 bp, Homo sapien
cacagagcctgacgtagaccagaag

SEQ ID NO: 610893 - DNA, 25 bp, Homo sapien
gaggaatttatgagctgagagacag

SEQ ID NO: 610894 - DNA, 25 bp, Homo sapien
tagaggaagacgagctcgaaagcct

SEQ ID NO: 610895 - DNA, 25 bp, Homo sapien
tgatggcaatgttccgtcttgaccg

SEQ ID NO: 610896 - DNA, 25 bp, Homo sapien
tcgaaagcctacagaccgcatggtt

SEQ ID NO: 610897 - DNA, 25 bp, Homo sapien
tcttgaccgtggctgcagttacgcg

SEQ ID NO: 610898 - DNA, 25 bp, Homo sapien
aagtgaccagcgtcagcgggatgcc

SEQ ID NO: 610899 - DNA, 25 bp, Homo sapien
gttcagccgttcgcccaggctctgg

SEQ ID NO: 610900 - DNA, 25 bp, Homo sapien
gcagaagaccttgccggagtccgta

SEQ ID NO: 610901 - DNA, 25 bp, Homo sapien
ggatgcccaggagcgcgtagaacat

SEQ ID NO: 610902 - DNA, 25 bp, Homo sapien
gtggacacgcacgtccaccgcaggc

SEQ ID NO: 610903 - DNA, 25 bp, Homo sapien
cccaggcagcacttggccgccaaca

SEQ ID NO: 610904 - DNA, 25 bp, Homo sapien
gcacttggccgccaacaggaggcgc

SEQ ID NO: 610905 - DNA, 25 bp, Homo sapien
tccgtggacacgcacgtccaccgca

SEQ ID NO: 610906 - DNA, 25 bp, Homo sapien
gctctgcagtgccacgaagtcgccg

SEQ ID NO: 610907 - DNA, 25 bp, Homo sapien
tgaaggccacgtaggggagcttcct

SEQ ID NO: 610908 - DNA, 25 bp, Homo sapien
agccctcgaagtgcgagaaggcgac

SEQ ID NO: 610909 - DNA, 25 bp, Homo sapien
agggtggcggcacacgccagcagcc

SEQ ID NO: 610910 - DNA, 25 bp, Homo sapien
aagacagaggcggagcccacggagc

SEQ ID NO: 610911 - DNA, 25 bp, Homo sapien
agccagaggccacggctctcgggcg

SEQ ID NO: 610912 - DNA, 25 bp, Homo sapien
gcgctcgggccagtcggcgctggca

SEQ ID NO: 610913 - DNA, 25 bp, Homo sapien
tctccagcttgtgcacgtggcagaa

SEQ ID NO: 610914 - DNA, 25 bp, Homo sapien
gcgaaaagcccaggttgtcgcgggc

SEQ ID NO: 610915 - DNA, 25 bp, Homo sapien
aaagcccaggttgtcgcgggcgcac

SEQ ID NO: 610916 - DNA, 25 bp, Homo sapien
agatggacttccaccgggccccaag

SEQ ID NO: 610917 - DNA, 25 bp, Homo sapien
tcagatggacttccaccgggcccca

SEQ ID NO: 610918 - DNA, 25 bp, Homo sapien
tcctaagtgctgatgtggccacgcc

SEQ ID NO: 610919 - DNA, 25 bp, Homo sapien
tcgtggcagaagaccgcctagaggc

SEQ ID NO: 610920 - DNA, 25 bp, Homo sapien
tgacctcactaattgcagcgaagat

SEQ ID NO: 610921 - DNA, 25 bp, Homo sapien
tcgtttagcgcaagagattgacccc

SEQ ID NO: 610922 - DNA, 25 bp, Homo sapien
tcattcacacatgggctgattccac

SEQ ID NO: 610923 - DNA, 25 bp, Homo sapien
attcacacatgggctgattccactc

SEQ ID NO: 610924 - DNA, 25 bp, Homo sapien
acaggacccggaagagagctcgtcc

SEQ ID NO: 610925 - DNA, 25 bp, Homo sapien
gatgcgattctccaaggtcatattg

SEQ ID NO: 610926 - DNA, 25 bp, Homo sapien
tattgctggtgattgacaggacccg

SEQ ID NO: 610927 - DNA, 25 bp, Homo sapien
tgaaccccgtcattctacagatgtg

SEQ ID NO: 610928 - DNA, 25 bp, Homo sapien
gccaggggaagtggctgagtgccac

SEQ ID NO: 610929 - DNA, 25 bp, Homo sapien
gtgcaggggcctgttccagaaagtc

SEQ ID NO: 610930 - DNA, 25 bp, Homo sapien
caggatgccacacctcgggctttgt

SEQ ID NO: 610931 - DNA, 25 bp, Homo sapien
tgcccccttatggtgcaggggcctg

SEQ ID NO: 610932 - DNA, 25 bp, Homo sapien
catgaccatgtagctcatgttgaaa

SEQ ID NO: 610933 - DNA, 25 bp, Homo sapien
tgttcatgaccatgtagctcatgtt

SEQ ID NO: 610934 - DNA, 25 bp, Homo sapien
gggtcgcgttgcattgtgttcatga

SEQ ID NO: 610935 - DNA, 25 bp, Homo sapien
tcgcgttgcattgtgttcatgacca

SEQ ID NO: 610936 - DNA, 25 bp, Homo sapien
cccagcgcttcagggaggtcagaat

SEQ ID NO: 610937 - DNA, 25 bp, Homo sapien
gacagaaagcattagcgtccacgag

SEQ ID NO: 610938 - DNA, 25 bp, Homo sapien
tatggtgtctccgaggccctctggg

SEQ ID NO: 610939 - DNA, 25 bp, Homo sapien
aatggagccgaacccagggctgtga

SEQ ID NO: 610940 - DNA, 25 bp, Homo sapien
ttgtaaggggccatagcctcttcag

SEQ ID NO: 610941 - DNA, 25 bp, Homo sapien
cccttgtaaggggccatagcctctt

SEQ ID NO: 610942 - DNA, 25 bp, Homo sapien
ccttgtaaggggccatagcctcttc

SEQ ID NO: 610943 - DNA, 25 bp, Homo sapien
cttgtaaggggccatagcctcttca

SEQ ID NO: 610944 - DNA, 25 bp, Homo sapien
cctgcgggagcccttttgcatgcaa

SEQ ID NO: 610945 - DNA, 25 bp, Homo sapien
gaagcctgccactctttacctagtc

SEQ ID NO: 610946 - DNA, 25 bp, Homo sapien
cttggctgaaggaaagatggcggta

SEQ ID NO: 610947 - DNA, 25 bp, Homo sapien
cgtgagtgtaagaactgggagattc

SEQ ID NO: 610948 - DNA, 25 bp, Homo sapien
ccagatgccgtgctaggatttcaca

SEQ ID NO: 610949 - DNA, 25 bp, Homo sapien
taagaaaggttctgtcgctattccc

SEQ ID NO: 610950 - DNA, 25 bp, Homo sapien
aaaaacggtatcatgctttcacgag

SEQ ID NO: 610951 - DNA, 25 bp, Homo sapien
gtatatgctatgtgcacccatggtg

SEQ ID NO: 610952 - DNA, 25 bp, Homo sapien
gcaggtacattaggaagtggacaca

SEQ ID NO: 610953 - DNA, 25 bp, Homo sapien
gagagtgctgagtcccaccttgaag

SEQ ID NO: 610954 - DNA, 25 bp, Homo sapien
caagcagagcagataacggtgattc

SEQ ID NO: 610955 - DNA, 25 bp, Homo sapien
aataggaccaggactttctcagccc

SEQ ID NO: 610956 - DNA, 25 bp, Homo sapien
taaaaggccgatacagataattacc

SEQ ID NO: 610957 - DNA, 25 bp, Homo sapien
aaaggccgatacagataattaccat

SEQ ID NO: 610958 - DNA, 25 bp, Homo sapien
gtaaaaggccgatacagataattac

SEQ ID NO: 610959 - DNA, 25 bp, Homo sapien
aaaaggccgatacagataattacca

SEQ ID NO: 610960 - DNA, 25 bp, Homo sapien
ggccatgagaccattgcatgggata

SEQ ID NO: 610961 - DNA, 25 bp, Homo sapien
accattgcatgggatattggaccca

SEQ ID NO: 610962 - DNA, 25 bp, Homo sapien
gaggattcaggtctagctccttttt

SEQ ID NO: 610963 - DNA, 25 bp, Homo sapien
gctcctttttcgtccagagagaaca

SEQ ID NO: 610964 - DNA, 25 bp, Homo sapien
gccgccagcagcacagcgcgcctcg

SEQ ID NO: 610965 - DNA, 25 bp, Homo sapien
gccgccgccagcagcacagcgcgcc

SEQ ID NO: 610966 - DNA, 25 bp, Homo sapien
ccgccgccagcagcacagcgcgcct

SEQ ID NO: 610967 - DNA, 25 bp, Homo sapien
cgccagcagcacagcgcgcctcggg

SEQ ID NO: 610968 - DNA, 25 bp, Homo sapien
ggtttgcccaatggtacacagctag

SEQ ID NO: 610969 - DNA, 25 bp, Homo sapien
acagtataaacctgtggcagagcag

SEQ ID NO: 610970 - DNA, 25 bp, Homo sapien
tgcactaggtttctagactccagcc

SEQ ID NO: 610971 - DNA, 25 bp, Homo sapien
acacagctagtgactttcagaggtc

SEQ ID NO: 610972 - DNA, 25 bp, Homo sapien
tgtgtcagcctgatttagaggcaca

SEQ ID NO: 610973 - DNA, 25 bp, Homo sapien
gtgtgtgtcagcctgatttagaggc

SEQ ID NO: 610974 - DNA, 25 bp, Homo sapien
atggtgtgtgtcagcctgatttaga

SEQ ID NO: 610975 - DNA, 25 bp, Homo sapien
gtgtgtcagcctgatttagaggcac

SEQ ID NO: 610976 - DNA, 25 bp, Homo sapien
tcgctagcccctccaataatcgtca

SEQ ID NO: 610977 - DNA, 25 bp, Homo sapien
attttggtacccataatcgctagcc

SEQ ID NO: 610978 - DNA, 25 bp, Homo sapien
ctgtgatctttagcccctccaataa

SEQ ID NO: 610979 - DNA, 25 bp, Homo sapien
gcccctccaataatcgtcacactca

SEQ ID NO: 610980 - DNA, 25 bp, Homo sapien
gttcaaatatagctcaggctcctcc

SEQ ID NO: 610981 - DNA, 25 bp, Homo sapien
tcagagaagttcaaatatagctcag

SEQ ID NO: 610982 - DNA, 25 bp, Homo sapien
atctgcaagtctggcagccccggtg

SEQ ID NO: 610983 - DNA, 25 bp, Homo sapien
cggtgcagagcagggaagcttttcc

SEQ ID NO: 610984 - DNA, 25 bp, Homo sapien
tgccagagaacagtctctatatgag

SEQ ID NO: 610985 - DNA, 25 bp, Homo sapien
cagagaacagtctctatatgagttt

SEQ ID NO: 610986 - DNA, 25 bp, Homo sapien
gaacagtctctatatgagtttgaaa

SEQ ID NO: 610987 - DNA, 25 bp, Homo sapien
gagaacagtctctatatgagtttga

SEQ ID NO: 610988 - DNA, 25 bp, Homo sapien
cagttccttgagcttcgcaggcagg

SEQ ID NO: 610989 - DNA, 25 bp, Homo sapien
cttggactggtgaaaattgctgagc

SEQ ID NO: 610990 - DNA, 25 bp, Homo sapien
tgcaagcaaacctggaaaccacgag

SEQ ID NO: 610991 - DNA, 25 bp, Homo sapien
gagagcagagcattcggtccttgga

SEQ ID NO: 610992 - DNA, 25 bp, Homo sapien
gaacaaagacccttccgagcgaagc

SEQ ID NO: 610993 - DNA, 25 bp, Homo sapien
cggtggcggtagctccacttccgct

SEQ ID NO: 610994 - DNA, 25 bp, Homo sapien
gctccgagcgagatgacctcttcct

SEQ ID NO: 610995 - DNA, 25 bp, Homo sapien
taagcccactactcaggcggcggca

SEQ ID NO: 610996 - DNA, 25 bp, Homo sapien
accccattatatgggagttctccat

SEQ ID NO: 610997 - DNA, 25 bp, Homo sapien
cacctctgaaaaccccattatatgg

SEQ ID NO: 610998 - DNA, 25 bp, Homo sapien
aaccccattatatgggagttctcca

SEQ ID NO: 610999 - DNA, 25 bp, Homo sapien
gctgccacctctgaaaaccccatta

SEQ ID NO: 611000 - DNA, 25 bp, Homo sapien
tcatcttgccaaattccatctccca

SEQ ID NO: 611001 - DNA, 25 bp, Homo sapien
gttcccgaggctgattttatgttca

SEQ ID NO: 611002 - DNA, 25 bp, Homo sapien
tttggttcccgaggctgattttatg

SEQ ID NO: 611003 - DNA, 25 bp, Homo sapien
gccaaattccatctcccacacaggg

SEQ ID NO: 611004 - DNA, 25 bp, Homo sapien
tagcggcccaaatctctggagactc

SEQ ID NO: 611005 - DNA, 25 bp, Homo sapien
tgcttctctatccacagccgaatgg

SEQ ID NO: 611006 - DNA, 25 bp, Homo sapien
aaaatgcactttttgtagcggccca

SEQ ID NO: 611007 - DNA, 25 bp, Homo sapien
cagccgaatgggcaaaatgcacttt

SEQ ID NO: 611008 - DNA, 25 bp, Homo sapien
tatcttctcacggtactctttgccc

SEQ ID NO: 611009 - DNA, 25 bp, Homo sapien
tcttcgttggagagttcatgcccct

SEQ ID NO: 611010 - DNA, 25 bp, Homo sapien
ggcgggcgcctaccacattcttgta

SEQ ID NO: 611011 - DNA, 25 bp, Homo sapien
cctgttctgtgactgccttcatggc

SEQ ID NO: 611012 - DNA, 25 bp, Homo sapien
ccaatggctcaggatgtgcgggaaa

SEQ ID NO: 611013 - DNA, 25 bp, Homo sapien
ggatgtgcctaactttcagaccaaa

SEQ ID NO: 611014 - DNA, 25 bp, Homo sapien
cattcaatcccaagtggcggccaga

SEQ ID NO: 611015 - DNA, 25 bp, Homo sapien
catgccgaacttgatggatgtgcct

SEQ ID NO: 611016 - DNA, 25 bp, Homo sapien
caaaagtagttctgaaggagtccaa

SEQ ID NO: 611017 - DNA, 25 bp, Homo sapien
ctgaaggagtccaagcttcgtatac

SEQ ID NO: 611018 - DNA, 25 bp, Homo sapien
tacagagcaatattttcgaagagtt

SEQ ID NO: 611019 - DNA, 25 bp, Homo sapien
ttttagaatgtggcatcctgaaaaa

SEQ ID NO: 611020 - DNA, 25 bp, Homo sapien
gcctggaaggagtatgttaataatg

SEQ ID NO: 611021 - DNA, 25 bp, Homo sapien
gatacatttgtgtacatgctcacaa

SEQ ID NO: 611022 - DNA, 25 bp, Homo sapien
ggtgataatagagcaaaactgccaa

SEQ ID NO: 611023 - DNA, 25 bp, Homo sapien
taataatggttctctgggtggtaag

SEQ ID NO: 611024 - DNA, 25 bp, Homo sapien
ttcaagatatacactactgcttcta

SEQ ID NO: 611025 - DNA, 25 bp, Homo sapien
caagatatacactactgcttctaaa

SEQ ID NO: 611026 - DNA, 25 bp, Homo sapien
gaatttagaattattcacgagatgt

SEQ ID NO: 611027 - DNA, 25 bp, Homo sapien
tcacgagatgttaaaactatgtttg

SEQ ID NO: 611028 - DNA, 25 bp, Homo sapien
actttctggttgtgtagcattggga

SEQ ID NO: 611029 - DNA, 25 bp, Homo sapien
tagaacaccttactttctggttgtg

SEQ ID NO: 611030 - DNA, 25 bp, Homo sapien
ttgtgtagcattgggaataagatat

SEQ ID NO: 611031 - DNA, 25 bp, Homo sapien
cattttcaagtagaacaccttactt

SEQ ID NO: 611032 - DNA, 25 bp, Homo sapien
tttagtgccagaccaagacgaattg

SEQ ID NO: 611033 - DNA, 25 bp, Homo sapien
cagaccaagacgaattgggtgtgta

SEQ ID NO: 611034 - DNA, 25 bp, Homo sapien
tgccagaccaagacgaattgggtgt

SEQ ID NO: 611035 - DNA, 25 bp, Homo sapien
gaaatttagtgccagaccaagacga

SEQ ID NO: 611036 - DNA, 25 bp, Homo sapien
gctaaccctagcacagtcattctgg

SEQ ID NO: 611037 - DNA, 25 bp, Homo sapien
cattctgggcaaacgcgtgtgattt

SEQ ID NO: 611038 - DNA, 25 bp, Homo sapien
gaattcacaagttctctggagctag

SEQ ID NO: 611039 - DNA, 25 bp, Homo sapien
tttccagcagaagtataaggcatat

SEQ ID NO: 611040 - DNA, 25 bp, Homo sapien
gtgagattgtccctaagtaactgca

SEQ ID NO: 611041 - DNA, 25 bp, Homo sapien
agtgagattgtccctaagtaactgc

SEQ ID NO: 611042 - DNA, 25 bp, Homo sapien
gtaagtggcccagtatgtataatct

SEQ ID NO: 611043 - DNA, 25 bp, Homo sapien
gcagacagggatgattgcaaaggtc

SEQ ID NO: 611044 - DNA, 25 bp, Homo sapien
gtataatcttatctcactcgacagt

SEQ ID NO: 611045 - DNA, 25 bp, Homo sapien
tcaaagcagggctactaaaagttcc

SEQ ID NO: 611046 - DNA, 25 bp, Homo sapien
agcgtctccttcgtctccctggttt

SEQ ID NO: 611047 - DNA, 25 bp, Homo sapien
tccccagcgtctccttcgtctccct

SEQ ID NO: 611048 - DNA, 25 bp, Homo sapien
gtctccctggttttccgatgtccac

SEQ ID NO: 611049 - DNA, 25 bp, Homo sapien
ctccctggttttccgatgtccacag

SEQ ID NO: 611050 - DNA, 25 bp, Homo sapien
ccgaacaacggcagcattactgtga

SEQ ID NO: 611051 - DNA, 25 bp, Homo sapien
tcaaaacttcggaatgccgtggcat

SEQ ID NO: 611052 - DNA, 25 bp, Homo sapien
gacactgaacagatcacaaagcacg

SEQ ID NO: 611053 - DNA, 25 bp, Homo sapien
ggcaacagcccaaacaggtcaagtg

SEQ ID NO: 611054 - DNA, 25 bp, Homo sapien
tattgaagcacaagttgcaaattgg

SEQ ID NO: 611055 - DNA, 25 bp, Homo sapien
gaacttttcaaggtgtcataagcca

SEQ ID NO: 611056 - DNA, 25 bp, Homo sapien
tgaaagtagattccactattgaagc

SEQ ID NO: 611057 - DNA, 25 bp, Homo sapien
caggattcgagtttcctcagaggaa

SEQ ID NO: 611058 - DNA, 25 bp, Homo sapien
aaatagttgggactagatgcacgca

SEQ ID NO: 611059 - DNA, 25 bp, Homo sapien
cacgcctgactcaggacattattct

SEQ ID NO: 611060 - DNA, 25 bp, Homo sapien
caccacgcctgactcaggacattat

SEQ ID NO: 611061 - DNA, 25 bp, Homo sapien
ctgactcaggacattattcttaaag

SEQ ID NO: 611062 - DNA, 25 bp, Homo sapien
tctgtgagactgataggcctgacta

SEQ ID NO: 611063 - DNA, 25 bp, Homo sapien
cagggctagcctcaatacagggaga

SEQ ID NO: 611064 - DNA, 25 bp, Homo sapien
gctaccagatatacagacaggcttg

SEQ ID NO: 611065 - DNA, 25 bp, Homo sapien
cagattccggtatgactgaagagca

SEQ ID NO: 611066 - DNA, 25 bp, Homo sapien
gtaacaacagagatggtggtgacac

SEQ ID NO: 611067 - DNA, 25 bp, Homo sapien
ccctggataacaccttgacttctgg

SEQ ID NO: 611068 - DNA, 25 bp, Homo sapien
tgacttctggtcctaaataatgaaa

SEQ ID NO: 611069 - DNA, 25 bp, Homo sapien
cagaatagttagctaggtctggtaa

SEQ ID NO: 611070 - DNA, 25 bp, Homo sapien
cggggcaagcaggagccgggtcacc

SEQ ID NO: 611071 - DNA, 25 bp, Homo sapien
gcaagcaggagccgggtcacccagc

SEQ ID NO: 611072 - DNA, 25 bp, Homo sapien
cgcgctcacccgggcggaagccctc

SEQ ID NO: 611073 - DNA, 25 bp, Homo sapien
gggcaagcaggagccgggtcaccca

SEQ ID NO: 611074 - DNA, 25 bp, Homo sapien
ttgatgtaggcgtagcccagcgagc

SEQ ID NO: 611075 - DNA, 25 bp, Homo sapien
tacatcgcggcacacgcggatggac

SEQ ID NO: 611076 - DNA, 25 bp, Homo sapien
caagcgggtagccagaaccgctggc

SEQ ID NO: 611077 - DNA, 25 bp, Homo sapien
tgcagatcgcccacgtaaagcgagg

SEQ ID NO: 611078 - DNA, 25 bp, Homo sapien
caaaggtggagaaggtatcatataa

SEQ ID NO: 611079 - DNA, 25 bp, Homo sapien
ggaccacatgatgcgaataggctgg

SEQ ID NO: 611080 - DNA, 25 bp, Homo sapien
gccttgttgtcaatggagtcctcca

SEQ ID NO: 611081 - DNA, 25 bp, Homo sapien
gaataggctggcctttgagcatctc

SEQ ID NO: 611082 - DNA, 25 bp, Homo sapien
aggtagttgacaccgatctacccaa

SEQ ID NO: 611083 - DNA, 25 bp, Homo sapien
taccaggcaggtagttgacaccgat

SEQ ID NO: 611084 - DNA, 25 bp, Homo sapien
ccctctaccaggcaggtagttgaca

SEQ ID NO: 611085 - DNA, 25 bp, Homo sapien
tcacccctctaccaggcaggtagtt

SEQ ID NO: 611086 - DNA, 25 bp, Homo sapien
caggaagagtactgacagagggttc

SEQ ID NO: 611087 - DNA, 25 bp, Homo sapien
actgacagagggttcaggtagaaag

SEQ ID NO: 611088 - DNA, 25 bp, Homo sapien
aagagtactgacagagggttcaggt

SEQ ID NO: 611089 - DNA, 25 bp, Homo sapien
gtactgacagagggttcaggtagaa

SEQ ID NO: 611090 - DNA, 25 bp, Homo sapien
ccattcatggtgttgatggcctgct

SEQ ID NO: 611091 - DNA, 25 bp, Homo sapien
tgctgtgcggcctcatgggtctcaa

SEQ ID NO: 611092 - DNA, 25 bp, Homo sapien
ttgatggcctgctgtgcggcctcat

SEQ ID NO: 611093 - DNA, 25 bp, Homo sapien
aaccccgggagccatgctcgtcaca

SEQ ID NO: 611094 - DNA, 25 bp, Homo sapien
cacatccaccgggaggttcttcacg

SEQ ID NO: 611095 - DNA, 25 bp, Homo sapien
tcacgtagatgttggtgaactccag

SEQ ID NO: 611096 - DNA, 25 bp, Homo sapien
ggagaagaggtcctgcaggccttgc

SEQ ID NO: 611097 - DNA, 25 bp, Homo sapien
tcgagacttgaagtgacccacaaag

SEQ ID NO: 611098 - DNA, 25 bp, Homo sapien
agtggccgctgttgtccctcatcac

SEQ ID NO: 611099 - DNA, 25 bp, Homo sapien
caaagccaaagcaccgcgagtggcc

SEQ ID NO: 611100 - DNA, 25 bp, Homo sapien
gcgagtggccgctgttgtccctcat

SEQ ID NO: 611101 - DNA, 25 bp, Homo sapien
aagcaccgcgagtggccgctgttgt

SEQ ID NO: 611102 - DNA, 25 bp, Homo sapien
tccttcccgttcatatggaccacgg

SEQ ID NO: 611103 - DNA, 25 bp, Homo sapien
ccttcccgttcatatggaccacggc

SEQ ID NO: 611104 - DNA, 25 bp, Homo sapien
ctccttcccgttcatatggaccacg

SEQ ID NO: 611105 - DNA, 25 bp, Homo sapien
ttttgggcccggcccgcgtacagca

SEQ ID NO: 611106 - DNA, 25 bp, Homo sapien
ttctgccgctccacgcgcttttggg

SEQ ID NO: 611107 - DNA, 25 bp, Homo sapien
tgcgcttcagttcattctgccgctc

SEQ ID NO: 611108 - DNA, 25 bp, Homo sapien
tcatctgctcaaacctgcgcttcag

SEQ ID NO: 611109 - DNA, 25 bp, Homo sapien
ggtaattactccatagggagagaac

SEQ ID NO: 611110 - DNA, 25 bp, Homo sapien
cttcgcactggtaattactccatag

SEQ ID NO: 611111 - DNA, 25 bp, Homo sapien
ttgtcgtcatcaatggagtcgtcca

SEQ ID NO: 611112 - DNA, 25 bp, Homo sapien
tctttcctcagtttgtcgtcatcaa

SEQ ID NO: 611113 - DNA, 25 bp, Homo sapien
aaagccaaaccccttgctgtggcca

SEQ ID NO: 611114 - DNA, 25 bp, Homo sapien
aacacacaaagccaaaccccttgct

SEQ ID NO: 611115 - DNA, 25 bp, Homo sapien
tggggaggaaaaacacacaaagcca

SEQ ID NO: 611116 - DNA, 25 bp, Homo sapien
cttgctgtggccaccctctgtcatc

SEQ ID NO: 611117 - DNA, 25 bp, Homo sapien
cacgtagagtggcttggtgcccacg

SEQ ID NO: 611118 - DNA, 25 bp, Homo sapien
ggttggtcaagatggccttccgctc

SEQ ID NO: 611119 - DNA, 25 bp, Homo sapien
aggcgctgcatgtactggttggtca

SEQ ID NO: 611120 - DNA, 25 bp, Homo sapien
tcatctctgtcacggcctttgtcgc

SEQ ID NO: 611121 - DNA, 25 bp, Homo sapien
gtgggagttgcgggcaggccgtcac

SEQ ID NO: 611122 - DNA, 25 bp, Homo sapien
gctgcggtgggagttgcgggcaggc

SEQ ID NO: 611123 - DNA, 25 bp, Homo sapien
ggtgggagttgcgggcaggccgtca

SEQ ID NO: 611124 - DNA, 25 bp, Homo sapien
aggctgcggtgggagttgcgggcag

SEQ ID NO: 611125 - DNA, 25 bp, Homo sapien
tcctaatgagtcctcggcagaagca

SEQ ID NO: 611126 - DNA, 25 bp, Homo sapien
ggtcttgcttaacgcagcatttccc

SEQ ID NO: 611127 - DNA, 25 bp, Homo sapien
cattcacgagcttctctcactggga

SEQ ID NO: 611128 - DNA, 25 bp, Homo sapien
aacttgctggatcattaagagtctt

SEQ ID NO: 611129 - DNA, 25 bp, Homo sapien
taaagaaatttagggccgatcatgg

SEQ ID NO: 611130 - DNA, 25 bp, Homo sapien
tacttcctgtaagtcccacgaggtc

SEQ ID NO: 611131 - DNA, 25 bp, Homo sapien
gaggaatgttcttaccgtggtggcc

SEQ ID NO: 611132 - DNA, 25 bp, Homo sapien
gaaatgctggataatctgtgcctgt

SEQ ID NO: 611133 - DNA, 25 bp, Homo sapien
cctgcagggcaaagatcttagattt

SEQ ID NO: 611134 - DNA, 25 bp, Homo sapien
agccctgaatcctgcagggcaaaga

SEQ ID NO: 611135 - DNA, 25 bp, Homo sapien
caagacccacaaggctgtaatgaaa

SEQ ID NO: 611136 - DNA, 25 bp, Homo sapien
tggtgagtcaagacccacaaggctg

SEQ ID NO: 611137 - DNA, 25 bp, Homo sapien
agggtaggtgagaagctacacctcc

SEQ ID NO: 611138 - DNA, 25 bp, Homo sapien
gcagggtaggtgagaagctacacct

SEQ ID NO: 611139 - DNA, 25 bp, Homo sapien
cagggtaggtgagaagctacacctc

SEQ ID NO: 611140 - DNA, 25 bp, Homo sapien
ggccacagccatagtatgcagcctg

SEQ ID NO: 611141 - DNA, 25 bp, Homo sapien
gaaggtctaggtggctgggatgtcc

SEQ ID NO: 611142 - DNA, 25 bp, Homo sapien
gccacagccatagtatgcagcctgg

SEQ ID NO: 611143 - DNA, 25 bp, Homo sapien
ctgggccacagccatagtatgcagc

SEQ ID NO: 611144 - DNA, 25 bp, Homo sapien
caataggccagtctgagagtggaag

SEQ ID NO: 611145 - DNA, 25 bp, Homo sapien
tgctggtggctagctgcgtgtcttc

SEQ ID NO: 611146 - DNA, 25 bp, Homo sapien
ggtactttacacacgtctcattcag

SEQ ID NO: 611147 - DNA, 25 bp, Homo sapien
gggcccacaccaataggccagtctg

SEQ ID NO: 611148 - DNA, 25 bp, Homo sapien
aataatcagggtggcacactgtgcc

SEQ ID NO: 611149 - DNA, 25 bp, Homo sapien
caaagccagctcgtgtctacctaga

SEQ ID NO: 611150 - DNA, 25 bp, Homo sapien
caagatagtttcaagtgagcgtgca

SEQ ID NO: 611151 - DNA, 25 bp, Homo sapien
gcgtgcaattcactcttacagagga

SEQ ID NO: 611152 - DNA, 25 bp, Homo sapien
cactgctgatgtgggccggggggcg

SEQ ID NO: 611153 - DNA, 25 bp, Homo sapien
ctgacactgctgatgtgggccgggg

SEQ ID NO: 611154 - DNA, 25 bp, Homo sapien
gacactgctgatgtgggccgggggg

SEQ ID NO: 611155 - DNA, 25 bp, Homo sapien
ctgctgatgtgggccggggggcgcc

SEQ ID NO: 611156 - DNA, 25 bp, Homo sapien
tctctgggtatgaggcaccgtgcgt

SEQ ID NO: 611157 - DNA, 25 bp, Homo sapien
actctctgggtatgaggcaccgtgc

SEQ ID NO: 611158 - DNA, 25 bp, Homo sapien
ctactctctgggtatgaggcaccgt

SEQ ID NO: 611159 - DNA, 25 bp, Homo sapien
ctgggtatgaggcaccgtgcgtggc

SEQ ID NO: 611160 - DNA, 25 bp, Homo sapien
gagcggccggcctggtgtacagcat

SEQ ID NO: 611161 - DNA, 25 bp, Homo sapien
gccggcctggtgtacagcatcctac

SEQ ID NO: 611162 - DNA, 25 bp, Homo sapien
cggccggcctggtgtacagcatcct

SEQ ID NO: 611163 - DNA, 25 bp, Homo sapien
ccgataggtgctatgtgctgctgag

SEQ ID NO: 611164 - DNA, 25 bp, Homo sapien
catggacaggcatgtcctcaaaata

SEQ ID NO: 611165 - DNA, 25 bp, Homo sapien
atgtcctcaaaatacttaccctggc

SEQ ID NO: 611166 - DNA, 25 bp, Homo sapien
cttaatcaccatggacaggcatgtc

SEQ ID NO: 611167 - DNA, 25 bp, Homo sapien
aatacttaccctggcaagtgagcag

SEQ ID NO: 611168 - DNA, 25 bp, Homo sapien
gcttttgctcatgcaggggcgccgc

SEQ ID NO: 611169 - DNA, 25 bp, Homo sapien
tttgctcatgcaggggcgccgcagc

SEQ ID NO: 611170 - DNA, 25 bp, Homo sapien
catggacgcggtcaggggctcctgt

SEQ ID NO: 611171 - DNA, 25 bp, Homo sapien
cagccagcatggacgcggtcagggg

SEQ ID NO: 611172 - DNA, 25 bp, Homo sapien
tggaccaccaggtgaggtgtttccc

SEQ ID NO: 611173 - DNA, 25 bp, Homo sapien
ctagagaatagagccagcttggcca

SEQ ID NO: 611174 - DNA, 25 bp, Homo sapien
gcttggccacggtcacccagtaggg

SEQ ID NO: 611175 - DNA, 25 bp, Homo sapien
tggaatttgacctcacgttggacca

SEQ ID NO: 611176 - DNA, 25 bp, Homo sapien
ccagtctgaccagcgttttaagaca

SEQ ID NO: 611177 - DNA, 25 bp, Homo sapien
agtctgaccagcgttttaagacaag

SEQ ID NO: 611178 - DNA, 25 bp, Homo sapien
atccagtctgaccagcgttttaaga

SEQ ID NO: 611179 - DNA, 25 bp, Homo sapien
tctgaccagcgttttaagacaagat

SEQ ID NO: 611180 - DNA, 25 bp, Homo sapien
tctcagcagaaacccaagaccatac

SEQ ID NO: 611181 - DNA, 25 bp, Homo sapien
cccgcattgagcactggaaactggt

SEQ ID NO: 611182 - DNA, 25 bp, Homo sapien
tgtatttaccaaacgcacagatgcc

SEQ ID NO: 611183 - DNA, 25 bp, Homo sapien
aacatcatgtatttaccaaacgcac

SEQ ID NO: 611184 - DNA, 25 bp, Homo sapien
catcccagggctcgtatggagtgga

SEQ ID NO: 611185 - DNA, 25 bp, Homo sapien
tggtcagcccatctcagcaatgtgt

SEQ ID NO: 611186 - DNA, 25 bp, Homo sapien
taatggcttgtgcacggcctagctc

SEQ ID NO: 611187 - DNA, 25 bp, Homo sapien
ggcggaaaggatcgtcccatgaaga

SEQ ID NO: 611188 - DNA, 25 bp, Homo sapien
tggataagggggtagagacgctccc

SEQ ID NO: 611189 - DNA, 25 bp, Homo sapien
atggataagggggtagagacgctcc

SEQ ID NO: 611190 - DNA, 25 bp, Homo sapien
ttggcatggagggattctggagact

SEQ ID NO: 611191 - DNA, 25 bp, Homo sapien
tggagactccagcatgagcaacagc

SEQ ID NO: 611192 - DNA, 25 bp, Homo sapien
gcaacagctctgagttgtcaatctc

SEQ ID NO: 611193 - DNA, 25 bp, Homo sapien
tgtcaatctccagcagcatgcccgt

SEQ ID NO: 611194 - DNA, 25 bp, Homo sapien
gctatccactggctccactaggaga

SEQ ID NO: 611195 - DNA, 25 bp, Homo sapien
ggctgaagtagcaaacccttaccta

SEQ ID NO: 611196 - DNA, 25 bp, Homo sapien
cacagaattagtctacggaagggct

SEQ ID NO: 611197 - DNA, 25 bp, Homo sapien
tcagcaggccttcaggtattagcaa

SEQ ID NO: 611198 - DNA, 25 bp, Homo sapien
tgcatgtacgccttcggctgctcca

SEQ ID NO: 611199 - DNA, 25 bp, Homo sapien
tgctccatagcctggtgtgcctgca

SEQ ID NO: 611200 - DNA, 25 bp, Homo sapien
tcagtgcatgtacgccttcggctgc

SEQ ID NO: 611201 - DNA, 25 bp, Homo sapien
ctccatagcctggtgtgcctgcagc

SEQ ID NO: 611202 - DNA, 25 bp, Homo sapien
gagaaagccaggaacacggcgcaat

SEQ ID NO: 611203 - DNA, 25 bp, Homo sapien
tttaaagtatggcagacacccagtc

SEQ ID NO: 611204 - DNA, 25 bp, Homo sapien
tgtttgtgaaagtcagtccctgcct

SEQ ID NO: 611205 - DNA, 25 bp, Homo sapien
acccagtcttcaataaagaaggtgg

SEQ ID NO: 611206 - DNA, 25 bp, Homo sapien
cactgtccttttggcagccatggaa

SEQ ID NO: 611207 - DNA, 25 bp, Homo sapien
gccatggaagcgaggatttcctttt

SEQ ID NO: 611208 - DNA, 25 bp, Homo sapien
ttagggctgagagccagaaacactg

SEQ ID NO: 611209 - DNA, 25 bp, Homo sapien
cttttggcagccatggaagcgagga

SEQ ID NO: 611210 - DNA, 25 bp, Homo sapien
gggtgaccaaccttcattcacatac

SEQ ID NO: 611211 - DNA, 25 bp, Homo sapien
taataggctggatgggtgaccaacc

SEQ ID NO: 611212 - DNA, 25 bp, Homo sapien
ttcacatacagagcccaagtataga

SEQ ID NO: 611213 - DNA, 25 bp, Homo sapien
gtatagatacagactaattgggaaa

SEQ ID NO: 611214 - DNA, 25 bp, Homo sapien
tacagattgagcctaggaatggtcc

SEQ ID NO: 611215 - DNA, 25 bp, Homo sapien
aagaggcctccttggtcagtgtcca

SEQ ID NO: 611216 - DNA, 25 bp, Homo sapien
aaaggtccccactagagctaagcgt

SEQ ID NO: 611217 - DNA, 25 bp, Homo sapien
tctgcagagaggcacctaagctgtt

SEQ ID NO: 611218 - DNA, 25 bp, Homo sapien
gacagaatgaacttggtctctgggt

SEQ ID NO: 611219 - DNA, 25 bp, Homo sapien
gctggagatcagttgacagaatgaa

SEQ ID NO: 611220 - DNA, 25 bp, Homo sapien
ggtgctggagatcagttgacagaat

SEQ ID NO: 611221 - DNA, 25 bp, Homo sapien
acagaatgaacttggtctctgggtg

SEQ ID NO: 611222 - DNA, 25 bp, Homo sapien
tataggaaacatggttgtaggagca

SEQ ID NO: 611223 - DNA, 25 bp, Homo sapien
cacataactgattgggccttggtgg

SEQ ID NO: 611224 - DNA, 25 bp, Homo sapien
tcattcaacacataactgattgggc

SEQ ID NO: 611225 - DNA, 25 bp, Homo sapien
gaaaaagtatacagttagcattatt

SEQ ID NO: 611226 - DNA, 25 bp, Homo sapien
ccaagtagttacagcatggatttct

SEQ ID NO: 611227 - DNA, 25 bp, Homo sapien
tgaatggcaaaaagcgcagtgtcct

SEQ ID NO: 611228 - DNA, 25 bp, Homo sapien
gatcatcttccccactctatctggg

SEQ ID NO: 611229 - DNA, 25 bp, Homo sapien
gaaatgtatcctaatgccctgaggc

SEQ ID NO: 611230 - DNA, 25 bp, Homo sapien
tactagtctttgtactttccgtctc

SEQ ID NO: 611231 - DNA, 25 bp, Homo sapien
ctagtctttgtactttccgtctctg

SEQ ID NO: 611232 - DNA, 25 bp, Homo sapien
tagtctttgtactttccgtctctgg

SEQ ID NO: 611233 - DNA, 25 bp, Homo sapien
actagtctttgtactttccgtctct

SEQ ID NO: 611234 - DNA, 25 bp, Homo sapien
tctgggtccatagaaaagctagcct

SEQ ID NO: 611235 - DNA, 25 bp, Homo sapien
gacttgtccggatcgcagggttgat

SEQ ID NO: 611236 - DNA, 25 bp, Homo sapien
tcctcatgtggtaggtgggcacgca

SEQ ID NO: 611237 - DNA, 25 bp, Homo sapien
tatctagatttagcaaggaccggag

SEQ ID NO: 611238 - DNA, 25 bp, Homo sapien
ccccgcagaccctcccacacttccg

SEQ ID NO: 611239 - DNA, 25 bp, Homo sapien
tgagcccgccccgcagaccctccca

SEQ ID NO: 611240 - DNA, 25 bp, Homo sapien
cccgcagaccctcccacacttccgc

SEQ ID NO: 611241 - DNA, 25 bp, Homo sapien
cagcagccgcccagacccgctcact

SEQ ID NO: 611242 - DNA, 25 bp, Homo sapien
cagccgcccagacccgctcactgct

SEQ ID NO: 611243 - DNA, 25 bp, Homo sapien
ggcgctgccagcagccgcccagacc

SEQ ID NO: 611244 - DNA, 25 bp, Homo sapien
gcgctgccagcagccgcccagaccc

SEQ ID NO: 611245 - DNA, 25 bp, Homo sapien
gcggcgggttcctcagctgtaccgt

SEQ ID NO: 611246 - DNA, 25 bp, Homo sapien
ggttcctcagctgtaccgtctccat

SEQ ID NO: 611247 - DNA, 25 bp, Homo sapien
ggcgggttcctcagctgtaccgtct

SEQ ID NO: 611248 - DNA, 25 bp, Homo sapien
cggcgcggcgggttcctcagctgta

SEQ ID NO: 611249 - DNA, 25 bp, Homo sapien
tgaagaccattaggaagacactgaa

SEQ ID NO: 611250 - DNA, 25 bp, Homo sapien
cactgaacatcagtaataaaagatg

SEQ ID NO: 611251 - DNA, 25 bp, Homo sapien
aggatgtgaagaccattaggaagac

SEQ ID NO: 611252 - DNA, 25 bp, Homo sapien
tgtgaagaccattaggaagacactg

SEQ ID NO: 611253 - DNA, 25 bp, Homo sapien
gaaaagggatgaagtgaaactcctc

SEQ ID NO: 611254 - DNA, 25 bp, Homo sapien
tgaaaagggatgaagtgaaactcct

SEQ ID NO: 611255 - DNA, 25 bp, Homo sapien
aaaagggatgaagtgaaactcctct

SEQ ID NO: 611256 - DNA, 25 bp, Homo sapien
gttgtttggttaaactatcttcatc

SEQ ID NO: 611257 - DNA, 25 bp, Homo sapien
tgtttggttaaactatcttcatcca

SEQ ID NO: 611258 - DNA, 25 bp, Homo sapien
ttgtttggttaaactatcttcatcc

SEQ ID NO: 611259 - DNA, 25 bp, Homo sapien
caggattgtggatctcctaagtagc

SEQ ID NO: 611260 - DNA, 25 bp, Homo sapien
cgaagaaggacatcacaagctgtaa

SEQ ID NO: 611261 - DNA, 25 bp, Homo sapien
cactggctcccaacccaggattgtg

SEQ ID NO: 611262 - DNA, 25 bp, Homo sapien
gactgggacccaatgacctacctat

SEQ ID NO: 611263 - DNA, 25 bp, Homo sapien
aagacgatgactcatgttttttaca

SEQ ID NO: 611264 - DNA, 25 bp, Homo sapien
cttacaaaaagacgatgactcatgt

SEQ ID NO: 611265 - DNA, 25 bp, Homo sapien
catgtaatccaggattgggtttaac

SEQ ID NO: 611266 - DNA, 25 bp, Homo sapien
catttcatgtaatccaggattgggt

SEQ ID NO: 611267 - DNA, 25 bp, Homo sapien
tcaactggcagtcttcagattcatc

SEQ ID NO: 611268 - DNA, 25 bp, Homo sapien
tacaatttaaaaaatcataattagc

SEQ ID NO: 611269 - DNA, 25 bp, Homo sapien
acaatttaaaaaatcataattagct

SEQ ID NO: 611270 - DNA, 25 bp, Homo sapien
caatttaaaaaatcataattagctt

SEQ ID NO: 611271 - DNA, 25 bp, Homo sapien
ggatcacttaaggccaagagttcaa

SEQ ID NO: 611272 - DNA, 25 bp, Homo sapien
agcactttgggaggctgaggcagga

SEQ ID NO: 611273 - DNA, 25 bp, Homo sapien
aaaacgcaatttgtccaggtgcagt

SEQ ID NO: 611274 - DNA, 25 bp, Homo sapien
tgcagtggttcacgtctctaatcct

SEQ ID NO: 611275 - DNA, 25 bp, Homo sapien
gaaataccacagtatctgaggccaa

SEQ ID NO: 611276 - DNA, 25 bp, Homo sapien
taacacagaatgattgcagcctcca

SEQ ID NO: 611277 - DNA, 25 bp, Homo sapien
gttcacagatggagagccgagttcc

SEQ ID NO: 611278 - DNA, 25 bp, Homo sapien
taaggcatgctttagtctccgctga

SEQ ID NO: 611279 - DNA, 25 bp, Homo sapien
tagcagtgccacctactatgtcaaa

SEQ ID NO: 611280 - DNA, 25 bp, Homo sapien
tagaagctgtcatacttgcaaaact

SEQ ID NO: 611281 - DNA, 25 bp, Homo sapien
ccttacaagatgtgatggtatctca

SEQ ID NO: 611282 - DNA, 25 bp, Homo sapien
ttcattggaatcctgggcagctgtc

SEQ ID NO: 611283 - DNA, 25 bp, Homo sapien
tagctttgtatacgctgccatagga

SEQ ID NO: 611284 - DNA, 25 bp, Homo sapien
tctggccggtctctttatgaatagc

SEQ ID NO: 611285 - DNA, 25 bp, Homo sapien
gattatctcctggaggtctgattcc

SEQ ID NO: 611286 - DNA, 25 bp, Homo sapien
gcttaatagcaacaatctggccggt

SEQ ID NO: 611287 - DNA, 25 bp, Homo sapien
ataaaataatgtgccctctgagagc

SEQ ID NO: 611288 - DNA, 25 bp, Homo sapien
aactggctagattgttatcatggcc

SEQ ID NO: 611289 - DNA, 25 bp, Homo sapien
aaccttaggaaacatgccagtgaca

SEQ ID NO: 611290 - DNA, 25 bp, Homo sapien
ctggaattttaggtctcaagctgga

SEQ ID NO: 611291 - DNA, 25 bp, Homo sapien
tactccataacgatccataagtctg

SEQ ID NO: 611292 - DNA, 25 bp, Homo sapien
cgttttatttcgtaatcgaatgata

SEQ ID NO: 611293 - DNA, 25 bp, Homo sapien
gaatgatatcagatacagaaccagc

SEQ ID NO: 611294 - DNA, 25 bp, Homo sapien
taactgccataatatttgactacat

SEQ ID NO: 611295 - DNA, 25 bp, Homo sapien
tgtcactgcagtatactaccatctg

SEQ ID NO: 611296 - DNA, 25 bp, Homo sapien
gatttgggactaggaagacgtagct

SEQ ID NO: 611297 - DNA, 25 bp, Homo sapien
ttaccaaggctttacatgatctggc

SEQ ID NO: 611298 - DNA, 25 bp, Homo sapien
tccagtatgcttcctcagtttgtaa

SEQ ID NO: 611299 - DNA, 25 bp, Homo sapien
tgtaagttgacctgctaccccaaaa

SEQ ID NO: 611300 - DNA, 25 bp, Homo sapien
caagtcccttaagagttgattgtaa

SEQ ID NO: 611301 - DNA, 25 bp, Homo sapien
gttgacctgctaccccaaaatctgc

SEQ ID NO: 611302 - DNA, 25 bp, Homo sapien
atttcctgccttgatatctcggtgt

SEQ ID NO: 611303 - DNA, 25 bp, Homo sapien
gagtgttttcagtacagtaactgcc

SEQ ID NO: 611304 - DNA, 25 bp, Homo sapien
tagctcttttgtaacctattggcag

SEQ ID NO: 611305 - DNA, 25 bp, Homo sapien
tccatgcactagttaggcaggagaa

SEQ ID NO: 611306 - DNA, 25 bp, Homo sapien
cctggactcaaacgaacagagtgtt

SEQ ID NO: 611307 - DNA, 25 bp, Homo sapien
gaccagatgtctgctacacagttgt

SEQ ID NO: 611308 - DNA, 25 bp, Homo sapien
ggcagttattcccagggaccagatg

SEQ ID NO: 611309 - DNA, 25 bp, Homo sapien
cactgtattccgcttggccatggta

SEQ ID NO: 611310 - DNA, 25 bp, Homo sapien
aaatggtgttcctatcactgtattc

SEQ ID NO: 611311 - DNA, 25 bp, Homo sapien
catagctctggttttcggaatgtgg

SEQ ID NO: 611312 - DNA, 25 bp, Homo sapien
ctgtaaagttatctgaccatagctc

SEQ ID NO: 611313 - DNA, 25 bp, Homo sapien
tctgctcagggctctttacaagaca

SEQ ID NO: 611314 - DNA, 25 bp, Homo sapien
gatttgtaggaatcatgaagattgc

SEQ ID NO: 611315 - DNA, 25 bp, Homo sapien
ggtagacttgatggtacccctgctt

SEQ ID NO: 611316 - DNA, 25 bp, Homo sapien
caaggaccaggcctagaagctacct

SEQ ID NO: 611317 - DNA, 25 bp, Homo sapien
aattctttgtcagactcgggtagac

SEQ ID NO: 611318 - DNA, 25 bp, Homo sapien
tgaaatgactgcaaacggttggcct

SEQ ID NO: 611319 - DNA, 25 bp, Homo sapien
attaattaagtctcgcagtattgac

SEQ ID NO: 611320 - DNA, 25 bp, Homo sapien
gtcctggtccacttcccgctgctgg

SEQ ID NO: 611321 - DNA, 25 bp, Homo sapien
gcagtattgacactcctttggcact

SEQ ID NO: 611322 - DNA, 25 bp, Homo sapien
tcctggcgtttcagtttcacatcca

SEQ ID NO: 611323 - DNA, 25 bp, Homo sapien
ccatggtgcccagttgtgatggcaa

SEQ ID NO: 611324 - DNA, 25 bp, Homo sapien
tcatggtgctggctactcggacagt

SEQ ID NO: 611325 - DNA, 25 bp, Homo sapien
gcaacgtgtcatcgtgctcaatcat

SEQ ID NO: 611326 - DNA, 25 bp, Homo sapien
tgctcgaaccatcgtgccagaatcc

SEQ ID NO: 611327 - DNA, 25 bp, Homo sapien
caagttttctactcctttggttgtg

SEQ ID NO: 611328 - DNA, 25 bp, Homo sapien
atatgtatgcttggtctaagaagtc

SEQ ID NO: 611329 - DNA, 25 bp, Homo sapien
tgtccccatcgcaaacttccaagtt

SEQ ID NO: 611330 - DNA, 25 bp, Homo sapien
aagaaagaacccaaggctaagcctg

SEQ ID NO: 611331 - DNA, 25 bp, Homo sapien
tcaaagtcttccaaaatccagtcaa

SEQ ID NO: 611332 - DNA, 25 bp, Homo sapien
agtcttccaaaatccagtcaacacc

SEQ ID NO: 611333 - DNA, 25 bp, Homo sapien
aaaatccagtcaacacccacatctg

SEQ ID NO: 611334 - DNA, 25 bp, Homo sapien
caaattcaaagtcttccaaaatcca

SEQ ID NO: 611335 - DNA, 25 bp, Homo sapien
ggaatgaccatctactagaccttaa

SEQ ID NO: 611336 - DNA, 25 bp, Homo sapien
tgttccattggaatgaccatctact

SEQ ID NO: 611337 - DNA, 25 bp, Homo sapien
cattggaatgaccatctactagacc

SEQ ID NO: 611338 - DNA, 25 bp, Homo sapien
catctactagaccttaaacttcatg

SEQ ID NO: 611339 - DNA, 25 bp, Homo sapien
cgtagtctccatcctgtggtatttt

SEQ ID NO: 611340 - DNA, 25 bp, Homo sapien
aagaaaggatggtttcgcaggctgc

SEQ ID NO: 611341 - DNA, 25 bp, Homo sapien
gtttcgcaggctgcatggtctcatc

SEQ ID NO: 611342 - DNA, 25 bp, Homo sapien
aaactcgtagtctccatcctgtggt

SEQ ID NO: 611343 - DNA, 25 bp, Homo sapien
cagaacaatagaaatcagggcttcc

SEQ ID NO: 611344 - DNA, 25 bp, Homo sapien
gaaatgggattacttatacactgct

SEQ ID NO: 611345 - DNA, 25 bp, Homo sapien
caacctagcagtcccattattgagt

SEQ ID NO: 611346 - DNA, 25 bp, Homo sapien
gccacagaaacgagcaagatcacat

SEQ ID NO: 611347 - DNA, 25 bp, Homo sapien
cactatgatacttaggctgatctca

SEQ ID NO: 611348 - DNA, 25 bp, Homo sapien
ttgtggtatgttttggtctctgaaa

SEQ ID NO: 611349 - DNA, 25 bp, Homo sapien
cctggcctatgttctattcttatgc

SEQ ID NO: 611350 - DNA, 25 bp, Homo sapien
atatcacagtgctttcattattgtg

SEQ ID NO: 611351 - DNA, 25 bp, Homo sapien
agcccacctcagtatctttcccttt

SEQ ID NO: 611352 - DNA, 25 bp, Homo sapien
gcagcccacctcagtatctttccct

SEQ ID NO: 611353 - DNA, 25 bp, Homo sapien
ggcagcccacctcagtatctttccc

SEQ ID NO: 611354 - DNA, 25 bp, Homo sapien
gggcagcccacctcagtatctttcc

SEQ ID NO: 611355 - DNA, 25 bp, Homo sapien
gttttagtgagtatccttgatattt

SEQ ID NO: 611356 - DNA, 25 bp, Homo sapien
cagtgttttagtgagtatccttgat

SEQ ID NO: 611357 - DNA, 25 bp, Homo sapien
tcagtgttttagtgagtatccttga

SEQ ID NO: 611358 - DNA, 25 bp, Homo sapien
gtgttttagtgagtatccttgatat

SEQ ID NO: 611359 - DNA, 25 bp, Homo sapien
agtctagcactaaaggccttttggt

SEQ ID NO: 611360 - DNA, 25 bp, Homo sapien
ctagcactaaaggccttttggttag

SEQ ID NO: 611361 - DNA, 25 bp, Homo sapien
tctagcactaaaggccttttggtta

SEQ ID NO: 611362 - DNA, 25 bp, Homo sapien
tccagactgctgttcttggctagtt

SEQ ID NO: 611363 - DNA, 25 bp, Homo sapien
catgtggtttctcagaaagcgtatc

SEQ ID NO: 611364 - DNA, 25 bp, Homo sapien
tccctggcaattttggatacatatg

SEQ ID NO: 611365 - DNA, 25 bp, Homo sapien
aagcgtatctacacagcaggtttcc

SEQ ID NO: 611366 - DNA, 25 bp, Homo sapien
ccagagactttggatcagctccagt

SEQ ID NO: 611367 - DNA, 25 bp, Homo sapien
gatggccagtaacccactggatggc

SEQ ID NO: 611368 - DNA, 25 bp, Homo sapien
taaacgacggcttgcccagagactt

SEQ ID NO: 611369 - DNA, 25 bp, Homo sapien
tgccagcactccagaaggtaaacga

SEQ ID NO: 611370 - DNA, 25 bp, Homo sapien
tgatgtctgccaaaggatgtctgaa

SEQ ID NO: 611371 - DNA, 25 bp, Homo sapien
gtaaaagcaacaacatttgtgcaga

SEQ ID NO: 611372 - DNA, 25 bp, Homo sapien
tcgcctttacccagtctgatgaggt

SEQ ID NO: 611373 - DNA, 25 bp, Homo sapien
tctgatgaggtctgatgtctgccaa

SEQ ID NO: 611374 - DNA, 25 bp, Homo sapien
tctattctgtgatacccatactcca

SEQ ID NO: 611375 - DNA, 25 bp, Homo sapien
tctctattctgtgatacccatactc

SEQ ID NO: 611376 - DNA, 25 bp, Homo sapien
tcccataggatgtgaatatcctctc

SEQ ID NO: 611377 - DNA, 25 bp, Homo sapien
taggatgtgaatatcctctctattc

SEQ ID NO: 611378 - DNA, 25 bp, Homo sapien
tgatgactcagtcatatcatccaga

SEQ ID NO: 611379 - DNA, 25 bp, Homo sapien
tccgaaaaacaagctcagacaatag

SEQ ID NO: 611380 - DNA, 25 bp, Homo sapien
tatcatccagatatggatttttccg

SEQ ID NO: 611381 - DNA, 25 bp, Homo sapien
gatttttccgaaaaacaagctcaga

SEQ ID NO: 611382 - DNA, 25 bp, Homo sapien
ggcatccaggatgggctgccgcttg

SEQ ID NO: 611383 - DNA, 25 bp, Homo sapien
gccaagagcctcttctgaaggtcct

SEQ ID NO: 611384 - DNA, 25 bp, Homo sapien
ttggactggtacttctgccggatct

SEQ ID NO: 611385 - DNA, 25 bp, Homo sapien
tgccgtctcttcttagcctctatgg

SEQ ID NO: 611386 - DNA, 25 bp, Homo sapien
tgaacgtgggtcacaaaagcaatcc

SEQ ID NO: 611387 - DNA, 25 bp, Homo sapien
cattgattcccaggtttcaggagca

SEQ ID NO: 611388 - DNA, 25 bp, Homo sapien
caagatggcacgctgactgtcaaga

SEQ ID NO: 611389 - DNA, 25 bp, Homo sapien
tacagtatcctgaggtgcaacccag

SEQ ID NO: 611390 - DNA, 25 bp, Homo sapien
taagttgcttcagatgactggttct

SEQ ID NO: 611391 - DNA, 25 bp, Homo sapien
tctcaaggagtcaaggctacaattc

SEQ ID NO: 611392 - DNA, 25 bp, Homo sapien
cccataggatgtatcatgatgtcgc

SEQ ID NO: 611393 - DNA, 25 bp, Homo sapien
gctcaggctggtatctatttcttct

SEQ ID NO: 611394 - DNA, 25 bp, Homo sapien
tttccaagttggtccgagtgcaagc

SEQ ID NO: 611395 - DNA, 25 bp, Homo sapien
ttcaagtcagcacttaagccagtgt

SEQ ID NO: 611396 - DNA, 25 bp, Homo sapien
gaaaggacactggaataagaatcag

SEQ ID NO: 611397 - DNA, 25 bp, Homo sapien
gctatgtctcatacaaactgctgac

SEQ ID NO: 611398 - DNA, 25 bp, Homo sapien
aggctatatattgaggttctcgtta

SEQ ID NO: 611399 - DNA, 25 bp, Homo sapien
caggctatatattgaggttctcgtt

SEQ ID NO: 611400 - DNA, 25 bp, Homo sapien
ggctatatattgaggttctcgttaa

SEQ ID NO: 611401 - DNA, 25 bp, Homo sapien
gaaggattccaaggtgatcatctca

SEQ ID NO: 611402 - DNA, 25 bp, Homo sapien
tgctgttccacctctgaatgctggg

SEQ ID NO: 611403 - DNA, 25 bp, Homo sapien
tattcctggataagaatgggccaca

SEQ ID NO: 611404 - DNA, 25 bp, Homo sapien
cacactagaggctttatacaggcgg

SEQ ID NO: 611405 - DNA, 25 bp, Homo sapien
gaagagaccttgctactctaggtac

SEQ ID NO: 611406 - DNA, 25 bp, Homo sapien
aaagcacagatcctaagagttcaca

SEQ ID NO: 611407 - DNA, 25 bp, Homo sapien
ttcctcaactgaaactctgggccca

SEQ ID NO: 611408 - DNA, 25 bp, Homo sapien
tagaacctgagtagcactgtagtcc

SEQ ID NO: 611409 - DNA, 25 bp, Homo sapien
cagagctcagagtcataggatagga

SEQ ID NO: 611410 - DNA, 25 bp, Homo sapien
gaaaagctccgaaagtccaggtgac

SEQ ID NO: 611411 - DNA, 25 bp, Homo sapien
cattagggtctacgtgagccaaatc

SEQ ID NO: 611412 - DNA, 25 bp, Homo sapien
caggctcagtctccgattcagggta

SEQ ID NO: 611413 - DNA, 25 bp, Homo sapien
tgaatttattggaagatatattagt

SEQ ID NO: 611414 - DNA, 25 bp, Homo sapien
ctgctgtaacaaattcaaacaaact

SEQ ID NO: 611415 - DNA, 25 bp, Homo sapien
gaatttattggaagatatattagtt

SEQ ID NO: 611416 - DNA, 25 bp, Homo sapien
ggtgattcatggatccccagagttg

SEQ ID NO: 611417 - DNA, 25 bp, Homo sapien
ttctaggagcatccaacaggagtca

SEQ ID NO: 611418 - DNA, 25 bp, Homo sapien
taagagatgagcgatgcctctccca

SEQ ID NO: 611419 - DNA, 25 bp, Homo sapien
gagtcagcaatcaaagatgagtcct

SEQ ID NO: 611420 - DNA, 25 bp, Homo sapien
gggcatcctggtggtagcactcccc

SEQ ID NO: 611421 - DNA, 25 bp, Homo sapien
ggaggacgtgggctttaacaccatc

SEQ ID NO: 611422 - DNA, 25 bp, Homo sapien
ggcacagtgagcatgaccaccgtgg

SEQ ID NO: 611423 - DNA, 25 bp, Homo sapien
cacagctaccgtgaggtgggcatct

SEQ ID NO: 611424 - DNA, 25 bp, Homo sapien
tggtgcaggtgttccgcctcatgcg

SEQ ID NO: 611425 - DNA, 25 bp, Homo sapien
gagtacttctgcatcgcctggttca

SEQ ID NO: 611426 - DNA, 25 bp, Homo sapien
catcttccgcgtactcaagttggcg

SEQ ID NO: 611427 - DNA, 25 bp, Homo sapien
ttcagcttcgaggtgtcgtcgcgcc

SEQ ID NO: 611428 - DNA, 25 bp, Homo sapien
cacaaatggtttcacgttatctctt

SEQ ID NO: 611429 - DNA, 25 bp, Homo sapien
acaaatggtttcacgttatctcttc

SEQ ID NO: 611430 - DNA, 25 bp, Homo sapien
aaattataccgcacaaatggtttca

SEQ ID NO: 611431 - DNA, 25 bp, Homo sapien
tcataaattataccgcacaaatggt

SEQ ID NO: 611432 - DNA, 25 bp, Homo sapien
ccttaggacactggcagtagaggca

SEQ ID NO: 611433 - DNA, 25 bp, Homo sapien
agctctttgtcaagcaccttactga

SEQ ID NO: 611434 - DNA, 25 bp, Homo sapien
tggtcccaatggtggtcctcatcct

SEQ ID NO: 611435 - DNA, 25 bp, Homo sapien
ccttactgacaatatgaaagccagc

SEQ ID NO: 611436 - DNA, 25 bp, Homo sapien
taaggccataccaatctttatgcag

SEQ ID NO: 611437 - DNA, 25 bp, Homo sapien
aaggtgtttggctaagagctaaggc

SEQ ID NO: 611438 - DNA, 25 bp, Homo sapien
gctaagagctaaggccataccaatc

SEQ ID NO: 611439 - DNA, 25 bp, Homo sapien
tttggctaagagctaaggccatacc

SEQ ID NO: 611440 - DNA, 25 bp, Homo sapien
gaaccagcgtcccagcgatgaggaa

SEQ ID NO: 611441 - DNA, 25 bp, Homo sapien
tctagaaccagcgtcccagcgatga

SEQ ID NO: 611442 - DNA, 25 bp, Homo sapien
gctgcctctagaaccagcgtcccag

SEQ ID NO: 611443 - DNA, 25 bp, Homo sapien
agcgtcccagcgatgaggaacacca

SEQ ID NO: 611444 - DNA, 25 bp, Homo sapien
gcagtcagtatctttcaagcagcgg

SEQ ID NO: 611445 - DNA, 25 bp, Homo sapien
cattgaatggaacacggcctttgac

SEQ ID NO: 611446 - DNA, 25 bp, Homo sapien
caacatggcgcaccggatcaagata

SEQ ID NO: 611447 - DNA, 25 bp, Homo sapien
gactggacctttgactggctcttgc

SEQ ID NO: 611448 - DNA, 25 bp, Homo sapien
gtgtcttcaggggtctcctcgttct

SEQ ID NO: 611449 - DNA, 25 bp, Homo sapien
tgtcttcaggggtctcctcgttctc

SEQ ID NO: 611450 - DNA, 25 bp, Homo sapien
gtcttcaggggtctcctcgttctcc

SEQ ID NO: 611451 - DNA, 25 bp, Homo sapien
agggacttaggaccagatggggcct

SEQ ID NO: 611452 - DNA, 25 bp, Homo sapien
cagctccagccgtgggcatcctgaa

SEQ ID NO: 611453 - DNA, 25 bp, Homo sapien
gggacttaggaccagatggggcctg

SEQ ID NO: 611454 - DNA, 25 bp, Homo sapien
agctccagccgtgggcatcctgaat

SEQ ID NO: 611455 - DNA, 25 bp, Homo sapien
tttgactgtgattctgcattcaatg

SEQ ID NO: 611456 - DNA, 25 bp, Homo sapien
tccacaaaggccaatatctgactaa

SEQ ID NO: 611457 - DNA, 25 bp, Homo sapien
tctaggtttcctagtggttttgtga

SEQ ID NO: 611458 - DNA, 25 bp, Homo sapien
tttgtgaaccagtcagatacttgta

SEQ ID NO: 611459 - DNA, 25 bp, Homo sapien
gagctgagccgaccttgtcatttat

SEQ ID NO: 611460 - DNA, 25 bp, Homo sapien
gagagctgagccgaccttgtcattt

SEQ ID NO: 611461 - DNA, 25 bp, Homo sapien
agctgagccgaccttgtcatttata

SEQ ID NO: 611462 - DNA, 25 bp, Homo sapien
tgagagctgagccgaccttgtcatt

SEQ ID NO: 611463 - DNA, 25 bp, Homo sapien
agctgcttgcttctccaagatgagg

SEQ ID NO: 611464 - DNA, 25 bp, Homo sapien
tccaagatgaggagcagggaaagta

SEQ ID NO: 611465 - DNA, 25 bp, Homo sapien
aagtacaaagatgatgttgggcttc

SEQ ID NO: 611466 - DNA, 25 bp, Homo sapien
tgaggagcagggaaagtacaaagat

SEQ ID NO: 611467 - DNA, 25 bp, Homo sapien
gagaaggattttgtgtcccacgatg

SEQ ID NO: 611468 - DNA, 25 bp, Homo sapien
tttacttagtccatgaacccacagc

SEQ ID NO: 611469 - DNA, 25 bp, Homo sapien
tactaggagctcatcttgggtagaa

SEQ ID NO: 611470 - DNA, 25 bp, Homo sapien
tttgtgcaccagagacggaagtttg

SEQ ID NO: 611471 - DNA, 25 bp, Homo sapien
ctttcggccatgctgttgatcttga

SEQ ID NO: 611472 - DNA, 25 bp, Homo sapien
gctgttgatcttgattgagattttt

SEQ ID NO: 611473 - DNA, 25 bp, Homo sapien
tcggccatgctgttgatcttgattg

SEQ ID NO: 611474 - DNA, 25 bp, Homo sapien
tgctgttgatcttgattgagatttt

SEQ ID NO: 611475 - DNA, 25 bp, Homo sapien
cttgaagattggtatgatattttat

SEQ ID NO: 611476 - DNA, 25 bp, Homo sapien
tttctccatagtggagtcgtctttc

SEQ ID NO: 611477 - DNA, 25 bp, Homo sapien
ctccatagtggagtcgtctttcttc

SEQ ID NO: 611478 - DNA, 25 bp, Homo sapien
cattttctccatagtggagtcgtct

SEQ ID NO: 611479 - DNA, 25 bp, Homo sapien
ttcagtttggctataaatactgctt

SEQ ID NO: 611480 - DNA, 25 bp, Homo sapien
tcagtttggctataaatactgcttt

SEQ ID NO: 611481 - DNA, 25 bp, Homo sapien
ttgctcttgactgggaattgttatc

SEQ ID NO: 611482 - DNA, 25 bp, Homo sapien
gctcttgactgggaattgttatctg

SEQ ID NO: 611483 - DNA, 25 bp, Homo sapien
cttgctcttgactgggaattgttat

SEQ ID NO: 611484 - DNA, 25 bp, Homo sapien
ctcttgactgggaattgttatctgt

SEQ ID NO: 611485 - DNA, 25 bp, Homo sapien
cttgaagattggtatgatattttat

SEQ ID NO: 611486 - DNA, 25 bp, Homo sapien
tttctccatagtggagtcgtctttc

SEQ ID NO: 611487 - DNA, 25 bp, Homo sapien
ctccatagtggagtcgtctttcttc

SEQ ID NO: 611488 - DNA, 25 bp, Homo sapien
cattttctccatagtggagtcgtct

SEQ ID NO: 611489 - DNA, 25 bp, Homo sapien
ctataaatactgcgttgggatacat

SEQ ID NO: 611490 - DNA, 25 bp, Homo sapien
aaatactgcgttgggatacatcttt

SEQ ID NO: 611491 - DNA, 25 bp, Homo sapien
tataaatactgcgttgggatacatc

SEQ ID NO: 611492 - DNA, 25 bp, Homo sapien
cgttgggatacatctttctgcacac

SEQ ID NO: 611493 - DNA, 25 bp, Homo sapien
tcaccatgccatggctcttgcttag

SEQ ID NO: 611494 - DNA, 25 bp, Homo sapien
tgttgtgccaaatgacgatcactgt

SEQ ID NO: 611495 - DNA, 25 bp, Homo sapien
gttcatgactgagtaggtcttgttc

SEQ ID NO: 611496 - DNA, 25 bp, Homo sapien
cggtcgttgttaagatgttgtgcca

SEQ ID NO: 611497 - DNA, 25 bp, Homo sapien
cttgatattggtccatcctttcaca

SEQ ID NO: 611498 - DNA, 25 bp, Homo sapien
ttgatattggtccatcctttcacat

SEQ ID NO: 611499 - DNA, 25 bp, Homo sapien
tgatattggtccatcctttcacatg

SEQ ID NO: 611500 - DNA, 25 bp, Homo sapien
ggtggtgtcatccatggaccaagaa

SEQ ID NO: 611501 - DNA, 25 bp, Homo sapien
gaccaagaatctgaaactacacggg

SEQ ID NO: 611502 - DNA, 25 bp, Homo sapien
caggttaggaaagcctaattcaagg

SEQ ID NO: 611503 - DNA, 25 bp, Homo sapien
tattggaagtttgaaggcgcttcag

SEQ ID NO: 611504 - DNA, 25 bp, Homo sapien
gagcggatctcttcatttatatgtt

SEQ ID NO: 611505 - DNA, 25 bp, Homo sapien
tatgttccttgagtgggtgtgctat

SEQ ID NO: 611506 - DNA, 25 bp, Homo sapien
gtgctatgggtggagctgaaatgtc

SEQ ID NO: 611507 - DNA, 25 bp, Homo sapien
gagaactgagcggatctcttcattt

SEQ ID NO: 611508 - DNA, 25 bp, Homo sapien
ctgcttgcttctccaagataaggag

SEQ ID NO: 611509 - DNA, 25 bp, Homo sapien
gcttgcttctccaagataaggagca

SEQ ID NO: 611510 - DNA, 25 bp, Homo sapien
tgcttgcttctccaagataaggagc

SEQ ID NO: 611511 - DNA, 25 bp, Homo sapien
gaaggattttgtgtcccatgatgag

SEQ ID NO: 611512 - DNA, 25 bp, Homo sapien
tacttagtccatgaacccatagcct

SEQ ID NO: 611513 - DNA, 25 bp, Homo sapien
tcgggtccagtcatgatcattgatg

SEQ ID NO: 611514 - DNA, 25 bp, Homo sapien
ggaagatccgcttggcaattggcct

SEQ ID NO: 611515 - DNA, 25 bp, Homo sapien
agtaaaaatgtctttgggtccatgt

SEQ ID NO: 611516 - DNA, 25 bp, Homo sapien
atgtctttgggtccatgttggagtc

SEQ ID NO: 611517 - DNA, 25 bp, Homo sapien
tctttgggtccatgttggagtctgt

SEQ ID NO: 611518 - DNA, 25 bp, Homo sapien
tagtaaaaatgtctttgggtccatg

SEQ ID NO: 611519 - DNA, 25 bp, Homo sapien
gaagacgggtatgatattttatgtg

SEQ ID NO: 611520 - DNA, 25 bp, Homo sapien
ctgtacgtgaagacgggtatgatat

SEQ ID NO: 611521 - DNA, 25 bp, Homo sapien
tttatgtgccttccggccatgctct

SEQ ID NO: 611522 - DNA, 25 bp, Homo sapien
ttttatgtgccttccggccatgctc

SEQ ID NO: 611523 - DNA, 25 bp, Homo sapien
tgcattttggccagaccattgatct

SEQ ID NO: 611524 - DNA, 25 bp, Homo sapien
tactcttgagcttgactaggaattc

SEQ ID NO: 611525 - DNA, 25 bp, Homo sapien
gcagattgaccagactttccttttg

SEQ ID NO: 611526 - DNA, 25 bp, Homo sapien
caaatgatcatcttgggcaacctca

SEQ ID NO: 611527 - DNA, 25 bp, Homo sapien
agcttttcaagtggttgctaagcaa

SEQ ID NO: 611528 - DNA, 25 bp, Homo sapien
cagcttttcaagtggttgctaagca

SEQ ID NO: 611529 - DNA, 25 bp, Homo sapien
gcttttcaagtggttgctaagcaac

SEQ ID NO: 611530 - DNA, 25 bp, Homo sapien
ccagcttttcaagtggttgctaagc

SEQ ID NO: 611531 - DNA, 25 bp, Homo sapien
gaccaaggatctgggaccacatggg

SEQ ID NO: 611532 - DNA, 25 bp, Homo sapien
aggtggtgtcatccatggaccaagg

SEQ ID NO: 611533 - DNA, 25 bp, Homo sapien
gtgtcatccatggaccaaggatctg

SEQ ID NO: 611534 - DNA, 25 bp, Homo sapien
tccatggaccaaggatctgggacca

SEQ ID NO: 611535 - DNA, 25 bp, Homo sapien
tgatccctttattggaagtttgaag

SEQ ID NO: 611536 - DNA, 25 bp, Homo sapien
atgatccctttattggaagtttgaa

SEQ ID NO: 611537 - DNA, 25 bp, Homo sapien
aatgatccctttattggaagtttga

SEQ ID NO: 611538 - DNA, 25 bp, Homo sapien
tgtgtcaaagtttttcatgggcaga

SEQ ID NO: 611539 - DNA, 25 bp, Homo sapien
taaatgtatgctgtaggagtaggac

SEQ ID NO: 611540 - DNA, 25 bp, Homo sapien
cactcttgctgaagtggtggagact

SEQ ID NO: 611541 - DNA, 25 bp, Homo sapien
cagatgtgggacttaagcttgcagg

SEQ ID NO: 611542 - DNA, 25 bp, Homo sapien
catatttcaacacttacggcaaagc

SEQ ID NO: 611543 - DNA, 25 bp, Homo sapien
tcaattcacttatcttcaacaaggg

SEQ ID NO: 611544 - DNA, 25 bp, Homo sapien
tgtggtactagcataagcatagaca

SEQ ID NO: 611545 - DNA, 25 bp, Homo sapien
gggagtccaaaaatcaaccattaca

SEQ ID NO: 611546 - DNA, 25 bp, Homo sapien
ctgtcgaatttttaggtaataggag

SEQ ID NO: 611547 - DNA, 25 bp, Homo sapien
atactgtcgaatttttaggtaatag

SEQ ID NO: 611548 - DNA, 25 bp, Homo sapien
tatactgtcgaatttttaggtaata

SEQ ID NO: 611549 - DNA, 25 bp, Homo sapien
gaagccgctcagcttcataatgcaa

SEQ ID NO: 611550 - DNA, 25 bp, Homo sapien
gaggatgttcacagagagtagaaag

SEQ ID NO: 611551 - DNA, 25 bp, Homo sapien
agccgctcagcttcataatgcaaga

SEQ ID NO: 611552 - DNA, 25 bp, Homo sapien
cagaggcaaaggaggatgttcacag

SEQ ID NO: 611553 - DNA, 25 bp, Homo sapien
gggcagtcaagatcaaactctgggc

SEQ ID NO: 611554 - DNA, 25 bp, Homo sapien
tgccgacagttgtagtagcaacact

SEQ ID NO: 611555 - DNA, 25 bp, Homo sapien
gggctccatacactgatgccgacag

SEQ ID NO: 611556 - DNA, 25 bp, Homo sapien
cgccagcgcataggtaagagagtga

SEQ ID NO: 611557 - DNA, 25 bp, Homo sapien
tcagaggagacctgtagtgggttgt

SEQ ID NO: 611558 - DNA, 25 bp, Homo sapien
ttctctcttcgaagctcttgcagag

SEQ ID NO: 611559 - DNA, 25 bp, Homo sapien
gtagtgggttgttactctctgtagg

SEQ ID NO: 611560 - DNA, 25 bp, Homo sapien
caggcagggtgttcggatgtctgct

SEQ ID NO: 611561 - DNA, 25 bp, Homo sapien
tgccttagatacaagaaacctgagt

SEQ ID NO: 611562 - DNA, 25 bp, Homo sapien
ccagtgccttagatacaagaaacct

SEQ ID NO: 611563 - DNA, 25 bp, Homo sapien
cttagatacaagaaacctgagtgcc

SEQ ID NO: 611564 - DNA, 25 bp, Homo sapien
agtgccttagatacaagaaacctga

SEQ ID NO: 611565 - DNA, 25 bp, Homo sapien
tgggctttagctctcaacttctctc

SEQ ID NO: 611566 - DNA, 25 bp, Homo sapien
gccttgggctttagctctcaacttc

SEQ ID NO: 611567 - DNA, 25 bp, Homo sapien
ctcacactggttctatttatctttg

SEQ ID NO: 611568 - DNA, 25 bp, Homo sapien
tctctcacactggttctatttatct

SEQ ID NO: 611569 - DNA, 25 bp, Homo sapien
gagaatgtagcttttaacattgtag

SEQ ID NO: 611570 - DNA, 25 bp, Homo sapien
agcttttaacattgtagcctctgca

SEQ ID NO: 611571 - DNA, 25 bp, Homo sapien
tgtagcttttaacattgtagcctct

SEQ ID NO: 611572 - DNA, 25 bp, Homo sapien
gaatgtagcttttaacattgtagcc

SEQ ID NO: 611573 - DNA, 25 bp, Homo sapien
cactcatcacaggtatagaggacac

SEQ ID NO: 611574 - DNA, 25 bp, Homo sapien
tcactcatcacaggtatagaggaca

SEQ ID NO: 611575 - DNA, 25 bp, Homo sapien
ctgggcagatgtgggcttcccacgc

SEQ ID NO: 611576 - DNA, 25 bp, Homo sapien
tgctgggcagatgtgggcttcccac

SEQ ID NO: 611577 - DNA, 25 bp, Homo sapien
ctgctgggcagatgtgggcttccca

SEQ ID NO: 611578 - DNA, 25 bp, Homo sapien
ggcagatgtgggcttcccacgcccc

SEQ ID NO: 611579 - DNA, 25 bp, Homo sapien
cgccgccctctggacgagtccagtg

SEQ ID NO: 611580 - DNA, 25 bp, Homo sapien
cgccctctggacgagtccagtgctg

SEQ ID NO: 611581 - DNA, 25 bp, Homo sapien
tcacccgccgccctctggacgagtc

SEQ ID NO: 611582 - DNA, 25 bp, Homo sapien
cctctggacgagtccagtgctgctg

SEQ ID NO: 611583 - DNA, 25 bp, Homo sapien
catctccgggtaggaaagtatggga

SEQ ID NO: 611584 - DNA, 25 bp, Homo sapien
gcaaggattaactcctcagaggaat

SEQ ID NO: 611585 - DNA, 25 bp, Homo sapien
cagaggaatcccaggttctagtatc

SEQ ID NO: 611586 - DNA, 25 bp, Homo sapien
agtcctgccacgacatcgccatgta

SEQ ID NO: 611587 - DNA, 25 bp, Homo sapien
gagtcaaaggattgggaggcactga

SEQ ID NO: 611588 - DNA, 25 bp, Homo sapien
tcaaaggattgggaggcactgaggg

SEQ ID NO: 611589 - DNA, 25 bp, Homo sapien
ctggtccaagtgcccgggaggctcc

SEQ ID NO: 611590 - DNA, 25 bp, Homo sapien
gcctgtcggcttcgctctgcagctg

SEQ ID NO: 611591 - DNA, 25 bp, Homo sapien
gctgcaaggtgctcaacgaagcctg

SEQ ID NO: 611592 - DNA, 25 bp, Homo sapien
tggtagagatgaagcttccccaccc

SEQ ID NO: 611593 - DNA, 25 bp, Homo sapien
gacacgtggctgtgacacaaaggct

SEQ ID NO: 611594 - DNA, 25 bp, Homo sapien
gcccaaaaccttgtcctcaggatgg

SEQ ID NO: 611595 - DNA, 25 bp, Homo sapien
gcacgcctcccctcagaatggtggt

SEQ ID NO: 611596 - DNA, 25 bp, Homo sapien
tctcatttccgtatgatttctgggc

SEQ ID NO: 611597 - DNA, 25 bp, Homo sapien
ggccaccttggcatgcaggatccgc

SEQ ID NO: 611598 - DNA, 25 bp, Homo sapien
accttggcatgcaggatccgcacag

SEQ ID NO: 611599 - DNA, 25 bp, Homo sapien
gccaggccccgagaggtagacacag

SEQ ID NO: 611600 - DNA, 25 bp, Homo sapien
ccaggccccgagaggtagacacagg

SEQ ID NO: 611601 - DNA, 25 bp, Homo sapien
cagccaggccccgagaggtagacac

SEQ ID NO: 611602 - DNA, 25 bp, Homo sapien
agccaggccccgagaggtagacaca

SEQ ID NO: 611603 - DNA, 25 bp, Homo sapien
caatctcgtggtcctccctacagag

SEQ ID NO: 611604 - DNA, 25 bp, Homo sapien
aggactcgggaggacgcaggtgcca

SEQ ID NO: 611605 - DNA, 25 bp, Homo sapien
aggtgccaggcaagcttagcgctcg

SEQ ID NO: 611606 - DNA, 25 bp, Homo sapien
aaagggacgcgaactggctctgcaa

SEQ ID NO: 611607 - DNA, 25 bp, Homo sapien
ctgcgtctcagtggcgctgccggac

SEQ ID NO: 611608 - DNA, 25 bp, Homo sapien
agtcccatgtaaccgcagaccgtgg

SEQ ID NO: 611609 - DNA, 25 bp, Homo sapien
ggagtccggctgctgctcgaaattc

SEQ ID NO: 611610 - DNA, 25 bp, Homo sapien
ggacgcgctgtccagtcccatgtaa

SEQ ID NO: 611611 - DNA, 25 bp, Homo sapien
tcaggctcggccttaaggcaggacc

SEQ ID NO: 611612 - DNA, 25 bp, Homo sapien
agatatcggacgtccgccccgtcgg

SEQ ID NO: 611613 - DNA, 25 bp, Homo sapien
cacctatctcttggctttcggaggg

SEQ ID NO: 611614 - DNA, 25 bp, Homo sapien
gctcacaggtacagggccatctcat

SEQ ID NO: 611615 - DNA, 25 bp, Homo sapien
gatcggtgtttttcagcgactgctt

SEQ ID NO: 611616 - DNA, 25 bp, Homo sapien
gccgcagcaccagccgaaagtgctt

SEQ ID NO: 611617 - DNA, 25 bp, Homo sapien
tgaccttgataaggcggctgtggaa

SEQ ID NO: 611618 - DNA, 25 bp, Homo sapien
tctgcgagggcttcgagatgacctt

SEQ ID NO: 611619 - DNA, 25 bp, Homo sapien
cgcgccccagtttagccgttctggg

SEQ ID NO: 611620 - DNA, 25 bp, Homo sapien
caactcctgcctagttcaacttttg

SEQ ID NO: 611621 - DNA, 25 bp, Homo sapien
tagtctgtccctagttcaactcctg

SEQ ID NO: 611622 - DNA, 25 bp, Homo sapien
tcccaacctggaatttggtatctgt

SEQ ID NO: 611623 - DNA, 25 bp, Homo sapien
actgtcgtgcactggccacaaaggc

SEQ ID NO: 611624 - DNA, 25 bp, Homo sapien
aggtggagcgtgaaggcagcccact

SEQ ID NO: 611625 - DNA, 25 bp, Homo sapien
agcgcaggcggttgaagagggagac

SEQ ID NO: 611626 - DNA, 25 bp, Homo sapien
gaggtagcgtgtggagaccgtctga

SEQ ID NO: 611627 - DNA, 25 bp, Homo sapien
atgccggtgaccgtgcagacgagct

SEQ ID NO: 611628 - DNA, 25 bp, Homo sapien
gtgaccgtgcagacgagctgcacca

SEQ ID NO: 611629 - DNA, 25 bp, Homo sapien
ccctctcgcggtgggaagtctcctt

SEQ ID NO: 611630 - DNA, 25 bp, Homo sapien
cagggagccatagcgaacgtagccc

SEQ ID NO: 611631 - DNA, 25 bp, Homo sapien
tctgtggcaaggcataagtaggtgc

SEQ ID NO: 611632 - DNA, 25 bp, Homo sapien
caaggagcgcacactgttttgctac

SEQ ID NO: 611633 - DNA, 25 bp, Homo sapien
gctcatccacatcaaggagcgcaca

SEQ ID NO: 611634 - DNA, 25 bp, Homo sapien
tggaatgcacacttgtgcagctggg

SEQ ID NO: 611635 - DNA, 25 bp, Homo sapien
cccggcctgggatagctgatttcta

SEQ ID NO: 611636 - DNA, 25 bp, Homo sapien
taattctatctcgtaacattctatg

SEQ ID NO: 611637 - DNA, 25 bp, Homo sapien
tatctgtgcttcgaatagtctttgc

SEQ ID NO: 611638 - DNA, 25 bp, Homo sapien
gggagtactactgcttaacgataat

SEQ ID NO: 611639 - DNA, 25 bp, Homo sapien
gacgaggccgaagcttctcatggtg

SEQ ID NO: 611640 - DNA, 25 bp, Homo sapien
ctggatactaatcctaggctctggg

SEQ ID NO: 611641 - DNA, 25 bp, Homo sapien
gcgtgggcttctgcgttagaccgaa

SEQ ID NO: 611642 - DNA, 25 bp, Homo sapien
gggttcacttgtcccctcagcttgg

SEQ ID NO: 611643 - DNA, 25 bp, Homo sapien
gaaaattccaccgactcggtgccga

SEQ ID NO: 611644 - DNA, 25 bp, Homo sapien
tcgttaagcagagccctgttcgcct

SEQ ID NO: 611645 - DNA, 25 bp, Homo sapien
gtgccgatgatggtccagcaagagc

SEQ ID NO: 611646 - DNA, 25 bp, Homo sapien
gcaagagctgtcgttaagcagagcc

SEQ ID NO: 611647 - DNA, 25 bp, Homo sapien
gtgaccggctccagggtacacgcca

SEQ ID NO: 611648 - DNA, 25 bp, Homo sapien
ctccagggtacacgccaggctggtg

SEQ ID NO: 611649 - DNA, 25 bp, Homo sapien
agaggcaccggagtgaccggctcca

SEQ ID NO: 611650 - DNA, 25 bp, Homo sapien
agggtgctgatgagaggcaccggag

SEQ ID NO: 611651 - DNA, 25 bp, Homo sapien
cgtggaagttctctccgtggagctc

SEQ ID NO: 611652 - DNA, 25 bp, Homo sapien
acaccttgagccccgcgtggaagtt

SEQ ID NO: 611653 - DNA, 25 bp, Homo sapien
cttgagccccgcgtggaagttctct

SEQ ID NO: 611654 - DNA, 25 bp, Homo sapien
gcgtggccacgtcgcccccgccgct

SEQ ID NO: 611655 - DNA, 25 bp, Homo sapien
gagggctgcggcgactccgacgacg

SEQ ID NO: 611656 - DNA, 25 bp, Homo sapien
ggctgcggcgactccgacgacgcgt

SEQ ID NO: 611657 - DNA, 25 bp, Homo sapien
gggtgagggctgcggcgactccgac

SEQ ID NO: 611658 - DNA, 25 bp, Homo sapien
tgcggcgactccgacgacgcgtgca

SEQ ID NO: 611659 - DNA, 25 bp, Homo sapien
cagtcgctgcagaaggccgccacgt

SEQ ID NO: 611660 - DNA, 25 bp, Homo sapien
acgtccggcaccacgcacaccaggg

SEQ ID NO: 611661 - DNA, 25 bp, Homo sapien
gcagccagcgccagtcgctgcagaa

SEQ ID NO: 611662 - DNA, 25 bp, Homo sapien
cgcgcaccaggctcatggggattgt

SEQ ID NO: 611663 - DNA, 25 bp, Homo sapien
aagttggtgcgcgtgaactcctgat

SEQ ID NO: 611664 - DNA, 25 bp, Homo sapien
gggtgacccggccgcacgctgtatt

SEQ ID NO: 611665 - DNA, 25 bp, Homo sapien
gcgcgtcggcgtcggtggcgggctc

SEQ ID NO: 611666 - DNA, 25 bp, Homo sapien
atgctctccaggagcgcgtcggcgt

SEQ ID NO: 611667 - DNA, 25 bp, Homo sapien
gatagggacacgcacataggtctgt

SEQ ID NO: 611668 - DNA, 25 bp, Homo sapien
cagatgcctggagggtaaatgtccc

SEQ ID NO: 611669 - DNA, 25 bp, Homo sapien
tgggaccgaattccccaggtgagac

SEQ ID NO: 611670 - DNA, 25 bp, Homo sapien
gtgagacttagagagacccggtgct

SEQ ID NO: 611671 - DNA, 25 bp, Homo sapien
aacgtccaaaaggtaggctctctgc

SEQ ID NO: 611672 - DNA, 25 bp, Homo sapien
agagatagctagtagggtaacaacc

SEQ ID NO: 611673 - DNA, 25 bp, Homo sapien
atagctagtagggtaacaaccccag

SEQ ID NO: 611674 - DNA, 25 bp, Homo sapien
aaacgtccaaaaggtaggctctctg

SEQ ID NO: 611675 - DNA, 25 bp, Homo sapien
tcttccttaggagggcaagctcttc

SEQ ID NO: 611676 - DNA, 25 bp, Homo sapien
catgtggtgcgctatgacactcttc

SEQ ID NO: 611677 - DNA, 25 bp, Homo sapien
gagtcaggcgctcatttcagggaca

SEQ ID NO: 611678 - DNA, 25 bp, Homo sapien
tcaatcccaggagttctgcccaggg

SEQ ID NO: 611679 - DNA, 25 bp, Homo sapien
cctttcatgtgtgaggcgaatgtga

SEQ ID NO: 611680 - DNA, 25 bp, Homo sapien
tgataaccactacattacagaagcc

SEQ ID NO: 611681 - DNA, 25 bp, Homo sapien
tggtgacctttcatgtgtgaggcga

SEQ ID NO: 611682 - DNA, 25 bp, Homo sapien
tttggcccggtctcaaactggtgac

SEQ ID NO: 611683 - DNA, 25 bp, Homo sapien
taaactggcttaacgagtcacagcc

SEQ ID NO: 611684 - DNA, 25 bp, Homo sapien
cagcgagagcatgtccatctgttgg

SEQ ID NO: 611685 - DNA, 25 bp, Homo sapien
tttatagctttagatagggcctccc

SEQ ID NO: 611686 - DNA, 25 bp, Homo sapien
tcatggctactgtactgacagcgag

SEQ ID NO: 611687 - DNA, 25 bp, Homo sapien
ttaagaatctaggtccgccctcaag

SEQ ID NO: 611688 - DNA, 25 bp, Homo sapien
aatgggtacttgtgatcacactacg

SEQ ID NO: 611689 - DNA, 25 bp, Homo sapien
tggattcaacttggcctttctgaag

SEQ ID NO: 611690 - DNA, 25 bp, Homo sapien
ctgggattggatcacttcttaaact

SEQ ID NO: 611691 - DNA, 25 bp, Homo sapien
tctgaagtggaaagacgggaagtaa

SEQ ID NO: 611692 - DNA, 25 bp, Homo sapien
caacttcattgatcctaggttcccc

SEQ ID NO: 611693 - DNA, 25 bp, Homo sapien
gacgaaaacccatcaacttcattga

SEQ ID NO: 611694 - DNA, 25 bp, Homo sapien
tattcctactccagcagacgaaaac

SEQ ID NO: 611695 - DNA, 25 bp, Homo sapien
aggcaaagctccagcgaccacggcg

SEQ ID NO: 611696 - DNA, 25 bp, Homo sapien
cgctgccggcctagagaggcaaagc

SEQ ID NO: 611697 - DNA, 25 bp, Homo sapien
ggcgctgccggcctagagaggcaaa

SEQ ID NO: 611698 - DNA, 25 bp, Homo sapien
tagagaggcaaagctccagcgacca

SEQ ID NO: 611699 - DNA, 25 bp, Homo sapien
cgatcgaagtgtctgagcgtggccc

SEQ ID NO: 611700 - DNA, 25 bp, Homo sapien
agtgtctgagcgtggcccggcctca

SEQ ID NO: 611701 - DNA, 25 bp, Homo sapien
cagtgacagactcgacgatcgaagt

SEQ ID NO: 611702 - DNA, 25 bp, Homo sapien
gactcgacgatcgaagtgtctgagc

SEQ ID NO: 611703 - DNA, 25 bp, Homo sapien
ggggtgagcccattccaagagtcag

SEQ ID NO: 611704 - DNA, 25 bp, Homo sapien
accaaggggtgagcccattccaaga

SEQ ID NO: 611705 - DNA, 25 bp, Homo sapien
agcccattccaagagtcagggggaa

SEQ ID NO: 611706 - DNA, 25 bp, Homo sapien
tggaaccaaggggtgagcccattcc

SEQ ID NO: 611707 - DNA, 25 bp, Homo sapien
ctcagccagcggcctgtctccatgg

SEQ ID NO: 611708 - DNA, 25 bp, Homo sapien
ccatggcaacgtcgccccgcccggg

SEQ ID NO: 611709 - DNA, 25 bp, Homo sapien
gtctccatggcaacgtcgccccgcc

SEQ ID NO: 611710 - DNA, 25 bp, Homo sapien
agggacacgagccgggcctcagcca

SEQ ID NO: 611711 - DNA, 25 bp, Homo sapien
gcgggtcccacacgtagctgcggaa

SEQ ID NO: 611712 - DNA, 25 bp, Homo sapien
ctgcgacaggatcagcagcgggtcc

SEQ ID NO: 611713 - DNA, 25 bp, Homo sapien
agcgggtcccacacgtagctgcgga

SEQ ID NO: 611714 - DNA, 25 bp, Homo sapien
cgacaggatcagcagcgggtcccac

SEQ ID NO: 611715 - DNA, 25 bp, Homo sapien
gggctgcttcgcactagcccgtcca

SEQ ID NO: 611716 - DNA, 25 bp, Homo sapien
gcccagcgagccgtaatacacggtc

SEQ ID NO: 611717 - DNA, 25 bp, Homo sapien
gaggggctgcttcgcactagcccgt

SEQ ID NO: 611718 - DNA, 25 bp, Homo sapien
gcgagccgtaatacacggtctgcat

SEQ ID NO: 611719 - DNA, 25 bp, Homo sapien
ctcggcgtcgaacatctggtccagc

SEQ ID NO: 611720 - DNA, 25 bp, Homo sapien
ctggaggggtggaaaagcccaggat

SEQ ID NO: 611721 - DNA, 25 bp, Homo sapien
gggcgttgaggatgaaggacatcat

SEQ ID NO: 611722 - DNA, 25 bp, Homo sapien
atgaaggacatcatggagagccggc

SEQ ID NO: 611723 - DNA, 25 bp, Homo sapien
agggcgttgaggatgaaggacatca

SEQ ID NO: 611724 - DNA, 25 bp, Homo sapien
gggagaggacagcagtgagttgtca

SEQ ID NO: 611725 - DNA, 25 bp, Homo sapien
agaggacagcagtgagttgtcactg

SEQ ID NO: 611726 - DNA, 25 bp, Homo sapien
agcagtgagttgtcactgggttgtc

SEQ ID NO: 611727 - DNA, 25 bp, Homo sapien
acagcagtgagttgtcactgggttg

SEQ ID NO: 611728 - DNA, 25 bp, Homo sapien
agctccgtccgcatgcacaggtact

SEQ ID NO: 611729 - DNA, 25 bp, Homo sapien
gtgcaatgcacacggcttggaccag

SEQ ID NO: 611730 - DNA, 25 bp, Homo sapien
cgatgacagccatgagtgcaatgca

SEQ ID NO: 611731 - DNA, 25 bp, Homo sapien
tcgccggatgaagtacagcaagccc

SEQ ID NO: 611732 - DNA, 25 bp, Homo sapien
tgcaaaggtaacagctgtcccaggg

SEQ ID NO: 611733 - DNA, 25 bp, Homo sapien
tacacaggaaggatagctgcaagcc

SEQ ID NO: 611734 - DNA, 25 bp, Homo sapien
caaggcttcaacagacagaggtcat

SEQ ID NO: 611735 - DNA, 25 bp, Homo sapien
aagaggcgctccaaccacagatgga

SEQ ID NO: 611736 - DNA, 25 bp, Homo sapien
aaaatgacaaacatgtcactgccat

SEQ ID NO: 611737 - DNA, 25 bp, Homo sapien
atgacaaacatgtcactgccattgc

SEQ ID NO: 611738 - DNA, 25 bp, Homo sapien
aaacatgtcactgccattgccctgc

SEQ ID NO: 611739 - DNA, 25 bp, Homo sapien
cactcaatagatgttatttattatt

SEQ ID NO: 611740 - DNA, 25 bp, Homo sapien
gactccaggactttgcactccactg

SEQ ID NO: 611741 - DNA, 25 bp, Homo sapien
tgtttgagctgtgtaccctccagga

SEQ ID NO: 611742 - DNA, 25 bp, Homo sapien
cacagctagtaatgggactccagga

SEQ ID NO: 611743 - DNA, 25 bp, Homo sapien
aattggacctatgactgtgacttgc

SEQ ID NO: 611744 - DNA, 25 bp, Homo sapien
tggtgccttgcgcttgtagtatcag

SEQ ID NO: 611745 - DNA, 25 bp, Homo sapien
cagatgtggtgccttgcgcttgtag

SEQ ID NO: 611746 - DNA, 25 bp, Homo sapien
gccttgcgcttgtagtatcagctac

SEQ ID NO: 611747 - DNA, 25 bp, Homo sapien
gatgtggtgccttgcgcttgtagta

SEQ ID NO: 611748 - DNA, 25 bp, Homo sapien
caaggagaaaacgtcattggcggca

SEQ ID NO: 611749 - DNA, 25 bp, Homo sapien
taagggtcccgagtctggcatagag

SEQ ID NO: 611750 - DNA, 25 bp, Homo sapien
tctagtcgcaggcaatcaggaaaca

SEQ ID NO: 611751 - DNA, 25 bp, Homo sapien
tagcaactgtctcgggaaccagggc

SEQ ID NO: 611752 - DNA, 25 bp, Homo sapien
taattgagcggaaccgtctgagaac

SEQ ID NO: 611753 - DNA, 25 bp, Homo sapien
gggaagctcatatactcatgcagta

SEQ ID NO: 611754 - DNA, 25 bp, Homo sapien
gtctgagaacggtgagacgccctgt

SEQ ID NO: 611755 - DNA, 25 bp, Homo sapien
caagatgagaaactgcgggacgaga

SEQ ID NO: 611756 - DNA, 25 bp, Homo sapien
tagctgggctagatctagtgtggcc

SEQ ID NO: 611757 - DNA, 25 bp, Homo sapien
tcatgggttgactatcagaccttgg

SEQ ID NO: 611758 - DNA, 25 bp, Homo sapien
gcaggcgcccagtcaaaacaggcga

SEQ ID NO: 611759 - DNA, 25 bp, Homo sapien
ggtttccagcccactatgatctagc

SEQ ID NO: 611760 - DNA, 25 bp, Homo sapien
tgcctggctatttttggtactttta

SEQ ID NO: 611761 - DNA, 25 bp, Homo sapien
gaagctgttaaagaagcctcggccc

SEQ ID NO: 611762 - DNA, 25 bp, Homo sapien
tgtaacagtactctaatatgcagga

SEQ ID NO: 611763 - DNA, 25 bp, Homo sapien
ccttagataaggtgcagtgagggta

SEQ ID NO: 611764 - DNA, 25 bp, Homo sapien
tactgggtaaagtactgctgtaaca

SEQ ID NO: 611765 - DNA, 25 bp, Homo sapien
gtatctttatagctgcacctcattc

SEQ ID NO: 611766 - DNA, 25 bp, Homo sapien
cacctcattctaccaataccagttt

SEQ ID NO: 611767 - DNA, 25 bp, Homo sapien
aggtatctttatagctgcacctcat

SEQ ID NO: 611768 - DNA, 25 bp, Homo sapien
gcacctcattctaccaataccagtt

SEQ ID NO: 611769 - DNA, 25 bp, Homo sapien
ggaaatgctcagtaatcgttagctg

SEQ ID NO: 611770 - DNA, 25 bp, Homo sapien
tggaaactagtttgtgggaggcaac

SEQ ID NO: 611771 - DNA, 25 bp, Homo sapien
aatggttagttacaggacttgggca

SEQ ID NO: 611772 - DNA, 25 bp, Homo sapien
taaacctattgattcctctagccag

SEQ ID NO: 611773 - DNA, 25 bp, Homo sapien
agggcaggtgcaaggcggcggagga

SEQ ID NO: 611774 - DNA, 25 bp, Homo sapien
agagagagttgggacccgcaggagg

SEQ ID NO: 611775 - DNA, 25 bp, Homo sapien
tccagaggacgcacgatgggaaaga

SEQ ID NO: 611776 - DNA, 25 bp, Homo sapien
cggctgcccctgattcctggctctg

SEQ ID NO: 611777 - DNA, 25 bp, Homo sapien
gcctccggcacccttggccacactc

SEQ ID NO: 611778 - DNA, 25 bp, Homo sapien
ggcacccttggccacactcgccaca

SEQ ID NO: 611779 - DNA, 25 bp, Homo sapien
gcacccttggccacactcgccacac

SEQ ID NO: 611780 - DNA, 25 bp, Homo sapien
tccggcacccttggccacactcgcc

SEQ ID NO: 611781 - DNA, 25 bp, Homo sapien
ttgggcagcgcccacgcaacgacta

SEQ ID NO: 611782 - DNA, 25 bp, Homo sapien
tgctctgcgccttttgggcagcgcc

SEQ ID NO: 611783 - DNA, 25 bp, Homo sapien
gctcgctcggatgcacttgctgcgc

SEQ ID NO: 611784 - DNA, 25 bp, Homo sapien
cggttctgcccacgcacacttgatg

SEQ ID NO: 611785 - DNA, 25 bp, Homo sapien
ggcggtcggaggcagcccctgcgag

SEQ ID NO: 611786 - DNA, 25 bp, Homo sapien
gtggcgggctcactcgctcgcagct

SEQ ID NO: 611787 - DNA, 25 bp, Homo sapien
tgggagccgggaacgaggaagaggc

SEQ ID NO: 611788 - DNA, 25 bp, Homo sapien
tactggtacttccaaggcggtcaaa

SEQ ID NO: 611789 - DNA, 25 bp, Homo sapien
gggcgtgggagcgagccgcgccggc

SEQ ID NO: 611790 - DNA, 25 bp, Homo sapien
tccgtccgctccagcgaggccgcgg

SEQ ID NO: 611791 - DNA, 25 bp, Homo sapien
cccctctgactcagtccgtccgctc

SEQ ID NO: 611792 - DNA, 25 bp, Homo sapien
tgactcagtccgtccgctccagcga

SEQ ID NO: 611793 - DNA, 25 bp, Homo sapien
agggagttgtttacgcgacctatag

SEQ ID NO: 611794 - DNA, 25 bp, Homo sapien
ttgtttacgcgacctataggtactg

SEQ ID NO: 611795 - DNA, 25 bp, Homo sapien
cgcgacctataggtactggaaaggg

SEQ ID NO: 611796 - DNA, 25 bp, Homo sapien
tttacgcgacctataggtactggaa

SEQ ID NO: 611797 - DNA, 25 bp, Homo sapien
gcccaggtcggtgcattcattccca

SEQ ID NO: 611798 - DNA, 25 bp, Homo sapien
caagaccctgcttgtgaaggtgagc

SEQ ID NO: 611799 - DNA, 25 bp, Homo sapien
gattcccgggaaaggctcttagagc

SEQ ID NO: 611800 - DNA, 25 bp, Homo sapien
tctgagcccatcaccagaggcaagg

SEQ ID NO: 611801 - DNA, 25 bp, Homo sapien
gcttgcctcagaaggccagggacag

SEQ ID NO: 611802 - DNA, 25 bp, Homo sapien
gttggagggattggttcagcacaaa

SEQ ID NO: 611803 - DNA, 25 bp, Homo sapien
taattggccccgcttgcctcagaag

SEQ ID NO: 611804 - DNA, 25 bp, Homo sapien
gcacaaatggaggaggtacgttttc

SEQ ID NO: 611805 - DNA, 25 bp, Homo sapien
tccaggcaccacaagagagatactc

SEQ ID NO: 611806 - DNA, 25 bp, Homo sapien
caagagagatactctgtattcaggg

SEQ ID NO: 611807 - DNA, 25 bp, Homo sapien
gggcttgccctaagctccacaaagg

SEQ ID NO: 611808 - DNA, 25 bp, Homo sapien
ggcttgccctaagctccacaaaggg

SEQ ID NO: 611809 - DNA, 25 bp, Homo sapien
tctgcccttggtgacctctttcccc

SEQ ID NO: 611810 - DNA, 25 bp, Homo sapien
ctctgcccttggtgacctctttccc

SEQ ID NO: 611811 - DNA, 25 bp, Homo sapien
ctgcccttggtgacctctttcccct

SEQ ID NO: 611812 - DNA, 25 bp, Homo sapien
tggtgacctctttccccttccctga

SEQ ID NO: 611813 - DNA, 25 bp, Homo sapien
cagctgcaaagtcgaaagagaagac

SEQ ID NO: 611814 - DNA, 25 bp, Homo sapien
ggagcaaaacaagtacagctgcaaa

SEQ ID NO: 611815 - DNA, 25 bp, Homo sapien
ctgcgggtagaggagcaaaacaagt

SEQ ID NO: 611816 - DNA, 25 bp, Homo sapien
agcatcccaacagtggggcccctgg

SEQ ID NO: 611817 - DNA, 25 bp, Homo sapien
tggctgtaaaatgtcctcgaagaat

SEQ ID NO: 611818 - DNA, 25 bp, Homo sapien
gtctctgcgactcgagatgcagatg

SEQ ID NO: 611819 - DNA, 25 bp, Homo sapien
tgcgactcgagatgcagatgggaca

SEQ ID NO: 611820 - DNA, 25 bp, Homo sapien
tttgccgctcccgaaggcggagctg

SEQ ID NO: 611821 - DNA, 25 bp, Homo sapien
cccaaggtcaataagttctacttgc

SEQ ID NO: 611822 - DNA, 25 bp, Homo sapien
aggtcaataagttctacttgctcca

SEQ ID NO: 611823 - DNA, 25 bp, Homo sapien
ggatcttcgcaaggcaagaacacat

SEQ ID NO: 611824 - DNA, 25 bp, Homo sapien
ggaggatcttcgcaaggcaagaaca

SEQ ID NO: 611825 - DNA, 25 bp, Homo sapien
agcctgacatccggctctggctgac

SEQ ID NO: 611826 - DNA, 25 bp, Homo sapien
cagagcctgacatccggctctggct

SEQ ID NO: 611827 - DNA, 25 bp, Homo sapien
tcagagcctgacatccggctctggc

SEQ ID NO: 611828 - DNA, 25 bp, Homo sapien
agagcctgacatccggctctggctg

SEQ ID NO: 611829 - DNA, 25 bp, Homo sapien
ttccccagcccagccttgtagcctc

SEQ ID NO: 611830 - DNA, 25 bp, Homo sapien
cttccccagcccagccttgtagcct

SEQ ID NO: 611831 - DNA, 25 bp, Homo sapien
cccagcccagccttgtagcctcgtt

SEQ ID NO: 611832 - DNA, 25 bp, Homo sapien
ttgtgtacttccccagcccagcctt

SEQ ID NO: 611833 - DNA, 25 bp, Homo sapien
tctggccaggagtaactaaagtcca

SEQ ID NO: 611834 - DNA, 25 bp, Homo sapien
caccatgtctgggatctacagtcag

SEQ ID NO: 611835 - DNA, 25 bp, Homo sapien
gctggtcaggccacaaacagggctt

SEQ ID NO: 611836 - DNA, 25 bp, Homo sapien
gattatatcacctaccctgacagga

SEQ ID NO: 611837 - DNA, 25 bp, Homo sapien
gatgtggtcctgtctgatgtaggca

SEQ ID NO: 611838 - DNA, 25 bp, Homo sapien
tgtaggcaccggcaggctcagctcc

SEQ ID NO: 611839 - DNA, 25 bp, Homo sapien
aggaggtcctagatgtggtcctgtc

SEQ ID NO: 611840 - DNA, 25 bp, Homo sapien
tatgcaggttggtggaggagtcgga

SEQ ID NO: 611841 - DNA, 25 bp, Homo sapien
cgactgtgccaagggcgtatctgct

SEQ ID NO: 611842 - DNA, 25 bp, Homo sapien
tccgactgtgccaagggcgtatctg

SEQ ID NO: 611843 - DNA, 25 bp, Homo sapien
actgtgccaagggcgtatctgctcc

SEQ ID NO: 611844 - DNA, 25 bp, Homo sapien
tgtgccaagggcgtatctgctccat

SEQ ID NO: 611845 - DNA, 25 bp, Homo sapien
gaatagccagcgtggtcagtctgta

SEQ ID NO: 611846 - DNA, 25 bp, Homo sapien
agagtctggtcttctcccgacaggc

SEQ ID NO: 611847 - DNA, 25 bp, Homo sapien
caggagtaagccaaaaactggtggg

SEQ ID NO: 611848 - DNA, 25 bp, Homo sapien
tgcctactgcaagtaaagagtctgg

SEQ ID NO: 611849 - DNA, 25 bp, Homo sapien
gtctacaggcttcatgtacttctgc

SEQ ID NO: 611850 - DNA, 25 bp, Homo sapien
tcctcctctagtggtctacaggctt

SEQ ID NO: 611851 - DNA, 25 bp, Homo sapien
ctagtggtctacaggcttcatgtac

SEQ ID NO: 611852 - DNA, 25 bp, Homo sapien
cttctcctcctctagtggtctacag

SEQ ID NO: 611853 - DNA, 25 bp, Homo sapien
ggcgctcggccccatgaaaagccgg

SEQ ID NO: 611854 - DNA, 25 bp, Homo sapien
cgctcggccccatgaaaagccggta

SEQ ID NO: 611855 - DNA, 25 bp, Homo sapien
ttccgcctacccagcggcgctcggc

SEQ ID NO: 611856 - DNA, 25 bp, Homo sapien
gcctgcggctacttccgcctaccca

SEQ ID NO: 611857 - DNA, 25 bp, Homo sapien
agcaacaggacgagcagagcaagcg

SEQ ID NO: 611858 - DNA, 25 bp, Homo sapien
acaggacgagcagagcaagcggcat

SEQ ID NO: 611859 - DNA, 25 bp, Homo sapien
ccaggagcaacaggacgagcagagc

SEQ ID NO: 611860 - DNA, 25 bp, Homo sapien
aggagcaacaggacgagcagagcaa

SEQ ID NO: 611861 - DNA, 25 bp, Homo sapien
gaactggaatgtggcggctacgtcc

SEQ ID NO: 611862 - DNA, 25 bp, Homo sapien
aatcccagcgcgtgcggaactggaa

SEQ ID NO: 611863 - DNA, 25 bp, Homo sapien
gctgaagctccgaatcccagcgcgt

SEQ ID NO: 611864 - DNA, 25 bp, Homo sapien
aatgtggcggctacgtccccggaag

SEQ ID NO: 611865 - DNA, 25 bp, Homo sapien
cagcaggcactacggaaatctttcc

SEQ ID NO: 611866 - DNA, 25 bp, Homo sapien
gatcccgaactctacccaggaatta

SEQ ID NO: 611867 - DNA, 25 bp, Homo sapien
ggagcaggtgagtgacgatccccac

SEQ ID NO: 611868 - DNA, 25 bp, Homo sapien
atctttccctggtcagatctcgcgc

SEQ ID NO: 611869 - DNA, 25 bp, Homo sapien
tgtgtgaatgacaggtgcagctccc

SEQ ID NO: 611870 - DNA, 25 bp, Homo sapien
tcgggtcctccaaaagccttgtgtg

SEQ ID NO: 611871 - DNA, 25 bp, Homo sapien
gcagctcccgtagagaatacttgga

SEQ ID NO: 611872 - DNA, 25 bp, Homo sapien
ttgggaaagagcctgtaatgggaca

SEQ ID NO: 611873 - DNA, 25 bp, Homo sapien
tggaaccagacccacagctctgcac

SEQ ID NO: 611874 - DNA, 25 bp, Homo sapien
cagtgacagtgtcttggaaccagac

SEQ ID NO: 611875 - DNA, 25 bp, Homo sapien
tcttggaaccagacccacagctctg

SEQ ID NO: 611876 - DNA, 25 bp, Homo sapien
tcagtgacagtgtcttggaaccaga

SEQ ID NO: 611877 - DNA, 25 bp, Homo sapien
gaatcgctgcctactggaagtgctg

SEQ ID NO: 611878 - DNA, 25 bp, Homo sapien
gtggcaggatgacaacactctccca

SEQ ID NO: 611879 - DNA, 25 bp, Homo sapien
tggcctgcaacagggcccaaggtgt

SEQ ID NO: 611880 - DNA, 25 bp, Homo sapien
ccagggatatgcatgtgctacctca

SEQ ID NO: 611881 - DNA, 25 bp, Homo sapien
catgatccggctccagtgcttacct

SEQ ID NO: 611882 - DNA, 25 bp, Homo sapien
gcagtcacggttctgaccatccaag

SEQ ID NO: 611883 - DNA, 25 bp, Homo sapien
tattcttaactattagacgggccag

SEQ ID NO: 611884 - DNA, 25 bp, Homo sapien
gaaagcgcctcatgtatcagagctg

SEQ ID NO: 611885 - DNA, 25 bp, Homo sapien
caaagtccacagctggctgctaaac

SEQ ID NO: 611886 - DNA, 25 bp, Homo sapien
tctgctccctctttcaaagtccaca

SEQ ID NO: 611887 - DNA, 25 bp, Homo sapien
gctccctctttcaaagtccacagct

SEQ ID NO: 611888 - DNA, 25 bp, Homo sapien
tgtcctggggctacctctgctccct

SEQ ID NO: 611889 - DNA, 25 bp, Homo sapien
tggatagagacacaaatccactcac

SEQ ID NO: 611890 - DNA, 25 bp, Homo sapien
ctggatagagacacaaatccactca

SEQ ID NO: 611891 - DNA, 25 bp, Homo sapien
gaggacattactgagctccttccaa

SEQ ID NO: 611892 - DNA, 25 bp, Homo sapien
gacattactgagctccttccaagat

SEQ ID NO: 611893 - DNA, 25 bp, Homo sapien
gaagatccctgagaggacattactg

SEQ ID NO: 611894 - DNA, 25 bp, Homo sapien
cctgagaggacattactgagctcct

SEQ ID NO: 611895 - DNA, 25 bp, Homo sapien
cacacaggggacttaggatctagcc

SEQ ID NO: 611896 - DNA, 25 bp, Homo sapien
acagtcccaactgggagtaggactc

SEQ ID NO: 611897 - DNA, 25 bp, Homo sapien
tggcacagtattgggggcctgcaca

SEQ ID NO: 611898 - DNA, 25 bp, Homo sapien
gctctgacccctcgggatccacatt

SEQ ID NO: 611899 - DNA, 25 bp, Homo sapien
gtgaggttttcggtgcagaccacct

SEQ ID NO: 611900 - DNA, 25 bp, Homo sapien
tagcgcagaaagtagtggtcagtgt

SEQ ID NO: 611901 - DNA, 25 bp, Homo sapien
cacagcatagcgcagaaagtagtgg

SEQ ID NO: 611902 - DNA, 25 bp, Homo sapien
gaactacagggcaagagcttcttcc

SEQ ID NO: 611903 - DNA, 25 bp, Homo sapien
gagatggaaagagataagagaagcc

SEQ ID NO: 611904 - DNA, 25 bp, Homo sapien
gaggagatggaaagagataagagaa

SEQ ID NO: 611905 - DNA, 25 bp, Homo sapien
ctggaggagatggaaagagataaga

SEQ ID NO: 611906 - DNA, 25 bp, Homo sapien
ggagatggaaagagataagagaagc

SEQ ID NO: 611907 - DNA, 25 bp, Homo sapien
gatatgcactgcctgggagtggtag

SEQ ID NO: 611908 - DNA, 25 bp, Homo sapien
agctggtgtggaacaagcgatctgc

SEQ ID NO: 611909 - DNA, 25 bp, Homo sapien
gcaaacagggcggatatgcactgcc

SEQ ID NO: 611910 - DNA, 25 bp, Homo sapien
agcgatctgccttcagcagcacaga

SEQ ID NO: 611911 - DNA, 25 bp, Homo sapien
ccaggagatgctagtacagcgtgca

SEQ ID NO: 611912 - DNA, 25 bp, Homo sapien
gcatcaaatacaactgacagggtct

SEQ ID NO: 611913 - DNA, 25 bp, Homo sapien
tttccctgccccgtgatgaaggcat

SEQ ID NO: 611914 - DNA, 25 bp, Homo sapien
aactgacagggtctgcctcagctcc

SEQ ID NO: 611915 - DNA, 25 bp, Homo sapien
gtgagggttcgggagaacatccgga

SEQ ID NO: 611916 - DNA, 25 bp, Homo sapien
tgagggttcgggagaacatccggaa

SEQ ID NO: 611917 - DNA, 25 bp, Homo sapien
ggctccgtgagggttcgggagaaca

SEQ ID NO: 611918 - DNA, 25 bp, Homo sapien
tccgtgagggttcgggagaacatcc

SEQ ID NO: 611919 - DNA, 25 bp, Homo sapien
gggtgcacctctaatgtctcgttgt

SEQ ID NO: 611920 - DNA, 25 bp, Homo sapien
taggtcttccgagtgcctaggatga

SEQ ID NO: 611921 - DNA, 25 bp, Homo sapien
cggtgtcaagcaagtcatagatggc

SEQ ID NO: 611922 - DNA, 25 bp, Homo sapien
gatgacgtcctgatatgtagtggtc

SEQ ID NO: 611923 - DNA, 25 bp, Homo sapien
atagccactcacgtaccgctgggca

SEQ ID NO: 611924 - DNA, 25 bp, Homo sapien
atggtgagggtgtgcacatacagcc

SEQ ID NO: 611925 - DNA, 25 bp, Homo sapien
agataccagggtacggtgtccagca

SEQ ID NO: 611926 - DNA, 25 bp, Homo sapien
cccggtatgggtgggtgttgtacag

SEQ ID NO: 611927 - DNA, 25 bp, Homo sapien
gaggctcccgttccagttttgagaa

SEQ ID NO: 611928 - DNA, 25 bp, Homo sapien
caagtgctttagtgctatgcctggc

SEQ ID NO: 611929 - DNA, 25 bp, Homo sapien
tatgcctggcacctaataggaagca

SEQ ID NO: 611930 - DNA, 25 bp, Homo sapien
tacttctgaacctggcacagtgagg

SEQ ID NO: 611931 - DNA, 25 bp, Homo sapien
tgcttgccatggagcctcaatctgg

SEQ ID NO: 611932 - DNA, 25 bp, Homo sapien
catgggcactgctacagatgaagag

SEQ ID NO: 611933 - DNA, 25 bp, Homo sapien
tcccaggatgcgatcaagagaggtt

SEQ ID NO: 611934 - DNA, 25 bp, Homo sapien
cctgatgtgacgcaagaagaagttc

SEQ ID NO: 611935 - DNA, 25 bp, Homo sapien
cagcgcccgctcaaactggatggaa

SEQ ID NO: 611936 - DNA, 25 bp, Homo sapien
catagaagccatggttaggatctgg

SEQ ID NO: 611937 - DNA, 25 bp, Homo sapien
taggatctggcgtgtactcggtcca

SEQ ID NO: 611938 - DNA, 25 bp, Homo sapien
agttggccggcagctgaatcagcat

SEQ ID NO: 611939 - DNA, 25 bp, Homo sapien
actggcttggctgctaccatgctgg

SEQ ID NO: 611940 - DNA, 25 bp, Homo sapien
tattaggattgaattaaatctacac

SEQ ID NO: 611941 - DNA, 25 bp, Homo sapien
ggagcctggtcacctgtgttaaggc

SEQ ID NO: 611942 - DNA, 25 bp, Homo sapien
taaatctacacatctctttggaaga

SEQ ID NO: 611943 - DNA, 25 bp, Homo sapien
gcaggcagctgaggatgtgttatca

SEQ ID NO: 611944 - DNA, 25 bp, Homo sapien
caccacagtgcacgtgaggcagatc

SEQ ID NO: 611945 - DNA, 25 bp, Homo sapien
gataaggttggccagccgcttggcc

SEQ ID NO: 611946 - DNA, 25 bp, Homo sapien
gaagtccggtgtcggcaggttcacc

SEQ ID NO: 611947 - DNA, 25 bp, Homo sapien
cacgttgtagggcatgctgaagtcc

SEQ ID NO: 611948 - DNA, 25 bp, Homo sapien
tgctgccagccgacctttctgtggt

SEQ ID NO: 611949 - DNA, 25 bp, Homo sapien
ggctcgtggctcctgtactggacaa

SEQ ID NO: 611950 - DNA, 25 bp, Homo sapien
tcaatatagaggtggccactacagg

SEQ ID NO: 611951 - DNA, 25 bp, Homo sapien
ccagggcactttggttcaaaagcca

SEQ ID NO: 611952 - DNA, 25 bp, Homo sapien
cagctgataaggaacacgtgttaag

SEQ ID NO: 611953 - DNA, 25 bp, Homo sapien
tccaggaagcacaccatctggtgga

SEQ ID NO: 611954 - DNA, 25 bp, Homo sapien
gaacacgtgttaagtccaaggcaat

SEQ ID NO: 611955 - DNA, 25 bp, Homo sapien
tcttaatgaaagacagaacctgtgc

SEQ ID NO: 611956 - DNA, 25 bp, Homo sapien
tccaagaaatcaaaaacaagatatt

SEQ ID NO: 611957 - DNA, 25 bp, Homo sapien
agaaatcaaaaacaagatatttcct

SEQ ID NO: 611958 - DNA, 25 bp, Homo sapien
cttccaagaaatcaaaaacaagata

SEQ ID NO: 611959 - DNA, 25 bp, Homo sapien
aatcaaaaacaagatatttcctttg

SEQ ID NO: 611960 - DNA, 25 bp, Homo sapien
gacattctcagtagctcccaggagc

SEQ ID NO: 611961 - DNA, 25 bp, Homo sapien
tgtagcaccacctccagacaaggag

SEQ ID NO: 611962 - DNA, 25 bp, Homo sapien
caggagcccctccaaggtgtgtagc

SEQ ID NO: 611963 - DNA, 25 bp, Homo sapien
catggactcaagtgtgcagtagatg

SEQ ID NO: 611964 - DNA, 25 bp, Homo sapien
attaccccataaaattgtccttcag

SEQ ID NO: 611965 - DNA, 25 bp, Homo sapien
taaaattgtccttcaggtattaaga

SEQ ID NO: 611966 - DNA, 25 bp, Homo sapien
tattaccccataaaattgtccttca

SEQ ID NO: 611967 - DNA, 25 bp, Homo sapien
ccccataaaattgtccttcaggtat

SEQ ID NO: 611968 - DNA, 25 bp, Homo sapien
ccctggacaacataacaagatttca

SEQ ID NO: 611969 - DNA, 25 bp, Homo sapien
accctggacaacataacaagatttc

SEQ ID NO: 611970 - DNA, 25 bp, Homo sapien
acccttgtccggaggtgaagccctg

SEQ ID NO: 611971 - DNA, 25 bp, Homo sapien
gatcatcgggcacctccttgttagg

SEQ ID NO: 611972 - DNA, 25 bp, Homo sapien
tatgtgctcatggagaacgatgcct

SEQ ID NO: 611973 - DNA, 25 bp, Homo sapien
taaatggtctcgacatgggaggtca

SEQ ID NO: 611974 - DNA, 25 bp, Homo sapien
ctacacagcaagcagcagaaacaac

SEQ ID NO: 611975 - DNA, 25 bp, Homo sapien
ggccatatccaaagatcttgcagat

SEQ ID NO: 611976 - DNA, 25 bp, Homo sapien
gcagcggccatatccaaagatcttg

SEQ ID NO: 611977 - DNA, 25 bp, Homo sapien
atatccaaagatcttgcagatcctg

SEQ ID NO: 611978 - DNA, 25 bp, Homo sapien
ttctgcagcggccatatccaaagat

SEQ ID NO: 611979 - DNA, 25 bp, Homo sapien
tcctcgccttaacccatgccctggg

SEQ ID NO: 611980 - DNA, 25 bp, Homo sapien
ggacctgctcctcgccttaacccat

SEQ ID NO: 611981 - DNA, 25 bp, Homo sapien
ctgggttcccggctctcttgtgtgg

SEQ ID NO: 611982 - DNA, 25 bp, Homo sapien
ttgcctcagatcttccctccggacc

SEQ ID NO: 611983 - DNA, 25 bp, Homo sapien
taagtctgcggtttcacaggacacg

SEQ ID NO: 611984 - DNA, 25 bp, Homo sapien
ttcagaggtgcttctagcagtgacc

SEQ ID NO: 611985 - DNA, 25 bp, Homo sapien
actttctcctcggaaggcagagaga

SEQ ID NO: 611986 - DNA, 25 bp, Homo sapien
gaacaggtaagacggctcagattat

SEQ ID NO: 611987 - DNA, 25 bp, Homo sapien
aattgtcgttgctgaagcccttgac

SEQ ID NO: 611988 - DNA, 25 bp, Homo sapien
cagctggcagatcctagaccctccc

SEQ ID NO: 611989 - DNA, 25 bp, Homo sapien
ttaattgtcgttgctgaagcccttg

SEQ ID NO: 611990 - DNA, 25 bp, Homo sapien
ttgtcgttgctgaagcccttgactt

SEQ ID NO: 611991 - DNA, 25 bp, Homo sapien
tctcaaggcagcacaggtgacaggc

SEQ ID NO: 611992 - DNA, 25 bp, Homo sapien
gaaggtgctgcactatttcagaaag

SEQ ID NO: 611993 - DNA, 25 bp, Homo sapien
ctgtctggggcatcctcagatgtca

SEQ ID NO: 611994 - DNA, 25 bp, Homo sapien
gcatcctcagatgtcagcatctcaa

SEQ ID NO: 611995 - DNA, 25 bp, Homo sapien
gtggtttgtgttctcgtggtgctca

SEQ ID NO: 611996 - DNA, 25 bp, Homo sapien
tgctgggggtaacgtgatgaaaaaa

SEQ ID NO: 611997 - DNA, 25 bp, Homo sapien
tatttacagactacctcctttgtgc

SEQ ID NO: 611998 - DNA, 25 bp, Homo sapien
ttgtgttctcgtggtgctcagttga

SEQ ID NO: 611999 - DNA, 25 bp, Homo sapien
tgctgaaactattcctctgtctccc

SEQ ID NO: 612000 - DNA, 25 bp, Homo sapien
cctgggttctcgcagcgtttgtgct

SEQ ID NO: 612001 - DNA, 25 bp, Homo sapien
tgtctcccctgttctggtccagcca

SEQ ID NO: 612002 - DNA, 25 bp, Homo sapien
tggtccagccaactcctaagtgggg

SEQ ID NO: 612003 - DNA, 25 bp, Homo sapien
gagccgatgctcaggtgcggggatt

SEQ ID NO: 612004 - DNA, 25 bp, Homo sapien
gccgatgctcaggtgcggggattta

SEQ ID NO: 612005 - DNA, 25 bp, Homo sapien
tgagccgatgctcaggtgcggggat

SEQ ID NO: 612006 - DNA, 25 bp, Homo sapien
tgtgagccgatgctcaggtgcgggg

SEQ ID NO: 612007 - DNA, 25 bp, Homo sapien
cggctagcgggcctaggcgacaagc

SEQ ID NO: 612008 - DNA, 25 bp, Homo sapien
gcgggcctaggcgacaagcaggcat

SEQ ID NO: 612009 - DNA, 25 bp, Homo sapien
ggagggcggcggctagcgggcctag

SEQ ID NO: 612010 - DNA, 25 bp, Homo sapien
agggcggcggctagcgggcctaggc

SEQ ID NO: 612011 - DNA, 25 bp, Homo sapien
tgagactagggtgaagccgaacagc

SEQ ID NO: 612012 - DNA, 25 bp, Homo sapien
ctagggtgaagccgaacagcagcag

SEQ ID NO: 612013 - DNA, 25 bp, Homo sapien
agactagggtgaagccgaacagcag

SEQ ID NO: 612014 - DNA, 25 bp, Homo sapien
ctgagactagggtgaagccgaacag

SEQ ID NO: 612015 - DNA, 25 bp, Homo sapien
agaaggtggcacagcccgcgctgca

SEQ ID NO: 612016 - DNA, 25 bp, Homo sapien
tcggcgcattcgctgtccgagacgc

SEQ ID NO: 612017 - DNA, 25 bp, Homo sapien
ttgcgtgcagttctggtcagcctgg

SEQ ID NO: 612018 - DNA, 25 bp, Homo sapien
ctgcagcacttgaggttgtcggcgc

SEQ ID NO: 612019 - DNA, 25 bp, Homo sapien
cctcccagcccagcgcggccccgcc

SEQ ID NO: 612020 - DNA, 25 bp, Homo sapien
tcctcccagcccagcgcggccccgc

SEQ ID NO: 612021 - DNA, 25 bp, Homo sapien
ctcctcccagcccagcgcggccccg

SEQ ID NO: 612022 - DNA, 25 bp, Homo sapien
tcggccggttcgagaaggaaactgc

SEQ ID NO: 612023 - DNA, 25 bp, Homo sapien
gatgctcccttacacatctttaaga

SEQ ID NO: 612024 - DNA, 25 bp, Homo sapien
taaagttcctttccgcctggacaga

SEQ ID NO: 612025 - DNA, 25 bp, Homo sapien
tgaaccctcactatgactccagcag

SEQ ID NO: 612026 - DNA, 25 bp, Homo sapien
cactcaatccttagagtggaagaga

SEQ ID NO: 612027 - DNA, 25 bp, Homo sapien
gaagagattgactgaaagacgacga

SEQ ID NO: 612028 - DNA, 25 bp, Homo sapien
ctttgagagagtccccagctcgcgc

SEQ ID NO: 612029 - DNA, 25 bp, Homo sapien
cgacgaagggcgatacagtgtccag

SEQ ID NO: 612030 - DNA, 25 bp, Homo sapien
gttctgatagcctggtggagactgc

SEQ ID NO: 612031 - DNA, 25 bp, Homo sapien
cccctgttctgatagcctggtggag

SEQ ID NO: 612032 - DNA, 25 bp, Homo sapien
gtttaagccaccccctgttctgata

SEQ ID NO: 612033 - DNA, 25 bp, Homo sapien
cctgttctgatagcctggtggagac

SEQ ID NO: 612034 - DNA, 25 bp, Homo sapien
gtcacaggggctgtattctggataa

SEQ ID NO: 612035 - DNA, 25 bp, Homo sapien
cacaggggctgtattctggataaag

SEQ ID NO: 612036 - DNA, 25 bp, Homo sapien
aaaagtcacaggggctgtattctgg

SEQ ID NO: 612037 - DNA, 25 bp, Homo sapien
aagtcacaggggctgtattctggat

SEQ ID NO: 612038 - DNA, 25 bp, Homo sapien
ctgatcggtgtcttgggtcaccgta

SEQ ID NO: 612039 - DNA, 25 bp, Homo sapien
ccctgctgatcggtgtcttgggtca

SEQ ID NO: 612040 - DNA, 25 bp, Homo sapien
tgctgatcggtgtcttgggtcaccg

SEQ ID NO: 612041 - DNA, 25 bp, Homo sapien
cacctccctgctgatcggtgtcttg

SEQ ID NO: 612042 - DNA, 25 bp, Homo sapien
tcctccacctctctcatctggctgc

SEQ ID NO: 612043 - DNA, 25 bp, Homo sapien
tgctgcctgctttctctccaaatct

SEQ ID NO: 612044 - DNA, 25 bp, Homo sapien
tcatccatcaaacagcaaagactcc

SEQ ID NO: 612045 - DNA, 25 bp, Homo sapien
caaacagcaaagactccctcctttg

SEQ ID NO: 612046 - DNA, 25 bp, Homo sapien
cactacacatctacagccacctgat

SEQ ID NO: 612047 - DNA, 25 bp, Homo sapien
acactacacatctacagccacctga

SEQ ID NO: 612048 - DNA, 25 bp, Homo sapien
ggcgagcagaagtagggtagggcat

SEQ ID NO: 612049 - DNA, 25 bp, Homo sapien
gaatagtgcactctggagcagatac

SEQ ID NO: 612050 - DNA, 25 bp, Homo sapien
tagggtagggcatcatctcacctgg

SEQ ID NO: 612051 - DNA, 25 bp, Homo sapien
gccgtgaggaatagtgcactctgga

SEQ ID NO: 612052 - DNA, 25 bp, Homo sapien
cagttgcagtctctcagcaccatga

SEQ ID NO: 612053 - DNA, 25 bp, Homo sapien
tcatcaactgaggtacatcatggtt

SEQ ID NO: 612054 - DNA, 25 bp, Homo sapien
gaaccccaagaaatctagctgcaga

SEQ ID NO: 612055 - DNA, 25 bp, Homo sapien
ccacagaccgaatcccagttgcagt

SEQ ID NO: 612056 - DNA, 25 bp, Homo sapien
ttaattagctcttattacatgccag

SEQ ID NO: 612057 - DNA, 25 bp, Homo sapien
acagtgaacacttaattagctctta

SEQ ID NO: 612058 - DNA, 25 bp, Homo sapien
actactctgtagttatgagaaatta

SEQ ID NO: 612059 - DNA, 25 bp, Homo sapien
tacatgccaggtatcaagcccctaa

SEQ ID NO: 612060 - DNA, 25 bp, Homo sapien
agcttgagtcccaagtgggccttcg

SEQ ID NO: 612061 - DNA, 25 bp, Homo sapien
cccagagcctccgtgtctttaggtg

SEQ ID NO: 612062 - DNA, 25 bp, Homo sapien
agagcctccgtgtctttaggtgcca

SEQ ID NO: 612063 - DNA, 25 bp, Homo sapien
ggccttcgtggcctagggccagaaa

SEQ ID NO: 612064 - DNA, 25 bp, Homo sapien
tcctcctgctcccaaatggaatcac

SEQ ID NO: 612065 - DNA, 25 bp, Homo sapien
ctcctgctcccaaatggaatcacag

SEQ ID NO: 612066 - DNA, 25 bp, Homo sapien
tgctcccaaatggaatcacaggacc

SEQ ID NO: 612067 - DNA, 25 bp, Homo sapien
ctgcaaatccctcctcctgctccca

SEQ ID NO: 612068 - DNA, 25 bp, Homo sapien
cctgagtccatcttgggcacctgag

SEQ ID NO: 612069 - DNA, 25 bp, Homo sapien
gctgcctgcctgagtccatcttggg

SEQ ID NO: 612070 - DNA, 25 bp, Homo sapien
cctcactgggcttcacatacagcag

SEQ ID NO: 612071 - DNA, 25 bp, Homo sapien
ggcttcacatacagcagagctgcct

SEQ ID NO: 612072 - DNA, 25 bp, Homo sapien
agggtaagtgggcagaggcgataca

SEQ ID NO: 612073 - DNA, 25 bp, Homo sapien
cgatacagggagattaacttgtacc

SEQ ID NO: 612074 - DNA, 25 bp, Homo sapien
ggagattaacttgtacctgcagcat

SEQ ID NO: 612075 - DNA, 25 bp, Homo sapien
gcagaggcgatacagggagattaac

SEQ ID NO: 612076 - DNA, 25 bp, Homo sapien
actggtcccgacagaggccgagctg

SEQ ID NO: 612077 - DNA, 25 bp, Homo sapien
cgagctggggaaagttaatgttcac

SEQ ID NO: 612078 - DNA, 25 bp, Homo sapien
acaccttcccacagccattgcggca

SEQ ID NO: 612079 - DNA, 25 bp, Homo sapien
agccattgcggcagcatttcatctg

SEQ ID NO: 612080 - DNA, 25 bp, Homo sapien
tcaacaacaatatccattagactag

SEQ ID NO: 612081 - DNA, 25 bp, Homo sapien
agaaaattataacaataccatcaac

SEQ ID NO: 612082 - DNA, 25 bp, Homo sapien
aacaacaatatccattagactaggc

SEQ ID NO: 612083 - DNA, 25 bp, Homo sapien
ccatcaacaacaatatccattagac

SEQ ID NO: 612084 - DNA, 25 bp, Homo sapien
tcctcactgctcagcctggtggtgg

SEQ ID NO: 612085 - DNA, 25 bp, Homo sapien
ggtgggctggaaccagatgcagggc

SEQ ID NO: 612086 - DNA, 25 bp, Homo sapien
cagggccaggcagaaactttctctc

SEQ ID NO: 612087 - DNA, 25 bp, Homo sapien
gcaggtgggctggaaccagatgcag

SEQ ID NO: 612088 - DNA, 25 bp, Homo sapien
agaagctgtggtcagcccaagaggg

SEQ ID NO: 612089 - DNA, 25 bp, Homo sapien
ggagaagctgtggtcagcccaagag

SEQ ID NO: 612090 - DNA, 25 bp, Homo sapien
gagaagctgtggtcagcccaagagg

SEQ ID NO: 612091 - DNA, 25 bp, Homo sapien
gggagaagctgtggtcagcccaaga

SEQ ID NO: 612092 - DNA, 25 bp, Homo sapien
ttttctgacctaattaatcttatag

SEQ ID NO: 612093 - DNA, 25 bp, Homo sapien
ggccaggtgtccggcagctcagcgt

SEQ ID NO: 612094 - DNA, 25 bp, Homo sapien
gccaggtgtccggcagctcagcgtc

SEQ ID NO: 612095 - DNA, 25 bp, Homo sapien
tgagggaaaggatgtcctctgcgcg

SEQ ID NO: 612096 - DNA, 25 bp, Homo sapien
tgctcacggaaaatgccctctccgc

SEQ ID NO: 612097 - DNA, 25 bp, Homo sapien
atgacgaactcgtcctgctcacgga

SEQ ID NO: 612098 - DNA, 25 bp, Homo sapien
aaaggatgtcctctgcgcggatgac

SEQ ID NO: 612099 - DNA, 25 bp, Homo sapien
tggaaaggagcagcaatcatgtgat

SEQ ID NO: 612100 - DNA, 25 bp, Homo sapien
tgtggacacctttgccatccctggg

SEQ ID NO: 612101 - DNA, 25 bp, Homo sapien
tgggttagacatcaccctgcctggg

SEQ ID NO: 612102 - DNA, 25 bp, Homo sapien
tcaaccccaatcaatgggcagctgt

SEQ ID NO: 612103 - DNA, 25 bp, Homo sapien
ggacttctgccaatcctggtaccat

SEQ ID NO: 612104 - DNA, 25 bp, Homo sapien
gggcacgctgaaggcatccttggca

SEQ ID NO: 612105 - DNA, 25 bp, Homo sapien
ggcagtaagtattgggaactccgtc

SEQ ID NO: 612106 - DNA, 25 bp, Homo sapien
atccttggcagtaagtattgggaac

SEQ ID NO: 612107 - DNA, 25 bp, Homo sapien
cagggatgcagatgcccactctggg

SEQ ID NO: 612108 - DNA, 25 bp, Homo sapien
caatatgtcagtggagctgtgctcc

SEQ ID NO: 612109 - DNA, 25 bp, Homo sapien
taacctgtttgtataaggacaccag

SEQ ID NO: 612110 - DNA, 25 bp, Homo sapien
catggttggttccttgtcagggtta

SEQ ID NO: 612111 - DNA, 25 bp, Homo sapien
tagtcactctctgataataaggctg

SEQ ID NO: 612112 - DNA, 25 bp, Homo sapien
tgtctggcctctgtctgtcatgtag

SEQ ID NO: 612113 - DNA, 25 bp, Homo sapien
gattcggtagtctcttcaagtgaga

SEQ ID NO: 612114 - DNA, 25 bp, Homo sapien
tacggcggctgtctgtgatcctaaa

SEQ ID NO: 612115 - DNA, 25 bp, Homo sapien
ggatgacagagcaagaatgttttta

SEQ ID NO: 612116 - DNA, 25 bp, Homo sapien
gatgacagagcaagaatgtttttaa

SEQ ID NO: 612117 - DNA, 25 bp, Homo sapien
tgacagagcaagaatgtttttaaag

SEQ ID NO: 612118 - DNA, 25 bp, Homo sapien
acagagcaagaatgtttttaaagaa

SEQ ID NO: 612119 - DNA, 25 bp, Homo sapien
gctccaccaggttcagagcctgcat

SEQ ID NO: 612120 - DNA, 25 bp, Homo sapien
gaagagctccaccaggttcagagcc

SEQ ID NO: 612121 - DNA, 25 bp, Homo sapien
agagctccaccaggttcagagcctg

SEQ ID NO: 612122 - DNA, 25 bp, Homo sapien
caaggaagagctccaccaggttcag

SEQ ID NO: 612123 - DNA, 25 bp, Homo sapien
tatttcttaatgcattcactttgtg

SEQ ID NO: 612124 - DNA, 25 bp, Homo sapien
ttatttcttaatgcattcactttgt

SEQ ID NO: 612125 - DNA, 25 bp, Homo sapien
gacccctggtttgctgtgattcata

SEQ ID NO: 612126 - DNA, 25 bp, Homo sapien
aaacctctaacttctatgacccctg

SEQ ID NO: 612127 - DNA, 25 bp, Homo sapien
gattcatactagatgacccaagccc

SEQ ID NO: 612128 - DNA, 25 bp, Homo sapien
accacatgggtggtaaggataggac

SEQ ID NO: 612129 - DNA, 25 bp, Homo sapien
tgatcagatcgtgagccctatgtct

SEQ ID NO: 612130 - DNA, 25 bp, Homo sapien
ctatgtctggccaggttgtcacaga

SEQ ID NO: 612131 - DNA, 25 bp, Homo sapien
gactctgatcagatcgtgagcccta

SEQ ID NO: 612132 - DNA, 25 bp, Homo sapien
gtgagccctatgtctggccaggttg

SEQ ID NO: 612133 - DNA, 25 bp, Homo sapien
tgtcacggtatcctccctgggcctg

SEQ ID NO: 612134 - DNA, 25 bp, Homo sapien
tcttgtcacggtatcctccctgggc

SEQ ID NO: 612135 - DNA, 25 bp, Homo sapien
cttgtcacggtatcctccctgggcc

SEQ ID NO: 612136 - DNA, 25 bp, Homo sapien
ttgtcacggtatcctccctgggcct

SEQ ID NO: 612137 - DNA, 25 bp, Homo sapien
tcagccctggtgcgcctttcactat

SEQ ID NO: 612138 - DNA, 25 bp, Homo sapien
attctcagccctggtgcgcctttca

SEQ ID NO: 612139 - DNA, 25 bp, Homo sapien
gccctggtgcgcctttcactatggg

SEQ ID NO: 612140 - DNA, 25 bp, Homo sapien
gattctcagccctggtgcgcctttc

SEQ ID NO: 612141 - DNA, 25 bp, Homo sapien
gagaatagaacggtaaataaacgca

SEQ ID NO: 612142 - DNA, 25 bp, Homo sapien
agaatagaacggtaaataaacgcag

SEQ ID NO: 612143 - DNA, 25 bp, Homo sapien
tgacaaggagaatagaacggtaaat

SEQ ID NO: 612144 - DNA, 25 bp, Homo sapien
ctgacaaggagaatagaacggtaaa

SEQ ID NO: 612145 - DNA, 25 bp, Homo sapien
tgacaatctcggtgagattcacata

SEQ ID NO: 612146 - DNA, 25 bp, Homo sapien
cacataagtgtttgcatagatatag

SEQ ID NO: 612147 - DNA, 25 bp, Homo sapien
tcacaggatgctcatgcaaacattc

SEQ ID NO: 612148 - DNA, 25 bp, Homo sapien
tcccacagtaggtagaacagcatat

SEQ ID NO: 612149 - DNA, 25 bp, Homo sapien
gatagaggagttgggaagcaggatg

SEQ ID NO: 612150 - DNA, 25 bp, Homo sapien
cttggatagaggagttgggaagcag

SEQ ID NO: 612151 - DNA, 25 bp, Homo sapien
tcagacagtagagagggcggcattc

SEQ ID NO: 612152 - DNA, 25 bp, Homo sapien
tgttgatgttcttatgctggtgact

SEQ ID NO: 612153 - DNA, 25 bp, Homo sapien
tagagagggcggcattcctgttgat

SEQ ID NO: 612154 - DNA, 25 bp, Homo sapien
gatgttcttatgctggtgacttgag

SEQ ID NO: 612155 - DNA, 25 bp, Homo sapien
ctggtttatttgacagggacaaggg

SEQ ID NO: 612156 - DNA, 25 bp, Homo sapien
tccctgggcatttgttctggtttat

SEQ ID NO: 612157 - DNA, 25 bp, Homo sapien
gttctggtttatttgacagggacaa

SEQ ID NO: 612158 - DNA, 25 bp, Homo sapien
ccctgggcatttgttctggtttatt

SEQ ID NO: 612159 - DNA, 25 bp, Homo sapien
gcaacagcagcatgaaccacctgtt

SEQ ID NO: 612160 - DNA, 25 bp, Homo sapien
ttactccttagcaacagcagcatga

SEQ ID NO: 612161 - DNA, 25 bp, Homo sapien
tactccttagcaacagcagcatgaa

SEQ ID NO: 612162 - DNA, 25 bp, Homo sapien
gcatgaaccacctgttccacatccc

SEQ ID NO: 612163 - DNA, 25 bp, Homo sapien
caggctgaaaactaggtcacttgca

SEQ ID NO: 612164 - DNA, 25 bp, Homo sapien
gaatagaacgtcaaaccatccacaa

SEQ ID NO: 612165 - DNA, 25 bp, Homo sapien
tcaaaagggcgactccagtgaacac

SEQ ID NO: 612166 - DNA, 25 bp, Homo sapien
ttaataaccccgcaatggtctccaa

SEQ ID NO: 612167 - DNA, 25 bp, Homo sapien
ccctacctctgttagcagtctgcat

SEQ ID NO: 612168 - DNA, 25 bp, Homo sapien
gatgctcacaggtggttctatacca

SEQ ID NO: 612169 - DNA, 25 bp, Homo sapien
actttggctgcatttgatgctcaca

SEQ ID NO: 612170 - DNA, 25 bp, Homo sapien
tcgtcaccagcaatgtttgtccctc

SEQ ID NO: 612171 - DNA, 25 bp, Homo sapien
aaatctggatctccaaaatgtcaag

SEQ ID NO: 612172 - DNA, 25 bp, Homo sapien
aagaacatggacgtcttggaggcag

SEQ ID NO: 612173 - DNA, 25 bp, Homo sapien
gaagaacatggacgtcttggaggca

SEQ ID NO: 612174 - DNA, 25 bp, Homo sapien
caaaatctggatctccaaaatgtca

SEQ ID NO: 612175 - DNA, 25 bp, Homo sapien
atatagaatataggatgtcagctag

SEQ ID NO: 612176 - DNA, 25 bp, Homo sapien
gaattgcattgtaatgccgtcttaa

SEQ ID NO: 612177 - DNA, 25 bp, Homo sapien
aatataggatgtcagctaggtgtgg

SEQ ID NO: 612178 - DNA, 25 bp, Homo sapien
cattgtaatgccgtcttaataattt

SEQ ID NO: 612179 - DNA, 25 bp, Homo sapien
cagtgggatgggtgagtaagttctg

SEQ ID NO: 612180 - DNA, 25 bp, Homo sapien
gatgggtgagtaagttctggccaag

SEQ ID NO: 612181 - DNA, 25 bp, Homo sapien
tgggatgggtgagtaagttctggcc

SEQ ID NO: 612182 - DNA, 25 bp, Homo sapien
gtgggatgggtgagtaagttctggc

SEQ ID NO: 612183 - DNA, 25 bp, Homo sapien
gcagtgctaggcagaacaccaccag

SEQ ID NO: 612184 - DNA, 25 bp, Homo sapien
tcagaacacgctgcttgggactccc

SEQ ID NO: 612185 - DNA, 25 bp, Homo sapien
tgcagtgctaggcagaacaccacca

SEQ ID NO: 612186 - DNA, 25 bp, Homo sapien
gaacacgctgcttgggactcccagg

SEQ ID NO: 612187 - DNA, 25 bp, Homo sapien
cctgcattgtacacaggtgagtaca

SEQ ID NO: 612188 - DNA, 25 bp, Homo sapien
gtttctgatgaacagactatcccac

SEQ ID NO: 612189 - DNA, 25 bp, Homo sapien
ttcctgcattgtacacaggtgagta

SEQ ID NO: 612190 - DNA, 25 bp, Homo sapien
ctgaaatcctttctcgcaatcttcc

SEQ ID NO: 612191 - DNA, 25 bp, Homo sapien
caggtacagtgtccctgggataagg

SEQ ID NO: 612192 - DNA, 25 bp, Homo sapien
cacctgcaggtacagtgtccctggg

SEQ ID NO: 612193 - DNA, 25 bp, Homo sapien
tgtccctgggataagggtggattct

SEQ ID NO: 612194 - DNA, 25 bp, Homo sapien
tgcaggtacagtgtccctgggataa

SEQ ID NO: 612195 - DNA, 25 bp, Homo sapien
agttggcaggcatgatgacttctga

SEQ ID NO: 612196 - DNA, 25 bp, Homo sapien
cagttggcaggcatgatgacttctg

SEQ ID NO: 612197 - DNA, 25 bp, Homo sapien
gttggcaggcatgatgacttctgag

SEQ ID NO: 612198 - DNA, 25 bp, Homo sapien
cgatttgcaggttagatattgggcc

SEQ ID NO: 612199 - DNA, 25 bp, Homo sapien
caaccaagggcaggtaatcagtgag

SEQ ID NO: 612200 - DNA, 25 bp, Homo sapien
caattagcctgatgagtgcaaccaa

SEQ ID NO: 612201 - DNA, 25 bp, Homo sapien
gaccttggagagttctagccctttg

SEQ ID NO: 612202 - DNA, 25 bp, Homo sapien
gaggtctccacatatcttctccgca

SEQ ID NO: 612203 - DNA, 25 bp, Homo sapien
aataacagggtattcaatgagcaga

SEQ ID NO: 612204 - DNA, 25 bp, Homo sapien
tccgcaattttattaacaccaccca

SEQ ID NO: 612205 - DNA, 25 bp, Homo sapien
tagaagaaatcccagcttggcagac

SEQ ID NO: 612206 - DNA, 25 bp, Homo sapien
gaagaccttcctggactacctagat

SEQ ID NO: 612207 - DNA, 25 bp, Homo sapien
catatctgctaagtgaacaggtcca

SEQ ID NO: 612208 - DNA, 25 bp, Homo sapien
gaggacccctagtgtaagtaatgcc

SEQ ID NO: 612209 - DNA, 25 bp, Homo sapien
tttctcgtcccctggaagcgctgag

SEQ ID NO: 612210 - DNA, 25 bp, Homo sapien
attgttaagagttgggtagtaagtg

SEQ ID NO: 612211 - DNA, 25 bp, Homo sapien
aagtggttggaacagccacaatcat

SEQ ID NO: 612212 - DNA, 25 bp, Homo sapien
tcctcataccccgtcatcttctcct

SEQ ID NO: 612213 - DNA, 25 bp, Homo sapien
ttggggtgatgctcgttcatcctca

SEQ ID NO: 612214 - DNA, 25 bp, Homo sapien
cagccggagaagacaaaagtttcac

SEQ ID NO: 612215 - DNA, 25 bp, Homo sapien
ctattttaagcttgaagttgttaag

SEQ ID NO: 612216 - DNA, 25 bp, Homo sapien
taaagtgaacttcatagcagcttcc

SEQ ID NO: 612217 - DNA, 25 bp, Homo sapien
caggctacttcacgttctattttaa

SEQ ID NO: 612218 - DNA, 25 bp, Homo sapien
tgtgtctttatttcggatggtgcag

SEQ ID NO: 612219 - DNA, 25 bp, Homo sapien
agaaagactctttcattctaatgat

SEQ ID NO: 612220 - DNA, 25 bp, Homo sapien
aaatcagtctgaattttcttgtgtc

SEQ ID NO: 612221 - DNA, 25 bp, Homo sapien
acatatggaagcttaaagcattatg

SEQ ID NO: 612222 - DNA, 25 bp, Homo sapien
tattgtgttagttttgatcctgtcc

SEQ ID NO: 612223 - DNA, 25 bp, Homo sapien
ttttgcatatttgaattctattgtg

SEQ ID NO: 612224 - DNA, 25 bp, Homo sapien
tgttagttttgatcctgtcctgcat

SEQ ID NO: 612225 - DNA, 25 bp, Homo sapien
ctttccaataactctgaatgatttt

SEQ ID NO: 612226 - DNA, 25 bp, Homo sapien
cttggctgattgattaagatgccct

SEQ ID NO: 612227 - DNA, 25 bp, Homo sapien
gattaagatgccctacaagtttcct

SEQ ID NO: 612228 - DNA, 25 bp, Homo sapien
gctgattgattaagatgccctacaa

SEQ ID NO: 612229 - DNA, 25 bp, Homo sapien
gattgattaagatgccctacaagtt

SEQ ID NO: 612230 - DNA, 25 bp, Homo sapien
tccactttcacgtaactgttttctg

SEQ ID NO: 612231 - DNA, 25 bp, Homo sapien
aactgttttctgagttgtggaggaa

SEQ ID NO: 612232 - DNA, 25 bp, Homo sapien
actgttttctgagttgtggaggaaa

SEQ ID NO: 612233 - DNA, 25 bp, Homo sapien
tcacattggtctgccctttctgttt

SEQ ID NO: 612234 - DNA, 25 bp, Homo sapien
atatgaattacaggtgcccttcttc

SEQ ID NO: 612235 - DNA, 25 bp, Homo sapien
ccttcttcagaggatagttgcagta

SEQ ID NO: 612236 - DNA, 25 bp, Homo sapien
caaagggctcacataaaaatgtcaa

SEQ ID NO: 612237 - DNA, 25 bp, Homo sapien
caaagtgttgtagtagaatctggtc

SEQ ID NO: 612238 - DNA, 25 bp, Homo sapien
aatggagccctcctctaattggatg

SEQ ID NO: 612239 - DNA, 25 bp, Homo sapien
taaacataggcttctcattccagta

SEQ ID NO: 612240 - DNA, 25 bp, Homo sapien
tgtgcttagcctagcagctgggtaa

SEQ ID NO: 612241 - DNA, 25 bp, Homo sapien
ggtgtattcgatgacaaagcctcca

SEQ ID NO: 612242 - DNA, 25 bp, Homo sapien
aagaagatctccctacccataggtg

SEQ ID NO: 612243 - DNA, 25 bp, Homo sapien
taagtaggccccagcgtttatcatt

SEQ ID NO: 612244 - DNA, 25 bp, Homo sapien
gaactctgtagctattgcttgccct

SEQ ID NO: 612245 - DNA, 25 bp, Homo sapien
taacatgcttgtgaaggtccttcca

SEQ ID NO: 612246 - DNA, 25 bp, Homo sapien
atgcttgaaccatatgcatgttgtc

SEQ ID NO: 612247 - DNA, 25 bp, Homo sapien
agtaggtggcaatgcttgaaccata

SEQ ID NO: 612248 - DNA, 25 bp, Homo sapien
gcaatgcttgaaccatatgcatgtt

SEQ ID NO: 612249 - DNA, 25 bp, Homo sapien
gcttgaaccatatgcatgttgtcag

SEQ ID NO: 612250 - DNA, 25 bp, Homo sapien
gactagaggagaggagaactcatcc

SEQ ID NO: 612251 - DNA, 25 bp, Homo sapien
ccagttgggcttactagaggttcta

SEQ ID NO: 612252 - DNA, 25 bp, Homo sapien
tgagctatcatttgggatccctggc

SEQ ID NO: 612253 - DNA, 25 bp, Homo sapien
taactgcaggagaacatggtgagct

SEQ ID NO: 612254 - DNA, 25 bp, Homo sapien
cccacaactccgctggactctgtca

SEQ ID NO: 612255 - DNA, 25 bp, Homo sapien
cgctggactctgtcaccggccggaa

SEQ ID NO: 612256 - DNA, 25 bp, Homo sapien
tggactctgtcaccggccggaaagt

SEQ ID NO: 612257 - DNA, 25 bp, Homo sapien
cggccggaaagtggcgccgtgacgt

SEQ ID NO: 612258 - DNA, 25 bp, Homo sapien
cggctgctcggcgtcgccagtggct

SEQ ID NO: 612259 - DNA, 25 bp, Homo sapien
gctcggcgtcgccagtggctcccat

SEQ ID NO: 612260 - DNA, 25 bp, Homo sapien
gtccccgcggctgctcggcgtcgcc

SEQ ID NO: 612261 - DNA, 25 bp, Homo sapien
cccgcggctgctcggcgtcgccagt

SEQ ID NO: 612262 - DNA, 25 bp, Homo sapien
atcccccagctccaagccgcccctc

SEQ ID NO: 612263 - DNA, 25 bp, Homo sapien
ccgctgcgcccgcatcccccagctc

SEQ ID NO: 612264 - DNA, 25 bp, Homo sapien
cgtaagaaccagctgccccgctgcg

SEQ ID NO: 612265 - DNA, 25 bp, Homo sapien
taagaaccagctgccccgctgcgcc

SEQ ID NO: 612266 - DNA, 25 bp, Homo sapien
gaggtggagggtgggtatgaagtta

SEQ ID NO: 612267 - DNA, 25 bp, Homo sapien
gaacaaatgtcactgcggcctgtga

SEQ ID NO: 612268 - DNA, 25 bp, Homo sapien
tgcttctcagatccgtcaccatctc

SEQ ID NO: 612269 - DNA, 25 bp, Homo sapien
ccaacggaacaaatgtcactgcggc

SEQ ID NO: 612270 - DNA, 25 bp, Homo sapien
tccgctgcacctgccggtgctttat

SEQ ID NO: 612271 - DNA, 25 bp, Homo sapien
cttgttgtcatctgtgagcggcggc

SEQ ID NO: 612272 - DNA, 25 bp, Homo sapien
ggcccctccgctgcacctgccggtg

SEQ ID NO: 612273 - DNA, 25 bp, Homo sapien
ttgtcatctgtgagcggcggcccct

SEQ ID NO: 612274 - DNA, 25 bp, Homo sapien
caggacagctcggaggagatccatg

SEQ ID NO: 612275 - DNA, 25 bp, Homo sapien
ggacagctcggaggagatccatgga

SEQ ID NO: 612276 - DNA, 25 bp, Homo sapien
aggacagctcggaggagatccatgg

SEQ ID NO: 612277 - DNA, 25 bp, Homo sapien
cttcatgtacttgttgaagacagtc

SEQ ID NO: 612278 - DNA, 25 bp, Homo sapien
ttcatgtacttgttgaagacagtct

SEQ ID NO: 612279 - DNA, 25 bp, Homo sapien
caggcagctccgacaggcttcctgg

SEQ ID NO: 612280 - DNA, 25 bp, Homo sapien
ggcagctccgacaggcttcctggat

SEQ ID NO: 612281 - DNA, 25 bp, Homo sapien
gtctcgcacgttcagtgctgccttc

SEQ ID NO: 612282 - DNA, 25 bp, Homo sapien
cccaacattgtctcgcacgttcagt

SEQ ID NO: 612283 - DNA, 25 bp, Homo sapien
gcttctatgagtttgctaagtcaca

SEQ ID NO: 612284 - DNA, 25 bp, Homo sapien
tgcatttatcctggtacctgacata

SEQ ID NO: 612285 - DNA, 25 bp, Homo sapien
gacatatagtagctacttcccttcc

SEQ ID NO: 612286 - DNA, 25 bp, Homo sapien
cctcaagcctatctcaatatgtggc

SEQ ID NO: 612287 - DNA, 25 bp, Homo sapien
caaatggggccatgataacttgatc

SEQ ID NO: 612288 - DNA, 25 bp, Homo sapien
catgataacttgatccaccacgcac

SEQ ID NO: 612289 - DNA, 25 bp, Homo sapien
ggtgctcatccccatgataccaaat

SEQ ID NO: 612290 - DNA, 25 bp, Homo sapien
cagcagggtgctcatccccatgata

SEQ ID NO: 612291 - DNA, 25 bp, Homo sapien
tggtgatggcaacaattcctcctaa

SEQ ID NO: 612292 - DNA, 25 bp, Homo sapien
taaacaggttctctactatcttggg

SEQ ID NO: 612293 - DNA, 25 bp, Homo sapien
gcgactattggcgacctttcctgat

SEQ ID NO: 612294 - DNA, 25 bp, Homo sapien
gacaacacggaagttactagcgacc

SEQ ID NO: 612295 - DNA, 25 bp, Homo sapien
tctccatctgaaaagagcagtttag

SEQ ID NO: 612296 - DNA, 25 bp, Homo sapien
ctccatctgaaaagagcagtttagc

SEQ ID NO: 612297 - DNA, 25 bp, Homo sapien
ttcctggaagctcatgggtcaatct

SEQ ID NO: 612298 - DNA, 25 bp, Homo sapien
tcaatctgggtattactttttctcc

SEQ ID NO: 612299 - DNA, 25 bp, Homo sapien
gggggcttcctcgatgggcacattc

SEQ ID NO: 612300 - DNA, 25 bp, Homo sapien
gggcttcctcgatgggcacattctt

SEQ ID NO: 612301 - DNA, 25 bp, Homo sapien
aagggggcttcctcgatgggcacat

SEQ ID NO: 612302 - DNA, 25 bp, Homo sapien
ggcttcctcgatgggcacattcttc

SEQ ID NO: 612303 - DNA, 25 bp, Homo sapien
cggtcgcttgacaggatgtgtccag

SEQ ID NO: 612304 - DNA, 25 bp, Homo sapien
tgcccggtcgcttgacaggatgtgt

SEQ ID NO: 612305 - DNA, 25 bp, Homo sapien
cggctgcccggtcgcttgacaggat

SEQ ID NO: 612306 - DNA, 25 bp, Homo sapien
gctgcccggtcgcttgacaggatgt

SEQ ID NO: 612307 - DNA, 25 bp, Homo sapien
ggtgaattctccaaggtgagaccta

SEQ ID NO: 612308 - DNA, 25 bp, Homo sapien
ccttcgtggtgacacataagaggag

SEQ ID NO: 612309 - DNA, 25 bp, Homo sapien
tacatagtggcatgagcaactccaa

SEQ ID NO: 612310 - DNA, 25 bp, Homo sapien
taaaactgcttcgtgtaggagacac

SEQ ID NO: 612311 - DNA, 25 bp, Homo sapien
ggccttcccggcgaattggttcaca

SEQ ID NO: 612312 - DNA, 25 bp, Homo sapien
gcgaattggttcacaggattttggt

SEQ ID NO: 612313 - DNA, 25 bp, Homo sapien
ccttcccggcgaattggttcacagg

SEQ ID NO: 612314 - DNA, 25 bp, Homo sapien
ttcccggcgaattggttcacaggat

SEQ ID NO: 612315 - DNA, 25 bp, Homo sapien
tcgagatcccaacacaaaggtggta

SEQ ID NO: 612316 - DNA, 25 bp, Homo sapien
tagattcattcaggcgagctgggtc

SEQ ID NO: 612317 - DNA, 25 bp, Homo sapien
gtagattcattcaggcgagctgggt

SEQ ID NO: 612318 - DNA, 25 bp, Homo sapien
acacaaaggtggtagattcattcag

SEQ ID NO: 612319 - DNA, 25 bp, Homo sapien
cttaaagaggtgtgggtgcttgatg

SEQ ID NO: 612320 - DNA, 25 bp, Homo sapien
taaagaggtgtgggtgcttgatgta

SEQ ID NO: 612321 - DNA, 25 bp, Homo sapien
ttaaagaggtgtgggtgcttgatgt

SEQ ID NO: 612322 - DNA, 25 bp, Homo sapien
tgttgcccgcatgtgatgctgctca

SEQ ID NO: 612323 - DNA, 25 bp, Homo sapien
ccctgttgcccgcatgtgatgctgc

SEQ ID NO: 612324 - DNA, 25 bp, Homo sapien
gccagccagtgcttatcctgggggt

SEQ ID NO: 612325 - DNA, 25 bp, Homo sapien
gccagtgcttatcctgggggtcagc

SEQ ID NO: 612326 - DNA, 25 bp, Homo sapien
tccctctgaggacaaagataacttg

SEQ ID NO: 612327 - DNA, 25 bp, Homo sapien
gatcaagtatacgaaaggacccaag

SEQ ID NO: 612328 - DNA, 25 bp, Homo sapien
tgtcacaatgcctcggtctacagtg

SEQ ID NO: 612329 - DNA, 25 bp, Homo sapien
taacagatcaggtgtccatgagtgg

SEQ ID NO: 612330 - DNA, 25 bp, Homo sapien
tgtcctcctcgatgaggaggtaggc

SEQ ID NO: 612331 - DNA, 25 bp, Homo sapien
cccggatgtcctcctcgatgaggag

SEQ ID NO: 612332 - DNA, 25 bp, Homo sapien
tggccgcaaggtcccggatgtcctc

SEQ ID NO: 612333 - DNA, 25 bp, Homo sapien
gcaaggtcccggatgtcctcctcga

SEQ ID NO: 612334 - DNA, 25 bp, Homo sapien
tctgtccgtagtgtctccatatact

SEQ ID NO: 612335 - DNA, 25 bp, Homo sapien
aggtgcttcaacagcacgatgctca

SEQ ID NO: 612336 - DNA, 25 bp, Homo sapien
caggagggtaggacaaaggatttca

SEQ ID NO: 612337 - DNA, 25 bp, Homo sapien
tgctcattctctgtccgtagtgtct

SEQ ID NO: 612338 - DNA, 25 bp, Homo sapien
gagtcactacaaactcgctcaggca

SEQ ID NO: 612339 - DNA, 25 bp, Homo sapien
atatagaaccacatgctagtctggg

SEQ ID NO: 612340 - DNA, 25 bp, Homo sapien
gcttaatgccgctgagatccatcta

SEQ ID NO: 612341 - DNA, 25 bp, Homo sapien
gagatccatctaggagcagtcccag

SEQ ID NO: 612342 - DNA, 25 bp, Homo sapien
ggtagagggcacagcaggttcacca

SEQ ID NO: 612343 - DNA, 25 bp, Homo sapien
tttttcctacacccacttctagagc

SEQ ID NO: 612344 - DNA, 25 bp, Homo sapien
ttttcctacacccacttctagagcc

SEQ ID NO: 612345 - DNA, 25 bp, Homo sapien
ctccccagtgggtagtgtgtaacct

SEQ ID NO: 612346 - DNA, 25 bp, Homo sapien
gtcatcaaactccatcgcattctgc

SEQ ID NO: 612347 - DNA, 25 bp, Homo sapien
gccatgtccttacattagctgggta

SEQ ID NO: 612348 - DNA, 25 bp, Homo sapien
gggagcaataaaagccaactctatt

SEQ ID NO: 612349 - DNA, 25 bp, Homo sapien
ggcggcgttggcagagagacaggaa

SEQ ID NO: 612350 - DNA, 25 bp, Homo sapien
gaactcggagaacacgactgcaact

SEQ ID NO: 612351 - DNA, 25 bp, Homo sapien
gagaacacgactgcaactgcaggac

SEQ ID NO: 612352 - DNA, 25 bp, Homo sapien
gagacaggaactcggagaacacgac

SEQ ID NO: 612353 - DNA, 25 bp, Homo sapien
tcggctcagctcctttacgggcggc

SEQ ID NO: 612354 - DNA, 25 bp, Homo sapien
ggcggcgacgctagtggcggctggg

SEQ ID NO: 612355 - DNA, 25 bp, Homo sapien
cggctcagctcctttacgggcggcg

SEQ ID NO: 612356 - DNA, 25 bp, Homo sapien
gctgggtcgcggttttgggaagcca

SEQ ID NO: 612357 - DNA, 25 bp, Homo sapien
ggcaggcccggcgagtggtaggccg

SEQ ID NO: 612358 - DNA, 25 bp, Homo sapien
gggcatggcaggcccggcgagtggt

SEQ ID NO: 612359 - DNA, 25 bp, Homo sapien
cggcgagtggtaggccgcatcactc

SEQ ID NO: 612360 - DNA, 25 bp, Homo sapien
aggcccggcgagtggtaggccgcat

SEQ ID NO: 612361 - DNA, 25 bp, Homo sapien
gagtcccggaagtctccgccctcga

SEQ ID NO: 612362 - DNA, 25 bp, Homo sapien
ctagaaatctttgctctgggtacca

SEQ ID NO: 612363 - DNA, 25 bp, Homo sapien
ctcctgcacccgcagatctcccgct

SEQ ID NO: 612364 - DNA, 25 bp, Homo sapien
cccgagctcctggtgtgttctcctg

SEQ ID NO: 612365 - DNA, 25 bp, Homo sapien
tgagcgtcttcatctaggcccacca

SEQ ID NO: 612366 - DNA, 25 bp, Homo sapien
gactccctcgggatgattctggcat

SEQ ID NO: 612367 - DNA, 25 bp, Homo sapien
gagtctcaaagagcggtctgagctc

SEQ ID NO: 612368 - DNA, 25 bp, Homo sapien
gatccacaggacgatcctagcgagt

SEQ ID NO: 612369 - DNA, 25 bp, Homo sapien
cagggggagccgtcatggaggctcc

SEQ ID NO: 612370 - DNA, 25 bp, Homo sapien
cacatcaccaaggtcaggctcagct

SEQ ID NO: 612371 - DNA, 25 bp, Homo sapien
gagccgtcatggaggctccccacat

SEQ ID NO: 612372 - DNA, 25 bp, Homo sapien
atcaccaaggtcaggctcagctcag

SEQ ID NO: 612373 - DNA, 25 bp, Homo sapien
gacggtgcatcttctcccacctgaa

SEQ ID NO: 612374 - DNA, 25 bp, Homo sapien
gccaggcctccagacggtgcatctt

SEQ ID NO: 612375 - DNA, 25 bp, Homo sapien
atgggccaggcctccagacggtgca

SEQ ID NO: 612376 - DNA, 25 bp, Homo sapien
agacggtgcatcttctcccacctga

SEQ ID NO: 612377 - DNA, 25 bp, Homo sapien
ctaggaagtagggacacactggata

SEQ ID NO: 612378 - DNA, 25 bp, Homo sapien
cttcagggaagtgttcgagataact

SEQ ID NO: 612379 - DNA, 25 bp, Homo sapien
taggctagaaataccaagaagggcg

SEQ ID NO: 612380 - DNA, 25 bp, Homo sapien
ccctatgtctagcaaaaaagctgac

SEQ ID NO: 612381 - DNA, 25 bp, Homo sapien
cagtgggtgagctttccccttaatt

SEQ ID NO: 612382 - DNA, 25 bp, Homo sapien
ggaatgtggagtacacttttgggca

SEQ ID NO: 612383 - DNA, 25 bp, Homo sapien
ggagtacacttttgggcatagcaaa

SEQ ID NO: 612384 - DNA, 25 bp, Homo sapien
catagcaaaggtcagtgggtgagct

SEQ ID NO: 612385 - DNA, 25 bp, Homo sapien
ggaaggcagaaatccctttatcgcc

SEQ ID NO: 612386 - DNA, 25 bp, Homo sapien
cagaaatccctttatcgccagacat

SEQ ID NO: 612387 - DNA, 25 bp, Homo sapien
tggatggtccctacccatttgaaaa

SEQ ID NO: 612388 - DNA, 25 bp, Homo sapien
tgaaaaggttgtctgattcagggaa

SEQ ID NO: 612389 - DNA, 25 bp, Homo sapien
tcttatctggtggagacatcagtga

SEQ ID NO: 612390 - DNA, 25 bp, Homo sapien
ggtctaaggattgtaaattggcatc

SEQ ID NO: 612391 - DNA, 25 bp, Homo sapien
tagaatattagttgctggccgggcg

SEQ ID NO: 612392 - DNA, 25 bp, Homo sapien
ggcatcctgtgctttagttcaatta

SEQ ID NO: 612393 - DNA, 25 bp, Homo sapien
ctgggaccggacagtagacaaactg

SEQ ID NO: 612394 - DNA, 25 bp, Homo sapien
caaggggcttgctagaatcttgagt

SEQ ID NO: 612395 - DNA, 25 bp, Homo sapien
cacaaggggcttgctagaatcttga

SEQ ID NO: 612396 - DNA, 25 bp, Homo sapien
agccccacacaaggggcttgctaga

SEQ ID NO: 612397 - DNA, 25 bp, Homo sapien
ccacacaaggggcttgctagaatct

SEQ ID NO: 612398 - DNA, 25 bp, Homo sapien
tccacgttggggtgatagcagggcg

SEQ ID NO: 612399 - DNA, 25 bp, Homo sapien
tgatagcagggcgtgaggaacttca

SEQ ID NO: 612400 - DNA, 25 bp, Homo sapien
tcactgtgggcgcattgtaagggta

SEQ ID NO: 612401 - DNA, 25 bp, Homo sapien
gggaactctagcgagagcttatacc

SEQ ID NO: 612402 - DNA, 25 bp, Homo sapien
tcctagaaggctctggatggagagc

SEQ ID NO: 612403 - DNA, 25 bp, Homo sapien
ggatggagagcagaatggtcctgac

SEQ ID NO: 612404 - DNA, 25 bp, Homo sapien
ctcctagaaggctctggatggagag

SEQ ID NO: 612405 - DNA, 25 bp, Homo sapien
tctggatggagagcagaatggtcct

SEQ ID NO: 612406 - DNA, 25 bp, Homo sapien
tcctgacaggttcccaagttgcatg

SEQ ID NO: 612407 - DNA, 25 bp, Homo sapien
aaggcggtagaagaggctgacccca

SEQ ID NO: 612408 - DNA, 25 bp, Homo sapien
cccagggagtcctgacaggttccca

SEQ ID NO: 612409 - DNA, 25 bp, Homo sapien
gagaaagagaaggtcaaggcggtag

SEQ ID NO: 612410 - DNA, 25 bp, Homo sapien
ggtttttccagagctcggcagcatg

SEQ ID NO: 612411 - DNA, 25 bp, Homo sapien
tttttccagagctcggcagcatgtg

SEQ ID NO: 612412 - DNA, 25 bp, Homo sapien
ttccagagctcggcagcatgtgtgt

SEQ ID NO: 612413 - DNA, 25 bp, Homo sapien
tggggtttttccagagctcggcagc

SEQ ID NO: 612414 - DNA, 25 bp, Homo sapien
ctcctggctggtgacctgctttgag

SEQ ID NO: 612415 - DNA, 25 bp, Homo sapien
gacctgctttgagtaggtttcttgc

SEQ ID NO: 612416 - DNA, 25 bp, Homo sapien
ctttgagtaggtttcttgcaggtac

SEQ ID NO: 612417 - DNA, 25 bp, Homo sapien
gctggtgacctgctttgagtaggtt

SEQ ID NO: 612418 - DNA, 25 bp, Homo sapien
ataaagagtcctatacagaaatcac

SEQ ID NO: 612419 - DNA, 25 bp, Homo sapien
cacagctcaagataaagagtcctat

SEQ ID NO: 612420 - DNA, 25 bp, Homo sapien
caagataaagagtcctatacagaaa

SEQ ID NO: 612421 - DNA, 25 bp, Homo sapien
gctcaagataaagagtcctatacag

SEQ ID NO: 612422 - DNA, 25 bp, Homo sapien
ccgggttctgcagggctccgccggg

SEQ ID NO: 612423 - DNA, 25 bp, Homo sapien
ggccgggttctgcagggctccgccg

SEQ ID NO: 612424 - DNA, 25 bp, Homo sapien
cagcccatggaggtcggccgggttc

SEQ ID NO: 612425 - DNA, 25 bp, Homo sapien
gcccatggaggtcggccgggttctg

SEQ ID NO: 612426 - DNA, 25 bp, Homo sapien
tcagcctaggaccgcgttcctcccc

SEQ ID NO: 612427 - DNA, 25 bp, Homo sapien
ggctcaggaccctcccgatgtctct

SEQ ID NO: 612428 - DNA, 25 bp, Homo sapien
gatgtctcttgcgccgcctcgtgcg

SEQ ID NO: 612429 - DNA, 25 bp, Homo sapien
aggaccctcccgatgtctcttgcgc

SEQ ID NO: 612430 - DNA, 25 bp, Homo sapien
gggagcgcgcgacgctgtgtaccgg

SEQ ID NO: 612431 - DNA, 25 bp, Homo sapien
gggacccagccagcatcgctttccc

SEQ ID NO: 612432 - DNA, 25 bp, Homo sapien
cagtccgaggtcttgcgaaccaggg

SEQ ID NO: 612433 - DNA, 25 bp, Homo sapien
cgacgctgtgtaccggatcccggag

SEQ ID NO: 612434 - DNA, 25 bp, Homo sapien
cgtcgccggccaaggcgtgccgcag

SEQ ID NO: 612435 - DNA, 25 bp, Homo sapien
gtcgccggccaaggcgtgccgcagc

SEQ ID NO: 612436 - DNA, 25 bp, Homo sapien
tcgccggccaaggcgtgccgcagcc

SEQ ID NO: 612437 - DNA, 25 bp, Homo sapien
cgccggccaaggcgtgccgcagccg

SEQ ID NO: 612438 - DNA, 25 bp, Homo sapien
agctctgagctctccggaaactgct

SEQ ID NO: 612439 - DNA, 25 bp, Homo sapien
gctctgagctctccggaaactgctc

SEQ ID NO: 612440 - DNA, 25 bp, Homo sapien
tgagctctccggaaactgctcggcc

SEQ ID NO: 612441 - DNA, 25 bp, Homo sapien
tctgagctctccggaaactgctcgg

SEQ ID NO: 612442 - DNA, 25 bp, Homo sapien
gtcccatccccgaggggcagctggt

SEQ ID NO: 612443 - DNA, 25 bp, Homo sapien
tgcgtcttctcctgacgtcccatcc

SEQ ID NO: 612444 - DNA, 25 bp, Homo sapien
tcgtcctcggcgctggtgaagctga

SEQ ID NO: 612445 - DNA, 25 bp, Homo sapien
gagggtgccgctgagtcgggaggac

SEQ ID NO: 612446 - DNA, 25 bp, Homo sapien
gctggatcaacttagcgccctggat

SEQ ID NO: 612447 - DNA, 25 bp, Homo sapien
tgagttctcccacttgacacaaggg

SEQ ID NO: 612448 - DNA, 25 bp, Homo sapien
tgggatggaggcctaatcgagcccc

SEQ ID NO: 612449 - DNA, 25 bp, Homo sapien
gggtcgacatcaaccactgacgtgg

SEQ ID NO: 612450 - DNA, 25 bp, Homo sapien
ggcgggtccttgacaacgttagcgc

SEQ ID NO: 612451 - DNA, 25 bp, Homo sapien
tgttccgggacttcttccagaaatc

SEQ ID NO: 612452 - DNA, 25 bp, Homo sapien
ctggtcacttcgaagagcagccgct

SEQ ID NO: 612453 - DNA, 25 bp, Homo sapien
tgccaaggtgttccgggacttcttc

SEQ ID NO: 612454 - DNA, 25 bp, Homo sapien
tgcttgagaactgattgacctgtgc

SEQ ID NO: 612455 - DNA, 25 bp, Homo sapien
gcaggccctagatgacaaacatttt

SEQ ID NO: 612456 - DNA, 25 bp, Homo sapien
tgtgcgttataaggacacagcaggc

SEQ ID NO: 612457 - DNA, 25 bp, Homo sapien
gatgacatagctaccatttcattga

SEQ ID NO: 612458 - DNA, 25 bp, Homo sapien
caagtcagtctctcaacagcaagga

SEQ ID NO: 612459 - DNA, 25 bp, Homo sapien
aacagcaacagaaaagggtggagag

SEQ ID NO: 612460 - DNA, 25 bp, Homo sapien
cctggcctgaaaagggactggagca

SEQ ID NO: 612461 - DNA, 25 bp, Homo sapien
gggcattaaaggagcagacctcatt

SEQ ID NO: 612462 - DNA, 25 bp, Homo sapien
acaagatgatcacgaagttccccgc

SEQ ID NO: 612463 - DNA, 25 bp, Homo sapien
tgacaatactctagccactcctggt

SEQ ID NO: 612464 - DNA, 25 bp, Homo sapien
tgaccttgtaacatgcagccagatg

SEQ ID NO: 612465 - DNA, 25 bp, Homo sapien
ccagtgttagatgttaaaggcaccc

SEQ ID NO: 612466 - DNA, 25 bp, Homo sapien
aaaataggttcggctgggcgtagtg

SEQ ID NO: 612467 - DNA, 25 bp, Homo sapien
gaggcaggagaacagcttaaggcca

SEQ ID NO: 612468 - DNA, 25 bp, Homo sapien
ttcgagaccagcctgggcaacatgg

SEQ ID NO: 612469 - DNA, 25 bp, Homo sapien
ctgaggcaggagaacagcttaaggc

SEQ ID NO: 612470 - DNA, 25 bp, Homo sapien
caggagaacagcttaaggccaggag

SEQ ID NO: 612471 - DNA, 25 bp, Homo sapien
tggccttgaacaatcttcctagcta

SEQ ID NO: 612472 - DNA, 25 bp, Homo sapien
cttgaacaatcttcctagctaggct

SEQ ID NO: 612473 - DNA, 25 bp, Homo sapien
aacaatcttcctagctaggcttccc

SEQ ID NO: 612474 - DNA, 25 bp, Homo sapien
gaagctctcagtttggttttgttgg

SEQ ID NO: 612475 - DNA, 25 bp, Homo sapien
tagagcattagttcttctgacagcc

SEQ ID NO: 612476 - DNA, 25 bp, Homo sapien
cccatagagcattagttcttctgac

SEQ ID NO: 612477 - DNA, 25 bp, Homo sapien
ctcccttcccatagagcattagttc

SEQ ID NO: 612478 - DNA, 25 bp, Homo sapien
gtactcccttcccatagagcattag

SEQ ID NO: 612479 - DNA, 25 bp, Homo sapien
acactcccagctgtacctccccacc

SEQ ID NO: 612480 - DNA, 25 bp, Homo sapien
tgggtgtcagggcaaatgcaagttg

SEQ ID NO: 612481 - DNA, 25 bp, Homo sapien
gtcagggcaaatgcaagttgtccac

SEQ ID NO: 612482 - DNA, 25 bp, Homo sapien
ggtgtcagggcaaatgcaagttgtc

SEQ ID NO: 612483 - DNA, 25 bp, Homo sapien
tgggctggctggcaatctggcggtc

SEQ ID NO: 612484 - DNA, 25 bp, Homo sapien
ggccccggaattgccgctgcaggtt

SEQ ID NO: 612485 - DNA, 25 bp, Homo sapien
caaagtccgagtaacggcgagagat

SEQ ID NO: 612486 - DNA, 25 bp, Homo sapien
tgcaggtttcggtgcagccgctcaa

SEQ ID NO: 612487 - DNA, 25 bp, Homo sapien
tgattgacgtttgtccaggcccagg

SEQ ID NO: 612488 - DNA, 25 bp, Homo sapien
gctacggcgggcaatggtctctgca

SEQ ID NO: 612489 - DNA, 25 bp, Homo sapien
gagtgccagagcctcacgatagagg

SEQ ID NO: 612490 - DNA, 25 bp, Homo sapien
gcaaagggtggaggctcttgtcccc

SEQ ID NO: 612491 - DNA, 25 bp, Homo sapien
gctggcttttaattcccctgggcca

SEQ ID NO: 612492 - DNA, 25 bp, Homo sapien
gacttccctgtactacacaagggca

SEQ ID NO: 612493 - DNA, 25 bp, Homo sapien
gagtccctggccttcagccaagagg

SEQ ID NO: 612494 - DNA, 25 bp, Homo sapien
caagggaacattgccccaacctgtg

SEQ ID NO: 612495 - DNA, 25 bp, Homo sapien
gatggagtcctagctgtgacctgtg

SEQ ID NO: 612496 - DNA, 25 bp, Homo sapien
tttggccctcacatccaataaagag

SEQ ID NO: 612497 - DNA, 25 bp, Homo sapien
cagagagcaagctgtagccagaggt

SEQ ID NO: 612498 - DNA, 25 bp, Homo sapien
gcgtgatccgagtgaagccccaggt

SEQ ID NO: 612499 - DNA, 25 bp, Homo sapien
cagggagccgatagttttcctaaca

SEQ ID NO: 612500 - DNA, 25 bp, Homo sapien
ttctgcttggccgaactgttgaagg

SEQ ID NO: 612501 - DNA, 25 bp, Homo sapien
gacactcagtgcacccttgtgtggg

SEQ ID NO: 612502 - DNA, 25 bp, Homo sapien
tgggccagaccctttgcaagaagtc

SEQ ID NO: 612503 - DNA, 25 bp, Homo sapien
gctctgctatgtgtaagggaaacca

SEQ ID NO: 612504 - DNA, 25 bp, Homo sapien
aaacttgggcccaaagccagcaagg

SEQ ID NO: 612505 - DNA, 25 bp, Homo sapien
tacagcagtggtatccaaacccgca

SEQ ID NO: 612506 - DNA, 25 bp, Homo sapien
tactgtgagaactgagtgagctctg

SEQ ID NO: 612507 - DNA, 25 bp, Homo sapien
tgaaggccgtgcaacatgggaagcc

SEQ ID NO: 612508 - DNA, 25 bp, Homo sapien
gaagagctgcttgactgtgagaccc

SEQ ID NO: 612509 - DNA, 25 bp, Homo sapien
tactgtaccaagtggagcggacacg

SEQ ID NO: 612510 - DNA, 25 bp, Homo sapien
taaaatcctgtaagcgatgagcacc

SEQ ID NO: 612511 - DNA, 25 bp, Homo sapien
aacagaactctgacgcacaatagca

SEQ ID NO: 612512 - DNA, 25 bp, Homo sapien
cctgacagtgaaggaccaaatggct

SEQ ID NO: 612513 - DNA, 25 bp, Homo sapien
gcacaggaagccagcctactatcca

SEQ ID NO: 612514 - DNA, 25 bp, Homo sapien
gttgcctaggctcttccactctgct

SEQ ID NO: 612515 - DNA, 25 bp, Homo sapien
tagcttacctgcagaccaaggattg

SEQ ID NO: 612516 - DNA, 25 bp, Homo sapien
tagggctggaactcattcacactga

SEQ ID NO: 612517 - DNA, 25 bp, Homo sapien
gagagctgagcaagccagttgacct

SEQ ID NO: 612518 - DNA, 25 bp, Homo sapien
tgaggagctcgcactctgatagaag

SEQ ID NO: 612519 - DNA, 25 bp, Homo sapien
cactatgagggtttataggcaggcg

SEQ ID NO: 612520 - DNA, 25 bp, Homo sapien
caactgggtggcctattctggaact

SEQ ID NO: 612521 - DNA, 25 bp, Homo sapien
aactcagggaggaaccctaggcctg

SEQ ID NO: 612522 - DNA, 25 bp, Homo sapien
atgccttaagggtccgccccaactg

SEQ ID NO: 612523 - DNA, 25 bp, Homo sapien
atgtcttcgcggatggaggtgccat

SEQ ID NO: 612524 - DNA, 25 bp, Homo sapien
tctcccttttgtaggcgctgaagca

SEQ ID NO: 612525 - DNA, 25 bp, Homo sapien
gagacgcagtccctgagaatgaagg

SEQ ID NO: 612526 - DNA, 25 bp, Homo sapien
gaagcactccttgaagtcctcatag

SEQ ID NO: 612527 - DNA, 25 bp, Homo sapien
tggagtgggtggtcaaaaaccaatg

SEQ ID NO: 612528 - DNA, 25 bp, Homo sapien
ccgtggaggcttagctctcttcaca

SEQ ID NO: 612529 - DNA, 25 bp, Homo sapien
ggtgctcaatgagtgcctgttgaat

SEQ ID NO: 612530 - DNA, 25 bp, Homo sapien
aaaagcctgtgaatggagtgaaagt

SEQ ID NO: 612531 - DNA, 25 bp, Homo sapien
gtggaaagaatatagcctggctgtc

SEQ ID NO: 612532 - DNA, 25 bp, Homo sapien
agttggcccgcatgctctgagttaa

SEQ ID NO: 612533 - DNA, 25 bp, Homo sapien
tatgctttaactctgagttggcccg

SEQ ID NO: 612534 - DNA, 25 bp, Homo sapien
cagcatagcactggacttcagaaca

SEQ ID NO: 612535 - DNA, 25 bp, Homo sapien
aggtagaggtaacaatgagaaaggt

SEQ ID NO: 612536 - DNA, 25 bp, Homo sapien
gaaggtagaggtaacaatgagaaag

SEQ ID NO: 612537 - DNA, 25 bp, Homo sapien
gggaaggtagaggtaacaatgagaa

SEQ ID NO: 612538 - DNA, 25 bp, Homo sapien
ctagggaaggtagaggtaacaatga

SEQ ID NO: 612539 - DNA, 25 bp, Homo sapien
tcctgtttgattgggtccgaatgca

SEQ ID NO: 612540 - DNA, 25 bp, Homo sapien
tccgaatgcagacaaatttcacctg

SEQ ID NO: 612541 - DNA, 25 bp, Homo sapien
ccttaggagcaagtacgctgggcac

SEQ ID NO: 612542 - DNA, 25 bp, Homo sapien
tagtctctcgttgtaccttaggagc

SEQ ID NO: 612543 - DNA, 25 bp, Homo sapien
gtctcctccaggactagccacttta

SEQ ID NO: 612544 - DNA, 25 bp, Homo sapien
gagatttgccagtggtgtctcctcc

SEQ ID NO: 612545 - DNA, 25 bp, Homo sapien
tgagatttgccagtggtgtctcctc

SEQ ID NO: 612546 - DNA, 25 bp, Homo sapien
caggactagccactttagagtcacc

SEQ ID NO: 612547 - DNA, 25 bp, Homo sapien
caggctggagtctctgcaggcacat

SEQ ID NO: 612548 - DNA, 25 bp, Homo sapien
acaggctggagtctctgcaggcaca

SEQ ID NO: 612549 - DNA, 25 bp, Homo sapien
gcacaggctggagtctctgcaggca

SEQ ID NO: 612550 - DNA, 25 bp, Homo sapien
ctgcacaggctggagtctctgcagg

SEQ ID NO: 612551 - DNA, 25 bp, Homo sapien
gatatccacaatcttgcgcagggtg

SEQ ID NO: 612552 - DNA, 25 bp, Homo sapien
tgaagagatcctcatccagtacggc

SEQ ID NO: 612553 - DNA, 25 bp, Homo sapien
tccacccggtgtagcaagagattct

SEQ ID NO: 612554 - DNA, 25 bp, Homo sapien
tttgggaccataccacgatcctgga

SEQ ID NO: 612555 - DNA, 25 bp, Homo sapien
aatgcatcacagctgtagcaggagg

SEQ ID NO: 612556 - DNA, 25 bp, Homo sapien
atgcatcacagctgtagcaggaggg

SEQ ID NO: 612557 - DNA, 25 bp, Homo sapien
aataatgcatcacagctgtagcagg

SEQ ID NO: 612558 - DNA, 25 bp, Homo sapien
taatgcatcacagctgtagcaggag

SEQ ID NO: 612559 - DNA, 25 bp, Homo sapien
ggtccaatgcttcagctaaagtgct

SEQ ID NO: 612560 - DNA, 25 bp, Homo sapien
ctttggccttgaacaacaactgagg

SEQ ID NO: 612561 - DNA, 25 bp, Homo sapien
aatgctaaaccctagtatgtcctgc

SEQ ID NO: 612562 - DNA, 25 bp, Homo sapien
tactgtaacaatattcctagcccca

SEQ ID NO: 612563 - DNA, 25 bp, Homo sapien
ccacagccaggctccgtcgccattt

SEQ ID NO: 612564 - DNA, 25 bp, Homo sapien
cacagccaggctccgtcgccatttc

SEQ ID NO: 612565 - DNA, 25 bp, Homo sapien
tggaggctagacaatcattcccaga

SEQ ID NO: 612566 - DNA, 25 bp, Homo sapien
gctagacaatcattcccagatcttt

SEQ ID NO: 612567 - DNA, 25 bp, Homo sapien
gaggctagacaatcattcccagatc

SEQ ID NO: 612568 - DNA, 25 bp, Homo sapien
gctggaggctagacaatcattccca

SEQ ID NO: 612569 - DNA, 25 bp, Homo sapien
gagagatgggagctgtccaaatgcc

SEQ ID NO: 612570 - DNA, 25 bp, Homo sapien
aaatgccaaggtcaaaatactttct

SEQ ID NO: 612571 - DNA, 25 bp, Homo sapien
tgtccaaatgccaaggtcaaaatac

SEQ ID NO: 612572 - DNA, 25 bp, Homo sapien
gggagctgtccaaatgccaaggtca

SEQ ID NO: 612573 - DNA, 25 bp, Homo sapien
gcagctctggtagttgaaggtatct

SEQ ID NO: 612574 - DNA, 25 bp, Homo sapien
tccaccaggaaggtatataagacct

SEQ ID NO: 612575 - DNA, 25 bp, Homo sapien
tgttaacctggtgcagcagcatagg

SEQ ID NO: 612576 - DNA, 25 bp, Homo sapien
gcttgagtccttaatcaggagccca

SEQ ID NO: 612577 - DNA, 25 bp, Homo sapien
cttcagtgtcctccttggcagggat

SEQ ID NO: 612578 - DNA, 25 bp, Homo sapien
cttggcagggatggcaaagtagact

SEQ ID NO: 612579 - DNA, 25 bp, Homo sapien
aggccttcagtgtcctccttggcag

SEQ ID NO: 612580 - DNA, 25 bp, Homo sapien
gccaggccttcagtgtcctccttgg

SEQ ID NO: 612581 - DNA, 25 bp, Homo sapien
tgtctagactggtagcacagcctgc

SEQ ID NO: 612582 - DNA, 25 bp, Homo sapien
gagttggacctgctcataaggccca

SEQ ID NO: 612583 - DNA, 25 bp, Homo sapien
tgtgggattctaccagctgctccag

SEQ ID NO: 612584 - DNA, 25 bp, Homo sapien
tgagccagccagatgcggtcgttga

SEQ ID NO: 612585 - DNA, 25 bp, Homo sapien
caggccatggtagatgagaagaccc

SEQ ID NO: 612586 - DNA, 25 bp, Homo sapien
gacacatgctaggtagcaggccatg

SEQ ID NO: 612587 - DNA, 25 bp, Homo sapien
ggcccacggaagtacaacagtgtaa

SEQ ID NO: 612588 - DNA, 25 bp, Homo sapien
tgtgcacaggtgcatgagcatctct

SEQ ID NO: 612589 - DNA, 25 bp, Homo sapien
tactgcaacctctgcctcccaggtt

SEQ ID NO: 612590 - DNA, 25 bp, Homo sapien
cacctggctaatttgtgtattttta

SEQ ID NO: 612591 - DNA, 25 bp, Homo sapien
acctggctaatttgtgtatttttag

SEQ ID NO: 612592 - DNA, 25 bp, Homo sapien
gtggcagcaggatcttggcctactg

SEQ ID NO: 612593 - DNA, 25 bp, Homo sapien
tcagttttattgaccccaggatggg

SEQ ID NO: 612594 - DNA, 25 bp, Homo sapien
ttttatctcttatcttagaccaggg

SEQ ID NO: 612595 - DNA, 25 bp, Homo sapien
taaaggagacgggttaagtgagtca

SEQ ID NO: 612596 - DNA, 25 bp, Homo sapien
tgactggggcaactgctaccaagcc

SEQ ID NO: 612597 - DNA, 25 bp, Homo sapien
gccagggctctacagccatctcttg

SEQ ID NO: 612598 - DNA, 25 bp, Homo sapien
ggccagggctctacagccatctctt

SEQ ID NO: 612599 - DNA, 25 bp, Homo sapien
ctctgcccgatctggtcaacctggg

SEQ ID NO: 612600 - DNA, 25 bp, Homo sapien
tatctgcgcattgagcagtttcgca

SEQ ID NO: 612601 - DNA, 25 bp, Homo sapien
aaccctcctcgtggaaccatatctg

SEQ ID NO: 612602 - DNA, 25 bp, Homo sapien
tgcccgatctggtcaacctgggcca

SEQ ID NO: 612603 - DNA, 25 bp, Homo sapien
ggaaatgccttacaaggtcgccttg

SEQ ID NO: 612604 - DNA, 25 bp, Homo sapien
tgtacgagtcacgtgaactccggcg

SEQ ID NO: 612605 - DNA, 25 bp, Homo sapien
cgggcgcacgcgatcagatgatcct

SEQ ID NO: 612606 - DNA, 25 bp, Homo sapien
ggtcgccttgcggtcaccatcattg

SEQ ID NO: 612607 - DNA, 25 bp, Homo sapien
tgctcccccgcgtccttgctctcca

SEQ ID NO: 612608 - DNA, 25 bp, Homo sapien
ctctgctcccccgcgtccttgctct

SEQ ID NO: 612609 - DNA, 25 bp, Homo sapien
ctgctcccccgcgtccttgctctcc

SEQ ID NO: 612610 - DNA, 25 bp, Homo sapien
ctcccccgcgtccttgctctccagg

SEQ ID NO: 612611 - DNA, 25 bp, Homo sapien
gggatcccctccagcctccggtgcc

SEQ ID NO: 612612 - DNA, 25 bp, Homo sapien
cgggctcggggatcccctccagcct

SEQ ID NO: 612613 - DNA, 25 bp, Homo sapien
cctccagcctccggtgccagctcac

SEQ ID NO: 612614 - DNA, 25 bp, Homo sapien
tcccctccagcctccggtgccagct

SEQ ID NO: 612615 - DNA, 25 bp, Homo sapien
ctggcggcgcctccgcgagggaagc

SEQ ID NO: 612616 - DNA, 25 bp, Homo sapien
gctgttgactcgctcctcagcgctt

SEQ ID NO: 612617 - DNA, 25 bp, Homo sapien
gcagaggggctgttgactcgctcct

SEQ ID NO: 612618 - DNA, 25 bp, Homo sapien
tcctcagcgcttccgtgcagcagcc

SEQ ID NO: 612619 - DNA, 25 bp, Homo sapien
agtactggcggaaagacggctgctt

SEQ ID NO: 612620 - DNA, 25 bp, Homo sapien
agtggaggtgcttggagccggagcc

SEQ ID NO: 612621 - DNA, 25 bp, Homo sapien
gagcctttgaggtagccggagtact

SEQ ID NO: 612622 - DNA, 25 bp, Homo sapien
gcttggagccggagcctttgaggta

SEQ ID NO: 612623 - DNA, 25 bp, Homo sapien
cagggttggcgcagttggaggggcc

SEQ ID NO: 612624 - DNA, 25 bp, Homo sapien
gggctgttctcgggatccttctggg

SEQ ID NO: 612625 - DNA, 25 bp, Homo sapien
agccgggacccccattgagccaaag

SEQ ID NO: 612626 - DNA, 25 bp, Homo sapien
gagccaaagcaccacagggctgttc

SEQ ID NO: 612627 - DNA, 25 bp, Homo sapien
ggctgttctcgggatccttctggga

SEQ ID NO: 612628 - DNA, 25 bp, Homo sapien
ggccatgctctgtgaggagcccatc

SEQ ID NO: 612629 - DNA, 25 bp, Homo sapien
catgctctgtgaggagcccatctag

SEQ ID NO: 612630 - DNA, 25 bp, Homo sapien
ccatgctctgtgaggagcccatcta

SEQ ID NO: 612631 - DNA, 25 bp, Homo sapien
tgctctgtgaggagcccatctagtg

SEQ ID NO: 612632 - DNA, 25 bp, Homo sapien
tccaagaataggggttgtactccag

SEQ ID NO: 612633 - DNA, 25 bp, Homo sapien
tgtactccagggtgacaccatctgg

SEQ ID NO: 612634 - DNA, 25 bp, Homo sapien
ttgtactccagggtgacaccatctg

SEQ ID NO: 612635 - DNA, 25 bp, Homo sapien
gattccaagaataggggttgtactc

SEQ ID NO: 612636 - DNA, 25 bp, Homo sapien
cataaaacttgtcatcggagtagga

SEQ ID NO: 612637 - DNA, 25 bp, Homo sapien
cagtgtcattagttgcataaaactt

SEQ ID NO: 612638 - DNA, 25 bp, Homo sapien
cttgtcatcggagtaggagaagccc

SEQ ID NO: 612639 - DNA, 25 bp, Homo sapien
gggactccaggtataacacattggc

SEQ ID NO: 612640 - DNA, 25 bp, Homo sapien
cggaaagaggcggaagaaatcttga

SEQ ID NO: 612641 - DNA, 25 bp, Homo sapien
ggatgtagatgccagcatagctctc

SEQ ID NO: 612642 - DNA, 25 bp, Homo sapien
tgttgttcttgtactccggaaagag

SEQ ID NO: 612643 - DNA, 25 bp, Homo sapien
cagcatagctctccccggtcaggaa

SEQ ID NO: 612644 - DNA, 25 bp, Homo sapien
ccagggtggtttatgtaggccggtg

SEQ ID NO: 612645 - DNA, 25 bp, Homo sapien
cagcaatccggaagctgaaacccag

SEQ ID NO: 612646 - DNA, 25 bp, Homo sapien
gctcagctcatgtggagggcaaaaa

SEQ ID NO: 612647 - DNA, 25 bp, Homo sapien
ccggtgggtatgagaggccactcaa

SEQ ID NO: 612648 - DNA, 25 bp, Homo sapien
agaaggccatggtagtaggcaaagt

SEQ ID NO: 612649 - DNA, 25 bp, Homo sapien
aagtagaccagggagttgtcattct

SEQ ID NO: 612650 - DNA, 25 bp, Homo sapien
cccagaaggccatggtagtaggcaa

SEQ ID NO: 612651 - DNA, 25 bp, Homo sapien
gaccagggagttgtcattctgctca

SEQ ID NO: 612652 - DNA, 25 bp, Homo sapien
agattgcccaactgccctatcccat

SEQ ID NO: 612653 - DNA, 25 bp, Homo sapien
gattgcccaactgccctatcccata

SEQ ID NO: 612654 - DNA, 25 bp, Homo sapien
ccagagattgcccaactgccctatc

SEQ ID NO: 612655 - DNA, 25 bp, Homo sapien
agagattgcccaactgccctatccc

SEQ ID NO: 612656 - DNA, 25 bp, Homo sapien
gatgagagtgaaaagcgcatcagct

SEQ ID NO: 612657 - DNA, 25 bp, Homo sapien
atgagagtgaaaagcgcatcagctg

SEQ ID NO: 612658 - DNA, 25 bp, Homo sapien
tgttgtcatagaagttacacttgtt

SEQ ID NO: 612659 - DNA, 25 bp, Homo sapien
ttgttttgagagcagcagtgggtct

SEQ ID NO: 612660 - DNA, 25 bp, Homo sapien
gcagtgggtctggagagaagaccaa

SEQ ID NO: 612661 - DNA, 25 bp, Homo sapien
cattccaggtctttgttgtcataga

SEQ ID NO: 612662 - DNA, 25 bp, Homo sapien
ctcacggaggttatgggatttgcca

SEQ ID NO: 612663 - DNA, 25 bp, Homo sapien
cactaaattgcttaaaggtgcaaga

SEQ ID NO: 612664 - DNA, 25 bp, Homo sapien
tggtggtgggaatacacacttagac

SEQ ID NO: 612665 - DNA, 25 bp, Homo sapien
tccccaaggagggaatgtggtcctg

SEQ ID NO: 612666 - DNA, 25 bp, Homo sapien
catagagattgtagatgttgaggcc

SEQ ID NO: 612667 - DNA, 25 bp, Homo sapien
gagttgcccacgatgcgggccactt

SEQ ID NO: 612668 - DNA, 25 bp, Homo sapien
cagcacacggggcatagagattgta

SEQ ID NO: 612669 - DNA, 25 bp, Homo sapien
ttgtagatgttgaggccagagttgc

SEQ ID NO: 612670 - DNA, 25 bp, Homo sapien
ctgatgccacatccgcttgagtggc

SEQ ID NO: 612671 - DNA, 25 bp, Homo sapien
atgccacatccgcttgagtggcagg

SEQ ID NO: 612672 - DNA, 25 bp, Homo sapien
gccacatccgcttgagtggcaggcg

SEQ ID NO: 612673 - DNA, 25 bp, Homo sapien
cacatccgcttgagtggcaggcgag

SEQ ID NO: 612674 - DNA, 25 bp, Homo sapien
caggaggaagcccacgccctcgcac

SEQ ID NO: 612675 - DNA, 25 bp, Homo sapien
aggaggaagcccacgccctcgcaca

SEQ ID NO: 612676 - DNA, 25 bp, Homo sapien
ggaggaagcccacgccctcgcacac

SEQ ID NO: 612677 - DNA, 25 bp, Homo sapien
tgttgtgttggtgcagggggggtcc

SEQ ID NO: 612678 - DNA, 25 bp, Homo sapien
gggtccatgcgcactttatcccctg

SEQ ID NO: 612679 - DNA, 25 bp, Homo sapien
cagggggggtccatgcgcactttat

SEQ ID NO: 612680 - DNA, 25 bp, Homo sapien
ctttatcccctgagcgcagcagtgc

SEQ ID NO: 612681 - DNA, 25 bp, Homo sapien
cacgtacgggttgttgaggtaggtg

SEQ ID NO: 612682 - DNA, 25 bp, Homo sapien
gccttccgcacgtacgggttgttga

SEQ ID NO: 612683 - DNA, 25 bp, Homo sapien
cgggttgttgaggtaggtggaagca

SEQ ID NO: 612684 - DNA, 25 bp, Homo sapien
tgctccgggatgttgagggccttcc

SEQ ID NO: 612685 - DNA, 25 bp, Homo sapien
caatgtggctacgtaatgaaatggg

SEQ ID NO: 612686 - DNA, 25 bp, Homo sapien
tattaaccaatgtgatggccgggtg

SEQ ID NO: 612687 - DNA, 25 bp, Homo sapien
tggctgactctcaatccactgaggg

SEQ ID NO: 612688 - DNA, 25 bp, Homo sapien
tgtagtgaactgtgaaacaacaacc

SEQ ID NO: 612689 - DNA, 25 bp, Homo sapien
gctgggattcagacagcctcaactc

SEQ ID NO: 612690 - DNA, 25 bp, Homo sapien
gggccacctctctaggactgacttg

SEQ ID NO: 612691 - DNA, 25 bp, Homo sapien
tcaccaccatttagaaaggtacagg

SEQ ID NO: 612692 - DNA, 25 bp, Homo sapien
cattttggttgttacgaggactggg

SEQ ID NO: 612693 - DNA, 25 bp, Homo sapien
tagagacggcggtactgtaagttta

SEQ ID NO: 612694 - DNA, 25 bp, Homo sapien
catgcttcggtagagacggcggtac

SEQ ID NO: 612695 - DNA, 25 bp, Homo sapien
ttcagatactgggagttcatgcttc

SEQ ID NO: 612696 - DNA, 25 bp, Homo sapien
tactgggagttcatgcttcggtaga

SEQ ID NO: 612697 - DNA, 25 bp, Homo sapien
gtggctgatgcagacccctaggcct

SEQ ID NO: 612698 - DNA, 25 bp, Homo sapien
tgctattaaccactgtgctggacag

SEQ ID NO: 612699 - DNA, 25 bp, Homo sapien
gacagaacctagtcctaacttggcc

SEQ ID NO: 612700 - DNA, 25 bp, Homo sapien
caagctagataacacgaaccaggga

SEQ ID NO: 612701 - DNA, 25 bp, Homo sapien
tcccccatgaaattgcaggccatgt

SEQ ID NO: 612702 - DNA, 25 bp, Homo sapien
gaaattgcaggccatgtctacatct

SEQ ID NO: 612703 - DNA, 25 bp, Homo sapien
catcccccatgaaattgcaggccat

SEQ ID NO: 612704 - DNA, 25 bp, Homo sapien
gtctacatctccattatataatagg

SEQ ID NO: 612705 - DNA, 25 bp, Homo sapien
gccactcccaggcatacccgctccc

SEQ ID NO: 612706 - DNA, 25 bp, Homo sapien
actcccaggcatacccgctcccaat

SEQ ID NO: 612707 - DNA, 25 bp, Homo sapien
acccgctcccaatcctccacagcag

SEQ ID NO: 612708 - DNA, 25 bp, Homo sapien
caggcatacccgctcccaatcctcc

SEQ ID NO: 612709 - DNA, 25 bp, Homo sapien
ggctgggaattcctccacacttgcc

SEQ ID NO: 612710 - DNA, 25 bp, Homo sapien
atccttgctcacagctaccagcaag

SEQ ID NO: 612711 - DNA, 25 bp, Homo sapien
cagctaccagcaagaccttagggct

SEQ ID NO: 612712 - DNA, 25 bp, Homo sapien
agcaagaccttagggctgggaattc

SEQ ID NO: 612713 - DNA, 25 bp, Homo sapien
aagccggcaatctgctccccgctgt

SEQ ID NO: 612714 - DNA, 25 bp, Homo sapien
cttgatcgtgagaaaggcgatgtgg

SEQ ID NO: 612715 - DNA, 25 bp, Homo sapien
cgtacttcactaaccagggccggcg

SEQ ID NO: 612716 - DNA, 25 bp, Homo sapien
gtgggagaactccttcacgaagccg

SEQ ID NO: 612717 - DNA, 25 bp, Homo sapien
atctctcagcaggcccagtccctac

SEQ ID NO: 612718 - DNA, 25 bp, Homo sapien
ttatctctcagcaggcccagtccct

SEQ ID NO: 612719 - DNA, 25 bp, Homo sapien
tatctctcagcaggcccagtcccta

SEQ ID NO: 612720 - DNA, 25 bp, Homo sapien
caatgttcgtgagctcctgacccca

SEQ ID NO: 612721 - DNA, 25 bp, Homo sapien
gcaatgttcgtgagctcctgacccc

SEQ ID NO: 612722 - DNA, 25 bp, Homo sapien
aatgttcgtgagctcctgaccccac

SEQ ID NO: 612723 - DNA, 25 bp, Homo sapien
gggagaacatggtgaaggcagcgag

SEQ ID NO: 612724 - DNA, 25 bp, Homo sapien
cagtatggctgcttgttcaggaagc

SEQ ID NO: 612725 - DNA, 25 bp, Homo sapien
cagcgaggggcttgtcggtgggaac

SEQ ID NO: 612726 - DNA, 25 bp, Homo sapien
gggcttgtcggtgggaaccatgtgg

SEQ ID NO: 612727 - DNA, 25 bp, Homo sapien
cccaggctgtctatgggagaccctg

SEQ ID NO: 612728 - DNA, 25 bp, Homo sapien
tagaagaggactctcctagcgggag

SEQ ID NO: 612729 - DNA, 25 bp, Homo sapien
tcctgggatggaatcagtgcatcat

SEQ ID NO: 612730 - DNA, 25 bp, Homo sapien
ccccattcaggaactgctgcgggaa

SEQ ID NO: 612731 - DNA, 25 bp, Homo sapien
gattgagaagaaccggcctgctgat

SEQ ID NO: 612732 - DNA, 25 bp, Homo sapien
ctgctgatgtcagggcgtccactgc

SEQ ID NO: 612733 - DNA, 25 bp, Homo sapien
aacacagggattcctcaccatcggg

SEQ ID NO: 612734 - DNA, 25 bp, Homo sapien
ccactttgccaaagggctgcgagag

SEQ ID NO: 612735 - DNA, 25 bp, Homo sapien
cctggacatggacttccgggtgagc

SEQ ID NO: 612736 - DNA, 25 bp, Homo sapien
cagccgtgagtgacttgagcccctt

SEQ ID NO: 612737 - DNA, 25 bp, Homo sapien
tccctcatgaaggatcctgtggctt

SEQ ID NO: 612738 - DNA, 25 bp, Homo sapien
tcattttatgggtgggcctctgagc

SEQ ID NO: 612739 - DNA, 25 bp, Homo sapien
ctctgtctactgtggggcaaaggta

SEQ ID NO: 612740 - DNA, 25 bp, Homo sapien
gggaaaggaacctcatgccatcttt

SEQ ID NO: 612741 - DNA, 25 bp, Homo sapien
ttcccatcacacctaacacacaggc

SEQ ID NO: 612742 - DNA, 25 bp, Homo sapien
acaggcatgggaagcgaaggaggag

SEQ ID NO: 612743 - DNA, 25 bp, Homo sapien
tgcaagatccgcgtcacctccaagg

SEQ ID NO: 612744 - DNA, 25 bp, Homo sapien
caacagtgggcacgggagctaagta

SEQ ID NO: 612745 - DNA, 25 bp, Homo sapien
tgctggcaggcgcacatgcagagtt

SEQ ID NO: 612746 - DNA, 25 bp, Homo sapien
agttcccaggctgcaagatccgcgt

SEQ ID NO: 612747 - DNA, 25 bp, Homo sapien
actttatcccaggaggcctaagcgg

SEQ ID NO: 612748 - DNA, 25 bp, Homo sapien
agtgtatgatagactggcacagtag

SEQ ID NO: 612749 - DNA, 25 bp, Homo sapien
atcccaggaggcctaagcgggcaga

SEQ ID NO: 612750 - DNA, 25 bp, Homo sapien
aatagtgtatgatagactggcacag

SEQ ID NO: 612751 - DNA, 25 bp, Homo sapien
catcgaacccaagctgtaaatgctc

SEQ ID NO: 612752 - DNA, 25 bp, Homo sapien
tccggacgtagcaaggacctgggtc

SEQ ID NO: 612753 - DNA, 25 bp, Homo sapien
tccctgctgttccttgtggcgctga

SEQ ID NO: 612754 - DNA, 25 bp, Homo sapien
tgcccgggctacatatacatcgaac

SEQ ID NO: 612755 - DNA, 25 bp, Homo sapien
tgcgcatgcgctggtaccgcctctg

SEQ ID NO: 612756 - DNA, 25 bp, Homo sapien
gggacgcggctacacgttctgctcg

SEQ ID NO: 612757 - DNA, 25 bp, Homo sapien
gccatcttgtgtcccgggccgggac

SEQ ID NO: 612758 - DNA, 25 bp, Homo sapien
acgttctgctcgaccgcccgttttg

SEQ ID NO: 612759 - DNA, 25 bp, Homo sapien
ccacccgcgggtctaagatggcggc

SEQ ID NO: 612760 - DNA, 25 bp, Homo sapien
agcggcagtcccgagcagaaagcgc

SEQ ID NO: 612761 - DNA, 25 bp, Homo sapien
gcggcggcaacagagacagggcaag

SEQ ID NO: 612762 - DNA, 25 bp, Homo sapien
gcccacccgcgggtctaagatggcg

SEQ ID NO: 612763 - DNA, 25 bp, Homo sapien
accatctccgcaatgtaccaatcag

SEQ ID NO: 612764 - DNA, 25 bp, Homo sapien
ccagagtccgagtccgggattggag

SEQ ID NO: 612765 - DNA, 25 bp, Homo sapien
cgtggggcgggaccatctccgcaat

SEQ ID NO: 612766 - DNA, 25 bp, Homo sapien
gggcgggaccatctccgcaatgtac

SEQ ID NO: 612767 - DNA, 25 bp, Homo sapien
tcagcacaggcgaatgggctggtca

SEQ ID NO: 612768 - DNA, 25 bp, Homo sapien
gcaacgttagcatgagaggcttttc

SEQ ID NO: 612769 - DNA, 25 bp, Homo sapien
ctgcaggaagactcagcacaggcga

SEQ ID NO: 612770 - DNA, 25 bp, Homo sapien
ggtctgcaacgttagcatgagaggc

SEQ ID NO: 612771 - DNA, 25 bp, Homo sapien
gattctctgggcaggaagaattcct

SEQ ID NO: 612772 - DNA, 25 bp, Homo sapien
gaagaattcctgatgccttgggggc

SEQ ID NO: 612773 - DNA, 25 bp, Homo sapien
aaaaaatgaagctgccttgattctc

SEQ ID NO: 612774 - DNA, 25 bp, Homo sapien
gcacacaggtttcaagactgaatga

SEQ ID NO: 612775 - DNA, 25 bp, Homo sapien
tacagtttggcagataaaaatgcag

SEQ ID NO: 612776 - DNA, 25 bp, Homo sapien
tattgtacactccatcatagacgtc

SEQ ID NO: 612777 - DNA, 25 bp, Homo sapien
gacatatgtacaacaaaaagtgcct

SEQ ID NO: 612778 - DNA, 25 bp, Homo sapien
aaagtcaatggttactccatcagta

SEQ ID NO: 612779 - DNA, 25 bp, Homo sapien
tttatcaactcattgtggtcacact

SEQ ID NO: 612780 - DNA, 25 bp, Homo sapien
attgtggtcacactgattatctcat

SEQ ID NO: 612781 - DNA, 25 bp, Homo sapien
ttgtggtcacactgattatctcatg

SEQ ID NO: 612782 - DNA, 25 bp, Homo sapien
gaggtacctggggagtgactcagca

SEQ ID NO: 612783 - DNA, 25 bp, Homo sapien
gagaacagggctggctctgattgga

SEQ ID NO: 612784 - DNA, 25 bp, Homo sapien
ctgaaccaggcggattggctttgga

SEQ ID NO: 612785 - DNA, 25 bp, Homo sapien
ccgggggctgccgtgattctcattg

SEQ ID NO: 612786 - DNA, 25 bp, Homo sapien
tcacatcgtgctgccccagcacggg

SEQ ID NO: 612787 - DNA, 25 bp, Homo sapien
tagtagggacgattctccctccggc

SEQ ID NO: 612788 - DNA, 25 bp, Homo sapien
aatcggttgaagtagtagggacgat

SEQ ID NO: 612789 - DNA, 25 bp, Homo sapien
tctcccagcctgcatgcaccagctc

SEQ ID NO: 612790 - DNA, 25 bp, Homo sapien
agaccagcagagttgcaaccagggc

SEQ ID NO: 612791 - DNA, 25 bp, Homo sapien
ggctgctcttccgagagctgccgct

SEQ ID NO: 612792 - DNA, 25 bp, Homo sapien
acaccattgccgcttggctgctctt

SEQ ID NO: 612793 - DNA, 25 bp, Homo sapien
gcagtggggtcgcattcagccccaa

SEQ ID NO: 612794 - DNA, 25 bp, Homo sapien
gggtcgcattcagccccaaagggtc

SEQ ID NO: 612795 - DNA, 25 bp, Homo sapien
tcagcgttggggttcctgggatact

SEQ ID NO: 612796 - DNA, 25 bp, Homo sapien
ttatcttcaggggacgtaccccaca

SEQ ID NO: 612797 - DNA, 25 bp, Homo sapien
cgtaccccacatcttcagcgttggg

SEQ ID NO: 612798 - DNA, 25 bp, Homo sapien
tcagtgggtcgtaggagagctgcct

SEQ ID NO: 612799 - DNA, 25 bp, Homo sapien
gagctgagagcggagcagttccact

SEQ ID NO: 612800 - DNA, 25 bp, Homo sapien
gcccccggtgcttgatgacagcatt

SEQ ID NO: 612801 - DNA, 25 bp, Homo sapien
gctggcacagctcccgatagtgctg

SEQ ID NO: 612802 - DNA, 25 bp, Homo sapien
tgctgccgaagcttcaggatgagct

SEQ ID NO: 612803 - DNA, 25 bp, Homo sapien
cagcatccagcggttgaaagactcc

SEQ ID NO: 612804 - DNA, 25 bp, Homo sapien
gactggttcacagttgctgggcaac

SEQ ID NO: 612805 - DNA, 25 bp, Homo sapien
cgaaacatggaaggtgacacgactg

SEQ ID NO: 612806 - DNA, 25 bp, Homo sapien
gaaagactcccgtggaggctcaatg

SEQ ID NO: 612807 - DNA, 25 bp, Homo sapien
cagagtgggcagagttagaggcctt

SEQ ID NO: 612808 - DNA, 25 bp, Homo sapien
ttcagagtgggcagagttagaggcc

SEQ ID NO: 612809 - DNA, 25 bp, Homo sapien
ctgcgtttcagagtgggcagagtta

SEQ ID NO: 612810 - DNA, 25 bp, Homo sapien
gtttcagagtgggcagagttagagg

SEQ ID NO: 612811 - DNA, 25 bp, Homo sapien
tcctcccggaacttgattcgggata

SEQ ID NO: 612812 - DNA, 25 bp, Homo sapien
tccgcatatttaaagagcaggcgct

SEQ ID NO: 612813 - DNA, 25 bp, Homo sapien
atttaaagagcaggcgcttggcttc

SEQ ID NO: 612814 - DNA, 25 bp, Homo sapien
tggcggcctccgcatatttaaagag

SEQ ID NO: 612815 - DNA, 25 bp, Homo sapien
cacattccatttgaccaccttccta

SEQ ID NO: 612816 - DNA, 25 bp, Homo sapien
tggtccttccgaagccagctaaagg

SEQ ID NO: 612817 - DNA, 25 bp, Homo sapien
gaggctgagtggtccttccgaagcc

SEQ ID NO: 612818 - DNA, 25 bp, Homo sapien
tttgaccaccttcctactgtcaggg

SEQ ID NO: 612819 - DNA, 25 bp, Homo sapien
tgcagatgccttccacggagtcctt

SEQ ID NO: 612820 - DNA, 25 bp, Homo sapien
gatccgtttgacgtactccagggag

SEQ ID NO: 612821 - DNA, 25 bp, Homo sapien
tgcctccgcagatgctccaggcgat

SEQ ID NO: 612822 - DNA, 25 bp, Homo sapien
tgtggtagatcttactgcagatgcc

SEQ ID NO: 612823 - DNA, 25 bp, Homo sapien
catctctcccttataccggatgcag

SEQ ID NO: 612824 - DNA, 25 bp, Homo sapien
cttgctgaagtagttgcggctgacc

SEQ ID NO: 612825 - DNA, 25 bp, Homo sapien
gatgcagaccacgttgttctccatg

SEQ ID NO: 612826 - DNA, 25 bp, Homo sapien
cagccggactgggtagcagtacact

SEQ ID NO: 612827 - DNA, 25 bp, Homo sapien
aatgcagctgtagcggtaaaggagc

SEQ ID NO: 612828 - DNA, 25 bp, Homo sapien
ctctcaaaggcagagtcatcaatgc

SEQ ID NO: 612829 - DNA, 25 bp, Homo sapien
ggcagagtcatcaatgcagctgtag

SEQ ID NO: 612830 - DNA, 25 bp, Homo sapien
gagtcatcaatgcagctgtagcggt

SEQ ID NO: 612831 - DNA, 25 bp, Homo sapien
ctggggctcaccctccctgttccct

SEQ ID NO: 612832 - DNA, 25 bp, Homo sapien
tcctggggagccctccctgctgccc

SEQ ID NO: 612833 - DNA, 25 bp, Homo sapien
tgcggagtggccaccgtcagcacct

SEQ ID NO: 612834 - DNA, 25 bp, Homo sapien
ccctcctggggagccctccctgctg

SEQ ID NO: 612835 - DNA, 25 bp, Homo sapien
cgaagctgacgccaaagagtcggtg

SEQ ID NO: 612836 - DNA, 25 bp, Homo sapien
cgtagaggcccacgccgaacatcat

SEQ ID NO: 612837 - DNA, 25 bp, Homo sapien
cagaacagtactggcggaagtagca

SEQ ID NO: 612838 - DNA, 25 bp, Homo sapien
ggagccaaagtagccgtctgtgtcg

SEQ ID NO: 612839 - DNA, 25 bp, Homo sapien
agggttggcctcaaatgaaccactc

SEQ ID NO: 612840 - DNA, 25 bp, Homo sapien
ctcaaagtgagagaccatggcatcc

SEQ ID NO: 612841 - DNA, 25 bp, Homo sapien
gcctcaaatgaaccactcagtggag

SEQ ID NO: 612842 - DNA, 25 bp, Homo sapien
tccatgagctcctcgcagaagggag

SEQ ID NO: 612843 - DNA, 25 bp, Homo sapien
ccactgcggtactcatgctcaaagg

SEQ ID NO: 612844 - DNA, 25 bp, Homo sapien
gctctgctccatgcgggtgagcgct

SEQ ID NO: 612845 - DNA, 25 bp, Homo sapien
caactggtggcgtttgaagcggctc

SEQ ID NO: 612846 - DNA, 25 bp, Homo sapien
gctccggtgagctctcaagcagtct

SEQ ID NO: 612847 - DNA, 25 bp, Homo sapien
ggcaaaggcaatggctcagggtggg

SEQ ID NO: 612848 - DNA, 25 bp, Homo sapien
ctgcgggcaaaggcaatggctcagg

SEQ ID NO: 612849 - DNA, 25 bp, Homo sapien
cgggcaaaggcaatggctcagggtg

SEQ ID NO: 612850 - DNA, 25 bp, Homo sapien
tgcgggcaaaggcaatggctcaggg

SEQ ID NO: 612851 - DNA, 25 bp, Homo sapien
tgttgtggacggccttgtagtgcat

SEQ ID NO: 612852 - DNA, 25 bp, Homo sapien
gcaaagccagggtcgttctgtagga

SEQ ID NO: 612853 - DNA, 25 bp, Homo sapien
gccgtgttgtggacggccttgtagt

SEQ ID NO: 612854 - DNA, 25 bp, Homo sapien
tcctgcagccgttcaggcgtcggcg

SEQ ID NO: 612855 - DNA, 25 bp, Homo sapien
cgaggaggacgatgaggaagaacca

SEQ ID NO: 612856 - DNA, 25 bp, Homo sapien
atgaggaagaaccagagctgtggct

SEQ ID NO: 612857 - DNA, 25 bp, Homo sapien
agaaccagagctgtggctgcggcct

SEQ ID NO: 612858 - DNA, 25 bp, Homo sapien
tccgaggaggacgatgaggaagaac

SEQ ID NO: 612859 - DNA, 25 bp, Homo sapien
gtggggtgaggctcgcggctaggac

SEQ ID NO: 612860 - DNA, 25 bp, Homo sapien
aggctcgcggctaggaccctgctca

SEQ ID NO: 612861 - DNA, 25 bp, Homo sapien
tgaggctcgcggctaggaccctgct

SEQ ID NO: 612862 - DNA, 25 bp, Homo sapien
gggtgaggctcgcggctaggaccct

SEQ ID NO: 612863 - DNA, 25 bp, Homo sapien
agcagtccagactagcacccctggg

SEQ ID NO: 612864 - DNA, 25 bp, Homo sapien
ataatcttcatatgtcagtggcagc

SEQ ID NO: 612865 - DNA, 25 bp, Homo sapien
tatacatgggacttggagggagttt

SEQ ID NO: 612866 - DNA, 25 bp, Homo sapien
gggaaggcatcaggacctatataca

SEQ ID NO: 612867 - DNA, 25 bp, Homo sapien
gtgtgggaccccagatgggagagtg

SEQ ID NO: 612868 - DNA, 25 bp, Homo sapien
ccaggggccatgagaaggagctgct

SEQ ID NO: 612869 - DNA, 25 bp, Homo sapien
tgggaccccagatgggagagtgaag

SEQ ID NO: 612870 - DNA, 25 bp, Homo sapien
ggagtgtggtcccagaagtagctcc

SEQ ID NO: 612871 - DNA, 25 bp, Homo sapien
cagtcctctgatccccaggggtatc

SEQ ID NO: 612872 - DNA, 25 bp, Homo sapien
gggtatccatacaggccctgctggg

SEQ ID NO: 612873 - DNA, 25 bp, Homo sapien
ccttggactcttcggacctcctgag

SEQ ID NO: 612874 - DNA, 25 bp, Homo sapien
ttggactcttcggacctcctgagcc

SEQ ID NO: 612875 - DNA, 25 bp, Homo sapien
tgtgcctacagatcctctgaagctg

SEQ ID NO: 612876 - DNA, 25 bp, Homo sapien
tgcctacagatcctctgaagctgct

SEQ ID NO: 612877 - DNA, 25 bp, Homo sapien
tacagatcctctgaagctgctctcc

SEQ ID NO: 612878 - DNA, 25 bp, Homo sapien
cctacagatcctctgaagctgctct

SEQ ID NO: 612879 - DNA, 25 bp, Homo sapien
gttcagagacggctgaaccagcgag

SEQ ID NO: 612880 - DNA, 25 bp, Homo sapien
gaggcctggcaatgagagaggtggc

SEQ ID NO: 612881 - DNA, 25 bp, Homo sapien
gaggtggctggttcagagacggctg

SEQ ID NO: 612882 - DNA, 25 bp, Homo sapien
tggctggttcagagacggctgaacc

SEQ ID NO: 612883 - DNA, 25 bp, Homo sapien
taaagggaccggagtccagtcctga

SEQ ID NO: 612884 - DNA, 25 bp, Homo sapien
cactggcctgtcagtctcaataaag

SEQ ID NO: 612885 - DNA, 25 bp, Homo sapien
caggccaggtcttgtgaggtggagg

SEQ ID NO: 612886 - DNA, 25 bp, Homo sapien
tcctgaacagcttactttgtctgct

SEQ ID NO: 612887 - DNA, 25 bp, Homo sapien
cacagatcatggatttgcggccagc

SEQ ID NO: 612888 - DNA, 25 bp, Homo sapien
tccagtatgaacaaggagccccgtt

SEQ ID NO: 612889 - DNA, 25 bp, Homo sapien
tttggtacagacgagacagtgcccg

SEQ ID NO: 612890 - DNA, 25 bp, Homo sapien
cagggcatcgagtacgacgtcatca

SEQ ID NO: 612891 - DNA, 25 bp, Homo sapien
ggaacagacagtgaccaatcaggta

SEQ ID NO: 612892 - DNA, 25 bp, Homo sapien
tggccagaccgtacagcacctggtg

SEQ ID NO: 612893 - DNA, 25 bp, Homo sapien
ggcaccactgggtacagtagcagct

SEQ ID NO: 612894 - DNA, 25 bp, Homo sapien
tccaagagatcaccacggcagatgg

SEQ ID NO: 612895 - DNA, 25 bp, Homo sapien
cagcagcaccagatacggatccggc

SEQ ID NO: 612896 - DNA, 25 bp, Homo sapien
gcacaggtcccctcatctaacacct

SEQ ID NO: 612897 - DNA, 25 bp, Homo sapien
tacggatccggcttggcctttctac

SEQ ID NO: 612898 - DNA, 25 bp, Homo sapien
ccagatacggatccggcttggcctt

SEQ ID NO: 612899 - DNA, 25 bp, Homo sapien
aggtgaacgccctatcaggcctcag

SEQ ID NO: 612900 - DNA, 25 bp, Homo sapien
gaggtgaacgccctatcaggcctca

SEQ ID NO: 612901 - DNA, 25 bp, Homo sapien
cagtgcagaggtgaacgccctatca

SEQ ID NO: 612902 - DNA, 25 bp, Homo sapien
tgcagaggtgaacgccctatcaggc

SEQ ID NO: 612903 - DNA, 25 bp, Homo sapien
gtgtgacagaggcatggctagggag

SEQ ID NO: 612904 - DNA, 25 bp, Homo sapien
aagtgtgtgacagaggcatggctag

SEQ ID NO: 612905 - DNA, 25 bp, Homo sapien
tgacagaggcatggctagggagact

SEQ ID NO: 612906 - DNA, 25 bp, Homo sapien
gcacagaagtgtgtgacagaggcat

SEQ ID NO: 612907 - DNA, 25 bp, Homo sapien
gagatgactccgcaaggtcccagct

SEQ ID NO: 612908 - DNA, 25 bp, Homo sapien
agtgtgaaccaagggtgcaggacac

SEQ ID NO: 612909 - DNA, 25 bp, Homo sapien
ttaatgagtgccctttcaagccaga

SEQ ID NO: 612910 - DNA, 25 bp, Homo sapien
cacacaacgtgactaatgccagaca

SEQ ID NO: 612911 - DNA, 25 bp, Homo sapien
tctgcagcagattgaggagctgaag

SEQ ID NO: 612912 - DNA, 25 bp, Homo sapien
cagcagattgaggagctgaagcagc

SEQ ID NO: 612913 - DNA, 25 bp, Homo sapien
agcagattgaggagctgaagcagca

SEQ ID NO: 612914 - DNA, 25 bp, Homo sapien
gcagattgaggagctgaagcagcag

SEQ ID NO: 612915 - DNA, 25 bp, Homo sapien
ggtcttagctactatactacccaca

SEQ ID NO: 612916 - DNA, 25 bp, Homo sapien
tctggtttactgtgagccaggcacc

SEQ ID NO: 612917 - DNA, 25 bp, Homo sapien
tgacagccaagaggaaacaaggctt

SEQ ID NO: 612918 - DNA, 25 bp, Homo sapien
cgcggcagccgttctcaggtatgga

SEQ ID NO: 612919 - DNA, 25 bp, Homo sapien
ttggacggaagagatcctgggactt

SEQ ID NO: 612920 - DNA, 25 bp, Homo sapien
ttccagcctctcaccatcaatctcc

SEQ ID NO: 612921 - DNA, 25 bp, Homo sapien
tggacggaagagatcctgggacttc

SEQ ID NO: 612922 - DNA, 25 bp, Homo sapien
cggtgagattggttctcaggtctcc

SEQ ID NO: 612923 - DNA, 25 bp, Homo sapien
cacaagggtggactggcgctgtctg

SEQ ID NO: 612924 - DNA, 25 bp, Homo sapien
gcctgtcggtgagattggttctcag

SEQ ID NO: 612925 - DNA, 25 bp, Homo sapien
tgccagctgcctgtcggtgagattg

SEQ ID NO: 612926 - DNA, 25 bp, Homo sapien
agcgcaggccccagagatttcgact

SEQ ID NO: 612927 - DNA, 25 bp, Homo sapien
tcaaaggtttggaatctgcccaggt

SEQ ID NO: 612928 - DNA, 25 bp, Homo sapien
tgccacccgagtgtaaccatagcgg

SEQ ID NO: 612929 - DNA, 25 bp, Homo sapien
gtctcgggcagggacagttgcttct

SEQ ID NO: 612930 - DNA, 25 bp, Homo sapien
tcccggctgtacacgcgagtgaagg

SEQ ID NO: 612931 - DNA, 25 bp, Homo sapien
caagtcttccgagtagttttggatc

SEQ ID NO: 612932 - DNA, 25 bp, Homo sapien
ccgcgacaccaaactggatgacgat

SEQ ID NO: 612933 - DNA, 25 bp, Homo sapien
ggatgacgatgtctgcgtcccggct

SEQ ID NO: 612934 - DNA, 25 bp, Homo sapien
aggaggaaaggcgtgtgccaggagc

SEQ ID NO: 612935 - DNA, 25 bp, Homo sapien
cgtcgaagggatacccgtctccgtg

SEQ ID NO: 612936 - DNA, 25 bp, Homo sapien
aatgggcgtctccctgaatgccggg

SEQ ID NO: 612937 - DNA, 25 bp, Homo sapien
cagggaccacaactcgtcatcgtcg

SEQ ID NO: 612938 - DNA, 25 bp, Homo sapien
gcagaagccaaaccggtcgtcggtg

SEQ ID NO: 612939 - DNA, 25 bp, Homo sapien
aggccgcgccatctgcgtttccaaa

SEQ ID NO: 612940 - DNA, 25 bp, Homo sapien
tcgtagttggccgtggtactgcacc

SEQ ID NO: 612941 - DNA, 25 bp, Homo sapien
actgcaccagggcaagccgtcggag

SEQ ID NO: 612942 - DNA, 25 bp, Homo sapien
tggtgcaggcggagtaggattggcc

SEQ ID NO: 612943 - DNA, 25 bp, Homo sapien
ccgaagagcttgtcccggtcgtagt

SEQ ID NO: 612944 - DNA, 25 bp, Homo sapien
gcattgccgtcctgggtgtagagtc

SEQ ID NO: 612945 - DNA, 25 bp, Homo sapien
cgtagttggcggtggtggcgcacca

SEQ ID NO: 612946 - DNA, 25 bp, Homo sapien
gtggtagcgcaccagaggcgcccat

SEQ ID NO: 612947 - DNA, 25 bp, Homo sapien
gccccacttcttgtcgctgtcaaag

SEQ ID NO: 612948 - DNA, 25 bp, Homo sapien
ggccctcgctggtacaggtcgagta

SEQ ID NO: 612949 - DNA, 25 bp, Homo sapien
ctgtcaaagttcgaggtggtagcgc

SEQ ID NO: 612950 - DNA, 25 bp, Homo sapien
tacatagggtacatgagcgcctccg

SEQ ID NO: 612951 - DNA, 25 bp, Homo sapien
tagaggtgccggatgccattcacgt

SEQ ID NO: 612952 - DNA, 25 bp, Homo sapien
cattcacgtcgtccttatgcaaggg

SEQ ID NO: 612953 - DNA, 25 bp, Homo sapien
tgaggaatgatctaagcccagcgcg

SEQ ID NO: 612954 - DNA, 25 bp, Homo sapien
ggccagctgtggggcgctctgaggg

SEQ ID NO: 612955 - DNA, 25 bp, Homo sapien
gaacaaatacagctggttcccaatc

SEQ ID NO: 612956 - DNA, 25 bp, Homo sapien
gatgttcacgttgcaggcatcgtcc

SEQ ID NO: 612957 - DNA, 25 bp, Homo sapien
cacagtagtggccgtagaagggcca

SEQ ID NO: 612958 - DNA, 25 bp, Homo sapien
ccgcgatggcgtcgaagatgttcac

SEQ ID NO: 612959 - DNA, 25 bp, Homo sapien
cctgccctcagagaatcgccagtac

SEQ ID NO: 612960 - DNA, 25 bp, Homo sapien
ctgccctcagagaatcgccagtact

SEQ ID NO: 612961 - DNA, 25 bp, Homo sapien
tgccctcagagaatcgccagtactt

SEQ ID NO: 612962 - DNA, 25 bp, Homo sapien
gccctcagagaatcgccagtacttc

SEQ ID NO: 612963 - DNA, 25 bp, Homo sapien
tcaaagaccgagtccagcttgcggg

SEQ ID NO: 612964 - DNA, 25 bp, Homo sapien
ggcagcgcgggccacttgtcggcga

SEQ ID NO: 612965 - DNA, 25 bp, Homo sapien
agcgcgggccacttgtcggcgataa

SEQ ID NO: 612966 - DNA, 25 bp, Homo sapien
aagcttcttggagagccgctcctca

SEQ ID NO: 612967 - DNA, 25 bp, Homo sapien
gcaccgacgcgcctgtgtacaccca

SEQ ID NO: 612968 - DNA, 25 bp, Homo sapien
ttgtccagacgcctcgggcccagca

SEQ ID NO: 612969 - DNA, 25 bp, Homo sapien
agaggcgccgcccgctgaacagcag

SEQ ID NO: 612970 - DNA, 25 bp, Homo sapien
gcccagcaccgacgcgcctgtgtac

SEQ ID NO: 612971 - DNA, 25 bp, Homo sapien
ctgcgggcaggcgcggaggagacag

SEQ ID NO: 612972 - DNA, 25 bp, Homo sapien
aggagacaggtgctgagccggctag

SEQ ID NO: 612973 - DNA, 25 bp, Homo sapien
gacaggtgctgagccggctagcgga

SEQ ID NO: 612974 - DNA, 25 bp, Homo sapien
cgcggaggagacaggtgctgagccg

SEQ ID NO: 612975 - DNA, 25 bp, Homo sapien
ctcggtactggaagacgtcgtgcgt

SEQ ID NO: 612976 - DNA, 25 bp, Homo sapien
caccatctgcgccttcacgtcgaac

SEQ ID NO: 612977 - DNA, 25 bp, Homo sapien
gggaacatccggtccacctcgctgg

SEQ ID NO: 612978 - DNA, 25 bp, Homo sapien
cgtgcgtgtccaaaggcaccccggg

SEQ ID NO: 612979 - DNA, 25 bp, Homo sapien
gttcaactcactccgggaactcacg

SEQ ID NO: 612980 - DNA, 25 bp, Homo sapien
gaactcacgcgccagtagaagcggt

SEQ ID NO: 612981 - DNA, 25 bp, Homo sapien
gcaggatgtcataggtcacgtagcc

SEQ ID NO: 612982 - DNA, 25 bp, Homo sapien
agcccacttggtccacctggttcaa

SEQ ID NO: 612983 - DNA, 25 bp, Homo sapien
cctttcctccagaacagaataccag

SEQ ID NO: 612984 - DNA, 25 bp, Homo sapien
agaataccagtttgtatccggcaaa

SEQ ID NO: 612985 - DNA, 25 bp, Homo sapien
gcactgccaaagcaggacgggagcc

SEQ ID NO: 612986 - DNA, 25 bp, Homo sapien
tggggatttacatggcactgccaaa

SEQ ID NO: 612987 - DNA, 25 bp, Homo sapien
tgcatacatacgtgcatacatatat

SEQ ID NO: 612988 - DNA, 25 bp, Homo sapien
actctatcagttaaatacatacatg

SEQ ID NO: 612989 - DNA, 25 bp, Homo sapien
cactctatcagttaaatacatacat

SEQ ID NO: 612990 - DNA, 25 bp, Homo sapien
catacatgcatacatacgtgcatac

SEQ ID NO: 612991 - DNA, 25 bp, Homo sapien
cacgtagaaagcactctatcagtta

SEQ ID NO: 612992 - DNA, 25 bp, Homo sapien
tctggcacgtagaaagcactctatc

SEQ ID NO: 612993 - DNA, 25 bp, Homo sapien
aacactttctggcacgtagaaagca

SEQ ID NO: 612994 - DNA, 25 bp, Homo sapien
tttctggcacgtagaaagcactcta

SEQ ID NO: 612995 - DNA, 25 bp, Homo sapien
tgtaaataggtcagactctctggag

SEQ ID NO: 612996 - DNA, 25 bp, Homo sapien
ccagccatagaatcacccttgtaaa

SEQ ID NO: 612997 - DNA, 25 bp, Homo sapien
tcagttccggttcagatgtcatctt

SEQ ID NO: 612998 - DNA, 25 bp, Homo sapien
gaagaagctcgttcatcctttctga

SEQ ID NO: 612999 - DNA, 25 bp, Homo sapien
tcattcggcacatgtcgatagcgct

SEQ ID NO: 613000 - DNA, 25 bp, Homo sapien
catctgcaggtgagagtcgtcccta

SEQ ID NO: 613001 - DNA, 25 bp, Homo sapien
tccgggatcgcacaagtggctgcaa

SEQ ID NO: 613002 - DNA, 25 bp, Homo sapien
tgaatctggccacttcgctgggagg

SEQ ID NO: 613003 - DNA, 25 bp, Homo sapien
gggtctgcgaccgaatgccggcggg

SEQ ID NO: 613004 - DNA, 25 bp, Homo sapien
tctgggtcagggcttctggcgggcc

SEQ ID NO: 613005 - DNA, 25 bp, Homo sapien
aggtgaccgtgaacctgcggctcat

SEQ ID NO: 613006 - DNA, 25 bp, Homo sapien
agcgaggtgaccgtgaacctgcggc

SEQ ID NO: 613007 - DNA, 25 bp, Homo sapien
ttctccaccgaaggccagaaggatc

SEQ ID NO: 613008 - DNA, 25 bp, Homo sapien
tgtgccctgcgtgtaacttccatta

SEQ ID NO: 613009 - DNA, 25 bp, Homo sapien
ttccattacaagaccctgcacaggg

SEQ ID NO: 613010 - DNA, 25 bp, Homo sapien
ggagaggacccctgatgagtgcccc

SEQ ID NO: 613011 - DNA, 25 bp, Homo sapien
tcggcagcgacccctggcggtctgg

SEQ ID NO: 613012 - DNA, 25 bp, Homo sapien
cggcagcgacccctggcggtctggg

SEQ ID NO: 613013 - DNA, 25 bp, Homo sapien
ctcggcagcgacccctggcggtctg

SEQ ID NO: 613014 - DNA, 25 bp, Homo sapien
ggcagcgacccctggcggtctgggg

SEQ ID NO: 613015 - DNA, 25 bp, Homo sapien
tggagcagggcgatgatgacagagg

SEQ ID NO: 613016 - DNA, 25 bp, Homo sapien
tgccagattcaggataagtttcaga

SEQ ID NO: 613017 - DNA, 25 bp, Homo sapien
caagacgtggggatcagttggattt

SEQ ID NO: 613018 - DNA, 25 bp, Homo sapien
tggtcgtggccatgtgaggcttgga

SEQ ID NO: 613019 - DNA, 25 bp, Homo sapien
tgtgagtaccggcatctgagagtgt

SEQ ID NO: 613020 - DNA, 25 bp, Homo sapien
ctgagagtgtgaatgggaaaacagc

SEQ ID NO: 613021 - DNA, 25 bp, Homo sapien
gggctgtgtttcacttcgaccccag

SEQ ID NO: 613022 - DNA, 25 bp, Homo sapien
cgaccccagcgaagtagtgtgagta

SEQ ID NO: 613023 - DNA, 25 bp, Homo sapien
tgggctgaggtaccgggcagtgagg

SEQ ID NO: 613024 - DNA, 25 bp, Homo sapien
cttgggctgaggtaccgggcagtga

SEQ ID NO: 613025 - DNA, 25 bp, Homo sapien
ttgggctgaggtaccgggcagtgag

SEQ ID NO: 613026 - DNA, 25 bp, Homo sapien
ggctgaggtaccgggcagtgaggtt

SEQ ID NO: 613027 - DNA, 25 bp, Homo sapien
tccatagaagagacaaggatgcagt

SEQ ID NO: 613028 - DNA, 25 bp, Homo sapien
gatgcagtcatatccatgcccctca

SEQ ID NO: 613029 - DNA, 25 bp, Homo sapien
tagaacttataaaagtcgtcttgcc

SEQ ID NO: 613030 - DNA, 25 bp, Homo sapien
tactccagtttaggactctcttcat

SEQ ID NO: 613031 - DNA, 25 bp, Homo sapien
gctctccgctccacggaggaagaag

SEQ ID NO: 613032 - DNA, 25 bp, Homo sapien
gccttcgccgctctctcgttcgctg

SEQ ID NO: 613033 - DNA, 25 bp, Homo sapien
tctctcgttcgctgtagctctgtct

SEQ ID NO: 613034 - DNA, 25 bp, Homo sapien
tcgctctccgctccacggaggaaga

SEQ ID NO: 613035 - DNA, 25 bp, Homo sapien
ccgtcctcgcagtccgtcaggttgt

SEQ ID NO: 613036 - DNA, 25 bp, Homo sapien
tcctcgcagtccgtcaggttgttta

SEQ ID NO: 613037 - DNA, 25 bp, Homo sapien
ctcgcagtccgtcaggttgtttagc

SEQ ID NO: 613038 - DNA, 25 bp, Homo sapien
tcgcagtccgtcaggttgtttagca

SEQ ID NO: 613039 - DNA, 25 bp, Homo sapien
ttctctgtgtcggtgctgttgatga

SEQ ID NO: 613040 - DNA, 25 bp, Homo sapien
aaggccatgttcttgccatcatact

SEQ ID NO: 613041 - DNA, 25 bp, Homo sapien
caaggccatgttcttgccatcatac

SEQ ID NO: 613042 - DNA, 25 bp, Homo sapien
gctgttgatgaagggactgctttcc

SEQ ID NO: 613043 - DNA, 25 bp, Homo sapien
tcttcatgctccctacttccctggg

SEQ ID NO: 613044 - DNA, 25 bp, Homo sapien
caggttggtgtagttggccaggcca

SEQ ID NO: 613045 - DNA, 25 bp, Homo sapien
ccaggccactgagcaaggaggacac

SEQ ID NO: 613046 - DNA, 25 bp, Homo sapien
ccatagggctggtgtccatctcctc

SEQ ID NO: 613047 - DNA, 25 bp, Homo sapien
gaggatgacgccaaagatgttctgc

SEQ ID NO: 613048 - DNA, 25 bp, Homo sapien
acggcaggtacacgcccatgaaggt

SEQ ID NO: 613049 - DNA, 25 bp, Homo sapien
agcagatgaacaccatgcagaagga

SEQ ID NO: 613050 - DNA, 25 bp, Homo sapien
tgcagaaggactccatgatgcctgc

SEQ ID NO: 613051 - DNA, 25 bp, Homo sapien
aacaccattcgttgcaattgcactc

SEQ ID NO: 613052 - DNA, 25 bp, Homo sapien
caccattcgttgcaattgcactcat

SEQ ID NO: 613053 - DNA, 25 bp, Homo sapien
ccattcgttgcaattgcactcatgg

SEQ ID NO: 613054 - DNA, 25 bp, Homo sapien
acaccattcgttgcaattgcactca

SEQ ID NO: 613055 - DNA, 25 bp, Homo sapien
gacctggaaatcatgtagtaggagc

SEQ ID NO: 613056 - DNA, 25 bp, Homo sapien
gaaatcatgtagtaggagccaccag

SEQ ID NO: 613057 - DNA, 25 bp, Homo sapien
tggaaatcatgtagtaggagccacc

SEQ ID NO: 613058 - DNA, 25 bp, Homo sapien
cctggaaatcatgtagtaggagcca

SEQ ID NO: 613059 - DNA, 25 bp, Homo sapien
ataaaatggccacctttaactcatg

SEQ ID NO: 613060 - DNA, 25 bp, Homo sapien
aaaatgatatacttcaagccttggg

SEQ ID NO: 613061 - DNA, 25 bp, Homo sapien
gagagagtcatgacgataaaataaa

SEQ ID NO: 613062 - DNA, 25 bp, Homo sapien
tcgaggctgtcagtgactgcaccac

SEQ ID NO: 613063 - DNA, 25 bp, Homo sapien
gtgggaaaggggcaggaagaacaga

SEQ ID NO: 613064 - DNA, 25 bp, Homo sapien
ctgtgggaaaggggcaggaagaaca

SEQ ID NO: 613065 - DNA, 25 bp, Homo sapien
ggaaaggggcaggaagaacagatac

SEQ ID NO: 613066 - DNA, 25 bp, Homo sapien
gggaaaggggcaggaagaacagata

SEQ ID NO: 613067 - DNA, 25 bp, Homo sapien
gagcacacaggtgccgtaaacacgc

SEQ ID NO: 613068 - DNA, 25 bp, Homo sapien
tggccatggctgggaagaggtaagc

SEQ ID NO: 613069 - DNA, 25 bp, Homo sapien
gaagttgggtgggtcgaaggcagac

SEQ ID NO: 613070 - DNA, 25 bp, Homo sapien
cacaggtgccgtaaacacgcatgtt

SEQ ID NO: 613071 - DNA, 25 bp, Homo sapien
tgtccaacactaggagattgtccca

SEQ ID NO: 613072 - DNA, 25 bp, Homo sapien
ttctaataagcagccaaggtggaga

SEQ ID NO: 613073 - DNA, 25 bp, Homo sapien
taggaggacgattccttgggctcag

SEQ ID NO: 613074 - DNA, 25 bp, Homo sapien
gaaaggtttccctaccacagacagc

SEQ ID NO: 613075 - DNA, 25 bp, Homo sapien
cattgtttcgggtgaagtattcatc

SEQ ID NO: 613076 - DNA, 25 bp, Homo sapien
cagcttggcacagacatcaaagcca

SEQ ID NO: 613077 - DNA, 25 bp, Homo sapien
cagaaaaggccccatagccgtgtgg

SEQ ID NO: 613078 - DNA, 25 bp, Homo sapien
agccgtgtggtcaccgtctcatttc

SEQ ID NO: 613079 - DNA, 25 bp, Homo sapien
ctacaatccctgcagcgttccctgg

SEQ ID NO: 613080 - DNA, 25 bp, Homo sapien
ccctgcagcgttccctggatgccag

SEQ ID NO: 613081 - DNA, 25 bp, Homo sapien
aatccctgcagcgttccctggatgc

SEQ ID NO: 613082 - DNA, 25 bp, Homo sapien
acaatccctgcagcgttccctggat

SEQ ID NO: 613083 - DNA, 25 bp, Homo sapien
caatcacgcccttggtcaggtagga

SEQ ID NO: 613084 - DNA, 25 bp, Homo sapien
tatcactgaagacataagggtggtc

SEQ ID NO: 613085 - DNA, 25 bp, Homo sapien
gggtgaagtaggaggtcatatcact

SEQ ID NO: 613086 - DNA, 25 bp, Homo sapien
ataggagtgccatcggccaggccca

SEQ ID NO: 613087 - DNA, 25 bp, Homo sapien
ggcatccctcaggtccccagagcgg

SEQ ID NO: 613088 - DNA, 25 bp, Homo sapien
gagcggttagaaccagccatgatcc

SEQ ID NO: 613089 - DNA, 25 bp, Homo sapien
agagcggttagaaccagccatgatc

SEQ ID NO: 613090 - DNA, 25 bp, Homo sapien
cagtggggattgacttctgggcatc

SEQ ID NO: 613091 - DNA, 25 bp, Homo sapien
caccagcaggtaaggcagcaagttc

SEQ ID NO: 613092 - DNA, 25 bp, Homo sapien
ctcccccgagggtggtcccagcaca

SEQ ID NO: 613093 - DNA, 25 bp, Homo sapien
ttcctgcaccagcaggtaaggcagc

SEQ ID NO: 613094 - DNA, 25 bp, Homo sapien
ggtaaggcagcaagttcagctgccc

SEQ ID NO: 613095 - DNA, 25 bp, Homo sapien
cagaggataaaggagaatccccacg

SEQ ID NO: 613096 - DNA, 25 bp, Homo sapien
gataaaggagaatccccacggttca

SEQ ID NO: 613097 - DNA, 25 bp, Homo sapien
ataaaggagaatccccacggttcag

SEQ ID NO: 613098 - DNA, 25 bp, Homo sapien
ggagaatccccacggttcagtcctc

SEQ ID NO: 613099 - DNA, 25 bp, Homo sapien
cgcaggacgaccccctcaatgcagg

SEQ ID NO: 613100 - DNA, 25 bp, Homo sapien
aggccccaaacagaacaacggagct

SEQ ID NO: 613101 - DNA, 25 bp, Homo sapien
caggccccaaacagaacaacggagc

SEQ ID NO: 613102 - DNA, 25 bp, Homo sapien
gcaggccccaaacagaacaacggag

SEQ ID NO: 613103 - DNA, 25 bp, Homo sapien
tgcctgccacaggactaagttctgt

SEQ ID NO: 613104 - DNA, 25 bp, Homo sapien
tccataccaactacagaaccaactg

SEQ ID NO: 613105 - DNA, 25 bp, Homo sapien
actacagaaccaactgtgtgcctgc

SEQ ID NO: 613106 - DNA, 25 bp, Homo sapien
ggaggcagagccccaaatgttccat

SEQ ID NO: 613107 - DNA, 25 bp, Homo sapien
tgccatccctcgagatggcctgcag

SEQ ID NO: 613108 - DNA, 25 bp, Homo sapien
ctgcaggaagggcacaatgccatcc

SEQ ID NO: 613109 - DNA, 25 bp, Homo sapien
gacaattacccatggagatggccag

SEQ ID NO: 613110 - DNA, 25 bp, Homo sapien
gagaagaaggatccgatgacaatta

SEQ ID NO: 613111 - DNA, 25 bp, Homo sapien
ggatgccaatctcgcagatgcaggc

SEQ ID NO: 613112 - DNA, 25 bp, Homo sapien
cattggccttgccatggccaaagac

SEQ ID NO: 613113 - DNA, 25 bp, Homo sapien
tcgagggatgcaatgaggatgccaa

SEQ ID NO: 613114 - DNA, 25 bp, Homo sapien
gggccacctcgtcgagggatgcaat

SEQ ID NO: 613115 - DNA, 25 bp, Homo sapien
cagttgggtgtcctcagcagcgtct

SEQ ID NO: 613116 - DNA, 25 bp, Homo sapien
tggtaatatcgaaagcgtggcctcc

SEQ ID NO: 613117 - DNA, 25 bp, Homo sapien
ctcagcagcgtctgcactgcacagg

SEQ ID NO: 613118 - DNA, 25 bp, Homo sapien
cacaaacatgtagcacatcaggaag

SEQ ID NO: 613119 - DNA, 25 bp, Homo sapien
gccccagcagggctgttgctgaagc

SEQ ID NO: 613120 - DNA, 25 bp, Homo sapien
tgagccccagcagggctgttgctga

SEQ ID NO: 613121 - DNA, 25 bp, Homo sapien
ctagacaaggtggggagacccagcc

SEQ ID NO: 613122 - DNA, 25 bp, Homo sapien
agacaaggtggggagacccagcctc

SEQ ID NO: 613123 - DNA, 25 bp, Homo sapien
caatgagcatggctaccagtgcata

SEQ ID NO: 613124 - DNA, 25 bp, Homo sapien
ctaccagtgcataataccaggagca

SEQ ID NO: 613125 - DNA, 25 bp, Homo sapien
agtccagcaatgagcatggctacca

SEQ ID NO: 613126 - DNA, 25 bp, Homo sapien
gcatggctaccagtgcataatacca

SEQ ID NO: 613127 - DNA, 25 bp, Homo sapien
atagcgagccgcactgagagacaga

SEQ ID NO: 613128 - DNA, 25 bp, Homo sapien
gtaagagggcatagcgagccgcact

SEQ ID NO: 613129 - DNA, 25 bp, Homo sapien
gagagacagacctcgtatcccatcg

SEQ ID NO: 613130 - DNA, 25 bp, Homo sapien
gcccttcctccaggcgtaagagggc

SEQ ID NO: 613131 - DNA, 25 bp, Homo sapien
gattttccagaaaggtgccctcaag

SEQ ID NO: 613132 - DNA, 25 bp, Homo sapien
caggcccttccccgccttcagctgg

SEQ ID NO: 613133 - DNA, 25 bp, Homo sapien
attttccagaaaggtgccctcaagg

SEQ ID NO: 613134 - DNA, 25 bp, Homo sapien
tgggacacgccatcacgcaagttgg

SEQ ID NO: 613135 - DNA, 25 bp, Homo sapien
caatgaagttcctccacgtctgatg

SEQ ID NO: 613136 - DNA, 25 bp, Homo sapien
ccagccaacaagcacagtgttgtgc

SEQ ID NO: 613137 - DNA, 25 bp, Homo sapien
ttggaggagatcaccacctggcaga

SEQ ID NO: 613138 - DNA, 25 bp, Homo sapien
cttctgtccccagcccccaatagcg

SEQ ID NO: 613139 - DNA, 25 bp, Homo sapien
tgtccccagcccccaatagcgttac

SEQ ID NO: 613140 - DNA, 25 bp, Homo sapien
ctcttctgtccccagcccccaatag

SEQ ID NO: 613141 - DNA, 25 bp, Homo sapien
tctgtccccagcccccaatagcgtt

SEQ ID NO: 613142 - DNA, 25 bp, Homo sapien
aggcccaaaggagcggaaatccagt

SEQ ID NO: 613143 - DNA, 25 bp, Homo sapien
tcaggcccaaaggagcggaaatcca

SEQ ID NO: 613144 - DNA, 25 bp, Homo sapien
tggcacgcagtgcttgggaaacccc

SEQ ID NO: 613145 - DNA, 25 bp, Homo sapien
ctgcatatgctgaatccacacttgg

SEQ ID NO: 613146 - DNA, 25 bp, Homo sapien
gagctgagatgtgggcctagcctct

SEQ ID NO: 613147 - DNA, 25 bp, Homo sapien
caatgcgtagccctcctaggactga

SEQ ID NO: 613148 - DNA, 25 bp, Homo sapien
ggagtgagtcacgtgtgcacagtca

SEQ ID NO: 613149 - DNA, 25 bp, Homo sapien
caagactgtctcgttcacagcggag

SEQ ID NO: 613150 - DNA, 25 bp, Homo sapien
aggaaacatggaaacgttcttggtg

SEQ ID NO: 613151 - DNA, 25 bp, Homo sapien
aaacgtcgatgctgccctcagagaa

SEQ ID NO: 613152 - DNA, 25 bp, Homo sapien
tggaaacgttcttggtgaccagcag

SEQ ID NO: 613153 - DNA, 25 bp, Homo sapien
cacaatccaccaaacgtcgatgctg

SEQ ID NO: 613154 - DNA, 25 bp, Homo sapien
ggccacagtgaagatacgcatcttg

SEQ ID NO: 613155 - DNA, 25 bp, Homo sapien
cgcagtgatgcgtaaatgatacaga

SEQ ID NO: 613156 - DNA, 25 bp, Homo sapien
atgatacagaaatgtggtcagatcc

SEQ ID NO: 613157 - DNA, 25 bp, Homo sapien
gatacgcatcttgcacttccgccag

SEQ ID NO: 613158 - DNA, 25 bp, Homo sapien
tgggaacgctgctccatcaccaacg

SEQ ID NO: 613159 - DNA, 25 bp, Homo sapien
tcataggtgtaagctgagatgtcgc

SEQ ID NO: 613160 - DNA, 25 bp, Homo sapien
tccatcaccaacgtcttctcatagg

SEQ ID NO: 613161 - DNA, 25 bp, Homo sapien
tgtaagctgagatgtcgctctcatg

SEQ ID NO: 613162 - DNA, 25 bp, Homo sapien
ccgctcccgctcattcttggttaaa

SEQ ID NO: 613163 - DNA, 25 bp, Homo sapien
ctcccgctcccgctcattcttggtt

SEQ ID NO: 613164 - DNA, 25 bp, Homo sapien
cccgctcattcttggttaaatgcat

SEQ ID NO: 613165 - DNA, 25 bp, Homo sapien
tcattcttggttaaatgcatctgtt

SEQ ID NO: 613166 - DNA, 25 bp, Homo sapien
gcggagccgcgtgttggctggattc

SEQ ID NO: 613167 - DNA, 25 bp, Homo sapien
tctttctccggattgagcctcgtga

SEQ ID NO: 613168 - DNA, 25 bp, Homo sapien
ctgtcaccagccgtctcttctggga

SEQ ID NO: 613169 - DNA, 25 bp, Homo sapien
tcttctgggacgttcaggcggagcc

SEQ ID NO: 613170 - DNA, 25 bp, Homo sapien
tgggagcactctgatcgtggatcag

SEQ ID NO: 613171 - DNA, 25 bp, Homo sapien
gactggggcccttattcttctctgc

SEQ ID NO: 613172 - DNA, 25 bp, Homo sapien
tgtccttggtccaggtgagatgcac

SEQ ID NO: 613173 - DNA, 25 bp, Homo sapien
agtccttgatgccctcagaggagac

SEQ ID NO: 613174 - DNA, 25 bp, Homo sapien
caaccccctaagtcctcagatggag

SEQ ID NO: 613175 - DNA, 25 bp, Homo sapien
acacccttcacctttccgctgcctg

SEQ ID NO: 613176 - DNA, 25 bp, Homo sapien
gctgcctgcaactgggaattctgag

SEQ ID NO: 613177 - DNA, 25 bp, Homo sapien
ttctgagacttagcaatggggccca

SEQ ID NO: 613178 - DNA, 25 bp, Homo sapien
ggactggttcttgcaagcctaggac

SEQ ID NO: 613179 - DNA, 25 bp, Homo sapien
gctattcagagatcccagaggtcgt

SEQ ID NO: 613180 - DNA, 25 bp, Homo sapien
tagagaagattggagccagtcgccc

SEQ ID NO: 613181 - DNA, 25 bp, Homo sapien
ttccagcccgaactgggctgctggg

SEQ ID NO: 613182 - DNA, 25 bp, Homo sapien
ttttcatcaccattgcggttgcggg

SEQ ID NO: 613183 - DNA, 25 bp, Homo sapien
tggcgtcccgggatttcttcacgat

SEQ ID NO: 613184 - DNA, 25 bp, Homo sapien
gaggcccaggcatgttgagcaaaac

SEQ ID NO: 613185 - DNA, 25 bp, Homo sapien
tgagcaaaacaagcttggcgtcccg

SEQ ID NO: 613186 - DNA, 25 bp, Homo sapien
gacccagattccctgacgtccacct

SEQ ID NO: 613187 - DNA, 25 bp, Homo sapien
tcccgacgaaattggggtcgcgctc

SEQ ID NO: 613188 - DNA, 25 bp, Homo sapien
tgctgatccggaggcaggaacagct

SEQ ID NO: 613189 - DNA, 25 bp, Homo sapien
ctgagagccggtcaaggagaaagac

SEQ ID NO: 613190 - DNA, 25 bp, Homo sapien
gtgaggacctcgagaaactccatgt

SEQ ID NO: 613191 - DNA, 25 bp, Homo sapien
gcggaccagcatcacccggtccagg

SEQ ID NO: 613192 - DNA, 25 bp, Homo sapien
ccgcggaccagcatcacccggtcca

SEQ ID NO: 613193 - DNA, 25 bp, Homo sapien
ggaccagcatcacccggtccaggtg

SEQ ID NO: 613194 - DNA, 25 bp, Homo sapien
tacactatgtataggctcggccgcc

SEQ ID NO: 613195 - DNA, 25 bp, Homo sapien
cgtgagatgtcaagctaggtgcgca

SEQ ID NO: 613196 - DNA, 25 bp, Homo sapien
tctgggcccagatagtgcaactttg

SEQ ID NO: 613197 - DNA, 25 bp, Homo sapien
tgaaagaatctatccagtcccctga

SEQ ID NO: 613198 - DNA, 25 bp, Homo sapien
caggcccagctagccaagtttggaa

SEQ ID NO: 613199 - DNA, 25 bp, Homo sapien
tgaagttggttctgagactctggcc

SEQ ID NO: 613200 - DNA, 25 bp, Homo sapien
tgtggttctaaatggagccccagga

SEQ ID NO: 613201 - DNA, 25 bp, Homo sapien
gcatttgtcatgtcagtagccacca

SEQ ID NO: 613202 - DNA, 25 bp, Homo sapien
ggagggacagctaggctaattcaaa

SEQ ID NO: 613203 - DNA, 25 bp, Homo sapien
tggtcaccattagtaaccccatcta

SEQ ID NO: 613204 - DNA, 25 bp, Homo sapien
ccttggtgatatttccctagctggg

SEQ ID NO: 613205 - DNA, 25 bp, Homo sapien
gcttcagggaagaatgatggtcacc

SEQ ID NO: 613206 - DNA, 25 bp, Homo sapien
gagtttcctttattcacaagaccat

SEQ ID NO: 613207 - DNA, 25 bp, Homo sapien
tatgtagatgctcacgaaactggct

SEQ ID NO: 613208 - DNA, 25 bp, Homo sapien
ccttttcatatgtagagagcaaatt

SEQ ID NO: 613209 - DNA, 25 bp, Homo sapien
tactcttaacctgaatgtttgccag

SEQ ID NO: 613210 - DNA, 25 bp, Homo sapien
aatgaaaatagatactacgaggcaa

SEQ ID NO: 613211 - DNA, 25 bp, Homo sapien
tactacgaggcaaattacaatcaaa

SEQ ID NO: 613212 - DNA, 25 bp, Homo sapien
atactttggactacccaatgaaaat

SEQ ID NO: 613213 - DNA, 25 bp, Homo sapien
aaaacgattccaccagcttcaaagt

SEQ ID NO: 613214 - DNA, 25 bp, Homo sapien
gatgtccagaaagatctccaaattg

SEQ ID NO: 613215 - DNA, 25 bp, Homo sapien
tttacaactctcactgaaaactccc

SEQ ID NO: 613216 - DNA, 25 bp, Homo sapien
gccgtgagttggtgctttagcattc

SEQ ID NO: 613217 - DNA, 25 bp, Homo sapien
gctctccgtgattagttccttaaag

SEQ ID NO: 613218 - DNA, 25 bp, Homo sapien
tcagtggcgcagtcgggattcgaac

SEQ ID NO: 613219 - DNA, 25 bp, Homo sapien
cctacggttctctgtggtggacgca

SEQ ID NO: 613220 - DNA, 25 bp, Homo sapien
ggcaacttcaatcacaaaccgggta

SEQ ID NO: 613221 - DNA, 25 bp, Homo sapien
cgaacggtcggtcactaggagtcct

SEQ ID NO: 613222 - DNA, 25 bp, Homo sapien
cgctggtagcggtgagtgccgggaa

SEQ ID NO: 613223 - DNA, 25 bp, Homo sapien
tgaggcgaaggagcggccgggagcc

SEQ ID NO: 613224 - DNA, 25 bp, Homo sapien
gggcctgaggcgaaggagcggccgg

SEQ ID NO: 613225 - DNA, 25 bp, Homo sapien
cgctggccgtcagccgaggcgtggg

SEQ ID NO: 613226 - DNA, 25 bp, Homo sapien
cgctgccagtccttgtgaaagtggg

SEQ ID NO: 613227 - DNA, 25 bp, Homo sapien
acgcgccgctgccagtccttgtgaa

SEQ ID NO: 613228 - DNA, 25 bp, Homo sapien
atgccattccggctgggcgccatgg

SEQ ID NO: 613229 - DNA, 25 bp, Homo sapien
ggcttcaagatcatgccattccggc

SEQ ID NO: 613230 - DNA, 25 bp, Homo sapien
cacagcaatgccaacgatctgggcc

SEQ ID NO: 613231 - DNA, 25 bp, Homo sapien
gatgggccccgatgcgtgacgcggg

SEQ ID NO: 613232 - DNA, 25 bp, Homo sapien
gatgcggtgcgccttggcttgcaag

SEQ ID NO: 613233 - DNA, 25 bp, Homo sapien
ggcgcctccgtgtggtacggaacca

SEQ ID NO: 613234 - DNA, 25 bp, Homo sapien
ctgaggaagaagatgagtttggaga

SEQ ID NO: 613235 - DNA, 25 bp, Homo sapien
tttggagaggtactccttcagccgc

SEQ ID NO: 613236 - DNA, 25 bp, Homo sapien
atgagtttggagaggtactccttca

SEQ ID NO: 613237 - DNA, 25 bp, Homo sapien
tggagaggtactccttcagccgctg

SEQ ID NO: 613238 - DNA, 25 bp, Homo sapien
ctcctcagtgacgattcgagctttc

SEQ ID NO: 613239 - DNA, 25 bp, Homo sapien
cctcctcagtgacgattcgagcttt

SEQ ID NO: 613240 - DNA, 25 bp, Homo sapien
tcctcctcagtgacgattcgagctt

SEQ ID NO: 613241 - DNA, 25 bp, Homo sapien
ggcgcccgagcgaggcctctgctga

SEQ ID NO: 613242 - DNA, 25 bp, Homo sapien
agcgaggtgagaccaggcggcagga

SEQ ID NO: 613243 - DNA, 25 bp, Homo sapien
ggcggcaggaccactgggcgcccga

SEQ ID NO: 613244 - DNA, 25 bp, Homo sapien
actgggcgcccgagcgaggcctctg

SEQ ID NO: 613245 - DNA, 25 bp, Homo sapien
agccccagaggacgcactgcagagg

SEQ ID NO: 613246 - DNA, 25 bp, Homo sapien
ccagaggacgcactgcagaggcaga

SEQ ID NO: 613247 - DNA, 25 bp, Homo sapien
agcaagcagccccagaggacgcact

SEQ ID NO: 613248 - DNA, 25 bp, Homo sapien
agcggtcagcaagcagccccagagg

SEQ ID NO: 613249 - DNA, 25 bp, Homo sapien
ccagtgctgtttggggctatgttta

SEQ ID NO: 613250 - DNA, 25 bp, Homo sapien
tccttggggcttgatgcctgagtca

SEQ ID NO: 613251 - DNA, 25 bp, Homo sapien
gagtcctgaagctggctgacttcag

SEQ ID NO: 613252 - DNA, 25 bp, Homo sapien
ggctatgtttagcacttggcctctt

SEQ ID NO: 613253 - DNA, 25 bp, Homo sapien
cagaattgtgcaatttgaagggatc

SEQ ID NO: 613254 - DNA, 25 bp, Homo sapien
gggatcttgaaatctccgttgcaac

SEQ ID NO: 613255 - DNA, 25 bp, Homo sapien
gaaatctccgttgcaacttcttcag

SEQ ID NO: 613256 - DNA, 25 bp, Homo sapien
atttgaagggatcttgaaatctccg

SEQ ID NO: 613257 - DNA, 25 bp, Homo sapien
cactgactgtttattaggtactgtt

SEQ ID NO: 613258 - DNA, 25 bp, Homo sapien
aaagaacagcactgactgtttatta

SEQ ID NO: 613259 - DNA, 25 bp, Homo sapien
agcactgactgtttattaggtactg

SEQ ID NO: 613260 - DNA, 25 bp, Homo sapien
ctgactgtttattaggtactgtttt

SEQ ID NO: 613261 - DNA, 25 bp, Homo sapien
ggaaggcattccgtttcagtgaact

SEQ ID NO: 613262 - DNA, 25 bp, Homo sapien
gctttcaccgcaaggaaggcattcc

SEQ ID NO: 613263 - DNA, 25 bp, Homo sapien
ccaggtgtctaggaattcgctttca

SEQ ID NO: 613264 - DNA, 25 bp, Homo sapien
ttcagtgaactctgtgcagtcactc

SEQ ID NO: 613265 - DNA, 25 bp, Homo sapien
aggaaggatgggaaccccctgctgg

SEQ ID NO: 613266 - DNA, 25 bp, Homo sapien
ctgcttgaccccaaagccgggcgag

SEQ ID NO: 613267 - DNA, 25 bp, Homo sapien
agcatgagcggtgcaggacacagct

SEQ ID NO: 613268 - DNA, 25 bp, Homo sapien
acaggcctcactcgtacagtgccag

SEQ ID NO: 613269 - DNA, 25 bp, Homo sapien
ttctgaggtgcccttctgctggacc

SEQ ID NO: 613270 - DNA, 25 bp, Homo sapien
tgacacattggagaagaagccgact

SEQ ID NO: 613271 - DNA, 25 bp, Homo sapien
agggctcgcagatggtatcagaaac

SEQ ID NO: 613272 - DNA, 25 bp, Homo sapien
tccaagggtgacatttttcgaaagc

SEQ ID NO: 613273 - DNA, 25 bp, Homo sapien
cagatggtatcagaaacccctgtag

SEQ ID NO: 613274 - DNA, 25 bp, Homo sapien
taaggtgaaagcaagacgaggaaaa

SEQ ID NO: 613275 - DNA, 25 bp, Homo sapien
tggagacagtaagttcccaaaacac

SEQ ID NO: 613276 - DNA, 25 bp, Homo sapien
cccaaaacacgtagacagccagtgg

SEQ ID NO: 613277 - DNA, 25 bp, Homo sapien
gaggcccaaactaaagtgacaacag

SEQ ID NO: 613278 - DNA, 25 bp, Homo sapien
taagatagggttactcaacgtcagc

SEQ ID NO: 613279 - DNA, 25 bp, Homo sapien
cattggcaaacgttccacagggagc

SEQ ID NO: 613280 - DNA, 25 bp, Homo sapien
cactagtgagaagattcagctgccc

SEQ ID NO: 613281 - DNA, 25 bp, Homo sapien
taaaatttggatcagcagtgcagtc

SEQ ID NO: 613282 - DNA, 25 bp, Homo sapien
gatctaggtaggctaaagtgagatg

SEQ ID NO: 613283 - DNA, 25 bp, Homo sapien
taggggagtctataatgagtgccaa

SEQ ID NO: 613284 - DNA, 25 bp, Homo sapien
gagaaaagattcttgcacatcttga

SEQ ID NO: 613285 - DNA, 25 bp, Homo sapien
gagtgccaagctttgtgatctaggt

SEQ ID NO: 613286 - DNA, 25 bp, Homo sapien
gcacagacacgtgcacaaatgcaca

SEQ ID NO: 613287 - DNA, 25 bp, Homo sapien
tgcacagacacgtgcacaaatgcac

SEQ ID NO: 613288 - DNA, 25 bp, Homo sapien
tgcacaaccaggtctttggtctcac

SEQ ID NO: 613289 - DNA, 25 bp, Homo sapien
gttgcacaaccaggtctttggtctc

SEQ ID NO: 613290 - DNA, 25 bp, Homo sapien
ctgttgcacaaccaggtctttggtc

SEQ ID NO: 613291 - DNA, 25 bp, Homo sapien
cacaaccaggtctttggtctcacag

SEQ ID NO: 613292 - DNA, 25 bp, Homo sapien
acaacatcagtcttgtttgtgcctg

SEQ ID NO: 613293 - DNA, 25 bp, Homo sapien
cacagacaacatcagtcttgtttgt

SEQ ID NO: 613294 - DNA, 25 bp, Homo sapien
caacatcagtcttgtttgtgcctgc

SEQ ID NO: 613295 - DNA, 25 bp, Homo sapien
agacaacatcagtcttgtttgtgcc

SEQ ID NO: 613296 - DNA, 25 bp, Homo sapien
tactaaggaagtgctgttatcatcc

SEQ ID NO: 613297 - DNA, 25 bp, Homo sapien
tgtaggccaaccttctcactctaaa

SEQ ID NO: 613298 - DNA, 25 bp, Homo sapien
cattatctgatctttactgtaggcc

SEQ ID NO: 613299 - DNA, 25 bp, Homo sapien
tcccatccagtgttcctgtgtgcct

SEQ ID NO: 613300 - DNA, 25 bp, Homo sapien
ctacaaagaggaaagtacattttga

SEQ ID NO: 613301 - DNA, 25 bp, Homo sapien
ttttgagaaaaagcaaagagaatgt

SEQ ID NO: 613302 - DNA, 25 bp, Homo sapien
caaagaggaaagtacattttgagaa

SEQ ID NO: 613303 - DNA, 25 bp, Homo sapien
attttgagaaaaagcaaagagaatg

SEQ ID NO: 613304 - DNA, 25 bp, Homo sapien
tgctcacctcattctagtcccagcc

SEQ ID NO: 613305 - DNA, 25 bp, Homo sapien
ttcttaaatattgcgcccgagggca

SEQ ID NO: 613306 - DNA, 25 bp, Homo sapien
gggcaagtgccttgctcacctcatt

SEQ ID NO: 613307 - DNA, 25 bp, Homo sapien
tactacacttttatggcaccttctt

SEQ ID NO: 613308 - DNA, 25 bp, Homo sapien
agggtcatgcaaacacagggtcgga

SEQ ID NO: 613309 - DNA, 25 bp, Homo sapien
caagtcagcaaactacggcctgcag

SEQ ID NO: 613310 - DNA, 25 bp, Homo sapien
tgaaaatcatcaggcggacaccaag

SEQ ID NO: 613311 - DNA, 25 bp, Homo sapien
cactcagtcatcaaggtaaacattc

SEQ ID NO: 613312 - DNA, 25 bp, Homo sapien
tacatcagaaggttcaaaccgcggt

SEQ ID NO: 613313 - DNA, 25 bp, Homo sapien
ctacatcagaaggttcaaaccgcgg

SEQ ID NO: 613314 - DNA, 25 bp, Homo sapien
cagaaggttcaaaccgcggtccttg

SEQ ID NO: 613315 - DNA, 25 bp, Homo sapien
catcagaaggttcaaaccgcggtcc

SEQ ID NO: 613316 - DNA, 25 bp, Homo sapien
aacctgctgtgacttgtcagactcc

SEQ ID NO: 613317 - DNA, 25 bp, Homo sapien
cagaatcttccaatgtcagagctca

SEQ ID NO: 613318 - DNA, 25 bp, Homo sapien
agaatcttccaatgtcagagctcat

SEQ ID NO: 613319 - DNA, 25 bp, Homo sapien
ttctccctaccctcaacctgctgtg

SEQ ID NO: 613320 - DNA, 25 bp, Homo sapien
caagaggatggcaaacaggatcccg

SEQ ID NO: 613321 - DNA, 25 bp, Homo sapien
tgataaagaccagcaccaagaggat

SEQ ID NO: 613322 - DNA, 25 bp, Homo sapien
caaacaggatcccgaagatgatggg

SEQ ID NO: 613323 - DNA, 25 bp, Homo sapien
atcccgaagatgatggggatcacca

SEQ ID NO: 613324 - DNA, 25 bp, Homo sapien
agttggagaggccagataagaaaca

SEQ ID NO: 613325 - DNA, 25 bp, Homo sapien
tggagaggccagataagaaacaggt

SEQ ID NO: 613326 - DNA, 25 bp, Homo sapien
gggagttggagaggccagataagaa

SEQ ID NO: 613327 - DNA, 25 bp, Homo sapien
gaggccagataagaaacaggtggtc

SEQ ID NO: 613328 - DNA, 25 bp, Homo sapien
gactctgaatcagttttactgcccc

SEQ ID NO: 613329 - DNA, 25 bp, Homo sapien
tactgccccataggcaaccgtgagg

SEQ ID NO: 613330 - DNA, 25 bp, Homo sapien
actctgtcccgggttctcaggggtg

SEQ ID NO: 613331 - DNA, 25 bp, Homo sapien
accgtgaggccatcttcccagtttg

SEQ ID NO: 613332 - DNA, 25 bp, Homo sapien
tgaagaacagccagtgttaggctct

SEQ ID NO: 613333 - DNA, 25 bp, Homo sapien
gatgcagctccccacgcgttgaatg

SEQ ID NO: 613334 - DNA, 25 bp, Homo sapien
ccccacgcgttgaatgccaggaaag

SEQ ID NO: 613335 - DNA, 25 bp, Homo sapien
gaaaggagtgaagaacagccagtgt

SEQ ID NO: 613336 - DNA, 25 bp, Homo sapien
tcgtcgggaaaattgatctcctggg

SEQ ID NO: 613337 - DNA, 25 bp, Homo sapien
gggtgaccggttggcatccatgtaa

SEQ ID NO: 613338 - DNA, 25 bp, Homo sapien
agccaggaagatcgtcgggaaaatt

SEQ ID NO: 613339 - DNA, 25 bp, Homo sapien
tgagatgcgactctctttgccatcc

SEQ ID NO: 613340 - DNA, 25 bp, Homo sapien
caagttgggagactggatgggctcc

SEQ ID NO: 613341 - DNA, 25 bp, Homo sapien
cagtgccaggtctcctgtctcaaac

SEQ ID NO: 613342 - DNA, 25 bp, Homo sapien
agcaccaggctctctggccaactgc

SEQ ID NO: 613343 - DNA, 25 bp, Homo sapien
agaagcggggagctatgcccagtca

SEQ ID NO: 613344 - DNA, 25 bp, Homo sapien
tgtgtatatggcttcctgggcgcag

SEQ ID NO: 613345 - DNA, 25 bp, Homo sapien
agttgttcactatcacaaacaatgc

SEQ ID NO: 613346 - DNA, 25 bp, Homo sapien
ccaaactgctggatcggaaggtctg

SEQ ID NO: 613347 - DNA, 25 bp, Homo sapien
caatgctgcaatgggcatctgtgta

SEQ ID NO: 613348 - DNA, 25 bp, Homo sapien
ctaattttatttagccagtctcctg

SEQ ID NO: 613349 - DNA, 25 bp, Homo sapien
attttatttagccagtctcctgctg

SEQ ID NO: 613350 - DNA, 25 bp, Homo sapien
taattttatttagccagtctcctgc

SEQ ID NO: 613351 - DNA, 25 bp, Homo sapien
ttctaattttatttagccagtctcc

SEQ ID NO: 613352 - DNA, 25 bp, Homo sapien
caccactcttcgagctgtgggtttt

SEQ ID NO: 613353 - DNA, 25 bp, Homo sapien
tatatccataggcaatatacataca

SEQ ID NO: 613354 - DNA, 25 bp, Homo sapien
tatttatacatatatccataggcaa

SEQ ID NO: 613355 - DNA, 25 bp, Homo sapien
cagacgtcaccactcttcgagctgt

SEQ ID NO: 613356 - DNA, 25 bp, Homo sapien
gcctgccgtccagcaaggctttccc

SEQ ID NO: 613357 - DNA, 25 bp, Homo sapien
gaataacaacactgacagcccgaag

SEQ ID NO: 613358 - DNA, 25 bp, Homo sapien
acaacactgacagcccgaagcgggc

SEQ ID NO: 613359 - DNA, 25 bp, Homo sapien
tattatgaataacaacactgacagc

SEQ ID NO: 613360 - DNA, 25 bp, Homo sapien
tatgaataacaacactgacagcccg

SEQ ID NO: 613361 - DNA, 25 bp, Homo sapien
ctgccaaagacccgggtatcctggc

SEQ ID NO: 613362 - DNA, 25 bp, Homo sapien
ttagctgtaatgtaccacagactgc

SEQ ID NO: 613363 - DNA, 25 bp, Homo sapien
gtaccacagactgcactgacatttg

SEQ ID NO: 613364 - DNA, 25 bp, Homo sapien
cacctcgggacccatttgacttcaa

SEQ ID NO: 613365 - DNA, 25 bp, Homo sapien
taatgtaccacagactgcactgaca

SEQ ID NO: 613366 - DNA, 25 bp, Homo sapien
ggaaggtgagatccggggacaggga

SEQ ID NO: 613367 - DNA, 25 bp, Homo sapien
ttgccaggacagcttgaaggaaggt

SEQ ID NO: 613368 - DNA, 25 bp, Homo sapien
ctggccttgccaggacagcttgaag

SEQ ID NO: 613369 - DNA, 25 bp, Homo sapien
tttgagaaggtgataaagcctggcc

SEQ ID NO: 613370 - DNA, 25 bp, Homo sapien
ggttgtacccacagacatgttcgca

SEQ ID NO: 613371 - DNA, 25 bp, Homo sapien
catgcacaggttgtacccacagaca

SEQ ID NO: 613372 - DNA, 25 bp, Homo sapien
tgccagcacatgatgcatgcacagg

SEQ ID NO: 613373 - DNA, 25 bp, Homo sapien
cgtgtgcatgagcatgccagcacat

SEQ ID NO: 613374 - DNA, 25 bp, Homo sapien
atgactctgattgtgagtgaagttt

SEQ ID NO: 613375 - DNA, 25 bp, Homo sapien
gatgactctgattgtgagtgaagtt

SEQ ID NO: 613376 - DNA, 25 bp, Homo sapien
ctagatgactctgattgtgagtgaa

SEQ ID NO: 613377 - DNA, 25 bp, Homo sapien
tagatgactctgattgtgagtgaag

SEQ ID NO: 613378 - DNA, 25 bp, Homo sapien
gctctgagcacagcgctctgttagc

SEQ ID NO: 613379 - DNA, 25 bp, Homo sapien
cgagctctgagcacagcgctctgtt

SEQ ID NO: 613380 - DNA, 25 bp, Homo sapien
gagctctgagcacagcgctctgtta

SEQ ID NO: 613381 - DNA, 25 bp, Homo sapien
tctgagcacagcgctctgttagcat

SEQ ID NO: 613382 - DNA, 25 bp, Homo sapien
tatctgataccccctgccattgtcg

SEQ ID NO: 613383 - DNA, 25 bp, Homo sapien
gctccccattctacatgggtctttc

SEQ ID NO: 613384 - DNA, 25 bp, Homo sapien
cattctacatgggtctttccctcct

SEQ ID NO: 613385 - DNA, 25 bp, Homo sapien
tgccattgtcgctccccattctaca

SEQ ID NO: 613386 - DNA, 25 bp, Homo sapien
aatttccttgagacccgtgtcaacg

SEQ ID NO: 613387 - DNA, 25 bp, Homo sapien
ttcaggtgagctgggaatttccttg

SEQ ID NO: 613388 - DNA, 25 bp, Homo sapien
ggcttacatgggtcagtttgtgagt

SEQ ID NO: 613389 - DNA, 25 bp, Homo sapien
tttgttggagggcttacatgggtca

SEQ ID NO: 613390 - DNA, 25 bp, Homo sapien
gctctgagaagacgacgggaacatc

SEQ ID NO: 613391 - DNA, 25 bp, Homo sapien
tctgagaagacgacgggaacatctt

SEQ ID NO: 613392 - DNA, 25 bp, Homo sapien
taagctctgagaagacgacgggaac

SEQ ID NO: 613393 - DNA, 25 bp, Homo sapien
agaagacgacgggaacatcttccat

SEQ ID NO: 613394 - DNA, 25 bp, Homo sapien
ttagctgtgaggactcattcatctg

SEQ ID NO: 613395 - DNA, 25 bp, Homo sapien
agctgtgaggactcattcatctgct

SEQ ID NO: 613396 - DNA, 25 bp, Homo sapien
cacctttccgacagccgtttgttag

SEQ ID NO: 613397 - DNA, 25 bp, Homo sapien
ttccgacagccgtttgttagctgtg

SEQ ID NO: 613398 - DNA, 25 bp, Homo sapien
caaaggcaagcttcccagaatgcag

SEQ ID NO: 613399 - DNA, 25 bp, Homo sapien
tgctaacaatgctgcaacctggtcc

SEQ ID NO: 613400 - DNA, 25 bp, Homo sapien
cacatgcaaaggcaagcttcccaga

SEQ ID NO: 613401 - DNA, 25 bp, Homo sapien
accggatggtcacggcacatgcaaa

SEQ ID NO: 613402 - DNA, 25 bp, Homo sapien
ctgctgggaaggcatgtcacagcac

SEQ ID NO: 613403 - DNA, 25 bp, Homo sapien
gaaggcatgtcacagcacagcggcc

SEQ ID NO: 613404 - DNA, 25 bp, Homo sapien
gctgggaaggcatgtcacagcacag

SEQ ID NO: 613405 - DNA, 25 bp, Homo sapien
tgggaaggcatgtcacagcacagcg

SEQ ID NO: 613406 - DNA, 25 bp, Homo sapien
ctgactggtagactcgggggatcgg

SEQ ID NO: 613407 - DNA, 25 bp, Homo sapien
ttctgactggtagactcgggggatc

SEQ ID NO: 613408 - DNA, 25 bp, Homo sapien
gactggtagactcgggggatcggcg

SEQ ID NO: 613409 - DNA, 25 bp, Homo sapien
ggatcggcggatcgggggctggctg

SEQ ID NO: 613410 - DNA, 25 bp, Homo sapien
cactcagccctattagcattctgca

SEQ ID NO: 613411 - DNA, 25 bp, Homo sapien
ggctgggctccacaattaacacaaa

SEQ ID NO: 613412 - DNA, 25 bp, Homo sapien
gggctccacaattaacacaaaggta

SEQ ID NO: 613413 - DNA, 25 bp, Homo sapien
catgtggctgggctccacaattaac

SEQ ID NO: 613414 - DNA, 25 bp, Homo sapien
cagctccctgtagcggcagcttcat

SEQ ID NO: 613415 - DNA, 25 bp, Homo sapien
acagctccctgtagcggcagcttca

SEQ ID NO: 613416 - DNA, 25 bp, Homo sapien
gcactgatctacagacgtccactta

SEQ ID NO: 613417 - DNA, 25 bp, Homo sapien
ttggtaacatcctcaggtgcctctt

SEQ ID NO: 613418 - DNA, 25 bp, Homo sapien
tacagacgtccacttattggtaaca

SEQ ID NO: 613419 - DNA, 25 bp, Homo sapien
tccacttattggtaacatcctcagg

SEQ ID NO: 613420 - DNA, 25 bp, Homo sapien
tggcagctccatcaggctcgtctta

SEQ ID NO: 613421 - DNA, 25 bp, Homo sapien
gacttgtaagtccccaagtgggctg

SEQ ID NO: 613422 - DNA, 25 bp, Homo sapien
atcaggctcgtcttacgggctggga

SEQ ID NO: 613423 - DNA, 25 bp, Homo sapien
ggcttttaggacagagggacttgta

SEQ ID NO: 613424 - DNA, 25 bp, Homo sapien
attcctcaagtagaagccccttggg

SEQ ID NO: 613425 - DNA, 25 bp, Homo sapien
cagattcctcaagtagaagcccctt

SEQ ID NO: 613426 - DNA, 25 bp, Homo sapien
ccttggggccagcgaagaggggact

SEQ ID NO: 613427 - DNA, 25 bp, Homo sapien
cttggggccagcgaagaggggactg

SEQ ID NO: 613428 - DNA, 25 bp, Homo sapien
gccgccgcggctccccctctcgctc

SEQ ID NO: 613429 - DNA, 25 bp, Homo sapien
ggctccccctctcgctcccgctctc

SEQ ID NO: 613430 - DNA, 25 bp, Homo sapien
gcggctccccctctcgctcccgctc

SEQ ID NO: 613431 - DNA, 25 bp, Homo sapien
ccgcggctccccctctcgctcccgc

SEQ ID NO: 613432 - DNA, 25 bp, Homo sapien
tccggtgtaaagctggatcctggcc

SEQ ID NO: 613433 - DNA, 25 bp, Homo sapien
gagagcttccggtgtaaagctggat

SEQ ID NO: 613434 - DNA, 25 bp, Homo sapien
gcttccggtgtaaagctggatcctg

SEQ ID NO: 613435 - DNA, 25 bp, Homo sapien
caggctgcgggagagcttccggtgt

SEQ ID NO: 613436 - DNA, 25 bp, Homo sapien
gcttccctttgattcccgtggagcc

SEQ ID NO: 613437 - DNA, 25 bp, Homo sapien
tggagcccagaatcaaaagcaggcg

SEQ ID NO: 613438 - DNA, 25 bp, Homo sapien
agcagcgtggcttccctttgattcc

SEQ ID NO: 613439 - DNA, 25 bp, Homo sapien
cagaatcaaaagcaggcggcagtgg

SEQ ID NO: 613440 - DNA, 25 bp, Homo sapien
tgccctggcctttcatctccacagg

SEQ ID NO: 613441 - DNA, 25 bp, Homo sapien
acaggctccaggtgagagaagccag

SEQ ID NO: 613442 - DNA, 25 bp, Homo sapien
tccacaggctccaggtgagagaagc

SEQ ID NO: 613443 - DNA, 25 bp, Homo sapien
ctgccctggcctttcatctccacag

SEQ ID NO: 613444 - DNA, 25 bp, Homo sapien
tccataggcccttgacaactgcctg

SEQ ID NO: 613445 - DNA, 25 bp, Homo sapien
tccttttcacatcttgaacttttcc

SEQ ID NO: 613446 - DNA, 25 bp, Homo sapien
gacttttggacacccctaggctgtg

SEQ ID NO: 613447 - DNA, 25 bp, Homo sapien
cataggcccttgacaactgcctgaa

SEQ ID NO: 613448 - DNA, 25 bp, Homo sapien
cacattcgaatatcgtccttgtcca

SEQ ID NO: 613449 - DNA, 25 bp, Homo sapien
ttcgaatatcgtccttgtccatgcc

SEQ ID NO: 613450 - DNA, 25 bp, Homo sapien
ttacacattcgaatatcgtccttgt

SEQ ID NO: 613451 - DNA, 25 bp, Homo sapien
cattcgaatatcgtccttgtccatg

SEQ ID NO: 613452 - DNA, 25 bp, Homo sapien
aacttgtcagcccagcagggtcctt

SEQ ID NO: 613453 - DNA, 25 bp, Homo sapien
gctgttggagacacgtccttccagg

SEQ ID NO: 613454 - DNA, 25 bp, Homo sapien
ggcaccttgcagcaggcgaaacttg

SEQ ID NO: 613455 - DNA, 25 bp, Homo sapien
acgccacctgatgctcgctgttgga

SEQ ID NO: 613456 - DNA, 25 bp, Homo sapien
gggcttcagagggcgcattcagtgc

SEQ ID NO: 613457 - DNA, 25 bp, Homo sapien
ggcttcagagggcgcattcagtgca

SEQ ID NO: 613458 - DNA, 25 bp, Homo sapien
ccagacatatttttagctttaattt

SEQ ID NO: 613459 - DNA, 25 bp, Homo sapien
ttagctttaattttctgtagctccc

SEQ ID NO: 613460 - DNA, 25 bp, Homo sapien
ttttagctttaattttctgtagctc

SEQ ID NO: 613461 - DNA, 25 bp, Homo sapien
agctttaattttctgtagctcccac

SEQ ID NO: 613462 - DNA, 25 bp, Homo sapien
cagggcagaaccctgggctggcgcc

SEQ ID NO: 613463 - DNA, 25 bp, Homo sapien
cttggatgtagtcccagtgagttcc

SEQ ID NO: 613464 - DNA, 25 bp, Homo sapien
gtagtcccagtgagttcctggcaga

SEQ ID NO: 613465 - DNA, 25 bp, Homo sapien
cgcccacgggtgcttggatgtagtc

SEQ ID NO: 613466 - DNA, 25 bp, Homo sapien
ggccatctggactcccttgcaagct

SEQ ID NO: 613467 - DNA, 25 bp, Homo sapien
ggctgtggccatctggactcccttg

SEQ ID NO: 613468 - DNA, 25 bp, Homo sapien
gtggccatctggactcccttgcaag

SEQ ID NO: 613469 - DNA, 25 bp, Homo sapien
tgtggccatctggactcccttgcaa

SEQ ID NO: 613470 - DNA, 25 bp, Homo sapien
tcccaggcagtaatagtgtgccagg

SEQ ID NO: 613471 - DNA, 25 bp, Homo sapien
ccaggcagtaatagtgtgccaggca

SEQ ID NO: 613472 - DNA, 25 bp, Homo sapien
gcgtttcccaggcagtaatagtgtg

SEQ ID NO: 613473 - DNA, 25 bp, Homo sapien
tttcccaggcagtaatagtgtgcca

SEQ ID NO: 613474 - DNA, 25 bp, Homo sapien
tgtggatgtcggcagccactccact

SEQ ID NO: 613475 - DNA, 25 bp, Homo sapien
agctgtggatgtcggcagccactcc

SEQ ID NO: 613476 - DNA, 25 bp, Homo sapien
tcagctgtggatgtcggcagccact

SEQ ID NO: 613477 - DNA, 25 bp, Homo sapien
catcagctgtggatgtcggcagcca

SEQ ID NO: 613478 - DNA, 25 bp, Homo sapien
ggtccaacacaatgggccgcaaggg

SEQ ID NO: 613479 - DNA, 25 bp, Homo sapien
caatgggccgcaaggggcagcgcca

SEQ ID NO: 613480 - DNA, 25 bp, Homo sapien
ccgggtccaacacaatgggccgcaa

SEQ ID NO: 613481 - DNA, 25 bp, Homo sapien
acaatgggccgcaaggggcagcgcc

SEQ ID NO: 613482 - DNA, 25 bp, Homo sapien
cagatttaaatgtcactgctgcagg

SEQ ID NO: 613483 - DNA, 25 bp, Homo sapien
ggaactggaggatgagtgtccacca

SEQ ID NO: 613484 - DNA, 25 bp, Homo sapien
tggaggatgagtgtccaccagtttc

SEQ ID NO: 613485 - DNA, 25 bp, Homo sapien
actggaggatgagtgtccaccagtt

SEQ ID NO: 613486 - DNA, 25 bp, Homo sapien
ggtgggaactggaggatgagtgtcc

SEQ ID NO: 613487 - DNA, 25 bp, Homo sapien
ctgggcttgccatttagcggtgcta

SEQ ID NO: 613488 - DNA, 25 bp, Homo sapien
gcttgccatttagcggtgctaaacg

SEQ ID NO: 613489 - DNA, 25 bp, Homo sapien
tgccatttagcggtgctaaacgaga

SEQ ID NO: 613490 - DNA, 25 bp, Homo sapien
atttagcggtgctaaacgagatgcg

SEQ ID NO: 613491 - DNA, 25 bp, Homo sapien
ggctcatggccttacaccacagcat

SEQ ID NO: 613492 - DNA, 25 bp, Homo sapien
caaagaaggatgactgccggactcc

SEQ ID NO: 613493 - DNA, 25 bp, Homo sapien
gcttcagggatgaccagggatctct

SEQ ID NO: 613494 - DNA, 25 bp, Homo sapien
gggtaaggcagtttcttcaagacaa

SEQ ID NO: 613495 - DNA, 25 bp, Homo sapien
gtacccttttctgccttgagggctc

SEQ ID NO: 613496 - DNA, 25 bp, Homo sapien
gctcaagggattgtctccatctgtt

SEQ ID NO: 613497 - DNA, 25 bp, Homo sapien
tctgctttatcctgctgtgaaaaac

SEQ ID NO: 613498 - DNA, 25 bp, Homo sapien
cactccggtacccttttctgccttg

SEQ ID NO: 613499 - DNA, 25 bp, Homo sapien
aatatgtgaggacgtccacagttgg

SEQ ID NO: 613500 - DNA, 25 bp, Homo sapien
ttaatggctccaatatgtgaggacg

SEQ ID NO: 613501 - DNA, 25 bp, Homo sapien
gttgtggtggcggtgagaatgggct

SEQ ID NO: 613502 - DNA, 25 bp, Homo sapien
tggcggtgagaatgggctgcagttt

SEQ ID NO: 613503 - DNA, 25 bp, Homo sapien
tctacaacaagtggctgacaaaggt

SEQ ID NO: 613504 - DNA, 25 bp, Homo sapien
tccggtgctgcagccgccacgaatg

SEQ ID NO: 613505 - DNA, 25 bp, Homo sapien
gggaggtgggccctcgatgtggcct

SEQ ID NO: 613506 - DNA, 25 bp, Homo sapien
tgggccctcgatgtggcctttttgt

SEQ ID NO: 613507 - DNA, 25 bp, Homo sapien
tggcctggcatggtaggtactaccc

SEQ ID NO: 613508 - DNA, 25 bp, Homo sapien
ccaagattgtaaccagagagcagcc

SEQ ID NO: 613509 - DNA, 25 bp, Homo sapien
ctggacatacgttagcacattggca

SEQ ID NO: 613510 - DNA, 25 bp, Homo sapien
tataggccatacttatacagacgtg

SEQ ID NO: 613511 - DNA, 25 bp, Homo sapien
tagatctgagtacaagcctgaggct

SEQ ID NO: 613512 - DNA, 25 bp, Homo sapien
tgatcagctggatccccacgtgagc

SEQ ID NO: 613513 - DNA, 25 bp, Homo sapien
gaggaacaaacagcagatgcccttg

SEQ ID NO: 613514 - DNA, 25 bp, Homo sapien
gagggctcactccagcttcatatgg

SEQ ID NO: 613515 - DNA, 25 bp, Homo sapien
aaagagcactcctacaccttgaggg

SEQ ID NO: 613516 - DNA, 25 bp, Homo sapien
gggaccaccggcatcaagagtaaga

SEQ ID NO: 613517 - DNA, 25 bp, Homo sapien
gaaggatctccagttaggcaggtcc

SEQ ID NO: 613518 - DNA, 25 bp, Homo sapien
cattgagtggccaggtgctaacgcc

SEQ ID NO: 613519 - DNA, 25 bp, Homo sapien
tgcagaaagaagtagcctggctcct

SEQ ID NO: 613520 - DNA, 25 bp, Homo sapien
gatgtcgtcccacacagaggaggct

SEQ ID NO: 613521 - DNA, 25 bp, Homo sapien
gggatcttcctaggatgactgcaga

SEQ ID NO: 613522 - DNA, 25 bp, Homo sapien
cttggcagtagggacgaaaatagca

SEQ ID NO: 613523 - DNA, 25 bp, Homo sapien
ggcttgccatggtattcgctctgaa

SEQ ID NO: 613524 - DNA, 25 bp, Homo sapien
tcaggtaccccgagcataggaagta

SEQ ID NO: 613525 - DNA, 25 bp, Homo sapien
tactatgatcttacttctccagggt

SEQ ID NO: 613526 - DNA, 25 bp, Homo sapien
tctttggctcgtacggatctttggc

SEQ ID NO: 613527 - DNA, 25 bp, Homo sapien
gcaggtagcatttggcacctcctgt

SEQ ID NO: 613528 - DNA, 25 bp, Homo sapien
tgagtgtcccaagtaggcaggtagc

SEQ ID NO: 613529 - DNA, 25 bp, Homo sapien
tgtagctctgttccctagcacgtcg

SEQ ID NO: 613530 - DNA, 25 bp, Homo sapien
cataagagtatgaagtgagtgtccc

SEQ ID NO: 613531 - DNA, 25 bp, Homo sapien
aaagggtttgtcagccataggcgcc

SEQ ID NO: 613532 - DNA, 25 bp, Homo sapien
catagcctggatgactgtaaagact

SEQ ID NO: 613533 - DNA, 25 bp, Homo sapien
caggatgacatcctcagcagtgaca

SEQ ID NO: 613534 - DNA, 25 bp, Homo sapien
cgagacaagatgcaacggtacacct

SEQ ID NO: 613535 - DNA, 25 bp, Homo sapien
cgctggcaagtggttggtcccaaaa

SEQ ID NO: 613536 - DNA, 25 bp, Homo sapien
tgttgcaacagtctttgacttgctg

SEQ ID NO: 613537 - DNA, 25 bp, Homo sapien
ctctcgagtaatggatgttgcaaca

SEQ ID NO: 613538 - DNA, 25 bp, Homo sapien
aaaaggtctccctctgcccgctagt

SEQ ID NO: 613539 - DNA, 25 bp, Homo sapien
cttctgggtcccccaggatgggttg

SEQ ID NO: 613540 - DNA, 25 bp, Homo sapien
tcacttctgggtcccccaggatggg

SEQ ID NO: 613541 - DNA, 25 bp, Homo sapien
caggatgggttggtattttcctttg

SEQ ID NO: 613542 - DNA, 25 bp, Homo sapien
ttggtattttcctttgctgacccac

SEQ ID NO: 613543 - DNA, 25 bp, Homo sapien
gctgggttgctagtagcatggctgc

SEQ ID NO: 613544 - DNA, 25 bp, Homo sapien
ccaggaagttgctgatataattatt

SEQ ID NO: 613545 - DNA, 25 bp, Homo sapien
gggggctgctgttgtaagtccagag

SEQ ID NO: 613546 - DNA, 25 bp, Homo sapien
tataattattagtctgaggccaaag

SEQ ID NO: 613547 - DNA, 25 bp, Homo sapien
cagaggactagtgcctgtgccagca

SEQ ID NO: 613548 - DNA, 25 bp, Homo sapien
taagtgacttcagctagactgcagg

SEQ ID NO: 613549 - DNA, 25 bp, Homo sapien
cacaatgacgaagttgagggcggct

SEQ ID NO: 613550 - DNA, 25 bp, Homo sapien
aagaatagctatggcccttcgggaa

SEQ ID NO: 613551 - DNA, 25 bp, Homo sapien
taacctttcatggtcttgagaatcc

SEQ ID NO: 613552 - DNA, 25 bp, Homo sapien
aaggagctttcaggcacgtctgtct

SEQ ID NO: 613553 - DNA, 25 bp, Homo sapien
ggcacgtctgtctcttttattgatg

SEQ ID NO: 613554 - DNA, 25 bp, Homo sapien
ttttattgatggtgctctcttcatc

SEQ ID NO: 613555 - DNA, 25 bp, Homo sapien
tgtgacaacataagggtagtcctgt

SEQ ID NO: 613556 - DNA, 25 bp, Homo sapien
gctgatagccctgcagtagccatgg

SEQ ID NO: 613557 - DNA, 25 bp, Homo sapien
gctatagcagagtttactacatgcc

SEQ ID NO: 613558 - DNA, 25 bp, Homo sapien
gaaattatcacacatccaaagggca

SEQ ID NO: 613559 - DNA, 25 bp, Homo sapien
tgggatttgtaaggaaggacataac

SEQ ID NO: 613560 - DNA, 25 bp, Homo sapien
tattttgtgcatgggatttgtaagg

SEQ ID NO: 613561 - DNA, 25 bp, Homo sapien
taaggaaggacataactgtcgctac

SEQ ID NO: 613562 - DNA, 25 bp, Homo sapien
taactgtcgctacttgcattccctc

SEQ ID NO: 613563 - DNA, 25 bp, Homo sapien
cagtttggcgctttcagcagcggga

SEQ ID NO: 613564 - DNA, 25 bp, Homo sapien
cagcgggacggcgtaaagtagcatc

SEQ ID NO: 613565 - DNA, 25 bp, Homo sapien
ggaggagaggcagtttggcgctttc

SEQ ID NO: 613566 - DNA, 25 bp, Homo sapien
cgggacggcgtaaagtagcatctcc

SEQ ID NO: 613567 - DNA, 25 bp, Homo sapien
ctggtgagaagaccacggccacatc

SEQ ID NO: 613568 - DNA, 25 bp, Homo sapien
gccacatctctaaatctcaccaact

SEQ ID NO: 613569 - DNA, 25 bp, Homo sapien
agaagaccacggccacatctctaaa

SEQ ID NO: 613570 - DNA, 25 bp, Homo sapien
gtgagaagaccacggccacatctct

SEQ ID NO: 613571 - DNA, 25 bp, Homo sapien
ggtttctctgttcaggagtcagatg

SEQ ID NO: 613572 - DNA, 25 bp, Homo sapien
ttctctgttcaggagtcagatgatc

SEQ ID NO: 613573 - DNA, 25 bp, Homo sapien
aaggtatttacagttatccagcatc

SEQ ID NO: 613574 - DNA, 25 bp, Homo sapien
tctctgttcaggagtcagatgatcc

SEQ ID NO: 613575 - DNA, 25 bp, Homo sapien
catcacgtgtgccttataagtccag

SEQ ID NO: 613576 - DNA, 25 bp, Homo sapien
cacgtgtgccttataagtccagttt

SEQ ID NO: 613577 - DNA, 25 bp, Homo sapien
acgtgtgccttataagtccagtttc

SEQ ID NO: 613578 - DNA, 25 bp, Homo sapien
tcacgtgtgccttataagtccagtt

SEQ ID NO: 613579 - DNA, 25 bp, Homo sapien
ctagtaggaaaacaatatgagaaaa

SEQ ID NO: 613580 - DNA, 25 bp, Homo sapien
tatgagaaaaaaaatcagaactgga

SEQ ID NO: 613581 - DNA, 25 bp, Homo sapien
tgagaaaaaaaatcagaactggaca

SEQ ID NO: 613582 - DNA, 25 bp, Homo sapien
aatatgagaaaaaaaatcagaactg

SEQ ID NO: 613583 - DNA, 25 bp, Homo sapien
ttgagggcacgaaacgttgccaatg

SEQ ID NO: 613584 - DNA, 25 bp, Homo sapien
cagattcattgagggcacgaaacgt

SEQ ID NO: 613585 - DNA, 25 bp, Homo sapien
aggcattcccagattcattgagggc

SEQ ID NO: 613586 - DNA, 25 bp, Homo sapien
cattcccagattcattgagggcacg

SEQ ID NO: 613587 - DNA, 25 bp, Homo sapien
tcatcacattcataatgctggacaa

SEQ ID NO: 613588 - DNA, 25 bp, Homo sapien
caaaagtacgatgtgttcggtattc

SEQ ID NO: 613589 - DNA, 25 bp, Homo sapien
gttgtgacacatgcccaaaagccat

SEQ ID NO: 613590 - DNA, 25 bp, Homo sapien
gatgtccagtaagttgtgacacatg

SEQ ID NO: 613591 - DNA, 25 bp, Homo sapien
gagcgatgcctaaagccccttgtat

SEQ ID NO: 613592 - DNA, 25 bp, Homo sapien
tggagcattgtaaatgatgagcgat

SEQ ID NO: 613593 - DNA, 25 bp, Homo sapien
tcaccatattcgtgggtttccccta

SEQ ID NO: 613594 - DNA, 25 bp, Homo sapien
atatagtgtacatattctctggagc

SEQ ID NO: 613595 - DNA, 25 bp, Homo sapien
ttgtatggcttcagtccactgtgca

SEQ ID NO: 613596 - DNA, 25 bp, Homo sapien
tgatgtatagagagggatgagagaa

SEQ ID NO: 613597 - DNA, 25 bp, Homo sapien
ggcttcagtccactgtgcatgctct

SEQ ID NO: 613598 - DNA, 25 bp, Homo sapien
gcttcagtccactgtgcatgctctg

SEQ ID NO: 613599 - DNA, 25 bp, Homo sapien
gatgccgagtcaggtttactctgtt

SEQ ID NO: 613600 - DNA, 25 bp, Homo sapien
agtcaggtttactctgttgccaaca

SEQ ID NO: 613601 - DNA, 25 bp, Homo sapien
ttactctgttgccaacatgaaatct

SEQ ID NO: 613602 - DNA, 25 bp, Homo sapien
ttctagtatgaattaatagatgttg

SEQ ID NO: 613603 - DNA, 25 bp, Homo sapien
tttgttggtggcgagcaagatccgt

SEQ ID NO: 613604 - DNA, 25 bp, Homo sapien
tggtggcgagcaagatccatgcgct

SEQ ID NO: 613605 - DNA, 25 bp, Homo sapien
tagatctgacagacggacaaaggtc

SEQ ID NO: 613606 - DNA, 25 bp, Homo sapien
tagatctgacagacggacaaaggtt

SEQ ID NO: 613607 - DNA, 25 bp, Homo sapien
actgatcttgagcttctgagctcca

SEQ ID NO: 613608 - DNA, 25 bp, Homo sapien
agccacccgagtagcacatgccacc

SEQ ID NO: 613609 - DNA, 25 bp, Homo sapien
ccacccgagtagcacatgccaccat

SEQ ID NO: 613610 - DNA, 25 bp, Homo sapien
ccagactgatcttgagcttctgagc

SEQ ID NO: 613611 - DNA, 25 bp, Homo sapien
gtttattcagagctgcaccaaccat

SEQ ID NO: 613612 - DNA, 25 bp, Homo sapien
cctctgtttattcagagctgcacca

SEQ ID NO: 613613 - DNA, 25 bp, Homo sapien
tctgtttattcagagctgcaccaac

SEQ ID NO: 613614 - DNA, 25 bp, Homo sapien
accctctgtttattcagagctgcac

SEQ ID NO: 613615 - DNA, 25 bp, Homo sapien
ttgcccgaagaaggcgcttggtgaa

SEQ ID NO: 613616 - DNA, 25 bp, Homo sapien
gatttgcccgaagaaggcgcttggt

SEQ ID NO: 613617 - DNA, 25 bp, Homo sapien
cctgatttgcccgaagaaggcgctt

SEQ ID NO: 613618 - DNA, 25 bp, Homo sapien
ggccctgatttgcccgaagaaggcg

SEQ ID NO: 613619 - DNA, 25 bp, Homo sapien
actggaggcgaagcgggtgcaccca

SEQ ID NO: 613620 - DNA, 25 bp, Homo sapien
gtgcgaactggaggcgaagcgggtg

SEQ ID NO: 613621 - DNA, 25 bp, Homo sapien
cgaactggaggcgaagcgggtgcac

SEQ ID NO: 613622 - DNA, 25 bp, Homo sapien
gaggcgaagcgggtgcacccacaac

SEQ ID NO: 613623 - DNA, 25 bp, Homo sapien
gcccttccggttcgccaggctcttc

SEQ ID NO: 613624 - DNA, 25 bp, Homo sapien
ctggacgcccttccggttcgccagg

SEQ ID NO: 613625 - DNA, 25 bp, Homo sapien
tcgccaggctcttccgggtgagggt

SEQ ID NO: 613626 - DNA, 25 bp, Homo sapien
aggctcttccgggtgagggtcctgc

SEQ ID NO: 613627 - DNA, 25 bp, Homo sapien
cgttagtattatattctgctggaat

SEQ ID NO: 613628 - DNA, 25 bp, Homo sapien
ggtcgttagtattatattctgctgg

SEQ ID NO: 613629 - DNA, 25 bp, Homo sapien
tctgcaggtcgttagtattatattc

SEQ ID NO: 613630 - DNA, 25 bp, Homo sapien
aattttctgcaggtcgttagtatta

SEQ ID NO: 613631 - DNA, 25 bp, Homo sapien
caccaactgctctacttgttagatg

SEQ ID NO: 613632 - DNA, 25 bp, Homo sapien
tgaatttctcgaaatgctcctggaa

SEQ ID NO: 613633 - DNA, 25 bp, Homo sapien
tttatatgcctcaaaatcctctaaa

SEQ ID NO: 613634 - DNA, 25 bp, Homo sapien
tggagaccttgcatcatgaatttct

SEQ ID NO: 613635 - DNA, 25 bp, Homo sapien
aggagggtccgccacctgcacgccc

SEQ ID NO: 613636 - DNA, 25 bp, Homo sapien
acgcccgccgcctgcggcatgccat

SEQ ID NO: 613637 - DNA, 25 bp, Homo sapien
gaggcgaggagggtccgccacctgc

SEQ ID NO: 613638 - DNA, 25 bp, Homo sapien
cctgcggcatgccatcgccgcttcc

SEQ ID NO: 613639 - DNA, 25 bp, Homo sapien
cgctcccattattctaaacctctgg

SEQ ID NO: 613640 - DNA, 25 bp, Homo sapien
gctcccattattctaaacctctggt

SEQ ID NO: 613641 - DNA, 25 bp, Homo sapien
gatgttccaactgcacaacgtgccg

SEQ ID NO: 613642 - DNA, 25 bp, Homo sapien
tgcacaacgtgccgctcccattatt

SEQ ID NO: 613643 - DNA, 25 bp, Homo sapien
tgtactaggaggtaatgatgcccat

SEQ ID NO: 613644 - DNA, 25 bp, Homo sapien
gatttgcccaaagtaacacgatgat

SEQ ID NO: 613645 - DNA, 25 bp, Homo sapien
tctggataagactccagaggtcctc

SEQ ID NO: 613646 - DNA, 25 bp, Homo sapien
gagtgatggcttcgccaatgtcccc

SEQ ID NO: 613647 - DNA, 25 bp, Homo sapien
gtgggccaaggattgacttcccaac

SEQ ID NO: 613648 - DNA, 25 bp, Homo sapien
agtgggccaaggattgacttcccaa

SEQ ID NO: 613649 - DNA, 25 bp, Homo sapien
gggccaaggattgacttcccaactc

SEQ ID NO: 613650 - DNA, 25 bp, Homo sapien
tgggccaaggattgacttcccaact

SEQ ID NO: 613651 - DNA, 25 bp, Homo sapien
tatggaacctgtacttctccagacc

SEQ ID NO: 613652 - DNA, 25 bp, Homo sapien
cttgatatggaacctgtacttctcc

SEQ ID NO: 613653 - DNA, 25 bp, Homo sapien
taaaccagacatcaaccgcttcctg

SEQ ID NO: 613654 - DNA, 25 bp, Homo sapien
ttcctagagaaggagcctgcctcac

SEQ ID NO: 613655 - DNA, 25 bp, Homo sapien
tctgtccgcagcagtcaggacagcc

SEQ ID NO: 613656 - DNA, 25 bp, Homo sapien
gcagcagtcaggacagccgcctttc

SEQ ID NO: 613657 - DNA, 25 bp, Homo sapien
tggacggagctgacggcccctctgt

SEQ ID NO: 613658 - DNA, 25 bp, Homo sapien
tcactggacggagctgacggcccct

SEQ ID NO: 613659 - DNA, 25 bp, Homo sapien
tggctttgcgcttggactggatgtg

SEQ ID NO: 613660 - DNA, 25 bp, Homo sapien
tttgcgcttggactggatgtggtaa

SEQ ID NO: 613661 - DNA, 25 bp, Homo sapien
ctttgcgcttggactggatgtggta

SEQ ID NO: 613662 - DNA, 25 bp, Homo sapien
cttggactggatgtggtaagatgaa

SEQ ID NO: 613663 - DNA, 25 bp, Homo sapien
ggttaaatggcaataccagtggatt

SEQ ID NO: 613664 - DNA, 25 bp, Homo sapien
ctgaaaaaagccatgcaagtgacaa

SEQ ID NO: 613665 - DNA, 25 bp, Homo sapien
ttagagaaacgcacatcagaatcac

SEQ ID NO: 613666 - DNA, 25 bp, Homo sapien
gtacatgcaatgtaatacctagagc

SEQ ID NO: 613667 - DNA, 25 bp, Homo sapien
tgtccaagacgtcacaggtagcaag

SEQ ID NO: 613668 - DNA, 25 bp, Homo sapien
ggctcgtgtgcattaagtcaacaaa

SEQ ID NO: 613669 - DNA, 25 bp, Homo sapien
tataatagtaggaccagtaccctgt

SEQ ID NO: 613670 - DNA, 25 bp, Homo sapien
aactccaagggccacaggagctgac

SEQ ID NO: 613671 - DNA, 25 bp, Homo sapien
agacacagcgcctgtccttttgtaa

SEQ ID NO: 613672 - DNA, 25 bp, Homo sapien
agacagacacagcgcctgtcctttt

SEQ ID NO: 613673 - DNA, 25 bp, Homo sapien
gaagagccacttactgagcgttgcc

SEQ ID NO: 613674 - DNA, 25 bp, Homo sapien
gacttctgaagagagcaaagcgcgt

SEQ ID NO: 613675 - DNA, 25 bp, Homo sapien
gacgtttttctcgagaggcgccgaa

SEQ ID NO: 613676 - DNA, 25 bp, Homo sapien
gaagtcccaggatttccgaagcgag

SEQ ID NO: 613677 - DNA, 25 bp, Homo sapien
gctgaaggcacaagcaggtatctca

SEQ ID NO: 613678 - DNA, 25 bp, Homo sapien
cgtacaggtggatacacaggcattc

SEQ ID NO: 613679 - DNA, 25 bp, Homo sapien
tggaggcgggacggaggggagccca

SEQ ID NO: 613680 - DNA, 25 bp, Homo sapien
gcccccggccgccccaggcctggca

SEQ ID NO: 613681 - DNA, 25 bp, Homo sapien
ccccggccgccccaggcctggcaag

SEQ ID NO: 613682 - DNA, 25 bp, Homo sapien
ccctgccctcccgcgcgcagcgccg

SEQ ID NO: 613683 - DNA, 25 bp, Homo sapien
cgctgccgccggacaaactttccgg

SEQ ID NO: 613684 - DNA, 25 bp, Homo sapien
gggactcggcggcgtgctgggggcg

SEQ ID NO: 613685 - DNA, 25 bp, Homo sapien
gcgcatcccccgccggagtccccaa

SEQ ID NO: 613686 - DNA, 25 bp, Homo sapien
cgccggagtccccaacgccgctgcc

SEQ ID NO: 613687 - DNA, 25 bp, Homo sapien
agcgtgggggcggtgtctacaccct

SEQ ID NO: 613688 - DNA, 25 bp, Homo sapien
gaaggaagcgcgaccgagccccgtc

SEQ ID NO: 613689 - DNA, 25 bp, Homo sapien
ctggccacccgagaggcggtatccg

SEQ ID NO: 613690 - DNA, 25 bp, Homo sapien
caggcagcgcccgatcgggacttac

SEQ ID NO: 613691 - DNA, 25 bp, Homo sapien
taggtgctcactcaagaatcaacga

SEQ ID NO: 613692 - DNA, 25 bp, Homo sapien
tcagcgaatcgatgaactgctttgc

SEQ ID NO: 613693 - DNA, 25 bp, Homo sapien
gaatcaacgactgatccttcgaggc

SEQ ID NO: 613694 - DNA, 25 bp, Homo sapien
aaaatagagccctagtcccgagtgg

SEQ ID NO: 613695 - DNA, 25 bp, Homo sapien
tgacaacactgtatgagcccctaga

SEQ ID NO: 613696 - DNA, 25 bp, Homo sapien
tgaataccacgtgggtgaacctggg

SEQ ID NO: 613697 - DNA, 25 bp, Homo sapien
catattcaactaaggagggcaggga

SEQ ID NO: 613698 - DNA, 25 bp, Homo sapien
tcctgggccctaggcagaggtgaat

SEQ ID NO: 613699 - DNA, 25 bp, Homo sapien
gacgagcgagcacaagggtcagttt

SEQ ID NO: 613700 - DNA, 25 bp, Homo sapien
tgtgggaatcaggaaagcacgccat

SEQ ID NO: 613701 - DNA, 25 bp, Homo sapien
gaatccagtgatccgagagctgtgg

SEQ ID NO: 613702 - DNA, 25 bp, Homo sapien
gattcctgagtacatgacgagcgag

SEQ ID NO: 613703 - DNA, 25 bp, Homo sapien
ccagagtgaggccatcttgaagtga

SEQ ID NO: 613704 - DNA, 25 bp, Homo sapien
gttgcatggccagagtgaggccatc

SEQ ID NO: 613705 - DNA, 25 bp, Homo sapien
tggccagagtgaggccatcttgaag

SEQ ID NO: 613706 - DNA, 25 bp, Homo sapien
catggccagagtgaggccatcttga

SEQ ID NO: 613707 - DNA, 25 bp, Homo sapien
ttggtgggacattgaaaaaagctct

SEQ ID NO: 613708 - DNA, 25 bp, Homo sapien
gctaaatgaggtgaatgtggcccaa

SEQ ID NO: 613709 - DNA, 25 bp, Homo sapien
gaagaagaatgggtccctgatggca

SEQ ID NO: 613710 - DNA, 25 bp, Homo sapien
gatgcaagctacacaccgacatagt

SEQ ID NO: 613711 - DNA, 25 bp, Homo sapien
acagagttagaatggttccttgtca

SEQ ID NO: 613712 - DNA, 25 bp, Homo sapien
gggacagagttagaatggttccttg

SEQ ID NO: 613713 - DNA, 25 bp, Homo sapien
tagaatggttccttgtcataccatc

SEQ ID NO: 613714 - DNA, 25 bp, Homo sapien
gagttagaatggttccttgtcatac

SEQ ID NO: 613715 - DNA, 25 bp, Homo sapien
cagttcataaccaaaggtcaggcca

SEQ ID NO: 613716 - DNA, 25 bp, Homo sapien
acggtgatgcctgcctcatagaggg

SEQ ID NO: 613717 - DNA, 25 bp, Homo sapien
gacacgtagatacagcaagccatgg

SEQ ID NO: 613718 - DNA, 25 bp, Homo sapien
gcagcaccaagttgctcccgaggat

SEQ ID NO: 613719 - DNA, 25 bp, Homo sapien
gcagtggcccagccgaacatgtgcc

SEQ ID NO: 613720 - DNA, 25 bp, Homo sapien
ccagccgaacatgtgcctccatccc

SEQ ID NO: 613721 - DNA, 25 bp, Homo sapien
agccgaacatgtgcctccatcccca

SEQ ID NO: 613722 - DNA, 25 bp, Homo sapien
agtggcccagccgaacatgtgcctc

SEQ ID NO: 613723 - DNA, 25 bp, Homo sapien
tgacgaggcctatgccactgacgga

SEQ ID NO: 613724 - DNA, 25 bp, Homo sapien
ccctgttagttgctggaagagcacc

SEQ ID NO: 613725 - DNA, 25 bp, Homo sapien
catgttatcgcgtgccctgaagagg

SEQ ID NO: 613726 - DNA, 25 bp, Homo sapien
tgtggtccggcctcgcatgttatcg

SEQ ID NO: 613727 - DNA, 25 bp, Homo sapien
tcctcattggtccttggaatgggag

SEQ ID NO: 613728 - DNA, 25 bp, Homo sapien
ggcttggttttcttagcagtggaca

SEQ ID NO: 613729 - DNA, 25 bp, Homo sapien
aggcacagcagtgcggtccagcgca

SEQ ID NO: 613730 - DNA, 25 bp, Homo sapien
gtggacaagattggctccctttggt

SEQ ID NO: 613731 - DNA, 25 bp, Homo sapien
aggagaaggcactgacaaagaccat

SEQ ID NO: 613732 - DNA, 25 bp, Homo sapien
tggcccaaacccaaaggagaaggca

SEQ ID NO: 613733 - DNA, 25 bp, Homo sapien
caaaggagaaggcactgacaaagac

SEQ ID NO: 613734 - DNA, 25 bp, Homo sapien
ccaaaggagaaggcactgacaaaga

SEQ ID NO: 613735 - DNA, 25 bp, Homo sapien
tggccgcccagttgaagctgttgca

SEQ ID NO: 613736 - DNA, 25 bp, Homo sapien
gtagatctcgctgaggacaagccag

SEQ ID NO: 613737 - DNA, 25 bp, Homo sapien
atctcgctgaggacaagccaggtca

SEQ ID NO: 613738 - DNA, 25 bp, Homo sapien
ctgatgaagaggttggccgcccagt

SEQ ID NO: 613739 - DNA, 25 bp, Homo sapien
ggaactgctggtctatctctgccaa

SEQ ID NO: 613740 - DNA, 25 bp, Homo sapien
tagagcaggaaggtccaggacaagc

SEQ ID NO: 613741 - DNA, 25 bp, Homo sapien
aggacagcggtcagtccgtagagca

SEQ ID NO: 613742 - DNA, 25 bp, Homo sapien
tatctctgccaacgactggcctttt

SEQ ID NO: 613743 - DNA, 25 bp, Homo sapien
cagagatctcgatgcggctgtacgg

SEQ ID NO: 613744 - DNA, 25 bp, Homo sapien
aggccgcagagatctcgatgcggct

SEQ ID NO: 613745 - DNA, 25 bp, Homo sapien
ctcgatgcggctgtacgggatgcca

SEQ ID NO: 613746 - DNA, 25 bp, Homo sapien
tacgggatgccagtggagttctgcc

SEQ ID NO: 613747 - DNA, 25 bp, Homo sapien
gaggcctcccgtcaaagagtcagag

SEQ ID NO: 613748 - DNA, 25 bp, Homo sapien
cagaccaaggactagaactgaggcc

SEQ ID NO: 613749 - DNA, 25 bp, Homo sapien
tagatcctcaggaaccttcagggcc

SEQ ID NO: 613750 - DNA, 25 bp, Homo sapien
tgatatcgggagagacttcctgcca

SEQ ID NO: 613751 - DNA, 25 bp, Homo sapien
taaagggtatgtttgttgcacacaa

SEQ ID NO: 613752 - DNA, 25 bp, Homo sapien
tgttgcacacaacttacaaataata

SEQ ID NO: 613753 - DNA, 25 bp, Homo sapien
ttacagagataaagggtatgtttgt

SEQ ID NO: 613754 - DNA, 25 bp, Homo sapien
ctctttattgtaaatattctatcct

SEQ ID NO: 613755 - DNA, 25 bp, Homo sapien
tcaccgaacgccgagtcagagagat

SEQ ID NO: 613756 - DNA, 25 bp, Homo sapien
tagtgccaaacccatgcctggaaat

SEQ ID NO: 613757 - DNA, 25 bp, Homo sapien
gaaaccaccgaaagagcttgccctg

SEQ ID NO: 613758 - DNA, 25 bp, Homo sapien
ctattgatacttggcgtcctgtggc

SEQ ID NO: 613759 - DNA, 25 bp, Homo sapien
cccagtgctcaaggaggttggagaa

SEQ ID NO: 613760 - DNA, 25 bp, Homo sapien
cagatatggccccaaattgcttaat

SEQ ID NO: 613761 - DNA, 25 bp, Homo sapien
ccaggtttggaatgtgttaattgca

SEQ ID NO: 613762 - DNA, 25 bp, Homo sapien
caccaggtctaaatgaagcagccag

SEQ ID NO: 613763 - DNA, 25 bp, Homo sapien
tgcattccgcctaaacaccaggtct

SEQ ID NO: 613764 - DNA, 25 bp, Homo sapien
gatgtttgcttctaaacgagtctcc

SEQ ID NO: 613765 - DNA, 25 bp, Homo sapien
atgtttgcttctaaacgagtctcca

SEQ ID NO: 613766 - DNA, 25 bp, Homo sapien
tgtttgcttctaaacgagtctccat

SEQ ID NO: 613767 - DNA, 25 bp, Homo sapien
ctcttggacagtctgtctctttttc

SEQ ID NO: 613768 - DNA, 25 bp, Homo sapien
cacagttaaattctttccaggagta

SEQ ID NO: 613769 - DNA, 25 bp, Homo sapien
caaagccagtatgacactgtcagat

SEQ ID NO: 613770 - DNA, 25 bp, Homo sapien
tatgaaggcacgtttttcctttggc

SEQ ID NO: 613771 - DNA, 25 bp, Homo sapien
tttggccacaggctcaacaaagcca

SEQ ID NO: 613772 - DNA, 25 bp, Homo sapien
ctacacctatatctacatccttctc

SEQ ID NO: 613773 - DNA, 25 bp, Homo sapien
atatctacacctatatctacatcct

SEQ ID NO: 613774 - DNA, 25 bp, Homo sapien
atttatatctacacctatatctaca

SEQ ID NO: 613775 - DNA, 25 bp, Homo sapien
tctacacctatatctacatccttct

SEQ ID NO: 613776 - DNA, 25 bp, Homo sapien
ccagagccttcggtggtgatcaagg

SEQ ID NO: 613777 - DNA, 25 bp, Homo sapien
ccccgcctctgtctgatgcaatcgc

SEQ ID NO: 613778 - DNA, 25 bp, Homo sapien
gcctctgtctgatgcaatcgccgca

SEQ ID NO: 613779 - DNA, 25 bp, Homo sapien
tgggtgtggtcaaatcagccagaga

SEQ ID NO: 613780 - DNA, 25 bp, Homo sapien
tcaggtggcatccttacagcacagg

SEQ ID NO: 613781 - DNA, 25 bp, Homo sapien
ggtctcatcaacttgcctctccaag

SEQ ID NO: 613782 - DNA, 25 bp, Homo sapien
ggaaaccaaggccacgctcggtctc

SEQ ID NO: 613783 - DNA, 25 bp, Homo sapien
gaaccaggaatagcaggggaaagca

SEQ ID NO: 613784 - DNA, 25 bp, Homo sapien
ggcacagtgaaaaatccacatagca

SEQ ID NO: 613785 - DNA, 25 bp, Homo sapien
gaagggaactttttcaggcacagtg

SEQ ID NO: 613786 - DNA, 25 bp, Homo sapien
cttccacaatgctagaggaagggaa

SEQ ID NO: 613787 - DNA, 25 bp, Homo sapien
cagtgaaaaatccacatagcaaaag

SEQ ID NO: 613788 - DNA, 25 bp, Homo sapien
ccatgctcttcgactgagtgtgcag

SEQ ID NO: 613789 - DNA, 25 bp, Homo sapien
gctttagtaggggagcacaactact

SEQ ID NO: 613790 - DNA, 25 bp, Homo sapien
ctctatgagggatggccatgctctt

SEQ ID NO: 613791 - DNA, 25 bp, Homo sapien
gatggccatgctcttcgactgagtg

SEQ ID NO: 613792 - DNA, 25 bp, Homo sapien
ctgtaagcttatcctctttgccagg

SEQ ID NO: 613793 - DNA, 25 bp, Homo sapien
tgtaagcttatcctctttgccagga

SEQ ID NO: 613794 - DNA, 25 bp, Homo sapien
caaagtatgagctggcaggtccttc

SEQ ID NO: 613795 - DNA, 25 bp, Homo sapien
tctatggatccaagaaggtggaaca

SEQ ID NO: 613796 - DNA, 25 bp, Homo sapien
gctggcatccataagaaggtagact

SEQ ID NO: 613797 - DNA, 25 bp, Homo sapien
tgggtccccggtatccaatgtgcaa

SEQ ID NO: 613798 - DNA, 25 bp, Homo sapien
actggatcagtcagcaccgtggact

SEQ ID NO: 613799 - DNA, 25 bp, Homo sapien
cagattcacacccaactgagcattc

SEQ ID NO: 613800 - DNA, 25 bp, Homo sapien
gatcagtcagcaccgtggactctac

SEQ ID NO: 613801 - DNA, 25 bp, Homo sapien
agattcacacccaactgagcattca

SEQ ID NO: 613802 - DNA, 25 bp, Homo sapien
actgcggcgggcacgttgctgtctc

SEQ ID NO: 613803 - DNA, 25 bp, Homo sapien
ggcacgttgctgtctctgccgttgc

SEQ ID NO: 613804 - DNA, 25 bp, Homo sapien
gaggcgcgacgctgggctacgcggg

SEQ ID NO: 613805 - DNA, 25 bp, Homo sapien
agagggcgccccgacgcggtgcggg

SEQ ID NO: 613806 - DNA, 25 bp, Homo sapien
gggtgtttatcctcctccgactaga

SEQ ID NO: 613807 - DNA, 25 bp, Homo sapien
tcacacgccgtaaagaacaaggtct

SEQ ID NO: 613808 - DNA, 25 bp, Homo sapien
gttagtcaaacaccattaggccagt

SEQ ID NO: 613809 - DNA, 25 bp, Homo sapien
caagtatttaccacctgacggaggg

SEQ ID NO: 613810 - DNA, 25 bp, Homo sapien
ccactgccggtaaatttattgactc

SEQ ID NO: 613811 - DNA, 25 bp, Homo sapien
cgtaatgttttagggcctctccact

SEQ ID NO: 613812 - DNA, 25 bp, Homo sapien
ttgacttgggctgcgcctaccgtaa

SEQ ID NO: 613813 - DNA, 25 bp, Homo sapien
agcaccttccggtaaacttgacttg

SEQ ID NO: 613814 - DNA, 25 bp, Homo sapien
ttcatgtctggacggggctaaaact

SEQ ID NO: 613815 - DNA, 25 bp, Homo sapien
acagcttgggcccatcgcagaccgg

SEQ ID NO: 613816 - DNA, 25 bp, Homo sapien
tctgtttagcaagaggagagcactg

SEQ ID NO: 613817 - DNA, 25 bp, Homo sapien
catcgcagaccggaggtgaatcatc

SEQ ID NO: 613818 - DNA, 25 bp, Homo sapien
tggtaagtcctatatgcctagtgcg

SEQ ID NO: 613819 - DNA, 25 bp, Homo sapien
tcattctgcacaacgcattgaggga

SEQ ID NO: 613820 - DNA, 25 bp, Homo sapien
taaacgcaggagtaggttaacactg

SEQ ID NO: 613821 - DNA, 25 bp, Homo sapien
gcctagtgcggtttcaggtgcagaa

SEQ ID NO: 613822 - DNA, 25 bp, Homo sapien
gcagccccgaatgggctcacatctg

SEQ ID NO: 613823 - DNA, 25 bp, Homo sapien
tagagacactgctatgaggctgatg

SEQ ID NO: 613824 - DNA, 25 bp, Homo sapien
atcaggaaaaaacgtggcagccccg

SEQ ID NO: 613825 - DNA, 25 bp, Homo sapien
gggatttgcttgttgcgagtacaca

SEQ ID NO: 613826 - DNA, 25 bp, Homo sapien
gaaagcgccatgatgacaagtgaca

SEQ ID NO: 613827 - DNA, 25 bp, Homo sapien
taagtggaaactatggccttggcac

SEQ ID NO: 613828 - DNA, 25 bp, Homo sapien
tatagaactgggagggaaagcgcca

SEQ ID NO: 613829 - DNA, 25 bp, Homo sapien
gggccagcgattttcaacactgacg

SEQ ID NO: 613830 - DNA, 25 bp, Homo sapien
agagagatgatgagtcctgagctcc

SEQ ID NO: 613831 - DNA, 25 bp, Homo sapien
caggacacatccttgagatgtggct

SEQ ID NO: 613832 - DNA, 25 bp, Homo sapien
agagatgatgagtcctgagctccct

SEQ ID NO: 613833 - DNA, 25 bp, Homo sapien
ccatcctgggtggcaccagtttctc

SEQ ID NO: 613834 - DNA, 25 bp, Homo sapien
ctctctgaggcgagggccggcgcat

SEQ ID NO: 613835 - DNA, 25 bp, Homo sapien
tccaagctctctgaggcgagggccg

SEQ ID NO: 613836 - DNA, 25 bp, Homo sapien
ctacgaggctccaagctctctgagg

SEQ ID NO: 613837 - DNA, 25 bp, Homo sapien
gaggctccaagctctctgaggcgag

SEQ ID NO: 613838 - DNA, 25 bp, Homo sapien
ccacctccggagagagtaaatttct

SEQ ID NO: 613839 - DNA, 25 bp, Homo sapien
catgaagacatacagggacaaggcc

SEQ ID NO: 613840 - DNA, 25 bp, Homo sapien
tgatagtgttaagaaagcagggacc

SEQ ID NO: 613841 - DNA, 25 bp, Homo sapien
gaccacagacgggaaagtgtcacct

SEQ ID NO: 613842 - DNA, 25 bp, Homo sapien
tgtccttgcccatgacacagcaccc

SEQ ID NO: 613843 - DNA, 25 bp, Homo sapien
gccactgaagaatggcccatgtcct

SEQ ID NO: 613844 - DNA, 25 bp, Homo sapien
ctgaagaatggcccatgtccttgcc

SEQ ID NO: 613845 - DNA, 25 bp, Homo sapien
cttctgggctcccatcaaggaaaat

SEQ ID NO: 613846 - DNA, 25 bp, Homo sapien
tgaggtcagctttccgtgagcaaat

SEQ ID NO: 613847 - DNA, 25 bp, Homo sapien
gtagaggcccctaacatcggcacag

SEQ ID NO: 613848 - DNA, 25 bp, Homo sapien
tgttacatcgacaatccaagcgttg

SEQ ID NO: 613849 - DNA, 25 bp, Homo sapien
tgtgatggcaaagcacgtctccagg

SEQ ID NO: 613850 - DNA, 25 bp, Homo sapien
tgttgtctccttatgggccagatct

SEQ ID NO: 613851 - DNA, 25 bp, Homo sapien
tagcctctttgcacggatgttctcc

SEQ ID NO: 613852 - DNA, 25 bp, Homo sapien
gcctctagcctctttgcacggatgt

SEQ ID NO: 613853 - DNA, 25 bp, Homo sapien
tggaagtgtggccagccgatccaac

SEQ ID NO: 613854 - DNA, 25 bp, Homo sapien
ggtttgcaagcttctcttggttttg

SEQ ID NO: 613855 - DNA, 25 bp, Homo sapien
taatgtggccggaaaggtctctctg

SEQ ID NO: 613856 - DNA, 25 bp, Homo sapien
cctctgttagctaatgtggccggaa

SEQ ID NO: 613857 - DNA, 25 bp, Homo sapien
gaaaagttcctctgttagctaatgt

SEQ ID NO: 613858 - DNA, 25 bp, Homo sapien
cccgttctgcgggttgcccgtggat

SEQ ID NO: 613859 - DNA, 25 bp, Homo sapien
tcactggccccgttctgcgggttgc

SEQ ID NO: 613860 - DNA, 25 bp, Homo sapien
ggcaagcactgttcccctctgacag

SEQ ID NO: 613861 - DNA, 25 bp, Homo sapien
ccggggtcactggccccgttctgcg

SEQ ID NO: 613862 - DNA, 25 bp, Homo sapien
tttgaatgtgggtctgtgggattcc

SEQ ID NO: 613863 - DNA, 25 bp, Homo sapien
aatgtgggtctgtgggattccaaga

SEQ ID NO: 613864 - DNA, 25 bp, Homo sapien
ggtctgtgggattccaagacagccc

SEQ ID NO: 613865 - DNA, 25 bp, Homo sapien
tgtgggattccaagacagccctacc

SEQ ID NO: 613866 - DNA, 25 bp, Homo sapien
ttagcaaacactaagcagcgcaact

SEQ ID NO: 613867 - DNA, 25 bp, Homo sapien
actgtgggaactccataggcggcca

SEQ ID NO: 613868 - DNA, 25 bp, Homo sapien
gcaaacactaagcagcgcaactgtg

SEQ ID NO: 613869 - DNA, 25 bp, Homo sapien
gcagcgcaactgtgggaactccata

SEQ ID NO: 613870 - DNA, 25 bp, Homo sapien
caagacctcctagggctttgagctt

SEQ ID NO: 613871 - DNA, 25 bp, Homo sapien
ctttgagcttagaagtagggaggga

SEQ ID NO: 613872 - DNA, 25 bp, Homo sapien
tctccacgggcaagacctcctaggg

SEQ ID NO: 613873 - DNA, 25 bp, Homo sapien
cccgctgatggccagtcttggcaga

SEQ ID NO: 613874 - DNA, 25 bp, Homo sapien
cagctcagggttgacatgaactcac

SEQ ID NO: 613875 - DNA, 25 bp, Homo sapien
gtggctatcggtggcatctcctggt

SEQ ID NO: 613876 - DNA, 25 bp, Homo sapien
tgagaatgcctcgtagtaagaactg

SEQ ID NO: 613877 - DNA, 25 bp, Homo sapien
tttgaggaatgacgcacagggtttc

SEQ ID NO: 613878 - DNA, 25 bp, Homo sapien
tacacaaggtcaagccaatcatccc

SEQ ID NO: 613879 - DNA, 25 bp, Homo sapien
tcccgatctgtgatgtaactgcaag

SEQ ID NO: 613880 - DNA, 25 bp, Homo sapien
tgatggctgctgtctatgccaccac

SEQ ID NO: 613881 - DNA, 25 bp, Homo sapien
catggtcagccagataagatcgagc

SEQ ID NO: 613882 - DNA, 25 bp, Homo sapien
atcccaaccatagcccattgcaatg

SEQ ID NO: 613883 - DNA, 25 bp, Homo sapien
gacccaagtgagaccactaaaactg

SEQ ID NO: 613884 - DNA, 25 bp, Homo sapien
gcccattgcaatgacctggacccaa

SEQ ID NO: 613885 - DNA, 25 bp, Homo sapien
gacctggacccaagtgagaccacta

SEQ ID NO: 613886 - DNA, 25 bp, Homo sapien
gcaaagagttccgaacacagccttg

SEQ ID NO: 613887 - DNA, 25 bp, Homo sapien
tgagtaagcgatttccctcctgcag

SEQ ID NO: 613888 - DNA, 25 bp, Homo sapien
ccttgcttataacctctgacggctt

SEQ ID NO: 613889 - DNA, 25 bp, Homo sapien
tatctgattccagcacgctggcctt

SEQ ID NO: 613890 - DNA, 25 bp, Homo sapien
tagcttccctttcacgaaggcaggg

SEQ ID NO: 613891 - DNA, 25 bp, Homo sapien
ggagaaagacttagcttccctttca

SEQ ID NO: 613892 - DNA, 25 bp, Homo sapien
gagagaactcagacagccttcaagg

SEQ ID NO: 613893 - DNA, 25 bp, Homo sapien
aggaaggaaaagcatggaattcatt

SEQ ID NO: 613894 - DNA, 25 bp, Homo sapien
ctgaaattggagaccagcttattct

SEQ ID NO: 613895 - DNA, 25 bp, Homo sapien
actggaaactgtcatcaggatcacc

SEQ ID NO: 613896 - DNA, 25 bp, Homo sapien
cactggttcctattgtggtttgagg

SEQ ID NO: 613897 - DNA, 25 bp, Homo sapien
caggatcacccggaaaccactggtt

SEQ ID NO: 613898 - DNA, 25 bp, Homo sapien
agacactggaaactgtcatcaggat

SEQ ID NO: 613899 - DNA, 25 bp, Homo sapien
tattatacaccaggcaattttcctg

SEQ ID NO: 613900 - DNA, 25 bp, Homo sapien
cccttccaaaaattctagtcatggt

SEQ ID NO: 613901 - DNA, 25 bp, Homo sapien
gggagatagaaggatctgtcctgta

SEQ ID NO: 613902 - DNA, 25 bp, Homo sapien
ttttaattctctcaaccacgctggg

SEQ ID NO: 613903 - DNA, 25 bp, Homo sapien
gaagcaaactattagccacagagta

SEQ ID NO: 613904 - DNA, 25 bp, Homo sapien
caaactattagccacagagtatagg

SEQ ID NO: 613905 - DNA, 25 bp, Homo sapien
tattagccacagagtataggaatgt

SEQ ID NO: 613906 - DNA, 25 bp, Homo sapien
aactattagccacagagtataggaa

SEQ ID NO: 613907 - DNA, 25 bp, Homo sapien
cacagcagcgtcagcacggttaaac

SEQ ID NO: 613908 - DNA, 25 bp, Homo sapien
caatcgctgtttacagtgaggctgg

SEQ ID NO: 613909 - DNA, 25 bp, Homo sapien
aacttcagtttatccagacaatcgc

SEQ ID NO: 613910 - DNA, 25 bp, Homo sapien
gctgggtgagatcactagttctacc

SEQ ID NO: 613911 - DNA, 25 bp, Homo sapien
tcctcccacaaagcgggatttctgt

SEQ ID NO: 613912 - DNA, 25 bp, Homo sapien
ttcctcccacaaagcgggatttctg

SEQ ID NO: 613913 - DNA, 25 bp, Homo sapien
aggccacgatgggattaatagcacc

SEQ ID NO: 613914 - DNA, 25 bp, Homo sapien
ccacgatgggattaatagcaccatt

SEQ ID NO: 613915 - DNA, 25 bp, Homo sapien
gttgctgcccttgaacttgccgtga

SEQ ID NO: 613916 - DNA, 25 bp, Homo sapien
catggttgtcatagacccttctggg

SEQ ID NO: 613917 - DNA, 25 bp, Homo sapien
cctctttgggatctggtgtctggca

SEQ ID NO: 613918 - DNA, 25 bp, Homo sapien
cagaccatcagcacaagggacagaa

SEQ ID NO: 613919 - DNA, 25 bp, Homo sapien
tgtagccaaacatcatcacagtacc

SEQ ID NO: 613920 - DNA, 25 bp, Homo sapien
aagtgggcatcactgttacagttgc

SEQ ID NO: 613921 - DNA, 25 bp, Homo sapien
taccaggaagtaggcttgaccaact

SEQ ID NO: 613922 - DNA, 25 bp, Homo sapien
caagcgacaacgtggtcttcagtgt

SEQ ID NO: 613923 - DNA, 25 bp, Homo sapien
agcccttagtcctcagaggtcatgt

SEQ ID NO: 613924 - DNA, 25 bp, Homo sapien
ttagtcctcagaggtcatgtggacc

SEQ ID NO: 613925 - DNA, 25 bp, Homo sapien
gaggtcatgtggaccaggaagtcca

SEQ ID NO: 613926 - DNA, 25 bp, Homo sapien
tcagaggtcatgtggaccaggaagt

SEQ ID NO: 613927 - DNA, 25 bp, Homo sapien
ggacactctcaggggggccgatttg

SEQ ID NO: 613928 - DNA, 25 bp, Homo sapien
ctcaggggggccgatttggtgatgc

SEQ ID NO: 613929 - DNA, 25 bp, Homo sapien
acactctcaggggggccgatttggt

SEQ ID NO: 613930 - DNA, 25 bp, Homo sapien
ctctcaggggggccgatttggtgat

SEQ ID NO: 613931 - DNA, 25 bp, Homo sapien
gattccataggcttgtgctggaggt

SEQ ID NO: 613932 - DNA, 25 bp, Homo sapien
ccgcactgtactgcgtctggccgta

SEQ ID NO: 613933 - DNA, 25 bp, Homo sapien
atagggggtagcctgctggatcccc

SEQ ID NO: 613934 - DNA, 25 bp, Homo sapien
tctggccgtaggctgccatggctgt

SEQ ID NO: 613935 - DNA, 25 bp, Homo sapien
tcagcttggttgtgtctattaatcc

SEQ ID NO: 613936 - DNA, 25 bp, Homo sapien
aaatcagcttggttgtgtctattaa

SEQ ID NO: 613937 - DNA, 25 bp, Homo sapien
ctaatccaaaatcagcttggttgtg

SEQ ID NO: 613938 - DNA, 25 bp, Homo sapien
tccaaaatcagcttggttgtgtcta

SEQ ID NO: 613939 - DNA, 25 bp, Homo sapien
ctggagccatagctgaggaatccac

SEQ ID NO: 613940 - DNA, 25 bp, Homo sapien
catagctgaggaatccactctggcc

SEQ ID NO: 613941 - DNA, 25 bp, Homo sapien
gctgaggaatccactctggccaggg

SEQ ID NO: 613942 - DNA, 25 bp, Homo sapien
ccaggggaatggttcaagctgtctt

SEQ ID NO: 613943 - DNA, 25 bp, Homo sapien
tgcatctggtaggtgtatgggctct

SEQ ID NO: 613944 - DNA, 25 bp, Homo sapien
cgtgcatctggtaggtgtatgggct

SEQ ID NO: 613945 - DNA, 25 bp, Homo sapien
gtgcatctggtaggtgtatgggctc

SEQ ID NO: 613946 - DNA, 25 bp, Homo sapien
tccagggcttctcagtgaccacaga

SEQ ID NO: 613947 - DNA, 25 bp, Homo sapien
tggagaagtacaaggcacaacagcc

SEQ ID NO: 613948 - DNA, 25 bp, Homo sapien
tgaccacagaacgagtttggacgga

SEQ ID NO: 613949 - DNA, 25 bp, Homo sapien
tgtggcatgcactattgactaaacg

SEQ ID NO: 613950 - DNA, 25 bp, Homo sapien
aaaaattctgtagttgaacctgtca

SEQ ID NO: 613951 - DNA, 25 bp, Homo sapien
gacttctggtgttctttgccgtgcc

SEQ ID NO: 613952 - DNA, 25 bp, Homo sapien
tctccacgtactaaatgtgtgggtc

SEQ ID NO: 613953 - DNA, 25 bp, Homo sapien
tccagatggctaactagctgttcca

SEQ ID NO: 613954 - DNA, 25 bp, Homo sapien
ccacacgtagacctgctttgctttg

SEQ ID NO: 613955 - DNA, 25 bp, Homo sapien
ttgctttgaaaatccgtctgatagt

SEQ ID NO: 613956 - DNA, 25 bp, Homo sapien
tcctgatgccacacgtagacctgct

SEQ ID NO: 613957 - DNA, 25 bp, Homo sapien
ctttgaaaatccgtctgatagtggg

SEQ ID NO: 613958 - DNA, 25 bp, Homo sapien
gctcttccgaatttgcaagtgccag

SEQ ID NO: 613959 - DNA, 25 bp, Homo sapien
gcactgtctcaggacagaactccct

SEQ ID NO: 613960 - DNA, 25 bp, Homo sapien
accagatcacctgccctgttttaga

SEQ ID NO: 613961 - DNA, 25 bp, Homo sapien
tggcgacacttgtgacccatggctg

SEQ ID NO: 613962 - DNA, 25 bp, Homo sapien
caacaaattgtgcaggtgcagaccc

SEQ ID NO: 613963 - DNA, 25 bp, Homo sapien
aacgtcatcaaagccgtgctctggg

SEQ ID NO: 613964 - DNA, 25 bp, Homo sapien
cctgcccctgccaatgatcagatgg

SEQ ID NO: 613965 - DNA, 25 bp, Homo sapien
tgcagaccctggttgtgggcccagt

SEQ ID NO: 613966 - DNA, 25 bp, Homo sapien
ttactaagcgtcactgcctcagggt

SEQ ID NO: 613967 - DNA, 25 bp, Homo sapien
gcttgtggtcactaggtatttgtca

SEQ ID NO: 613968 - DNA, 25 bp, Homo sapien
tcatggcggccctgattaggcttgt

SEQ ID NO: 613969 - DNA, 25 bp, Homo sapien
tacactgaccattaattcatggcgg

SEQ ID NO: 613970 - DNA, 25 bp, Homo sapien
gcccagccagtagttgacttttttc

SEQ ID NO: 613971 - DNA, 25 bp, Homo sapien
gagcccagccagtagttgacttttt

SEQ ID NO: 613972 - DNA, 25 bp, Homo sapien
actgagcccagccagtagttgactt

SEQ ID NO: 613973 - DNA, 25 bp, Homo sapien
cagccagtagttgacttttttccct

SEQ ID NO: 613974 - DNA, 25 bp, Homo sapien
ttttctgcaccgatcctggagcctg

SEQ ID NO: 613975 - DNA, 25 bp, Homo sapien
catgttttctgcaccgatcctggag

SEQ ID NO: 613976 - DNA, 25 bp, Homo sapien
cttgggaagcgaacatgttttctgc

SEQ ID NO: 613977 - DNA, 25 bp, Homo sapien
tctgcaccgatcctggagcctgatg

SEQ ID NO: 613978 - DNA, 25 bp, Homo sapien
ctgatgcggccgtggctatggctca

SEQ ID NO: 613979 - DNA, 25 bp, Homo sapien
tatggctcacgtgacccctaagtct

SEQ ID NO: 613980 - DNA, 25 bp, Homo sapien
agcgttcccaaagcaacccaggtga

SEQ ID NO: 613981 - DNA, 25 bp, Homo sapien
tggatcttcctctgtccggatggca

SEQ ID NO: 613982 - DNA, 25 bp, Homo sapien
tggtgcacactcccgaaaccggctg

SEQ ID NO: 613983 - DNA, 25 bp, Homo sapien
ccatttcctccttgatagaaccctg

SEQ ID NO: 613984 - DNA, 25 bp, Homo sapien
cctccttgatagaaccctgttgtgc

SEQ ID NO: 613985 - DNA, 25 bp, Homo sapien
accggctgcgttgcccagtccattt

SEQ ID NO: 613986 - DNA, 25 bp, Homo sapien
caagtgactcggaactctggttggg

SEQ ID NO: 613987 - DNA, 25 bp, Homo sapien
acgttgtgagatgcctcctggagga

SEQ ID NO: 613988 - DNA, 25 bp, Homo sapien
ggcagatgctgctggccgggacgta

SEQ ID NO: 613989 - DNA, 25 bp, Homo sapien
gttgtaggatgagccgtaatactgg

SEQ ID NO: 613990 - DNA, 25 bp, Homo sapien
cactgctgtcagagaacatgctttg

SEQ ID NO: 613991 - DNA, 25 bp, Homo sapien
tgacccatgggtcactgaaatgtat

SEQ ID NO: 613992 - DNA, 25 bp, Homo sapien
tatggcccagaagatattaatattt

SEQ ID NO: 613993 - DNA, 25 bp, Homo sapien
gccttgattcttttaaaggtactga

SEQ ID NO: 613994 - DNA, 25 bp, Homo sapien
caatctcattgtcccctgccgggga

SEQ ID NO: 613995 - DNA, 25 bp, Homo sapien
agcttcccgtcggaggcccggtgcg

SEQ ID NO: 613996 - DNA, 25 bp, Homo sapien
tggaaggtccattgtgtgtgttgta

SEQ ID NO: 613997 - DNA, 25 bp, Homo sapien
tgctcctcttagaccggcctcggag

SEQ ID NO: 613998 - DNA, 25 bp, Homo sapien
cacactggacgtcagaggctggtct

SEQ ID NO: 613999 - DNA, 25 bp, Homo sapien
tttctgagaccacttgacccctgga

SEQ ID NO: 614000 - DNA, 25 bp, Homo sapien
gacgactgcaggctttgacaatgaa

SEQ ID NO: 614001 - DNA, 25 bp, Homo sapien
tagcatggaaacaccagagagtggc

SEQ ID NO: 614002 - DNA, 25 bp, Homo sapien
acttcacttctaacttatcccattt

SEQ ID NO: 614003 - DNA, 25 bp, Homo sapien
ggttgatactgcctttccttgtaaa

SEQ ID NO: 614004 - DNA, 25 bp, Homo sapien
catttatttaccttggcctttattg

SEQ ID NO: 614005 - DNA, 25 bp, Homo sapien
attttatggatgcaagatcttgagt

SEQ ID NO: 614006 - DNA, 25 bp, Homo sapien
tatttctgggttggatccactgttt

SEQ ID NO: 614007 - DNA, 25 bp, Homo sapien
cagtgatagaaacctccaatgtgga

SEQ ID NO: 614008 - DNA, 25 bp, Homo sapien
ccaatgtggactggatcatttttag

SEQ ID NO: 614009 - DNA, 25 bp, Homo sapien
gccacacactctgtattggagatat

SEQ ID NO: 614010 - DNA, 25 bp, Homo sapien
catccaagtcccacacgaacacacg

SEQ ID NO: 614011 - DNA, 25 bp, Homo sapien
ttcccgtatctggatgcaaatgtcc

SEQ ID NO: 614012 - DNA, 25 bp, Homo sapien
cttcccgtatctggatgcaaatgtc

SEQ ID NO: 614013 - DNA, 25 bp, Homo sapien
tgtccccgtgagtaaggagtgaaaa

SEQ ID NO: 614014 - DNA, 25 bp, Homo sapien
tggatgcaaatgtccccgtgagtaa

SEQ ID NO: 614015 - DNA, 25 bp, Homo sapien
ccatgttcgttaactttcctgaggc

SEQ ID NO: 614016 - DNA, 25 bp, Homo sapien
ctacaacacggatgatcacacgtac

SEQ ID NO: 614017 - DNA, 25 bp, Homo sapien
cactatgtctgatcgttttacaagg

SEQ ID NO: 614018 - DNA, 25 bp, Homo sapien
cacgtactgtgtgattccctttata

SEQ ID NO: 614019 - DNA, 25 bp, Homo sapien
ttcgtgaataaaggagccatgtaga

SEQ ID NO: 614020 - DNA, 25 bp, Homo sapien
tcgtgaataaaggagccatgtagaa

SEQ ID NO: 614021 - DNA, 25 bp, Homo sapien
attcgtgaataaaggagccatgtag

SEQ ID NO: 614022 - DNA, 25 bp, Homo sapien
caggaaccagatacatgtcagcagt

SEQ ID NO: 614023 - DNA, 25 bp, Homo sapien
acagaggactcgtgggtccatggac

SEQ ID NO: 614024 - DNA, 25 bp, Homo sapien
tcagcagtgtcgtaagtggacagag

SEQ ID NO: 614025 - DNA, 25 bp, Homo sapien
tggactctcacccaatccctgggtg

SEQ ID NO: 614026 - DNA, 25 bp, Homo sapien
tgtatccgccaacaagaacatgggc

SEQ ID NO: 614027 - DNA, 25 bp, Homo sapien
gttttccagcctcccattcataagg

SEQ ID NO: 614028 - DNA, 25 bp, Homo sapien
tgtgagttgttactctctgctccct

SEQ ID NO: 614029 - DNA, 25 bp, Homo sapien
tgctgagcgagtggcactggtttct

SEQ ID NO: 614030 - DNA, 25 bp, Homo sapien
taatggactttgttccctgccgcat

SEQ ID NO: 614031 - DNA, 25 bp, Homo sapien
tagaacagtacacctggcatgcagg

SEQ ID NO: 614032 - DNA, 25 bp, Homo sapien
taagtaactctcatgcctcaagcct

SEQ ID NO: 614033 - DNA, 25 bp, Homo sapien
caaggatatcagctccatgagggca

SEQ ID NO: 614034 - DNA, 25 bp, Homo sapien
tcggcatgcccgaaagtatctttgt

SEQ ID NO: 614035 - DNA, 25 bp, Homo sapien
ccagacagttgggaatttgatgccc

SEQ ID NO: 614036 - DNA, 25 bp, Homo sapien
gcaaatttggctatgaagacccttc

SEQ ID NO: 614037 - DNA, 25 bp, Homo sapien
tcagaatagcatacgcagaggccca

SEQ ID NO: 614038 - DNA, 25 bp, Homo sapien
tgggttctggattccggaatccaag

SEQ ID NO: 614039 - DNA, 25 bp, Homo sapien
gaatccaagccggaatcacgtaata

SEQ ID NO: 614040 - DNA, 25 bp, Homo sapien
ggaatcacgtaataacacccgcgga

SEQ ID NO: 614041 - DNA, 25 bp, Homo sapien
cacgtaataacacccgcggaggaat

SEQ ID NO: 614042 - DNA, 25 bp, Homo sapien
gaaatctccgacttcctcagaaaat

SEQ ID NO: 614043 - DNA, 25 bp, Homo sapien
tctccgtttcagagctacaggctcc

SEQ ID NO: 614044 - DNA, 25 bp, Homo sapien
ggtgctcgcctcacatgaccaagaa

SEQ ID NO: 614045 - DNA, 25 bp, Homo sapien
tctggccaggcctttaaacttccaa

SEQ ID NO: 614046 - DNA, 25 bp, Homo sapien
aaagtcaaccccaaatacaatggcg

SEQ ID NO: 614047 - DNA, 25 bp, Homo sapien
tacaatggcgttgacaccttcctgc

SEQ ID NO: 614048 - DNA, 25 bp, Homo sapien
gcaatctttggacgctggaagaaca

SEQ ID NO: 614049 - DNA, 25 bp, Homo sapien
cctgccgtttagcaggtgacacctc

SEQ ID NO: 614050 - DNA, 25 bp, Homo sapien
cagtgctacaagtgggaaagtcaca

SEQ ID NO: 614051 - DNA, 25 bp, Homo sapien
accaactctcctgatttgcctggga

SEQ ID NO: 614052 - DNA, 25 bp, Homo sapien
tcattccaaggactcagaacagggt

SEQ ID NO: 614053 - DNA, 25 bp, Homo sapien
caaacctggatgagatgatcaccct

SEQ ID NO: 614054 - DNA, 25 bp, Homo sapien
tttcttctgtgtcaattaccctgac

SEQ ID NO: 614055 - DNA, 25 bp, Homo sapien
tgtgcttcagcaccaatcctggaat

SEQ ID NO: 614056 - DNA, 25 bp, Homo sapien
gcttcagcaccaatcctggaatgga

SEQ ID NO: 614057 - DNA, 25 bp, Homo sapien
taccctgacgtcctgaacttcagga

SEQ ID NO: 614058 - DNA, 25 bp, Homo sapien
caaatggccaccacaaattgcctcc

SEQ ID NO: 614059 - DNA, 25 bp, Homo sapien
tcacaaggtatccatgaatgtggcc

SEQ ID NO: 614060 - DNA, 25 bp, Homo sapien
tgtggccatagacaagaatctccat

SEQ ID NO: 614061 - DNA, 25 bp, Homo sapien
gcctccatcattcacaaggtatcca

SEQ ID NO: 614062 - DNA, 25 bp, Homo sapien
gaaactggtttatgtgactgtggga

SEQ ID NO: 614063 - DNA, 25 bp, Homo sapien
gaaggcatgccgatttcatcctgaa

SEQ ID NO: 614064 - DNA, 25 bp, Homo sapien
tggccaatctctagtgagtgctttg

SEQ ID NO: 614065 - DNA, 25 bp, Homo sapien
taagccagactacctctgatcaagg

SEQ ID NO: 614066 - DNA, 25 bp, Homo sapien
tgaaagggagaggataagagtatac

SEQ ID NO: 614067 - DNA, 25 bp, Homo sapien
tttcaccacgtaggcggcccaaaga

SEQ ID NO: 614068 - DNA, 25 bp, Homo sapien
cactatcttgggatgtatggttgta

SEQ ID NO: 614069 - DNA, 25 bp, Homo sapien
gagtttcaaaacgtgaatgccaaag

SEQ ID NO: 614070 - DNA, 25 bp, Homo sapien
cccattttctgaagcattacatatt

SEQ ID NO: 614071 - DNA, 25 bp, Homo sapien
gaaacccattttctgaagcattaca

SEQ ID NO: 614072 - DNA, 25 bp, Homo sapien
aacccattttctgaagcattacata

SEQ ID NO: 614073 - DNA, 25 bp, Homo sapien
tgaaacccattttctgaagcattac

SEQ ID NO: 614074 - DNA, 25 bp, Homo sapien
cttccatcataaggccaatgcgcac

SEQ ID NO: 614075 - DNA, 25 bp, Homo sapien
caatgcgcacggacgtcgtggtgtc

SEQ ID NO: 614076 - DNA, 25 bp, Homo sapien
tgcaaggttgaagatcatctcttcc

SEQ ID NO: 614077 - DNA, 25 bp, Homo sapien
gaagaacagatgtgtatctgcaagg

SEQ ID NO: 614078 - DNA, 25 bp, Homo sapien
gcaggttcaaccaagatccacaagg

SEQ ID NO: 614079 - DNA, 25 bp, Homo sapien
catagacgtcatcgtgaagcgagcc

SEQ ID NO: 614080 - DNA, 25 bp, Homo sapien
tagagacagtcccaagccttgaagc

SEQ ID NO: 614081 - DNA, 25 bp, Homo sapien
tcagggtcaatcacacagagtggtc

SEQ ID NO: 614082 - DNA, 25 bp, Homo sapien
taccaagaagaatgtgatgcccagc

SEQ ID NO: 614083 - DNA, 25 bp, Homo sapien
cagggcagggctgaacagtatctcc

SEQ ID NO: 614084 - DNA, 25 bp, Homo sapien
tcaacttgggacatgcgtgcagaat

SEQ ID NO: 614085 - DNA, 25 bp, Homo sapien
tttagggccaccaaacgccatggat

SEQ ID NO: 614086 - DNA, 25 bp, Homo sapien
agaaaccaggatttgaggagaagaa

SEQ ID NO: 614087 - DNA, 25 bp, Homo sapien
ctatgacatcactggtttgatgtac

SEQ ID NO: 614088 - DNA, 25 bp, Homo sapien
gtttgatgtactggtcatttttccc

SEQ ID NO: 614089 - DNA, 25 bp, Homo sapien
atgacatcactggtttgatgtactg

SEQ ID NO: 614090 - DNA, 25 bp, Homo sapien
actggtttgatgtactggtcatttt

SEQ ID NO: 614091 - DNA, 25 bp, Homo sapien
cccaagtagccggcattacaaatgc

SEQ ID NO: 614092 - DNA, 25 bp, Homo sapien
aagtagccggcattacaaatgcctg

SEQ ID NO: 614093 - DNA, 25 bp, Homo sapien
caagtagccggcattacaaatgcct

SEQ ID NO: 614094 - DNA, 25 bp, Homo sapien
gtagccggcattacaaatgcctgcc

SEQ ID NO: 614095 - DNA, 25 bp, Homo sapien
ctggatcaagttaccccttgagcca

SEQ ID NO: 614096 - DNA, 25 bp, Homo sapien
aagttaccccttgagccagctcgga

SEQ ID NO: 614097 - DNA, 25 bp, Homo sapien
agggaagagaatcccacgaccctca

SEQ ID NO: 614098 - DNA, 25 bp, Homo sapien
cagggaagagaatcccacgaccctc

SEQ ID NO: 614099 - DNA, 25 bp, Homo sapien
taaagtgtgacaacagtagcgatca

SEQ ID NO: 614100 - DNA, 25 bp, Homo sapien
taccgtgacgctcagctagacgcta

SEQ ID NO: 614101 - DNA, 25 bp, Homo sapien
gcagggttccatgcgctttccttga

SEQ ID NO: 614102 - DNA, 25 bp, Homo sapien
cagtagcgatcacatttcggactta

SEQ ID NO: 614103 - DNA, 25 bp, Homo sapien
ccctccacattgaaagaatctagag

SEQ ID NO: 614104 - DNA, 25 bp, Homo sapien
ccacattgaaagaatctagagccat

SEQ ID NO: 614105 - DNA, 25 bp, Homo sapien
gatgataccctccacattgaaagaa

SEQ ID NO: 614106 - DNA, 25 bp, Homo sapien
gataccctccacattgaaagaatct

SEQ ID NO: 614107 - DNA, 25 bp, Homo sapien
cccaagaaggagtgatcttttttgc

SEQ ID NO: 614108 - DNA, 25 bp, Homo sapien
ggtggtctcaggtataatctacccc

SEQ ID NO: 614109 - DNA, 25 bp, Homo sapien
cttggtggtctcaggtataatctac

SEQ ID NO: 614110 - DNA, 25 bp, Homo sapien
agaaggagtgatcttttttgcagta

SEQ ID NO: 614111 - DNA, 25 bp, Homo sapien
tctgatgagacgtcatcaacgtgga

SEQ ID NO: 614112 - DNA, 25 bp, Homo sapien
catctgatgagacgtcatcaacgtg

SEQ ID NO: 614113 - DNA, 25 bp, Homo sapien
gatgagacgtcatcaacgtggatct

SEQ ID NO: 614114 - DNA, 25 bp, Homo sapien
ttgtcatctgatgagacgtcatcaa

SEQ ID NO: 614115 - DNA, 25 bp, Homo sapien
gggccgaactgtggaagccgtcagc

SEQ ID NO: 614116 - DNA, 25 bp, Homo sapien
ccgccggtagcggaaggccagcttc

SEQ ID NO: 614117 - DNA, 25 bp, Homo sapien
agccgtcagcggagaagttgtatgt

SEQ ID NO: 614118 - DNA, 25 bp, Homo sapien
ctcctggggccgaactgtggaagcc

SEQ ID NO: 614119 - DNA, 25 bp, Homo sapien
cttgtaggtattgtacatctccttc

SEQ ID NO: 614120 - DNA, 25 bp, Homo sapien
cagatgacaacccaaagtaaacttc

SEQ ID NO: 614121 - DNA, 25 bp, Homo sapien
atcagatgacaacccaaagtaaact

SEQ ID NO: 614122 - DNA, 25 bp, Homo sapien
agatgacaacccaaagtaaacttca

SEQ ID NO: 614123 - DNA, 25 bp, Homo sapien
aaatcagatgacaacccaaagtaaa

SEQ ID NO: 614124 - DNA, 25 bp, Homo sapien
ccagaggtctgtgagagcttccagc

SEQ ID NO: 614125 - DNA, 25 bp, Homo sapien
cagctcggagctgtagccaggtctc

SEQ ID NO: 614126 - DNA, 25 bp, Homo sapien
tgatgaggtttagtgccttcaggga

SEQ ID NO: 614127 - DNA, 25 bp, Homo sapien
tcccttttgggagtgcctatcaacc

SEQ ID NO: 614128 - DNA, 25 bp, Homo sapien
ctactgcgagaaagttcagtggcac

SEQ ID NO: 614129 - DNA, 25 bp, Homo sapien
cactgtctactgcgagaaagttcag

SEQ ID NO: 614130 - DNA, 25 bp, Homo sapien
tctactgcgagaaagttcagtggca

SEQ ID NO: 614131 - DNA, 25 bp, Homo sapien
tgtctactgcgagaaagttcagtgg

SEQ ID NO: 614132 - DNA, 25 bp, Homo sapien
tatagcaggactttggccagggcag

SEQ ID NO: 614133 - DNA, 25 bp, Homo sapien
aataggaaacacagaccccaggcca

SEQ ID NO: 614134 - DNA, 25 bp, Homo sapien
gaccccaggccatatagcaggactt

SEQ ID NO: 614135 - DNA, 25 bp, Homo sapien
gaattagttgagtggtggtgaccag

SEQ ID NO: 614136 - DNA, 25 bp, Homo sapien
aaccctgtatccccgccgaggtgtg

SEQ ID NO: 614137 - DNA, 25 bp, Homo sapien
cctgtatccccgccgaggtgtggct

SEQ ID NO: 614138 - DNA, 25 bp, Homo sapien
tatccccgccgaggtgtggcttctc

SEQ ID NO: 614139 - DNA, 25 bp, Homo sapien
ctccaaccctgtatccccgccgagg

SEQ ID NO: 614140 - DNA, 25 bp, Homo sapien
tttctgccgaatctctgcattatcc

SEQ ID NO: 614141 - DNA, 25 bp, Homo sapien
ttctgccgaatctctgcattatcct

SEQ ID NO: 614142 - DNA, 25 bp, Homo sapien
tgccgaatctctgcattatcctctc

SEQ ID NO: 614143 - DNA, 25 bp, Homo sapien
tctgccgaatctctgcattatcctc

SEQ ID NO: 614144 - DNA, 25 bp, Homo sapien
ttcgctccttgctcctcttccacac

SEQ ID NO: 614145 - DNA, 25 bp, Homo sapien
ccttgctcctcttccacaccatcac

SEQ ID NO: 614146 - DNA, 25 bp, Homo sapien
ctttttcgctccttgctcctcttcc

SEQ ID NO: 614147 - DNA, 25 bp, Homo sapien
tccttgctcctcttccacaccatca

SEQ ID NO: 614148 - DNA, 25 bp, Homo sapien
ggtctgcgtggcaggatatccgcca

SEQ ID NO: 614149 - DNA, 25 bp, Homo sapien
aggtctgcgtggcaggatatccgcc

SEQ ID NO: 614150 - DNA, 25 bp, Homo sapien
tgagatggcaggtggagatgctgct

SEQ ID NO: 614151 - DNA, 25 bp, Homo sapien
ggcaggtggagatgctgctgatcct

SEQ ID NO: 614152 - DNA, 25 bp, Homo sapien
gggtgagatggcaggtggagatgct

SEQ ID NO: 614153 - DNA, 25 bp, Homo sapien
gcaggtggagatgctgctgatcctg

SEQ ID NO: 614154 - DNA, 25 bp, Homo sapien
acggcttctgagatggtcactggac

SEQ ID NO: 614155 - DNA, 25 bp, Homo sapien
catttggactgatggacggcttctg

SEQ ID NO: 614156 - DNA, 25 bp, Homo sapien
tccccaaagtcaaatactccgaagc

SEQ ID NO: 614157 - DNA, 25 bp, Homo sapien
ccaatgttgggtactttccttctca

SEQ ID NO: 614158 - DNA, 25 bp, Homo sapien
tacattagaactgtgaaccacccca

SEQ ID NO: 614159 - DNA, 25 bp, Homo sapien
aattccggagtaatgagactagtcc

SEQ ID NO: 614160 - DNA, 25 bp, Homo sapien
caagatgtagcgtaaggcacgtgca

SEQ ID NO: 614161 - DNA, 25 bp, Homo sapien
caggtacaagagcataattccggag

SEQ ID NO: 614162 - DNA, 25 bp, Homo sapien
tggtaataaagtaaccacatcctac

SEQ ID NO: 614163 - DNA, 25 bp, Homo sapien
ttctattcttctgcaactgataaag

SEQ ID NO: 614164 - DNA, 25 bp, Homo sapien
aacacatttggaagcctcaagagtg

SEQ ID NO: 614165 - DNA, 25 bp, Homo sapien
tattcttctgcaactgataaagtct

SEQ ID NO: 614166 - DNA, 25 bp, Homo sapien
gaaaaatgccgtggtcgtcctcgaa

SEQ ID NO: 614167 - DNA, 25 bp, Homo sapien
gccagtcctcgtcaaacagttggga

SEQ ID NO: 614168 - DNA, 25 bp, Homo sapien
ggacggagttgtcttcttgaagccc

SEQ ID NO: 614169 - DNA, 25 bp, Homo sapien
gctgtgtcaggtttgcacgaccaaa

SEQ ID NO: 614170 - DNA, 25 bp, Homo sapien
tcttcattgttaagaggatgcgaac

SEQ ID NO: 614171 - DNA, 25 bp, Homo sapien
gatatcattccagtacgttttgttg

SEQ ID NO: 614172 - DNA, 25 bp, Homo sapien
aggcccgtcatgctgtccgtacact

SEQ ID NO: 614173 - DNA, 25 bp, Homo sapien
cactacgtatgctgtagagccattt

SEQ ID NO: 614174 - DNA, 25 bp, Homo sapien
cacacgacggaatggatactgggcc

SEQ ID NO: 614175 - DNA, 25 bp, Homo sapien
tctgtacgcagcatgttgggatcgg

SEQ ID NO: 614176 - DNA, 25 bp, Homo sapien
aatgatgactctactcctaaaaggg

SEQ ID NO: 614177 - DNA, 25 bp, Homo sapien
gacaccttctgggactagcagtgaa

SEQ ID NO: 614178 - DNA, 25 bp, Homo sapien
gaaggacttgatgtggtttgaccac

SEQ ID NO: 614179 - DNA, 25 bp, Homo sapien
agtgtcccgtgtcctctccatatga

SEQ ID NO: 614180 - DNA, 25 bp, Homo sapien
taaagggtcctagatgaacaccgat

SEQ ID NO: 614181 - DNA, 25 bp, Homo sapien
gatactgaactcagcttggccctgg

SEQ ID NO: 614182 - DNA, 25 bp, Homo sapien
tgactttccccgttgtcaaggttga

SEQ ID NO: 614183 - DNA, 25 bp, Homo sapien
gaacatgtgcattctgtcctataac

SEQ ID NO: 614184 - DNA, 25 bp, Homo sapien
gattatgaccatatcattcatggca

SEQ ID NO: 614185 - DNA, 25 bp, Homo sapien
taactgcagttaagcctcactcttg

SEQ ID NO: 614186 - DNA, 25 bp, Homo sapien
ggtctccacctagaaatgactaaat

SEQ ID NO: 614187 - DNA, 25 bp, Homo sapien
aaatagagtaactctaaatcagcag

SEQ ID NO: 614188 - DNA, 25 bp, Homo sapien
catgtcgcctttcacgtggttttcc

SEQ ID NO: 614189 - DNA, 25 bp, Homo sapien
caggttggctcttgttgatgggctt

SEQ ID NO: 614190 - DNA, 25 bp, Homo sapien
tcttccgcccaaacttccgcggctg

SEQ ID NO: 614191 - DNA, 25 bp, Homo sapien
aaactccaccatccacgacggtggg

SEQ ID NO: 614192 - DNA, 25 bp, Homo sapien
cattggctagttgtaggtaaaactc

SEQ ID NO: 614193 - DNA, 25 bp, Homo sapien
gaaacaccggtgctcacccgctctt

SEQ ID NO: 614194 - DNA, 25 bp, Homo sapien
gcagaagtctaagaacgagccagaa

SEQ ID NO: 614195 - DNA, 25 bp, Homo sapien
tcatagatttaggagaagaccattc

SEQ ID NO: 614196 - DNA, 25 bp, Homo sapien
tggagcagtcaaggacaaggccagc

SEQ ID NO: 614197 - DNA, 25 bp, Homo sapien
gaaaagatgagacggattccccaac

SEQ ID NO: 614198 - DNA, 25 bp, Homo sapien
aggagatcagaacaagcagggcaat

SEQ ID NO: 614199 - DNA, 25 bp, Homo sapien
tctgtcagccgtggaacgactttcc

SEQ ID NO: 614200 - DNA, 25 bp, Homo sapien
gattgcaatgacctaacgggaagag

SEQ ID NO: 614201 - DNA, 25 bp, Homo sapien
gcagctcttccggttcaggacacat

SEQ ID NO: 614202 - DNA, 25 bp, Homo sapien
gtttggaggcgttctcacggtgaca

SEQ ID NO: 614203 - DNA, 25 bp, Homo sapien
aactgggtggtcattgggcttcctc

SEQ ID NO: 614204 - DNA, 25 bp, Homo sapien
ggctcccattcagaccaaccagttg

SEQ ID NO: 614205 - DNA, 25 bp, Homo sapien
ggacacacgtgcttccttgggaaca

SEQ ID NO: 614206 - DNA, 25 bp, Homo sapien
gttctatgtcttacagtaccagtga

SEQ ID NO: 614207 - DNA, 25 bp, Homo sapien
tttcttcgtgtaacaaacacttcag

SEQ ID NO: 614208 - DNA, 25 bp, Homo sapien
ggactagtaataatatagcagcccc

SEQ ID NO: 614209 - DNA, 25 bp, Homo sapien
tgccacgtgctaggccaattctatt

SEQ ID NO: 614210 - DNA, 25 bp, Homo sapien
tagagcagccgtagacagttaagac

SEQ ID NO: 614211 - DNA, 25 bp, Homo sapien
tagtcattgttgcagtaacgtagcc

SEQ ID NO: 614212 - DNA, 25 bp, Homo sapien
tgtggtcctagacactcatggttga

SEQ ID NO: 614213 - DNA, 25 bp, Homo sapien
ggataccatgaatgtccccaagagt

SEQ ID NO: 614214 - DNA, 25 bp, Homo sapien
tacaggtgcgcgcactactatgtcc

SEQ ID NO: 614215 - DNA, 25 bp, Homo sapien
ggtgcgcgcactactatgtccagct

SEQ ID NO: 614216 - DNA, 25 bp, Homo sapien
caggtgcgcgcactactatgtccag

SEQ ID NO: 614217 - DNA, 25 bp, Homo sapien
gtgcgcgcactactatgtccagcta

SEQ ID NO: 614218 - DNA, 25 bp, Homo sapien
aatcaatggctcttcggtgcactgc

SEQ ID NO: 614219 - DNA, 25 bp, Homo sapien
gaaggcaagtcgctgggtttcagac

SEQ ID NO: 614220 - DNA, 25 bp, Homo sapien
gcgacctaatgcgtacaagaccggg

SEQ ID NO: 614221 - DNA, 25 bp, Homo sapien
tgattgcaaagaggtgacagtgtcc

SEQ ID NO: 614222 - DNA, 25 bp, Homo sapien
agtttggaagccactaccaccggag

SEQ ID NO: 614223 - DNA, 25 bp, Homo sapien
accttggttggttagcagtggcgcc

SEQ ID NO: 614224 - DNA, 25 bp, Homo sapien
ttccggtcgagtttgaagggcctca

SEQ ID NO: 614225 - DNA, 25 bp, Homo sapien
taaatagtgccaacgggtgtcagcc

SEQ ID NO: 614226 - DNA, 25 bp, Homo sapien
tgaaagatgctcctacatcaatggg

SEQ ID NO: 614227 - DNA, 25 bp, Homo sapien
tctcaggagacaaagctttcgagct

SEQ ID NO: 614228 - DNA, 25 bp, Homo sapien
cgagctttcaagatgtcaggttgac

SEQ ID NO: 614229 - DNA, 25 bp, Homo sapien
catttgtgtccgagggtaatgatcc

SEQ ID NO: 614230 - DNA, 25 bp, Homo sapien
caatttatgcgtttattcacaagcc

SEQ ID NO: 614231 - DNA, 25 bp, Homo sapien
ggagtagactcctgaatatcttcta

SEQ ID NO: 614232 - DNA, 25 bp, Homo sapien
tctttggttgatgaaaaggctcatc

SEQ ID NO: 614233 - DNA, 25 bp, Homo sapien
tctaattgagggattggtacttttc

SEQ ID NO: 614234 - DNA, 25 bp, Homo sapien
gattgctggaatcagtgctcctcgg

SEQ ID NO: 614235 - DNA, 25 bp, Homo sapien
cagtagtaagccgtgcctgctgtag

SEQ ID NO: 614236 - DNA, 25 bp, Homo sapien
ggtgtgggaaatcttactctttgcc

SEQ ID NO: 614237 - DNA, 25 bp, Homo sapien
gccctaaagtattcagcgatcagaa

SEQ ID NO: 614238 - DNA, 25 bp, Homo sapien
gcgggggccagtggcccgtccttgc

SEQ ID NO: 614239 - DNA, 25 bp, Homo sapien
tgtaacagtaaatgacgttatccac

SEQ ID NO: 614240 - DNA, 25 bp, Homo sapien
gtaacagtaaatgacgttatccact

SEQ ID NO: 614241 - DNA, 25 bp, Homo sapien
ctgtaacagtaaatgacgttatcca

SEQ ID NO: 614242 - DNA, 25 bp, Homo sapien
cagtggggagactgcatcaggtctt

SEQ ID NO: 614243 - DNA, 25 bp, Homo sapien
tccagccacttgcaacgcgtgatgt

SEQ ID NO: 614244 - DNA, 25 bp, Homo sapien
catcaggtcttaaataggatgaggg

SEQ ID NO: 614245 - DNA, 25 bp, Homo sapien
ctgggaaccctcaatctggctttgc

SEQ ID NO: 614246 - DNA, 25 bp, Homo sapien
taaaatggctcccacaggtttggag

SEQ ID NO: 614247 - DNA, 25 bp, Homo sapien
tgtgacccctaccaagcatgagtct

SEQ ID NO: 614248 - DNA, 25 bp, Homo sapien
taaagattgacaattgcagtggccg

SEQ ID NO: 614249 - DNA, 25 bp, Homo sapien
tgatcatagttagcccgttggcgcc

SEQ ID NO: 614250 - DNA, 25 bp, Homo sapien
cggctttacactccgatttgccggg

SEQ ID NO: 614251 - DNA, 25 bp, Homo sapien
agcctcacaaagataatcgctcagg

SEQ ID NO: 614252 - DNA, 25 bp, Homo sapien
gggcggctttacactccgatttgcc

SEQ ID NO: 614253 - DNA, 25 bp, Homo sapien
agataatcgctcaggaagtgtttca

SEQ ID NO: 614254 - DNA, 25 bp, Homo sapien
gaaggcatcgcaggctaatacggaa

SEQ ID NO: 614255 - DNA, 25 bp, Homo sapien
tggattcacaaggtacacgcctccc

SEQ ID NO: 614256 - DNA, 25 bp, Homo sapien
cccgagtccgagagagggttaacag

SEQ ID NO: 614257 - DNA, 25 bp, Homo sapien
ttcgctgcgatctcaaggcctagtt

SEQ ID NO: 614258 - DNA, 25 bp, Homo sapien
tgagcacgcactgcttcactgtggc

SEQ ID NO: 614259 - DNA, 25 bp, Homo sapien
tcattggttcgtggacttagctgca

SEQ ID NO: 614260 - DNA, 25 bp, Homo sapien
ttgggtggccatggagctgtccctc

SEQ ID NO: 614261 - DNA, 25 bp, Homo sapien
tagctgcatgggagatctgccacca

SEQ ID NO: 614262 - DNA, 25 bp, Homo sapien
gagcagagctgccagaataagccag

SEQ ID NO: 614263 - DNA, 25 bp, Homo sapien
tccatctgccaccatacttttgtgt

SEQ ID NO: 614264 - DNA, 25 bp, Homo sapien
tgtgtctgtccccagccgaattgct

SEQ ID NO: 614265 - DNA, 25 bp, Homo sapien
tgccaacagcattcctcaaacagag

SEQ ID NO: 614266 - DNA, 25 bp, Homo sapien
tagttccaggtttctaacaatgcca

SEQ ID NO: 614267 - DNA, 25 bp, Homo sapien
gaatcagtctatgtaaagcactaat

SEQ ID NO: 614268 - DNA, 25 bp, Homo sapien
acatctgatctctggcacttcccag

SEQ ID NO: 614269 - DNA, 25 bp, Homo sapien
tttctttagagccaggagaaggtac

SEQ ID NO: 614270 - DNA, 25 bp, Homo sapien
gcgagacactgtatcaaaaaacaaa

SEQ ID NO: 614271 - DNA, 25 bp, Homo sapien
cgagacactgtatcaaaaaacaaaa

SEQ ID NO: 614272 - DNA, 25 bp, Homo sapien
agagcgagacactgtatcaaaaaac

SEQ ID NO: 614273 - DNA, 25 bp, Homo sapien
gagcgagacactgtatcaaaaaaca

SEQ ID NO: 614274 - DNA, 25 bp, Homo sapien
ccttcagcgccatcattcaatactg

SEQ ID NO: 614275 - DNA, 25 bp, Homo sapien
ttgaatgagtctaatctaaaagttt

SEQ ID NO: 614276 - DNA, 25 bp, Homo sapien
caatctgtaatgaggggcatttgaa

SEQ ID NO: 614277 - DNA, 25 bp, Homo sapien
ttgggagggagagggtcgcttcctc

SEQ ID NO: 614278 - DNA, 25 bp, Homo sapien
gaaccactggtttcagggaatataa

SEQ ID NO: 614279 - DNA, 25 bp, Homo sapien
tgaaccactggtttcagggaatata

SEQ ID NO: 614280 - DNA, 25 bp, Homo sapien
tgtgacaacccacacgtctccaagc

SEQ ID NO: 614281 - DNA, 25 bp, Homo sapien
cagaggcagaatgattggactgttt

SEQ ID NO: 614282 - DNA, 25 bp, Homo sapien
tacaacctccctaactgtgacaacc

SEQ ID NO: 614283 - DNA, 25 bp, Homo sapien
tataggatgttttgcatcatccttg

SEQ ID NO: 614284 - DNA, 25 bp, Homo sapien
tggaaagatatctgatgtagggtgc

SEQ ID NO: 614285 - DNA, 25 bp, Homo sapien
aagatatctgatgtagggtgcagca

SEQ ID NO: 614286 - DNA, 25 bp, Homo sapien
ccagggctcagatggaaagatatct

SEQ ID NO: 614287 - DNA, 25 bp, Homo sapien
tagtttttaagccagggctcagatg

SEQ ID NO: 614288 - DNA, 25 bp, Homo sapien
gctttaaatcggaaactcgccgctc

SEQ ID NO: 614289 - DNA, 25 bp, Homo sapien
ctcgcagctcagctttaaatcggaa

SEQ ID NO: 614290 - DNA, 25 bp, Homo sapien
ccgctgccgtcgctgtggagcggct

SEQ ID NO: 614291 - DNA, 25 bp, Homo sapien
gccaccgactaagccgcagccgctg

SEQ ID NO: 614292 - DNA, 25 bp, Homo sapien
ggactgccacccagcttcgtctcag

SEQ ID NO: 614293 - DNA, 25 bp, Homo sapien
acaccccgaaactacctcagcgcgt

SEQ ID NO: 614294 - DNA, 25 bp, Homo sapien
tggcagatctgaagccgctggctct

SEQ ID NO: 614295 - DNA, 25 bp, Homo sapien
ctcggatccccaagcggactgccac

SEQ ID NO: 614296 - DNA, 25 bp, Homo sapien
tttccctcccgtgcgtcccagaagc

SEQ ID NO: 614297 - DNA, 25 bp, Homo sapien
ccgtgcgtcccagaagctgctaagg

SEQ ID NO: 614298 - DNA, 25 bp, Homo sapien
cctcccgtgcgtcccagaagctgct

SEQ ID NO: 614299 - DNA, 25 bp, Homo sapien
gaggacgacgcggggagctttcaaa

SEQ ID NO: 614300 - DNA, 25 bp, Homo sapien
tatcgcctagaaaaagggtctcacg

SEQ ID NO: 614301 - DNA, 25 bp, Homo sapien
tactgaagcttttttgcagccaggg

SEQ ID NO: 614302 - DNA, 25 bp, Homo sapien
taaaccatgacgaactgggtcgatg

SEQ ID NO: 614303 - DNA, 25 bp, Homo sapien
gatcagttaggtggatccgaggcca

SEQ ID NO: 614304 - DNA, 25 bp, Homo sapien
cattactgtgtgatacccaggccaa

SEQ ID NO: 614305 - DNA, 25 bp, Homo sapien
cagtcccctggagttcgttataatg

SEQ ID NO: 614306 - DNA, 25 bp, Homo sapien
tgatatacatgctctgccactgccc

SEQ ID NO: 614307 - DNA, 25 bp, Homo sapien
tgtcgacataaaccaagagctactc

SEQ ID NO: 614308 - DNA, 25 bp, Homo sapien
gatcagtagtagtcccttgcctcct

SEQ ID NO: 614309 - DNA, 25 bp, Homo sapien
tctacaatctctataggcaaaaccg

SEQ ID NO: 614310 - DNA, 25 bp, Homo sapien
ggcaaaaccgacttatcactgattg

SEQ ID NO: 614311 - DNA, 25 bp, Homo sapien
tatgagtacctgattgattgtgcac

SEQ ID NO: 614312 - DNA, 25 bp, Homo sapien
ttaatgttacccctcatagtgagtg

SEQ ID NO: 614313 - DNA, 25 bp, Homo sapien
ttttcgtacttacttgccactggtg

SEQ ID NO: 614314 - DNA, 25 bp, Homo sapien
tagggcatcatttactcaaatcaca

SEQ ID NO: 614315 - DNA, 25 bp, Homo sapien
ccagcctagtctttaacttccggct

SEQ ID NO: 614316 - DNA, 25 bp, Homo sapien
gcaagtgcatcacctaaagtcacga

SEQ ID NO: 614317 - DNA, 25 bp, Homo sapien
agtgcatcacctaaagtcacgagtt

SEQ ID NO: 614318 - DNA, 25 bp, Homo sapien
caaaaaaacagcacacctgtgatcc

SEQ ID NO: 614319 - DNA, 25 bp, Homo sapien
gctgaggcaagtgcatcacctaaag

SEQ ID NO: 614320 - DNA, 25 bp, Homo sapien
gaaaagtttctcgtaaagcctcagc

SEQ ID NO: 614321 - DNA, 25 bp, Homo sapien
tgtgtagaacatcatagcgcccctg

SEQ ID NO: 614322 - DNA, 25 bp, Homo sapien
gggtcagctttttcacgggctacgc

SEQ ID NO: 614323 - DNA, 25 bp, Homo sapien
tagagccaggccaacaacctttgat

SEQ ID NO: 614324 - DNA, 25 bp, Homo sapien
tcattttggtgcatgggccaggaaa

SEQ ID NO: 614325 - DNA, 25 bp, Homo sapien
tggtgggtatggaatggatttcaac

SEQ ID NO: 614326 - DNA, 25 bp, Homo sapien
agctttataagatctgtatactggg

SEQ ID NO: 614327 - DNA, 25 bp, Homo sapien
aaattcaaccatcagagtggtgggt

SEQ ID NO: 614328 - DNA, 25 bp, Homo sapien
cagccgccccgtccaggagggaggt

SEQ ID NO: 614329 - DNA, 25 bp, Homo sapien
ccggccgcccctattgggaagtgag

SEQ ID NO: 614330 - DNA, 25 bp, Homo sapien
ccgtccaggaggtgaggggcgcctc

SEQ ID NO: 614331 - DNA, 25 bp, Homo sapien
tcagcccccccgtccggccagccgc

SEQ ID NO: 614332 - DNA, 25 bp, Homo sapien
tagcaaagttataatatattaggca

SEQ ID NO: 614333 - DNA, 25 bp, Homo sapien
cacagacatgatcacctatatatac

SEQ ID NO: 614334 - DNA, 25 bp, Homo sapien
gacatgatcacctatatatacaatc

SEQ ID NO: 614335 - DNA, 25 bp, Homo sapien
ttagcaaagttataatatattaggc

SEQ ID NO: 614336 - DNA, 25 bp, Homo sapien
aatgtctgcggttcttcttcatatt

SEQ ID NO: 614337 - DNA, 25 bp, Homo sapien
tgacatccagaatgtctgcggttct

SEQ ID NO: 614338 - DNA, 25 bp, Homo sapien
tccagaatgtctgcggttcttcttc

SEQ ID NO: 614339 - DNA, 25 bp, Homo sapien
catccagaatgtctgcggttcttct

SEQ ID NO: 614340 - DNA, 25 bp, Homo sapien
tacaggaaaggtcaagaggaaggat

SEQ ID NO: 614341 - DNA, 25 bp, Homo sapien
tgtacaagggaggagcagatcacag

SEQ ID NO: 614342 - DNA, 25 bp, Homo sapien
gaaaagaccttggttaacagtgaga

SEQ ID NO: 614343 - DNA, 25 bp, Homo sapien
tcaaatctagcccaacagtccagaa

SEQ ID NO: 614344 - DNA, 25 bp, Homo sapien
ggctactcttcacatgactgctgga

SEQ ID NO: 614345 - DNA, 25 bp, Homo sapien
gactgctggagggtcttatgaagac

SEQ ID NO: 614346 - DNA, 25 bp, Homo sapien
taatctctgctaaacccatatactg

SEQ ID NO: 614347 - DNA, 25 bp, Homo sapien
tattaataatggatgatgcggttgc

SEQ ID NO: 614348 - DNA, 25 bp, Homo sapien
ccagtagtacataaaataggccggg

SEQ ID NO: 614349 - DNA, 25 bp, Homo sapien
taaaaagggcatggcctccgaaatc

SEQ ID NO: 614350 - DNA, 25 bp, Homo sapien
gcatcctcaacaacgctggcttcat

SEQ ID NO: 614351 - DNA, 25 bp, Homo sapien
tcaagccaaagttgacatacaggcc

SEQ ID NO: 614352 - DNA, 25 bp, Homo sapien
tcacactgtagaccaatgagaactg

SEQ ID NO: 614353 - DNA, 25 bp, Homo sapien
gaagggctctcctaagatacaacat

SEQ ID NO: 614354 - DNA, 25 bp, Homo sapien
tgttccagacagatagcgctatata

SEQ ID NO: 614355 - DNA, 25 bp, Homo sapien
tcattatgtccaatagccccaagct

SEQ ID NO: 614356 - DNA, 25 bp, Homo sapien
catctgagaaggtaacagggacatt

SEQ ID NO: 614357 - DNA, 25 bp, Homo sapien
catcttggacaacatggcccctgtt

SEQ ID NO: 614358 - DNA, 25 bp, Homo sapien
tcaggaatctgagtccatcttggac

SEQ ID NO: 614359 - DNA, 25 bp, Homo sapien
gaagttccagaaacattagacatct

SEQ ID NO: 614360 - DNA, 25 bp, Homo sapien
tgctatccaatttaattcgtgtaag

SEQ ID NO: 614361 - DNA, 25 bp, Homo sapien
taattcgtgtaagatgaacggagaa

SEQ ID NO: 614362 - DNA, 25 bp, Homo sapien
ccacatcaactacccaaggagctgg

SEQ ID NO: 614363 - DNA, 25 bp, Homo sapien
gccaccataccggaccgaatgttat

SEQ ID NO: 614364 - DNA, 25 bp, Homo sapien
ccagtcaaaggatgttcaagcagtt

SEQ ID NO: 614365 - DNA, 25 bp, Homo sapien
tgagtccaccatccagcaagtattt

SEQ ID NO: 614366 - DNA, 25 bp, Homo sapien
ctggctaaccagtcaaaggatgttc

SEQ ID NO: 614367 - DNA, 25 bp, Homo sapien
tttattggtctctgagtccaccatc

SEQ ID NO: 614368 - DNA, 25 bp, Homo sapien
catgatagggcattatttccaggag

SEQ ID NO: 614369 - DNA, 25 bp, Homo sapien
gaaatgggaaggataagacagaaaa

SEQ ID NO: 614370 - DNA, 25 bp, Homo sapien
ttccaggagatatcagttaagtagg

SEQ ID NO: 614371 - DNA, 25 bp, Homo sapien
tggcatggaagggatacaaaagcaa

SEQ ID NO: 614372 - DNA, 25 bp, Homo sapien
tttcccaggctggaatgcaatggtg

SEQ ID NO: 614373 - DNA, 25 bp, Homo sapien
tgtcttgagacacaatcttactctg

SEQ ID NO: 614374 - DNA, 25 bp, Homo sapien
ttgtcttgagacacaatcttactct

SEQ ID NO: 614375 - DNA, 25 bp, Homo sapien
tcttctaatctgactggttatcacg

SEQ ID NO: 614376 - DNA, 25 bp, Homo sapien
gactggttatcacgcatcttgagtg

SEQ ID NO: 614377 - DNA, 25 bp, Homo sapien
cttgagtggtgtaacagcagttagc

SEQ ID NO: 614378 - DNA, 25 bp, Homo sapien
cagcagttagcaggtaactaaaagg

SEQ ID NO: 614379 - DNA, 25 bp, Homo sapien
gaatgcaatgtctacctaggagcgg

SEQ ID NO: 614380 - DNA, 25 bp, Homo sapien
acaccaacgggatgaaaatagcaaa

SEQ ID NO: 614381 - DNA, 25 bp, Homo sapien
ggcgccactgccttaattcatggta

SEQ ID NO: 614382 - DNA, 25 bp, Homo sapien
tcatggtaaggtgtcagcaatttta

SEQ ID NO: 614383 - DNA, 25 bp, Homo sapien
gaatagcaaagctaggagcctacag

SEQ ID NO: 614384 - DNA, 25 bp, Homo sapien
tctacaagaaactaccttggtggag

SEQ ID NO: 614385 - DNA, 25 bp, Homo sapien
gaactctcaggctagcagaacagga

SEQ ID NO: 614386 - DNA, 25 bp, Homo sapien
caaacgttttgcatgcccagaatca

SEQ ID NO: 614387 - DNA, 25 bp, Homo sapien
tttgtttctttcaatgctggtaagg

SEQ ID NO: 614388 - DNA, 25 bp, Homo sapien
taatttattccacattctagatatt

SEQ ID NO: 614389 - DNA, 25 bp, Homo sapien
gtaatttattccacattctagatat

SEQ ID NO: 614390 - DNA, 25 bp, Homo sapien
ggcaatttgcgttttcgtgaatcac

SEQ ID NO: 614391 - DNA, 25 bp, Homo sapien
cacatggcaatttgcgttttcgtga

SEQ ID NO: 614392 - DNA, 25 bp, Homo sapien
agtatcacatggcaatttgcgtttt

SEQ ID NO: 614393 - DNA, 25 bp, Homo sapien
tgcgttttcgtgaatcactggccag

SEQ ID NO: 614394 - DNA, 25 bp, Homo sapien
tgtcaggcctctgagaccaagcctg

SEQ ID NO: 614395 - DNA, 25 bp, Homo sapien
aggcctctgagaccaagcctgcaca

SEQ ID NO: 614396 - DNA, 25 bp, Homo sapien
cctctgagaccaagcctgcacatat

SEQ ID NO: 614397 - DNA, 25 bp, Homo sapien
tgagaccaagcctgcacatatacat

SEQ ID NO: 614398 - DNA, 25 bp, Homo sapien
caacggtgcgactttggctcaatgc

SEQ ID NO: 614399 - DNA, 25 bp, Homo sapien
gctgtcttggagaagtagtacaaca

SEQ ID NO: 614400 - DNA, 25 bp, Homo sapien
caaactaaactcagccaatataaac

SEQ ID NO: 614401 - DNA, 25 bp, Homo sapien
cagttccatctttgttagctaggtg

SEQ ID NO: 614402 - DNA, 25 bp, Homo sapien
gcacatttatctggtttgacattga

SEQ ID NO: 614403 - DNA, 25 bp, Homo sapien
cactaagattggcagatatcagctc

SEQ ID NO: 614404 - DNA, 25 bp, Homo sapien
gctcttttatttgacgtatctgtct

SEQ ID NO: 614405 - DNA, 25 bp, Homo sapien
cctttaaaatcgcacatttatctgg

SEQ ID NO: 614406 - DNA, 25 bp, Homo sapien
gatacatcggctttttgaacatcat

SEQ ID NO: 614407 - DNA, 25 bp, Homo sapien
ccctgtagaagatacatcggctttt

SEQ ID NO: 614408 - DNA, 25 bp, Homo sapien
tgccctgtagaagatacatcggctt

SEQ ID NO: 614409 - DNA, 25 bp, Homo sapien
tagaagatacatcggctttttgaac

SEQ ID NO: 614410 - DNA, 25 bp, Homo sapien
ctgaagtaaaagcggtcctaaggag

SEQ ID NO: 614411 - DNA, 25 bp, Homo sapien
gtcctaaggagtctttatcaataac

SEQ ID NO: 614412 - DNA, 25 bp, Homo sapien
attagcaccattactacaggcctta

SEQ ID NO: 614413 - DNA, 25 bp, Homo sapien
caatgtttccgtctcgattcaccac

SEQ ID NO: 614414 - DNA, 25 bp, Homo sapien
tcttcatgtaagatattgtaaacac

SEQ ID NO: 614415 - DNA, 25 bp, Homo sapien
caggtcctcttgcttatattgcagg

SEQ ID NO: 614416 - DNA, 25 bp, Homo sapien
tgtgtgacattttctgatacaaata

SEQ ID NO: 614417 - DNA, 25 bp, Homo sapien
gttttcatcaacatacggcaattaa

SEQ ID NO: 614418 - DNA, 25 bp, Homo sapien
ttcatcaacatacggcaattaaatg

SEQ ID NO: 614419 - DNA, 25 bp, Homo sapien
ttcaggactggcgtttatgtcttcc

SEQ ID NO: 614420 - DNA, 25 bp, Homo sapien
aggactggcgtttatgtcttccaga

SEQ ID NO: 614421 - DNA, 25 bp, Homo sapien
catagctcgtggctgagacagggca

SEQ ID NO: 614422 - DNA, 25 bp, Homo sapien
catcatagctcgtggctgagacagg

SEQ ID NO: 614423 - DNA, 25 bp, Homo sapien
cctccatcatagctcgtggctgaga

SEQ ID NO: 614424 - DNA, 25 bp, Homo sapien
atagctcgtggctgagacagggcaa

SEQ ID NO: 614425 - DNA, 25 bp, Homo sapien
gcgtgccacacagatcatacaagat

SEQ ID NO: 614426 - DNA, 25 bp, Homo sapien
aataaagctctcagggtttgatgga

SEQ ID NO: 614427 - DNA, 25 bp, Homo sapien
tctcctgtagtaatgcggcgtgcca

SEQ ID NO: 614428 - DNA, 25 bp, Homo sapien
tctggtaataaagctctcagggttt

SEQ ID NO: 614429 - DNA, 25 bp, Homo sapien
caagattgaaactcaggttgacgtc

SEQ ID NO: 614430 - DNA, 25 bp, Homo sapien
tcaggttgacgtcaagaattactcc

SEQ ID NO: 614431 - DNA, 25 bp, Homo sapien
gtcaagaattactcccggccaagca

SEQ ID NO: 614432 - DNA, 25 bp, Homo sapien
aaatggcagaccaagattgaaactc

SEQ ID NO: 614433 - DNA, 25 bp, Homo sapien
ttgctgtcactatgtttatctgagg

SEQ ID NO: 614434 - DNA, 25 bp, Homo sapien
tataaagtaacatacagccgggcat

SEQ ID NO: 614435 - DNA, 25 bp, Homo sapien
gcagagaaagactcactctaaaagg

SEQ ID NO: 614436 - DNA, 25 bp, Homo sapien
taacactgccaaatcataagaggtg

SEQ ID NO: 614437 - DNA, 25 bp, Homo sapien
gatagtgacgtttctgggaccatga

SEQ ID NO: 614438 - DNA, 25 bp, Homo sapien
aaaaaatctctgaatacaccttcgg

SEQ ID NO: 614439 - DNA, 25 bp, Homo sapien
caccttcggattatatcttcaaagc

SEQ ID NO: 614440 - DNA, 25 bp, Homo sapien
aagccaggcctcatggaggatctca

SEQ ID NO: 614441 - DNA, 25 bp, Homo sapien
tgttggggaaaatatcccatcactg

SEQ ID NO: 614442 - DNA, 25 bp, Homo sapien
ctgttggggaaaatatcccatcact

SEQ ID NO: 614443 - DNA, 25 bp, Homo sapien
ttggggaaaatatcccatcactggt

SEQ ID NO: 614444 - DNA, 25 bp, Homo sapien
ggggaaaatatcccatcactggtaa

SEQ ID NO: 614445 - DNA, 25 bp, Homo sapien
gttccatcagccaacgagaatcgat

SEQ ID NO: 614446 - DNA, 25 bp, Homo sapien
tgtgcagtcactatagttccatcag

SEQ ID NO: 614447 - DNA, 25 bp, Homo sapien
catttgttacaggatttcggaagag

SEQ ID NO: 614448 - DNA, 25 bp, Homo sapien
aaggaagtgggttgagacaaagcca

SEQ ID NO: 614449 - DNA, 25 bp, Homo sapien
gaactgttgcatccagccataggtg

SEQ ID NO: 614450 - DNA, 25 bp, Homo sapien
gccataggtggtctaatcccttgtc

SEQ ID NO: 614451 - DNA, 25 bp, Homo sapien
aatcccttgtccaacaggatttggg

SEQ ID NO: 614452 - DNA, 25 bp, Homo sapien
ggtttggtctatatccattctgttc

SEQ ID NO: 614453 - DNA, 25 bp, Homo sapien
tggtttggcgacatactcatgccgc

SEQ ID NO: 614454 - DNA, 25 bp, Homo sapien
gctagggtctgccaagccataggcc

SEQ ID NO: 614455 - DNA, 25 bp, Homo sapien
ctgctcggcatctgtaagccttggt

SEQ ID NO: 614456 - DNA, 25 bp, Homo sapien
aagatggtgattgcatgcctggccc

SEQ ID NO: 614457 - DNA, 25 bp, Homo sapien
tcccacgattacgaggagaaatcat

SEQ ID NO: 614458 - DNA, 25 bp, Homo sapien
gctactcatgttgagcccatagttg

SEQ ID NO: 614459 - DNA, 25 bp, Homo sapien
tgaggctatctttggactcccacga

SEQ ID NO: 614460 - DNA, 25 bp, Homo sapien
gggcaagaccaggactcccatgtgg

SEQ ID NO: 614461 - DNA, 25 bp, Homo sapien
tgtggttcccagtattgccagaaga

SEQ ID NO: 614462 - DNA, 25 bp, Homo sapien
gctgtggttcccagtattgccagaa

SEQ ID NO: 614463 - DNA, 25 bp, Homo sapien
tggaaaagctgtggttcccagtatt

SEQ ID NO: 614464 - DNA, 25 bp, Homo sapien
aaagctgtggttcccagtattgcca

SEQ ID NO: 614465 - DNA, 25 bp, Homo sapien
atgacagagtagataaaagggaagt

SEQ ID NO: 614466 - DNA, 25 bp, Homo sapien
tggtgatgacagagtagataaaagg

SEQ ID NO: 614467 - DNA, 25 bp, Homo sapien
gacagagtagataaaagggaagtcc

SEQ ID NO: 614468 - DNA, 25 bp, Homo sapien
ctggtgatgacagagtagataaaag

SEQ ID NO: 614469 - DNA, 25 bp, Homo sapien
tgacacattgaactctccactggat

SEQ ID NO: 614470 - DNA, 25 bp, Homo sapien
tgattgcttactttacttggttggg

SEQ ID NO: 614471 - DNA, 25 bp, Homo sapien
ctgaggtgatctctgctatttgact

SEQ ID NO: 614472 - DNA, 25 bp, Homo sapien
gattttggtcgcaataaaagcccag

SEQ ID NO: 614473 - DNA, 25 bp, Homo sapien
tggtcaaggaggaatgaccccggtc

SEQ ID NO: 614474 - DNA, 25 bp, Homo sapien
ccaaaggacccctttgattctctgc

SEQ ID NO: 614475 - DNA, 25 bp, Homo sapien
tcagaagaacaggtaagtaactgca

SEQ ID NO: 614476 - DNA, 25 bp, Homo sapien
tgaccccggtcatcagaagaacagg

SEQ ID NO: 614477 - DNA, 25 bp, Homo sapien
cagtaatcttggctacctcagctgg

SEQ ID NO: 614478 - DNA, 25 bp, Homo sapien
gcagcaacttgtgcaaaatccggtg

SEQ ID NO: 614479 - DNA, 25 bp, Homo sapien
aaatccggtgcttctcttgtaacag

SEQ ID NO: 614480 - DNA, 25 bp, Homo sapien
tgtccagcaggtatctaagaagtgc

SEQ ID NO: 614481 - DNA, 25 bp, Homo sapien
gcatctagattatccaagtctccag

SEQ ID NO: 614482 - DNA, 25 bp, Homo sapien
cacctgttgcttagtccccagatga

SEQ ID NO: 614483 - DNA, 25 bp, Homo sapien
ccccagatgactaccatttgaggat

SEQ ID NO: 614484 - DNA, 25 bp, Homo sapien
tagtcagatcaccaagaatagcatc

SEQ ID NO: 614485 - DNA, 25 bp, Homo sapien
gaggacttgagccaacagaaacagg

SEQ ID NO: 614486 - DNA, 25 bp, Homo sapien
tcttggattcccacccaacatgggt

SEQ ID NO: 614487 - DNA, 25 bp, Homo sapien
tggaggacgaatagactgcacagac

SEQ ID NO: 614488 - DNA, 25 bp, Homo sapien
cactgctcggttatatggaggacga

SEQ ID NO: 614489 - DNA, 25 bp, Homo sapien
aaaacaggtagccatacttaggtct

SEQ ID NO: 614490 - DNA, 25 bp, Homo sapien
aaaacagcactttgtcatggtaaga

SEQ ID NO: 614491 - DNA, 25 bp, Homo sapien
ccaactgtggagacataggccacta

SEQ ID NO: 614492 - DNA, 25 bp, Homo sapien
ctcatatattcaacaggctggaaaa

SEQ ID NO: 614493 - DNA, 25 bp, Homo sapien
gagtcacagtcacatttcggtttgg

SEQ ID NO: 614494 - DNA, 25 bp, Homo sapien
acagtcacatttcggtttggcccac

SEQ ID NO: 614495 - DNA, 25 bp, Homo sapien
gaaggagtctgagtcacagtcacat

SEQ ID NO: 614496 - DNA, 25 bp, Homo sapien
tgaggaaggagtctgagtcacagtc

SEQ ID NO: 614497 - DNA, 25 bp, Homo sapien
taggttccattctgccggcctttga

SEQ ID NO: 614498 - DNA, 25 bp, Homo sapien
aatagagccacccagtgcaggtctg

SEQ ID NO: 614499 - DNA, 25 bp, Homo sapien
catggagtttgaattcataggttcc

SEQ ID NO: 614500 - DNA, 25 bp, Homo sapien
gctattagaccgaagaggcaatgtg

SEQ ID NO: 614501 - DNA, 25 bp, Homo sapien
tgctgttgcaatactggtctcgcac

SEQ ID NO: 614502 - DNA, 25 bp, Homo sapien
gctgctgttgcaatactggtctcgc

SEQ ID NO: 614503 - DNA, 25 bp, Homo sapien
tgctgctgttgcaatactggtctcg

SEQ ID NO: 614504 - DNA, 25 bp, Homo sapien
gctgctgctgttgcaatactggtct

SEQ ID NO: 614505 - DNA, 25 bp, Homo sapien
aacccagttggttagatgctgctgc

SEQ ID NO: 614506 - DNA, 25 bp, Homo sapien
ggacaacatgccatcgggccaggaa

SEQ ID NO: 614507 - DNA, 25 bp, Homo sapien
ggccatagggattagcccccattcc

SEQ ID NO: 614508 - DNA, 25 bp, Homo sapien
ttgagtgccatgagaaacttgttcc

SEQ ID NO: 614509 - DNA, 25 bp, Homo sapien
cagtaactcaaatgctacaaacaca

SEQ ID NO: 614510 - DNA, 25 bp, Homo sapien
tagaaatttcaccaggccactttag

SEQ ID NO: 614511 - DNA, 25 bp, Homo sapien
ggccactttagaccaccatatacag

SEQ ID NO: 614512 - DNA, 25 bp, Homo sapien
gagtaatagatcacagcaaccatgc

SEQ ID NO: 614513 - DNA, 25 bp, Homo sapien
aataatgctctttcgtcactctggc

SEQ ID NO: 614514 - DNA, 25 bp, Homo sapien
tggcatctgtgttgctgagaagagt

SEQ ID NO: 614515 - DNA, 25 bp, Homo sapien
cagctggtccaataatgctctttcg

SEQ ID NO: 614516 - DNA, 25 bp, Homo sapien
gaaggtggcccaacaagatcatcca

SEQ ID NO: 614517 - DNA, 25 bp, Homo sapien
atcctgtttgggctctaatgcctgt

SEQ ID NO: 614518 - DNA, 25 bp, Homo sapien
cctgtttgggctctaatgcctgtcc

SEQ ID NO: 614519 - DNA, 25 bp, Homo sapien
tcctgtttgggctctaatgcctgtc

SEQ ID NO: 614520 - DNA, 25 bp, Homo sapien
catcatagagttaaaagatggtgat

SEQ ID NO: 614521 - DNA, 25 bp, Homo sapien
gtatgtctgtccatataatcctgcc

SEQ ID NO: 614522 - DNA, 25 bp, Homo sapien
ccatataatcctgccttctgatcca

SEQ ID NO: 614523 - DNA, 25 bp, Homo sapien
tctcatgatgttggctcgtgggtgc

SEQ ID NO: 614524 - DNA, 25 bp, Homo sapien
caccagcagtagggttttccatttt

SEQ ID NO: 614525 - DNA, 25 bp, Homo sapien
accaccagcagtagggttttccatt

SEQ ID NO: 614526 - DNA, 25 bp, Homo sapien
ttttcaattcaagtgcctgtcggct

SEQ ID NO: 614527 - DNA, 25 bp, Homo sapien
caccaccagcagtagggttttccat

SEQ ID NO: 614528 - DNA, 25 bp, Homo sapien
cgaccatttgagcattaagaaaacc

SEQ ID NO: 614529 - DNA, 25 bp, Homo sapien
tgggcgaccatttgagcattaagaa

SEQ ID NO: 614530 - DNA, 25 bp, Homo sapien
gctgcgttgggcgaccatttgagca

SEQ ID NO: 614531 - DNA, 25 bp, Homo sapien
cagctctctgctgcgttgggcgacc

SEQ ID NO: 614532 - DNA, 25 bp, Homo sapien
gggaagcagtcacattaggaggtgg

SEQ ID NO: 614533 - DNA, 25 bp, Homo sapien
aagcagtcacattaggaggtgggct

SEQ ID NO: 614534 - DNA, 25 bp, Homo sapien
cagtcacattaggaggtgggctgaa

SEQ ID NO: 614535 - DNA, 25 bp, Homo sapien
tcacattaggaggtgggctgaaggc

SEQ ID NO: 614536 - DNA, 25 bp, Homo sapien
cataatttggttgatatggaaactg

SEQ ID NO: 614537 - DNA, 25 bp, Homo sapien
gtgggtcctgccaaaagcccatcca

SEQ ID NO: 614538 - DNA, 25 bp, Homo sapien
tatggaaactgttgcggaggagctt

SEQ ID NO: 614539 - DNA, 25 bp, Homo sapien
gagcttgtggcattgtgggtcctgc

SEQ ID NO: 614540 - DNA, 25 bp, Homo sapien
tgcagcatttttgttttccaatcat

SEQ ID NO: 614541 - DNA, 25 bp, Homo sapien
gcatttttgttttccaatcatttaa

SEQ ID NO: 614542 - DNA, 25 bp, Homo sapien
cagcatttttgttttccaatcattt

SEQ ID NO: 614543 - DNA, 25 bp, Homo sapien
gtgtgctgcagcatttttgttttcc

SEQ ID NO: 614544 - DNA, 25 bp, Homo sapien
tgggagggacccattcttgacgaca

SEQ ID NO: 614545 - DNA, 25 bp, Homo sapien
ttgacgacatcattgcattgggagg

SEQ ID NO: 614546 - DNA, 25 bp, Homo sapien
tagacactcgaccaaaggctggatc

SEQ ID NO: 614547 - DNA, 25 bp, Homo sapien
catcattgcattgggaggactagac

SEQ ID NO: 614548 - DNA, 25 bp, Homo sapien
tgcagcctgcgggtgttgcatcatg

SEQ ID NO: 614549 - DNA, 25 bp, Homo sapien
atgcagcctgcgggtgttgcatcat

SEQ ID NO: 614550 - DNA, 25 bp, Homo sapien
gcagcctgcgggtgttgcatcatgg

SEQ ID NO: 614551 - DNA, 25 bp, Homo sapien
agcctgcgggtgttgcatcatggga

SEQ ID NO: 614552 - DNA, 25 bp, Homo sapien
aggacccataggcatgccagacatg

SEQ ID NO: 614553 - DNA, 25 bp, Homo sapien
ccatactatacactgcaggattccc

SEQ ID NO: 614554 - DNA, 25 bp, Homo sapien
ccataggcatgccagacatgggcat

SEQ ID NO: 614555 - DNA, 25 bp, Homo sapien
tactatacactgcaggattcccctg

SEQ ID NO: 614556 - DNA, 25 bp, Homo sapien
tatgatcagtaacactccatgtctc

SEQ ID NO: 614557 - DNA, 25 bp, Homo sapien
caagatggatgcctggaacaatgat

SEQ ID NO: 614558 - DNA, 25 bp, Homo sapien
aaacacgtagatattgcccttcggc

SEQ ID NO: 614559 - DNA, 25 bp, Homo sapien
acttaaaatacccttgatggagctc

SEQ ID NO: 614560 - DNA, 25 bp, Homo sapien
ctttgtccaatactgcaactagaga

SEQ ID NO: 614561 - DNA, 25 bp, Homo sapien
tagggcaaataatagggacagagca

SEQ ID NO: 614562 - DNA, 25 bp, Homo sapien
ggctgggactatgctctttgtccaa

SEQ ID NO: 614563 - DNA, 25 bp, Homo sapien
tggcccacctacgtgtatttaagag

SEQ ID NO: 614564 - DNA, 25 bp, Homo sapien
ggaggtgaagtattacaggacatga

SEQ ID NO: 614565 - DNA, 25 bp, Homo sapien
ctggaggtgaagtattacaggacat

SEQ ID NO: 614566 - DNA, 25 bp, Homo sapien
ggacatgaatggcaaatgaaaacct

SEQ ID NO: 614567 - DNA, 25 bp, Homo sapien
gtgaagtattacaggacatgaatgg

SEQ ID NO: 614568 - DNA, 25 bp, Homo sapien
tgtgaaaagtttgctactgctgcga

SEQ ID NO: 614569 - DNA, 25 bp, Homo sapien
aatctattcacagaaacactgcgag

SEQ ID NO: 614570 - DNA, 25 bp, Homo sapien
catataggcaaagggtgacaccagt

SEQ ID NO: 614571 - DNA, 25 bp, Homo sapien
ttttaaataaagtgcactcagctgc

SEQ ID NO: 614572 - DNA, 25 bp, Homo sapien
caaagtgcttagttctggtagagga

SEQ ID NO: 614573 - DNA, 25 bp, Homo sapien
caggccacaaaagtcaagggatgtc

SEQ ID NO: 614574 - DNA, 25 bp, Homo sapien
aggaaaagctgtggagcactacccc

SEQ ID NO: 614575 - DNA, 25 bp, Homo sapien
tgaaaagagcgaggcatctaaggct

SEQ ID NO: 614576 - DNA, 25 bp, Homo sapien
caggtcttagcaaccaaaatctgaa

SEQ ID NO: 614577 - DNA, 25 bp, Homo sapien
tcaggtcttagcaaccaaaatctga

SEQ ID NO: 614578 - DNA, 25 bp, Homo sapien
tagcaaccaaaatctgaaaacgctc

SEQ ID NO: 614579 - DNA, 25 bp, Homo sapien
tcttagcaaccaaaatctgaaaacg

SEQ ID NO: 614580 - DNA, 25 bp, Homo sapien
ccagaaaccacaccaaggattctac

SEQ ID NO: 614581 - DNA, 25 bp, Homo sapien
ccaaggattctactcgagatctcaa

SEQ ID NO: 614582 - DNA, 25 bp, Homo sapien
accagaaaccacaccaaggattcta

SEQ ID NO: 614583 - DNA, 25 bp, Homo sapien
gattctactcgagatctcaatatgg

SEQ ID NO: 614584 - DNA, 25 bp, Homo sapien
caggtgtcaaagagaggcaacagca

SEQ ID NO: 614585 - DNA, 25 bp, Homo sapien
gataccaaggctagcagagacctct

SEQ ID NO: 614586 - DNA, 25 bp, Homo sapien
gacactattctaatccacagggaca

SEQ ID NO: 614587 - DNA, 25 bp, Homo sapien
tgttcacccaacagataccaaggtt

SEQ ID NO: 614588 - DNA, 25 bp, Homo sapien
ggccaacccttctttgtgtatcagg

SEQ ID NO: 614589 - DNA, 25 bp, Homo sapien
gaccagcagttggtatgaagaacct

SEQ ID NO: 614590 - DNA, 25 bp, Homo sapien
catacttcaagggactacaggtaag

SEQ ID NO: 614591 - DNA, 25 bp, Homo sapien
aattgcaaagaaattcgccttggcc

SEQ ID NO: 614592 - DNA, 25 bp, Homo sapien
ggattatacctcaccagctgcacaa

SEQ ID NO: 614593 - DNA, 25 bp, Homo sapien
aaaagaaaatccctcgcagttgtgg

SEQ ID NO: 614594 - DNA, 25 bp, Homo sapien
taaaccctggttgcctctgaagaaa

SEQ ID NO: 614595 - DNA, 25 bp, Homo sapien
ggtgtcaataaacgctctgtggcca

SEQ ID NO: 614596 - DNA, 25 bp, Homo sapien
tcgagtcgcaggcaaagctgagcct

SEQ ID NO: 614597 - DNA, 25 bp, Homo sapien
tagaatgtaacaatacgagcccgct

SEQ ID NO: 614598 - DNA, 25 bp, Homo sapien
taatgcccacagagtacaaggccag

SEQ ID NO: 614599 - DNA, 25 bp, Homo sapien
ggaagcccggccctatcttgatgaa

SEQ ID NO: 614600 - DNA, 25 bp, Homo sapien
gagtttatagaactaccctgggctg

SEQ ID NO: 614601 - DNA, 25 bp, Homo sapien
aatgctaggaccagaggttcacagg

SEQ ID NO: 614602 - DNA, 25 bp, Homo sapien
cctaggagccatgtttcagcgttca

SEQ ID NO: 614603 - DNA, 25 bp, Homo sapien
tcagcgttcaattagtcagtgtttg

SEQ ID NO: 614604 - DNA, 25 bp, Homo sapien
tcccaaagcgattgagtgacgtgtc

SEQ ID NO: 614605 - DNA, 25 bp, Homo sapien
tgtcggaggtatcccagcaagtctg

SEQ ID NO: 614606 - DNA, 25 bp, Homo sapien
aaccgtgagggtgagcaagtcagac

SEQ ID NO: 614607 - DNA, 25 bp, Homo sapien
gaacatattcctaggtgtccagaga

SEQ ID NO: 614608 - DNA, 25 bp, Homo sapien
gctggacacggagcggccggtgaat

SEQ ID NO: 614609 - DNA, 25 bp, Homo sapien
ctgcggatatggacgggaaatccat

SEQ ID NO: 614610 - DNA, 25 bp, Homo sapien
tgaatcggtgaggacggagcagggc

SEQ ID NO: 614611 - DNA, 25 bp, Homo sapien
gatatggacgggaaatccatcctca

SEQ ID NO: 614612 - DNA, 25 bp, Homo sapien
ggaattcaccaacatgctccagcgg

SEQ ID NO: 614613 - DNA, 25 bp, Homo sapien
ggataagcccctgacatgccaatgt

SEQ ID NO: 614614 - DNA, 25 bp, Homo sapien
tactggttcccgatgaaggctctga

SEQ ID NO: 614615 - DNA, 25 bp, Homo sapien
gagtgagtgacagacccagtgtacc

SEQ ID NO: 614616 - DNA, 25 bp, Homo sapien
tatctgagacgctgctgaagtcccg

SEQ ID NO: 614617 - DNA, 25 bp, Homo sapien
gccccggacgattgtgatatctgag

SEQ ID NO: 614618 - DNA, 25 bp, Homo sapien
tacatagcaacggtgtccacagctg

SEQ ID NO: 614619 - DNA, 25 bp, Homo sapien
cccagcggcagcgtcacaatttctg

SEQ ID NO: 614620 - DNA, 25 bp, Homo sapien
tgtttgttgaacaggcagctgggcc

SEQ ID NO: 614621 - DNA, 25 bp, Homo sapien
cacgcccttttgtgaacgcaccaga

SEQ ID NO: 614622 - DNA, 25 bp, Homo sapien
agatattcctcggatgctggaggag

SEQ ID NO: 614623 - DNA, 25 bp, Homo sapien
caaagggcgctgattgtggcttcaa

SEQ ID NO: 614624 - DNA, 25 bp, Homo sapien
tgtgcacaggacactatggcaagag

SEQ ID NO: 614625 - DNA, 25 bp, Homo sapien
agagaacagggcatggctgaagccc

SEQ ID NO: 614626 - DNA, 25 bp, Homo sapien
tggcattgcggagctagcagagatc

SEQ ID NO: 614627 - DNA, 25 bp, Homo sapien
gacatggagaaatctgcccagccac

SEQ ID NO: 614628 - DNA, 25 bp, Homo sapien
cctgtgataagacgccaccctgagt

SEQ ID NO: 614629 - DNA, 25 bp, Homo sapien
aagaattagactccgccttaagcgc

SEQ ID NO: 614630 - DNA, 25 bp, Homo sapien
cctgcgccgtaagaggaagtggcca

SEQ ID NO: 614631 - DNA, 25 bp, Homo sapien
gagtgatacgtgacctgtgcccaca

SEQ ID NO: 614632 - DNA, 25 bp, Homo sapien
gatattctgctggaggacatccgca

SEQ ID NO: 614633 - DNA, 25 bp, Homo sapien
tacagagaccgtgtggctggaacca

SEQ ID NO: 614634 - DNA, 25 bp, Homo sapien
tgaagataacctgaatgaaggctcc

SEQ ID NO: 614635 - DNA, 25 bp, Homo sapien
cagagatttcggttttaacctgcca

SEQ ID NO: 614636 - DNA, 25 bp, Homo sapien
aggggagcgcgcctgggccggccat

SEQ ID NO: 614637 - DNA, 25 bp, Homo sapien
ggtaggggagcgcgcctgggccggc

SEQ ID NO: 614638 - DNA, 25 bp, Homo sapien
ggggagcgcgcctgggccggccatc

SEQ ID NO: 614639 - DNA, 25 bp, Homo sapien
cgggtaggggagcgcgcctgggccg

SEQ ID NO: 614640 - DNA, 25 bp, Homo sapien
aaggcagtcgagtgtttgcagaccg

SEQ ID NO: 614641 - DNA, 25 bp, Homo sapien
tttgccctgcgattgagctgcgggt

SEQ ID NO: 614642 - DNA, 25 bp, Homo sapien
ggcgccggcctctccaatggcaaat

SEQ ID NO: 614643 - DNA, 25 bp, Homo sapien
cgaggctttcggcaaaggcagtcga

SEQ ID NO: 614644 - DNA, 25 bp, Homo sapien
tctcggggagttctcgggcgcgcac

SEQ ID NO: 614645 - DNA, 25 bp, Homo sapien
atttctcggggagttctcgggcgcg

SEQ ID NO: 614646 - DNA, 25 bp, Homo sapien
ttctcggggagttctcgggcgcgca

SEQ ID NO: 614647 - DNA, 25 bp, Homo sapien
tgagccgaagttaatttctcgggga

SEQ ID NO: 614648 - DNA, 25 bp, Homo sapien
gagctaaggcttcttggcttcacag

SEQ ID NO: 614649 - DNA, 25 bp, Homo sapien
ggacagcggaaaccacggtagacag

SEQ ID NO: 614650 - DNA, 25 bp, Homo sapien
taagtctgacaactctaccatggag

SEQ ID NO: 614651 - DNA, 25 bp, Homo sapien
tgtttccccttagctagcaactcgg

SEQ ID NO: 614652 - DNA, 25 bp, Homo sapien
gggaatccgcagagtcagacctttg

SEQ ID NO: 614653 - DNA, 25 bp, Homo sapien
agtcagacctttgccagcggattca

SEQ ID NO: 614654 - DNA, 25 bp, Homo sapien
tggagtgggagggaatccgcagagt

SEQ ID NO: 614655 - DNA, 25 bp, Homo sapien
agacctttgccagcggattcactct

SEQ ID NO: 614656 - DNA, 25 bp, Homo sapien
gcgattccatcaagtcctggcagag

SEQ ID NO: 614657 - DNA, 25 bp, Homo sapien
cccaagagccatcgcagggtgagga

SEQ ID NO: 614658 - DNA, 25 bp, Homo sapien
caaattgatgagtcacccaagagcc

SEQ ID NO: 614659 - DNA, 25 bp, Homo sapien
cagacgaccggatataagcacaaat

SEQ ID NO: 614660 - DNA, 25 bp, Homo sapien
tctggctcctgtcgtgaaacgtgga

SEQ ID NO: 614661 - DNA, 25 bp, Homo sapien
gttgccttcaaaacatccaggtgga

SEQ ID NO: 614662 - DNA, 25 bp, Homo sapien
gcttggcccttataactagatgaga

SEQ ID NO: 614663 - DNA, 25 bp, Homo sapien
tcttgtctcggaatctgcacctggg

SEQ ID NO: 614664 - DNA, 25 bp, Homo sapien
tccttgagacaatggactggctttc

SEQ ID NO: 614665 - DNA, 25 bp, Homo sapien
tgcaggtaggtacatacgacggcct

SEQ ID NO: 614666 - DNA, 25 bp, Homo sapien
tatggcaagaagatctgagtcaccc

SEQ ID NO: 614667 - DNA, 25 bp, Homo sapien
aagattattagcaccaaactgggac

SEQ ID NO: 614668 - DNA, 25 bp, Homo sapien
gggctcttctgagacagcaccaggc

SEQ ID NO: 614669 - DNA, 25 bp, Homo sapien
ggaagctgcggtccactctgctctt

SEQ ID NO: 614670 - DNA, 25 bp, Homo sapien
tcagcacagaccatgggctcttctg

SEQ ID NO: 614671 - DNA, 25 bp, Homo sapien
ctggttggccggagtcacccgaggg

SEQ ID NO: 614672 - DNA, 25 bp, Homo sapien
gagcgaattgctcacccctgtgtgc

SEQ ID NO: 614673 - DNA, 25 bp, Homo sapien
cacacagggcagttgcgagaattca

SEQ ID NO: 614674 - DNA, 25 bp, Homo sapien
tgattacagagtgggtcccgagcca

SEQ ID NO: 614675 - DNA, 25 bp, Homo sapien
taattgacccgtggcttttacgagc

SEQ ID NO: 614676 - DNA, 25 bp, Homo sapien
cttcacagcctgcatgtacttaagc

SEQ ID NO: 614677 - DNA, 25 bp, Homo sapien
ttcacagcctgcatgtacttaagca

SEQ ID NO: 614678 - DNA, 25 bp, Homo sapien
tcacagcctgcatgtacttaagcat

SEQ ID NO: 614679 - DNA, 25 bp, Homo sapien
cacagcctgcatgtacttaagcatc

SEQ ID NO: 614680 - DNA, 25 bp, Homo sapien
ctgacagggcaccttcatcacatgg

SEQ ID NO: 614681 - DNA, 25 bp, Homo sapien
ctcacaggaggacagcactagggtc

SEQ ID NO: 614682 - DNA, 25 bp, Homo sapien
ctgacgccctcatgccccagatttc

SEQ ID NO: 614683 - DNA, 25 bp, Homo sapien
tccagcccggcagcacccttgactg

SEQ ID NO: 614684 - DNA, 25 bp, Homo sapien
ccggcagcacccttgactgtggctg

SEQ ID NO: 614685 - DNA, 25 bp, Homo sapien
tgacgccctcatgccccagatttcc

SEQ ID NO: 614686 - DNA, 25 bp, Homo sapien
ttcacaggggacatcaccgctgact

SEQ ID NO: 614687 - DNA, 25 bp, Homo sapien
gacatcaccgctgactgtcactgca

SEQ ID NO: 614688 - DNA, 25 bp, Homo sapien
gggacatcaccgctgactgtcactg

SEQ ID NO: 614689 - DNA, 25 bp, Homo sapien
tcaccgctgactgtcactgcattct

SEQ ID NO: 614690 - DNA, 25 bp, Homo sapien
tgcctcactgctccggtgagtgcgg

SEQ ID NO: 614691 - DNA, 25 bp, Homo sapien
actgctccggtgagtgcggcctctg

SEQ ID NO: 614692 - DNA, 25 bp, Homo sapien
tagttctgcctcactgctccggtga

SEQ ID NO: 614693 - DNA, 25 bp, Homo sapien
agttagttctgcctcactgctccgg

SEQ ID NO: 614694 - DNA, 25 bp, Homo sapien
ctgctgtgtccgttgaagtttgagg

SEQ ID NO: 614695 - DNA, 25 bp, Homo sapien
tctgctgtgtccgttgaagtttgag

SEQ ID NO: 614696 - DNA, 25 bp, Homo sapien
atctgctgtgtccgttgaagtttga

SEQ ID NO: 614697 - DNA, 25 bp, Homo sapien
tgctgtgtccgttgaagtttgaggg

SEQ ID NO: 614698 - DNA, 25 bp, Homo sapien
cattgttctctagccgctgcattcc

SEQ ID NO: 614699 - DNA, 25 bp, Homo sapien
gcttcattgttctctagccgctgca

SEQ ID NO: 614700 - DNA, 25 bp, Homo sapien
ggtctgaattggataggagcagaaa

SEQ ID NO: 614701 - DNA, 25 bp, Homo sapien
ggaaggtctgaattggataggagca

SEQ ID NO: 614702 - DNA, 25 bp, Homo sapien
tcatgagtgcccggtgtcaacggga

SEQ ID NO: 614703 - DNA, 25 bp, Homo sapien
ctctaagccaaagcgtccgggcaca

SEQ ID NO: 614704 - DNA, 25 bp, Homo sapien
cggtgtcaacgggagaagcagcact

SEQ ID NO: 614705 - DNA, 25 bp, Homo sapien
gcctctaagccaaagcgtccgggca

SEQ ID NO: 614706 - DNA, 25 bp, Homo sapien
catagtggccaagaccccgtccctg

SEQ ID NO: 614707 - DNA, 25 bp, Homo sapien
atagtggccaagaccccgtccctgg

SEQ ID NO: 614708 - DNA, 25 bp, Homo sapien
gggctgcttttgaacacatggctgt

SEQ ID NO: 614709 - DNA, 25 bp, Homo sapien
atggctgtcccatgggccgcgcctt

SEQ ID NO: 614710 - DNA, 25 bp, Homo sapien
ccggaccacaggctacacgtctggt

SEQ ID NO: 614711 - DNA, 25 bp, Homo sapien
acaaggatgttctggtagtgcgagt

SEQ ID NO: 614712 - DNA, 25 bp, Homo sapien
cacgtctggtggaacgagacttcgg

SEQ ID NO: 614713 - DNA, 25 bp, Homo sapien
cagagaggcaggatggctaccatct

SEQ ID NO: 614714 - DNA, 25 bp, Homo sapien
ttgtgcaagacacccatctctgccc

SEQ ID NO: 614715 - DNA, 25 bp, Homo sapien
cttgtgcaagacacccatctctgcc

SEQ ID NO: 614716 - DNA, 25 bp, Homo sapien
gtgcaagacacccatctctgcccac

SEQ ID NO: 614717 - DNA, 25 bp, Homo sapien
tgtgcaagacacccatctctgccca

SEQ ID NO: 614718 - DNA, 25 bp, Homo sapien
aactggccatgcctagcaggaactt

SEQ ID NO: 614719 - DNA, 25 bp, Homo sapien
tgtcaatgtcacactggaccacaga

SEQ ID NO: 614720 - DNA, 25 bp, Homo sapien
gaactagagtagcaactggccatgc

SEQ ID NO: 614721 - DNA, 25 bp, Homo sapien
actccatggagaggtgcttccccac

SEQ ID NO: 614722 - DNA, 25 bp, Homo sapien
tgcttcatgaactcaaaactgtcac

SEQ ID NO: 614723 - DNA, 25 bp, Homo sapien
tctgcttcatgaactcaaaactgtc

SEQ ID NO: 614724 - DNA, 25 bp, Homo sapien
ctgagaagtcagtgatacatcaaag

SEQ ID NO: 614725 - DNA, 25 bp, Homo sapien
agtcagtgatacatcaaaggcatcc

SEQ ID NO: 614726 - DNA, 25 bp, Homo sapien
ttctgccgcacagcatgaagccagt

SEQ ID NO: 614727 - DNA, 25 bp, Homo sapien
gaccatgcagtaggtgtagcccacc

SEQ ID NO: 614728 - DNA, 25 bp, Homo sapien
gaactgccacatctccttatgaggt

SEQ ID NO: 614729 - DNA, 25 bp, Homo sapien
agcagagaatgctgtcctccgcgag

SEQ ID NO: 614730 - DNA, 25 bp, Homo sapien
tggttagcactttgcaggcaggccg

SEQ ID NO: 614731 - DNA, 25 bp, Homo sapien
tctgctgtgggaagcgggtgtctga

SEQ ID NO: 614732 - DNA, 25 bp, Homo sapien
ccaacagtgtggttagcactttgca

SEQ ID NO: 614733 - DNA, 25 bp, Homo sapien
aagcgggtgtctgagagcaaggtca

SEQ ID NO: 614734 - DNA, 25 bp, Homo sapien
cacgatggatggactacggctgcat

SEQ ID NO: 614735 - DNA, 25 bp, Homo sapien
cacttgggcatgaagtcacatttgc

SEQ ID NO: 614736 - DNA, 25 bp, Homo sapien
attcacaagaagacacgatggatgg

SEQ ID NO: 614737 - DNA, 25 bp, Homo sapien
ctttctctttcttggcgtatattgg

SEQ ID NO: 614738 - DNA, 25 bp, Homo sapien
atcatggcaggtgcattcagcagcc

SEQ ID NO: 614739 - DNA, 25 bp, Homo sapien
gcatcatggcaggtgcattcagcag

SEQ ID NO: 614740 - DNA, 25 bp, Homo sapien
gcagccactcacactcagatagcat

SEQ ID NO: 614741 - DNA, 25 bp, Homo sapien
cagcatcatggcaggtgcattcagc

SEQ ID NO: 614742 - DNA, 25 bp, Homo sapien
tgcaacagcagacgctgaagttgtt

SEQ ID NO: 614743 - DNA, 25 bp, Homo sapien
tgtgctgtcacgtgatctctcccat

SEQ ID NO: 614744 - DNA, 25 bp, Homo sapien
gagtgtcctgtgctgtcacgtgatc

SEQ ID NO: 614745 - DNA, 25 bp, Homo sapien
caggctggccaaactgcaacagcag

SEQ ID NO: 614746 - DNA, 25 bp, Homo sapien
ttctttgtggccagtgatgtccaag

SEQ ID NO: 614747 - DNA, 25 bp, Homo sapien
ccttctttgtggccagtgatgtcca

SEQ ID NO: 614748 - DNA, 25 bp, Homo sapien
cttctttgtggccagtgatgtccaa

SEQ ID NO: 614749 - DNA, 25 bp, Homo sapien
ggtctccatagggatagagacagca

SEQ ID NO: 614750 - DNA, 25 bp, Homo sapien
tggacactgaccgtagctcgagtgt

SEQ ID NO: 614751 - DNA, 25 bp, Homo sapien
ccagtcatcgtggacactgaccgta

SEQ ID NO: 614752 - DNA, 25 bp, Homo sapien
caggtttctgctgggccagcaattg

SEQ ID NO: 614753 - DNA, 25 bp, Homo sapien
tacttggcgtctctggccatgagcc

SEQ ID NO: 614754 - DNA, 25 bp, Homo sapien
gtcatttctgtaattagagcacaga

SEQ ID NO: 614755 - DNA, 25 bp, Homo sapien
gccgcctggcaatgtggtcctgttt

SEQ ID NO: 614756 - DNA, 25 bp, Homo sapien
tttgtgtgaggacctgtgcccagcg

SEQ ID NO: 614757 - DNA, 25 bp, Homo sapien
ggcagggactcccaatgcacagtac

SEQ ID NO: 614758 - DNA, 25 bp, Homo sapien
ggggcagggactcccaatgcacagt

SEQ ID NO: 614759 - DNA, 25 bp, Homo sapien
gcagggactcccaatgcacagtaca

SEQ ID NO: 614760 - DNA, 25 bp, Homo sapien
agggactcccaatgcacagtacagg

SEQ ID NO: 614761 - DNA, 25 bp, Homo sapien
aagctttcacactcacaaaccggtg

SEQ ID NO: 614762 - DNA, 25 bp, Homo sapien
tcctctaacgagcaggtcacatggg

SEQ ID NO: 614763 - DNA, 25 bp, Homo sapien
gtagtgaacagctgatctccatgaa

SEQ ID NO: 614764 - DNA, 25 bp, Homo sapien
catgaattaacgtgggaggtcctgt

SEQ ID NO: 614765 - DNA, 25 bp, Homo sapien
tgctttgtcctcgatccttgactga

SEQ ID NO: 614766 - DNA, 25 bp, Homo sapien
tatcatgctttttcctagactgcat

SEQ ID NO: 614767 - DNA, 25 bp, Homo sapien
agcttccaggccctacttgagtgat

SEQ ID NO: 614768 - DNA, 25 bp, Homo sapien
ggccctacttgagtgatccctcttc

SEQ ID NO: 614769 - DNA, 25 bp, Homo sapien
tagggacaattccaggagagctgac

SEQ ID NO: 614770 - DNA, 25 bp, Homo sapien
ctcaacgctagtagggacaattcca

SEQ ID NO: 614771 - DNA, 25 bp, Homo sapien
ccacactcaacgctagtagggacaa

SEQ ID NO: 614772 - DNA, 25 bp, Homo sapien
gtaagacagccacactcaacgctag

SEQ ID NO: 614773 - DNA, 25 bp, Homo sapien
gagtcccttatgtgtgctcagacat

SEQ ID NO: 614774 - DNA, 25 bp, Homo sapien
aatccctgatgaatagagtgagtct

SEQ ID NO: 614775 - DNA, 25 bp, Homo sapien
gtatcccattctgcgggcatgcaca

SEQ ID NO: 614776 - DNA, 25 bp, Homo sapien
acagagtcccttatgtgtgctcaga

SEQ ID NO: 614777 - DNA, 25 bp, Homo sapien
ttgccgaccctggacagcgtgctct

SEQ ID NO: 614778 - DNA, 25 bp, Homo sapien
tttgccgcttctcgagtgttcttgc

SEQ ID NO: 614779 - DNA, 25 bp, Homo sapien
ctgttgacatgtgtgagtctgcgta

SEQ ID NO: 614780 - DNA, 25 bp, Homo sapien
tgttcttgcacctaaagcacaccat

SEQ ID NO: 614781 - DNA, 25 bp, Homo sapien
tgaagggggtaaaatactgtgagcc

SEQ ID NO: 614782 - DNA, 25 bp, Homo sapien
ctgaagggggtaaaatactgtgagc

SEQ ID NO: 614783 - DNA, 25 bp, Homo sapien
tttgctaaactacaaccagccacct

SEQ ID NO: 614784 - DNA, 25 bp, Homo sapien
agcgatgtcagtggctgttttgcta

SEQ ID NO: 614785 - DNA, 25 bp, Homo sapien
tgaaggagcagcgatgtcagtggct

SEQ ID NO: 614786 - DNA, 25 bp, Homo sapien
tgttttgctaaactacaaccagcca

SEQ ID NO: 614787 - DNA, 25 bp, Homo sapien
ggctcagtctctccgaagggcctct

SEQ ID NO: 614788 - DNA, 25 bp, Homo sapien
cctcgatggcctggcggctcagtct

SEQ ID NO: 614789 - DNA, 25 bp, Homo sapien
tgggaggtcagactctgctgtcgca

SEQ ID NO: 614790 - DNA, 25 bp, Homo sapien
actctgctgtcgcagctgctccgag

SEQ ID NO: 614791 - DNA, 25 bp, Homo sapien
atctttgtttctgagattttgctca

SEQ ID NO: 614792 - DNA, 25 bp, Homo sapien
tgtttctgagattttgctcaaagaa

SEQ ID NO: 614793 - DNA, 25 bp, Homo sapien
gtgcagaggtcatcacaggcatctt

SEQ ID NO: 614794 - DNA, 25 bp, Homo sapien
gcagaggtcatcacaggcatctttg

SEQ ID NO: 614795 - DNA, 25 bp, Homo sapien
tgcttgcttctgggcgggagaacac

SEQ ID NO: 614796 - DNA, 25 bp, Homo sapien
tggctgaattcactggactgtcagg

SEQ ID NO: 614797 - DNA, 25 bp, Homo sapien
ttctgggcgggagaacacattttgg

SEQ ID NO: 614798 - DNA, 25 bp, Homo sapien
ccatttcctttggctgaattcactg

SEQ ID NO: 614799 - DNA, 25 bp, Homo sapien
tattaatgcactctccgctgagcca

SEQ ID NO: 614800 - DNA, 25 bp, Homo sapien
cagaagtggtcaagcctattaatgc

SEQ ID NO: 614801 - DNA, 25 bp, Homo sapien
gccaccggagtcatcaggtcttctg

SEQ ID NO: 614802 - DNA, 25 bp, Homo sapien
ctgaagatcgagcagaagtggtcaa

SEQ ID NO: 614803 - DNA, 25 bp, Homo sapien
gaccatggcagtgggtggacacgtg

SEQ ID NO: 614804 - DNA, 25 bp, Homo sapien
tcaggtcagctgaatcccacaaagc

SEQ ID NO: 614805 - DNA, 25 bp, Homo sapien
tcgtggcctttgtgggatccgctct

SEQ ID NO: 614806 - DNA, 25 bp, Homo sapien
tgaacgaaggacctaagctgaccgt

SEQ ID NO: 614807 - DNA, 25 bp, Homo sapien
tagagcttcggtgggcagctagcac

SEQ ID NO: 614808 - DNA, 25 bp, Homo sapien
gtgaatctggaataaggcaacttcc

SEQ ID NO: 614809 - DNA, 25 bp, Homo sapien
ctgtgaatctggaataaggcaactt

SEQ ID NO: 614810 - DNA, 25 bp, Homo sapien
ataaggcaacttcccccggagatgc

SEQ ID NO: 614811 - DNA, 25 bp, Homo sapien
ctgggcttctgtggctttgagctga

SEQ ID NO: 614812 - DNA, 25 bp, Homo sapien
taatggcaccgctgaagatggtggc

SEQ ID NO: 614813 - DNA, 25 bp, Homo sapien
aaaatgtggtcttttatgtaagctc

SEQ ID NO: 614814 - DNA, 25 bp, Homo sapien
tgacacagctctagcccagtggagg

SEQ ID NO: 614815 - DNA, 25 bp, Homo sapien
agcaaccacagaaggcctcgaggta

SEQ ID NO: 614816 - DNA, 25 bp, Homo sapien
gcagacagggtcatgtggtttggtc

SEQ ID NO: 614817 - DNA, 25 bp, Homo sapien
cacatgacggttccttggaggaact

SEQ ID NO: 614818 - DNA, 25 bp, Homo sapien
ggtcaccttcattactcaaaagcag

SEQ ID NO: 614819 - DNA, 25 bp, Homo sapien
gatttagagaatttcattggatttg

SEQ ID NO: 614820 - DNA, 25 bp, Homo sapien
cacccaggggttgccgtgatcagca

SEQ ID NO: 614821 - DNA, 25 bp, Homo sapien
acagctggggcttcgcaggccgagg

SEQ ID NO: 614822 - DNA, 25 bp, Homo sapien
cttgtctgcagacggaggacagctg

SEQ ID NO: 614823 - DNA, 25 bp, Homo sapien
gcttcgcaggccgaggcacccaggg

SEQ ID NO: 614824 - DNA, 25 bp, Homo sapien
aaaccctgagagctgttgaacctgg

SEQ ID NO: 614825 - DNA, 25 bp, Homo sapien
cagactgacgtgactctttgcagca

SEQ ID NO: 614826 - DNA, 25 bp, Homo sapien
tattgcagaacacagcccaggaatt

SEQ ID NO: 614827 - DNA, 25 bp, Homo sapien
caggaattcaacaagcagtggcatt

SEQ ID NO: 614828 - DNA, 25 bp, Homo sapien
cttggcaaggatgtccagcggcatc

SEQ ID NO: 614829 - DNA, 25 bp, Homo sapien
ttggcaaggatgtccagcggcatcc

SEQ ID NO: 614830 - DNA, 25 bp, Homo sapien
tggcaaggatgtccagcggcatcca

SEQ ID NO: 614831 - DNA, 25 bp, Homo sapien
ggcaaggatgtccagcggcatccat

SEQ ID NO: 614832 - DNA, 25 bp, Homo sapien
aacggcagggcagctcattaaagtg

SEQ ID NO: 614833 - DNA, 25 bp, Homo sapien
cgttagggaatttgatggtgaagcc

SEQ ID NO: 614834 - DNA, 25 bp, Homo sapien
tcaggcaatggcttgacaatggctc

SEQ ID NO: 614835 - DNA, 25 bp, Homo sapien
gtgactcaacccagaacacagccgt

SEQ ID NO: 614836 - DNA, 25 bp, Homo sapien
atgtaataagaaggcgcccacggca

SEQ ID NO: 614837 - DNA, 25 bp, Homo sapien
gccctatgggtgtgcttgtacagac

SEQ ID NO: 614838 - DNA, 25 bp, Homo sapien
tgtctttccataacgataacaggcg

SEQ ID NO: 614839 - DNA, 25 bp, Homo sapien
gctgaacccagacctacaagatgca

SEQ ID NO: 614840 - DNA, 25 bp, Homo sapien
tgagcactagagctgtgaacagaca

SEQ ID NO: 614841 - DNA, 25 bp, Homo sapien
taaactgggaattgaaagagcaaag

SEQ ID NO: 614842 - DNA, 25 bp, Homo sapien
agagggtgaaactgctctacaggaa

SEQ ID NO: 614843 - DNA, 25 bp, Homo sapien
ccctcagagggtgaacgttctggta

SEQ ID NO: 614844 - DNA, 25 bp, Homo sapien
ccctgggcccgctgatgtgcataat

SEQ ID NO: 614845 - DNA, 25 bp, Homo sapien
gcatggaattgcaggcacagcgtcc

SEQ ID NO: 614846 - DNA, 25 bp, Homo sapien
gctacttgaggatgcgatcgaccaa

SEQ ID NO: 614847 - DNA, 25 bp, Homo sapien
gataatcacgctctggagtggctac

SEQ ID NO: 614848 - DNA, 25 bp, Homo sapien
cctaaggttccaattcaggaggtct

SEQ ID NO: 614849 - DNA, 25 bp, Homo sapien
ggttccaattcaggaggtctcagca

SEQ ID NO: 614850 - DNA, 25 bp, Homo sapien
ttccaattcaggaggtctcagcaga

SEQ ID NO: 614851 - DNA, 25 bp, Homo sapien
tggcgaggcccaccctaaggttcca

SEQ ID NO: 614852 - DNA, 25 bp, Homo sapien
tctttgcatgttaggaaaggctcac

SEQ ID NO: 614853 - DNA, 25 bp, Homo sapien
tctctatgtgggctcagcttcaccc

SEQ ID NO: 614854 - DNA, 25 bp, Homo sapien
tgtatttagacattatccctggatg

SEQ ID NO: 614855 - DNA, 25 bp, Homo sapien
catgtttagccctttaagagccctg

SEQ ID NO: 614856 - DNA, 25 bp, Homo sapien
aaagcagagtggtttgtcgctacac

SEQ ID NO: 614857 - DNA, 25 bp, Homo sapien
gagtcacaagcctgtccagcatgaa

SEQ ID NO: 614858 - DNA, 25 bp, Homo sapien
gaagcctcttcactcaatctggtag

SEQ ID NO: 614859 - DNA, 25 bp, Homo sapien
tggcggcctcaggacagtaggactt

SEQ ID NO: 614860 - DNA, 25 bp, Homo sapien
ctgcttcaatgcggatgaccacaag

SEQ ID NO: 614861 - DNA, 25 bp, Homo sapien
tgcttcaatgcggatgaccacaagg

SEQ ID NO: 614862 - DNA, 25 bp, Homo sapien
gcttcaatgcggatgaccacaagga

SEQ ID NO: 614863 - DNA, 25 bp, Homo sapien
catgctttcatctaaagcagaccag

SEQ ID NO: 614864 - DNA, 25 bp, Homo sapien
gcagaccagccaggttcataagtca

SEQ ID NO: 614865 - DNA, 25 bp, Homo sapien
tcatctggtgaagaattttcctcgc

SEQ ID NO: 614866 - DNA, 25 bp, Homo sapien
cctcgccatttgtgagaaggaccac

SEQ ID NO: 614867 - DNA, 25 bp, Homo sapien
tgctcctcaggtgccaagatctgaa

SEQ ID NO: 614868 - DNA, 25 bp, Homo sapien
gctttggattcctaaccccagctgg

SEQ ID NO: 614869 - DNA, 25 bp, Homo sapien
cacacgagtgtgtggacggatcctg

SEQ ID NO: 614870 - DNA, 25 bp, Homo sapien
gacgcatatgcagtgtcaggctcca

SEQ ID NO: 614871 - DNA, 25 bp, Homo sapien
tggctgctacaaaaagaccttccaa

SEQ ID NO: 614872 - DNA, 25 bp, Homo sapien
aaacacagacccctgggcatgtcgc

SEQ ID NO: 614873 - DNA, 25 bp, Homo sapien
taccttctattgctgagggcaggga

SEQ ID NO: 614874 - DNA, 25 bp, Homo sapien
actgcctccctagattggacctcgg

SEQ ID NO: 614875 - DNA, 25 bp, Homo sapien
cattggacactgttgtgtgaacaca

SEQ ID NO: 614876 - DNA, 25 bp, Homo sapien
cttcattggacactgttgtgtgaac

SEQ ID NO: 614877 - DNA, 25 bp, Homo sapien
gacactgttgtgtgaacacagcaag

SEQ ID NO: 614878 - DNA, 25 bp, Homo sapien
ctgttgtgtgaacacagcaagtggc

SEQ ID NO: 614879 - DNA, 25 bp, Homo sapien
caggtagcacgggccacgtggctgc

SEQ ID NO: 614880 - DNA, 25 bp, Homo sapien
tcaggtagcacgggccacgtggctg

SEQ ID NO: 614881 - DNA, 25 bp, Homo sapien
aggtagcacgggccacgtggctgcg

SEQ ID NO: 614882 - DNA, 25 bp, Homo sapien
tcacgcatctatggtgtgttaagga

SEQ ID NO: 614883 - DNA, 25 bp, Homo sapien
aatgactatttgagtctcagctgga

SEQ ID NO: 614884 - DNA, 25 bp, Homo sapien
aatgtatcacatggagcacccaccc

SEQ ID NO: 614885 - DNA, 25 bp, Homo sapien
gccttagagtcatggaaaacgctcc

SEQ ID NO: 614886 - DNA, 25 bp, Homo sapien
tgggtaaatcttaagccgcacatcc

SEQ ID NO: 614887 - DNA, 25 bp, Homo sapien
tctcagggcggttcttagcatctcc

SEQ ID NO: 614888 - DNA, 25 bp, Homo sapien
tcaacgtcctaattgaggtcagccc

SEQ ID NO: 614889 - DNA, 25 bp, Homo sapien
tgactaagcctggtagaaaagagcc

SEQ ID NO: 614890 - DNA, 25 bp, Homo sapien
ggaggatgctgcccacgagagtcat

SEQ ID NO: 614891 - DNA, 25 bp, Homo sapien
tggctgagtccacatggaggatgct

SEQ ID NO: 614892 - DNA, 25 bp, Homo sapien
gtggacactgcaggatagaggccac

SEQ ID NO: 614893 - DNA, 25 bp, Homo sapien
cactgcaggatagaggccacctgga

SEQ ID NO: 614894 - DNA, 25 bp, Homo sapien
ttacaggagggtctcagatgtggca

SEQ ID NO: 614895 - DNA, 25 bp, Homo sapien
tacaggagggtctcagatgtggcaa

SEQ ID NO: 614896 - DNA, 25 bp, Homo sapien
ggagggtctcagatgtggcaatgtt

SEQ ID NO: 614897 - DNA, 25 bp, Homo sapien
caggagggtctcagatgtggcaatg

SEQ ID NO: 614898 - DNA, 25 bp, Homo sapien
tcttggacatcagcttgcggagggc

SEQ ID NO: 614899 - DNA, 25 bp, Homo sapien
tgtggcgcctcattggtcaaaccgg

SEQ ID NO: 614900 - DNA, 25 bp, Homo sapien
tgcacaagcttagaacagaacctgg

SEQ ID NO: 614901 - DNA, 25 bp, Homo sapien
gaggctagtatttgaccccaggcag

SEQ ID NO: 614902 - DNA, 25 bp, Homo sapien
tatgtaaaggaggacagcctaaggc

SEQ ID NO: 614903 - DNA, 25 bp, Homo sapien
gaagcagagtcagtccctcagatag

SEQ ID NO: 614904 - DNA, 25 bp, Homo sapien
acagaattatctcggctaggactcc

SEQ ID NO: 614905 - DNA, 25 bp, Homo sapien
tcatagctcaaggtgacggctccag

SEQ ID NO: 614906 - DNA, 25 bp, Homo sapien
aagagatgctagatgtgtctgcaga

SEQ ID NO: 614907 - DNA, 25 bp, Homo sapien
tcaagttgaaagagatgctagatgt

SEQ ID NO: 614908 - DNA, 25 bp, Homo sapien
gtcaacagggtcagatctgtttttt

SEQ ID NO: 614909 - DNA, 25 bp, Homo sapien
gaagtcaacagggtcagatctgttt

SEQ ID NO: 614910 - DNA, 25 bp, Homo sapien
caaaggatagtgcagctctctaggg

SEQ ID NO: 614911 - DNA, 25 bp, Homo sapien
caaacaagtgcgtggcttccaacag

SEQ ID NO: 614912 - DNA, 25 bp, Homo sapien
caaacatctctgacaactgggtacc

SEQ ID NO: 614913 - DNA, 25 bp, Homo sapien
ccactggcagggaacataacttgga

SEQ ID NO: 614914 - DNA, 25 bp, Homo sapien
tcacagaactcaaaacgtggatggt

SEQ ID NO: 614915 - DNA, 25 bp, Homo sapien
cataaatcgacacttgtcacagaac

SEQ ID NO: 614916 - DNA, 25 bp, Homo sapien
cacagaactcaaaacgtggatggtt

SEQ ID NO: 614917 - DNA, 25 bp, Homo sapien
caggctaggggctgccataaatcga

SEQ ID NO: 614918 - DNA, 25 bp, Homo sapien
tcagttcccctctgagtcatgggct

SEQ ID NO: 614919 - DNA, 25 bp, Homo sapien
cagttcccctctgagtcatgggcta

SEQ ID NO: 614920 - DNA, 25 bp, Homo sapien
agttcccctctgagtcatgggctac

SEQ ID NO: 614921 - DNA, 25 bp, Homo sapien
tgcacaaaactttaaactgcagttc

SEQ ID NO: 614922 - DNA, 25 bp, Homo sapien
tccttaaacacccctctcttcatta

SEQ ID NO: 614923 - DNA, 25 bp, Homo sapien
tctggctccactcaggacgtgagac

SEQ ID NO: 614924 - DNA, 25 bp, Homo sapien
cactcaggacgtgagaccctggtgg

SEQ ID NO: 614925 - DNA, 25 bp, Homo sapien
gctccactcaggacgtgagaccctg

SEQ ID NO: 614926 - DNA, 25 bp, Homo sapien
cagctacatggtcatttctggctcc

SEQ ID NO: 614927 - DNA, 25 bp, Homo sapien
cagaagcatccacaacggtccgagc

SEQ ID NO: 614928 - DNA, 25 bp, Homo sapien
agaagcatccacaacggtccgagca

SEQ ID NO: 614929 - DNA, 25 bp, Homo sapien
acagaagcatccacaacggtccgag

SEQ ID NO: 614930 - DNA, 25 bp, Homo sapien
gttcagatgacagacgactctgggc

SEQ ID NO: 614931 - DNA, 25 bp, Homo sapien
tgccagccgcagatgacttggaggt

SEQ ID NO: 614932 - DNA, 25 bp, Homo sapien
tgttcgcttctctccgggctcacag

SEQ ID NO: 614933 - DNA, 25 bp, Homo sapien
cacaggccccggatattggattcat

SEQ ID NO: 614934 - DNA, 25 bp, Homo sapien
tcttccttgggccctgtaaaatgga

SEQ ID NO: 614935 - DNA, 25 bp, Homo sapien
ccttgggccctgtaaaatggatgtg

SEQ ID NO: 614936 - DNA, 25 bp, Homo sapien
ttccttgggccctgtaaaatggatg

SEQ ID NO: 614937 - DNA, 25 bp, Homo sapien
cttcttccttgggccctgtaaaatg

SEQ ID NO: 614938 - DNA, 25 bp, Homo sapien
caggattctgtctccgtgttttgac

SEQ ID NO: 614939 - DNA, 25 bp, Homo sapien
acagtggcagacaggctcaccttgc

SEQ ID NO: 614940 - DNA, 25 bp, Homo sapien
tcagcaccaggaggtaatgctgttg

SEQ ID NO: 614941 - DNA, 25 bp, Homo sapien
aatgggtgggcagagcttagactcc

SEQ ID NO: 614942 - DNA, 25 bp, Homo sapien
gccacaaatatgtcgtctccccaaa

SEQ ID NO: 614943 - DNA, 25 bp, Homo sapien
cacaaatatgtcgtctccccaaaac

SEQ ID NO: 614944 - DNA, 25 bp, Homo sapien
ggccacaaatatgtcgtctccccaa

SEQ ID NO: 614945 - DNA, 25 bp, Homo sapien
caaatatgtcgtctccccaaaacac

SEQ ID NO: 614946 - DNA, 25 bp, Homo sapien
gtctctgggagcttgtgaatcagca

SEQ ID NO: 614947 - DNA, 25 bp, Homo sapien
gtcacttcacacagcccggtgatgc

SEQ ID NO: 614948 - DNA, 25 bp, Homo sapien
tcacttcacacagcccggtgatgca

SEQ ID NO: 614949 - DNA, 25 bp, Homo sapien
agtcacttcacacagcccggtgatg

SEQ ID NO: 614950 - DNA, 25 bp, Homo sapien
gagtcacttcacacagcccggtgat

SEQ ID NO: 614951 - DNA, 25 bp, Homo sapien
cctcccaagtctgagagtcattgag

SEQ ID NO: 614952 - DNA, 25 bp, Homo sapien
cagccagtgctatagttgaattttg

SEQ ID NO: 614953 - DNA, 25 bp, Homo sapien
tgttggagttggagtttgagggtca

SEQ ID NO: 614954 - DNA, 25 bp, Homo sapien
tgaattttgagggagctggagaccc

SEQ ID NO: 614955 - DNA, 25 bp, Homo sapien
ctgctgctgttcatgtctgagggtt

SEQ ID NO: 614956 - DNA, 25 bp, Homo sapien
ggaggagccagtgctactgagggtc

SEQ ID NO: 614957 - DNA, 25 bp, Homo sapien
agccagtgctactgagggtcgtgta

SEQ ID NO: 614958 - DNA, 25 bp, Homo sapien
tgctactgagggtcgtgtatctgga

SEQ ID NO: 614959 - DNA, 25 bp, Homo sapien
ctgagggtcgtgtatctggagcttt

SEQ ID NO: 614960 - DNA, 25 bp, Homo sapien
cgagttttcggggacagcccgtgct

SEQ ID NO: 614961 - DNA, 25 bp, Homo sapien
ggggacagcccgtgctgctatgtaa

SEQ ID NO: 614962 - DNA, 25 bp, Homo sapien
tggatctcgagttttcggggacagc

SEQ ID NO: 614963 - DNA, 25 bp, Homo sapien
cggggacagcccgtgctgctatgta

SEQ ID NO: 614964 - DNA, 25 bp, Homo sapien
aaaatcccagaggaacaggtgctcc

SEQ ID NO: 614965 - DNA, 25 bp, Homo sapien
gcaatgttgtcatagttcaagggtc

SEQ ID NO: 614966 - DNA, 25 bp, Homo sapien
tcagggtcgtggaggtgaaaatccc

SEQ ID NO: 614967 - DNA, 25 bp, Homo sapien
tctaatttaaggatcatgaagccgg

SEQ ID NO: 614968 - DNA, 25 bp, Homo sapien
gctcctctgtttttcggaatgcgga

SEQ ID NO: 614969 - DNA, 25 bp, Homo sapien
gaatgcggacacgtgtctgttgtcc

SEQ ID NO: 614970 - DNA, 25 bp, Homo sapien
tttcggaatgcggacacgtgtctgt

SEQ ID NO: 614971 - DNA, 25 bp, Homo sapien
tctgtttttcggaatgcggacacgt

SEQ ID NO: 614972 - DNA, 25 bp, Homo sapien
ggaagaaacatggaacgaccccata

SEQ ID NO: 614973 - DNA, 25 bp, Homo sapien
ggggggcatcgcactgttgccatat

SEQ ID NO: 614974 - DNA, 25 bp, Homo sapien
ccatggggggcatcgcactgttgcc

SEQ ID NO: 614975 - DNA, 25 bp, Homo sapien
gaggatgcggatgtgaagctgaaag

SEQ ID NO: 614976 - DNA, 25 bp, Homo sapien
tagaagactttattgagcagcgagc

SEQ ID NO: 614977 - DNA, 25 bp, Homo sapien
tatctccaacctccgatgctcagtt

SEQ ID NO: 614978 - DNA, 25 bp, Homo sapien
tggaacccagccgtctctggccagg

SEQ ID NO: 614979 - DNA, 25 bp, Homo sapien
tatcctcgacgctcagccatttgcg

SEQ ID NO: 614980 - DNA, 25 bp, Homo sapien
tagctgggcaagtggctggcgatga

SEQ ID NO: 614981 - DNA, 25 bp, Homo sapien
tggtaagtctcagcaggttcctagg

SEQ ID NO: 614982 - DNA, 25 bp, Homo sapien
tggcctctggtaagtctcagcaggt

SEQ ID NO: 614983 - DNA, 25 bp, Homo sapien
ttttgactgccgcaggagcctagct

SEQ ID NO: 614984 - DNA, 25 bp, Homo sapien
gttcgtaagtaagaatgtgcccagt

SEQ ID NO: 614985 - DNA, 25 bp, Homo sapien
gaaagttcgtaagtaagaatgtgcc

SEQ ID NO: 614986 - DNA, 25 bp, Homo sapien
aggaaagttcgtaagtaagaatgtg

SEQ ID NO: 614987 - DNA, 25 bp, Homo sapien
aagttcgtaagtaagaatgtgccca

SEQ ID NO: 614988 - DNA, 25 bp, Homo sapien
gcccttccacttggacacctgcccc

SEQ ID NO: 614989 - DNA, 25 bp, Homo sapien
ctctcagagcccccagagcgccctt

SEQ ID NO: 614990 - DNA, 25 bp, Homo sapien
atgtcacagggccagcgcctctcag

SEQ ID NO: 614991 - DNA, 25 bp, Homo sapien
gggcttgacgctgttacttccaaga

SEQ ID NO: 614992 - DNA, 25 bp, Homo sapien
tttgtagagtagcattgaggcaggc

SEQ ID NO: 614993 - DNA, 25 bp, Homo sapien
agctgtgcgcgctcttgctcgctct

SEQ ID NO: 614994 - DNA, 25 bp, Homo sapien
gaaaagcattttgcccggacttgcc

SEQ ID NO: 614995 - DNA, 25 bp, Homo sapien
agggagagaagattgaagcctgctc

SEQ ID NO: 614996 - DNA, 25 bp, Homo sapien
cctcggtgcaggcatcttgagcagt

SEQ ID NO: 614997 - DNA, 25 bp, Homo sapien
ggcctgatcgactgcccttggagtt

SEQ ID NO: 614998 - DNA, 25 bp, Homo sapien
tcctggtctccgtgggctgaattct

SEQ ID NO: 614999 - DNA, 25 bp, Homo sapien
ccttggagttcctggtctccgtggg

SEQ ID NO: 615000 - DNA, 25 bp, Homo sapien
gccattctttttcggctgagaagtc

SEQ ID NO: 615001 - DNA, 25 bp, Homo sapien
ttgccattctttttcggctgagaag

SEQ ID NO: 615002 - DNA, 25 bp, Homo sapien
tgccattctttttcggctgagaagt

SEQ ID NO: 615003 - DNA, 25 bp, Homo sapien
ccattctttttcggctgagaagtcc

SEQ ID NO: 615004 - DNA, 25 bp, Homo sapien
caagctcctcgctgttagattctgc

SEQ ID NO: 615005 - DNA, 25 bp, Homo sapien
gaagtcagacattgcaccaagctcc

SEQ ID NO: 615006 - DNA, 25 bp, Homo sapien
gctcctcgctgttagattctgcaga

SEQ ID NO: 615007 - DNA, 25 bp, Homo sapien
tcagcagacaccgaagtcagacatt

SEQ ID NO: 615008 - DNA, 25 bp, Homo sapien
acagactcgagtttggaagacccct

SEQ ID NO: 615009 - DNA, 25 bp, Homo sapien
gcctcattgttcactccagtcggta

SEQ ID NO: 615010 - DNA, 25 bp, Homo sapien
gaagacccctgaccaattataggaa

SEQ ID NO: 615011 - DNA, 25 bp, Homo sapien
gctgtcctccatatggtggcctcat

SEQ ID NO: 615012 - DNA, 25 bp, Homo sapien
cacagtgtgggtcggctctgattgg

SEQ ID NO: 615013 - DNA, 25 bp, Homo sapien
gacacagtgtgggtcggctctgatt

SEQ ID NO: 615014 - DNA, 25 bp, Homo sapien
gtgtgggtcggctctgattggaggg

SEQ ID NO: 615015 - DNA, 25 bp, Homo sapien
cagtgtgggtcggctctgattggag

SEQ ID NO: 615016 - DNA, 25 bp, Homo sapien
tggtgcacgtgttcagtaggcagta

SEQ ID NO: 615017 - DNA, 25 bp, Homo sapien
ccccacggcggtgatggtgcacgtg

SEQ ID NO: 615018 - DNA, 25 bp, Homo sapien
acggcggtgatggtgcacgtgttca

SEQ ID NO: 615019 - DNA, 25 bp, Homo sapien
tgatggtgcacgtgttcagtaggca

SEQ ID NO: 615020 - DNA, 25 bp, Homo sapien
gactggtttgtcaactcccacactg

SEQ ID NO: 615021 - DNA, 25 bp, Homo sapien
actgcccgatctgaggacaaactgg

SEQ ID NO: 615022 - DNA, 25 bp, Homo sapien
tatgtcctcggtgcaatgatcacaa

SEQ ID NO: 615023 - DNA, 25 bp, Homo sapien
gggcagacttctgcgtcatctgagt

SEQ ID NO: 615024 - DNA, 25 bp, Homo sapien
ggaagacaagaatcacctaagagca

SEQ ID NO: 615025 - DNA, 25 bp, Homo sapien
gggaccttgcctgtcacgtctaatg

SEQ ID NO: 615026 - DNA, 25 bp, Homo sapien
gcgagtggcgattgggcttccccac

SEQ ID NO: 615027 - DNA, 25 bp, Homo sapien
tttgttttctccgtagcactgagca

SEQ ID NO: 615028 - DNA, 25 bp, Homo sapien
ctctgcgtgaccagccctgaaagcc

SEQ ID NO: 615029 - DNA, 25 bp, Homo sapien
tcagaatccaccctctgcgtgacca

SEQ ID NO: 615030 - DNA, 25 bp, Homo sapien
tgcccgtcagaatccaccctctgcg

SEQ ID NO: 615031 - DNA, 25 bp, Homo sapien
gcagccctgcccgtcagaatccacc

SEQ ID NO: 615032 - DNA, 25 bp, Homo sapien
gaaaaggatcccctcgaagtgagtc

SEQ ID NO: 615033 - DNA, 25 bp, Homo sapien
gacaaatcccaccaatgaagccgtg

SEQ ID NO: 615034 - DNA, 25 bp, Homo sapien
cactcaaagggaggacaccaggttt

SEQ ID NO: 615035 - DNA, 25 bp, Homo sapien
tgggaaaaatggtgccgcctggcat

SEQ ID NO: 615036 - DNA, 25 bp, Homo sapien
tatctcgtgggaaatgtcatggcct

SEQ ID NO: 615037 - DNA, 25 bp, Homo sapien
taatccatataccaaagtgacgtca

SEQ ID NO: 615038 - DNA, 25 bp, Homo sapien
ttaagtgtgtttgtgcagatgcacc

SEQ ID NO: 615039 - DNA, 25 bp, Homo sapien
tctcttcctggtacaaagggagtgt

SEQ ID NO: 615040 - DNA, 25 bp, Homo sapien
gccaggttgggggtcagaaggcttc

SEQ ID NO: 615041 - DNA, 25 bp, Homo sapien
tgtctctgcgtagcctctgccaggt

SEQ ID NO: 615042 - DNA, 25 bp, Homo sapien
ctctgccaggttgggggtcagaagg

SEQ ID NO: 615043 - DNA, 25 bp, Homo sapien
ctgccaggttgggggtcagaaggct

SEQ ID NO: 615044 - DNA, 25 bp, Homo sapien
ttcccctgcacccaggagtggacgt

SEQ ID NO: 615045 - DNA, 25 bp, Homo sapien
cctgcttcccctgcacccaggagtg

SEQ ID NO: 615046 - DNA, 25 bp, Homo sapien
cccctgcacccaggagtggacgtac

SEQ ID NO: 615047 - DNA, 25 bp, Homo sapien
tgcttcccctgcacccaggagtgga

SEQ ID NO: 615048 - DNA, 25 bp, Homo sapien
cacatgaaaataccccacagctcct

SEQ ID NO: 615049 - DNA, 25 bp, Homo sapien
ctcttggatccaacagccaaccagg

SEQ ID NO: 615050 - DNA, 25 bp, Homo sapien
ccaggcaggggctgcgaacgcacat

SEQ ID NO: 615051 - DNA, 25 bp, Homo sapien
accttgtggggtgggcactctctgc

SEQ ID NO: 615052 - DNA, 25 bp, Homo sapien
gtgacagtgagaactaacatggtca

SEQ ID NO: 615053 - DNA, 25 bp, Homo sapien
ctgagacactcgtcttgcagcctgg

SEQ ID NO: 615054 - DNA, 25 bp, Homo sapien
ggtcattgggtcacatccctctgag

SEQ ID NO: 615055 - DNA, 25 bp, Homo sapien
cagcctggatcgtgggcatcctgga

SEQ ID NO: 615056 - DNA, 25 bp, Homo sapien
tggccccgcgccagggcaccgctgt

SEQ ID NO: 615057 - DNA, 25 bp, Homo sapien
cgggaatgagcgaggtgcccgaggg

SEQ ID NO: 615058 - DNA, 25 bp, Homo sapien
agcgaggtgcccgagggtggccccg

SEQ ID NO: 615059 - DNA, 25 bp, Homo sapien
cattaggaggaaatgcgctggggcc

SEQ ID NO: 615060 - DNA, 25 bp, Homo sapien
acaaggagcacggaactccctgatg

SEQ ID NO: 615061 - DNA, 25 bp, Homo sapien
ctagacaaggagcacggaactccct

SEQ ID NO: 615062 - DNA, 25 bp, Homo sapien
agacaaggagcacggaactccctga

SEQ ID NO: 615063 - DNA, 25 bp, Homo sapien
aaggagcacggaactccctgatgac

SEQ ID NO: 615064 - DNA, 25 bp, Homo sapien
ttgtccatagagatctatagctgtg

SEQ ID NO: 615065 - DNA, 25 bp, Homo sapien
tccatagagatctatagctgtgctt

SEQ ID NO: 615066 - DNA, 25 bp, Homo sapien
catagagatctatagctgtgcttcc

SEQ ID NO: 615067 - DNA, 25 bp, Homo sapien
gtgcttcctggaggcaccttagtca

SEQ ID NO: 615068 - DNA, 25 bp, Homo sapien
caacgaggttatggatgggcacatc

SEQ ID NO: 615069 - DNA, 25 bp, Homo sapien
tcatgtgagcaacgaggttatggat

SEQ ID NO: 615070 - DNA, 25 bp, Homo sapien
gatgggcacatccttagagtacttt

SEQ ID NO: 615071 - DNA, 25 bp, Homo sapien
tcactcggtcttcatgtgagcaacg

SEQ ID NO: 615072 - DNA, 25 bp, Homo sapien
cagctttaagtggaaattggagtga

SEQ ID NO: 615073 - DNA, 25 bp, Homo sapien
tgagagttctttattgcagcagcgg

SEQ ID NO: 615074 - DNA, 25 bp, Homo sapien
gggcaactgatccacaataacatgt

SEQ ID NO: 615075 - DNA, 25 bp, Homo sapien
cactgaagcgcagcctcttgtttcc

SEQ ID NO: 615076 - DNA, 25 bp, Homo sapien
tcctcgtctaaacaggtggtgggca

SEQ ID NO: 615077 - DNA, 25 bp, Homo sapien
taaattaggcagacgtggtagcgca

SEQ ID NO: 615078 - DNA, 25 bp, Homo sapien
gcttaaatagctagagtggaccctc

SEQ ID NO: 615079 - DNA, 25 bp, Homo sapien
tgctctggtccctgaaacccatggg

SEQ ID NO: 615080 - DNA, 25 bp, Homo sapien
cagggtggcaccagtgactgccact

SEQ ID NO: 615081 - DNA, 25 bp, Homo sapien
ctccctgctggtccccatcagggtg

SEQ ID NO: 615082 - DNA, 25 bp, Homo sapien
ctgctggtccccatcagggtggcac

SEQ ID NO: 615083 - DNA, 25 bp, Homo sapien
gactgccactgtcccagtcctcaga

SEQ ID NO: 615084 - DNA, 25 bp, Homo sapien
ttaaccttgaagcaccgatctccac

SEQ ID NO: 615085 - DNA, 25 bp, Homo sapien
ggtagacggcctggagtttgcacac

SEQ ID NO: 615086 - DNA, 25 bp, Homo sapien
tcacagtgcagggtagacggcctgg

SEQ ID NO: 615087 - DNA, 25 bp, Homo sapien
cttgctctgttaaccttgaagcacc

SEQ ID NO: 615088 - DNA, 25 bp, Homo sapien
gatccacaaagctgctcggataggg

SEQ ID NO: 615089 - DNA, 25 bp, Homo sapien
gggtctgagttactccggagtctga

SEQ ID NO: 615090 - DNA, 25 bp, Homo sapien
catctcaggcagaggaccacgaggg

SEQ ID NO: 615091 - DNA, 25 bp, Homo sapien
cgggctgcccaggtgacatgcccag

SEQ ID NO: 615092 - DNA, 25 bp, Homo sapien
gtgacgatatcagtcccacgggcca

SEQ ID NO: 615093 - DNA, 25 bp, Homo sapien
gatatcagtcccacgggccacgttt

SEQ ID NO: 615094 - DNA, 25 bp, Homo sapien
ggtgacgatatcagtcccacgggcc

SEQ ID NO: 615095 - DNA, 25 bp, Homo sapien
gacgatatcagtcccacgggccacg

SEQ ID NO: 615096 - DNA, 25 bp, Homo sapien
ttgctcaggtggattctatgcaaag

SEQ ID NO: 615097 - DNA, 25 bp, Homo sapien
aagcaagttacatgaccaagctcaa

SEQ ID NO: 615098 - DNA, 25 bp, Homo sapien
tctcacatggctcaaagcaagttac

SEQ ID NO: 615099 - DNA, 25 bp, Homo sapien
tgtgcaatttgtgtcggatgtacaa

SEQ ID NO: 615100 - DNA, 25 bp, Homo sapien
tgtctccaaggccacggccgtggca

SEQ ID NO: 615101 - DNA, 25 bp, Homo sapien
aagccacggggcatcaaccgtcggg

SEQ ID NO: 615102 - DNA, 25 bp, Homo sapien
atcattgccctcgtgtccacctggt

SEQ ID NO: 615103 - DNA, 25 bp, Homo sapien
cagggcggagcgagtatgggcggag

SEQ ID NO: 615104 - DNA, 25 bp, Homo sapien
ccttcaagcacatcaccaagatcag

SEQ ID NO: 615105 - DNA, 25 bp, Homo sapien
actccattttgttgggtcatcacca

SEQ ID NO: 615106 - DNA, 25 bp, Homo sapien
caccatggcaactacagggaccagg

SEQ ID NO: 615107 - DNA, 25 bp, Homo sapien
agttctccctgttgactccattttg

SEQ ID NO: 615108 - DNA, 25 bp, Homo sapien
gaagcagagcaaatgcttcaatatg

SEQ ID NO: 615109 - DNA, 25 bp, Homo sapien
tgtttgcctcactgtttaggcttga

SEQ ID NO: 615110 - DNA, 25 bp, Homo sapien
cccgtggtctatggaggaagctcct

SEQ ID NO: 615111 - DNA, 25 bp, Homo sapien
cacttccagggaggatgcttggctt

SEQ ID NO: 615112 - DNA, 25 bp, Homo sapien
ctggagggaaaaattgcccaggttg

SEQ ID NO: 615113 - DNA, 25 bp, Homo sapien
ctgttggcaagtgtacctggaggga

SEQ ID NO: 615114 - DNA, 25 bp, Homo sapien
caagtgtacctggagggaaaaattg

SEQ ID NO: 615115 - DNA, 25 bp, Homo sapien
gacaaccaaaactgtgtccagctgt

SEQ ID NO: 615116 - DNA, 25 bp, Homo sapien
tctggcctttgccttgaggtttcca

SEQ ID NO: 615117 - DNA, 25 bp, Homo sapien
taatttggtttactctctagctcta

SEQ ID NO: 615118 - DNA, 25 bp, Homo sapien
ctggcctttgccttgaggtttccag

SEQ ID NO: 615119 - DNA, 25 bp, Homo sapien
tagccattgaacctgcaactgcatg

SEQ ID NO: 615120 - DNA, 25 bp, Homo sapien
ctgttctaaaggacgatagaggtga

SEQ ID NO: 615121 - DNA, 25 bp, Homo sapien
caactgcatgatgtgcgggaggtgg

SEQ ID NO: 615122 - DNA, 25 bp, Homo sapien
gagtctggaggacaagcagtagcca

SEQ ID NO: 615123 - DNA, 25 bp, Homo sapien
ctcccttctttgttgggatgcccca

SEQ ID NO: 615124 - DNA, 25 bp, Homo sapien
actttgggtggcctgctgaactcct

SEQ ID NO: 615125 - DNA, 25 bp, Homo sapien
tctcctttcggtcttggtggcgcca

SEQ ID NO: 615126 - DNA, 25 bp, Homo sapien
tgtaactgttttaccatctgggaca

SEQ ID NO: 615127 - DNA, 25 bp, Homo sapien
cgtcttccaggtaaaggcgtctgaa

SEQ ID NO: 615128 - DNA, 25 bp, Homo sapien
tgcttgaccaagcatgaaggttgct

SEQ ID NO: 615129 - DNA, 25 bp, Homo sapien
cctgccctgggtttgacttaagcaa

SEQ ID NO: 615130 - DNA, 25 bp, Homo sapien
cattcacgggttgactgctcctctc

SEQ ID NO: 615131 - DNA, 25 bp, Homo sapien
tgtgtcctctttggattacgctgac

SEQ ID NO: 615132 - DNA, 25 bp, Homo sapien
cctcctgatgactgttcctgttggg

SEQ ID NO: 615133 - DNA, 25 bp, Homo sapien
ggagctgctgacctctgacggcttc

SEQ ID NO: 615134 - DNA, 25 bp, Homo sapien
tttcctggtgacaagaaaatagcag

SEQ ID NO: 615135 - DNA, 25 bp, Homo sapien
gaaccttggttcagcagacctggac

SEQ ID NO: 615136 - DNA, 25 bp, Homo sapien
ttctcctgccttccgtcatgaaaga

SEQ ID NO: 615137 - DNA, 25 bp, Homo sapien
tcagatgggatgaaccccagtagac

SEQ ID NO: 615138 - DNA, 25 bp, Homo sapien
aataggcctctgattgtcactggct

SEQ ID NO: 615139 - DNA, 25 bp, Homo sapien
gaaaggggtgccatgtgctagcaca

SEQ ID NO: 615140 - DNA, 25 bp, Homo sapien
tgtgttacttgctttgaacaatggg

SEQ ID NO: 615141 - DNA, 25 bp, Homo sapien
ttgatattgggtttggttgtgttac

SEQ ID NO: 615142 - DNA, 25 bp, Homo sapien
ttgctttgaacaatgggatgttagc

SEQ ID NO: 615143 - DNA, 25 bp, Homo sapien
tccttggaaatatgctcaggttggg

SEQ ID NO: 615144 - DNA, 25 bp, Homo sapien
gtatggaaactaagctgggagagca

SEQ ID NO: 615145 - DNA, 25 bp, Homo sapien
agtttgtgcacctagaggtggagtc

SEQ ID NO: 615146 - DNA, 25 bp, Homo sapien
cgatgcgacgtcattgcccctgtgt

SEQ ID NO: 615147 - DNA, 25 bp, Homo sapien
caggaggctcgtgaaacccagatga

SEQ ID NO: 615148 - DNA, 25 bp, Homo sapien
ggaattatgcacatcagcgggccca

SEQ ID NO: 615149 - DNA, 25 bp, Homo sapien
tctctagaagaatggacaacagcct

SEQ ID NO: 615150 - DNA, 25 bp, Homo sapien
tcaagtagccactccagagcgtgat

SEQ ID NO: 615151 - DNA, 25 bp, Homo sapien
tgggctctgtcattgacggaggctt

SEQ ID NO: 615152 - DNA, 25 bp, Homo sapien
cttgggctctgtcattgacggaggc

SEQ ID NO: 615153 - DNA, 25 bp, Homo sapien
ttgggctctgtcattgacggaggct

SEQ ID NO: 615154 - DNA, 25 bp, Homo sapien
gggctctgtcattgacggaggcttt

SEQ ID NO: 615155 - DNA, 25 bp, Homo sapien
cggggctgatcctcgacctgcccat

SEQ ID NO: 615156 - DNA, 25 bp, Homo sapien
tgacagcctcgccatcgggggattg

SEQ ID NO: 615157 - DNA, 25 bp, Homo sapien
ttttctcccacatgacagcctcgcc

SEQ ID NO: 615158 - DNA, 25 bp, Homo sapien
ggcgagctagttgggcggctcccgg

SEQ ID NO: 615159 - DNA, 25 bp, Homo sapien
gtcagtgtcggtcaaggctgagtcc

SEQ ID NO: 615160 - DNA, 25 bp, Homo sapien
aggagacgaacaaagcggccgctgt

SEQ ID NO: 615161 - DNA, 25 bp, Homo sapien
gaacagagtcagtgtcggtcaaggc

SEQ ID NO: 615162 - DNA, 25 bp, Homo sapien
caggagctcgggtccgccgggcggc

SEQ ID NO: 615163 - DNA, 25 bp, Homo sapien
cagctgatcccgcagggagctttgg

SEQ ID NO: 615164 - DNA, 25 bp, Homo sapien
gattcccagacccagctgatcccgc

SEQ ID NO: 615165 - DNA, 25 bp, Homo sapien
cagacccagctgatcccgcagggag

SEQ ID NO: 615166 - DNA, 25 bp, Homo sapien
caaacaccggcctcatccgaaaagt

SEQ ID NO: 615167 - DNA, 25 bp, Homo sapien
gctggacttgcccaatggggaactt

SEQ ID NO: 615168 - DNA, 25 bp, Homo sapien
tggacttgcccaatggggaactttc

SEQ ID NO: 615169 - DNA, 25 bp, Homo sapien
tgctggacttgcccaatggggaact

SEQ ID NO: 615170 - DNA, 25 bp, Homo sapien
ggacttgcccaatggggaactttca

SEQ ID NO: 615171 - DNA, 25 bp, Homo sapien
gagtggtcacccacgtgctcgtggc

SEQ ID NO: 615172 - DNA, 25 bp, Homo sapien
tgaggtgggataatccgcggagtgg

SEQ ID NO: 615173 - DNA, 25 bp, Homo sapien
ggataatccgcggagtggtcaccca

SEQ ID NO: 615174 - DNA, 25 bp, Homo sapien
taatccgcggagtggtcacccacgt

SEQ ID NO: 615175 - DNA, 25 bp, Homo sapien
aactcagggcggtccccgagcagct

SEQ ID NO: 615176 - DNA, 25 bp, Homo sapien
gaaactcagggcggtccccgagcag

SEQ ID NO: 615177 - DNA, 25 bp, Homo sapien
tctcagaaactcagggcggtccccg

SEQ ID NO: 615178 - DNA, 25 bp, Homo sapien
caggactctcagaaactcagggcgg

SEQ ID NO: 615179 - DNA, 25 bp, Homo sapien
gagtcgaagccttcgagactcccca

SEQ ID NO: 615180 - DNA, 25 bp, Homo sapien
tcgaagccttcgagactccccagtg

SEQ ID NO: 615181 - DNA, 25 bp, Homo sapien
gctcagcccgagtcgaagccttcga

SEQ ID NO: 615182 - DNA, 25 bp, Homo sapien
tcagcccgagtcgaagccttcgaga

SEQ ID NO: 615183 - DNA, 25 bp, Homo sapien
gcaaaagagaaacagtcataatctt

SEQ ID NO: 615184 - DNA, 25 bp, Homo sapien
agcaaaagagaaacagtcataatct

SEQ ID NO: 615185 - DNA, 25 bp, Homo sapien
caaaagagaaacagtcataatcttc

SEQ ID NO: 615186 - DNA, 25 bp, Homo sapien
aaagagaaacagtcataatcttctt

SEQ ID NO: 615187 - DNA, 25 bp, Homo sapien
cggaataaggttcgtgaattctgga

SEQ ID NO: 615188 - DNA, 25 bp, Homo sapien
aattctggatttagctttgaatgct

SEQ ID NO: 615189 - DNA, 25 bp, Homo sapien
tcagatggttggtgcggaataaggt

SEQ ID NO: 615190 - DNA, 25 bp, Homo sapien
cagccaacctggaatttgtctgaat

SEQ ID NO: 615191 - DNA, 25 bp, Homo sapien
ttctgggctttgaccattgtgggat

SEQ ID NO: 615192 - DNA, 25 bp, Homo sapien
cttctgggctttgaccattgtggga

SEQ ID NO: 615193 - DNA, 25 bp, Homo sapien
catcaaggtttataagatccagctt

SEQ ID NO: 615194 - DNA, 25 bp, Homo sapien
tcaaggtttataagatccagcttct

SEQ ID NO: 615195 - DNA, 25 bp, Homo sapien
cataggattcagtgatgtccaaggc

SEQ ID NO: 615196 - DNA, 25 bp, Homo sapien
caggcattgtgctccgtgcatagga

SEQ ID NO: 615197 - DNA, 25 bp, Homo sapien
caaagtaaggttgtctacagctgat

SEQ ID NO: 615198 - DNA, 25 bp, Homo sapien
taaggaatgtgtgcttggctctgga

SEQ ID NO: 615199 - DNA, 25 bp, Homo sapien
tctccagctaagaggacagctgtca

SEQ ID NO: 615200 - DNA, 25 bp, Homo sapien
tcatctccagctaagaggacagctg

SEQ ID NO: 615201 - DNA, 25 bp, Homo sapien
ttctcatctccagctaagaggacag

SEQ ID NO: 615202 - DNA, 25 bp, Homo sapien
tccagctaagaggacagctgtcagg

SEQ ID NO: 615203 - DNA, 25 bp, Homo sapien
tgtcctgggcgatgacaataagttg

SEQ ID NO: 615204 - DNA, 25 bp, Homo sapien
ggccgtccttgtcctgggcgatgac

SEQ ID NO: 615205 - DNA, 25 bp, Homo sapien
gccgtccttgtcctgggcgatgaca

SEQ ID NO: 615206 - DNA, 25 bp, Homo sapien
ttgtcctgggcgatgacaataagtt

SEQ ID NO: 615207 - DNA, 25 bp, Homo sapien
tttgacatcttggtcgaatcacggg

SEQ ID NO: 615208 - DNA, 25 bp, Homo sapien
tcgaatcacgggctattgtgctgct

SEQ ID NO: 615209 - DNA, 25 bp, Homo sapien
gctgctgttgtggaatccttgtgta

SEQ ID NO: 615210 - DNA, 25 bp, Homo sapien
cctctacatgctgattttgacatct

SEQ ID NO: 615211 - DNA, 25 bp, Homo sapien
tattttggggatgagattgtaaagc

SEQ ID NO: 615212 - DNA, 25 bp, Homo sapien
ctgagggcttaactcctggcatggc

SEQ ID NO: 615213 - DNA, 25 bp, Homo sapien
tgttgaataagacttggccttggcc

SEQ ID NO: 615214 - DNA, 25 bp, Homo sapien
tggctgagggcttaactcctggcat

SEQ ID NO: 615215 - DNA, 25 bp, Homo sapien
cccatggctgagggcttaactcctg

SEQ ID NO: 615216 - DNA, 25 bp, Homo sapien
ttgctatttaatgcatcttgtgtat

SEQ ID NO: 615217 - DNA, 25 bp, Homo sapien
ctatttaatgcatcttgtgtataac

SEQ ID NO: 615218 - DNA, 25 bp, Homo sapien
tttaatgcatcttgtgtataactgt

SEQ ID NO: 615219 - DNA, 25 bp, Homo sapien
gctatttaatgcatcttgtgtataa

SEQ ID NO: 615220 - DNA, 25 bp, Homo sapien
tggaacaccatggatgttcctaatg

SEQ ID NO: 615221 - DNA, 25 bp, Homo sapien
ctggatggaacaccatggatgttcc

SEQ ID NO: 615222 - DNA, 25 bp, Homo sapien
acaccatggatgttcctaatgttcc

SEQ ID NO: 615223 - DNA, 25 bp, Homo sapien
gaacaccatggatgttcctaatgtt

SEQ ID NO: 615224 - DNA, 25 bp, Homo sapien
tcacagagcccagtgatgcagtaga

SEQ ID NO: 615225 - DNA, 25 bp, Homo sapien
ggttttggtgcagaatattgtgtga

SEQ ID NO: 615226 - DNA, 25 bp, Homo sapien
aaggaccctcgcccagctgttcctg

SEQ ID NO: 615227 - DNA, 25 bp, Homo sapien
gagcccagtgatgcagtagatgtca

SEQ ID NO: 615228 - DNA, 25 bp, Homo sapien
ttgtgtagctggagacctgggagga

SEQ ID NO: 615229 - DNA, 25 bp, Homo sapien
gttagggtcgtgaagctgaagacca

SEQ ID NO: 615230 - DNA, 25 bp, Homo sapien
ttggagctgttgaccccggaagagc

SEQ ID NO: 615231 - DNA, 25 bp, Homo sapien
ccggtgctgctgtttgagagtggcg

SEQ ID NO: 615232 - DNA, 25 bp, Homo sapien
ctagttttagagtcttggagctgtt

SEQ ID NO: 615233 - DNA, 25 bp, Homo sapien
cagttcaagtttaagggtcgtggag

SEQ ID NO: 615234 - DNA, 25 bp, Homo sapien
ggtcgtggagttggagatttggcga

SEQ ID NO: 615235 - DNA, 25 bp, Homo sapien
tgctgcagttcaagtttaagggtcg

SEQ ID NO: 615236 - DNA, 25 bp, Homo sapien
agttggagatttggcgagaagttaa

SEQ ID NO: 615237 - DNA, 25 bp, Homo sapien
cctgtttagtttgagggtctgtagc

SEQ ID NO: 615238 - DNA, 25 bp, Homo sapien
gttcgtggagctggatatgtgggca

SEQ ID NO: 615239 - DNA, 25 bp, Homo sapien
ctttgaggttcgtggagctggatat

SEQ ID NO: 615240 - DNA, 25 bp, Homo sapien
ttaactttgaggttcgtggagctgg

SEQ ID NO: 615241 - DNA, 25 bp, Homo sapien
cgtggagctggatatgtgggcagaa

SEQ ID NO: 615242 - DNA, 25 bp, Homo sapien
tcaagtttgatggtcgtggagatgg

SEQ ID NO: 615243 - DNA, 25 bp, Homo sapien
ttgatggtcgtggagatggagacct

SEQ ID NO: 615244 - DNA, 25 bp, Homo sapien
agtttgatggtcgtggagatggaga

SEQ ID NO: 615245 - DNA, 25 bp, Homo sapien
caagtttgatggtcgtggagatgga

SEQ ID NO: 615246 - DNA, 25 bp, Homo sapien
gaaagacgctctggtgaatgatgga

SEQ ID NO: 615247 - DNA, 25 bp, Homo sapien
ctgggctctccggaaaaagagccag

SEQ ID NO: 615248 - DNA, 25 bp, Homo sapien
gatcctgaaggctagcaagtccaaa

SEQ ID NO: 615249 - DNA, 25 bp, Homo sapien
ggtgtccatatcctacatacagaga

SEQ ID NO: 615250 - DNA, 25 bp, Homo sapien
gagacagcttcaatctgtcaaacag

SEQ ID NO: 615251 - DNA, 25 bp, Homo sapien
caaaatgaacattcaagggagataa

SEQ ID NO: 615252 - DNA, 25 bp, Homo sapien
caagggagataagtgtgcactggcc

SEQ ID NO: 615253 - DNA, 25 bp, Homo sapien
taagtctgccactgagttggttaca

SEQ ID NO: 615254 - DNA, 25 bp, Homo sapien
agagccagaccattgccgtgcactc

SEQ ID NO: 615255 - DNA, 25 bp, Homo sapien
cagagccagaccattgccgtgcact

SEQ ID NO: 615256 - DNA, 25 bp, Homo sapien
agccagaccattgccgtgcactcca

SEQ ID NO: 615257 - DNA, 25 bp, Homo sapien
gagccagaccattgccgtgcactcc

SEQ ID NO: 615258 - DNA, 25 bp, Homo sapien
gagcagataggttactgaagtcaca

SEQ ID NO: 615259 - DNA, 25 bp, Homo sapien
tttcacctggtagcaattggtgctc

SEQ ID NO: 615260 - DNA, 25 bp, Homo sapien
tactgttggtaccttgctctgtctc

SEQ ID NO: 615261 - DNA, 25 bp, Homo sapien
agcactttaaggttgtcagggagca

SEQ ID NO: 615262 - DNA, 25 bp, Homo sapien
tggcctgaggctttaagtcaaagtg

SEQ ID NO: 615263 - DNA, 25 bp, Homo sapien
tcaatgtcaatgagagaagcaaccc

SEQ ID NO: 615264 - DNA, 25 bp, Homo sapien
tttaagtcaaagtgtctgagcgcag

SEQ ID NO: 615265 - DNA, 25 bp, Homo sapien
ttctcttaacaagttctcaatgtca

SEQ ID NO: 615266 - DNA, 25 bp, Homo sapien
tgtctcctgggccccggccctgctc

SEQ ID NO: 615267 - DNA, 25 bp, Homo sapien
ctgtctcctgggccccggccctgct

SEQ ID NO: 615268 - DNA, 25 bp, Homo sapien
cctgtctcctgggccccggccctgc

SEQ ID NO: 615269 - DNA, 25 bp, Homo sapien
ggatcgagtgtactggcgtgtaact

SEQ ID NO: 615270 - DNA, 25 bp, Homo sapien
ctcccatcgtgcaaaccccatgagc

SEQ ID NO: 615271 - DNA, 25 bp, Homo sapien
tgggagcgctcctcccatcgtgcaa

SEQ ID NO: 615272 - DNA, 25 bp, Homo sapien
tgtactggcgtgtaacttaagtaaa

SEQ ID NO: 615273 - DNA, 25 bp, Homo sapien
caccacggtggcatgcaaatgacag

SEQ ID NO: 615274 - DNA, 25 bp, Homo sapien
caaatgacagagatgcgtgggacag

SEQ ID NO: 615275 - DNA, 25 bp, Homo sapien
ccaggtaagggcaggtcgtcatgaa

SEQ ID NO: 615276 - DNA, 25 bp, Homo sapien
tggccaggaagactgtcaccacggt

SEQ ID NO: 615277 - DNA, 25 bp, Homo sapien
tcagaaactaaaaggccctgtcaca

SEQ ID NO: 615278 - DNA, 25 bp, Homo sapien
cagaaactaaaaggccctgtcacac

SEQ ID NO: 615279 - DNA, 25 bp, Homo sapien
cctctcccagttggtcctgcctctc

SEQ ID NO: 615280 - DNA, 25 bp, Homo sapien
ccctctcccagttggtcctgcctct

SEQ ID NO: 615281 - DNA, 25 bp, Homo sapien
tgctacggttgttcaaatctgaggg

SEQ ID NO: 615282 - DNA, 25 bp, Homo sapien
gttgttgagctggagattcagggag

SEQ ID NO: 615283 - DNA, 25 bp, Homo sapien
ctgcctctcaagtctgagagttgtt

SEQ ID NO: 615284 - DNA, 25 bp, Homo sapien
gggagttgccggtgctgcctctcaa

SEQ ID NO: 615285 - DNA, 25 bp, Homo sapien
gctaccgccatttaagtcagaaggt

SEQ ID NO: 615286 - DNA, 25 bp, Homo sapien
agtgctaccgccatttaagtcagaa

SEQ ID NO: 615287 - DNA, 25 bp, Homo sapien
aaggttgtggatctggagttttggg

SEQ ID NO: 615288 - DNA, 25 bp, Homo sapien
tcagaaggttgtggatctggagttt

SEQ ID NO: 615289 - DNA, 25 bp, Homo sapien
gagtgttatggaactggagaaccag

SEQ ID NO: 615290 - DNA, 25 bp, Homo sapien
tagtgaatcttgagccggaaggagg

SEQ ID NO: 615291 - DNA, 25 bp, Homo sapien
tgttgttcaaatccgaggtcatggg

SEQ ID NO: 615292 - DNA, 25 bp, Homo sapien
agatcctgggaagagccggtgccat

SEQ ID NO: 615293 - DNA, 25 bp, Homo sapien
gttctggtgtgaaggtcgtggagct

SEQ ID NO: 615294 - DNA, 25 bp, Homo sapien
caatgttgttgtaattggagggtcc

SEQ ID NO: 615295 - DNA, 25 bp, Homo sapien
aatgttgttgtaattggagggtccg

SEQ ID NO: 615296 - DNA, 25 bp, Homo sapien
ctggtgtgaaggtcgtggagctgca

SEQ ID NO: 615297 - DNA, 25 bp, Homo sapien
ccgctgctcagatctgagggtgttg

SEQ ID NO: 615298 - DNA, 25 bp, Homo sapien
ctgccgctgctcagatctgagggtg

SEQ ID NO: 615299 - DNA, 25 bp, Homo sapien
ttgctgccattgaagtgtgagagtc

SEQ ID NO: 615300 - DNA, 25 bp, Homo sapien
tgggggtggagccattgctgccatt

SEQ ID NO: 615301 - DNA, 25 bp, Homo sapien
atttttctccaaccgctgccttcga

SEQ ID NO: 615302 - DNA, 25 bp, Homo sapien
tgaactagatacgagcaggaaatgg

SEQ ID NO: 615303 - DNA, 25 bp, Homo sapien
tatggaaggtctgaactagatacga

SEQ ID NO: 615304 - DNA, 25 bp, Homo sapien
gatacgagcaggaaatggattcatt

SEQ ID NO: 615305 - DNA, 25 bp, Homo sapien
acatggacccggttactgtggccct

SEQ ID NO: 615306 - DNA, 25 bp, Homo sapien
gtagattgtggtcctggttggcaca

SEQ ID NO: 615307 - DNA, 25 bp, Homo sapien
cccggttactgtggccctgatggta

SEQ ID NO: 615308 - DNA, 25 bp, Homo sapien
tagattgtggtcctggttggcacag

SEQ ID NO: 615309 - DNA, 25 bp, Homo sapien
gttgtatgggttgtcctcagataac

SEQ ID NO: 615310 - DNA, 25 bp, Homo sapien
cttgtttcattacacgtggtcctgg

SEQ ID NO: 615311 - DNA, 25 bp, Homo sapien
tatgggttgtcctcagataacaatg

SEQ ID NO: 615312 - DNA, 25 bp, Homo sapien
tgtcctcagataacaatggccttgt

SEQ ID NO: 615313 - DNA, 25 bp, Homo sapien
gcctccgatgtgttttagatgctct

SEQ ID NO: 615314 - DNA, 25 bp, Homo sapien
tcacaaggcgatgcctccgatgtgt

SEQ ID NO: 615315 - DNA, 25 bp, Homo sapien
ggcgatgcctccgatgtgttttaga

SEQ ID NO: 615316 - DNA, 25 bp, Homo sapien
tctgaggccaggtcatcctggaggg

SEQ ID NO: 615317 - DNA, 25 bp, Homo sapien
tggcagagtgacgatagtggtccct

SEQ ID NO: 615318 - DNA, 25 bp, Homo sapien
caagagtccacaaatcgttcctgag

SEQ ID NO: 615319 - DNA, 25 bp, Homo sapien
tacagcgccttttgatgttgcagtc

SEQ ID NO: 615320 - DNA, 25 bp, Homo sapien
cacttgataggacgaccaagagtcc

SEQ ID NO: 615321 - DNA, 25 bp, Homo sapien
ccttaaagagatcaccaggattgac

SEQ ID NO: 615322 - DNA, 25 bp, Homo sapien
tccattgggtggctatacatgcaaa

SEQ ID NO: 615323 - DNA, 25 bp, Homo sapien
caggattgacagacccataactaac

SEQ ID NO: 615324 - DNA, 25 bp, Homo sapien
tctgggaagctataaacaacacttg

SEQ ID NO: 615325 - DNA, 25 bp, Homo sapien
tcaagatttccgcagcatgaagctg

SEQ ID NO: 615326 - DNA, 25 bp, Homo sapien
cagcttgaaaggaccacagaatctc

SEQ ID NO: 615327 - DNA, 25 bp, Homo sapien
tgaatcccaaatgtagactgtccaa

SEQ ID NO: 615328 - DNA, 25 bp, Homo sapien
gttcaggtcaccaacaattccagct

SEQ ID NO: 615329 - DNA, 25 bp, Homo sapien
gggaatgatgttcaacttcctgtta

SEQ ID NO: 615330 - DNA, 25 bp, Homo sapien
ccagtggggaatgatgttcaacttc

SEQ ID NO: 615331 - DNA, 25 bp, Homo sapien
aatgatgttcaacttcctgttacac

SEQ ID NO: 615332 - DNA, 25 bp, Homo sapien
ctccaactccagtggggaatgatgt

SEQ ID NO: 615333 - DNA, 25 bp, Homo sapien
tgcacactcgctttgaagctgtaga

SEQ ID NO: 615334 - DNA, 25 bp, Homo sapien
cacactcgctttgaagctgtagaac

SEQ ID NO: 615335 - DNA, 25 bp, Homo sapien
tgtttgcacactcgctttgaagctg

SEQ ID NO: 615336 - DNA, 25 bp, Homo sapien
tggatgtttgcacactcgctttgaa

SEQ ID NO: 615337 - DNA, 25 bp, Homo sapien
tcccattttggacctattttggaga

SEQ ID NO: 615338 - DNA, 25 bp, Homo sapien
catggggggatgaattgttgaaaat

SEQ ID NO: 615339 - DNA, 25 bp, Homo sapien
tgaaaatctcactggtggccccgag

SEQ ID NO: 615340 - DNA, 25 bp, Homo sapien
tatcttggtaaccacctgtccagat

SEQ ID NO: 615341 - DNA, 25 bp, Homo sapien
tcctaatggataggggagctgcctg

SEQ ID NO: 615342 - DNA, 25 bp, Homo sapien
gactggcttctgcgatggttcccat

SEQ ID NO: 615343 - DNA, 25 bp, Homo sapien
tctaggagagcatgttcaccgaggc

SEQ ID NO: 615344 - DNA, 25 bp, Homo sapien
aaggtctgaggctcgttctaggaga

SEQ ID NO: 615345 - DNA, 25 bp, Homo sapien
ctcacaactgccttgtgccagaggt

SEQ ID NO: 615346 - DNA, 25 bp, Homo sapien
taacaaatacttatattgcgcttgc

SEQ ID NO: 615347 - DNA, 25 bp, Homo sapien
cttatattgcgcttgctgtgtggag

SEQ ID NO: 615348 - DNA, 25 bp, Homo sapien
tctcacaactgccttgtgccagagg

SEQ ID NO: 615349 - DNA, 25 bp, Homo sapien
aggtccacagcagggagaggggcat

SEQ ID NO: 615350 - DNA, 25 bp, Homo sapien
ctggcagccactggaccaggtccac

SEQ ID NO: 615351 - DNA, 25 bp, Homo sapien
gtccacagcagggagaggggcatgg

SEQ ID NO: 615352 - DNA, 25 bp, Homo sapien
ggcagccactggaccaggtccacag

SEQ ID NO: 615353 - DNA, 25 bp, Homo sapien
cgcctaagcgggatgattctacagc

SEQ ID NO: 615354 - DNA, 25 bp, Homo sapien
gctgggatactcagttacagcccca

SEQ ID NO: 615355 - DNA, 25 bp, Homo sapien
tgtgtgagtttacaccgcctgggaa

SEQ ID NO: 615356 - DNA, 25 bp, Homo sapien
agttagataagcgagccctgtgccc

SEQ ID NO: 615357 - DNA, 25 bp, Homo sapien
ctttgcttgtcttcttagaatttag

SEQ ID NO: 615358 - DNA, 25 bp, Homo sapien
tagaatttagatggtctattttgga

SEQ ID NO: 615359 - DNA, 25 bp, Homo sapien
tttgggtggcccgatactgtgatga

SEQ ID NO: 615360 - DNA, 25 bp, Homo sapien
tgggtggcccgatactgtgatgaaa

SEQ ID NO: 615361 - DNA, 25 bp, Homo sapien
ttgtcacactgggtctgggggtgtc

SEQ ID NO: 615362 - DNA, 25 bp, Homo sapien
gggtgtcctgggctgtgcctgccat

SEQ ID NO: 615363 - DNA, 25 bp, Homo sapien
gcccttgtcacactgggtctggggg

SEQ ID NO: 615364 - DNA, 25 bp, Homo sapien
cagggcccttgtcacactgggtctg

SEQ ID NO: 615365 - DNA, 25 bp, Homo sapien
ttgatgtcctccctttgagcacttt

SEQ ID NO: 615366 - DNA, 25 bp, Homo sapien
taggtggctattggcggcagtgcgg

SEQ ID NO: 615367 - DNA, 25 bp, Homo sapien
tgtcctccctttgagcacttttagg

SEQ ID NO: 615368 - DNA, 25 bp, Homo sapien
gcagtgcgggggcttcatgctctgc

SEQ ID NO: 615369 - DNA, 25 bp, Homo sapien
ctgccccaaaaacttggtgaccagg

SEQ ID NO: 615370 - DNA, 25 bp, Homo sapien
gtccccaaagtctgcggccaccagg

SEQ ID NO: 615371 - DNA, 25 bp, Homo sapien
cctctgtccccaaagtctgcggcca

SEQ ID NO: 615372 - DNA, 25 bp, Homo sapien
ctcagctgctcagccgtggagccag

SEQ ID NO: 615373 - DNA, 25 bp, Homo sapien
tctcagctgctcagccgtggagcca

SEQ ID NO: 615374 - DNA, 25 bp, Homo sapien
cattttcatgtgaaaggcaggtggg

SEQ ID NO: 615375 - DNA, 25 bp, Homo sapien
tgacagccatgtgtccccctgacgg

SEQ ID NO: 615376 - DNA, 25 bp, Homo sapien
ctggcttcgtatacatctgcctggc

SEQ ID NO: 615377 - DNA, 25 bp, Homo sapien
gcttcgtatacatctgcctggctgt

SEQ ID NO: 615378 - DNA, 25 bp, Homo sapien
acaggtgtgatttctgtgcagagga

SEQ ID NO: 615379 - DNA, 25 bp, Homo sapien
gataacaggtgtgatttctgtgcag

SEQ ID NO: 615380 - DNA, 25 bp, Homo sapien
taacaggtgtgatttctgtgcagag

SEQ ID NO: 615381 - DNA, 25 bp, Homo sapien
agataacaggtgtgatttctgtgca

SEQ ID NO: 615382 - DNA, 25 bp, Homo sapien
caggccatgggacattcagaggctg

SEQ ID NO: 615383 - DNA, 25 bp, Homo sapien
ccatgggacattcagaggctgggct

SEQ ID NO: 615384 - DNA, 25 bp, Homo sapien
gctgggctggctgttcccatcctgt

SEQ ID NO: 615385 - DNA, 25 bp, Homo sapien
gttcccatcctgtggtcgcagagtg

SEQ ID NO: 615386 - DNA, 25 bp, Homo sapien
tatctggtaaatgttactgtcctct

SEQ ID NO: 615387 - DNA, 25 bp, Homo sapien
ccattgtcatagtgttgagtctctg

SEQ ID NO: 615388 - DNA, 25 bp, Homo sapien
caagccttgtcatagtctgaggtta

SEQ ID NO: 615389 - DNA, 25 bp, Homo sapien
agtctgaggttacccagtcaacagc

SEQ ID NO: 615390 - DNA, 25 bp, Homo sapien
tggctgacactggaagacgatggac

SEQ ID NO: 615391 - DNA, 25 bp, Homo sapien
acactggaagacgatggacccgtgg

SEQ ID NO: 615392 - DNA, 25 bp, Homo sapien
gctgacactggaagacgatggaccc

SEQ ID NO: 615393 - DNA, 25 bp, Homo sapien
gcgtggctgacactggaagacgatg

SEQ ID NO: 615394 - DNA, 25 bp, Homo sapien
ccctcctagagctgtaggtgatgat

SEQ ID NO: 615395 - DNA, 25 bp, Homo sapien
caggaggttcagagatgaagagctg

SEQ ID NO: 615396 - DNA, 25 bp, Homo sapien
ctgatgggtaacgggagatgctctc

SEQ ID NO: 615397 - DNA, 25 bp, Homo sapien
gtgcttcgccagagccctcctagag

SEQ ID NO: 615398 - DNA, 25 bp, Homo sapien
tgtcacacgggttagagggtcactg

SEQ ID NO: 615399 - DNA, 25 bp, Homo sapien
tctcttgccgcagcatacacgaggg

SEQ ID NO: 615400 - DNA, 25 bp, Homo sapien
cagcttcggtatgccttcagggaaa

SEQ ID NO: 615401 - DNA, 25 bp, Homo sapien
taacttctcagagcagggcgattgg

SEQ ID NO: 615402 - DNA, 25 bp, Homo sapien
tggtttgccttgtagccatggctgg

SEQ ID NO: 615403 - DNA, 25 bp, Homo sapien
gtttgccttgtagccatggctggtt

SEQ ID NO: 615404 - DNA, 25 bp, Homo sapien
catggtttgccttgtagccatggct

SEQ ID NO: 615405 - DNA, 25 bp, Homo sapien
tcatgtcttttaaaccatactcatt

SEQ ID NO: 615406 - DNA, 25 bp, Homo sapien
gagcttagtaactggtgtgcacgtc

SEQ ID NO: 615407 - DNA, 25 bp, Homo sapien
agtcctgctggatcccttgggccag

SEQ ID NO: 615408 - DNA, 25 bp, Homo sapien
gaacacatttgagcttccttggtga

SEQ ID NO: 615409 - DNA, 25 bp, Homo sapien
cctggtgttcctgcggccgttttca

SEQ ID NO: 615410 - DNA, 25 bp, Homo sapien
cgtgtgattcgttaagccagtggca

SEQ ID NO: 615411 - DNA, 25 bp, Homo sapien
tcttggttcgggtcagcaggtcttc

SEQ ID NO: 615412 - DNA, 25 bp, Homo sapien
tatttgtttatagttggcctcccgc

SEQ ID NO: 615413 - DNA, 25 bp, Homo sapien
tttgggctgcaaggagcgacatacc

SEQ ID NO: 615414 - DNA, 25 bp, Homo sapien
gaggcttgccatttaatccccacag

SEQ ID NO: 615415 - DNA, 25 bp, Homo sapien
tgtggcaccttttgaggcgcctcga

SEQ ID NO: 615416 - DNA, 25 bp, Homo sapien
gagagaaattgcagggcgtgaccct

SEQ ID NO: 615417 - DNA, 25 bp, Homo sapien
tattcccaccttagggctgaccagg

SEQ ID NO: 615418 - DNA, 25 bp, Homo sapien
agtcagctgggcacaacctctcatt

SEQ ID NO: 615419 - DNA, 25 bp, Homo sapien
tccattggaggccttgcattcccct

SEQ ID NO: 615420 - DNA, 25 bp, Homo sapien
tttcatgtgtctacctcatctcacc

SEQ ID NO: 615421 - DNA, 25 bp, Homo sapien
tgggaataggactcactctttagct

SEQ ID NO: 615422 - DNA, 25 bp, Homo sapien
ccgcgcccgaccagattctcttttt

SEQ ID NO: 615423 - DNA, 25 bp, Homo sapien
ctttggtgttccaggcaccgtgcca

SEQ ID NO: 615424 - DNA, 25 bp, Homo sapien
tccctgttaggcagatcccatcact

SEQ ID NO: 615425 - DNA, 25 bp, Homo sapien
tctgacatcacgtgtggtgtctttg

SEQ ID NO: 615426 - DNA, 25 bp, Homo sapien
tgcataatattccttgggcctaaat

SEQ ID NO: 615427 - DNA, 25 bp, Homo sapien
tgctggtctgtcacgtgaaactccc

SEQ ID NO: 615428 - DNA, 25 bp, Homo sapien
tctgtggttgactgctgtaaggaag

SEQ ID NO: 615429 - DNA, 25 bp, Homo sapien
ctaaatgtccgtggcaccctgttgt

SEQ ID NO: 615430 - DNA, 25 bp, Homo sapien
gctgccggaaccagttctccttact

SEQ ID NO: 615431 - DNA, 25 bp, Homo sapien
ttactgggtctcagaaagaattcag

SEQ ID NO: 615432 - DNA, 25 bp, Homo sapien
tactgggtctcagaaagaattcagt

SEQ ID NO: 615433 - DNA, 25 bp, Homo sapien
ctggcttctcagctgccggaaccag

SEQ ID NO: 615434 - DNA, 25 bp, Homo sapien
gtggccgcccctacgcatgtattgg

SEQ ID NO: 615435 - DNA, 25 bp, Homo sapien
tgttgtacccaactggaccacggac

SEQ ID NO: 615436 - DNA, 25 bp, Homo sapien
tccagggactgctgaaccggttgtc

SEQ ID NO: 615437 - DNA, 25 bp, Homo sapien
tgtgtgataacgaatgcaggctcct

SEQ ID NO: 615438 - DNA, 25 bp, Homo sapien
ctgctatgcaccagggaccattcaa

SEQ ID NO: 615439 - DNA, 25 bp, Homo sapien
gtgtgttagcttctgtaattctcat

SEQ ID NO: 615440 - DNA, 25 bp, Homo sapien
aatcctgtgtactcattttatcccc

SEQ ID NO: 615441 - DNA, 25 bp, Homo sapien
aatttacttcaggtcttagagcttg

SEQ ID NO: 615442 - DNA, 25 bp, Homo sapien
ctcggaagcaggcagtctataataa

SEQ ID NO: 615443 - DNA, 25 bp, Homo sapien
acttgctgaagtcacgtggttggca

SEQ ID NO: 615444 - DNA, 25 bp, Homo sapien
caggccctggttaacacttgctggg

SEQ ID NO: 615445 - DNA, 25 bp, Homo sapien
tggtactcggagaggacttgtcccc

SEQ ID NO: 615446 - DNA, 25 bp, Homo sapien
catcccctcttcagggccctcgttt

SEQ ID NO: 615447 - DNA, 25 bp, Homo sapien
ccgctgacaggtggggacttgaacc

SEQ ID NO: 615448 - DNA, 25 bp, Homo sapien
gccctcgtttgagggggcttcttca

SEQ ID NO: 615449 - DNA, 25 bp, Homo sapien
ctgacaccagaacctccatcttcca

SEQ ID NO: 615450 - DNA, 25 bp, Homo sapien
ttggcaacgggcctcaaagaagcca

SEQ ID NO: 615451 - DNA, 25 bp, Homo sapien
gagggtggctcgtctctttggcaac

SEQ ID NO: 615452 - DNA, 25 bp, Homo sapien
gccagggcttcgtggatgcacagtt

SEQ ID NO: 615453 - DNA, 25 bp, Homo sapien
tcctgttcccgaatcttcttagaag

SEQ ID NO: 615454 - DNA, 25 bp, Homo sapien
gctgtcctcctatggcactgcttgg

SEQ ID NO: 615455 - DNA, 25 bp, Homo sapien
tttcagggcagtaaatttcctcagc

SEQ ID NO: 615456 - DNA, 25 bp, Homo sapien
gctgagctgccgacttcctttccag

SEQ ID NO: 615457 - DNA, 25 bp, Homo sapien
ccagcttgatgtggtgggaagttcc

SEQ ID NO: 615458 - DNA, 25 bp, Homo sapien
cagttctttaaggacccctagctct

SEQ ID NO: 615459 - DNA, 25 bp, Homo sapien
tctaaccacaagatattctggctca

SEQ ID NO: 615460 - DNA, 25 bp, Homo sapien
actgcacctggtctcttttgagcat

SEQ ID NO: 615461 - DNA, 25 bp, Homo sapien
gggcagtagttatgctcattgttac

SEQ ID NO: 615462 - DNA, 25 bp, Homo sapien
ttccggaggctgtgctgttaaccag

SEQ ID NO: 615463 - DNA, 25 bp, Homo sapien
tgagtggcagcgctgtgtaaaccca

SEQ ID NO: 615464 - DNA, 25 bp, Homo sapien
caccttagactatgacactcgcctg

SEQ ID NO: 615465 - DNA, 25 bp, Homo sapien
tgcttggcctgttgctgtagccccg

SEQ ID NO: 615466 - DNA, 25 bp, Homo sapien
tcattttgcaaaacccctggagccc

SEQ ID NO: 615467 - DNA, 25 bp, Homo sapien
tttggacttcttgtgcactctctga

SEQ ID NO: 615468 - DNA, 25 bp, Homo sapien
tcattgtgagccagcgactcctggg

SEQ ID NO: 615469 - DNA, 25 bp, Homo sapien
ttcactgatgtcataaaaccctgca

SEQ ID NO: 615470 - DNA, 25 bp, Homo sapien
ccaggactattttgatcatccccat

SEQ ID NO: 615471 - DNA, 25 bp, Homo sapien
agggcagccaggactattttgatca

SEQ ID NO: 615472 - DNA, 25 bp, Homo sapien
cagccaggactattttgatcatccc

SEQ ID NO: 615473 - DNA, 25 bp, Homo sapien
ggcagccaggactattttgatcatc

SEQ ID NO: 615474 - DNA, 25 bp, Homo sapien
tggtgagaggagagttggagattag

SEQ ID NO: 615475 - DNA, 25 bp, Homo sapien
gattagcactgccaggggttgttcg

SEQ ID NO: 615476 - DNA, 25 bp, Homo sapien
ggggttgttcggagcagctgcctga

SEQ ID NO: 615477 - DNA, 25 bp, Homo sapien
aggagagttggagattagcactgcc

SEQ ID NO: 615478 - DNA, 25 bp, Homo sapien
gggaagatggtgggatgaggagcat

SEQ ID NO: 615479 - DNA, 25 bp, Homo sapien
ctctagggagtagggggaagatggt

SEQ ID NO: 615480 - DNA, 25 bp, Homo sapien
agtagggggaagatggtgggatgag

SEQ ID NO: 615481 - DNA, 25 bp, Homo sapien
ctagggagtagggggaagatggtgg

SEQ ID NO: 615482 - DNA, 25 bp, Homo sapien
tgcactgaaacacgtcagacttctc

SEQ ID NO: 615483 - DNA, 25 bp, Homo sapien
cttctttgtttatcagttcctggta

SEQ ID NO: 615484 - DNA, 25 bp, Homo sapien
gatggtgaggaggtcgtttgcttct

SEQ ID NO: 615485 - DNA, 25 bp, Homo sapien
tcacctggctagactgtagatggtg

SEQ ID NO: 615486 - DNA, 25 bp, Homo sapien
acctggctagactgtagatggtgag

SEQ ID NO: 615487 - DNA, 25 bp, Homo sapien
ccacggagaagagctgtgagctgga

SEQ ID NO: 615488 - DNA, 25 bp, Homo sapien
ctgtgagctggatgttgaaggatgc

SEQ ID NO: 615489 - DNA, 25 bp, Homo sapien
tagaagaccacggagaagagctgtg

SEQ ID NO: 615490 - DNA, 25 bp, Homo sapien
gctggatgttgaaggatgctttggc

SEQ ID NO: 615491 - DNA, 25 bp, Homo sapien
cgcgccgccccgtcaggaagcgaca

SEQ ID NO: 615492 - DNA, 25 bp, Homo sapien
gttggagcgcgtcacgtgaccacgt

SEQ ID NO: 615493 - DNA, 25 bp, Homo sapien
tggagcgcgtcacgtgaccacgtga

SEQ ID NO: 615494 - DNA, 25 bp, Homo sapien
gtcaggaagcgacacctcggcccca

SEQ ID NO: 615495 - DNA, 25 bp, Homo sapien
cgggcggcgtgagcgagatggcgag

SEQ ID NO: 615496 - DNA, 25 bp, Homo sapien
atggcgagctaggctgcgggcccgg

SEQ ID NO: 615497 - DNA, 25 bp, Homo sapien
ggcggcgtgagcgagatggcgagct

SEQ ID NO: 615498 - DNA, 25 bp, Homo sapien
agatggcgagctaggctgcgggccc

SEQ ID NO: 615499 - DNA, 25 bp, Homo sapien
tcggctaggatcttctccagggccc

SEQ ID NO: 615500 - DNA, 25 bp, Homo sapien
gggcccgggacacgaacatgctctt

SEQ ID NO: 615501 - DNA, 25 bp, Homo sapien
catgctcttggtctggctctcctgc

SEQ ID NO: 615502 - DNA, 25 bp, Homo sapien
cctccttgtcggctaggatcttctc

SEQ ID NO: 615503 - DNA, 25 bp, Homo sapien
tcagtacctggtatgcagtgggcac

SEQ ID NO: 615504 - DNA, 25 bp, Homo sapien
tcagtattcagctcaagtgtcaccc

SEQ ID NO: 615505 - DNA, 25 bp, Homo sapien
caaatgcatggattctcccaccaag

SEQ ID NO: 615506 - DNA, 25 bp, Homo sapien
ctccatatggtggatagttcttgcc

SEQ ID NO: 615507 - DNA, 25 bp, Homo sapien
tggtaatctctaaaataccacatag

SEQ ID NO: 615508 - DNA, 25 bp, Homo sapien
caagcatttcaactttgagccgtca

SEQ ID NO: 615509 - DNA, 25 bp, Homo sapien
caacaatctatacatggtaatctct

SEQ ID NO: 615510 - DNA, 25 bp, Homo sapien
tccttatacactggctcgtttcagc

SEQ ID NO: 615511 - DNA, 25 bp, Homo sapien
gtacaatgttccaaccacacactgg

SEQ ID NO: 615512 - DNA, 25 bp, Homo sapien
gccatagagccttcactcaggttgt

SEQ ID NO: 615513 - DNA, 25 bp, Homo sapien
tgttctttataaatcgcccagtgag

SEQ ID NO: 615514 - DNA, 25 bp, Homo sapien
gccttccgccataggatgaccctgg

SEQ ID NO: 615515 - DNA, 25 bp, Homo sapien
tagaagtgggcacaaggagactccc

SEQ ID NO: 615516 - DNA, 25 bp, Homo sapien
tttactcacaaccaatggagtggcc

SEQ ID NO: 615517 - DNA, 25 bp, Homo sapien
taaaactctcgatcttggcctccaa

SEQ ID NO: 615518 - DNA, 25 bp, Homo sapien
caatcatcgctgttctgctgccgtc

SEQ ID NO: 615519 - DNA, 25 bp, Homo sapien
tctccgtgggatcaagcaatgccaa

SEQ ID NO: 615520 - DNA, 25 bp, Homo sapien
tcttgacaccgccatgagagaggtc

SEQ ID NO: 615521 - DNA, 25 bp, Homo sapien
tgaaaagccgcgctgtctttgcggg

SEQ ID NO: 615522 - DNA, 25 bp, Homo sapien
tgctccacatcttaacaggcgttgc

SEQ ID NO: 615523 - DNA, 25 bp, Homo sapien
taaaatcttaaccacagaggttgca

SEQ ID NO: 615524 - DNA, 25 bp, Homo sapien
agaggttgcactacccttggcaggg

SEQ ID NO: 615525 - DNA, 25 bp, Homo sapien
cattcacattgtgctaaggcacgtg

SEQ ID NO: 615526 - DNA, 25 bp, Homo sapien
tgtatttctacatgttagacccaca

SEQ ID NO: 615527 - DNA, 25 bp, Homo sapien
ttttctatttctgctttaatttcat

SEQ ID NO: 615528 - DNA, 25 bp, Homo sapien
tctgcttttctatttctgctttaat

SEQ ID NO: 615529 - DNA, 25 bp, Homo sapien
gcttttctatttctgctttaatttc

SEQ ID NO: 615530 - DNA, 25 bp, Homo sapien
ctctgcttttctatttctgctttaa

SEQ ID NO: 615531 - DNA, 25 bp, Homo sapien
tgaagtttgcctttggtggtgcagc

SEQ ID NO: 615532 - DNA, 25 bp, Homo sapien
tgctgactacccttggggacttgga

SEQ ID NO: 615533 - DNA, 25 bp, Homo sapien
gcaagcagtcaagggatgtgctgac

SEQ ID NO: 615534 - DNA, 25 bp, Homo sapien
gactggcaagctagctcgaatggaa

SEQ ID NO: 615535 - DNA, 25 bp, Homo sapien
cgcgcctggcttgaattacacttta

SEQ ID NO: 615536 - DNA, 25 bp, Homo sapien
gccaccaagctagtctaatttttct

SEQ ID NO: 615537 - DNA, 25 bp, Homo sapien
caactgcaaatggtttcaacaattc

SEQ ID NO: 615538 - DNA, 25 bp, Homo sapien
tcaacaattctgtcgatcagccgct

SEQ ID NO: 615539 - DNA, 25 bp, Homo sapien
gtaactgaaccccttcatcagtctg

SEQ ID NO: 615540 - DNA, 25 bp, Homo sapien
tgccagtgatgtgcccgtatgcgat

SEQ ID NO: 615541 - DNA, 25 bp, Homo sapien
ttccatgcgggtgaaaatgacgttc

SEQ ID NO: 615542 - DNA, 25 bp, Homo sapien
tgtctgcaggatagtaccctcatga

SEQ ID NO: 615543 - DNA, 25 bp, Homo sapien
tcagcatctgagtaagggtagcctt

SEQ ID NO: 615544 - DNA, 25 bp, Homo sapien
tagccttggcagtggtttgattgat

SEQ ID NO: 615545 - DNA, 25 bp, Homo sapien
cctggcatgttcaccgttggttaaa

SEQ ID NO: 615546 - DNA, 25 bp, Homo sapien
tactgctgcagcttggatcacaggg

SEQ ID NO: 615547 - DNA, 25 bp, Homo sapien
tgcctgactgtgcttcaaacgaacg

SEQ ID NO: 615548 - DNA, 25 bp, Homo sapien
ttttccagaatcactcctggcatgt

SEQ ID NO: 615549 - DNA, 25 bp, Homo sapien
tctttctctgggtgcgtctccattt

SEQ ID NO: 615550 - DNA, 25 bp, Homo sapien
ctttctctgggtgcgtctccatttt

SEQ ID NO: 615551 - DNA, 25 bp, Homo sapien
tggaaaaagagccataccgtatcag

SEQ ID NO: 615552 - DNA, 25 bp, Homo sapien
aaaagagccataccgtatcagcccg

SEQ ID NO: 615553 - DNA, 25 bp, Homo sapien
agagccataccgtatcagcccgtac

SEQ ID NO: 615554 - DNA, 25 bp, Homo sapien
acttggaaaaagagccataccgtat

SEQ ID NO: 615555 - DNA, 25 bp, Homo sapien
ctgaacctgttgcactgaggctgac

SEQ ID NO: 615556 - DNA, 25 bp, Homo sapien
cactgaggctgacatgaagaagtag

SEQ ID NO: 615557 - DNA, 25 bp, Homo sapien
tgaggctgacatgaagaagtagcag

SEQ ID NO: 615558 - DNA, 25 bp, Homo sapien
tgaacctgttgcactgaggctgaca

SEQ ID NO: 615559 - DNA, 25 bp, Homo sapien
caatctgattcccatgttcctggga

SEQ ID NO: 615560 - DNA, 25 bp, Homo sapien
tccgttctgacccactatttgcagg

SEQ ID NO: 615561 - DNA, 25 bp, Homo sapien
gggtttgcttctcccaggcaatctg

SEQ ID NO: 615562 - DNA, 25 bp, Homo sapien
gggaaagtctcacaggatgcaccaa

SEQ ID NO: 615563 - DNA, 25 bp, Homo sapien
attgtacctggcctaacattactca

SEQ ID NO: 615564 - DNA, 25 bp, Homo sapien
ggaactatctacgtggcaaagtaaa

SEQ ID NO: 615565 - DNA, 25 bp, Homo sapien
catttataaaacatcacgttgacca

SEQ ID NO: 615566 - DNA, 25 bp, Homo sapien
gatctataaggtcccggagggcagt

SEQ ID NO: 615567 - DNA, 25 bp, Homo sapien
gatgtgactacatcttccaagatgt

SEQ ID NO: 615568 - DNA, 25 bp, Homo sapien
gcagatgtgactacatcttccaaga

SEQ ID NO: 615569 - DNA, 25 bp, Homo sapien
acatcttccaagatgtccttcacca

SEQ ID NO: 615570 - DNA, 25 bp, Homo sapien
tttaatggcagatgtgactacatct

SEQ ID NO: 615571 - DNA, 25 bp, Homo sapien
gattatctgctgacgacaaggactg

SEQ ID NO: 615572 - DNA, 25 bp, Homo sapien
tcggctatcccgttggtctgtgagt

SEQ ID NO: 615573 - DNA, 25 bp, Homo sapien
tgtcagaccatgcttttccgctgct

SEQ ID NO: 615574 - DNA, 25 bp, Homo sapien
gaatagcacattcctggcactccag

SEQ ID NO: 615575 - DNA, 25 bp, Homo sapien
ggcatccttctgcagaacgtgggag

SEQ ID NO: 615576 - DNA, 25 bp, Homo sapien
ccttctgcagaacgtgggagaacct

SEQ ID NO: 615577 - DNA, 25 bp, Homo sapien
cttgcacagggagcggaacacaagg

SEQ ID NO: 615578 - DNA, 25 bp, Homo sapien
gacagcttgcacagggagcggaaca

SEQ ID NO: 615579 - DNA, 25 bp, Homo sapien
cacagtaccatgtgctgctggatca

SEQ ID NO: 615580 - DNA, 25 bp, Homo sapien
tggactgaaggtggccaagaactgc

SEQ ID NO: 615581 - DNA, 25 bp, Homo sapien
tacactgacaaagagacatgacact

SEQ ID NO: 615582 - DNA, 25 bp, Homo sapien
taaaaccgttcctgcacttacactg

SEQ ID NO: 615583 - DNA, 25 bp, Homo sapien
agggaaaccaccttggaacgcagct

SEQ ID NO: 615584 - DNA, 25 bp, Homo sapien
caccttggaacgcagctcatgggat

SEQ ID NO: 615585 - DNA, 25 bp, Homo sapien
ggaaaccaccttggaacgcagctca

SEQ ID NO: 615586 - DNA, 25 bp, Homo sapien
aaaccaccttggaacgcagctcatg

SEQ ID NO: 615587 - DNA, 25 bp, Homo sapien
gacgccgtttttggacaaggccaca

SEQ ID NO: 615588 - DNA, 25 bp, Homo sapien
tgcattgatgaacatctcgtgagtc

SEQ ID NO: 615589 - DNA, 25 bp, Homo sapien
gaaaaatggcaagagagagctcaaa

SEQ ID NO: 615590 - DNA, 25 bp, Homo sapien
cacacagagatattgcttgattgca

SEQ ID NO: 615591 - DNA, 25 bp, Homo sapien
cgtcagagtctgaatgaccatccac

SEQ ID NO: 615592 - DNA, 25 bp, Homo sapien
cacctgtgctcaaaagaacttgttg

SEQ ID NO: 615593 - DNA, 25 bp, Homo sapien
acagatcctcgtcagagtctgaatg

SEQ ID NO: 615594 - DNA, 25 bp, Homo sapien
tctgaatgaccatccacctgtgctc

SEQ ID NO: 615595 - DNA, 25 bp, Homo sapien
cagcatttaaatcacagtcgtagtt

SEQ ID NO: 615596 - DNA, 25 bp, Homo sapien
ggataaatcatttacaaggcgctca

SEQ ID NO: 615597 - DNA, 25 bp, Homo sapien
cacttcttccctgagcaattttgga

SEQ ID NO: 615598 - DNA, 25 bp, Homo sapien
tttacaaggcgctcaaaaatgttag

SEQ ID NO: 615599 - DNA, 25 bp, Homo sapien
ttgggattcacatacaggtctttgc

SEQ ID NO: 615600 - DNA, 25 bp, Homo sapien
gacacgaggcactccaggcctttct

SEQ ID NO: 615601 - DNA, 25 bp, Homo sapien
gggattcacatacaggtctttgctc

SEQ ID NO: 615602 - DNA, 25 bp, Homo sapien
tccaccatgcacttgagaatggaca

SEQ ID NO: 615603 - DNA, 25 bp, Homo sapien
tgcctcagcctccagagcacctggg

SEQ ID NO: 615604 - DNA, 25 bp, Homo sapien
ccacctcacaggttcaagctgttct

SEQ ID NO: 615605 - DNA, 25 bp, Homo sapien
acctcacaggttcaagctgttctcc

SEQ ID NO: 615606 - DNA, 25 bp, Homo sapien
cctccacctcacaggttcaagctgt

SEQ ID NO: 615607 - DNA, 25 bp, Homo sapien
ttgatgacctcaaattgctcagggt

SEQ ID NO: 615608 - DNA, 25 bp, Homo sapien
gaacagttgtctgggtccccgagga

SEQ ID NO: 615609 - DNA, 25 bp, Homo sapien
cgtcttgccatgtcaaggcctttcc

SEQ ID NO: 615610 - DNA, 25 bp, Homo sapien
tggacgtcacactacaccgtcttgc

SEQ ID NO: 615611 - DNA, 25 bp, Homo sapien
ctatactacaacgctaaccaaaaca

SEQ ID NO: 615612 - DNA, 25 bp, Homo sapien
caaactatactacaacgctaaccaa

SEQ ID NO: 615613 - DNA, 25 bp, Homo sapien
tagatagtgcagttgctgaaggcct

SEQ ID NO: 615614 - DNA, 25 bp, Homo sapien
taagcacaaactggcaagcgtcatg

SEQ ID NO: 615615 - DNA, 25 bp, Homo sapien
tcagttaaggtctcatgatggctac

SEQ ID NO: 615616 - DNA, 25 bp, Homo sapien
gtaagattccgtcccaagatggcca

SEQ ID NO: 615617 - DNA, 25 bp, Homo sapien
tgtcttcaactgacgttcccagcat

SEQ ID NO: 615618 - DNA, 25 bp, Homo sapien
atgtcttcaactgacgttcccagca

SEQ ID NO: 615619 - DNA, 25 bp, Homo sapien
tatgtcttcaactgacgttcccagc

SEQ ID NO: 615620 - DNA, 25 bp, Homo sapien
ctatgtcttcaactgacgttcccag

SEQ ID NO: 615621 - DNA, 25 bp, Homo sapien
ctgacagaactcacatgcaagtgct

SEQ ID NO: 615622 - DNA, 25 bp, Homo sapien
gacagaactcacatgcaagtgctac

SEQ ID NO: 615623 - DNA, 25 bp, Homo sapien
cagaactcacatgcaagtgctacac

SEQ ID NO: 615624 - DNA, 25 bp, Homo sapien
gaactcacatgcaagtgctacaccc

SEQ ID NO: 615625 - DNA, 25 bp, Homo sapien
gaaccttgcgctatctcccagaaaa

SEQ ID NO: 615626 - DNA, 25 bp, Homo sapien
gaagtcaagttggtccacgtaggca

SEQ ID NO: 615627 - DNA, 25 bp, Homo sapien
tgcggcaaacttctccattaatcgg

SEQ ID NO: 615628 - DNA, 25 bp, Homo sapien
ccttctaggaatgtccgcagggctg

SEQ ID NO: 615629 - DNA, 25 bp, Homo sapien
gcaagtctgtagtcagcataataat

SEQ ID NO: 615630 - DNA, 25 bp, Homo sapien
gctaggacataagcagtgtcagcac

SEQ ID NO: 615631 - DNA, 25 bp, Homo sapien
gcataataattgaatacgctaggac

SEQ ID NO: 615632 - DNA, 25 bp, Homo sapien
tgtcagcactagcaaacagagtttg

SEQ ID NO: 615633 - DNA, 25 bp, Homo sapien
tactatcattgataccccgattcat

SEQ ID NO: 615634 - DNA, 25 bp, Homo sapien
gatgcttgagagatactcttctggc

SEQ ID NO: 615635 - DNA, 25 bp, Homo sapien
cttctggcagatctttactatcatt

SEQ ID NO: 615636 - DNA, 25 bp, Homo sapien
tgcttagtagatttggttgcaatcg

SEQ ID NO: 615637 - DNA, 25 bp, Homo sapien
agccgccgctgcttttcactagcta

SEQ ID NO: 615638 - DNA, 25 bp, Homo sapien
tttgaacattggccggacatggtcc

SEQ ID NO: 615639 - DNA, 25 bp, Homo sapien
ggacatggtccaggtgagtggcact

SEQ ID NO: 615640 - DNA, 25 bp, Homo sapien
cgccgctgcttttcactagctacat

SEQ ID NO: 615641 - DNA, 25 bp, Homo sapien
gattcggattgcacatcggatgcct

SEQ ID NO: 615642 - DNA, 25 bp, Homo sapien
cattccaaagatgcaggcgattcgg

SEQ ID NO: 615643 - DNA, 25 bp, Homo sapien
taggctgccaatagtggcgtccaca

SEQ ID NO: 615644 - DNA, 25 bp, Homo sapien
tctggagtccgatgctgtaggctgc

SEQ ID NO: 615645 - DNA, 25 bp, Homo sapien
agccactgtgataagcgtcttaatg

SEQ ID NO: 615646 - DNA, 25 bp, Homo sapien
aatggtgtcgatgtttttctgcttc

SEQ ID NO: 615647 - DNA, 25 bp, Homo sapien
tagttgccatcggtgtgagccactg

SEQ ID NO: 615648 - DNA, 25 bp, Homo sapien
tagggagaagcgagcaagagcctga

SEQ ID NO: 615649 - DNA, 25 bp, Homo sapien
tgagaaaaggcaattcaaagagaca

SEQ ID NO: 615650 - DNA, 25 bp, Homo sapien
gagaaaaggcaattcaaagagacac

SEQ ID NO: 615651 - DNA, 25 bp, Homo sapien
gaaaaggcaattcaaagagacacgt

SEQ ID NO: 615652 - DNA, 25 bp, Homo sapien
aaaggcaattcaaagagacacgtac

SEQ ID NO: 615653 - DNA, 25 bp, Homo sapien
gggacagctggaatctcaagtacgt

SEQ ID NO: 615654 - DNA, 25 bp, Homo sapien
cttaccaaggaatggcacacagacc

SEQ ID NO: 615655 - DNA, 25 bp, Homo sapien
gaaacactggctacatgaaacttac

SEQ ID NO: 615656 - DNA, 25 bp, Homo sapien
gaatgcagatctgcacacgggccct

SEQ ID NO: 615657 - DNA, 25 bp, Homo sapien
acaccggttcctatcagctgagcga

SEQ ID NO: 615658 - DNA, 25 bp, Homo sapien
aggccaaggcccatgaactcttctc

SEQ ID NO: 615659 - DNA, 25 bp, Homo sapien
cgcccagatccagacaggtagcgcg

SEQ ID NO: 615660 - DNA, 25 bp, Homo sapien
aggtagcgcgtcttcacaccggttc

SEQ ID NO: 615661 - DNA, 25 bp, Homo sapien
tatccactccgccactcaccaaatt

SEQ ID NO: 615662 - DNA, 25 bp, Homo sapien
ccatctgtcttttatccactccgcc

SEQ ID NO: 615663 - DNA, 25 bp, Homo sapien
atccactccgccactcaccaaatta

SEQ ID NO: 615664 - DNA, 25 bp, Homo sapien
tgtcttttatccactccgccactca

SEQ ID NO: 615665 - DNA, 25 bp, Homo sapien
agctacaaccacactctgcgagctg

SEQ ID NO: 615666 - DNA, 25 bp, Homo sapien
acaaccacactctgcgagctggtct

SEQ ID NO: 615667 - DNA, 25 bp, Homo sapien
gctacaaccacactctgcgagctgg

SEQ ID NO: 615668 - DNA, 25 bp, Homo sapien
tgtccacagctacaaccacactctg

SEQ ID NO: 615669 - DNA, 25 bp, Homo sapien
ctaggaagataattccagacaaaat

SEQ ID NO: 615670 - DNA, 25 bp, Homo sapien
caaaataaacattagaccgggtgtg

SEQ ID NO: 615671 - DNA, 25 bp, Homo sapien
taggaagataattccagacaaaata

SEQ ID NO: 615672 - DNA, 25 bp, Homo sapien
tccagacaaaataaacattagaccg

SEQ ID NO: 615673 - DNA, 25 bp, Homo sapien
catccagtctggtagacccagtaaa

SEQ ID NO: 615674 - DNA, 25 bp, Homo sapien
cagtctggtagacccagtaaaaatc

SEQ ID NO: 615675 - DNA, 25 bp, Homo sapien
tccatccagtctggtagacccagta

SEQ ID NO: 615676 - DNA, 25 bp, Homo sapien
tccagtctggtagacccagtaaaaa

SEQ ID NO: 615677 - DNA, 25 bp, Homo sapien
cagcgtgaggcttctgcagttttca

SEQ ID NO: 615678 - DNA, 25 bp, Homo sapien
taggaacagtcagacggtcacagcg

SEQ ID NO: 615679 - DNA, 25 bp, Homo sapien
aggccagacccaacaacacaagcaa

SEQ ID NO: 615680 - DNA, 25 bp, Homo sapien
caacacaagcaaagcctcgttagga

SEQ ID NO: 615681 - DNA, 25 bp, Homo sapien
agttcatccatggacacagcacaca

SEQ ID NO: 615682 - DNA, 25 bp, Homo sapien
gggggaagccagttcatccatggac

SEQ ID NO: 615683 - DNA, 25 bp, Homo sapien
agcacacagccagcggacaaagtca

SEQ ID NO: 615684 - DNA, 25 bp, Homo sapien
ctgaacatgcgaggatggtgggggg

SEQ ID NO: 615685 - DNA, 25 bp, Homo sapien
gaagtgatctccaatcacatgccat

SEQ ID NO: 615686 - DNA, 25 bp, Homo sapien
tcacatgccatattcgagaccactg

SEQ ID NO: 615687 - DNA, 25 bp, Homo sapien
gagaccactgtagtcggatccgatt

SEQ ID NO: 615688 - DNA, 25 bp, Homo sapien
catgttgtagtatgatatctccaca

SEQ ID NO: 615689 - DNA, 25 bp, Homo sapien
gagagttgccttaatgagtcaacag

SEQ ID NO: 615690 - DNA, 25 bp, Homo sapien
tcaagaaacttcatggagagttgcc

SEQ ID NO: 615691 - DNA, 25 bp, Homo sapien
cataatatgctcaaagggcctcaga

SEQ ID NO: 615692 - DNA, 25 bp, Homo sapien
tctggaaacggaagttggctaattc

SEQ ID NO: 615693 - DNA, 25 bp, Homo sapien
tcctcctaggaaaggctacacatag

SEQ ID NO: 615694 - DNA, 25 bp, Homo sapien
taaggaaaatcgatgtgaatcacag

SEQ ID NO: 615695 - DNA, 25 bp, Homo sapien
ttctacaagttgcagggtgacatct

SEQ ID NO: 615696 - DNA, 25 bp, Homo sapien
tgtgcccagccggttcacgacatat

SEQ ID NO: 615697 - DNA, 25 bp, Homo sapien
agaattacagaagtgtggaattact

SEQ ID NO: 615698 - DNA, 25 bp, Homo sapien
tctgtgacatataacgctttactat

SEQ ID NO: 615699 - DNA, 25 bp, Homo sapien
cccggccaaacattgtgaacatttt

SEQ ID NO: 615700 - DNA, 25 bp, Homo sapien
tatcccatgttgtaccggtaccaac

SEQ ID NO: 615701 - DNA, 25 bp, Homo sapien
aagatgttcttccaacctgagcgga

SEQ ID NO: 615702 - DNA, 25 bp, Homo sapien
cctggtggaacacggcaaagatgtt

SEQ ID NO: 615703 - DNA, 25 bp, Homo sapien
gatgttggccgcctgggagttcacc

SEQ ID NO: 615704 - DNA, 25 bp, Homo sapien
atctgggcaatgcagcggatcgcca

SEQ ID NO: 615705 - DNA, 25 bp, Homo sapien
caggaaaatggtgctggaaaatagt

SEQ ID NO: 615706 - DNA, 25 bp, Homo sapien
ggaaaatggtgctggaaaatagttg

SEQ ID NO: 615707 - DNA, 25 bp, Homo sapien
gcaggaaaatggtgctggaaaatag

SEQ ID NO: 615708 - DNA, 25 bp, Homo sapien
ctgcaggaaaatggtgctggaaaat

SEQ ID NO: 615709 - DNA, 25 bp, Homo sapien
gaaagcggcgttgcaggcgaactct

SEQ ID NO: 615710 - DNA, 25 bp, Homo sapien
ggcgaactctgataagcacttcaca

SEQ ID NO: 615711 - DNA, 25 bp, Homo sapien
tatttgccacagaagcggatgagcc

SEQ ID NO: 615712 - DNA, 25 bp, Homo sapien
gagccgaatcgcttccatgctcgtg

SEQ ID NO: 615713 - DNA, 25 bp, Homo sapien
agcctcggacccagactctgtcacc

SEQ ID NO: 615714 - DNA, 25 bp, Homo sapien
gtcaccaggagctacattcatgtca

SEQ ID NO: 615715 - DNA, 25 bp, Homo sapien
cttgttcgtacatctaacttgcatc

SEQ ID NO: 615716 - DNA, 25 bp, Homo sapien
gatgcaggagagttcgaataagatg

SEQ ID NO: 615717 - DNA, 25 bp, Homo sapien
caggtcctgccaccagtgcttttca

SEQ ID NO: 615718 - DNA, 25 bp, Homo sapien
gaaacacgattctgaacaggtcctg

SEQ ID NO: 615719 - DNA, 25 bp, Homo sapien
tgacagttgctcagggagtttcata

SEQ ID NO: 615720 - DNA, 25 bp, Homo sapien
catattgtcaaaaatccgaaacacg

SEQ ID NO: 615721 - DNA, 25 bp, Homo sapien
tgcaggttgttgtcatccactcaga

SEQ ID NO: 615722 - DNA, 25 bp, Homo sapien
tcataaaactgggtaaaaacatcac

SEQ ID NO: 615723 - DNA, 25 bp, Homo sapien
catcacaaatagcataaagtgcgtg

SEQ ID NO: 615724 - DNA, 25 bp, Homo sapien
ttgtttgacacaccactgcaattgt

SEQ ID NO: 615725 - DNA, 25 bp, Homo sapien
tttgtacctgatcgcgccaactgtt

SEQ ID NO: 615726 - DNA, 25 bp, Homo sapien
aagcaatttgtacctgatcgcgcca

SEQ ID NO: 615727 - DNA, 25 bp, Homo sapien
cctgatcgcgccaactgttcattat

SEQ ID NO: 615728 - DNA, 25 bp, Homo sapien
tggatattactaagttttctaagca

SEQ ID NO: 615729 - DNA, 25 bp, Homo sapien
gttgcaggtttcatcccagacttca

SEQ ID NO: 615730 - DNA, 25 bp, Homo sapien
ttgcaggtttcatcccagacttcag

SEQ ID NO: 615731 - DNA, 25 bp, Homo sapien
tgcaggtttcatcccagacttcagg

SEQ ID NO: 615732 - DNA, 25 bp, Homo sapien
catacagttgcaggtttcatcccag

SEQ ID NO: 615733 - DNA, 25 bp, Homo sapien
ctccattcctacaggtctccatgtc

SEQ ID NO: 615734 - DNA, 25 bp, Homo sapien
tccattcctacaggtctccatgtca

SEQ ID NO: 615735 - DNA, 25 bp, Homo sapien
ccattcctacaggtctccatgtcag

SEQ ID NO: 615736 - DNA, 25 bp, Homo sapien
taacctgagagtccgataagggaga

SEQ ID NO: 615737 - DNA, 25 bp, Homo sapien
taccacttctttggtgaagaggaaa

SEQ ID NO: 615738 - DNA, 25 bp, Homo sapien
gacagttgctgtatcccaaatgctt

SEQ ID NO: 615739 - DNA, 25 bp, Homo sapien
gcacagttacgccaaagcactattt

SEQ ID NO: 615740 - DNA, 25 bp, Homo sapien
tatctatgctgcttaaagactggcg

SEQ ID NO: 615741 - DNA, 25 bp, Homo sapien
ctgtcatctgttgggttagagagct

SEQ ID NO: 615742 - DNA, 25 bp, Homo sapien
tgcgtatggtctacccttccagctg

SEQ ID NO: 615743 - DNA, 25 bp, Homo sapien
ctctcagagggatttttatctatgc

SEQ ID NO: 615744 - DNA, 25 bp, Homo sapien
gattgagtcctaggtacttctcaga

SEQ ID NO: 615745 - DNA, 25 bp, Homo sapien
gaaatgtatacttggcctccacaca

SEQ ID NO: 615746 - DNA, 25 bp, Homo sapien
gagagtgcttctcctattgaaagaa

SEQ ID NO: 615747 - DNA, 25 bp, Homo sapien
gctcgtgaagaaaaagagcctgggc

SEQ ID NO: 615748 - DNA, 25 bp, Homo sapien
tttcaggttcctgcagtagccagcc

SEQ ID NO: 615749 - DNA, 25 bp, Homo sapien
gctactcctaaagaccaccactgga

SEQ ID NO: 615750 - DNA, 25 bp, Homo sapien
tggactgtgccctaaccagaggacg

SEQ ID NO: 615751 - DNA, 25 bp, Homo sapien
tcagggtaggactgcacgtttaagc

SEQ ID NO: 615752 - DNA, 25 bp, Homo sapien
tttgctcgtcgcagggtagaacaca

SEQ ID NO: 615753 - DNA, 25 bp, Homo sapien
caatgttgtcaatggtctgtatcaa

SEQ ID NO: 615754 - DNA, 25 bp, Homo sapien
gcatcctcctttttgctcgtcgcag

SEQ ID NO: 615755 - DNA, 25 bp, Homo sapien
ggcggcaaccatgtgctctgcatcc

SEQ ID NO: 615756 - DNA, 25 bp, Homo sapien
ggtgctgggaagacatgtacttata

SEQ ID NO: 615757 - DNA, 25 bp, Homo sapien
cctgatcctccgtctctatgtggat

SEQ ID NO: 615758 - DNA, 25 bp, Homo sapien
tgtacttatacatgccctgatcctc

SEQ ID NO: 615759 - DNA, 25 bp, Homo sapien
gacagtccgctgctcgtaattggag

SEQ ID NO: 615760 - DNA, 25 bp, Homo sapien
ctgctggtttcttgttttagaagat

SEQ ID NO: 615761 - DNA, 25 bp, Homo sapien
tcgaaacaggatcctcaaacaacag

SEQ ID NO: 615762 - DNA, 25 bp, Homo sapien
ggaatccctgcggttctcatcaaca

SEQ ID NO: 615763 - DNA, 25 bp, Homo sapien
tcatcaacatacattcgaaacagga

SEQ ID NO: 615764 - DNA, 25 bp, Homo sapien
tgaaatgagccattggtgcctcctt

SEQ ID NO: 615765 - DNA, 25 bp, Homo sapien
aaaatagctacatcattctaaggga

SEQ ID NO: 615766 - DNA, 25 bp, Homo sapien
cttttgggcttaagctgaaatgagc

SEQ ID NO: 615767 - DNA, 25 bp, Homo sapien
gagaaactttatgagactgtaggta

SEQ ID NO: 615768 - DNA, 25 bp, Homo sapien
aagagacttgtccaggcctcccgat

SEQ ID NO: 615769 - DNA, 25 bp, Homo sapien
gcctcccgatggctctcagaattca

SEQ ID NO: 615770 - DNA, 25 bp, Homo sapien
tagttagaagtaacaacaagagact

SEQ ID NO: 615771 - DNA, 25 bp, Homo sapien
tcacagtgatgaaataggcaagagc

SEQ ID NO: 615772 - DNA, 25 bp, Homo sapien
gaagaacttccgcagaactgctcgg

SEQ ID NO: 615773 - DNA, 25 bp, Homo sapien
gctcagggatcaggtcaaactgcat

SEQ ID NO: 615774 - DNA, 25 bp, Homo sapien
ggctcttctggtatccatatcttat

SEQ ID NO: 615775 - DNA, 25 bp, Homo sapien
tcttatacacaacacctatccgtag

SEQ ID NO: 615776 - DNA, 25 bp, Homo sapien
ctaccacactggtgacagtgctgct

SEQ ID NO: 615777 - DNA, 25 bp, Homo sapien
cacactggtgacagtgctgctggta

SEQ ID NO: 615778 - DNA, 25 bp, Homo sapien
acactggtgacagtgctgctggtac

SEQ ID NO: 615779 - DNA, 25 bp, Homo sapien
caaaacgtttatagccaatcatggg

SEQ ID NO: 615780 - DNA, 25 bp, Homo sapien
tatgggagcggcttctcatgcacag

SEQ ID NO: 615781 - DNA, 25 bp, Homo sapien
taaaacagggagatccacgaggcac

SEQ ID NO: 615782 - DNA, 25 bp, Homo sapien
taacactttgtctaacgctcagcga

SEQ ID NO: 615783 - DNA, 25 bp, Homo sapien
aagcaaaagcaccagaaatccttct

SEQ ID NO: 615784 - DNA, 25 bp, Homo sapien
tgatgacgcgctatgataccaggga

SEQ ID NO: 615785 - DNA, 25 bp, Homo sapien
gactgacttgttgaggtgatgacgc

SEQ ID NO: 615786 - DNA, 25 bp, Homo sapien
ttcgtacaaaagtcacctgccagag

SEQ ID NO: 615787 - DNA, 25 bp, Homo sapien
gatgtaccacctgatcaaagcatgg

SEQ ID NO: 615788 - DNA, 25 bp, Homo sapien
ctgaggccagagcgcatgagcgagc

SEQ ID NO: 615789 - DNA, 25 bp, Homo sapien
ggccagagcgcatgagcgagcggcc

SEQ ID NO: 615790 - DNA, 25 bp, Homo sapien
cagagcgcatgagcgagcggcccgc

SEQ ID NO: 615791 - DNA, 25 bp, Homo sapien
gcgcatgagcgagcggcccgctgca

SEQ ID NO: 615792 - DNA, 25 bp, Homo sapien
cagccgcggaccgtagctggcacta

SEQ ID NO: 615793 - DNA, 25 bp, Homo sapien
ccccggcaaaatggcgcgacagcga

SEQ ID NO: 615794 - DNA, 25 bp, Homo sapien
tcacattcaaaccccggcaaaatgg

SEQ ID NO: 615795 - DNA, 25 bp, Homo sapien
tagctggcactacccgctcctgccg

SEQ ID NO: 615796 - DNA, 25 bp, Homo sapien
gcagatttgcatcgctgagttccat

SEQ ID NO: 615797 - DNA, 25 bp, Homo sapien
tctgttagtgtttgcagatttgcat

SEQ ID NO: 615798 - DNA, 25 bp, Homo sapien
acgtcggatggcaggatcaggatca

SEQ ID NO: 615799 - DNA, 25 bp, Homo sapien
gatggcaggatcaggatcaagtgtt

SEQ ID NO: 615800 - DNA, 25 bp, Homo sapien
cgcatccggcctaaagcaggcatgt

SEQ ID NO: 615801 - DNA, 25 bp, Homo sapien
aatacataggtttctctcacctgtc

SEQ ID NO: 615802 - DNA, 25 bp, Homo sapien
tataaactacgcttgagaacccaag

SEQ ID NO: 615803 - DNA, 25 bp, Homo sapien
cacctgtcctgaaggaattaatcaa

SEQ ID NO: 615804 - DNA, 25 bp, Homo sapien
ggggttacaggcacatgctaccatg

SEQ ID NO: 615805 - DNA, 25 bp, Homo sapien
gggttacaggcacatgctaccatgc

SEQ ID NO: 615806 - DNA, 25 bp, Homo sapien
tgcctggctaatgtttgtattttta

SEQ ID NO: 615807 - DNA, 25 bp, Homo sapien
tggggttacaggcacatgctaccat

SEQ ID NO: 615808 - DNA, 25 bp, Homo sapien
agcaacagtggataattctgatttc

SEQ ID NO: 615809 - DNA, 25 bp, Homo sapien
aaagcaacagtggataattctgatt

SEQ ID NO: 615810 - DNA, 25 bp, Homo sapien
caacagtggataattctgatttcct

SEQ ID NO: 615811 - DNA, 25 bp, Homo sapien
caaaagcaacagtggataattctga

SEQ ID NO: 615812 - DNA, 25 bp, Homo sapien
tagtttttgaatgttactgaagcac

SEQ ID NO: 615813 - DNA, 25 bp, Homo sapien
tatagtttttgaatgttactgaagc

SEQ ID NO: 615814 - DNA, 25 bp, Homo sapien
aatatagtttttgaatgttactgaa

SEQ ID NO: 615815 - DNA, 25 bp, Homo sapien
atagtttttgaatgttactgaagca

SEQ ID NO: 615816 - DNA, 25 bp, Homo sapien
taagcatcaagtgcactatgttggc

SEQ ID NO: 615817 - DNA, 25 bp, Homo sapien
cactcgatcggcttcacaaattttg

SEQ ID NO: 615818 - DNA, 25 bp, Homo sapien
ttgctctgggctgctaagcatcaag

SEQ ID NO: 615819 - DNA, 25 bp, Homo sapien
ggctttaatggccactcgatcggct

SEQ ID NO: 615820 - DNA, 25 bp, Homo sapien
tctgaaagcgattcaccatttctgt

SEQ ID NO: 615821 - DNA, 25 bp, Homo sapien
tccattaataacatggaaatctcca

SEQ ID NO: 615822 - DNA, 25 bp, Homo sapien
tgtgctgtacggaggactccattaa

SEQ ID NO: 615823 - DNA, 25 bp, Homo sapien
taatgaatgtgctgtacggaggact

SEQ ID NO: 615824 - DNA, 25 bp, Homo sapien
tccataactcgtttgacttaaattc

SEQ ID NO: 615825 - DNA, 25 bp, Homo sapien
ggcaaagcaaaggcatccagaacaa

SEQ ID NO: 615826 - DNA, 25 bp, Homo sapien
cttaatttcagtccataactcgttt

SEQ ID NO: 615827 - DNA, 25 bp, Homo sapien
ggcatccagaacaagcttaatttca

SEQ ID NO: 615828 - DNA, 25 bp, Homo sapien
gaaatgctctaaacattatctatca

SEQ ID NO: 615829 - DNA, 25 bp, Homo sapien
tataacattcctaagaaagggaaca

SEQ ID NO: 615830 - DNA, 25 bp, Homo sapien
gatgggagttcactatagcatctct

SEQ ID NO: 615831 - DNA, 25 bp, Homo sapien
tgctaaccattaaatttgtgtaata

SEQ ID NO: 615832 - DNA, 25 bp, Homo sapien
tttgcatgggtactgcagagttcaa

SEQ ID NO: 615833 - DNA, 25 bp, Homo sapien
catcatttgcatgggtactgcagag

SEQ ID NO: 615834 - DNA, 25 bp, Homo sapien
gcagaggcatcatttgcatgggtac

SEQ ID NO: 615835 - DNA, 25 bp, Homo sapien
gggtactgcagagttcaatagtggc

SEQ ID NO: 615836 - DNA, 25 bp, Homo sapien
aaaagcttattatccaatgttaaga

SEQ ID NO: 615837 - DNA, 25 bp, Homo sapien
tcatccaagtttccatattatcttc

SEQ ID NO: 615838 - DNA, 25 bp, Homo sapien
ttcatccaagtttccatattatctt

SEQ ID NO: 615839 - DNA, 25 bp, Homo sapien
tgtgaccattagcatgagccaacac

SEQ ID NO: 615840 - DNA, 25 bp, Homo sapien
taaataggtttccagactgtagcca

SEQ ID NO: 615841 - DNA, 25 bp, Homo sapien
taagccaagcccatgataagagtaa

SEQ ID NO: 615842 - DNA, 25 bp, Homo sapien
gggatcctcacaactaagccttctg

SEQ ID NO: 615843 - DNA, 25 bp, Homo sapien
cagagtgagacaagggaagacatca

SEQ ID NO: 615844 - DNA, 25 bp, Homo sapien
cctcacactgattacttaaggcata

SEQ ID NO: 615845 - DNA, 25 bp, Homo sapien
actgcgacgggccaagcccaggagt

SEQ ID NO: 615846 - DNA, 25 bp, Homo sapien
cataaatagtagcacaaggtagcac

SEQ ID NO: 615847 - DNA, 25 bp, Homo sapien
tcaaacagtatattctggctgagtg

SEQ ID NO: 615848 - DNA, 25 bp, Homo sapien
tattgtaaactacagctatgccacc

SEQ ID NO: 615849 - DNA, 25 bp, Homo sapien
tgctaacataagtaagaggagtaac

SEQ ID NO: 615850 - DNA, 25 bp, Homo sapien
gagtaactgaaattcctgaactaga

SEQ ID NO: 615851 - DNA, 25 bp, Homo sapien
ctgggattttaagagctccaataag

SEQ ID NO: 615852 - DNA, 25 bp, Homo sapien
gattttaagagctccaataagccgg

SEQ ID NO: 615853 - DNA, 25 bp, Homo sapien
tttaagagctccaataagccggctt

SEQ ID NO: 615854 - DNA, 25 bp, Homo sapien
gggattttaagagctccaataagcc

SEQ ID NO: 615855 - DNA, 25 bp, Homo sapien
tcatatttaacctcttgacccgttg

SEQ ID NO: 615856 - DNA, 25 bp, Homo sapien
gaattcttcatcgtacttttgtgca

SEQ ID NO: 615857 - DNA, 25 bp, Homo sapien
aggcaggtatcgctggaattcttca

SEQ ID NO: 615858 - DNA, 25 bp, Homo sapien
aattccagatggctgtaacaaaacg

SEQ ID NO: 615859 - DNA, 25 bp, Homo sapien
agaatgtcttttaattatttgtctc

SEQ ID NO: 615860 - DNA, 25 bp, Homo sapien
agagaatgtcttttaattatttgtc

SEQ ID NO: 615861 - DNA, 25 bp, Homo sapien
taattatttgtctccaccatcatct

SEQ ID NO: 615862 - DNA, 25 bp, Homo sapien
gtcttttaattatttgtctccacca

SEQ ID NO: 615863 - DNA, 25 bp, Homo sapien
cacagatacttgtcagcgtgttctg

SEQ ID NO: 615864 - DNA, 25 bp, Homo sapien
cgtgttctggtcctcaaatagattc

SEQ ID NO: 615865 - DNA, 25 bp, Homo sapien
gattcttataatgaggtctctcaca

SEQ ID NO: 615866 - DNA, 25 bp, Homo sapien
ccatgttaggcacaataaccttttc

SEQ ID NO: 615867 - DNA, 25 bp, Homo sapien
tgctaacttttaatttcaccaaata

SEQ ID NO: 615868 - DNA, 25 bp, Homo sapien
ggattatacctgcaactgtcaaaaa

SEQ ID NO: 615869 - DNA, 25 bp, Homo sapien
caaataagtagagtggacaatgtca

SEQ ID NO: 615870 - DNA, 25 bp, Homo sapien
tagggatcagtatcagaatgctaac

SEQ ID NO: 615871 - DNA, 25 bp, Homo sapien
tatgtactcctcagaattatcttca

SEQ ID NO: 615872 - DNA, 25 bp, Homo sapien
ccttatgtactcctcagaattatct

SEQ ID NO: 615873 - DNA, 25 bp, Homo sapien
tctctccttatgtactcctcagaat

SEQ ID NO: 615874 - DNA, 25 bp, Homo sapien
tctccttatgtactcctcagaatta

SEQ ID NO: 615875 - DNA, 25 bp, Homo sapien
tgtcactaggtagatggctgcatct

SEQ ID NO: 615876 - DNA, 25 bp, Homo sapien
tcgtaccagatcacaagcagccctg

SEQ ID NO: 615877 - DNA, 25 bp, Homo sapien
gcagccctgcgtctagtatcaatat

SEQ ID NO: 615878 - DNA, 25 bp, Homo sapien
ttaacataaccagagaagattcctg

SEQ ID NO: 615879 - DNA, 25 bp, Homo sapien
cagttaggtttacaagttcatttgc

SEQ ID NO: 615880 - DNA, 25 bp, Homo sapien
gaggatgtgattcacaaagaactca

SEQ ID NO: 615881 - DNA, 25 bp, Homo sapien
cacaaagaactcagttaggtttaca

SEQ ID NO: 615882 - DNA, 25 bp, Homo sapien
agttcatttgcttgtgtaattccat

SEQ ID NO: 615883 - DNA, 25 bp, Homo sapien
tgataccgtcagctttaaggacagg

SEQ ID NO: 615884 - DNA, 25 bp, Homo sapien
tatttgataccgtcagctttaagga

SEQ ID NO: 615885 - DNA, 25 bp, Homo sapien
taccgtcagctttaaggacaggaaa

SEQ ID NO: 615886 - DNA, 25 bp, Homo sapien
aatatatttgataccgtcagcttta

SEQ ID NO: 615887 - DNA, 25 bp, Homo sapien
ttgaagatgattaatcaagagagga

SEQ ID NO: 615888 - DNA, 25 bp, Homo sapien
gaggaatcgagactaaaagatgttc

SEQ ID NO: 615889 - DNA, 25 bp, Homo sapien
taatcaagagaggaatcgagactaa

SEQ ID NO: 615890 - DNA, 25 bp, Homo sapien
gatgattaatcaagagaggaatcga

SEQ ID NO: 615891 - DNA, 25 bp, Homo sapien
gctgcgtaagtatgaacaacaatac

SEQ ID NO: 615892 - DNA, 25 bp, Homo sapien
tagtaaagagccgttcaagagcatg

SEQ ID NO: 615893 - DNA, 25 bp, Homo sapien
cattgttaggccctcgcatagtaaa

SEQ ID NO: 615894 - DNA, 25 bp, Homo sapien
gccgttcaagagcatgagctgcgta

SEQ ID NO: 615895 - DNA, 25 bp, Homo sapien
acaaacggtgcgatttctgcagctg

SEQ ID NO: 615896 - DNA, 25 bp, Homo sapien
gaaaaggtttgttagcagaatctca

SEQ ID NO: 615897 - DNA, 25 bp, Homo sapien
gtgtgagagctttgaaaaggtttgt

SEQ ID NO: 615898 - DNA, 25 bp, Homo sapien
gttagcagaatctcaacaaacggtg

SEQ ID NO: 615899 - DNA, 25 bp, Homo sapien
gagtgatgagagtagggatgtaggg

SEQ ID NO: 615900 - DNA, 25 bp, Homo sapien
taagctgagtgatgagagtagggat

SEQ ID NO: 615901 - DNA, 25 bp, Homo sapien
atgtaggggattatggcttcttgta

SEQ ID NO: 615902 - DNA, 25 bp, Homo sapien
tgtaggggattatggcttcttgtag

SEQ ID NO: 615903 - DNA, 25 bp, Homo sapien
aaatggcccaaagtccaccatgaaa

SEQ ID NO: 615904 - DNA, 25 bp, Homo sapien
taacttgtcttaagcccacgtgccc

SEQ ID NO: 615905 - DNA, 25 bp, Homo sapien
cgtgccctcgcagagaagaaatact

SEQ ID NO: 615906 - DNA, 25 bp, Homo sapien
gtaatgccactagccttaacttctg

SEQ ID NO: 615907 - DNA, 25 bp, Homo sapien
acagcagcagggttagctttgcaag

SEQ ID NO: 615908 - DNA, 25 bp, Homo sapien
tgcaagttattcttatggataaaca

SEQ ID NO: 615909 - DNA, 25 bp, Homo sapien
tgcacatcattttgtaagatttcag

SEQ ID NO: 615910 - DNA, 25 bp, Homo sapien
catattgcttcaaacatgtagtgat

SEQ ID NO: 615911 - DNA, 25 bp, Homo sapien
gggctgcattttatagccatgttaa

SEQ ID NO: 615912 - DNA, 25 bp, Homo sapien
cacaaaaggcccacatcgcttaggt

SEQ ID NO: 615913 - DNA, 25 bp, Homo sapien
cacatcgcttaggtgggctgcattt

SEQ ID NO: 615914 - DNA, 25 bp, Homo sapien
ggtgggctgcattttatagccatgt

SEQ ID NO: 615915 - DNA, 25 bp, Homo sapien
cacttgctattgtgtttgaaccgcg

SEQ ID NO: 615916 - DNA, 25 bp, Homo sapien
ggccatataggaagacgggatgtca

SEQ ID NO: 615917 - DNA, 25 bp, Homo sapien
cttgaagaagcctcactagagcagg

SEQ ID NO: 615918 - DNA, 25 bp, Homo sapien
gaaccgcgttctaagaatgcttgaa

SEQ ID NO: 615919 - DNA, 25 bp, Homo sapien
tagaagataaaaaccttggtggtca

SEQ ID NO: 615920 - DNA, 25 bp, Homo sapien
tctgaaagacacctagtaacccagg

SEQ ID NO: 615921 - DNA, 25 bp, Homo sapien
ttgctttggatgcaatcagcttctg

SEQ ID NO: 615922 - DNA, 25 bp, Homo sapien
aaccttggtggtcatttgctttgga

SEQ ID NO: 615923 - DNA, 25 bp, Homo sapien
tgtttcctatattggtcaactgatt

SEQ ID NO: 615924 - DNA, 25 bp, Homo sapien
ttgtttcctatattggtcaactgat

SEQ ID NO: 615925 - DNA, 25 bp, Homo sapien
gtttcctatattggtcaactgattc

SEQ ID NO: 615926 - DNA, 25 bp, Homo sapien
tttcctatattggtcaactgattca

SEQ ID NO: 615927 - DNA, 25 bp, Homo sapien
tcattacttctgtagaacatccaga

SEQ ID NO: 615928 - DNA, 25 bp, Homo sapien
tacttctgtagaacatccagatgat

SEQ ID NO: 615929 - DNA, 25 bp, Homo sapien
tgtagaacatccagatgattttact

SEQ ID NO: 615930 - DNA, 25 bp, Homo sapien
tttcattacttctgtagaacatcca

SEQ ID NO: 615931 - DNA, 25 bp, Homo sapien
tctgggacttaggtgatgctcctac

SEQ ID NO: 615932 - DNA, 25 bp, Homo sapien
catgaacctccacacgtggccaagt

SEQ ID NO: 615933 - DNA, 25 bp, Homo sapien
tatctgcaaccataaagtctaaggg

SEQ ID NO: 615934 - DNA, 25 bp, Homo sapien
tcaacctctgggacttaggtgatgc

SEQ ID NO: 615935 - DNA, 25 bp, Homo sapien
ttgtagtgctagtgccccatatttt

SEQ ID NO: 615936 - DNA, 25 bp, Homo sapien
atatttcttgtagtgctagtgcccc

SEQ ID NO: 615937 - DNA, 25 bp, Homo sapien
tttcttgtagtgctagtgccccata

SEQ ID NO: 615938 - DNA, 25 bp, Homo sapien
tcttgtagtgctagtgccccatatt

SEQ ID NO: 615939 - DNA, 25 bp, Homo sapien
cactagcagtgcatgagatttcctc

SEQ ID NO: 615940 - DNA, 25 bp, Homo sapien
gaaatatggctcaaagggtatggca

SEQ ID NO: 615941 - DNA, 25 bp, Homo sapien
aagatcaggctaattcaggctccca

SEQ ID NO: 615942 - DNA, 25 bp, Homo sapien
gaggtacagggatctaactgtcccc

SEQ ID NO: 615943 - DNA, 25 bp, Homo sapien
tcagtgtccatcattgggggacatt

SEQ ID NO: 615944 - DNA, 25 bp, Homo sapien
cattctgttagtaatttggttatgc

SEQ ID NO: 615945 - DNA, 25 bp, Homo sapien
aaccgcacagatctttttctctaca

SEQ ID NO: 615946 - DNA, 25 bp, Homo sapien
taatttggttatgccaaccgcacag

SEQ ID NO: 615947 - DNA, 25 bp, Homo sapien
gaatggtatcatcttcgggtaactc

SEQ ID NO: 615948 - DNA, 25 bp, Homo sapien
gacaggcggtagacaacttgtgaag

SEQ ID NO: 615949 - DNA, 25 bp, Homo sapien
ggttattcaccatttgacctacagg

SEQ ID NO: 615950 - DNA, 25 bp, Homo sapien
tgagaaggcagtctgatatcctggt

SEQ ID NO: 615951 - DNA, 25 bp, Homo sapien
gattacttcgatctgggaaataaac

SEQ ID NO: 615952 - DNA, 25 bp, Homo sapien
tacatttctattgaagggatttttc

SEQ ID NO: 615953 - DNA, 25 bp, Homo sapien
actcttattataaagtgctgacaaa

SEQ ID NO: 615954 - DNA, 25 bp, Homo sapien
gacaaaatgcaactatacagcctta

SEQ ID NO: 615955 - DNA, 25 bp, Homo sapien
agtccttactggttaatgatgtaga

SEQ ID NO: 615956 - DNA, 25 bp, Homo sapien
ggtacttacgcgtgaaacgtatgat

SEQ ID NO: 615957 - DNA, 25 bp, Homo sapien
gaaagtctccgtaataatacaatga

SEQ ID NO: 615958 - DNA, 25 bp, Homo sapien
tgtctaagacttgctcaatacagag

SEQ ID NO: 615959 - DNA, 25 bp, Homo sapien
tgcttttatgccttcaaaaataggt

SEQ ID NO: 615960 - DNA, 25 bp, Homo sapien
aagagcagccagtcaagtcattaat

SEQ ID NO: 615961 - DNA, 25 bp, Homo sapien
gccagtcaagtcattaatcaccatc

SEQ ID NO: 615962 - DNA, 25 bp, Homo sapien
gcagccagtcaagtcattaatcacc

SEQ ID NO: 615963 - DNA, 25 bp, Homo sapien
agtcaagtcattaatcaccatccaa

SEQ ID NO: 615964 - DNA, 25 bp, Homo sapien
ggtgcgccaatacaaaccccatctt

SEQ ID NO: 615965 - DNA, 25 bp, Homo sapien
caaaccccatcttctacgggagagc

SEQ ID NO: 615966 - DNA, 25 bp, Homo sapien
atacaaaccccatcttctacgggag

SEQ ID NO: 615967 - DNA, 25 bp, Homo sapien
ttggagatcttggtgcgccaataca

SEQ ID NO: 615968 - DNA, 25 bp, Homo sapien
cccttggagatactggagcgcttct

SEQ ID NO: 615969 - DNA, 25 bp, Homo sapien
gaaggtacccttggagatactggag

SEQ ID NO: 615970 - DNA, 25 bp, Homo sapien
tactggagcgcttctgcattcaggc

SEQ ID NO: 615971 - DNA, 25 bp, Homo sapien
actggctgcctgaaggtacccttgg

SEQ ID NO: 615972 - DNA, 25 bp, Homo sapien
gaaaccatctgggtttagcccatta

SEQ ID NO: 615973 - DNA, 25 bp, Homo sapien
taggaaaccatctgggtttagccca

SEQ ID NO: 615974 - DNA, 25 bp, Homo sapien
accatctgggtttagcccattagaa

SEQ ID NO: 615975 - DNA, 25 bp, Homo sapien
tcctaggaaaccatctgggtttagc

SEQ ID NO: 615976 - DNA, 25 bp, Homo sapien
gaattcgtgacaagttcaaaaggag

SEQ ID NO: 615977 - DNA, 25 bp, Homo sapien
caagatggaattcgtgacaagttca

SEQ ID NO: 615978 - DNA, 25 bp, Homo sapien
cctttacaagatggaattcgtgaca

SEQ ID NO: 615979 - DNA, 25 bp, Homo sapien
tgacaagttcaaaaggagaacttcc

SEQ ID NO: 615980 - DNA, 25 bp, Homo sapien
agaagccacccacataactgtatga

SEQ ID NO: 615981 - DNA, 25 bp, Homo sapien
tctccacagtgtccgtcaaaattta

SEQ ID NO: 615982 - DNA, 25 bp, Homo sapien
aactatgaaatgtgcactgcttggc

SEQ ID NO: 615983 - DNA, 25 bp, Homo sapien
taagattatccaaaccgtgcaaacg

SEQ ID NO: 615984 - DNA, 25 bp, Homo sapien
gagagcactgaaaacctgcccttaa

SEQ ID NO: 615985 - DNA, 25 bp, Homo sapien
gagcactgaaaacctgcccttaaga

SEQ ID NO: 615986 - DNA, 25 bp, Homo sapien
tgagagagcactgaaaacctgccct

SEQ ID NO: 615987 - DNA, 25 bp, Homo sapien
cactgaaaacctgcccttaagatgt

SEQ ID NO: 615988 - DNA, 25 bp, Homo sapien
cattcacctacagctgggcaaaatc

SEQ ID NO: 615989 - DNA, 25 bp, Homo sapien
ccatgtgtggtagctcaagccagta

SEQ ID NO: 615990 - DNA, 25 bp, Homo sapien
cccagcaattagcaagcctgagagg

SEQ ID NO: 615991 - DNA, 25 bp, Homo sapien
gagggtagggacacatcttcgttgt

SEQ ID NO: 615992 - DNA, 25 bp, Homo sapien
actgttgtggcccacaagagccagg

SEQ ID NO: 615993 - DNA, 25 bp, Homo sapien
gaactgttgtggcccacaagagcca

SEQ ID NO: 615994 - DNA, 25 bp, Homo sapien
agaactgttgtggcccacaagagcc

SEQ ID NO: 615995 - DNA, 25 bp, Homo sapien
aactgttgtggcccacaagagccag

SEQ ID NO: 615996 - DNA, 25 bp, Homo sapien
tccaacagtgcatgatggttccagt

SEQ ID NO: 615997 - DNA, 25 bp, Homo sapien
tttggataaatgtctgtccaagtct

SEQ ID NO: 615998 - DNA, 25 bp, Homo sapien
tgtttcgttaaatagtagctgtcct

SEQ ID NO: 615999 - DNA, 25 bp, Homo sapien
ccacattgtcgccaatgtttattgt

SEQ ID NO: 616000 - DNA, 25 bp, Homo sapien
ctgtggctggtttatcttacatagc

SEQ ID NO: 616001 - DNA, 25 bp, Homo sapien
gcccagactgctaactacttttaag

SEQ ID NO: 616002 - DNA, 25 bp, Homo sapien
tcctataaatggacagtatctgccc

SEQ ID NO: 616003 - DNA, 25 bp, Homo sapien
aatacattgtcagtaggcacttggg

SEQ ID NO: 616004 - DNA, 25 bp, Homo sapien
gctggctcactcagacacattggga

SEQ ID NO: 616005 - DNA, 25 bp, Homo sapien
tgtgaaagaagaaacggcacgaccc

SEQ ID NO: 616006 - DNA, 25 bp, Homo sapien
tggcggtccctacgcaatagcagct

SEQ ID NO: 616007 - DNA, 25 bp, Homo sapien
tatttcattgactaacccaggacag

SEQ ID NO: 616008 - DNA, 25 bp, Homo sapien
gatacttccaatggcaatgctggga

SEQ ID NO: 616009 - DNA, 25 bp, Homo sapien
caatgtaatggctgcagacttctca

SEQ ID NO: 616010 - DNA, 25 bp, Homo sapien
ggaatagatgtacagtagttcacca

SEQ ID NO: 616011 - DNA, 25 bp, Homo sapien
catcattgtaggtttagagttagac

SEQ ID NO: 616012 - DNA, 25 bp, Homo sapien
gggaatggagtcaacttgctctgtt

SEQ ID NO: 616013 - DNA, 25 bp, Homo sapien
caaaggtgttgctcatgtcactgac

SEQ ID NO: 616014 - DNA, 25 bp, Homo sapien
tagcatgaatactggttgagataca

SEQ ID NO: 616015 - DNA, 25 bp, Homo sapien
tcagtgtgacagttaccaacgatag

SEQ ID NO: 616016 - DNA, 25 bp, Homo sapien
ttgacttctgataggtaacagtgct

SEQ ID NO: 616017 - DNA, 25 bp, Homo sapien
tgctatgtttccgatgagtttggtg

SEQ ID NO: 616018 - DNA, 25 bp, Homo sapien
catgagagaagagtaatgagccggc

SEQ ID NO: 616019 - DNA, 25 bp, Homo sapien
ccatgagagaagagtaatgagccgg

SEQ ID NO: 616020 - DNA, 25 bp, Homo sapien
gggaaaactaatgattcccagtgta

SEQ ID NO: 616021 - DNA, 25 bp, Homo sapien
ggtttggtataaattgcgtgaagtg

SEQ ID NO: 616022 - DNA, 25 bp, Homo sapien
aatgggaaaactaatgattcccagt

SEQ ID NO: 616023 - DNA, 25 bp, Homo sapien
gcgtgaagtggaaaaccaggctctc

SEQ ID NO: 616024 - DNA, 25 bp, Homo sapien
taaaggcaaaagattgtgtacatct

SEQ ID NO: 616025 - DNA, 25 bp, Homo sapien
gaacttagtcaaatggagctgccag

SEQ ID NO: 616026 - DNA, 25 bp, Homo sapien
gaagatatgcagtaaagccagcgct

SEQ ID NO: 616027 - DNA, 25 bp, Homo sapien
aagttctccacagaaagagggtgcc

SEQ ID NO: 616028 - DNA, 25 bp, Homo sapien
tgagttgaaacagtcagcgccatcc

SEQ ID NO: 616029 - DNA, 25 bp, Homo sapien
tgctctctcagggagccaaatactg

SEQ ID NO: 616030 - DNA, 25 bp, Homo sapien
atactgaacaagaaccagtctcttc

SEQ ID NO: 616031 - DNA, 25 bp, Homo sapien
aagctgtttacctgcatttgttcac

SEQ ID NO: 616032 - DNA, 25 bp, Homo sapien
ttcatagcactgaattaacctgcac

SEQ ID NO: 616033 - DNA, 25 bp, Homo sapien
cggtgcctggtttagtatgcattct

SEQ ID NO: 616034 - DNA, 25 bp, Homo sapien
atggagtcttgctctatcgcccagg

SEQ ID NO: 616035 - DNA, 25 bp, Homo sapien
gtaccaccatgcctggctaattttt

SEQ ID NO: 616036 - DNA, 25 bp, Homo sapien
gattacaggtgcgtaccaccatgcc

SEQ ID NO: 616037 - DNA, 25 bp, Homo sapien
ccacttcagcctcccgataagctga

SEQ ID NO: 616038 - DNA, 25 bp, Homo sapien
tcttatttgatgtgatacccagtga

SEQ ID NO: 616039 - DNA, 25 bp, Homo sapien
gacagatttgtttcacactagacct

SEQ ID NO: 616040 - DNA, 25 bp, Homo sapien
tcatgagcctctaaattggatcttc

SEQ ID NO: 616041 - DNA, 25 bp, Homo sapien
tgtggttgaaatgcttctcgtgtaa

SEQ ID NO: 616042 - DNA, 25 bp, Homo sapien
tggagaaccccatgtgttagtcact

SEQ ID NO: 616043 - DNA, 25 bp, Homo sapien
tattaactcatagccaaggtcggtt

SEQ ID NO: 616044 - DNA, 25 bp, Homo sapien
tctggaaaacatgcgaaactcgaat

SEQ ID NO: 616045 - DNA, 25 bp, Homo sapien
cattgtgtcacaacattagcgattt

SEQ ID NO: 616046 - DNA, 25 bp, Homo sapien
tcttaacacacatgcggcaaagtgg

SEQ ID NO: 616047 - DNA, 25 bp, Homo sapien
tcaggaatccgtgcttaccaagtgt

SEQ ID NO: 616048 - DNA, 25 bp, Homo sapien
tgtgtgtttacctgagtgatcctcc

SEQ ID NO: 616049 - DNA, 25 bp, Homo sapien
tagagggagcagtttcggttatcct

SEQ ID NO: 616050 - DNA, 25 bp, Homo sapien
aggatattcaccatctcccgcagga

SEQ ID NO: 616051 - DNA, 25 bp, Homo sapien
catctccgcttaggcaactgcagga

SEQ ID NO: 616052 - DNA, 25 bp, Homo sapien
ggcgtacgcttaattgggacactgt

SEQ ID NO: 616053 - DNA, 25 bp, Homo sapien
tagaggctgcagtgttccgcgtgcc

SEQ ID NO: 616054 - DNA, 25 bp, Homo sapien
cggtgccacaaacaggtgctgcggc

SEQ ID NO: 616055 - DNA, 25 bp, Homo sapien
acaaacaggtgctgcggccgccttt

SEQ ID NO: 616056 - DNA, 25 bp, Homo sapien
tgccacaaacaggtgctgcggccgc

SEQ ID NO: 616057 - DNA, 25 bp, Homo sapien
cacaaacaggtgctgcggccgcctt

SEQ ID NO: 616058 - DNA, 25 bp, Homo sapien
acttagcaagactcaagaggtcttc

SEQ ID NO: 616059 - DNA, 25 bp, Homo sapien
gcaagactcaagaggtcttcaggac

SEQ ID NO: 616060 - DNA, 25 bp, Homo sapien
ttacttagcaagactcaagaggtct

SEQ ID NO: 616061 - DNA, 25 bp, Homo sapien
tagcaagactcaagaggtcttcagg

SEQ ID NO: 616062 - DNA, 25 bp, Homo sapien
gaaccaggtgatacatacaggtgat

SEQ ID NO: 616063 - DNA, 25 bp, Homo sapien
tactattgagtagtggcaccaactg

SEQ ID NO: 616064 - DNA, 25 bp, Homo sapien
tggacactgtagatatcaccgtttc

SEQ ID NO: 616065 - DNA, 25 bp, Homo sapien
taaagtgtaagtttcctatgggtgc

SEQ ID NO: 616066 - DNA, 25 bp, Homo sapien
tttaagatataagggtcttgccatg

SEQ ID NO: 616067 - DNA, 25 bp, Homo sapien
agctatgccccccaattcaaagcaa

SEQ ID NO: 616068 - DNA, 25 bp, Homo sapien
cggaagcgagcacagcctgcggtcc

SEQ ID NO: 616069 - DNA, 25 bp, Homo sapien
ctcgtcgtctttgcgcaagtaccat

SEQ ID NO: 616070 - DNA, 25 bp, Homo sapien
gttgtcgcagaagccacttccggaa

SEQ ID NO: 616071 - DNA, 25 bp, Homo sapien
ttaacttttcgcagcctcctcgtcg

SEQ ID NO: 616072 - DNA, 25 bp, Homo sapien
cgattaagccgaggtccgcaagcat

SEQ ID NO: 616073 - DNA, 25 bp, Homo sapien
gcctatggttccgattaagccgagg

SEQ ID NO: 616074 - DNA, 25 bp, Homo sapien
cgtcatcctcgcctatggttccgat

SEQ ID NO: 616075 - DNA, 25 bp, Homo sapien
tcgtccccggagtcagactcgggct

SEQ ID NO: 616076 - DNA, 25 bp, Homo sapien
tcagggttgaaatcagcactgcggt

SEQ ID NO: 616077 - DNA, 25 bp, Homo sapien
tggctcatgacatcagccagggccc

SEQ ID NO: 616078 - DNA, 25 bp, Homo sapien
tctcagtgaaaacgaaatcagggtt

SEQ ID NO: 616079 - DNA, 25 bp, Homo sapien
caaagctttttgtcgtctgcccagc

SEQ ID NO: 616080 - DNA, 25 bp, Homo sapien
caatcttctcatctaatgtagtggc

SEQ ID NO: 616081 - DNA, 25 bp, Homo sapien
tttctttcgaactttctcaatcttc

SEQ ID NO: 616082 - DNA, 25 bp, Homo sapien
ttctcatctaatgtagtggctgccc

SEQ ID NO: 616083 - DNA, 25 bp, Homo sapien
ctcaatcttctcatctaatgtagtg

SEQ ID NO: 616084 - DNA, 25 bp, Homo sapien
tcatcattctcttgaaggtcttcct

SEQ ID NO: 616085 - DNA, 25 bp, Homo sapien
tgctcctttggttcagagccttcct

SEQ ID NO: 616086 - DNA, 25 bp, Homo sapien
tcctgctcctttggttcagagcctt

SEQ ID NO: 616087 - DNA, 25 bp, Homo sapien
gtcagtctccgaggcttcatcttct

SEQ ID NO: 616088 - DNA, 25 bp, Homo sapien
tggacactgtcctaagtgccaatgc

SEQ ID NO: 616089 - DNA, 25 bp, Homo sapien
cagatgaggacactttgtggcagca

SEQ ID NO: 616090 - DNA, 25 bp, Homo sapien
ggtgaccatcgtcaaccttgtttca

SEQ ID NO: 616091 - DNA, 25 bp, Homo sapien
gagaaaaacttagctgatgaccacg

SEQ ID NO: 616092 - DNA, 25 bp, Homo sapien
tcttcttcttcttccgatcctttac

SEQ ID NO: 616093 - DNA, 25 bp, Homo sapien
ttcttcttcttcttccgatccttta

SEQ ID NO: 616094 - DNA, 25 bp, Homo sapien
tttcatcgtactgagatgcatcttc

SEQ ID NO: 616095 - DNA, 25 bp, Homo sapien
gtcctggaacgagaggttttcatcg

SEQ ID NO: 616096 - DNA, 25 bp, Homo sapien
gaggttttcatcgtactgagatgca

SEQ ID NO: 616097 - DNA, 25 bp, Homo sapien
gaacgagaggttttcatcgtactga

SEQ ID NO: 616098 - DNA, 25 bp, Homo sapien
ttcagaagagggcgggaaaggttca

SEQ ID NO: 616099 - DNA, 25 bp, Homo sapien
tcagaagagggcgggaaaggttcat

SEQ ID NO: 616100 - DNA, 25 bp, Homo sapien
cacaggtatgcacgccttctggatc

SEQ ID NO: 616101 - DNA, 25 bp, Homo sapien
ttccccaatagacccacaggtatgc

SEQ ID NO: 616102 - DNA, 25 bp, Homo sapien
acaggcacagatgtccttccccaat

SEQ ID NO: 616103 - DNA, 25 bp, Homo sapien
aggtatgcacgccttctggatcggg

SEQ ID NO: 616104 - DNA, 25 bp, Homo sapien
accagcacgcgggtgactggagcct

SEQ ID NO: 616105 - DNA, 25 bp, Homo sapien
gagcctggcggggtttataaatcag

SEQ ID NO: 616106 - DNA, 25 bp, Homo sapien
tctcgggtgggcactagcaccagca

SEQ ID NO: 616107 - DNA, 25 bp, Homo sapien
ataaatcagacgctccaaaacaggc

SEQ ID NO: 616108 - DNA, 25 bp, Homo sapien
ggcgctgcccgaagagctgcttcct

SEQ ID NO: 616109 - DNA, 25 bp, Homo sapien
tggaggtgatcgatgagccggcctg

SEQ ID NO: 616110 - DNA, 25 bp, Homo sapien
cagttgtggaggtgatcgatgagcc

SEQ ID NO: 616111 - DNA, 25 bp, Homo sapien
gcctggggtggcgatgaggatgtca

SEQ ID NO: 616112 - DNA, 25 bp, Homo sapien
tggccaggctgtgtcgacaggcggg

SEQ ID NO: 616113 - DNA, 25 bp, Homo sapien
gggcgtgtggccaggctgtgtcgac

SEQ ID NO: 616114 - DNA, 25 bp, Homo sapien
cgtgtggccaggctgtgtcgacagg

SEQ ID NO: 616115 - DNA, 25 bp, Homo sapien
aaagtgggggcgtgtggccaggctg

SEQ ID NO: 616116 - DNA, 25 bp, Homo sapien
cattcggatgatctccttcatctgc

SEQ ID NO: 616117 - DNA, 25 bp, Homo sapien
tggccgagaagagcatggtctggcg

SEQ ID NO: 616118 - DNA, 25 bp, Homo sapien
tctgctcctcaaagtactcatccag

SEQ ID NO: 616119 - DNA, 25 bp, Homo sapien
catggtctggcggtggtgggaacac

SEQ ID NO: 616120 - DNA, 25 bp, Homo sapien
agcacaaagccaggtttcctcagct

SEQ ID NO: 616121 - DNA, 25 bp, Homo sapien
ctgccaagcacaaagccaggtttcc

SEQ ID NO: 616122 - DNA, 25 bp, Homo sapien
gccaagcacaaagccaggtttcctc

SEQ ID NO: 616123 - DNA, 25 bp, Homo sapien
caagcacaaagccaggtttcctcag

SEQ ID NO: 616124 - DNA, 25 bp, Homo sapien
ccttcacgattaggccggatccgga

SEQ ID NO: 616125 - DNA, 25 bp, Homo sapien
tccggacaggattcttcaaggagac

SEQ ID NO: 616126 - DNA, 25 bp, Homo sapien
tgctgttcacaaatatccggacagg

SEQ ID NO: 616127 - DNA, 25 bp, Homo sapien
atccggatgaactcctgccgcagga

SEQ ID NO: 616128 - DNA, 25 bp, Homo sapien
tggcactggatagacaggcactgtc

SEQ ID NO: 616129 - DNA, 25 bp, Homo sapien
cgatccaggcgacagagaacagtgg

SEQ ID NO: 616130 - DNA, 25 bp, Homo sapien
gactgacgggtacaacagcagctga

SEQ ID NO: 616131 - DNA, 25 bp, Homo sapien
gcatggatactacgagctcaaggaa

SEQ ID NO: 616132 - DNA, 25 bp, Homo sapien
tcagtgaaggtcctcgtcaacaaag

SEQ ID NO: 616133 - DNA, 25 bp, Homo sapien
tcttggtttgcgtgaacagcatcac

SEQ ID NO: 616134 - DNA, 25 bp, Homo sapien
tgacaagttgccatggagctcaccc

SEQ ID NO: 616135 - DNA, 25 bp, Homo sapien
ccagccgctgcgtctgtgacaagtt

SEQ ID NO: 616136 - DNA, 25 bp, Homo sapien
gagaccatgtgttgcctttccaagc

SEQ ID NO: 616137 - DNA, 25 bp, Homo sapien
gaaatcacatggaaagcacgcagca

SEQ ID NO: 616138 - DNA, 25 bp, Homo sapien
gatcatgctatgtgtcccctgctaa

SEQ ID NO: 616139 - DNA, 25 bp, Homo sapien
catccaaggacatgagggtcatctc

SEQ ID NO: 616140 - DNA, 25 bp, Homo sapien
catccagacaccctcccctaataat

SEQ ID NO: 616141 - DNA, 25 bp, Homo sapien
tcccctaataatgctccacaagagc

SEQ ID NO: 616142 - DNA, 25 bp, Homo sapien
caaacagctgttcatccagacaccc

SEQ ID NO: 616143 - DNA, 25 bp, Homo sapien
gacaccctcccctaataatgctcca

SEQ ID NO: 616144 - DNA, 25 bp, Homo sapien
caatgtcaagtccacgggctgccac

SEQ ID NO: 616145 - DNA, 25 bp, Homo sapien
aatgtcaagtccacgggctgccaca

SEQ ID NO: 616146 - DNA, 25 bp, Homo sapien
cacgggctgccacatcagtggccac

SEQ ID NO: 616147 - DNA, 25 bp, Homo sapien
gaaggtcaaaaatgaacgtcaggcc

SEQ ID NO: 616148 - DNA, 25 bp, Homo sapien
ctagaaggtcaaaaatgaacgtcag

SEQ ID NO: 616149 - DNA, 25 bp, Homo sapien
aggtcaaaaatgaacgtcaggcctg

SEQ ID NO: 616150 - DNA, 25 bp, Homo sapien
tccaaggaagatagtgtctgctcac

SEQ ID NO: 616151 - DNA, 25 bp, Homo sapien
tctcccaccagagagactgagcgcc

SEQ ID NO: 616152 - DNA, 25 bp, Homo sapien
tgtttgatggtattaggcattgtga

SEQ ID NO: 616153 - DNA, 25 bp, Homo sapien
tcgccccacccggtggacataatgt

SEQ ID NO: 616154 - DNA, 25 bp, Homo sapien
agccctgccagcacgtgctgttcgc

SEQ ID NO: 616155 - DNA, 25 bp, Homo sapien
aagtatcctggccttcacaggggcc

SEQ ID NO: 616156 - DNA, 25 bp, Homo sapien
cagcttttacaatctccttcagcat

SEQ ID NO: 616157 - DNA, 25 bp, Homo sapien
ggaagtatcctggccttcacagggg

SEQ ID NO: 616158 - DNA, 25 bp, Homo sapien
cttggggaagtatcctggccttcac

SEQ ID NO: 616159 - DNA, 25 bp, Homo sapien
tcttgtcccggaatttgaggatgac

SEQ ID NO: 616160 - DNA, 25 bp, Homo sapien
tttctcaatcttgtcccggaatttg

SEQ ID NO: 616161 - DNA, 25 bp, Homo sapien
tttttcctccgcctctagctgcaga

SEQ ID NO: 616162 - DNA, 25 bp, Homo sapien
cagaactgcatacacatctttctcc

SEQ ID NO: 616163 - DNA, 25 bp, Homo sapien
tcgggctcttggaccactgcctcct

SEQ ID NO: 616164 - DNA, 25 bp, Homo sapien
ccaggagccgctttgctgtattgat

SEQ ID NO: 616165 - DNA, 25 bp, Homo sapien
ctctcgggctcttggaccactgcct

SEQ ID NO: 616166 - DNA, 25 bp, Homo sapien
tctccaggagccgctttgctgtatt

SEQ ID NO: 616167 - DNA, 25 bp, Homo sapien
tctttcctcttaaggccaagtcaaa

SEQ ID NO: 616168 - DNA, 25 bp, Homo sapien
ttggcatccttcataaacttcttcc

SEQ ID NO: 616169 - DNA, 25 bp, Homo sapien
tcttaaggccaagtcaaattcctgc

SEQ ID NO: 616170 - DNA, 25 bp, Homo sapien
gccaagtcaaattcctgcagagctt

SEQ ID NO: 616171 - DNA, 25 bp, Homo sapien
tggctctgcgattcctcttcgctag

SEQ ID NO: 616172 - DNA, 25 bp, Homo sapien
gctagccgttcagcaaacatctgcg

SEQ ID NO: 616173 - DNA, 25 bp, Homo sapien
tctgcgccttgaggatttcaaactg

SEQ ID NO: 616174 - DNA, 25 bp, Homo sapien
ctcgggcattgctcgggcccgcttg

SEQ ID NO: 616175 - DNA, 25 bp, Homo sapien
cttgcttgtgttggtgagttcttca

SEQ ID NO: 616176 - DNA, 25 bp, Homo sapien
agggccttcttgcttgtgttggtga

SEQ ID NO: 616177 - DNA, 25 bp, Homo sapien
cttcttgcttgtgttggtgagttct

SEQ ID NO: 616178 - DNA, 25 bp, Homo sapien
tgcttgtgttggtgagttcttcatc

SEQ ID NO: 616179 - DNA, 25 bp, Homo sapien
tgtactatttcacctccaaggcagg

SEQ ID NO: 616180 - DNA, 25 bp, Homo sapien
cattagaataccaagggctcgccgg

SEQ ID NO: 616181 - DNA, 25 bp, Homo sapien
tacatgaagcagtagcatctctggg

SEQ ID NO: 616182 - DNA, 25 bp, Homo sapien
ggtggagaacagacaggtacccttg

SEQ ID NO: 616183 - DNA, 25 bp, Homo sapien
tctctggtggggcaagcccaactgt

SEQ ID NO: 616184 - DNA, 25 bp, Homo sapien
taaagtttcctcctcgtctctggtg

SEQ ID NO: 616185 - DNA, 25 bp, Homo sapien
aagtttcctcctcgtctctggtggg

SEQ ID NO: 616186 - DNA, 25 bp, Homo sapien
gcaagcccaactgtttcctttcttc

SEQ ID NO: 616187 - DNA, 25 bp, Homo sapien
ggatggagaagcttcttttccatga

SEQ ID NO: 616188 - DNA, 25 bp, Homo sapien
aaatcagagttaagaccagaatgag

SEQ ID NO: 616189 - DNA, 25 bp, Homo sapien
tatctctaatcccaaaacctatgcc

SEQ ID NO: 616190 - DNA, 25 bp, Homo sapien
agttaagaccagaatgaggatggag

SEQ ID NO: 616191 - DNA, 25 bp, Homo sapien
aatagctacgtaccataccaccaca

SEQ ID NO: 616192 - DNA, 25 bp, Homo sapien
gacatgcttaggaaaatagctacgt

SEQ ID NO: 616193 - DNA, 25 bp, Homo sapien
gaagggagattgacagacatgctta

SEQ ID NO: 616194 - DNA, 25 bp, Homo sapien
tatgaaagctaatcagcaagaaggg

SEQ ID NO: 616195 - DNA, 25 bp, Homo sapien
gaatgaatagctttgaacacactct

SEQ ID NO: 616196 - DNA, 25 bp, Homo sapien
tctagggtatgtgctactggataac

SEQ ID NO: 616197 - DNA, 25 bp, Homo sapien
cagaaaaggatgagaaccgacgttc

SEQ ID NO: 616198 - DNA, 25 bp, Homo sapien
tgaattggaccctctgttggtgact

SEQ ID NO: 616199 - DNA, 25 bp, Homo sapien
ggttgcagtgagcagtgaagccact

SEQ ID NO: 616200 - DNA, 25 bp, Homo sapien
ccagcctgggcaagagtgagaccct

SEQ ID NO: 616201 - DNA, 25 bp, Homo sapien
ggaggatcacctgagcctggggagg

SEQ ID NO: 616202 - DNA, 25 bp, Homo sapien
cctagctactccaaaggctgaggta

SEQ ID NO: 616203 - DNA, 25 bp, Homo sapien
gtatgagctcattgatgcagaccga

SEQ ID NO: 616204 - DNA, 25 bp, Homo sapien
tgccaggccctaatttgcagactaa

SEQ ID NO: 616205 - DNA, 25 bp, Homo sapien
tgcagaccgattctaattgccaggc

SEQ ID NO: 616206 - DNA, 25 bp, Homo sapien
tacccctgcgctagagtaagcactt

SEQ ID NO: 616207 - DNA, 25 bp, Homo sapien
tcactacctataccgggcagctctt

SEQ ID NO: 616208 - DNA, 25 bp, Homo sapien
tccatgttgtggacaaataccaagg

SEQ ID NO: 616209 - DNA, 25 bp, Homo sapien
taagtggccagtgcatgtcaagaga

SEQ ID NO: 616210 - DNA, 25 bp, Homo sapien
tcagaaccagcatgaggctcacttt

SEQ ID NO: 616211 - DNA, 25 bp, Homo sapien
tggcccctcagcgccccgtcgcccc

SEQ ID NO: 616212 - DNA, 25 bp, Homo sapien
ctggcccctcagcgccccgtcgccc

SEQ ID NO: 616213 - DNA, 25 bp, Homo sapien
ccgccggggggagctgaggtgacgc

SEQ ID NO: 616214 - DNA, 25 bp, Homo sapien
cgccggggggagctgaggtgacgcc

SEQ ID NO: 616215 - DNA, 25 bp, Homo sapien
gaggcgccggccgtgcctgggccag

SEQ ID NO: 616216 - DNA, 25 bp, Homo sapien
ccccgcggtccgctcccctcagccg

SEQ ID NO: 616217 - DNA, 25 bp, Homo sapien
ccgcaaaggccttgggcgcagtcat

SEQ ID NO: 616218 - DNA, 25 bp, Homo sapien
tgaggcccgcaaaggccttgggcgc

SEQ ID NO: 616219 - DNA, 25 bp, Homo sapien
gcccgcaaaggccttgggcgcagtc

SEQ ID NO: 616220 - DNA, 25 bp, Homo sapien
ccggctgaggcccgcaaaggccttg

SEQ ID NO: 616221 - DNA, 25 bp, Homo sapien
ccgggcttgtccgcttcctcgccat

SEQ ID NO: 616222 - DNA, 25 bp, Homo sapien
agcacagcccgaggcgctctagtag

SEQ ID NO: 616223 - DNA, 25 bp, Homo sapien
gcactggacccgaaacgctctcttt

SEQ ID NO: 616224 - DNA, 25 bp, Homo sapien
agtagttgtccaggccgcgtctagc

SEQ ID NO: 616225 - DNA, 25 bp, Homo sapien
ggaaatgtagtctcgagcagcacag

SEQ ID NO: 616226 - DNA, 25 bp, Homo sapien
aaagaacgaatggcttcctgaacct

SEQ ID NO: 616227 - DNA, 25 bp, Homo sapien
caccgcagacgcgaaagaacgaatg

SEQ ID NO: 616228 - DNA, 25 bp, Homo sapien
ggcaccgcagacgcgaaagaacgaa

SEQ ID NO: 616229 - DNA, 25 bp, Homo sapien
ccgcagacgcgaaagaacgaatggc

SEQ ID NO: 616230 - DNA, 25 bp, Homo sapien
tgcaactaggagaagtaccacactc

SEQ ID NO: 616231 - DNA, 25 bp, Homo sapien
ggacaatagcgtatgaagcctgact

SEQ ID NO: 616232 - DNA, 25 bp, Homo sapien
gactgcaactaggagaagtaccaca

SEQ ID NO: 616233 - DNA, 25 bp, Homo sapien
caggacaatagcgtatgaagcctga

SEQ ID NO: 616234 - DNA, 25 bp, Homo sapien
gggaggaccagaggtctccaacgaa

SEQ ID NO: 616235 - DNA, 25 bp, Homo sapien
tccaacgaagaacatggagtttcca

SEQ ID NO: 616236 - DNA, 25 bp, Homo sapien
agagacgacggcacaaagaagggaa

SEQ ID NO: 616237 - DNA, 25 bp, Homo sapien
aagccacgagaaggagattagggct

SEQ ID NO: 616238 - DNA, 25 bp, Homo sapien
tgcagaaggcagtggcttttccagc

SEQ ID NO: 616239 - DNA, 25 bp, Homo sapien
agccaagggcttctcaggcccgtgc

SEQ ID NO: 616240 - DNA, 25 bp, Homo sapien
actcatttctcccacgcccttaagg

SEQ ID NO: 616241 - DNA, 25 bp, Homo sapien
cagctccagaaactcatttctccca

SEQ ID NO: 616242 - DNA, 25 bp, Homo sapien
aaaaaagtgaagtcatcatttacac

SEQ ID NO: 616243 - DNA, 25 bp, Homo sapien
ctgatggggaaaaaagtgaagtcat

SEQ ID NO: 616244 - DNA, 25 bp, Homo sapien
tggggaaaaaagtgaagtcatcatt

SEQ ID NO: 616245 - DNA, 25 bp, Homo sapien
ggaaaaaagtgaagtcatcatttac

SEQ ID NO: 616246 - DNA, 25 bp, Homo sapien
caaaatataagacgtcagcattgtc

SEQ ID NO: 616247 - DNA, 25 bp, Homo sapien
aatataagacgtcagcattgtcgat

SEQ ID NO: 616248 - DNA, 25 bp, Homo sapien
aaatataagacgtcagcattgtcga

SEQ ID NO: 616249 - DNA, 25 bp, Homo sapien
tggcaaaatataagacgtcagcatt

SEQ ID NO: 616250 - DNA, 25 bp, Homo sapien
tcccacggtcagaaacgaacaaggc

SEQ ID NO: 616251 - DNA, 25 bp, Homo sapien
ctgtgaaccaacaaataaagggcgt

SEQ ID NO: 616252 - DNA, 25 bp, Homo sapien
tcttcccacggtcagaaacgaacaa

SEQ ID NO: 616253 - DNA, 25 bp, Homo sapien
gccatcttcccacggtcagaaacga

SEQ ID NO: 616254 - DNA, 25 bp, Homo sapien
tcgtcaggagatcgaaggttgtaga

SEQ ID NO: 616255 - DNA, 25 bp, Homo sapien
ttgtagatgtctgcacgtggcttcc

SEQ ID NO: 616256 - DNA, 25 bp, Homo sapien
ggtccagtggtgactccctcttcca

SEQ ID NO: 616257 - DNA, 25 bp, Homo sapien
aaatccattctgtacccgctggctg

SEQ ID NO: 616258 - DNA, 25 bp, Homo sapien
agcgcccggccgtcagaacactttt

SEQ ID NO: 616259 - DNA, 25 bp, Homo sapien
caaagcacgtgttttctacagtaga

SEQ ID NO: 616260 - DNA, 25 bp, Homo sapien
taaatgctcgatagaaagtgctttg

SEQ ID NO: 616261 - DNA, 25 bp, Homo sapien
tacagtagacccataggagacaaag

SEQ ID NO: 616262 - DNA, 25 bp, Homo sapien
tcaagctggcatatcagacagaaac

SEQ ID NO: 616263 - DNA, 25 bp, Homo sapien
gctcccatcagctagatgcccaggg

SEQ ID NO: 616264 - DNA, 25 bp, Homo sapien
tgctcaagctggcatatcagacaga

SEQ ID NO: 616265 - DNA, 25 bp, Homo sapien
tgagctcccatcagctagatgccca

SEQ ID NO: 616266 - DNA, 25 bp, Homo sapien
tcatcctggttcaatcaaagcctgg

SEQ ID NO: 616267 - DNA, 25 bp, Homo sapien
cctggttcaatcaaagcctggtttt

SEQ ID NO: 616268 - DNA, 25 bp, Homo sapien
tggttcaatcaaagcctggttttgg

SEQ ID NO: 616269 - DNA, 25 bp, Homo sapien
atcctggttcaatcaaagcctggtt

SEQ ID NO: 616270 - DNA, 25 bp, Homo sapien
tatatatattctacttccaacaccc

SEQ ID NO: 616271 - DNA, 25 bp, Homo sapien
tatatattctacttccaacacccgc

SEQ ID NO: 616272 - DNA, 25 bp, Homo sapien
tatatatatattctacttccaacac

SEQ ID NO: 616273 - DNA, 25 bp, Homo sapien
tatattctacttccaacacccgcat

SEQ ID NO: 616274 - DNA, 25 bp, Homo sapien
ggcagactgaatcaagccaagatca

SEQ ID NO: 616275 - DNA, 25 bp, Homo sapien
gcagactgaatcaagccaagatcaa

SEQ ID NO: 616276 - DNA, 25 bp, Homo sapien
agactgaatcaagccaagatcaaca

SEQ ID NO: 616277 - DNA, 25 bp, Homo sapien
acacactggtacacgtggctcccaa

SEQ ID NO: 616278 - DNA, 25 bp, Homo sapien
taggatgctgtatcataccctgtat

SEQ ID NO: 616279 - DNA, 25 bp, Homo sapien
tcttgtaggatgctgtatcataccc

SEQ ID NO: 616280 - DNA, 25 bp, Homo sapien
tcctgccatcagaataggtttgctc

SEQ ID NO: 616281 - DNA, 25 bp, Homo sapien
tgccatcagaataggtttgctcatt

SEQ ID NO: 616282 - DNA, 25 bp, Homo sapien
agccagagccccagattgttccctt

SEQ ID NO: 616283 - DNA, 25 bp, Homo sapien
taagctatgccaaactctctcgctg

SEQ ID NO: 616284 - DNA, 25 bp, Homo sapien
tgtttcctgaagtcccctgaagtcc

SEQ ID NO: 616285 - DNA, 25 bp, Homo sapien
gcattaagttgtatggcagctctct

SEQ ID NO: 616286 - DNA, 25 bp, Homo sapien
tgaggcaggaacgaacttattagga

SEQ ID NO: 616287 - DNA, 25 bp, Homo sapien
tattaggaagagacttaccaccgca

SEQ ID NO: 616288 - DNA, 25 bp, Homo sapien
cattcatcctcatgtatgggcagga

SEQ ID NO: 616289 - DNA, 25 bp, Homo sapien
aaattcctgttaatccctgaggcag

SEQ ID NO: 616290 - DNA, 25 bp, Homo sapien
tcccgaactgagagtatttcccaag

SEQ ID NO: 616291 - DNA, 25 bp, Homo sapien
tggtagtctgggaacattaacaccc

SEQ ID NO: 616292 - DNA, 25 bp, Homo sapien
caagcccttgttagatgacccttat

SEQ ID NO: 616293 - DNA, 25 bp, Homo sapien
gaagaaccatgatccatagggctgc

SEQ ID NO: 616294 - DNA, 25 bp, Homo sapien
tactgacacaccaatgctaaggagg

SEQ ID NO: 616295 - DNA, 25 bp, Homo sapien
gactctcagcaacacaggcggaaag

SEQ ID NO: 616296 - DNA, 25 bp, Homo sapien
caactgagtgcgaagcgagcgatga

SEQ ID NO: 616297 - DNA, 25 bp, Homo sapien
tactgcggtgaccaggtaactgcac

SEQ ID NO: 616298 - DNA, 25 bp, Homo sapien
taacaggcccatgtaacaaggagct

SEQ ID NO: 616299 - DNA, 25 bp, Homo sapien
catggaggtagtgtccccaagggac

SEQ ID NO: 616300 - DNA, 25 bp, Homo sapien
tgggagtttcccttgaagccatgag

SEQ ID NO: 616301 - DNA, 25 bp, Homo sapien
tacaatcatggtctcaggccacagt

SEQ ID NO: 616302 - DNA, 25 bp, Homo sapien
gctcctctcatattccatcgccagt

SEQ ID NO: 616303 - DNA, 25 bp, Homo sapien
tccagagggctcctctcatattcca

SEQ ID NO: 616304 - DNA, 25 bp, Homo sapien
gagggctcctctcatattccatcgc

SEQ ID NO: 616305 - DNA, 25 bp, Homo sapien
cagagggctcctctcatattccatc

SEQ ID NO: 616306 - DNA, 25 bp, Homo sapien
acagtaaccttgtggaactggttca

SEQ ID NO: 616307 - DNA, 25 bp, Homo sapien
cagtaaccttgtggaactggttcag

SEQ ID NO: 616308 - DNA, 25 bp, Homo sapien
tttcaaagtctaacaatgacattct

SEQ ID NO: 616309 - DNA, 25 bp, Homo sapien
aatttcaaagtctaacaatgacatt

SEQ ID NO: 616310 - DNA, 25 bp, Homo sapien
aacaatgacattcttgaagtgggca

SEQ ID NO: 616311 - DNA, 25 bp, Homo sapien
tgacattcttgaagtgggcacagcc

SEQ ID NO: 616312 - DNA, 25 bp, Homo sapien
ttattttctttatgcaggtaggcag

SEQ ID NO: 616313 - DNA, 25 bp, Homo sapien
tttattttctttatgcaggtaggca

SEQ ID NO: 616314 - DNA, 25 bp, Homo sapien
taacatacacgatcttgtgcaggtg

SEQ ID NO: 616315 - DNA, 25 bp, Homo sapien
tctgctttgaattctggcccaagtg

SEQ ID NO: 616316 - DNA, 25 bp, Homo sapien
taagcatacaagtgagatacctctg

SEQ ID NO: 616317 - DNA, 25 bp, Homo sapien
cagaaaccaactgcccactagggtg

SEQ ID NO: 616318 - DNA, 25 bp, Homo sapien
tagaaccaatagcatttgccaaggg

SEQ ID NO: 616319 - DNA, 25 bp, Homo sapien
ggtacatgaggttgattccacagct

SEQ ID NO: 616320 - DNA, 25 bp, Homo sapien
caattgatcgtagggagcaaaggct

SEQ ID NO: 616321 - DNA, 25 bp, Homo sapien
accaaggtggtagcaatgaagacgc

SEQ ID NO: 616322 - DNA, 25 bp, Homo sapien
tgagccaatggctaatacataacag

SEQ ID NO: 616323 - DNA, 25 bp, Homo sapien
tggctaatacataacagagccggga

SEQ ID NO: 616324 - DNA, 25 bp, Homo sapien
gccaatggctaatacataacagagc

SEQ ID NO: 616325 - DNA, 25 bp, Homo sapien
aatggctaatacataacagagccgg

SEQ ID NO: 616326 - DNA, 25 bp, Homo sapien
tgtggccactactagaggagctcag

SEQ ID NO: 616327 - DNA, 25 bp, Homo sapien
gtacttccctctttccaggcacaag

SEQ ID NO: 616328 - DNA, 25 bp, Homo sapien
cactgctgcggtcccagaagtgctg

SEQ ID NO: 616329 - DNA, 25 bp, Homo sapien
tggagaaatcagtcgctacaacacc

SEQ ID NO: 616330 - DNA, 25 bp, Homo sapien
tctgggtaattaaaccagctggcag

SEQ ID NO: 616331 - DNA, 25 bp, Homo sapien
cgcagaggagggcacctctggacat

SEQ ID NO: 616332 - DNA, 25 bp, Homo sapien
cttcccatctgggtaattaaaccag

SEQ ID NO: 616333 - DNA, 25 bp, Homo sapien
ttatcagtctccgtggtgtctgcag

SEQ ID NO: 616334 - DNA, 25 bp, Homo sapien
cccgcgggcgacaaacatcgggtca

SEQ ID NO: 616335 - DNA, 25 bp, Homo sapien
agcgacagggacaggattcgcgcca

SEQ ID NO: 616336 - DNA, 25 bp, Homo sapien
cagacccgcgtatagtctgcgcagc

SEQ ID NO: 616337 - DNA, 25 bp, Homo sapien
cgcacgcttggtcgcagaagcagcg

SEQ ID NO: 616338 - DNA, 25 bp, Homo sapien
gccctcggctcgtgtgacccctcca

SEQ ID NO: 616339 - DNA, 25 bp, Homo sapien
gctccgagcgttccgctagtgcctt

SEQ ID NO: 616340 - DNA, 25 bp, Homo sapien
gcgttccgctagtgccttgcctttc

SEQ ID NO: 616341 - DNA, 25 bp, Homo sapien
agctcccctccgctccgagcgttcc

SEQ ID NO: 616342 - DNA, 25 bp, Homo sapien
tgcccgcgcgaccccctgcacgtcc

SEQ ID NO: 616343 - DNA, 25 bp, Homo sapien
ttgcccgcgcgaccccctgcacgtc

SEQ ID NO: 616344 - DNA, 25 bp, Homo sapien
gcccgcgcgaccccctgcacgtccc

SEQ ID NO: 616345 - DNA, 25 bp, Homo sapien
tgggtgcgctccttcctctctcgca

SEQ ID NO: 616346 - DNA, 25 bp, Homo sapien
tgcgcgtctttctcggctcgcagct

SEQ ID NO: 616347 - DNA, 25 bp, Homo sapien
tgcctgcgcctcttgtgctcatttc

SEQ ID NO: 616348 - DNA, 25 bp, Homo sapien
tttaggtcctgagtgtctgcgtccc

SEQ ID NO: 616349 - DNA, 25 bp, Homo sapien
gtcaaattcagcattgtgacaatct

SEQ ID NO: 616350 - DNA, 25 bp, Homo sapien
taaatgtcaaattcagcattgtgac

SEQ ID NO: 616351 - DNA, 25 bp, Homo sapien
tgtcaaattcagcattgtgacaatc

SEQ ID NO: 616352 - DNA, 25 bp, Homo sapien
aatgtcaaattcagcattgtgacaa

SEQ ID NO: 616353 - DNA, 25 bp, Homo sapien
gtttcacacagcgactgcagccact

SEQ ID NO: 616354 - DNA, 25 bp, Homo sapien
gacacgcctccggtgtacatggtag

SEQ ID NO: 616355 - DNA, 25 bp, Homo sapien
tccggtgtacatggtaggagacctg

SEQ ID NO: 616356 - DNA, 25 bp, Homo sapien
gcaggtttcacacagcgactgcagc

SEQ ID NO: 616357 - DNA, 25 bp, Homo sapien
tccacacagccagcccgctcttcca

SEQ ID NO: 616358 - DNA, 25 bp, Homo sapien
agcctgactgttcccactgagagcc

SEQ ID NO: 616359 - DNA, 25 bp, Homo sapien
tgcaatgactgctggcactccactc

SEQ ID NO: 616360 - DNA, 25 bp, Homo sapien
tcagaccctacccaagaactcatgg

SEQ ID NO: 616361 - DNA, 25 bp, Homo sapien
cccactcatgcaatgactgctggca

SEQ ID NO: 616362 - DNA, 25 bp, Homo sapien
cacacagaccgtgtggccctgactc

SEQ ID NO: 616363 - DNA, 25 bp, Homo sapien
tggaccccaactggaactggacaca

SEQ ID NO: 616364 - DNA, 25 bp, Homo sapien
actcctcacacagaccgtgtggccc

SEQ ID NO: 616365 - DNA, 25 bp, Homo sapien
cccgcagctccctggaatggacccc

SEQ ID NO: 616366 - DNA, 25 bp, Homo sapien
ggtccctcggcaccggggatggctg

SEQ ID NO: 616367 - DNA, 25 bp, Homo sapien
cagggcaggaacaatgccggagctg

SEQ ID NO: 616368 - DNA, 25 bp, Homo sapien
ggcaggaacaatgccggagctgccc

SEQ ID NO: 616369 - DNA, 25 bp, Homo sapien
tggctggccgcttgccacagccaca

SEQ ID NO: 616370 - DNA, 25 bp, Homo sapien
cagtgcttggcactcttacgggtgc

SEQ ID NO: 616371 - DNA, 25 bp, Homo sapien
atgtataaaaggctgagacagtgct

SEQ ID NO: 616372 - DNA, 25 bp, Homo sapien
ctcagaatccaatgagtgagtatgt

SEQ ID NO: 616373 - DNA, 25 bp, Homo sapien
gggataatcattgcatctaactcag

SEQ ID NO: 616374 - DNA, 25 bp, Homo sapien
taggctgtccggttgtcatggcgac

SEQ ID NO: 616375 - DNA, 25 bp, Homo sapien
tgcgtccctggtgacgcaggaagct

SEQ ID NO: 616376 - DNA, 25 bp, Homo sapien
tgtccggttgtcatggcgacagccg

SEQ ID NO: 616377 - DNA, 25 bp, Homo sapien
caggaagctgtaggctgtccggttg

SEQ ID NO: 616378 - DNA, 25 bp, Homo sapien
gtgggtcctattcatctctcgtcag

SEQ ID NO: 616379 - DNA, 25 bp, Homo sapien
cccaggaacccgtcgtgtgaggttg

SEQ ID NO: 616380 - DNA, 25 bp, Homo sapien
gaaaataagcattgcgcatgtgcgc

SEQ ID NO: 616381 - DNA, 25 bp, Homo sapien
tctgatcacctcacccttgacaggg

SEQ ID NO: 616382 - DNA, 25 bp, Homo sapien
tatcattagtatcaggcatccagct

SEQ ID NO: 616383 - DNA, 25 bp, Homo sapien
aacatattgcatttgggtggtccga

SEQ ID NO: 616384 - DNA, 25 bp, Homo sapien
tccaatagtgccttgcataggaggg

SEQ ID NO: 616385 - DNA, 25 bp, Homo sapien
catgcaatgcagttggcgcagtgcc

SEQ ID NO: 616386 - DNA, 25 bp, Homo sapien
cagacccctcagctgatgttcacag

SEQ ID NO: 616387 - DNA, 25 bp, Homo sapien
catctcaggaaacaccaccactatc

SEQ ID NO: 616388 - DNA, 25 bp, Homo sapien
acagtctcttgcctggacacctacc

SEQ ID NO: 616389 - DNA, 25 bp, Homo sapien
aatttgtcttccgtactgtgaacag

SEQ ID NO: 616390 - DNA, 25 bp, Homo sapien
tcaggccactgaatatcaagttgca

SEQ ID NO: 616391 - DNA, 25 bp, Homo sapien
caggccactgaatatcaagttgcat

SEQ ID NO: 616392 - DNA, 25 bp, Homo sapien
ctcaggccactgaatatcaagttgc

SEQ ID NO: 616393 - DNA, 25 bp, Homo sapien
ttctcaggccactgaatatcaagtt

SEQ ID NO: 616394 - DNA, 25 bp, Homo sapien
tcctttgatagtccaagtaggacga

SEQ ID NO: 616395 - DNA, 25 bp, Homo sapien
tagtccaagtaggacgatagccacc

SEQ ID NO: 616396 - DNA, 25 bp, Homo sapien
ctatagagcggccttatttcctttg

SEQ ID NO: 616397 - DNA, 25 bp, Homo sapien
ggacgatagccaccaggtaattcca

SEQ ID NO: 616398 - DNA, 25 bp, Homo sapien
tatcacggtcgtcccaaattggctg

SEQ ID NO: 616399 - DNA, 25 bp, Homo sapien
ggtcgtcccaaattggctgctcagc

SEQ ID NO: 616400 - DNA, 25 bp, Homo sapien
cgttaaatatatcacggtcgtccca

SEQ ID NO: 616401 - DNA, 25 bp, Homo sapien
cagccggatgtagggacaggcagca

SEQ ID NO: 616402 - DNA, 25 bp, Homo sapien
cccgggagtgtgtgttcctcacgaa

SEQ ID NO: 616403 - DNA, 25 bp, Homo sapien
tgctggttctttcccataacggaac

SEQ ID NO: 616404 - DNA, 25 bp, Homo sapien
tcctcacgaagaacaaagatgtagg

SEQ ID NO: 616405 - DNA, 25 bp, Homo sapien
cacgcagctcctggcctaattggca

SEQ ID NO: 616406 - DNA, 25 bp, Homo sapien
aagattggagagtgtcctccaatcc

SEQ ID NO: 616407 - DNA, 25 bp, Homo sapien
cctgggacaggggaagattggagag

SEQ ID NO: 616408 - DNA, 25 bp, Homo sapien
cctcgtcccctcttctacttgggct

SEQ ID NO: 616409 - DNA, 25 bp, Homo sapien
ttgggctccaagggcaaaaccagga

SEQ ID NO: 616410 - DNA, 25 bp, Homo sapien
ggggcagccagccaccggtgggagc

SEQ ID NO: 616411 - DNA, 25 bp, Homo sapien
ggtcaacatcagcagacgtccacca

SEQ ID NO: 616412 - DNA, 25 bp, Homo sapien
gtcaacatcagcagacgtccaccac

SEQ ID NO: 616413 - DNA, 25 bp, Homo sapien
ccaccggtgggagcacgggctccct

SEQ ID NO: 616414 - DNA, 25 bp, Homo sapien
tggggaaccatttcaaactcttcac

SEQ ID NO: 616415 - DNA, 25 bp, Homo sapien
ttggggaaccatttcaaactcttca

SEQ ID NO: 616416 - DNA, 25 bp, Homo sapien
tagccggcgtatgagtagttcacag

SEQ ID NO: 616417 - DNA, 25 bp, Homo sapien
gaatgcatatgcacacgtgacactg

SEQ ID NO: 616418 - DNA, 25 bp, Homo sapien
ccacagatttgtccacgggaataga

SEQ ID NO: 616419 - DNA, 25 bp, Homo sapien
taatgaaccgtgcttcatgcgccgt

SEQ ID NO: 616420 - DNA, 25 bp, Homo sapien
ccctccatgataggccctggtattt

SEQ ID NO: 616421 - DNA, 25 bp, Homo sapien
gataggccctggtatttcttgcaag

SEQ ID NO: 616422 - DNA, 25 bp, Homo sapien
tgatgtcattccctccatgataggc

SEQ ID NO: 616423 - DNA, 25 bp, Homo sapien
tgaacgtgatgtcattccctccatg

SEQ ID NO: 616424 - DNA, 25 bp, Homo sapien
tgatgtccattcacattgggcaggg

SEQ ID NO: 616425 - DNA, 25 bp, Homo sapien
caaaatagctgggttacacgcgtga

SEQ ID NO: 616426 - DNA, 25 bp, Homo sapien
gtataaatcccagtgcaaaggcagg

SEQ ID NO: 616427 - DNA, 25 bp, Homo sapien
tggtctgagtcccaatgcctgagaa

SEQ ID NO: 616428 - DNA, 25 bp, Homo sapien
tcacgtggctggaaatgttgggggt

SEQ ID NO: 616429 - DNA, 25 bp, Homo sapien
tcctggctgccaatgatcaaacacc

SEQ ID NO: 616430 - DNA, 25 bp, Homo sapien
tgtgtatggagtgtaacaacgcagc

SEQ ID NO: 616431 - DNA, 25 bp, Homo sapien
tataatgatcaagtgccgcagcctc

SEQ ID NO: 616432 - DNA, 25 bp, Homo sapien
tagccagaaatccaaaccgagtgtt

SEQ ID NO: 616433 - DNA, 25 bp, Homo sapien
gagttcgataacacgtgctgcgcag

SEQ ID NO: 616434 - DNA, 25 bp, Homo sapien
ttcagccaagagctcgactactggg

SEQ ID NO: 616435 - DNA, 25 bp, Homo sapien
gcagatgaacgaggagctcaagcgt

SEQ ID NO: 616436 - DNA, 25 bp, Homo sapien
ggcatcgacgagatctacctggagt

SEQ ID NO: 616437 - DNA, 25 bp, Homo sapien
tccaagcccggggaaaggcgcagaa

SEQ ID NO: 616438 - DNA, 25 bp, Homo sapien
gctaaggcgtgagccctacatgcag

SEQ ID NO: 616439 - DNA, 25 bp, Homo sapien
cgaaatcactagtgcgcggtaggag

SEQ ID NO: 616440 - DNA, 25 bp, Homo sapien
cagctcggcctgttggtctgctcgg

SEQ ID NO: 616441 - DNA, 25 bp, Homo sapien
cattgtcaagtggaaacatgctgaa

SEQ ID NO: 616442 - DNA, 25 bp, Homo sapien
tgagatttcacaggtcttgcccaaa

SEQ ID NO: 616443 - DNA, 25 bp, Homo sapien
gaagcaggagtaagtttctcatccc

SEQ ID NO: 616444 - DNA, 25 bp, Homo sapien
caattgctgccaatagtggataaca

SEQ ID NO: 616445 - DNA, 25 bp, Homo sapien
tagaagtgacattgtaagaggtggt

SEQ ID NO: 616446 - DNA, 25 bp, Homo sapien
taattggtccaacccagcctgagtg

SEQ ID NO: 616447 - DNA, 25 bp, Homo sapien
tgaacaaatgtatcagtgatgaaaa

SEQ ID NO: 616448 - DNA, 25 bp, Homo sapien
catctgagtgtgagaccctgttcta

SEQ ID NO: 616449 - DNA, 25 bp, Homo sapien
tctgaggccatatcagctctgtcct

SEQ ID NO: 616450 - DNA, 25 bp, Homo sapien
tctgctattttcaaggcctgcctgt

SEQ ID NO: 616451 - DNA, 25 bp, Homo sapien
ttcctccaagatgccatagccagag

SEQ ID NO: 616452 - DNA, 25 bp, Homo sapien
tcaaatccttgcgtattccagccct

SEQ ID NO: 616453 - DNA, 25 bp, Homo sapien
gagggcttagatggcacacttggaa

SEQ ID NO: 616454 - DNA, 25 bp, Homo sapien
tgaggctcctacagggaaatgtctg

SEQ ID NO: 616455 - DNA, 25 bp, Homo sapien
gaatcagacctgatccttggaagag

SEQ ID NO: 616456 - DNA, 25 bp, Homo sapien
aatgtctggatgttcgtccctggga

SEQ ID NO: 616457 - DNA, 25 bp, Homo sapien
agggtggcaggagcatcatcactca

SEQ ID NO: 616458 - DNA, 25 bp, Homo sapien
agccagaagttctgaggttcttggg

SEQ ID NO: 616459 - DNA, 25 bp, Homo sapien
gacagatcaacatgggtctcttttc

SEQ ID NO: 616460 - DNA, 25 bp, Homo sapien
ttccatgctaggctggctctcaggc

SEQ ID NO: 616461 - DNA, 25 bp, Homo sapien
tgtgcgccactacatccgcctagtt

SEQ ID NO: 616462 - DNA, 25 bp, Homo sapien
cactacatccgcctagttttgtatt

SEQ ID NO: 616463 - DNA, 25 bp, Homo sapien
gcgccactacatccgcctagttttg

SEQ ID NO: 616464 - DNA, 25 bp, Homo sapien
ggtgtgcgccactacatccgcctag

SEQ ID NO: 616465 - DNA, 25 bp, Homo sapien
gacgatggcattgagcgtagctagc

SEQ ID NO: 616466 - DNA, 25 bp, Homo sapien
aaggtgtccccgtttgttcatgctg

SEQ ID NO: 616467 - DNA, 25 bp, Homo sapien
tgtatccactcaccattgacgatgg

SEQ ID NO: 616468 - DNA, 25 bp, Homo sapien
tcttcaaggctactgatgggtggcc

SEQ ID NO: 616469 - DNA, 25 bp, Homo sapien
cactgtcagtcatgtgtccaccagg

SEQ ID NO: 616470 - DNA, 25 bp, Homo sapien
catagttaaaaacgtacagccaggc

SEQ ID NO: 616471 - DNA, 25 bp, Homo sapien
caccaggcctcgaatatcatatggg

SEQ ID NO: 616472 - DNA, 25 bp, Homo sapien
gaatctctggatgtgcactgtcagt

SEQ ID NO: 616473 - DNA, 25 bp, Homo sapien
gatggttctgtggacatatgatccc

SEQ ID NO: 616474 - DNA, 25 bp, Homo sapien
ctcatatgagagagcaggttcctgc

SEQ ID NO: 616475 - DNA, 25 bp, Homo sapien
cacaaactgtgggagtgattggcca

SEQ ID NO: 616476 - DNA, 25 bp, Homo sapien
gcccttgaaaatgccggtaagctat

SEQ ID NO: 616477 - DNA, 25 bp, Homo sapien
tggattcactcttccctgtcggccg

SEQ ID NO: 616478 - DNA, 25 bp, Homo sapien
gatatagggcatgtcacaaaagaac

SEQ ID NO: 616479 - DNA, 25 bp, Homo sapien
cgacctttattgctgggagctggct

SEQ ID NO: 616480 - DNA, 25 bp, Homo sapien
actctccgctaagcgggaggctgct

SEQ ID NO: 616481 - DNA, 25 bp, Homo sapien
ccgagctggctcaggtgaacgagta

SEQ ID NO: 616482 - DNA, 25 bp, Homo sapien
gccaccaagaaagcagtccgatgag

SEQ ID NO: 616483 - DNA, 25 bp, Homo sapien
tttgcaaacatcacatacgacgcct

SEQ ID NO: 616484 - DNA, 25 bp, Homo sapien
gagaatgtacgtttgctttacccac

SEQ ID NO: 616485 - DNA, 25 bp, Homo sapien
tcaactggatttggtaacacaaggg

SEQ ID NO: 616486 - DNA, 25 bp, Homo sapien
gcttagctatacattggaattccca

SEQ ID NO: 616487 - DNA, 25 bp, Homo sapien
ccaaagtactgatgtctgtgcctga

SEQ ID NO: 616488 - DNA, 25 bp, Homo sapien
taattggcctgaggtatagcctgaa

SEQ ID NO: 616489 - DNA, 25 bp, Homo sapien
ggaagtcaattcatgggttttgctc

SEQ ID NO: 616490 - DNA, 25 bp, Homo sapien
tgtgtacatgtaagcaaaaagcttg

SEQ ID NO: 616491 - DNA, 25 bp, Homo sapien
tattaagtagcataatatgtcttgg

SEQ ID NO: 616492 - DNA, 25 bp, Homo sapien
taaaaggtgtactcaggcctcagtc

SEQ ID NO: 616493 - DNA, 25 bp, Homo sapien
aagatgcggggagggcctacagaca

SEQ ID NO: 616494 - DNA, 25 bp, Homo sapien
agatgcggggagggcctacagacat

SEQ ID NO: 616495 - DNA, 25 bp, Homo sapien
tgaagatgcggggagggcctacaga

SEQ ID NO: 616496 - DNA, 25 bp, Homo sapien
gaagatgcggggagggcctacagac

SEQ ID NO: 616497 - DNA, 25 bp, Homo sapien
ggtatgccttctttgagactaaaca

SEQ ID NO: 616498 - DNA, 25 bp, Homo sapien
tgttgaacatatcaatcggtatgcc

SEQ ID NO: 616499 - DNA, 25 bp, Homo sapien
tcttgccaagaaaggattccatttg

SEQ ID NO: 616500 - DNA, 25 bp, Homo sapien
cagggtaaggattcttctctaggat

SEQ ID NO: 616501 - DNA, 25 bp, Homo sapien
cgattgttaatttggcatacctgac

SEQ ID NO: 616502 - DNA, 25 bp, Homo sapien
taataaacagctagtcttgtgctcc

SEQ ID NO: 616503 - DNA, 25 bp, Homo sapien
taaaaagctaggctactacccgtgc

SEQ ID NO: 616504 - DNA, 25 bp, Homo sapien
aataaccttgcctctattgctgaga

SEQ ID NO: 616505 - DNA, 25 bp, Homo sapien
taagcactttgtgtcgtacagtatg

SEQ ID NO: 616506 - DNA, 25 bp, Homo sapien
gcttaggctacgataaattgtttca

SEQ ID NO: 616507 - DNA, 25 bp, Homo sapien
gtcatctaccccagtacattctaag

SEQ ID NO: 616508 - DNA, 25 bp, Homo sapien
acctttatgtcttgaatctgcttgc

SEQ ID NO: 616509 - DNA, 25 bp, Homo sapien
gagtaagcaattattagaccctggg

SEQ ID NO: 616510 - DNA, 25 bp, Homo sapien
gcctttgcaggtgacggagctaccc

SEQ ID NO: 616511 - DNA, 25 bp, Homo sapien
gagctacccaggtactttgcagcaa

SEQ ID NO: 616512 - DNA, 25 bp, Homo sapien
tgcagcaatcagaagcgaacctgtt

SEQ ID NO: 616513 - DNA, 25 bp, Homo sapien
cacaactaatcaacactggagtttt

SEQ ID NO: 616514 - DNA, 25 bp, Homo sapien
caggcgcaatcccacaactaatcaa

SEQ ID NO: 616515 - DNA, 25 bp, Homo sapien
agtacactacaacacagaactcttg

SEQ ID NO: 616516 - DNA, 25 bp, Homo sapien
atcccacaactaatcaacactggag

SEQ ID NO: 616517 - DNA, 25 bp, Homo sapien
cgaacacctcacaattttttatgtc

SEQ ID NO: 616518 - DNA, 25 bp, Homo sapien
tatcgaacacctcacaattttttat

SEQ ID NO: 616519 - DNA, 25 bp, Homo sapien
atcgaacacctcacaattttttatg

SEQ ID NO: 616520 - DNA, 25 bp, Homo sapien
atatcgaacacctcacaatttttta

SEQ ID NO: 616521 - DNA, 25 bp, Homo sapien
acagcaatagtcttccttccgccaa

SEQ ID NO: 616522 - DNA, 25 bp, Homo sapien
ttccttccgccaaatgtctttcagc

SEQ ID NO: 616523 - DNA, 25 bp, Homo sapien
aatagtcttccttccgccaaatgtc

SEQ ID NO: 616524 - DNA, 25 bp, Homo sapien
cacacagtacggttcccacacagca

SEQ ID NO: 616525 - DNA, 25 bp, Homo sapien
ctccgtctcagtggcccgagggtgg

SEQ ID NO: 616526 - DNA, 25 bp, Homo sapien
tgggaggattgcttcttagtctctc

SEQ ID NO: 616527 - DNA, 25 bp, Homo sapien
ggattgcttcttagtctctcccggg

SEQ ID NO: 616528 - DNA, 25 bp, Homo sapien
gaggattgcttcttagtctctcccg

SEQ ID NO: 616529 - DNA, 25 bp, Homo sapien
ccgcggggctagcaggacccgcttt

SEQ ID NO: 616530 - DNA, 25 bp, Homo sapien
ggagcttccaggaccaccgagttcg

SEQ ID NO: 616531 - DNA, 25 bp, Homo sapien
gggctagcaggacccgcttttgctt

SEQ ID NO: 616532 - DNA, 25 bp, Homo sapien
caggaccaccgagttcggagccgcg

SEQ ID NO: 616533 - DNA, 25 bp, Homo sapien
ccgctggactgctcctcttgctggg

SEQ ID NO: 616534 - DNA, 25 bp, Homo sapien
gtcgggagcaccagtttcgtcgtga

SEQ ID NO: 616535 - DNA, 25 bp, Homo sapien
aagaaaatggtcatgccgctggact

SEQ ID NO: 616536 - DNA, 25 bp, Homo sapien
tttcgtcgtgacaaccagggtggtg

SEQ ID NO: 616537 - DNA, 25 bp, Homo sapien
cacagacacgggatggcagatgatg

SEQ ID NO: 616538 - DNA, 25 bp, Homo sapien
gagtgacagggttaaacacacagac

SEQ ID NO: 616539 - DNA, 25 bp, Homo sapien
tgttccctcagtgtttgatatgaaa

SEQ ID NO: 616540 - DNA, 25 bp, Homo sapien
cttcagaacttgctaagcaccatga

SEQ ID NO: 616541 - DNA, 25 bp, Homo sapien
ctaaattaacaatacaggtggtaca

SEQ ID NO: 616542 - DNA, 25 bp, Homo sapien
catagatatggcaaaagtcatgacc

SEQ ID NO: 616543 - DNA, 25 bp, Homo sapien
gcatactcctttgagtagaacttga

SEQ ID NO: 616544 - DNA, 25 bp, Homo sapien
catgaccatggttaatgagaatgac

SEQ ID NO: 616545 - DNA, 25 bp, Homo sapien
aaatgcaccaatatgatgcagatag

SEQ ID NO: 616546 - DNA, 25 bp, Homo sapien
tctggcaagaaatgtaatctgtatc

SEQ ID NO: 616547 - DNA, 25 bp, Homo sapien
tgtatcggatcagtaaatgcaccaa

SEQ ID NO: 616548 - DNA, 25 bp, Homo sapien
caacagcaacactctctggcaagaa

SEQ ID NO: 616549 - DNA, 25 bp, Homo sapien
taggcatcacactctcattcagcag

SEQ ID NO: 616550 - DNA, 25 bp, Homo sapien
caaagaccaatcttgacttggaggg

SEQ ID NO: 616551 - DNA, 25 bp, Homo sapien
aagatggctaccagtccactaggca

SEQ ID NO: 616552 - DNA, 25 bp, Homo sapien
gaactgggtttcacactgccttgcc

SEQ ID NO: 616553 - DNA, 25 bp, Homo sapien
agtccttcggtggattaacgatctt

SEQ ID NO: 616554 - DNA, 25 bp, Homo sapien
ggtggattaacgatctttcctggtg

SEQ ID NO: 616555 - DNA, 25 bp, Homo sapien
gaaggaggataccagccgagtttcc

SEQ ID NO: 616556 - DNA, 25 bp, Homo sapien
ttgctgagcagcgaactcacagccc

SEQ ID NO: 616557 - DNA, 25 bp, Homo sapien
tggaatagtttacccttgtgaatct

SEQ ID NO: 616558 - DNA, 25 bp, Homo sapien
ctgagaaactctttggcggcatcca

SEQ ID NO: 616559 - DNA, 25 bp, Homo sapien
ggcatccaccgcttgctggaatagt

SEQ ID NO: 616560 - DNA, 25 bp, Homo sapien
ccaggcatgatcttatgttccaaaa

SEQ ID NO: 616561 - DNA, 25 bp, Homo sapien
tgagtttggcctgcttctctcctca

SEQ ID NO: 616562 - DNA, 25 bp, Homo sapien
ctgagtttggcctgcttctctcctc

SEQ ID NO: 616563 - DNA, 25 bp, Homo sapien
tttccttcagacaggctgtttgcac

SEQ ID NO: 616564 - DNA, 25 bp, Homo sapien
ttcagacaggctgtttgcacttctc

SEQ ID NO: 616565 - DNA, 25 bp, Homo sapien
ccttcagacaggctgtttgcacttc

SEQ ID NO: 616566 - DNA, 25 bp, Homo sapien
ttccttcagacaggctgtttgcact

SEQ ID NO: 616567 - DNA, 25 bp, Homo sapien
ttaacaggctcgcttctggtcggct

SEQ ID NO: 616568 - DNA, 25 bp, Homo sapien
ggtcggctgccatttaaatgcagcc

SEQ ID NO: 616569 - DNA, 25 bp, Homo sapien
gtcggctgccatttaaatgcagcca

SEQ ID NO: 616570 - DNA, 25 bp, Homo sapien
taacagacagagatggcttgtttgg

SEQ ID NO: 616571 - DNA, 25 bp, Homo sapien
ttcaacttctttgtgattgcctggt

SEQ ID NO: 616572 - DNA, 25 bp, Homo sapien
tgtgattgcctggtaacagacagag

SEQ ID NO: 616573 - DNA, 25 bp, Homo sapien
ttctttgtgattgcctggtaacaga

SEQ ID NO: 616574 - DNA, 25 bp, Homo sapien
gatgctgccattcacggccgtgctg

SEQ ID NO: 616575 - DNA, 25 bp, Homo sapien
ccgtgctgtcagctgcccggatgga

SEQ ID NO: 616576 - DNA, 25 bp, Homo sapien
gttagagacgattccacttctcatg

SEQ ID NO: 616577 - DNA, 25 bp, Homo sapien
gtgtgacccatttttagcaagttag

SEQ ID NO: 616578 - DNA, 25 bp, Homo sapien
ttggcagtgcggttccagacagtca

SEQ ID NO: 616579 - DNA, 25 bp, Homo sapien
gtttcttggcagtgcggttccagac

SEQ ID NO: 616580 - DNA, 25 bp, Homo sapien
tggcagtgcggttccagacagtcac

SEQ ID NO: 616581 - DNA, 25 bp, Homo sapien
tcttggcagtgcggttccagacagt

SEQ ID NO: 616582 - DNA, 25 bp, Homo sapien
tccagggcagatcccttgcagcata

SEQ ID NO: 616583 - DNA, 25 bp, Homo sapien
cacgggcgaaagtgatgtcacaggt

SEQ ID NO: 616584 - DNA, 25 bp, Homo sapien
tgggatccaacacacgggcgaaagt

SEQ ID NO: 616585 - DNA, 25 bp, Homo sapien
caacacacgggcgaaagtgatgtca

SEQ ID NO: 616586 - DNA, 25 bp, Homo sapien
gatcaccaacattctgtgattagaa

SEQ ID NO: 616587 - DNA, 25 bp, Homo sapien
ccccgacctggacgcaatcacccag

SEQ ID NO: 616588 - DNA, 25 bp, Homo sapien
tggacgcaatcacccaggccagcta

SEQ ID NO: 616589 - DNA, 25 bp, Homo sapien
gagcttctggaaagcgaccccccga

SEQ ID NO: 616590 - DNA, 25 bp, Homo sapien
tcccttggactatgtttacaatcag

SEQ ID NO: 616591 - DNA, 25 bp, Homo sapien
tggactatgtttacaatcagcatca

SEQ ID NO: 616592 - DNA, 25 bp, Homo sapien
tgatcatggctatgaagctcccttg

SEQ ID NO: 616593 - DNA, 25 bp, Homo sapien
ctcagtgatcatggctatgaagctc

SEQ ID NO: 616594 - DNA, 25 bp, Homo sapien
gaagatgctggccaactgtccctga

SEQ ID NO: 616595 - DNA, 25 bp, Homo sapien
aagatgctggccaactgtccctgat

SEQ ID NO: 616596 - DNA, 25 bp, Homo sapien
cacagcggacatattgttggactgg

SEQ ID NO: 616597 - DNA, 25 bp, Homo sapien
caggacacagcggacatattgttgg

SEQ ID NO: 616598 - DNA, 25 bp, Homo sapien
agttgaccgcattgcccagcgcaat

SEQ ID NO: 616599 - DNA, 25 bp, Homo sapien
ctgccatgggagtcagagagttgac

SEQ ID NO: 616600 - DNA, 25 bp, Homo sapien
tactccctggaaagccagggcctca

SEQ ID NO: 616601 - DNA, 25 bp, Homo sapien
actccctggaaagccagggcctcat

SEQ ID NO: 616602 - DNA, 25 bp, Homo sapien
atactccctggaaagccagggcctc

SEQ ID NO: 616603 - DNA, 25 bp, Homo sapien
catactccctggaaagccagggcct

SEQ ID NO: 616604 - DNA, 25 bp, Homo sapien
tacattaccacatcttcctccaccc

SEQ ID NO: 616605 - DNA, 25 bp, Homo sapien
agaatgtgtcctgccaagactagaa

SEQ ID NO: 616606 - DNA, 25 bp, Homo sapien
ccagaatgtgtcctgccaagactag

SEQ ID NO: 616607 - DNA, 25 bp, Homo sapien
caaaggtgaaacagcttaacaaata

SEQ ID NO: 616608 - DNA, 25 bp, Homo sapien
ggaagtgctgtcttacaagcttttt

SEQ ID NO: 616609 - DNA, 25 bp, Homo sapien
gggaagtgctgtcttacaagctttt

SEQ ID NO: 616610 - DNA, 25 bp, Homo sapien
agggaagtgctgtcttacaagcttt

SEQ ID NO: 616611 - DNA, 25 bp, Homo sapien
gacatgagacatctatcaacaatgt

SEQ ID NO: 616612 - DNA, 25 bp, Homo sapien
aattggaacacgcactcattgctga

SEQ ID NO: 616613 - DNA, 25 bp, Homo sapien
gagacaagtctcagtcaagttagga

SEQ ID NO: 616614 - DNA, 25 bp, Homo sapien
taaggatgaccacccttgacacagc

SEQ ID NO: 616615 - DNA, 25 bp, Homo sapien
aatttttataactgctcccatgaga

SEQ ID NO: 616616 - DNA, 25 bp, Homo sapien
tttttataactgctcccatgagaat

SEQ ID NO: 616617 - DNA, 25 bp, Homo sapien
tttataactgctcccatgagaatac

SEQ ID NO: 616618 - DNA, 25 bp, Homo sapien
ataatttttataactgctcccatga

SEQ ID NO: 616619 - DNA, 25 bp, Homo sapien
taaataactccactgatagccaagt

SEQ ID NO: 616620 - DNA, 25 bp, Homo sapien
cattggcgcccatgttcacttgaaa

SEQ ID NO: 616621 - DNA, 25 bp, Homo sapien
gtttggacacaagactccactcggc

SEQ ID NO: 616622 - DNA, 25 bp, Homo sapien
gctctgtgacactgaatacatccca

SEQ ID NO: 616623 - DNA, 25 bp, Homo sapien
tcttcagtcatgacccactcttggg

SEQ ID NO: 616624 - DNA, 25 bp, Homo sapien
gggcaaaatctacacatcaggctat

SEQ ID NO: 616625 - DNA, 25 bp, Homo sapien
cctaggagtagaaaaaggctcttca

SEQ ID NO: 616626 - DNA, 25 bp, Homo sapien
caacgcccagccttgatcaaatgat

SEQ ID NO: 616627 - DNA, 25 bp, Homo sapien
cttgtgtaatgaatatccagactca

SEQ ID NO: 616628 - DNA, 25 bp, Homo sapien
ttgtgtaatgaatatccagactcaa

SEQ ID NO: 616629 - DNA, 25 bp, Homo sapien
tcaaagataatagggggaagcagga

SEQ ID NO: 616630 - DNA, 25 bp, Homo sapien
tgatggaaccaatattttgaaagaa

SEQ ID NO: 616631 - DNA, 25 bp, Homo sapien
caaaagcggagattgccgtcccaaa

SEQ ID NO: 616632 - DNA, 25 bp, Homo sapien
gattgccgtcccaaaaacagcaaac

SEQ ID NO: 616633 - DNA, 25 bp, Homo sapien
acaaaagcggagattgccgtcccaa

SEQ ID NO: 616634 - DNA, 25 bp, Homo sapien
gcggagattgccgtcccaaaaacag

SEQ ID NO: 616635 - DNA, 25 bp, Homo sapien
cacccaactggtgccactgggaagt

SEQ ID NO: 616636 - DNA, 25 bp, Homo sapien
tgaagaaagctgcatgacagacaga

SEQ ID NO: 616637 - DNA, 25 bp, Homo sapien
gatgtgttaaagaaatctgcccgtc

SEQ ID NO: 616638 - DNA, 25 bp, Homo sapien
gataccaaaggtcttggaggacact

SEQ ID NO: 616639 - DNA, 25 bp, Homo sapien
gggcaacgtccatcttacataagtt

SEQ ID NO: 616640 - DNA, 25 bp, Homo sapien
cattgagaggtctgtatggaaagac

SEQ ID NO: 616641 - DNA, 25 bp, Homo sapien
tggaaagacggttatttcacctggc

SEQ ID NO: 616642 - DNA, 25 bp, Homo sapien
aggctgtcacgggtgcgcatgctca

SEQ ID NO: 616643 - DNA, 25 bp, Homo sapien
cgtagacagccgagagaaacactga

SEQ ID NO: 616644 - DNA, 25 bp, Homo sapien
tcagagcagctagagccaaatggcc

SEQ ID NO: 616645 - DNA, 25 bp, Homo sapien
tctaagaaagtgtcaaaaagcagca

SEQ ID NO: 616646 - DNA, 25 bp, Homo sapien
ccttggaatgctgtccgtgaccgac

SEQ ID NO: 616647 - DNA, 25 bp, Homo sapien
taaactgagttgttaggaatggcct

SEQ ID NO: 616648 - DNA, 25 bp, Homo sapien
cagaaagcaatactacacgctagag

SEQ ID NO: 616649 - DNA, 25 bp, Homo sapien
tgaccaatgatggaagggagacttt

SEQ ID NO: 616650 - DNA, 25 bp, Homo sapien
tctagtgtcagcacggagacttgac

SEQ ID NO: 616651 - DNA, 25 bp, Homo sapien
caaagaccagcatgttgagcacggg

SEQ ID NO: 616652 - DNA, 25 bp, Homo sapien
tggccactggatcgacagcagatat

SEQ ID NO: 616653 - DNA, 25 bp, Homo sapien
tggagactgcatcgttgagaatact

SEQ ID NO: 616654 - DNA, 25 bp, Homo sapien
cagcagatattagggagccaaacgc

SEQ ID NO: 616655 - DNA, 25 bp, Homo sapien
atgcttttctcatagtacccttttg

SEQ ID NO: 616656 - DNA, 25 bp, Homo sapien
ggatgcttttctcatagtacccttt

SEQ ID NO: 616657 - DNA, 25 bp, Homo sapien
gatgcttttctcatagtaccctttt

SEQ ID NO: 616658 - DNA, 25 bp, Homo sapien
tggatgcttttctcatagtaccctt

SEQ ID NO: 616659 - DNA, 25 bp, Homo sapien
tcaggcagtatttggtaagctcctc

SEQ ID NO: 616660 - DNA, 25 bp, Homo sapien
aaaggtgacaacagctcccaggagc

SEQ ID NO: 616661 - DNA, 25 bp, Homo sapien
ctgataaccaaggaaaggtgacaac

SEQ ID NO: 616662 - DNA, 25 bp, Homo sapien
aaggaaaggtgacaacagctcccag

SEQ ID NO: 616663 - DNA, 25 bp, Homo sapien
cagctcccaggagcatatttttctt

SEQ ID NO: 616664 - DNA, 25 bp, Homo sapien
tacctcttcaaaaccaggtatgatt

SEQ ID NO: 616665 - DNA, 25 bp, Homo sapien
tgaagtatacctcttcaaaaccagg

SEQ ID NO: 616666 - DNA, 25 bp, Homo sapien
gatcgtttatgaagtatacctcttc

SEQ ID NO: 616667 - DNA, 25 bp, Homo sapien
tttggagatgatcgtttatgaagta

SEQ ID NO: 616668 - DNA, 25 bp, Homo sapien
aaagggagtattgcttcagggtcca

SEQ ID NO: 616669 - DNA, 25 bp, Homo sapien
caaaaggtttcctctacagcagtga

SEQ ID NO: 616670 - DNA, 25 bp, Homo sapien
ttttatacagagtagcctgaggccc

SEQ ID NO: 616671 - DNA, 25 bp, Homo sapien
ggcaatggtttctgaactccaggta

SEQ ID NO: 616672 - DNA, 25 bp, Homo sapien
tgacatctgacatattttttcttgt

SEQ ID NO: 616673 - DNA, 25 bp, Homo sapien
catctgacatattttttcttgttaa

SEQ ID NO: 616674 - DNA, 25 bp, Homo sapien
ttttcttgttaaaccttcagctgtg

SEQ ID NO: 616675 - DNA, 25 bp, Homo sapien
tctgacatattttttcttgttaaac

SEQ ID NO: 616676 - DNA, 25 bp, Homo sapien
agtagtcaagggcttgtaaaaatgt

SEQ ID NO: 616677 - DNA, 25 bp, Homo sapien
aattaagccagtgagagtgccgagc

SEQ ID NO: 616678 - DNA, 25 bp, Homo sapien
gaaattaagccagtgagagtgccga

SEQ ID NO: 616679 - DNA, 25 bp, Homo sapien
taagccagtgagagtgccgagcgct

SEQ ID NO: 616680 - DNA, 25 bp, Homo sapien
tgagacgtaggcttaggtgcgcacc

SEQ ID NO: 616681 - DNA, 25 bp, Homo sapien
aaagagtctcttccggccatctgtg

SEQ ID NO: 616682 - DNA, 25 bp, Homo sapien
gaagctgtcagccaactcaatagag

SEQ ID NO: 616683 - DNA, 25 bp, Homo sapien
tgacacaaactgctcgtggaggcgg

SEQ ID NO: 616684 - DNA, 25 bp, Homo sapien
atgtgccgggccatggcgcaaagct

SEQ ID NO: 616685 - DNA, 25 bp, Homo sapien
cgggccatggcgcaaagctggggct

SEQ ID NO: 616686 - DNA, 25 bp, Homo sapien
tcacttggccaggttcctcccaggg

SEQ ID NO: 616687 - DNA, 25 bp, Homo sapien
gctgcagacacaccaaggacagctc

SEQ ID NO: 616688 - DNA, 25 bp, Homo sapien
gaaatgtaaattccggagataaatg

SEQ ID NO: 616689 - DNA, 25 bp, Homo sapien
tggaagatgaaaatcaacctaagtc

SEQ ID NO: 616690 - DNA, 25 bp, Homo sapien
tctgacaaaacactaagaaatgtaa

SEQ ID NO: 616691 - DNA, 25 bp, Homo sapien
tcctttgtagggagactgttgctat

SEQ ID NO: 616692 - DNA, 25 bp, Homo sapien
gcaagcccataaggcagataagcaa

SEQ ID NO: 616693 - DNA, 25 bp, Homo sapien
cccataaggcagataagcaaaaatg

SEQ ID NO: 616694 - DNA, 25 bp, Homo sapien
agcccataaggcagataagcaaaaa

SEQ ID NO: 616695 - DNA, 25 bp, Homo sapien
ctgcaagcccataaggcagataagc

SEQ ID NO: 616696 - DNA, 25 bp, Homo sapien
aactgagtcactagagaccactggg

SEQ ID NO: 616697 - DNA, 25 bp, Homo sapien
tgcagcacccaagtgtgactccgga

SEQ ID NO: 616698 - DNA, 25 bp, Homo sapien
tgactccggatagcgactgggtaga

SEQ ID NO: 616699 - DNA, 25 bp, Homo sapien
cctggtgaactggtctgcgatgaaa

SEQ ID NO: 616700 - DNA, 25 bp, Homo sapien
tcttgtcgtggtgcatatactagaa

SEQ ID NO: 616701 - DNA, 25 bp, Homo sapien
tcctctcgccacacaggtctgggct

SEQ ID NO: 616702 - DNA, 25 bp, Homo sapien
cgcacatctatcttcagacccctgg

SEQ ID NO: 616703 - DNA, 25 bp, Homo sapien
catatatggtgcctattaccagcag

SEQ ID NO: 616704 - DNA, 25 bp, Homo sapien
ccacggtgcggagggtctgctgcat

SEQ ID NO: 616705 - DNA, 25 bp, Homo sapien
atcacgatgcctgagaaaaggatgg

SEQ ID NO: 616706 - DNA, 25 bp, Homo sapien
agaaggccacggtgcggagggtctg

SEQ ID NO: 616707 - DNA, 25 bp, Homo sapien
tgcgtgtagtgggacatcacgatgc

SEQ ID NO: 616708 - DNA, 25 bp, Homo sapien
gccagggaaagtctcaactgacttc

SEQ ID NO: 616709 - DNA, 25 bp, Homo sapien
ggtctttaaattgtaggcgccagat

SEQ ID NO: 616710 - DNA, 25 bp, Homo sapien
gccattttcaccaaaccatcattaa

SEQ ID NO: 616711 - DNA, 25 bp, Homo sapien
taattggttctcactatttttggtc

SEQ ID NO: 616712 - DNA, 25 bp, Homo sapien
aaatggacaggccaagaaatgcaaa

SEQ ID NO: 616713 - DNA, 25 bp, Homo sapien
tatgcaccagatgacaaaggaaatt

SEQ ID NO: 616714 - DNA, 25 bp, Homo sapien
actaaaaatggacaggccaagaaat

SEQ ID NO: 616715 - DNA, 25 bp, Homo sapien
tggacaggccaagaaatgcaaacac

SEQ ID NO: 616716 - DNA, 25 bp, Homo sapien
tagctgttgactttgaacagttaac

SEQ ID NO: 616717 - DNA, 25 bp, Homo sapien
taaacaaaagagtgtctatgtagct

SEQ ID NO: 616718 - DNA, 25 bp, Homo sapien
aaatgaatccggaacatgtgtttat

SEQ ID NO: 616719 - DNA, 25 bp, Homo sapien
aacagttaacagttacataaatgaa

SEQ ID NO: 616720 - DNA, 25 bp, Homo sapien
tccttgcaaaggtcttacaaagtag

SEQ ID NO: 616721 - DNA, 25 bp, Homo sapien
tcaaacatttctatgccagacaaca

SEQ ID NO: 616722 - DNA, 25 bp, Homo sapien
attggtccaagttgacaaggcagga

SEQ ID NO: 616723 - DNA, 25 bp, Homo sapien
caggaagtaatggatccaagtctca

SEQ ID NO: 616724 - DNA, 25 bp, Homo sapien
gggaaaatgtttaccgctctgccaa

SEQ ID NO: 616725 - DNA, 25 bp, Homo sapien
gatgaacatcatcttcggtgtgatt

SEQ ID NO: 616726 - DNA, 25 bp, Homo sapien
cactaaaccacatgatgaacatcat

SEQ ID NO: 616727 - DNA, 25 bp, Homo sapien
ttatgatcccggaagaaattcagga

SEQ ID NO: 616728 - DNA, 25 bp, Homo sapien
tggcaaaagaggtgcggacacagct

SEQ ID NO: 616729 - DNA, 25 bp, Homo sapien
gcccctcgttgaggatccaggaaag

SEQ ID NO: 616730 - DNA, 25 bp, Homo sapien
gtagcagaggcttgttcagtgcccc

SEQ ID NO: 616731 - DNA, 25 bp, Homo sapien
tcagtgcccctcgttgaggatccag

SEQ ID NO: 616732 - DNA, 25 bp, Homo sapien
cccagatggggagacggcagggcaa

SEQ ID NO: 616733 - DNA, 25 bp, Homo sapien
atggggagacggcagggcaagagca

SEQ ID NO: 616734 - DNA, 25 bp, Homo sapien
gagcaaagggcacataatacagaga

SEQ ID NO: 616735 - DNA, 25 bp, Homo sapien
ctgctgcaggccagacccagatggg

SEQ ID NO: 616736 - DNA, 25 bp, Homo sapien
tgttcctgcggtgtgccttggcgtc

SEQ ID NO: 616737 - DNA, 25 bp, Homo sapien
tcttgttcctgcggtgtgccttggc

SEQ ID NO: 616738 - DNA, 25 bp, Homo sapien
gctcagggcataggggatggctccc

SEQ ID NO: 616739 - DNA, 25 bp, Homo sapien
gtccatgaggcgaatgaggggcatg

SEQ ID NO: 616740 - DNA, 25 bp, Homo sapien
aggcaggaacgtccatcagggcaca

SEQ ID NO: 616741 - DNA, 25 bp, Homo sapien
gattctatcatgcaaccaggaccag

SEQ ID NO: 616742 - DNA, 25 bp, Homo sapien
tcaagcttttgggtgattctatcat

SEQ ID NO: 616743 - DNA, 25 bp, Homo sapien
ttcattagcagcaaatcgcacaggg

SEQ ID NO: 616744 - DNA, 25 bp, Homo sapien
gatgtagtgggcctcgtactcctcc

SEQ ID NO: 616745 - DNA, 25 bp, Homo sapien
gaagcccttaaggtcctgccgcctg

SEQ ID NO: 616746 - DNA, 25 bp, Homo sapien
tcagcctccgagtgaagaaggggtt

SEQ ID NO: 616747 - DNA, 25 bp, Homo sapien
gtacttggcgtccagccacacgaag

SEQ ID NO: 616748 - DNA, 25 bp, Homo sapien
cacaaccaagccgtcagggcgtcag

SEQ ID NO: 616749 - DNA, 25 bp, Homo sapien
aagggaggggatgctactgggtgtt

SEQ ID NO: 616750 - DNA, 25 bp, Homo sapien
gagacacaaccaagccgtcagggcg

SEQ ID NO: 616751 - DNA, 25 bp, Homo sapien
caaccaagccgtcagggcgtcaggg

SEQ ID NO: 616752 - DNA, 25 bp, Homo sapien
tggcgtacctcctcgtaccacttgt

SEQ ID NO: 616753 - DNA, 25 bp, Homo sapien
tttcatctggatgcgcccgtggtgc

SEQ ID NO: 616754 - DNA, 25 bp, Homo sapien
gtaccacttgttggtgagagttttc

SEQ ID NO: 616755 - DNA, 25 bp, Homo sapien
agttttcatctggatgcgcccgtgg

SEQ ID NO: 616756 - DNA, 25 bp, Homo sapien
taggcgccctagcttcacagatgac

SEQ ID NO: 616757 - DNA, 25 bp, Homo sapien
aatcaagacagcagttgtgggccgg

SEQ ID NO: 616758 - DNA, 25 bp, Homo sapien
ggttctggactaaggcgactctgca

SEQ ID NO: 616759 - DNA, 25 bp, Homo sapien
gctacccagggagatagactgcgaa

SEQ ID NO: 616760 - DNA, 25 bp, Homo sapien
tgtaccatggcctagacccagaaga

SEQ ID NO: 616761 - DNA, 25 bp, Homo sapien
tgaggactctccaagcatgtgcgcc

SEQ ID NO: 616762 - DNA, 25 bp, Homo sapien
gggtcataacaactacaggctgcag

SEQ ID NO: 616763 - DNA, 25 bp, Homo sapien
ggaatgcacatgatcagcccagggt

SEQ ID NO: 616764 - DNA, 25 bp, Homo sapien
taaataggcatccagtgacacgact

SEQ ID NO: 616765 - DNA, 25 bp, Homo sapien
cagctgacttttgaccacggatgca

SEQ ID NO: 616766 - DNA, 25 bp, Homo sapien
taaagagtccaacgagatgacgcag

SEQ ID NO: 616767 - DNA, 25 bp, Homo sapien
caaagcctttggtgtaagccaggcc

SEQ ID NO: 616768 - DNA, 25 bp, Homo sapien
catttcgtacaccacagctcagtca

SEQ ID NO: 616769 - DNA, 25 bp, Homo sapien
tctccaggtgtcaaaggtgaaccga

SEQ ID NO: 616770 - DNA, 25 bp, Homo sapien
tcagtcagcccatggccttcgtgaa

SEQ ID NO: 616771 - DNA, 25 bp, Homo sapien
ggtgaaccgagtccagtattagctg

SEQ ID NO: 616772 - DNA, 25 bp, Homo sapien
attccccgactgggtccagctcagg

SEQ ID NO: 616773 - DNA, 25 bp, Homo sapien
tatgaagttagagcacatacctact

SEQ ID NO: 616774 - DNA, 25 bp, Homo sapien
tttttatggacagaacagtatgaag

SEQ ID NO: 616775 - DNA, 25 bp, Homo sapien
ttgatactaggtggtatgctcttcc

SEQ ID NO: 616776 - DNA, 25 bp, Homo sapien
tagggaagcttctttcagcaccgct

SEQ ID NO: 616777 - DNA, 25 bp, Homo sapien
tccttcagagcttctccgagagagg

SEQ ID NO: 616778 - DNA, 25 bp, Homo sapien
gagcctcttgcttggaacgagtgca

SEQ ID NO: 616779 - DNA, 25 bp, Homo sapien
ctgtaggaatgaccgagctgggact

SEQ ID NO: 616780 - DNA, 25 bp, Homo sapien
ccgggagctgcctcgcaggctcctg

SEQ ID NO: 616781 - DNA, 25 bp, Homo sapien
cccgggagctgcctcgcaggctcct

SEQ ID NO: 616782 - DNA, 25 bp, Homo sapien
aggtgggcccgctgtttcggcgctc

SEQ ID NO: 616783 - DNA, 25 bp, Homo sapien
ggtgggcccgctgtttcggcgctcc

SEQ ID NO: 616784 - DNA, 25 bp, Homo sapien
tgggcccgctgtttcggcgctcccg

SEQ ID NO: 616785 - DNA, 25 bp, Homo sapien
gtgggcccgctgtttcggcgctccc

SEQ ID NO: 616786 - DNA, 25 bp, Homo sapien
gccagacagcggcagggctcggctg

SEQ ID NO: 616787 - DNA, 25 bp, Homo sapien
gggcgccagacagcggcagggctcg

SEQ ID NO: 616788 - DNA, 25 bp, Homo sapien
ccagacagcggcagggctcggctgg

SEQ ID NO: 616789 - DNA, 25 bp, Homo sapien
gagggggcgccagacagcggcaggg

SEQ ID NO: 616790 - DNA, 25 bp, Homo sapien
tggcccccgggtactggtctcagta

SEQ ID NO: 616791 - DNA, 25 bp, Homo sapien
tcgctgctggcccccgggtactggt

SEQ ID NO: 616792 - DNA, 25 bp, Homo sapien
catcatttccgggccgagtgtttcc

SEQ ID NO: 616793 - DNA, 25 bp, Homo sapien
gacatcatttccgggccgagtgttt

SEQ ID NO: 616794 - DNA, 25 bp, Homo sapien
cgccggtttcgtcctcgctcttcgg

SEQ ID NO: 616795 - DNA, 25 bp, Homo sapien
tctgggttgtagtctccgtcggccg

SEQ ID NO: 616796 - DNA, 25 bp, Homo sapien
gtcggccgcgggcatcgaccgcttc

SEQ ID NO: 616797 - DNA, 25 bp, Homo sapien
ttccgctttgtcctccgcctctggg

SEQ ID NO: 616798 - DNA, 25 bp, Homo sapien
tggaggctatccttcatttaccctg

SEQ ID NO: 616799 - DNA, 25 bp, Homo sapien
cctttgattgctccctttactccag

SEQ ID NO: 616800 - DNA, 25 bp, Homo sapien
ccacaggtagccgagtttttgatct

SEQ ID NO: 616801 - DNA, 25 bp, Homo sapien
cacttctccatgctctaagctctat

SEQ ID NO: 616802 - DNA, 25 bp, Homo sapien
taagttaggcataatttaccccatc

SEQ ID NO: 616803 - DNA, 25 bp, Homo sapien
gatttcagccggttcttcaagattg

SEQ ID NO: 616804 - DNA, 25 bp, Homo sapien
gcgtcacagttctatcagcctcagg

SEQ ID NO: 616805 - DNA, 25 bp, Homo sapien
gaagtaactccagccctcaaatcct

SEQ ID NO: 616806 - DNA, 25 bp, Homo sapien
cttgctgccgctctgcgccgcgcaa

SEQ ID NO: 616807 - DNA, 25 bp, Homo sapien
cgctctgcgccgcgcaacggcggcc

SEQ ID NO: 616808 - DNA, 25 bp, Homo sapien
tgccgctctgcgccgcgcaacggcg

SEQ ID NO: 616809 - DNA, 25 bp, Homo sapien
tctgcgccgcgcaacggcggccgat

SEQ ID NO: 616810 - DNA, 25 bp, Homo sapien
tgaagcgtcctagggggtcagcctc

SEQ ID NO: 616811 - DNA, 25 bp, Homo sapien
acctctaagcacacgggacacgtga

SEQ ID NO: 616812 - DNA, 25 bp, Homo sapien
cacacgggacacgtgaagcgtccta

SEQ ID NO: 616813 - DNA, 25 bp, Homo sapien
ggcttctcgtacacctctaagcaca

SEQ ID NO: 616814 - DNA, 25 bp, Homo sapien
tcattataaccactctattcacaat

SEQ ID NO: 616815 - DNA, 25 bp, Homo sapien
cacatatctgctttaatcattataa

SEQ ID NO: 616816 - DNA, 25 bp, Homo sapien
tattcacaatattcaggtcatgaag

SEQ ID NO: 616817 - DNA, 25 bp, Homo sapien
tcaggtcatgaaggcttaattgaaa

SEQ ID NO: 616818 - DNA, 25 bp, Homo sapien
ggtaaaaatcaactaggcacaggag

SEQ ID NO: 616819 - DNA, 25 bp, Homo sapien
tctaccagattggagaacacagtca

SEQ ID NO: 616820 - DNA, 25 bp, Homo sapien
ccagccagagttgcagtgatgctca

SEQ ID NO: 616821 - DNA, 25 bp, Homo sapien
aaattcccttctcttgggcacccag

SEQ ID NO: 616822 - DNA, 25 bp, Homo sapien
aaatatggcaaacagaccagctggg

SEQ ID NO: 616823 - DNA, 25 bp, Homo sapien
tacccaacctgatagattaagacag

SEQ ID NO: 616824 - DNA, 25 bp, Homo sapien
gcaatggaaacttgacaaagccctg

SEQ ID NO: 616825 - DNA, 25 bp, Homo sapien
gagggagtctattcattcaccactg

SEQ ID NO: 616826 - DNA, 25 bp, Homo sapien
gatgaccgagttcctatcctgaagc

SEQ ID NO: 616827 - DNA, 25 bp, Homo sapien
agatgaccgagttcctatcctgaag

SEQ ID NO: 616828 - DNA, 25 bp, Homo sapien
aaagatgaccgagttcctatcctga

SEQ ID NO: 616829 - DNA, 25 bp, Homo sapien
tcaaagatgaccgagttcctatcct

SEQ ID NO: 616830 - DNA, 25 bp, Homo sapien
ggatgaattcaggaaaccattcaca

SEQ ID NO: 616831 - DNA, 25 bp, Homo sapien
aaacagatggctaaaggcagaggat

SEQ ID NO: 616832 - DNA, 25 bp, Homo sapien
cattcacagaaaggtagaatcagga

SEQ ID NO: 616833 - DNA, 25 bp, Homo sapien
cagaggattgtgagggtctgactga

SEQ ID NO: 616834 - DNA, 25 bp, Homo sapien
tgtgctctcgatctgccgctcgagc

SEQ ID NO: 616835 - DNA, 25 bp, Homo sapien
tcttacggcagccatggcaagaagt

SEQ ID NO: 616836 - DNA, 25 bp, Homo sapien
gagctccacggctcggacgccaggt

SEQ ID NO: 616837 - DNA, 25 bp, Homo sapien
acgccaggtgccagagcgctgcgac

SEQ ID NO: 616838 - DNA, 25 bp, Homo sapien
cccaacttatcatggaaagacatgg

SEQ ID NO: 616839 - DNA, 25 bp, Homo sapien
tgctgttagtgacctagtcatgctc

SEQ ID NO: 616840 - DNA, 25 bp, Homo sapien
tctaacttcagcaacaacatggcag

SEQ ID NO: 616841 - DNA, 25 bp, Homo sapien
caggtaattggcatgcacgcgtgct

SEQ ID NO: 616842 - DNA, 25 bp, Homo sapien
gcccagccatcaccacaggtaattg

SEQ ID NO: 616843 - DNA, 25 bp, Homo sapien
ctttccagtagcagttataacaggt

SEQ ID NO: 616844 - DNA, 25 bp, Homo sapien
atcaacaaggctgtgtatatctctt

SEQ ID NO: 616845 - DNA, 25 bp, Homo sapien
tgaggaacaagcctacattattgtg

SEQ ID NO: 616846 - DNA, 25 bp, Homo sapien
gttgaacgaattttgaagtaatctc

SEQ ID NO: 616847 - DNA, 25 bp, Homo sapien
taaactagtctccttacagcaagcc

SEQ ID NO: 616848 - DNA, 25 bp, Homo sapien
gatttcccattaataccaaggctgc

SEQ ID NO: 616849 - DNA, 25 bp, Homo sapien
cccataagttagtgaggaccttgca

SEQ ID NO: 616850 - DNA, 25 bp, Homo sapien
ccaaactcctgactacgctgatggg

SEQ ID NO: 616851 - DNA, 25 bp, Homo sapien
tctggtatttggaacaagtagccac

SEQ ID NO: 616852 - DNA, 25 bp, Homo sapien
ttctggtatttggaacaagtagcca

SEQ ID NO: 616853 - DNA, 25 bp, Homo sapien
aattctggtatttggaacaagtagc

SEQ ID NO: 616854 - DNA, 25 bp, Homo sapien
tggtatttggaacaagtagccacgt

SEQ ID NO: 616855 - DNA, 25 bp, Homo sapien
aggacagtaaggacaaggaaaggtg

SEQ ID NO: 616856 - DNA, 25 bp, Homo sapien
gacagtaaggacaaggaaaggtgta

SEQ ID NO: 616857 - DNA, 25 bp, Homo sapien
ctcaggacagtaaggacaaggaaag

SEQ ID NO: 616858 - DNA, 25 bp, Homo sapien
tcaggacagtaaggacaaggaaagg

SEQ ID NO: 616859 - DNA, 25 bp, Homo sapien
cagatttggtatccgtgctatggaa

SEQ ID NO: 616860 - DNA, 25 bp, Homo sapien
ataatttgcagtgttccacaagtcc

SEQ ID NO: 616861 - DNA, 25 bp, Homo sapien
ccacaagtccttcctgatcaaagtt

SEQ ID NO: 616862 - DNA, 25 bp, Homo sapien
ggaataatttgcagtgttccacaag

SEQ ID NO: 616863 - DNA, 25 bp, Homo sapien
tagcttattcccaagtggtcagcaa

SEQ ID NO: 616864 - DNA, 25 bp, Homo sapien
tgacttaatgtagcacccagaggac

SEQ ID NO: 616865 - DNA, 25 bp, Homo sapien
gacagagaactcgtgtaccatccct

SEQ ID NO: 616866 - DNA, 25 bp, Homo sapien
tcctgtatcagggtgcgaagtattc

SEQ ID NO: 616867 - DNA, 25 bp, Homo sapien
cggtgccggcgctggatgtgctctc

SEQ ID NO: 616868 - DNA, 25 bp, Homo sapien
tgctctctgaagttggcgctgcggt

SEQ ID NO: 616869 - DNA, 25 bp, Homo sapien
gtcataagaaaaccggtgccggcgc

SEQ ID NO: 616870 - DNA, 25 bp, Homo sapien
gcatcgaggcacatatcggacaaac

SEQ ID NO: 616871 - DNA, 25 bp, Homo sapien
tgtcctcttcatcaacatcataatc

SEQ ID NO: 616872 - DNA, 25 bp, Homo sapien
ctgattcatcatgtcctcttcatca

SEQ ID NO: 616873 - DNA, 25 bp, Homo sapien
gattcatcatgtcctcttcatcaac

SEQ ID NO: 616874 - DNA, 25 bp, Homo sapien
catcatgtcctcttcatcaacatca

SEQ ID NO: 616875 - DNA, 25 bp, Homo sapien
tggtcgatgatggagcgctgcaaca

SEQ ID NO: 616876 - DNA, 25 bp, Homo sapien
ggtcgatgatggagcgctgcaacac

SEQ ID NO: 616877 - DNA, 25 bp, Homo sapien
tcactggtcgatgatggagcgctgc

SEQ ID NO: 616878 - DNA, 25 bp, Homo sapien
actggtcgatgatggagcgctgcaa

SEQ ID NO: 616879 - DNA, 25 bp, Homo sapien
taatatgtaatggaagctctgtaac

SEQ ID NO: 616880 - DNA, 25 bp, Homo sapien
acgtttaatatgtaatggaagctct

SEQ ID NO: 616881 - DNA, 25 bp, Homo sapien
atgagacagatagcaagcacggact

SEQ ID NO: 616882 - DNA, 25 bp, Homo sapien
gacagatagcaagcacggactctgc

SEQ ID NO: 616883 - DNA, 25 bp, Homo sapien
ttgaaggacccgagagacaaacact

SEQ ID NO: 616884 - DNA, 25 bp, Homo sapien
gactggtgacatgtaccccgggatg

SEQ ID NO: 616885 - DNA, 25 bp, Homo sapien
aagtgaccctgtcccaatgccatgg

SEQ ID NO: 616886 - DNA, 25 bp, Homo sapien
gaacaagaatgtaggcaggctccca

SEQ ID NO: 616887 - DNA, 25 bp, Homo sapien
ctcttcaccggcaggcgcggagccc

SEQ ID NO: 616888 - DNA, 25 bp, Homo sapien
caagcgcgaggtagcacttgcagcc

SEQ ID NO: 616889 - DNA, 25 bp, Homo sapien
tgggtcctcccgagaaatactaatg

SEQ ID NO: 616890 - DNA, 25 bp, Homo sapien
cagcagtgtacaagcgcgaggtagc

SEQ ID NO: 616891 - DNA, 25 bp, Homo sapien
caggaaggtctgagtgaacttcttc

SEQ ID NO: 616892 - DNA, 25 bp, Homo sapien
ggaaggtctgagtgaacttcttcca

SEQ ID NO: 616893 - DNA, 25 bp, Homo sapien
tcaggaaggtctgagtgaacttctt

SEQ ID NO: 616894 - DNA, 25 bp, Homo sapien
aggaaggtctgagtgaacttcttcc

SEQ ID NO: 616895 - DNA, 25 bp, Homo sapien
caccagtgaggtggacatacactca

SEQ ID NO: 616896 - DNA, 25 bp, Homo sapien
tacaagaagtgcacttaatacaagg

SEQ ID NO: 616897 - DNA, 25 bp, Homo sapien
tcacatcagtccctcaaacgaaggt

SEQ ID NO: 616898 - DNA, 25 bp, Homo sapien
gaagtaagtttctcggtgccaccag

SEQ ID NO: 616899 - DNA, 25 bp, Homo sapien
cgggtagttagtggagaaggtggag

SEQ ID NO: 616900 - DNA, 25 bp, Homo sapien
gagaaggtggagcgagtggtgaagg

SEQ ID NO: 616901 - DNA, 25 bp, Homo sapien
gaaggtggagcgagtggtgaaggtc

SEQ ID NO: 616902 - DNA, 25 bp, Homo sapien
aggtggagcgagtggtgaaggtcat

SEQ ID NO: 616903 - DNA, 25 bp, Homo sapien
actgctgaccggccgggcgccatag

SEQ ID NO: 616904 - DNA, 25 bp, Homo sapien
gggcacctgcatagacgctaaccat

SEQ ID NO: 616905 - DNA, 25 bp, Homo sapien
cccgggcacctgcatagacgctaac

SEQ ID NO: 616906 - DNA, 25 bp, Homo sapien
cgggcacctgcatagacgctaacca

SEQ ID NO: 616907 - DNA, 25 bp, Homo sapien
gccccgggcacctgcatagacgcta

SEQ ID NO: 616908 - DNA, 25 bp, Homo sapien
gatccccagccatccccccggccag

SEQ ID NO: 616909 - DNA, 25 bp, Homo sapien
aggtcctcgatggttttgaagtgat

SEQ ID NO: 616910 - DNA, 25 bp, Homo sapien
tgccagatccccagccatccccccg

SEQ ID NO: 616911 - DNA, 25 bp, Homo sapien
cctcgatggttttgaagtgatggct

SEQ ID NO: 616912 - DNA, 25 bp, Homo sapien
agcaagacaggcattgttgatctgc

SEQ ID NO: 616913 - DNA, 25 bp, Homo sapien
ttgatctgcagaacaatgcaggcat

SEQ ID NO: 616914 - DNA, 25 bp, Homo sapien
caggcattgttgatctgcagaacaa

SEQ ID NO: 616915 - DNA, 25 bp, Homo sapien
tgatctgcagaacaatgcaggcatt

SEQ ID NO: 616916 - DNA, 25 bp, Homo sapien
gcctgcatgtctgtcatgatcttgc

SEQ ID NO: 616917 - DNA, 25 bp, Homo sapien
ctactgagatcagtacatgtccagc

SEQ ID NO: 616918 - DNA, 25 bp, Homo sapien
catgtctgtcatgatcttgctgacg

SEQ ID NO: 616919 - DNA, 25 bp, Homo sapien
tgcatgtctgtcatgatcttgctga

SEQ ID NO: 616920 - DNA, 25 bp, Homo sapien
ctgcgtggtgacttctgtagtgttc

SEQ ID NO: 616921 - DNA, 25 bp, Homo sapien
gactgcgtggtgacttctgtagtgt

SEQ ID NO: 616922 - DNA, 25 bp, Homo sapien
tgacttctgtagtgttctcctcaat

SEQ ID NO: 616923 - DNA, 25 bp, Homo sapien
gcgtggtgacttctgtagtgttctc

SEQ ID NO: 616924 - DNA, 25 bp, Homo sapien
cagtatcccactgagctgttccatc

SEQ ID NO: 616925 - DNA, 25 bp, Homo sapien
actccaggtacagcagtatcccact

SEQ ID NO: 616926 - DNA, 25 bp, Homo sapien
gactccaggtacagcagtatcccac

SEQ ID NO: 616927 - DNA, 25 bp, Homo sapien
gtacagcagtatcccactgagctgt

SEQ ID NO: 616928 - DNA, 25 bp, Homo sapien
ctggcactgtccctctgcctgggtc

SEQ ID NO: 616929 - DNA, 25 bp, Homo sapien
gcttcctactcctgggcctggcact

SEQ ID NO: 616930 - DNA, 25 bp, Homo sapien
ggcctggcactgtccctctgcctgg

SEQ ID NO: 616931 - DNA, 25 bp, Homo sapien
cttatgttcagcagggcttcctact

SEQ ID NO: 616932 - DNA, 25 bp, Homo sapien
caagattgaagtcctcgctgtcttc

SEQ ID NO: 616933 - DNA, 25 bp, Homo sapien
tttgccatccactgtctggcgggtg

SEQ ID NO: 616934 - DNA, 25 bp, Homo sapien
agattgaagtcctcgctgtcttcca

SEQ ID NO: 616935 - DNA, 25 bp, Homo sapien
atccactgtctggcgggtggtggtc

SEQ ID NO: 616936 - DNA, 25 bp, Homo sapien
tcattaacaagggtgaaggcagcgt

SEQ ID NO: 616937 - DNA, 25 bp, Homo sapien
ctgcgctgggcacataatttttttg

SEQ ID NO: 616938 - DNA, 25 bp, Homo sapien
gaataaagggaccacattgaggacc

SEQ ID NO: 616939 - DNA, 25 bp, Homo sapien
tgtgcttccgatttgaggccctgcc

SEQ ID NO: 616940 - DNA, 25 bp, Homo sapien
tgagacattcagcagaagacaccgc

SEQ ID NO: 616941 - DNA, 25 bp, Homo sapien
catgagatccactttcctggagaaa

SEQ ID NO: 616942 - DNA, 25 bp, Homo sapien
cccagtgagtctccaggcacttgca

SEQ ID NO: 616943 - DNA, 25 bp, Homo sapien
cagactgcactgatagagccctgct

SEQ ID NO: 616944 - DNA, 25 bp, Homo sapien
gctcgcagactgtctcgggcctagg

SEQ ID NO: 616945 - DNA, 25 bp, Homo sapien
tacacgcacacttgctcgcagactg

SEQ ID NO: 616946 - DNA, 25 bp, Homo sapien
tgcataggggccacattaatgttct

SEQ ID NO: 616947 - DNA, 25 bp, Homo sapien
taggggccacattaatgttctgtgt

SEQ ID NO: 616948 - DNA, 25 bp, Homo sapien
gggccacattaatgttctgtgtatc

SEQ ID NO: 616949 - DNA, 25 bp, Homo sapien
cataggggccacattaatgttctgt

SEQ ID NO: 616950 - DNA, 25 bp, Homo sapien
aaacacaatgtcgagcagaggtcac

SEQ ID NO: 616951 - DNA, 25 bp, Homo sapien
ggatttatacgaggttctgaagcag

SEQ ID NO: 616952 - DNA, 25 bp, Homo sapien
ctgaagcaggcaaatgaaaccctat

SEQ ID NO: 616953 - DNA, 25 bp, Homo sapien
gactggattaatgaaccctggtgca

SEQ ID NO: 616954 - DNA, 25 bp, Homo sapien
tgaagggcagaactactgtctgttt

SEQ ID NO: 616955 - DNA, 25 bp, Homo sapien
caaaatcgtcctcccctggttctag

SEQ ID NO: 616956 - DNA, 25 bp, Homo sapien
tgtgacagccgtgaacaaaatcgtc

SEQ ID NO: 616957 - DNA, 25 bp, Homo sapien
tgtttagtcacttggtgccgggtgt

SEQ ID NO: 616958 - DNA, 25 bp, Homo sapien
ggcgcagcgcgggtcgtccccggtg

SEQ ID NO: 616959 - DNA, 25 bp, Homo sapien
ggctcgcgccgcgtggcggtgagag

SEQ ID NO: 616960 - DNA, 25 bp, Homo sapien
gaaggccactccccgagcaggtgcg

SEQ ID NO: 616961 - DNA, 25 bp, Homo sapien
ctccgcgccaatcggaggctcgtct

SEQ ID NO: 616962 - DNA, 25 bp, Homo sapien
tcgccgattcgcgcagcagtagcgc

SEQ ID NO: 616963 - DNA, 25 bp, Homo sapien
agcagtagcgcagaagaaccactcg

SEQ ID NO: 616964 - DNA, 25 bp, Homo sapien
tggtcgaggcactggggtcgccgat

SEQ ID NO: 616965 - DNA, 25 bp, Homo sapien
actggggtcgccgattcgcgcagca

SEQ ID NO: 616966 - DNA, 25 bp, Homo sapien
tggattagagtcctgcagctcgctg

SEQ ID NO: 616967 - DNA, 25 bp, Homo sapien
tgcagctcgctgtagttaggcttcc

SEQ ID NO: 616968 - DNA, 25 bp, Homo sapien
ctggattagagtcctgcagctcgct

SEQ ID NO: 616969 - DNA, 25 bp, Homo sapien
ctcgctgtagttaggcttccgattg

SEQ ID NO: 616970 - DNA, 25 bp, Homo sapien
tgggactctcctggagccgaaggga

SEQ ID NO: 616971 - DNA, 25 bp, Homo sapien
gcctttcgagcctggagatccttgg

SEQ ID NO: 616972 - DNA, 25 bp, Homo sapien
acagagtcccagatgagcattggca

SEQ ID NO: 616973 - DNA, 25 bp, Homo sapien
ccgcaggttccgcagacgcagggca

SEQ ID NO: 616974 - DNA, 25 bp, Homo sapien
acattcgggagaaggtccgagcaca

SEQ ID NO: 616975 - DNA, 25 bp, Homo sapien
gagcacacgcctggcactggtactt

SEQ ID NO: 616976 - DNA, 25 bp, Homo sapien
tacttcttgacatctgagtgggtct

SEQ ID NO: 616977 - DNA, 25 bp, Homo sapien
gggacatcctgagcagccggactct

SEQ ID NO: 616978 - DNA, 25 bp, Homo sapien
gcactcaggagggaattccatggca

SEQ ID NO: 616979 - DNA, 25 bp, Homo sapien
gctctggatacaaaaacccacgcag

SEQ ID NO: 616980 - DNA, 25 bp, Homo sapien
ccctccacagaaatggccatgggaa

SEQ ID NO: 616981 - DNA, 25 bp, Homo sapien
tgggagacacatcggtcagaccaga

SEQ ID NO: 616982 - DNA, 25 bp, Homo sapien
gggtgggaagggaggcgccagccat

SEQ ID NO: 616983 - DNA, 25 bp, Homo sapien
gagggtgggaagggaggcgccagcc

SEQ ID NO: 616984 - DNA, 25 bp, Homo sapien
cctagacagggcaggggcggagctg

SEQ ID NO: 616985 - DNA, 25 bp, Homo sapien
aggggcggagctggagagggtggga

SEQ ID NO: 616986 - DNA, 25 bp, Homo sapien
gcctccagttgtgggtgacccatag

SEQ ID NO: 616987 - DNA, 25 bp, Homo sapien
catagggactttccccaacaggtga

SEQ ID NO: 616988 - DNA, 25 bp, Homo sapien
tgacccatagggactttccccaaca

SEQ ID NO: 616989 - DNA, 25 bp, Homo sapien
accagcctccagttgtgggtgaccc

SEQ ID NO: 616990 - DNA, 25 bp, Homo sapien
caccaaggtgagtccctctgaggca

SEQ ID NO: 616991 - DNA, 25 bp, Homo sapien
atgggccccagaccccgaagagtct

SEQ ID NO: 616992 - DNA, 25 bp, Homo sapien
ggcagcaaatgtgcaatggcctcgg

SEQ ID NO: 616993 - DNA, 25 bp, Homo sapien
ggcctcggtgtttgggcctgtccat

SEQ ID NO: 616994 - DNA, 25 bp, Homo sapien
ccccatgaacctgctcgccaggctg

SEQ ID NO: 616995 - DNA, 25 bp, Homo sapien
agtcccccatgaacctgctcgccag

SEQ ID NO: 616996 - DNA, 25 bp, Homo sapien
tcgccaggctggagccagccgccat

SEQ ID NO: 616997 - DNA, 25 bp, Homo sapien
catgaacctgctcgccaggctggag

SEQ ID NO: 616998 - DNA, 25 bp, Homo sapien
gcagaacgggccgctgacctcaagg

SEQ ID NO: 616999 - DNA, 25 bp, Homo sapien
ggcagaacgggccgctgacctcaag

SEQ ID NO: 617000 - DNA, 25 bp, Homo sapien
cagggcagaacgggccgctgacctc

SEQ ID NO: 617001 - DNA, 25 bp, Homo sapien
agggcagaacgggccgctgacctca

SEQ ID NO: 617002 - DNA, 25 bp, Homo sapien
tttcttctcggatccaggctggggc

SEQ ID NO: 617003 - DNA, 25 bp, Homo sapien
ctttcttctcggatccaggctgggg

SEQ ID NO: 617004 - DNA, 25 bp, Homo sapien
cctttcttctcggatccaggctggg

SEQ ID NO: 617005 - DNA, 25 bp, Homo sapien
gcacaagtgcgactggcctggcttc

SEQ ID NO: 617006 - DNA, 25 bp, Homo sapien
gcttttgataaagcccctctgtgcg

SEQ ID NO: 617007 - DNA, 25 bp, Homo sapien
gggcctcctcacagccgcttttgat

SEQ ID NO: 617008 - DNA, 25 bp, Homo sapien
gtggagcacacgaagaccagggcac

SEQ ID NO: 617009 - DNA, 25 bp, Homo sapien
gggccatccattagcatttatcacg

SEQ ID NO: 617010 - DNA, 25 bp, Homo sapien
gcgttcccgggccatccattagcat

SEQ ID NO: 617011 - DNA, 25 bp, Homo sapien
atttatcacgttcctcccatgtgcc

SEQ ID NO: 617012 - DNA, 25 bp, Homo sapien
cattagcatttatcacgttcctccc

SEQ ID NO: 617013 - DNA, 25 bp, Homo sapien
tcttgactctggtggtcggcttttc

SEQ ID NO: 617014 - DNA, 25 bp, Homo sapien
ttttcgcatccaggtcttccgtcac

SEQ ID NO: 617015 - DNA, 25 bp, Homo sapien
tttgctgccattggcgcagtcaggg

SEQ ID NO: 617016 - DNA, 25 bp, Homo sapien
gagtctgggaatcccggcttccttg

SEQ ID NO: 617017 - DNA, 25 bp, Homo sapien
cacggtggccagaggcttaaagccg

SEQ ID NO: 617018 - DNA, 25 bp, Homo sapien
tgacacggtggccagaggcttaaag

SEQ ID NO: 617019 - DNA, 25 bp, Homo sapien
cagaggcttaaagccggacccagcc

SEQ ID NO: 617020 - DNA, 25 bp, Homo sapien
tggccagaggcttaaagccggaccc

SEQ ID NO: 617021 - DNA, 25 bp, Homo sapien
gaagcctgggccgttcacttccggc

SEQ ID NO: 617022 - DNA, 25 bp, Homo sapien
tcaggcgcccaagccatgggttcct

SEQ ID NO: 617023 - DNA, 25 bp, Homo sapien
ttcacttccggccacactgcccttg

SEQ ID NO: 617024 - DNA, 25 bp, Homo sapien
ccatgggttccttggaatgtaattc

SEQ ID NO: 617025 - DNA, 25 bp, Homo sapien
gtgggtcacatggacctgtgaggcc

SEQ ID NO: 617026 - DNA, 25 bp, Homo sapien
tcttggtgggtcacatggacctgtg

SEQ ID NO: 617027 - DNA, 25 bp, Homo sapien
gccactggcagtgacaagggagggg

SEQ ID NO: 617028 - DNA, 25 bp, Homo sapien
cactggcagtgacaagggaggggtc

SEQ ID NO: 617029 - DNA, 25 bp, Homo sapien
gctccgtagttaagcgcagcacacc

SEQ ID NO: 617030 - DNA, 25 bp, Homo sapien
gggatccgctccgtagttaagcgca

SEQ ID NO: 617031 - DNA, 25 bp, Homo sapien
ttagctcctccccgggatattcttc

SEQ ID NO: 617032 - DNA, 25 bp, Homo sapien
agccttggggatccgctccgtagtt

SEQ ID NO: 617033 - DNA, 25 bp, Homo sapien
gaccgcatgaagatacttgtaagca

SEQ ID NO: 617034 - DNA, 25 bp, Homo sapien
tgtaagcacacatgatccctctgaa

SEQ ID NO: 617035 - DNA, 25 bp, Homo sapien
caaaaagaaccttgaatccggtgca

SEQ ID NO: 617036 - DNA, 25 bp, Homo sapien
gtgtgcacagcagatccccgaaatt

SEQ ID NO: 617037 - DNA, 25 bp, Homo sapien
caaatcatcctgtcaagtgtaacca

SEQ ID NO: 617038 - DNA, 25 bp, Homo sapien
tctgagattggccttcggtgaggaa

SEQ ID NO: 617039 - DNA, 25 bp, Homo sapien
gaagcatagattgtaacccctccac

SEQ ID NO: 617040 - DNA, 25 bp, Homo sapien
cagcctgtgggactactgctaggtg

SEQ ID NO: 617041 - DNA, 25 bp, Homo sapien
tgaagaggacaggtcctgagcccgg

SEQ ID NO: 617042 - DNA, 25 bp, Homo sapien
aagaggacaggtcctgagcccggca

SEQ ID NO: 617043 - DNA, 25 bp, Homo sapien
gaggacaggtcctgagcccggcagc

SEQ ID NO: 617044 - DNA, 25 bp, Homo sapien
cagtgaagaggacaggtcctgagcc

SEQ ID NO: 617045 - DNA, 25 bp, Homo sapien
tacacatgttaacgtcacgccaagc

SEQ ID NO: 617046 - DNA, 25 bp, Homo sapien
tgttcaaagaggagatcagcaagtg

SEQ ID NO: 617047 - DNA, 25 bp, Homo sapien
ggaaatgctgccttaacctgagagg

SEQ ID NO: 617048 - DNA, 25 bp, Homo sapien
gaatctgagttccacctaaagtcct

SEQ ID NO: 617049 - DNA, 25 bp, Homo sapien
cctccctcgtcttgtcttaattttg

SEQ ID NO: 617050 - DNA, 25 bp, Homo sapien
gatggaacaccccagttgaaatccc

SEQ ID NO: 617051 - DNA, 25 bp, Homo sapien
gctgcctcacccattgaatgccagt

SEQ ID NO: 617052 - DNA, 25 bp, Homo sapien
agtaatctctcaggtcagactacca

SEQ ID NO: 617053 - DNA, 25 bp, Homo sapien
ccacctcggcccccccagatgccga

SEQ ID NO: 617054 - DNA, 25 bp, Homo sapien
acctcggcccccccagatgccgaga

SEQ ID NO: 617055 - DNA, 25 bp, Homo sapien
cacctcggcccccccagatgccgag

SEQ ID NO: 617056 - DNA, 25 bp, Homo sapien
cacaagtttgcgtctctctgaagga

SEQ ID NO: 617057 - DNA, 25 bp, Homo sapien
tgcctaatggacaaagtagcctgtg

SEQ ID NO: 617058 - DNA, 25 bp, Homo sapien
tgagaaggctacgaagtctccgggt

SEQ ID NO: 617059 - DNA, 25 bp, Homo sapien
tgtgtgtgtgcccaaggagtgtccc

SEQ ID NO: 617060 - DNA, 25 bp, Homo sapien
ggattgatacccaatactaggcaac

SEQ ID NO: 617061 - DNA, 25 bp, Homo sapien
cagaaccagctcttgctgccgaggt

SEQ ID NO: 617062 - DNA, 25 bp, Homo sapien
caaagaaggcacaatatgagaacac

SEQ ID NO: 617063 - DNA, 25 bp, Homo sapien
gcagaaacagtaaccaccctctggg

SEQ ID NO: 617064 - DNA, 25 bp, Homo sapien
gcaaaaatggccctcatcgaggagc

SEQ ID NO: 617065 - DNA, 25 bp, Homo sapien
tgtgtctaggcaacgcttgatcctc

SEQ ID NO: 617066 - DNA, 25 bp, Homo sapien
tcatgagagtgctaggtatgtgcgt

SEQ ID NO: 617067 - DNA, 25 bp, Homo sapien
tgcagcaaccataaatgtgtctagg

SEQ ID NO: 617068 - DNA, 25 bp, Homo sapien
tccctcgcaatttccgactgttgga

SEQ ID NO: 617069 - DNA, 25 bp, Homo sapien
ccctcgcaatttccgactgttggaa

SEQ ID NO: 617070 - DNA, 25 bp, Homo sapien
aagtccctcgcaatttccgactgtt

SEQ ID NO: 617071 - DNA, 25 bp, Homo sapien
gtccctcgcaatttccgactgttgg

SEQ ID NO: 617072 - DNA, 25 bp, Homo sapien
atggcaggtacaaagtagtacctca

SEQ ID NO: 617073 - DNA, 25 bp, Homo sapien
catggcaggtacaaagtagtacctc

SEQ ID NO: 617074 - DNA, 25 bp, Homo sapien
tggcaggtacaaagtagtacctcat

SEQ ID NO: 617075 - DNA, 25 bp, Homo sapien
ctgcgcatcagggccgggggacggg

SEQ ID NO: 617076 - DNA, 25 bp, Homo sapien
gcgcatcagggccgggggacgggta

SEQ ID NO: 617077 - DNA, 25 bp, Homo sapien
tgcgcatcagggccgggggacgggt

SEQ ID NO: 617078 - DNA, 25 bp, Homo sapien
tcagcggcggcgtatgtgcgtgcgc

SEQ ID NO: 617079 - DNA, 25 bp, Homo sapien
cctcgagcacgcagatatttccttt

SEQ ID NO: 617080 - DNA, 25 bp, Homo sapien
gttgctgggccctcgagcacgcaga

SEQ ID NO: 617081 - DNA, 25 bp, Homo sapien
tccaggccacgggtcgtgcaggtct

SEQ ID NO: 617082 - DNA, 25 bp, Homo sapien
ctgcgatgagctcggcacgggaatt

SEQ ID NO: 617083 - DNA, 25 bp, Homo sapien
gctcggcacgggaattattattgtc

SEQ ID NO: 617084 - DNA, 25 bp, Homo sapien
taacctcttcctgcgatgagctcgg

SEQ ID NO: 617085 - DNA, 25 bp, Homo sapien
ctcttcctgcgatgagctcggcacg

SEQ ID NO: 617086 - DNA, 25 bp, Homo sapien
cgtgtgcgcgggacgtactacaact

SEQ ID NO: 617087 - DNA, 25 bp, Homo sapien
cagaaactcttcgagggagcgtgtg

SEQ ID NO: 617088 - DNA, 25 bp, Homo sapien
gctagactacaacaaccagcatgcc

SEQ ID NO: 617089 - DNA, 25 bp, Homo sapien
caggcgccggaaggaatcctgctct

SEQ ID NO: 617090 - DNA, 25 bp, Homo sapien
gataaagtaatgatggctgatccct

SEQ ID NO: 617091 - DNA, 25 bp, Homo sapien
cctcaggatgagagctgtcacctga

SEQ ID NO: 617092 - DNA, 25 bp, Homo sapien
caacaaagacctatcctggtggagc

SEQ ID NO: 617093 - DNA, 25 bp, Homo sapien
caggtacagcggtgaaagaaccaac

SEQ ID NO: 617094 - DNA, 25 bp, Homo sapien
taagcgtcgtggagcattgttctgc

SEQ ID NO: 617095 - DNA, 25 bp, Homo sapien
catttggaagaggacacggtatccc

SEQ ID NO: 617096 - DNA, 25 bp, Homo sapien
aagagtctacttaaccttggctgcc

SEQ ID NO: 617097 - DNA, 25 bp, Homo sapien
tagccggccagaagaggctggaacc

SEQ ID NO: 617098 - DNA, 25 bp, Homo sapien
catgaatgaggccaccttagcccag

SEQ ID NO: 617099 - DNA, 25 bp, Homo sapien
cagttaagcaactaagattaagaca

SEQ ID NO: 617100 - DNA, 25 bp, Homo sapien
agaagcagccgcatgcacaagccca

SEQ ID NO: 617101 - DNA, 25 bp, Homo sapien
gccaacacacagaattgcaagcagt

SEQ ID NO: 617102 - DNA, 25 bp, Homo sapien
gaaaacaccacgtacagaagccagt

SEQ ID NO: 617103 - DNA, 25 bp, Homo sapien
ccaacaaggagcgaggagcagtttc

SEQ ID NO: 617104 - DNA, 25 bp, Homo sapien
gagactttatgggacatctgggcct

SEQ ID NO: 617105 - DNA, 25 bp, Homo sapien
ccagatgcagtacagaggtgcccca

SEQ ID NO: 617106 - DNA, 25 bp, Homo sapien
gcaacacagcgcagcgtgactacgt

SEQ ID NO: 617107 - DNA, 25 bp, Homo sapien
gatctgtctcctcctaacgggcatg

SEQ ID NO: 617108 - DNA, 25 bp, Homo sapien
gactacgtgcttgatctgtctcctc

SEQ ID NO: 617109 - DNA, 25 bp, Homo sapien
aagcggagggaagcaacacagcgca

SEQ ID NO: 617110 - DNA, 25 bp, Homo sapien
agtgtccatcatcatcgatcacatg

SEQ ID NO: 617111 - DNA, 25 bp, Homo sapien
tcatcatcgatcacatgaacaaaca

SEQ ID NO: 617112 - DNA, 25 bp, Homo sapien
ctgactcaagctataatgtgaatga

SEQ ID NO: 617113 - DNA, 25 bp, Homo sapien
gcaacagtgtttacgatagctaaaa

SEQ ID NO: 617114 - DNA, 25 bp, Homo sapien
gcaggtgtcaccagagaatccagaa

SEQ ID NO: 617115 - DNA, 25 bp, Homo sapien
aagccatagtccgcggtcttgcact

SEQ ID NO: 617116 - DNA, 25 bp, Homo sapien
ttcatactctgatttacttaatcac

SEQ ID NO: 617117 - DNA, 25 bp, Homo sapien
ggaaggtgcagctgcatcctggcac

SEQ ID NO: 617118 - DNA, 25 bp, Homo sapien
ctcgctccggggcttgtagatggcc

SEQ ID NO: 617119 - DNA, 25 bp, Homo sapien
taatcactgttcagccagaaaaccg

SEQ ID NO: 617120 - DNA, 25 bp, Homo sapien
agaaagaaatcgcagccgcagagag

SEQ ID NO: 617121 - DNA, 25 bp, Homo sapien
aaacccctgaacaccgcaacagaga

SEQ ID NO: 617122 - DNA, 25 bp, Homo sapien
cacagggaacgggttacagagacga

SEQ ID NO: 617123 - DNA, 25 bp, Homo sapien
tcatacaacattgtccttctgtgtc

SEQ ID NO: 617124 - DNA, 25 bp, Homo sapien
caggtccataggtgttgtggtctgt

SEQ ID NO: 617125 - DNA, 25 bp, Homo sapien
gttttccaggtccataggtgttgtg

SEQ ID NO: 617126 - DNA, 25 bp, Homo sapien
ctcatacaacattgtccttctgtgt

SEQ ID NO: 617127 - DNA, 25 bp, Homo sapien
aatgcattcacactaggcacagtgg

SEQ ID NO: 617128 - DNA, 25 bp, Homo sapien
ggtgcccaccgggtgctgacatgca

SEQ ID NO: 617129 - DNA, 25 bp, Homo sapien
ccacagaggtgaaggcccctggtca

SEQ ID NO: 617130 - DNA, 25 bp, Homo sapien
ctgtcgccgggaacgtaagcaactg

SEQ ID NO: 617131 - DNA, 25 bp, Homo sapien
ctgggcatttatgctgtgccaggca

SEQ ID NO: 617132 - DNA, 25 bp, Homo sapien
gcttttcacaattcctcctccccat

SEQ ID NO: 617133 - DNA, 25 bp, Homo sapien
caaactgcttttcacaattcctcct

SEQ ID NO: 617134 - DNA, 25 bp, Homo sapien
ctcctctgcccccaaactgcttttc

SEQ ID NO: 617135 - DNA, 25 bp, Homo sapien
aactgcttttcacaattcctcctcc

SEQ ID NO: 617136 - DNA, 25 bp, Homo sapien
taagggcggcccgtagcaaccgctg

SEQ ID NO: 617137 - DNA, 25 bp, Homo sapien
cgtgcgcggctctgactcgctaaag

SEQ ID NO: 617138 - DNA, 25 bp, Homo sapien
cgctaaagtttctcctgagcccggt

SEQ ID NO: 617139 - DNA, 25 bp, Homo sapien
gggacgcgaaggacacggccgcggc

SEQ ID NO: 617140 - DNA, 25 bp, Homo sapien
tccatggatttaaaggcaggcggcg

SEQ ID NO: 617141 - DNA, 25 bp, Homo sapien
ttccatggatttaaaggcaggcggc

SEQ ID NO: 617142 - DNA, 25 bp, Homo sapien
agccgcctcgaaggtgtccgtggcc

SEQ ID NO: 617143 - DNA, 25 bp, Homo sapien
gtggtcgccgatgctgcccagctcg

SEQ ID NO: 617144 - DNA, 25 bp, Homo sapien
aagcagtccgcctcgtagtagaagt

SEQ ID NO: 617145 - DNA, 25 bp, Homo sapien
gctccaggtacgggctgaagtcgat

SEQ ID NO: 617146 - DNA, 25 bp, Homo sapien
aagaggtcggagaggaagtcgtggt

SEQ ID NO: 617147 - DNA, 25 bp, Homo sapien
tcttgcccccgtagtcgtcggagaa

SEQ ID NO: 617148 - DNA, 25 bp, Homo sapien
cttgcagttcttgcccccgtagtcg

SEQ ID NO: 617149 - DNA, 25 bp, Homo sapien
tagtcgtcggagaagaggtcggaga

SEQ ID NO: 617150 - DNA, 25 bp, Homo sapien
ggtaagcgcgcagcgcgtacgggaa

SEQ ID NO: 617151 - DNA, 25 bp, Homo sapien
cctggtagccgaggtaagcgcgcag

SEQ ID NO: 617152 - DNA, 25 bp, Homo sapien
tccgcttgcagtccgcgggctcgaa

SEQ ID NO: 617153 - DNA, 25 bp, Homo sapien
tcgaagcccggctccgccttgagct

SEQ ID NO: 617154 - DNA, 25 bp, Homo sapien
agccgctcgttctcggccgtgagct

SEQ ID NO: 617155 - DNA, 25 bp, Homo sapien
tgtactcgtcgctgtgcttgtccac

SEQ ID NO: 617156 - DNA, 25 bp, Homo sapien
ttgtgctgcgtctccaggttgcgca

SEQ ID NO: 617157 - DNA, 25 bp, Homo sapien
gctcgcgccggatcttgtactcgtc

SEQ ID NO: 617158 - DNA, 25 bp, Homo sapien
ctcgggcagctgcttgaacaagttc

SEQ ID NO: 617159 - DNA, 25 bp, Homo sapien
gtgctgagctcgcgcgacagctgct

SEQ ID NO: 617160 - DNA, 25 bp, Homo sapien
ggcagctgcttgaacaagttccgca

SEQ ID NO: 617161 - DNA, 25 bp, Homo sapien
cttgaacaagttccgcagggtgctg

SEQ ID NO: 617162 - DNA, 25 bp, Homo sapien
ccagtgccaaagttttgccggcgcc

SEQ ID NO: 617163 - DNA, 25 bp, Homo sapien
agtgccaaagttttgccggcgccgc

SEQ ID NO: 617164 - DNA, 25 bp, Homo sapien
gccccagtgccaaagttttgccggc

SEQ ID NO: 617165 - DNA, 25 bp, Homo sapien
gggcgctccccggagtctcagcccc

SEQ ID NO: 617166 - DNA, 25 bp, Homo sapien
cccatctgcatgtgcggttggtttg

SEQ ID NO: 617167 - DNA, 25 bp, Homo sapien
tgcatgtgcggttggtttggacaaa

SEQ ID NO: 617168 - DNA, 25 bp, Homo sapien
ataacaccacgggcgggagccccat

SEQ ID NO: 617169 - DNA, 25 bp, Homo sapien
tcatctgtacacatagacgtttctt

SEQ ID NO: 617170 - DNA, 25 bp, Homo sapien
tacacgtgggttgcgtcagtcccgt

SEQ ID NO: 617171 - DNA, 25 bp, Homo sapien
tttaagcgattactcagggcccggc

SEQ ID NO: 617172 - DNA, 25 bp, Homo sapien
gattgcatcaacttcgaaaccggcc

SEQ ID NO: 617173 - DNA, 25 bp, Homo sapien
catcaacagcaacaagcccgtagga

SEQ ID NO: 617174 - DNA, 25 bp, Homo sapien
actcaacgctggttccaggacagca

SEQ ID NO: 617175 - DNA, 25 bp, Homo sapien
ttctgtggacctcaatgtgtgcttt

SEQ ID NO: 617176 - DNA, 25 bp, Homo sapien
gcttttagaaatgggtctagcacct

SEQ ID NO: 617177 - DNA, 25 bp, Homo sapien
tgaagaactgactcaacgctggttc

SEQ ID NO: 617178 - DNA, 25 bp, Homo sapien
ccttgctaaaatcaccaggccgtgg

SEQ ID NO: 617179 - DNA, 25 bp, Homo sapien
cccagcagtgtctcgagcgttcatt

SEQ ID NO: 617180 - DNA, 25 bp, Homo sapien
gagttgattaaaccaaggagcacag

SEQ ID NO: 617181 - DNA, 25 bp, Homo sapien
caggccgtgggacaattgcataaga

SEQ ID NO: 617182 - DNA, 25 bp, Homo sapien
ttcacttgcctcaaactacagagct

SEQ ID NO: 617183 - DNA, 25 bp, Homo sapien
atgcattcacttgcctcaaactaca

SEQ ID NO: 617184 - DNA, 25 bp, Homo sapien
ggtccagcaagatgcattcacttgc

SEQ ID NO: 617185 - DNA, 25 bp, Homo sapien
aggtccagcaagatgcattcacttg

SEQ ID NO: 617186 - DNA, 25 bp, Homo sapien
ttattcatccccccgcgtcagtggg

SEQ ID NO: 617187 - DNA, 25 bp, Homo sapien
tgcttgatgctcttcagatgtggct

SEQ ID NO: 617188 - DNA, 25 bp, Homo sapien
cttgatgctcttcagatgtggctcc

SEQ ID NO: 617189 - DNA, 25 bp, Homo sapien
tcatccccccgcgtcagtggggagc

SEQ ID NO: 617190 - DNA, 25 bp, Homo sapien
tggcaatgggctcattgcccctttc

SEQ ID NO: 617191 - DNA, 25 bp, Homo sapien
ggtgcagcatccaagctccgccgta

SEQ ID NO: 617192 - DNA, 25 bp, Homo sapien
ggtccccctttcagtcctgggtgca

SEQ ID NO: 617193 - DNA, 25 bp, Homo sapien
cagcacggagcaggcctgacatttg

SEQ ID NO: 617194 - DNA, 25 bp, Homo sapien
agggaggaactctggctcctattcc

SEQ ID NO: 617195 - DNA, 25 bp, Homo sapien
tgctccccttatcagctagctgcct

SEQ ID NO: 617196 - DNA, 25 bp, Homo sapien
gagggaggaactctggctcctattc

SEQ ID NO: 617197 - DNA, 25 bp, Homo sapien
tcagctagctgccttctgaccctgg

SEQ ID NO: 617198 - DNA, 25 bp, Homo sapien
gggagaagctctgcgttaggcacac

SEQ ID NO: 617199 - DNA, 25 bp, Homo sapien
gcaaagcgccactatggttgcggct

SEQ ID NO: 617200 - DNA, 25 bp, Homo sapien
cagggagctcaaggaagactcagca

SEQ ID NO: 617201 - DNA, 25 bp, Homo sapien
tgttggtcagacctcaccgtgggtg

SEQ ID NO: 617202 - DNA, 25 bp, Homo sapien
ggccttatgccagtcagtgccagga

SEQ ID NO: 617203 - DNA, 25 bp, Homo sapien
gtgacacaggccatttgccccaagg

SEQ ID NO: 617204 - DNA, 25 bp, Homo sapien
cgggccagcccagtggtgagtgaca

SEQ ID NO: 617205 - DNA, 25 bp, Homo sapien
gccaggatggctaaaccaggctcga

SEQ ID NO: 617206 - DNA, 25 bp, Homo sapien
tgtgtcttgacccaatgagcccgtt

SEQ ID NO: 617207 - DNA, 25 bp, Homo sapien
cacaccggagttgtcgtttggctaa

SEQ ID NO: 617208 - DNA, 25 bp, Homo sapien
tgtcattccgccagtcattctgtgg

SEQ ID NO: 617209 - DNA, 25 bp, Homo sapien
tctcaggtttccagaccacgatggt

SEQ ID NO: 617210 - DNA, 25 bp, Homo sapien
tgagctgcctgggacattttcccca

SEQ ID NO: 617211 - DNA, 25 bp, Homo sapien
tcattgaccctccggggatctgagc

SEQ ID NO: 617212 - DNA, 25 bp, Homo sapien
ctcattgaccctccggggatctgag

SEQ ID NO: 617213 - DNA, 25 bp, Homo sapien
ggaaacgttggaagtaagtgattca

SEQ ID NO: 617214 - DNA, 25 bp, Homo sapien
aacgttggaagtaagtgattcattc

SEQ ID NO: 617215 - DNA, 25 bp, Homo sapien
gaaacgttggaagtaagtgattcat

SEQ ID NO: 617216 - DNA, 25 bp, Homo sapien
aaacgttggaagtaagtgattcatt

SEQ ID NO: 617217 - DNA, 25 bp, Homo sapien
ccctcccgagtgagaaagggcccag

SEQ ID NO: 617218 - DNA, 25 bp, Homo sapien
cctcccgagtgagaaagggcccagg

SEQ ID NO: 617219 - DNA, 25 bp, Homo sapien
gccctcccgagtgagaaagggccca

SEQ ID NO: 617220 - DNA, 25 bp, Homo sapien
aaaccctcagaatgatggggcagag

SEQ ID NO: 617221 - DNA, 25 bp, Homo sapien
actggccatgggctagcctttgtga

SEQ ID NO: 617222 - DNA, 25 bp, Homo sapien
gagagcagaaaggttcgcaactttt

SEQ ID NO: 617223 - DNA, 25 bp, Homo sapien
cctttgtgacaattggatagggccc

SEQ ID NO: 617224 - DNA, 25 bp, Homo sapien
gagtcatgccacaagtaagaaggtc

SEQ ID NO: 617225 - DNA, 25 bp, Homo sapien
gcagcgaacccagatcgcgacactg

SEQ ID NO: 617226 - DNA, 25 bp, Homo sapien
ttgcagcgaacccagatcgcgacac

SEQ ID NO: 617227 - DNA, 25 bp, Homo sapien
ggttgcagcgaacccagatcgcgac

SEQ ID NO: 617228 - DNA, 25 bp, Homo sapien
aggttgcagcgaacccagatcgcga

SEQ ID NO: 617229 - DNA, 25 bp, Homo sapien
ccgcaaagtgtcctcaagcctcagt

SEQ ID NO: 617230 - DNA, 25 bp, Homo sapien
catatccactctgctggaggaatga

SEQ ID NO: 617231 - DNA, 25 bp, Homo sapien
ccttggaggccgcaaagtgtcctca

SEQ ID NO: 617232 - DNA, 25 bp, Homo sapien
gtgtcagaggtcacgtagccaagac

SEQ ID NO: 617233 - DNA, 25 bp, Homo sapien
cctcagtcaaacaggcttggctttg

SEQ ID NO: 617234 - DNA, 25 bp, Homo sapien
cccttcttcagggtgctggcctagg

SEQ ID NO: 617235 - DNA, 25 bp, Homo sapien
attgtgaaggcacccgagactccag

SEQ ID NO: 617236 - DNA, 25 bp, Homo sapien
ttgaccagaaactccaacaagcagg

SEQ ID NO: 617237 - DNA, 25 bp, Homo sapien
gggtcctaaattgggtgccagatgt

SEQ ID NO: 617238 - DNA, 25 bp, Homo sapien
ctgtccagcaatgggaacaggagct

SEQ ID NO: 617239 - DNA, 25 bp, Homo sapien
gcagctgtccagcaatgggaacagg

SEQ ID NO: 617240 - DNA, 25 bp, Homo sapien
ggccttgccactttcctctaggatc

SEQ ID NO: 617241 - DNA, 25 bp, Homo sapien
gtccttgaacgcaggccacagggtg

SEQ ID NO: 617242 - DNA, 25 bp, Homo sapien
tacgcaggcggaatctatggagaga

SEQ ID NO: 617243 - DNA, 25 bp, Homo sapien
gctgaagcggccatgggattacgca

SEQ ID NO: 617244 - DNA, 25 bp, Homo sapien
ctgttgctacgatgtggtccttgaa

SEQ ID NO: 617245 - DNA, 25 bp, Homo sapien
ctcaggctcgcttccttggatgcaa

SEQ ID NO: 617246 - DNA, 25 bp, Homo sapien
gctcagaggaagcatctgccggctc

SEQ ID NO: 617247 - DNA, 25 bp, Homo sapien
gtctcaggctcgcttccttggatgc

SEQ ID NO: 617248 - DNA, 25 bp, Homo sapien
agaggaagcatctgccggctcccag

SEQ ID NO: 617249 - DNA, 25 bp, Homo sapien
ggatgtgactgtgctgcgtgacctt

SEQ ID NO: 617250 - DNA, 25 bp, Homo sapien
gatgtgactgtgctgcgtgaccttg

SEQ ID NO: 617251 - DNA, 25 bp, Homo sapien
aacgtgctctggtcccgtcatctca

SEQ ID NO: 617252 - DNA, 25 bp, Homo sapien
ggaacgtgctctggtcccgtcatct

SEQ ID NO: 617253 - DNA, 25 bp, Homo sapien
ctctcagagacagcgtgacttgtgg

SEQ ID NO: 617254 - DNA, 25 bp, Homo sapien
cagagacagcgtgacttgtggcctc

SEQ ID NO: 617255 - DNA, 25 bp, Homo sapien
aagggataggatctaacttgagctc

SEQ ID NO: 617256 - DNA, 25 bp, Homo sapien
gtgcgaagtcaatgaggcagcagca

SEQ ID NO: 617257 - DNA, 25 bp, Homo sapien
ccagcaggttaatttctaggatacg

SEQ ID NO: 617258 - DNA, 25 bp, Homo sapien
tgaccctagacaaggatccgccatg

SEQ ID NO: 617259 - DNA, 25 bp, Homo sapien
caagtgtttactgggcacttgtcct

SEQ ID NO: 617260 - DNA, 25 bp, Homo sapien
aaaatccccacctgggcgatggtga

SEQ ID NO: 617261 - DNA, 25 bp, Homo sapien
cacaaaaatccccacctgggcgatg

SEQ ID NO: 617262 - DNA, 25 bp, Homo sapien
caaaaatccccacctgggcgatggt

SEQ ID NO: 617263 - DNA, 25 bp, Homo sapien
cacgcagggactgcgattcgcacgc

SEQ ID NO: 617264 - DNA, 25 bp, Homo sapien
agcactgggctatgagtctgagacc

SEQ ID NO: 617265 - DNA, 25 bp, Homo sapien
accagggcgtgtcagcagaaagagc

SEQ ID NO: 617266 - DNA, 25 bp, Homo sapien
cgaggcacaccctctttgttgctga

SEQ ID NO: 617267 - DNA, 25 bp, Homo sapien
gacccattgaccagggtaagtggta

SEQ ID NO: 617268 - DNA, 25 bp, Homo sapien
tgcctacaagggtaatctctcggac

SEQ ID NO: 617269 - DNA, 25 bp, Homo sapien
cggccagacagtgcccatgggacct

SEQ ID NO: 617270 - DNA, 25 bp, Homo sapien
tggaatgtcagccatgaagcccggc

SEQ ID NO: 617271 - DNA, 25 bp, Homo sapien
gaatccgagggtttattctccaagc

SEQ ID NO: 617272 - DNA, 25 bp, Homo sapien
cagggaagagacttctgtgccagca

SEQ ID NO: 617273 - DNA, 25 bp, Homo sapien
tgctgtggactgatgtgggctggcc

SEQ ID NO: 617274 - DNA, 25 bp, Homo sapien
caagcaacagagatcccttagagag

SEQ ID NO: 617275 - DNA, 25 bp, Homo sapien
gatgggccgatacgataccagggca

SEQ ID NO: 617276 - DNA, 25 bp, Homo sapien
tcagcagccaacaggttaagggccc

SEQ ID NO: 617277 - DNA, 25 bp, Homo sapien
gagacaatcaagcagggaacagggc

SEQ ID NO: 617278 - DNA, 25 bp, Homo sapien
tggcctaatctcagaccagctgtgt

SEQ ID NO: 617279 - DNA, 25 bp, Homo sapien
gagagacagaactcaagagggacaa

SEQ ID NO: 617280 - DNA, 25 bp, Homo sapien
cctgggcagtgggtcagatacacaa

SEQ ID NO: 617281 - DNA, 25 bp, Homo sapien
agaggtatagacgaagacagggact

SEQ ID NO: 617282 - DNA, 25 bp, Homo sapien
actcaagagggacaaactcatctcc

SEQ ID NO: 617283 - DNA, 25 bp, Homo sapien
gatcgggctctcagtggtcccattt

SEQ ID NO: 617284 - DNA, 25 bp, Homo sapien
aatgagtgagtgaaatgatcgggcc

SEQ ID NO: 617285 - DNA, 25 bp, Homo sapien
agttatcatctattgagtgctttcc

SEQ ID NO: 617286 - DNA, 25 bp, Homo sapien
agccctctcatcgttcctcctcata

SEQ ID NO: 617287 - DNA, 25 bp, Homo sapien
tactaaatgggaagatccgggccgc

SEQ ID NO: 617288 - DNA, 25 bp, Homo sapien
tctaaagcctgctaaggaggatgct

SEQ ID NO: 617289 - DNA, 25 bp, Homo sapien
gaacaattctctcaaggctgtccag

SEQ ID NO: 617290 - DNA, 25 bp, Homo sapien
tgttctctccagttcaccggagcca

SEQ ID NO: 617291 - DNA, 25 bp, Homo sapien
cggaggcagctgtgctaactctccc

SEQ ID NO: 617292 - DNA, 25 bp, Homo sapien
ccaagcaccacctctccaagtcacc

SEQ ID NO: 617293 - DNA, 25 bp, Homo sapien
caggctcggaggcagctgtgctaac

SEQ ID NO: 617294 - DNA, 25 bp, Homo sapien
ttcttcacagttgagtccaagcacc

SEQ ID NO: 617295 - DNA, 25 bp, Homo sapien
cgtcatgtggctccgggtcattaat

SEQ ID NO: 617296 - DNA, 25 bp, Homo sapien
agtgctgtgtcatgctccgtcatgt

SEQ ID NO: 617297 - DNA, 25 bp, Homo sapien
catgctccgtcatgtggctccgggt

SEQ ID NO: 617298 - DNA, 25 bp, Homo sapien
tgtcatgctccgtcatgtggctccg

SEQ ID NO: 617299 - DNA, 25 bp, Homo sapien
tgtgtgctgcttcccctactgggaa

SEQ ID NO: 617300 - DNA, 25 bp, Homo sapien
agggagaccctgacaataacacttc

SEQ ID NO: 617301 - DNA, 25 bp, Homo sapien
gatgaatttcccagacaacgcctgc

SEQ ID NO: 617302 - DNA, 25 bp, Homo sapien
gagtgtgtcacagcactgagattgg

SEQ ID NO: 617303 - DNA, 25 bp, Homo sapien
aagcagatcagccacagtcggcagg

SEQ ID NO: 617304 - DNA, 25 bp, Homo sapien
tggaatatgcgcagtttatcgtgtg

SEQ ID NO: 617305 - DNA, 25 bp, Homo sapien
ttatcgtgtgtttgttacaccccag

SEQ ID NO: 617306 - DNA, 25 bp, Homo sapien
gagaacgcaaactaatccacagccg

SEQ ID NO: 617307 - DNA, 25 bp, Homo sapien
tgcgtgggctgtgcagttctagaac

SEQ ID NO: 617308 - DNA, 25 bp, Homo sapien
gttctagaacacagcgccgaatgcc

SEQ ID NO: 617309 - DNA, 25 bp, Homo sapien
aggcccagcccttgtgcaatccaga

SEQ ID NO: 617310 - DNA, 25 bp, Homo sapien
caagataaagggaccactagcgcct

SEQ ID NO: 617311 - DNA, 25 bp, Homo sapien
tgggtctgtaggtggctcttaggct

SEQ ID NO: 617312 - DNA, 25 bp, Homo sapien
ggtctgtaggtggctcttaggctcc

SEQ ID NO: 617313 - DNA, 25 bp, Homo sapien
gtctgtaggtggctcttaggctcca

SEQ ID NO: 617314 - DNA, 25 bp, Homo sapien
cttgggtctgtaggtggctcttagg

SEQ ID NO: 617315 - DNA, 25 bp, Homo sapien
aatgcggcgtgtagccttccagtct

SEQ ID NO: 617316 - DNA, 25 bp, Homo sapien
ctgcagagcgttcagagcccctgct

SEQ ID NO: 617317 - DNA, 25 bp, Homo sapien
gggaatgcggcgtgtagccttccag

SEQ ID NO: 617318 - DNA, 25 bp, Homo sapien
tgcagagcgttcagagcccctgctg

SEQ ID NO: 617319 - DNA, 25 bp, Homo sapien
ccagttgtgaaatctgggaatcttg

SEQ ID NO: 617320 - DNA, 25 bp, Homo sapien
cagttgtgaaatctgggaatcttgt

SEQ ID NO: 617321 - DNA, 25 bp, Homo sapien
gccccagttgtgaaatctgggaatc

SEQ ID NO: 617322 - DNA, 25 bp, Homo sapien
ccccagttgtgaaatctgggaatct

SEQ ID NO: 617323 - DNA, 25 bp, Homo sapien
caggtaattacccacggcctgaggg

SEQ ID NO: 617324 - DNA, 25 bp, Homo sapien
gaagtgggcgctattaacctgggca

SEQ ID NO: 617325 - DNA, 25 bp, Homo sapien
tttctaacagtcctggaggccggag

SEQ ID NO: 617326 - DNA, 25 bp, Homo sapien
ggaatggccgaactcactttcatga

SEQ ID NO: 617327 - DNA, 25 bp, Homo sapien
gtacttttcattggctccaaaccca

SEQ ID NO: 617328 - DNA, 25 bp, Homo sapien
ttcctgcgctttcgtgaggtgagag

SEQ ID NO: 617329 - DNA, 25 bp, Homo sapien
aacccacattcctgcgctttcgtga

SEQ ID NO: 617330 - DNA, 25 bp, Homo sapien
tgggagcaggcgctgcgagggcctt

SEQ ID NO: 617331 - DNA, 25 bp, Homo sapien
gtgtgtgcctgacactgtgctgagc

SEQ ID NO: 617332 - DNA, 25 bp, Homo sapien
ggaacacattgtgaatgaaacagac

SEQ ID NO: 617333 - DNA, 25 bp, Homo sapien
gaaacagacaaaatcccctgccctc

SEQ ID NO: 617334 - DNA, 25 bp, Homo sapien
tgagctctgggaacacattgtgaat

SEQ ID NO: 617335 - DNA, 25 bp, Homo sapien
gaataactctcgctatgtgacccga

SEQ ID NO: 617336 - DNA, 25 bp, Homo sapien
ttcttcttggtacatgagtgccccg

SEQ ID NO: 617337 - DNA, 25 bp, Homo sapien
taatttcaggtacagtgggatccag

SEQ ID NO: 617338 - DNA, 25 bp, Homo sapien
tgagaagtagctgggttccaccgtg

SEQ ID NO: 617339 - DNA, 25 bp, Homo sapien
cataaagtttgaacagatactacac

SEQ ID NO: 617340 - DNA, 25 bp, Homo sapien
caaaggcttgactagtatccagaat

SEQ ID NO: 617341 - DNA, 25 bp, Homo sapien
tttcacaaaggcttgactagtatcc

SEQ ID NO: 617342 - DNA, 25 bp, Homo sapien
atatttcacaaaggcttgactagta

SEQ ID NO: 617343 - DNA, 25 bp, Homo sapien
gaaagctgcccgttggctgcaaggt

SEQ ID NO: 617344 - DNA, 25 bp, Homo sapien
aagctgcccgttggctgcaaggttg

SEQ ID NO: 617345 - DNA, 25 bp, Homo sapien
cccgttggctgcaaggttggctgtt

SEQ ID NO: 617346 - DNA, 25 bp, Homo sapien
ctgcccgttggctgcaaggttggct

SEQ ID NO: 617347 - DNA, 25 bp, Homo sapien
ggaggggttctcatacagctggggc

SEQ ID NO: 617348 - DNA, 25 bp, Homo sapien
gaggggttctcatacagctggggca

SEQ ID NO: 617349 - DNA, 25 bp, Homo sapien
tgggaggggttctcatacagctggg

SEQ ID NO: 617350 - DNA, 25 bp, Homo sapien
tgtgggaggggttctcatacagctg

SEQ ID NO: 617351 - DNA, 25 bp, Homo sapien
ttgaggataacgaagctgaagcagt

SEQ ID NO: 617352 - DNA, 25 bp, Homo sapien
ctttgaggataacgaagctgaagca

SEQ ID NO: 617353 - DNA, 25 bp, Homo sapien
ggataacgaagctgaagcagttctt

SEQ ID NO: 617354 - DNA, 25 bp, Homo sapien
tttgaggataacgaagctgaagcag

SEQ ID NO: 617355 - DNA, 25 bp, Homo sapien
gcagcatgtcccagccagggatggg

SEQ ID NO: 617356 - DNA, 25 bp, Homo sapien
tgcagcatgtcccagccagggatgg

SEQ ID NO: 617357 - DNA, 25 bp, Homo sapien
cgtttggactttctccaggtcgcag

SEQ ID NO: 617358 - DNA, 25 bp, Homo sapien
cagaagcaagatctggagttgcact

SEQ ID NO: 617359 - DNA, 25 bp, Homo sapien
gccattgatggttttagagcagagc

SEQ ID NO: 617360 - DNA, 25 bp, Homo sapien
ggtcgcagcggggagccattgatgg

SEQ ID NO: 617361 - DNA, 25 bp, Homo sapien
ctgggggagccaggtacatgctcag

SEQ ID NO: 617362 - DNA, 25 bp, Homo sapien
gtggttagcctgagctggaaaatgc

SEQ ID NO: 617363 - DNA, 25 bp, Homo sapien
gaatggtggttagcctgagctggaa

SEQ ID NO: 617364 - DNA, 25 bp, Homo sapien
gactgaatggtggttagcctgagct

SEQ ID NO: 617365 - DNA, 25 bp, Homo sapien
tggtggttagcctgagctggaaaat

SEQ ID NO: 617366 - DNA, 25 bp, Homo sapien
gcatcaggtccgcactcagaaagtt

SEQ ID NO: 617367 - DNA, 25 bp, Homo sapien
gggctcagccgtgaaacaacagcga

SEQ ID NO: 617368 - DNA, 25 bp, Homo sapien
cgcgggctttcacttacggcatcag

SEQ ID NO: 617369 - DNA, 25 bp, Homo sapien
aataaggagttcagggcgaccaagc

SEQ ID NO: 617370 - DNA, 25 bp, Homo sapien
tggctgaagtttccggataactgag

SEQ ID NO: 617371 - DNA, 25 bp, Homo sapien
aggtggctgaagtttccggataact

SEQ ID NO: 617372 - DNA, 25 bp, Homo sapien
gaaccggtgttccaggtggctgaag

SEQ ID NO: 617373 - DNA, 25 bp, Homo sapien
ccgcctcatgcgcaggaaccggtgt

SEQ ID NO: 617374 - DNA, 25 bp, Homo sapien
tttagggtgatattcccatcgttcc

SEQ ID NO: 617375 - DNA, 25 bp, Homo sapien
gggtgatattcccatcgttccccac

SEQ ID NO: 617376 - DNA, 25 bp, Homo sapien
atattcccatcgttccccacccaca

SEQ ID NO: 617377 - DNA, 25 bp, Homo sapien
tattcccatcgttccccacccacag

SEQ ID NO: 617378 - DNA, 25 bp, Homo sapien
tggcctgagaatgactcaaggtcaa

SEQ ID NO: 617379 - DNA, 25 bp, Homo sapien
aggaggaagagacgacgctgtcatt

SEQ ID NO: 617380 - DNA, 25 bp, Homo sapien
gaagagacgacgctgtcattccggg

SEQ ID NO: 617381 - DNA, 25 bp, Homo sapien
cgacgctgtcattccggggccgctg

SEQ ID NO: 617382 - DNA, 25 bp, Homo sapien
aggaagagacgacgctgtcattccg

SEQ ID NO: 617383 - DNA, 25 bp, Homo sapien
cattcttgtaggcataggtgactga

SEQ ID NO: 617384 - DNA, 25 bp, Homo sapien
gcagcattcttgtaggcataggtga

SEQ ID NO: 617385 - DNA, 25 bp, Homo sapien
tcttgtaggcataggtgactgatcc

SEQ ID NO: 617386 - DNA, 25 bp, Homo sapien
tgtaggcataggtgactgatccacg

SEQ ID NO: 617387 - DNA, 25 bp, Homo sapien
ttggccactgcatggcccttggtgc

SEQ ID NO: 617388 - DNA, 25 bp, Homo sapien
ggtgcctttagagatttcaaactga

SEQ ID NO: 617389 - DNA, 25 bp, Homo sapien
agatttcaaactgatcctctttcat

SEQ ID NO: 617390 - DNA, 25 bp, Homo sapien
ggcccttggtgcctttagagatttc

SEQ ID NO: 617391 - DNA, 25 bp, Homo sapien
tcctgtcaacttcaagcagacccgg

SEQ ID NO: 617392 - DNA, 25 bp, Homo sapien
ttacctcctgtcaacttcaagcaga

SEQ ID NO: 617393 - DNA, 25 bp, Homo sapien
aacttcaagcagacccggtgcctga

SEQ ID NO: 617394 - DNA, 25 bp, Homo sapien
gtgtatgctaaactttgtcctgaat

SEQ ID NO: 617395 - DNA, 25 bp, Homo sapien
gtcataacggaactcgtctgaagcc

SEQ ID NO: 617396 - DNA, 25 bp, Homo sapien
tgcaggtcataacggaactcgtctg

SEQ ID NO: 617397 - DNA, 25 bp, Homo sapien
gcaggtcataacggaactcgtctga

SEQ ID NO: 617398 - DNA, 25 bp, Homo sapien
ggtcataacggaactcgtctgaagc

SEQ ID NO: 617399 - DNA, 25 bp, Homo sapien
gggagcttcacggcttctgcatctg

SEQ ID NO: 617400 - DNA, 25 bp, Homo sapien
ggtctcacacgggttgtccccatga

SEQ ID NO: 617401 - DNA, 25 bp, Homo sapien
tggtctcacacgggttgtccccatg

SEQ ID NO: 617402 - DNA, 25 bp, Homo sapien
gggtgcacgatacggcgtggactta

SEQ ID NO: 617403 - DNA, 25 bp, Homo sapien
tgactgaggggtgcacgatacggcg

SEQ ID NO: 617404 - DNA, 25 bp, Homo sapien
acgatacggcgtggacttaggtgtt

SEQ ID NO: 617405 - DNA, 25 bp, Homo sapien
atacggcgtggacttaggtgttgac

SEQ ID NO: 617406 - DNA, 25 bp, Homo sapien
tagcggcctccaagttagcccagag

SEQ ID NO: 617407 - DNA, 25 bp, Homo sapien
agatttcttgccgatgaaccaggaa

SEQ ID NO: 617408 - DNA, 25 bp, Homo sapien
gagcctttgccaacccagccagttt

SEQ ID NO: 617409 - DNA, 25 bp, Homo sapien
gaagaagggtcaagggaatattcag

SEQ ID NO: 617410 - DNA, 25 bp, Homo sapien
ggaagcagggcaaagcacgttcttt

SEQ ID NO: 617411 - DNA, 25 bp, Homo sapien
aagcagggcaaagcacgttcttttt

SEQ ID NO: 617412 - DNA, 25 bp, Homo sapien
gaagcagggcaaagcacgttctttt

SEQ ID NO: 617413 - DNA, 25 bp, Homo sapien
gaagtaccaggagaagaagcacgtg

SEQ ID NO: 617414 - DNA, 25 bp, Homo sapien
tcacagtgtaggagtcctgaagtac

SEQ ID NO: 617415 - DNA, 25 bp, Homo sapien
taggagtcctgaagtaccaggagaa

SEQ ID NO: 617416 - DNA, 25 bp, Homo sapien
gaagcacgtggtaagagaaccatgg

SEQ ID NO: 617417 - DNA, 25 bp, Homo sapien
caccactgtctatctcatcaaagcc

SEQ ID NO: 617418 - DNA, 25 bp, Homo sapien
ccactgtctatctcatcaaagccac

SEQ ID NO: 617419 - DNA, 25 bp, Homo sapien
accccaccactgtctatctcatcaa

SEQ ID NO: 617420 - DNA, 25 bp, Homo sapien
cccaccactgtctatctcatcaaag

SEQ ID NO: 617421 - DNA, 25 bp, Homo sapien
cccagaatgcctacaacaagctggg

SEQ ID NO: 617422 - DNA, 25 bp, Homo sapien
gaatgcctacaacaagctggggcct

SEQ ID NO: 617423 - DNA, 25 bp, Homo sapien
aggtccccagaatgcctacaacaag

SEQ ID NO: 617424 - DNA, 25 bp, Homo sapien
tccccagaatgcctacaacaagctg

SEQ ID NO: 617425 - DNA, 25 bp, Homo sapien
gcagctgtgacctggtggatgctgc

SEQ ID NO: 617426 - DNA, 25 bp, Homo sapien
ccagtcctctggctggcagctgtga

SEQ ID NO: 617427 - DNA, 25 bp, Homo sapien
gccagtcctctggctggcagctgtg

SEQ ID NO: 617428 - DNA, 25 bp, Homo sapien
ctgtgacctggtggatgctgcccag

SEQ ID NO: 617429 - DNA, 25 bp, Homo sapien
aacccgataacctggccaaactctg

SEQ ID NO: 617430 - DNA, 25 bp, Homo sapien
ggtcggctccggcaggcccgtgagc

SEQ ID NO: 617431 - DNA, 25 bp, Homo sapien
tcggctccggcaggcccgtgagcac

SEQ ID NO: 617432 - DNA, 25 bp, Homo sapien
tgagagagggtcggctccggcaggc

SEQ ID NO: 617433 - DNA, 25 bp, Homo sapien
agagggtcggctccggcaggcccgt

SEQ ID NO: 617434 - DNA, 25 bp, Homo sapien
accacgaggttgtcttgagcggaaa

SEQ ID NO: 617435 - DNA, 25 bp, Homo sapien
tacagcagcccgaatgaaaggaacg

SEQ ID NO: 617436 - DNA, 25 bp, Homo sapien
gaatccagagcaacctatggtcctg

SEQ ID NO: 617437 - DNA, 25 bp, Homo sapien
gacctcagtatctccacgtgtgtgg

SEQ ID NO: 617438 - DNA, 25 bp, Homo sapien
cagaacgcctctgagaagttggaaa

SEQ ID NO: 617439 - DNA, 25 bp, Homo sapien
cagcgtttcctatccttacatttgc

SEQ ID NO: 617440 - DNA, 25 bp, Homo sapien
ggataacatagaacagcgtttccta

SEQ ID NO: 617441 - DNA, 25 bp, Homo sapien
tgtggttctgattgatgagatagcc

SEQ ID NO: 617442 - DNA, 25 bp, Homo sapien
ggtgaggcattcagccggaggggac

SEQ ID NO: 617443 - DNA, 25 bp, Homo sapien
ggggaaggtgaggcattcagccgga

SEQ ID NO: 617444 - DNA, 25 bp, Homo sapien
gaaggtgaggcattcagccggaggg

SEQ ID NO: 617445 - DNA, 25 bp, Homo sapien
gtgaggcattcagccggaggggact

SEQ ID NO: 617446 - DNA, 25 bp, Homo sapien
tgagcccatgttgcgcctcttggca

SEQ ID NO: 617447 - DNA, 25 bp, Homo sapien
ggccccggcaaatactgagcccatg

SEQ ID NO: 617448 - DNA, 25 bp, Homo sapien
gagaggccccggcaaatactgagcc

SEQ ID NO: 617449 - DNA, 25 bp, Homo sapien
tgcgcctcttggcactgttctcaaa

SEQ ID NO: 617450 - DNA, 25 bp, Homo sapien
ccttctattaatacaggaagacgtt

SEQ ID NO: 617451 - DNA, 25 bp, Homo sapien
aagacgtttttggtggcctgacaag

SEQ ID NO: 617452 - DNA, 25 bp, Homo sapien
tttttggtggcctgacaagagaaaa

SEQ ID NO: 617453 - DNA, 25 bp, Homo sapien
ctattaatacaggaagacgtttttg

SEQ ID NO: 617454 - DNA, 25 bp, Homo sapien
ctgtccttgataggtgtgtaaactt

SEQ ID NO: 617455 - DNA, 25 bp, Homo sapien
tgtgtaaacttcaacaccaacatcc

SEQ ID NO: 617456 - DNA, 25 bp, Homo sapien
ccttgataggtgtgtaaacttcaac

SEQ ID NO: 617457 - DNA, 25 bp, Homo sapien
taggtgtgtaaacttcaacaccaac

SEQ ID NO: 617458 - DNA, 25 bp, Homo sapien
tgaaatcacagacgcttaaccagaa

SEQ ID NO: 617459 - DNA, 25 bp, Homo sapien
tatgaaatcacagacgcttaaccag

SEQ ID NO: 617460 - DNA, 25 bp, Homo sapien
aaatcacagacgcttaaccagaagg

SEQ ID NO: 617461 - DNA, 25 bp, Homo sapien
atgaaatcacagacgcttaaccaga

SEQ ID NO: 617462 - DNA, 25 bp, Homo sapien
ttggttcggccatagcaatcttgta

SEQ ID NO: 617463 - DNA, 25 bp, Homo sapien
tcttggttcggccatagcaatcttg

SEQ ID NO: 617464 - DNA, 25 bp, Homo sapien
tggttcggccatagcaatcttgtag

SEQ ID NO: 617465 - DNA, 25 bp, Homo sapien
gttcggccatagcaatcttgtagaa

SEQ ID NO: 617466 - DNA, 25 bp, Homo sapien
tcatgtggacgttgtgaattccagg

SEQ ID NO: 617467 - DNA, 25 bp, Homo sapien
atgtggacgttgtgaattccaggag

SEQ ID NO: 617468 - DNA, 25 bp, Homo sapien
aggttggtcaggttgccttcctgca

SEQ ID NO: 617469 - DNA, 25 bp, Homo sapien
tgcaggctccagtttaaaccatccc

SEQ ID NO: 617470 - DNA, 25 bp, Homo sapien
aaccggcagccggaactacgcatca

SEQ ID NO: 617471 - DNA, 25 bp, Homo sapien
tgtcaaccggcagccggaactacgc

SEQ ID NO: 617472 - DNA, 25 bp, Homo sapien
ctgcttcttcatgtcaaccggcagc

SEQ ID NO: 617473 - DNA, 25 bp, Homo sapien
tcttcatgtcaaccggcagccggaa

SEQ ID NO: 617474 - DNA, 25 bp, Homo sapien
aggcccgctgcaatccccgacccct

SEQ ID NO: 617475 - DNA, 25 bp, Homo sapien
tgcaatccccgacccctgcagctac

SEQ ID NO: 617476 - DNA, 25 bp, Homo sapien
gctgcaatccccgacccctgcagct

SEQ ID NO: 617477 - DNA, 25 bp, Homo sapien
cccgaggcccgctgcaatccccgac

SEQ ID NO: 617478 - DNA, 25 bp, Homo sapien
tccttctcggcccactgcgccgtct

SEQ ID NO: 617479 - DNA, 25 bp, Homo sapien
gcctccttctcggcccactgcgccg

SEQ ID NO: 617480 - DNA, 25 bp, Homo sapien
tcggcccactgcgccgtctgccgct

SEQ ID NO: 617481 - DNA, 25 bp, Homo sapien
ctcggcccactgcgccgtctgccgc

SEQ ID NO: 617482 - DNA, 25 bp, Homo sapien
ccagctcccggacttgtcgatctgc

SEQ ID NO: 617483 - DNA, 25 bp, Homo sapien
cccagctcccggacttgtcgatctg

SEQ ID NO: 617484 - DNA, 25 bp, Homo sapien
gactcgacgcacactgagactaggg

SEQ ID NO: 617485 - DNA, 25 bp, Homo sapien
attcgcgttgagagcacagaccggc

SEQ ID NO: 617486 - DNA, 25 bp, Homo sapien
tccaatgcctaagcggtgcctagca

SEQ ID NO: 617487 - DNA, 25 bp, Homo sapien
tgttcaagcggcctaagcgaagggc

SEQ ID NO: 617488 - DNA, 25 bp, Homo sapien
tagaataactgacctgcttaccaag

SEQ ID NO: 617489 - DNA, 25 bp, Homo sapien
taggcccaatcaagcaaccggatga

SEQ ID NO: 617490 - DNA, 25 bp, Homo sapien
tctgatcacaataggctaggcaagc

SEQ ID NO: 617491 - DNA, 25 bp, Homo sapien
ttttggtaaagcgatacacaccttg

SEQ ID NO: 617492 - DNA, 25 bp, Homo sapien
caaatgtcaattggaagagtggccc

SEQ ID NO: 617493 - DNA, 25 bp, Homo sapien
aacatggttttaacctagtcaggca

SEQ ID NO: 617494 - DNA, 25 bp, Homo sapien
ggtattattgcagtcccctttatct

SEQ ID NO: 617495 - DNA, 25 bp, Homo sapien
gagtggcccattttacaaagcctgc

SEQ ID NO: 617496 - DNA, 25 bp, Homo sapien
acaaacacagccgaggcttccttct

SEQ ID NO: 617497 - DNA, 25 bp, Homo sapien
agccacaaacacagccgaggcttcc

SEQ ID NO: 617498 - DNA, 25 bp, Homo sapien
acacagccgaggcttccttcttcat

SEQ ID NO: 617499 - DNA, 25 bp, Homo sapien
aaacacagccgaggcttccttcttc

SEQ ID NO: 617500 - DNA, 25 bp, Homo sapien
gaataattacttgatgttcactttc

SEQ ID NO: 617501 - DNA, 25 bp, Homo sapien
ggaataattacttgatgttcacttt

SEQ ID NO: 617502 - DNA, 25 bp, Homo sapien
ccatgataggtacataaagggccca

SEQ ID NO: 617503 - DNA, 25 bp, Homo sapien
tctagggatgtggattctcaaggaa

SEQ ID NO: 617504 - DNA, 25 bp, Homo sapien
caacctttaggtgtggctaaaccag

SEQ ID NO: 617505 - DNA, 25 bp, Homo sapien
tagttatttgtggtgtgaacagacc

SEQ ID NO: 617506 - DNA, 25 bp, Homo sapien
ccccacattcgataaatcaccaaat

SEQ ID NO: 617507 - DNA, 25 bp, Homo sapien
cacattcgataaatcaccaaatcct

SEQ ID NO: 617508 - DNA, 25 bp, Homo sapien
ctagctatttccctaatctggaaca

SEQ ID NO: 617509 - DNA, 25 bp, Homo sapien
tatttccctaatctggaacattcct

SEQ ID NO: 617510 - DNA, 25 bp, Homo sapien
agtttggtcttctatccaggatgcc

SEQ ID NO: 617511 - DNA, 25 bp, Homo sapien
ccctgcgacagtggccatataacgg

SEQ ID NO: 617512 - DNA, 25 bp, Homo sapien
gcttctatatggcaagcgaagaatt

SEQ ID NO: 617513 - DNA, 25 bp, Homo sapien
tatggcatatatggcagagagactg

SEQ ID NO: 617514 - DNA, 25 bp, Homo sapien
tagggaatgctgcaaacaggcccat

SEQ ID NO: 617515 - DNA, 25 bp, Homo sapien
cacagaggctgtaactagagagcag

SEQ ID NO: 617516 - DNA, 25 bp, Homo sapien
agcaactgagcgagggaatctggca

SEQ ID NO: 617517 - DNA, 25 bp, Homo sapien
ggtgggctgcccaaatgcactgaca

SEQ ID NO: 617518 - DNA, 25 bp, Homo sapien
caggtaagctttagatctgatggcc

SEQ ID NO: 617519 - DNA, 25 bp, Homo sapien
gagcctgggcccaggaagacaaaga

SEQ ID NO: 617520 - DNA, 25 bp, Homo sapien
acacaagtacagtggagaggcagca

SEQ ID NO: 617521 - DNA, 25 bp, Homo sapien
tttccagcagcgcttaggagcctgg

SEQ ID NO: 617522 - DNA, 25 bp, Homo sapien
cataagactaataagccacagggaa

SEQ ID NO: 617523 - DNA, 25 bp, Homo sapien
gaagtccaattccatgcaaggcacc

SEQ ID NO: 617524 - DNA, 25 bp, Homo sapien
gagagactctctcataccactgatg

SEQ ID NO: 617525 - DNA, 25 bp, Homo sapien
gacatggactgcttcgagataagac

SEQ ID NO: 617526 - DNA, 25 bp, Homo sapien
tctacaggacaatacaatcagagct

SEQ ID NO: 617527 - DNA, 25 bp, Homo sapien
tcgctgaaccgacccaaagaagatt

SEQ ID NO: 617528 - DNA, 25 bp, Homo sapien
aaaagtccatctgagcaacattcgc

SEQ ID NO: 617529 - DNA, 25 bp, Homo sapien
cacatttgtgcgttaaggactgtct

SEQ ID NO: 617530 - DNA, 25 bp, Homo sapien
ctttcggaagtggtacatcaaatct

SEQ ID NO: 617531 - DNA, 25 bp, Homo sapien
ttcggaagtggtacatcaaatcttc

SEQ ID NO: 617532 - DNA, 25 bp, Homo sapien
gaagtggtacatcaaatcttccttt

SEQ ID NO: 617533 - DNA, 25 bp, Homo sapien
cggaagtggtacatcaaatcttcct

SEQ ID NO: 617534 - DNA, 25 bp, Homo sapien
tcttggttacagtgatgcccgactg

SEQ ID NO: 617535 - DNA, 25 bp, Homo sapien
tggttacagtgatgcccgactgaac

SEQ ID NO: 617536 - DNA, 25 bp, Homo sapien
atcttcttggttacagtgatgcccg

SEQ ID NO: 617537 - DNA, 25 bp, Homo sapien
ctgacctatcttcttggttacagtg

SEQ ID NO: 617538 - DNA, 25 bp, Homo sapien
agggaatgctttttgagggcagaac

SEQ ID NO: 617539 - DNA, 25 bp, Homo sapien
ctcatttctcttacaggtagctgct

SEQ ID NO: 617540 - DNA, 25 bp, Homo sapien
catacaagggtatgacggagatatg

SEQ ID NO: 617541 - DNA, 25 bp, Homo sapien
cacaatgcatacacacgtggatacg

SEQ ID NO: 617542 - DNA, 25 bp, Homo sapien
ccagtggagaaagctcgatggccta

SEQ ID NO: 617543 - DNA, 25 bp, Homo sapien
gatgcttcagtccattttgaacggc

SEQ ID NO: 617544 - DNA, 25 bp, Homo sapien
tgaccacctatgtaccaaccagggt

SEQ ID NO: 617545 - DNA, 25 bp, Homo sapien
cagcatacctttcagcacccagggt

SEQ ID NO: 617546 - DNA, 25 bp, Homo sapien
cagatgtctgagctaggcgatgtta

SEQ ID NO: 617547 - DNA, 25 bp, Homo sapien
tatcgactgagcatcaactatgtgg

SEQ ID NO: 617548 - DNA, 25 bp, Homo sapien
ggcgatgttacatgcaaccctcata

SEQ ID NO: 617549 - DNA, 25 bp, Homo sapien
caggcaaccaagctcctctgtgtgg

SEQ ID NO: 617550 - DNA, 25 bp, Homo sapien
cataatgacagcttaagaacttcag

SEQ ID NO: 617551 - DNA, 25 bp, Homo sapien
gaggacagtggtacagttgactaag

SEQ ID NO: 617552 - DNA, 25 bp, Homo sapien
taaggacacatgtagttggcagaca

SEQ ID NO: 617553 - DNA, 25 bp, Homo sapien
gcttctgctgtttgccggaggacag

SEQ ID NO: 617554 - DNA, 25 bp, Homo sapien
agtgaagaagtagaggcagcaaccc

SEQ ID NO: 617555 - DNA, 25 bp, Homo sapien
ctttatagaacagaagtgctcctga

SEQ ID NO: 617556 - DNA, 25 bp, Homo sapien
cagcaacccattagcagccaggagt

SEQ ID NO: 617557 - DNA, 25 bp, Homo sapien
gccaggagtctgagaagaagtgctt

SEQ ID NO: 617558 - DNA, 25 bp, Homo sapien
gggagctacgtttccaacagctata

SEQ ID NO: 617559 - DNA, 25 bp, Homo sapien
caggaaactaaggtaacaatgcagc

SEQ ID NO: 617560 - DNA, 25 bp, Homo sapien
gtagactaccgtaccgtaacagcaa

SEQ ID NO: 617561 - DNA, 25 bp, Homo sapien
aaatcagtttctggcgaatccctca

SEQ ID NO: 617562 - DNA, 25 bp, Homo sapien
ataattctccagtctcagcctccca

SEQ ID NO: 617563 - DNA, 25 bp, Homo sapien
taattctccagtctcagcctcccat

SEQ ID NO: 617564 - DNA, 25 bp, Homo sapien
aattctccagtctcagcctcccata

SEQ ID NO: 617565 - DNA, 25 bp, Homo sapien
attctccagtctcagcctcccatag

SEQ ID NO: 617566 - DNA, 25 bp, Homo sapien
cttctttagaaatggtattcggttg

SEQ ID NO: 617567 - DNA, 25 bp, Homo sapien
atgtccttatctgctaatttatcat

SEQ ID NO: 617568 - DNA, 25 bp, Homo sapien
attaatcctatccagctaaattctc

SEQ ID NO: 617569 - DNA, 25 bp, Homo sapien
ttaatgtccttatctgctaatttat

SEQ ID NO: 617570 - DNA, 25 bp, Homo sapien
tttacaatatgcatcgaattcacga

SEQ ID NO: 617571 - DNA, 25 bp, Homo sapien
tttttatgctagtctgctggcaaca

SEQ ID NO: 617572 - DNA, 25 bp, Homo sapien
gaattcacgatggtctactttcaaa

SEQ ID NO: 617573 - DNA, 25 bp, Homo sapien
tttaccaaaaatacgacaacagcat

SEQ ID NO: 617574 - DNA, 25 bp, Homo sapien
gggactgacgtctctgtacctattt

SEQ ID NO: 617575 - DNA, 25 bp, Homo sapien
ttttgttcttaggaagcttggccac

SEQ ID NO: 617576 - DNA, 25 bp, Homo sapien
gaagcttggccactctacatgggaa

SEQ ID NO: 617577 - DNA, 25 bp, Homo sapien
gccactctacatgggaagtcactgg

SEQ ID NO: 617578 - DNA, 25 bp, Homo sapien
tctataatggtggaaaaatgagcta

SEQ ID NO: 617579 - DNA, 25 bp, Homo sapien
atactaaaccctgaggcgaaaggag

SEQ ID NO: 617580 - DNA, 25 bp, Homo sapien
tggtaccggccacgtggatacttac

SEQ ID NO: 617581 - DNA, 25 bp, Homo sapien
aatcgcgtcataaacctctgctaca

SEQ ID NO: 617582 - DNA, 25 bp, Homo sapien
cttatgtctgcgtgaggtactgggc

SEQ ID NO: 617583 - DNA, 25 bp, Homo sapien
acctgatgacctagaagtgcacttc

SEQ ID NO: 617584 - DNA, 25 bp, Homo sapien
caaaagctagagatccagggtatcc

SEQ ID NO: 617585 - DNA, 25 bp, Homo sapien
ccatgtcaaagaggtgaacggtgat

SEQ ID NO: 617586 - DNA, 25 bp, Homo sapien
taaacactactgtacttggaccagc

SEQ ID NO: 617587 - DNA, 25 bp, Homo sapien
ttgtgatcacatagttgtaaacact

SEQ ID NO: 617588 - DNA, 25 bp, Homo sapien
gtgatcacatagttgtaaacactac

SEQ ID NO: 617589 - DNA, 25 bp, Homo sapien
aacactactgtacttggaccagccc

SEQ ID NO: 617590 - DNA, 25 bp, Homo sapien
taagaatgtaactcctttgggcttc

SEQ ID NO: 617591 - DNA, 25 bp, Homo sapien
tccatttttatcaaactagcgttga

SEQ ID NO: 617592 - DNA, 25 bp, Homo sapien
gatgtagtttaatccgactatggtc

SEQ ID NO: 617593 - DNA, 25 bp, Homo sapien
tagcgttgatatagtcattatcttc

SEQ ID NO: 617594 - DNA, 25 bp, Homo sapien
tgaggtggcccaaggggaacagagt

SEQ ID NO: 617595 - DNA, 25 bp, Homo sapien
tctgctgagcagctggcccatttca

SEQ ID NO: 617596 - DNA, 25 bp, Homo sapien
taaatggtcaatgaggtggcccaag

SEQ ID NO: 617597 - DNA, 25 bp, Homo sapien
cactggggcatgagggtgtctgctg

SEQ ID NO: 617598 - DNA, 25 bp, Homo sapien
gcatgacgacacccctgcttttctg

SEQ ID NO: 617599 - DNA, 25 bp, Homo sapien
accatctcccaaaagtgaccgcatg

SEQ ID NO: 617600 - DNA, 25 bp, Homo sapien
agtgaccgcatgtgttaggcaaagg

SEQ ID NO: 617601 - DNA, 25 bp, Homo sapien
tcccaaaagtgaccgcatgtgttag

SEQ ID NO: 617602 - DNA, 25 bp, Homo sapien
tcaaacgtggcaacgggatcctgca

SEQ ID NO: 617603 - DNA, 25 bp, Homo sapien
ggagcacatcccacaagcttcatga

SEQ ID NO: 617604 - DNA, 25 bp, Homo sapien
tctacgaggtgaagccagattgaac

SEQ ID NO: 617605 - DNA, 25 bp, Homo sapien
cttcatgataactcaaaggcctggg

SEQ ID NO: 617606 - DNA, 25 bp, Homo sapien
gtggccagtattgtgcgcattttaa

SEQ ID NO: 617607 - DNA, 25 bp, Homo sapien
tttccaattctagctgtcgcactgt

SEQ ID NO: 617608 - DNA, 25 bp, Homo sapien
tcgcactgtataatatgacttgata

SEQ ID NO: 617609 - DNA, 25 bp, Homo sapien
gtgtcttcaaagatcatctcttttt

SEQ ID NO: 617610 - DNA, 25 bp, Homo sapien
gacattaggtaatatcacccaaggg

SEQ ID NO: 617611 - DNA, 25 bp, Homo sapien
cagtagccgcctgaagtgctgaagt

SEQ ID NO: 617612 - DNA, 25 bp, Homo sapien
taggtacacaagtaagctccgctca

SEQ ID NO: 617613 - DNA, 25 bp, Homo sapien
tccctgggcacttggtaggtacaca

SEQ ID NO: 617614 - DNA, 25 bp, Homo sapien
gaagactgaggaccacaaagaaggc

SEQ ID NO: 617615 - DNA, 25 bp, Homo sapien
ggaccacaaagaaggcagcatgctt

SEQ ID NO: 617616 - DNA, 25 bp, Homo sapien
gacttgcaggctgccgctccagtcc

SEQ ID NO: 617617 - DNA, 25 bp, Homo sapien
tcagactcgaagactgaggaccaca

SEQ ID NO: 617618 - DNA, 25 bp, Homo sapien
tgccaagcaaaaagcgcacagctct

SEQ ID NO: 617619 - DNA, 25 bp, Homo sapien
ggagcaccacgatgtctgactaact

SEQ ID NO: 617620 - DNA, 25 bp, Homo sapien
gattcgaccccagttaggttctaga

SEQ ID NO: 617621 - DNA, 25 bp, Homo sapien
gaaccctcgcaaaacctgagtttga

SEQ ID NO: 617622 - DNA, 25 bp, Homo sapien
cgagtcacaatgatgctgggcagcc

SEQ ID NO: 617623 - DNA, 25 bp, Homo sapien
aaaagtgaacaaggaacagcaggtg

SEQ ID NO: 617624 - DNA, 25 bp, Homo sapien
acatggttacaactggtttctctct

SEQ ID NO: 617625 - DNA, 25 bp, Homo sapien
gcaaggcctcccgtgaaaaagtgaa

SEQ ID NO: 617626 - DNA, 25 bp, Homo sapien
acactgaacctgcagggtgcgcctg

SEQ ID NO: 617627 - DNA, 25 bp, Homo sapien
caggccctgggcttgacactgaacc

SEQ ID NO: 617628 - DNA, 25 bp, Homo sapien
agggtccacacacccagtcaacaaa

SEQ ID NO: 617629 - DNA, 25 bp, Homo sapien
gcgcctgcttagacttcatttccct

SEQ ID NO: 617630 - DNA, 25 bp, Homo sapien
tcaggccatgtggtatagtggaaat

SEQ ID NO: 617631 - DNA, 25 bp, Homo sapien
tggaaatgtaagatctctcgagttt

SEQ ID NO: 617632 - DNA, 25 bp, Homo sapien
gggactccaaagtcaggccatgtgg

SEQ ID NO: 617633 - DNA, 25 bp, Homo sapien
tgtaagatctctcgagtttcttggg

SEQ ID NO: 617634 - DNA, 25 bp, Homo sapien
ccgtgctccgggctgagtgaccctg

SEQ ID NO: 617635 - DNA, 25 bp, Homo sapien
acaacgggcccgtgctccgggctga

SEQ ID NO: 617636 - DNA, 25 bp, Homo sapien
agtgcaccacaacgggcccgtgctc

SEQ ID NO: 617637 - DNA, 25 bp, Homo sapien
gcagtgcaccacaacgggcccgtgc

SEQ ID NO: 617638 - DNA, 25 bp, Homo sapien
ggagcgcttcagtttctacttagga

SEQ ID NO: 617639 - DNA, 25 bp, Homo sapien
cagggcacccgcgagggcctcctta

SEQ ID NO: 617640 - DNA, 25 bp, Homo sapien
ttattagtaacgcaaaaacagacta

SEQ ID NO: 617641 - DNA, 25 bp, Homo sapien
ccgagtctcaggtacgcctttatta

SEQ ID NO: 617642 - DNA, 25 bp, Homo sapien
gatgaatttggcaccttcgatcaca

SEQ ID NO: 617643 - DNA, 25 bp, Homo sapien
ttctaacagcactttcttgatatca

SEQ ID NO: 617644 - DNA, 25 bp, Homo sapien
ctgtctggatcagccccatccgaaa

SEQ ID NO: 617645 - DNA, 25 bp, Homo sapien
gatatcaacggaagaagggtctttc

SEQ ID NO: 617646 - DNA, 25 bp, Homo sapien
agcaagaggaagtcctattagtgtt

SEQ ID NO: 617647 - DNA, 25 bp, Homo sapien
tccaggtcctcgtgggaaagctcct

SEQ ID NO: 617648 - DNA, 25 bp, Homo sapien
gtgatttgggaagaactccctgcat

SEQ ID NO: 617649 - DNA, 25 bp, Homo sapien
gcatttcccattgtgtggctccagg

SEQ ID NO: 617650 - DNA, 25 bp, Homo sapien
ttgtgtggctccaggattcgtttgg

SEQ ID NO: 617651 - DNA, 25 bp, Homo sapien
ggcagtctttatcctcctgggtctc

SEQ ID NO: 617652 - DNA, 25 bp, Homo sapien
tgatggggcagtctttatcctcctg

SEQ ID NO: 617653 - DNA, 25 bp, Homo sapien
cgatgccgtagggtgcggcatttaa

SEQ ID NO: 617654 - DNA, 25 bp, Homo sapien
ctttcgatgccgtagggtgcggcat

SEQ ID NO: 617655 - DNA, 25 bp, Homo sapien
caattgcaatgtctggccacatcag

SEQ ID NO: 617656 - DNA, 25 bp, Homo sapien
caagccacgtgtagacagagttgga

SEQ ID NO: 617657 - DNA, 25 bp, Homo sapien
tgatgttaaccttccagcgagccag

SEQ ID NO: 617658 - DNA, 25 bp, Homo sapien
ccagggtagggttcacaaggtgcct

SEQ ID NO: 617659 - DNA, 25 bp, Homo sapien
gtccttctcgggcagtgacggctcc

SEQ ID NO: 617660 - DNA, 25 bp, Homo sapien
tctaacttcagtgtcttgactcatg

SEQ ID NO: 617661 - DNA, 25 bp, Homo sapien
cacgacccgacttctaacttcagtg

SEQ ID NO: 617662 - DNA, 25 bp, Homo sapien
ccagtaactcagtgcatggtcctcg

SEQ ID NO: 617663 - DNA, 25 bp, Homo sapien
cggccgtgaggaccgtagccacgca

SEQ ID NO: 617664 - DNA, 25 bp, Homo sapien
taagcgccggccgtgaggaccgtag

SEQ ID NO: 617665 - DNA, 25 bp, Homo sapien
tgtagcagaggtaagcgccggccgt

SEQ ID NO: 617666 - DNA, 25 bp, Homo sapien
ggaccgtagccacgcacatgttgac

SEQ ID NO: 617667 - DNA, 25 bp, Homo sapien
gaactgaatcctaccatcgggctag

SEQ ID NO: 617668 - DNA, 25 bp, Homo sapien
taacagcgggttgacatgccaatgg

SEQ ID NO: 617669 - DNA, 25 bp, Homo sapien
gaggcctcgaggacacccatttatg

SEQ ID NO: 617670 - DNA, 25 bp, Homo sapien
tactcctgaataggttaaggccctg

SEQ ID NO: 617671 - DNA, 25 bp, Homo sapien
tgggctctgcgggcagaggcggaca

SEQ ID NO: 617672 - DNA, 25 bp, Homo sapien
ggctctgcgggcagaggcggacagt

SEQ ID NO: 617673 - DNA, 25 bp, Homo sapien
tctgcgggcagaggcggacagtggg

SEQ ID NO: 617674 - DNA, 25 bp, Homo sapien
ctgctagtcgggcgtgggctctgcg

SEQ ID NO: 617675 - DNA, 25 bp, Homo sapien
aaatatggagtggagagttgctccc

SEQ ID NO: 617676 - DNA, 25 bp, Homo sapien
ttttagtgcagaaccaacgtccgtc

SEQ ID NO: 617677 - DNA, 25 bp, Homo sapien
aagcccttgatgcaaggctgacatc

SEQ ID NO: 617678 - DNA, 25 bp, Homo sapien
gctagtgcactatggatgcctttgg

SEQ ID NO: 617679 - DNA, 25 bp, Homo sapien
tcccagtactggtctgacgcagcag

SEQ ID NO: 617680 - DNA, 25 bp, Homo sapien
gtactggtctgacgcagcaggccca

SEQ ID NO: 617681 - DNA, 25 bp, Homo sapien
tggtctgacgcagcaggcccatggc

SEQ ID NO: 617682 - DNA, 25 bp, Homo sapien
tctgacgcagcaggcccatggcaaa

SEQ ID NO: 617683 - DNA, 25 bp, Homo sapien
gaaaactgcaccctattgctgagcg

SEQ ID NO: 617684 - DNA, 25 bp, Homo sapien
cctttgcaggaagagtcgtgagcac

SEQ ID NO: 617685 - DNA, 25 bp, Homo sapien
tccaaatcacggtctgctcaagaag

SEQ ID NO: 617686 - DNA, 25 bp, Homo sapien
tctctcggcaaggtgaaccgggaca

SEQ ID NO: 617687 - DNA, 25 bp, Homo sapien
tctaccacgagaaaggcaaaatgtg

SEQ ID NO: 617688 - DNA, 25 bp, Homo sapien
ccaccacagaatttctctgtactgg

SEQ ID NO: 617689 - DNA, 25 bp, Homo sapien
gctctgcagggtgacacctcgaatg

SEQ ID NO: 617690 - DNA, 25 bp, Homo sapien
tctgtactggcttctaccacgagaa

SEQ ID NO: 617691 - DNA, 25 bp, Homo sapien
tctccaaggataggaggttaaacca

SEQ ID NO: 617692 - DNA, 25 bp, Homo sapien
taaggcatatagcagagcagctcgc

SEQ ID NO: 617693 - DNA, 25 bp, Homo sapien
aaccagtacgtccattttgaaatgc

SEQ ID NO: 617694 - DNA, 25 bp, Homo sapien
gcagctcgctacctctctaacataa

SEQ ID NO: 617695 - DNA, 25 bp, Homo sapien
ctgacagttctgtgaggtcacagaa

SEQ ID NO: 617696 - DNA, 25 bp, Homo sapien
aattttattgttgcagctaaaatgc

SEQ ID NO: 617697 - DNA, 25 bp, Homo sapien
agttctgtgaggtcacagaagaccc

SEQ ID NO: 617698 - DNA, 25 bp, Homo sapien
ccacccacccggtcatgcagccacg

SEQ ID NO: 617699 - DNA, 25 bp, Homo sapien
gttaagttatctgagggccctacac

SEQ ID NO: 617700 - DNA, 25 bp, Homo sapien
tacgtactgagatgtggtaaccatt

SEQ ID NO: 617701 - DNA, 25 bp, Homo sapien
tacacaggcaaagcgtcaatttggg

SEQ ID NO: 617702 - DNA, 25 bp, Homo sapien
tgaggcctaaggtgttcaacaagct

SEQ ID NO: 617703 - DNA, 25 bp, Homo sapien
cccttagaatctgcgagaggccaca

SEQ ID NO: 617704 - DNA, 25 bp, Homo sapien
caaggcagggttcccattcagcgga

SEQ ID NO: 617705 - DNA, 25 bp, Homo sapien
tcagcggaacatcctagaggtaaag

SEQ ID NO: 617706 - DNA, 25 bp, Homo sapien
tagacctttgggatagaagccagag

SEQ ID NO: 617707 - DNA, 25 bp, Homo sapien
atcagaaaaccagcgagggccaggt

SEQ ID NO: 617708 - DNA, 25 bp, Homo sapien
tagacccaattctaggaccggagaa

SEQ ID NO: 617709 - DNA, 25 bp, Homo sapien
gagactcttgatacaacccacacat

SEQ ID NO: 617710 - DNA, 25 bp, Homo sapien
gatggatcagcaggaaattctaaga

SEQ ID NO: 617711 - DNA, 25 bp, Homo sapien
tagcatgctgcttgtacagggcaaa

SEQ ID NO: 617712 - DNA, 25 bp, Homo sapien
gcacaaactcagtgtatttggtcag

SEQ ID NO: 617713 - DNA, 25 bp, Homo sapien
gtatttggtcagacacccactgcag

SEQ ID NO: 617714 - DNA, 25 bp, Homo sapien
tcagtaactccatagcatgctgctt

SEQ ID NO: 617715 - DNA, 25 bp, Homo sapien
ttgagggcctgtttgtccttggaga

SEQ ID NO: 617716 - DNA, 25 bp, Homo sapien
tgagggcctgtttgtccttggagac

SEQ ID NO: 617717 - DNA, 25 bp, Homo sapien
cctttccttgatgaacttgagggcc

SEQ ID NO: 617718 - DNA, 25 bp, Homo sapien
ccttgatgaacttgagggcctgttt

SEQ ID NO: 617719 - DNA, 25 bp, Homo sapien
ggcggccaggacattggctcggctc

SEQ ID NO: 617720 - DNA, 25 bp, Homo sapien
catggcggccaggacattggctcgg

SEQ ID NO: 617721 - DNA, 25 bp, Homo sapien
tggcggccaggacattggctcggct

SEQ ID NO: 617722 - DNA, 25 bp, Homo sapien
aggacattggctcggctcctcctgc

SEQ ID NO: 617723 - DNA, 25 bp, Homo sapien
tctggcatgccaggggctgtttaat

SEQ ID NO: 617724 - DNA, 25 bp, Homo sapien
ttgcacgtgcccgtctggaagcttg

SEQ ID NO: 617725 - DNA, 25 bp, Homo sapien
cgtgcccgtctggaagcttgtctgg

SEQ ID NO: 617726 - DNA, 25 bp, Homo sapien
caggttgcacgtgcccgtctggaag

SEQ ID NO: 617727 - DNA, 25 bp, Homo sapien
cagccgcactgtcaaggcaaacaac

SEQ ID NO: 617728 - DNA, 25 bp, Homo sapien
aagcgcagccgcactgtcaaggcaa

SEQ ID NO: 617729 - DNA, 25 bp, Homo sapien
ccctggtaacccgagcaggccgaag

SEQ ID NO: 617730 - DNA, 25 bp, Homo sapien
gccttgttccctggtaacccgagca

SEQ ID NO: 617731 - DNA, 25 bp, Homo sapien
gggctggtccactgaagcactgtag

SEQ ID NO: 617732 - DNA, 25 bp, Homo sapien
cactgaagcactgtagggacccttg

SEQ ID NO: 617733 - DNA, 25 bp, Homo sapien
ctggtccactgaagcactgtaggga

SEQ ID NO: 617734 - DNA, 25 bp, Homo sapien
aagcactgtagggacccttgtgtgg

SEQ ID NO: 617735 - DNA, 25 bp, Homo sapien
ccctgggaggaaggttgtttctgct

SEQ ID NO: 617736 - DNA, 25 bp, Homo sapien
gaaccatttacgagcaggcaggcct

SEQ ID NO: 617737 - DNA, 25 bp, Homo sapien
aggccacagcccgatgagctcaggc

SEQ ID NO: 617738 - DNA, 25 bp, Homo sapien
ggcagtttatcgacatcctgaaggg

SEQ ID NO: 617739 - DNA, 25 bp, Homo sapien
acagagacagccagctcttccgaca

SEQ ID NO: 617740 - DNA, 25 bp, Homo sapien
agctggggtcttagccaattgcaca

SEQ ID NO: 617741 - DNA, 25 bp, Homo sapien
cagagacagccagctcttccgacat

SEQ ID NO: 617742 - DNA, 25 bp, Homo sapien
agagctggggtcttagccaattgca

SEQ ID NO: 617743 - DNA, 25 bp, Homo sapien
ttggccagcagtgagcggacagact

SEQ ID NO: 617744 - DNA, 25 bp, Homo sapien
cagcagtgagcggacagacttagcg

SEQ ID NO: 617745 - DNA, 25 bp, Homo sapien
ttagcgggagtagactctgcttcct

SEQ ID NO: 617746 - DNA, 25 bp, Homo sapien
cggacagacttagcgggagtagact

SEQ ID NO: 617747 - DNA, 25 bp, Homo sapien
tgaggaaatgcaagacaggaaggat

SEQ ID NO: 617748 - DNA, 25 bp, Homo sapien
cttgaggaaatgcaagacaggaagg

SEQ ID NO: 617749 - DNA, 25 bp, Homo sapien
ttgaggaaatgcaagacaggaagga

SEQ ID NO: 617750 - DNA, 25 bp, Homo sapien
ctgtgcgggagtcccaaggccggct

SEQ ID NO: 617751 - DNA, 25 bp, Homo sapien
gtggctgtgcgggagtcccaaggcc

SEQ ID NO: 617752 - DNA, 25 bp, Homo sapien
gcattccagagggttgactcagcag

SEQ ID NO: 617753 - DNA, 25 bp, Homo sapien
cctgtggggagttgtgggcattcca

SEQ ID NO: 617754 - DNA, 25 bp, Homo sapien
tcatctcttgttgaacccttgacca

SEQ ID NO: 617755 - DNA, 25 bp, Homo sapien
taacagcctccactagcaaacagac

SEQ ID NO: 617756 - DNA, 25 bp, Homo sapien
ccgtgctgttaacagcctccactag

SEQ ID NO: 617757 - DNA, 25 bp, Homo sapien
aaacagacccggctccaccggctca

SEQ ID NO: 617758 - DNA, 25 bp, Homo sapien
aggggccaggaaaggtctcatgaga

SEQ ID NO: 617759 - DNA, 25 bp, Homo sapien
taaggggccaggaaaggtctcatga

SEQ ID NO: 617760 - DNA, 25 bp, Homo sapien
gataaggggccaggaaaggtctcat

SEQ ID NO: 617761 - DNA, 25 bp, Homo sapien
agataaggggccaggaaaggtctca

SEQ ID NO: 617762 - DNA, 25 bp, Homo sapien
tgaactcatgttcgtggccagtgag

SEQ ID NO: 617763 - DNA, 25 bp, Homo sapien
ccagtgagtgaatggtctctccggg

SEQ ID NO: 617764 - DNA, 25 bp, Homo sapien
tagcttgttcagtcatcagtggcca

SEQ ID NO: 617765 - DNA, 25 bp, Homo sapien
ccttttggggcatgtatctgaactc

SEQ ID NO: 617766 - DNA, 25 bp, Homo sapien
aacatcctgtgtctcttgattcacg

SEQ ID NO: 617767 - DNA, 25 bp, Homo sapien
gtttctgagggagggaatccagtac

SEQ ID NO: 617768 - DNA, 25 bp, Homo sapien
gtgtctcttgattcacgtttctgag

SEQ ID NO: 617769 - DNA, 25 bp, Homo sapien
tcttgattcacgtttctgagggagg

SEQ ID NO: 617770 - DNA, 25 bp, Homo sapien
tggactaagacaagtagagtgggtt

SEQ ID NO: 617771 - DNA, 25 bp, Homo sapien
cagccacttagctctatcactggga

SEQ ID NO: 617772 - DNA, 25 bp, Homo sapien
ttcaggtgaagcttgatccagccac

SEQ ID NO: 617773 - DNA, 25 bp, Homo sapien
tatggacgtactccccagaatgacc

SEQ ID NO: 617774 - DNA, 25 bp, Homo sapien
gaggggctgctgattgcagaaccag

SEQ ID NO: 617775 - DNA, 25 bp, Homo sapien
aggagtgagtctgcggctgatcctt

SEQ ID NO: 617776 - DNA, 25 bp, Homo sapien
gagtctgcggctgatccttttcctc

SEQ ID NO: 617777 - DNA, 25 bp, Homo sapien
gaggaggagtgagtctgcggctgat

SEQ ID NO: 617778 - DNA, 25 bp, Homo sapien
cagatgctcccaggtagtctgggtc

SEQ ID NO: 617779 - DNA, 25 bp, Homo sapien
agcagatgctcccaggtagtctggg

SEQ ID NO: 617780 - DNA, 25 bp, Homo sapien
gcagatgctcccaggtagtctgggt

SEQ ID NO: 617781 - DNA, 25 bp, Homo sapien
tctctgagggctcctccttcagagg

SEQ ID NO: 617782 - DNA, 25 bp, Homo sapien
cttctctgagggctcctccttcaga

SEQ ID NO: 617783 - DNA, 25 bp, Homo sapien
tctgagggctcctccttcagagggt

SEQ ID NO: 617784 - DNA, 25 bp, Homo sapien
ctgagggctcctccttcagagggtc

SEQ ID NO: 617785 - DNA, 25 bp, Homo sapien
cagccattctcaaattgtgagagag

SEQ ID NO: 617786 - DNA, 25 bp, Homo sapien
aatgtgctcgagttgacagccattc

SEQ ID NO: 617787 - DNA, 25 bp, Homo sapien
tgacagccattctcaaattgtgaga

SEQ ID NO: 617788 - DNA, 25 bp, Homo sapien
taataatgtgctcgagttgacagcc

SEQ ID NO: 617789 - DNA, 25 bp, Homo sapien
tagccaagctaggttcagagtccag

SEQ ID NO: 617790 - DNA, 25 bp, Homo sapien
tgtcctaggctggtcgcggtgactc

SEQ ID NO: 617791 - DNA, 25 bp, Homo sapien
gaattttaactttgccggctgatgg

SEQ ID NO: 617792 - DNA, 25 bp, Homo sapien
agaccgtaagatagctccccaggag

SEQ ID NO: 617793 - DNA, 25 bp, Homo sapien
atggggtttcgccaggttggccagg

SEQ ID NO: 617794 - DNA, 25 bp, Homo sapien
agtgattctcttgcttcggcctcct

SEQ ID NO: 617795 - DNA, 25 bp, Homo sapien
tggggtttcgccaggttggccaggc

SEQ ID NO: 617796 - DNA, 25 bp, Homo sapien
aagtgattctcttgcttcggcctcc

SEQ ID NO: 617797 - DNA, 25 bp, Homo sapien
gcagtggggacatccaccggtccag

SEQ ID NO: 617798 - DNA, 25 bp, Homo sapien
ttcaatgctggggttggttgccacc

SEQ ID NO: 617799 - DNA, 25 bp, Homo sapien
ccggtccagctctcagcacattcaa

SEQ ID NO: 617800 - DNA, 25 bp, Homo sapien
ctggggttggttgccacccagcttg

SEQ ID NO: 617801 - DNA, 25 bp, Homo sapien
tggaatcccaggcatcagacatatg

SEQ ID NO: 617802 - DNA, 25 bp, Homo sapien
gaaataggtcccaggattatctctg

SEQ ID NO: 617803 - DNA, 25 bp, Homo sapien
ccaagagcttggagtcggctgtact

SEQ ID NO: 617804 - DNA, 25 bp, Homo sapien
tctgactccaaagctggcaaggttt

SEQ ID NO: 617805 - DNA, 25 bp, Homo sapien
gttatctgtgttgatagttgtgagc

SEQ ID NO: 617806 - DNA, 25 bp, Homo sapien
cacaatgcggtgcacgcagctggtg

SEQ ID NO: 617807 - DNA, 25 bp, Homo sapien
gacattggcacaatgcggtgcacgc

SEQ ID NO: 617808 - DNA, 25 bp, Homo sapien
ttgatagttgtgagcatccttccag

SEQ ID NO: 617809 - DNA, 25 bp, Homo sapien
gccccgctggccgtaattgactgta

SEQ ID NO: 617810 - DNA, 25 bp, Homo sapien
agagaagttggctaccacagcgcct

SEQ ID NO: 617811 - DNA, 25 bp, Homo sapien
cacagcgcctgagttatgagaatct

SEQ ID NO: 617812 - DNA, 25 bp, Homo sapien
gttgagcctcgtctaatgacacctg

SEQ ID NO: 617813 - DNA, 25 bp, Homo sapien
atggtgagtgtgaagtgactgctcc

SEQ ID NO: 617814 - DNA, 25 bp, Homo sapien
gcgggactgcactcgagtgtccaga

SEQ ID NO: 617815 - DNA, 25 bp, Homo sapien
gacgccgccttgtgtggacagactt

SEQ ID NO: 617816 - DNA, 25 bp, Homo sapien
atgtgtgccgtgacgccgccttgtg

SEQ ID NO: 617817 - DNA, 25 bp, Homo sapien
gcaggcggcatccggggggagcggg

SEQ ID NO: 617818 - DNA, 25 bp, Homo sapien
atcggccgcgtccagagcagcaggc

SEQ ID NO: 617819 - DNA, 25 bp, Homo sapien
gcaatcggccgcgtccagagcagca

SEQ ID NO: 617820 - DNA, 25 bp, Homo sapien
aagcaatcggccgcgtccagagcag

SEQ ID NO: 617821 - DNA, 25 bp, Homo sapien
gtctttgccaaattacccttcagag

SEQ ID NO: 617822 - DNA, 25 bp, Homo sapien
tcagaggtctttgccaaattaccct

SEQ ID NO: 617823 - DNA, 25 bp, Homo sapien
gaggtctttgccaaattacccttca

SEQ ID NO: 617824 - DNA, 25 bp, Homo sapien
ttcagaggtctttgccaaattaccc

SEQ ID NO: 617825 - DNA, 25 bp, Homo sapien
aatccctctcctcgtgaggctgagg

SEQ ID NO: 617826 - DNA, 25 bp, Homo sapien
cctgtaatccctctcctcgtgaggc

SEQ ID NO: 617827 - DNA, 25 bp, Homo sapien
cacccaccatgacacccgggaaatt

SEQ ID NO: 617828 - DNA, 25 bp, Homo sapien
gcacccaccatgacacccgggaaat

SEQ ID NO: 617829 - DNA, 25 bp, Homo sapien
acatgaacgcgacagagtgcttgcc

SEQ ID NO: 617830 - DNA, 25 bp, Homo sapien
ggtcgagctgagaagtcagactcat

SEQ ID NO: 617831 - DNA, 25 bp, Homo sapien
agaaacagacatgaacgcgacagag

SEQ ID NO: 617832 - DNA, 25 bp, Homo sapien
ctccaaggaactcagggtcgagctg

SEQ ID NO: 617833 - DNA, 25 bp, Homo sapien
ctccgccccgcttcaggccggagag

SEQ ID NO: 617834 - DNA, 25 bp, Homo sapien
cccgcttcaggccggagagccagaa

SEQ ID NO: 617835 - DNA, 25 bp, Homo sapien
ttcaggccggagagccagaaggcgc

SEQ ID NO: 617836 - DNA, 25 bp, Homo sapien
gcttcaggccggagagccagaaggc

SEQ ID NO: 617837 - DNA, 25 bp, Homo sapien
gcgacggcgacagcgctggaggaga

SEQ ID NO: 617838 - DNA, 25 bp, Homo sapien
tcacacggcgggaccgagggtcgga

SEQ ID NO: 617839 - DNA, 25 bp, Homo sapien
acccaatagaaagcgcgcacctgcg

SEQ ID NO: 617840 - DNA, 25 bp, Homo sapien
gaagatgccgcaatccctcgcgttc

SEQ ID NO: 617841 - DNA, 25 bp, Homo sapien
tgcgcgactggggatctcggaaagc

SEQ ID NO: 617842 - DNA, 25 bp, Homo sapien
ggatctcggaaagcggttgcggccc

SEQ ID NO: 617843 - DNA, 25 bp, Homo sapien
tgaacgccgagccccgcgacggcct

SEQ ID NO: 617844 - DNA, 25 bp, Homo sapien
gccgagccccgcgacggcctcctcc

SEQ ID NO: 617845 - DNA, 25 bp, Homo sapien
ccccgtgccggtggctgcggttcat

SEQ ID NO: 617846 - DNA, 25 bp, Homo sapien
ccgccccgtgccggtggctgcggtt

SEQ ID NO: 617847 - DNA, 25 bp, Homo sapien
gccccgtgccggtggctgcggttca

SEQ ID NO: 617848 - DNA, 25 bp, Homo sapien
cgccccgtgccggtggctgcggttc

SEQ ID NO: 617849 - DNA, 25 bp, Homo sapien
taattatcagcagattggcataccg

SEQ ID NO: 617850 - DNA, 25 bp, Homo sapien
taaagtgctactccaacgtaaggtg

SEQ ID NO: 617851 - DNA, 25 bp, Homo sapien
gaggaagtcataacctttctaagcc

SEQ ID NO: 617852 - DNA, 25 bp, Homo sapien
cacttgatgtgagtaggtagcagga

SEQ ID NO: 617853 - DNA, 25 bp, Homo sapien
catggatgtctgcatagcctaccaa

SEQ ID NO: 617854 - DNA, 25 bp, Homo sapien
ttgatctttccagcgaaaaccgacg

SEQ ID NO: 617855 - DNA, 25 bp, Homo sapien
gattggccgttgaaacagctttgtg

SEQ ID NO: 617856 - DNA, 25 bp, Homo sapien
aatatcctaagcagtggattggccg

SEQ ID NO: 617857 - DNA, 25 bp, Homo sapien
ggcatgccctatgagagacaaagtt

SEQ ID NO: 617858 - DNA, 25 bp, Homo sapien
gatgatttagatgcccagttaccag

SEQ ID NO: 617859 - DNA, 25 bp, Homo sapien
tcacatctgtgtaagggcatgccct

SEQ ID NO: 617860 - DNA, 25 bp, Homo sapien
ggtgtcaatcaaaaacagacggtgt

SEQ ID NO: 617861 - DNA, 25 bp, Homo sapien
gattcgcccgcctcggccaccaaaa

SEQ ID NO: 617862 - DNA, 25 bp, Homo sapien
tcgcccgcctcggccaccaaaaatg

SEQ ID NO: 617863 - DNA, 25 bp, Homo sapien
tacaggctgtaatttatttttttca

SEQ ID NO: 617864 - DNA, 25 bp, Homo sapien
gctgggattacaggctgtaatttat

SEQ ID NO: 617865 - DNA, 25 bp, Homo sapien
agaggtcgggagttcgcaagcagcc

SEQ ID NO: 617866 - DNA, 25 bp, Homo sapien
gactccaggctctcagtattaggaa

SEQ ID NO: 617867 - DNA, 25 bp, Homo sapien
tagactgaccggaactgccagaagt

SEQ ID NO: 617868 - DNA, 25 bp, Homo sapien
tattagcgtgtctgtaccaaaggca

SEQ ID NO: 617869 - DNA, 25 bp, Homo sapien
gacgtaccctacgatgcgtttctgg

SEQ ID NO: 617870 - DNA, 25 bp, Homo sapien
tgaggtccccaatgtaccacaagag

SEQ ID NO: 617871 - DNA, 25 bp, Homo sapien
aagcacgtaacttcatcagcaaagg

SEQ ID NO: 617872 - DNA, 25 bp, Homo sapien
taaaatgttgaacccctgcaccact

SEQ ID NO: 617873 - DNA, 25 bp, Homo sapien
ccacgtcactggtcagaggtatata

SEQ ID NO: 617874 - DNA, 25 bp, Homo sapien
ttttggaatgttccaatacacatcc

SEQ ID NO: 617875 - DNA, 25 bp, Homo sapien
tgtttttggaatgttccaatacaca

SEQ ID NO: 617876 - DNA, 25 bp, Homo sapien
ggcaaatatctcaagtgaaaagtaa

SEQ ID NO: 617877 - DNA, 25 bp, Homo sapien
tggcaaatatctcaagtgaaaagta

SEQ ID NO: 617878 - DNA, 25 bp, Homo sapien
gatttagtttctgagtcactaagca

SEQ ID NO: 617879 - DNA, 25 bp, Homo sapien
agctccaggagcgccgggccgagcg

SEQ ID NO: 617880 - DNA, 25 bp, Homo sapien
ggcaggtgcgctcccggcggtcgcg

SEQ ID NO: 617881 - DNA, 25 bp, Homo sapien
gccccgcggaccgcctggcggaggc

SEQ ID NO: 617882 - DNA, 25 bp, Homo sapien
gcggtcgcggctcgcagctccagga

SEQ ID NO: 617883 - DNA, 25 bp, Homo sapien
agcccgtggttgcgcccgggcctcg

SEQ ID NO: 617884 - DNA, 25 bp, Homo sapien
cgtggttgcgcccgggcctcggagc

SEQ ID NO: 617885 - DNA, 25 bp, Homo sapien
ccgtggttgcgcccgggcctcggag

SEQ ID NO: 617886 - DNA, 25 bp, Homo sapien
ggtccggctggcggaggctgcctgg

SEQ ID NO: 617887 - DNA, 25 bp, Homo sapien
gtccggctggcggaggctgcctggg

SEQ ID NO: 617888 - DNA, 25 bp, Homo sapien
gggtccggctggcggaggctgcctg

SEQ ID NO: 617889 - DNA, 25 bp, Homo sapien
ggggtccggctggcggaggctgcct

SEQ ID NO: 617890 - DNA, 25 bp, Homo sapien
gggtcaggaagagcgcgagctcgcg

SEQ ID NO: 617891 - DNA, 25 bp, Homo sapien
gctgatcagcgtccacgagcagcat

SEQ ID NO: 617892 - DNA, 25 bp, Homo sapien
atgggctccggctgatcagcgtcca

SEQ ID NO: 617893 - DNA, 25 bp, Homo sapien
tgcgcatgggctccggctgatcagc

SEQ ID NO: 617894 - DNA, 25 bp, Homo sapien
cgccccgcagccacccttcaggaag

SEQ ID NO: 617895 - DNA, 25 bp, Homo sapien
gacccgctgcacatctctgcgtggc

SEQ ID NO: 617896 - DNA, 25 bp, Homo sapien
ccccactccgggagcgagaggatgc

SEQ ID NO: 617897 - DNA, 25 bp, Homo sapien
agcgagcagggacgacccgctgcac

SEQ ID NO: 617898 - DNA, 25 bp, Homo sapien
ccgggcaccgctcggaggtagccgg

SEQ ID NO: 617899 - DNA, 25 bp, Homo sapien
ttaaaatagaaagcgcagacagagg

SEQ ID NO: 617900 - DNA, 25 bp, Homo sapien
gttttcgctccgagctgcagcagcg

SEQ ID NO: 617901 - DNA, 25 bp, Homo sapien
cagaggcgtggtgttttcgctccga

SEQ ID NO: 617902 - DNA, 25 bp, Homo sapien
ggcgctcaggataagccagcccacc

SEQ ID NO: 617903 - DNA, 25 bp, Homo sapien
cgctcaggataagccagcccaccat

SEQ ID NO: 617904 - DNA, 25 bp, Homo sapien
aaggcgctcaggataagccagccca

SEQ ID NO: 617905 - DNA, 25 bp, Homo sapien
gaaggcgctcaggataagccagccc

SEQ ID NO: 617906 - DNA, 25 bp, Homo sapien
agcctgaggagcatgccctcgatgg

SEQ ID NO: 617907 - DNA, 25 bp, Homo sapien
ggagcatgccctcgatggtctcctc

SEQ ID NO: 617908 - DNA, 25 bp, Homo sapien
gtcagccaggctgcaaaactcttcc

SEQ ID NO: 617909 - DNA, 25 bp, Homo sapien
cagccaggctgcaaaactcttccag

SEQ ID NO: 617910 - DNA, 25 bp, Homo sapien
tgtcagtttggccttaaggactggg

SEQ ID NO: 617911 - DNA, 25 bp, Homo sapien
ctctagccggtccactttggcatag

SEQ ID NO: 617912 - DNA, 25 bp, Homo sapien
tggcatagatgccacgcatttctgt

SEQ ID NO: 617913 - DNA, 25 bp, Homo sapien
ctagccggtccactttggcatagat

SEQ ID NO: 617914 - DNA, 25 bp, Homo sapien
cagaaccttcgtttgcctagacgta

SEQ ID NO: 617915 - DNA, 25 bp, Homo sapien
tcagaaccttcgtttgcctagacgt

SEQ ID NO: 617916 - DNA, 25 bp, Homo sapien
tgctcagaaaggaaccgggcctgac

SEQ ID NO: 617917 - DNA, 25 bp, Homo sapien
tcatggtaatttctcccagcagcga

SEQ ID NO: 617918 - DNA, 25 bp, Homo sapien
tgttaattctctgctacctcggtgc

SEQ ID NO: 617919 - DNA, 25 bp, Homo sapien
cctggccctcagtcaacatcagtgg

SEQ ID NO: 617920 - DNA, 25 bp, Homo sapien
gagacaggaagatgtcactccgtgg

SEQ ID NO: 617921 - DNA, 25 bp, Homo sapien
gcagcagaacgatggctcccaaaga

SEQ ID NO: 617922 - DNA, 25 bp, Homo sapien
ggtcactgtgaatcatccaggtagg

SEQ ID NO: 617923 - DNA, 25 bp, Homo sapien
aggtaggcccaacgtaatctcaagg

SEQ ID NO: 617924 - DNA, 25 bp, Homo sapien
ctgaagaagacagagacgcaagaga

SEQ ID NO: 617925 - DNA, 25 bp, Homo sapien
cagagacgcaagagaaaaatccact

SEQ ID NO: 617926 - DNA, 25 bp, Homo sapien
tgaagaagacagagacgcaagagaa

SEQ ID NO: 617927 - DNA, 25 bp, Homo sapien
agagacgcaagagaaaaatccactg

SEQ ID NO: 617928 - DNA, 25 bp, Homo sapien
tccgatatggctgagatcgagaaat

SEQ ID NO: 617929 - DNA, 25 bp, Homo sapien
caaatccgatatggctgagatcgag

SEQ ID NO: 617930 - DNA, 25 bp, Homo sapien
gatcgagaaattcgataagtcgaaa

SEQ ID NO: 617931 - DNA, 25 bp, Homo sapien
ctgacaaatccgatatggctgagat

SEQ ID NO: 617932 - DNA, 25 bp, Homo sapien
cagacttcgctcgttctcgcgtgcc

SEQ ID NO: 617933 - DNA, 25 bp, Homo sapien
acttcgctcgttctcgcgtgcctcg

SEQ ID NO: 617934 - DNA, 25 bp, Homo sapien
ttcgctcgttctcgcgtgcctcgct

SEQ ID NO: 617935 - DNA, 25 bp, Homo sapien
gctcgttctcgcgtgcctcgctccg

SEQ ID NO: 617936 - DNA, 25 bp, Homo sapien
aataaaattggacaactcagtggtg

SEQ ID NO: 617937 - DNA, 25 bp, Homo sapien
ggacaactcagtggtggccactacg

SEQ ID NO: 617938 - DNA, 25 bp, Homo sapien
aattggacaactcagtggtggccac

SEQ ID NO: 617939 - DNA, 25 bp, Homo sapien
caactcagtggtggccactacgcag

SEQ ID NO: 617940 - DNA, 25 bp, Homo sapien
gcggatcccagccacctccgcaggg

SEQ ID NO: 617941 - DNA, 25 bp, Homo sapien
ggaaggcgacgtggtgtccaaccat

SEQ ID NO: 617942 - DNA, 25 bp, Homo sapien
cccatggtcccgctcagcctgaagc

SEQ ID NO: 617943 - DNA, 25 bp, Homo sapien
ggagccctgcggatcccagccacct

SEQ ID NO: 617944 - DNA, 25 bp, Homo sapien
atggtcactgttcgggccagcctgg

SEQ ID NO: 617945 - DNA, 25 bp, Homo sapien
cgtctggatggtcactgttcgggcc

SEQ ID NO: 617946 - DNA, 25 bp, Homo sapien
tctggatggtcactgttcgggccag

SEQ ID NO: 617947 - DNA, 25 bp, Homo sapien
tggatggtcactgttcgggccagcc

SEQ ID NO: 617948 - DNA, 25 bp, Homo sapien
ctttggaggcagcacgggtgggtga

SEQ ID NO: 617949 - DNA, 25 bp, Homo sapien
ctccactccatggaccctttggagg

SEQ ID NO: 617950 - DNA, 25 bp, Homo sapien
ttctttcctctgaccggacaagggc

SEQ ID NO: 617951 - DNA, 25 bp, Homo sapien
tctccagatgtgaggggccctccgc

SEQ ID NO: 617952 - DNA, 25 bp, Homo sapien
atgtgaggggccctccgcaagcagg

SEQ ID NO: 617953 - DNA, 25 bp, Homo sapien
tcctctgaccggacaagggccctga

SEQ ID NO: 617954 - DNA, 25 bp, Homo sapien
agataaagctgagctgtcgggctcc

SEQ ID NO: 617955 - DNA, 25 bp, Homo sapien
agcctccaccaccagataaagctga

SEQ ID NO: 617956 - DNA, 25 bp, Homo sapien
taaagctgagctgtcgggctccctc

SEQ ID NO: 617957 - DNA, 25 bp, Homo sapien
ctccaccaccagataaagctgagct

SEQ ID NO: 617958 - DNA, 25 bp, Homo sapien
caatgcacacacttccaggggcact

SEQ ID NO: 617959 - DNA, 25 bp, Homo sapien
aaggcctctggagccaggtctaggc

SEQ ID NO: 617960 - DNA, 25 bp, Homo sapien
cctctggagccaggtctaggccagc

SEQ ID NO: 617961 - DNA, 25 bp, Homo sapien
ccaaggcctctggagccaggtctag

SEQ ID NO: 617962 - DNA, 25 bp, Homo sapien
tgtgggctccacacggtgcaggccc

SEQ ID NO: 617963 - DNA, 25 bp, Homo sapien
gtgggctccacacggtgcaggccct

SEQ ID NO: 617964 - DNA, 25 bp, Homo sapien
acggaggccatctcgccttcaggga

SEQ ID NO: 617965 - DNA, 25 bp, Homo sapien
ggaaacaccgcacccttgtcatttc

SEQ ID NO: 617966 - DNA, 25 bp, Homo sapien
gaagacaggccgtccgtgctggacg

SEQ ID NO: 617967 - DNA, 25 bp, Homo sapien
ttcagggaaacaccgcacccttgtc

SEQ ID NO: 617968 - DNA, 25 bp, Homo sapien
gctgtgcccgtgcatctcagcccag

SEQ ID NO: 617969 - DNA, 25 bp, Homo sapien
actgccgggcctgcacatgcacctg

SEQ ID NO: 617970 - DNA, 25 bp, Homo sapien
tgcactgtccttgcctgatgaagac

SEQ ID NO: 617971 - DNA, 25 bp, Homo sapien
cctcagacatgaggtgtccttggag

SEQ ID NO: 617972 - DNA, 25 bp, Homo sapien
tcttgggtgaccactgcagccccag

SEQ ID NO: 617973 - DNA, 25 bp, Homo sapien
ttttatgtggttggctgttcttggg

SEQ ID NO: 617974 - DNA, 25 bp, Homo sapien
ccagaacaggcaagaggcacaggtc

SEQ ID NO: 617975 - DNA, 25 bp, Homo sapien
ctgtccttgggcctgacttttatgt

SEQ ID NO: 617976 - DNA, 25 bp, Homo sapien
tccaggaaaaaccaggtcaccaaga

SEQ ID NO: 617977 - DNA, 25 bp, Homo sapien
ctccaggaaaaaccaggtcaccaag

SEQ ID NO: 617978 - DNA, 25 bp, Homo sapien
tgtgcgctggctggcgggctcctgc

SEQ ID NO: 617979 - DNA, 25 bp, Homo sapien
gcgctggctggcgggctcctgcagg

SEQ ID NO: 617980 - DNA, 25 bp, Homo sapien
gtgcgctggctggcgggctcctgca

SEQ ID NO: 617981 - DNA, 25 bp, Homo sapien
gctggctggcgggctcctgcaggct

SEQ ID NO: 617982 - DNA, 25 bp, Homo sapien
tcacgggcaccggtgcaggtgactt

SEQ ID NO: 617983 - DNA, 25 bp, Homo sapien
ctatacagtgtgggcagctcgtacg

SEQ ID NO: 617984 - DNA, 25 bp, Homo sapien
gcgtccacaggaaaatagtcctccg

SEQ ID NO: 617985 - DNA, 25 bp, Homo sapien
gtccacaggaaaatagtcctccgtc

SEQ ID NO: 617986 - DNA, 25 bp, Homo sapien
ccggcgtccacaggaaaatagtcct

SEQ ID NO: 617987 - DNA, 25 bp, Homo sapien
tgcttccccggcgtccacaggaaaa

SEQ ID NO: 617988 - DNA, 25 bp, Homo sapien
cacaaaggccgagggcaggtgcggg

SEQ ID NO: 617989 - DNA, 25 bp, Homo sapien
gcaccgaggtctggaggcaacagaa

SEQ ID NO: 617990 - DNA, 25 bp, Homo sapien
tattggaaggatcctcaaggctgtg

SEQ ID NO: 617991 - DNA, 25 bp, Homo sapien
aaccctgtggtctcacatgaggcag

SEQ ID NO: 617992 - DNA, 25 bp, Homo sapien
cagcgttcctgatgggaagaccaca

SEQ ID NO: 617993 - DNA, 25 bp, Homo sapien
ttgaccctgtgcataagcgaccctc

SEQ ID NO: 617994 - DNA, 25 bp, Homo sapien
cacatgctagggtgcagtagaacaa

SEQ ID NO: 617995 - DNA, 25 bp, Homo sapien
taatgcagatttacagttcagtcct

SEQ ID NO: 617996 - DNA, 25 bp, Homo sapien
tcttgaaattctaatgcagatttac

SEQ ID NO: 617997 - DNA, 25 bp, Homo sapien
tcagtctggtgaggcttaaatagat

SEQ ID NO: 617998 - DNA, 25 bp, Homo sapien
ggtttgtgccaacactacattttgg

SEQ ID NO: 617999 - DNA, 25 bp, Homo sapien
aaatagatacactcagtttgtgaaa

SEQ ID NO: 618000 - DNA, 25 bp, Homo sapien
acttaggcacccctttctgtaatat

SEQ ID NO: 618001 - DNA, 25 bp, Homo sapien
taactctgacacgtaagggcagtcc

SEQ ID NO: 618002 - DNA, 25 bp, Homo sapien
gaaacctcttgctttggtgagcacg

SEQ ID NO: 618003 - DNA, 25 bp, Homo sapien
tgagcacgaagttcacatccgctgg

SEQ ID NO: 618004 - DNA, 25 bp, Homo sapien
ggttagaggccatcaatagtcagca

SEQ ID NO: 618005 - DNA, 25 bp, Homo sapien
gaaaaggatacctctcaccccagat

SEQ ID NO: 618006 - DNA, 25 bp, Homo sapien
ttttgttaggtatgccaattgcccc

SEQ ID NO: 618007 - DNA, 25 bp, Homo sapien
cactgtgcagtgactaaccttgtac

SEQ ID NO: 618008 - DNA, 25 bp, Homo sapien
catatcttggcgatgtttccacacc

SEQ ID NO: 618009 - DNA, 25 bp, Homo sapien
taggctgaacacttctaacatgaga

SEQ ID NO: 618010 - DNA, 25 bp, Homo sapien
taatctggagatcgttggctatggc

SEQ ID NO: 618011 - DNA, 25 bp, Homo sapien
cctgcaggttttctcgtgggaatga

SEQ ID NO: 618012 - DNA, 25 bp, Homo sapien
gcaacgtgctgccacctaattagag

SEQ ID NO: 618013 - DNA, 25 bp, Homo sapien
agttacaaggaagcagaattaggcc

SEQ ID NO: 618014 - DNA, 25 bp, Homo sapien
aacaactgtagtgcaggcggctctg

SEQ ID NO: 618015 - DNA, 25 bp, Homo sapien
tcagtcacctcaaggatagtggcct

SEQ ID NO: 618016 - DNA, 25 bp, Homo sapien
tcaccttacgatgggaacaactgta

SEQ ID NO: 618017 - DNA, 25 bp, Homo sapien
gttgaagcagcaaaccaatgagtgc

SEQ ID NO: 618018 - DNA, 25 bp, Homo sapien
tgtacaatcttgcaacagaggccag

SEQ ID NO: 618019 - DNA, 25 bp, Homo sapien
tcatgatcctgttactgtgtgccca

SEQ ID NO: 618020 - DNA, 25 bp, Homo sapien
cagaggccagccacgtaagatatat

SEQ ID NO: 618021 - DNA, 25 bp, Homo sapien
gggcctggatcccaacaagtgtcag

SEQ ID NO: 618022 - DNA, 25 bp, Homo sapien
ccaaagcgaagatgcaaggagcagt

SEQ ID NO: 618023 - DNA, 25 bp, Homo sapien
ggtctgacgagtcttcccaaagcga

SEQ ID NO: 618024 - DNA, 25 bp, Homo sapien
gaatgatgagcgcttatctaacccc

SEQ ID NO: 618025 - DNA, 25 bp, Homo sapien
gataagacaaatgcaccctctcggc

SEQ ID NO: 618026 - DNA, 25 bp, Homo sapien
tggcacctgtgaagcgcacttacga

SEQ ID NO: 618027 - DNA, 25 bp, Homo sapien
tgaagatgattcctatgaagccagg

SEQ ID NO: 618028 - DNA, 25 bp, Homo sapien
tatcccaccaggagagaaattgaga

SEQ ID NO: 618029 - DNA, 25 bp, Homo sapien
gaacattttcagcatgtggcagcac

SEQ ID NO: 618030 - DNA, 25 bp, Homo sapien
cattgcagcagggtagtcacactaa

SEQ ID NO: 618031 - DNA, 25 bp, Homo sapien
cagagtgttaggtcagtccagttcc

SEQ ID NO: 618032 - DNA, 25 bp, Homo sapien
gagggatgccccagctgaatctgtt

SEQ ID NO: 618033 - DNA, 25 bp, Homo sapien
tatagaataggcatatgaagataga

SEQ ID NO: 618034 - DNA, 25 bp, Homo sapien
tttttaagcttatagaataggcata

SEQ ID NO: 618035 - DNA, 25 bp, Homo sapien
agcttatagaataggcatatgaaga

SEQ ID NO: 618036 - DNA, 25 bp, Homo sapien
ttttaagcttatagaataggcatat

SEQ ID NO: 618037 - DNA, 25 bp, Homo sapien
tctttcttttgatcagcgctgaatc

SEQ ID NO: 618038 - DNA, 25 bp, Homo sapien
taaccagcagtcttagaatgagaat

SEQ ID NO: 618039 - DNA, 25 bp, Homo sapien
gcgctgaatctgatactacactgta

SEQ ID NO: 618040 - DNA, 25 bp, Homo sapien
ggactgactgcataggtgttaacaa

SEQ ID NO: 618041 - DNA, 25 bp, Homo sapien
gatgtaggactgtgggacccatcac

SEQ ID NO: 618042 - DNA, 25 bp, Homo sapien
taagattgggttagcgtttatacca

SEQ ID NO: 618043 - DNA, 25 bp, Homo sapien
tggcagcatgcttggtatactccct

SEQ ID NO: 618044 - DNA, 25 bp, Homo sapien
gaaacctgactgaccatcaggaaag

SEQ ID NO: 618045 - DNA, 25 bp, Homo sapien
tccattactttgtgtcagtggccaa

SEQ ID NO: 618046 - DNA, 25 bp, Homo sapien
catgtcaggcgttgaactaggtgcc

SEQ ID NO: 618047 - DNA, 25 bp, Homo sapien
gcagaaggctaccattgaggactta

SEQ ID NO: 618048 - DNA, 25 bp, Homo sapien
taacagctctgtgggatagccatgc

SEQ ID NO: 618049 - DNA, 25 bp, Homo sapien
cagcttatgtttaggtgttaaccag

SEQ ID NO: 618050 - DNA, 25 bp, Homo sapien
gtaaggatccttgtgtagctctcag

SEQ ID NO: 618051 - DNA, 25 bp, Homo sapien
gattatgccactgggtaacagaggg

SEQ ID NO: 618052 - DNA, 25 bp, Homo sapien
ggttcccgaacattataaagtagca

SEQ ID NO: 618053 - DNA, 25 bp, Homo sapien
ttcatgctttggtttgattgcccac

SEQ ID NO: 618054 - DNA, 25 bp, Homo sapien
gattgcccactaggcccagattcta

SEQ ID NO: 618055 - DNA, 25 bp, Homo sapien
gcataaatttgcgtcatgggcttag

SEQ ID NO: 618056 - DNA, 25 bp, Homo sapien
cagtaacctgccacttttgcataaa

SEQ ID NO: 618057 - DNA, 25 bp, Homo sapien
gaccataagtttagacacacacccg

SEQ ID NO: 618058 - DNA, 25 bp, Homo sapien
caggggtttattggccagaatcctc

SEQ ID NO: 618059 - DNA, 25 bp, Homo sapien
ggtcagttctcatagccaggggttt

SEQ ID NO: 618060 - DNA, 25 bp, Homo sapien
taggccaagttgcagaccataagtt

SEQ ID NO: 618061 - DNA, 25 bp, Homo sapien
atttatgtatgtatggctgagcatg

SEQ ID NO: 618062 - DNA, 25 bp, Homo sapien
tcactggcactccaagttgaaacaa

SEQ ID NO: 618063 - DNA, 25 bp, Homo sapien
atgtatgtatggctgagcatgccca

SEQ ID NO: 618064 - DNA, 25 bp, Homo sapien
ttatgtatgtatggctgagcatgcc

SEQ ID NO: 618065 - DNA, 25 bp, Homo sapien
ggcttttacagtctcattctggcca

SEQ ID NO: 618066 - DNA, 25 bp, Homo sapien
ttccactcttatcacagactaagtg

SEQ ID NO: 618067 - DNA, 25 bp, Homo sapien
ttatcacagactaagtgtggaggag

SEQ ID NO: 618068 - DNA, 25 bp, Homo sapien
tctctatgtaaatattgctccttgg

SEQ ID NO: 618069 - DNA, 25 bp, Homo sapien
atccaagctgtttaaccttctacca

SEQ ID NO: 618070 - DNA, 25 bp, Homo sapien
caagctgtttaaccttctaccattc

SEQ ID NO: 618071 - DNA, 25 bp, Homo sapien
taaccttctaccattctcttgagta

SEQ ID NO: 618072 - DNA, 25 bp, Homo sapien
gctgtttaaccttctaccattctct

SEQ ID NO: 618073 - DNA, 25 bp, Homo sapien
tgtaagctgactcgatataggtact

SEQ ID NO: 618074 - DNA, 25 bp, Homo sapien
gctgactcgatataggtactttaaa

SEQ ID NO: 618075 - DNA, 25 bp, Homo sapien
agctgactcgatataggtactttaa

SEQ ID NO: 618076 - DNA, 25 bp, Homo sapien
taagctgactcgatataggtacttt

SEQ ID NO: 618077 - DNA, 25 bp, Homo sapien
tctcctcggtgcctaccagacatgg

SEQ ID NO: 618078 - DNA, 25 bp, Homo sapien
tggcagcagactccagcttcacatt

SEQ ID NO: 618079 - DNA, 25 bp, Homo sapien
tcggtgcctaccagacatggcagca

SEQ ID NO: 618080 - DNA, 25 bp, Homo sapien
taccagacatggcagcagactccag

SEQ ID NO: 618081 - DNA, 25 bp, Homo sapien
cacccggcctggattaatcctctta

SEQ ID NO: 618082 - DNA, 25 bp, Homo sapien
ccggcctggattaatcctcttaaag

SEQ ID NO: 618083 - DNA, 25 bp, Homo sapien
cctgaaatctgaatacggaaagtat

SEQ ID NO: 618084 - DNA, 25 bp, Homo sapien
taaactcttagaggagttcagcctg

SEQ ID NO: 618085 - DNA, 25 bp, Homo sapien
caactggttctactggtgtactgga

SEQ ID NO: 618086 - DNA, 25 bp, Homo sapien
ggataagcagcaacacagtagcagt

SEQ ID NO: 618087 - DNA, 25 bp, Homo sapien
gggcgcgggcgcattgttgttcgca

SEQ ID NO: 618088 - DNA, 25 bp, Homo sapien
attgttgttcgcatcgccgccctcc

SEQ ID NO: 618089 - DNA, 25 bp, Homo sapien
cccggagcttttgcagctaagggca

SEQ ID NO: 618090 - DNA, 25 bp, Homo sapien
cgctacccgactctgctccggaggt

SEQ ID NO: 618091 - DNA, 25 bp, Homo sapien
gcgcgcgcctcgaggccgagtcaag

SEQ ID NO: 618092 - DNA, 25 bp, Homo sapien
gcgagccggagtccgccgagccgga

SEQ ID NO: 618093 - DNA, 25 bp, Homo sapien
gagccggagcgcgacgaggccccgg

SEQ ID NO: 618094 - DNA, 25 bp, Homo sapien
tgtccggcccccgagcacgccggcc

SEQ ID NO: 618095 - DNA, 25 bp, Homo sapien
cgccgcccgccgctctgctgcgccc

SEQ ID NO: 618096 - DNA, 25 bp, Homo sapien
gccgccgcccgccgctctgctgcgc

SEQ ID NO: 618097 - DNA, 25 bp, Homo sapien
gccgcccgccgctctgctgcgcccg

SEQ ID NO: 618098 - DNA, 25 bp, Homo sapien
cgcccgccgctctgctgcgcccgcc

SEQ ID NO: 618099 - DNA, 25 bp, Homo sapien
cgccattttggctagggcaggttcg

SEQ ID NO: 618100 - DNA, 25 bp, Homo sapien
gactcggtccgaggcgcttgtattg

SEQ ID NO: 618101 - DNA, 25 bp, Homo sapien
tttctcggccgccattttggctagg

SEQ ID NO: 618102 - DNA, 25 bp, Homo sapien
ggactcggtccgaggcgcttgtatt

SEQ ID NO: 618103 - DNA, 25 bp, Homo sapien
cgggagcgcactgcggccattatcc

SEQ ID NO: 618104 - DNA, 25 bp, Homo sapien
ggcgcctcctagtgggtcaatggca

SEQ ID NO: 618105 - DNA, 25 bp, Homo sapien
gggtcaatggcaaatccgcctggtt

SEQ ID NO: 618106 - DNA, 25 bp, Homo sapien
tatccgcggcgcctcctagtgggtc

SEQ ID NO: 618107 - DNA, 25 bp, Homo sapien
cagttcggttcttttcagctgttga

SEQ ID NO: 618108 - DNA, 25 bp, Homo sapien
tagagcaggcatttacagttcggtt

SEQ ID NO: 618109 - DNA, 25 bp, Homo sapien
ttgacagcagttgattacatagccg

SEQ ID NO: 618110 - DNA, 25 bp, Homo sapien
catttcatctatcaaagcaggtcta

SEQ ID NO: 618111 - DNA, 25 bp, Homo sapien
cattttgctgtattgagacctataa

SEQ ID NO: 618112 - DNA, 25 bp, Homo sapien
aaagttgctggcctaatgagcaatg

SEQ ID NO: 618113 - DNA, 25 bp, Homo sapien
taaggtaaggtaaatttcatgcatc

SEQ ID NO: 618114 - DNA, 25 bp, Homo sapien
aacatgaaagaagcctggttactga

SEQ ID NO: 618115 - DNA, 25 bp, Homo sapien
ccagatggagatgattgttcgggca

SEQ ID NO: 618116 - DNA, 25 bp, Homo sapien
tatcataatcatcaagtgtgcgagc

SEQ ID NO: 618117 - DNA, 25 bp, Homo sapien
tattggcgaggtatgcaactgatgc

SEQ ID NO: 618118 - DNA, 25 bp, Homo sapien
taaaggctacgtcttccagatggag

SEQ ID NO: 618119 - DNA, 25 bp, Homo sapien
tctgaaaatacggagctccctgcta

SEQ ID NO: 618120 - DNA, 25 bp, Homo sapien
taaagttaggctgcacattcaccca

SEQ ID NO: 618121 - DNA, 25 bp, Homo sapien
gaaaccctgaggcacagtaggtcca

SEQ ID NO: 618122 - DNA, 25 bp, Homo sapien
gaaattgctgcctccctatgaactg

SEQ ID NO: 618123 - DNA, 25 bp, Homo sapien
caagcccctatgtgtttgttggccc

SEQ ID NO: 618124 - DNA, 25 bp, Homo sapien
tcagattattgtccctccagttcag

SEQ ID NO: 618125 - DNA, 25 bp, Homo sapien
caatctctgcgtaaagtcaccttag

SEQ ID NO: 618126 - DNA, 25 bp, Homo sapien
ccagttcagggagttcagggagttc

SEQ ID NO: 618127 - DNA, 25 bp, Homo sapien
tatctgtatagatagtagacacaca

SEQ ID NO: 618128 - DNA, 25 bp, Homo sapien
aatgatgtattttaggagtcctgag

SEQ ID NO: 618129 - DNA, 25 bp, Homo sapien
tgatcatgcctctccattctagtct

SEQ ID NO: 618130 - DNA, 25 bp, Homo sapien
tgggaagtcagggtaggagggttgc

SEQ ID NO: 618131 - DNA, 25 bp, Homo sapien
gtagttcacccaatatagcacagag

SEQ ID NO: 618132 - DNA, 25 bp, Homo sapien
aagattagtaacagctggaggtcac

SEQ ID NO: 618133 - DNA, 25 bp, Homo sapien
ccaaatggagcagtgaggctactaa

SEQ ID NO: 618134 - DNA, 25 bp, Homo sapien
aggtcactgccacccctagggatgg

SEQ ID NO: 618135 - DNA, 25 bp, Homo sapien
acacatagactcaaagtgaagggat

SEQ ID NO: 618136 - DNA, 25 bp, Homo sapien
gatggaaaaagacattccatgcaaa

SEQ ID NO: 618137 - DNA, 25 bp, Homo sapien
acatagactcaaagtgaagggatgg

SEQ ID NO: 618138 - DNA, 25 bp, Homo sapien
agggatggaaaaagacattccatgc

SEQ ID NO: 618139 - DNA, 25 bp, Homo sapien
gcagttagagttagattgttatcag

SEQ ID NO: 618140 - DNA, 25 bp, Homo sapien
tagcctgttatcactataagatggg

SEQ ID NO: 618141 - DNA, 25 bp, Homo sapien
gatgggttttgtaagtctcatggta

SEQ ID NO: 618142 - DNA, 25 bp, Homo sapien
gcctaaagtagattcacaaaagata

SEQ ID NO: 618143 - DNA, 25 bp, Homo sapien
cgacccgtccttttccgcgccacat

SEQ ID NO: 618144 - DNA, 25 bp, Homo sapien
cgcgccacattacgtaattccgctt

SEQ ID NO: 618145 - DNA, 25 bp, Homo sapien
ccttttccgcgccacattacgtaat

SEQ ID NO: 618146 - DNA, 25 bp, Homo sapien
acattacgtaattccgcttccggca

SEQ ID NO: 618147 - DNA, 25 bp, Homo sapien
gcaatggccctagaagaactagcga

SEQ ID NO: 618148 - DNA, 25 bp, Homo sapien
ggcatttccgcttccgtcttctgtc

SEQ ID NO: 618149 - DNA, 25 bp, Homo sapien
tccggaagttgtcgtgaaaggcatt

SEQ ID NO: 618150 - DNA, 25 bp, Homo sapien
tctcctagcgactgggataaactaa

SEQ ID NO: 618151 - DNA, 25 bp, Homo sapien
tccagcaacaggtggaatgccccag

SEQ ID NO: 618152 - DNA, 25 bp, Homo sapien
cagatcagtcacagtgggccgttcc

SEQ ID NO: 618153 - DNA, 25 bp, Homo sapien
cagaatctcatctcgggacagagcg

SEQ ID NO: 618154 - DNA, 25 bp, Homo sapien
ggtagactgtgatttggccctcgaa

SEQ ID NO: 618155 - DNA, 25 bp, Homo sapien
tgaacagtaaacagatccgaagtat

SEQ ID NO: 618156 - DNA, 25 bp, Homo sapien
actttaaagatctcgggagggtgtg

SEQ ID NO: 618157 - DNA, 25 bp, Homo sapien
ggccaaatagaatgaccctctttct

SEQ ID NO: 618158 - DNA, 25 bp, Homo sapien
aaaatgcaaaatcctgtcacgttac

SEQ ID NO: 618159 - DNA, 25 bp, Homo sapien
cattagttcatctggccactgatag

SEQ ID NO: 618160 - DNA, 25 bp, Homo sapien
actcgttggcaggaacagtcataag

SEQ ID NO: 618161 - DNA, 25 bp, Homo sapien
tgtgtgcaacataaggtggaccctg

SEQ ID NO: 618162 - DNA, 25 bp, Homo sapien
tatattggaagttggtgagactacc

SEQ ID NO: 618163 - DNA, 25 bp, Homo sapien
gttatattcttaacagcccatcttt

SEQ ID NO: 618164 - DNA, 25 bp, Homo sapien
tctgggttgtgtactgggtatctgt

SEQ ID NO: 618165 - DNA, 25 bp, Homo sapien
tagatctgggttgtgtactgggtat

SEQ ID NO: 618166 - DNA, 25 bp, Homo sapien
aaatagatctgggttgtgtactggg

SEQ ID NO: 618167 - DNA, 25 bp, Homo sapien
cctctgcagtttcttgaacggaaca

SEQ ID NO: 618168 - DNA, 25 bp, Homo sapien
aatacacttccgtgattgtcaggac

SEQ ID NO: 618169 - DNA, 25 bp, Homo sapien
taggccacatattcagaccccattg

SEQ ID NO: 618170 - DNA, 25 bp, Homo sapien
gcatgacacttagggaatgggctct

SEQ ID NO: 618171 - DNA, 25 bp, Homo sapien
tgcgtcctctaaccctgactttagc

SEQ ID NO: 618172 - DNA, 25 bp, Homo sapien
ccagtcccaacggaaggaaggagtg

SEQ ID NO: 618173 - DNA, 25 bp, Homo sapien
tcctcaggaagtccgcagaacacag

SEQ ID NO: 618174 - DNA, 25 bp, Homo sapien
ttcctcaaacgcacagagctctgtc

SEQ ID NO: 618175 - DNA, 25 bp, Homo sapien
aatcgaaggctatcaggaaatagag

SEQ ID NO: 618176 - DNA, 25 bp, Homo sapien
ctggcaacccgcatgtgtgaatcga

SEQ ID NO: 618177 - DNA, 25 bp, Homo sapien
gggatggttcggaaactcaaatgta

SEQ ID NO: 618178 - DNA, 25 bp, Homo sapien
caccccacattgaccccaaaggtct

SEQ ID NO: 618179 - DNA, 25 bp, Homo sapien
tatataagcaaagcttaggctgggc

SEQ ID NO: 618180 - DNA, 25 bp, Homo sapien
gatgtacccacccaaaaatgtcaag

SEQ ID NO: 618181 - DNA, 25 bp, Homo sapien
gagaatccaaatgtcccaataccca

SEQ ID NO: 618182 - DNA, 25 bp, Homo sapien
tgcctgcaaggacatgcccctataa

SEQ ID NO: 618183 - DNA, 25 bp, Homo sapien
ccagctggttgcacagcaagagttt

SEQ ID NO: 618184 - DNA, 25 bp, Homo sapien
ctggttgcacagcaagagttttcct

SEQ ID NO: 618185 - DNA, 25 bp, Homo sapien
ctttcatttgcacattgaccaggtt

SEQ ID NO: 618186 - DNA, 25 bp, Homo sapien
gactgtctttcatttgcacattgac

SEQ ID NO: 618187 - DNA, 25 bp, Homo sapien
tgaggcctcatctggctccttcttc

SEQ ID NO: 618188 - DNA, 25 bp, Homo sapien
agctctgtataaaaggccacactcc

SEQ ID NO: 618189 - DNA, 25 bp, Homo sapien
ccagctctgtataaaaggccacact

SEQ ID NO: 618190 - DNA, 25 bp, Homo sapien
tctctgctccaatgtcacctaaaca

SEQ ID NO: 618191 - DNA, 25 bp, Homo sapien
aatgctacagtgagcattggagacc

SEQ ID NO: 618192 - DNA, 25 bp, Homo sapien
caagacagctctaatcagccggtct

SEQ ID NO: 618193 - DNA, 25 bp, Homo sapien
atcccattgataggcatcagggtgg

SEQ ID NO: 618194 - DNA, 25 bp, Homo sapien
gtcttgtcccgacgcccctggtgtg

SEQ ID NO: 618195 - DNA, 25 bp, Homo sapien
cacgccacatgaagggattagaagc

SEQ ID NO: 618196 - DNA, 25 bp, Homo sapien
gagacctgtctggaaattgctgtac

SEQ ID NO: 618197 - DNA, 25 bp, Homo sapien
gaaagtgctcaccatttgagacctg

SEQ ID NO: 618198 - DNA, 25 bp, Homo sapien
tgattgggctgactgagtccacgcc

SEQ ID NO: 618199 - DNA, 25 bp, Homo sapien
tgatttttgacgtgcctggccctga

SEQ ID NO: 618200 - DNA, 25 bp, Homo sapien
tggccctgagcgaagcacattacat

SEQ ID NO: 618201 - DNA, 25 bp, Homo sapien
tatgtgtgtctacaaatggtgagca

SEQ ID NO: 618202 - DNA, 25 bp, Homo sapien
tgcatcatagtagcccagacacatt

SEQ ID NO: 618203 - DNA, 25 bp, Homo sapien
tcggatcatcatcaacgtaggcggc

SEQ ID NO: 618204 - DNA, 25 bp, Homo sapien
cgtaggcggcatcaagtactcgctg

SEQ ID NO: 618205 - DNA, 25 bp, Homo sapien
tgactacgacgtcacctgcaacgag

SEQ ID NO: 618206 - DNA, 25 bp, Homo sapien
tcctcaacgtgtgcgatgactacga

SEQ ID NO: 618207 - DNA, 25 bp, Homo sapien
tgatggtctggcaccgtccttggga

SEQ ID NO: 618208 - DNA, 25 bp, Homo sapien
tggtctggcaccgtccttgggagac

SEQ ID NO: 618209 - DNA, 25 bp, Homo sapien
ttgatggtctggcaccgtccttggg

SEQ ID NO: 618210 - DNA, 25 bp, Homo sapien
tctggcaccgtccttgggagacacc

SEQ ID NO: 618211 - DNA, 25 bp, Homo sapien
tcagatgatgctggatccaaatccc

SEQ ID NO: 618212 - DNA, 25 bp, Homo sapien
tcccagtgggtcaggtcagaaaaga

SEQ ID NO: 618213 - DNA, 25 bp, Homo sapien
ggcagcggactctaatcgtagcttg

SEQ ID NO: 618214 - DNA, 25 bp, Homo sapien
gaattccaaggcgactattgagggt

SEQ ID NO: 618215 - DNA, 25 bp, Homo sapien
agagcctctaggagattgacacgtt

SEQ ID NO: 618216 - DNA, 25 bp, Homo sapien
gcctctaggagattgacacgttggg

SEQ ID NO: 618217 - DNA, 25 bp, Homo sapien
ctctaggagattgacacgttgggca

SEQ ID NO: 618218 - DNA, 25 bp, Homo sapien
tctaggagattgacacgttgggcag

SEQ ID NO: 618219 - DNA, 25 bp, Homo sapien
atttctccaatgaagcgggactcac

SEQ ID NO: 618220 - DNA, 25 bp, Homo sapien
gatttttctcacgaaccagaaggga

SEQ ID NO: 618221 - DNA, 25 bp, Homo sapien
gcagccccaacgcagaagatttttc

SEQ ID NO: 618222 - DNA, 25 bp, Homo sapien
ggaaatttgatcaaggcagccccaa

SEQ ID NO: 618223 - DNA, 25 bp, Homo sapien
caggaatctacccttggttgttgca

SEQ ID NO: 618224 - DNA, 25 bp, Homo sapien
gttgatgaagagtcaacattgcctg

SEQ ID NO: 618225 - DNA, 25 bp, Homo sapien
tctccaccctgctttccaatgttga

SEQ ID NO: 618226 - DNA, 25 bp, Homo sapien
attgcctgttgccagaggtctaggg

SEQ ID NO: 618227 - DNA, 25 bp, Homo sapien
tcataccaagcgctcaacagtcatt

SEQ ID NO: 618228 - DNA, 25 bp, Homo sapien
ctcagcccggaggtatggaaggaaa

SEQ ID NO: 618229 - DNA, 25 bp, Homo sapien
aacatttatggaggcgctatgctgg

SEQ ID NO: 618230 - DNA, 25 bp, Homo sapien
ggatactgagacagttcactgggca

SEQ ID NO: 618231 - DNA, 25 bp, Homo sapien
cgtggagcgcgcttgttacggccaa

SEQ ID NO: 618232 - DNA, 25 bp, Homo sapien
gcgggtccggcttcggttcatccca

SEQ ID NO: 618233 - DNA, 25 bp, Homo sapien
catcccggctgtgggccgaggtttc

SEQ ID NO: 618234 - DNA, 25 bp, Homo sapien
tgcgaagtccgggacgttcgccgcc

SEQ ID NO: 618235 - DNA, 25 bp, Homo sapien
tcgccgggcgccaccaaagcgcgaa

SEQ ID NO: 618236 - DNA, 25 bp, Homo sapien
acttgaggtgggaactttgcgcgct

SEQ ID NO: 618237 - DNA, 25 bp, Homo sapien
tttgcgcgctgcagcctcgccgggc

SEQ ID NO: 618238 - DNA, 25 bp, Homo sapien
acgccgcgacgggaacttgaggtgg

SEQ ID NO: 618239 - DNA, 25 bp, Homo sapien
cagagcgggctccccgggcgacttc

SEQ ID NO: 618240 - DNA, 25 bp, Homo sapien
cttccaggcccctctcgcgtcctcg

SEQ ID NO: 618241 - DNA, 25 bp, Homo sapien
gaggcagagacggggcggccgtggc

SEQ ID NO: 618242 - DNA, 25 bp, Homo sapien
agcgggctccccgggcgacttccag

SEQ ID NO: 618243 - DNA, 25 bp, Homo sapien
accttgaaggctgtcgcgtgcaggc

SEQ ID NO: 618244 - DNA, 25 bp, Homo sapien
ccggagcacttgcaccgcggggaaa

SEQ ID NO: 618245 - DNA, 25 bp, Homo sapien
gcgccgcctggtgcgtgaagctcca

SEQ ID NO: 618246 - DNA, 25 bp, Homo sapien
gggcgcgcgaccctaggaggctgcc

SEQ ID NO: 618247 - DNA, 25 bp, Homo sapien
taatatctagcacatgtagaccctg

SEQ ID NO: 618248 - DNA, 25 bp, Homo sapien
ctagcacatgtagaccctggggcgg

SEQ ID NO: 618249 - DNA, 25 bp, Homo sapien
cacatgtagaccctggggcggtgct

SEQ ID NO: 618250 - DNA, 25 bp, Homo sapien
atatctagcacatgtagaccctggg

SEQ ID NO: 618251 - DNA, 25 bp, Homo sapien
ggtctccacacagtgtaccaggtct

SEQ ID NO: 618252 - DNA, 25 bp, Homo sapien
cattgttctcactgacggtctccac

SEQ ID NO: 618253 - DNA, 25 bp, Homo sapien
cagtcagggataagatcaggcagta

SEQ ID NO: 618254 - DNA, 25 bp, Homo sapien
caggaccgggtggaagtcattgttc

SEQ ID NO: 618255 - DNA, 25 bp, Homo sapien
gagttagatataaccttttccctga

SEQ ID NO: 618256 - DNA, 25 bp, Homo sapien
gggagattgtgtccaaccacacagc

SEQ ID NO: 618257 - DNA, 25 bp, Homo sapien
ttttccctgaatagatggtacagct

SEQ ID NO: 618258 - DNA, 25 bp, Homo sapien
tagtgacacaagctggaccagaacc

SEQ ID NO: 618259 - DNA, 25 bp, Homo sapien
gaatccagctggactaaggcactct

SEQ ID NO: 618260 - DNA, 25 bp, Homo sapien
cctcaatgtatcaacaagcctgatg

SEQ ID NO: 618261 - DNA, 25 bp, Homo sapien
tggcttccctcaatgtatcaacaag

SEQ ID NO: 618262 - DNA, 25 bp, Homo sapien
caagcctgatgaatccagctggact

SEQ ID NO: 618263 - DNA, 25 bp, Homo sapien
ttcagaaatgaggattgaggactcg

SEQ ID NO: 618264 - DNA, 25 bp, Homo sapien
tctttttcacaagcagagagattgc

SEQ ID NO: 618265 - DNA, 25 bp, Homo sapien
gagagattgcctttacaacacccct

SEQ ID NO: 618266 - DNA, 25 bp, Homo sapien
tgaggactcgttctgcctcttggtt

SEQ ID NO: 618267 - DNA, 25 bp, Homo sapien
tgtccacatcgttggatacgtgatc

SEQ ID NO: 618268 - DNA, 25 bp, Homo sapien
attgtccacatcgttggatacgtga

SEQ ID NO: 618269 - DNA, 25 bp, Homo sapien
gttggggaccgtgtcattgtccaca

SEQ ID NO: 618270 - DNA, 25 bp, Homo sapien
tgtgattccttgaggttggggaccg

SEQ ID NO: 618271 - DNA, 25 bp, Homo sapien
ttggcactccgtggacatgccagat

SEQ ID NO: 618272 - DNA, 25 bp, Homo sapien
gtcccttggcactccgtggacatgc

SEQ ID NO: 618273 - DNA, 25 bp, Homo sapien
actccgtggacatgccagatgccac

SEQ ID NO: 618274 - DNA, 25 bp, Homo sapien
gcactccgtggacatgccagatgcc

SEQ ID NO: 618275 - DNA, 25 bp, Homo sapien
gagggcggccctcagggatgtgcga

SEQ ID NO: 618276 - DNA, 25 bp, Homo sapien
gccagtgagggcggccctcagggat

SEQ ID NO: 618277 - DNA, 25 bp, Homo sapien
gggcggccctcagggatgtgcgaca

SEQ ID NO: 618278 - DNA, 25 bp, Homo sapien
gtgagggcggccctcagggatgtgc

SEQ ID NO: 618279 - DNA, 25 bp, Homo sapien
acacattggtgggtgccaccatcca

SEQ ID NO: 618280 - DNA, 25 bp, Homo sapien
ggctaacacattggtgggtgccacc

SEQ ID NO: 618281 - DNA, 25 bp, Homo sapien
gatggagaaagggctaacacattgg

SEQ ID NO: 618282 - DNA, 25 bp, Homo sapien
taacacattggtgggtgccaccatc

SEQ ID NO: 618283 - DNA, 25 bp, Homo sapien
gatgccctgcctcgagttatccttc

SEQ ID NO: 618284 - DNA, 25 bp, Homo sapien
ctggatgccctgcctcgagttatcc

SEQ ID NO: 618285 - DNA, 25 bp, Homo sapien
tgccctgcctcgagttatccttcat

SEQ ID NO: 618286 - DNA, 25 bp, Homo sapien
tggatgccctgcctcgagttatcct

SEQ ID NO: 618287 - DNA, 25 bp, Homo sapien
gaatctcagccacataaactatttc

SEQ ID NO: 618288 - DNA, 25 bp, Homo sapien
ggaatctcagccacataaactattt

SEQ ID NO: 618289 - DNA, 25 bp, Homo sapien
tggaatctcagccacataaactatt

SEQ ID NO: 618290 - DNA, 25 bp, Homo sapien
gatgatcaaaacagcctccatgagg

SEQ ID NO: 618291 - DNA, 25 bp, Homo sapien
catgaggcgatcaacccaagggcct

SEQ ID NO: 618292 - DNA, 25 bp, Homo sapien
gcagaccttctgagttctagccagg

SEQ ID NO: 618293 - DNA, 25 bp, Homo sapien
gggcctaagaggacagcagaccttc

SEQ ID NO: 618294 - DNA, 25 bp, Homo sapien
tctcagatccacaaaggaatttatg

SEQ ID NO: 618295 - DNA, 25 bp, Homo sapien
tgcaggaaacagtcaccagtgacat

SEQ ID NO: 618296 - DNA, 25 bp, Homo sapien
aaaggaatttatgttgcaggaaaca

SEQ ID NO: 618297 - DNA, 25 bp, Homo sapien
tgttgcaggaaacagtcaccagtga

SEQ ID NO: 618298 - DNA, 25 bp, Homo sapien
tatatcacgatgtcaggctgcaaca

SEQ ID NO: 618299 - DNA, 25 bp, Homo sapien
ctatatcacgatgtcaggctgcaac

SEQ ID NO: 618300 - DNA, 25 bp, Homo sapien
tatcacgatgtcaggctgcaacagc

SEQ ID NO: 618301 - DNA, 25 bp, Homo sapien
cacgatgtcaggctgcaacagccca

SEQ ID NO: 618302 - DNA, 25 bp, Homo sapien
tcatctagtataggctccctttttc

SEQ ID NO: 618303 - DNA, 25 bp, Homo sapien
tgcatcatctagtataggctccctt

SEQ ID NO: 618304 - DNA, 25 bp, Homo sapien
catcatctagtataggctccctttt

SEQ ID NO: 618305 - DNA, 25 bp, Homo sapien
tttgcatcatctagtataggctccc

SEQ ID NO: 618306 - DNA, 25 bp, Homo sapien
ggcagcagaacccatggccaggctg

SEQ ID NO: 618307 - DNA, 25 bp, Homo sapien
tgtgaagggcgctttgcaggcatca

SEQ ID NO: 618308 - DNA, 25 bp, Homo sapien
caatgttttacgcatctgcaggagg

SEQ ID NO: 618309 - DNA, 25 bp, Homo sapien
cagtcaggtcctaggtccttctcat

SEQ ID NO: 618310 - DNA, 25 bp, Homo sapien
ccatgccactatctggggctgatct

SEQ ID NO: 618311 - DNA, 25 bp, Homo sapien
tcaaggtctgtgttaaaagcttcaa

SEQ ID NO: 618312 - DNA, 25 bp, Homo sapien
tgttaaaagcttcaatccccatgcc

SEQ ID NO: 618313 - DNA, 25 bp, Homo sapien
gggctgatctgaagccaactgctct

SEQ ID NO: 618314 - DNA, 25 bp, Homo sapien
aggatcggttccaccagagattcag

SEQ ID NO: 618315 - DNA, 25 bp, Homo sapien
gggaaaaagccagttgcctctctaa

SEQ ID NO: 618316 - DNA, 25 bp, Homo sapien
ggaaaaagccagttgcctctctaag

SEQ ID NO: 618317 - DNA, 25 bp, Homo sapien
aaaaagccagttgcctctctaagct

SEQ ID NO: 618318 - DNA, 25 bp, Homo sapien
atgaggcgtcaatggtgtacatgga

SEQ ID NO: 618319 - DNA, 25 bp, Homo sapien
gtgaggggagcccaccgaacacacc

SEQ ID NO: 618320 - DNA, 25 bp, Homo sapien
gggtgatgaggcgtcaatggtgtac

SEQ ID NO: 618321 - DNA, 25 bp, Homo sapien
gggagcccaccgaacacacccgatc

SEQ ID NO: 618322 - DNA, 25 bp, Homo sapien
ccttcctggtaagatgctccccaag

SEQ ID NO: 618323 - DNA, 25 bp, Homo sapien
gaagaacaccttcctggtaagatgc

SEQ ID NO: 618324 - DNA, 25 bp, Homo sapien
tggtaagatgctccccaagatttgt

SEQ ID NO: 618325 - DNA, 25 bp, Homo sapien
gggcttagacgtgaagaacaccttc

SEQ ID NO: 618326 - DNA, 25 bp, Homo sapien
taggtaggataattaggcagtcgca

SEQ ID NO: 618327 - DNA, 25 bp, Homo sapien
gaagggaatccataatcatagtagg

SEQ ID NO: 618328 - DNA, 25 bp, Homo sapien
taattaggcagtcgcagaaaggaag

SEQ ID NO: 618329 - DNA, 25 bp, Homo sapien
ggaatccataatcatagtaggtagg

SEQ ID NO: 618330 - DNA, 25 bp, Homo sapien
tgagaattgatggagacctggatga

SEQ ID NO: 618331 - DNA, 25 bp, Homo sapien
gagacctggatgagcgggggtggtg

SEQ ID NO: 618332 - DNA, 25 bp, Homo sapien
agatcaactgagaattgatggagac

SEQ ID NO: 618333 - DNA, 25 bp, Homo sapien
caactgagaattgatggagacctgg

SEQ ID NO: 618334 - DNA, 25 bp, Homo sapien
gggtaattactgcaagactccaaat

SEQ ID NO: 618335 - DNA, 25 bp, Homo sapien
tcattatttaatctgctctcagact

SEQ ID NO: 618336 - DNA, 25 bp, Homo sapien
taggaagcagttgccggcggcctgc

SEQ ID NO: 618337 - DNA, 25 bp, Homo sapien
cctgcgcagaaggtaccgacgccat

SEQ ID NO: 618338 - DNA, 25 bp, Homo sapien
agcacatgactgacaagcctatggc

SEQ ID NO: 618339 - DNA, 25 bp, Homo sapien
tcaccaacccagttagcaatgctgg

SEQ ID NO: 618340 - DNA, 25 bp, Homo sapien
taaggcaaaggcttattaaccatgg

SEQ ID NO: 618341 - DNA, 25 bp, Homo sapien
gcctatggcattggattatctggga

SEQ ID NO: 618342 - DNA, 25 bp, Homo sapien
tgatccctccactagcagggctttg

SEQ ID NO: 618343 - DNA, 25 bp, Homo sapien
actcagaagtaacctggccatccca

SEQ ID NO: 618344 - DNA, 25 bp, Homo sapien
tttccaaatccacctttgtcagtct

SEQ ID NO: 618345 - DNA, 25 bp, Homo sapien
caactgagttaccagagaggaactg

SEQ ID NO: 618346 - DNA, 25 bp, Homo sapien
gcagccagagagtgttccgtaaaac

SEQ ID NO: 618347 - DNA, 25 bp, Homo sapien
acgcagccagagagtgttccgtaaa

SEQ ID NO: 618348 - DNA, 25 bp, Homo sapien
ggagagctttgtaacgcagccagag

SEQ ID NO: 618349 - DNA, 25 bp, Homo sapien
ctttgtaacgcagccagagagtgtt

SEQ ID NO: 618350 - DNA, 25 bp, Homo sapien
cacgaatgcaagtcgatggagatca

SEQ ID NO: 618351 - DNA, 25 bp, Homo sapien
caatgtcacacgaatgcaagtcgat

SEQ ID NO: 618352 - DNA, 25 bp, Homo sapien
tgtcacacgaatgcaagtcgatgga

SEQ ID NO: 618353 - DNA, 25 bp, Homo sapien
tcacagccaatgtcacacgaatgca

SEQ ID NO: 618354 - DNA, 25 bp, Homo sapien
ccttatgctatccaactccacagtg

SEQ ID NO: 618355 - DNA, 25 bp, Homo sapien
cctggttctttcacctttgggtctg

SEQ ID NO: 618356 - DNA, 25 bp, Homo sapien
tctgggcagatcatgggccatgcca

SEQ ID NO: 618357 - DNA, 25 bp, Homo sapien
acgacgcagacggatcctggttctt

SEQ ID NO: 618358 - DNA, 25 bp, Homo sapien
ccagatgcatccagacagtcatgtt

SEQ ID NO: 618359 - DNA, 25 bp, Homo sapien
taggaaggtctgtatcctggaaccc

SEQ ID NO: 618360 - DNA, 25 bp, Homo sapien
cttgggaagattctccagggtgcct

SEQ ID NO: 618361 - DNA, 25 bp, Homo sapien
ccctaagaacagctggtgagtcact

SEQ ID NO: 618362 - DNA, 25 bp, Homo sapien
gccccacagcccattagtgattgca

SEQ ID NO: 618363 - DNA, 25 bp, Homo sapien
cacagcccattagtgattgcagcac

SEQ ID NO: 618364 - DNA, 25 bp, Homo sapien
gcccattagtgattgcagcacagtg

SEQ ID NO: 618365 - DNA, 25 bp, Homo sapien
cagcccattagtgattgcagcacag

SEQ ID NO: 618366 - DNA, 25 bp, Homo sapien
gataccgaggtttatccaggggcat

SEQ ID NO: 618367 - DNA, 25 bp, Homo sapien
agataccgaggtttatccaggggca

SEQ ID NO: 618368 - DNA, 25 bp, Homo sapien
ggaggtgggaggcaaagcttttctg

SEQ ID NO: 618369 - DNA, 25 bp, Homo sapien
aggtgggaggcaaagcttttctgca

SEQ ID NO: 618370 - DNA, 25 bp, Homo sapien
gtgggaggcaaagcttttctgcagc

SEQ ID NO: 618371 - DNA, 25 bp, Homo sapien
cttcaggacatgagggtgagggagg

SEQ ID NO: 618372 - DNA, 25 bp, Homo sapien
aaatgttggagagccctcagatacg

SEQ ID NO: 618373 - DNA, 25 bp, Homo sapien
ctgtgtgctcaaatgagtgggccag

SEQ ID NO: 618374 - DNA, 25 bp, Homo sapien
ctcagatacgtgaccatcgggcagc

SEQ ID NO: 618375 - DNA, 25 bp, Homo sapien
tgggccagaatcactccctttctgt

SEQ ID NO: 618376 - DNA, 25 bp, Homo sapien
aagaatgtgaaaacgtggcctcatc

SEQ ID NO: 618377 - DNA, 25 bp, Homo sapien
caagaatgtgaaaacgtggcctcat

SEQ ID NO: 618378 - DNA, 25 bp, Homo sapien
agaatgtgaaaacgtggcctcatcc

SEQ ID NO: 618379 - DNA, 25 bp, Homo sapien
gaatgtgaaaacgtggcctcatccc

SEQ ID NO: 618380 - DNA, 25 bp, Homo sapien
ggcctgtgagctgctatctctgtgg

SEQ ID NO: 618381 - DNA, 25 bp, Homo sapien
atgatcacaagcgaccagcaaggcc

SEQ ID NO: 618382 - DNA, 25 bp, Homo sapien
gagtttatggacatgatcacaagcg

SEQ ID NO: 618383 - DNA, 25 bp, Homo sapien
cttcctctctcaaccaagacctggt

SEQ ID NO: 618384 - DNA, 25 bp, Homo sapien
gggagagagcaacaccacttgatga

SEQ ID NO: 618385 - DNA, 25 bp, Homo sapien
cctgttttccaagtctctcctaaca

SEQ ID NO: 618386 - DNA, 25 bp, Homo sapien
tttccaagtctctcctaacactgcc

SEQ ID NO: 618387 - DNA, 25 bp, Homo sapien
tgttttccaagtctctcctaacact

SEQ ID NO: 618388 - DNA, 25 bp, Homo sapien
gttttccaagtctctcctaacactg

SEQ ID NO: 618389 - DNA, 25 bp, Homo sapien
aggtgtaaaggtctctgggaaggtg

SEQ ID NO: 618390 - DNA, 25 bp, Homo sapien
caaggcagacgctgtggggcacata

SEQ ID NO: 618391 - DNA, 25 bp, Homo sapien
tggaccctcctctgatagccatcaa

SEQ ID NO: 618392 - DNA, 25 bp, Homo sapien
tgtggggcacatacgctacagccat

SEQ ID NO: 618393 - DNA, 25 bp, Homo sapien
cagggggacgacttggcctcaccac

SEQ ID NO: 618394 - DNA, 25 bp, Homo sapien
gctcgatgcagcagggggacgactt

SEQ ID NO: 618395 - DNA, 25 bp, Homo sapien
tgcagcagggggacgacttggcctc

SEQ ID NO: 618396 - DNA, 25 bp, Homo sapien
gacgacttggcctcaccaccctcag

SEQ ID NO: 618397 - DNA, 25 bp, Homo sapien
tgaaagtattagcttccagaacacg

SEQ ID NO: 618398 - DNA, 25 bp, Homo sapien
ccactggaagttcatgaggagcagg

SEQ ID NO: 618399 - DNA, 25 bp, Homo sapien
tgtgaccctgcaatcaagaagccct

SEQ ID NO: 618400 - DNA, 25 bp, Homo sapien
ctggaccgggtctgtgcaaaaacat

SEQ ID NO: 618401 - DNA, 25 bp, Homo sapien
tgaggatcaggagtgtgggccaccc

SEQ ID NO: 618402 - DNA, 25 bp, Homo sapien
gatcaggagtgtgggccacccactc

SEQ ID NO: 618403 - DNA, 25 bp, Homo sapien
aggatcaggagtgtgggccacccac

SEQ ID NO: 618404 - DNA, 25 bp, Homo sapien
atgaggatcaggagtgtgggccacc

SEQ ID NO: 618405 - DNA, 25 bp, Homo sapien
atggtggagccctctataccattct

SEQ ID NO: 618406 - DNA, 25 bp, Homo sapien
aatggtggagccctctataccattc

SEQ ID NO: 618407 - DNA, 25 bp, Homo sapien
ctgggcttaatgtgtgcctgatgaa

SEQ ID NO: 618408 - DNA, 25 bp, Homo sapien
ttaatgtgtgcctgatgaatggtgg

SEQ ID NO: 618409 - DNA, 25 bp, Homo sapien
cttctaaactctgtgaaaccgtgat

SEQ ID NO: 618410 - DNA, 25 bp, Homo sapien
caaaacagttagtgacacatgcaag

SEQ ID NO: 618411 - DNA, 25 bp, Homo sapien
ttcaaaacagttagtgacacatgca

SEQ ID NO: 618412 - DNA, 25 bp, Homo sapien
tctgtgaaaccgtgatttctgaaag

SEQ ID NO: 618413 - DNA, 25 bp, Homo sapien
caagccctctttgtctgaggctcag

SEQ ID NO: 618414 - DNA, 25 bp, Homo sapien
tcaagccctctttgtctgaggctca

SEQ ID NO: 618415 - DNA, 25 bp, Homo sapien
tgcttgctcatgaaccagtgactgg

SEQ ID NO: 618416 - DNA, 25 bp, Homo sapien
tggatgcctgtaaaccaatcagggc

SEQ ID NO: 618417 - DNA, 25 bp, Homo sapien
tagatgcaccctgattagaccttca

SEQ ID NO: 618418 - DNA, 25 bp, Homo sapien
agaaaaatgaactgcgtggatgcct

SEQ ID NO: 618419 - DNA, 25 bp, Homo sapien
ttaacgccaactgtgaccatctctc

SEQ ID NO: 618420 - DNA, 25 bp, Homo sapien
aacgccaactgtgaccatctctcag

SEQ ID NO: 618421 - DNA, 25 bp, Homo sapien
ggccagctgcatcccaggggcgaca

SEQ ID NO: 618422 - DNA, 25 bp, Homo sapien
gtgaccatctctcagcacagccatg

SEQ ID NO: 618423 - DNA, 25 bp, Homo sapien
gcctatgaataggtttgtcatctgg

SEQ ID NO: 618424 - DNA, 25 bp, Homo sapien
accaaagcccagttgggcctatgaa

SEQ ID NO: 618425 - DNA, 25 bp, Homo sapien
ctccctatgacttttgtataccaaa

SEQ ID NO: 618426 - DNA, 25 bp, Homo sapien
aggtttgtcatctggtattttgacc

SEQ ID NO: 618427 - DNA, 25 bp, Homo sapien
ctttccccaactttccaactctgct

SEQ ID NO: 618428 - DNA, 25 bp, Homo sapien
gctgaggacagagtctaccagcccc

SEQ ID NO: 618429 - DNA, 25 bp, Homo sapien
tgaggacagagtctaccagccccac

SEQ ID NO: 618430 - DNA, 25 bp, Homo sapien
tctgctgaggacagagtctaccagc

SEQ ID NO: 618431 - DNA, 25 bp, Homo sapien
cacggtacatggcagctggtccaga

SEQ ID NO: 618432 - DNA, 25 bp, Homo sapien
cctccatgggtcattctggaaggga

SEQ ID NO: 618433 - DNA, 25 bp, Homo sapien
tcctcggtgaggatgggcccatatc

SEQ ID NO: 618434 - DNA, 25 bp, Homo sapien
cactgaaggtctttagttctcctcc

SEQ ID NO: 618435 - DNA, 25 bp, Homo sapien
gctcagccagcttcggcaggcaggt

SEQ ID NO: 618436 - DNA, 25 bp, Homo sapien
ctcctctccaccttttaggctgagg

SEQ ID NO: 618437 - DNA, 25 bp, Homo sapien
ctctccaccttttaggctgagggtg

SEQ ID NO: 618438 - DNA, 25 bp, Homo sapien
ctcagccagcttcggcaggcaggtg

SEQ ID NO: 618439 - DNA, 25 bp, Homo sapien
cggtcccgactgtgatggcatttgg

SEQ ID NO: 618440 - DNA, 25 bp, Homo sapien
ttcctttggagatagcagccacttt

SEQ ID NO: 618441 - DNA, 25 bp, Homo sapien
aaccctgtgtcggtcccgactgtga

SEQ ID NO: 618442 - DNA, 25 bp, Homo sapien
atttggaagatgaaagcatcacggt

SEQ ID NO: 618443 - DNA, 25 bp, Homo sapien
tcaggattcaaagatgccggggaga

SEQ ID NO: 618444 - DNA, 25 bp, Homo sapien
agatggcatcaggattcaaagatgc

SEQ ID NO: 618445 - DNA, 25 bp, Homo sapien
tggcatcaggattcaaagatgccgg

SEQ ID NO: 618446 - DNA, 25 bp, Homo sapien
ggcatcaggattcaaagatgccggg

SEQ ID NO: 618447 - DNA, 25 bp, Homo sapien
tttaccgacatccctgatcatgaga

SEQ ID NO: 618448 - DNA, 25 bp, Homo sapien
taccgacatccctgatcatgagatt

SEQ ID NO: 618449 - DNA, 25 bp, Homo sapien
ttaccgacatccctgatcatgagat

SEQ ID NO: 618450 - DNA, 25 bp, Homo sapien
tcctgactcaactgcactgagagac

SEQ ID NO: 618451 - DNA, 25 bp, Homo sapien
gggtcctcctgactcaactgcactg

SEQ ID NO: 618452 - DNA, 25 bp, Homo sapien
cacggtcatggaagtgacctcctgg

SEQ ID NO: 618453 - DNA, 25 bp, Homo sapien
cactgagagacaatgtccacggtca

SEQ ID NO: 618454 - DNA, 25 bp, Homo sapien
agctgcttccccttcgggggctcca

SEQ ID NO: 618455 - DNA, 25 bp, Homo sapien
ccctttttctggctcgcattgtggg

SEQ ID NO: 618456 - DNA, 25 bp, Homo sapien
tttctggctcgcattgtgggttgct

SEQ ID NO: 618457 - DNA, 25 bp, Homo sapien
agatggggatttcggagctgcttcc

SEQ ID NO: 618458 - DNA, 25 bp, Homo sapien
ttgtttctttgccacagatccacaa

SEQ ID NO: 618459 - DNA, 25 bp, Homo sapien
tccacaaaacagaatccaagcttac

SEQ ID NO: 618460 - DNA, 25 bp, Homo sapien
atccacaaaacagaatccaagctta

SEQ ID NO: 618461 - DNA, 25 bp, Homo sapien
acaatattctgttgtttctttgcca

SEQ ID NO: 618462 - DNA, 25 bp, Homo sapien
catttgggagcacgctgataagtga

SEQ ID NO: 618463 - DNA, 25 bp, Homo sapien
cactgcatttgggagcacgctgata

SEQ ID NO: 618464 - DNA, 25 bp, Homo sapien
gtcactgcatttgggagcacgctga

SEQ ID NO: 618465 - DNA, 25 bp, Homo sapien
tgcatttgggagcacgctgataagt

SEQ ID NO: 618466 - DNA, 25 bp, Homo sapien
cctgagcaccgtggcctgaggtttc

SEQ ID NO: 618467 - DNA, 25 bp, Homo sapien
tgtgcacttgggacagggctctaat

SEQ ID NO: 618468 - DNA, 25 bp, Homo sapien
catgccccgctgtgagatatgttag

SEQ ID NO: 618469 - DNA, 25 bp, Homo sapien
tgctgggtgcttgatcccttggcct

SEQ ID NO: 618470 - DNA, 25 bp, Homo sapien
ccgcctctgccgtcattcctccact

SEQ ID NO: 618471 - DNA, 25 bp, Homo sapien
agcatcattcagctgtcgtgtgtgc

SEQ ID NO: 618472 - DNA, 25 bp, Homo sapien
attcagctgtcgtgtgtgccctccc

SEQ ID NO: 618473 - DNA, 25 bp, Homo sapien
ggccacatgctctcagcagcatcat

SEQ ID NO: 618474 - DNA, 25 bp, Homo sapien
gagttctctgctgcgctgccaaccg

SEQ ID NO: 618475 - DNA, 25 bp, Homo sapien
gcctgagttctctgctgcgctgcca

SEQ ID NO: 618476 - DNA, 25 bp, Homo sapien
gccagacacaaggcccaagtccatg

SEQ ID NO: 618477 - DNA, 25 bp, Homo sapien
caagtccatggggtccctattcctc

SEQ ID NO: 618478 - DNA, 25 bp, Homo sapien
tgtaattgaccaagaggagctggca

SEQ ID NO: 618479 - DNA, 25 bp, Homo sapien
agctgctctgaaagggaaatctggg

SEQ ID NO: 618480 - DNA, 25 bp, Homo sapien
ggaatgacatttatcaatgtaattg

SEQ ID NO: 618481 - DNA, 25 bp, Homo sapien
ggcatttccacgactacctctgctg

SEQ ID NO: 618482 - DNA, 25 bp, Homo sapien
accactctctgcaaatcagtgagcc

SEQ ID NO: 618483 - DNA, 25 bp, Homo sapien
ccactctctgcaaatcagtgagccc

SEQ ID NO: 618484 - DNA, 25 bp, Homo sapien
gtcatggggagcaatgatggatatc

SEQ ID NO: 618485 - DNA, 25 bp, Homo sapien
tggctccacatgcaaacggatgcag

SEQ ID NO: 618486 - DNA, 25 bp, Homo sapien
agagtccactctgatggcttttccc

SEQ ID NO: 618487 - DNA, 25 bp, Homo sapien
agaacctggctccacatgcaaacgg

SEQ ID NO: 618488 - DNA, 25 bp, Homo sapien
ttctgcttctacctggccttgtctc

SEQ ID NO: 618489 - DNA, 25 bp, Homo sapien
aaggttctgttagcaccggccctca

SEQ ID NO: 618490 - DNA, 25 bp, Homo sapien
tgctggaaggttctgttagcaccgg

SEQ ID NO: 618491 - DNA, 25 bp, Homo sapien
tcaggcgtgggcactagaaggtgct

SEQ ID NO: 618492 - DNA, 25 bp, Homo sapien
cggctaccccttgccctagctccct

SEQ ID NO: 618493 - DNA, 25 bp, Homo sapien
gcctgaaggtccctgtcccgcttcc

SEQ ID NO: 618494 - DNA, 25 bp, Homo sapien
gaaggtaagtcagaaggggattcca

SEQ ID NO: 618495 - DNA, 25 bp, Homo sapien
aaggggattccatcccttgcctgaa

SEQ ID NO: 618496 - DNA, 25 bp, Homo sapien
agaggtcttcacttgcaaccaggaa

SEQ ID NO: 618497 - DNA, 25 bp, Homo sapien
ccacgatgtcttctggggacctggg

SEQ ID NO: 618498 - DNA, 25 bp, Homo sapien
gacttgggctttttagtgcccagag

SEQ ID NO: 618499 - DNA, 25 bp, Homo sapien
acattgccaggcctagacttgggct

SEQ ID NO: 618500 - DNA, 25 bp, Homo sapien
cctctgttggcaactctatttccag

SEQ ID NO: 618501 - DNA, 25 bp, Homo sapien
catgactcacggtgagaaccacagg

SEQ ID NO: 618502 - DNA, 25 bp, Homo sapien
ccgagatagcgaggacggcacagca

SEQ ID NO: 618503 - DNA, 25 bp, Homo sapien
aaccacagggatggaatccaggggc

SEQ ID NO: 618504 - DNA, 25 bp, Homo sapien
gatctccggttccccgagatagcga

SEQ ID NO: 618505 - DNA, 25 bp, Homo sapien
taggctgtagctcaacgaactcggc

SEQ ID NO: 618506 - DNA, 25 bp, Homo sapien
taaagccacaaatcccgaggcgatc

SEQ ID NO: 618507 - DNA, 25 bp, Homo sapien
gagttaagagaagtaggacatgtcc

SEQ ID NO: 618508 - DNA, 25 bp, Homo sapien
tcctctccggagacttttaaagcca

SEQ ID NO: 618509 - DNA, 25 bp, Homo sapien
catgaggctctgatccctgggggct

SEQ ID NO: 618510 - DNA, 25 bp, Homo sapien
gggggctctgatctctggaccaaaa

SEQ ID NO: 618511 - DNA, 25 bp, Homo sapien
cttgcccccaacagggattctgtgg

SEQ ID NO: 618512 - DNA, 25 bp, Homo sapien
gattctgtggcccttagagggtgca

SEQ ID NO: 618513 - DNA, 25 bp, Homo sapien
gggatgtttgaggagacacaagctt

SEQ ID NO: 618514 - DNA, 25 bp, Homo sapien
gagacacaagctttctcctgcaatt

SEQ ID NO: 618515 - DNA, 25 bp, Homo sapien
taacaagtcccttgactacaacctg

SEQ ID NO: 618516 - DNA, 25 bp, Homo sapien
ttgactacaacctgtatggtccggg

SEQ ID NO: 618517 - DNA, 25 bp, Homo sapien
cattcatggtcaactgggctaagcc

SEQ ID NO: 618518 - DNA, 25 bp, Homo sapien
agggtcccaaagcattcatggtcaa

SEQ ID NO: 618519 - DNA, 25 bp, Homo sapien
caaagcattcatggtcaactgggct

SEQ ID NO: 618520 - DNA, 25 bp, Homo sapien
tcatggtcaactgggctaagccagc

SEQ ID NO: 618521 - DNA, 25 bp, Homo sapien
tgtgagtgccttgacttacagccaa

SEQ ID NO: 618522 - DNA, 25 bp, Homo sapien
tacgtttcgtggaaccaaagcagcc

SEQ ID NO: 618523 - DNA, 25 bp, Homo sapien
ggctcgaggctagggcattacgttt

SEQ ID NO: 618524 - DNA, 25 bp, Homo sapien
aaccttgggtctcctaggctcgagg

SEQ ID NO: 618525 - DNA, 25 bp, Homo sapien
caaggtgctcggtgacccagcgcat

SEQ ID NO: 618526 - DNA, 25 bp, Homo sapien
ggaggcaaggtgctcggtgacccag

SEQ ID NO: 618527 - DNA, 25 bp, Homo sapien
acttgtttcccggaggcaaggtgct

SEQ ID NO: 618528 - DNA, 25 bp, Homo sapien
ttgtttcccggaggcaaggtgctcg

SEQ ID NO: 618529 - DNA, 25 bp, Homo sapien
tgttagtcacctctctagaagatgg

SEQ ID NO: 618530 - DNA, 25 bp, Homo sapien
ccagtcttgggcagaggctgtcaca

SEQ ID NO: 618531 - DNA, 25 bp, Homo sapien
ccctgagcctggatctggtcactga

SEQ ID NO: 618532 - DNA, 25 bp, Homo sapien
tgtttacatccagtagccaagacgc

SEQ ID NO: 618533 - DNA, 25 bp, Homo sapien
ggtggagaatctcaagcatgtgcat

SEQ ID NO: 618534 - DNA, 25 bp, Homo sapien
gcagctgtacaacctggatgctttg

SEQ ID NO: 618535 - DNA, 25 bp, Homo sapien
caaggttccggcttgctttcttcct

SEQ ID NO: 618536 - DNA, 25 bp, Homo sapien
agccagagtgcttttccgtaaagcg

SEQ ID NO: 618537 - DNA, 25 bp, Homo sapien
cgcagtcctgctaacacaatttcca

SEQ ID NO: 618538 - DNA, 25 bp, Homo sapien
ggcgagctgttctttaacccctgca

SEQ ID NO: 618539 - DNA, 25 bp, Homo sapien
agcacgcagtcctgctaacacaatt

SEQ ID NO: 618540 - DNA, 25 bp, Homo sapien
ggcacctagccctggagctgtcttg

SEQ ID NO: 618541 - DNA, 25 bp, Homo sapien
ggttccctgctaggaactccacaca

SEQ ID NO: 618542 - DNA, 25 bp, Homo sapien
tgaccaaactttcctgagctggcac

SEQ ID NO: 618543 - DNA, 25 bp, Homo sapien
aaggtagcttgcttcctgatgccag

SEQ ID NO: 618544 - DNA, 25 bp, Homo sapien
gagaggggtgaccaaactttcctga

SEQ ID NO: 618545 - DNA, 25 bp, Homo sapien
caaatgtgggacctgtggaccctgc

SEQ ID NO: 618546 - DNA, 25 bp, Homo sapien
gaactttctccttgttggcagtcag

SEQ ID NO: 618547 - DNA, 25 bp, Homo sapien
tggtactcgagtctgcaaatgtggg

SEQ ID NO: 618548 - DNA, 25 bp, Homo sapien
gaacaagtgccgacatttcagaaag

SEQ ID NO: 618549 - DNA, 25 bp, Homo sapien
gagcctggccgctaagaagacctta

SEQ ID NO: 618550 - DNA, 25 bp, Homo sapien
ccttatcgtgcaggtttcaggaggc

SEQ ID NO: 618551 - DNA, 25 bp, Homo sapien
gattccctccactcaaggtttcagc

SEQ ID NO: 618552 - DNA, 25 bp, Homo sapien
cctacctaagaagccactgaggaag

SEQ ID NO: 618553 - DNA, 25 bp, Homo sapien
gctggcctgcgtggaaaaatgcagc

SEQ ID NO: 618554 - DNA, 25 bp, Homo sapien
gatgaggccccattaacttgcatgc

SEQ ID NO: 618555 - DNA, 25 bp, Homo sapien
aaaatgcagcaacgtctttggagcc

SEQ ID NO: 618556 - DNA, 25 bp, Homo sapien
taaatgaggctctccatccgtggtg

SEQ ID NO: 618557 - DNA, 25 bp, Homo sapien
cctccactcctgaagtggacactcc

SEQ ID NO: 618558 - DNA, 25 bp, Homo sapien
taagggctagacccctccactcctg

SEQ ID NO: 618559 - DNA, 25 bp, Homo sapien
agggctagacccctccactcctgaa

SEQ ID NO: 618560 - DNA, 25 bp, Homo sapien
ccactcctgaagtggacactcctgg

SEQ ID NO: 618561 - DNA, 25 bp, Homo sapien
gtataagaaaacttgacaggctgaa

SEQ ID NO: 618562 - DNA, 25 bp, Homo sapien
tgctctgcaggtcgccggcccaaag

SEQ ID NO: 618563 - DNA, 25 bp, Homo sapien
gcccctctcagcaggatgtgaaaat

SEQ ID NO: 618564 - DNA, 25 bp, Homo sapien
ggtcgccggcccaaagctgtctgcg

SEQ ID NO: 618565 - DNA, 25 bp, Homo sapien
tctgcgcacactagggcgcagtgag

SEQ ID NO: 618566 - DNA, 25 bp, Homo sapien
tctcgtaagccccaaggtcttgctc

SEQ ID NO: 618567 - DNA, 25 bp, Homo sapien
ggtcttgctcataaaatggctggtg

SEQ ID NO: 618568 - DNA, 25 bp, Homo sapien
ggcacgtggtgtggcatctttctcg

SEQ ID NO: 618569 - DNA, 25 bp, Homo sapien
tccaggagctcaactcgaagcaggt

SEQ ID NO: 618570 - DNA, 25 bp, Homo sapien
tatctttagaggtgtgctggcccag

SEQ ID NO: 618571 - DNA, 25 bp, Homo sapien
ttctctggcatgaagcttggtgact

SEQ ID NO: 618572 - DNA, 25 bp, Homo sapien
aggtggtggccaactactcagggac

SEQ ID NO: 618573 - DNA, 25 bp, Homo sapien
tagtagcaggagactagaaacaggc

SEQ ID NO: 618574 - DNA, 25 bp, Homo sapien
tgtgagaagtgattctgagtccacg

SEQ ID NO: 618575 - DNA, 25 bp, Homo sapien
gggagtgtgtttgccagactgacaa

SEQ ID NO: 618576 - DNA, 25 bp, Homo sapien
tcatctgatgagactccaggaaact

SEQ ID NO: 618577 - DNA, 25 bp, Homo sapien
ttgtaacaatgctaatgatccctcc

SEQ ID NO: 618578 - DNA, 25 bp, Homo sapien
ctgctcagggggcgtgttgctgagc

SEQ ID NO: 618579 - DNA, 25 bp, Homo sapien
tggctgcctcgggaactgctcaggg

SEQ ID NO: 618580 - DNA, 25 bp, Homo sapien
tggatgccgcctcctttagcattca

SEQ ID NO: 618581 - DNA, 25 bp, Homo sapien
gctcagggggcgtgttgctgagcat

SEQ ID NO: 618582 - DNA, 25 bp, Homo sapien
ttcagcacttggaaaaggagcggcc

SEQ ID NO: 618583 - DNA, 25 bp, Homo sapien
cctgcatggcagctactgggagtca

SEQ ID NO: 618584 - DNA, 25 bp, Homo sapien
gcctttgaaatgttccgcagccggt

SEQ ID NO: 618585 - DNA, 25 bp, Homo sapien
gatgacgtggaggacgcctttgaaa

SEQ ID NO: 618586 - DNA, 25 bp, Homo sapien
tgcaaagcaagtgtttccaaaggaa

SEQ ID NO: 618587 - DNA, 25 bp, Homo sapien
agctacgttccagccgactccagac

SEQ ID NO: 618588 - DNA, 25 bp, Homo sapien
gcatttggaggtcagaagccaccaa

SEQ ID NO: 618589 - DNA, 25 bp, Homo sapien
aaggaatgtgcacttgcatttggag

SEQ ID NO: 618590 - DNA, 25 bp, Homo sapien
gacttgtttgtccagaaccgagtgc

SEQ ID NO: 618591 - DNA, 25 bp, Homo sapien
gaaagtacaggtcaggccagattcc

SEQ ID NO: 618592 - DNA, 25 bp, Homo sapien
tcaagaaagacaacggatgtgggct

SEQ ID NO: 618593 - DNA, 25 bp, Homo sapien
gaaagaagatggacccttggctcat

SEQ ID NO: 618594 - DNA, 25 bp, Homo sapien
tggattatacggaacttctggtcaa

SEQ ID NO: 618595 - DNA, 25 bp, Homo sapien
gattcccacaaaggatcccgtaata

SEQ ID NO: 618596 - DNA, 25 bp, Homo sapien
caatggcactgggaatgctgtctgg

SEQ ID NO: 618597 - DNA, 25 bp, Homo sapien
cagcccagagcggtagaagcatact

SEQ ID NO: 618598 - DNA, 25 bp, Homo sapien
ttcccatctccatggacatttggcc

SEQ ID NO: 618599 - DNA, 25 bp, Homo sapien
catctccatggacatttggccagca

SEQ ID NO: 618600 - DNA, 25 bp, Homo sapien
ccgttcccatctccatggacatttg

SEQ ID NO: 618601 - DNA, 25 bp, Homo sapien
ccatggacatttggccagcaagggc

SEQ ID NO: 618602 - DNA, 25 bp, Homo sapien
gccggtgtgggcgtataacagctct

SEQ ID NO: 618603 - DNA, 25 bp, Homo sapien
tgctgtcacctctgttcggaacagg

SEQ ID NO: 618604 - DNA, 25 bp, Homo sapien
aacagctctttgtcatgggagaggc

SEQ ID NO: 618605 - DNA, 25 bp, Homo sapien
caaggctctgtgacacaatggtcgc

SEQ ID NO: 618606 - DNA, 25 bp, Homo sapien
ttcaccatcttggggttctttttca

SEQ ID NO: 618607 - DNA, 25 bp, Homo sapien
gcatttcctcagccctagcttttgc

SEQ ID NO: 618608 - DNA, 25 bp, Homo sapien
catcttggggttctttttcagctgt

SEQ ID NO: 618609 - DNA, 25 bp, Homo sapien
atttcctcagccctagcttttgcct

SEQ ID NO: 618610 - DNA, 25 bp, Homo sapien
tttgtttaaccagaagccgcctaga

SEQ ID NO: 618611 - DNA, 25 bp, Homo sapien
ctttggtaaagcaggccggtgcacg

SEQ ID NO: 618612 - DNA, 25 bp, Homo sapien
tgtttaaccagaagccgcctagaca

SEQ ID NO: 618613 - DNA, 25 bp, Homo sapien
cacgtatccatgtgccatttgtacc

SEQ ID NO: 618614 - DNA, 25 bp, Homo sapien
gactctttgtacatggcagtttctt

SEQ ID NO: 618615 - DNA, 25 bp, Homo sapien
tctgagcagttgaatcatctgactc

SEQ ID NO: 618616 - DNA, 25 bp, Homo sapien
tcatctgactctttgtacatggcag

SEQ ID NO: 618617 - DNA, 25 bp, Homo sapien
gttgaatcatctgactctttgtaca

SEQ ID NO: 618618 - DNA, 25 bp, Homo sapien
ctgctgtactttgaatgccagtcct

SEQ ID NO: 618619 - DNA, 25 bp, Homo sapien
cctgtgctctgcaaaccatggttcc

SEQ ID NO: 618620 - DNA, 25 bp, Homo sapien
tgatgatctactggctttggagatg

SEQ ID NO: 618621 - DNA, 25 bp, Homo sapien
ccttgatgatctactggctttggag

SEQ ID NO: 618622 - DNA, 25 bp, Homo sapien
ggtgtgagttagagtccccttcaga

SEQ ID NO: 618623 - DNA, 25 bp, Homo sapien
gggaaaaatgggagtccgctctgat

SEQ ID NO: 618624 - DNA, 25 bp, Homo sapien
tgaggtgtgagttagagtccccttc

SEQ ID NO: 618625 - DNA, 25 bp, Homo sapien
ggagtccgctctgatccacaggttt

SEQ ID NO: 618626 - DNA, 25 bp, Homo sapien
cacgtggactcgttctcacgtgcat

SEQ ID NO: 618627 - DNA, 25 bp, Homo sapien
cgtggactcgttctcacgtgcatct

SEQ ID NO: 618628 - DNA, 25 bp, Homo sapien
tccacgtggactcgttctcacgtgc

SEQ ID NO: 618629 - DNA, 25 bp, Homo sapien
tggactcgttctcacgtgcatcttc

SEQ ID NO: 618630 - DNA, 25 bp, Homo sapien
gctggcgtaggcggctccttggtgg

SEQ ID NO: 618631 - DNA, 25 bp, Homo sapien
tcaagaacagcggttgagaggttgt

SEQ ID NO: 618632 - DNA, 25 bp, Homo sapien
aggctttggtgagccccgctgtgtc

SEQ ID NO: 618633 - DNA, 25 bp, Homo sapien
ggtgatggatgtgctggcgtaggcg

SEQ ID NO: 618634 - DNA, 25 bp, Homo sapien
catcccgccagagatagtctgtgtt

SEQ ID NO: 618635 - DNA, 25 bp, Homo sapien
cattggttctctggacatcccgcca

SEQ ID NO: 618636 - DNA, 25 bp, Homo sapien
tgtgcttgaggttgtattcgtggtc

SEQ ID NO: 618637 - DNA, 25 bp, Homo sapien
cgtggtctttgttgccgtcattatc

SEQ ID NO: 618638 - DNA, 25 bp, Homo sapien
tggcatctacagaaggttccattgg

SEQ ID NO: 618639 - DNA, 25 bp, Homo sapien
ggcatctacagaaggttccattgga

SEQ ID NO: 618640 - DNA, 25 bp, Homo sapien
atctacagaaggttccattggacct

SEQ ID NO: 618641 - DNA, 25 bp, Homo sapien
catctacagaaggttccattggacc

SEQ ID NO: 618642 - DNA, 25 bp, Homo sapien
acttggtggagctcctgcagacctg

SEQ ID NO: 618643 - DNA, 25 bp, Homo sapien
tgttagttcgacatggacacaggga

SEQ ID NO: 618644 - DNA, 25 bp, Homo sapien
tttagtagaaccctgctgtcttacg

SEQ ID NO: 618645 - DNA, 25 bp, Homo sapien
ggccaaacataatatgcctgcagga

SEQ ID NO: 618646 - DNA, 25 bp, Homo sapien
tggcctttgcctgtgctatcgctcc

SEQ ID NO: 618647 - DNA, 25 bp, Homo sapien
gcttgagtgaggcttcctatctggg

SEQ ID NO: 618648 - DNA, 25 bp, Homo sapien
ggctccagcaaaattgctgcttcca

SEQ ID NO: 618649 - DNA, 25 bp, Homo sapien
gctcctcctcaacgggcactgttgg

SEQ ID NO: 618650 - DNA, 25 bp, Homo sapien
tgggcacttgtgttctgactccggg

SEQ ID NO: 618651 - DNA, 25 bp, Homo sapien
gccagttgagagtcccgtgggcact

SEQ ID NO: 618652 - DNA, 25 bp, Homo sapien
tcctctgagagcattcgggggccag

SEQ ID NO: 618653 - DNA, 25 bp, Homo sapien
tgagagtcccgtgggcacttgtgtt

SEQ ID NO: 618654 - DNA, 25 bp, Homo sapien
gtctccttgtcatctgagtccctaa

SEQ ID NO: 618655 - DNA, 25 bp, Homo sapien
ctgagtttctgttccgtgcatgtgt

SEQ ID NO: 618656 - DNA, 25 bp, Homo sapien
ttccgtgcatgtgttgtgcttagga

SEQ ID NO: 618657 - DNA, 25 bp, Homo sapien
tgtgttgtgcttaggaagagctgaa

SEQ ID NO: 618658 - DNA, 25 bp, Homo sapien
tcagggtgtccttttcggtctagac

SEQ ID NO: 618659 - DNA, 25 bp, Homo sapien
tgtggacggaattctcctagccagt

SEQ ID NO: 618660 - DNA, 25 bp, Homo sapien
tgctccatggatccacctcagaggg

SEQ ID NO: 618661 - DNA, 25 bp, Homo sapien
cggctatgctttgcgctctcaagga

SEQ ID NO: 618662 - DNA, 25 bp, Homo sapien
gatacgatgggtctctgttcagccc

SEQ ID NO: 618663 - DNA, 25 bp, Homo sapien
cagaggtgccttttccttcgacagt

SEQ ID NO: 618664 - DNA, 25 bp, Homo sapien
cacttgggtcagatttcgaaggcga

SEQ ID NO: 618665 - DNA, 25 bp, Homo sapien
gcagtcatgaactgcgggagcccag

SEQ ID NO: 618666 - DNA, 25 bp, Homo sapien
taaattctcgatgctgtgatgacac

SEQ ID NO: 618667 - DNA, 25 bp, Homo sapien
tactttcattgtttgccagcgtggc

SEQ ID NO: 618668 - DNA, 25 bp, Homo sapien
tgcaaattttcaccaggacagcgtt

SEQ ID NO: 618669 - DNA, 25 bp, Homo sapien
caagggcgcatcttaaagttggagc

SEQ ID NO: 618670 - DNA, 25 bp, Homo sapien
tctgcctggcgctacttctgtgtgc

SEQ ID NO: 618671 - DNA, 25 bp, Homo sapien
aatgactttacgttgcaggtactgg

SEQ ID NO: 618672 - DNA, 25 bp, Homo sapien
gatgcctactaactcctgctcttgg

SEQ ID NO: 618673 - DNA, 25 bp, Homo sapien
tcagatagtcccttgcctttggagc

SEQ ID NO: 618674 - DNA, 25 bp, Homo sapien
tagaaagctcttggtgtcggtttgg

SEQ ID NO: 618675 - DNA, 25 bp, Homo sapien
cagcatccatagtgtgtgagttaac

SEQ ID NO: 618676 - DNA, 25 bp, Homo sapien
gaaatgctcagtatcgtctccagcc

SEQ ID NO: 618677 - DNA, 25 bp, Homo sapien
ggattcctgggatcgtaaccagtaa

SEQ ID NO: 618678 - DNA, 25 bp, Homo sapien
tttttgagacacagggcaaagccac

SEQ ID NO: 618679 - DNA, 25 bp, Homo sapien
aacatgtttacctcagtggcctcca

SEQ ID NO: 618680 - DNA, 25 bp, Homo sapien
cccagactgtggaggcgttgtaaga

SEQ ID NO: 618681 - DNA, 25 bp, Homo sapien
ttcccaatggactgtgagccacgag

SEQ ID NO: 618682 - DNA, 25 bp, Homo sapien
tgtgccctggtcatctcgggagact

SEQ ID NO: 618683 - DNA, 25 bp, Homo sapien
tgcagagtcaaccaataggattcca

SEQ ID NO: 618684 - DNA, 25 bp, Homo sapien
gctgaacgccttccgcaggaagcat

SEQ ID NO: 618685 - DNA, 25 bp, Homo sapien
tatcatgtccggagagcaatgcctc

SEQ ID NO: 618686 - DNA, 25 bp, Homo sapien
gagtagtgtgacgaatttcatgcca

SEQ ID NO: 618687 - DNA, 25 bp, Homo sapien
taaaacagcaatatggtaatcccca

SEQ ID NO: 618688 - DNA, 25 bp, Homo sapien
tgtggtattgccgtgcttgcgttca

SEQ ID NO: 618689 - DNA, 25 bp, Homo sapien
ttgctagtcactcaggaaccctcag

SEQ ID NO: 618690 - DNA, 25 bp, Homo sapien
tctccttgatcatttaccgtgtagc

SEQ ID NO: 618691 - DNA, 25 bp, Homo sapien
tagtagaaatggtaatagccactag

SEQ ID NO: 618692 - DNA, 25 bp, Homo sapien
tgacaggaatgacaagtaacattta

SEQ ID NO: 618693 - DNA, 25 bp, Homo sapien
gctttagtgccatgggcagctctgg

SEQ ID NO: 618694 - DNA, 25 bp, Homo sapien
gaccccagagcttattatggaagaa

SEQ ID NO: 618695 - DNA, 25 bp, Homo sapien
gaactctgagctttttgaccccaga

SEQ ID NO: 618696 - DNA, 25 bp, Homo sapien
tattttctcttgtggtcgctggcca

SEQ ID NO: 618697 - DNA, 25 bp, Homo sapien
caagcttgcgaagtctgcgtttctc

SEQ ID NO: 618698 - DNA, 25 bp, Homo sapien
tagggtggcagctgtcattgcctgc

SEQ ID NO: 618699 - DNA, 25 bp, Homo sapien
taactccttgcagttgttccctagg

SEQ ID NO: 618700 - DNA, 25 bp, Homo sapien
ggaccttgcctatagcacctattga

SEQ ID NO: 618701 - DNA, 25 bp, Homo sapien
gataccagcagatgtgtcatgatgg

SEQ ID NO: 618702 - DNA, 25 bp, Homo sapien
cagtagcaatcagctccaatgcaga

SEQ ID NO: 618703 - DNA, 25 bp, Homo sapien
gcagcagtagcaatcagctccaatg

SEQ ID NO: 618704 - DNA, 25 bp, Homo sapien
gaagcagcagtagcaatcagctcca

SEQ ID NO: 618705 - DNA, 25 bp, Homo sapien
gcagtagcaatcagctccaatgcag

SEQ ID NO: 618706 - DNA, 25 bp, Homo sapien
tgatgttggcaccaatgagctgtcc

SEQ ID NO: 618707 - DNA, 25 bp, Homo sapien
tcgttctgccgacagctggtgtgct

SEQ ID NO: 618708 - DNA, 25 bp, Homo sapien
cctttgcctcgtgggagggtgacct

SEQ ID NO: 618709 - DNA, 25 bp, Homo sapien
ccaggttatatcgagctctgagaca

SEQ ID NO: 618710 - DNA, 25 bp, Homo sapien
tgtggttgtatgtggacttggacat

SEQ ID NO: 618711 - DNA, 25 bp, Homo sapien
gtgtggttgtatgtggacttggaca

SEQ ID NO: 618712 - DNA, 25 bp, Homo sapien
catgagcatgcgtcccaagtttgga

SEQ ID NO: 618713 - DNA, 25 bp, Homo sapien
tcgatgaattttgctgccgacaccc

SEQ ID NO: 618714 - DNA, 25 bp, Homo sapien
catgtttgcagatggagatctctac

SEQ ID NO: 618715 - DNA, 25 bp, Homo sapien
caagggtcttgatagcctcggcgtg

SEQ ID NO: 618716 - DNA, 25 bp, Homo sapien
aacaccaacgtgacagctgccacaa

SEQ ID NO: 618717 - DNA, 25 bp, Homo sapien
agcagcacccacaacaccaacgtga

SEQ ID NO: 618718 - DNA, 25 bp, Homo sapien
tcatggcagtgtcagacggtccagt

SEQ ID NO: 618719 - DNA, 25 bp, Homo sapien
cagtgtcagacggtccagtttcagt

SEQ ID NO: 618720 - DNA, 25 bp, Homo sapien
ggtacaaatccattgcacagggggt

SEQ ID NO: 618721 - DNA, 25 bp, Homo sapien
ttccctggagtgtatatgtctctac

SEQ ID NO: 618722 - DNA, 25 bp, Homo sapien
tattgccgctgtgaacatcctcgtg

SEQ ID NO: 618723 - DNA, 25 bp, Homo sapien
gggtgttgccctgtctattgccgct

SEQ ID NO: 618724 - DNA, 25 bp, Homo sapien
aggaggtccctgtagtccagtccgc

SEQ ID NO: 618725 - DNA, 25 bp, Homo sapien
tcttgcatgcaataagttggaaaaa

SEQ ID NO: 618726 - DNA, 25 bp, Homo sapien
tccgcaaggagatgggggcaccctt

SEQ ID NO: 618727 - DNA, 25 bp, Homo sapien
aaaaggaggcaaggcatggaaccgg

SEQ ID NO: 618728 - DNA, 25 bp, Homo sapien
acagtggagcttggcagcggcccat

SEQ ID NO: 618729 - DNA, 25 bp, Homo sapien
cccctgggatgagaacagtggagct

SEQ ID NO: 618730 - DNA, 25 bp, Homo sapien
caacagctctttgcccccctgggat

SEQ ID NO: 618731 - DNA, 25 bp, Homo sapien
gctggaggagagagttgcaccaaca

SEQ ID NO: 618732 - DNA, 25 bp, Homo sapien
gcagaccctgggaacggattgtcgt

SEQ ID NO: 618733 - DNA, 25 bp, Homo sapien
agaccctgggaacggattgtcgtgc

SEQ ID NO: 618734 - DNA, 25 bp, Homo sapien
acggattgtcgtgctcctctttcca

SEQ ID NO: 618735 - DNA, 25 bp, Homo sapien
gggaacggattgtcgtgctcctctt

SEQ ID NO: 618736 - DNA, 25 bp, Homo sapien
gggctctcgtatcgcctgccataga

SEQ ID NO: 618737 - DNA, 25 bp, Homo sapien
gacgggttggtattttgcgcctcgc

SEQ ID NO: 618738 - DNA, 25 bp, Homo sapien
gcttggagcattactcgggagccca

SEQ ID NO: 618739 - DNA, 25 bp, Homo sapien
tgtcacaccgagctctgcgcttgga

SEQ ID NO: 618740 - DNA, 25 bp, Homo sapien
ggagccccgagagtgccaatgtttt

SEQ ID NO: 618741 - DNA, 25 bp, Homo sapien
gaggccctcaaatggacttacgtta

SEQ ID NO: 618742 - DNA, 25 bp, Homo sapien
tagaaccttaagtaggaggccctca

SEQ ID NO: 618743 - DNA, 25 bp, Homo sapien
taaatacagttcagttggagccccg

SEQ ID NO: 618744 - DNA, 25 bp, Homo sapien
tgtcagagctccctcaagatgcatt

SEQ ID NO: 618745 - DNA, 25 bp, Homo sapien
tccagtgtaagatctgtggccgagc

SEQ ID NO: 618746 - DNA, 25 bp, Homo sapien
catccattaagacgcagcattcgtg

SEQ ID NO: 618747 - DNA, 25 bp, Homo sapien
catttgccaccgagtcttaagctgt

SEQ ID NO: 618748 - DNA, 25 bp, Homo sapien
gaaccgagtctttctttagacagca

SEQ ID NO: 618749 - DNA, 25 bp, Homo sapien
ctgtagggctacctcagaatctttc

SEQ ID NO: 618750 - DNA, 25 bp, Homo sapien
taatcccaaggacctcacgggtggc

SEQ ID NO: 618751 - DNA, 25 bp, Homo sapien
tcacgggtggctccttgcccggtga

SEQ ID NO: 618752 - DNA, 25 bp, Homo sapien
gggccgacactctgaagaccttggg

SEQ ID NO: 618753 - DNA, 25 bp, Homo sapien
ggcggccctctacaagcacaagtgt

SEQ ID NO: 618754 - DNA, 25 bp, Homo sapien
gatgtcaaacccaaagacgaggcgg

SEQ ID NO: 618755 - DNA, 25 bp, Homo sapien
gagcagatccgcatccaggtgaaca

SEQ ID NO: 618756 - DNA, 25 bp, Homo sapien
tgccttgccctgcttgatggcccat

SEQ ID NO: 618757 - DNA, 25 bp, Homo sapien
tgaaatggctttgcccgtggtgcct

SEQ ID NO: 618758 - DNA, 25 bp, Homo sapien
tggctttgcccgtggtgccttgccc

SEQ ID NO: 618759 - DNA, 25 bp, Homo sapien
tgtttgaaatggctttgcccgtggt

SEQ ID NO: 618760 - DNA, 25 bp, Homo sapien
gcctgccgatcttcgccctaacctt

SEQ ID NO: 618761 - DNA, 25 bp, Homo sapien
tttcgccttttctgcccgggctgcg

SEQ ID NO: 618762 - DNA, 25 bp, Homo sapien
tccagccatctttgatttccgactt

SEQ ID NO: 618763 - DNA, 25 bp, Homo sapien
tctggatttcgccttttctgcccgg

SEQ ID NO: 618764 - DNA, 25 bp, Homo sapien
tctgagcccggatgctaattagctg

SEQ ID NO: 618765 - DNA, 25 bp, Homo sapien
ccagcgcaaattcaggagccgagat

SEQ ID NO: 618766 - DNA, 25 bp, Homo sapien
cctttgtcacaagtaggcccggact

SEQ ID NO: 618767 - DNA, 25 bp, Homo sapien
aataattactgggacatgcgcgttc

SEQ ID NO: 618768 - DNA, 25 bp, Homo sapien
gattagtaacaaccagatactgtga

SEQ ID NO: 618769 - DNA, 25 bp, Homo sapien
aaaaattccaggcatcatgtgtcaa

SEQ ID NO: 618770 - DNA, 25 bp, Homo sapien
gtgacagtgccccattgccattcca

SEQ ID NO: 618771 - DNA, 25 bp, Homo sapien
tacaatcactttgaacgatacacct

SEQ ID NO: 618772 - DNA, 25 bp, Homo sapien
aggtctacagctcgggctgaaatga

SEQ ID NO: 618773 - DNA, 25 bp, Homo sapien
gatgatggaatatcttgagcctcag

SEQ ID NO: 618774 - DNA, 25 bp, Homo sapien
ccctcgatatctgatgatggaatat

SEQ ID NO: 618775 - DNA, 25 bp, Homo sapien
gagcctcagtcttcaggtctacagc

SEQ ID NO: 618776 - DNA, 25 bp, Homo sapien
catctctcgagtatttcaacataga

SEQ ID NO: 618777 - DNA, 25 bp, Homo sapien
acatagataacttcaggaatccaaa

SEQ ID NO: 618778 - DNA, 25 bp, Homo sapien
tagataacttcaggaatccaaagca

SEQ ID NO: 618779 - DNA, 25 bp, Homo sapien
taacttcaggaatccaaagcattga

SEQ ID NO: 618780 - DNA, 25 bp, Homo sapien
taaacagctctttcctattcattat

SEQ ID NO: 618781 - DNA, 25 bp, Homo sapien
gtctgctgttcctagtcactttcat

SEQ ID NO: 618782 - DNA, 25 bp, Homo sapien
agaataaacagctctttcctattca

SEQ ID NO: 618783 - DNA, 25 bp, Homo sapien
tttacttcaatattcaggggtggga

SEQ ID NO: 618784 - DNA, 25 bp, Homo sapien
ctggagatgacatgagatgttctca

SEQ ID NO: 618785 - DNA, 25 bp, Homo sapien
tggagatgacatgagatgttctcat

SEQ ID NO: 618786 - DNA, 25 bp, Homo sapien
ccttgtaccaggaaagatgtttctc

SEQ ID NO: 618787 - DNA, 25 bp, Homo sapien
ccgggaccttgtaccaggaaagatg

SEQ ID NO: 618788 - DNA, 25 bp, Homo sapien
cgggaccttgtaccaggaaagatgt

SEQ ID NO: 618789 - DNA, 25 bp, Homo sapien
tgtaccaggaaagatgtttctcccc

SEQ ID NO: 618790 - DNA, 25 bp, Homo sapien
tacccatttccaggcccgctgaagc

SEQ ID NO: 618791 - DNA, 25 bp, Homo sapien
tgtgtgcaaacatacctgtacactg

SEQ ID NO: 618792 - DNA, 25 bp, Homo sapien
ctttcttgtgtgcaaacatacctgt

SEQ ID NO: 618793 - DNA, 25 bp, Homo sapien
gactggattttggatgaattggaca

SEQ ID NO: 618794 - DNA, 25 bp, Homo sapien
aattggacaaagctggccagttctt

SEQ ID NO: 618795 - DNA, 25 bp, Homo sapien
agaccaccgcttcgcagtacctgta

SEQ ID NO: 618796 - DNA, 25 bp, Homo sapien
tgttccttgagagcccacagcggtg

SEQ ID NO: 618797 - DNA, 25 bp, Homo sapien
gagcaggcagaccaccgcttcgcag

SEQ ID NO: 618798 - DNA, 25 bp, Homo sapien
cgcttcgcagtacctgtaactgcat

SEQ ID NO: 618799 - DNA, 25 bp, Homo sapien
tcgttccagtttttggcatatgtac

SEQ ID NO: 618800 - DNA, 25 bp, Homo sapien
cacatatgaaacgctttgtgaattt

SEQ ID NO: 618801 - DNA, 25 bp, Homo sapien
ttccggcaaaaactggaaagactgc

SEQ ID NO: 618802 - DNA, 25 bp, Homo sapien
aattctaaaagagctgtaacactgg

SEQ ID NO: 618803 - DNA, 25 bp, Homo sapien
cggcaaaaactggaaagactgctag

SEQ ID NO: 618804 - DNA, 25 bp, Homo sapien
agactgctagacaaattctaaaaga

SEQ ID NO: 618805 - DNA, 25 bp, Homo sapien
gacaattaatccagagaccaaggaa

SEQ ID NO: 618806 - DNA, 25 bp, Homo sapien
ctttctgggagatcttagcgtgtca

SEQ ID NO: 618807 - DNA, 25 bp, Homo sapien
gcaaactctgcgtaatctatcacct

SEQ ID NO: 618808 - DNA, 25 bp, Homo sapien
cagtttaatggcatactttctggga

SEQ ID NO: 618809 - DNA, 25 bp, Homo sapien
ctgtgaactgaaagatcaaaggctt

SEQ ID NO: 618810 - DNA, 25 bp, Homo sapien
gtgaactgaaagatcaaaggcttaa

SEQ ID NO: 618811 - DNA, 25 bp, Homo sapien
tgtgaactgaaagatcaaaggctta

SEQ ID NO: 618812 - DNA, 25 bp, Homo sapien
aaatcggatcgtgagcaaggcggct

SEQ ID NO: 618813 - DNA, 25 bp, Homo sapien
agtgtctgcacaccttcgtactcag

SEQ ID NO: 618814 - DNA, 25 bp, Homo sapien
tcgtactcagcaagacagaaaggca

SEQ ID NO: 618815 - DNA, 25 bp, Homo sapien
attcctggtgattggtaggcagccc

SEQ ID NO: 618816 - DNA, 25 bp, Homo sapien
ttagggaagcatggatctgcctgtg

SEQ ID NO: 618817 - DNA, 25 bp, Homo sapien
gcctgtgtcatagtttcccattctg

SEQ ID NO: 618818 - DNA, 25 bp, Homo sapien
cacagtccacgaacaattgcaaaat

SEQ ID NO: 618819 - DNA, 25 bp, Homo sapien
caactctgttctcacagtcacagtc

SEQ ID NO: 618820 - DNA, 25 bp, Homo sapien
gccccagggtggactggaaggcttc

SEQ ID NO: 618821 - DNA, 25 bp, Homo sapien
ttggatgggaaatctcccggtgctg

SEQ ID NO: 618822 - DNA, 25 bp, Homo sapien
aaggcttccttcattggatgggaaa

SEQ ID NO: 618823 - DNA, 25 bp, Homo sapien
gccctgggtgtggatcttggactct

SEQ ID NO: 618824 - DNA, 25 bp, Homo sapien
cgaatgaatcattgctcagctgtac

SEQ ID NO: 618825 - DNA, 25 bp, Homo sapien
agactcaggtatggccagcagtgcc

SEQ ID NO: 618826 - DNA, 25 bp, Homo sapien
tttgaagactcaggtatggccagca

SEQ ID NO: 618827 - DNA, 25 bp, Homo sapien
ggtagaaataagtctaaggctggcg

SEQ ID NO: 618828 - DNA, 25 bp, Homo sapien
gggtgtggtcctcccgccgataatg

SEQ ID NO: 618829 - DNA, 25 bp, Homo sapien
agaggcattatatgctctaccgggt

SEQ ID NO: 618830 - DNA, 25 bp, Homo sapien
ggcattatatgctctaccgggtgtg

SEQ ID NO: 618831 - DNA, 25 bp, Homo sapien
ttatatgctctaccgggtgtggtcc

SEQ ID NO: 618832 - DNA, 25 bp, Homo sapien
gccaaagaacgtggcgcttagtcac

SEQ ID NO: 618833 - DNA, 25 bp, Homo sapien
tgatcccctctgagaaataaagcca

SEQ ID NO: 618834 - DNA, 25 bp, Homo sapien
ttcacaccggaaatagcacagagct

SEQ ID NO: 618835 - DNA, 25 bp, Homo sapien
cagagctccaagtattgtggtctcc

SEQ ID NO: 618836 - DNA, 25 bp, Homo sapien
gatgcatggtctggcatatgttagc

SEQ ID NO: 618837 - DNA, 25 bp, Homo sapien
atagccggctatttcagttgctttc

SEQ ID NO: 618838 - DNA, 25 bp, Homo sapien
tcataaggatcacataagctaacac

SEQ ID NO: 618839 - DNA, 25 bp, Homo sapien
caattaatcgttaaaatagccggct

SEQ ID NO: 618840 - DNA, 25 bp, Homo sapien
aatcattttacctggcgcatggtgg

SEQ ID NO: 618841 - DNA, 25 bp, Homo sapien
catggcttggtatgtgttctagaac

SEQ ID NO: 618842 - DNA, 25 bp, Homo sapien
tggacaccctctaggatcacctgaa

SEQ ID NO: 618843 - DNA, 25 bp, Homo sapien
ggcactcatcgacaaggcagttaaa

SEQ ID NO: 618844 - DNA, 25 bp, Homo sapien
catcaggcttctttacaatgtcttc

SEQ ID NO: 618845 - DNA, 25 bp, Homo sapien
tcttctagcacagtgttcccattca

SEQ ID NO: 618846 - DNA, 25 bp, Homo sapien
tgttatcagttggaatcctcatcag

SEQ ID NO: 618847 - DNA, 25 bp, Homo sapien
tggctgttatcagttggaatcctca

SEQ ID NO: 618848 - DNA, 25 bp, Homo sapien
ataatgattgacacactgaacaaac

SEQ ID NO: 618849 - DNA, 25 bp, Homo sapien
aatgactaactaaagtaatccccag

SEQ ID NO: 618850 - DNA, 25 bp, Homo sapien
ccccaactttacttccgaatgagtg

SEQ ID NO: 618851 - DNA, 25 bp, Homo sapien
gatgtgtggaaaggttaatcctcaa

SEQ ID NO: 618852 - DNA, 25 bp, Homo sapien
tctgtgacatcattcgcatctgtgg

SEQ ID NO: 618853 - DNA, 25 bp, Homo sapien
ggcagctcataaagtctctctgtga

SEQ ID NO: 618854 - DNA, 25 bp, Homo sapien
gcatcagatgattttcggcagctca

SEQ ID NO: 618855 - DNA, 25 bp, Homo sapien
gcatctgtggcaacttaagcctcat

SEQ ID NO: 618856 - DNA, 25 bp, Homo sapien
ctctgttaaaccacggcccttactg

SEQ ID NO: 618857 - DNA, 25 bp, Homo sapien
taaaccacggcccttactggcatca

SEQ ID NO: 618858 - DNA, 25 bp, Homo sapien
cacggcccttactggcatcaagaaa

SEQ ID NO: 618859 - DNA, 25 bp, Homo sapien
aaccacggcccttactggcatcaag

SEQ ID NO: 618860 - DNA, 25 bp, Homo sapien
tcaacagtaagcattgaatctatcc

SEQ ID NO: 618861 - DNA, 25 bp, Homo sapien
agcattgaatctatcccccatcaaa

SEQ ID NO: 618862 - DNA, 25 bp, Homo sapien
aacagtaagcattgaatctatcccc

SEQ ID NO: 618863 - DNA, 25 bp, Homo sapien
cattgaatctatcccccatcaaaca

SEQ ID NO: 618864 - DNA, 25 bp, Homo sapien
actgggctgctatctcttagcatgt

SEQ ID NO: 618865 - DNA, 25 bp, Homo sapien
ctggaaacttctgcgatccattcta

SEQ ID NO: 618866 - DNA, 25 bp, Homo sapien
tattcgttcagactgtaggctgaga

SEQ ID NO: 618867 - DNA, 25 bp, Homo sapien
tatctcttagcatgtatgatttgag

SEQ ID NO: 618868 - DNA, 25 bp, Homo sapien
gaagcacatcttccaattacttgca

SEQ ID NO: 618869 - DNA, 25 bp, Homo sapien
caggaaagaagcacatcttccaatt

SEQ ID NO: 618870 - DNA, 25 bp, Homo sapien
ggaaagaagcacatcttccaattac

SEQ ID NO: 618871 - DNA, 25 bp, Homo sapien
aagaagcacatcttccaattacttg

SEQ ID NO: 618872 - DNA, 25 bp, Homo sapien
ccagaactgcaggataaaccatgtc

SEQ ID NO: 618873 - DNA, 25 bp, Homo sapien
tctagaaacactctccttggatctc

SEQ ID NO: 618874 - DNA, 25 bp, Homo sapien
tgctggaaacataacttgctgcctt

SEQ ID NO: 618875 - DNA, 25 bp, Homo sapien
ttctggtgccttcgctactcccata

SEQ ID NO: 618876 - DNA, 25 bp, Homo sapien
aagatgtcactaaatgacttgggcc

SEQ ID NO: 618877 - DNA, 25 bp, Homo sapien
ggccatggcttccactggctgtcag

SEQ ID NO: 618878 - DNA, 25 bp, Homo sapien
cactaaatgacttgggccatggctt

SEQ ID NO: 618879 - DNA, 25 bp, Homo sapien
cttaagatgtcactaaatgacttgg

SEQ ID NO: 618880 - DNA, 25 bp, Homo sapien
tggagtgggctgtgccggtgaaaac

SEQ ID NO: 618881 - DNA, 25 bp, Homo sapien
ggaagcaggttcctctggagtgggc

SEQ ID NO: 618882 - DNA, 25 bp, Homo sapien
ctggagtgggctgtgccggtgaaaa

SEQ ID NO: 618883 - DNA, 25 bp, Homo sapien
ctacaaaggacacggggaagcaggt

SEQ ID NO: 618884 - DNA, 25 bp, Homo sapien
tctagctcagccgaagagggtggtc

SEQ ID NO: 618885 - DNA, 25 bp, Homo sapien
tcagggatgactctctgagatgcca

SEQ ID NO: 618886 - DNA, 25 bp, Homo sapien
caagcacgtcgacaaggtgcacagg

SEQ ID NO: 618887 - DNA, 25 bp, Homo sapien
taaggaccgtcccttcaagtgtgac

SEQ ID NO: 618888 - DNA, 25 bp, Homo sapien
agggaacatcatccgtttccccagg

SEQ ID NO: 618889 - DNA, 25 bp, Homo sapien
gagggaacatcatccgtttccccag

SEQ ID NO: 618890 - DNA, 25 bp, Homo sapien
tgagggaacatcatccgtttcccca

SEQ ID NO: 618891 - DNA, 25 bp, Homo sapien
ctgtgggagcaggacgcaaactctg

SEQ ID NO: 618892 - DNA, 25 bp, Homo sapien
tcttccaactgacgttttatcctag

SEQ ID NO: 618893 - DNA, 25 bp, Homo sapien
tgccggcccagtagtgtgcctcaac

SEQ ID NO: 618894 - DNA, 25 bp, Homo sapien
ctgacgttttatcctagtacctttg

SEQ ID NO: 618895 - DNA, 25 bp, Homo sapien
cgtgcgtcctggagtactgaggtga

SEQ ID NO: 618896 - DNA, 25 bp, Homo sapien
ggtgtcgtgcgtcctggagtactga

SEQ ID NO: 618897 - DNA, 25 bp, Homo sapien
gcgtcctggagtactgaggtgactt

SEQ ID NO: 618898 - DNA, 25 bp, Homo sapien
ggagggtgtcgtgcgtcctggagta

SEQ ID NO: 618899 - DNA, 25 bp, Homo sapien
ttctggagccgcacccagtgtttcg

SEQ ID NO: 618900 - DNA, 25 bp, Homo sapien
tgtttatagaagagaattgctgagt

SEQ ID NO: 618901 - DNA, 25 bp, Homo sapien
gctcttgctgatctctgcgcctcgg

SEQ ID NO: 618902 - DNA, 25 bp, Homo sapien
tgcactgagctactttggattcctg

SEQ ID NO: 618903 - DNA, 25 bp, Homo sapien
cagccgtcaggactcttgataaatc

SEQ ID NO: 618904 - DNA, 25 bp, Homo sapien
gataaatcgccctgctcggctgatg

SEQ ID NO: 618905 - DNA, 25 bp, Homo sapien
gaattcgttgtgtgaagtaggccac

SEQ ID NO: 618906 - DNA, 25 bp, Homo sapien
cagaattgccgggacatgcgcgttc

SEQ ID NO: 618907 - DNA, 25 bp, Homo sapien
cctggacgttgatgccgatgtagcc

SEQ ID NO: 618908 - DNA, 25 bp, Homo sapien
gagtatgcctggacgttgatgccga

SEQ ID NO: 618909 - DNA, 25 bp, Homo sapien
tatgcctggacgttgatgccgatgt

SEQ ID NO: 618910 - DNA, 25 bp, Homo sapien
tgagtatgcctggacgttgatgccg

SEQ ID NO: 618911 - DNA, 25 bp, Homo sapien
agcaggttcgtcttggtgaagttca

SEQ ID NO: 618912 - DNA, 25 bp, Homo sapien
caggatgagttcaggcgtcttgctg

SEQ ID NO: 618913 - DNA, 25 bp, Homo sapien
tgaagttcaacacccagtaccgcta

SEQ ID NO: 618914 - DNA, 25 bp, Homo sapien
ccagtaccgctacggtgagaagcag

SEQ ID NO: 618915 - DNA, 25 bp, Homo sapien
gtataattcagaagtatgctgttta

SEQ ID NO: 618916 - DNA, 25 bp, Homo sapien
tacttaagagttgcgagaattacag

SEQ ID NO: 618917 - DNA, 25 bp, Homo sapien
ttcttctacaaagcgacaatgtttg

SEQ ID NO: 618918 - DNA, 25 bp, Homo sapien
gtttgtaaagagaggtagagtgacc

SEQ ID NO: 618919 - DNA, 25 bp, Homo sapien
ttggctctcaggcaccttcccaaac

SEQ ID NO: 618920 - DNA, 25 bp, Homo sapien
ctaaggtgcactggacgttagggca

SEQ ID NO: 618921 - DNA, 25 bp, Homo sapien
cactggacgttagggcagtctggaa

SEQ ID NO: 618922 - DNA, 25 bp, Homo sapien
tggaaagacagagggtatttgtaat

SEQ ID NO: 618923 - DNA, 25 bp, Homo sapien
aagacagagggtatttgtaattgga

SEQ ID NO: 618924 - DNA, 25 bp, Homo sapien
gaagcaggcaccatgaggagcatct

SEQ ID NO: 618925 - DNA, 25 bp, Homo sapien
ctgggaacaggccttcccagattta

SEQ ID NO: 618926 - DNA, 25 bp, Homo sapien
acagaagcaggcaccatgaggagca

SEQ ID NO: 618927 - DNA, 25 bp, Homo sapien
tgggaacaggccttcccagatttag

SEQ ID NO: 618928 - DNA, 25 bp, Homo sapien
cagtcacacattgctgagtttcttc

SEQ ID NO: 618929 - DNA, 25 bp, Homo sapien
gctggttgaccatgtgtgcttctct

SEQ ID NO: 618930 - DNA, 25 bp, Homo sapien
tttctgagacgtctctgcatagggc

SEQ ID NO: 618931 - DNA, 25 bp, Homo sapien
ggacattaacccgacatcagtcaca

SEQ ID NO: 618932 - DNA, 25 bp, Homo sapien
aaatgttaccaagatgattccaatg

SEQ ID NO: 618933 - DNA, 25 bp, Homo sapien
tacatgtaagtctgttggcatgaag

SEQ ID NO: 618934 - DNA, 25 bp, Homo sapien
tgtaacaactttgagaccacctctg

SEQ ID NO: 618935 - DNA, 25 bp, Homo sapien
caactctaataaaggtttctgtcca

SEQ ID NO: 618936 - DNA, 25 bp, Homo sapien
aggcgtcccgggagcagcgctgctg

SEQ ID NO: 618937 - DNA, 25 bp, Homo sapien
gcacgtgggtctccccgcaaaccac

SEQ ID NO: 618938 - DNA, 25 bp, Homo sapien
gcaggtgcaaaaggcgccccgagcc

SEQ ID NO: 618939 - DNA, 25 bp, Homo sapien
atcgcgtccgcggagaacgcagagt

SEQ ID NO: 618940 - DNA, 25 bp, Homo sapien
ctggccagaactcccgctgagttca

SEQ ID NO: 618941 - DNA, 25 bp, Homo sapien
gggatttgtgttccaaatgccaagg

SEQ ID NO: 618942 - DNA, 25 bp, Homo sapien
acatgaggtccaagctaacacggca

SEQ ID NO: 618943 - DNA, 25 bp, Homo sapien
taacacggcattggttggaggtctg

SEQ ID NO: 618944 - DNA, 25 bp, Homo sapien
caatgtggtcaaaaggtgttccacc

SEQ ID NO: 618945 - DNA, 25 bp, Homo sapien
ttaggtcctccactgaacagtgctg

SEQ ID NO: 618946 - DNA, 25 bp, Homo sapien
tagtggccagttgcaaggcttgctg

SEQ ID NO: 618947 - DNA, 25 bp, Homo sapien
ctccactgaacagtgctgacagtgc

SEQ ID NO: 618948 - DNA, 25 bp, Homo sapien
tcctcagacccagtcgcctggcgca

SEQ ID NO: 618949 - DNA, 25 bp, Homo sapien
ctgaaagattctccccccggcctga

SEQ ID NO: 618950 - DNA, 25 bp, Homo sapien
agggaatgaataactcctgcctcct

SEQ ID NO: 618951 - DNA, 25 bp, Homo sapien
aagcttaagggaatgaataactcct

SEQ ID NO: 618952 - DNA, 25 bp, Homo sapien
tcttaagccttgcatgaatgaggac

SEQ ID NO: 618953 - DNA, 25 bp, Homo sapien
ggtgatgttgacctgcattctctct

SEQ ID NO: 618954 - DNA, 25 bp, Homo sapien
tcatgcattcctaattcctcactgg

SEQ ID NO: 618955 - DNA, 25 bp, Homo sapien
cctcactggtagtggtatgtggaag

SEQ ID NO: 618956 - DNA, 25 bp, Homo sapien
ccagctccactgtctctggcttgca

SEQ ID NO: 618957 - DNA, 25 bp, Homo sapien
ggccagctccactgtctctggcttg

SEQ ID NO: 618958 - DNA, 25 bp, Homo sapien
tctggccagctccactgtctctggc

SEQ ID NO: 618959 - DNA, 25 bp, Homo sapien
aagacctctggccagctccactgtc

SEQ ID NO: 618960 - DNA, 25 bp, Homo sapien
gaaccaagcaatctttgaggcaaca

SEQ ID NO: 618961 - DNA, 25 bp, Homo sapien
gaacccatgtggatactctcgtaag

SEQ ID NO: 618962 - DNA, 25 bp, Homo sapien
caagcgtaacttttgcctgggtggg

SEQ ID NO: 618963 - DNA, 25 bp, Homo sapien
gaggcaacaatcttccacaagcgta

SEQ ID NO: 618964 - DNA, 25 bp, Homo sapien
agctcatggcagtggtatttattct

SEQ ID NO: 618965 - DNA, 25 bp, Homo sapien
tattctcccttaggcaagatgtggg

SEQ ID NO: 618966 - DNA, 25 bp, Homo sapien
ttctttcctttgggcacaagctcat

SEQ ID NO: 618967 - DNA, 25 bp, Homo sapien
tatttattctcccttaggcaagatg

SEQ ID NO: 618968 - DNA, 25 bp, Homo sapien
tgccattgggcttacaatactgtcc

SEQ ID NO: 618969 - DNA, 25 bp, Homo sapien
aaataaagtacctctatgtagctca

SEQ ID NO: 618970 - DNA, 25 bp, Homo sapien
gtagctcaaggtgcaagggcagttc

SEQ ID NO: 618971 - DNA, 25 bp, Homo sapien
gggcttacaatactgtccccagtgc

SEQ ID NO: 618972 - DNA, 25 bp, Homo sapien
cccacatgctgccatcgatattaca

SEQ ID NO: 618973 - DNA, 25 bp, Homo sapien
cagcatgaccataaggtttgctaat

SEQ ID NO: 618974 - DNA, 25 bp, Homo sapien
gctgccatcgatattacaacagagt

SEQ ID NO: 618975 - DNA, 25 bp, Homo sapien
gccacatctgtttaacagctgtcag

SEQ ID NO: 618976 - DNA, 25 bp, Homo sapien
ttcagtttttcagtattgttttcaa

SEQ ID NO: 618977 - DNA, 25 bp, Homo sapien
tcaatttctttaatgttctgggaaa

SEQ ID NO: 618978 - DNA, 25 bp, Homo sapien
tttcaatttctttaatgttctggga

SEQ ID NO: 618979 - DNA, 25 bp, Homo sapien
ctacttttcagtttttcagtattgt

SEQ ID NO: 618980 - DNA, 25 bp, Homo sapien
ggcttccctagaaacagaccctgag

SEQ ID NO: 618981 - DNA, 25 bp, Homo sapien
tggaacgtgatgtcaagaagctctg

SEQ ID NO: 618982 - DNA, 25 bp, Homo sapien
gataagaccatggaccctagcagct

SEQ ID NO: 618983 - DNA, 25 bp, Homo sapien
gggaggccacgaccagtcatgttaa

SEQ ID NO: 618984 - DNA, 25 bp, Homo sapien
aaattgtatccagacccatcattga

SEQ ID NO: 618985 - DNA, 25 bp, Homo sapien
tcgcccagtcggaagggctgtgccc

SEQ ID NO: 618986 - DNA, 25 bp, Homo sapien
ttggattcgcccagtcggaagggct

SEQ ID NO: 618987 - DNA, 25 bp, Homo sapien
ttcgcccagtcggaagggctgtgcc

SEQ ID NO: 618988 - DNA, 25 bp, Homo sapien
aaagttggattcgcccagtcggaag

SEQ ID NO: 618989 - DNA, 25 bp, Homo sapien
tgtctgatctgtgcatggcaaagcc

SEQ ID NO: 618990 - DNA, 25 bp, Homo sapien
taaatgtggatggatagtgacgaag

SEQ ID NO: 618991 - DNA, 25 bp, Homo sapien
cctgcagggagcctgtttgcctgta

SEQ ID NO: 618992 - DNA, 25 bp, Homo sapien
gatgatggcaccagtgtgtctgatc

SEQ ID NO: 618993 - DNA, 25 bp, Homo sapien
taattctggggaggagagagtgggc

SEQ ID NO: 618994 - DNA, 25 bp, Homo sapien
ttaattctggggaggagagagtggg

SEQ ID NO: 618995 - DNA, 25 bp, Homo sapien
tactttgctctctagtagcatctgg

SEQ ID NO: 618996 - DNA, 25 bp, Homo sapien
atactttgctctctagtagcatctg

SEQ ID NO: 618997 - DNA, 25 bp, Homo sapien
tttgctctctagtagcatctggtgg

SEQ ID NO: 618998 - DNA, 25 bp, Homo sapien
gctctctagtagcatctggtggcat

SEQ ID NO: 618999 - DNA, 25 bp, Homo sapien
tttggtaagcgtccaaggaccaaga

SEQ ID NO: 619000 - DNA, 25 bp, Homo sapien
gagagtcattcaacccaacagaagt

SEQ ID NO: 619001 - DNA, 25 bp, Homo sapien
cagagagtcattcaacccaacagaa

SEQ ID NO: 619002 - DNA, 25 bp, Homo sapien
agagtcattcaacccaacagaagta

SEQ ID NO: 619003 - DNA, 25 bp, Homo sapien
agagagtcattcaacccaacagaag

SEQ ID NO: 619004 - DNA, 25 bp, Homo sapien
actaggctcttggtaagctcttcca

SEQ ID NO: 619005 - DNA, 25 bp, Homo sapien
cggtgttgtctttaacagcatgggc

SEQ ID NO: 619006 - DNA, 25 bp, Homo sapien
cagcatgggctttgagagtcttccc

SEQ ID NO: 619007 - DNA, 25 bp, Homo sapien
ggcctccagtgggatctgtccctca

SEQ ID NO: 619008 - DNA, 25 bp, Homo sapien
ggcccttggcttctgcacttagatc

SEQ ID NO: 619009 - DNA, 25 bp, Homo sapien
tgaacaagccctcgctgttcagtcc

SEQ ID NO: 619010 - DNA, 25 bp, Homo sapien
ctgccaggattccacagacacctcc

SEQ ID NO: 619011 - DNA, 25 bp, Homo sapien
aaaaacagaggcttcagtgtttcct

SEQ ID NO: 619012 - DNA, 25 bp, Homo sapien
cctgccacatgacccctaagtattt

SEQ ID NO: 619013 - DNA, 25 bp, Homo sapien
cagctgccccgatgatgttcctaca

SEQ ID NO: 619014 - DNA, 25 bp, Homo sapien
agcaatgccagggacacgcctctgt

SEQ ID NO: 619015 - DNA, 25 bp, Homo sapien
cagcagcctttctgactgcacaggg

SEQ ID NO: 619016 - DNA, 25 bp, Homo sapien
ctaacttgtgttctttggagaccca

SEQ ID NO: 619017 - DNA, 25 bp, Homo sapien
taacttgtgttctttggagacccat

SEQ ID NO: 619018 - DNA, 25 bp, Homo sapien
tgtctaacttgtgttctttggagac

SEQ ID NO: 619019 - DNA, 25 bp, Homo sapien
cactgtctaacttgtgttctttgga

SEQ ID NO: 619020 - DNA, 25 bp, Homo sapien
aaagatctgagggacacagatcctc

SEQ ID NO: 619021 - DNA, 25 bp, Homo sapien
aagatctgagggacacagatcctct

SEQ ID NO: 619022 - DNA, 25 bp, Homo sapien
atgcaagccaactctttcatctgga

SEQ ID NO: 619023 - DNA, 25 bp, Homo sapien
aaatttttcatacagcacagcccct

SEQ ID NO: 619024 - DNA, 25 bp, Homo sapien
ttcatctggagttccaccaaagaag

SEQ ID NO: 619025 - DNA, 25 bp, Homo sapien
cttgcagagcatagattttgtgtta

SEQ ID NO: 619026 - DNA, 25 bp, Homo sapien
gagcgaggtacacgatttggtctcc

SEQ ID NO: 619027 - DNA, 25 bp, Homo sapien
agcgaggtacacgatttggtctcca

SEQ ID NO: 619028 - DNA, 25 bp, Homo sapien
ggagagcgaggtacacgatttggtc

SEQ ID NO: 619029 - DNA, 25 bp, Homo sapien
agagcgaggtacacgatttggtctc

SEQ ID NO: 619030 - DNA, 25 bp, Homo sapien
tccgtggtcatgcagaggttttgca

SEQ ID NO: 619031 - DNA, 25 bp, Homo sapien
ggttctgagagccagatcagtccct

SEQ ID NO: 619032 - DNA, 25 bp, Homo sapien
gagagccagatcagtccctctttct

SEQ ID NO: 619033 - DNA, 25 bp, Homo sapien
ctttctccgtggtcatgcagaggtt

SEQ ID NO: 619034 - DNA, 25 bp, Homo sapien
tcagtgttagaaccgcagcagatag

SEQ ID NO: 619035 - DNA, 25 bp, Homo sapien
tttaaggaccatgttagaagaccaa

SEQ ID NO: 619036 - DNA, 25 bp, Homo sapien
gcagatagggggaactgctcagtct

SEQ ID NO: 619037 - DNA, 25 bp, Homo sapien
gaagaccaatatacctctttcagtg

SEQ ID NO: 619038 - DNA, 25 bp, Homo sapien
cttgttctagatcctgctcagtgct

SEQ ID NO: 619039 - DNA, 25 bp, Homo sapien
caccttgttctagatcctgctcagt

SEQ ID NO: 619040 - DNA, 25 bp, Homo sapien
ttacactgactacaacatctagctg

SEQ ID NO: 619041 - DNA, 25 bp, Homo sapien
tttgaaaatttattacactgactac

SEQ ID NO: 619042 - DNA, 25 bp, Homo sapien
ttgtacgtagacaaaatccaagtca

SEQ ID NO: 619043 - DNA, 25 bp, Homo sapien
gtcactttacttatacattcacaaa

SEQ ID NO: 619044 - DNA, 25 bp, Homo sapien
catagaagtccttgtacgtagacaa

SEQ ID NO: 619045 - DNA, 25 bp, Homo sapien
ctgttttatgcaggcatagaagtcc

SEQ ID NO: 619046 - DNA, 25 bp, Homo sapien
gaaaagggcctcttccaaccagtca

SEQ ID NO: 619047 - DNA, 25 bp, Homo sapien
aaagggcctcttccaaccagtcaga

SEQ ID NO: 619048 - DNA, 25 bp, Homo sapien
aaaagggcctcttccaaccagtcag

SEQ ID NO: 619049 - DNA, 25 bp, Homo sapien
caacgccacaaatccgttcttcagt

SEQ ID NO: 619050 - DNA, 25 bp, Homo sapien
ttcttcagttgatcgccatctgcaa

SEQ ID NO: 619051 - DNA, 25 bp, Homo sapien
caacaacgccacaaatccgttcttc

SEQ ID NO: 619052 - DNA, 25 bp, Homo sapien
tcttcagttgatcgccatctgcaac

SEQ ID NO: 619053 - DNA, 25 bp, Homo sapien
taataccttagggatacatcactta

SEQ ID NO: 619054 - DNA, 25 bp, Homo sapien
gtcagggagaagcttttagtcatcc

SEQ ID NO: 619055 - DNA, 25 bp, Homo sapien
tagtcatcctgacaccaggctttca

SEQ ID NO: 619056 - DNA, 25 bp, Homo sapien
tgctcatggatatagtttgaaccta

SEQ ID NO: 619057 - DNA, 25 bp, Homo sapien
tattttctattaaatcctgaattcc

SEQ ID NO: 619058 - DNA, 25 bp, Homo sapien
tttctattaaatcctgaattcccat

SEQ ID NO: 619059 - DNA, 25 bp, Homo sapien
ttttctattaaatcctgaattccca

SEQ ID NO: 619060 - DNA, 25 bp, Homo sapien
aattttctattaatctaccaccaga

SEQ ID NO: 619061 - DNA, 25 bp, Homo sapien
tgttctgagttttggagcagaccct

SEQ ID NO: 619062 - DNA, 25 bp, Homo sapien
gaccctgatttatagtggaacactc

SEQ ID NO: 619063 - DNA, 25 bp, Homo sapien
cagtggtcacatcctcagagcccct

SEQ ID NO: 619064 - DNA, 25 bp, Homo sapien
caggttgctctctctcggtatctct

SEQ ID NO: 619065 - DNA, 25 bp, Homo sapien
ctgggagagagtcggtaagaaatgc

SEQ ID NO: 619066 - DNA, 25 bp, Homo sapien
gggagagagtcggtaagaaatgcag

SEQ ID NO: 619067 - DNA, 25 bp, Homo sapien
ggagagagtcggtaagaaatgcaga

SEQ ID NO: 619068 - DNA, 25 bp, Homo sapien
tgggagagagtcggtaagaaatgca

SEQ ID NO: 619069 - DNA, 25 bp, Homo sapien
aagcttttcccagactctcaagccc

SEQ ID NO: 619070 - DNA, 25 bp, Homo sapien
tgctcagagtgcactcagaggcagc

SEQ ID NO: 619071 - DNA, 25 bp, Homo sapien
agcttttcccagactctcaagccct

SEQ ID NO: 619072 - DNA, 25 bp, Homo sapien
gcttttcccagactctcaagccctc

SEQ ID NO: 619073 - DNA, 25 bp, Homo sapien
atgattcacaaaagcatcattgaga

SEQ ID NO: 619074 - DNA, 25 bp, Homo sapien
gatgctcattgcttaaacccaaatg

SEQ ID NO: 619075 - DNA, 25 bp, Homo sapien
aacccaaatgattcacaaaagcatc

SEQ ID NO: 619076 - DNA, 25 bp, Homo sapien
taatattttcccgtgagttcactgt

SEQ ID NO: 619077 - DNA, 25 bp, Homo sapien
tgacatttggaacgacataggacat

SEQ ID NO: 619078 - DNA, 25 bp, Homo sapien
ccatagtctgacatttggaacgaca

SEQ ID NO: 619079 - DNA, 25 bp, Homo sapien
agccctttggccatagtctgacatt

SEQ ID NO: 619080 - DNA, 25 bp, Homo sapien
tgttgggtggtccagagttggtcaa

SEQ ID NO: 619081 - DNA, 25 bp, Homo sapien
ttcccccaaagacggacagatgatg

SEQ ID NO: 619082 - DNA, 25 bp, Homo sapien
gccaaggagtgatgtaaccagtgtg

SEQ ID NO: 619083 - DNA, 25 bp, Homo sapien
gatgacagccaaggagtgatgtaac

SEQ ID NO: 619084 - DNA, 25 bp, Homo sapien
tgtggagcatctctcaaggcgatgg

SEQ ID NO: 619085 - DNA, 25 bp, Homo sapien
gagtgtctcacagcaattggaccac

SEQ ID NO: 619086 - DNA, 25 bp, Homo sapien
cagcagtgcccttttatctgtgtga

SEQ ID NO: 619087 - DNA, 25 bp, Homo sapien
gcccctgcagtgaaaatccatagta

SEQ ID NO: 619088 - DNA, 25 bp, Homo sapien
catagtattgatcaggccatttctc

SEQ ID NO: 619089 - DNA, 25 bp, Homo sapien
gctaagctagacaccaggcacatgg

SEQ ID NO: 619090 - DNA, 25 bp, Homo sapien
tacaagctcgagaaaagatgccaca

SEQ ID NO: 619091 - DNA, 25 bp, Homo sapien
tggattcaaacatcacgggcaaggg

SEQ ID NO: 619092 - DNA, 25 bp, Homo sapien
caatgggttggtaagaagccctcca

SEQ ID NO: 619093 - DNA, 25 bp, Homo sapien
ttcacgtacatggagtcaccctggg

SEQ ID NO: 619094 - DNA, 25 bp, Homo sapien
ccactgcaattcagttgaataagaa

SEQ ID NO: 619095 - DNA, 25 bp, Homo sapien
aaggagaagctgtgaactgtaggtc

SEQ ID NO: 619096 - DNA, 25 bp, Homo sapien
ctgtaggtctaaggacttctcaaac

SEQ ID NO: 619097 - DNA, 25 bp, Homo sapien
tttctcaggcctttgaactcacagt

SEQ ID NO: 619098 - DNA, 25 bp, Homo sapien
accttgtcagtcctatagcctcaga

SEQ ID NO: 619099 - DNA, 25 bp, Homo sapien
agttacagcattgaagcccgggttt

SEQ ID NO: 619100 - DNA, 25 bp, Homo sapien
ttcagactcccagacttacatcagt

SEQ ID NO: 619101 - DNA, 25 bp, Homo sapien
taggagcctctaataatacttcgaa

SEQ ID NO: 619102 - DNA, 25 bp, Homo sapien
tgctaagagacttcttatcatgcct

SEQ ID NO: 619103 - DNA, 25 bp, Homo sapien
aaaaatcaaccactgctttcactga

SEQ ID NO: 619104 - DNA, 25 bp, Homo sapien
ttaagtttggttagctctagcttct

SEQ ID NO: 619105 - DNA, 25 bp, Homo sapien
gctgtcccctcaacaaagtcatgtg

SEQ ID NO: 619106 - DNA, 25 bp, Homo sapien
catccccaggagcacgaaataagtg

SEQ ID NO: 619107 - DNA, 25 bp, Homo sapien
taggcctggcaacttcaccagactg

SEQ ID NO: 619108 - DNA, 25 bp, Homo sapien
ggccaaaggctgttcactaaataat

SEQ ID NO: 619109 - DNA, 25 bp, Homo sapien
taagagggactctgtttacatgaag

SEQ ID NO: 619110 - DNA, 25 bp, Homo sapien
aagagggactctgtttacatgaaga

SEQ ID NO: 619111 - DNA, 25 bp, Homo sapien
ataagagggactctgtttacatgaa

SEQ ID NO: 619112 - DNA, 25 bp, Homo sapien
cacttcagccaataagagggactct

SEQ ID NO: 619113 - DNA, 25 bp, Homo sapien
ataggaaaccttcatcttgagatgc

SEQ ID NO: 619114 - DNA, 25 bp, Homo sapien
ggtctgttgttctgactttggtcta

SEQ ID NO: 619115 - DNA, 25 bp, Homo sapien
tctaagaacaccaagggacttgttc

SEQ ID NO: 619116 - DNA, 25 bp, Homo sapien
cataatcacaaataggaaaccttca

SEQ ID NO: 619117 - DNA, 25 bp, Homo sapien
ggacagtcagctccccgcacatatt

SEQ ID NO: 619118 - DNA, 25 bp, Homo sapien
gctttcaaggccatggacgggatga

SEQ ID NO: 619119 - DNA, 25 bp, Homo sapien
gaacagagatcaatggaggactcca

SEQ ID NO: 619120 - DNA, 25 bp, Homo sapien
caattgtagtaagtgctttcaaggc

SEQ ID NO: 619121 - DNA, 25 bp, Homo sapien
gcagctggcaaaatcgctgactcag

SEQ ID NO: 619122 - DNA, 25 bp, Homo sapien
gattctgagcttgaactccaactcc

SEQ ID NO: 619123 - DNA, 25 bp, Homo sapien
gccaatggtagactcatcgaattta

SEQ ID NO: 619124 - DNA, 25 bp, Homo sapien
taatgacaacacgatgagccacagc

SEQ ID NO: 619125 - DNA, 25 bp, Homo sapien
caatttcattcatagaagattggcc

SEQ ID NO: 619126 - DNA, 25 bp, Homo sapien
tttcattcatagaagattggccaca

SEQ ID NO: 619127 - DNA, 25 bp, Homo sapien
tggacaatttcattcatagaagatt

SEQ ID NO: 619128 - DNA, 25 bp, Homo sapien
gacaatttcattcatagaagattgg

SEQ ID NO: 619129 - DNA, 25 bp, Homo sapien
tatgtctaagtaggtcatgttagca

SEQ ID NO: 619130 - DNA, 25 bp, Homo sapien
catgttagcaatattttgagtagtc

SEQ ID NO: 619131 - DNA, 25 bp, Homo sapien
ttccaagaacatattgaatgtagct

SEQ ID NO: 619132 - DNA, 25 bp, Homo sapien
tgagtagtcattacattgtagccca

SEQ ID NO: 619133 - DNA, 25 bp, Homo sapien
agccatgcgcccgaccagtattact

SEQ ID NO: 619134 - DNA, 25 bp, Homo sapien
tgctgtctgtgtatgaactgagtac

SEQ ID NO: 619135 - DNA, 25 bp, Homo sapien
cacatggtttaatcactgggagaca

SEQ ID NO: 619136 - DNA, 25 bp, Homo sapien
caaggagacgacacaacttcatgct

SEQ ID NO: 619137 - DNA, 25 bp, Homo sapien
tactaaacttctcactatgcaatgg

SEQ ID NO: 619138 - DNA, 25 bp, Homo sapien
gagcaatggtcatctgcatgtaagc

SEQ ID NO: 619139 - DNA, 25 bp, Homo sapien
taatgctccacgaactcagcacagt

SEQ ID NO: 619140 - DNA, 25 bp, Homo sapien
caatggttcagggaagaacccacct

SEQ ID NO: 619141 - DNA, 25 bp, Homo sapien
attgcacagtcatctaaacacacct

SEQ ID NO: 619142 - DNA, 25 bp, Homo sapien
acacacctctggacttgttattatg

SEQ ID NO: 619143 - DNA, 25 bp, Homo sapien
aaatttccagtagtttgtcaagcat

SEQ ID NO: 619144 - DNA, 25 bp, Homo sapien
gcaattcaacataatcgtaacttac

SEQ ID NO: 619145 - DNA, 25 bp, Homo sapien
tggatgcctgctgatcattttgaat

SEQ ID NO: 619146 - DNA, 25 bp, Homo sapien
cttggatgcctgctgatcattttga

SEQ ID NO: 619147 - DNA, 25 bp, Homo sapien
gaaatcttggatgcctgctgatcat

SEQ ID NO: 619148 - DNA, 25 bp, Homo sapien
aatcttggatgcctgctgatcattt

SEQ ID NO: 619149 - DNA, 25 bp, Homo sapien
gacctgtgcatgtttaccgcagcta

SEQ ID NO: 619150 - DNA, 25 bp, Homo sapien
caggaaaacctgattgagcagaact

SEQ ID NO: 619151 - DNA, 25 bp, Homo sapien
catttttgaacgctagacctgtgca

SEQ ID NO: 619152 - DNA, 25 bp, Homo sapien
taccctggcaacgtggtagacttga

SEQ ID NO: 619153 - DNA, 25 bp, Homo sapien
tagcaagcactcaacatatggcagg

SEQ ID NO: 619154 - DNA, 25 bp, Homo sapien
tcagatgcagctcaaggctttgtgt

SEQ ID NO: 619155 - DNA, 25 bp, Homo sapien
gcactgtgccggcagatagcaagca

SEQ ID NO: 619156 - DNA, 25 bp, Homo sapien
atatggcaggtgctcgggctctcac

SEQ ID NO: 619157 - DNA, 25 bp, Homo sapien
tctcccttcacagtaacagagcatc

SEQ ID NO: 619158 - DNA, 25 bp, Homo sapien
aatgctggctttattatctgggtga

SEQ ID NO: 619159 - DNA, 25 bp, Homo sapien
gagaagatgtcttcttgttccccat

SEQ ID NO: 619160 - DNA, 25 bp, Homo sapien
tatgcactttgtagccctagtgaga

SEQ ID NO: 619161 - DNA, 25 bp, Homo sapien
tgagaaactcggctctatgataggg

SEQ ID NO: 619162 - DNA, 25 bp, Homo sapien
aatagccccattgccctcatgacag

SEQ ID NO: 619163 - DNA, 25 bp, Homo sapien
tattgatgtgttaatttcccagggc

SEQ ID NO: 619164 - DNA, 25 bp, Homo sapien
tcgtccaagtactagtgcaagagcc

SEQ ID NO: 619165 - DNA, 25 bp, Homo sapien
taggccagcaggtagaaaactcagg

SEQ ID NO: 619166 - DNA, 25 bp, Homo sapien
taagacactagcatcctcagggagc

SEQ ID NO: 619167 - DNA, 25 bp, Homo sapien
caggtgtaagctccaattgcccaga

SEQ ID NO: 619168 - DNA, 25 bp, Homo sapien
cagaacagacattcccgtgtgcagg

SEQ ID NO: 619169 - DNA, 25 bp, Homo sapien
tagtatctcatctcctaatgtctct

SEQ ID NO: 619170 - DNA, 25 bp, Homo sapien
cctggtacagctgtgaggagtgaac

SEQ ID NO: 619171 - DNA, 25 bp, Homo sapien
gacggaatatctcaggtccctggta

SEQ ID NO: 619172 - DNA, 25 bp, Homo sapien
cacagatgtgcacaaaggcttggtt

SEQ ID NO: 619173 - DNA, 25 bp, Homo sapien
ttgttctgaaattgtgagtttggac

SEQ ID NO: 619174 - DNA, 25 bp, Homo sapien
gaaattgtgagtttggacatggaga

SEQ ID NO: 619175 - DNA, 25 bp, Homo sapien
aaccactggtgggatctccaaaatc

SEQ ID NO: 619176 - DNA, 25 bp, Homo sapien
tcttctcataccctggcaccggaaa

SEQ ID NO: 619177 - DNA, 25 bp, Homo sapien
aagcaggaaccattcaccagcccag

SEQ ID NO: 619178 - DNA, 25 bp, Homo sapien
ttcagaagcgttggtcggctgccga

SEQ ID NO: 619179 - DNA, 25 bp, Homo sapien
tagctagcaagagccactgtctgtc

SEQ ID NO: 619180 - DNA, 25 bp, Homo sapien
tctcttcaggccacgtcaggttgga

SEQ ID NO: 619181 - DNA, 25 bp, Homo sapien
caggttggatatcatcaagccagac

SEQ ID NO: 619182 - DNA, 25 bp, Homo sapien
aacagatgcaccagcctcttgggag

SEQ ID NO: 619183 - DNA, 25 bp, Homo sapien
agctcgttggttctgtcactcgtga

SEQ ID NO: 619184 - DNA, 25 bp, Homo sapien
gtgcctgctcctttaaacagatgca

SEQ ID NO: 619185 - DNA, 25 bp, Homo sapien
cactcgtgagtaatgcaccatagct

SEQ ID NO: 619186 - DNA, 25 bp, Homo sapien
caaaaccagcttggacaacatggtg

SEQ ID NO: 619187 - DNA, 25 bp, Homo sapien
ccgaagcaggtggatttcttgaccc

SEQ ID NO: 619188 - DNA, 25 bp, Homo sapien
cgaagcaggtggatttcttgacccc

SEQ ID NO: 619189 - DNA, 25 bp, Homo sapien
aggagttcaaaaccagcttggacaa

SEQ ID NO: 619190 - DNA, 25 bp, Homo sapien
tcattacaaatgatcacctattgat

SEQ ID NO: 619191 - DNA, 25 bp, Homo sapien
caacgtggatatacttaaaggaact

SEQ ID NO: 619192 - DNA, 25 bp, Homo sapien
ttgataaataacttggttgcctagg

SEQ ID NO: 619193 - DNA, 25 bp, Homo sapien
gttgcctaggcaacgtggatatact

SEQ ID NO: 619194 - DNA, 25 bp, Homo sapien
tgcactcaggacagtaagactccat

SEQ ID NO: 619195 - DNA, 25 bp, Homo sapien
gatgaaccctttactttacagataa

SEQ ID NO: 619196 - DNA, 25 bp, Homo sapien
tgtttcaggtaagattcaaccaaag

SEQ ID NO: 619197 - DNA, 25 bp, Homo sapien
cagataaggacaatacagagaccat

SEQ ID NO: 619198 - DNA, 25 bp, Homo sapien
ttcccagaaaaggtattccaatatc

SEQ ID NO: 619199 - DNA, 25 bp, Homo sapien
tgcccgtttatttgcaccctaagtg

SEQ ID NO: 619200 - DNA, 25 bp, Homo sapien
tgaacaagataagtccagactcttg

SEQ ID NO: 619201 - DNA, 25 bp, Homo sapien
gaagcagaaaaaccgagaccaggaa

SEQ ID NO: 619202 - DNA, 25 bp, Homo sapien
ctgtaagagccttcctcagttagaa

SEQ ID NO: 619203 - DNA, 25 bp, Homo sapien
caaatcgatgtgtatggcactggcc

SEQ ID NO: 619204 - DNA, 25 bp, Homo sapien
tcttattactgctcaagtgcaaatc

SEQ ID NO: 619205 - DNA, 25 bp, Homo sapien
gagccttcctcagttagaaatgagt

SEQ ID NO: 619206 - DNA, 25 bp, Homo sapien
aactcacagtcaaacatgaatcaat

SEQ ID NO: 619207 - DNA, 25 bp, Homo sapien
ctcacagtcaaacatgaatcaataa

SEQ ID NO: 619208 - DNA, 25 bp, Homo sapien
cctgcgttggtgtttggaatacaga

SEQ ID NO: 619209 - DNA, 25 bp, Homo sapien
ctgaaatgacctgcgttggtgtttg

SEQ ID NO: 619210 - DNA, 25 bp, Homo sapien
cagtgtcttcggtgtttccaccccg

SEQ ID NO: 619211 - DNA, 25 bp, Homo sapien
tccaccccgggtaccagcgtatctc

SEQ ID NO: 619212 - DNA, 25 bp, Homo sapien
gaaacagtgtcttcggtgtttccac

SEQ ID NO: 619213 - DNA, 25 bp, Homo sapien
agaaacagtgtcttcggtgtttcca

SEQ ID NO: 619214 - DNA, 25 bp, Homo sapien
gtatgggctcattacttcacacatc

SEQ ID NO: 619215 - DNA, 25 bp, Homo sapien
tgtatgggctcattacttcacacat

SEQ ID NO: 619216 - DNA, 25 bp, Homo sapien
atgggctcattacttcacacatcat

SEQ ID NO: 619217 - DNA, 25 bp, Homo sapien
tatgggctcattacttcacacatca

SEQ ID NO: 619218 - DNA, 25 bp, Homo sapien
aacatgactgaaatgtatgccagat

SEQ ID NO: 619219 - DNA, 25 bp, Homo sapien
tctagtttggcacagttgtaggaat

SEQ ID NO: 619220 - DNA, 25 bp, Homo sapien
cagtttctgtgagaccgtgtaagca

SEQ ID NO: 619221 - DNA, 25 bp, Homo sapien
cacagttgtaggaattaacatgact

SEQ ID NO: 619222 - DNA, 25 bp, Homo sapien
ttgaggacaccgttcatcataaggg

SEQ ID NO: 619223 - DNA, 25 bp, Homo sapien
tgtttgaggacaccgttcatcataa

SEQ ID NO: 619224 - DNA, 25 bp, Homo sapien
tttgaggacaccgttcatcataagg

SEQ ID NO: 619225 - DNA, 25 bp, Homo sapien
gcttgtttgaggacaccgttcatca

SEQ ID NO: 619226 - DNA, 25 bp, Homo sapien
ctccatcaaacagaaatctatattg

SEQ ID NO: 619227 - DNA, 25 bp, Homo sapien
aaattatcaatattcacacatctgg

SEQ ID NO: 619228 - DNA, 25 bp, Homo sapien
aacagaaatctatattgtgccttga

SEQ ID NO: 619229 - DNA, 25 bp, Homo sapien
gctccagagaaattatcaatattca

SEQ ID NO: 619230 - DNA, 25 bp, Homo sapien
ggaggttttgaaaccttgcctgagc

SEQ ID NO: 619231 - DNA, 25 bp, Homo sapien
aggttttgaaaccttgcctgagctg

SEQ ID NO: 619232 - DNA, 25 bp, Homo sapien
gaggttttgaaaccttgcctgagct

SEQ ID NO: 619233 - DNA, 25 bp, Homo sapien
cttgcctgagctgtagggactgccc

SEQ ID NO: 619234 - DNA, 25 bp, Homo sapien
ggaaggtcgccattacagtcctgca

SEQ ID NO: 619235 - DNA, 25 bp, Homo sapien
ttctcaatggattcattccacactg

SEQ ID NO: 619236 - DNA, 25 bp, Homo sapien
catgtaattggcaataaatacttct

SEQ ID NO: 619237 - DNA, 25 bp, Homo sapien
gattcattccacactggaaggtcgc

SEQ ID NO: 619238 - DNA, 25 bp, Homo sapien
ttggaatagagtctgtgcactggcg

SEQ ID NO: 619239 - DNA, 25 bp, Homo sapien
taatacctttcttgtaagacacaag

SEQ ID NO: 619240 - DNA, 25 bp, Homo sapien
ctctcagtaggagatatgtcaggga

SEQ ID NO: 619241 - DNA, 25 bp, Homo sapien
tcagggagttggaatagagtctgtg

SEQ ID NO: 619242 - DNA, 25 bp, Homo sapien
caaggaacagtggatataggctcag

SEQ ID NO: 619243 - DNA, 25 bp, Homo sapien
aaacagcaccagagaaacgtggccc

SEQ ID NO: 619244 - DNA, 25 bp, Homo sapien
gaaaggcctgttctccctaagcaca

SEQ ID NO: 619245 - DNA, 25 bp, Homo sapien
taagcacagtgctgcatcaaaacag

SEQ ID NO: 619246 - DNA, 25 bp, Homo sapien
taggccaaggagagttgtaactcac

SEQ ID NO: 619247 - DNA, 25 bp, Homo sapien
ctaggccaaggagagttgtaactca

SEQ ID NO: 619248 - DNA, 25 bp, Homo sapien
tcttctcccatgcaggatttctcag

SEQ ID NO: 619249 - DNA, 25 bp, Homo sapien
gaagctggattggtgagcatagaca

SEQ ID NO: 619250 - DNA, 25 bp, Homo sapien
tcagtagaagctggattggtgagca

SEQ ID NO: 619251 - DNA, 25 bp, Homo sapien
aagttcaagaactcttctcccatgc

SEQ ID NO: 619252 - DNA, 25 bp, Homo sapien
aacctgcaggcagatgctttccagc

SEQ ID NO: 619253 - DNA, 25 bp, Homo sapien
taacctgcaggcagatgctttccag

SEQ ID NO: 619254 - DNA, 25 bp, Homo sapien
cccatcctgtgcttagaggagacct

SEQ ID NO: 619255 - DNA, 25 bp, Homo sapien
ggcttcatcacgtccccatcctgtg

SEQ ID NO: 619256 - DNA, 25 bp, Homo sapien
catcctgtgcttagaggagacctca

SEQ ID NO: 619257 - DNA, 25 bp, Homo sapien
atcctgtgcttagaggagacctcat

SEQ ID NO: 619258 - DNA, 25 bp, Homo sapien
cacaatggctgctgccaggcaggag

SEQ ID NO: 619259 - DNA, 25 bp, Homo sapien
acaatggctgctgccaggcaggagt

SEQ ID NO: 619260 - DNA, 25 bp, Homo sapien
aatggctgctgccaggcaggagtac

SEQ ID NO: 619261 - DNA, 25 bp, Homo sapien
caatggctgctgccaggcaggagta

SEQ ID NO: 619262 - DNA, 25 bp, Homo sapien
ttggcttactctttgccagaaattt

SEQ ID NO: 619263 - DNA, 25 bp, Homo sapien
gttggcttactctttgccagaaatt

SEQ ID NO: 619264 - DNA, 25 bp, Homo sapien
tgttggcttactctttgccagaaat

SEQ ID NO: 619265 - DNA, 25 bp, Homo sapien
ctgttggcttactctttgccagaaa

SEQ ID NO: 619266 - DNA, 25 bp, Homo sapien
gcagtcagctgggttatacacaact

SEQ ID NO: 619267 - DNA, 25 bp, Homo sapien
gagaaggcaatgcaatgccgtcgga

SEQ ID NO: 619268 - DNA, 25 bp, Homo sapien
atgcaatgccgtcggagacaaagcc

SEQ ID NO: 619269 - DNA, 25 bp, Homo sapien
ggcgtggttgggtaatgcagtcagc

SEQ ID NO: 619270 - DNA, 25 bp, Homo sapien
gcacctgtagtgttctggaggtagc

SEQ ID NO: 619271 - DNA, 25 bp, Homo sapien
ctgtagtgttctggaggtagctgca

SEQ ID NO: 619272 - DNA, 25 bp, Homo sapien
cctgtagtgttctggaggtagctgc

SEQ ID NO: 619273 - DNA, 25 bp, Homo sapien
acctgtagtgttctggaggtagctg

SEQ ID NO: 619274 - DNA, 25 bp, Homo sapien
ttcacattgagttccatttccaagt

SEQ ID NO: 619275 - DNA, 25 bp, Homo sapien
catattgccctaacttcacattgag

SEQ ID NO: 619276 - DNA, 25 bp, Homo sapien
cttcacattgagttccatttccaag

SEQ ID NO: 619277 - DNA, 25 bp, Homo sapien
tgctcctccttctcatattgcccta

SEQ ID NO: 619278 - DNA, 25 bp, Homo sapien
aacacagcgttccagtcactagaca

SEQ ID NO: 619279 - DNA, 25 bp, Homo sapien
acaccctcgacttgctgatggggca

SEQ ID NO: 619280 - DNA, 25 bp, Homo sapien
tgatggggcagcgtggattcaacca

SEQ ID NO: 619281 - DNA, 25 bp, Homo sapien
atgatggggcaaacacagcgttcca

SEQ ID NO: 619282 - DNA, 25 bp, Homo sapien
tgtggctcaatgaaggcaccaaatg

SEQ ID NO: 619283 - DNA, 25 bp, Homo sapien
gttcgtagatatagacaatagctct

SEQ ID NO: 619284 - DNA, 25 bp, Homo sapien
ctttgtttgccaagatggccggtac

SEQ ID NO: 619285 - DNA, 25 bp, Homo sapien
ggcttttgctgccacaccggaggca

SEQ ID NO: 619286 - DNA, 25 bp, Homo sapien
aagaatcttgtgcacagctttctgc

SEQ ID NO: 619287 - DNA, 25 bp, Homo sapien
tcaccccatctcatgtaggccttta

SEQ ID NO: 619288 - DNA, 25 bp, Homo sapien
catgtaggcctttaatatgagaaag

SEQ ID NO: 619289 - DNA, 25 bp, Homo sapien
agaatcttgtgcacagctttctgca

SEQ ID NO: 619290 - DNA, 25 bp, Homo sapien
catccagagattctgcccgttgctg

SEQ ID NO: 619291 - DNA, 25 bp, Homo sapien
gcctgatgattgctgggaaaatcaa

SEQ ID NO: 619292 - DNA, 25 bp, Homo sapien
tcaagacaaatgtattccaagcttc

SEQ ID NO: 619293 - DNA, 25 bp, Homo sapien
cacaaatgtacaacccagggcttct

SEQ ID NO: 619294 - DNA, 25 bp, Homo sapien
gagagaacagctcattcgtaatgtc

SEQ ID NO: 619295 - DNA, 25 bp, Homo sapien
gtggtccagagagaacagctcattc

SEQ ID NO: 619296 - DNA, 25 bp, Homo sapien
ggtccagagagaacagctcattcgt

SEQ ID NO: 619297 - DNA, 25 bp, Homo sapien
tccagagagaacagctcattcgtaa

SEQ ID NO: 619298 - DNA, 25 bp, Homo sapien
ttggtaggagcacctatgagcccgg

SEQ ID NO: 619299 - DNA, 25 bp, Homo sapien
gcttttagggtcactgccatggaaa

SEQ ID NO: 619300 - DNA, 25 bp, Homo sapien
tgctattttgtactgacttccaaca

SEQ ID NO: 619301 - DNA, 25 bp, Homo sapien
tgttcatcttttgacgaagtccatg

SEQ ID NO: 619302 - DNA, 25 bp, Homo sapien
tggtatgtttggtcaggtgctgtct

SEQ ID NO: 619303 - DNA, 25 bp, Homo sapien
ttggtatgtttggtcaggtgctgtc

SEQ ID NO: 619304 - DNA, 25 bp, Homo sapien
gtgccacgcacatggagcaaagcca

SEQ ID NO: 619305 - DNA, 25 bp, Homo sapien
cccatttgtccttggagacctgggc

SEQ ID NO: 619306 - DNA, 25 bp, Homo sapien
tgagggcccatttgtccttggagac

SEQ ID NO: 619307 - DNA, 25 bp, Homo sapien
tgtccttggagacctgggctaactc

SEQ ID NO: 619308 - DNA, 25 bp, Homo sapien
cttgagggcccatttgtccttggag

SEQ ID NO: 619309 - DNA, 25 bp, Homo sapien
cacttcctctttgtggagatgtgca

SEQ ID NO: 619310 - DNA, 25 bp, Homo sapien
agctgctttcctcctggcagtcatg

SEQ ID NO: 619311 - DNA, 25 bp, Homo sapien
cctctttgtggagatgtgcatcctc

SEQ ID NO: 619312 - DNA, 25 bp, Homo sapien
tggcagtcatgctcagctcctccca

SEQ ID NO: 619313 - DNA, 25 bp, Homo sapien
catcttgctaaaggcaatggtgcca

SEQ ID NO: 619314 - DNA, 25 bp, Homo sapien
gctgccctaacagagtaacgtctaa

SEQ ID NO: 619315 - DNA, 25 bp, Homo sapien
taatcaccccatgaaaggacgcatt

SEQ ID NO: 619316 - DNA, 25 bp, Homo sapien
gacgcattcagccaaaagatgtcag

SEQ ID NO: 619317 - DNA, 25 bp, Homo sapien
tcagaagcgggcttgccccttttct

SEQ ID NO: 619318 - DNA, 25 bp, Homo sapien
gaagcgggcttgccccttttctcta

SEQ ID NO: 619319 - DNA, 25 bp, Homo sapien
cagaagcgggcttgccccttttctc

SEQ ID NO: 619320 - DNA, 25 bp, Homo sapien
agcgggcttgccccttttctctaat

SEQ ID NO: 619321 - DNA, 25 bp, Homo sapien
aaatcactcttggtagcatgtctgt

SEQ ID NO: 619322 - DNA, 25 bp, Homo sapien
gcagccatcctggttgtgatttatc

SEQ ID NO: 619323 - DNA, 25 bp, Homo sapien
tatcttcacaagttgccaaatcact

SEQ ID NO: 619324 - DNA, 25 bp, Homo sapien
catgtctgtgcttggtgaataatga

SEQ ID NO: 619325 - DNA, 25 bp, Homo sapien
gtgcttgcccccacactctgtcagc

SEQ ID NO: 619326 - DNA, 25 bp, Homo sapien
gcatgtgcttgcccccacactctgt

SEQ ID NO: 619327 - DNA, 25 bp, Homo sapien
ccacactctgtcagcctccagagtc

SEQ ID NO: 619328 - DNA, 25 bp, Homo sapien
cccccacactctgtcagcctccaga

SEQ ID NO: 619329 - DNA, 25 bp, Homo sapien
tgttctctcgaaagcatggcacttg

SEQ ID NO: 619330 - DNA, 25 bp, Homo sapien
cacttgggaacaatgtcgggggaga

SEQ ID NO: 619331 - DNA, 25 bp, Homo sapien
tcaaactttgcaccagtgggaccca

SEQ ID NO: 619332 - DNA, 25 bp, Homo sapien
aacatttgttctctcgaaagcatgg

SEQ ID NO: 619333 - DNA, 25 bp, Homo sapien
tcttctcattgacggttgaattcat

SEQ ID NO: 619334 - DNA, 25 bp, Homo sapien
cctgcttcggtaacctgccatctgt

SEQ ID NO: 619335 - DNA, 25 bp, Homo sapien
gcttcggtaacctgccatctgtctt

SEQ ID NO: 619336 - DNA, 25 bp, Homo sapien
gacggttgaattcataacctcctcc

SEQ ID NO: 619337 - DNA, 25 bp, Homo sapien
agcagcaggcataggatgtccttgg

SEQ ID NO: 619338 - DNA, 25 bp, Homo sapien
cctgaagactgtgcctgctcgttaa

SEQ ID NO: 619339 - DNA, 25 bp, Homo sapien
gcctgctcgttaacatccagaggac

SEQ ID NO: 619340 - DNA, 25 bp, Homo sapien
tagcggattccttggcaaatgcatt

SEQ ID NO: 619341 - DNA, 25 bp, Homo sapien
catgatgttttggatgcgggaagtc

SEQ ID NO: 619342 - DNA, 25 bp, Homo sapien
acgtggaggtaaacgcatgatggcc

SEQ ID NO: 619343 - DNA, 25 bp, Homo sapien
gattgttggcaatccagcaatagga

SEQ ID NO: 619344 - DNA, 25 bp, Homo sapien
catgatggccgtcgtgacacgtggt

SEQ ID NO: 619345 - DNA, 25 bp, Homo sapien
taaatgacctcgtgggatgtgattc

SEQ ID NO: 619346 - DNA, 25 bp, Homo sapien
ggtaaaaccagcttgcaggcagtcg

SEQ ID NO: 619347 - DNA, 25 bp, Homo sapien
gatgtgattcatttcccgatccctt

SEQ ID NO: 619348 - DNA, 25 bp, Homo sapien
gcttgaatactcagaaggtaaaacc

SEQ ID NO: 619349 - DNA, 25 bp, Homo sapien
tttcagttggattacaatttagtcc

SEQ ID NO: 619350 - DNA, 25 bp, Homo sapien
ccatttcagttggattacaatttag

SEQ ID NO: 619351 - DNA, 25 bp, Homo sapien
ttcagttggattacaatttagtcca

SEQ ID NO: 619352 - DNA, 25 bp, Homo sapien
cagttggattacaatttagtccaaa

SEQ ID NO: 619353 - DNA, 25 bp, Homo sapien
gcagaagtttgcaagcgccaagggt

SEQ ID NO: 619354 - DNA, 25 bp, Homo sapien
cgccaagggtgtccatgactccaaa

SEQ ID NO: 619355 - DNA, 25 bp, Homo sapien
gaatggatgctcttcgcactcccag

SEQ ID NO: 619356 - DNA, 25 bp, Homo sapien
tgctttcccgatgcgcacagactga

SEQ ID NO: 619357 - DNA, 25 bp, Homo sapien
tcttgttgggaggaaaggcatgatt

SEQ ID NO: 619358 - DNA, 25 bp, Homo sapien
cttgcatctgtagcataaagaacgt

SEQ ID NO: 619359 - DNA, 25 bp, Homo sapien
ttcttgttgggaggaaaggcatgat

SEQ ID NO: 619360 - DNA, 25 bp, Homo sapien
ctgtagcataaagaacgtcttgttc

SEQ ID NO: 619361 - DNA, 25 bp, Homo sapien
ttgatccatgatgggcagaaactta

SEQ ID NO: 619362 - DNA, 25 bp, Homo sapien
accataatttgatccatgatgggca

SEQ ID NO: 619363 - DNA, 25 bp, Homo sapien
aatttgatccatgatgggcagaaac

SEQ ID NO: 619364 - DNA, 25 bp, Homo sapien
cataatttgatccatgatgggcaga

SEQ ID NO: 619365 - DNA, 25 bp, Homo sapien
tcactgacaagatgaattgttgtag

SEQ ID NO: 619366 - DNA, 25 bp, Homo sapien
cctatcagcatctcacgctctggat

SEQ ID NO: 619367 - DNA, 25 bp, Homo sapien
tagaagatgacacccctatcagcat

SEQ ID NO: 619368 - DNA, 25 bp, Homo sapien
cacgctctggatctattagtatctc

SEQ ID NO: 619369 - DNA, 25 bp, Homo sapien
tcctgaagaatccaaaccaagtcgc

SEQ ID NO: 619370 - DNA, 25 bp, Homo sapien
ccaagtcgctggcccagtaatccat

SEQ ID NO: 619371 - DNA, 25 bp, Homo sapien
aaccaagtcgctggcccagtaatcc

SEQ ID NO: 619372 - DNA, 25 bp, Homo sapien
tgaagaatccaaaccaagtcgctgg

SEQ ID NO: 619373 - DNA, 25 bp, Homo sapien
tatatcctcaggttgagcaccgtat

SEQ ID NO: 619374 - DNA, 25 bp, Homo sapien
tcaggttgagcaccgtattggtgct

SEQ ID NO: 619375 - DNA, 25 bp, Homo sapien
tcctcaggttgagcaccgtattggt

SEQ ID NO: 619376 - DNA, 25 bp, Homo sapien
catttatatcctcaggttgagcacc

SEQ ID NO: 619377 - DNA, 25 bp, Homo sapien
cctcctccagatctatctttcctct

SEQ ID NO: 619378 - DNA, 25 bp, Homo sapien
ctttcctcttcactctaaactcaaa

SEQ ID NO: 619379 - DNA, 25 bp, Homo sapien
agatctatctttcctcttcactcta

SEQ ID NO: 619380 - DNA, 25 bp, Homo sapien
ttcctcttcactctaaactcaaatg

SEQ ID NO: 619381 - DNA, 25 bp, Homo sapien
tattaaagggacagcgtcccgcagg

SEQ ID NO: 619382 - DNA, 25 bp, Homo sapien
ggagaaatttactccccagccgcag

SEQ ID NO: 619383 - DNA, 25 bp, Homo sapien
tctccccgcgacctgatgacaggga

SEQ ID NO: 619384 - DNA, 25 bp, Homo sapien
gcagcgggagcctattaaagggaca

SEQ ID NO: 619385 - DNA, 25 bp, Homo sapien
acagggcgaggcgatgccagcaaac

SEQ ID NO: 619386 - DNA, 25 bp, Homo sapien
aagacagggcgaggcgatgccagca

SEQ ID NO: 619387 - DNA, 25 bp, Homo sapien
agacagggcgaggcgatgccagcaa

SEQ ID NO: 619388 - DNA, 25 bp, Homo sapien
agggcgaggcgatgccagcaaacat

SEQ ID NO: 619389 - DNA, 25 bp, Homo sapien
gcacactcgcgcgtaaagataagga

SEQ ID NO: 619390 - DNA, 25 bp, Homo sapien
ccccgtctgtgagtgatatgcgaga

SEQ ID NO: 619391 - DNA, 25 bp, Homo sapien
ggcttgtgccggctgctttgaagta

SEQ ID NO: 619392 - DNA, 25 bp, Homo sapien
gggagagcgatcactcactgtaggt

SEQ ID NO: 619393 - DNA, 25 bp, Homo sapien
tgggtgcctgctgttttctcctcgg

SEQ ID NO: 619394 - DNA, 25 bp, Homo sapien
tgccgcccgcttgggtgcctgctgt

SEQ ID NO: 619395 - DNA, 25 bp, Homo sapien
ctgccgcccgcttgggtgcctgctg

SEQ ID NO: 619396 - DNA, 25 bp, Homo sapien
gtgcctgctgttttctcctcggcat

SEQ ID NO: 619397 - DNA, 25 bp, Homo sapien
tatgttacgtacacctggatcctta

SEQ ID NO: 619398 - DNA, 25 bp, Homo sapien
ccttatcgatcgtaggataattata

SEQ ID NO: 619399 - DNA, 25 bp, Homo sapien
caaagtcgagcaattctgagcaatg

SEQ ID NO: 619400 - DNA, 25 bp, Homo sapien
gatacagtgttatgttacgtacacc

SEQ ID NO: 619401 - DNA, 25 bp, Homo sapien
atgaatcatcctttttcagcttaaa

SEQ ID NO: 619402 - DNA, 25 bp, Homo sapien
tgtacgaaatgaatcatcctttttc

SEQ ID NO: 619403 - DNA, 25 bp, Homo sapien
atcatcctttttcagcttaaaaagg

SEQ ID NO: 619404 - DNA, 25 bp, Homo sapien
gaatcatcctttttcagcttaaaaa

SEQ ID NO: 619405 - DNA, 25 bp, Homo sapien
agttgtccctgttgactatgtttcc

SEQ ID NO: 619406 - DNA, 25 bp, Homo sapien
tgactatgtttcccatgtaaataac

SEQ ID NO: 619407 - DNA, 25 bp, Homo sapien
gagttgtccctgttgactatgtttc

SEQ ID NO: 619408 - DNA, 25 bp, Homo sapien
tcatcactatcaagaggtggaaaag

SEQ ID NO: 619409 - DNA, 25 bp, Homo sapien
tcagagtcatcactatcaagaggtg

SEQ ID NO: 619410 - DNA, 25 bp, Homo sapien
tcactatcaagaggtggaaaagaga

SEQ ID NO: 619411 - DNA, 25 bp, Homo sapien
gagtcatcactatcaagaggtggaa

SEQ ID NO: 619412 - DNA, 25 bp, Homo sapien
ctgattagggttaacgtattgtgtc

SEQ ID NO: 619413 - DNA, 25 bp, Homo sapien
tcacttgtaatctgctgattagggt

SEQ ID NO: 619414 - DNA, 25 bp, Homo sapien
ctgctgattagggttaacgtattgt

SEQ ID NO: 619415 - DNA, 25 bp, Homo sapien
ctgtcacttgtaatctgctgattag

SEQ ID NO: 619416 - DNA, 25 bp, Homo sapien
ctgacagatgaaaacgctgaggtgc

SEQ ID NO: 619417 - DNA, 25 bp, Homo sapien
cattcatttgtgaggaagaacccat

SEQ ID NO: 619418 - DNA, 25 bp, Homo sapien
taaacggtgccaaggactaactcag

SEQ ID NO: 619419 - DNA, 25 bp, Homo sapien
ctgggcccgcaccaagagttttata

SEQ ID NO: 619420 - DNA, 25 bp, Homo sapien
tgttcataaaggtcctaaggcaggc

SEQ ID NO: 619421 - DNA, 25 bp, Homo sapien
ctcaatgtaagctccgggaaggcag

SEQ ID NO: 619422 - DNA, 25 bp, Homo sapien
tccagagaggtgcagttttcttcca

SEQ ID NO: 619423 - DNA, 25 bp, Homo sapien
tgtcattcggatgcaaggctccagt

SEQ ID NO: 619424 - DNA, 25 bp, Homo sapien
tggtcggcctgctcgcaacctgggt

SEQ ID NO: 619425 - DNA, 25 bp, Homo sapien
tgactgcattgatgtagacgcctct

SEQ ID NO: 619426 - DNA, 25 bp, Homo sapien
tgcaaacttgtggtctctccccgga

SEQ ID NO: 619427 - DNA, 25 bp, Homo sapien
tctggtccaagtcagcatagccttt

SEQ ID NO: 619428 - DNA, 25 bp, Homo sapien
aatgagtccttttattaggtctgtt

SEQ ID NO: 619429 - DNA, 25 bp, Homo sapien
ttcttcattgcaagtaccacggtgt

SEQ ID NO: 619430 - DNA, 25 bp, Homo sapien
ccacggtgttaagcgtattatctgg

SEQ ID NO: 619431 - DNA, 25 bp, Homo sapien
aagcgtattatctggtttatctcaa

SEQ ID NO: 619432 - DNA, 25 bp, Homo sapien
gagacatgctttcggctccttgggt

SEQ ID NO: 619433 - DNA, 25 bp, Homo sapien
tgagcactcgctgtatgcaaagcac

SEQ ID NO: 619434 - DNA, 25 bp, Homo sapien
taacctttccccgtagagacatgct

SEQ ID NO: 619435 - DNA, 25 bp, Homo sapien
ccaggtcttgtggacacgaaagcaa

SEQ ID NO: 619436 - DNA, 25 bp, Homo sapien
tcgctgtaacacaatagagagcctt

SEQ ID NO: 619437 - DNA, 25 bp, Homo sapien
aatgcatgcatttcctcgctgtaac

SEQ ID NO: 619438 - DNA, 25 bp, Homo sapien
gaagacttttctgggctctgtttca

SEQ ID NO: 619439 - DNA, 25 bp, Homo sapien
gccacaagtgaaaatggacccctca

SEQ ID NO: 619440 - DNA, 25 bp, Homo sapien
cattaaggcgatgacagttagtgtc

SEQ ID NO: 619441 - DNA, 25 bp, Homo sapien
cacattcacccatggatcaccggta

SEQ ID NO: 619442 - DNA, 25 bp, Homo sapien
tcaagaaatggtaaccattaaggcg

SEQ ID NO: 619443 - DNA, 25 bp, Homo sapien
tgttcatcattagcaccatcatcgt

SEQ ID NO: 619444 - DNA, 25 bp, Homo sapien
gattcttactgagacgccccagatg

SEQ ID NO: 619445 - DNA, 25 bp, Homo sapien
tcttgaccataaacctgtgagggca

SEQ ID NO: 619446 - DNA, 25 bp, Homo sapien
taaatttcagttcatggccttagcc

SEQ ID NO: 619447 - DNA, 25 bp, Homo sapien
gagcagcgtctgacttaaggccaca

SEQ ID NO: 619448 - DNA, 25 bp, Homo sapien
tagtgcctgtctctagggagagact

SEQ ID NO: 619449 - DNA, 25 bp, Homo sapien
gaattcttattatgcgccaagcgtt

SEQ ID NO: 619450 - DNA, 25 bp, Homo sapien
taatggaagatacgcacactagatt

SEQ ID NO: 619451 - DNA, 25 bp, Homo sapien
gaagtaagaactctccttatgccta

SEQ ID NO: 619452 - DNA, 25 bp, Homo sapien
ctttcattcctgacatacaaaaact

SEQ ID NO: 619453 - DNA, 25 bp, Homo sapien
tttcattcctgacatacaaaaactt

SEQ ID NO: 619454 - DNA, 25 bp, Homo sapien
tctttcattcctgacatacaaaaac

SEQ ID NO: 619455 - DNA, 25 bp, Homo sapien
ttcattcctgacatacaaaaacttt

SEQ ID NO: 619456 - DNA, 25 bp, Homo sapien
gcacaaatgattcagccacgagcac

SEQ ID NO: 619457 - DNA, 25 bp, Homo sapien
acaaatgattcagccacgagcacat

SEQ ID NO: 619458 - DNA, 25 bp, Homo sapien
tacatatgcattggactaaatcaac

SEQ ID NO: 619459 - DNA, 25 bp, Homo sapien
ctcagctttggatgcacaaatgatt

SEQ ID NO: 619460 - DNA, 25 bp, Homo sapien
gacgaagaaagagatgcctgcacta

SEQ ID NO: 619461 - DNA, 25 bp, Homo sapien
tgttgatgtccgagcagacccagat

SEQ ID NO: 619462 - DNA, 25 bp, Homo sapien
tgtccccaaacaaaggttgcatgcc

SEQ ID NO: 619463 - DNA, 25 bp, Homo sapien
gatgcaataatagccacccatggga

SEQ ID NO: 619464 - DNA, 25 bp, Homo sapien
tggcgtttagctcacaggtcacagt

SEQ ID NO: 619465 - DNA, 25 bp, Homo sapien
aaaaatacactagggcagaagccag

SEQ ID NO: 619466 - DNA, 25 bp, Homo sapien
cattggacgtctgcgaagatgaact

SEQ ID NO: 619467 - DNA, 25 bp, Homo sapien
ctgtcctacacatacaacaagttgg

SEQ ID NO: 619468 - DNA, 25 bp, Homo sapien
cagaagacgaggtggggctttattt

SEQ ID NO: 619469 - DNA, 25 bp, Homo sapien
aacagaagacgaggtggggctttat

SEQ ID NO: 619470 - DNA, 25 bp, Homo sapien
acagaagacgaggtggggctttatt

SEQ ID NO: 619471 - DNA, 25 bp, Homo sapien
cgtaggtcccaaatactgtactgga

SEQ ID NO: 619472 - DNA, 25 bp, Homo sapien
gggcagaccatgacctctccttgag

SEQ ID NO: 619473 - DNA, 25 bp, Homo sapien
taatacacacgtcgtacctggagaa

SEQ ID NO: 619474 - DNA, 25 bp, Homo sapien
cctcataatcaataggccctgggaa

SEQ ID NO: 619475 - DNA, 25 bp, Homo sapien
gccgatcactaaggaatcttctcaa

SEQ ID NO: 619476 - DNA, 25 bp, Homo sapien
tacaggcgtgccagtttgaaagcgt

SEQ ID NO: 619477 - DNA, 25 bp, Homo sapien
cagtttgaaagcgtgtaagccgatc

SEQ ID NO: 619478 - DNA, 25 bp, Homo sapien
ggcctgctcatacctcgagcttcca

SEQ ID NO: 619479 - DNA, 25 bp, Homo sapien
tctggactgctaagcgtaaatgcct

SEQ ID NO: 619480 - DNA, 25 bp, Homo sapien
tgttttatgcttttcccggcaggtc

SEQ ID NO: 619481 - DNA, 25 bp, Homo sapien
tgctaagcgtaaatgccttttctct

SEQ ID NO: 619482 - DNA, 25 bp, Homo sapien
tcccggcaggtctggactgctaagc

SEQ ID NO: 619483 - DNA, 25 bp, Homo sapien
ggtaactattccatgctaatgtcat

SEQ ID NO: 619484 - DNA, 25 bp, Homo sapien
actttgaaaggcctatactcatgcc

SEQ ID NO: 619485 - DNA, 25 bp, Homo sapien
ggcccagttgccatattgcaagtca

SEQ ID NO: 619486 - DNA, 25 bp, Homo sapien
tactcctcttgttaactctttatgg

SEQ ID NO: 619487 - DNA, 25 bp, Homo sapien
gctggttctaaccactgaacagcag

SEQ ID NO: 619488 - DNA, 25 bp, Homo sapien
tgcatccagctggttctaaccactg

SEQ ID NO: 619489 - DNA, 25 bp, Homo sapien
cgaccagaggatcttgcatccagct

SEQ ID NO: 619490 - DNA, 25 bp, Homo sapien
aggctgggcacacataaaatccgac

SEQ ID NO: 619491 - DNA, 25 bp, Homo sapien
gctttaatggaagttatggcagtga

SEQ ID NO: 619492 - DNA, 25 bp, Homo sapien
taatggaagttatggcagtgataga

SEQ ID NO: 619493 - DNA, 25 bp, Homo sapien
gaagttatggcagtgatagactctt

SEQ ID NO: 619494 - DNA, 25 bp, Homo sapien
tcttttgaaactgtttagtggaggc

SEQ ID NO: 619495 - DNA, 25 bp, Homo sapien
gttttcgttggccatctgggaaata

SEQ ID NO: 619496 - DNA, 25 bp, Homo sapien
ctgggaaatacaaatattgaccacc

SEQ ID NO: 619497 - DNA, 25 bp, Homo sapien
ccaccttgtctacaaggatgccatg

SEQ ID NO: 619498 - DNA, 25 bp, Homo sapien
tgcgagttaggatacagctgttagg

SEQ ID NO: 619499 - DNA, 25 bp, Homo sapien
gaagcatgcagctcacaggatatca

SEQ ID NO: 619500 - DNA, 25 bp, Homo sapien
cagattttatttggcagtcataggc

SEQ ID NO: 619501 - DNA, 25 bp, Homo sapien
tgaaaaccttgagaatagtgtcgtc

SEQ ID NO: 619502 - DNA, 25 bp, Homo sapien
aaatgacgaaatataaggaactggc

SEQ ID NO: 619503 - DNA, 25 bp, Homo sapien
ataggtctgatcaacagccccaagc

SEQ ID NO: 619504 - DNA, 25 bp, Homo sapien
aaaataggtctgatcaacagcccca

SEQ ID NO: 619505 - DNA, 25 bp, Homo sapien
taaaaataggtctgatcaacagccc

SEQ ID NO: 619506 - DNA, 25 bp, Homo sapien
ccgtaaaaataggtctgatcaacag

SEQ ID NO: 619507 - DNA, 25 bp, Homo sapien
tcagaaaaagtaacgccaaaatgtg

SEQ ID NO: 619508 - DNA, 25 bp, Homo sapien
tctgaggctgagtaactgactttca

SEQ ID NO: 619509 - DNA, 25 bp, Homo sapien
tatatgcctagcacactgaagtgat

SEQ ID NO: 619510 - DNA, 25 bp, Homo sapien
tgttgccagatgattcagtaccctc

SEQ ID NO: 619511 - DNA, 25 bp, Homo sapien
tctgatgatggattgcacggaacgt

SEQ ID NO: 619512 - DNA, 25 bp, Homo sapien
tcatccgccggaaactttcctgctg

SEQ ID NO: 619513 - DNA, 25 bp, Homo sapien
gagctggtggtaggtgttgaaggga

SEQ ID NO: 619514 - DNA, 25 bp, Homo sapien
tccattccacccttgatcaggagga

SEQ ID NO: 619515 - DNA, 25 bp, Homo sapien
aggctcttcctcagtaacaaccgtt

SEQ ID NO: 619516 - DNA, 25 bp, Homo sapien
gtttatgtgaacctctctgcaacaa

SEQ ID NO: 619517 - DNA, 25 bp, Homo sapien
ctttgttctgaatttgtgtaaacag

SEQ ID NO: 619518 - DNA, 25 bp, Homo sapien
gaagctgtagcaatgtttctttgtt

SEQ ID NO: 619519 - DNA, 25 bp, Homo sapien
gctgacttgtcccagtgtgccgtgg

SEQ ID NO: 619520 - DNA, 25 bp, Homo sapien
tgtgccgtggactctcccagtttaa

SEQ ID NO: 619521 - DNA, 25 bp, Homo sapien
ccttttatagcttggcatgcagtgc

SEQ ID NO: 619522 - DNA, 25 bp, Homo sapien
tctcccattgcatgtaaagtacagc

SEQ ID NO: 619523 - DNA, 25 bp, Homo sapien
tctctgctaagctcatagacttgtg

SEQ ID NO: 619524 - DNA, 25 bp, Homo sapien
gattcttccggatacaaaaatgcaa

SEQ ID NO: 619525 - DNA, 25 bp, Homo sapien
taagcccgagttctcttaggaatac

SEQ ID NO: 619526 - DNA, 25 bp, Homo sapien
ttcagcacctgagagactacttcca

SEQ ID NO: 619527 - DNA, 25 bp, Homo sapien
cctttgcatcaattccctggtctat

SEQ ID NO: 619528 - DNA, 25 bp, Homo sapien
tgcatcaattccctggtctatgcca

SEQ ID NO: 619529 - DNA, 25 bp, Homo sapien
tcaattccctggtctatgccagcgc

SEQ ID NO: 619530 - DNA, 25 bp, Homo sapien
tctaccctctccgacatcccactca

SEQ ID NO: 619531 - DNA, 25 bp, Homo sapien
acttttctctaaatagcctgaagac

SEQ ID NO: 619532 - DNA, 25 bp, Homo sapien
tggccgaatcaatagacatactact

SEQ ID NO: 619533 - DNA, 25 bp, Homo sapien
tttctctaaatagcctgaagacacc

SEQ ID NO: 619534 - DNA, 25 bp, Homo sapien
catcatttaagtccctgccaatggc

SEQ ID NO: 619535 - DNA, 25 bp, Homo sapien
ttggatttaatccaactagaagaag

SEQ ID NO: 619536 - DNA, 25 bp, Homo sapien
aagaagcagaggtactacacagcca

SEQ ID NO: 619537 - DNA, 25 bp, Homo sapien
tgtccttggatttaatccaactaga

SEQ ID NO: 619538 - DNA, 25 bp, Homo sapien
gaggtactacacagccaacacgtac

SEQ ID NO: 619539 - DNA, 25 bp, Homo sapien
gacatgatctcgtaagcctgaactc

SEQ ID NO: 619540 - DNA, 25 bp, Homo sapien
tattggacatgatctcgtaagcctg

SEQ ID NO: 619541 - DNA, 25 bp, Homo sapien
ttggcctattggacatgatctcgta

SEQ ID NO: 619542 - DNA, 25 bp, Homo sapien
cactttggcctattggacatgatct

SEQ ID NO: 619543 - DNA, 25 bp, Homo sapien
gctcggagacccttgcaagcaagct

SEQ ID NO: 619544 - DNA, 25 bp, Homo sapien
tgggcttgtgggctcggagaccctt

SEQ ID NO: 619545 - DNA, 25 bp, Homo sapien
gagacccttgcaagcaagctgctgt

SEQ ID NO: 619546 - DNA, 25 bp, Homo sapien
cttgtgggctcggagacccttgcaa

SEQ ID NO: 619547 - DNA, 25 bp, Homo sapien
caattctaattgatgggagcggtca

SEQ ID NO: 619548 - DNA, 25 bp, Homo sapien
taaggtctctcgtatagggctataa

SEQ ID NO: 619549 - DNA, 25 bp, Homo sapien
cacacaaggaaacgatattgtgagt

SEQ ID NO: 619550 - DNA, 25 bp, Homo sapien
ggattggaactgatgtcaattctaa

SEQ ID NO: 619551 - DNA, 25 bp, Homo sapien
cccctgggccagattgaaactggaa

SEQ ID NO: 619552 - DNA, 25 bp, Homo sapien
taactggatttgctgcatggatccc

SEQ ID NO: 619553 - DNA, 25 bp, Homo sapien
aacaagtgtgatctaggagtcttga

SEQ ID NO: 619554 - DNA, 25 bp, Homo sapien
aagtgtgatctaggagtcttgagac

SEQ ID NO: 619555 - DNA, 25 bp, Homo sapien
atggaccttgagagcatgttggagg

SEQ ID NO: 619556 - DNA, 25 bp, Homo sapien
cagccatggatttgtcaatgctggg

SEQ ID NO: 619557 - DNA, 25 bp, Homo sapien
ctattaagattggaccaattgtttc

SEQ ID NO: 619558 - DNA, 25 bp, Homo sapien
catggatttgtcaatgctgggtgtg

SEQ ID NO: 619559 - DNA, 25 bp, Homo sapien
ggatttgtcaatgctgggtgtgcct

SEQ ID NO: 619560 - DNA, 25 bp, Homo sapien
caaactgggtctatgtgacaaaaag

SEQ ID NO: 619561 - DNA, 25 bp, Homo sapien
gctaaagttgcgtacatattgtcca

SEQ ID NO: 619562 - DNA, 25 bp, Homo sapien
cagatgctctagcactgtgtagaca

SEQ ID NO: 619563 - DNA, 25 bp, Homo sapien
aaaatagagttaattgtctgaatgt

SEQ ID NO: 619564 - DNA, 25 bp, Homo sapien
acctgaaaggccatgatactgagag

SEQ ID NO: 619565 - DNA, 25 bp, Homo sapien
gccagattcatcatggagcatcaaa

SEQ ID NO: 619566 - DNA, 25 bp, Homo sapien
agagccaccagcttcgtataaacag

SEQ ID NO: 619567 - DNA, 25 bp, Homo sapien
aaaggccatgatactgagagccacc

SEQ ID NO: 619568 - DNA, 25 bp, Homo sapien
gggcaacggtaattgcttcgatgcc

SEQ ID NO: 619569 - DNA, 25 bp, Homo sapien
tttgagaccttcgtaagaactgtta

SEQ ID NO: 619570 - DNA, 25 bp, Homo sapien
catgaataggatggggcaacggtaa

SEQ ID NO: 619571 - DNA, 25 bp, Homo sapien
gccttgcatatttatgtttgagacc

SEQ ID NO: 619572 - DNA, 25 bp, Homo sapien
agggaattttggcagatgcagggct

SEQ ID NO: 619573 - DNA, 25 bp, Homo sapien
tcatctgcatgtccatattctaggg

SEQ ID NO: 619574 - DNA, 25 bp, Homo sapien
ggagagggaattttggcagatgcag

SEQ ID NO: 619575 - DNA, 25 bp, Homo sapien
atctgcatgtccatattctagggcc

SEQ ID NO: 619576 - DNA, 25 bp, Homo sapien
tggaaatgccctgattaagactgct

SEQ ID NO: 619577 - DNA, 25 bp, Homo sapien
tttgcggagccataacttacctagg

SEQ ID NO: 619578 - DNA, 25 bp, Homo sapien
tatagagtagtggtgcccaactagc

SEQ ID NO: 619579 - DNA, 25 bp, Homo sapien
gaatgacaacttaagctgcctagag

SEQ ID NO: 619580 - DNA, 25 bp, Homo sapien
taatttgtgataagaggagatgcct

SEQ ID NO: 619581 - DNA, 25 bp, Homo sapien
ttctgggtattagggcacattctgg

SEQ ID NO: 619582 - DNA, 25 bp, Homo sapien
caccgtgccctgactatatggacct

SEQ ID NO: 619583 - DNA, 25 bp, Homo sapien
gattaacctacgcttaaggactgcc

SEQ ID NO: 619584 - DNA, 25 bp, Homo sapien
gaagaggcatgagagaacgtgcact

SEQ ID NO: 619585 - DNA, 25 bp, Homo sapien
ggaatatttaaacttgctcaagtgt

SEQ ID NO: 619586 - DNA, 25 bp, Homo sapien
agaacccaataatgctgacactctg

SEQ ID NO: 619587 - DNA, 25 bp, Homo sapien
ctcccaatgggttggtattaagaga

SEQ ID NO: 619588 - DNA, 25 bp, Homo sapien
taagaaccatttacccatatagcgt

SEQ ID NO: 619589 - DNA, 25 bp, Homo sapien
cccttttaacccatgaatgcactgg

SEQ ID NO: 619590 - DNA, 25 bp, Homo sapien
taagcatgccgatcaaacagtggtg

SEQ ID NO: 619591 - DNA, 25 bp, Homo sapien
gtggacctcacataagacactagga

SEQ ID NO: 619592 - DNA, 25 bp, Homo sapien
tgctgggcagcatagcgctggactc

SEQ ID NO: 619593 - DNA, 25 bp, Homo sapien
tgttcatcgttaccatgctgggcag

SEQ ID NO: 619594 - DNA, 25 bp, Homo sapien
catagctccattgggattagtgaca

SEQ ID NO: 619595 - DNA, 25 bp, Homo sapien
gtgacaccgatatctagaacatagc

SEQ ID NO: 619596 - DNA, 25 bp, Homo sapien
taagcaggacctggtgaatcagatc

SEQ ID NO: 619597 - DNA, 25 bp, Homo sapien
gagccactctgcgtagactgacagc

SEQ ID NO: 619598 - DNA, 25 bp, Homo sapien
ttttgccggctaccattccgagagg

SEQ ID NO: 619599 - DNA, 25 bp, Homo sapien
ccaaccgaaggttaagcaaggcacg

SEQ ID NO: 619600 - DNA, 25 bp, Homo sapien
gatttagatttgcagcatctagcgc

SEQ ID NO: 619601 - DNA, 25 bp, Homo sapien
catctagcgctaagaaattgataac

SEQ ID NO: 619602 - DNA, 25 bp, Homo sapien
gatacagttcacatgcaagacacac

SEQ ID NO: 619603 - DNA, 25 bp, Homo sapien
tcataatatgtaaacccactgagcc

SEQ ID NO: 619604 - DNA, 25 bp, Homo sapien
cttcagcaagatgatgcaggtcttg

SEQ ID NO: 619605 - DNA, 25 bp, Homo sapien
gagctggctcgaactgggtgcttta

SEQ ID NO: 619606 - DNA, 25 bp, Homo sapien
tctaacgtgtcaaagagtggccacc

SEQ ID NO: 619607 - DNA, 25 bp, Homo sapien
tggcagaccacgaggaatggataca

SEQ ID NO: 619608 - DNA, 25 bp, Homo sapien
gaagccaaccatggcagtggtcaaa

SEQ ID NO: 619609 - DNA, 25 bp, Homo sapien
caaagatgctcctgttgccaataag

SEQ ID NO: 619610 - DNA, 25 bp, Homo sapien
tacgtgcacagagatcagctagagg

SEQ ID NO: 619611 - DNA, 25 bp, Homo sapien
tgtctgaaaggtgacaaagtcctgg

SEQ ID NO: 619612 - DNA, 25 bp, Homo sapien
gaactacatgatcaggtcagagctg

SEQ ID NO: 619613 - DNA, 25 bp, Homo sapien
tgagaaaattaagatccagtgaggc

SEQ ID NO: 619614 - DNA, 25 bp, Homo sapien
aaaagcttcttagggcagctatcac

SEQ ID NO: 619615 - DNA, 25 bp, Homo sapien
gagaagttctgtagcgaagtcctaa

SEQ ID NO: 619616 - DNA, 25 bp, Homo sapien
gaacagtacctttgcatagcgtagg

SEQ ID NO: 619617 - DNA, 25 bp, Homo sapien
gggattgcaggaaacagtagacaca

SEQ ID NO: 619618 - DNA, 25 bp, Homo sapien
cctgacagctgagttctaaacagtt

SEQ ID NO: 619619 - DNA, 25 bp, Homo sapien
tatgaaactgtcaacaaggccttgt

SEQ ID NO: 619620 - DNA, 25 bp, Homo sapien
gcccggataggtgcaggaaaggtga

SEQ ID NO: 619621 - DNA, 25 bp, Homo sapien
tctgaaccggaagccctgtggagct

SEQ ID NO: 619622 - DNA, 25 bp, Homo sapien
tagctaatacagaggaaggaggacc

SEQ ID NO: 619623 - DNA, 25 bp, Homo sapien
tagaggacctctcaatggcctggcc

SEQ ID NO: 619624 - DNA, 25 bp, Homo sapien
tattggaactcatcacgtgactcag

SEQ ID NO: 619625 - DNA, 25 bp, Homo sapien
gctgtcagccatagtgtgccctaaa

SEQ ID NO: 619626 - DNA, 25 bp, Homo sapien
tcagcgccggattaagcaaagttac

SEQ ID NO: 619627 - DNA, 25 bp, Homo sapien
tactcaatgcgatctgacacagttc

SEQ ID NO: 619628 - DNA, 25 bp, Homo sapien
taagtgttgcaaagcagcgggtcac

SEQ ID NO: 619629 - DNA, 25 bp, Homo sapien
gaggctaaaagcatagactccagac

SEQ ID NO: 619630 - DNA, 25 bp, Homo sapien
gattttaccttagattagaagccac

SEQ ID NO: 619631 - DNA, 25 bp, Homo sapien
tcaggtgggatttgactcactggct

SEQ ID NO: 619632 - DNA, 25 bp, Homo sapien
ctaaattgaggatatgtgcaggtac

SEQ ID NO: 619633 - DNA, 25 bp, Homo sapien
caatacgtcaacaaataagagtggc

SEQ ID NO: 619634 - DNA, 25 bp, Homo sapien
taactctggaaactagggtggtaca

SEQ ID NO: 619635 - DNA, 25 bp, Homo sapien
taaatgagctggaattcgacaacct

SEQ ID NO: 619636 - DNA, 25 bp, Homo sapien
tatttcaggctttgagggtcacatg

SEQ ID NO: 619637 - DNA, 25 bp, Homo sapien
acagacattgttatcggcacatcta

SEQ ID NO: 619638 - DNA, 25 bp, Homo sapien
ggcacatctaacttaattgtagcca

SEQ ID NO: 619639 - DNA, 25 bp, Homo sapien
ctgaaatgtgcgatttaaaatggaa

SEQ ID NO: 619640 - DNA, 25 bp, Homo sapien
tgtctgaaatgtgcgatttaaaatg

SEQ ID NO: 619641 - DNA, 25 bp, Homo sapien
caccatcatcttaagtcagaggcta

SEQ ID NO: 619642 - DNA, 25 bp, Homo sapien
tcatcttaagtcagaggctatcacc

SEQ ID NO: 619643 - DNA, 25 bp, Homo sapien
agtcagaggctatcaccaattttgg

SEQ ID NO: 619644 - DNA, 25 bp, Homo sapien
tcaccaattttggagcaaacagatt

SEQ ID NO: 619645 - DNA, 25 bp, Homo sapien
gaagggttagaacagcgtggatctc

SEQ ID NO: 619646 - DNA, 25 bp, Homo sapien
tttttctaaccccatgcattttgag

SEQ ID NO: 619647 - DNA, 25 bp, Homo sapien
ccattatgttgctctggcacttgca

SEQ ID NO: 619648 - DNA, 25 bp, Homo sapien
ggcacttgcatctcgctgatgtcta

SEQ ID NO: 619649 - DNA, 25 bp, Homo sapien
gaaagtcggagactaaccataaatc

SEQ ID NO: 619650 - DNA, 25 bp, Homo sapien
tcggtatgatttacaatgtggagcc

SEQ ID NO: 619651 - DNA, 25 bp, Homo sapien
gaatgagtgacaacccttcggtatg

SEQ ID NO: 619652 - DNA, 25 bp, Homo sapien
aaccaggacttgatggatgatgctg

SEQ ID NO: 619653 - DNA, 25 bp, Homo sapien
aagggctgctccgtgaaatactagt

SEQ ID NO: 619654 - DNA, 25 bp, Homo sapien
tatcgatggaattcaaatggcagtc

SEQ ID NO: 619655 - DNA, 25 bp, Homo sapien
gactagccactttgtatgctggaaa

SEQ ID NO: 619656 - DNA, 25 bp, Homo sapien
cctttctgtgataggctgcgacgca

SEQ ID NO: 619657 - DNA, 25 bp, Homo sapien
tctaaactaccctcatctgataaac

SEQ ID NO: 619658 - DNA, 25 bp, Homo sapien
gattgattggttgttcctcccagga

SEQ ID NO: 619659 - DNA, 25 bp, Homo sapien
caatccctggcaaagcgtcttggtg

SEQ ID NO: 619660 - DNA, 25 bp, Homo sapien
caaagcgtcttggtgttccataata

SEQ ID NO: 619661 - DNA, 25 bp, Homo sapien
caccgcacccggccacaagttactt

SEQ ID NO: 619662 - DNA, 25 bp, Homo sapien
gatgaaagacccagatgcaaagcct

SEQ ID NO: 619663 - DNA, 25 bp, Homo sapien
aaaatcccaaggtctcgtgctctga

SEQ ID NO: 619664 - DNA, 25 bp, Homo sapien
gataaatcaaacagcaccaggtgga

SEQ ID NO: 619665 - DNA, 25 bp, Homo sapien
aagtgtttcggccaaatacccatga

SEQ ID NO: 619666 - DNA, 25 bp, Homo sapien
agagctagcttttgaccattagcca

SEQ ID NO: 619667 - DNA, 25 bp, Homo sapien
tatgaaagtcattaccctggtcagt

SEQ ID NO: 619668 - DNA, 25 bp, Homo sapien
tcttatttcgcctaacttcacgcat

SEQ ID NO: 619669 - DNA, 25 bp, Homo sapien
ccattagccatccaaatacttaggg

SEQ ID NO: 619670 - DNA, 25 bp, Homo sapien
atacacagtcggttgagtaaatagc

SEQ ID NO: 619671 - DNA, 25 bp, Homo sapien
aatctgctttaaatcgtccatatac

SEQ ID NO: 619672 - DNA, 25 bp, Homo sapien
gagctggtacagtctactgggtcaa

SEQ ID NO: 619673 - DNA, 25 bp, Homo sapien
tcattgagacgatagatagagctgg

SEQ ID NO: 619674 - DNA, 25 bp, Homo sapien
ttatagcatcataaggtccaggctg

SEQ ID NO: 619675 - DNA, 25 bp, Homo sapien
gtccaggctgtataaaactgctccc

SEQ ID NO: 619676 - DNA, 25 bp, Homo sapien
tttaatttcatggtaccccagtgca

SEQ ID NO: 619677 - DNA, 25 bp, Homo sapien
gctcccttacagacacattggaaag

SEQ ID NO: 619678 - DNA, 25 bp, Homo sapien
ggaaaagcatctccttatatgcagc

SEQ ID NO: 619679 - DNA, 25 bp, Homo sapien
gattattaggcatgggctgagttcc

SEQ ID NO: 619680 - DNA, 25 bp, Homo sapien
ttctaacacctttgagtgaccctta

SEQ ID NO: 619681 - DNA, 25 bp, Homo sapien
tgagtgacccttaggaggtacaaag

SEQ ID NO: 619682 - DNA, 25 bp, Homo sapien
cattatttttggcagctggtttctt

SEQ ID NO: 619683 - DNA, 25 bp, Homo sapien
ctttgcacttcagggtgaatgagtt

SEQ ID NO: 619684 - DNA, 25 bp, Homo sapien
agggtgaatgagttaattagatcat

SEQ ID NO: 619685 - DNA, 25 bp, Homo sapien
tagatcattatttttggcagctggt

SEQ ID NO: 619686 - DNA, 25 bp, Homo sapien
caatctgcccacccagtatagtcat

SEQ ID NO: 619687 - DNA, 25 bp, Homo sapien
acacacaatctgcccacccagtata

SEQ ID NO: 619688 - DNA, 25 bp, Homo sapien
acaatctgcccacccagtatagtca

SEQ ID NO: 619689 - DNA, 25 bp, Homo sapien
acacaatctgcccacccagtatagt

SEQ ID NO: 619690 - DNA, 25 bp, Homo sapien
cctcttctttcagctgttcctcctg

SEQ ID NO: 619691 - DNA, 25 bp, Homo sapien
tcctcttctttcagctgttcctcct

SEQ ID NO: 619692 - DNA, 25 bp, Homo sapien
ttcagctgttcctcctgggcgtagc

SEQ ID NO: 619693 - DNA, 25 bp, Homo sapien
tcctcctcttctttcagctgttcct

SEQ ID NO: 619694 - DNA, 25 bp, Homo sapien
ggcctgaccagtaggaatccgacag

SEQ ID NO: 619695 - DNA, 25 bp, Homo sapien
tattggacagcttgaagccaaggcc

SEQ ID NO: 619696 - DNA, 25 bp, Homo sapien
gatcactggcgtcactcagcagaga

SEQ ID NO: 619697 - DNA, 25 bp, Homo sapien
tccgacaggatgttggcgtagacag

SEQ ID NO: 619698 - DNA, 25 bp, Homo sapien
tcttggagggaatcaaaggagtcgc

SEQ ID NO: 619699 - DNA, 25 bp, Homo sapien
catgtggacgctcaaatcttggagg

SEQ ID NO: 619700 - DNA, 25 bp, Homo sapien
tagtggcccgtttcattcatgtgca

SEQ ID NO: 619701 - DNA, 25 bp, Homo sapien
tcgactagggtgtcataggccgcgc

SEQ ID NO: 619702 - DNA, 25 bp, Homo sapien
gggaacacggccgattgacatcaaa

SEQ ID NO: 619703 - DNA, 25 bp, Homo sapien
gccgattgacatcaaaaacgcgttt

SEQ ID NO: 619704 - DNA, 25 bp, Homo sapien
cacggccgattgacatcaaaaacgc

SEQ ID NO: 619705 - DNA, 25 bp, Homo sapien
tcctgtggttgaatcgggggaacac

SEQ ID NO: 619706 - DNA, 25 bp, Homo sapien
ccttgagaaagtgacctgtgaccat

SEQ ID NO: 619707 - DNA, 25 bp, Homo sapien
tagccatagcggttgttggaggaca

SEQ ID NO: 619708 - DNA, 25 bp, Homo sapien
tgcattttctccactgctaacgggt

SEQ ID NO: 619709 - DNA, 25 bp, Homo sapien
tccatgcactttaagatctgggact

SEQ ID NO: 619710 - DNA, 25 bp, Homo sapien
actgtttggggcctcagacaacgac

SEQ ID NO: 619711 - DNA, 25 bp, Homo sapien
cttcatagtcctcgcttttcacgac

SEQ ID NO: 619712 - DNA, 25 bp, Homo sapien
ctttaactcagttgtagaggctgta

SEQ ID NO: 619713 - DNA, 25 bp, Homo sapien
tgatgctgagttactggatggcttg

SEQ ID NO: 619714 - DNA, 25 bp, Homo sapien
taggtattgatatttgattgtaggg

SEQ ID NO: 619715 - DNA, 25 bp, Homo sapien
aggtattgatatttgattgtagggt

SEQ ID NO: 619716 - DNA, 25 bp, Homo sapien
ggtattgatatttgattgtagggtc

SEQ ID NO: 619717 - DNA, 25 bp, Homo sapien
tggacacgctggctgaccttgtgga

SEQ ID NO: 619718 - DNA, 25 bp, Homo sapien
tgggatcccataggcaaaggcggct

SEQ ID NO: 619719 - DNA, 25 bp, Homo sapien
tccactttggtgcaatgggcctcag

SEQ ID NO: 619720 - DNA, 25 bp, Homo sapien
tgtgtgggcatagaaaccagtggca

SEQ ID NO: 619721 - DNA, 25 bp, Homo sapien
aagattgtgcttgcgaggactcggc

SEQ ID NO: 619722 - DNA, 25 bp, Homo sapien
gatttgcatacgctcttgtgggccc

SEQ ID NO: 619723 - DNA, 25 bp, Homo sapien
tctggagacctctgagccgacgata

SEQ ID NO: 619724 - DNA, 25 bp, Homo sapien
tggagacatcctcaaagcgcctgac

SEQ ID NO: 619725 - DNA, 25 bp, Homo sapien
tgctcacaaatgtccgacagcacaa

SEQ ID NO: 619726 - DNA, 25 bp, Homo sapien
aaactgtgaatggtgttcgggtgac

SEQ ID NO: 619727 - DNA, 25 bp, Homo sapien
tcgggtgacttgctgtgcgttttgc

SEQ ID NO: 619728 - DNA, 25 bp, Homo sapien
gagttttaccgcatgtttgctcaca

SEQ ID NO: 619729 - DNA, 25 bp, Homo sapien
cccttagtgtatgcgggcatcatgc

SEQ ID NO: 619730 - DNA, 25 bp, Homo sapien
gattggttaagacccagccttgctt

SEQ ID NO: 619731 - DNA, 25 bp, Homo sapien
gccttgcttatcctcaacatttgaa

SEQ ID NO: 619732 - DNA, 25 bp, Homo sapien
tgaacacataggagggcccttagtg

SEQ ID NO: 619733 - DNA, 25 bp, Homo sapien
cgtcaactggattggtcagcacaga

SEQ ID NO: 619734 - DNA, 25 bp, Homo sapien
gctaattaactaggagcaaatccgt

SEQ ID NO: 619735 - DNA, 25 bp, Homo sapien
gtaaaccaatgctctgacaataggg

SEQ ID NO: 619736 - DNA, 25 bp, Homo sapien
tctccatcagaagcgtagatcgcct

SEQ ID NO: 619737 - DNA, 25 bp, Homo sapien
tctctaagtattctctgtatgcccc

SEQ ID NO: 619738 - DNA, 25 bp, Homo sapien
caggtgtgaattcaatggatgcatt

SEQ ID NO: 619739 - DNA, 25 bp, Homo sapien
tgttgaaccccaagctcaggtgtga

SEQ ID NO: 619740 - DNA, 25 bp, Homo sapien
tccgtgagctgaacaaatcatgctt

SEQ ID NO: 619741 - DNA, 25 bp, Homo sapien
tgggctgttggaggtacatccagcc

SEQ ID NO: 619742 - DNA, 25 bp, Homo sapien
caatgtttgatagctggagcctcca

SEQ ID NO: 619743 - DNA, 25 bp, Homo sapien
gaggtacatccagccatgagtatta

SEQ ID NO: 619744 - DNA, 25 bp, Homo sapien
gagttgcaatgtttgatagctggag

SEQ ID NO: 619745 - DNA, 25 bp, Homo sapien
tactgctagtgagtagtggacccta

SEQ ID NO: 619746 - DNA, 25 bp, Homo sapien
gtggatagatctacgcagctgctca

SEQ ID NO: 619747 - DNA, 25 bp, Homo sapien
tgctcatattcccaggcagagtgcc

SEQ ID NO: 619748 - DNA, 25 bp, Homo sapien
gcagagtgccctgttcgcattccag

SEQ ID NO: 619749 - DNA, 25 bp, Homo sapien
caataggatggcaacttcatagaca

SEQ ID NO: 619750 - DNA, 25 bp, Homo sapien
gaacagttttaaccattgcttccaa

SEQ ID NO: 619751 - DNA, 25 bp, Homo sapien
aatatagagctaatatgctgaacag

SEQ ID NO: 619752 - DNA, 25 bp, Homo sapien
cttttagggccaattaattcagaat

SEQ ID NO: 619753 - DNA, 25 bp, Homo sapien
caatgcaagcaagaagcatacactt

SEQ ID NO: 619754 - DNA, 25 bp, Homo sapien
taatgacagattgacgggagatttg

SEQ ID NO: 619755 - DNA, 25 bp, Homo sapien
tgtttaatgacagattgacgggaga

SEQ ID NO: 619756 - DNA, 25 bp, Homo sapien
atgacagattgacgggagatttgca

SEQ ID NO: 619757 - DNA, 25 bp, Homo sapien
ttaagacagaacataattgccagct

SEQ ID NO: 619758 - DNA, 25 bp, Homo sapien
taagggccccagatgaaaggccagt

SEQ ID NO: 619759 - DNA, 25 bp, Homo sapien
tctgagttgctgacattaatcgttt

SEQ ID NO: 619760 - DNA, 25 bp, Homo sapien
aaacgatcaggcctgtcaagagtaa

SEQ ID NO: 619761 - DNA, 25 bp, Homo sapien
ttgtactgacccaacatctgcaaaa

SEQ ID NO: 619762 - DNA, 25 bp, Homo sapien
taaagttctgaattttcaatcaaga

SEQ ID NO: 619763 - DNA, 25 bp, Homo sapien
ccagaatgctgggatacaagcgtga

SEQ ID NO: 619764 - DNA, 25 bp, Homo sapien
ttctcagatattgtactgacccaac

SEQ ID NO: 619765 - DNA, 25 bp, Homo sapien
tccgcttaggaacaaacacaaatgg

SEQ ID NO: 619766 - DNA, 25 bp, Homo sapien
taataagccgctcactccgcttagg

SEQ ID NO: 619767 - DNA, 25 bp, Homo sapien
gagaagccggctatttctgccctaa

SEQ ID NO: 619768 - DNA, 25 bp, Homo sapien
cattttccactgagctcgagaagta

SEQ ID NO: 619769 - DNA, 25 bp, Homo sapien
tacgattgtgcattcgcttcacttc

SEQ ID NO: 619770 - DNA, 25 bp, Homo sapien
ttgtcccctagatgatgaacctcgg

SEQ ID NO: 619771 - DNA, 25 bp, Homo sapien
gcaatgtgtccaggcactacgattg

SEQ ID NO: 619772 - DNA, 25 bp, Homo sapien
ggaggaactgtgtcctggtctggca

SEQ ID NO: 619773 - DNA, 25 bp, Homo sapien
tatggccagcctcccgataatggaa

SEQ ID NO: 619774 - DNA, 25 bp, Homo sapien
ggttgaagactcaagtttcctctat

SEQ ID NO: 619775 - DNA, 25 bp, Homo sapien
gaccacatagaaattagcttgagga

SEQ ID NO: 619776 - DNA, 25 bp, Homo sapien
ccaataaatgtcaggaagagatttg

SEQ ID NO: 619777 - DNA, 25 bp, Homo sapien
ttgctctatcgtccaggccagagtg

SEQ ID NO: 619778 - DNA, 25 bp, Homo sapien
cagtggcctgatctcagctcactgc

SEQ ID NO: 619779 - DNA, 25 bp, Homo sapien
agtcttgctctatcgtccaggccag

SEQ ID NO: 619780 - DNA, 25 bp, Homo sapien
gcctccaccgcccaggttcaataga

SEQ ID NO: 619781 - DNA, 25 bp, Homo sapien
tagagcgattaagcgacctgccaag

SEQ ID NO: 619782 - DNA, 25 bp, Homo sapien
taatctgcctaacaacctttgaggg

SEQ ID NO: 619783 - DNA, 25 bp, Homo sapien
ccacagaaattggtcaacacggcaa

SEQ ID NO: 619784 - DNA, 25 bp, Homo sapien
gcaaacgtctaccacagtgctaggt

SEQ ID NO: 619785 - DNA, 25 bp, Homo sapien
gactcgtgtctttatgtaaccgcag

SEQ ID NO: 619786 - DNA, 25 bp, Homo sapien
ccaatgactaggcagaaatgtacta

SEQ ID NO: 619787 - DNA, 25 bp, Homo sapien
taaccgcagtagtgttgttggaagc

SEQ ID NO: 619788 - DNA, 25 bp, Homo sapien
gactctcagaacctcttgatggact

SEQ ID NO: 619789 - DNA, 25 bp, Homo sapien
ccatagaggcagcaatacaagcaaa

SEQ ID NO: 619790 - DNA, 25 bp, Homo sapien
tcaagttcaaggttttaacatccca

SEQ ID NO: 619791 - DNA, 25 bp, Homo sapien
aacttcaccttagctaaagcatgag

SEQ ID NO: 619792 - DNA, 25 bp, Homo sapien
gacttaggcaagcatcaggatctgg

SEQ ID NO: 619793 - DNA, 25 bp, Homo sapien
aagaacctgaatggccttcagtctt

SEQ ID NO: 619794 - DNA, 25 bp, Homo sapien
agaacctgaatggccttcagtcttt

SEQ ID NO: 619795 - DNA, 25 bp, Homo sapien
tacacagagcacactaaaggaaggt

SEQ ID NO: 619796 - DNA, 25 bp, Homo sapien
tccactgggaatgtccaataacgag

SEQ ID NO: 619797 - DNA, 25 bp, Homo sapien
cagacgtgtgttgcaaaagccaggc

SEQ ID NO: 619798 - DNA, 25 bp, Homo sapien
acacatcatgcttgttgccctggag

SEQ ID NO: 619799 - DNA, 25 bp, Homo sapien
cacagcccctgaattgtttcatcat

SEQ ID NO: 619800 - DNA, 25 bp, Homo sapien
acagcccctgaattgtttcatcatt

SEQ ID NO: 619801 - DNA, 25 bp, Homo sapien
catcatttctctgcctgcatttcag

SEQ ID NO: 619802 - DNA, 25 bp, Homo sapien
gcctgcatttcagggccttttccat

SEQ ID NO: 619803 - DNA, 25 bp, Homo sapien
tgctggactcgaggcctgcatgctg

SEQ ID NO: 619804 - DNA, 25 bp, Homo sapien
tgctcatcaggccttgtaatacaat

SEQ ID NO: 619805 - DNA, 25 bp, Homo sapien
ctgccctggaacgtgctgctggact

SEQ ID NO: 619806 - DNA, 25 bp, Homo sapien
gtaatacaattcacgccgacactct

SEQ ID NO: 619807 - DNA, 25 bp, Homo sapien
gggctgctctctgtaagaaaaccaa

SEQ ID NO: 619808 - DNA, 25 bp, Homo sapien
gaacatgggctgtgtgtgcaaaaag

SEQ ID NO: 619809 - DNA, 25 bp, Homo sapien
gatcggcaatgtcctttgaatgata

SEQ ID NO: 619810 - DNA, 25 bp, Homo sapien
taaatactttgctccagaacatggg

SEQ ID NO: 619811 - DNA, 25 bp, Homo sapien
gctgacccaaagtagggactccacc

SEQ ID NO: 619812 - DNA, 25 bp, Homo sapien
acagacttgttgaggccatagacat

SEQ ID NO: 619813 - DNA, 25 bp, Homo sapien
tgttgaggccatagacattgttgcc

SEQ ID NO: 619814 - DNA, 25 bp, Homo sapien
gaggccatagacattgttgccaaca

SEQ ID NO: 619815 - DNA, 25 bp, Homo sapien
tgccaggccctgagaaatcatgcaa

SEQ ID NO: 619816 - DNA, 25 bp, Homo sapien
gaaatcatgcaaaaggcagcaggat

SEQ ID NO: 619817 - DNA, 25 bp, Homo sapien
gcaggatgaagctctggtgcattct

SEQ ID NO: 619818 - DNA, 25 bp, Homo sapien
catcacacaagatgaaacaattgtc

SEQ ID NO: 619819 - DNA, 25 bp, Homo sapien
ctgaggacacttgccaaccagcctc

SEQ ID NO: 619820 - DNA, 25 bp, Homo sapien
gctgaggacacttgccaaccagcct

SEQ ID NO: 619821 - DNA, 25 bp, Homo sapien
aggacacttgccaaccagcctctct

SEQ ID NO: 619822 - DNA, 25 bp, Homo sapien
tgaggacacttgccaaccagcctct

SEQ ID NO: 619823 - DNA, 25 bp, Homo sapien
aacatagctttcctatggcggtcta

SEQ ID NO: 619824 - DNA, 25 bp, Homo sapien
tccctgacgttgtttcccacctagc

SEQ ID NO: 619825 - DNA, 25 bp, Homo sapien
gacgggggaccagacaagtcctctg

SEQ ID NO: 619826 - DNA, 25 bp, Homo sapien
tagctttcctatggcggtctacact

SEQ ID NO: 619827 - DNA, 25 bp, Homo sapien
ctgaaatcagcacgtgatcacgcca

SEQ ID NO: 619828 - DNA, 25 bp, Homo sapien
aatcagcacgtgatcacgccaccgc

SEQ ID NO: 619829 - DNA, 25 bp, Homo sapien
aaatcagcacgtgatcacgccaccg

SEQ ID NO: 619830 - DNA, 25 bp, Homo sapien
tgaaatcagcacgtgatcacgccac

SEQ ID NO: 619831 - DNA, 25 bp, Homo sapien
gcccctcttgagtgaccggcatgct

SEQ ID NO: 619832 - DNA, 25 bp, Homo sapien
ctgccggtgcctcgtggtcagcggg

SEQ ID NO: 619833 - DNA, 25 bp, Homo sapien
tcatttgtgcaagggggtccctgtc

SEQ ID NO: 619834 - DNA, 25 bp, Homo sapien
tgtcctcggagtgggtcggcccctc

SEQ ID NO: 619835 - DNA, 25 bp, Homo sapien
tctgcaaaggattcaaccattaact

SEQ ID NO: 619836 - DNA, 25 bp, Homo sapien
ctttttctgcaaaggattcaaccat

SEQ ID NO: 619837 - DNA, 25 bp, Homo sapien
gattcaaccattaactgtttgctgg

SEQ ID NO: 619838 - DNA, 25 bp, Homo sapien
accattaactgtttgctggctcttc

SEQ ID NO: 619839 - DNA, 25 bp, Homo sapien
taaggcaacatctgttctcctggga

SEQ ID NO: 619840 - DNA, 25 bp, Homo sapien
tcagtgttgggtatactctaggcaa

SEQ ID NO: 619841 - DNA, 25 bp, Homo sapien
tacacagagtgtctagttgctagcc

SEQ ID NO: 619842 - DNA, 25 bp, Homo sapien
ttaagtgaccctttgattcaagaga

SEQ ID NO: 619843 - DNA, 25 bp, Homo sapien
ttaaatgcaattgaaaacttgccat

SEQ ID NO: 619844 - DNA, 25 bp, Homo sapien
tgcaattgaaaacttgccattaaac

SEQ ID NO: 619845 - DNA, 25 bp, Homo sapien
ctggcctgggggtattttaaatgca

SEQ ID NO: 619846 - DNA, 25 bp, Homo sapien
ccactaagcctggcctgggggtatt

SEQ ID NO: 619847 - DNA, 25 bp, Homo sapien
tttgaggcggagatggtaaccctga

SEQ ID NO: 619848 - DNA, 25 bp, Homo sapien
tcctgaacttcctacgacaccgtga

SEQ ID NO: 619849 - DNA, 25 bp, Homo sapien
tccacggagaaactgagcagggctg

SEQ ID NO: 619850 - DNA, 25 bp, Homo sapien
gaaaggcgtttctatcaccagtgta

SEQ ID NO: 619851 - DNA, 25 bp, Homo sapien
caaatggctcttaagaaccaaaaca

SEQ ID NO: 619852 - DNA, 25 bp, Homo sapien
gtgcaaatggctcttaagaaccaaa

SEQ ID NO: 619853 - DNA, 25 bp, Homo sapien
cagtgcaaatggctcttaagaacca

SEQ ID NO: 619854 - DNA, 25 bp, Homo sapien
ggaatattcacatgccgctggtggg

SEQ ID NO: 619855 - DNA, 25 bp, Homo sapien
ttattccagtgtttcccgagaaaga

SEQ ID NO: 619856 - DNA, 25 bp, Homo sapien
tactagatccttgagttagtgtcag

SEQ ID NO: 619857 - DNA, 25 bp, Homo sapien
taggccagtgtttgaacagccagga

SEQ ID NO: 619858 - DNA, 25 bp, Homo sapien
catggtacctgtgctaaccaagtgg

SEQ ID NO: 619859 - DNA, 25 bp, Homo sapien
ctacaggtgcacaccgccacccccg

SEQ ID NO: 619860 - DNA, 25 bp, Homo sapien
acaggcgtgagccactgtgcccggt

SEQ ID NO: 619861 - DNA, 25 bp, Homo sapien
gtgcacaccgccacccccggctaat

SEQ ID NO: 619862 - DNA, 25 bp, Homo sapien
ctggcctcccaaagtgttaggatta

SEQ ID NO: 619863 - DNA, 25 bp, Homo sapien
ctggatgggtctagttcattatcac

SEQ ID NO: 619864 - DNA, 25 bp, Homo sapien
ccaggaaaaggagattaaggcccag

SEQ ID NO: 619865 - DNA, 25 bp, Homo sapien
cttttgacctaaaccacattcctga

SEQ ID NO: 619866 - DNA, 25 bp, Homo sapien
tgagagaatcagataggtaaaggca

SEQ ID NO: 619867 - DNA, 25 bp, Homo sapien
cagaggccacctcggagaactgtga

SEQ ID NO: 619868 - DNA, 25 bp, Homo sapien
tcagagttggtcagcagccaggtca

SEQ ID NO: 619869 - DNA, 25 bp, Homo sapien
tggatgacgaatgccttccgaggct

SEQ ID NO: 619870 - DNA, 25 bp, Homo sapien
tgaatccctttcatgcacaagcaga

SEQ ID NO: 619871 - DNA, 25 bp, Homo sapien
cattgctcattggtgctttagtgag

SEQ ID NO: 619872 - DNA, 25 bp, Homo sapien
ttaggaagacgtgggaccagttgac

SEQ ID NO: 619873 - DNA, 25 bp, Homo sapien
aacagaggcaaaatgtagggattag

SEQ ID NO: 619874 - DNA, 25 bp, Homo sapien
ttggtgctttagtgagagaccctga

SEQ ID NO: 619875 - DNA, 25 bp, Homo sapien
gaatagagcccgactactgtctgaa

SEQ ID NO: 619876 - DNA, 25 bp, Homo sapien
gaatgacgcagggtgagcagacttt

SEQ ID NO: 619877 - DNA, 25 bp, Homo sapien
tcatcctgatgaccgctaagacctg

SEQ ID NO: 619878 - DNA, 25 bp, Homo sapien
ggtatcagcacgtgctctttccata

SEQ ID NO: 619879 - DNA, 25 bp, Homo sapien
gatcccacacccattttagatggaa

SEQ ID NO: 619880 - DNA, 25 bp, Homo sapien
ccttgggaagtagtaggatcccaca

SEQ ID NO: 619881 - DNA, 25 bp, Homo sapien
tgaagctgctcagagaatccaggac

SEQ ID NO: 619882 - DNA, 25 bp, Homo sapien
gctcagagaatccaggaccacgtag

SEQ ID NO: 619883 - DNA, 25 bp, Homo sapien
cctgccttagtgttaggcctttggc

SEQ ID NO: 619884 - DNA, 25 bp, Homo sapien
tgttaggcctttggcggcctggact

SEQ ID NO: 619885 - DNA, 25 bp, Homo sapien
ttagtgttaggcctttggcggcctg

SEQ ID NO: 619886 - DNA, 25 bp, Homo sapien
gtggcctgccttagtgttaggcctt

SEQ ID NO: 619887 - DNA, 25 bp, Homo sapien
attgaacatggtagggctgaccgtg

SEQ ID NO: 619888 - DNA, 25 bp, Homo sapien
atattgaacatggtagggctgaccg

SEQ ID NO: 619889 - DNA, 25 bp, Homo sapien
tattgaacatggtagggctgaccgt

SEQ ID NO: 619890 - DNA, 25 bp, Homo sapien
ttgaacatggtagggctgaccgtgg

SEQ ID NO: 619891 - DNA, 25 bp, Homo sapien
gaagtcaccactcaggtacataatg

SEQ ID NO: 619892 - DNA, 25 bp, Homo sapien
tcaggtacataatggaataattctg

SEQ ID NO: 619893 - DNA, 25 bp, Homo sapien
gagacatggcctaaaggctcgccat

SEQ ID NO: 619894 - DNA, 25 bp, Homo sapien
gccgttaagtcgtgtgaagtcacca

SEQ ID NO: 619895 - DNA, 25 bp, Homo sapien
aatttctccctgtagatgggcttac

SEQ ID NO: 619896 - DNA, 25 bp, Homo sapien
ttctcatcatccaatttctccctgt

SEQ ID NO: 619897 - DNA, 25 bp, Homo sapien
tgcatgtttcagaatgaagttctca

SEQ ID NO: 619898 - DNA, 25 bp, Homo sapien
ctgcatgtttcagaatgaagttctc

SEQ ID NO: 619899 - DNA, 25 bp, Homo sapien
gccatccagccactcgattttggca

SEQ ID NO: 619900 - DNA, 25 bp, Homo sapien
tgttgagtccagcaagatgccagga

SEQ ID NO: 619901 - DNA, 25 bp, Homo sapien
ccagccactcgattttggcagtgca

SEQ ID NO: 619902 - DNA, 25 bp, Homo sapien
tttgtgttgagtccagcaagatgcc

SEQ ID NO: 619903 - DNA, 25 bp, Homo sapien
tctgtgatattgattcatgccctct

SEQ ID NO: 619904 - DNA, 25 bp, Homo sapien
tgatattgattcatgccctcttgca

SEQ ID NO: 619905 - DNA, 25 bp, Homo sapien
tccctggcttctgtgatattgattc

SEQ ID NO: 619906 - DNA, 25 bp, Homo sapien
ggcttctgtgatattgattcatgcc

SEQ ID NO: 619907 - DNA, 25 bp, Homo sapien
ccagagacaaaagcaaaaggacttt

SEQ ID NO: 619908 - DNA, 25 bp, Homo sapien
gagacaaaagcaaaaggactttgag

SEQ ID NO: 619909 - DNA, 25 bp, Homo sapien
agagacaaaagcaaaaggactttga

SEQ ID NO: 619910 - DNA, 25 bp, Homo sapien
gcgtgctctcggcttggccaaagca

SEQ ID NO: 619911 - DNA, 25 bp, Homo sapien
tgttctccttttctggctcggaaga

SEQ ID NO: 619912 - DNA, 25 bp, Homo sapien
agtggatttaggcagaccagtctga

SEQ ID NO: 619913 - DNA, 25 bp, Homo sapien
aaacacgctcgaggagctgaggccc

SEQ ID NO: 619914 - DNA, 25 bp, Homo sapien
gagacatagcgtcctgtcagggaga

SEQ ID NO: 619915 - DNA, 25 bp, Homo sapien
tccaactgaggcctaaatgccggca

SEQ ID NO: 619916 - DNA, 25 bp, Homo sapien
tagacagtgcagcttcgagtggcct

SEQ ID NO: 619917 - DNA, 25 bp, Homo sapien
gggttcgcagacagatgactatcat

SEQ ID NO: 619918 - DNA, 25 bp, Homo sapien
tgtggcattgggtaccaggctttcc

SEQ ID NO: 619919 - DNA, 25 bp, Homo sapien
caaggtccaaagctaacaaagttgc

SEQ ID NO: 619920 - DNA, 25 bp, Homo sapien
gcacagttccagcattgtcggccag

SEQ ID NO: 619921 - DNA, 25 bp, Homo sapien
gatcaaggcacgtgttccaagtagg

SEQ ID NO: 619922 - DNA, 25 bp, Homo sapien
ggctcccttgtacccttggatacat

SEQ ID NO: 619923 - DNA, 25 bp, Homo sapien
cccttgtacccttggatacatctta

SEQ ID NO: 619924 - DNA, 25 bp, Homo sapien
ctggctcccttgtacccttggatac

SEQ ID NO: 619925 - DNA, 25 bp, Homo sapien
tcagctggctcccttgtacccttgg

SEQ ID NO: 619926 - DNA, 25 bp, Homo sapien
gagcaaaggctattggaggaaggtg

SEQ ID NO: 619927 - DNA, 25 bp, Homo sapien
tgtgactattgagaaggagcaaagg

SEQ ID NO: 619928 - DNA, 25 bp, Homo sapien
tgatctatattctgtgactattgag

SEQ ID NO: 619929 - DNA, 25 bp, Homo sapien
gcagttgagcttcctacatgctcca

SEQ ID NO: 619930 - DNA, 25 bp, Homo sapien
gaaatgtttgtatgaaggattcccc

SEQ ID NO: 619931 - DNA, 25 bp, Homo sapien
tacaagaggctaaatgagtggtcac

SEQ ID NO: 619932 - DNA, 25 bp, Homo sapien
catgtagcctgattactgtttggag

SEQ ID NO: 619933 - DNA, 25 bp, Homo sapien
gagagccagcggctccctacgttaa

SEQ ID NO: 619934 - DNA, 25 bp, Homo sapien
gaagcttccaagcatgtgttctgcc

SEQ ID NO: 619935 - DNA, 25 bp, Homo sapien
tcaactggctcatgggaccacaagt

SEQ ID NO: 619936 - DNA, 25 bp, Homo sapien
cattatgcagaagggtcaactggct

SEQ ID NO: 619937 - DNA, 25 bp, Homo sapien
cactggctcatgtgacctcctggtg

SEQ ID NO: 619938 - DNA, 25 bp, Homo sapien
catcttctctaagtggagtgcagag

SEQ ID NO: 619939 - DNA, 25 bp, Homo sapien
caacgagattcactgcatggacaca

SEQ ID NO: 619940 - DNA, 25 bp, Homo sapien
gcagctaacttacagcccaacgaga

SEQ ID NO: 619941 - DNA, 25 bp, Homo sapien
taataagaacggtatgccctccaag

SEQ ID NO: 619942 - DNA, 25 bp, Homo sapien
tgcctcctttatgggccacctctga

SEQ ID NO: 619943 - DNA, 25 bp, Homo sapien
ttttttgtctcgtaatggatgccag

SEQ ID NO: 619944 - DNA, 25 bp, Homo sapien
gccagagaatcttaactgacctcta

SEQ ID NO: 619945 - DNA, 25 bp, Homo sapien
taatcaactttgcatgtctatggaa

SEQ ID NO: 619946 - DNA, 25 bp, Homo sapien
gcacggtgcgcgcacccactgacct

SEQ ID NO: 619947 - DNA, 25 bp, Homo sapien
cggctcgcgcacggtgcgcgcaccc

SEQ ID NO: 619948 - DNA, 25 bp, Homo sapien
tcggctcgcgcacggtgcgcgcacc

SEQ ID NO: 619949 - DNA, 25 bp, Homo sapien
ggctcgcgcacggtgcgcgcaccca

SEQ ID NO: 619950 - DNA, 25 bp, Homo sapien
gctgggaacgtgaggctccttgcaa

SEQ ID NO: 619951 - DNA, 25 bp, Homo sapien
tgtgcctaaagaggagatcctggca

SEQ ID NO: 619952 - DNA, 25 bp, Homo sapien
gagagccaggcgaagagatgtaatt

SEQ ID NO: 619953 - DNA, 25 bp, Homo sapien
ggaccactttgggacaacacactat

SEQ ID NO: 619954 - DNA, 25 bp, Homo sapien
catgaaaggatcctgttgtggtgac

SEQ ID NO: 619955 - DNA, 25 bp, Homo sapien
gggcctgtggtcattcttgtctctt

SEQ ID NO: 619956 - DNA, 25 bp, Homo sapien
ccactgcttcttatacggcttgtaa

SEQ ID NO: 619957 - DNA, 25 bp, Homo sapien
aacttcacaatgctgcagttcagga

SEQ ID NO: 619958 - DNA, 25 bp, Homo sapien
cacaaatgacagattcctgtgtgaa

SEQ ID NO: 619959 - DNA, 25 bp, Homo sapien
agcacaaatgacagattcctgtgtg

SEQ ID NO: 619960 - DNA, 25 bp, Homo sapien
caaatgacagattcctgtgtgaaaa

SEQ ID NO: 619961 - DNA, 25 bp, Homo sapien
gcacaaatgacagattcctgtgtga

SEQ ID NO: 619962 - DNA, 25 bp, Homo sapien
caggcagcctccttgagaaatggtg

SEQ ID NO: 619963 - DNA, 25 bp, Homo sapien
gcgtctccaaactgtgcactaggta

SEQ ID NO: 619964 - DNA, 25 bp, Homo sapien
tgatgatcaaggtgccccaccactg

SEQ ID NO: 619965 - DNA, 25 bp, Homo sapien
cagtgattaatggtcccctagtgca

SEQ ID NO: 619966 - DNA, 25 bp, Homo sapien
aaagccaccccgttgtactgttgct

SEQ ID NO: 619967 - DNA, 25 bp, Homo sapien
tttgagccgctattccctatgccca

SEQ ID NO: 619968 - DNA, 25 bp, Homo sapien
catgtcagaactacatttgagccgc

SEQ ID NO: 619969 - DNA, 25 bp, Homo sapien
caatgaagctatttcgactgccatc

SEQ ID NO: 619970 - DNA, 25 bp, Homo sapien
ggttaagcaaagacagacctcactg

SEQ ID NO: 619971 - DNA, 25 bp, Homo sapien
ggagcaagggctcgagaatccactt

SEQ ID NO: 619972 - DNA, 25 bp, Homo sapien
ctttggcctaataaccctggattgg

SEQ ID NO: 619973 - DNA, 25 bp, Homo sapien
ccttgttgaaggacggtgctcagta

SEQ ID NO: 619974 - DNA, 25 bp, Homo sapien
tcaactaagttcagcggcttgcgcc

SEQ ID NO: 619975 - DNA, 25 bp, Homo sapien
gtggtgatgtatgccccagtgccag

SEQ ID NO: 619976 - DNA, 25 bp, Homo sapien
tctcactggtaccaagaggtggtgg

SEQ ID NO: 619977 - DNA, 25 bp, Homo sapien
taggacagtgtctcacataacaggt

SEQ ID NO: 619978 - DNA, 25 bp, Homo sapien
catttgtatgccgaagggtgtcaag

SEQ ID NO: 619979 - DNA, 25 bp, Homo sapien
tggagaaacacccacgcctgttagc

SEQ ID NO: 619980 - DNA, 25 bp, Homo sapien
gaaatagcgttccacctggtactag

SEQ ID NO: 619981 - DNA, 25 bp, Homo sapien
cagagtcctgttgcagaaatagcgt

SEQ ID NO: 619982 - DNA, 25 bp, Homo sapien
tctgtagagcaagaactggttggcc

SEQ ID NO: 619983 - DNA, 25 bp, Homo sapien
taaaaatgcacggaaggcttacgct

SEQ ID NO: 619984 - DNA, 25 bp, Homo sapien
caattggacgggactcatgcagaca

SEQ ID NO: 619985 - DNA, 25 bp, Homo sapien
tgcattgtactcagggaaaacagcc

SEQ ID NO: 619986 - DNA, 25 bp, Homo sapien
catttccagtggttgtttgtctttg

SEQ ID NO: 619987 - DNA, 25 bp, Homo sapien
tggcccccttcgtttcaagcaggaa

SEQ ID NO: 619988 - DNA, 25 bp, Homo sapien
atcatttccagtggttgtttgtctt

SEQ ID NO: 619989 - DNA, 25 bp, Homo sapien
tttgtctttgggcagtgacaatgcg

SEQ ID NO: 619990 - DNA, 25 bp, Homo sapien
gaaggtggttcaatagctgcagcat

SEQ ID NO: 619991 - DNA, 25 bp, Homo sapien
gataatttcaatgctgcggcaccac

SEQ ID NO: 619992 - DNA, 25 bp, Homo sapien
tattccgtatcagctaggtttcagg

SEQ ID NO: 619993 - DNA, 25 bp, Homo sapien
taaaatgagggacagcctccagcaa

SEQ ID NO: 619994 - DNA, 25 bp, Homo sapien
agcccgtccgaaaagcgcaatattc

SEQ ID NO: 619995 - DNA, 25 bp, Homo sapien
ccgattttccaggtgagtccgtcac

SEQ ID NO: 619996 - DNA, 25 bp, Homo sapien
ccaggtgagtccgtcacccctttct

SEQ ID NO: 619997 - DNA, 25 bp, Homo sapien
cccgtccgaaaagcgcaatattcgg

SEQ ID NO: 619998 - DNA, 25 bp, Homo sapien
ggctctgcacagctgtaagctctcc

SEQ ID NO: 619999 - DNA, 25 bp, Homo sapien
tctgaggttcggctcgggtctccgt

SEQ ID NO: 620000 - DNA, 25 bp, Homo sapien
cagcgcagttcaggatctgaggttc

SEQ ID NO: 620001 - DNA, 25 bp, Homo sapien
tgtgctgtcacagcgcagttcagga

SEQ ID NO: 620002 - DNA, 25 bp, Homo sapien
gtgatcttctttcccagtctaatac

SEQ ID NO: 620003 - DNA, 25 bp, Homo sapien
tgtggccgtgggaatcccagctccc

SEQ ID NO: 620004 - DNA, 25 bp, Homo sapien
gaatcccagctcccttagcaaaggc

SEQ ID NO: 620005 - DNA, 25 bp, Homo sapien
tgggaatcccagctcccttagcaaa

SEQ ID NO: 620006 - DNA, 25 bp, Homo sapien
ctgtggccgtgggaatcccagctcc

SEQ ID NO: 620007 - DNA, 25 bp, Homo sapien
cagtcgtaggcgtctttgtctctgc

SEQ ID NO: 620008 - DNA, 25 bp, Homo sapien
ttagtctgacaagggagtttctgat

SEQ ID NO: 620009 - DNA, 25 bp, Homo sapien
gacctcggatgtgggaacagtcgta

SEQ ID NO: 620010 - DNA, 25 bp, Homo sapien
tctgacaagggagtttctgattggg

SEQ ID NO: 620011 - DNA, 25 bp, Homo sapien
gaaccaggagttctatctgtaacgg

SEQ ID NO: 620012 - DNA, 25 bp, Homo sapien
aaggctagtcgagtgcagtagtaag

SEQ ID NO: 620013 - DNA, 25 bp, Homo sapien
accaggagttctatctgtaacggac

SEQ ID NO: 620014 - DNA, 25 bp, Homo sapien
caggagttctatctgtaacggactg

SEQ ID NO: 620015 - DNA, 25 bp, Homo sapien
taccagggtgcttaatgttgtcaca

SEQ ID NO: 620016 - DNA, 25 bp, Homo sapien
tttcattccgtggacagtgttggga

SEQ ID NO: 620017 - DNA, 25 bp, Homo sapien
tgtagtcttctctcgtctgtgacca

SEQ ID NO: 620018 - DNA, 25 bp, Homo sapien
tctcatgattgtctgggattacggg

SEQ ID NO: 620019 - DNA, 25 bp, Homo sapien
gtagtcccagagactctggaggccg

SEQ ID NO: 620020 - DNA, 25 bp, Homo sapien
tgagtcatgatggcaccaccacact

SEQ ID NO: 620021 - DNA, 25 bp, Homo sapien
tagtcccagagactctggaggccga

SEQ ID NO: 620022 - DNA, 25 bp, Homo sapien
cagtgagtcatgatggcaccaccac

SEQ ID NO: 620023 - DNA, 25 bp, Homo sapien
gtgccattgcaagccagcctcagcg

SEQ ID NO: 620024 - DNA, 25 bp, Homo sapien
ttgcaagccagcctcagcgaaagag

SEQ ID NO: 620025 - DNA, 25 bp, Homo sapien
cattgcaagccagcctcagcgaaag

SEQ ID NO: 620026 - DNA, 25 bp, Homo sapien
gcaagccagcctcagcgaaagagtg

SEQ ID NO: 620027 - DNA, 25 bp, Homo sapien
tgctggaattttttgggctttcaga

SEQ ID NO: 620028 - DNA, 25 bp, Homo sapien
tataatagaggtacaattcgttgga

SEQ ID NO: 620029 - DNA, 25 bp, Homo sapien
caagtcgatttgtattatgctggaa

SEQ ID NO: 620030 - DNA, 25 bp, Homo sapien
tacttaagttgtcgaacagtagaca

SEQ ID NO: 620031 - DNA, 25 bp, Homo sapien
tcctgttcacaagctgagccatatg

SEQ ID NO: 620032 - DNA, 25 bp, Homo sapien
taatccaatgagtgttacagagagc

SEQ ID NO: 620033 - DNA, 25 bp, Homo sapien
gatgtcctccttgatagaagtctta

SEQ ID NO: 620034 - DNA, 25 bp, Homo sapien
gaagtcttagctcctgtgttacaag

SEQ ID NO: 620035 - DNA, 25 bp, Homo sapien
tggaacctccaggatccttgactga

SEQ ID NO: 620036 - DNA, 25 bp, Homo sapien
ccaggatccttgactgagggcgttg

SEQ ID NO: 620037 - DNA, 25 bp, Homo sapien
cagattgtcctggaacctccaggat

SEQ ID NO: 620038 - DNA, 25 bp, Homo sapien
cgttgggatggcttgtaggattttt

SEQ ID NO: 620039 - DNA, 25 bp, Homo sapien
aagctactgaaataagctgtgattg

SEQ ID NO: 620040 - DNA, 25 bp, Homo sapien
tttacttcatcctttgagaagcgaa

SEQ ID NO: 620041 - DNA, 25 bp, Homo sapien
gctactgaaataagctgtgattgta

SEQ ID NO: 620042 - DNA, 25 bp, Homo sapien
gagaagcgaatggtgaaagctactg

SEQ ID NO: 620043 - DNA, 25 bp, Homo sapien
agcgtgagccttgtgtggttctgca

SEQ ID NO: 620044 - DNA, 25 bp, Homo sapien
tgttcctcaggtaactcttgtcccg

SEQ ID NO: 620045 - DNA, 25 bp, Homo sapien
tcatcgggactcatatgggaactga

SEQ ID NO: 620046 - DNA, 25 bp, Homo sapien
ctggctgctaggatacgaagatgaa

SEQ ID NO: 620047 - DNA, 25 bp, Homo sapien
gtaaaaaagtagctcagtgtcccag

SEQ ID NO: 620048 - DNA, 25 bp, Homo sapien
gtggtgacaacactctgtcaagaat

SEQ ID NO: 620049 - DNA, 25 bp, Homo sapien
ctttatcacatagaagctctactgg

SEQ ID NO: 620050 - DNA, 25 bp, Homo sapien
ggcaaactcggtcaaactgcagcat

SEQ ID NO: 620051 - DNA, 25 bp, Homo sapien
gcattttaccattccctgctggcct

SEQ ID NO: 620052 - DNA, 25 bp, Homo sapien
tatggtgtgctcagtagtcagtgcc

SEQ ID NO: 620053 - DNA, 25 bp, Homo sapien
cagaatgccagcattacaggcgcga

SEQ ID NO: 620054 - DNA, 25 bp, Homo sapien
tgctggcctgtaaacttcttaagag

SEQ ID NO: 620055 - DNA, 25 bp, Homo sapien
tatatttaacgttggaatgctttcc

SEQ ID NO: 620056 - DNA, 25 bp, Homo sapien
cttttatatttaacgttggaatgct

SEQ ID NO: 620057 - DNA, 25 bp, Homo sapien
ttatatttaacgttggaatgctttc

SEQ ID NO: 620058 - DNA, 25 bp, Homo sapien
ccttcctcaagcttgaagaaaatct

SEQ ID NO: 620059 - DNA, 25 bp, Homo sapien
gtttttcgcgcacagctgccttcta

SEQ ID NO: 620060 - DNA, 25 bp, Homo sapien
aactgtttatcttctcgaccttcct

SEQ ID NO: 620061 - DNA, 25 bp, Homo sapien
ttctaacccgcgagcaacggcgtta

SEQ ID NO: 620062 - DNA, 25 bp, Homo sapien
cataacgcagacagtgtcataaagg

SEQ ID NO: 620063 - DNA, 25 bp, Homo sapien
cgcagacagtgtcataaaggaggca

SEQ ID NO: 620064 - DNA, 25 bp, Homo sapien
tgtcataaaggaggcattgaacaaa

SEQ ID NO: 620065 - DNA, 25 bp, Homo sapien
cagggctaggcataacgcagacagt

SEQ ID NO: 620066 - DNA, 25 bp, Homo sapien
ggatccgggttcagatttgatctct

SEQ ID NO: 620067 - DNA, 25 bp, Homo sapien
tcaggttctgtaggagacggatccg

SEQ ID NO: 620068 - DNA, 25 bp, Homo sapien
tccggtataagcgcccctggcaggt

SEQ ID NO: 620069 - DNA, 25 bp, Homo sapien
ggcgatctagctgatgattgagcga

SEQ ID NO: 620070 - DNA, 25 bp, Homo sapien
gaccttctatgaggattgcccagct

SEQ ID NO: 620071 - DNA, 25 bp, Homo sapien
ggtcgtccgcagttgccctctcttt

SEQ ID NO: 620072 - DNA, 25 bp, Homo sapien
ctgaagggcaggtcgtccccgacct

SEQ ID NO: 620073 - DNA, 25 bp, Homo sapien
cctggctcgacctccactttggaga

SEQ ID NO: 620074 - DNA, 25 bp, Homo sapien
gtgtggttggggaggacacacctac

SEQ ID NO: 620075 - DNA, 25 bp, Homo sapien
ggtgtggttggggaggacacaccta

SEQ ID NO: 620076 - DNA, 25 bp, Homo sapien
tgggagggtgtggttggggaggaca

SEQ ID NO: 620077 - DNA, 25 bp, Homo sapien
gagggtgtggttggggaggacacac

SEQ ID NO: 620078 - DNA, 25 bp, Homo sapien
taagccctccgctggaagcggtgaa

SEQ ID NO: 620079 - DNA, 25 bp, Homo sapien
ggtgaagaagctttgggccaacgca

SEQ ID NO: 620080 - DNA, 25 bp, Homo sapien
tcagtttgtcctgtacgcgggtcag

SEQ ID NO: 620081 - DNA, 25 bp, Homo sapien
caacgcagttcggagcgccagtgta

SEQ ID NO: 620082 - DNA, 25 bp, Homo sapien
tgagaaaacccgctgtgtgagggct

SEQ ID NO: 620083 - DNA, 25 bp, Homo sapien
cattttggcggacgtttattgcgta

SEQ ID NO: 620084 - DNA, 25 bp, Homo sapien
aatcctggctaacgtcattttggcg

SEQ ID NO: 620085 - DNA, 25 bp, Homo sapien
attgcgtatcgccatgtgccaggca

SEQ ID NO: 620086 - DNA, 25 bp, Homo sapien
aatagcatctcacgctttagctggc

SEQ ID NO: 620087 - DNA, 25 bp, Homo sapien
tagctggcagcaaatcctactcaag

SEQ ID NO: 620088 - DNA, 25 bp, Homo sapien
gatgatgccgctgaagaaagccttg

SEQ ID NO: 620089 - DNA, 25 bp, Homo sapien
gattcggcatcttcgaggtcccaca

SEQ ID NO: 620090 - DNA, 25 bp, Homo sapien
gcaaaaataaggtcactctacttcc

SEQ ID NO: 620091 - DNA, 25 bp, Homo sapien
tagatcagcaaaaataaggtcactc

SEQ ID NO: 620092 - DNA, 25 bp, Homo sapien
aaaatttagatcagcaaaaataagg

SEQ ID NO: 620093 - DNA, 25 bp, Homo sapien
gatcagcaaaaataaggtcactcta

SEQ ID NO: 620094 - DNA, 25 bp, Homo sapien
atttttcaggagaaaggcatgctca

SEQ ID NO: 620095 - DNA, 25 bp, Homo sapien
ttttatttttcaggagaaaggcatg

SEQ ID NO: 620096 - DNA, 25 bp, Homo sapien
ttatttttcaggagaaaggcatgct

SEQ ID NO: 620097 - DNA, 25 bp, Homo sapien
tatttttcaggagaaaggcatgctc

SEQ ID NO: 620098 - DNA, 25 bp, Homo sapien
ctgagaaaaggacctaagaaagcct

SEQ ID NO: 620099 - DNA, 25 bp, Homo sapien
aggacctaagaaagccttcagggtg

SEQ ID NO: 620100 - DNA, 25 bp, Homo sapien
tgcgtggaggcacgccgctccttgc

SEQ ID NO: 620101 - DNA, 25 bp, Homo sapien
acacgcggggcaattctccggttgg

SEQ ID NO: 620102 - DNA, 25 bp, Homo sapien
gctgcggccactcgcgggcggcgtg

SEQ ID NO: 620103 - DNA, 25 bp, Homo sapien
cggccactcgcgcggctgttgttgt

SEQ ID NO: 620104 - DNA, 25 bp, Homo sapien
catgtgaagttacgttctgattccg

SEQ ID NO: 620105 - DNA, 25 bp, Homo sapien
gatgagtgtaccatgcttgcttggg

SEQ ID NO: 620106 - DNA, 25 bp, Homo sapien
gttagagttttccagactatattcc

SEQ ID NO: 620107 - DNA, 25 bp, Homo sapien
tgtagacacagcaatctgttagagt

SEQ ID NO: 620108 - DNA, 25 bp, Homo sapien
ctgcttgtaaggtgaagtcgcatga

SEQ ID NO: 620109 - DNA, 25 bp, Homo sapien
tgaagtcgcatgaggaaaattgact

SEQ ID NO: 620110 - DNA, 25 bp, Homo sapien
tgtaaggtgaagtcgcatgaggaaa

SEQ ID NO: 620111 - DNA, 25 bp, Homo sapien
cgcatgaggaaaattgacttactca

SEQ ID NO: 620112 - DNA, 25 bp, Homo sapien
tcccaaacaactcgaggatgtggct

SEQ ID NO: 620113 - DNA, 25 bp, Homo sapien
atgtggctcgccacactggctgcag

SEQ ID NO: 620114 - DNA, 25 bp, Homo sapien
tgcagacgccctcacactggtgttt

SEQ ID NO: 620115 - DNA, 25 bp, Homo sapien
tggtgtttgtcagcagactctggta

SEQ ID NO: 620116 - DNA, 25 bp, Homo sapien
gttggcgcttttaacctcaaagtgc

SEQ ID NO: 620117 - DNA, 25 bp, Homo sapien
tgcacgaactagtgggaatgctgcc

SEQ ID NO: 620118 - DNA, 25 bp, Homo sapien
ctgcacgaactagtgggaatgctgc

SEQ ID NO: 620119 - DNA, 25 bp, Homo sapien
tacaattttgagttggcgaagggca

SEQ ID NO: 620120 - DNA, 25 bp, Homo sapien
ttttgagttggcgaagggcattcat

SEQ ID NO: 620121 - DNA, 25 bp, Homo sapien
cgcgtcacagacgcctggtttccag

SEQ ID NO: 620122 - DNA, 25 bp, Homo sapien
gcgtcacagacgcctggtttccagc

SEQ ID NO: 620123 - DNA, 25 bp, Homo sapien
ctccgcgtcacagacgcctggtttc

SEQ ID NO: 620124 - DNA, 25 bp, Homo sapien
tccgcgtcacagacgcctggtttcc

SEQ ID NO: 620125 - DNA, 25 bp, Homo sapien
gaagaatttgatggttctgcgcagg

SEQ ID NO: 620126 - DNA, 25 bp, Homo sapien
gatggttctgcgcaggagcccttgt

SEQ ID NO: 620127 - DNA, 25 bp, Homo sapien
gttctgcgcaggagcccttgtccac

SEQ ID NO: 620128 - DNA, 25 bp, Homo sapien
gaatttgatggttctgcgcaggagc

SEQ ID NO: 620129 - DNA, 25 bp, Homo sapien
ggcgtttcaggggtcccagtgtctc

SEQ ID NO: 620130 - DNA, 25 bp, Homo sapien
ggaccactccgcacaaggcagaggg

SEQ ID NO: 620131 - DNA, 25 bp, Homo sapien
tggaggtgctgggtctttagtacaa

SEQ ID NO: 620132 - DNA, 25 bp, Homo sapien
ctgacctgtcgcattccacagtagt

SEQ ID NO: 620133 - DNA, 25 bp, Homo sapien
cagatctctggagatagagaccagg

SEQ ID NO: 620134 - DNA, 25 bp, Homo sapien
aggagggaagtggagccagcgcctc

SEQ ID NO: 620135 - DNA, 25 bp, Homo sapien
agtggagccagcgcctctgggacac

SEQ ID NO: 620136 - DNA, 25 bp, Homo sapien
tcagatctctggagatagagaccag

SEQ ID NO: 620137 - DNA, 25 bp, Homo sapien
tctggtgcctgcagtggatagacgt

SEQ ID NO: 620138 - DNA, 25 bp, Homo sapien
agctctgacggagactgaagcccac

SEQ ID NO: 620139 - DNA, 25 bp, Homo sapien
tgcagtggatagacgtgctggctct

SEQ ID NO: 620140 - DNA, 25 bp, Homo sapien
cccacatgaggctcttctggtgcct

SEQ ID NO: 620141 - DNA, 25 bp, Homo sapien
accccagcggtctttatctggacca

SEQ ID NO: 620142 - DNA, 25 bp, Homo sapien
gctgcttctgatgtcgggaaggaat

SEQ ID NO: 620143 - DNA, 25 bp, Homo sapien
tattgtatccaaacaggctgattga

SEQ ID NO: 620144 - DNA, 25 bp, Homo sapien
ctgattgaagcctggataattggca

SEQ ID NO: 620145 - DNA, 25 bp, Homo sapien
caagtttttaggatttctggcatca

SEQ ID NO: 620146 - DNA, 25 bp, Homo sapien
tcaatgacaaatacaacaggcaacc

SEQ ID NO: 620147 - DNA, 25 bp, Homo sapien
tctctagggtttctaatgcctctct

SEQ ID NO: 620148 - DNA, 25 bp, Homo sapien
tctttgtggtgattgccaaatgccc

SEQ ID NO: 620149 - DNA, 25 bp, Homo sapien
tcccggggagccagccgcactgcct

SEQ ID NO: 620150 - DNA, 25 bp, Homo sapien
ccggggagccagccgcactgcctgc

SEQ ID NO: 620151 - DNA, 25 bp, Homo sapien
cccggggagccagccgcactgcctg

SEQ ID NO: 620152 - DNA, 25 bp, Homo sapien
cagctggcagatcgtcttctaggca

SEQ ID NO: 620153 - DNA, 25 bp, Homo sapien
taggcatgcgcactcgctgaatgaa

SEQ ID NO: 620154 - DNA, 25 bp, Homo sapien
tagcaggtcatcttgaaaggtcgga

SEQ ID NO: 620155 - DNA, 25 bp, Homo sapien
tatgcgctgacggagatgaacgcac

SEQ ID NO: 620156 - DNA, 25 bp, Homo sapien
gctaagggataaagacaattcactc

SEQ ID NO: 620157 - DNA, 25 bp, Homo sapien
cagtggactttgaaattccactttc

SEQ ID NO: 620158 - DNA, 25 bp, Homo sapien
tcaggagagacgctaagggataaag

SEQ ID NO: 620159 - DNA, 25 bp, Homo sapien
aagagctttcaggagagacgctaag

SEQ ID NO: 620160 - DNA, 25 bp, Homo sapien
gcaggtgcctcgttttatctggaaa

SEQ ID NO: 620161 - DNA, 25 bp, Homo sapien
caggcattcatctcttgttggatca

SEQ ID NO: 620162 - DNA, 25 bp, Homo sapien
agttgtgcaatgatggcttcgctcc

SEQ ID NO: 620163 - DNA, 25 bp, Homo sapien
gacagtcctcaaggcaacttccatg

SEQ ID NO: 620164 - DNA, 25 bp, Homo sapien
gcctaaactgtttgtacagacgaca

SEQ ID NO: 620165 - DNA, 25 bp, Homo sapien
taggtggtcataaccatagggagtt

SEQ ID NO: 620166 - DNA, 25 bp, Homo sapien
tctttagaatgattggtgaccctca

SEQ ID NO: 620167 - DNA, 25 bp, Homo sapien
gacacagtctatgcagaatatctgc

SEQ ID NO: 620168 - DNA, 25 bp, Homo sapien
cacatgaggataagcgctggtcagc

SEQ ID NO: 620169 - DNA, 25 bp, Homo sapien
cagcccttttctagacttcaggaga

SEQ ID NO: 620170 - DNA, 25 bp, Homo sapien
caatagcgtgatcctgttgctgagt

SEQ ID NO: 620171 - DNA, 25 bp, Homo sapien
gagattacccctgatcatcgcaaaa

SEQ ID NO: 620172 - DNA, 25 bp, Homo sapien
ttctccatatgtgttcatgaccagg

SEQ ID NO: 620173 - DNA, 25 bp, Homo sapien
catccagaactgataagctgtcccc

SEQ ID NO: 620174 - DNA, 25 bp, Homo sapien
tttgatccttgccaatcttttccca

SEQ ID NO: 620175 - DNA, 25 bp, Homo sapien
ttctattttgatccttgccaatctt

SEQ ID NO: 620176 - DNA, 25 bp, Homo sapien
gcatttctatagagaacatgcagtg

SEQ ID NO: 620177 - DNA, 25 bp, Homo sapien
ttttaccccttcaagagcagtagca

SEQ ID NO: 620178 - DNA, 25 bp, Homo sapien
tcaaggctggtagcaggtgcagcca

SEQ ID NO: 620179 - DNA, 25 bp, Homo sapien
tgtgagcctgaacaactgcaagagc

SEQ ID NO: 620180 - DNA, 25 bp, Homo sapien
aatatttattcagcagcaccatatg

SEQ ID NO: 620181 - DNA, 25 bp, Homo sapien
cactgagctgggctaattgacaaga

SEQ ID NO: 620182 - DNA, 25 bp, Homo sapien
agaaagacataaacccgcccctcat

SEQ ID NO: 620183 - DNA, 25 bp, Homo sapien
aactgggttctgtgtatactgctct

SEQ ID NO: 620184 - DNA, 25 bp, Homo sapien
aggccatctgacatcggagtacatg

SEQ ID NO: 620185 - DNA, 25 bp, Homo sapien
gtttctattgacagggagtttacag

SEQ ID NO: 620186 - DNA, 25 bp, Homo sapien
gcaggaccatcatggaaaagagcag

SEQ ID NO: 620187 - DNA, 25 bp, Homo sapien
agagtaacaggaaggttcaggcgca

SEQ ID NO: 620188 - DNA, 25 bp, Homo sapien
ctgtctttggattggaccgactgaa

SEQ ID NO: 620189 - DNA, 25 bp, Homo sapien
gaaacattgtcttggattagcccga

SEQ ID NO: 620190 - DNA, 25 bp, Homo sapien
ggaccgactgaaacattgtcttgga

SEQ ID NO: 620191 - DNA, 25 bp, Homo sapien
attagcccgactccatagcaacagg

SEQ ID NO: 620192 - DNA, 25 bp, Homo sapien
gagaccggtctagttccaaggtaag

SEQ ID NO: 620193 - DNA, 25 bp, Homo sapien
cttaccttggaactagaccggtctc

SEQ ID NO: 620194 - DNA, 25 bp, Homo sapien
cacatctggtgattcaaatcgccca

SEQ ID NO: 620195 - DNA, 25 bp, Homo sapien
tgaagttcatatgtgagcagcggca

SEQ ID NO: 620196 - DNA, 25 bp, Homo sapien
gattcactcccacgttcttcataag

SEQ ID NO: 620197 - DNA, 25 bp, Homo sapien
aaatcgcccagcaagatggtcaagg

SEQ ID NO: 620198 - DNA, 25 bp, Homo sapien
catacagggccgttcaacagccgaa

SEQ ID NO: 620199 - DNA, 25 bp, Homo sapien
ctctcaggaagttgccagatggcac

SEQ ID NO: 620200 - DNA, 25 bp, Homo sapien
gccagtaagttacatcgaagcagct

SEQ ID NO: 620201 - DNA, 25 bp, Homo sapien
gaagtacatctatccctgagcatct

SEQ ID NO: 620202 - DNA, 25 bp, Homo sapien
accacttcggaatttgtgaaggcct

SEQ ID NO: 620203 - DNA, 25 bp, Homo sapien
ctgcaagggccactaccacttcgga

SEQ ID NO: 620204 - DNA, 25 bp, Homo sapien
cacttcggaatttgtgaaggcctgc

SEQ ID NO: 620205 - DNA, 25 bp, Homo sapien
gcaagggccactaccacttcggaat

SEQ ID NO: 620206 - DNA, 25 bp, Homo sapien
cttgcaaactgtaagggctcgacct

SEQ ID NO: 620207 - DNA, 25 bp, Homo sapien
tacacgaagacctctcagatggcct

SEQ ID NO: 620208 - DNA, 25 bp, Homo sapien
gagaggaccccgtcatcatcaaggt

SEQ ID NO: 620209 - DNA, 25 bp, Homo sapien
aggaactaactacacagcaggccag

SEQ ID NO: 620210 - DNA, 25 bp, Homo sapien
tcagaattggagatcagagccgctc

SEQ ID NO: 620211 - DNA, 25 bp, Homo sapien
caccagcagacaccattttgcagaa

SEQ ID NO: 620212 - DNA, 25 bp, Homo sapien
agcttcccttgcaaacaccagcaga

SEQ ID NO: 620213 - DNA, 25 bp, Homo sapien
gttagggaaccgcacactcagctcc

SEQ ID NO: 620214 - DNA, 25 bp, Homo sapien
tgccttgtgctaccctccactccat

SEQ ID NO: 620215 - DNA, 25 bp, Homo sapien
aaaagcatccttgccacggccgctg

SEQ ID NO: 620216 - DNA, 25 bp, Homo sapien
ttgtgctaccctccactccattcaa

SEQ ID NO: 620217 - DNA, 25 bp, Homo sapien
ttgccacggccgctggagagaacct

SEQ ID NO: 620218 - DNA, 25 bp, Homo sapien
tcccgtgagtgactgagaaatcatt

SEQ ID NO: 620219 - DNA, 25 bp, Homo sapien
tcgttctgtcctgtcattgccttaa

SEQ ID NO: 620220 - DNA, 25 bp, Homo sapien
tcattccagaattcagcccatcgtt

SEQ ID NO: 620221 - DNA, 25 bp, Homo sapien
cacctgtgccttatccagtcagaca

SEQ ID NO: 620222 - DNA, 25 bp, Homo sapien
tgaatggcattcacgcaaccctctc

SEQ ID NO: 620223 - DNA, 25 bp, Homo sapien
tcagatctttagtgcagaatgccgg

SEQ ID NO: 620224 - DNA, 25 bp, Homo sapien
cattaccgtttataaagtgctctgg

SEQ ID NO: 620225 - DNA, 25 bp, Homo sapien
tggccctttaactggccccggcaga

SEQ ID NO: 620226 - DNA, 25 bp, Homo sapien
ttgactggtaaccataaaagaattc

SEQ ID NO: 620227 - DNA, 25 bp, Homo sapien
gctgacggtgactttttgactggta

SEQ ID NO: 620228 - DNA, 25 bp, Homo sapien
cataaaagaattcattcaaaagggc

SEQ ID NO: 620229 - DNA, 25 bp, Homo sapien
attcattcaaaagggcagttgttcc

SEQ ID NO: 620230 - DNA, 25 bp, Homo sapien
catttgcaagtttcacctcgctggg

SEQ ID NO: 620231 - DNA, 25 bp, Homo sapien
tcgtgccgcttagtatcagaatgct

SEQ ID NO: 620232 - DNA, 25 bp, Homo sapien
atcactgccatcgtcagagcacggg

SEQ ID NO: 620233 - DNA, 25 bp, Homo sapien
gaagccattggtgggaggcccatca

SEQ ID NO: 620234 - DNA, 25 bp, Homo sapien
tgaaccctggtaggtgaattctggg

SEQ ID NO: 620235 - DNA, 25 bp, Homo sapien
cttaggccaggttgcttggagcaga

SEQ ID NO: 620236 - DNA, 25 bp, Homo sapien
gcagtcccactctatatctgagatg

SEQ ID NO: 620237 - DNA, 25 bp, Homo sapien
taggatatactgagagtgggctccg

SEQ ID NO: 620238 - DNA, 25 bp, Homo sapien
gacaggtttgagacactaattacag

SEQ ID NO: 620239 - DNA, 25 bp, Homo sapien
gattggcctggtgattcctgaagaa

SEQ ID NO: 620240 - DNA, 25 bp, Homo sapien
taggatggcagcatcccttcaggct

SEQ ID NO: 620241 - DNA, 25 bp, Homo sapien
taattacagttctagacaccgagtc

SEQ ID NO: 620242 - DNA, 25 bp, Homo sapien
tgattggctgcaacatggctatttg

SEQ ID NO: 620243 - DNA, 25 bp, Homo sapien
gggcagcactcaaaacccaaagagg

SEQ ID NO: 620244 - DNA, 25 bp, Homo sapien
catagacactgggagtaaggagact

SEQ ID NO: 620245 - DNA, 25 bp, Homo sapien
tcacgatgtgatgagttgtctgcct

SEQ ID NO: 620246 - DNA, 25 bp, Homo sapien
cccaaaggttgacagatatgatcca

SEQ ID NO: 620247 - DNA, 25 bp, Homo sapien
gacagagtccctaatgaatgccaaa

SEQ ID NO: 620248 - DNA, 25 bp, Homo sapien
gctgaatgaaatccttacgtgtcca

SEQ ID NO: 620249 - DNA, 25 bp, Homo sapien
tcttacgacacagcccgaatttgga

SEQ ID NO: 620250 - DNA, 25 bp, Homo sapien
cctccctgtttctgcgagtctactt

SEQ ID NO: 620251 - DNA, 25 bp, Homo sapien
tgtttctgcgagtctacttgcaacc

SEQ ID NO: 620252 - DNA, 25 bp, Homo sapien
atcaccatcccgcattcctccctgt

SEQ ID NO: 620253 - DNA, 25 bp, Homo sapien
ctgcgagtctacttgcaacctatgc

SEQ ID NO: 620254 - DNA, 25 bp, Homo sapien
tgctgctgtttagcccctttgccct

SEQ ID NO: 620255 - DNA, 25 bp, Homo sapien
tatgtgatggaaccctctgctgctt

SEQ ID NO: 620256 - DNA, 25 bp, Homo sapien
caaaattatgtgatggaaccctctg

SEQ ID NO: 620257 - DNA, 25 bp, Homo sapien
tggggacttctccacttcaaaatta

SEQ ID NO: 620258 - DNA, 25 bp, Homo sapien
ttcttcctcattcagagggcgtcca

SEQ ID NO: 620259 - DNA, 25 bp, Homo sapien
agggcgtccatcatggcagatcctg

SEQ ID NO: 620260 - DNA, 25 bp, Homo sapien
tttctccaggttacggaagtactca

SEQ ID NO: 620261 - DNA, 25 bp, Homo sapien
tacggaagtactcacagctttcttc

SEQ ID NO: 620262 - DNA, 25 bp, Homo sapien
ggcagatcttgctcctccatagcta

SEQ ID NO: 620263 - DNA, 25 bp, Homo sapien
gatcttgctcctccatagctactgt

SEQ ID NO: 620264 - DNA, 25 bp, Homo sapien
gggccggcagatcttgctcctccat

SEQ ID NO: 620265 - DNA, 25 bp, Homo sapien
ccacaggcaaacctactccttgccc

SEQ ID NO: 620266 - DNA, 25 bp, Homo sapien
tatcccatgctgtggaagtaccagt

SEQ ID NO: 620267 - DNA, 25 bp, Homo sapien
ggaaattaatccgaatcactgagtg

SEQ ID NO: 620268 - DNA, 25 bp, Homo sapien
tatccagcgtcactcaacggtaaca

SEQ ID NO: 620269 - DNA, 25 bp, Homo sapien
ggatactgcatactgactgttcagg

SEQ ID NO: 620270 - DNA, 25 bp, Homo sapien
tagaaatgttagtgtccatgcccat

SEQ ID NO: 620271 - DNA, 25 bp, Homo sapien
tgacctgtgcaaacgccatctgtct

SEQ ID NO: 620272 - DNA, 25 bp, Homo sapien
aatatggccaacacctgacctgtgc

SEQ ID NO: 620273 - DNA, 25 bp, Homo sapien
ctcacagagatagcacagttgactc

SEQ ID NO: 620274 - DNA, 25 bp, Homo sapien
tgcttgggcatccaaagcctatcca

SEQ ID NO: 620275 - DNA, 25 bp, Homo sapien
cccagaggcggtaaactagtcgtca

SEQ ID NO: 620276 - DNA, 25 bp, Homo sapien
tactacttgcgcctgagtggagaaa

SEQ ID NO: 620277 - DNA, 25 bp, Homo sapien
ccaggacctgaaagttacgtgccca

SEQ ID NO: 620278 - DNA, 25 bp, Homo sapien
catcctgatgtttctctgggtagaa

SEQ ID NO: 620279 - DNA, 25 bp, Homo sapien
ttctctgggtagaaacttctgtgtg

SEQ ID NO: 620280 - DNA, 25 bp, Homo sapien
ttctgtgtgaagaacaataacagct

SEQ ID NO: 620281 - DNA, 25 bp, Homo sapien
tgaagaacaataacagctgtggcat

SEQ ID NO: 620282 - DNA, 25 bp, Homo sapien
ttatcagggcagtccgatgatgtcc

SEQ ID NO: 620283 - DNA, 25 bp, Homo sapien
gcaaggtggcaagctgttgacccct

SEQ ID NO: 620284 - DNA, 25 bp, Homo sapien
ggcgctaatgggataagaccactgc

SEQ ID NO: 620285 - DNA, 25 bp, Homo sapien
tccctgcagggaaggtaagtgtgcc

SEQ ID NO: 620286 - DNA, 25 bp, Homo sapien
catcccttggatcagtgaagcttga

SEQ ID NO: 620287 - DNA, 25 bp, Homo sapien
ggcctgtaccaggacgtaccggaga

SEQ ID NO: 620288 - DNA, 25 bp, Homo sapien
gtaccggagaccaagccgcagattc

SEQ ID NO: 620289 - DNA, 25 bp, Homo sapien
tgtcagctccaataaagctccagcg

SEQ ID NO: 620290 - DNA, 25 bp, Homo sapien
tgcggatgccaacggaaagaatctt

SEQ ID NO: 620291 - DNA, 25 bp, Homo sapien
tcagaatgaccagagaacaacacag

SEQ ID NO: 620292 - DNA, 25 bp, Homo sapien
tcccggcttggctgaataaccactg

SEQ ID NO: 620293 - DNA, 25 bp, Homo sapien
tgtcaagacggataatgtggccact

SEQ ID NO: 620294 - DNA, 25 bp, Homo sapien
aggagcagctccgggtgacacgagg

SEQ ID NO: 620295 - DNA, 25 bp, Homo sapien
aggctccaccgacagccaggcactg

SEQ ID NO: 620296 - DNA, 25 bp, Homo sapien
gactgaagatactcccacaggggct

SEQ ID NO: 620297 - DNA, 25 bp, Homo sapien
agaagggaggactccacccaggctt

SEQ ID NO: 620298 - DNA, 25 bp, Homo sapien
gagggcagccccacatcaggaagag

SEQ ID NO: 620299 - DNA, 25 bp, Homo sapien
ggcagccccacatcaggaagagaac

SEQ ID NO: 620300 - DNA, 25 bp, Homo sapien
ttattggagttgggagggcagcccc

SEQ ID NO: 620301 - DNA, 25 bp, Homo sapien
tgggagggcagccccacatcaggaa

SEQ ID NO: 620302 - DNA, 25 bp, Homo sapien
tagcaataactccacagattttccc

SEQ ID NO: 620303 - DNA, 25 bp, Homo sapien
gtatccaggttcttgacagtagttc

SEQ ID NO: 620304 - DNA, 25 bp, Homo sapien
tttaatagctctgtgggtatccagg

SEQ ID NO: 620305 - DNA, 25 bp, Homo sapien
cacacaaccctcagaagcttaaact

SEQ ID NO: 620306 - DNA, 25 bp, Homo sapien
agcagggaaggatgccgtttgttct

SEQ ID NO: 620307 - DNA, 25 bp, Homo sapien
ggaaggatgccgtttgttctcacca

SEQ ID NO: 620308 - DNA, 25 bp, Homo sapien
gatgccgtttgttctcaccaactgt

SEQ ID NO: 620309 - DNA, 25 bp, Homo sapien
gaaggatgccgtttgttctcaccaa

SEQ ID NO: 620310 - DNA, 25 bp, Homo sapien
tgactggctttggcaagaggcaaca

SEQ ID NO: 620311 - DNA, 25 bp, Homo sapien
gactggctttggcaagaggcaacat

SEQ ID NO: 620312 - DNA, 25 bp, Homo sapien
ctgactggctttggcaagaggcaac

SEQ ID NO: 620313 - DNA, 25 bp, Homo sapien
tgggcttgtttttacttggcataac

SEQ ID NO: 620314 - DNA, 25 bp, Homo sapien
cctgatccggatgtggaaggtatgc

SEQ ID NO: 620315 - DNA, 25 bp, Homo sapien
ctcctagggaggtttgtgggcttgt

SEQ ID NO: 620316 - DNA, 25 bp, Homo sapien
tcatcatcagcaccctgatccggat

SEQ ID NO: 620317 - DNA, 25 bp, Homo sapien
tgtcagcgttatccgggcagccatt

SEQ ID NO: 620318 - DNA, 25 bp, Homo sapien
tagtttgtcaggacttcttcagccc

SEQ ID NO: 620319 - DNA, 25 bp, Homo sapien
tcagccctctgaatatggccacatg

SEQ ID NO: 620320 - DNA, 25 bp, Homo sapien
tattcattcgttgccatgcattgct

SEQ ID NO: 620321 - DNA, 25 bp, Homo sapien
tatcaggcctcccatgaaattgcgt

SEQ ID NO: 620322 - DNA, 25 bp, Homo sapien
cacttgtcagtcaggtagaggttac

SEQ ID NO: 620323 - DNA, 25 bp, Homo sapien
gatccaaggcattctacagggttca

SEQ ID NO: 620324 - DNA, 25 bp, Homo sapien
tgcttatggcttctacgttaccgga

SEQ ID NO: 620325 - DNA, 25 bp, Homo sapien
gattttccgcatgaagttgggttcc

SEQ ID NO: 620326 - DNA, 25 bp, Homo sapien
gttcctttgagtcggtgcacctggg

SEQ ID NO: 620327 - DNA, 25 bp, Homo sapien
atgcctgctggaagcgctgtaccgc

SEQ ID NO: 620328 - DNA, 25 bp, Homo sapien
aagaaacagcacgacaccctggtaa

SEQ ID NO: 620329 - DNA, 25 bp, Homo sapien
tgggaggcgcagaaagccaaacttc

SEQ ID NO: 620330 - DNA, 25 bp, Homo sapien
gcccggcatcgcgattgtgcaagcg

SEQ ID NO: 620331 - DNA, 25 bp, Homo sapien
tagacaaggcttcgttgttgccgct

SEQ ID NO: 620332 - DNA, 25 bp, Homo sapien
tattgactgttgactatagacaagg

SEQ ID NO: 620333 - DNA, 25 bp, Homo sapien
tccgttcctgaattagcaaagcgag

SEQ ID NO: 620334 - DNA, 25 bp, Homo sapien
tggtttcaagctctgtgtgcccctc

SEQ ID NO: 620335 - DNA, 25 bp, Homo sapien
tgccagccgcggtaactctagaaat

SEQ ID NO: 620336 - DNA, 25 bp, Homo sapien
aattcaagcatcgttggtgcaagcc

SEQ ID NO: 620337 - DNA, 25 bp, Homo sapien
cagggaaggatttgccaacacttgg

SEQ ID NO: 620338 - DNA, 25 bp, Homo sapien
tcagtgcctgacttatcataagccc

SEQ ID NO: 620339 - DNA, 25 bp, Homo sapien
cataatctatagtgtatgctgtaac

SEQ ID NO: 620340 - DNA, 25 bp, Homo sapien
gcttaagttggactgcaaaagattt

SEQ ID NO: 620341 - DNA, 25 bp, Homo sapien
agggatggcgagctctctgaccacc

SEQ ID NO: 620342 - DNA, 25 bp, Homo sapien
tgcacgtggacccacatctcgaggc

SEQ ID NO: 620343 - DNA, 25 bp, Homo sapien
aagagggatggcgagctctctgacc

SEQ ID NO: 620344 - DNA, 25 bp, Homo sapien
tctcgaggcacgatgggtggaataa

SEQ ID NO: 620345 - DNA, 25 bp, Homo sapien
gacaaggcttcatttgaggatacgc

SEQ ID NO: 620346 - DNA, 25 bp, Homo sapien
cagagacaaggcttcatttgaggat

SEQ ID NO: 620347 - DNA, 25 bp, Homo sapien
gagacaaggcttcatttgaggatac

SEQ ID NO: 620348 - DNA, 25 bp, Homo sapien
tcacagagacaaggcttcatttgag

SEQ ID NO: 620349 - DNA, 25 bp, Homo sapien
tgtgggattctttgagccgtgattc

SEQ ID NO: 620350 - DNA, 25 bp, Homo sapien
gggattctttgagccgtgattccat

SEQ ID NO: 620351 - DNA, 25 bp, Homo sapien
gcttttcacgctcacttgcttgtct

SEQ ID NO: 620352 - DNA, 25 bp, Homo sapien
tcacatctggcttttcacgctcact

SEQ ID NO: 620353 - DNA, 25 bp, Homo sapien
actgcttcaatcctctttacctctg

SEQ ID NO: 620354 - DNA, 25 bp, Homo sapien
tcctctattggctttagttatgtgt

SEQ ID NO: 620355 - DNA, 25 bp, Homo sapien
tgcaaaccaccttcctctattggct

SEQ ID NO: 620356 - DNA, 25 bp, Homo sapien
gagcaaaaatggtctcccctagctt

SEQ ID NO: 620357 - DNA, 25 bp, Homo sapien
tctaggatgccacaccatgtattcc

SEQ ID NO: 620358 - DNA, 25 bp, Homo sapien
ctgtcatatctagagttttctagga

SEQ ID NO: 620359 - DNA, 25 bp, Homo sapien
ctagagttttctaggatgccacacc

SEQ ID NO: 620360 - DNA, 25 bp, Homo sapien
tattccagaataagtctttctgctt

SEQ ID NO: 620361 - DNA, 25 bp, Homo sapien
cacagagctagaaacagtagagcta

SEQ ID NO: 620362 - DNA, 25 bp, Homo sapien
cgggacataatgtgctcgaggacac

SEQ ID NO: 620363 - DNA, 25 bp, Homo sapien
taactgaggcaagagtacgggacat

SEQ ID NO: 620364 - DNA, 25 bp, Homo sapien
cctttgggccaaagtagaatcatct

SEQ ID NO: 620365 - DNA, 25 bp, Homo sapien
tctctctgcaactcctgaagaattg

SEQ ID NO: 620366 - DNA, 25 bp, Homo sapien
caactcctgaagaattgtctacacg

SEQ ID NO: 620367 - DNA, 25 bp, Homo sapien
tctctgcaactcctgaagaattgtc

SEQ ID NO: 620368 - DNA, 25 bp, Homo sapien
tttctctctgcaactcctgaagaat

SEQ ID NO: 620369 - DNA, 25 bp, Homo sapien
gcaaattgtgatcatgtggactcat

SEQ ID NO: 620370 - DNA, 25 bp, Homo sapien
tgtggactcattgttcgagcaacac

SEQ ID NO: 620371 - DNA, 25 bp, Homo sapien
gactcattgttcgagcaacactcct

SEQ ID NO: 620372 - DNA, 25 bp, Homo sapien
gatcatgtggactcattgttcgagc

SEQ ID NO: 620373 - DNA, 25 bp, Homo sapien
ggtatatgaacttgtaactcccagc

SEQ ID NO: 620374 - DNA, 25 bp, Homo sapien
tatgaacttgtaactcccagccttc

SEQ ID NO: 620375 - DNA, 25 bp, Homo sapien
gtttctgcctgatgggcagctgctg

SEQ ID NO: 620376 - DNA, 25 bp, Homo sapien
cacacaggtacatgtagggcacctg

SEQ ID NO: 620377 - DNA, 25 bp, Homo sapien
ccgcatggtacagggactttcaagt

SEQ ID NO: 620378 - DNA, 25 bp, Homo sapien
atcttctcatttcctgatgtggagc

SEQ ID NO: 620379 - DNA, 25 bp, Homo sapien
gagcatttccgacctttgtttctgg

SEQ ID NO: 620380 - DNA, 25 bp, Homo sapien
gaaaaactcgttctgcaagtccgca

SEQ ID NO: 620381 - DNA, 25 bp, Homo sapien
tcttgtccctctcctctccccagac

SEQ ID NO: 620382 - DNA, 25 bp, Homo sapien
ttcttgtccctctcctctccccaga

SEQ ID NO: 620383 - DNA, 25 bp, Homo sapien
tttctcatcattcttgtccctctcc

SEQ ID NO: 620384 - DNA, 25 bp, Homo sapien
ctatttctcatcattcttgtccctc

SEQ ID NO: 620385 - DNA, 25 bp, Homo sapien
agccctgcaagtctgcacaccatgg

SEQ ID NO: 620386 - DNA, 25 bp, Homo sapien
tgtgaggctgtaagcacgagccaac

SEQ ID NO: 620387 - DNA, 25 bp, Homo sapien
gccaactggacggagaggcagccct

SEQ ID NO: 620388 - DNA, 25 bp, Homo sapien
catggccggtgtggagctggtcact

SEQ ID NO: 620389 - DNA, 25 bp, Homo sapien
gggaggcggacctgcgtccttcgag

SEQ ID NO: 620390 - DNA, 25 bp, Homo sapien
ggcggacctgcgtccttcgaggctc

SEQ ID NO: 620391 - DNA, 25 bp, Homo sapien
tcgcgggaggcggacctgcgtcctt

SEQ ID NO: 620392 - DNA, 25 bp, Homo sapien
cggcatcgcgggaggcggacctgcg

SEQ ID NO: 620393 - DNA, 25 bp, Homo sapien
tcaaggccaaccacactcaacggga

SEQ ID NO: 620394 - DNA, 25 bp, Homo sapien
ggtgcaacgcccgagtcaaggccaa

SEQ ID NO: 620395 - DNA, 25 bp, Homo sapien
taatgcgatcatgccggtgcaacgc

SEQ ID NO: 620396 - DNA, 25 bp, Homo sapien
gctacccataaccagtgaggctaat

SEQ ID NO: 620397 - DNA, 25 bp, Homo sapien
agctgagtcactttagggcctctaa

SEQ ID NO: 620398 - DNA, 25 bp, Homo sapien
gcttcttactagctgagtcacttta

SEQ ID NO: 620399 - DNA, 25 bp, Homo sapien
ttactagctgagtcactttagggcc

SEQ ID NO: 620400 - DNA, 25 bp, Homo sapien
tgagtcactttagggcctctaactg

SEQ ID NO: 620401 - DNA, 25 bp, Homo sapien
gggattagaggaggaaactgaacca

SEQ ID NO: 620402 - DNA, 25 bp, Homo sapien
tagaggaggaaactgaaccatactc

SEQ ID NO: 620403 - DNA, 25 bp, Homo sapien
ggaggaaactgaaccatactcagtc

SEQ ID NO: 620404 - DNA, 25 bp, Homo sapien
gaggaggaaactgaaccatactcag

SEQ ID NO: 620405 - DNA, 25 bp, Homo sapien
cgatatacccagagactgtatgcaa

SEQ ID NO: 620406 - DNA, 25 bp, Homo sapien
gcaaaatggcatgtatagtatgtgc

SEQ ID NO: 620407 - DNA, 25 bp, Homo sapien
cttctggaaggtcttcatagctttc

SEQ ID NO: 620408 - DNA, 25 bp, Homo sapien
tggacattgacaggtcgatataccc

SEQ ID NO: 620409 - DNA, 25 bp, Homo sapien
aacggatccagtgcaggactgcctg

SEQ ID NO: 620410 - DNA, 25 bp, Homo sapien
tctaaatcatgcttgatcagactca

SEQ ID NO: 620411 - DNA, 25 bp, Homo sapien
gggctcaacagagccattcacatga

SEQ ID NO: 620412 - DNA, 25 bp, Homo sapien
gatcagactcaaacacatagtttcc

SEQ ID NO: 620413 - DNA, 25 bp, Homo sapien
catactgaaacactacttttggctc

SEQ ID NO: 620414 - DNA, 25 bp, Homo sapien
tcatactgaaacactacttttggct

SEQ ID NO: 620415 - DNA, 25 bp, Homo sapien
gttgatcttcgaaagtaacattgac

SEQ ID NO: 620416 - DNA, 25 bp, Homo sapien
atcttttgttgatcttcgaaagtaa

SEQ ID NO: 620417 - DNA, 25 bp, Homo sapien
tgtattccgtgcaaatttgtttatc

SEQ ID NO: 620418 - DNA, 25 bp, Homo sapien
tgtgattctacttgtattccgtgca

SEQ ID NO: 620419 - DNA, 25 bp, Homo sapien
tgtaactttttagaagacatttcac

SEQ ID NO: 620420 - DNA, 25 bp, Homo sapien
tcacaagcaagcacttagagctacc

SEQ ID NO: 620421 - DNA, 25 bp, Homo sapien
ttgtaactttttagaagacatttca

SEQ ID NO: 620422 - DNA, 25 bp, Homo sapien
acaagcaagcacttagagctaccta

SEQ ID NO: 620423 - DNA, 25 bp, Homo sapien
atgtcatcacaagcatcttctaggt

SEQ ID NO: 620424 - DNA, 25 bp, Homo sapien
atcacaagcatcttctaggttttgg

SEQ ID NO: 620425 - DNA, 25 bp, Homo sapien
catcacaagcatcttctaggttttg

SEQ ID NO: 620426 - DNA, 25 bp, Homo sapien
gtcatcacaagcatcttctaggttt

SEQ ID NO: 620427 - DNA, 25 bp, Homo sapien
ctaacatttcttgcgtttcttcttg

SEQ ID NO: 620428 - DNA, 25 bp, Homo sapien
tgaagacatcaccaatttgataagg

SEQ ID NO: 620429 - DNA, 25 bp, Homo sapien
ggtatcattaagcaatcatcatctg

SEQ ID NO: 620430 - DNA, 25 bp, Homo sapien
cttgagaatggctaatgaagacatc

SEQ ID NO: 620431 - DNA, 25 bp, Homo sapien
agaaccttctaaacttggacaggca

SEQ ID NO: 620432 - DNA, 25 bp, Homo sapien
gaagaacaacttatgatccaaatct

SEQ ID NO: 620433 - DNA, 25 bp, Homo sapien
tggacaggcagctaagtaacactga

SEQ ID NO: 620434 - DNA, 25 bp, Homo sapien
taactatgagactacaggaaatgat

SEQ ID NO: 620435 - DNA, 25 bp, Homo sapien
gctaacactcgctgaattgattcca

SEQ ID NO: 620436 - DNA, 25 bp, Homo sapien
actttcaaatctgctaacactcgct

SEQ ID NO: 620437 - DNA, 25 bp, Homo sapien
aatctgctaacactcgctgaattga

SEQ ID NO: 620438 - DNA, 25 bp, Homo sapien
tcaaatctgctaacactcgctgaat

SEQ ID NO: 620439 - DNA, 25 bp, Homo sapien
caatattcaagtttattaaacaaat

SEQ ID NO: 620440 - DNA, 25 bp, Homo sapien
tttaataacatgacatgaagcccct

SEQ ID NO: 620441 - DNA, 25 bp, Homo sapien
gaagcccctagacttgatataatcg

SEQ ID NO: 620442 - DNA, 25 bp, Homo sapien
gatataatcgttatgcaaaatacat

SEQ ID NO: 620443 - DNA, 25 bp, Homo sapien
aatacataggtgaatactgtcttct

SEQ ID NO: 620444 - DNA, 25 bp, Homo sapien
gcacatctcttggtttctaaaacgt

SEQ ID NO: 620445 - DNA, 25 bp, Homo sapien
tcatcgtgctttccccgtcattaga

SEQ ID NO: 620446 - DNA, 25 bp, Homo sapien
gcaaggatgcaggattgtacatctt

SEQ ID NO: 620447 - DNA, 25 bp, Homo sapien
gtataaagctccacatgcctccaca

SEQ ID NO: 620448 - DNA, 25 bp, Homo sapien
gggaagaaatgcatcctttatttaa

SEQ ID NO: 620449 - DNA, 25 bp, Homo sapien
gaaataagccttacttttacataca

SEQ ID NO: 620450 - DNA, 25 bp, Homo sapien
agccttacttttacatacatagctg

SEQ ID NO: 620451 - DNA, 25 bp, Homo sapien
taagccttacttttacatacatagc

SEQ ID NO: 620452 - DNA, 25 bp, Homo sapien
tccatggtttcaagcatggcctggg

SEQ ID NO: 620453 - DNA, 25 bp, Homo sapien
tattaggtacacatctaggagcagt

SEQ ID NO: 620454 - DNA, 25 bp, Homo sapien
taaaccaggactattgcatgagcat

SEQ ID NO: 620455 - DNA, 25 bp, Homo sapien
tatatatagagtaccatccatggtt

SEQ ID NO: 620456 - DNA, 25 bp, Homo sapien
gttgtcctggttttgcattaatagc

SEQ ID NO: 620457 - DNA, 25 bp, Homo sapien
gaaaggtgtgatattgtctttgtgt

SEQ ID NO: 620458 - DNA, 25 bp, Homo sapien
tttgtgttgtcctggttttgcatta

SEQ ID NO: 620459 - DNA, 25 bp, Homo sapien
ttgacagaatggaaaggtgtgatat

SEQ ID NO: 620460 - DNA, 25 bp, Homo sapien
gatggctttcctgttggttttacat

SEQ ID NO: 620461 - DNA, 25 bp, Homo sapien
ttctattactgggtcctgagagcac

SEQ ID NO: 620462 - DNA, 25 bp, Homo sapien
tgctcttctattactgggtcctgag

SEQ ID NO: 620463 - DNA, 25 bp, Homo sapien
cattcatctgctcttctattactgg

SEQ ID NO: 620464 - DNA, 25 bp, Homo sapien
gatctccaaagatacaatcaattac

SEQ ID NO: 620465 - DNA, 25 bp, Homo sapien
tttgatctccaaagatacaatcaat

SEQ ID NO: 620466 - DNA, 25 bp, Homo sapien
ccttaaatcaatatgtctcacaaaa

SEQ ID NO: 620467 - DNA, 25 bp, Homo sapien
tttcccttaaatcaatatgtctcac

SEQ ID NO: 620468 - DNA, 25 bp, Homo sapien
aacacaatgtatgaatcggaccagc

SEQ ID NO: 620469 - DNA, 25 bp, Homo sapien
caattgcacattgatctgttggcac

SEQ ID NO: 620470 - DNA, 25 bp, Homo sapien
tacgcagtgtctgtgcaaattggca

SEQ ID NO: 620471 - DNA, 25 bp, Homo sapien
aagatcccagggagttaatatggca

SEQ ID NO: 620472 - DNA, 25 bp, Homo sapien
tcttaaagccctggcaattaacctc

SEQ ID NO: 620473 - DNA, 25 bp, Homo sapien
ctgtcacccgcagcttaatcttctt

SEQ ID NO: 620474 - DNA, 25 bp, Homo sapien
ttggctgttcccactaacagcacca

SEQ ID NO: 620475 - DNA, 25 bp, Homo sapien
tggctgttcccactaacagcaccat

SEQ ID NO: 620476 - DNA, 25 bp, Homo sapien
tcttgatctcaacatgcaaaccaca

SEQ ID NO: 620477 - DNA, 25 bp, Homo sapien
tctcctggattcttgatctcaacat

SEQ ID NO: 620478 - DNA, 25 bp, Homo sapien
ggatttcaattccaccagcatttcc

SEQ ID NO: 620479 - DNA, 25 bp, Homo sapien
caattccaccagcatttccaacaat

SEQ ID NO: 620480 - DNA, 25 bp, Homo sapien
agagagggttgttatgttctgggtc

SEQ ID NO: 620481 - DNA, 25 bp, Homo sapien
caggcctccaagttgtgagagaggg

SEQ ID NO: 620482 - DNA, 25 bp, Homo sapien
cctccaagttgtgagagagggttgt

SEQ ID NO: 620483 - DNA, 25 bp, Homo sapien
ccaagttgtgagagagggttgttat

SEQ ID NO: 620484 - DNA, 25 bp, Homo sapien
tgttgcatcatgcactggaattgca

SEQ ID NO: 620485 - DNA, 25 bp, Homo sapien
catcatgcactggaattgcaggcca

SEQ ID NO: 620486 - DNA, 25 bp, Homo sapien
catgcactggaattgcaggccaccc

SEQ ID NO: 620487 - DNA, 25 bp, Homo sapien
cacatctttgttgcatcatgcactg

SEQ ID NO: 620488 - DNA, 25 bp, Homo sapien
ggtgaactaaggttttcgagaatgc

SEQ ID NO: 620489 - DNA, 25 bp, Homo sapien
ggttttcgagaatgctgacttctac

SEQ ID NO: 620490 - DNA, 25 bp, Homo sapien
aactaaggttttcgagaatgctgac

SEQ ID NO: 620491 - DNA, 25 bp, Homo sapien
taaggttttcgagaatgctgacttc

SEQ ID NO: 620492 - DNA, 25 bp, Homo sapien
tgctctcgcctctttctgaagctat

SEQ ID NO: 620493 - DNA, 25 bp, Homo sapien
gggctcctgattcagactggaacaa

SEQ ID NO: 620494 - DNA, 25 bp, Homo sapien
tgattgtacgaggaacagcagtgtc

SEQ ID NO: 620495 - DNA, 25 bp, Homo sapien
gaacaataaggcaccttctttggga

SEQ ID NO: 620496 - DNA, 25 bp, Homo sapien
ttgataatgactctgaacatgggta

SEQ ID NO: 620497 - DNA, 25 bp, Homo sapien
gaagtgctccagctaaaacacaagc

SEQ ID NO: 620498 - DNA, 25 bp, Homo sapien
aacacaagccaactggtcaagagca

SEQ ID NO: 620499 - DNA, 25 bp, Homo sapien
gccaaccagtacaatcctaaagacg

SEQ ID NO: 620500 - DNA, 25 bp, Homo sapien
agcaaagatgaacaccatctggcct

SEQ ID NO: 620501 - DNA, 25 bp, Homo sapien
gggggctgtattcttgctctccaac

SEQ ID NO: 620502 - DNA, 25 bp, Homo sapien
gatgaacaccatctggcctgctttc

SEQ ID NO: 620503 - DNA, 25 bp, Homo sapien
caacaatgtccttaagttccagtct

SEQ ID NO: 620504 - DNA, 25 bp, Homo sapien
agtactccttatgaaactggcagca

SEQ ID NO: 620505 - DNA, 25 bp, Homo sapien
tgccaaagtactccttatgaaactg

SEQ ID NO: 620506 - DNA, 25 bp, Homo sapien
agctatcccgtagctcttgcagggt

SEQ ID NO: 620507 - DNA, 25 bp, Homo sapien
ttagctatcccgtagctcttgcagg

SEQ ID NO: 620508 - DNA, 25 bp, Homo sapien
cttgagctgacttcaacattggtga

SEQ ID NO: 620509 - DNA, 25 bp, Homo sapien
gtgaaaaatcttcagatgtgctcat

SEQ ID NO: 620510 - DNA, 25 bp, Homo sapien
gaacatccttgagctgacttcaaca

SEQ ID NO: 620511 - DNA, 25 bp, Homo sapien
atgggctgggtatgaacatccttga

SEQ ID NO: 620512 - DNA, 25 bp, Homo sapien
tagagatgctcgtgcaaagtccttt

SEQ ID NO: 620513 - DNA, 25 bp, Homo sapien
gacaagtgacgtttatttgactgtt

SEQ ID NO: 620514 - DNA, 25 bp, Homo sapien
aattcagctttgaaggacaagtgac

SEQ ID NO: 620515 - DNA, 25 bp, Homo sapien
tttaagtactttcccgctctcggca

SEQ ID NO: 620516 - DNA, 25 bp, Homo sapien
aaatgaattggcaaatttgcaatgc

SEQ ID NO: 620517 - DNA, 25 bp, Homo sapien
atgaattggcaaatttgcaatgcca

SEQ ID NO: 620518 - DNA, 25 bp, Homo sapien
cttggaaaacaaatgaattggcaaa

SEQ ID NO: 620519 - DNA, 25 bp, Homo sapien
acaaatgaattggcaaatttgcaat

SEQ ID NO: 620520 - DNA, 25 bp, Homo sapien
gcaggcgaatagctttcttactccc

SEQ ID NO: 620521 - DNA, 25 bp, Homo sapien
tactttatctgcagtgaacagcagg

SEQ ID NO: 620522 - DNA, 25 bp, Homo sapien
tgctcagcgggttttggcagctccg

SEQ ID NO: 620523 - DNA, 25 bp, Homo sapien
aattccagatgttgggcgctgctca

SEQ ID NO: 620524 - DNA, 25 bp, Homo sapien
aatagatggattgggctgacaatac

SEQ ID NO: 620525 - DNA, 25 bp, Homo sapien
tacttaaacccactcatcagccatg

SEQ ID NO: 620526 - DNA, 25 bp, Homo sapien
ggctgacaatacttaaacccactca

SEQ ID NO: 620527 - DNA, 25 bp, Homo sapien
gattgggctgacaatacttaaaccc

SEQ ID NO: 620528 - DNA, 25 bp, Homo sapien
ccgcttcagcgaaaggcagtaagtc

SEQ ID NO: 620529 - DNA, 25 bp, Homo sapien
gtagggtgggtatagcagcctcccc

SEQ ID NO: 620530 - DNA, 25 bp, Homo sapien
tgagtgagtttgaccgcttcagcga

SEQ ID NO: 620531 - DNA, 25 bp, Homo sapien
gaaaaacatgttgctggagtcaagg

SEQ ID NO: 620532 - DNA, 25 bp, Homo sapien
ccaaacctgctcttctgacagcagc

SEQ ID NO: 620533 - DNA, 25 bp, Homo sapien
cttctgacagcagctcctcaaccat

SEQ ID NO: 620534 - DNA, 25 bp, Homo sapien
tgctcttctgacagcagctcctcaa

SEQ ID NO: 620535 - DNA, 25 bp, Homo sapien
gctcttctgacagcagctcctcaac

SEQ ID NO: 620536 - DNA, 25 bp, Homo sapien
atctaggaatttggccttgtagatg

SEQ ID NO: 620537 - DNA, 25 bp, Homo sapien
cactgcatttcaaatctaggaattt

SEQ ID NO: 620538 - DNA, 25 bp, Homo sapien
cttgctttagagtgttttctaaatg

SEQ ID NO: 620539 - DNA, 25 bp, Homo sapien
ttaaggcttctactaaaatgaaatc

SEQ ID NO: 620540 - DNA, 25 bp, Homo sapien
ccattctgttacaaatccaaatcat

SEQ ID NO: 620541 - DNA, 25 bp, Homo sapien
accattctgttacaaatccaaatca

SEQ ID NO: 620542 - DNA, 25 bp, Homo sapien
ctattctatgataacctctagttgt

SEQ ID NO: 620543 - DNA, 25 bp, Homo sapien
gataacctctagttgttccctctgt

SEQ ID NO: 620544 - DNA, 25 bp, Homo sapien
tgtatgtttaaccagccagaggaaa

SEQ ID NO: 620545 - DNA, 25 bp, Homo sapien
ttccctctgtatgtttaaccagcca

SEQ ID NO: 620546 - DNA, 25 bp, Homo sapien
gagttccgtttgcacttctgggtgg

SEQ ID NO: 620547 - DNA, 25 bp, Homo sapien
tgctgagttccgtttgcacttctgg

SEQ ID NO: 620548 - DNA, 25 bp, Homo sapien
ccgtttgcacttctgggtggtcctc

SEQ ID NO: 620549 - DNA, 25 bp, Homo sapien
tggatgctgagttccgtttgcactt

SEQ ID NO: 620550 - DNA, 25 bp, Homo sapien
tcaagtaccacaaagcaccaaagct

SEQ ID NO: 620551 - DNA, 25 bp, Homo sapien
tctagagcaggtaatgggctcccaa

SEQ ID NO: 620552 - DNA, 25 bp, Homo sapien
tggaatggcacttctccaataccct

SEQ ID NO: 620553 - DNA, 25 bp, Homo sapien
cctgctgctttcagtgggagtgtca

SEQ ID NO: 620554 - DNA, 25 bp, Homo sapien
tggagcgccggcgtcagctgactcc

SEQ ID NO: 620555 - DNA, 25 bp, Homo sapien
tgggcggccggcttgcagccacttt

SEQ ID NO: 620556 - DNA, 25 bp, Homo sapien
tcaagacaagcagtcggtgggagaa

SEQ ID NO: 620557 - DNA, 25 bp, Homo sapien
gaggctttagaaggcgcacatcact

SEQ ID NO: 620558 - DNA, 25 bp, Homo sapien
gaggcgtctgctccggatcctcacg

SEQ ID NO: 620559 - DNA, 25 bp, Homo sapien
cccgaggcgtctgctccggatcctc

SEQ ID NO: 620560 - DNA, 25 bp, Homo sapien
cggatcctcacgtacccttgcttca

SEQ ID NO: 620561 - DNA, 25 bp, Homo sapien
cacgtacccttgcttcactatgtca

SEQ ID NO: 620562 - DNA, 25 bp, Homo sapien
tctaccagtttggcctgtcctgggg

SEQ ID NO: 620563 - DNA, 25 bp, Homo sapien
gggactgcagctgcgatactgcaaa

SEQ ID NO: 620564 - DNA, 25 bp, Homo sapien
cagctgcgatactgcaaaaaggcta

SEQ ID NO: 620565 - DNA, 25 bp, Homo sapien
caaaaaggctacaagaatcaagaat

SEQ ID NO: 620566 - DNA, 25 bp, Homo sapien
cggaagccgaggtgtaagcagttca

SEQ ID NO: 620567 - DNA, 25 bp, Homo sapien
tcagtgacatggtctgctcatagca

SEQ ID NO: 620568 - DNA, 25 bp, Homo sapien
atttccgtctccatcttccgcagcg

SEQ ID NO: 620569 - DNA, 25 bp, Homo sapien
ctcatagcagatggccggcagtagg

SEQ ID NO: 620570 - DNA, 25 bp, Homo sapien
tagtatggtgtgacacagcgagtga

SEQ ID NO: 620571 - DNA, 25 bp, Homo sapien
acagcgagtgaacgcagcaggctct

SEQ ID NO: 620572 - DNA, 25 bp, Homo sapien
aactaaaggtggtgtgttgggctca

SEQ ID NO: 620573 - DNA, 25 bp, Homo sapien
ggctcatgcactgattttgggtagt

SEQ ID NO: 620574 - DNA, 25 bp, Homo sapien
tccctctttagaaggttggtctaga

SEQ ID NO: 620575 - DNA, 25 bp, Homo sapien
gcagttacatatcaggttgctggag

SEQ ID NO: 620576 - DNA, 25 bp, Homo sapien
gatctgcatgcagggtgttcactgc

SEQ ID NO: 620577 - DNA, 25 bp, Homo sapien
tgagtaaaataaagggagaaccatg

SEQ ID NO: 620578 - DNA, 25 bp, Homo sapien
aatagggattatgtaaaagtgctcc

SEQ ID NO: 620579 - DNA, 25 bp, Homo sapien
ggacatgttaagcaactccacaagc

SEQ ID NO: 620580 - DNA, 25 bp, Homo sapien
cctcaacttctcattgaaaataggg

SEQ ID NO: 620581 - DNA, 25 bp, Homo sapien
cttatgttggagcattaggtgatcc

SEQ ID NO: 620582 - DNA, 25 bp, Homo sapien
tatatctgtttatgttgtcaagtga

SEQ ID NO: 620583 - DNA, 25 bp, Homo sapien
tgttgtcaagtgaaccacgctgatt

SEQ ID NO: 620584 - DNA, 25 bp, Homo sapien
ttcgagaggagcctgtggtcagaaa

SEQ ID NO: 620585 - DNA, 25 bp, Homo sapien
tctaatgggccatttaacagcatat

SEQ ID NO: 620586 - DNA, 25 bp, Homo sapien
ctgtagccttaagtgtctcacaatt

SEQ ID NO: 620587 - DNA, 25 bp, Homo sapien
ttaagtgtctcacaattattatcag

SEQ ID NO: 620588 - DNA, 25 bp, Homo sapien
tagccttaagtgtctcacaattatt

SEQ ID NO: 620589 - DNA, 25 bp, Homo sapien
gccttaagtgtctcacaattattat

SEQ ID NO: 620590 - DNA, 25 bp, Homo sapien
tcaaaaacgaatctttaccaccatc

SEQ ID NO: 620591 - DNA, 25 bp, Homo sapien
tttgatcaaaaacgaatctttacca

SEQ ID NO: 620592 - DNA, 25 bp, Homo sapien
caaggtttgatcaaaaacgaatctt

SEQ ID NO: 620593 - DNA, 25 bp, Homo sapien
ccaaggtttgatcaaaaacgaatct

SEQ ID NO: 620594 - DNA, 25 bp, Homo sapien
tctaaaagtgcttcccgatgcgggc

SEQ ID NO: 620595 - DNA, 25 bp, Homo sapien
gggtggcttgcaaaaggtggcacat

SEQ ID NO: 620596 - DNA, 25 bp, Homo sapien
gtgcttcccgatgcgggcatctgag

SEQ ID NO: 620597 - DNA, 25 bp, Homo sapien
gggctgccgacaaagacttctaaaa

SEQ ID NO: 620598 - DNA, 25 bp, Homo sapien
tgagctcagcatctcccctgactga

SEQ ID NO: 620599 - DNA, 25 bp, Homo sapien
tacaaagactgagctcagcatctcc

SEQ ID NO: 620600 - DNA, 25 bp, Homo sapien
ggaaggaaatacaaagactgagctc

SEQ ID NO: 620601 - DNA, 25 bp, Homo sapien
agcatctcccctgactgacatttgc

SEQ ID NO: 620602 - DNA, 25 bp, Homo sapien
tcttgaatactaaccagcatcgctg

SEQ ID NO: 620603 - DNA, 25 bp, Homo sapien
cttatgataacacctgaaatatgca

SEQ ID NO: 620604 - DNA, 25 bp, Homo sapien
ggacctttgcttgaagctttcttga

SEQ ID NO: 620605 - DNA, 25 bp, Homo sapien
tatgcagcacgttcatcagaaaatt

SEQ ID NO: 620606 - DNA, 25 bp, Homo sapien
gggcttcagtgtagggagtacaaca

SEQ ID NO: 620607 - DNA, 25 bp, Homo sapien
caacatgataagtcccatagcagag

SEQ ID NO: 620608 - DNA, 25 bp, Homo sapien
tctgagacacaatgagatccagtcc

SEQ ID NO: 620609 - DNA, 25 bp, Homo sapien
acaataaatcggtagaacttcctct

SEQ ID NO: 620610 - DNA, 25 bp, Homo sapien
gagaatctaggaacagactcacata

SEQ ID NO: 620611 - DNA, 25 bp, Homo sapien
taattggacaatcacagggaaaaga

SEQ ID NO: 620612 - DNA, 25 bp, Homo sapien
caaggagttcttagactttacacca

SEQ ID NO: 620613 - DNA, 25 bp, Homo sapien
gaaaggcacagccactagattagct

SEQ ID NO: 620614 - DNA, 25 bp, Homo sapien
cggaagtgtctatacggcttactaa

SEQ ID NO: 620615 - DNA, 25 bp, Homo sapien
tgtagctatcaaagaagaccggaag

SEQ ID NO: 620616 - DNA, 25 bp, Homo sapien
tgaacacaggtgaacctcagctgag

SEQ ID NO: 620617 - DNA, 25 bp, Homo sapien
tgcatgtaattaggtcagtccctcc

SEQ ID NO: 620618 - DNA, 25 bp, Homo sapien
gctttttggcaatcgagctacgttc

SEQ ID NO: 620619 - DNA, 25 bp, Homo sapien
cgtcattgaaataaatccctatggc

SEQ ID NO: 620620 - DNA, 25 bp, Homo sapien
ctgattcgcaagcaaaagtcttgga

SEQ ID NO: 620621 - DNA, 25 bp, Homo sapien
aagtcttggaggtatcgtcattgaa

SEQ ID NO: 620622 - DNA, 25 bp, Homo sapien
tggaaatgtcaaaaagattaaactg

SEQ ID NO: 620623 - DNA, 25 bp, Homo sapien
ctgtggaaatgtcaaaaagattaaa

SEQ ID NO: 620624 - DNA, 25 bp, Homo sapien
aaaagattaaactgtgtgcccagca

SEQ ID NO: 620625 - DNA, 25 bp, Homo sapien
tgtcaaaaagattaaactgtgtgcc

SEQ ID NO: 620626 - DNA, 25 bp, Homo sapien
ttgcaccactcatcagcctcaagat

SEQ ID NO: 620627 - DNA, 25 bp, Homo sapien
actttgcaccactcatcagcctcaa

SEQ ID NO: 620628 - DNA, 25 bp, Homo sapien
tggagtactttgcaccactcatcag

SEQ ID NO: 620629 - DNA, 25 bp, Homo sapien
ctggagtactttgcaccactcatca

SEQ ID NO: 620630 - DNA, 25 bp, Homo sapien
aggctgatgtcattgatccgtgttc

SEQ ID NO: 620631 - DNA, 25 bp, Homo sapien
gatgtcattgatccgtgttcctaca

SEQ ID NO: 620632 - DNA, 25 bp, Homo sapien
tgatccgtgttcctacacactccat

SEQ ID NO: 620633 - DNA, 25 bp, Homo sapien
tgtcattgatccgtgttcctacaca

SEQ ID NO: 620634 - DNA, 25 bp, Homo sapien
ggattctggacgtcccaaagacaga

SEQ ID NO: 620635 - DNA, 25 bp, Homo sapien
taatctgcaaggcacattcgccatg

SEQ ID NO: 620636 - DNA, 25 bp, Homo sapien
ttagcggccaagagatgagtttgac

SEQ ID NO: 620637 - DNA, 25 bp, Homo sapien
gtagtatcacgtccataccgccgca

SEQ ID NO: 620638 - DNA, 25 bp, Homo sapien
ttcccaaacgaagcctaaattctga

SEQ ID NO: 620639 - DNA, 25 bp, Homo sapien
caaacgaagcctaaattctgaggga

SEQ ID NO: 620640 - DNA, 25 bp, Homo sapien
cagtgttcccaaacgaagcctaaat

SEQ ID NO: 620641 - DNA, 25 bp, Homo sapien
gcagtgttcccaaacgaagcctaaa

SEQ ID NO: 620642 - DNA, 25 bp, Homo sapien
tctgaccattcaatctcaagtttgc

SEQ ID NO: 620643 - DNA, 25 bp, Homo sapien
ctgaccattcaatctcaagtttgca

SEQ ID NO: 620644 - DNA, 25 bp, Homo sapien
ttctgaccattcaatctcaagtttg

SEQ ID NO: 620645 - DNA, 25 bp, Homo sapien
acaaaacagcttctgaaaatccagc

SEQ ID NO: 620646 - DNA, 25 bp, Homo sapien
caaaaacaaaacagcttctgaaaat

SEQ ID NO: 620647 - DNA, 25 bp, Homo sapien
aaacaaaacagcttctgaaaatcca

SEQ ID NO: 620648 - DNA, 25 bp, Homo sapien
aaaacagcttctgaaaatccagcgc

SEQ ID NO: 620649 - DNA, 25 bp, Homo sapien
agtttttcacactctgtagcaagcg

SEQ ID NO: 620650 - DNA, 25 bp, Homo sapien
cgtgctgctcggctatggccaaggc

SEQ ID NO: 620651 - DNA, 25 bp, Homo sapien
ccgtctcgggtctgaaagataaaca

SEQ ID NO: 620652 - DNA, 25 bp, Homo sapien
tttctgatagatggcctccccgtct

SEQ ID NO: 620653 - DNA, 25 bp, Homo sapien
tctgcagtgataggcactgggacac

SEQ ID NO: 620654 - DNA, 25 bp, Homo sapien
cactgggacacgaggaagaaattcc

SEQ ID NO: 620655 - DNA, 25 bp, Homo sapien
caaaaatgacccaattgctttctgc

SEQ ID NO: 620656 - DNA, 25 bp, Homo sapien
gcacaaaaatgacccaattgctttc

SEQ ID NO: 620657 - DNA, 25 bp, Homo sapien
tgtttgactcctcttgtttccctct

SEQ ID NO: 620658 - DNA, 25 bp, Homo sapien
ccctcttctgaagacaattgtgatt

SEQ ID NO: 620659 - DNA, 25 bp, Homo sapien
caccattgccttgccctctgtttga

SEQ ID NO: 620660 - DNA, 25 bp, Homo sapien
ttctaacttctcaaggccacaaaca

SEQ ID NO: 620661 - DNA, 25 bp, Homo sapien
ccttgaggctctcgccttgaaggaa

SEQ ID NO: 620662 - DNA, 25 bp, Homo sapien
gtgtgtaatcaggactccagagtac

SEQ ID NO: 620663 - DNA, 25 bp, Homo sapien
ttcaccttgaggctctcgccttgaa

SEQ ID NO: 620664 - DNA, 25 bp, Homo sapien
gtaatcaggactccagagtacaggg

SEQ ID NO: 620665 - DNA, 25 bp, Homo sapien
tcagacagctagttgaaagccaagc

SEQ ID NO: 620666 - DNA, 25 bp, Homo sapien
cattgtctgcctccacaacggtgct

SEQ ID NO: 620667 - DNA, 25 bp, Homo sapien
tctgggcatcatttataagccacac

SEQ ID NO: 620668 - DNA, 25 bp, Homo sapien
tatatgctcatagatgtcgtgccca

SEQ ID NO: 620669 - DNA, 25 bp, Homo sapien
ccctttcgatgaattctgcactcgg

SEQ ID NO: 620670 - DNA, 25 bp, Homo sapien
tcgatgaattctgcactcggtgttc

SEQ ID NO: 620671 - DNA, 25 bp, Homo sapien
cactcggtgttcttcggctcattca

SEQ ID NO: 620672 - DNA, 25 bp, Homo sapien
gaattctgcactcggtgttcttcgg

SEQ ID NO: 620673 - DNA, 25 bp, Homo sapien
taagattcaaaaaccagtccctatc

SEQ ID NO: 620674 - DNA, 25 bp, Homo sapien
tctccaaggatagttgtgaaaattg

SEQ ID NO: 620675 - DNA, 25 bp, Homo sapien
tgctcacatgcttcctacctaaaaa

SEQ ID NO: 620676 - DNA, 25 bp, Homo sapien
tatccctcaattagaagaagcctcc

SEQ ID NO: 620677 - DNA, 25 bp, Homo sapien
cttgctgctggtgcacttctttcat

SEQ ID NO: 620678 - DNA, 25 bp, Homo sapien
gtttcgctgacactgacttgctgct

SEQ ID NO: 620679 - DNA, 25 bp, Homo sapien
ctgctggtgcacttctttcatgagt

SEQ ID NO: 620680 - DNA, 25 bp, Homo sapien
tgctgctggtgcacttctttcatga

SEQ ID NO: 620681 - DNA, 25 bp, Homo sapien
aatgcatttctggtttcccagttcc

SEQ ID NO: 620682 - DNA, 25 bp, Homo sapien
ctgccaaatgcatttctggtttccc

SEQ ID NO: 620683 - DNA, 25 bp, Homo sapien
caaatgcatttctggtttcccagtt

SEQ ID NO: 620684 - DNA, 25 bp, Homo sapien
gccaaatgcatttctggtttcccag

SEQ ID NO: 620685 - DNA, 25 bp, Homo sapien
aatccagtaggcaggtttccgctcc

SEQ ID NO: 620686 - DNA, 25 bp, Homo sapien
ccttgatatcaaccaccagtggagg

SEQ ID NO: 620687 - DNA, 25 bp, Homo sapien
ggcactgatgtaccgccctggtgga

SEQ ID NO: 620688 - DNA, 25 bp, Homo sapien
ccctggtggaaatagcagttagcac

SEQ ID NO: 620689 - DNA, 25 bp, Homo sapien
agggaagaaagttgtgcgtcagcaa

SEQ ID NO: 620690 - DNA, 25 bp, Homo sapien
aaagttgtgcgtcagcaacactggg

SEQ ID NO: 620691 - DNA, 25 bp, Homo sapien
gaagaaagttgtgcgtcagcaacac

SEQ ID NO: 620692 - DNA, 25 bp, Homo sapien
gcaacactggggccgaaagtggcct

SEQ ID NO: 620693 - DNA, 25 bp, Homo sapien
gtgctgccagtaggcgctgcgaggc

SEQ ID NO: 620694 - DNA, 25 bp, Homo sapien
caccatggtgctcagcgaggcggcc

SEQ ID NO: 620695 - DNA, 25 bp, Homo sapien
cttgcaagcggtagagctgtcccgt

SEQ ID NO: 620696 - DNA, 25 bp, Homo sapien
tgtgctgccgtgtgatgtgctgcca

SEQ ID NO: 620697 - DNA, 25 bp, Homo sapien
catgcagcagctgcgagttgagctg

SEQ ID NO: 620698 - DNA, 25 bp, Homo sapien
ctggacacaggtagccccacgctta

SEQ ID NO: 620699 - DNA, 25 bp, Homo sapien
tggacacaggtagccccacgcttac

SEQ ID NO: 620700 - DNA, 25 bp, Homo sapien
gcatgcagcagctgcgagttgagct

SEQ ID NO: 620701 - DNA, 25 bp, Homo sapien
aggatgagggacgggcgcagcatac

SEQ ID NO: 620702 - DNA, 25 bp, Homo sapien
agggacgggcgcagcatacaggaaa

SEQ ID NO: 620703 - DNA, 25 bp, Homo sapien
gagggacgggcgcagcatacaggaa

SEQ ID NO: 620704 - DNA, 25 bp, Homo sapien
atgagggacgggcgcagcatacagg

SEQ ID NO: 620705 - DNA, 25 bp, Homo sapien
actccagttacaagaaagtcctgag

SEQ ID NO: 620706 - DNA, 25 bp, Homo sapien
tgtccactccagttacaagaaagtc

SEQ ID NO: 620707 - DNA, 25 bp, Homo sapien
ttatgagtgcacgtcatcagagatg

SEQ ID NO: 620708 - DNA, 25 bp, Homo sapien
tgagtgcacgtcatcagagatgtcc

SEQ ID NO: 620709 - DNA, 25 bp, Homo sapien
ctgtacattattgcttcctgggaga

SEQ ID NO: 620710 - DNA, 25 bp, Homo sapien
gaccatgagtcaattggccacataa

SEQ ID NO: 620711 - DNA, 25 bp, Homo sapien
cctgatggaaggcatacaaggtgcc

SEQ ID NO: 620712 - DNA, 25 bp, Homo sapien
gcattctttcgacaaatcctgatgg

SEQ ID NO: 620713 - DNA, 25 bp, Homo sapien
agggtaaagattgctgagatgataa

SEQ ID NO: 620714 - DNA, 25 bp, Homo sapien
ctaagggtaaagattgctgagatga

SEQ ID NO: 620715 - DNA, 25 bp, Homo sapien
taagggtaaagattgctgagatgat

SEQ ID NO: 620716 - DNA, 25 bp, Homo sapien
aagggtaaagattgctgagatgata

SEQ ID NO: 620717 - DNA, 25 bp, Homo sapien
taggtccgatctatgatataggtgc

SEQ ID NO: 620718 - DNA, 25 bp, Homo sapien
cactggagcaatgaagcaccttggc

SEQ ID NO: 620719 - DNA, 25 bp, Homo sapien
gtccgatctatgatataggtgccta

SEQ ID NO: 620720 - DNA, 25 bp, Homo sapien
tcccacagaagagttcggaaaacac

SEQ ID NO: 620721 - DNA, 25 bp, Homo sapien
ctgtaggctggaaaagtctctgttc

SEQ ID NO: 620722 - DNA, 25 bp, Homo sapien
aagtctctgttcgatgaagcttcag

SEQ ID NO: 620723 - DNA, 25 bp, Homo sapien
ctctgttcgatgaagcttcagaggg

SEQ ID NO: 620724 - DNA, 25 bp, Homo sapien
gctggaaaagtctctgttcgatgaa

SEQ ID NO: 620725 - DNA, 25 bp, Homo sapien
ctgtggctgacacatcacaagtgtg

SEQ ID NO: 620726 - DNA, 25 bp, Homo sapien
tgttaacaattcttggcagttactg

SEQ ID NO: 620727 - DNA, 25 bp, Homo sapien
tgggtgaatctgtggctgacacatc

SEQ ID NO: 620728 - DNA, 25 bp, Homo sapien
gaatctgtggctgacacatcacaag

SEQ ID NO: 620729 - DNA, 25 bp, Homo sapien
catttcccttgctgtcattctgtga

SEQ ID NO: 620730 - DNA, 25 bp, Homo sapien
atttcccttgctgtcattctgtgac

SEQ ID NO: 620731 - DNA, 25 bp, Homo sapien
tccaatgaccacacaattagccagg

SEQ ID NO: 620732 - DNA, 25 bp, Homo sapien
gagggaacacagagtcaatatctat

SEQ ID NO: 620733 - DNA, 25 bp, Homo sapien
gagcacgtttcaattacactaagaa

SEQ ID NO: 620734 - DNA, 25 bp, Homo sapien
aattattgtattgcagagttttcca

SEQ ID NO: 620735 - DNA, 25 bp, Homo sapien
gtatctacaatagaaaatcatttcg

SEQ ID NO: 620736 - DNA, 25 bp, Homo sapien
tagaaaatcatttcgtgacattgac

SEQ ID NO: 620737 - DNA, 25 bp, Homo sapien
gaagtgcaagggacaaagtatctac

SEQ ID NO: 620738 - DNA, 25 bp, Homo sapien
ctgtcatacaactgaaacacttgga

SEQ ID NO: 620739 - DNA, 25 bp, Homo sapien
agagactccgaacaaaataaaggct

SEQ ID NO: 620740 - DNA, 25 bp, Homo sapien
taactgaggaatagggtgtaaacaa

SEQ ID NO: 620741 - DNA, 25 bp, Homo sapien
tgaacagaacagataagagtgagtc

SEQ ID NO: 620742 - DNA, 25 bp, Homo sapien
tccagtagttaatcagaaccacagt

SEQ ID NO: 620743 - DNA, 25 bp, Homo sapien
tatagtagcttcctctaagatcaca

SEQ ID NO: 620744 - DNA, 25 bp, Homo sapien
caaatgtaaatgttgtggtatccca

SEQ ID NO: 620745 - DNA, 25 bp, Homo sapien
tcaaggaatcgatccccactgtggg

SEQ ID NO: 620746 - DNA, 25 bp, Homo sapien
ggatatctttgcacaatgggtacat

SEQ ID NO: 620747 - DNA, 25 bp, Homo sapien
gctgcggtacccttgcatccggtga

SEQ ID NO: 620748 - DNA, 25 bp, Homo sapien
tgacaaacagcggctaaaactttcc

SEQ ID NO: 620749 - DNA, 25 bp, Homo sapien
ctcagctccagctgcggtacccttg

SEQ ID NO: 620750 - DNA, 25 bp, Homo sapien
cttgcatccggtgacagctgacaaa

SEQ ID NO: 620751 - DNA, 25 bp, Homo sapien
ttgctttttgtccctgcatccaatt

SEQ ID NO: 620752 - DNA, 25 bp, Homo sapien
gattacattgctttttgtccctgca

SEQ ID NO: 620753 - DNA, 25 bp, Homo sapien
cattttgattacattgctttttgtc

SEQ ID NO: 620754 - DNA, 25 bp, Homo sapien
tgtccctgcatccaatttatggtac

SEQ ID NO: 620755 - DNA, 25 bp, Homo sapien
cacagcttgtggttgatggagcctg

SEQ ID NO: 620756 - DNA, 25 bp, Homo sapien
tgacacagcttgtggttgatggagc

SEQ ID NO: 620757 - DNA, 25 bp, Homo sapien
acagcttgtggttgatggagcctga

SEQ ID NO: 620758 - DNA, 25 bp, Homo sapien
cttgtggttgatggagcctgaggaa

SEQ ID NO: 620759 - DNA, 25 bp, Homo sapien
tccccatttccaattgaccatgagt

SEQ ID NO: 620760 - DNA, 25 bp, Homo sapien
cagtgtatgaacatggacttggagg

SEQ ID NO: 620761 - DNA, 25 bp, Homo sapien
tgagtcagtagaagacctgcagagt

SEQ ID NO: 620762 - DNA, 25 bp, Homo sapien
ccaattgaccatgagtcagtagaag

SEQ ID NO: 620763 - DNA, 25 bp, Homo sapien
tccgccagctagactaattgcatga

SEQ ID NO: 620764 - DNA, 25 bp, Homo sapien
taactgtaaatgttgttaacagcat

SEQ ID NO: 620765 - DNA, 25 bp, Homo sapien
acaacagctctccacttcacttagg

SEQ ID NO: 620766 - DNA, 25 bp, Homo sapien
tcttggacctagagcatcggtttca

SEQ ID NO: 620767 - DNA, 25 bp, Homo sapien
ctgaacactttattttctttaagag

SEQ ID NO: 620768 - DNA, 25 bp, Homo sapien
cactgaacactttattttctttaag

SEQ ID NO: 620769 - DNA, 25 bp, Homo sapien
cactttcggtctacctggattgaga

SEQ ID NO: 620770 - DNA, 25 bp, Homo sapien
gattgagaagagatccagcctgact

SEQ ID NO: 620771 - DNA, 25 bp, Homo sapien
caggccacagtcagatgttcaagag

SEQ ID NO: 620772 - DNA, 25 bp, Homo sapien
taatccaatccaagtagatctcagg

SEQ ID NO: 620773 - DNA, 25 bp, Homo sapien
accacagagatcgtggaagtgggtt

SEQ ID NO: 620774 - DNA, 25 bp, Homo sapien
caagttaggtccaccaaattctcta

SEQ ID NO: 620775 - DNA, 25 bp, Homo sapien
cacagagatcgtggaagtgggttta

SEQ ID NO: 620776 - DNA, 25 bp, Homo sapien
cacataagatcatcaaggatccaag

SEQ ID NO: 620777 - DNA, 25 bp, Homo sapien
cagaaaagatcaaccaccagaggag

SEQ ID NO: 620778 - DNA, 25 bp, Homo sapien
gagtagcaccaagagattacctggg

SEQ ID NO: 620779 - DNA, 25 bp, Homo sapien
tgctgagatgccttagaagttgcct

SEQ ID NO: 620780 - DNA, 25 bp, Homo sapien
ccgttcagtcaattggagggcttag

SEQ ID NO: 620781 - DNA, 25 bp, Homo sapien
cctaaagttacatccataagaagca

SEQ ID NO: 620782 - DNA, 25 bp, Homo sapien
ataagaagcactttggaattgtttt

SEQ ID NO: 620783 - DNA, 25 bp, Homo sapien
tccataagaagcactttggaattgt

SEQ ID NO: 620784 - DNA, 25 bp, Homo sapien
aagttacatccataagaagcacttt

SEQ ID NO: 620785 - DNA, 25 bp, Homo sapien
cattttgctgcacgtggtccctcat

SEQ ID NO: 620786 - DNA, 25 bp, Homo sapien
tgtcattttgctgcacgtggtccct

SEQ ID NO: 620787 - DNA, 25 bp, Homo sapien
gtcattttgctgcacgtggtccctc

SEQ ID NO: 620788 - DNA, 25 bp, Homo sapien
tcattttgctgcacgtggtccctca

SEQ ID NO: 620789 - DNA, 25 bp, Homo sapien
tctgagtggtgaactgctttgggaa

SEQ ID NO: 620790 - DNA, 25 bp, Homo sapien
tgggaaatcctcctgatgagagtgt

SEQ ID NO: 620791 - DNA, 25 bp, Homo sapien
tgctttctgagtggtgaactgcttt

SEQ ID NO: 620792 - DNA, 25 bp, Homo sapien
atcctcctgatgagagtgttggagc

SEQ ID NO: 620793 - DNA, 25 bp, Homo sapien
gttccatgaaacgaattctctgttg

SEQ ID NO: 620794 - DNA, 25 bp, Homo sapien
taatgtgtcatgagagagtgttgct

SEQ ID NO: 620795 - DNA, 25 bp, Homo sapien
acgaattctctgttgacacatgtaa

SEQ ID NO: 620796 - DNA, 25 bp, Homo sapien
tgagagagtgttgctttgggaaaac

SEQ ID NO: 620797 - DNA, 25 bp, Homo sapien
tcttacttttgtttgccaagtactc

SEQ ID NO: 620798 - DNA, 25 bp, Homo sapien
tgacacattatagccctctcaactc

SEQ ID NO: 620799 - DNA, 25 bp, Homo sapien
gctctcgaggtaaaactgacacatt

SEQ ID NO: 620800 - DNA, 25 bp, Homo sapien
ggtggctctcgaggtaaaactgaca

SEQ ID NO: 620801 - DNA, 25 bp, Homo sapien
tctcaactccacagcaaatccattt

SEQ ID NO: 620802 - DNA, 25 bp, Homo sapien
tgttgacagatcctcagatttattg

SEQ ID NO: 620803 - DNA, 25 bp, Homo sapien
tctgttgacagatcctcagatttat

SEQ ID NO: 620804 - DNA, 25 bp, Homo sapien
ctgtgacagcaagctcttctgttga

SEQ ID NO: 620805 - DNA, 25 bp, Homo sapien
agctcttctgttgacagatcctcag

SEQ ID NO: 620806 - DNA, 25 bp, Homo sapien
cttgtggctcctagccgtctctcat

SEQ ID NO: 620807 - DNA, 25 bp, Homo sapien
gctcctagccgtctctcataagtca

SEQ ID NO: 620808 - DNA, 25 bp, Homo sapien
caaactcctatatcacgagggttgg

SEQ ID NO: 620809 - DNA, 25 bp, Homo sapien
cctatatcacgagggttggcactgt

SEQ ID NO: 620810 - DNA, 25 bp, Homo sapien
tggcagttgctttgagaccaacaga

SEQ ID NO: 620811 - DNA, 25 bp, Homo sapien
tgtcatgtaccaaagacagtttggc

SEQ ID NO: 620812 - DNA, 25 bp, Homo sapien
taaccaatccagtgagtccctgtat

SEQ ID NO: 620813 - DNA, 25 bp, Homo sapien
gaccaacagatgaattgtccacatg

SEQ ID NO: 620814 - DNA, 25 bp, Homo sapien
catcctaccacccaaacttttgcca

SEQ ID NO: 620815 - DNA, 25 bp, Homo sapien
tctacttttcctgagcatttgaccc

SEQ ID NO: 620816 - DNA, 25 bp, Homo sapien
gaaaatgtggatactaccattgcaa

SEQ ID NO: 620817 - DNA, 25 bp, Homo sapien
tcaccagcactaccaacattaccac

SEQ ID NO: 620818 - DNA, 25 bp, Homo sapien
cttaggaagagctctaagacatggc

SEQ ID NO: 620819 - DNA, 25 bp, Homo sapien
ctgtctcatccatcttaggaagagc

SEQ ID NO: 620820 - DNA, 25 bp, Homo sapien
gaagagctctaagacatggcagcat

SEQ ID NO: 620821 - DNA, 25 bp, Homo sapien
tgtctcatccatcttaggaagagct

SEQ ID NO: 620822 - DNA, 25 bp, Homo sapien
gctcagcaaattggttttcgtattc

SEQ ID NO: 620823 - DNA, 25 bp, Homo sapien
tcagcaaattggttttcgtattcat

SEQ ID NO: 620824 - DNA, 25 bp, Homo sapien
ggttttcgtattcattacatccaca

SEQ ID NO: 620825 - DNA, 25 bp, Homo sapien
caaattggttttcgtattcattaca

SEQ ID NO: 620826 - DNA, 25 bp, Homo sapien
tgatcaaaatctgtgatgtgcttga

SEQ ID NO: 620827 - DNA, 25 bp, Homo sapien
caatttgatcaaaatctgtgatgtg

SEQ ID NO: 620828 - DNA, 25 bp, Homo sapien
gattggcagtgaaaaacaatttgat

SEQ ID NO: 620829 - DNA, 25 bp, Homo sapien
taccacccatctgattggcagtgaa

SEQ ID NO: 620830 - DNA, 25 bp, Homo sapien
gctccacacaggagaagagacttac

SEQ ID NO: 620831 - DNA, 25 bp, Homo sapien
tgaattcagaagctccacacaggag

SEQ ID NO: 620832 - DNA, 25 bp, Homo sapien
cactaagcagcagcgcaaaataaaa

SEQ ID NO: 620833 - DNA, 25 bp, Homo sapien
agagacttacagaaacaagcacact

SEQ ID NO: 620834 - DNA, 25 bp, Homo sapien
ggatggtggtgttagatcggaaatt

SEQ ID NO: 620835 - DNA, 25 bp, Homo sapien
atggtggtgttagatcggaaattac

SEQ ID NO: 620836 - DNA, 25 bp, Homo sapien
gatggtggtgttagatcggaaatta

SEQ ID NO: 620837 - DNA, 25 bp, Homo sapien
ctttgttcgcaaaaatttgaacatc

SEQ ID NO: 620838 - DNA, 25 bp, Homo sapien
aaacaaatgactgccactcattgtc

SEQ ID NO: 620839 - DNA, 25 bp, Homo sapien
cactcattgtcaaatatctgactgc

SEQ ID NO: 620840 - DNA, 25 bp, Homo sapien
tttgaacatcaaaaacaaatgactg

SEQ ID NO: 620841 - DNA, 25 bp, Homo sapien
tctcccaactctttgtagttaagaa

SEQ ID NO: 620842 - DNA, 25 bp, Homo sapien
tagttaagaactggcggacagagct

SEQ ID NO: 620843 - DNA, 25 bp, Homo sapien
gcttttatcgccaaagtttccttca

SEQ ID NO: 620844 - DNA, 25 bp, Homo sapien
gaagatgggctgtcttgaggtacca

SEQ ID NO: 620845 - DNA, 25 bp, Homo sapien
ttttgttccactttgacaaagcatt

SEQ ID NO: 620846 - DNA, 25 bp, Homo sapien
gttccactttgacaaagcattagtc

SEQ ID NO: 620847 - DNA, 25 bp, Homo sapien
ttgttccactttgacaaagcattag

SEQ ID NO: 620848 - DNA, 25 bp, Homo sapien
tccactttgacaaagcattagtctt

SEQ ID NO: 620849 - DNA, 25 bp, Homo sapien
cctggacaaacaattgccatggcaa

SEQ ID NO: 620850 - DNA, 25 bp, Homo sapien
agttaccacagtttgggcctggaca

SEQ ID NO: 620851 - DNA, 25 bp, Homo sapien
tgggcctggacaaacaattgccatg

SEQ ID NO: 620852 - DNA, 25 bp, Homo sapien
ctaagttaccacagtttgggcctgg

SEQ ID NO: 620853 - DNA, 25 bp, Homo sapien
gatttcagaaacgacctgctgctcc

SEQ ID NO: 620854 - DNA, 25 bp, Homo sapien
cccacattgaaacgtctggtgtgtt

SEQ ID NO: 620855 - DNA, 25 bp, Homo sapien
gccaggaagggatattgagtcatac

SEQ ID NO: 620856 - DNA, 25 bp, Homo sapien
tgctccgagtgggatttaagcaaat

SEQ ID NO: 620857 - DNA, 25 bp, Homo sapien
tgggttgggtttagttctactctgc

SEQ ID NO: 620858 - DNA, 25 bp, Homo sapien
tctcattcatagatttcaggtctgt

SEQ ID NO: 620859 - DNA, 25 bp, Homo sapien
ggttgggtttagttctactctgcat

SEQ ID NO: 620860 - DNA, 25 bp, Homo sapien
ttttctcattcatagatttcaggtc

SEQ ID NO: 620861 - DNA, 25 bp, Homo sapien
ggacatagaaagagatagttcctca

SEQ ID NO: 620862 - DNA, 25 bp, Homo sapien
acatagaaagagatagttcctcatt

SEQ ID NO: 620863 - DNA, 25 bp, Homo sapien
gacatagaaagagatagttcctcat

SEQ ID NO: 620864 - DNA, 25 bp, Homo sapien
tcaaggatgcatgatgtttacatct

SEQ ID NO: 620865 - DNA, 25 bp, Homo sapien
tgacaattccacatctctgacatct

SEQ ID NO: 620866 - DNA, 25 bp, Homo sapien
tctcctcccattctcgttgacaatt

SEQ ID NO: 620867 - DNA, 25 bp, Homo sapien
tctttactccctgttcgtctcttct

SEQ ID NO: 620868 - DNA, 25 bp, Homo sapien
ggaacttcactatctccacctgtgc

SEQ ID NO: 620869 - DNA, 25 bp, Homo sapien
aacttcactatctccacctgtgcct

SEQ ID NO: 620870 - DNA, 25 bp, Homo sapien
agctaaccccctgtttcacagaaag

SEQ ID NO: 620871 - DNA, 25 bp, Homo sapien
cgaaagctaaccccctgtttcacag

SEQ ID NO: 620872 - DNA, 25 bp, Homo sapien
gacgaccgaagaaagtcgcaccttg

SEQ ID NO: 620873 - DNA, 25 bp, Homo sapien
ttcgggacgaccgaagaaagtcgca

SEQ ID NO: 620874 - DNA, 25 bp, Homo sapien
tcgggacgaccgaagaaagtcgcac

SEQ ID NO: 620875 - DNA, 25 bp, Homo sapien
ccgaagaaagtcgcaccttggcctc

SEQ ID NO: 620876 - DNA, 25 bp, Homo sapien
gtcgaacttcggcggcatggtggag

SEQ ID NO: 620877 - DNA, 25 bp, Homo sapien
tggaggcggctggtgtcggatgaac

SEQ ID NO: 620878 - DNA, 25 bp, Homo sapien
tcgttggggtcgaacttcggcggca

SEQ ID NO: 620879 - DNA, 25 bp, Homo sapien
gggtcgaacttcggcggcatggtgg

SEQ ID NO: 620880 - DNA, 25 bp, Homo sapien
gcagaagtggcaccgacttcacctc

SEQ ID NO: 620881 - DNA, 25 bp, Homo sapien
agtggcaccgacttcacctccggtg

SEQ ID NO: 620882 - DNA, 25 bp, Homo sapien
agaagtggcaccgacttcacctccg

SEQ ID NO: 620883 - DNA, 25 bp, Homo sapien
gggcagaagtggcaccgacttcacc

SEQ ID NO: 620884 - DNA, 25 bp, Homo sapien
cgttgccttggcaatgtcatcacca

SEQ ID NO: 620885 - DNA, 25 bp, Homo sapien
gttgccttggcaatgtcatcaccaa

SEQ ID NO: 620886 - DNA, 25 bp, Homo sapien
ttgccttggcaatgtcatcaccaac

SEQ ID NO: 620887 - DNA, 25 bp, Homo sapien
ctgtaatcctcaggcccttccagtc

SEQ ID NO: 620888 - DNA, 25 bp, Homo sapien
tgtaatcctcaggcccttccagtca

SEQ ID NO: 620889 - DNA, 25 bp, Homo sapien
gtaatcctcaggcccttccagtcac

SEQ ID NO: 620890 - DNA, 25 bp, Homo sapien
gctaaggatcggtgccgcatctgtc

SEQ ID NO: 620891 - DNA, 25 bp, Homo sapien
ggatcggtgccgcatctgtcgagca

SEQ ID NO: 620892 - DNA, 25 bp, Homo sapien
tctggctaaggatcggtgccgcatc

SEQ ID NO: 620893 - DNA, 25 bp, Homo sapien
aaggatcggtgccgcatctgtcgag

SEQ ID NO: 620894 - DNA, 25 bp, Homo sapien
taccccagcgatctctactgcccct

SEQ ID NO: 620895 - DNA, 25 bp, Homo sapien
gtctaccccagcgatctctactgcc

SEQ ID NO: 620896 - DNA, 25 bp, Homo sapien
gcctgtctaccccagcgatctctac

SEQ ID NO: 620897 - DNA, 25 bp, Homo sapien
cccagcgatctctactgcccctcat

SEQ ID NO: 620898 - DNA, 25 bp, Homo sapien
tcaggtatagttgtagatgagtttg

SEQ ID NO: 620899 - DNA, 25 bp, Homo sapien
acttcttttacttgggtagaggcag

SEQ ID NO: 620900 - DNA, 25 bp, Homo sapien
gaggcagcctttgttcttgagctgt

SEQ ID NO: 620901 - DNA, 25 bp, Homo sapien
cagataattatcctgtatgtacact

SEQ ID NO: 620902 - DNA, 25 bp, Homo sapien
cagttgctgtgcaactcaacaggga

SEQ ID NO: 620903 - DNA, 25 bp, Homo sapien
gtggcagttgctgtgcaactcaaca

SEQ ID NO: 620904 - DNA, 25 bp, Homo sapien
tgtgcaactcaacagggaagatttg

SEQ ID NO: 620905 - DNA, 25 bp, Homo sapien
caactcaacagggaagatttgcaat

SEQ ID NO: 620906 - DNA, 25 bp, Homo sapien
gctttctccttacgatgaagtggga

SEQ ID NO: 620907 - DNA, 25 bp, Homo sapien
gggccttttccaatgatcctataag

SEQ ID NO: 620908 - DNA, 25 bp, Homo sapien
cctataagagtcctgaagtttgttc

SEQ ID NO: 620909 - DNA, 25 bp, Homo sapien
ttcctattggactcaccatgaccaa

SEQ ID NO: 620910 - DNA, 25 bp, Homo sapien
gaaaaattgcattgtgggatgaccc

SEQ ID NO: 620911 - DNA, 25 bp, Homo sapien
aaaattgcattgtgggatgacccat

SEQ ID NO: 620912 - DNA, 25 bp, Homo sapien
aaaaattgcattgtgggatgaccca

SEQ ID NO: 620913 - DNA, 25 bp, Homo sapien
ggaaaaattgcattgtgggatgacc

SEQ ID NO: 620914 - DNA, 25 bp, Homo sapien
atggactgtagagggatgaaaatgt

SEQ ID NO: 620915 - DNA, 25 bp, Homo sapien
tcatggactgtagagggatgaaaat

SEQ ID NO: 620916 - DNA, 25 bp, Homo sapien
catggactgtagagggatgaaaatg

SEQ ID NO: 620917 - DNA, 25 bp, Homo sapien
tgtccctccaccagaagccttggtc

SEQ ID NO: 620918 - DNA, 25 bp, Homo sapien
tatgtgcttatctgcctggactgtc

SEQ ID NO: 620919 - DNA, 25 bp, Homo sapien
ccttgacaattatgtgcttatctgc

SEQ ID NO: 620920 - DNA, 25 bp, Homo sapien
caattatgtgcttatctgcctggac

SEQ ID NO: 620921 - DNA, 25 bp, Homo sapien
gaacaaaatggcctttcgagcttgt

SEQ ID NO: 620922 - DNA, 25 bp, Homo sapien
cgagcttgtaacctggttgtcagac

SEQ ID NO: 620923 - DNA, 25 bp, Homo sapien
aacctggttgtcagacttccttgtc

SEQ ID NO: 620924 - DNA, 25 bp, Homo sapien
tgaagtacaatttctctgagagtga

SEQ ID NO: 620925 - DNA, 25 bp, Homo sapien
cccagggccgaccttcacctatttg

SEQ ID NO: 620926 - DNA, 25 bp, Homo sapien
cagggccgaccttcacctatttgca

SEQ ID NO: 620927 - DNA, 25 bp, Homo sapien
ccagggccgaccttcacctatttgc

SEQ ID NO: 620928 - DNA, 25 bp, Homo sapien
aatttttatcaattggtctctatgg

SEQ ID NO: 620929 - DNA, 25 bp, Homo sapien
cactgggactggttgatggctcttc

SEQ ID NO: 620930 - DNA, 25 bp, Homo sapien
ttctcacatcctgctactgccattg

SEQ ID NO: 620931 - DNA, 25 bp, Homo sapien
tcagaattccctttggctgcaattt

SEQ ID NO: 620932 - DNA, 25 bp, Homo sapien
gctgaactggacaaataagcaagac

SEQ ID NO: 620933 - DNA, 25 bp, Homo sapien
tgaactggacaaataagcaagactc

SEQ ID NO: 620934 - DNA, 25 bp, Homo sapien
ctgaactggacaaataagcaagact

SEQ ID NO: 620935 - DNA, 25 bp, Homo sapien
tagtgccaacataagaagagatgtc

SEQ ID NO: 620936 - DNA, 25 bp, Homo sapien
gtatgttgctgttacagtttgaatg

SEQ ID NO: 620937 - DNA, 25 bp, Homo sapien
gccttatcccctagagtgactgtat

SEQ ID NO: 620938 - DNA, 25 bp, Homo sapien
tagggttgaataaggtcataaggat

SEQ ID NO: 620939 - DNA, 25 bp, Homo sapien
taggctccggacctcttggtccata

SEQ ID NO: 620940 - DNA, 25 bp, Homo sapien
tccctcttgagacgtaggctccgga

SEQ ID NO: 620941 - DNA, 25 bp, Homo sapien
agtccaaaaagcaatccctcttgag

SEQ ID NO: 620942 - DNA, 25 bp, Homo sapien
aaagcaatccctcttgagacgtagg

SEQ ID NO: 620943 - DNA, 25 bp, Homo sapien
aggcacatctttcactcgaccatag

SEQ ID NO: 620944 - DNA, 25 bp, Homo sapien
tccaaatggagattccagcatggcg

SEQ ID NO: 620945 - DNA, 25 bp, Homo sapien
ccagcatggcgccacgtagacttac

SEQ ID NO: 620946 - DNA, 25 bp, Homo sapien
tcgaccatagacacaaatgacatcc

SEQ ID NO: 620947 - DNA, 25 bp, Homo sapien
cagaatgagacatagcttctctcag

SEQ ID NO: 620948 - DNA, 25 bp, Homo sapien
ctttctccaggatgaacgtttgtca

SEQ ID NO: 620949 - DNA, 25 bp, Homo sapien
gcttctctcagacaaaaagatgtta

SEQ ID NO: 620950 - DNA, 25 bp, Homo sapien
ctcagacaaaaagatgttaccatcc

SEQ ID NO: 620951 - DNA, 25 bp, Homo sapien
cctggctcctcttttcctgtcacca

SEQ ID NO: 620952 - DNA, 25 bp, Homo sapien
ttcttcagtgttgaaaatccctggc

SEQ ID NO: 620953 - DNA, 25 bp, Homo sapien
ttattcttcagtgttgaaaatccct

SEQ ID NO: 620954 - DNA, 25 bp, Homo sapien
tcttcagtgttgaaaatccctggct

SEQ ID NO: 620955 - DNA, 25 bp, Homo sapien
aatcatttgcggagcatgctgggca

SEQ ID NO: 620956 - DNA, 25 bp, Homo sapien
aaatcactggatgcgtaaggttagg

SEQ ID NO: 620957 - DNA, 25 bp, Homo sapien
tcctttagagagtaagaagccctga

SEQ ID NO: 620958 - DNA, 25 bp, Homo sapien
catgcagttgttcagaaatccaggc

SEQ ID NO: 620959 - DNA, 25 bp, Homo sapien
acagaatttatttaggtgccttgag

SEQ ID NO: 620960 - DNA, 25 bp, Homo sapien
gaaggtgtagaaaccttctctgaac

SEQ ID NO: 620961 - DNA, 25 bp, Homo sapien
tatgtgacgttgaagcagagagaaa

SEQ ID NO: 620962 - DNA, 25 bp, Homo sapien
gttctccacatactaaaagtagagt

SEQ ID NO: 620963 - DNA, 25 bp, Homo sapien
actcaaactttcacatttagtgggc

SEQ ID NO: 620964 - DNA, 25 bp, Homo sapien
ctaacactgacagtgtgtcccagca

SEQ ID NO: 620965 - DNA, 25 bp, Homo sapien
gtcacaatggcattgtctaacactg

SEQ ID NO: 620966 - DNA, 25 bp, Homo sapien
tcaaactttcacatttagtgggcat

SEQ ID NO: 620967 - DNA, 25 bp, Homo sapien
tgatgtaagtgagtgcaaagtaagg

SEQ ID NO: 620968 - DNA, 25 bp, Homo sapien
agatgggtgatgtaagtgagtgcaa

SEQ ID NO: 620969 - DNA, 25 bp, Homo sapien
tgttccaatcctgaatacagccaac

SEQ ID NO: 620970 - DNA, 25 bp, Homo sapien
tctcttgttccaatcctgaatacag

SEQ ID NO: 620971 - DNA, 25 bp, Homo sapien
tgtttatgctacaccatcgacgatc

SEQ ID NO: 620972 - DNA, 25 bp, Homo sapien
tcttgttttctaccggagcaatttc

SEQ ID NO: 620973 - DNA, 25 bp, Homo sapien
gttcttctccctgtttatgctacac

SEQ ID NO: 620974 - DNA, 25 bp, Homo sapien
tcgacgatctccaagattcactctc

SEQ ID NO: 620975 - DNA, 25 bp, Homo sapien
cctctggccactgtatgttgttgat

SEQ ID NO: 620976 - DNA, 25 bp, Homo sapien
cctggccattgcatagacacaaatc

SEQ ID NO: 620977 - DNA, 25 bp, Homo sapien
tgttgttgataggaagccttctgcc

SEQ ID NO: 620978 - DNA, 25 bp, Homo sapien
agctgaacaatacttggatgtctgg

SEQ ID NO: 620979 - DNA, 25 bp, Homo sapien
ggagagctgtacatcaaaatgcagg

SEQ ID NO: 620980 - DNA, 25 bp, Homo sapien
aattggttctacatgatcactgcag

SEQ ID NO: 620981 - DNA, 25 bp, Homo sapien
ccccatagacactgagggagagctg

SEQ ID NO: 620982 - DNA, 25 bp, Homo sapien
ggatcttgaacaaatgccccataga

SEQ ID NO: 620983 - DNA, 25 bp, Homo sapien
gatatttctactgaagccgatgatg

SEQ ID NO: 620984 - DNA, 25 bp, Homo sapien
gtaattgcagccctgtgtgtcacag

SEQ ID NO: 620985 - DNA, 25 bp, Homo sapien
cagatatttctactgaagccgatga

SEQ ID NO: 620986 - DNA, 25 bp, Homo sapien
taattgcagccctgtgtgtcacaga

SEQ ID NO: 620987 - DNA, 25 bp, Homo sapien
tgattagttgcttttccccatggaa

SEQ ID NO: 620988 - DNA, 25 bp, Homo sapien
gattagttgcttttccccatggaaa

SEQ ID NO: 620989 - DNA, 25 bp, Homo sapien
attagttgcttttccccatggaaat

SEQ ID NO: 620990 - DNA, 25 bp, Homo sapien
tatgattagttgcttttccccatgg

SEQ ID NO: 620991 - DNA, 25 bp, Homo sapien
caacacaaagggctttctgtgaaag

SEQ ID NO: 620992 - DNA, 25 bp, Homo sapien
tttggagggagatgtgcagattagg

SEQ ID NO: 620993 - DNA, 25 bp, Homo sapien
gcagccctgttggagtttggaggga

SEQ ID NO: 620994 - DNA, 25 bp, Homo sapien
cagattagggtctgtttgctcaaca

SEQ ID NO: 620995 - DNA, 25 bp, Homo sapien
tcaaacagctgttccagctggtgtt

SEQ ID NO: 620996 - DNA, 25 bp, Homo sapien
ctgttccagctggtgttgagatgct

SEQ ID NO: 620997 - DNA, 25 bp, Homo sapien
caaacagctgttccagctggtgttg

SEQ ID NO: 620998 - DNA, 25 bp, Homo sapien
cagctgttccagctggtgttgagat

SEQ ID NO: 620999 - DNA, 25 bp, Homo sapien
aactgtctacccatcataatatcga

SEQ ID NO: 621000 - DNA, 25 bp, Homo sapien
atcaactgtctacccatcataatat

SEQ ID NO: 621001 - DNA, 25 bp, Homo sapien
ctgtctacccatcataatatcgacc

SEQ ID NO: 621002 - DNA, 25 bp, Homo sapien
gtctacccatcataatatcgaccat

SEQ ID NO: 621003 - DNA, 25 bp, Homo sapien
taatatgtctagatgctttgctaag

SEQ ID NO: 621004 - DNA, 25 bp, Homo sapien
cagaggcatccagatacaaaatact

SEQ ID NO: 621005 - DNA, 25 bp, Homo sapien
tatcaacctcttcaagtccagaggc

SEQ ID NO: 621006 - DNA, 25 bp, Homo sapien
gaattgtgttctccttactacctct

SEQ ID NO: 621007 - DNA, 25 bp, Homo sapien
ccaggtctccatagtactgaggaca

SEQ ID NO: 621008 - DNA, 25 bp, Homo sapien
aaacttgttcatcactgggactctg

SEQ ID NO: 621009 - DNA, 25 bp, Homo sapien
gcatcatctagaggagttttctcag

SEQ ID NO: 621010 - DNA, 25 bp, Homo sapien
gaacccttttgggtcagcagtccag

SEQ ID NO: 621011 - DNA, 25 bp, Homo sapien
atgctgaattccatgattaacaact

SEQ ID NO: 621012 - DNA, 25 bp, Homo sapien
gctgaattccatgattaacaacttc

SEQ ID NO: 621013 - DNA, 25 bp, Homo sapien
gaattccatgattaacaacttctgt

SEQ ID NO: 621014 - DNA, 25 bp, Homo sapien
tgaattccatgattaacaacttctg

SEQ ID NO: 621015 - DNA, 25 bp, Homo sapien
cattcctctcgtatcacatttgtca

SEQ ID NO: 621016 - DNA, 25 bp, Homo sapien
catagacatttacgacatagagccg

SEQ ID NO: 621017 - DNA, 25 bp, Homo sapien
tgtcataacaaggtatttagcatag

SEQ ID NO: 621018 - DNA, 25 bp, Homo sapien
cgacatagagccgtgtagccattgg

SEQ ID NO: 621019 - DNA, 25 bp, Homo sapien
tcagcctttgcccatgatgagtcaa

SEQ ID NO: 621020 - DNA, 25 bp, Homo sapien
ccttgtggcttcagcctttgcccat

SEQ ID NO: 621021 - DNA, 25 bp, Homo sapien
tgcccatgatgagtcaactttctgg

SEQ ID NO: 621022 - DNA, 25 bp, Homo sapien
gagtcaactttctggaatatctttc

SEQ ID NO: 621023 - DNA, 25 bp, Homo sapien
gctgtcaccctaagaaacgacattg

SEQ ID NO: 621024 - DNA, 25 bp, Homo sapien
agcgagggggtccaaattttctgat

SEQ ID NO: 621025 - DNA, 25 bp, Homo sapien
tccattctgctgtcaccctaagaaa

SEQ ID NO: 621026 - DNA, 25 bp, Homo sapien
cattgttctaagtcgacagcgaggg

SEQ ID NO: 621027 - DNA, 25 bp, Homo sapien
ttgaaatccaaaaccacatactgtt

SEQ ID NO: 621028 - DNA, 25 bp, Homo sapien
aaatccatgggcattctctgtgtgc

SEQ ID NO: 621029 - DNA, 25 bp, Homo sapien
tagcttgaagctcagattgaagaaa

SEQ ID NO: 621030 - DNA, 25 bp, Homo sapien
cccaggagggatttagctgaatgcc

SEQ ID NO: 621031 - DNA, 25 bp, Homo sapien
actgccttctgtgtaaatttgttca

SEQ ID NO: 621032 - DNA, 25 bp, Homo sapien
gaatttgaatcacacttcactgcct

SEQ ID NO: 621033 - DNA, 25 bp, Homo sapien
tgatacttgcacctctcccagaagt

SEQ ID NO: 621034 - DNA, 25 bp, Homo sapien
ccctgtgtctccaactggttgatac

SEQ ID NO: 621035 - DNA, 25 bp, Homo sapien
taagtcactggatctcatatccctg

SEQ ID NO: 621036 - DNA, 25 bp, Homo sapien
ggaaagagtgtgtagattcccaaga

SEQ ID NO: 621037 - DNA, 25 bp, Homo sapien
gaaatttggcattagttctatacaa

SEQ ID NO: 621038 - DNA, 25 bp, Homo sapien
cagagatggctctgttacatctttc

SEQ ID NO: 621039 - DNA, 25 bp, Homo sapien
gttactaaactttgcttagcatcag

SEQ ID NO: 621040 - DNA, 25 bp, Homo sapien
tctgcaaagtggtagcagtaattgc

SEQ ID NO: 621041 - DNA, 25 bp, Homo sapien
cactacttcttgtgatattgggcaa

SEQ ID NO: 621042 - DNA, 25 bp, Homo sapien
cagtaattgcatgaggctcgtagga

SEQ ID NO: 621043 - DNA, 25 bp, Homo sapien
ccacttaacacctcctggcaatggc

SEQ ID NO: 621044 - DNA, 25 bp, Homo sapien
cctggcaatggccagtgccagccat

SEQ ID NO: 621045 - DNA, 25 bp, Homo sapien
cacttaacacctcctggcaatggcc

SEQ ID NO: 621046 - DNA, 25 bp, Homo sapien
cttctaaaacaccttccagcacagt

SEQ ID NO: 621047 - DNA, 25 bp, Homo sapien
gttagacggccctgtgccagcaatc

SEQ ID NO: 621048 - DNA, 25 bp, Homo sapien
gcactaggcagaccgggcttttcca

SEQ ID NO: 621049 - DNA, 25 bp, Homo sapien
cggtcactcctcttgtcacgatgct

SEQ ID NO: 621050 - DNA, 25 bp, Homo sapien
tacctattatttgtgcgctgatgcc

SEQ ID NO: 621051 - DNA, 25 bp, Homo sapien
tactacttctgctacaacaactgtt

SEQ ID NO: 621052 - DNA, 25 bp, Homo sapien
ctgttctgtgttggtatcctgttca

SEQ ID NO: 621053 - DNA, 25 bp, Homo sapien
tgttaacacccagtgcatgcagagt

SEQ ID NO: 621054 - DNA, 25 bp, Homo sapien
aatctccaaaagctgaatcatggcc

SEQ ID NO: 621055 - DNA, 25 bp, Homo sapien
tttaggaagaatatgggaaagatca

SEQ ID NO: 621056 - DNA, 25 bp, Homo sapien
aagccaggagatccgtgactcctct

SEQ ID NO: 621057 - DNA, 25 bp, Homo sapien
tgggaaagatcacagattctaaatg

SEQ ID NO: 621058 - DNA, 25 bp, Homo sapien
tggcaccctcgcaaagcccaaatca

SEQ ID NO: 621059 - DNA, 25 bp, Homo sapien
taaaccctgcttctgatggttcagg

SEQ ID NO: 621060 - DNA, 25 bp, Homo sapien
tgccatctttctgcgttgattttca

SEQ ID NO: 621061 - DNA, 25 bp, Homo sapien
ggttcaggaagttgatatgccatct

SEQ ID NO: 621062 - DNA, 25 bp, Homo sapien
tctgctcctcggggttcagatcttg

SEQ ID NO: 621063 - DNA, 25 bp, Homo sapien
aagaaaggttgacaatctgctcctc

SEQ ID NO: 621064 - DNA, 25 bp, Homo sapien
cttgctatattgcaggggccaggaa

SEQ ID NO: 621065 - DNA, 25 bp, Homo sapien
ttgctatattgcaggggccaggaag

SEQ ID NO: 621066 - DNA, 25 bp, Homo sapien
cctcaccagcagctacgtatggttg

SEQ ID NO: 621067 - DNA, 25 bp, Homo sapien
tatagtaaaccaccagtccttcagc

SEQ ID NO: 621068 - DNA, 25 bp, Homo sapien
tcagttagaagaagagtcattttgg

SEQ ID NO: 621069 - DNA, 25 bp, Homo sapien
taaaaagctccatccgtgctatagt

SEQ ID NO: 621070 - DNA, 25 bp, Homo sapien
ttttataaggaatttgctttctcca

SEQ ID NO: 621071 - DNA, 25 bp, Homo sapien
ctgattattctctccaggatgtttt

SEQ ID NO: 621072 - DNA, 25 bp, Homo sapien
ttataaggaatttgctttctccaca

SEQ ID NO: 621073 - DNA, 25 bp, Homo sapien
tctctccaggatgttttttataagg

SEQ ID NO: 621074 - DNA, 25 bp, Homo sapien
tttccacggtagagtcaaacagaga

SEQ ID NO: 621075 - DNA, 25 bp, Homo sapien
tggactttctttggccagcgtccct

SEQ ID NO: 621076 - DNA, 25 bp, Homo sapien
atggtagttctgagcattgcgcgcc

SEQ ID NO: 621077 - DNA, 25 bp, Homo sapien
cagcgtcccttgatgagtgtcagca

SEQ ID NO: 621078 - DNA, 25 bp, Homo sapien
caagctctagggctgacctgtgagt

SEQ ID NO: 621079 - DNA, 25 bp, Homo sapien
tctcctgggcccgtaggcaaacaca

SEQ ID NO: 621080 - DNA, 25 bp, Homo sapien
agtatcccacctaaagtgtgcccct

SEQ ID NO: 621081 - DNA, 25 bp, Homo sapien
gtgcccctgtagtgtctgtaaatca

SEQ ID NO: 621082 - DNA, 25 bp, Homo sapien
gggtgttcctgttatagctccttgg

SEQ ID NO: 621083 - DNA, 25 bp, Homo sapien
cctgttatagctccttgggacatat

SEQ ID NO: 621084 - DNA, 25 bp, Homo sapien
gttcctgttatagctccttgggaca

SEQ ID NO: 621085 - DNA, 25 bp, Homo sapien
gctaggggtgttcctgttatagctc

SEQ ID NO: 621086 - DNA, 25 bp, Homo sapien
attggctgtcttgatcaagggtatg

SEQ ID NO: 621087 - DNA, 25 bp, Homo sapien
acagagtatttgtaattggctgtct

SEQ ID NO: 621088 - DNA, 25 bp, Homo sapien
tggctgtcttgatcaagggtatgcc

SEQ ID NO: 621089 - DNA, 25 bp, Homo sapien
cagagtatttgtaattggctgtctt

SEQ ID NO: 621090 - DNA, 25 bp, Homo sapien
ggtatgattctgagacagtttatga

SEQ ID NO: 621091 - DNA, 25 bp, Homo sapien
cagtttatgagacatggcacagtca

SEQ ID NO: 621092 - DNA, 25 bp, Homo sapien
tgagacagtttatgagacatggcac

SEQ ID NO: 621093 - DNA, 25 bp, Homo sapien
ctgaggtatgattctgagacagttt

SEQ ID NO: 621094 - DNA, 25 bp, Homo sapien
taggagccgggcctcctgaaaagct

SEQ ID NO: 621095 - DNA, 25 bp, Homo sapien
tctgggccacttagggttggctaca

SEQ ID NO: 621096 - DNA, 25 bp, Homo sapien
caatggcaagagatttgagaattgc

SEQ ID NO: 621097 - DNA, 25 bp, Homo sapien
tgtgtttgaacagggcaatggcaag

SEQ ID NO: 621098 - DNA, 25 bp, Homo sapien
cagtgtataaaggccagatgggaac

SEQ ID NO: 621099 - DNA, 25 bp, Homo sapien
tgtataaaggccagatgggaacagg

SEQ ID NO: 621100 - DNA, 25 bp, Homo sapien
tataaaggccagatgggaacagggt

SEQ ID NO: 621101 - DNA, 25 bp, Homo sapien
taaaggccagatgggaacagggtgt

SEQ ID NO: 621102 - DNA, 25 bp, Homo sapien
aaatcattacagtatatctgagcag

SEQ ID NO: 621103 - DNA, 25 bp, Homo sapien
ttggtttaaggacagccagtgaagg

SEQ ID NO: 621104 - DNA, 25 bp, Homo sapien
gatggagaatgctttcccccgggag

SEQ ID NO: 621105 - DNA, 25 bp, Homo sapien
gagcagtttggcttcatagttttct

SEQ ID NO: 621106 - DNA, 25 bp, Homo sapien
ggaaattgagatactgagttctcca

SEQ ID NO: 621107 - DNA, 25 bp, Homo sapien
caactgcagttggagattgtctgta

SEQ ID NO: 621108 - DNA, 25 bp, Homo sapien
acatggaaattgagatactgagttc

SEQ ID NO: 621109 - DNA, 25 bp, Homo sapien
tgttttgaaggaatttcatactcca

SEQ ID NO: 621110 - DNA, 25 bp, Homo sapien
accacattttaaagtatctgcatca

SEQ ID NO: 621111 - DNA, 25 bp, Homo sapien
ctgcatcattgacttttactccatc

SEQ ID NO: 621112 - DNA, 25 bp, Homo sapien
tgggtttgattctgataatcaaaga

SEQ ID NO: 621113 - DNA, 25 bp, Homo sapien
ggtttgattctgataatcaaagagt

SEQ ID NO: 621114 - DNA, 25 bp, Homo sapien
tttcttatgtaagctatacccatga

SEQ ID NO: 621115 - DNA, 25 bp, Homo sapien
tatgtaagctatacccatgacacat

SEQ ID NO: 621116 - DNA, 25 bp, Homo sapien
tcttatgtaagctatacccatgaca

SEQ ID NO: 621117 - DNA, 25 bp, Homo sapien
ttatgtaagctatacccatgacaca

SEQ ID NO: 621118 - DNA, 25 bp, Homo sapien
atcgagctgtactcttggctgaaca

SEQ ID NO: 621119 - DNA, 25 bp, Homo sapien
catcgagctgtactcttggctgaac

SEQ ID NO: 621120 - DNA, 25 bp, Homo sapien
ttacatcgagctgtactcttggctg

SEQ ID NO: 621121 - DNA, 25 bp, Homo sapien
acatcgagctgtactcttggctgaa

SEQ ID NO: 621122 - DNA, 25 bp, Homo sapien
tgctcccttgttcctgggctcactg

SEQ ID NO: 621123 - DNA, 25 bp, Homo sapien
tcccttgttcctgggctcactgccc

SEQ ID NO: 621124 - DNA, 25 bp, Homo sapien
gctcccttgttcctgggctcactgc

SEQ ID NO: 621125 - DNA, 25 bp, Homo sapien
ccttgttcctgggctcactgcccat

SEQ ID NO: 621126 - DNA, 25 bp, Homo sapien
ggaagtctgttgacgactgccttgg

SEQ ID NO: 621127 - DNA, 25 bp, Homo sapien
tgatgaacagtaatcgccaaaggaa

SEQ ID NO: 621128 - DNA, 25 bp, Homo sapien
gtggcaaatccctccctgtagttga

SEQ ID NO: 621129 - DNA, 25 bp, Homo sapien
tgcataacccggagacagatccaac

SEQ ID NO: 621130 - DNA, 25 bp, Homo sapien
ctgaggctcgatgtaagtaattttc

SEQ ID NO: 621131 - DNA, 25 bp, Homo sapien
gagatttggatgtgtaatgaatttc

SEQ ID NO: 621132 - DNA, 25 bp, Homo sapien
ttctactcggcattttagagatttg

SEQ ID NO: 621133 - DNA, 25 bp, Homo sapien
cttttcctactgctgaggctcgatg

SEQ ID NO: 621134 - DNA, 25 bp, Homo sapien
tcagctgtacatttcagttgctttg

SEQ ID NO: 621135 - DNA, 25 bp, Homo sapien
cagctgtacatttcagttgctttgc

SEQ ID NO: 621136 - DNA, 25 bp, Homo sapien
tgccaatcttatgcccttcacaggg

SEQ ID NO: 621137 - DNA, 25 bp, Homo sapien
tgagtgaactcccacagtgaccgtg

SEQ ID NO: 621138 - DNA, 25 bp, Homo sapien
agtgaccgtgcaccccacagtgatg

SEQ ID NO: 621139 - DNA, 25 bp, Homo sapien
taccactgctgagtgaactcccaca

SEQ ID NO: 621140 - DNA, 25 bp, Homo sapien
aggcaggcatgctacccacacagtt

SEQ ID NO: 621141 - DNA, 25 bp, Homo sapien
aaaggcaggcatgctacccacacag

SEQ ID NO: 621142 - DNA, 25 bp, Homo sapien
ggcaggcatgctacccacacagttc

SEQ ID NO: 621143 - DNA, 25 bp, Homo sapien
caggcatgctacccacacagttcca

SEQ ID NO: 621144 - DNA, 25 bp, Homo sapien
ctccacggaagcctgtgatgcttgc

SEQ ID NO: 621145 - DNA, 25 bp, Homo sapien
taataactctgctccacggaagcct

SEQ ID NO: 621146 - DNA, 25 bp, Homo sapien
cggaagcctgtgatgcttgctatgg

SEQ ID NO: 621147 - DNA, 25 bp, Homo sapien
tgatgcttgctatggggacctgatg

SEQ ID NO: 621148 - DNA, 25 bp, Homo sapien
tcaccagcacgtttctgatatgcag

SEQ ID NO: 621149 - DNA, 25 bp, Homo sapien
tacttgcaatcaccagcacgtttct

SEQ ID NO: 621150 - DNA, 25 bp, Homo sapien
tctctgaccgtcagggacaatccaa

SEQ ID NO: 621151 - DNA, 25 bp, Homo sapien
gggctttctggtaacgcagatctct

SEQ ID NO: 621152 - DNA, 25 bp, Homo sapien
cattggtggtttgcaggcttgcgtt

SEQ ID NO: 621153 - DNA, 25 bp, Homo sapien
cctgctgcataaattgtgtcacaac

SEQ ID NO: 621154 - DNA, 25 bp, Homo sapien
tgcgttctgttctgtctgatgagga

SEQ ID NO: 621155 - DNA, 25 bp, Homo sapien
gggctgttgagaatcccattggcta

SEQ ID NO: 621156 - DNA, 25 bp, Homo sapien
cattatcagtgtcagtgagggcatc

SEQ ID NO: 621157 - DNA, 25 bp, Homo sapien
tccttttgggttcagagcccaccag

SEQ ID NO: 621158 - DNA, 25 bp, Homo sapien
cagacactgatcaccaaagtcagca

SEQ ID NO: 621159 - DNA, 25 bp, Homo sapien
gtcagcaattataagcattatcagt

SEQ ID NO: 621160 - DNA, 25 bp, Homo sapien
tcaagtgccttgcaatgcagatgtg

SEQ ID NO: 621161 - DNA, 25 bp, Homo sapien
caagtgccttgcaatgcagatgtgc

SEQ ID NO: 621162 - DNA, 25 bp, Homo sapien
agtgccttgcaatgcagatgtgcca

SEQ ID NO: 621163 - DNA, 25 bp, Homo sapien
tgccttgcaatgcagatgtgccaac

SEQ ID NO: 621164 - DNA, 25 bp, Homo sapien
tgtctgcttggaacattaaacacaa

SEQ ID NO: 621165 - DNA, 25 bp, Homo sapien
tgtactgttagtagaatgagatttg

SEQ ID NO: 621166 - DNA, 25 bp, Homo sapien
tgaggcattattgttattaagggac

SEQ ID NO: 621167 - DNA, 25 bp, Homo sapien
aaacacaccaatttgaggcattatt

SEQ ID NO: 621168 - DNA, 25 bp, Homo sapien
caggtccatggtgaatagcctacag

SEQ ID NO: 621169 - DNA, 25 bp, Homo sapien
gatggctctcggctctgtaatgcca

SEQ ID NO: 621170 - DNA, 25 bp, Homo sapien
caaaaagcttgttggaaggctttgc

SEQ ID NO: 621171 - DNA, 25 bp, Homo sapien
cactggtcagaaacgtgttacttgc

SEQ ID NO: 621172 - DNA, 25 bp, Homo sapien
catatctggactagtgggcagagca

SEQ ID NO: 621173 - DNA, 25 bp, Homo sapien
taagttaatgtcacctgtcctttcc

SEQ ID NO: 621174 - DNA, 25 bp, Homo sapien
ttccttcatatctggactagtgggc

SEQ ID NO: 621175 - DNA, 25 bp, Homo sapien
gaccccgatggccatttgtaagtta

SEQ ID NO: 621176 - DNA, 25 bp, Homo sapien
cttatgaacaaaaatgatgccctcc

SEQ ID NO: 621177 - DNA, 25 bp, Homo sapien
cttctgaggatgtgtctgctccatc

SEQ ID NO: 621178 - DNA, 25 bp, Homo sapien
tgaacaaaaatgatgccctccggct

SEQ ID NO: 621179 - DNA, 25 bp, Homo sapien
tatgaacaaaaatgatgccctccgg

SEQ ID NO: 621180 - DNA, 25 bp, Homo sapien
atgagtggcacgagagtcactggaa

SEQ ID NO: 621181 - DNA, 25 bp, Homo sapien
tagagatgagtggcacgagagtcac

SEQ ID NO: 621182 - DNA, 25 bp, Homo sapien
agatgagtggcacgagagtcactgg

SEQ ID NO: 621183 - DNA, 25 bp, Homo sapien
tgagtggcacgagagtcactggaac

SEQ ID NO: 621184 - DNA, 25 bp, Homo sapien
cttccatgatgtctggtttatcata

SEQ ID NO: 621185 - DNA, 25 bp, Homo sapien
tatcataaacccagttccctttgtg

SEQ ID NO: 621186 - DNA, 25 bp, Homo sapien
cagttccctttgtggtccccacatt

SEQ ID NO: 621187 - DNA, 25 bp, Homo sapien
gatgtctggtttatcataaacccag

SEQ ID NO: 621188 - DNA, 25 bp, Homo sapien
tggaaatgcgccaacatcaggtgga

SEQ ID NO: 621189 - DNA, 25 bp, Homo sapien
aatgcgccaacatcaggtggaaatg

SEQ ID NO: 621190 - DNA, 25 bp, Homo sapien
gaaatgcgccaacatcaggtggaaa

SEQ ID NO: 621191 - DNA, 25 bp, Homo sapien
caacatcaggtggaaatgaagccaa

SEQ ID NO: 621192 - DNA, 25 bp, Homo sapien
caaaaacccatgagtgaaacagaaa

SEQ ID NO: 621193 - DNA, 25 bp, Homo sapien
cctgggagtagccacaatggtgctt

SEQ ID NO: 621194 - DNA, 25 bp, Homo sapien
tcagaggcattactgatatggtcct

SEQ ID NO: 621195 - DNA, 25 bp, Homo sapien
ccacaatggtgcttcgtggctgaat

SEQ ID NO: 621196 - DNA, 25 bp, Homo sapien
ctatctgctgaggtctaagggtttc

SEQ ID NO: 621197 - DNA, 25 bp, Homo sapien
tgctgaggtctaagggtttccactc

SEQ ID NO: 621198 - DNA, 25 bp, Homo sapien
tatctgctgaggtctaagggtttcc

SEQ ID NO: 621199 - DNA, 25 bp, Homo sapien
tctgctgaggtctaagggtttccac

SEQ ID NO: 621200 - DNA, 25 bp, Homo sapien
catgaccctggctagcctaatggga

SEQ ID NO: 621201 - DNA, 25 bp, Homo sapien
gctggattgtggagccatgaccctg

SEQ ID NO: 621202 - DNA, 25 bp, Homo sapien
tccaggaacacgagaggtggccctt

SEQ ID NO: 621203 - DNA, 25 bp, Homo sapien
caaagcaacatggtagttccaggaa

SEQ ID NO: 621204 - DNA, 25 bp, Homo sapien
tggaggttcctgtcattctgactgg

SEQ ID NO: 621205 - DNA, 25 bp, Homo sapien
gaggatttgaattcgctttgcctgg

SEQ ID NO: 621206 - DNA, 25 bp, Homo sapien
tatatctggcactcggtcaatgaaa

SEQ ID NO: 621207 - DNA, 25 bp, Homo sapien
gcctggcattgtcgggttctccatg

SEQ ID NO: 621208 - DNA, 25 bp, Homo sapien
gtactgtacgctgtccttgcattgc

SEQ ID NO: 621209 - DNA, 25 bp, Homo sapien
ttgatctgagatcccttctctgccc

SEQ ID NO: 621210 - DNA, 25 bp, Homo sapien
tctctgcccgcagttccagaaaaag

SEQ ID NO: 621211 - DNA, 25 bp, Homo sapien
tccaaacttgtactgtacgctgtcc

SEQ ID NO: 621212 - DNA, 25 bp, Homo sapien
gaagtcccatctctctgttttgtag

SEQ ID NO: 621213 - DNA, 25 bp, Homo sapien
cagggagctcatgaagggctcttca

SEQ ID NO: 621214 - DNA, 25 bp, Homo sapien
actttgccactctgcggcctggtta

SEQ ID NO: 621215 - DNA, 25 bp, Homo sapien
tttgtgggctctaccatgggaaaag

SEQ ID NO: 621216 - DNA, 25 bp, Homo sapien
gatgatctgagatccgggatgtgtg

SEQ ID NO: 621217 - DNA, 25 bp, Homo sapien
ggacatgtggtacttgccagtgctc

SEQ ID NO: 621218 - DNA, 25 bp, Homo sapien
ggtgtgtagttgtcgtgtgccagcc

SEQ ID NO: 621219 - DNA, 25 bp, Homo sapien
tttctcaccctaccaagcttccaca

SEQ ID NO: 621220 - DNA, 25 bp, Homo sapien
taacatgtggccagagttctaaagt

SEQ ID NO: 621221 - DNA, 25 bp, Homo sapien
ttctaaagtcttcaggatatgacca

SEQ ID NO: 621222 - DNA, 25 bp, Homo sapien
cagagttctaaagtcttcaggatat

SEQ ID NO: 621223 - DNA, 25 bp, Homo sapien
ctgggtaacatgtggccagagttct

SEQ ID NO: 621224 - DNA, 25 bp, Homo sapien
aattgtttcattagctgacaggaga

SEQ ID NO: 621225 - DNA, 25 bp, Homo sapien
ctttgtctccagataaagctgttaa

SEQ ID NO: 621226 - DNA, 25 bp, Homo sapien
ttattctccaatgatccccaattgt

SEQ ID NO: 621227 - DNA, 25 bp, Homo sapien
gggcaaatctttgtctccagataaa

SEQ ID NO: 621228 - DNA, 25 bp, Homo sapien
acggttggcagtaggcgcagcgcca

SEQ ID NO: 621229 - DNA, 25 bp, Homo sapien
ttgctggcaaactgcacggttggca

SEQ ID NO: 621230 - DNA, 25 bp, Homo sapien
tacaattgtgcatccattctgtgcc

SEQ ID NO: 621231 - DNA, 25 bp, Homo sapien
tgtgtattttcccagcttggagatt

SEQ ID NO: 621232 - DNA, 25 bp, Homo sapien
gatatgatccctggaacatccaaaa

SEQ ID NO: 621233 - DNA, 25 bp, Homo sapien
tccaaaatgtaccaaagcgtttcca

SEQ ID NO: 621234 - DNA, 25 bp, Homo sapien
aaagcgtttccagcaggcatgtctg

SEQ ID NO: 621235 - DNA, 25 bp, Homo sapien
agcatttggatatgatccctggaac

SEQ ID NO: 621236 - DNA, 25 bp, Homo sapien
tcatccataggtgacgtgacttgta

SEQ ID NO: 621237 - DNA, 25 bp, Homo sapien
ccattttcgccatagcttgacttac

SEQ ID NO: 621238 - DNA, 25 bp, Homo sapien
atttctccattttcgccatagcttg

SEQ ID NO: 621239 - DNA, 25 bp, Homo sapien
taggtgacgtgacttgtaagaataa

SEQ ID NO: 621240 - DNA, 25 bp, Homo sapien
tatgtgaaaaaatccaaatcttcac

SEQ ID NO: 621241 - DNA, 25 bp, Homo sapien
aaaaaatccaaatcttcaccatcca

SEQ ID NO: 621242 - DNA, 25 bp, Homo sapien
aaatccaaatcttcaccatccatgt

SEQ ID NO: 621243 - DNA, 25 bp, Homo sapien
accatccatgtgtgttttcatacat

SEQ ID NO: 621244 - DNA, 25 bp, Homo sapien
tggtggaacttccagcagcagtgag

SEQ ID NO: 621245 - DNA, 25 bp, Homo sapien
gctgtagtggtggaacttccagcag

SEQ ID NO: 621246 - DNA, 25 bp, Homo sapien
tagtggtggaacttccagcagcagt

SEQ ID NO: 621247 - DNA, 25 bp, Homo sapien
tgtagtggtggaacttccagcagca

SEQ ID NO: 621248 - DNA, 25 bp, Homo sapien
cttaatgtcgtgcactgaggtctgt

SEQ ID NO: 621249 - DNA, 25 bp, Homo sapien
gctgggttggaccttcctctgttag

SEQ ID NO: 621250 - DNA, 25 bp, Homo sapien
ttactggtgaacattggctgggttg

SEQ ID NO: 621251 - DNA, 25 bp, Homo sapien
tggaccttcctctgttagccttttc

SEQ ID NO: 621252 - DNA, 25 bp, Homo sapien
gtaatgttttccgttcttgaattca

SEQ ID NO: 621253 - DNA, 25 bp, Homo sapien
caggacaggagagcttagctccact

SEQ ID NO: 621254 - DNA, 25 bp, Homo sapien
ccactagcttggtcattgggtactg

SEQ ID NO: 621255 - DNA, 25 bp, Homo sapien
tactgagggtctgtaatgttttccg

SEQ ID NO: 621256 - DNA, 25 bp, Homo sapien
aagattgatttatgtggagtttctc

SEQ ID NO: 621257 - DNA, 25 bp, Homo sapien
ctttggaatatctggaaaatcttgc

SEQ ID NO: 621258 - DNA, 25 bp, Homo sapien
aatggtaaccgagacacaaaattca

SEQ ID NO: 621259 - DNA, 25 bp, Homo sapien
cccctgacacaaagaatggtaaccg

SEQ ID NO: 621260 - DNA, 25 bp, Homo sapien
tcgtgtgacttggttcagaggccaa

SEQ ID NO: 621261 - DNA, 25 bp, Homo sapien
ctgtgtctgagtgataaatgcctaa

SEQ ID NO: 621262 - DNA, 25 bp, Homo sapien
ttgctgtgtctgagtgataaatgcc

SEQ ID NO: 621263 - DNA, 25 bp, Homo sapien
atgcctaaatcattgttcgtgtgac

SEQ ID NO: 621264 - DNA, 25 bp, Homo sapien
caacgaatcatgctgctgttgtggc

SEQ ID NO: 621265 - DNA, 25 bp, Homo sapien
gaggagtgaaggttcctccagttca

SEQ ID NO: 621266 - DNA, 25 bp, Homo sapien
tcacaacgaatcatgctgctgttgt

SEQ ID NO: 621267 - DNA, 25 bp, Homo sapien
ggaggagtgaaggttcctccagttc

SEQ ID NO: 621268 - DNA, 25 bp, Homo sapien
aaagacaaacagaggatcgcaggcc

SEQ ID NO: 621269 - DNA, 25 bp, Homo sapien
aaatatcaggaggatgctcaatgta

SEQ ID NO: 621270 - DNA, 25 bp, Homo sapien
ggaattattattacacctgccttat

SEQ ID NO: 621271 - DNA, 25 bp, Homo sapien
ggagatttggctcaatttcctggtc

SEQ ID NO: 621272 - DNA, 25 bp, Homo sapien
gaattttcaggtagtgtcctctgag

SEQ ID NO: 621273 - DNA, 25 bp, Homo sapien
ggaattgcgagcttgccaaaagaga

SEQ ID NO: 621274 - DNA, 25 bp, Homo sapien
gaacttagtaaactcttctttcaga

SEQ ID NO: 621275 - DNA, 25 bp, Homo sapien
tcttttgtataggtcatatgaattc

SEQ ID NO: 621276 - DNA, 25 bp, Homo sapien
ctggacctgatcctgcgaatccgcg

SEQ ID NO: 621277 - DNA, 25 bp, Homo sapien
tgccgcaagccagacaggactggca

SEQ ID NO: 621278 - DNA, 25 bp, Homo sapien
aatccgcgctttcggtgcgagggac

SEQ ID NO: 621279 - DNA, 25 bp, Homo sapien
ttttgaccaggcgaaagtgggagtc

SEQ ID NO: 621280 - DNA, 25 bp, Homo sapien
ctgcggactcagatcgagcaggaga

SEQ ID NO: 621281 - DNA, 25 bp, Homo sapien
cactcggcggcagagttccgcgctg

SEQ ID NO: 621282 - DNA, 25 bp, Homo sapien
cgccgcgctccgcttggagggcact

SEQ ID NO: 621283 - DNA, 25 bp, Homo sapien
cccaaggcttccctgagctcgccag

SEQ ID NO: 621284 - DNA, 25 bp, Homo sapien
tgctctctctctctcgattttccat

SEQ ID NO: 621285 - DNA, 25 bp, Homo sapien
gaaaatccttttgaagttctcacca

SEQ ID NO: 621286 - DNA, 25 bp, Homo sapien
tgaaaatccttttgaagttctcacc

SEQ ID NO: 621287 - DNA, 25 bp, Homo sapien
aaaatccttttgaagttctcaccat

SEQ ID NO: 621288 - DNA, 25 bp, Homo sapien
cttgaaaatccttttgaagttctca

SEQ ID NO: 621289 - DNA, 25 bp, Homo sapien
cagcatcaataagtcagcaaatgaa

SEQ ID NO: 621290 - DNA, 25 bp, Homo sapien
ccagcatcaataagtcagcaaatga

SEQ ID NO: 621291 - DNA, 25 bp, Homo sapien
tctcctgatcctcacataagcactg

SEQ ID NO: 621292 - DNA, 25 bp, Homo sapien
aatgttaactcactgtgtggatggt

SEQ ID NO: 621293 - DNA, 25 bp, Homo sapien
gcactgaatacagattctctaagct

SEQ ID NO: 621294 - DNA, 25 bp, Homo sapien
tcctcacataagcactgaatacaga

SEQ ID NO: 621295 - DNA, 25 bp, Homo sapien
tgagctcccgtggaatgatgggctt

SEQ ID NO: 621296 - DNA, 25 bp, Homo sapien
tagttgctcaatgaatgggccaaac

SEQ ID NO: 621297 - DNA, 25 bp, Homo sapien
tattggattcactggggtgagctcc

SEQ ID NO: 621298 - DNA, 25 bp, Homo sapien
gaatgggccaaacttatgttcagtg

SEQ ID NO: 621299 - DNA, 25 bp, Homo sapien
ttgtcatagccctaataaaaatgta

SEQ ID NO: 621300 - DNA, 25 bp, Homo sapien
tacctctgaatcacttgtcatagcc

SEQ ID NO: 621301 - DNA, 25 bp, Homo sapien
aatgtacacccatggccgtgaatgc

SEQ ID NO: 621302 - DNA, 25 bp, Homo sapien
cattccattgcttaattacctctga

SEQ ID NO: 621303 - DNA, 25 bp, Homo sapien
cctctccatggctgaatagtcacaa

SEQ ID NO: 621304 - DNA, 25 bp, Homo sapien
tcttgttccttatggacagcttcct

SEQ ID NO: 621305 - DNA, 25 bp, Homo sapien
gctgaatagtcacaaggttcctgct

SEQ ID NO: 621306 - DNA, 25 bp, Homo sapien
ccctttgcatttgctccaattgttc

SEQ ID NO: 621307 - DNA, 25 bp, Homo sapien
tttccatgctacatcggaactgaag

SEQ ID NO: 621308 - DNA, 25 bp, Homo sapien
gctacatcggaactgaagggtgttg

SEQ ID NO: 621309 - DNA, 25 bp, Homo sapien
gggcacaagcattatccattttcag

SEQ ID NO: 621310 - DNA, 25 bp, Homo sapien
tctctctacttaattgcctttccat

SEQ ID NO: 621311 - DNA, 25 bp, Homo sapien
tggctgatgtcacccataataaagc

SEQ ID NO: 621312 - DNA, 25 bp, Homo sapien
catctctttggctgatgtcacccat

SEQ ID NO: 621313 - DNA, 25 bp, Homo sapien
ctttggctgatgtcacccataataa

SEQ ID NO: 621314 - DNA, 25 bp, Homo sapien
ctgatgtcacccataataaagcctt

SEQ ID NO: 621315 - DNA, 25 bp, Homo sapien
tcctgaagaaagttccgggcccata

SEQ ID NO: 621316 - DNA, 25 bp, Homo sapien
cattccgatggtccctatagtggca

SEQ ID NO: 621317 - DNA, 25 bp, Homo sapien
tatagtggcatgagagctccagtga

SEQ ID NO: 621318 - DNA, 25 bp, Homo sapien
gagacgtggctctactagttggact

SEQ ID NO: 621319 - DNA, 25 bp, Homo sapien
gctccttggtccgtcttgtctccat

SEQ ID NO: 621320 - DNA, 25 bp, Homo sapien
catctcgtctccgtggtcccgtgct

SEQ ID NO: 621321 - DNA, 25 bp, Homo sapien
gtcccgtgctccttggtccgtcttg

SEQ ID NO: 621322 - DNA, 25 bp, Homo sapien
tccctgctccgtttcatctcagtgg

SEQ ID NO: 621323 - DNA, 25 bp, Homo sapien
tcaatgatcgagttcttagatgctg

SEQ ID NO: 621324 - DNA, 25 bp, Homo sapien
cattacgtcctcctcaatgatcgag

SEQ ID NO: 621325 - DNA, 25 bp, Homo sapien
gattgccattacgtcctcctcaatg

SEQ ID NO: 621326 - DNA, 25 bp, Homo sapien
tcgagttcttagatgctgtgatgtc

SEQ ID NO: 621327 - DNA, 25 bp, Homo sapien
ctccagatattgccgttatggctag

SEQ ID NO: 621328 - DNA, 25 bp, Homo sapien
actccagatattgccgttatggcta

SEQ ID NO: 621329 - DNA, 25 bp, Homo sapien
tctatttcccacataacaccttttc

SEQ ID NO: 621330 - DNA, 25 bp, Homo sapien
tttggctggtctggttggcccatac

SEQ ID NO: 621331 - DNA, 25 bp, Homo sapien
gctggtctggttggcccatactttt

SEQ ID NO: 621332 - DNA, 25 bp, Homo sapien
tgttctatttcccacataacacctt

SEQ ID NO: 621333 - DNA, 25 bp, Homo sapien
ctgccatcctctcattttgggtcac

SEQ ID NO: 621334 - DNA, 25 bp, Homo sapien
tcactcagtctgtcgtgagacctgc

SEQ ID NO: 621335 - DNA, 25 bp, Homo sapien
tttgggtcacttccggcaactttgc

SEQ ID NO: 621336 - DNA, 25 bp, Homo sapien
tgcctaagcggtgatagatgctgag

SEQ ID NO: 621337 - DNA, 25 bp, Homo sapien
tcattgctcctccttggaacgtggc

SEQ ID NO: 621338 - DNA, 25 bp, Homo sapien
cattgctcctccttggaacgtggcc

SEQ ID NO: 621339 - DNA, 25 bp, Homo sapien
tgctcctccttggaacgtggccctg

SEQ ID NO: 621340 - DNA, 25 bp, Homo sapien
cctccttggaacgtggccctgctag

SEQ ID NO: 621341 - DNA, 25 bp, Homo sapien
ggttccaggagcaaagccctttctg

SEQ ID NO: 621342 - DNA, 25 bp, Homo sapien
ctggttccaggagcaaagccctttc

SEQ ID NO: 621343 - DNA, 25 bp, Homo sapien
gttccaggagcaaagccctttctgt

SEQ ID NO: 621344 - DNA, 25 bp, Homo sapien
tggttccaggagcaaagccctttct

SEQ ID NO: 621345 - DNA, 25 bp, Homo sapien
cagagaagatgattggcaagaaatg

SEQ ID NO: 621346 - DNA, 25 bp, Homo sapien
agagaagatgattggcaagaaatgt

SEQ ID NO: 621347 - DNA, 25 bp, Homo sapien
gcagacatgatccatggtgatgggc

SEQ ID NO: 621348 - DNA, 25 bp, Homo sapien
gagcttcctcatcgatctgccgcag

SEQ ID NO: 621349 - DNA, 25 bp, Homo sapien
tctcattttctcagccggagttagg

SEQ ID NO: 621350 - DNA, 25 bp, Homo sapien
tcagccggagttaggaacacgtgtg

SEQ ID NO: 621351 - DNA, 25 bp, Homo sapien
tcatctcctatcaccccggatgctc

SEQ ID NO: 621352 - DNA, 25 bp, Homo sapien
ggatgctcccctgatcccctgaagg

SEQ ID NO: 621353 - DNA, 25 bp, Homo sapien
tgatcccctgaagggtcgtaggcat

SEQ ID NO: 621354 - DNA, 25 bp, Homo sapien
ccctgaagggtcgtaggcattgtct

SEQ ID NO: 621355 - DNA, 25 bp, Homo sapien
gtactttctctgataggatgagggc

SEQ ID NO: 621356 - DNA, 25 bp, Homo sapien
gatggactgatgagtactttctctg

SEQ ID NO: 621357 - DNA, 25 bp, Homo sapien
tttggctctttatgcagggaagtgg

SEQ ID NO: 621358 - DNA, 25 bp, Homo sapien
gttgctgacaactgagatggactga

SEQ ID NO: 621359 - DNA, 25 bp, Homo sapien
ttccaaattcctggtaagacgagtc

SEQ ID NO: 621360 - DNA, 25 bp, Homo sapien
agacgagtcttctccaaagcccaga

SEQ ID NO: 621361 - DNA, 25 bp, Homo sapien
caaattcctggtaagacgagtcttc

SEQ ID NO: 621362 - DNA, 25 bp, Homo sapien
cctggtaagacgagtcttctccaaa

SEQ ID NO: 621363 - DNA, 25 bp, Homo sapien
ttgttcccattgctcgcactgggtg

SEQ ID NO: 621364 - DNA, 25 bp, Homo sapien
cgcactgggtgtcagtgttcacctg

SEQ ID NO: 621365 - DNA, 25 bp, Homo sapien
tcccattgctcgcactgggtgtcag

SEQ ID NO: 621366 - DNA, 25 bp, Homo sapien
tgctcgcactgggtgtcagtgttca

SEQ ID NO: 621367 - DNA, 25 bp, Homo sapien
acatagttacggttgaaggtggttg

SEQ ID NO: 621368 - DNA, 25 bp, Homo sapien
acctggaggtcctatgtgagcaggt

SEQ ID NO: 621369 - DNA, 25 bp, Homo sapien
agacatagttacggttgaaggtggt

SEQ ID NO: 621370 - DNA, 25 bp, Homo sapien
ctagacatagttacggttgaaggtg

SEQ ID NO: 621371 - DNA, 25 bp, Homo sapien
tgttgcagggttcttgcagtgctgc

SEQ ID NO: 621372 - DNA, 25 bp, Homo sapien
ccctgcctcttgcaataatttacag

SEQ ID NO: 621373 - DNA, 25 bp, Homo sapien
tccaagatttcgtgtgttgcagggt

SEQ ID NO: 621374 - DNA, 25 bp, Homo sapien
ggtgttcttccctcttgtacttgta

SEQ ID NO: 621375 - DNA, 25 bp, Homo sapien
taagaggcatcaggatgattttgtg

SEQ ID NO: 621376 - DNA, 25 bp, Homo sapien
ggcctccgcagggttaagaggcatc

SEQ ID NO: 621377 - DNA, 25 bp, Homo sapien
aggcttttgtgccttggacaccctc

SEQ ID NO: 621378 - DNA, 25 bp, Homo sapien
catctaggcttttgtgccttggaca

SEQ ID NO: 621379 - DNA, 25 bp, Homo sapien
acccacggttttccagcttaagatg

SEQ ID NO: 621380 - DNA, 25 bp, Homo sapien
tgcactttgtagttggacccacggt

SEQ ID NO: 621381 - DNA, 25 bp, Homo sapien
tgccgcaggtagtcccaatatccag

SEQ ID NO: 621382 - DNA, 25 bp, Homo sapien
caatatccagactgccctgtcatgg

SEQ ID NO: 621383 - DNA, 25 bp, Homo sapien
gatatgccactgagtgacaccatcg

SEQ ID NO: 621384 - DNA, 25 bp, Homo sapien
tcgctgacaacccctttacatgcag

SEQ ID NO: 621385 - DNA, 25 bp, Homo sapien
aacatcaagaagatatgccactgag

SEQ ID NO: 621386 - DNA, 25 bp, Homo sapien
actgagtgacaccatcgctgacaac

SEQ ID NO: 621387 - DNA, 25 bp, Homo sapien
ttttagatcttgtgttggggaggtg

SEQ ID NO: 621388 - DNA, 25 bp, Homo sapien
ttcatccttttttagatcttgtgtt

SEQ ID NO: 621389 - DNA, 25 bp, Homo sapien
cttttttagatcttgtgttggggag

SEQ ID NO: 621390 - DNA, 25 bp, Homo sapien
aatttcatccttttttagatcttgt

SEQ ID NO: 621391 - DNA, 25 bp, Homo sapien
ttactcactgtccaaggacatgaca

SEQ ID NO: 621392 - DNA, 25 bp, Homo sapien
cactgtccaaggacatgacagcagg

SEQ ID NO: 621393 - DNA, 25 bp, Homo sapien
tactcactgtccaaggacatgacag

SEQ ID NO: 621394 - DNA, 25 bp, Homo sapien
ctcactgtccaaggacatgacagca

SEQ ID NO: 621395 - DNA, 25 bp, Homo sapien
tagcttggagacatagggagaactt

SEQ ID NO: 621396 - DNA, 25 bp, Homo sapien
cagctcttttcatggcaagacaggg

SEQ ID NO: 621397 - DNA, 25 bp, Homo sapien
ccatagggtctcttaccagctgtct

SEQ ID NO: 621398 - DNA, 25 bp, Homo sapien
tgccaccggctgctacagttacagc

SEQ ID NO: 621399 - DNA, 25 bp, Homo sapien
acacacagagagaaagagcgaaggg

SEQ ID NO: 621400 - DNA, 25 bp, Homo sapien
cagagagaaagagcgaagggggaag

SEQ ID NO: 621401 - DNA, 25 bp, Homo sapien
agagagagagacatacacacagaga

SEQ ID NO: 621402 - DNA, 25 bp, Homo sapien
gagaaagagcgaagggggaagagag

SEQ ID NO: 621403 - DNA, 25 bp, Homo sapien
ccttagagtttattctcctctagaa

SEQ ID NO: 621404 - DNA, 25 bp, Homo sapien
tcaatctggccttagagtttattct

SEQ ID NO: 621405 - DNA, 25 bp, Homo sapien
tctggccttagagtttattctcctc

SEQ ID NO: 621406 - DNA, 25 bp, Homo sapien
ggccttagagtttattctcctctag

SEQ ID NO: 621407 - DNA, 25 bp, Homo sapien
gccattaggcagtgttggctgaaca

SEQ ID NO: 621408 - DNA, 25 bp, Homo sapien
ctgtcagaagggctgatccgagctg

SEQ ID NO: 621409 - DNA, 25 bp, Homo sapien
ccagatacgtcttttggatgctcat

SEQ ID NO: 621410 - DNA, 25 bp, Homo sapien
gcttggaggtgctccgagccattag

SEQ ID NO: 621411 - DNA, 25 bp, Homo sapien
gataaactggtcctcgaaggtcagg

SEQ ID NO: 621412 - DNA, 25 bp, Homo sapien
gtgttgcgcaattccaggctccgga

SEQ ID NO: 621413 - DNA, 25 bp, Homo sapien
caagttcatgccgttgcagccacag

SEQ ID NO: 621414 - DNA, 25 bp, Homo sapien
aaacctcgggcttgatgaagacctg

SEQ ID NO: 621415 - DNA, 25 bp, Homo sapien
gagtttgtgacttacccatcttgga

SEQ ID NO: 621416 - DNA, 25 bp, Homo sapien
taagtgcaaagctatctctccgtgt

SEQ ID NO: 621417 - DNA, 25 bp, Homo sapien
gagagcatgcagagaagccttcgct

SEQ ID NO: 621418 - DNA, 25 bp, Homo sapien
gcttgcaagagatctgaaccaccct

SEQ ID NO: 621419 - DNA, 25 bp, Homo sapien
gttacatcctcatgctacctttggg

SEQ ID NO: 621420 - DNA, 25 bp, Homo sapien
gggaaaacggcatagcattgctcct

SEQ ID NO: 621421 - DNA, 25 bp, Homo sapien
ggtatcaaaatacacgtacacaagt

SEQ ID NO: 621422 - DNA, 25 bp, Homo sapien
taatctataccttaaaatagcaagg

SEQ ID NO: 621423 - DNA, 25 bp, Homo sapien
gacattgataacagggtcactcaac

SEQ ID NO: 621424 - DNA, 25 bp, Homo sapien
aaaggatctgacaatgcgagcacta

SEQ ID NO: 621425 - DNA, 25 bp, Homo sapien
cacagtggttctacggtttctcaaa

SEQ ID NO: 621426 - DNA, 25 bp, Homo sapien
tcaccctttgctcccaggaatgaat

SEQ ID NO: 621427 - DNA, 25 bp, Homo sapien
cccagtatatgctagtgcaagataa

SEQ ID NO: 621428 - DNA, 25 bp, Homo sapien
taaagaaccccagtatatgctagtg

SEQ ID NO: 621429 - DNA, 25 bp, Homo sapien
ttccaaacatcataaccaaagcaag

SEQ ID NO: 621430 - DNA, 25 bp, Homo sapien
agtattaaagaaccccagtatatgc

SEQ ID NO: 621431 - DNA, 25 bp, Homo sapien
cagacaaggatgagggttgaaaacc

SEQ ID NO: 621432 - DNA, 25 bp, Homo sapien
catgtcatacgagccttgagccacg

SEQ ID NO: 621433 - DNA, 25 bp, Homo sapien
gatggtatgactgaaacccacaaga

SEQ ID NO: 621434 - DNA, 25 bp, Homo sapien
agctctgccagtcgcgtagatggta

SEQ ID NO: 621435 - DNA, 25 bp, Homo sapien
tgaaacacagtgctgtggcagccgt

SEQ ID NO: 621436 - DNA, 25 bp, Homo sapien
gaaacacagtgctgtggcagccgtg

SEQ ID NO: 621437 - DNA, 25 bp, Homo sapien
ctgaaacacagtgctgtggcagccg

SEQ ID NO: 621438 - DNA, 25 bp, Homo sapien
aacacagtgctgtggcagccgtgac

SEQ ID NO: 621439 - DNA, 25 bp, Homo sapien
tcttctttccccatgacgaggcatg

SEQ ID NO: 621440 - DNA, 25 bp, Homo sapien
tgtgctccagtcctacgagctgctt

SEQ ID NO: 621441 - DNA, 25 bp, Homo sapien
gagccctcgggatgccatataaagt

SEQ ID NO: 621442 - DNA, 25 bp, Homo sapien
gaatgcctgttgctccatgtggaaa

SEQ ID NO: 621443 - DNA, 25 bp, Homo sapien
tggactattaccaccgcctcctaac

SEQ ID NO: 621444 - DNA, 25 bp, Homo sapien
actattaccaccgcctcctaactgc

SEQ ID NO: 621445 - DNA, 25 bp, Homo sapien
gactattaccaccgcctcctaactg

SEQ ID NO: 621446 - DNA, 25 bp, Homo sapien
ctggactattaccaccgcctcctaa

SEQ ID NO: 621447 - DNA, 25 bp, Homo sapien
ctaggtttctcttaggtacaccagt

SEQ ID NO: 621448 - DNA, 25 bp, Homo sapien
cagagtttttgtaggacttcacaac

SEQ ID NO: 621449 - DNA, 25 bp, Homo sapien
ggtacaccagtgtgaggtaagaggc

SEQ ID NO: 621450 - DNA, 25 bp, Homo sapien
gaacagagtttttgtaggacttcac

SEQ ID NO: 621451 - DNA, 25 bp, Homo sapien
tggataattactttcaacactggat

SEQ ID NO: 621452 - DNA, 25 bp, Homo sapien
gataagccatagcagaatgatttct

SEQ ID NO: 621453 - DNA, 25 bp, Homo sapien
ttcaacactggataagccatagcag

SEQ ID NO: 621454 - DNA, 25 bp, Homo sapien
ttttggataattactttcaacactg

SEQ ID NO: 621455 - DNA, 25 bp, Homo sapien
tgtagggcctcttgctctggtaaag

SEQ ID NO: 621456 - DNA, 25 bp, Homo sapien
tgtgatttctggctataggcttccc

SEQ ID NO: 621457 - DNA, 25 bp, Homo sapien
tacacccgtgaggacttattgcagt

SEQ ID NO: 621458 - DNA, 25 bp, Homo sapien
gaattacagctaaagatttctccat

SEQ ID NO: 621459 - DNA, 25 bp, Homo sapien
ggtgaggaaacacctactggtcgga

SEQ ID NO: 621460 - DNA, 25 bp, Homo sapien
gcttaaagttatcagctcttgctgc

SEQ ID NO: 621461 - DNA, 25 bp, Homo sapien
tgtttggtgaccatctaatgtgggt

SEQ ID NO: 621462 - DNA, 25 bp, Homo sapien
caagcttccactacagtgcccatag

SEQ ID NO: 621463 - DNA, 25 bp, Homo sapien
tgcacattttgcttaggctaaatgt

SEQ ID NO: 621464 - DNA, 25 bp, Homo sapien
attttgcttaggctaaatgtgggtt

SEQ ID NO: 621465 - DNA, 25 bp, Homo sapien
tagggtagatgtgcattgcctttag

SEQ ID NO: 621466 - DNA, 25 bp, Homo sapien
acattttgcttaggctaaatgtggg

SEQ ID NO: 621467 - DNA, 25 bp, Homo sapien
atatggctattttagtcacatctaa

SEQ ID NO: 621468 - DNA, 25 bp, Homo sapien
aatatggctattttagtcacatcta

SEQ ID NO: 621469 - DNA, 25 bp, Homo sapien
tatggctattttagtcacatctaaa

SEQ ID NO: 621470 - DNA, 25 bp, Homo sapien
tcatgtgatctaaaatatggctgcc

SEQ ID NO: 621471 - DNA, 25 bp, Homo sapien
agactgtggtgtccattgctaggca

SEQ ID NO: 621472 - DNA, 25 bp, Homo sapien
tggccatggaggtcatgtgatctaa

SEQ ID NO: 621473 - DNA, 25 bp, Homo sapien
taagggctgccctttataagggatc

SEQ ID NO: 621474 - DNA, 25 bp, Homo sapien
aatgaattctttggcaaatttttca

SEQ ID NO: 621475 - DNA, 25 bp, Homo sapien
tgaaatgaattctttggcaaatttt

SEQ ID NO: 621476 - DNA, 25 bp, Homo sapien
ctttgaaatgaattctttggcaaat

SEQ ID NO: 621477 - DNA, 25 bp, Homo sapien
ttgaaatgaattctttggcaaattt

SEQ ID NO: 621478 - DNA, 25 bp, Homo sapien
cttctgtgcgaaaggcaagggacag

SEQ ID NO: 621479 - DNA, 25 bp, Homo sapien
gtgcgaaaggcaagggacagccctc

SEQ ID NO: 621480 - DNA, 25 bp, Homo sapien
ctgtgcgaaaggcaagggacagccc

SEQ ID NO: 621481 - DNA, 25 bp, Homo sapien
ttctgtgcgaaaggcaagggacagc

SEQ ID NO: 621482 - DNA, 25 bp, Homo sapien
gctgggactgtaatgcccgttttcc

SEQ ID NO: 621483 - DNA, 25 bp, Homo sapien
tgggactgtaatgcccgttttccca

SEQ ID NO: 621484 - DNA, 25 bp, Homo sapien
tgctgggactgtaatgcccgttttc

SEQ ID NO: 621485 - DNA, 25 bp, Homo sapien
ttgctgggactgtaatgcccgtttt

SEQ ID NO: 621486 - DNA, 25 bp, Homo sapien
ggtgtggccactgtcaggtcagagc

SEQ ID NO: 621487 - DNA, 25 bp, Homo sapien
ctgtggggggtgtggccactgtcag

SEQ ID NO: 621488 - DNA, 25 bp, Homo sapien
tggggggtgtggccactgtcaggtc

SEQ ID NO: 621489 - DNA, 25 bp, Homo sapien
gggggtgtggccactgtcaggtcag

SEQ ID NO: 621490 - DNA, 25 bp, Homo sapien
tggagaaccgtctccacgagcaggg

SEQ ID NO: 621491 - DNA, 25 bp, Homo sapien
gaagaaatggagaaccgtctccacg

SEQ ID NO: 621492 - DNA, 25 bp, Homo sapien
aatggagaaccgtctccacgagcag

SEQ ID NO: 621493 - DNA, 25 bp, Homo sapien
gaaccgtctccacgagcagggcctg

SEQ ID NO: 621494 - DNA, 25 bp, Homo sapien
gatgctgtggaaagttgatggaaca

SEQ ID NO: 621495 - DNA, 25 bp, Homo sapien
gtagaaagtatcatctcgaattcta

SEQ ID NO: 621496 - DNA, 25 bp, Homo sapien
taatcacaaagaaagacttggggtg

SEQ ID NO: 621497 - DNA, 25 bp, Homo sapien
tctcgaattctaaggtaatcacaaa

SEQ ID NO: 621498 - DNA, 25 bp, Homo sapien
gtttgaacttggaccgatttggatg

SEQ ID NO: 621499 - DNA, 25 bp, Homo sapien
ggaccgatttggatggtcatttgtg

SEQ ID NO: 621500 - DNA, 25 bp, Homo sapien
tctgccccttaagctggtgtggaga

SEQ ID NO: 621501 - DNA, 25 bp, Homo sapien
acatcaccagtgataactaccaccg

SEQ ID NO: 621502 - DNA, 25 bp, Homo sapien
cacacaaatgaccttgtaggccaca

SEQ ID NO: 621503 - DNA, 25 bp, Homo sapien
aatgaccttgtaggccacatggaaa

SEQ ID NO: 621504 - DNA, 25 bp, Homo sapien
caaatgaccttgtaggccacatgga

SEQ ID NO: 621505 - DNA, 25 bp, Homo sapien
tctccacacaaatgaccttgtaggc

SEQ ID NO: 621506 - DNA, 25 bp, Homo sapien
ggtgcgcagctaggcgcagcacccg

SEQ ID NO: 621507 - DNA, 25 bp, Homo sapien
cgcagctaggcgcagcacccgcgcc

SEQ ID NO: 621508 - DNA, 25 bp, Homo sapien
gtgcgcagctaggcgcagcacccgc

SEQ ID NO: 621509 - DNA, 25 bp, Homo sapien
tgcgcagctaggcgcagcacccgcg

SEQ ID NO: 621510 - DNA, 25 bp, Homo sapien
ctgccggacccagcaacgccagcaa

SEQ ID NO: 621511 - DNA, 25 bp, Homo sapien
cctgcctgccggacccagcaacgcc

SEQ ID NO: 621512 - DNA, 25 bp, Homo sapien
tgccggacccagcaacgccagcaac

SEQ ID NO: 621513 - DNA, 25 bp, Homo sapien
gcctgccggacccagcaacgccagc

SEQ ID NO: 621514 - DNA, 25 bp, Homo sapien
tccccgcgcgccgtgcggagcagcc

SEQ ID NO: 621515 - DNA, 25 bp, Homo sapien
cagccgggcgtctagcctgggcggg

SEQ ID NO: 621516 - DNA, 25 bp, Homo sapien
cagtccccgcgcgccgtgcggagca

SEQ ID NO: 621517 - DNA, 25 bp, Homo sapien
agcagccgggcgtctagcctgggcg

SEQ ID NO: 621518 - DNA, 25 bp, Homo sapien
cgagcgtcgggaggtgttcaaaaca

SEQ ID NO: 621519 - DNA, 25 bp, Homo sapien
aacaactccgcaggcaacgtgtgga

SEQ ID NO: 621520 - DNA, 25 bp, Homo sapien
cagctacaagtgcaaaggcgtcctt

SEQ ID NO: 621521 - DNA, 25 bp, Homo sapien
ctggctgtcaactaggaggatcgct

SEQ ID NO: 621522 - DNA, 25 bp, Homo sapien
tttcacttagcaccaatggaaagtg

SEQ ID NO: 621523 - DNA, 25 bp, Homo sapien
tagcaccaatggaaagtgacggaaa

SEQ ID NO: 621524 - DNA, 25 bp, Homo sapien
aagtgacggaaatgaaacataacaa

SEQ ID NO: 621525 - DNA, 25 bp, Homo sapien
caatggaaagtgacggaaatgaaac

SEQ ID NO: 621526 - DNA, 25 bp, Homo sapien
aggcggcacggtgtgtgcagaaggt

SEQ ID NO: 621527 - DNA, 25 bp, Homo sapien
ggatccccaagacctgtgtgccacc

SEQ ID NO: 621528 - DNA, 25 bp, Homo sapien
ggaggcggcacggtgtgtgcagaag

SEQ ID NO: 621529 - DNA, 25 bp, Homo sapien
aggatccccaagacctgtgtgccac

SEQ ID NO: 621530 - DNA, 25 bp, Homo sapien
cacaggtcgttagagagggcttccc

SEQ ID NO: 621531 - DNA, 25 bp, Homo sapien
aggacaagaggccattccagatgag

SEQ ID NO: 621532 - DNA, 25 bp, Homo sapien
caacaacaagtgagtagagagagga

SEQ ID NO: 621533 - DNA, 25 bp, Homo sapien
gaggcatccgagacctcacaggtcg

SEQ ID NO: 621534 - DNA, 25 bp, Homo sapien
ttgtccccgtggcctggctggggtc

SEQ ID NO: 621535 - DNA, 25 bp, Homo sapien
ctgttgtccccgtggcctggctggg

SEQ ID NO: 621536 - DNA, 25 bp, Homo sapien
tgttgtccccgtggcctggctgggg

SEQ ID NO: 621537 - DNA, 25 bp, Homo sapien
gattccaatgtgcaatgacacgcca

SEQ ID NO: 621538 - DNA, 25 bp, Homo sapien
tgtgcaatgacacgccaacagtgcc

SEQ ID NO: 621539 - DNA, 25 bp, Homo sapien
gaaattaatgagattccaatgtgca

SEQ ID NO: 621540 - DNA, 25 bp, Homo sapien
tgacacgccaacagtgccatactct

SEQ ID NO: 621541 - DNA, 25 bp, Homo sapien
gaaaacaattattacagcaagggat

SEQ ID NO: 621542 - DNA, 25 bp, Homo sapien
agaaaacaattattacagcaaggga

SEQ ID NO: 621543 - DNA, 25 bp, Homo sapien
aaaacaattattacagcaagggatt

SEQ ID NO: 621544 - DNA, 25 bp, Homo sapien
ggactctttaaatccgagtttcagc

SEQ ID NO: 621545 - DNA, 25 bp, Homo sapien
ctctttaaatccgagtttcagcagg

SEQ ID NO: 621546 - DNA, 25 bp, Homo sapien
gactctttaaatccgagtttcagca

SEQ ID NO: 621547 - DNA, 25 bp, Homo sapien
tctttaaatccgagtttcagcagga

SEQ ID NO: 621548 - DNA, 25 bp, Homo sapien
tttcgaaaatatctgacaatcaagg

SEQ ID NO: 621549 - DNA, 25 bp, Homo sapien
tctgacaatcaagggcacagagact

SEQ ID NO: 621550 - DNA, 25 bp, Homo sapien
gcagctggaggtttaaaaaatccca

SEQ ID NO: 621551 - DNA, 25 bp, Homo sapien
agactagcgtaatgctgattctcac

SEQ ID NO: 621552 - DNA, 25 bp, Homo sapien
tcagtgtgtacgactgaagagttca

SEQ ID NO: 621553 - DNA, 25 bp, Homo sapien
aaaagcctgatttttgctggcaaag

SEQ ID NO: 621554 - DNA, 25 bp, Homo sapien
ccaaatcatgtaatttagaagaaat

SEQ ID NO: 621555 - DNA, 25 bp, Homo sapien
catgagaacatagcaattagccccc

SEQ ID NO: 621556 - DNA, 25 bp, Homo sapien
tataaggacgaagcctcagtgtctc

SEQ ID NO: 621557 - DNA, 25 bp, Homo sapien
gacaaatgacgctgacctaccttaa

SEQ ID NO: 621558 - DNA, 25 bp, Homo sapien
tcatgtaatacaagcctctccctgg

SEQ ID NO: 621559 - DNA, 25 bp, Homo sapien
ccttcattgggtaaagctggctcag

SEQ ID NO: 621560 - DNA, 25 bp, Homo sapien
caggcgttctgtacatcttgctggt

SEQ ID NO: 621561 - DNA, 25 bp, Homo sapien
tattctgctagttccataaaaacaa

SEQ ID NO: 621562 - DNA, 25 bp, Homo sapien
tagatgttttattctgctagttcca

SEQ ID NO: 621563 - DNA, 25 bp, Homo sapien
aacaatgtaaacacaggcgttctgt

SEQ ID NO: 621564 - DNA, 25 bp, Homo sapien
taacttattgggttggcgaagcctg

SEQ ID NO: 621565 - DNA, 25 bp, Homo sapien
tcataatctggaggcaaggttcgac

SEQ ID NO: 621566 - DNA, 25 bp, Homo sapien
gtgtcttcacaggaggcaaatccag

SEQ ID NO: 621567 - DNA, 25 bp, Homo sapien
tgaccccgatcagttaaggagctgt

SEQ ID NO: 621568 - DNA, 25 bp, Homo sapien
tttcccatttagtcagaagggctgc

SEQ ID NO: 621569 - DNA, 25 bp, Homo sapien
tatacagtgcctacgttcagcagtt

SEQ ID NO: 621570 - DNA, 25 bp, Homo sapien
caggcttcatggaatcgcagagtta

SEQ ID NO: 621571 - DNA, 25 bp, Homo sapien
gctgtgaccacgtaagcctccatgg

SEQ ID NO: 621572 - DNA, 25 bp, Homo sapien
tgacatggcaccagcctaagagcta

SEQ ID NO: 621573 - DNA, 25 bp, Homo sapien
cagggccatttgttgccgtatggtg

SEQ ID NO: 621574 - DNA, 25 bp, Homo sapien
ctaagagctagctctaactggctga

SEQ ID NO: 621575 - DNA, 25 bp, Homo sapien
taactgtgttttgcattgacatggc

SEQ ID NO: 621576 - DNA, 25 bp, Homo sapien
agaggagttagggatggtgattaga

SEQ ID NO: 621577 - DNA, 25 bp, Homo sapien
atattaattgagtgagtgtcctggg

SEQ ID NO: 621578 - DNA, 25 bp, Homo sapien
agagtttggaccagcatccagatat

SEQ ID NO: 621579 - DNA, 25 bp, Homo sapien
ggaccagcatccagatatctgagca

SEQ ID NO: 621580 - DNA, 25 bp, Homo sapien
tttatctccaatgcgtcaagcttga

SEQ ID NO: 621581 - DNA, 25 bp, Homo sapien
ataaatggccgaccgcggagagcac

SEQ ID NO: 621582 - DNA, 25 bp, Homo sapien
gggctgttgcttcaccgataaatgg

SEQ ID NO: 621583 - DNA, 25 bp, Homo sapien
cacttccgggttcttagggagcaag

SEQ ID NO: 621584 - DNA, 25 bp, Homo sapien
cgcacgttcactgcgcacgctgaaa

SEQ ID NO: 621585 - DNA, 25 bp, Homo sapien
tggaaaaatggaggcgcgaatcctg

SEQ ID NO: 621586 - DNA, 25 bp, Homo sapien
aagccgaccgctgcgctatcgatcg

SEQ ID NO: 621587 - DNA, 25 bp, Homo sapien
gctatcgatcggtcccactctctct

SEQ ID NO: 621588 - DNA, 25 bp, Homo sapien
tccggttctcttggtatcccgctct

SEQ ID NO: 621589 - DNA, 25 bp, Homo sapien
ggttctcttggtatcccgctctctc

SEQ ID NO: 621590 - DNA, 25 bp, Homo sapien
cagctggtccggttctcttggtatc

SEQ ID NO: 621591 - DNA, 25 bp, Homo sapien
tggtccggttctcttggtatcccgc

SEQ ID NO: 621592 - DNA, 25 bp, Homo sapien
agctactctccccgtgtcccagtac

SEQ ID NO: 621593 - DNA, 25 bp, Homo sapien
cagctactctccccgtgtcccagta

SEQ ID NO: 621594 - DNA, 25 bp, Homo sapien
tctcgccccagtcgtttctgtggtt

SEQ ID NO: 621595 - DNA, 25 bp, Homo sapien
cagtctcgccccagtcgtttctgtg

SEQ ID NO: 621596 - DNA, 25 bp, Homo sapien
ggttttctctaaatgccccagccga

SEQ ID NO: 621597 - DNA, 25 bp, Homo sapien
cttgctaactctcgactcttccagt

SEQ ID NO: 621598 - DNA, 25 bp, Homo sapien
caagccgggcaacttaggaaacgca

SEQ ID NO: 621599 - DNA, 25 bp, Homo sapien
cggatacatcgcagttggaaaggct

SEQ ID NO: 621600 - DNA, 25 bp, Homo sapien
caggtgagcacacgaggacaagaac

SEQ ID NO: 621601 - DNA, 25 bp, Homo sapien
tatatgcgccgcgaccatctggatg

SEQ ID NO: 621602 - DNA, 25 bp, Homo sapien
aaaaggaagacagtttccctgccag

SEQ ID NO: 621603 - DNA, 25 bp, Homo sapien
gaaaaggaagacagtttccctgcca

SEQ ID NO: 621604 - DNA, 25 bp, Homo sapien
gagaaaaggaagacagtttccctgc

SEQ ID NO: 621605 - DNA, 25 bp, Homo sapien
tcagcttgtagagctgctggcggtc

SEQ ID NO: 621606 - DNA, 25 bp, Homo sapien
tggcggtccttcaagcccactttgg

SEQ ID NO: 621607 - DNA, 25 bp, Homo sapien
tgatgtagccgtcatatagcagctg

SEQ ID NO: 621608 - DNA, 25 bp, Homo sapien
tttcattgatgaggccattggcgat

SEQ ID NO: 621609 - DNA, 25 bp, Homo sapien
catgggacgtatggatttgtgttca

SEQ ID NO: 621610 - DNA, 25 bp, Homo sapien
ccatgggacgtatggatttgtgttc

SEQ ID NO: 621611 - DNA, 25 bp, Homo sapien
cttgccatgggacgtatggatttgt

SEQ ID NO: 621612 - DNA, 25 bp, Homo sapien
tgccatgggacgtatggatttgtgt

SEQ ID NO: 621613 - DNA, 25 bp, Homo sapien
tggaggtaaggatcccatgggaaac

SEQ ID NO: 621614 - DNA, 25 bp, Homo sapien
tatggcagggtaaccgggaaaatgc

SEQ ID NO: 621615 - DNA, 25 bp, Homo sapien
tcaggccagaaccagcttaaggtct

SEQ ID NO: 621616 - DNA, 25 bp, Homo sapien
aacaaatgggatcgctatggcaggg

SEQ ID NO: 621617 - DNA, 25 bp, Homo sapien
ctttatcgaagcatcagcagaccca

SEQ ID NO: 621618 - DNA, 25 bp, Homo sapien
tactataggtagctacacggcatgg

SEQ ID NO: 621619 - DNA, 25 bp, Homo sapien
tgcatactgaactgcggtgtcatcg

SEQ ID NO: 621620 - DNA, 25 bp, Homo sapien
catagcatgtttcgtactcagaagc

SEQ ID NO: 621621 - DNA, 25 bp, Homo sapien
tgttgtgcggtctcattcatcatga

SEQ ID NO: 621622 - DNA, 25 bp, Homo sapien
taaagagttcgaatcactgggtggt

SEQ ID NO: 621623 - DNA, 25 bp, Homo sapien
gagtataatcccttgaaccagaagc

SEQ ID NO: 621624 - DNA, 25 bp, Homo sapien
aaggcacgtgacttcatccacatgg

SEQ ID NO: 621625 - DNA, 25 bp, Homo sapien
tgctgagttccgacaagtataaagt

SEQ ID NO: 621626 - DNA, 25 bp, Homo sapien
tcataaaggcgaagagtaggatgct

SEQ ID NO: 621627 - DNA, 25 bp, Homo sapien
taattaacggaacatatagcatcgg

SEQ ID NO: 621628 - DNA, 25 bp, Homo sapien
tggcagaacaaacttcagcaccgtc

SEQ ID NO: 621629 - DNA, 25 bp, Homo sapien
taaaaactgcctaataattgcaccc

SEQ ID NO: 621630 - DNA, 25 bp, Homo sapien
tcagaggtaacagtcaatactttgg

SEQ ID NO: 621631 - DNA, 25 bp, Homo sapien
tattcaagcatatgtagtgcagatc

SEQ ID NO: 621632 - DNA, 25 bp, Homo sapien
tcctagagacagaattactgagaca

SEQ ID NO: 621633 - DNA, 25 bp, Homo sapien
gctctgaagtcatcgctgcacgtca

SEQ ID NO: 621634 - DNA, 25 bp, Homo sapien
aagactgatcgtcctctcgtcgggc

SEQ ID NO: 621635 - DNA, 25 bp, Homo sapien
tcgtcgggcagcaacacatagtcct

SEQ ID NO: 621636 - DNA, 25 bp, Homo sapien
tcagtcagtggtcgatctccggtac

SEQ ID NO: 621637 - DNA, 25 bp, Homo sapien
agagtcctcgagaaagaaccctacg

SEQ ID NO: 621638 - DNA, 25 bp, Homo sapien
gagggtagagtcctcgagaaagaac

SEQ ID NO: 621639 - DNA, 25 bp, Homo sapien
aggagggtagagtcctcgagaaaga

SEQ ID NO: 621640 - DNA, 25 bp, Homo sapien
gtagagtcctcgagaaagaacccta

SEQ ID NO: 621641 - DNA, 25 bp, Homo sapien
caagaagaatgtggacagaggtggc

SEQ ID NO: 621642 - DNA, 25 bp, Homo sapien
cactgtaataatcagtgaatgtaga

SEQ ID NO: 621643 - DNA, 25 bp, Homo sapien
gtggcagcaaaacgtcaaggatggt

SEQ ID NO: 621644 - DNA, 25 bp, Homo sapien
aactgcacagatctgtgtttccaac

SEQ ID NO: 621645 - DNA, 25 bp, Homo sapien
tatcctccttcaatcaagagatcaa

SEQ ID NO: 621646 - DNA, 25 bp, Homo sapien
ttaatgccctatcctccttcaatca

SEQ ID NO: 621647 - DNA, 25 bp, Homo sapien
tcaagagatcaaaagaaacggcaag

SEQ ID NO: 621648 - DNA, 25 bp, Homo sapien
aaagcactttaatgccctatcctcc

SEQ ID NO: 621649 - DNA, 25 bp, Homo sapien
agaataagcaagaaagttgacagaa

SEQ ID NO: 621650 - DNA, 25 bp, Homo sapien
cacagagggttcagcagaataagca

SEQ ID NO: 621651 - DNA, 25 bp, Homo sapien
cagagggttcagcagaataagcaag

SEQ ID NO: 621652 - DNA, 25 bp, Homo sapien
agagggttcagcagaataagcaaga

SEQ ID NO: 621653 - DNA, 25 bp, Homo sapien
ataatggcataaaactcaggagtct

SEQ ID NO: 621654 - DNA, 25 bp, Homo sapien
caggatagaattgagggattcttga

SEQ ID NO: 621655 - DNA, 25 bp, Homo sapien
tttcaggatagaattgagggattct

SEQ ID NO: 621656 - DNA, 25 bp, Homo sapien
cataaaactcaggagtctcagagct

SEQ ID NO: 621657 - DNA, 25 bp, Homo sapien
catgctgacgagaactgaagactta

SEQ ID NO: 621658 - DNA, 25 bp, Homo sapien
cctgagagcaatagcaggctgacct

SEQ ID NO: 621659 - DNA, 25 bp, Homo sapien
tcattcgtgaagacaggcaacacct

SEQ ID NO: 621660 - DNA, 25 bp, Homo sapien
tactatgtgcctccatgatgagaag

SEQ ID NO: 621661 - DNA, 25 bp, Homo sapien
gatccattgctgagactactcgaaa

SEQ ID NO: 621662 - DNA, 25 bp, Homo sapien
ttacgagagtagcacccacagatgg

SEQ ID NO: 621663 - DNA, 25 bp, Homo sapien
tgagctaaaaccctgtgatgtaaca

SEQ ID NO: 621664 - DNA, 25 bp, Homo sapien
taggtgccttttagtcttacgagag

SEQ ID NO: 621665 - DNA, 25 bp, Homo sapien
ggtataagttcgtatcctgaccaga

SEQ ID NO: 621666 - DNA, 25 bp, Homo sapien
taacgagatgcagatactaagtcca

SEQ ID NO: 621667 - DNA, 25 bp, Homo sapien
aatggcagagtgttgtgtggtacaa

SEQ ID NO: 621668 - DNA, 25 bp, Homo sapien
tggcatttacaccaggctcacaaca

SEQ ID NO: 621669 - DNA, 25 bp, Homo sapien
tgtctgtaagtagagactgtcactc

SEQ ID NO: 621670 - DNA, 25 bp, Homo sapien
gagactgtcactcatttgctatgtg

SEQ ID NO: 621671 - DNA, 25 bp, Homo sapien
catttgctatgtgaaaccacaaaag

SEQ ID NO: 621672 - DNA, 25 bp, Homo sapien
tctcaatgcctgacgtctcactttg

SEQ ID NO: 621673 - DNA, 25 bp, Homo sapien
tgggaaacgatcaaaaagactctcc

SEQ ID NO: 621674 - DNA, 25 bp, Homo sapien
caacacatgggaaacgatcaaaaag

SEQ ID NO: 621675 - DNA, 25 bp, Homo sapien
tctcccagcaggcaaactttctgga

SEQ ID NO: 621676 - DNA, 25 bp, Homo sapien
agactctcccagcaggcaaactttc

SEQ ID NO: 621677 - DNA, 25 bp, Homo sapien
ctgagctctgcagctagtatctcca

SEQ ID NO: 621678 - DNA, 25 bp, Homo sapien
ctcagaaactgaattctatggagct

SEQ ID NO: 621679 - DNA, 25 bp, Homo sapien
cagaaactgaattctatggagctat

SEQ ID NO: 621680 - DNA, 25 bp, Homo sapien
actgcatgcttctggctggttctca

SEQ ID NO: 621681 - DNA, 25 bp, Homo sapien
cttgggcgcacagtccatgatgcct

SEQ ID NO: 621682 - DNA, 25 bp, Homo sapien
tgggcgcacagtccatgatgcctgt

SEQ ID NO: 621683 - DNA, 25 bp, Homo sapien
ggcgcacagtccatgatgcctgttc

SEQ ID NO: 621684 - DNA, 25 bp, Homo sapien
cagtccatgatgcctgttcccttca

SEQ ID NO: 621685 - DNA, 25 bp, Homo sapien
tgctggacgcaaaatgatggacggc

SEQ ID NO: 621686 - DNA, 25 bp, Homo sapien
gaaagtcacaactaaagctggtcaa

SEQ ID NO: 621687 - DNA, 25 bp, Homo sapien
gatggacggcgctgtcaaccaagta

SEQ ID NO: 621688 - DNA, 25 bp, Homo sapien
gcagactcgcatcttgcttcaggag

SEQ ID NO: 621689 - DNA, 25 bp, Homo sapien
gaattcctaaaaccatgtgtaaata

SEQ ID NO: 621690 - DNA, 25 bp, Homo sapien
gagttagaggtttgggattagataa

SEQ ID NO: 621691 - DNA, 25 bp, Homo sapien
cttctgggtaggaaacaggggtctg

SEQ ID NO: 621692 - DNA, 25 bp, Homo sapien
taaaaagagcaagatgagcataggt

SEQ ID NO: 621693 - DNA, 25 bp, Homo sapien
ggtggtataagagacatccgcaggc

SEQ ID NO: 621694 - DNA, 25 bp, Homo sapien
catccatggtggtataagagacatc

SEQ ID NO: 621695 - DNA, 25 bp, Homo sapien
tttcatcatccatggtggtataaga

SEQ ID NO: 621696 - DNA, 25 bp, Homo sapien
catggtggtataagagacatccgca

SEQ ID NO: 621697 - DNA, 25 bp, Homo sapien
gatgagcgctcctatttctgtctgg

SEQ ID NO: 621698 - DNA, 25 bp, Homo sapien
gaagatttctgtgacgcccctgccc

SEQ ID NO: 621699 - DNA, 25 bp, Homo sapien
tgcccacacttttggatgaccttcg

SEQ ID NO: 621700 - DNA, 25 bp, Homo sapien
gaccttcggtaagaatgaccaccag

SEQ ID NO: 621701 - DNA, 25 bp, Homo sapien
ctccagaatggtcaggatgtcccct

SEQ ID NO: 621702 - DNA, 25 bp, Homo sapien
tctggcacgtgttgctccagaatgg

SEQ ID NO: 621703 - DNA, 25 bp, Homo sapien
cgtgttgctccagaatggtcaggat

SEQ ID NO: 621704 - DNA, 25 bp, Homo sapien
ggcagttgtcataaagtgccctggc

SEQ ID NO: 621705 - DNA, 25 bp, Homo sapien
cctgtctgcagcgacctccgtgagg

SEQ ID NO: 621706 - DNA, 25 bp, Homo sapien
ctgcagcgacctccgtgaggatttg

SEQ ID NO: 621707 - DNA, 25 bp, Homo sapien
cagcgacctccgtgaggatttggag

SEQ ID NO: 621708 - DNA, 25 bp, Homo sapien
gaatggggggcacggcctgtctgca

SEQ ID NO: 621709 - DNA, 25 bp, Homo sapien
gtgggagggcggggtagagtgggca

SEQ ID NO: 621710 - DNA, 25 bp, Homo sapien
tgggagggcggggtagagtgggcac

SEQ ID NO: 621711 - DNA, 25 bp, Homo sapien
ctggagtgggagggcggggtagagt

SEQ ID NO: 621712 - DNA, 25 bp, Homo sapien
tggagtgggagggcggggtagagtg

SEQ ID NO: 621713 - DNA, 25 bp, Homo sapien
gtgggagggtcggggaattcataga

SEQ ID NO: 621714 - DNA, 25 bp, Homo sapien
gagggtcggggaattcatagacttg

SEQ ID NO: 621715 - DNA, 25 bp, Homo sapien
agctgagagtcttttcacagatgat

SEQ ID NO: 621716 - DNA, 25 bp, Homo sapien
gctgagagtcttttcacagatgatt

SEQ ID NO: 621717 - DNA, 25 bp, Homo sapien
ggacacccatgcctcaagaggtagt

SEQ ID NO: 621718 - DNA, 25 bp, Homo sapien
ccatgcctcaagaggtagttaggcc

SEQ ID NO: 621719 - DNA, 25 bp, Homo sapien
gtttccatacccctcaacccatgtc

SEQ ID NO: 621720 - DNA, 25 bp, Homo sapien
tcaagaggtagttaggcctctgggt

SEQ ID NO: 621721 - DNA, 25 bp, Homo sapien
tgggctcccgttttgcgtgtttgat

SEQ ID NO: 621722 - DNA, 25 bp, Homo sapien
acaagctccccgagcgtgattgcca

SEQ ID NO: 621723 - DNA, 25 bp, Homo sapien
gcaatctgggctcccgttttgcgtg

SEQ ID NO: 621724 - DNA, 25 bp, Homo sapien
ccgagcgtgattgccagcaatctgg

SEQ ID NO: 621725 - DNA, 25 bp, Homo sapien
gggaatcacagtggcgccaagggtg

SEQ ID NO: 621726 - DNA, 25 bp, Homo sapien
tcacagtggcgccaagggtgtcaac

SEQ ID NO: 621727 - DNA, 25 bp, Homo sapien
tggcgccaagggtgtcaacgacaag

SEQ ID NO: 621728 - DNA, 25 bp, Homo sapien
acagtggcgccaagggtgtcaacga

SEQ ID NO: 621729 - DNA, 25 bp, Homo sapien
catttcccacagagtgtgcccagcc

SEQ ID NO: 621730 - DNA, 25 bp, Homo sapien
tgaaaagggtgccacgaacatcctc

SEQ ID NO: 621731 - DNA, 25 bp, Homo sapien
ggtgccacgaacatcctcagtgcct

SEQ ID NO: 621732 - DNA, 25 bp, Homo sapien
aagggtgccacgaacatcctcagtg

SEQ ID NO: 621733 - DNA, 25 bp, Homo sapien
cagagtactgggaatatagataggt

SEQ ID NO: 621734 - DNA, 25 bp, Homo sapien
cacatgtgtgctactatgctggcta

SEQ ID NO: 621735 - DNA, 25 bp, Homo sapien
actgggaatatagataggtgtaagc

SEQ ID NO: 621736 - DNA, 25 bp, Homo sapien
aatgcgatgtgtaacttcttgcctc

SEQ ID NO: 621737 - DNA, 25 bp, Homo sapien
tgttgtggtgatatgccaagatatg

SEQ ID NO: 621738 - DNA, 25 bp, Homo sapien
caagatatgtataaccaatccactg

SEQ ID NO: 621739 - DNA, 25 bp, Homo sapien
tctatgccataatggctacagcctc

SEQ ID NO: 621740 - DNA, 25 bp, Homo sapien
ccagacatatatttgcctgcttgta

SEQ ID NO: 621741 - DNA, 25 bp, Homo sapien
tcagaaagaatagcgtcagccacag

SEQ ID NO: 621742 - DNA, 25 bp, Homo sapien
gacgcctctcttaggacaacttgag

SEQ ID NO: 621743 - DNA, 25 bp, Homo sapien
gcagagatcgcacccagctatagag

SEQ ID NO: 621744 - DNA, 25 bp, Homo sapien
tttgatggctgactgtgggatcccc

SEQ ID NO: 621745 - DNA, 25 bp, Homo sapien
tggctgtaccgccagtggtacctcc

SEQ ID NO: 621746 - DNA, 25 bp, Homo sapien
cggaccactggctgtaccgccagtg

SEQ ID NO: 621747 - DNA, 25 bp, Homo sapien
tgagtgagtgtcccggaccactggc

SEQ ID NO: 621748 - DNA, 25 bp, Homo sapien
ggtctgacaagctatgcacccgcca

SEQ ID NO: 621749 - DNA, 25 bp, Homo sapien
aatgaggtctgaatataggctgggc

SEQ ID NO: 621750 - DNA, 25 bp, Homo sapien
tgggcacaggctggtaagcaagaca

SEQ ID NO: 621751 - DNA, 25 bp, Homo sapien
gatgctgtctaccacgggcttaaag

SEQ ID NO: 621752 - DNA, 25 bp, Homo sapien
actggcgtcccaaggagctgttgct

SEQ ID NO: 621753 - DNA, 25 bp, Homo sapien
cgcctggccccgatttatattttat

SEQ ID NO: 621754 - DNA, 25 bp, Homo sapien
tatattttattgagagcacctggcc

SEQ ID NO: 621755 - DNA, 25 bp, Homo sapien
agtcggcagtgaggcccggacaggt

SEQ ID NO: 621756 - DNA, 25 bp, Homo sapien
ggcagagtcggcagtgaggcccgga

SEQ ID NO: 621757 - DNA, 25 bp, Homo sapien
agagtcggcagtgaggcccggacag

SEQ ID NO: 621758 - DNA, 25 bp, Homo sapien
aaggcagagtcggcagtgaggcccg

SEQ ID NO: 621759 - DNA, 25 bp, Homo sapien
tcaggaccacggggccccggtgctg

SEQ ID NO: 621760 - DNA, 25 bp, Homo sapien
caggaccacggggccccggtgctgg

SEQ ID NO: 621761 - DNA, 25 bp, Homo sapien
ctgggggatggagtcctgccttctt

SEQ ID NO: 621762 - DNA, 25 bp, Homo sapien
atggagtcctgccttcttggggctg

SEQ ID NO: 621763 - DNA, 25 bp, Homo sapien
ggtatgtcatataactgctgcttct

SEQ ID NO: 621764 - DNA, 25 bp, Homo sapien
gggctggctggtatgtcatataact

SEQ ID NO: 621765 - DNA, 25 bp, Homo sapien
gatttggtaatgtgctgtaaccgcc

SEQ ID NO: 621766 - DNA, 25 bp, Homo sapien
tgattcttccgcaaagctggtgaga

SEQ ID NO: 621767 - DNA, 25 bp, Homo sapien
cttaaggtagtcactgatatcaggg

SEQ ID NO: 621768 - DNA, 25 bp, Homo sapien
tcttcatccaaaggaaatgtgcctc

SEQ ID NO: 621769 - DNA, 25 bp, Homo sapien
tatggcccgcggaattctctgacac

SEQ ID NO: 621770 - DNA, 25 bp, Homo sapien
ccagaggccaattgcgattatccaa

SEQ ID NO: 621771 - DNA, 25 bp, Homo sapien
gaaacactcgacgttgctttaggga

SEQ ID NO: 621772 - DNA, 25 bp, Homo sapien
gattgcatcaatgttggcctccaga

SEQ ID NO: 621773 - DNA, 25 bp, Homo sapien
tgttcatcttccctttgcttagtgg

SEQ ID NO: 621774 - DNA, 25 bp, Homo sapien
gggtactcttttggtgtgattcagt

SEQ ID NO: 621775 - DNA, 25 bp, Homo sapien
ttggggaggctggatgtatttttca

SEQ ID NO: 621776 - DNA, 25 bp, Homo sapien
tcatcttccctttgcttagtggaag

SEQ ID NO: 621777 - DNA, 25 bp, Homo sapien
ctccaggtaacaattgaagcccctt

SEQ ID NO: 621778 - DNA, 25 bp, Homo sapien
ctactccaggtaacaattgaagccc

SEQ ID NO: 621779 - DNA, 25 bp, Homo sapien
aattgaagcccctttttcgatcact

SEQ ID NO: 621780 - DNA, 25 bp, Homo sapien
caattgaagcccctttttcgatcac

SEQ ID NO: 621781 - DNA, 25 bp, Homo sapien
tttcggaagaaatccaaatcaactg

SEQ ID NO: 621782 - DNA, 25 bp, Homo sapien
tatacactatggaaagagtctcagc

SEQ ID NO: 621783 - DNA, 25 bp, Homo sapien
tctagaaaatggaaccagtgtctcc

SEQ ID NO: 621784 - DNA, 25 bp, Homo sapien
aactgacctatctgcctatgctgac

SEQ ID NO: 621785 - DNA, 25 bp, Homo sapien
tctgttgatggttctgcctactgat

SEQ ID NO: 621786 - DNA, 25 bp, Homo sapien
catctaacctttattccaagatagg

SEQ ID NO: 621787 - DNA, 25 bp, Homo sapien
gaattttgcctatcaacatggcctg

SEQ ID NO: 621788 - DNA, 25 bp, Homo sapien
tacactacagtggaactgtttaagt

SEQ ID NO: 621789 - DNA, 25 bp, Homo sapien
gctatccgtagcatgatgagacgaa

SEQ ID NO: 621790 - DNA, 25 bp, Homo sapien
caaaaacgaactctcgcccatgtgg

SEQ ID NO: 621791 - DNA, 25 bp, Homo sapien
gcaatagagcgtatgaatcagaagc

SEQ ID NO: 621792 - DNA, 25 bp, Homo sapien
tgtcaaagaggaacggagtcagtcc

SEQ ID NO: 621793 - DNA, 25 bp, Homo sapien
ggctgaggtataagagggccaggat

SEQ ID NO: 621794 - DNA, 25 bp, Homo sapien
gctgaggtataagagggccaggatt

SEQ ID NO: 621795 - DNA, 25 bp, Homo sapien
tgactgctgccacggaggatctcgt

SEQ ID NO: 621796 - DNA, 25 bp, Homo sapien
tagagccggcagtgttcagataagc

SEQ ID NO: 621797 - DNA, 25 bp, Homo sapien
tctgagtgatgatctccgcgggctg

SEQ ID NO: 621798 - DNA, 25 bp, Homo sapien
gctacgtccttgagcaggctgcaga

SEQ ID NO: 621799 - DNA, 25 bp, Homo sapien
tcagctcattggtgtatgccccggc

SEQ ID NO: 621800 - DNA, 25 bp, Homo sapien
tagccacttggtactaccagctttg

SEQ ID NO: 621801 - DNA, 25 bp, Homo sapien
gcgaagtcacttcaagctgatactg

SEQ ID NO: 621802 - DNA, 25 bp, Homo sapien
cggctggcttttcccatagggcaga

SEQ ID NO: 621803 - DNA, 25 bp, Homo sapien
cctggcacctgctatactgtgtatg

SEQ ID NO: 621804 - DNA, 25 bp, Homo sapien
gaatttaaaacacgtacatgccagg

SEQ ID NO: 621805 - DNA, 25 bp, Homo sapien
caagctagccctataaggaattgca

SEQ ID NO: 621806 - DNA, 25 bp, Homo sapien
gaaggtcacagtcatgttaccacat

SEQ ID NO: 621807 - DNA, 25 bp, Homo sapien
gacaaaagtaaacatcggaggcttc

SEQ ID NO: 621808 - DNA, 25 bp, Homo sapien
aagctgtcacttccgggatttccgg

SEQ ID NO: 621809 - DNA, 25 bp, Homo sapien
tgtcacttccgggatttccggcgaa

SEQ ID NO: 621810 - DNA, 25 bp, Homo sapien
cgcaggacgggagtcagagccagca

SEQ ID NO: 621811 - DNA, 25 bp, Homo sapien
ccccaaagctgtcacttccgggatt

SEQ ID NO: 621812 - DNA, 25 bp, Homo sapien
caaccttcttcggccccttcaccag

SEQ ID NO: 621813 - DNA, 25 bp, Homo sapien
ttctcaaccttcttcggccccttca

SEQ ID NO: 621814 - DNA, 25 bp, Homo sapien
ccttcaccagttcatgcctcttggg

SEQ ID NO: 621815 - DNA, 25 bp, Homo sapien
tcttggggattgttcccccgtcgca

SEQ ID NO: 621816 - DNA, 25 bp, Homo sapien
tctggggtcgtcaaattcccaccac

SEQ ID NO: 621817 - DNA, 25 bp, Homo sapien
ttcctctcgttttctggggtcgtca

SEQ ID NO: 621818 - DNA, 25 bp, Homo sapien
ctctcgttttctggggtcgtcaaat

SEQ ID NO: 621819 - DNA, 25 bp, Homo sapien
ttctggggtcgtcaaattcccacca

SEQ ID NO: 621820 - DNA, 25 bp, Homo sapien
ccccatccaggagcccaccaataat

SEQ ID NO: 621821 - DNA, 25 bp, Homo sapien
tggtgaccaggccccatccaggagc

SEQ ID NO: 621822 - DNA, 25 bp, Homo sapien
catccaggagcccaccaataattgc

SEQ ID NO: 621823 - DNA, 25 bp, Homo sapien
ctggtgaccaggccccatccaggag

SEQ ID NO: 621824 - DNA, 25 bp, Homo sapien
gattattaactccatgtccaattcc

SEQ ID NO: 621825 - DNA, 25 bp, Homo sapien
taactccatgtccaattcctcttct

SEQ ID NO: 621826 - DNA, 25 bp, Homo sapien
tgatggattattaactccatgtcca

SEQ ID NO: 621827 - DNA, 25 bp, Homo sapien
cacgtaggcatgatggattattaac

SEQ ID NO: 621828 - DNA, 25 bp, Homo sapien
tgttgtcggcaacccagaaaatctc

SEQ ID NO: 621829 - DNA, 25 bp, Homo sapien
cttcagggatctttatggagacccc

SEQ ID NO: 621830 - DNA, 25 bp, Homo sapien
aaaatctccaaaccctcaacttcag

SEQ ID NO: 621831 - DNA, 25 bp, Homo sapien
tagttaccattgctgatttattaca

SEQ ID NO: 621832 - DNA, 25 bp, Homo sapien
tgccaatcacaagttcaagttgtca

SEQ ID NO: 621833 - DNA, 25 bp, Homo sapien
gatgatttgctagtgtctcacagat

SEQ ID NO: 621834 - DNA, 25 bp, Homo sapien
tctgactgtctataaatcaaaggct

SEQ ID NO: 621835 - DNA, 25 bp, Homo sapien
ctaccccgactttagatgccaatca

SEQ ID NO: 621836 - DNA, 25 bp, Homo sapien
tcttttaagtttttacatatctgta

SEQ ID NO: 621837 - DNA, 25 bp, Homo sapien
ctctcttctttcctagggtctttct

SEQ ID NO: 621838 - DNA, 25 bp, Homo sapien
cagggtctctcttctttcctagggt

SEQ ID NO: 621839 - DNA, 25 bp, Homo sapien
tctctcttctttcctagggtctttc

SEQ ID NO: 621840 - DNA, 25 bp, Homo sapien
caccaagagattaggttatattcaa

SEQ ID NO: 621841 - DNA, 25 bp, Homo sapien
aactctatgagttagtatttttact

SEQ ID NO: 621842 - DNA, 25 bp, Homo sapien
agtgacaaatcactccttatccagg

SEQ ID NO: 621843 - DNA, 25 bp, Homo sapien
ggttatattcaaaaagcacctcaga

SEQ ID NO: 621844 - DNA, 25 bp, Homo sapien
ttcactgtgtagactgcaccactct

SEQ ID NO: 621845 - DNA, 25 bp, Homo sapien
tccttcactgtgtagactgcaccac

SEQ ID NO: 621846 - DNA, 25 bp, Homo sapien
actgtgtagactgcaccactctttc

SEQ ID NO: 621847 - DNA, 25 bp, Homo sapien
tttccttcactgtgtagactgcacc

SEQ ID NO: 621848 - DNA, 25 bp, Homo sapien
cacaggcaactattggtcgtcttaa

SEQ ID NO: 621849 - DNA, 25 bp, Homo sapien
gagtacaatagttccattgggccac

SEQ ID NO: 621850 - DNA, 25 bp, Homo sapien
taatatttcctgacttagagtacaa

SEQ ID NO: 621851 - DNA, 25 bp, Homo sapien
cattgggccactaattcagcatctt

SEQ ID NO: 621852 - DNA, 25 bp, Homo sapien
ccaagagaaattcaatgacggcatc

SEQ ID NO: 621853 - DNA, 25 bp, Homo sapien
ttcaatgacggcatctttgttataa

SEQ ID NO: 621854 - DNA, 25 bp, Homo sapien
gcttttaatgtgagatgctgccttc

SEQ ID NO: 621855 - DNA, 25 bp, Homo sapien
cttttctgcagatttgtccaagaga

SEQ ID NO: 621856 - DNA, 25 bp, Homo sapien
acccaatcatagcattatgaactac

SEQ ID NO: 621857 - DNA, 25 bp, Homo sapien
ggaaacccaatcatagcattatgaa

SEQ ID NO: 621858 - DNA, 25 bp, Homo sapien
tggaaacccaatcatagcattatga

SEQ ID NO: 621859 - DNA, 25 bp, Homo sapien
aatcatagcattatgaactactaaa

SEQ ID NO: 621860 - DNA, 25 bp, Homo sapien
cacaacggggcagatgaaacgcgcc

SEQ ID NO: 621861 - DNA, 25 bp, Homo sapien
cgcccgctggaggtcatcgtgcttg

SEQ ID NO: 621862 - DNA, 25 bp, Homo sapien
tcccaggcaggattatcagaaagct

SEQ ID NO: 621863 - DNA, 25 bp, Homo sapien
ctgtgtcggccgttcatctccaggc

SEQ ID NO: 621864 - DNA, 25 bp, Homo sapien
tggaagtcccgtagcaatggctgac

SEQ ID NO: 621865 - DNA, 25 bp, Homo sapien
gacggaaatgaacgtgctcatgacc

SEQ ID NO: 621866 - DNA, 25 bp, Homo sapien
gccacatgactgctaagctccggca

SEQ ID NO: 621867 - DNA, 25 bp, Homo sapien
caggctggatctcgctggaagtccc

SEQ ID NO: 621868 - DNA, 25 bp, Homo sapien
gaagcccctcgttgttccatttcag

SEQ ID NO: 621869 - DNA, 25 bp, Homo sapien
catgaagcccctcgttgttccattt

SEQ ID NO: 621870 - DNA, 25 bp, Homo sapien
ttcccctcgcacagtctgccacacg

SEQ ID NO: 621871 - DNA, 25 bp, Homo sapien
gtctgccacacgcaacacggcctgg

SEQ ID NO: 621872 - DNA, 25 bp, Homo sapien
tttatctctttcaaggctcgctcag

SEQ ID NO: 621873 - DNA, 25 bp, Homo sapien
agaaaacacacagccgcagcaccga

SEQ ID NO: 621874 - DNA, 25 bp, Homo sapien
gccgcagcaccgaaggaagcagaac

SEQ ID NO: 621875 - DNA, 25 bp, Homo sapien
cgtgtggcaaacttccgcttttatc

SEQ ID NO: 621876 - DNA, 25 bp, Homo sapien
gactttactattgattacaggccac

SEQ ID NO: 621877 - DNA, 25 bp, Homo sapien
tagcaatgcacttagaaggccaaat

SEQ ID NO: 621878 - DNA, 25 bp, Homo sapien
ccgctagggagtgtttgctttctta

SEQ ID NO: 621879 - DNA, 25 bp, Homo sapien
caatatgagactgaaccgctaggga

SEQ ID NO: 621880 - DNA, 25 bp, Homo sapien
gttaaatcatggtaacagctgccac

SEQ ID NO: 621881 - DNA, 25 bp, Homo sapien
catagtcttagaaacaacactggac

SEQ ID NO: 621882 - DNA, 25 bp, Homo sapien
tcacacatacgctgaggcctcactt

SEQ ID NO: 621883 - DNA, 25 bp, Homo sapien
actgagattctagcacattgtagca

SEQ ID NO: 621884 - DNA, 25 bp, Homo sapien
caaggaagtttgtagagttcatact

SEQ ID NO: 621885 - DNA, 25 bp, Homo sapien
gttcatactgactgacatccatgca

SEQ ID NO: 621886 - DNA, 25 bp, Homo sapien
tcagtggtccaaagacatccgcagc

SEQ ID NO: 621887 - DNA, 25 bp, Homo sapien
gagcaacactactgggtgaccctga

SEQ ID NO: 621888 - DNA, 25 bp, Homo sapien
aaaataatttcaagacgctgaccca

SEQ ID NO: 621889 - DNA, 25 bp, Homo sapien
cttcatctgggtcaggcgtcttctg

SEQ ID NO: 621890 - DNA, 25 bp, Homo sapien
caatgtgagtgactgtgcgcccttc

SEQ ID NO: 621891 - DNA, 25 bp, Homo sapien
ctccttaatgagagagggtctgata

SEQ ID NO: 621892 - DNA, 25 bp, Homo sapien
caccacatgctatggcgcagactca

SEQ ID NO: 621893 - DNA, 25 bp, Homo sapien
tccccactggaaggccacatgaatg

SEQ ID NO: 621894 - DNA, 25 bp, Homo sapien
tcagaggcaccccatgagcaggtga

SEQ ID NO: 621895 - DNA, 25 bp, Homo sapien
ccgcttaggcgtcaaggcacataga

SEQ ID NO: 621896 - DNA, 25 bp, Homo sapien
taacgtttaatgtgggcaacactcc

SEQ ID NO: 621897 - DNA, 25 bp, Homo sapien
taccaatagaaatgggtggctcagc

SEQ ID NO: 621898 - DNA, 25 bp, Homo sapien
ggctcagctcgtctagtatgtttgc

SEQ ID NO: 621899 - DNA, 25 bp, Homo sapien
tatgtttgcttcttgtgttggcatt

SEQ ID NO: 621900 - DNA, 25 bp, Homo sapien
aaatgtctgcttaaatccctggtcc

SEQ ID NO: 621901 - DNA, 25 bp, Homo sapien
tcctgcgtttctcctaagtggtttg

SEQ ID NO: 621902 - DNA, 25 bp, Homo sapien
gaccatctgtataccttctctggag

SEQ ID NO: 621903 - DNA, 25 bp, Homo sapien
taagtcatcgcctaacccaagattg

SEQ ID NO: 621904 - DNA, 25 bp, Homo sapien
taatcatgacctggagtcttgtctt

SEQ ID NO: 621905 - DNA, 25 bp, Homo sapien
ggcactaatcatgacctggagtctt

SEQ ID NO: 621906 - DNA, 25 bp, Homo sapien
gcactaatcatgacctggagtcttg

SEQ ID NO: 621907 - DNA, 25 bp, Homo sapien
actaatcatgacctggagtcttgtc

SEQ ID NO: 621908 - DNA, 25 bp, Homo sapien
cactggtgggatcccagcactcttt

SEQ ID NO: 621909 - DNA, 25 bp, Homo sapien
gctgtcactggtgggatcccagcac

SEQ ID NO: 621910 - DNA, 25 bp, Homo sapien
ggatcccagcactctttctgtgttg

SEQ ID NO: 621911 - DNA, 25 bp, Homo sapien
ggtgggatcccagcactctttctgt

SEQ ID NO: 621912 - DNA, 25 bp, Homo sapien
agtgagtgagccacctctgcagagg

SEQ ID NO: 621913 - DNA, 25 bp, Homo sapien
tgtcagtgagtgagccacctctgca

SEQ ID NO: 621914 - DNA, 25 bp, Homo sapien
tgagtgagccacctctgcagaggct

SEQ ID NO: 621915 - DNA, 25 bp, Homo sapien
agagctgtcagtgagtgagccacct

SEQ ID NO: 621916 - DNA, 25 bp, Homo sapien
tccttgtcttcagcacgtccacatc

SEQ ID NO: 621917 - DNA, 25 bp, Homo sapien
cagcacgtccacatcctccttggtg

SEQ ID NO: 621918 - DNA, 25 bp, Homo sapien
gccattgagcatgatgacatcatcc

SEQ ID NO: 621919 - DNA, 25 bp, Homo sapien
cttttccagcttcgctctcagcctt

SEQ ID NO: 621920 - DNA, 25 bp, Homo sapien
cagtgtcagtgctttatggccatgg

SEQ ID NO: 621921 - DNA, 25 bp, Homo sapien
tctgaacgatgaagcatgaagcacc

SEQ ID NO: 621922 - DNA, 25 bp, Homo sapien
caccagcgcatggaagaactcttgg

SEQ ID NO: 621923 - DNA, 25 bp, Homo sapien
gatgcgttgtctggagcctgctcac

SEQ ID NO: 621924 - DNA, 25 bp, Homo sapien
aacacagcatttcaatggccaagcg

SEQ ID NO: 621925 - DNA, 25 bp, Homo sapien
ctctcttacaataatgaaatcatag

SEQ ID NO: 621926 - DNA, 25 bp, Homo sapien
catttcaatggccaagcggcttttt

SEQ ID NO: 621927 - DNA, 25 bp, Homo sapien
taagaacagggagatggcttttggc

SEQ ID NO: 621928 - DNA, 25 bp, Homo sapien
gaggagcatgttagtcccactgggc

SEQ ID NO: 621929 - DNA, 25 bp, Homo sapien
ttgaattaacttggcaggaaacctg

SEQ ID NO: 621930 - DNA, 25 bp, Homo sapien
tttcctaagcatccaaaaggtggca

SEQ ID NO: 621931 - DNA, 25 bp, Homo sapien
tctacggtcacacagctgcgttgga

SEQ ID NO: 621932 - DNA, 25 bp, Homo sapien
agactctgctgccttgggtttcttt

SEQ ID NO: 621933 - DNA, 25 bp, Homo sapien
cttcactgacatctggttttgaaac

SEQ ID NO: 621934 - DNA, 25 bp, Homo sapien
tggttttgaaacagactctgctgcc

SEQ ID NO: 621935 - DNA, 25 bp, Homo sapien
tttgaaacagactctgctgccttgg

SEQ ID NO: 621936 - DNA, 25 bp, Homo sapien
tgctaaaataaggatctcttgaagg

SEQ ID NO: 621937 - DNA, 25 bp, Homo sapien
atgaacatattagcagactgcccta

SEQ ID NO: 621938 - DNA, 25 bp, Homo sapien
taaaataaggatctcttgaaggatc

SEQ ID NO: 621939 - DNA, 25 bp, Homo sapien
gccctagagtcgcattttgctaaaa

SEQ ID NO: 621940 - DNA, 25 bp, Homo sapien
tgtgcttttgggagccaagttggtt

SEQ ID NO: 621941 - DNA, 25 bp, Homo sapien
ctgtgcttttgggagccaagttggt

SEQ ID NO: 621942 - DNA, 25 bp, Homo sapien
gcttccctgtcttaacttttgatgg

SEQ ID NO: 621943 - DNA, 25 bp, Homo sapien
tcaggcttccctgtcttaacttttg

SEQ ID NO: 621944 - DNA, 25 bp, Homo sapien
tcactgtcagcgatggacctctttg

SEQ ID NO: 621945 - DNA, 25 bp, Homo sapien
taggcctccgattcttcactgtcag

SEQ ID NO: 621946 - DNA, 25 bp, Homo sapien
tctttgtggctccacacggaggctt

SEQ ID NO: 621947 - DNA, 25 bp, Homo sapien
tgggcagactcctccttggagcgct

SEQ ID NO: 621948 - DNA, 25 bp, Homo sapien
ggggcaggagcggtggcagtgcggg

SEQ ID NO: 621949 - DNA, 25 bp, Homo sapien
ctggggcaggagcggtggcagtgcg

SEQ ID NO: 621950 - DNA, 25 bp, Homo sapien
cttctggggcaggagcggtggcagt

SEQ ID NO: 621951 - DNA, 25 bp, Homo sapien
ggcaggagcggtggcagtgcgggct

SEQ ID NO: 621952 - DNA, 25 bp, Homo sapien
gacacgcctcacatcaagagtggcc

SEQ ID NO: 621953 - DNA, 25 bp, Homo sapien
gaaaggaccaaatgcacctgcaggt

SEQ ID NO: 621954 - DNA, 25 bp, Homo sapien
tggccaggacagctttatgacacag

SEQ ID NO: 621955 - DNA, 25 bp, Homo sapien
gcgacctgcctacgtggaaactaaa

SEQ ID NO: 621956 - DNA, 25 bp, Homo sapien
cccttcgaagcttctagtgggcaca

SEQ ID NO: 621957 - DNA, 25 bp, Homo sapien
gtgggcacagtgtatttgaaatcca

SEQ ID NO: 621958 - DNA, 25 bp, Homo sapien
gggacgaggcccttcgaagcttcta

SEQ ID NO: 621959 - DNA, 25 bp, Homo sapien
ctgtagcagagggacgaggcccttc

SEQ ID NO: 621960 - DNA, 25 bp, Homo sapien
gactctgctatcttcgaaatgatga

SEQ ID NO: 621961 - DNA, 25 bp, Homo sapien
tgggtgcccaactatgactctgcta

SEQ ID NO: 621962 - DNA, 25 bp, Homo sapien
gggcacactcccctaacagtattta

SEQ ID NO: 621963 - DNA, 25 bp, Homo sapien
ccagctttatttttgaacccaatca

SEQ ID NO: 621964 - DNA, 25 bp, Homo sapien
tcttacccaagcatgagcagaaggt

SEQ ID NO: 621965 - DNA, 25 bp, Homo sapien
tatctcagtcataccaccgtgtgca

SEQ ID NO: 621966 - DNA, 25 bp, Homo sapien
ctgtaatcaccaatgcaacggctgc

SEQ ID NO: 621967 - DNA, 25 bp, Homo sapien
caacggctgcaatgttcttacccaa

SEQ ID NO: 621968 - DNA, 25 bp, Homo sapien
cactctccaatagagcaggaccagt

SEQ ID NO: 621969 - DNA, 25 bp, Homo sapien
gcagaccagatctttgagccaaact

SEQ ID NO: 621970 - DNA, 25 bp, Homo sapien
gccacatgtgattttgttatttgga

SEQ ID NO: 621971 - DNA, 25 bp, Homo sapien
caggaccagtgggtaagcagaccag

SEQ ID NO: 621972 - DNA, 25 bp, Homo sapien
tctgcaagactactctagaaaaccg

SEQ ID NO: 621973 - DNA, 25 bp, Homo sapien
caggttgaccagaagacgggcactt

SEQ ID NO: 621974 - DNA, 25 bp, Homo sapien
gaattacacccactgtagaggcagc

SEQ ID NO: 621975 - DNA, 25 bp, Homo sapien
ggagagatgcaaatctccaggttga

SEQ ID NO: 621976 - DNA, 25 bp, Homo sapien
ctttgctgggagaggccatcatgtt

SEQ ID NO: 621977 - DNA, 25 bp, Homo sapien
tgcccgggaggaggactcaaaggga

SEQ ID NO: 621978 - DNA, 25 bp, Homo sapien
agagagagaggatgggcacgacggg

SEQ ID NO: 621979 - DNA, 25 bp, Homo sapien
gacggggtgccaattccctgccagg

SEQ ID NO: 621980 - DNA, 25 bp, Homo sapien
tgcttgccctcgcaactgggagact

SEQ ID NO: 621981 - DNA, 25 bp, Homo sapien
cttgccctcgcaactgggagactgg

SEQ ID NO: 621982 - DNA, 25 bp, Homo sapien
tttgcttgccctcgcaactgggaga

SEQ ID NO: 621983 - DNA, 25 bp, Homo sapien
ggtttgcttgccctcgcaactggga

SEQ ID NO: 621984 - DNA, 25 bp, Homo sapien
gcaggaccagggacgatttcagcgt

SEQ ID NO: 621985 - DNA, 25 bp, Homo sapien
gaccagggacgatttcagcgtccac

SEQ ID NO: 621986 - DNA, 25 bp, Homo sapien
aaaggcatagctgcaggtgaggcac

SEQ ID NO: 621987 - DNA, 25 bp, Homo sapien
ccagggacgatttcagcgtccacat

SEQ ID NO: 621988 - DNA, 25 bp, Homo sapien
ctgccgaatccgaaagtgctctccg

SEQ ID NO: 621989 - DNA, 25 bp, Homo sapien
tgcagtatcacaaacggcacaacaa

SEQ ID NO: 621990 - DNA, 25 bp, Homo sapien
cttgggtgtgctctggtagattctg

SEQ ID NO: 621991 - DNA, 25 bp, Homo sapien
cgaaagtgctctccgtattgcacct

SEQ ID NO: 621992 - DNA, 25 bp, Homo sapien
tctgtgagccagtaagcagaggtca

SEQ ID NO: 621993 - DNA, 25 bp, Homo sapien
gaccatactgcccacaaagctgaag

SEQ ID NO: 621994 - DNA, 25 bp, Homo sapien
gttcattatacccaacggtgccgtc

SEQ ID NO: 621995 - DNA, 25 bp, Homo sapien
gacacagttcgtgttacaacagcag

SEQ ID NO: 621996 - DNA, 25 bp, Homo sapien
tattgaatgcacagtctttgttggg

SEQ ID NO: 621997 - DNA, 25 bp, Homo sapien
ggcacgtttaagattccgcactttg

SEQ ID NO: 621998 - DNA, 25 bp, Homo sapien
cgagttccattaaggtattgaatgc

SEQ ID NO: 621999 - DNA, 25 bp, Homo sapien
acaaatttcataagctccacctcga

SEQ ID NO: 622000 - DNA, 25 bp, Homo sapien
tgacatggtatggatctgcaggcat

SEQ ID NO: 622001 - DNA, 25 bp, Homo sapien
gacatggtatggatctgcaggcatc

SEQ ID NO: 622002 - DNA, 25 bp, Homo sapien
gtgacatggtatggatctgcaggca

SEQ ID NO: 622003 - DNA, 25 bp, Homo sapien
ttgcatacagtttgtcaacactcaa

SEQ ID NO: 622004 - DNA, 25 bp, Homo sapien
tcaacactcaacttttttctctcct

SEQ ID NO: 622005 - DNA, 25 bp, Homo sapien
tgtcaacactcaacttttttctctc

SEQ ID NO: 622006 - DNA, 25 bp, Homo sapien
tacagtttgtcaacactcaactttt

SEQ ID NO: 622007 - DNA, 25 bp, Homo sapien
catgtcaattaatctgggagcccct

SEQ ID NO: 622008 - DNA, 25 bp, Homo sapien
ggcaagcacctaagtatgtacagag

SEQ ID NO: 622009 - DNA, 25 bp, Homo sapien
aatatacacggaacctttgacaggg

SEQ ID NO: 622010 - DNA, 25 bp, Homo sapien
ggagcccctggttagcacacttgta

SEQ ID NO: 622011 - DNA, 25 bp, Homo sapien
caagtgagaatcattttgcccagcc

SEQ ID NO: 622012 - DNA, 25 bp, Homo sapien
cccaggctgtagcactacggtgcaa

SEQ ID NO: 622013 - DNA, 25 bp, Homo sapien
gctgtagcactacggtgcaatcatg

SEQ ID NO: 622014 - DNA, 25 bp, Homo sapien
gattacaagtgagaatcattttgcc

SEQ ID NO: 622015 - DNA, 25 bp, Homo sapien
ggtttgcttgccctcgcaactggaa

SEQ ID NO: 622016 - DNA, 25 bp, Homo sapien
gcaggaccagggacgatttcagcgt

SEQ ID NO: 622017 - DNA, 25 bp, Homo sapien
gaccagggacgatttcagcgtccac

SEQ ID NO: 622018 - DNA, 25 bp, Homo sapien
caggaccagggacgatttcagcgtc

SEQ ID NO: 622019 - DNA, 25 bp, Homo sapien
ccagggacgatttcagcgtccacat

SEQ ID NO: 622020 - DNA, 25 bp, Homo sapien
tgcagtatcacaaacggcacaacag

SEQ ID NO: 622021 - DNA, 25 bp, Homo sapien
ctgccgaatccgaaagtgctctcca

SEQ ID NO: 622022 - DNA, 25 bp, Homo sapien
cagtatcacaaacggcacaacagca

SEQ ID NO: 622023 - DNA, 25 bp, Homo sapien
agtgctctccacacggcaccttccc

SEQ ID NO: 622024 - DNA, 25 bp, Homo sapien
gactcctgagattgaatcaatatgg

SEQ ID NO: 622025 - DNA, 25 bp, Homo sapien
cctgagactcctgagattgaatcaa

SEQ ID NO: 622026 - DNA, 25 bp, Homo sapien
cctgagattgaatcaatatggtgta

SEQ ID NO: 622027 - DNA, 25 bp, Homo sapien
gagattgaatcaatatggtgtaaaa

SEQ ID NO: 622028 - DNA, 25 bp, Homo sapien
gttcattatacccaacggtgccgcc

SEQ ID NO: 622029 - DNA, 25 bp, Homo sapien
gtttgtcccaatatctgtggatgtg

SEQ ID NO: 622030 - DNA, 25 bp, Homo sapien
gaaactagaggtcatcttccactgt

SEQ ID NO: 622031 - DNA, 25 bp, Homo sapien
caggaattttcagtaagtcaagcac

SEQ ID NO: 622032 - DNA, 25 bp, Homo sapien
ttgaatacacagtctttgtaaagag

SEQ ID NO: 622033 - DNA, 25 bp, Homo sapien
aagctccacttcaagttcgtttaag

SEQ ID NO: 622034 - DNA, 25 bp, Homo sapien
ctttaagattctgcacttcggacac

SEQ ID NO: 622035 - DNA, 25 bp, Homo sapien
tctttagtggagtgcgaaatgggaa

SEQ ID NO: 622036 - DNA, 25 bp, Homo sapien
tgacatggtatggatctgcaggcat

SEQ ID NO: 622037 - DNA, 25 bp, Homo sapien
gtgacatggtatggatctgcaggca

SEQ ID NO: 622038 - DNA, 25 bp, Homo sapien
gacatggtatggatctgcaggcatc

SEQ ID NO: 622039 - DNA, 25 bp, Homo sapien
tcaacactcaacttttttctctcct

SEQ ID NO: 622040 - DNA, 25 bp, Homo sapien
tacagtttgtcaacactcaactttt

SEQ ID NO: 622041 - DNA, 25 bp, Homo sapien
tgtcaacactcaacttttttctctc

SEQ ID NO: 622042 - DNA, 25 bp, Homo sapien
ttgcatacagtttgtcaacactcaa

SEQ ID NO: 622043 - DNA, 25 bp, Homo sapien
ccatcactgctatggctactggtct

SEQ ID NO: 622044 - DNA, 25 bp, Homo sapien
catcactgctatggctactggtctc

SEQ ID NO: 622045 - DNA, 25 bp, Homo sapien
tcactgctatggctactggtctccc

SEQ ID NO: 622046 - DNA, 25 bp, Homo sapien
accatcactgctatggctactggtc

SEQ ID NO: 622047 - DNA, 25 bp, Homo sapien
actattatgtagctttcggtgctct

SEQ ID NO: 622048 - DNA, 25 bp, Homo sapien
agatttccctagctccatcgtccac

SEQ ID NO: 622049 - DNA, 25 bp, Homo sapien
cagatttccctagctccatcgtcca

SEQ ID NO: 622050 - DNA, 25 bp, Homo sapien
ctcatgctggagcagcgtctttgca

SEQ ID NO: 622051 - DNA, 25 bp, Homo sapien
cgtgagtgacctgtttccacccagt

SEQ ID NO: 622052 - DNA, 25 bp, Homo sapien
cccattcctggtattcaaaccgtga

SEQ ID NO: 622053 - DNA, 25 bp, Homo sapien
tccacccagtagagcatggcagagc

SEQ ID NO: 622054 - DNA, 25 bp, Homo sapien
gtcaaagggcaaggtggacgtgtca

SEQ ID NO: 622055 - DNA, 25 bp, Homo sapien
agagacccagtgactaggtcaaagg

SEQ ID NO: 622056 - DNA, 25 bp, Homo sapien
agacccagtgactaggtcaaagggc

SEQ ID NO: 622057 - DNA, 25 bp, Homo sapien
tcaaagggcaaggtggacgtgtcag

SEQ ID NO: 622058 - DNA, 25 bp, Homo sapien
tggctgctgtttctttggtctcatt

SEQ ID NO: 622059 - DNA, 25 bp, Homo sapien
catggctgctgtttctttggtctca

SEQ ID NO: 622060 - DNA, 25 bp, Homo sapien
tccatggctgctgtttctttggtct

SEQ ID NO: 622061 - DNA, 25 bp, Homo sapien
ttcttgatccatggctgctgtttct

SEQ ID NO: 622062 - DNA, 25 bp, Homo sapien
aagagcacacgggacctctcagtgc

SEQ ID NO: 622063 - DNA, 25 bp, Homo sapien
tacctaagacgcaaccacaggagga

SEQ ID NO: 622064 - DNA, 25 bp, Homo sapien
tggtgattaccagaatccatgcggg

SEQ ID NO: 622065 - DNA, 25 bp, Homo sapien
tgcaaacacacgttgctccgcgtca

SEQ ID NO: 622066 - DNA, 25 bp, Homo sapien
ccttgtgcctcagcatcttaagtag

SEQ ID NO: 622067 - DNA, 25 bp, Homo sapien
caatccttgtgcctcagcatcttaa

SEQ ID NO: 622068 - DNA, 25 bp, Homo sapien
aatccttgtgcctcagcatcttaag

SEQ ID NO: 622069 - DNA, 25 bp, Homo sapien
agcaatccttgtgcctcagcatctt

SEQ ID NO: 622070 - DNA, 25 bp, Homo sapien
ccctgcccgatctagaaaaacgtgt

SEQ ID NO: 622071 - DNA, 25 bp, Homo sapien
catgcagtgacattcctgtccacgg

SEQ ID NO: 622072 - DNA, 25 bp, Homo sapien
tgctgactgtagagtaaaccccaac

SEQ ID NO: 622073 - DNA, 25 bp, Homo sapien
tgagccagatggcacaacaaacagc

SEQ ID NO: 622074 - DNA, 25 bp, Homo sapien
tgctttttgttgcattgctttggaa

SEQ ID NO: 622075 - DNA, 25 bp, Homo sapien
agactaacacaacctttgttagatg

SEQ ID NO: 622076 - DNA, 25 bp, Homo sapien
acagactaacacaacctttgttaga

SEQ ID NO: 622077 - DNA, 25 bp, Homo sapien
tgtgctttttgttgcattgctttgg

SEQ ID NO: 622078 - DNA, 25 bp, Homo sapien
ttccaccttgtgttccaacacctcc

SEQ ID NO: 622079 - DNA, 25 bp, Homo sapien
ggaattcattcccagaaacagtggc

SEQ ID NO: 622080 - DNA, 25 bp, Homo sapien
aggaattcattcccagaaacagtgg

SEQ ID NO: 622081 - DNA, 25 bp, Homo sapien
aaactgccgcaagatttgcatcttg

SEQ ID NO: 622082 - DNA, 25 bp, Homo sapien
ctgtaaaaactgccgcaagatttgc

SEQ ID NO: 622083 - DNA, 25 bp, Homo sapien
caggagcttcggctgcttgaataaa

SEQ ID NO: 622084 - DNA, 25 bp, Homo sapien
gcaatgcatgagggtcgttggttct

SEQ ID NO: 622085 - DNA, 25 bp, Homo sapien
aatgcatgagggtcgttggttctct

SEQ ID NO: 622086 - DNA, 25 bp, Homo sapien
aagcaggagcttcggctgcttgaat

SEQ ID NO: 622087 - DNA, 25 bp, Homo sapien
atgccccgactcctcttcccacggg

SEQ ID NO: 622088 - DNA, 25 bp, Homo sapien
gtatttccagcaagggatgccccga

SEQ ID NO: 622089 - DNA, 25 bp, Homo sapien
ggtggttttgccagcaaccttcagg

SEQ ID NO: 622090 - DNA, 25 bp, Homo sapien
accttcagggctggggtatttccag

SEQ ID NO: 622091 - DNA, 25 bp, Homo sapien
ctttttgacgctctcaggggctcct

SEQ ID NO: 622092 - DNA, 25 bp, Homo sapien
aggggctcctggagcagactttttg

SEQ ID NO: 622093 - DNA, 25 bp, Homo sapien
cttgttctttttgacgctctcaggg

SEQ ID NO: 622094 - DNA, 25 bp, Homo sapien
ggctcctggagcagactttttgttc

SEQ ID NO: 622095 - DNA, 25 bp, Homo sapien
tctgccggggatccaggcctaggta

SEQ ID NO: 622096 - DNA, 25 bp, Homo sapien
cagtggtcggcgtcgggttgtggac

SEQ ID NO: 622097 - DNA, 25 bp, Homo sapien
gagggccggccagtggtcggcgtcg

SEQ ID NO: 622098 - DNA, 25 bp, Homo sapien
tcgggttgtggacctgcatctgccg

SEQ ID NO: 622099 - DNA, 25 bp, Homo sapien
tctgcattgttctatggattgcata

SEQ ID NO: 622100 - DNA, 25 bp, Homo sapien
tgcattgttctatggattgcataaa

SEQ ID NO: 622101 - DNA, 25 bp, Homo sapien
ttctgcattgttctatggattgcat

SEQ ID NO: 622102 - DNA, 25 bp, Homo sapien
cattgttctatggattgcataaaac

SEQ ID NO: 622103 - DNA, 25 bp, Homo sapien
gctaggtctttgcatgatgtcccat

SEQ ID NO: 622104 - DNA, 25 bp, Homo sapien
cacgtgctaggtctttgcatgatgt

SEQ ID NO: 622105 - DNA, 25 bp, Homo sapien
tgggcatctggaggtaaagtccagt

SEQ ID NO: 622106 - DNA, 25 bp, Homo sapien
aggtctttgcatgatgtcccatgtc

SEQ ID NO: 622107 - DNA, 25 bp, Homo sapien
tccccatgacgcatgtggtaattgg

SEQ ID NO: 622108 - DNA, 25 bp, Homo sapien
agctcttctccccatgacgcatgtg

SEQ ID NO: 622109 - DNA, 25 bp, Homo sapien
ctctgcaggtgagcgattgaaaacg

SEQ ID NO: 622110 - DNA, 25 bp, Homo sapien
gagaatccaccgttgtgtctaaacc

SEQ ID NO: 622111 - DNA, 25 bp, Homo sapien
tggttccaggactctcctcaggcac

SEQ ID NO: 622112 - DNA, 25 bp, Homo sapien
caaaaaagattacagttgtccctca

SEQ ID NO: 622113 - DNA, 25 bp, Homo sapien
attggttccaggactctcctcaggc

SEQ ID NO: 622114 - DNA, 25 bp, Homo sapien
tctcctcaggcaccaaaatccatgg

SEQ ID NO: 622115 - DNA, 25 bp, Homo sapien
cattaggcaaggaaagaggacctct

SEQ ID NO: 622116 - DNA, 25 bp, Homo sapien
ttaggcaaggaaagaggacctctgt

SEQ ID NO: 622117 - DNA, 25 bp, Homo sapien
taggcaaggaaagaggacctctgtc

SEQ ID NO: 622118 - DNA, 25 bp, Homo sapien
tgcattaggcaaggaaagaggacct

SEQ ID NO: 622119 - DNA, 25 bp, Homo sapien
ctttggagctgctacctgcttcaga

SEQ ID NO: 622120 - DNA, 25 bp, Homo sapien
gatgcttcttgggaccacgagccat

SEQ ID NO: 622121 - DNA, 25 bp, Homo sapien
atgctttggagctgctacctgcttc

SEQ ID NO: 622122 - DNA, 25 bp, Homo sapien
ggagctgctacctgcttcagatgct

SEQ ID NO: 622123 - DNA, 25 bp, Homo sapien
gacactctctcaaattgtggggact

SEQ ID NO: 622124 - DNA, 25 bp, Homo sapien
gcaaacacaccagtcaatttattca

SEQ ID NO: 622125 - DNA, 25 bp, Homo sapien
tgaggagcaaacacaccagtcaatt

SEQ ID NO: 622126 - DNA, 25 bp, Homo sapien
tggatgaggagcaaacacaccagtc

SEQ ID NO: 622127 - DNA, 25 bp, Homo sapien
cttctttacttcatttccagtgagg

SEQ ID NO: 622128 - DNA, 25 bp, Homo sapien
cagagtaggttatatcagtacggac

SEQ ID NO: 622129 - DNA, 25 bp, Homo sapien
ttcatttccagtgaggacatactta

SEQ ID NO: 622130 - DNA, 25 bp, Homo sapien
ccagtgaggacatacttaagtctgt

SEQ ID NO: 622131 - DNA, 25 bp, Homo sapien
aaagatttttctcagtttgcacaaa

SEQ ID NO: 622132 - DNA, 25 bp, Homo sapien
aagatttttctcagtttgcacaaac

SEQ ID NO: 622133 - DNA, 25 bp, Homo sapien
agggaacattgtttatggtggctgc

SEQ ID NO: 622134 - DNA, 25 bp, Homo sapien
acaattccacatctaagggaacatt

SEQ ID NO: 622135 - DNA, 25 bp, Homo sapien
ctaagggaacattgtttatggtggc

SEQ ID NO: 622136 - DNA, 25 bp, Homo sapien
cacatctaagggaacattgtttatg

SEQ ID NO: 622137 - DNA, 25 bp, Homo sapien
cttcttccggattcttctgctcagg

SEQ ID NO: 622138 - DNA, 25 bp, Homo sapien
ttcttccggattcttctgctcaggg

SEQ ID NO: 622139 - DNA, 25 bp, Homo sapien
tccggattcttctgctcagggcaag

SEQ ID NO: 622140 - DNA, 25 bp, Homo sapien
taaccaactatagaaattatccctg

SEQ ID NO: 622141 - DNA, 25 bp, Homo sapien
tctctagtaaccaactatagaaatt

SEQ ID NO: 622142 - DNA, 25 bp, Homo sapien
ggtgctctacatatttaaagaaact

SEQ ID NO: 622143 - DNA, 25 bp, Homo sapien
agaaattatccctgaaagtgtagtt

SEQ ID NO: 622144 - DNA, 25 bp, Homo sapien
tacatttaggttctcaaatgctccc

SEQ ID NO: 622145 - DNA, 25 bp, Homo sapien
gtccaagagtttttagctaatgcta

SEQ ID NO: 622146 - DNA, 25 bp, Homo sapien
gctaatgctacatttaggttctcaa

SEQ ID NO: 622147 - DNA, 25 bp, Homo sapien
tccaagagtttttagctaatgctac

SEQ ID NO: 622148 - DNA, 25 bp, Homo sapien
gctacgggtggtctggtccagtcca

SEQ ID NO: 622149 - DNA, 25 bp, Homo sapien
tatgggaggctacgggtggtctggt

SEQ ID NO: 622150 - DNA, 25 bp, Homo sapien
agagcttcgcagcaatcctgagggt

SEQ ID NO: 622151 - DNA, 25 bp, Homo sapien
gggtgagagagcttcgcagcaatcc

SEQ ID NO: 622152 - DNA, 25 bp, Homo sapien
tggacagttccataaccagcccagc

SEQ ID NO: 622153 - DNA, 25 bp, Homo sapien
gtgggagataaaccttcgcacttgg

SEQ ID NO: 622154 - DNA, 25 bp, Homo sapien
taaaccttcgcacttggtggacagt

SEQ ID NO: 622155 - DNA, 25 bp, Homo sapien
tggtggacagttccataaccagccc

SEQ ID NO: 622156 - DNA, 25 bp, Homo sapien
tggcagctacggcctgctctagtgg

SEQ ID NO: 622157 - DNA, 25 bp, Homo sapien
ggcagctacggcctgctctagtggg

SEQ ID NO: 622158 - DNA, 25 bp, Homo sapien
aggcactggcagctacggcctgctc

SEQ ID NO: 622159 - DNA, 25 bp, Homo sapien
cactggcagctacggcctgctctag

SEQ ID NO: 622160 - DNA, 25 bp, Homo sapien
ttttcaaacaggcaaagtgaggcga

SEQ ID NO: 622161 - DNA, 25 bp, Homo sapien
cttggccgtgggatggtagactcct

SEQ ID NO: 622162 - DNA, 25 bp, Homo sapien
caaacgagacttcgtgggcacagtc

SEQ ID NO: 622163 - DNA, 25 bp, Homo sapien
ggagcccgttagagacatgcctgac

SEQ ID NO: 622164 - DNA, 25 bp, Homo sapien
tgcagtagacatgactctcccatcc

SEQ ID NO: 622165 - DNA, 25 bp, Homo sapien
catccacggaatggcggcatccact

SEQ ID NO: 622166 - DNA, 25 bp, Homo sapien
actgcctcgctgttccttctcgggt

SEQ ID NO: 622167 - DNA, 25 bp, Homo sapien
tctcgggttcgtttgaactttagca

SEQ ID NO: 622168 - DNA, 25 bp, Homo sapien
tgctgccgccgcgagtgtcaagacc

SEQ ID NO: 622169 - DNA, 25 bp, Homo sapien
gctctgcgagcgtagatgctgccgc

SEQ ID NO: 622170 - DNA, 25 bp, Homo sapien
cgcgcccgaacagtgtgtcctggcg

SEQ ID NO: 622171 - DNA, 25 bp, Homo sapien
tgctgtccgggtcactggacacgca

SEQ ID NO: 622172 - DNA, 25 bp, Homo sapien
caaaacagtcgccagttaaatccag

SEQ ID NO: 622173 - DNA, 25 bp, Homo sapien
cggcgtcccccaaaacagtcgccag

SEQ ID NO: 622174 - DNA, 25 bp, Homo sapien
tccaaaatcggggtcacggtgacca

SEQ ID NO: 622175 - DNA, 25 bp, Homo sapien
aacagtcgccagttaaatccaggat

SEQ ID NO: 622176 - DNA, 25 bp, Homo sapien
gacattatcggttattttccacaac

SEQ ID NO: 622177 - DNA, 25 bp, Homo sapien
ttcgtacttgacattatcggttatt

SEQ ID NO: 622178 - DNA, 25 bp, Homo sapien
tacttgacattatcggttattttcc

SEQ ID NO: 622179 - DNA, 25 bp, Homo sapien
ttgacattatcggttattttccaca

SEQ ID NO: 622180 - DNA, 25 bp, Homo sapien
ctatgccctcgtccccgacctcggt

SEQ ID NO: 622181 - DNA, 25 bp, Homo sapien
cggtccagtggcccctgcctcccgg

SEQ ID NO: 622182 - DNA, 25 bp, Homo sapien
ccagggctcctatgccctcgtcccc

SEQ ID NO: 622183 - DNA, 25 bp, Homo sapien
gctcctatgccctcgtccccgacct

SEQ ID NO: 622184 - DNA, 25 bp, Homo sapien
cctcgggacaaagacctccgagcgg

SEQ ID NO: 622185 - DNA, 25 bp, Homo sapien
ggcggcgctcggaaagcagggcccg

SEQ ID NO: 622186 - DNA, 25 bp, Homo sapien
aagggcagtgttctcgcacgtcggg

SEQ ID NO: 622187 - DNA, 25 bp, Homo sapien
agtaataagtgggggcgccctgcac

SEQ ID NO: 622188 - DNA, 25 bp, Homo sapien
gcccggtgcagagctatctcgtgga

SEQ ID NO: 622189 - DNA, 25 bp, Homo sapien
gaacgagttctcaaagcccggcggc

SEQ ID NO: 622190 - DNA, 25 bp, Homo sapien
ggcgaaggtctaggcgctgctccca

SEQ ID NO: 622191 - DNA, 25 bp, Homo sapien
cttggaggcgccaagtccgaaccct

SEQ ID NO: 622192 - DNA, 25 bp, Homo sapien
cggtaggcatccctgcgggcgctca

SEQ ID NO: 622193 - DNA, 25 bp, Homo sapien
gatattcggcgactccagtgtggga

SEQ ID NO: 622194 - DNA, 25 bp, Homo sapien
ggacccgcggattcccattgctgct

SEQ ID NO: 622195 - DNA, 25 bp, Homo sapien
tcgtccatctggtgaggcatgtcgt

SEQ ID NO: 622196 - DNA, 25 bp, Homo sapien
gggtgaacaggtccggtcaggagcc

SEQ ID NO: 622197 - DNA, 25 bp, Homo sapien
gccgtagggtgaacaggtccggtca

SEQ ID NO: 622198 - DNA, 25 bp, Homo sapien
aacaggtccggtcaggagccgcagc

SEQ ID NO: 622199 - DNA, 25 bp, Homo sapien
tcgggggagcctagaggagtgcggg

SEQ ID NO: 622200 - DNA, 25 bp, Homo sapien
gcaacaggtgctggtcgtcgacatt

SEQ ID NO: 622201 - DNA, 25 bp, Homo sapien
ctgtctgatcgtgcagcaacaggtg

SEQ ID NO: 622202 - DNA, 25 bp, Homo sapien
cagcaacaggtgctggtcgtcgaca

SEQ ID NO: 622203 - DNA, 25 bp, Homo sapien
gactgtctgatcgtgcagcaacagg

SEQ ID NO: 622204 - DNA, 25 bp, Homo sapien
taggcagtaacaactccggagatga

SEQ ID NO: 622205 - DNA, 25 bp, Homo sapien
cactcaacgaaggtgtgcctgtgac

SEQ ID NO: 622206 - DNA, 25 bp, Homo sapien
tgaagagacagctcctaggaggtcg

SEQ ID NO: 622207 - DNA, 25 bp, Homo sapien
tcagtgttcactcgctctggaagac

SEQ ID NO: 622208 - DNA, 25 bp, Homo sapien
tatttagacgtagagctgaggagcg

SEQ ID NO: 622209 - DNA, 25 bp, Homo sapien
gccactgtcactttgtatttagacg

SEQ ID NO: 622210 - DNA, 25 bp, Homo sapien
gaggagcgacaatcttccagggact

SEQ ID NO: 622211 - DNA, 25 bp, Homo sapien
gggacagtcgcctctgtacttcagc

SEQ ID NO: 622212 - DNA, 25 bp, Homo sapien
aactacccaaccactatgcctagaa

SEQ ID NO: 622213 - DNA, 25 bp, Homo sapien
cccaaccactatgcctagaattgtg

SEQ ID NO: 622214 - DNA, 25 bp, Homo sapien
tatgcctagaattgtgccccaagta

SEQ ID NO: 622215 - DNA, 25 bp, Homo sapien
cactatgcctagaattgtgccccaa

SEQ ID NO: 622216 - DNA, 25 bp, Homo sapien
cccgattagaattcagtgttaggca

SEQ ID NO: 622217 - DNA, 25 bp, Homo sapien
gaaaaattgactctggctactctca

SEQ ID NO: 622218 - DNA, 25 bp, Homo sapien
tgaaaagtgatagcagggtcctctt

SEQ ID NO: 622219 - DNA, 25 bp, Homo sapien
taaactcctaaagtgctgctgtcaa

SEQ ID NO: 622220 - DNA, 25 bp, Homo sapien
caacttctcccgcaaggaccggcct

SEQ ID NO: 622221 - DNA, 25 bp, Homo sapien
ccggccggaagattcaacccaatct

SEQ ID NO: 622222 - DNA, 25 bp, Homo sapien
gagagtcacatgagcggctttccgc

SEQ ID NO: 622223 - DNA, 25 bp, Homo sapien
tactaaggatgtcaggagagtcaca

SEQ ID NO: 622224 - DNA, 25 bp, Homo sapien
gaaattcggcttcacagacataggc

SEQ ID NO: 622225 - DNA, 25 bp, Homo sapien
tccaagatgaggtctggttaaatat

SEQ ID NO: 622226 - DNA, 25 bp, Homo sapien
gttcttcctagctgccatctcattt

SEQ ID NO: 622227 - DNA, 25 bp, Homo sapien
gaggtctggttaaatattctgccac

SEQ ID NO: 622228 - DNA, 25 bp, Homo sapien
gagaagttctgtgaattctttacac

SEQ ID NO: 622229 - DNA, 25 bp, Homo sapien
gaaatgagacaagcagttctgtatg

SEQ ID NO: 622230 - DNA, 25 bp, Homo sapien
gtgtccggtcttggctgagaagttc

SEQ ID NO: 622231 - DNA, 25 bp, Homo sapien
ctgtatgttcgtctccaagactggg

SEQ ID NO: 622232 - DNA, 25 bp, Homo sapien
ccagggttcatgtaggatttgtcta

SEQ ID NO: 622233 - DNA, 25 bp, Homo sapien
ctggctgccaaacccgtgggtaatc

SEQ ID NO: 622234 - DNA, 25 bp, Homo sapien
ctccagggttttgttagaatcagct

SEQ ID NO: 622235 - DNA, 25 bp, Homo sapien
ctttgatgtagttctgcagggcaga

SEQ ID NO: 622236 - DNA, 25 bp, Homo sapien
gatgcagaaccagtgaaggctcttt

SEQ ID NO: 622237 - DNA, 25 bp, Homo sapien
tcagcccaacaggaacgagacaaag

SEQ ID NO: 622238 - DNA, 25 bp, Homo sapien
taaaatctgtacactcaacgcactg

SEQ ID NO: 622239 - DNA, 25 bp, Homo sapien
gaagtgcaccagtatttacagaccc

SEQ ID NO: 622240 - DNA, 25 bp, Homo sapien
tggaaaacgttgagaagccacagta

SEQ ID NO: 622241 - DNA, 25 bp, Homo sapien
ctggaaaacgttgagaagccacagt

SEQ ID NO: 622242 - DNA, 25 bp, Homo sapien
ggaaaacgttgagaagccacagtaa

SEQ ID NO: 622243 - DNA, 25 bp, Homo sapien
gaaaacgttgagaagccacagtaac

SEQ ID NO: 622244 - DNA, 25 bp, Homo sapien
cgtagggagtgtcactcctgaaggc

SEQ ID NO: 622245 - DNA, 25 bp, Homo sapien
cattctcgtagggagtgtcactcct

SEQ ID NO: 622246 - DNA, 25 bp, Homo sapien
cacattctcgtagggagtgtcactc

SEQ ID NO: 622247 - DNA, 25 bp, Homo sapien
cgttcacattctcgtagggagtgtc

SEQ ID NO: 622248 - DNA, 25 bp, Homo sapien
gggattccctccttaagtatctgca

SEQ ID NO: 622249 - DNA, 25 bp, Homo sapien
taagatccagagtctgcgtcctccc

SEQ ID NO: 622250 - DNA, 25 bp, Homo sapien
tccggctttggctcaagtttgtgtg

SEQ ID NO: 622251 - DNA, 25 bp, Homo sapien
gagacctggagatcctaagtttgga

SEQ ID NO: 622252 - DNA, 25 bp, Homo sapien
agggcgccaagggtgatgcagactg

SEQ ID NO: 622253 - DNA, 25 bp, Homo sapien
ctccatcaaccaaggagcaattgtt

SEQ ID NO: 622254 - DNA, 25 bp, Homo sapien
aagggtgatgcagactgtgacccac

SEQ ID NO: 622255 - DNA, 25 bp, Homo sapien
tcaaccaaggagcaattgttatcat

SEQ ID NO: 622256 - DNA, 25 bp, Homo sapien
gaacatactgatctctattgttcca

SEQ ID NO: 622257 - DNA, 25 bp, Homo sapien
agggaacatactgatctctattgtt

SEQ ID NO: 622258 - DNA, 25 bp, Homo sapien
aacatactgatctctattgttccaa

SEQ ID NO: 622259 - DNA, 25 bp, Homo sapien
gggaacatactgatctctattgttc

SEQ ID NO: 622260 - DNA, 25 bp, Homo sapien
tgtgaacagagcaagggtgaagcct

SEQ ID NO: 622261 - DNA, 25 bp, Homo sapien
aaggtgatttcaaacctccaggatc

SEQ ID NO: 622262 - DNA, 25 bp, Homo sapien
ccaggatcagtcaggatgcccgtgc

SEQ ID NO: 622263 - DNA, 25 bp, Homo sapien
tcaggatgcccgtgcgtgctttgct

SEQ ID NO: 622264 - DNA, 25 bp, Homo sapien
gcccactgacgtcttgtgaattccc

SEQ ID NO: 622265 - DNA, 25 bp, Homo sapien
gcacctgagccagggatccacagag

SEQ ID NO: 622266 - DNA, 25 bp, Homo sapien
tagaagcttgcgtcagtgtccactg

SEQ ID NO: 622267 - DNA, 25 bp, Homo sapien
ccactgggtcaggattctgcacctg

SEQ ID NO: 622268 - DNA, 25 bp, Homo sapien
tccaaaatagaagcttgcgtcagtg

SEQ ID NO: 622269 - DNA, 25 bp, Homo sapien
ccaagctgctcaggatgagcacgat

SEQ ID NO: 622270 - DNA, 25 bp, Homo sapien
tattgagtgatggtacagaagaacc

SEQ ID NO: 622271 - DNA, 25 bp, Homo sapien
gccagggtcatttggcagagaccct

SEQ ID NO: 622272 - DNA, 25 bp, Homo sapien
cacatcctggttgggagttattgag

SEQ ID NO: 622273 - DNA, 25 bp, Homo sapien
ggccagcttttggttggagcctcca

SEQ ID NO: 622274 - DNA, 25 bp, Homo sapien
ccgggccagcttttggttggagcct

SEQ ID NO: 622275 - DNA, 25 bp, Homo sapien
tgagagggcagtcgggacccgggcc

SEQ ID NO: 622276 - DNA, 25 bp, Homo sapien
cagtcgggacccgggccagcttttg

SEQ ID NO: 622277 - DNA, 25 bp, Homo sapien
gaagacgattatactcaagaccgct

SEQ ID NO: 622278 - DNA, 25 bp, Homo sapien
gagaggaaatgctcgatgaaaagtg

SEQ ID NO: 622279 - DNA, 25 bp, Homo sapien
cacaccggctcttcagatatctgaa

SEQ ID NO: 622280 - DNA, 25 bp, Homo sapien
gggcaattgagttgaacggctgttc

SEQ ID NO: 622281 - DNA, 25 bp, Homo sapien
ccatttccaacttgggcgtgttcac

SEQ ID NO: 622282 - DNA, 25 bp, Homo sapien
ccttttaggcaacctgctcctggga

SEQ ID NO: 622283 - DNA, 25 bp, Homo sapien
gcatagctaacacacttcagcccag

SEQ ID NO: 622284 - DNA, 25 bp, Homo sapien
cctgggaggtcaacatatttgatgc

SEQ ID NO: 622285 - DNA, 25 bp, Homo sapien
gctcctgcggtctgccatttgtggt

SEQ ID NO: 622286 - DNA, 25 bp, Homo sapien
acgccagagggctgatgcggcaaac

SEQ ID NO: 622287 - DNA, 25 bp, Homo sapien
ctggtaaggacatgtcaccggccca

SEQ ID NO: 622288 - DNA, 25 bp, Homo sapien
gcaaactgcaggcaaacactcggct

SEQ ID NO: 622289 - DNA, 25 bp, Homo sapien
tagtgttgggcaaagagactttctc

SEQ ID NO: 622290 - DNA, 25 bp, Homo sapien
caggtattcatgagagtagcttcca

SEQ ID NO: 622291 - DNA, 25 bp, Homo sapien
ttaactggcgttgggcttagtgttg

SEQ ID NO: 622292 - DNA, 25 bp, Homo sapien
tattcatgagagtagcttccacagt

SEQ ID NO: 622293 - DNA, 25 bp, Homo sapien
ggtctctcgctggtcaagaacctga

SEQ ID NO: 622294 - DNA, 25 bp, Homo sapien
ccctggaggagggattcaccctgca

SEQ ID NO: 622295 - DNA, 25 bp, Homo sapien
cagagcctctcgctgagatgggtgc

SEQ ID NO: 622296 - DNA, 25 bp, Homo sapien
tgctccttgcaagggcttgcagttg

SEQ ID NO: 622297 - DNA, 25 bp, Homo sapien
gtctttcaccagaagcctgctgatg

SEQ ID NO: 622298 - DNA, 25 bp, Homo sapien
gaagtcaatgtgtaagaagaggatc

SEQ ID NO: 622299 - DNA, 25 bp, Homo sapien
tcaccagaagcctgctgatgaagtc

SEQ ID NO: 622300 - DNA, 25 bp, Homo sapien
tgatgaagtcaatgtgtaagaagag

SEQ ID NO: 622301 - DNA, 25 bp, Homo sapien
ggttctgtagcaacaaagtctgccc

SEQ ID NO: 622302 - DNA, 25 bp, Homo sapien
taaattaccctaggatgataggccc

SEQ ID NO: 622303 - DNA, 25 bp, Homo sapien
gccatcagtatccacaaaggtccgg

SEQ ID NO: 622304 - DNA, 25 bp, Homo sapien
aataactccagtgggtaacagcggg

SEQ ID NO: 622305 - DNA, 25 bp, Homo sapien
tctgtctgtagcttgacatttgcta

SEQ ID NO: 622306 - DNA, 25 bp, Homo sapien
tgtagcttgacatttgctagagcaa

SEQ ID NO: 622307 - DNA, 25 bp, Homo sapien
gctctccttgagagcgctgatttct

SEQ ID NO: 622308 - DNA, 25 bp, Homo sapien
ccttgagagcgctgatttctgtctg

SEQ ID NO: 622309 - DNA, 25 bp, Homo sapien
tgctgccgatctgtgcgggactcag

SEQ ID NO: 622310 - DNA, 25 bp, Homo sapien
ccttcaaaaccggtgctgccgatct

SEQ ID NO: 622311 - DNA, 25 bp, Homo sapien
ctggagtacacgtggccttcaaaac

SEQ ID NO: 622312 - DNA, 25 bp, Homo sapien
tacacgtggccttcaaaaccggtgc

SEQ ID NO: 622313 - DNA, 25 bp, Homo sapien
ttttctggtccaaaaatatcccata

SEQ ID NO: 622314 - DNA, 25 bp, Homo sapien
attttctggtccaaaaatatcccat

SEQ ID NO: 622315 - DNA, 25 bp, Homo sapien
tttctggtccaaaaatatcccatac

SEQ ID NO: 622316 - DNA, 25 bp, Homo sapien
ttctggtccaaaaatatcccatact

SEQ ID NO: 622317 - DNA, 25 bp, Homo sapien
tggatgcagacactttctgtcttca

SEQ ID NO: 622318 - DNA, 25 bp, Homo sapien
gtttactagttccatctggaatgaa

SEQ ID NO: 622319 - DNA, 25 bp, Homo sapien
tatggatgcagacactttctgtctt

SEQ ID NO: 622320 - DNA, 25 bp, Homo sapien
ctatggatgcagacactttctgtct

SEQ ID NO: 622321 - DNA, 25 bp, Homo sapien
acctgctgcacacgcctgcatcctg

SEQ ID NO: 622322 - DNA, 25 bp, Homo sapien
gtggctcctcgcagacgcccatgaa

SEQ ID NO: 622323 - DNA, 25 bp, Homo sapien
aggtggagacacttgagtggcctcc

SEQ ID NO: 622324 - DNA, 25 bp, Homo sapien
tttctgcctggtatcccgctcccca

SEQ ID NO: 622325 - DNA, 25 bp, Homo sapien
cctccaggataaggcggtgccattt

SEQ ID NO: 622326 - DNA, 25 bp, Homo sapien
tgaaaaacaacctgatgttgcctcc

SEQ ID NO: 622327 - DNA, 25 bp, Homo sapien
ggataaggcggtgccatttgctctg

SEQ ID NO: 622328 - DNA, 25 bp, Homo sapien
aaaacaacctgatgttgcctccagg

SEQ ID NO: 622329 - DNA, 25 bp, Homo sapien
tacaaatatgatggctggagcagga

SEQ ID NO: 622330 - DNA, 25 bp, Homo sapien
gggcgcccatgagagttctttaagg

SEQ ID NO: 622331 - DNA, 25 bp, Homo sapien
aacaggtcataaaagggtcttcaga

SEQ ID NO: 622332 - DNA, 25 bp, Homo sapien
aaaggccaaaggaaacatagccacg

SEQ ID NO: 622333 - DNA, 25 bp, Homo sapien
ggtacgccaccgctattttagacgc

SEQ ID NO: 622334 - DNA, 25 bp, Homo sapien
tgttgcttaagcaggtattctaccc

SEQ ID NO: 622335 - DNA, 25 bp, Homo sapien
caaccagcactggatttgtgttgct

SEQ ID NO: 622336 - DNA, 25 bp, Homo sapien
ttactgaccaataacggtacgccac

SEQ ID NO: 622337 - DNA, 25 bp, Homo sapien
aagaatcctgtcgagtccagctggc

SEQ ID NO: 622338 - DNA, 25 bp, Homo sapien
gggtaaagaatcctgtcgagtccag

SEQ ID NO: 622339 - DNA, 25 bp, Homo sapien
taaagaatcctgtcgagtccagctg

SEQ ID NO: 622340 - DNA, 25 bp, Homo sapien
aatcctgtcgagtccagctggccat

SEQ ID NO: 622341 - DNA, 25 bp, Homo sapien
ctgtcggtgccagccggaatcggtc

SEQ ID NO: 622342 - DNA, 25 bp, Homo sapien
ggattcaaatatgccccctctagac

SEQ ID NO: 622343 - DNA, 25 bp, Homo sapien
gacatcctctgtcggtgccagccgg

SEQ ID NO: 622344 - DNA, 25 bp, Homo sapien
taggattcaaatatgccccctctag

SEQ ID NO: 622345 - DNA, 25 bp, Homo sapien
ctggccgtgtccctgccttgatcag

SEQ ID NO: 622346 - DNA, 25 bp, Homo sapien
cagggctgagccagcaagtcgtgtc

SEQ ID NO: 622347 - DNA, 25 bp, Homo sapien
tataattacgttctccagggctgag

SEQ ID NO: 622348 - DNA, 25 bp, Homo sapien
tcaaaaacgcagtggctggccgtgt

SEQ ID NO: 622349 - DNA, 25 bp, Homo sapien
ggttcactcccacagcccgtggaaa

SEQ ID NO: 622350 - DNA, 25 bp, Homo sapien
gaaagctcagcaggccggtcaggtg

SEQ ID NO: 622351 - DNA, 25 bp, Homo sapien
tcaggtgtgaactagggaagaggaa

SEQ ID NO: 622352 - DNA, 25 bp, Homo sapien
aacttagagggttcactcccacagc

SEQ ID NO: 622353 - DNA, 25 bp, Homo sapien
caagttatttcatagagggagctct

SEQ ID NO: 622354 - DNA, 25 bp, Homo sapien
gttatttcatagagggagctctggg

SEQ ID NO: 622355 - DNA, 25 bp, Homo sapien
acaagttatttcatagagggagctc

SEQ ID NO: 622356 - DNA, 25 bp, Homo sapien
aagttatttcatagagggagctctg

SEQ ID NO: 622357 - DNA, 25 bp, Homo sapien
catggcctatctgttcattaatcac

SEQ ID NO: 622358 - DNA, 25 bp, Homo sapien
ttaattccagtaggcgttgtggcaa

SEQ ID NO: 622359 - DNA, 25 bp, Homo sapien
taatcacaacaggaatgatcaggtt

SEQ ID NO: 622360 - DNA, 25 bp, Homo sapien
tcaatttcgccttaagacatggcct

SEQ ID NO: 622361 - DNA, 25 bp, Homo sapien
caatgtagattcttgaagacgagct

SEQ ID NO: 622362 - DNA, 25 bp, Homo sapien
tcaatgtagattcttgaagacgagc

SEQ ID NO: 622363 - DNA, 25 bp, Homo sapien
aatgtagattcttgaagacgagctc

SEQ ID NO: 622364 - DNA, 25 bp, Homo sapien
gtctgctccaatccgctgtctcttg

SEQ ID NO: 622365 - DNA, 25 bp, Homo sapien
ccacttgacagtcggtctgctccaa

SEQ ID NO: 622366 - DNA, 25 bp, Homo sapien
tccacttgacagtcggtctgctcca

SEQ ID NO: 622367 - DNA, 25 bp, Homo sapien
cttgacagtcggtctgctccaatcc

SEQ ID NO: 622368 - DNA, 25 bp, Homo sapien
caattggaagcagaccttctcatcc

SEQ ID NO: 622369 - DNA, 25 bp, Homo sapien
tcatccaagaatacactctgagctc

SEQ ID NO: 622370 - DNA, 25 bp, Homo sapien
gcaccggataggaggcaaagctctc

SEQ ID NO: 622371 - DNA, 25 bp, Homo sapien
aaagctctccactcccaattggaag

SEQ ID NO: 622372 - DNA, 25 bp, Homo sapien
aggaagagcccgctgcacagtgatg

SEQ ID NO: 622373 - DNA, 25 bp, Homo sapien
tggtgtttacaaatgcagcaggaag

SEQ ID NO: 622374 - DNA, 25 bp, Homo sapien
atagctgggttgctccctgagccgg

SEQ ID NO: 622375 - DNA, 25 bp, Homo sapien
gatgaagccatcaacctcagatgct

SEQ ID NO: 622376 - DNA, 25 bp, Homo sapien
ccaggcaggctgagataaatcggat

SEQ ID NO: 622377 - DNA, 25 bp, Homo sapien
tgagataaatcggatctgctgatac

SEQ ID NO: 622378 - DNA, 25 bp, Homo sapien
gataaatcggatctgctgatactca

SEQ ID NO: 622379 - DNA, 25 bp, Homo sapien
caggctgagataaatcggatctgct

SEQ ID NO: 622380 - DNA, 25 bp, Homo sapien
gtcctcggcactctataccatatgt

SEQ ID NO: 622381 - DNA, 25 bp, Homo sapien
tcctggtaacactggatccgcattc

SEQ ID NO: 622382 - DNA, 25 bp, Homo sapien
tctgctgcactcagggatacaggct

SEQ ID NO: 622383 - DNA, 25 bp, Homo sapien
ctcatgcagcagcaacgaggttgca

SEQ ID NO: 622384 - DNA, 25 bp, Homo sapien
catctcaatgtaggccaggacctgc

SEQ ID NO: 622385 - DNA, 25 bp, Homo sapien
gcctctgaggacacccgtgtcatct

SEQ ID NO: 622386 - DNA, 25 bp, Homo sapien
tggtagacaagcacggccgagccag

SEQ ID NO: 622387 - DNA, 25 bp, Homo sapien
gacacccgtgtcatctcaatgtagg

SEQ ID NO: 622388 - DNA, 25 bp, Homo sapien
ggaaggcgataagttctaggagtgg

SEQ ID NO: 622389 - DNA, 25 bp, Homo sapien
ggtgcagctgggaaggcgataagtt

SEQ ID NO: 622390 - DNA, 25 bp, Homo sapien
ttcacttggttgctgcaaaagtggt

SEQ ID NO: 622391 - DNA, 25 bp, Homo sapien
aatcttcacttggttgctgcaaaag

SEQ ID NO: 622392 - DNA, 25 bp, Homo sapien
gggagttacaggatcgctcatttac

SEQ ID NO: 622393 - DNA, 25 bp, Homo sapien
ctcatttactgacttgctgtgctga

SEQ ID NO: 622394 - DNA, 25 bp, Homo sapien
aacagacttgggtggcatccggccc

SEQ ID NO: 622395 - DNA, 25 bp, Homo sapien
cacgcatccggcctgtctgcatctc

SEQ ID NO: 622396 - DNA, 25 bp, Homo sapien
tcagttaattatcaggcctggccac

SEQ ID NO: 622397 - DNA, 25 bp, Homo sapien
tcctcccctatacatttaacaaagc

SEQ ID NO: 622398 - DNA, 25 bp, Homo sapien
cattcctcccctatacatttaacaa

SEQ ID NO: 622399 - DNA, 25 bp, Homo sapien
gccattcctcccctatacatttaac

SEQ ID NO: 622400 - DNA, 25 bp, Homo sapien
ccttgtaaacgtgccggcttcgcag

SEQ ID NO: 622401 - DNA, 25 bp, Homo sapien
aattcgccatgaacgcatttgctgc

SEQ ID NO: 622402 - DNA, 25 bp, Homo sapien
agaccggcaagctcctacggtgcag

SEQ ID NO: 622403 - DNA, 25 bp, Homo sapien
tgttctggtggaagtatgacagccc

SEQ ID NO: 622404 - DNA, 25 bp, Homo sapien
ttcaccaggacgttcacggagggct

SEQ ID NO: 622405 - DNA, 25 bp, Homo sapien
aatgggcgggatgatgcgtggtagc

SEQ ID NO: 622406 - DNA, 25 bp, Homo sapien
gtagccacggcgcaggccagttttc

SEQ ID NO: 622407 - DNA, 25 bp, Homo sapien
agaaggcggcctggtgaaaggcagc

SEQ ID NO: 622408 - DNA, 25 bp, Homo sapien
tttcacggcttgagagtcacccctg

SEQ ID NO: 622409 - DNA, 25 bp, Homo sapien
ttgtgaaacctccacaggcgcctgt

SEQ ID NO: 622410 - DNA, 25 bp, Homo sapien
tattggagttattgccccttctgaa

SEQ ID NO: 622411 - DNA, 25 bp, Homo sapien
caatgctattgttgccccgaaggga

SEQ ID NO: 622412 - DNA, 25 bp, Homo sapien
gaagtcagcatccacacacattttc

SEQ ID NO: 622413 - DNA, 25 bp, Homo sapien
tagaagtcagcatccacacacattt

SEQ ID NO: 622414 - DNA, 25 bp, Homo sapien
ctagaagtcagcatccacacacatt

SEQ ID NO: 622415 - DNA, 25 bp, Homo sapien
agtcagcatccacacacattttctc

SEQ ID NO: 622416 - DNA, 25 bp, Homo sapien
ggtctggggctccacatgtcgctca

SEQ ID NO: 622417 - DNA, 25 bp, Homo sapien
ctgtcatgggggacggaatgagctg

SEQ ID NO: 622418 - DNA, 25 bp, Homo sapien
aagtgctgggttcctgccctctggg

SEQ ID NO: 622419 - DNA, 25 bp, Homo sapien
ggctccacatgtcgctcaggaagtg

SEQ ID NO: 622420 - DNA, 25 bp, Homo sapien
tccccagagggagtagaactttctg

SEQ ID NO: 622421 - DNA, 25 bp, Homo sapien
gaggaaagctgttttccccattgga

SEQ ID NO: 622422 - DNA, 25 bp, Homo sapien
ccattggaaacaagagccggactcc

SEQ ID NO: 622423 - DNA, 25 bp, Homo sapien
cacacaggacaactcggtgacctca

SEQ ID NO: 622424 - DNA, 25 bp, Homo sapien
gggaatcctgaagggccaacatcaa

SEQ ID NO: 622425 - DNA, 25 bp, Homo sapien
ctgaagggccaacatcaaggtcacc

SEQ ID NO: 622426 - DNA, 25 bp, Homo sapien
tctccgtggggttcccagtggagct

SEQ ID NO: 622427 - DNA, 25 bp, Homo sapien
ctggacaactacaaaggcactgaac

SEQ ID NO: 622428 - DNA, 25 bp, Homo sapien
caacaatgaacaagctggaaaatgc

SEQ ID NO: 622429 - DNA, 25 bp, Homo sapien
acaatgaacaagctggaaaatgcac

SEQ ID NO: 622430 - DNA, 25 bp, Homo sapien
tctcaacaatgaacaagctggaaaa

SEQ ID NO: 622431 - DNA, 25 bp, Homo sapien
tcaacaatgaacaagctggaaaatg

SEQ ID NO: 622432 - DNA, 25 bp, Homo sapien
ggactttccctctgaagggcaggaa

SEQ ID NO: 622433 - DNA, 25 bp, Homo sapien
tacagccacgcttatatccagttac

SEQ ID NO: 622434 - DNA, 25 bp, Homo sapien
gttacaccggacagtaaacgcagct

SEQ ID NO: 622435 - DNA, 25 bp, Homo sapien
gcgatgttcacaaaaactaacgtgg

SEQ ID NO: 622436 - DNA, 25 bp, Homo sapien
ctccgtagcagaatgccagctgatg

SEQ ID NO: 622437 - DNA, 25 bp, Homo sapien
gaggtgtctgtcatcaaagaaggct

SEQ ID NO: 622438 - DNA, 25 bp, Homo sapien
gtacttcctgctgaagagcgacggc

SEQ ID NO: 622439 - DNA, 25 bp, Homo sapien
ccctgagctgtcccgagctaggtga

SEQ ID NO: 622440 - DNA, 25 bp, Homo sapien
acgctgccaccatgaatgaggtgtc

SEQ ID NO: 622441 - DNA, 25 bp, Homo sapien
agctaggtgacagcgtaccacgctg

SEQ ID NO: 622442 - DNA, 25 bp, Homo sapien
gagcgacggctccttcattgggtac

SEQ ID NO: 622443 - DNA, 25 bp, Homo sapien
caagcgtggtgaatacatcaagacc

SEQ ID NO: 622444 - DNA, 25 bp, Homo sapien
ccacgtggattctccagacgagagg

SEQ ID NO: 622445 - DNA, 25 bp, Homo sapien
gctgcctgcagtggaccacagtcat

SEQ ID NO: 622446 - DNA, 25 bp, Homo sapien
ctgtccacggtgcctcctgcatgtc

SEQ ID NO: 622447 - DNA, 25 bp, Homo sapien
cagaggggcccagactgagagcggc

SEQ ID NO: 622448 - DNA, 25 bp, Homo sapien
tccaggtgttgcagaggggcccaga

SEQ ID NO: 622449 - DNA, 25 bp, Homo sapien
ttgcagaggggcccagactgagagc

SEQ ID NO: 622450 - DNA, 25 bp, Homo sapien
gaggggcccagactgagagcggcgc

SEQ ID NO: 622451 - DNA, 25 bp, Homo sapien
tgggtgctgccgcacctccagcagg

SEQ ID NO: 622452 - DNA, 25 bp, Homo sapien
accctgggggcggattaaggagcag

SEQ ID NO: 622453 - DNA, 25 bp, Homo sapien
ccttgggtgctgccgcacctccagc

SEQ ID NO: 622454 - DNA, 25 bp, Homo sapien
ccctgggggcggattaaggagcaga

SEQ ID NO: 622455 - DNA, 25 bp, Homo sapien
ctgcacagcgcatggcagcacttcc

SEQ ID NO: 622456 - DNA, 25 bp, Homo sapien
tcatctgtttgccttgaagtgggcc

SEQ ID NO: 622457 - DNA, 25 bp, Homo sapien
tgggcctgggtgataatgtgacaca

SEQ ID NO: 622458 - DNA, 25 bp, Homo sapien
aagtgggcctgggtgataatgtgac

SEQ ID NO: 622459 - DNA, 25 bp, Homo sapien
tctgtttgccttgaagtgggcctgg

SEQ ID NO: 622460 - DNA, 25 bp, Homo sapien
catcaaacaaaaccgggatccaaga

SEQ ID NO: 622461 - DNA, 25 bp, Homo sapien
acagttcatcaaacaaaaccgggat

SEQ ID NO: 622462 - DNA, 25 bp, Homo sapien
cagttcatcaaacaaaaccgggatc

SEQ ID NO: 622463 - DNA, 25 bp, Homo sapien
gttcatcaaacaaaaccgggatcca

SEQ ID NO: 622464 - DNA, 25 bp, Homo sapien
agcttttgacatgaactgccgttcc

SEQ ID NO: 622465 - DNA, 25 bp, Homo sapien
tcgttcgctgggtgaacaccggcca

SEQ ID NO: 622466 - DNA, 25 bp, Homo sapien
tttcatgagtaaacgagctgggagc

SEQ ID NO: 622467 - DNA, 25 bp, Homo sapien
gccgttccttcgaagcagcagttaa

SEQ ID NO: 622468 - DNA, 25 bp, Homo sapien
gcttgtgaggatttacgaatctggt

SEQ ID NO: 622469 - DNA, 25 bp, Homo sapien
acagaggttggacagcagagtgctc

SEQ ID NO: 622470 - DNA, 25 bp, Homo sapien
tctgaagagctgtatcgctggagtc

SEQ ID NO: 622471 - DNA, 25 bp, Homo sapien
atttggatgagcagtaaatatctga

SEQ ID NO: 622472 - DNA, 25 bp, Homo sapien
gcaaatatggacaataagaggcgct

SEQ ID NO: 622473 - DNA, 25 bp, Homo sapien
gctttagttggacaccagagggagc

SEQ ID NO: 622474 - DNA, 25 bp, Homo sapien
gccagatgccgccagttgagggcca

SEQ ID NO: 622475 - DNA, 25 bp, Homo sapien
aattggaaatcaagggaagggtctg

SEQ ID NO: 622476 - DNA, 25 bp, Homo sapien
gggagctcgtgtctcaggtgctgaa

SEQ ID NO: 622477 - DNA, 25 bp, Homo sapien
agcatctcagcatcttcgtccacat

SEQ ID NO: 622478 - DNA, 25 bp, Homo sapien
aggtgaatgatgtgccaccccaggt

SEQ ID NO: 622479 - DNA, 25 bp, Homo sapien
ctgatgctccaggttcaaccaggag

SEQ ID NO: 622480 - DNA, 25 bp, Homo sapien
cactgaacgtcgcttgaggaagaaa

SEQ ID NO: 622481 - DNA, 25 bp, Homo sapien
gaaacacggtttttggtgccgcatg

SEQ ID NO: 622482 - DNA, 25 bp, Homo sapien
tattaagtaactggaacgctgtctc

SEQ ID NO: 622483 - DNA, 25 bp, Homo sapien
attgcacttccgactttggagaccc

SEQ ID NO: 622484 - DNA, 25 bp, Homo sapien
catttacagactgcctgtgaacgtg

SEQ ID NO: 622485 - DNA, 25 bp, Homo sapien
tggtcaggagcttgtcccggttttc

SEQ ID NO: 622486 - DNA, 25 bp, Homo sapien
gttttcctgtcttgcctgcgtcatg

SEQ ID NO: 622487 - DNA, 25 bp, Homo sapien
cccctggaaatgtggcagctaggtg

SEQ ID NO: 622488 - DNA, 25 bp, Homo sapien
tgctttttgaacgtgatgatcttca

SEQ ID NO: 622489 - DNA, 25 bp, Homo sapien
gctttttgaacgtgatgatcttcat

SEQ ID NO: 622490 - DNA, 25 bp, Homo sapien
gacctgctttttgaacgtgatgatc

SEQ ID NO: 622491 - DNA, 25 bp, Homo sapien
cctgctttttgaacgtgatgatctt

SEQ ID NO: 622492 - DNA, 25 bp, Homo sapien
gcattggccaaccaagctctagagg

SEQ ID NO: 622493 - DNA, 25 bp, Homo sapien
attggccaaccaagctctagaggtt

SEQ ID NO: 622494 - DNA, 25 bp, Homo sapien
cattggccaaccaagctctagaggt

SEQ ID NO: 622495 - DNA, 25 bp, Homo sapien
ggcattggccaaccaagctctagag

SEQ ID NO: 622496 - DNA, 25 bp, Homo sapien
tctccgatgtttgtgtgaacagcac

SEQ ID NO: 622497 - DNA, 25 bp, Homo sapien
taatggaggtcacgtgagctctctg

SEQ ID NO: 622498 - DNA, 25 bp, Homo sapien
tgatgtctcatcaggtcccgctggg

SEQ ID NO: 622499 - DNA, 25 bp, Homo sapien
gcacgcacggcggtgacagtgataa

SEQ ID NO: 622500 - DNA, 25 bp, Homo sapien
gagccatccgcgctaaacactgaag

SEQ ID NO: 622501 - DNA, 25 bp, Homo sapien
ttccacctcagagctagtgtccttt

SEQ ID NO: 622502 - DNA, 25 bp, Homo sapien
cagagctagtgtccttttgggtgac

SEQ ID NO: 622503 - DNA, 25 bp, Homo sapien
tgccccgttcccagacagcgcctgg

SEQ ID NO: 622504 - DNA, 25 bp, Homo sapien
tccacaggtatgacttcagagccct

SEQ ID NO: 622505 - DNA, 25 bp, Homo sapien
aagccacatttaggcttcactgaag

SEQ ID NO: 622506 - DNA, 25 bp, Homo sapien
agagcccttggcaggcgggtggaca

SEQ ID NO: 622507 - DNA, 25 bp, Homo sapien
caggcgggtggacatcctggtgttc

SEQ ID NO: 622508 - DNA, 25 bp, Homo sapien
tccaaagacacgtggcctcagactg

SEQ ID NO: 622509 - DNA, 25 bp, Homo sapien
ttataggaagagtggccggagaacc

SEQ ID NO: 622510 - DNA, 25 bp, Homo sapien
gagttgtcacctttgtgaacggcat

SEQ ID NO: 622511 - DNA, 25 bp, Homo sapien
gactgtttgctgacagtcgaggact

SEQ ID NO: 622512 - DNA, 25 bp, Homo sapien
cttcccacgaggctgcacagagatc

SEQ ID NO: 622513 - DNA, 25 bp, Homo sapien
tccttggttagccagaaaaatcctc

SEQ ID NO: 622514 - DNA, 25 bp, Homo sapien
cagaacactccccaaaaactccttg

SEQ ID NO: 622515 - DNA, 25 bp, Homo sapien
cttccctaagccagcatgggtggga

SEQ ID NO: 622516 - DNA, 25 bp, Homo sapien
tccatcacttgcaaccaagaaagtc

SEQ ID NO: 622517 - DNA, 25 bp, Homo sapien
gaagtaaacatggacttcctccctg

SEQ ID NO: 622518 - DNA, 25 bp, Homo sapien
cctcagccacctttgaggaagtaaa

SEQ ID NO: 622519 - DNA, 25 bp, Homo sapien
cttctttagcgaaaattactaggag

SEQ ID NO: 622520 - DNA, 25 bp, Homo sapien
acaacccttgaaccatcttctttag

SEQ ID NO: 622521 - DNA, 25 bp, Homo sapien
tgactgctttttcccttggagggtg

SEQ ID NO: 622522 - DNA, 25 bp, Homo sapien
ctgctttttcccttggagggtggtg

SEQ ID NO: 622523 - DNA, 25 bp, Homo sapien
tcactctaggaaccatgggaaccac

SEQ ID NO: 622524 - DNA, 25 bp, Homo sapien
gtcctcactctaggaaccatgggaa

SEQ ID NO: 622525 - DNA, 25 bp, Homo sapien
actctaggaaccatgggaaccacag

SEQ ID NO: 622526 - DNA, 25 bp, Homo sapien
agctggctggtcctcgtgctttctt

SEQ ID NO: 622527 - DNA, 25 bp, Homo sapien
taaaatgtcggcattgtaaatcaaa

SEQ ID NO: 622528 - DNA, 25 bp, Homo sapien
ggtgaacgagccagggtcctcttct

SEQ ID NO: 622529 - DNA, 25 bp, Homo sapien
ttttcaaagctttcatccctaaaga

SEQ ID NO: 622530 - DNA, 25 bp, Homo sapien
ctaaagaagtcaatgtataaggaat

SEQ ID NO: 622531 - DNA, 25 bp, Homo sapien
ttccttcagccagatcaaggtcctt

SEQ ID NO: 622532 - DNA, 25 bp, Homo sapien
cttgtcacttacagccaacaccaca

SEQ ID NO: 622533 - DNA, 25 bp, Homo sapien
tcagccagatcaaggtccttgtcac

SEQ ID NO: 622534 - DNA, 25 bp, Homo sapien
agtctcaggagccaacactctttcc

SEQ ID NO: 622535 - DNA, 25 bp, Homo sapien
cagagaagccatctatggcttggcc

SEQ ID NO: 622536 - DNA, 25 bp, Homo sapien
agccatctatggcttggccaggaca

SEQ ID NO: 622537 - DNA, 25 bp, Homo sapien
gctggtggtgatggccaagcagtta

SEQ ID NO: 622538 - DNA, 25 bp, Homo sapien
atggccaagcagttaggccgactcc

SEQ ID NO: 622539 - DNA, 25 bp, Homo sapien
tatgtgactgagttctgtcaaaagg

SEQ ID NO: 622540 - DNA, 25 bp, Homo sapien
ccttcttgctgactggagttttgtg

SEQ ID NO: 622541 - DNA, 25 bp, Homo sapien
gggcataaacatgtgctcttataat

SEQ ID NO: 622542 - DNA, 25 bp, Homo sapien
agttttgtgtaatggctggatctcc

SEQ ID NO: 622543 - DNA, 25 bp, Homo sapien
ttttgtcaccgtgccatacacttcc

SEQ ID NO: 622544 - DNA, 25 bp, Homo sapien
cagggcttcggtttttgtcaccgtg

SEQ ID NO: 622545 - DNA, 25 bp, Homo sapien
ttcttcagggcttcggtttttgtca

SEQ ID NO: 622546 - DNA, 25 bp, Homo sapien
tcggtttttgtcaccgtgccataca

SEQ ID NO: 622547 - DNA, 25 bp, Homo sapien
gtctgaggctcctttgctccatgga

SEQ ID NO: 622548 - DNA, 25 bp, Homo sapien
ggatttctgaacctgttcgcgttca

SEQ ID NO: 622549 - DNA, 25 bp, Homo sapien
cctgttcgcgttcagtgttccccaa

SEQ ID NO: 622550 - DNA, 25 bp, Homo sapien
atgtctgaggctcctttgctccatg

SEQ ID NO: 622551 - DNA, 25 bp, Homo sapien
ctcctcagtccaggggagacccttt

SEQ ID NO: 622552 - DNA, 25 bp, Homo sapien
aactcctcagtccaggggagaccct

SEQ ID NO: 622553 - DNA, 25 bp, Homo sapien
aggactcgctggttacctcccagga

SEQ ID NO: 622554 - DNA, 25 bp, Homo sapien
ctcgctggttacctcccaggaaact

SEQ ID NO: 622555 - DNA, 25 bp, Homo sapien
cttaaacgtgaaaagcaggaggttg

SEQ ID NO: 622556 - DNA, 25 bp, Homo sapien
tttaaagagagcagagaagtcggtg

SEQ ID NO: 622557 - DNA, 25 bp, Homo sapien
catgttgctgaagggccaccttgcg

SEQ ID NO: 622558 - DNA, 25 bp, Homo sapien
tcagtatctgggataggagagtcac

SEQ ID NO: 622559 - DNA, 25 bp, Homo sapien
gccagctcgttctgcgctcttccca

SEQ ID NO: 622560 - DNA, 25 bp, Homo sapien
gggagcctgccagctcgttctgcgc

SEQ ID NO: 622561 - DNA, 25 bp, Homo sapien
gcctgccagctcgttctgcgctctt

SEQ ID NO: 622562 - DNA, 25 bp, Homo sapien
tgccagctcgttctgcgctcttccc

SEQ ID NO: 622563 - DNA, 25 bp, Homo sapien
attcaggctaaaaaattcactgtgc

SEQ ID NO: 622564 - DNA, 25 bp, Homo sapien
gatcattcaggctaaaaaattcact

SEQ ID NO: 622565 - DNA, 25 bp, Homo sapien
tgatcattcaggctaaaaaattcac

SEQ ID NO: 622566 - DNA, 25 bp, Homo sapien
ctgatcattcaggctaaaaaattca

SEQ ID NO: 622567 - DNA, 25 bp, Homo sapien
agtccactgagcgcagcacgaggag

SEQ ID NO: 622568 - DNA, 25 bp, Homo sapien
gtagtccactgagcgcagcacgagg

SEQ ID NO: 622569 - DNA, 25 bp, Homo sapien
tggtagtccactgagcgcagcacga

SEQ ID NO: 622570 - DNA, 25 bp, Homo sapien
tccactgagcgcagcacgaggagga

SEQ ID NO: 622571 - DNA, 25 bp, Homo sapien
acagggatattgaagggtgctcacc

SEQ ID NO: 622572 - DNA, 25 bp, Homo sapien
aaatctgaccttctccttccactgg

SEQ ID NO: 622573 - DNA, 25 bp, Homo sapien
ccttcaatatcgtgccttaagcatt

SEQ ID NO: 622574 - DNA, 25 bp, Homo sapien
cacatttattattcttggtcctaga

SEQ ID NO: 622575 - DNA, 25 bp, Homo sapien
cacccaaccaaagccacggtgcaca

SEQ ID NO: 622576 - DNA, 25 bp, Homo sapien
cccaaccaaagccacggtgcacagg

SEQ ID NO: 622577 - DNA, 25 bp, Homo sapien
caaccaaagccacggtgcacaggca

SEQ ID NO: 622578 - DNA, 25 bp, Homo sapien
acacccaaccaaagccacggtgcac

SEQ ID NO: 622579 - DNA, 25 bp, Homo sapien
ctgcgggccttggacatgttgcgaa

SEQ ID NO: 622580 - DNA, 25 bp, Homo sapien
tataaatagtccgacgggctccacg

SEQ ID NO: 622581 - DNA, 25 bp, Homo sapien
cacgtctgattgtgcaggcatggcg

SEQ ID NO: 622582 - DNA, 25 bp, Homo sapien
gttgcgaaggtcttcgcctcctggc

SEQ ID NO: 622583 - DNA, 25 bp, Homo sapien
cttcttatctgtggagtgggtgcac

SEQ ID NO: 622584 - DNA, 25 bp, Homo sapien
ggagtgggtgcactgataacactga

SEQ ID NO: 622585 - DNA, 25 bp, Homo sapien
tgcactgataacactgagcaggtcc

SEQ ID NO: 622586 - DNA, 25 bp, Homo sapien
gggccaggcacagcttcttatctgt

SEQ ID NO: 622587 - DNA, 25 bp, Homo sapien
ctgagtgttagcttctctggtgggt

SEQ ID NO: 622588 - DNA, 25 bp, Homo sapien
gctgcacacgggtagtcctttccct

SEQ ID NO: 622589 - DNA, 25 bp, Homo sapien
gctgtaccgtggacgctgcacacgg

SEQ ID NO: 622590 - DNA, 25 bp, Homo sapien
caacgctgagtgttagcttctctgg

SEQ ID NO: 622591 - DNA, 25 bp, Homo sapien
cctggtttaccacctctcttgctca

SEQ ID NO: 622592 - DNA, 25 bp, Homo sapien
ctggtttaccacctctcttgctcat

SEQ ID NO: 622593 - DNA, 25 bp, Homo sapien
tattgcctggaataaagcggctgct

SEQ ID NO: 622594 - DNA, 25 bp, Homo sapien
tgaagtgcacactcaggtcacctga

SEQ ID NO: 622595 - DNA, 25 bp, Homo sapien
tggagcagcagtttggacgcctttc

SEQ ID NO: 622596 - DNA, 25 bp, Homo sapien
gaatcccagcctgatacttggacag

SEQ ID NO: 622597 - DNA, 25 bp, Homo sapien
tggaaccaagcaacacatgtgaatt

SEQ ID NO: 622598 - DNA, 25 bp, Homo sapien
caggagagatggaaccaagcaacac

SEQ ID NO: 622599 - DNA, 25 bp, Homo sapien
cacatgtgaatttggtaggctcgac

SEQ ID NO: 622600 - DNA, 25 bp, Homo sapien
ggctcgactacaaaggtccttgatt

SEQ ID NO: 622601 - DNA, 25 bp, Homo sapien
gggaagtggccgctcgtcaatattt

SEQ ID NO: 622602 - DNA, 25 bp, Homo sapien
accgtgaacgctctgtttagcatcc

SEQ ID NO: 622603 - DNA, 25 bp, Homo sapien
ggccgctcgtcaatatttggtgcag

SEQ ID NO: 622604 - DNA, 25 bp, Homo sapien
cgtgaacgctctgtttagcatccag

SEQ ID NO: 622605 - DNA, 25 bp, Homo sapien
cgtcgagcagtccttagtgaaaatt

SEQ ID NO: 622606 - DNA, 25 bp, Homo sapien
ctatttattaatggttggaccaatg

SEQ ID NO: 622607 - DNA, 25 bp, Homo sapien
taatggttggaccaatgtactcaca

SEQ ID NO: 622608 - DNA, 25 bp, Homo sapien
tactcacagctgttgcgtcgagcag

SEQ ID NO: 622609 - DNA, 25 bp, Homo sapien
tgaaactaggtgtgtgaaatacccg

SEQ ID NO: 622610 - DNA, 25 bp, Homo sapien
tacccgcagacatttgggattggct

SEQ ID NO: 622611 - DNA, 25 bp, Homo sapien
gcagaggcccagtgtttaccgaggt

SEQ ID NO: 622612 - DNA, 25 bp, Homo sapien
tcagctggatttgccgtggcagaaa

SEQ ID NO: 622613 - DNA, 25 bp, Homo sapien
gtcctctacttcgatgacagctcca

SEQ ID NO: 622614 - DNA, 25 bp, Homo sapien
gaccaactgccttttgtgagacctt

SEQ ID NO: 622615 - DNA, 25 bp, Homo sapien
gacagctccaacgtcatcctgaaga

SEQ ID NO: 622616 - DNA, 25 bp, Homo sapien
aatacagaaacatggtggtccgggc

SEQ ID NO: 622617 - DNA, 25 bp, Homo sapien
gccttcagaatgtccggcctgcagt

SEQ ID NO: 622618 - DNA, 25 bp, Homo sapien
tcctgcttagaactcctcccggctt

SEQ ID NO: 622619 - DNA, 25 bp, Homo sapien
gttttccaaagagcagcagagtgag

SEQ ID NO: 622620 - DNA, 25 bp, Homo sapien
tctgcgagtggcagagcccgtcatc

SEQ ID NO: 622621 - DNA, 25 bp, Homo sapien
ggcctgctttgtgctaagctgtgtg

SEQ ID NO: 622622 - DNA, 25 bp, Homo sapien
gcagaggataccagcacatttgtcc

SEQ ID NO: 622623 - DNA, 25 bp, Homo sapien
ctgaggcctgctttgtgctaagctg

SEQ ID NO: 622624 - DNA, 25 bp, Homo sapien
tttgtccagcgtgcatctgaggcct

SEQ ID NO: 622625 - DNA, 25 bp, Homo sapien
aatgcggtccccaggagaagtctag

SEQ ID NO: 622626 - DNA, 25 bp, Homo sapien
gcagctgcccatccgtgtgggattt

SEQ ID NO: 622627 - DNA, 25 bp, Homo sapien
cactgggtttctggatggatcatgc

SEQ ID NO: 622628 - DNA, 25 bp, Homo sapien
agagccgtgtcagaagctctgcagt

SEQ ID NO: 622629 - DNA, 25 bp, Homo sapien
tgcctgagcgcatgtacaacagatg

SEQ ID NO: 622630 - DNA, 25 bp, Homo sapien
gaagttgcacggacttggacagcat

SEQ ID NO: 622631 - DNA, 25 bp, Homo sapien
gcctgtcccagtagtgtgtagtgag

SEQ ID NO: 622632 - DNA, 25 bp, Homo sapien
gctcagtaagacaccaaatgcacga

SEQ ID NO: 622633 - DNA, 25 bp, Homo sapien
tctattcagacagtcccgaggcaga

SEQ ID NO: 622634 - DNA, 25 bp, Homo sapien
caaggtcctattactcagtggctgg

SEQ ID NO: 622635 - DNA, 25 bp, Homo sapien
ggacttgttaccatagacagggaca

SEQ ID NO: 622636 - DNA, 25 bp, Homo sapien
gacagggacagaagaaccatcacag

SEQ ID NO: 622637 - DNA, 25 bp, Homo sapien
tgcaactggccccttagagacattt

SEQ ID NO: 622638 - DNA, 25 bp, Homo sapien
atcttgcataggctgaatctagaca

SEQ ID NO: 622639 - DNA, 25 bp, Homo sapien
gcaggatcttgcataggctgaatct

SEQ ID NO: 622640 - DNA, 25 bp, Homo sapien
agacatttcttagtccaggcaggat

SEQ ID NO: 622641 - DNA, 25 bp, Homo sapien
taattgatgtcggtagcatggtaca

SEQ ID NO: 622642 - DNA, 25 bp, Homo sapien
tgttaatttgttcccatgcaggagc

SEQ ID NO: 622643 - DNA, 25 bp, Homo sapien
caagtctcctgacactttgcagcta

SEQ ID NO: 622644 - DNA, 25 bp, Homo sapien
taacggaagttctcggtgacagcag

SEQ ID NO: 622645 - DNA, 25 bp, Homo sapien
tatgcgaaactcaggcaagcatgtg

SEQ ID NO: 622646 - DNA, 25 bp, Homo sapien
gaattaatgacaactccgagagcac

SEQ ID NO: 622647 - DNA, 25 bp, Homo sapien
aagcctgtgctgatccgcgtggagt

SEQ ID NO: 622648 - DNA, 25 bp, Homo sapien
tggagccagggtgcatataatccgg

SEQ ID NO: 622649 - DNA, 25 bp, Homo sapien
tagtttaaatcaaatgcgccggtgc

SEQ ID NO: 622650 - DNA, 25 bp, Homo sapien
gggtgaggaactaccaatatttaca

SEQ ID NO: 622651 - DNA, 25 bp, Homo sapien
gatcccagatcaacgtggagttgag

SEQ ID NO: 622652 - DNA, 25 bp, Homo sapien
tacacactcaaattgctccaacttg

SEQ ID NO: 622653 - DNA, 25 bp, Homo sapien
agtgtttggcattaagacctctccc

SEQ ID NO: 622654 - DNA, 25 bp, Homo sapien
tttcccaagcatgtatgtgacccag

SEQ ID NO: 622655 - DNA, 25 bp, Homo sapien
tataggagtgcaccaacagctgtgt

SEQ ID NO: 622656 - DNA, 25 bp, Homo sapien
gagcaggccctaccactgtagagta

SEQ ID NO: 622657 - DNA, 25 bp, Homo sapien
tatccgcgccggaggttggaagagg

SEQ ID NO: 622658 - DNA, 25 bp, Homo sapien
ggcctcttgtgcgatccagggcgca

SEQ ID NO: 622659 - DNA, 25 bp, Homo sapien
gcgcacaaggctgggagagcgcccc

SEQ ID NO: 622660 - DNA, 25 bp, Homo sapien
ccgagggcgagagcgccagaggagc

SEQ ID NO: 622661 - DNA, 25 bp, Homo sapien
taggcaccccgtgggcactcagtaa

SEQ ID NO: 622662 - DNA, 25 bp, Homo sapien
gcgacgtcccgccaggctctaggca

SEQ ID NO: 622663 - DNA, 25 bp, Homo sapien
gggcagggccggctccgattcctcc

SEQ ID NO: 622664 - DNA, 25 bp, Homo sapien
ttcctggtccggaccgcgagtgccg

SEQ ID NO: 622665 - DNA, 25 bp, Homo sapien
acaggctggcaacggcttcagggag

SEQ ID NO: 622666 - DNA, 25 bp, Homo sapien
caggaagccttctatttccgcgcca

SEQ ID NO: 622667 - DNA, 25 bp, Homo sapien
aagaccggctcaagggtcaccgctt

SEQ ID NO: 622668 - DNA, 25 bp, Homo sapien
cagcgtggctggcttaaaaggatac

SEQ ID NO: 622669 - DNA, 25 bp, Homo sapien
agaaaacaaacgtgcgaggggcgag

SEQ ID NO: 622670 - DNA, 25 bp, Homo sapien
aaacaaacgtgcgaggggcgaggcg

SEQ ID NO: 622671 - DNA, 25 bp, Homo sapien
agcaagagaaactacaggaaagaaa

SEQ ID NO: 622672 - DNA, 25 bp, Homo sapien
gacagcaagagaaactacaggaaag

SEQ ID NO: 622673 - DNA, 25 bp, Homo sapien
ctcaagtatttgagcctcaatttcc

SEQ ID NO: 622674 - DNA, 25 bp, Homo sapien
tccctcaagtatttgagcctcaatt

SEQ ID NO: 622675 - DNA, 25 bp, Homo sapien
gggcaggttccctcaagtatttgag

SEQ ID NO: 622676 - DNA, 25 bp, Homo sapien
aggttccctcaagtatttgagcctc

SEQ ID NO: 622677 - DNA, 25 bp, Homo sapien
tcctcaaacactgatagggcatcta

SEQ ID NO: 622678 - DNA, 25 bp, Homo sapien
ggcttttgagtgtatgacttctgca

SEQ ID NO: 622679 - DNA, 25 bp, Homo sapien
cttctgcaataaaggaggaattgaa

SEQ ID NO: 622680 - DNA, 25 bp, Homo sapien
aagggctcagaggtatgttcctcaa

SEQ ID NO: 622681 - DNA, 25 bp, Homo sapien
gatggaattctggtttttgatgttt

SEQ ID NO: 622682 - DNA, 25 bp, Homo sapien
ggaggagcttgcatatgctctgaac

SEQ ID NO: 622683 - DNA, 25 bp, Homo sapien
gaggagcttgcatatgctctgaaca

SEQ ID NO: 622684 - DNA, 25 bp, Homo sapien
ggtaggaggagcttgcatatgctct

SEQ ID NO: 622685 - DNA, 25 bp, Homo sapien
taggaggagcttgcatatgctctga

SEQ ID NO: 622686 - DNA, 25 bp, Homo sapien
ttagccgtcgttggtactgatgtct

SEQ ID NO: 622687 - DNA, 25 bp, Homo sapien
cttccctccgacttggaagtgcttg

SEQ ID NO: 622688 - DNA, 25 bp, Homo sapien
gatgtctgttggtgtgctgtccttc

SEQ ID NO: 622689 - DNA, 25 bp, Homo sapien
gctgtccttccctccgacttggaag

SEQ ID NO: 622690 - DNA, 25 bp, Homo sapien
acactggactgagttagggccgcag

SEQ ID NO: 622691 - DNA, 25 bp, Homo sapien
ctgccaggtgttgaaccaggaggca

SEQ ID NO: 622692 - DNA, 25 bp, Homo sapien
tgcagggcctagtgcagctcagagc

SEQ ID NO: 622693 - DNA, 25 bp, Homo sapien
tcgaaacagaggagtcgcaggagcc

SEQ ID NO: 622694 - DNA, 25 bp, Homo sapien
tctaggaaacacgtccctgcaaggc

SEQ ID NO: 622695 - DNA, 25 bp, Homo sapien
caggagcccgttttgctgttctgga

SEQ ID NO: 622696 - DNA, 25 bp, Homo sapien
gagaattgccccagagtagaactgt

SEQ ID NO: 622697 - DNA, 25 bp, Homo sapien
tgaatgccagtctcgtctgcgagga

SEQ ID NO: 622698 - DNA, 25 bp, Homo sapien
gaggtgattgtattcctgcacacag

SEQ ID NO: 622699 - DNA, 25 bp, Homo sapien
catcagatgaggtcagtgccaccaa

SEQ ID NO: 622700 - DNA, 25 bp, Homo sapien
ccacttggctctttcaagggcgttt

SEQ ID NO: 622701 - DNA, 25 bp, Homo sapien
tgttgagacttccactagggcccgg

SEQ ID NO: 622702 - DNA, 25 bp, Homo sapien
ttcaagggcgtttcaatgagcagcc

SEQ ID NO: 622703 - DNA, 25 bp, Homo sapien
tctcctttgcggcaggaccaccagg

SEQ ID NO: 622704 - DNA, 25 bp, Homo sapien
ttggtcggacgcttcatttgctcca

SEQ ID NO: 622705 - DNA, 25 bp, Homo sapien
tatgagaagtatttggtcggacgct

SEQ ID NO: 622706 - DNA, 25 bp, Homo sapien
gcctctgagcggcttacccagcaag

SEQ ID NO: 622707 - DNA, 25 bp, Homo sapien
cctctgagcggcttacccagcaagg

SEQ ID NO: 622708 - DNA, 25 bp, Homo sapien
cccctctccattctcttagagtgaa

SEQ ID NO: 622709 - DNA, 25 bp, Homo sapien
ctccattctcttagagtgaagacag

SEQ ID NO: 622710 - DNA, 25 bp, Homo sapien
cattctcttagagtgaagacagcca

SEQ ID NO: 622711 - DNA, 25 bp, Homo sapien
cctctccattctcttagagtgaaga

SEQ ID NO: 622712 - DNA, 25 bp, Homo sapien
atttggtgtcatttgtggatggcag

SEQ ID NO: 622713 - DNA, 25 bp, Homo sapien
gatgtcaaagttgagcaggcttcta

SEQ ID NO: 622714 - DNA, 25 bp, Homo sapien
ggcattccctttgtacatcattggt

SEQ ID NO: 622715 - DNA, 25 bp, Homo sapien
gacagtgcccttggagatctatggg

SEQ ID NO: 622716 - DNA, 25 bp, Homo sapien
caagttgcagacgtggcagcagtgc

SEQ ID NO: 622717 - DNA, 25 bp, Homo sapien
ggcctgaacgcgaggctgtaacacg

SEQ ID NO: 622718 - DNA, 25 bp, Homo sapien
gcagtgcacatgaaagcagccgcag

SEQ ID NO: 622719 - DNA, 25 bp, Homo sapien
taacacgatgcgtgcgtgaaagaga

SEQ ID NO: 622720 - DNA, 25 bp, Homo sapien
gcaatgccgatgcatttgggggctc

SEQ ID NO: 622721 - DNA, 25 bp, Homo sapien
caatgccgatgcatttgggggctcc

SEQ ID NO: 622722 - DNA, 25 bp, Homo sapien
gagattggcagagcgcggttgcaga

SEQ ID NO: 622723 - DNA, 25 bp, Homo sapien
gctccttgggggatgagattggcag

SEQ ID NO: 622724 - DNA, 25 bp, Homo sapien
tctccctttctgttgtcacggcagt

SEQ ID NO: 622725 - DNA, 25 bp, Homo sapien
gaggagctctggctgtcaccccttc

SEQ ID NO: 622726 - DNA, 25 bp, Homo sapien
ggagctctggctgtcaccccttcaa

SEQ ID NO: 622727 - DNA, 25 bp, Homo sapien
tttctgttgtcacggcagtggcccg

SEQ ID NO: 622728 - DNA, 25 bp, Homo sapien
cacgttgagccctaggctccaacag

SEQ ID NO: 622729 - DNA, 25 bp, Homo sapien
ggccttggtcctcacgttgagccct

SEQ ID NO: 622730 - DNA, 25 bp, Homo sapien
gctgagtcagctaagctgctggtga

SEQ ID NO: 622731 - DNA, 25 bp, Homo sapien
aagaggccccttgctgagtcagcta

SEQ ID NO: 622732 - DNA, 25 bp, Homo sapien
aaataaatctgtaaccggctgtgat

SEQ ID NO: 622733 - DNA, 25 bp, Homo sapien
ttgtaaacaccacggcacatcctgg

SEQ ID NO: 622734 - DNA, 25 bp, Homo sapien
aagtccggtcaagtgaagcggtggg

SEQ ID NO: 622735 - DNA, 25 bp, Homo sapien
agtggggaaggaacaaataaatctg

SEQ ID NO: 622736 - DNA, 25 bp, Homo sapien
tgagagccaactgccgtctaggtct

SEQ ID NO: 622737 - DNA, 25 bp, Homo sapien
gggcacttggatggaatcttctact

SEQ ID NO: 622738 - DNA, 25 bp, Homo sapien
tcctgtgggcacttggatggaatct

SEQ ID NO: 622739 - DNA, 25 bp, Homo sapien
ggaatcttctactgagagccaactg

SEQ ID NO: 622740 - DNA, 25 bp, Homo sapien
tgtgagatctccttgatgtaagcag

SEQ ID NO: 622741 - DNA, 25 bp, Homo sapien
cggtagatgcagttgccagcaatgc

SEQ ID NO: 622742 - DNA, 25 bp, Homo sapien
ctagtggcatctgtgagtgagcatt

SEQ ID NO: 622743 - DNA, 25 bp, Homo sapien
taagcagtatgtggatcggtagatg

SEQ ID NO: 622744 - DNA, 25 bp, Homo sapien
cgaatccactggggacgattttgct

SEQ ID NO: 622745 - DNA, 25 bp, Homo sapien
gaatccactggggacgattttgctt

SEQ ID NO: 622746 - DNA, 25 bp, Homo sapien
tggccaggaattgcttaatcccaaa

SEQ ID NO: 622747 - DNA, 25 bp, Homo sapien
ccaggaattgcttaatcccaaaagt

SEQ ID NO: 622748 - DNA, 25 bp, Homo sapien
tttctgagcggccggcgtgcccacg

SEQ ID NO: 622749 - DNA, 25 bp, Homo sapien
tgcctttcccgcgctttctgagcgg

SEQ ID NO: 622750 - DNA, 25 bp, Homo sapien
tttcccgcgctttctgagcggccgg

SEQ ID NO: 622751 - DNA, 25 bp, Homo sapien
ctgtcctaggctgcgcccttggggc

SEQ ID NO: 622752 - DNA, 25 bp, Homo sapien
cctgtgtcggtccaaaacgtcgaag

SEQ ID NO: 622753 - DNA, 25 bp, Homo sapien
caaaacgtcgaagaacgaggcctcg

SEQ ID NO: 622754 - DNA, 25 bp, Homo sapien
ctccctgtgtcggtccaaaacgtcg

SEQ ID NO: 622755 - DNA, 25 bp, Homo sapien
tgtgtcggtccaaaacgtcgaagaa

SEQ ID NO: 622756 - DNA, 25 bp, Homo sapien
tcccagcttgatctgttgtctatcg

SEQ ID NO: 622757 - DNA, 25 bp, Homo sapien
gtctatcgtgaatgcaggtgcttca

SEQ ID NO: 622758 - DNA, 25 bp, Homo sapien
tcttgccaagcttgtgattatgtct

SEQ ID NO: 622759 - DNA, 25 bp, Homo sapien
tcatttcttgccaagcttgtgatta

SEQ ID NO: 622760 - DNA, 25 bp, Homo sapien
ctgaagacccacagaatcttcaaac

SEQ ID NO: 622761 - DNA, 25 bp, Homo sapien
atttttgagctgattttggtgaatc

SEQ ID NO: 622762 - DNA, 25 bp, Homo sapien
tttttgagctgattttggtgaatca

SEQ ID NO: 622763 - DNA, 25 bp, Homo sapien
ggttgcataagtgttgctctgtact

SEQ ID NO: 622764 - DNA, 25 bp, Homo sapien
gttgcataagtgttgctctgtacta

SEQ ID NO: 622765 - DNA, 25 bp, Homo sapien
cataagtgttgctctgtactaattt

SEQ ID NO: 622766 - DNA, 25 bp, Homo sapien
tgcataagtgttgctctgtactaat

SEQ ID NO: 622767 - DNA, 25 bp, Homo sapien
aagagttgactgtcagtgtaatata

SEQ ID NO: 622768 - DNA, 25 bp, Homo sapien
caaagagttgactgtcagtgtaata

SEQ ID NO: 622769 - DNA, 25 bp, Homo sapien
aaagagttgactgtcagtgtaatat

SEQ ID NO: 622770 - DNA, 25 bp, Homo sapien
gagttgactgtcagtgtaatatatg

SEQ ID NO: 622771 - DNA, 25 bp, Homo sapien
gtagactcctccttgacacttttaa

SEQ ID NO: 622772 - DNA, 25 bp, Homo sapien
tatatgtagactcctccttgacact

SEQ ID NO: 622773 - DNA, 25 bp, Homo sapien
cattgataatattgtcgacgacagt

SEQ ID NO: 622774 - DNA, 25 bp, Homo sapien
tgtcattgataatattgtcgacgac

SEQ ID NO: 622775 - DNA, 25 bp, Homo sapien
ggtacaattcactttggtgccatct

SEQ ID NO: 622776 - DNA, 25 bp, Homo sapien
cgatgtatcttaagttgccagcaat

SEQ ID NO: 622777 - DNA, 25 bp, Homo sapien
cgttgcaccacaggtacaattcact

SEQ ID NO: 622778 - DNA, 25 bp, Homo sapien
tggtgccatcttcctcgatgtatct

SEQ ID NO: 622779 - DNA, 25 bp, Homo sapien
tttctttgaccataccagtcatcag

SEQ ID NO: 622780 - DNA, 25 bp, Homo sapien
ccataccagtcatcagagacttctt

SEQ ID NO: 622781 - DNA, 25 bp, Homo sapien
tgaccataccagtcatcagagactt

SEQ ID NO: 622782 - DNA, 25 bp, Homo sapien
ttctttgaccataccagtcatcaga

SEQ ID NO: 622783 - DNA, 25 bp, Homo sapien
tgaatattcgatggcacagcaacag

SEQ ID NO: 622784 - DNA, 25 bp, Homo sapien
tccgaattccttgaatattcgatgg

SEQ ID NO: 622785 - DNA, 25 bp, Homo sapien
gaattccttgaatattcgatggcac

SEQ ID NO: 622786 - DNA, 25 bp, Homo sapien
ttccttgaatattcgatggcacagc

SEQ ID NO: 622787 - DNA, 25 bp, Homo sapien
atgaatgaatgaacattccaaaagt

SEQ ID NO: 622788 - DNA, 25 bp, Homo sapien
aatgaatgaatgaacattccaaaag

SEQ ID NO: 622789 - DNA, 25 bp, Homo sapien
gaatgaatgaacattccaaaagttt

SEQ ID NO: 622790 - DNA, 25 bp, Homo sapien
tgaatgaatgaacattccaaaagtt

SEQ ID NO: 622791 - DNA, 25 bp, Homo sapien
gtgaagttaaggctgataaattgaa

SEQ ID NO: 622792 - DNA, 25 bp, Homo sapien
tgtgaagttaaggctgataaattga

SEQ ID NO: 622793 - DNA, 25 bp, Homo sapien
tgaagttaaggctgataaattgaaa

SEQ ID NO: 622794 - DNA, 25 bp, Homo sapien
gaagttaaggctgataaattgaaag

SEQ ID NO: 622795 - DNA, 25 bp, Homo sapien
gagacaatttgttgcaaaagttgtc

SEQ ID NO: 622796 - DNA, 25 bp, Homo sapien
cgtaatcatgatgcaaggagacaat

SEQ ID NO: 622797 - DNA, 25 bp, Homo sapien
gagccgctgaaatgttgcatctttt

SEQ ID NO: 622798 - DNA, 25 bp, Homo sapien
gcaaaagttgtcatctaggagccgc

SEQ ID NO: 622799 - DNA, 25 bp, Homo sapien
tggatttcaggtgctgaaagactgg

SEQ ID NO: 622800 - DNA, 25 bp, Homo sapien
gatttcaggtgctgaaagactggtg

SEQ ID NO: 622801 - DNA, 25 bp, Homo sapien
tcaggtgctgaaagactggtgttga

SEQ ID NO: 622802 - DNA, 25 bp, Homo sapien
tttcaggtgctgaaagactggtgtt

SEQ ID NO: 622803 - DNA, 25 bp, Homo sapien
tcttgtgtttagatcaggaactccc

SEQ ID NO: 622804 - DNA, 25 bp, Homo sapien
cacagtttcttgactaaaagtcttg

SEQ ID NO: 622805 - DNA, 25 bp, Homo sapien
gatccatacttatagatgcacatta

SEQ ID NO: 622806 - DNA, 25 bp, Homo sapien
tagatccatacttatagatgcacat

SEQ ID NO: 622807 - DNA, 25 bp, Homo sapien
catagatccatacttatagatgcac

SEQ ID NO: 622808 - DNA, 25 bp, Homo sapien
catacttatagatgcacattatttc

SEQ ID NO: 622809 - DNA, 25 bp, Homo sapien
ttcaccatgcatcagaatgcttgga

SEQ ID NO: 622810 - DNA, 25 bp, Homo sapien
gcatcagaatgcttggaggatccca

SEQ ID NO: 622811 - DNA, 25 bp, Homo sapien
attccccatcttacaccctgctcca

SEQ ID NO: 622812 - DNA, 25 bp, Homo sapien
atttcaccatgcatcagaatgcttg

SEQ ID NO: 622813 - DNA, 25 bp, Homo sapien
aagaccaagccatctaatagctgga

SEQ ID NO: 622814 - DNA, 25 bp, Homo sapien
agaccaagccatctaatagctggaa

SEQ ID NO: 622815 - DNA, 25 bp, Homo sapien
gaccaagccatctaatagctggaac

SEQ ID NO: 622816 - DNA, 25 bp, Homo sapien
accaagccatctaatagctggaact

SEQ ID NO: 622817 - DNA, 25 bp, Homo sapien
caggatactgtcaagtttcatttgg

SEQ ID NO: 622818 - DNA, 25 bp, Homo sapien
ggcaggtaacataaggtctcctcag

SEQ ID NO: 622819 - DNA, 25 bp, Homo sapien
ttttctccaaaatggttggcaggta

SEQ ID NO: 622820 - DNA, 25 bp, Homo sapien
catttggtccctttttgtcagtgga

SEQ ID NO: 622821 - DNA, 25 bp, Homo sapien
tgatgataggaaagtcaaagcttga

SEQ ID NO: 622822 - DNA, 25 bp, Homo sapien
ggaaagataatctgatgataggaaa

SEQ ID NO: 622823 - DNA, 25 bp, Homo sapien
taatttgttaggtaagtacactctg

SEQ ID NO: 622824 - DNA, 25 bp, Homo sapien
gtacactctggaaagataatctgat

SEQ ID NO: 622825 - DNA, 25 bp, Homo sapien
gaattaagaatataatatatgttct

SEQ ID NO: 622826 - DNA, 25 bp, Homo sapien
agcctctggcaatcagaagttcttc

SEQ ID NO: 622827 - DNA, 25 bp, Homo sapien
aaaagcctctggcaatcagaagttc

SEQ ID NO: 622828 - DNA, 25 bp, Homo sapien
aaagcctctggcaatcagaagttct

SEQ ID NO: 622829 - DNA, 25 bp, Homo sapien
caaatgaattaatggagtaagaccc

SEQ ID NO: 622830 - DNA, 25 bp, Homo sapien
tctctatagaggcaagaataaggcc

SEQ ID NO: 622831 - DNA, 25 bp, Homo sapien
tgttaccagtaagatactttatgcg

SEQ ID NO: 622832 - DNA, 25 bp, Homo sapien
tgtaagaagaaactaccggacacca

SEQ ID NO: 622833 - DNA, 25 bp, Homo sapien
gaagcctccttaagcctgcggtaga

SEQ ID NO: 622834 - DNA, 25 bp, Homo sapien
tttataaatccgcaactggccaggc

SEQ ID NO: 622835 - DNA, 25 bp, Homo sapien
tccaaagttgatgtagccgctgcaa

SEQ ID NO: 622836 - DNA, 25 bp, Homo sapien
tgcgtcgcccggaaatcgtcgaaga

SEQ ID NO: 622837 - DNA, 25 bp, Homo sapien
tctcgccccggcggaaagcggcggc

SEQ ID NO: 622838 - DNA, 25 bp, Homo sapien
gccgggagcagaagggtctgaggag

SEQ ID NO: 622839 - DNA, 25 bp, Homo sapien
tacttggcgggctaagacagaaaca

SEQ ID NO: 622840 - DNA, 25 bp, Homo sapien
caagagaaacgatggattaggccct

SEQ ID NO: 622841 - DNA, 25 bp, Homo sapien
gaagtactgcctgtacggtggcacc

SEQ ID NO: 622842 - DNA, 25 bp, Homo sapien
tgacatgtatctgacgagacgccag

SEQ ID NO: 622843 - DNA, 25 bp, Homo sapien
ccactggttccaaaacctgaggttg

SEQ ID NO: 622844 - DNA, 25 bp, Homo sapien
ctgaggttgttccaaacaggctcat

SEQ ID NO: 622845 - DNA, 25 bp, Homo sapien
caaaacctgaggttgttccaaacag

SEQ ID NO: 622846 - DNA, 25 bp, Homo sapien
cactggttccaaaacctgaggttgt

SEQ ID NO: 622847 - DNA, 25 bp, Homo sapien
ggattgtgattgtctgtagttgcac

SEQ ID NO: 622848 - DNA, 25 bp, Homo sapien
attgtctgtagttgcactgccaaac

SEQ ID NO: 622849 - DNA, 25 bp, Homo sapien
cttcatgggattgtgattgtctgta

SEQ ID NO: 622850 - DNA, 25 bp, Homo sapien
gtgattgtctgtagttgcactgcca

SEQ ID NO: 622851 - DNA, 25 bp, Homo sapien
ttccttactttgatcaaagacagga

SEQ ID NO: 622852 - DNA, 25 bp, Homo sapien
gtggcctttccttgtgtacaagaac

SEQ ID NO: 622853 - DNA, 25 bp, Homo sapien
aataagctagagaaagtaccagcac

SEQ ID NO: 622854 - DNA, 25 bp, Homo sapien
tgaattagacctttccttactttga

SEQ ID NO: 622855 - DNA, 25 bp, Homo sapien
gacagacaaccaatgctatcatcag

SEQ ID NO: 622856 - DNA, 25 bp, Homo sapien
caaggttggtgggctaaaagacaga

SEQ ID NO: 622857 - DNA, 25 bp, Homo sapien
tgcaataagaaagttccccggcaag

SEQ ID NO: 622858 - DNA, 25 bp, Homo sapien
cattagcccatgatcctgcaataag

SEQ ID NO: 622859 - DNA, 25 bp, Homo sapien
taaccttggccatacaaagagagat

SEQ ID NO: 622860 - DNA, 25 bp, Homo sapien
aaaaagtttcatacatgcctgagga

SEQ ID NO: 622861 - DNA, 25 bp, Homo sapien
tgggaaacaacggagctaaagctaa

SEQ ID NO: 622862 - DNA, 25 bp, Homo sapien
aacgggtgtaagaataatgtctgcc

SEQ ID NO: 622863 - DNA, 25 bp, Homo sapien
tttggaatggtctgtccactgtctt

SEQ ID NO: 622864 - DNA, 25 bp, Homo sapien
ggcttttggaatggtctgtccactg

SEQ ID NO: 622865 - DNA, 25 bp, Homo sapien
ctgctgggcttttggaatggtctgt

SEQ ID NO: 622866 - DNA, 25 bp, Homo sapien
gctgggcttttggaatggtctgtcc

SEQ ID NO: 622867 - DNA, 25 bp, Homo sapien
gagcctcttttgatctaacaaaagg

SEQ ID NO: 622868 - DNA, 25 bp, Homo sapien
ctcttttgatctaacaaaaggagag

SEQ ID NO: 622869 - DNA, 25 bp, Homo sapien
gcctcttttgatctaacaaaaggag

SEQ ID NO: 622870 - DNA, 25 bp, Homo sapien
tgagcctcttttgatctaacaaaag

SEQ ID NO: 622871 - DNA, 25 bp, Homo sapien
attagaggcactatctgcccagtga

SEQ ID NO: 622872 - DNA, 25 bp, Homo sapien
cagtattagaggcactatctgccca

SEQ ID NO: 622873 - DNA, 25 bp, Homo sapien
gacatatattcaacagctgtggtat

SEQ ID NO: 622874 - DNA, 25 bp, Homo sapien
atgcaaacacccctaccccagtgaa

SEQ ID NO: 622875 - DNA, 25 bp, Homo sapien
aaaggagcaggtatcaagcatgcac

SEQ ID NO: 622876 - DNA, 25 bp, Homo sapien
tagatcacccggatcaaaaggagca

SEQ ID NO: 622877 - DNA, 25 bp, Homo sapien
aaatgtcctctagatcacccggatc

SEQ ID NO: 622878 - DNA, 25 bp, Homo sapien
tgctgaggtcccacattttggcagt

SEQ ID NO: 622879 - DNA, 25 bp, Homo sapien
cgatctgtatcgcttggttactgct

SEQ ID NO: 622880 - DNA, 25 bp, Homo sapien
cgatgccgtaaacactttgctccca

SEQ ID NO: 622881 - DNA, 25 bp, Homo sapien
ttggcagttttatcacacgatgccg

SEQ ID NO: 622882 - DNA, 25 bp, Homo sapien
taaatgtaagaatgtgctgaacagc

SEQ ID NO: 622883 - DNA, 25 bp, Homo sapien
aaaacagatcaaggtaaatgtaaga

SEQ ID NO: 622884 - DNA, 25 bp, Homo sapien
cagagtttgcatgtccccaccaaat

SEQ ID NO: 622885 - DNA, 25 bp, Homo sapien
aacatacttagcattttaccaatcc

SEQ ID NO: 622886 - DNA, 25 bp, Homo sapien
tttaaagtcttatcccagctcccag

SEQ ID NO: 622887 - DNA, 25 bp, Homo sapien
acacagctgtagtttggagctttga

SEQ ID NO: 622888 - DNA, 25 bp, Homo sapien
ctttaaagtcttatcccagctccca

SEQ ID NO: 622889 - DNA, 25 bp, Homo sapien
taaagtcttatcccagctcccagtc

SEQ ID NO: 622890 - DNA, 25 bp, Homo sapien
gcagaagtcgaaatggtgcaaaaat

SEQ ID NO: 622891 - DNA, 25 bp, Homo sapien
ttcagagcagaagtcgaaatggtgc

SEQ ID NO: 622892 - DNA, 25 bp, Homo sapien
gaagccagtatgtgaccattcagag

SEQ ID NO: 622893 - DNA, 25 bp, Homo sapien
gccaaacaatgcctcaactgcacat

SEQ ID NO: 622894 - DNA, 25 bp, Homo sapien
catcataggatttgacgatcgagta

SEQ ID NO: 622895 - DNA, 25 bp, Homo sapien
gatttgacgatcgagtatcccaaaa

SEQ ID NO: 622896 - DNA, 25 bp, Homo sapien
cacagtaacacctttcagggagttg

SEQ ID NO: 622897 - DNA, 25 bp, Homo sapien
gggagttgcaaaaccatcataggat

SEQ ID NO: 622898 - DNA, 25 bp, Homo sapien
actgcaggacgccacaaggtgagaa

SEQ ID NO: 622899 - DNA, 25 bp, Homo sapien
tgatagatgtcacactagagatggc

SEQ ID NO: 622900 - DNA, 25 bp, Homo sapien
tagagatggcatgtagctagctgca

SEQ ID NO: 622901 - DNA, 25 bp, Homo sapien
gcatatgttcaaacgagtggcagga

SEQ ID NO: 622902 - DNA, 25 bp, Homo sapien
ttcagtggagattctatcctcctga

SEQ ID NO: 622903 - DNA, 25 bp, Homo sapien
tgatagacaatcaggcccctctctg

SEQ ID NO: 622904 - DNA, 25 bp, Homo sapien
ttcagaaggttgattctctagctga

SEQ ID NO: 622905 - DNA, 25 bp, Homo sapien
tggagattctatcctcctgaattca

SEQ ID NO: 622906 - DNA, 25 bp, Homo sapien
ggcaagcacgggcagatttctagat

SEQ ID NO: 622907 - DNA, 25 bp, Homo sapien
agaagctgacaagagtgcaggccca

SEQ ID NO: 622908 - DNA, 25 bp, Homo sapien
aaactggccttagcaggacggcttc

SEQ ID NO: 622909 - DNA, 25 bp, Homo sapien
tctgcatacggttcctgagaaggct

SEQ ID NO: 622910 - DNA, 25 bp, Homo sapien
acaggaatgaggtacgagtctccag

SEQ ID NO: 622911 - DNA, 25 bp, Homo sapien
gtccgactgggtgtccatgtcagga

SEQ ID NO: 622912 - DNA, 25 bp, Homo sapien
ctgtccgactgggtgtccatgtcag

SEQ ID NO: 622913 - DNA, 25 bp, Homo sapien
cgagtctccagtccacagggcgtgg

SEQ ID NO: 622914 - DNA, 25 bp, Homo sapien
tgcagtggccatgctacagacaagc

SEQ ID NO: 622915 - DNA, 25 bp, Homo sapien
gagtgaacatgagagccaccgctta

SEQ ID NO: 622916 - DNA, 25 bp, Homo sapien
tcagttctcaacaacggagaggcca

SEQ ID NO: 622917 - DNA, 25 bp, Homo sapien
ccaagggcaggtctctattctacag

SEQ ID NO: 622918 - DNA, 25 bp, Homo sapien
tgatatagtgaatagcaactctccc

SEQ ID NO: 622919 - DNA, 25 bp, Homo sapien
tcgatacttcccagggcaaaaccag

SEQ ID NO: 622920 - DNA, 25 bp, Homo sapien
aaaaccagtaggcttgttctgtttg

SEQ ID NO: 622921 - DNA, 25 bp, Homo sapien
gaatagcaactctcccctcgatact

SEQ ID NO: 622922 - DNA, 25 bp, Homo sapien
tgcaagctgacagagtcacacttac

SEQ ID NO: 622923 - DNA, 25 bp, Homo sapien
tgaaagacaaaggttcatgtaagtc

SEQ ID NO: 622924 - DNA, 25 bp, Homo sapien
aagacaaaggttcatgtaagtcttc

SEQ ID NO: 622925 - DNA, 25 bp, Homo sapien
ctgaaagacaaaggttcatgtaagt

SEQ ID NO: 622926 - DNA, 25 bp, Homo sapien
gaaagacaaaggttcatgtaagtct

SEQ ID NO: 622927 - DNA, 25 bp, Homo sapien
cgatgacatttaaaggtgaagttat

SEQ ID NO: 622928 - DNA, 25 bp, Homo sapien
ggttccattagatcgatgacattta

SEQ ID NO: 622929 - DNA, 25 bp, Homo sapien
tgaggagctgaagtgttggttccat

SEQ ID NO: 622930 - DNA, 25 bp, Homo sapien
cgcataaatgtcctgaggagctgaa

SEQ ID NO: 622931 - DNA, 25 bp, Homo sapien
gaagctgaatctaccatcagatccc

SEQ ID NO: 622932 - DNA, 25 bp, Homo sapien
cagtcgtagctggaagcgtatgcaa

SEQ ID NO: 622933 - DNA, 25 bp, Homo sapien
tctggcatctttgtcccagaagctg

SEQ ID NO: 622934 - DNA, 25 bp, Homo sapien
gatgggctgatctaactgttccgaa

SEQ ID NO: 622935 - DNA, 25 bp, Homo sapien
atagcggggggccagcaaggcaaga

SEQ ID NO: 622936 - DNA, 25 bp, Homo sapien
gcggggggccagcaaggcaagaggg

SEQ ID NO: 622937 - DNA, 25 bp, Homo sapien
tgagatagcggggggccagcaaggc

SEQ ID NO: 622938 - DNA, 25 bp, Homo sapien
ctgagatagcggggggccagcaagg

SEQ ID NO: 622939 - DNA, 25 bp, Homo sapien
ggaatgcaaagcgctgtttagagcc

SEQ ID NO: 622940 - DNA, 25 bp, Homo sapien
ttgggaatgcaaagcgctgtttaga

SEQ ID NO: 622941 - DNA, 25 bp, Homo sapien
aatgcaaagcgctgtttagagccct

SEQ ID NO: 622942 - DNA, 25 bp, Homo sapien
tgggaatgcaaagcgctgtttagag

SEQ ID NO: 622943 - DNA, 25 bp, Homo sapien
tgtgtctaagttcggggcctcaggg

SEQ ID NO: 622944 - DNA, 25 bp, Homo sapien
cagccacgctcctgagactgggaaa

SEQ ID NO: 622945 - DNA, 25 bp, Homo sapien
ggtgcagccacgctcctgagactgg

SEQ ID NO: 622946 - DNA, 25 bp, Homo sapien
ctcaggtgcagccacgctcctgaga

SEQ ID NO: 622947 - DNA, 25 bp, Homo sapien
gcaaaccctcaaacagggaaacaca

SEQ ID NO: 622948 - DNA, 25 bp, Homo sapien
cagcaaaccctcaaacagggaaaca

SEQ ID NO: 622949 - DNA, 25 bp, Homo sapien
tcagtcctcagagaaaggcctaagg

SEQ ID NO: 622950 - DNA, 25 bp, Homo sapien
ccacatggaaggagcaacagacacg

SEQ ID NO: 622951 - DNA, 25 bp, Homo sapien
gactttaacgccaggataactgcct

SEQ ID NO: 622952 - DNA, 25 bp, Homo sapien
gaagtcctgtgctacaatactggaa

SEQ ID NO: 622953 - DNA, 25 bp, Homo sapien
gctttagctcttcggctgcattacg

SEQ ID NO: 622954 - DNA, 25 bp, Homo sapien
agctcttcggctgcattacgcagga

SEQ ID NO: 622955 - DNA, 25 bp, Homo sapien
ttagctcttcggctgcattacgcag

SEQ ID NO: 622956 - DNA, 25 bp, Homo sapien
ctgggctttagctcttcggctgcat

SEQ ID NO: 622957 - DNA, 25 bp, Homo sapien
tctcagctgctgaacaatgacatcg

SEQ ID NO: 622958 - DNA, 25 bp, Homo sapien
ggtgcccgcaatctaacgtctacaa

SEQ ID NO: 622959 - DNA, 25 bp, Homo sapien
tgaagcgctgcaaaatccctggcgg

SEQ ID NO: 622960 - DNA, 25 bp, Homo sapien
caaattcgtacagagatgaggcaga

SEQ ID NO: 622961 - DNA, 25 bp, Homo sapien
tgctgggcaggacgcatgttcctga

SEQ ID NO: 622962 - DNA, 25 bp, Homo sapien
aggacgcatgttcctgaggttacgg

SEQ ID NO: 622963 - DNA, 25 bp, Homo sapien
ggcaggacgcatgttcctgaggtta

SEQ ID NO: 622964 - DNA, 25 bp, Homo sapien
atgctgggcaggacgcatgttcctg

SEQ ID NO: 622965 - DNA, 25 bp, Homo sapien
gaaagtcacgcaagtgtcacccact

SEQ ID NO: 622966 - DNA, 25 bp, Homo sapien
tgagtcactcggaaatctgagcagc

SEQ ID NO: 622967 - DNA, 25 bp, Homo sapien
gaaatacagtgacagacccaaaagt

SEQ ID NO: 622968 - DNA, 25 bp, Homo sapien
taggaggttacccacaaatggcctg

SEQ ID NO: 622969 - DNA, 25 bp, Homo sapien
tcatctagggttcacatcctggtgg

SEQ ID NO: 622970 - DNA, 25 bp, Homo sapien
gcaggacggcttgacatttagtgaa

SEQ ID NO: 622971 - DNA, 25 bp, Homo sapien
tactgcatgcaacttacaggtgcct

SEQ ID NO: 622972 - DNA, 25 bp, Homo sapien
tgggaaagcgcactctaaaaggcct

SEQ ID NO: 622973 - DNA, 25 bp, Homo sapien
tacgtgaagtcccaagagatgacat

SEQ ID NO: 622974 - DNA, 25 bp, Homo sapien
tcaccgaagacagtggcaagtgcca

SEQ ID NO: 622975 - DNA, 25 bp, Homo sapien
ttcaagtaacacagggagcggcctc

SEQ ID NO: 622976 - DNA, 25 bp, Homo sapien
ggcccacaggttggattcgaggtac

SEQ ID NO: 622977 - DNA, 25 bp, Homo sapien
agccgccaggcccgaccactccggc

SEQ ID NO: 622978 - DNA, 25 bp, Homo sapien
ccgtcccgccgtgcgcgccgacgtg

SEQ ID NO: 622979 - DNA, 25 bp, Homo sapien
gccgcgctgcgctcccgaccggcgc

SEQ ID NO: 622980 - DNA, 25 bp, Homo sapien
actccggcgcccgtcccgccgtgcg

SEQ ID NO: 622981 - DNA, 25 bp, Homo sapien
gctcggggcgcacggcgcgggctgc

SEQ ID NO: 622982 - DNA, 25 bp, Homo sapien
gggaagcccgcgctcggggcgcacg

SEQ ID NO: 622983 - DNA, 25 bp, Homo sapien
gcgctcggggcgcacggcgcgggct

SEQ ID NO: 622984 - DNA, 25 bp, Homo sapien
aggggccgcgggaagcccgcgctcg

SEQ ID NO: 622985 - DNA, 25 bp, Homo sapien
cgtcggtagtgtggtacggcaggcc

SEQ ID NO: 622986 - DNA, 25 bp, Homo sapien
acggcctcctcgatgtcgccgaagc

SEQ ID NO: 622987 - DNA, 25 bp, Homo sapien
gccgaagccctcgaagtacttcctg

SEQ ID NO: 622988 - DNA, 25 bp, Homo sapien
cacgaagatcttggtgaacgtggtg

SEQ ID NO: 622989 - DNA, 25 bp, Homo sapien
agtcctaattgaacacagcggctct

SEQ ID NO: 622990 - DNA, 25 bp, Homo sapien
gagtcctaattgaacacagcggctc

SEQ ID NO: 622991 - DNA, 25 bp, Homo sapien
gagggccgagactttcctctgagaa

SEQ ID NO: 622992 - DNA, 25 bp, Homo sapien
tctgagaaggagtttgcgacgctat

SEQ ID NO: 622993 - DNA, 25 bp, Homo sapien
cttcaagacgtttttacttaagctg

SEQ ID NO: 622994 - DNA, 25 bp, Homo sapien
tgcgacgctatgcttggaaggtaag

SEQ ID NO: 622995 - DNA, 25 bp, Homo sapien
agctcctcccgtcaaagttcaaggc

SEQ ID NO: 622996 - DNA, 25 bp, Homo sapien
ccagctcctcccgtcaaagttcaag

SEQ ID NO: 622997 - DNA, 25 bp, Homo sapien
gaaatgtggccttcaaggacaaaaa

SEQ ID NO: 622998 - DNA, 25 bp, Homo sapien
gggaaatgtggccttcaaggacaaa

SEQ ID NO: 622999 - DNA, 25 bp, Homo sapien
tccgccctggcaccggatgctgcca

SEQ ID NO: 623000 - DNA, 25 bp, Homo sapien
cgaaaggggcagacggctccgccct

SEQ ID NO: 623001 - DNA, 25 bp, Homo sapien
ttcctctgagggtgcctgtgaccca

SEQ ID NO: 623002 - DNA, 25 bp, Homo sapien
cagggtccttgagccaaagctcctc

SEQ ID NO: 623003 - DNA, 25 bp, Homo sapien
ccaagaagaagttgatagtaacaca

SEQ ID NO: 623004 - DNA, 25 bp, Homo sapien
tgtgttactatcaacttcttcttgg

SEQ ID NO: 623005 - DNA, 25 bp, Homo sapien
ggcgcccagatatgccaggttcacg

SEQ ID NO: 623006 - DNA, 25 bp, Homo sapien
cacgttggccttgcggccgtcgatg

SEQ ID NO: 623007 - DNA, 25 bp, Homo sapien
gttcacgttggccttgcggccgtcg

SEQ ID NO: 623008 - DNA, 25 bp, Homo sapien
cgtctggaggctccgcggcttggcg

SEQ ID NO: 623009 - DNA, 25 bp, Homo sapien
gcaactggggtgcagtaccctccct

SEQ ID NO: 623010 - DNA, 25 bp, Homo sapien
tgtgagaaggggtctagatcctcga

SEQ ID NO: 623011 - DNA, 25 bp, Homo sapien
ctcctgcgaggacagctggcaactg

SEQ ID NO: 623012 - DNA, 25 bp, Homo sapien
ttctttgggccacacgctgtgagaa

SEQ ID NO: 623013 - DNA, 25 bp, Homo sapien
gagagaacaatcagggacttggcct

SEQ ID NO: 623014 - DNA, 25 bp, Homo sapien
aaaacgagagaacaatcagggactt

SEQ ID NO: 623015 - DNA, 25 bp, Homo sapien
gacttggccttgctgcacgagccac

SEQ ID NO: 623016 - DNA, 25 bp, Homo sapien
cgagccacgtctcaagggctgcaca

SEQ ID NO: 623017 - DNA, 25 bp, Homo sapien
agtccgctggatcaaggtggggtgc

SEQ ID NO: 623018 - DNA, 25 bp, Homo sapien
cacacgtgatcaactggcattaggg

SEQ ID NO: 623019 - DNA, 25 bp, Homo sapien
gaaagttcatgaagtgccaatgccc

SEQ ID NO: 623020 - DNA, 25 bp, Homo sapien
caatggaatctacgtggtgcgcaca

SEQ ID NO: 623021 - DNA, 25 bp, Homo sapien
caggcaggttactcctcaagctgtg

SEQ ID NO: 623022 - DNA, 25 bp, Homo sapien
tcctcccactgctacacttgcacac

SEQ ID NO: 623023 - DNA, 25 bp, Homo sapien
acacatccaccaatacacacggaag

SEQ ID NO: 623024 - DNA, 25 bp, Homo sapien
ccggccactcgcacaggctagaagg

SEQ ID NO: 623025 - DNA, 25 bp, Homo sapien
caatacacacggaagccggcaggga

SEQ ID NO: 623026 - DNA, 25 bp, Homo sapien
tcattttctgaacataaagtcgcct

SEQ ID NO: 623027 - DNA, 25 bp, Homo sapien
cgcggtttggcaacatgtgggcact

SEQ ID NO: 623028 - DNA, 25 bp, Homo sapien
gagctgtgctcttaaccctacctgg

SEQ ID NO: 623029 - DNA, 25 bp, Homo sapien
ccactgtggaaacgcattgaggcca

SEQ ID NO: 623030 - DNA, 25 bp, Homo sapien
tgcagccctacagcaacggtggaaa

SEQ ID NO: 623031 - DNA, 25 bp, Homo sapien
ggtcttcccatcatgaggcccattt

SEQ ID NO: 623032 - DNA, 25 bp, Homo sapien
ccatttcacacacggggccaggtga

SEQ ID NO: 623033 - DNA, 25 bp, Homo sapien
cgtactgtgactgggtgcgtcaccc

SEQ ID NO: 623034 - DNA, 25 bp, Homo sapien
tgcgtcaccccgtcggcttggtctt

SEQ ID NO: 623035 - DNA, 25 bp, Homo sapien
cagcagctccgtgaggatgtgagag

SEQ ID NO: 623036 - DNA, 25 bp, Homo sapien
atgtgagagtgactgcgtgaatgct

SEQ ID NO: 623037 - DNA, 25 bp, Homo sapien
gtgaccacagagatgatggcgccaa

SEQ ID NO: 623038 - DNA, 25 bp, Homo sapien
gctggagcaaaggagtgcaatggcg

SEQ ID NO: 623039 - DNA, 25 bp, Homo sapien
tccccggagctggtgcaaaaataaa

SEQ ID NO: 623040 - DNA, 25 bp, Homo sapien
tcctcatcggtcagatgggcacaga

SEQ ID NO: 623041 - DNA, 25 bp, Homo sapien
ttgagagtttgaagccacgacggcg

SEQ ID NO: 623042 - DNA, 25 bp, Homo sapien
tcaaggccttcgcactgactgtctg

SEQ ID NO: 623043 - DNA, 25 bp, Homo sapien
gctgggatcaccacgctgggctgca

SEQ ID NO: 623044 - DNA, 25 bp, Homo sapien
tactgcacgaaagtggtgcccgcgg

SEQ ID NO: 623045 - DNA, 25 bp, Homo sapien
gctggccggcgtgtactcaatgtag

SEQ ID NO: 623046 - DNA, 25 bp, Homo sapien
cagggtagctgtagcccacgaagct

SEQ ID NO: 623047 - DNA, 25 bp, Homo sapien
gaaacactatcgtcgtctccacggg

SEQ ID NO: 623048 - DNA, 25 bp, Homo sapien
cacagctcgggaggatcaagttaca

SEQ ID NO: 623049 - DNA, 25 bp, Homo sapien
cgcgagccggcagacactttattat

SEQ ID NO: 623050 - DNA, 25 bp, Homo sapien
gctgccatggtgtgcaaggaacctg

SEQ ID NO: 623051 - DNA, 25 bp, Homo sapien
tattctctgagccttgactctgtcc

SEQ ID NO: 623052 - DNA, 25 bp, Homo sapien
agggaagaggcgcacccttctgcac

SEQ ID NO: 623053 - DNA, 25 bp, Homo sapien
tgcactcaaccgctccagcgggcag

SEQ ID NO: 623054 - DNA, 25 bp, Homo sapien
aagacaggcaggaaccgtctcaggc

SEQ ID NO: 623055 - DNA, 25 bp, Homo sapien
aatattatgatgagattagctacct

SEQ ID NO: 623056 - DNA, 25 bp, Homo sapien
tatttttatcatcagaacattctaa

SEQ ID NO: 623057 - DNA, 25 bp, Homo sapien
ttatcatcagaacattctaataaaa

SEQ ID NO: 623058 - DNA, 25 bp, Homo sapien
ataaaaatattatgatgagattagc

SEQ ID NO: 623059 - DNA, 25 bp, Homo sapien
ttgaggtctctcacggccgtctcag

SEQ ID NO: 623060 - DNA, 25 bp, Homo sapien
cgtcgttgaggtctctcacggccgt

SEQ ID NO: 623061 - DNA, 25 bp, Homo sapien
gcccacgctgccgtcgttgaggtct

SEQ ID NO: 623062 - DNA, 25 bp, Homo sapien
gctgccgtcgttgaggtctctcacg

SEQ ID NO: 623063 - DNA, 25 bp, Homo sapien
tgtgggcaaagcccgcctagtggga

SEQ ID NO: 623064 - DNA, 25 bp, Homo sapien
aaagcccgcctagtgggatggccct

SEQ ID NO: 623065 - DNA, 25 bp, Homo sapien
ggcaaagcccgcctagtgggatggc

SEQ ID NO: 623066 - DNA, 25 bp, Homo sapien
aagcccgcctagtgggatggccctg

SEQ ID NO: 623067 - DNA, 25 bp, Homo sapien
tcccactcaaggaccatgaatgcga

SEQ ID NO: 623068 - DNA, 25 bp, Homo sapien
ccatgaatgcgaaggcaccttgggc

SEQ ID NO: 623069 - DNA, 25 bp, Homo sapien
tcaaggaccatgaatgcgaaggcac

SEQ ID NO: 623070 - DNA, 25 bp, Homo sapien
cagctcccactcaaggaccatgaat

SEQ ID NO: 623071 - DNA, 25 bp, Homo sapien
cttttgctaaacctcagcttgagat

SEQ ID NO: 623072 - DNA, 25 bp, Homo sapien
tttgctaaacctcagcttgagattc

SEQ ID NO: 623073 - DNA, 25 bp, Homo sapien
tgctaaacctcagcttgagattcag

SEQ ID NO: 623074 - DNA, 25 bp, Homo sapien
gctaaacctcagcttgagattcagg

SEQ ID NO: 623075 - DNA, 25 bp, Homo sapien
gcatctcctctctccgaggaggcgg

SEQ ID NO: 623076 - DNA, 25 bp, Homo sapien
caccctggaacctctttcgtttctg

SEQ ID NO: 623077 - DNA, 25 bp, Homo sapien
atggcatctcctctctccgaggagg

SEQ ID NO: 623078 - DNA, 25 bp, Homo sapien
ggtgagtattggctggagaagcgct

SEQ ID NO: 623079 - DNA, 25 bp, Homo sapien
aggctctgggagaccccgatgagca

SEQ ID NO: 623080 - DNA, 25 bp, Homo sapien
tccagctttgcaggatggttgttca

SEQ ID NO: 623081 - DNA, 25 bp, Homo sapien
gcttctaggacagcgctgttccagg

SEQ ID NO: 623082 - DNA, 25 bp, Homo sapien
gccttggtgctgactttgacgcaca

SEQ ID NO: 623083 - DNA, 25 bp, Homo sapien
tagtcgtttgtcacatgtataattt

SEQ ID NO: 623084 - DNA, 25 bp, Homo sapien
tctgtgcagaaacttcttggtttaa

SEQ ID NO: 623085 - DNA, 25 bp, Homo sapien
tattagtcgtttgtcacatgtataa

SEQ ID NO: 623086 - DNA, 25 bp, Homo sapien
gtcgtttgtcacatgtataatttac

SEQ ID NO: 623087 - DNA, 25 bp, Homo sapien
tgtcttaaagcatttaacgcccctg

SEQ ID NO: 623088 - DNA, 25 bp, Homo sapien
ttttgtatggttaatacactaccaa

SEQ ID NO: 623089 - DNA, 25 bp, Homo sapien
tatggttaatacactaccaaatgtg

SEQ ID NO: 623090 - DNA, 25 bp, Homo sapien
cagtgtcgttttttgtatggttaat

SEQ ID NO: 623091 - DNA, 25 bp, Homo sapien
ctgtggctcacagagggccctcctc

SEQ ID NO: 623092 - DNA, 25 bp, Homo sapien
agtccctgctgcgtccatttcccac

SEQ ID NO: 623093 - DNA, 25 bp, Homo sapien
tcctggaacccttgtaaggtctctc

SEQ ID NO: 623094 - DNA, 25 bp, Homo sapien
catctcctggaacccttgtaaggtc

SEQ ID NO: 623095 - DNA, 25 bp, Homo sapien
caatgcggcattttaactgagaacc

SEQ ID NO: 623096 - DNA, 25 bp, Homo sapien
aagcttctggaaggacagcgaatcc

SEQ ID NO: 623097 - DNA, 25 bp, Homo sapien
gagttctctgtgcaatgtgttccca

SEQ ID NO: 623098 - DNA, 25 bp, Homo sapien
tgtgttcccacgacacaccgagggt

SEQ ID NO: 623099 - DNA, 25 bp, Homo sapien
gtaggagacgggctctaagccctcc

SEQ ID NO: 623100 - DNA, 25 bp, Homo sapien
aaaggctgtaggagacgggctctaa

SEQ ID NO: 623101 - DNA, 25 bp, Homo sapien
agagagaaaggctgtaggagacggg

SEQ ID NO: 623102 - DNA, 25 bp, Homo sapien
taggagacgggctctaagccctcct

SEQ ID NO: 623103 - DNA, 25 bp, Homo sapien
cagcaagtttgtgttcccagtggga

SEQ ID NO: 623104 - DNA, 25 bp, Homo sapien
gatccacaggtttctttccgggctc

SEQ ID NO: 623105 - DNA, 25 bp, Homo sapien
ggatgatctcgaagggagatccaca

SEQ ID NO: 623106 - DNA, 25 bp, Homo sapien
ggctcttcccgccagcaagtttgtg

SEQ ID NO: 623107 - DNA, 25 bp, Homo sapien
caaatagttattgctctcaggaaaa

SEQ ID NO: 623108 - DNA, 25 bp, Homo sapien
cattcgacggccttttgccagggct

SEQ ID NO: 623109 - DNA, 25 bp, Homo sapien
aacgcaagcgtcctgaacaaaaaca

SEQ ID NO: 623110 - DNA, 25 bp, Homo sapien
ctgaaatagaaaacgcaagcgtcct

SEQ ID NO: 623111 - DNA, 25 bp, Homo sapien
ctgctaaggggcacgaatgtgaggt

SEQ ID NO: 623112 - DNA, 25 bp, Homo sapien
ctaaggggcacgaatgtgaggtcac

SEQ ID NO: 623113 - DNA, 25 bp, Homo sapien
tgctaaggggcacgaatgtgaggtc

SEQ ID NO: 623114 - DNA, 25 bp, Homo sapien
gctaaggggcacgaatgtgaggtca

SEQ ID NO: 623115 - DNA, 25 bp, Homo sapien
cacagctcagcgttattctcgagaa

SEQ ID NO: 623116 - DNA, 25 bp, Homo sapien
tcagagccgtcacagatgtggatgt

SEQ ID NO: 623117 - DNA, 25 bp, Homo sapien
ccgagaggttcaggccgttttgcag

SEQ ID NO: 623118 - DNA, 25 bp, Homo sapien
ttccctggacaactttggccgagag

SEQ ID NO: 623119 - DNA, 25 bp, Homo sapien
tgggctggcccactaatgtcacaaa

SEQ ID NO: 623120 - DNA, 25 bp, Homo sapien
gggcagcgaaccatctccttcagta

SEQ ID NO: 623121 - DNA, 25 bp, Homo sapien
ggacatttactccactaggacctgg

SEQ ID NO: 623122 - DNA, 25 bp, Homo sapien
gtggctttccatgcctagcagagtg

SEQ ID NO: 623123 - DNA, 25 bp, Homo sapien
cgtcttgctttcgatcctggccaca

SEQ ID NO: 623124 - DNA, 25 bp, Homo sapien
tcttgggtgacgataaccgtcttgc

SEQ ID NO: 623125 - DNA, 25 bp, Homo sapien
ctgggaacctggcattgaacgcttt

SEQ ID NO: 623126 - DNA, 25 bp, Homo sapien
gacatccagcgaccgagctggctga

SEQ ID NO: 623127 - DNA, 25 bp, Homo sapien
cataaatgtgcaattgggtcccacc

SEQ ID NO: 623128 - DNA, 25 bp, Homo sapien
acatctgaggtggtgggagcttcca

SEQ ID NO: 623129 - DNA, 25 bp, Homo sapien
gaccttggacttcgaacacgaccag

SEQ ID NO: 623130 - DNA, 25 bp, Homo sapien
tagaagaggccactggaaagtgaac

SEQ ID NO: 623131 - DNA, 25 bp, Homo sapien
gtgaatccgtcagctcgatgccgat

SEQ ID NO: 623132 - DNA, 25 bp, Homo sapien
tggccaccacgtagggtgaatccgt

SEQ ID NO: 623133 - DNA, 25 bp, Homo sapien
ccgatctttgacagaggcgagccca

SEQ ID NO: 623134 - DNA, 25 bp, Homo sapien
aatgggatgacgtacatggtgcgac

SEQ ID NO: 623135 - DNA, 25 bp, Homo sapien
ctgtgaacaaggacccctcccaagt

SEQ ID NO: 623136 - DNA, 25 bp, Homo sapien
ttgggggtccccgaggcactcactg

SEQ ID NO: 623137 - DNA, 25 bp, Homo sapien
tcactggggtttgcgttcagctttc

SEQ ID NO: 623138 - DNA, 25 bp, Homo sapien
tcccaagtcagtgcgccagggccct

SEQ ID NO: 623139 - DNA, 25 bp, Homo sapien
cgatgagcgtcagctccgggttgca

SEQ ID NO: 623140 - DNA, 25 bp, Homo sapien
aggcaggtgggcgatgagcgtcagc

SEQ ID NO: 623141 - DNA, 25 bp, Homo sapien
gagttcccgccgtacccactgccaa

SEQ ID NO: 623142 - DNA, 25 bp, Homo sapien
ggttgcagggccagttgttgaccaa

SEQ ID NO: 623143 - DNA, 25 bp, Homo sapien
gatctctatggtcccctggtgtttg

SEQ ID NO: 623144 - DNA, 25 bp, Homo sapien
tctccccgaggttggtacttcagcc

SEQ ID NO: 623145 - DNA, 25 bp, Homo sapien
tgcacgctcagagaggtgtgctgac

SEQ ID NO: 623146 - DNA, 25 bp, Homo sapien
ccagaggttggaatgtaggccctca

SEQ ID NO: 623147 - DNA, 25 bp, Homo sapien
ttcatccaggcaatgtcatccccga

SEQ ID NO: 623148 - DNA, 25 bp, Homo sapien
caggttggtcttcccgcaggcgctg

SEQ ID NO: 623149 - DNA, 25 bp, Homo sapien
aatgcggccgccaggtacttcttct

SEQ ID NO: 623150 - DNA, 25 bp, Homo sapien
cttgtgcgtcaaacttcatccaggc

SEQ ID NO: 623151 - DNA, 25 bp, Homo sapien
caagagttgggtctaaaagagtcac

SEQ ID NO: 623152 - DNA, 25 bp, Homo sapien
tccaaacactggactgaggagaatg

SEQ ID NO: 623153 - DNA, 25 bp, Homo sapien
tgagtccaatcgttaccaagagttg

SEQ ID NO: 623154 - DNA, 25 bp, Homo sapien
gtgacatgtttcgaaggccaacgat

SEQ ID NO: 623155 - DNA, 25 bp, Homo sapien
cttattcttccaggacgtgatggtg

SEQ ID NO: 623156 - DNA, 25 bp, Homo sapien
ctcggccacattggtaaagattgtg

SEQ ID NO: 623157 - DNA, 25 bp, Homo sapien
gatggtgacacctgaagctagcggc

SEQ ID NO: 623158 - DNA, 25 bp, Homo sapien
gagcgacaccgaaaaagccattttc

SEQ ID NO: 623159 - DNA, 25 bp, Homo sapien
cctgcagcccggcacaccaaggcct

SEQ ID NO: 623160 - DNA, 25 bp, Homo sapien
agaaaggctcgtgagtgcctggctc

SEQ ID NO: 623161 - DNA, 25 bp, Homo sapien
agtgcctggctcaaacaggcagtcc

SEQ ID NO: 623162 - DNA, 25 bp, Homo sapien
tgcagcccggcacaccaaggcctct

SEQ ID NO: 623163 - DNA, 25 bp, Homo sapien
gagactcccaggcagcatcaatgat

SEQ ID NO: 623164 - DNA, 25 bp, Homo sapien
cagaacctcgagttggggtgggcac

SEQ ID NO: 623165 - DNA, 25 bp, Homo sapien
gataatgccttcaatgggaacacct

SEQ ID NO: 623166 - DNA, 25 bp, Homo sapien
ggtctacggcctccaaagataatgc

SEQ ID NO: 623167 - DNA, 25 bp, Homo sapien
aattcagactccacaaccagtggtg

SEQ ID NO: 623168 - DNA, 25 bp, Homo sapien
tcgagctagttttgcgttcaccaag

SEQ ID NO: 623169 - DNA, 25 bp, Homo sapien
catgttcccagcctaaatgaaggag

SEQ ID NO: 623170 - DNA, 25 bp, Homo sapien
tcagaaaggttccaggtgaccagaa

SEQ ID NO: 623171 - DNA, 25 bp, Homo sapien
ctccatgttgccagctgagagcttc

SEQ ID NO: 623172 - DNA, 25 bp, Homo sapien
tggcctctgatctcatggccgcccc

SEQ ID NO: 623173 - DNA, 25 bp, Homo sapien
ctttatgttctgcagccgctgtggc

SEQ ID NO: 623174 - DNA, 25 bp, Homo sapien
tgagagcttcatagactagagggac

SEQ ID NO: 623175 - DNA, 25 bp, Homo sapien
ggtttcagatcaggactttgattta

SEQ ID NO: 623176 - DNA, 25 bp, Homo sapien
gtttcagatcaggactttgatttac

SEQ ID NO: 623177 - DNA, 25 bp, Homo sapien
gagtgacgaagagtgctctaatccc

SEQ ID NO: 623178 - DNA, 25 bp, Homo sapien
cattagtaaatgaggctctcctagg

SEQ ID NO: 623179 - DNA, 25 bp, Homo sapien
agactgacgccattgattgttgaca

SEQ ID NO: 623180 - DNA, 25 bp, Homo sapien
ctgttaaacagagagggagttcatt

SEQ ID NO: 623181 - DNA, 25 bp, Homo sapien
gccagtgggccaggtatttgccgaa

SEQ ID NO: 623182 - DNA, 25 bp, Homo sapien
ggcttttccatcgatccggttgaac

SEQ ID NO: 623183 - DNA, 25 bp, Homo sapien
aggtcggcattgacttgatcctcca

SEQ ID NO: 623184 - DNA, 25 bp, Homo sapien
caggcctttcaggttcagggcatcc

SEQ ID NO: 623185 - DNA, 25 bp, Homo sapien
gattttaaaggtaaagcactcaggc

SEQ ID NO: 623186 - DNA, 25 bp, Homo sapien
tggcgtcaatttgggaacacttgcc

SEQ ID NO: 623187 - DNA, 25 bp, Homo sapien
cctactgcaccttatggatgggaaa

SEQ ID NO: 623188 - DNA, 25 bp, Homo sapien
gaaaactagtaggtcatcttgccca

SEQ ID NO: 623189 - DNA, 25 bp, Homo sapien
gtcaaaaagcatgcattaaaccctc

SEQ ID NO: 623190 - DNA, 25 bp, Homo sapien
gcaaaatcctatgaaactgtccaca

SEQ ID NO: 623191 - DNA, 25 bp, Homo sapien
taaaaggcaaaatcctatgaaactg

SEQ ID NO: 623192 - DNA, 25 bp, Homo sapien
aagcatgcattaaaccctcccagtc

SEQ ID NO: 623193 - DNA, 25 bp, Homo sapien
caagaacgtgttccgcagtgaaaag

SEQ ID NO: 623194 - DNA, 25 bp, Homo sapien
gccagtgtctttgcctgccgaggga

SEQ ID NO: 623195 - DNA, 25 bp, Homo sapien
gagtggagactactgaaagcccgta

SEQ ID NO: 623196 - DNA, 25 bp, Homo sapien
tctaacaagccaacgtgtctggagc

SEQ ID NO: 623197 - DNA, 25 bp, Homo sapien
tatagaattcctggacccaaactct

SEQ ID NO: 623198 - DNA, 25 bp, Homo sapien
cctagttgtctgttctcaaaaggac

SEQ ID NO: 623199 - DNA, 25 bp, Homo sapien
taagtaatctcctattgttgggcat

SEQ ID NO: 623200 - DNA, 25 bp, Homo sapien
ccttcacaggtgaagccggtggcaa

SEQ ID NO: 623201 - DNA, 25 bp, Homo sapien
gggccatagaacaggtaccctctca

SEQ ID NO: 623202 - DNA, 25 bp, Homo sapien
tgggccatagaacaggtaccctctc

SEQ ID NO: 623203 - DNA, 25 bp, Homo sapien
ggccatagaacaggtaccctctcat

SEQ ID NO: 623204 - DNA, 25 bp, Homo sapien
aaggagctatcttcacccgtccctg

SEQ ID NO: 623205 - DNA, 25 bp, Homo sapien
atcttcacccgtccctgaaaaatag

SEQ ID NO: 623206 - DNA, 25 bp, Homo sapien
aggttggcaactggcatggcagaca

SEQ ID NO: 623207 - DNA, 25 bp, Homo sapien
ttggccttggcagagaatttcacga

SEQ ID NO: 623208 - DNA, 25 bp, Homo sapien
agcctttaccaaccggtagacactg

SEQ ID NO: 623209 - DNA, 25 bp, Homo sapien
gccagcctttaccaaccggtagaca

SEQ ID NO: 623210 - DNA, 25 bp, Homo sapien
ttgagccagcctttaccaaccggta

SEQ ID NO: 623211 - DNA, 25 bp, Homo sapien
gagccagcctttaccaaccggtaga

SEQ ID NO: 623212 - DNA, 25 bp, Homo sapien
tcagtagatgctccaggattggtcc

SEQ ID NO: 623213 - DNA, 25 bp, Homo sapien
caagtaccaggcacgtagtagccac

SEQ ID NO: 623214 - DNA, 25 bp, Homo sapien
taaatattcggcacgaagcccgagt

SEQ ID NO: 623215 - DNA, 25 bp, Homo sapien
cattgcttagaaatggcttgcgatc

SEQ ID NO: 623216 - DNA, 25 bp, Homo sapien
aatgagctttcgctcagagctgcag

SEQ ID NO: 623217 - DNA, 25 bp, Homo sapien
tccatactgagacgggtgcagctgg

SEQ ID NO: 623218 - DNA, 25 bp, Homo sapien
tttaaagctagcactctaggctggg

SEQ ID NO: 623219 - DNA, 25 bp, Homo sapien
cagctgaaccagagtagagcaggtg

SEQ ID NO: 623220 - DNA, 25 bp, Homo sapien
taactgggatctagaggccagaccc

SEQ ID NO: 623221 - DNA, 25 bp, Homo sapien
cgtccccgctgcgtaagactctgta

SEQ ID NO: 623222 - DNA, 25 bp, Homo sapien
tctgtatttggatgccaatccacag

SEQ ID NO: 623223 - DNA, 25 bp, Homo sapien
tctgaaaagctgcaatacttataca

SEQ ID NO: 623224 - DNA, 25 bp, Homo sapien
tcagtaatcattagtggcaatgatg

SEQ ID NO: 623225 - DNA, 25 bp, Homo sapien
tgtactatagagctcagaaggacac

SEQ ID NO: 623226 - DNA, 25 bp, Homo sapien
gaaatcttgctgtactatagagctc

SEQ ID NO: 623227 - DNA, 25 bp, Homo sapien
tcttgctgtactatagagctcagaa

SEQ ID NO: 623228 - DNA, 25 bp, Homo sapien
cttgaaatcttgctgtactatagag

SEQ ID NO: 623229 - DNA, 25 bp, Homo sapien
gaatttcagagtcgcctgacggcag

SEQ ID NO: 623230 - DNA, 25 bp, Homo sapien
taagagaaactgtatgtgcgagggc

SEQ ID NO: 623231 - DNA, 25 bp, Homo sapien
gaacactccgcgcttcttagaagag

SEQ ID NO: 623232 - DNA, 25 bp, Homo sapien
gttatatattccctaccgaaggaga

SEQ ID NO: 623233 - DNA, 25 bp, Homo sapien
aatgtgcgacaatctgccagcagcg

SEQ ID NO: 623234 - DNA, 25 bp, Homo sapien
tggccaggccaatgtgcgacaatct

SEQ ID NO: 623235 - DNA, 25 bp, Homo sapien
gccaatgtgcgacaatctgccagca

SEQ ID NO: 623236 - DNA, 25 bp, Homo sapien
gccaggccaatgtgcgacaatctgc

SEQ ID NO: 623237 - DNA, 25 bp, Homo sapien
aggagacggcacctgggatcctgct

SEQ ID NO: 623238 - DNA, 25 bp, Homo sapien
cagttagtggagagtgtaccgtacc

SEQ ID NO: 623239 - DNA, 25 bp, Homo sapien
ttgaagctaggcctgtgcggcccgt

SEQ ID NO: 623240 - DNA, 25 bp, Homo sapien
caccttcggccaatagaaagtctcc

SEQ ID NO: 623241 - DNA, 25 bp, Homo sapien
gaacttgcccgcctctgacggtgaa

SEQ ID NO: 623242 - DNA, 25 bp, Homo sapien
caaagggcggcacagagttaatctc

SEQ ID NO: 623243 - DNA, 25 bp, Homo sapien
tatccttcagcaggtggaccaaagg

SEQ ID NO: 623244 - DNA, 25 bp, Homo sapien
tgaagcccggctgttcggtatcctt

SEQ ID NO: 623245 - DNA, 25 bp, Homo sapien
agaggcctgacacaacaggatggtg

SEQ ID NO: 623246 - DNA, 25 bp, Homo sapien
agcacaggaaggcattctgggtcca

SEQ ID NO: 623247 - DNA, 25 bp, Homo sapien
cggcatttggctcttacccaccggg

SEQ ID NO: 623248 - DNA, 25 bp, Homo sapien
ggcagcacaggaaggcattctgggt

SEQ ID NO: 623249 - DNA, 25 bp, Homo sapien
ggcatcgcctgtgaccttgccggga

SEQ ID NO: 623250 - DNA, 25 bp, Homo sapien
gggctttcctgagtctgggttgcac

SEQ ID NO: 623251 - DNA, 25 bp, Homo sapien
tccttccggtcagtccctacagagg

SEQ ID NO: 623252 - DNA, 25 bp, Homo sapien
cctcctccgccgtgagagcagcttc

SEQ ID NO: 623253 - DNA, 25 bp, Homo sapien
tcttcgttggacctgtttgtgggcc

SEQ ID NO: 623254 - DNA, 25 bp, Homo sapien
tttgtgggccccaatgctgctgtgc

SEQ ID NO: 623255 - DNA, 25 bp, Homo sapien
ccaagggtggtcttcgttggacctg

SEQ ID NO: 623256 - DNA, 25 bp, Homo sapien
ctggatggagatttcggggcctcct

SEQ ID NO: 623257 - DNA, 25 bp, Homo sapien
cacgaagaggattctgcgagctgcc

SEQ ID NO: 623258 - DNA, 25 bp, Homo sapien
tgcgctcctcggaacaaatgcaggc

SEQ ID NO: 623259 - DNA, 25 bp, Homo sapien
catgcttgatgaactcggcctgagt

SEQ ID NO: 623260 - DNA, 25 bp, Homo sapien
tctcaagctgcgactgggaatgggc

SEQ ID NO: 623261 - DNA, 25 bp, Homo sapien
gcagatgccttgggtgtggcctgct

SEQ ID NO: 623262 - DNA, 25 bp, Homo sapien
cagatgccttgggtgtggcctgctt

SEQ ID NO: 623263 - DNA, 25 bp, Homo sapien
tgcagatgccttgggtgtggcctgc

SEQ ID NO: 623264 - DNA, 25 bp, Homo sapien
cattgcaggtgtgcatgcgacctga

SEQ ID NO: 623265 - DNA, 25 bp, Homo sapien
tgacaggctcagaccatagggcagg

SEQ ID NO: 623266 - DNA, 25 bp, Homo sapien
gcgacctgagggtggaggcttgtca

SEQ ID NO: 623267 - DNA, 25 bp, Homo sapien
ggcgtgtcagccttgatcctggcac

SEQ ID NO: 623268 - DNA, 25 bp, Homo sapien
ggaagaacgtgtttctctgtgttgc

SEQ ID NO: 623269 - DNA, 25 bp, Homo sapien
cacctcctgtgtgatgactcgggac

SEQ ID NO: 623270 - DNA, 25 bp, Homo sapien
tgtgtgatgactcgggacactggtt

SEQ ID NO: 623271 - DNA, 25 bp, Homo sapien
ctgtgttgctcaggaactcccaaag

SEQ ID NO: 623272 - DNA, 25 bp, Homo sapien
tgccaataattcaaacggtgactga

SEQ ID NO: 623273 - DNA, 25 bp, Homo sapien
aattcaaacggtgactgatattttg

SEQ ID NO: 623274 - DNA, 25 bp, Homo sapien
taactttcggatgttatgcacctcc

SEQ ID NO: 623275 - DNA, 25 bp, Homo sapien
gtcgtccactctcctcaattaacaa

SEQ ID NO: 623276 - DNA, 25 bp, Homo sapien
tatgcacctccgacatgtccactga

SEQ ID NO: 623277 - DNA, 25 bp, Homo sapien
tgtccactgactgctcgctcactgt

SEQ ID NO: 623278 - DNA, 25 bp, Homo sapien
gttactactactatgcaggatgtgg

SEQ ID NO: 623279 - DNA, 25 bp, Homo sapien
cttggctgatcatgtgttgactggc

SEQ ID NO: 623280 - DNA, 25 bp, Homo sapien
caggatgtggcagttctcaggcgac

SEQ ID NO: 623281 - DNA, 25 bp, Homo sapien
ggacactggtaaagggacactcatg

SEQ ID NO: 623282 - DNA, 25 bp, Homo sapien
tgcacgttcactgtggtcagaacgg

SEQ ID NO: 623283 - DNA, 25 bp, Homo sapien
tcctcgtatgtccacattcatctgt

SEQ ID NO: 623284 - DNA, 25 bp, Homo sapien
tcagaacggctttagaagattccaa

SEQ ID NO: 623285 - DNA, 25 bp, Homo sapien
aagattccaagctattcctcgtatg

SEQ ID NO: 623286 - DNA, 25 bp, Homo sapien
ttgctgcttccaagaggtcggagga

SEQ ID NO: 623287 - DNA, 25 bp, Homo sapien
ttgagtttgttgtccactcttgtga

SEQ ID NO: 623288 - DNA, 25 bp, Homo sapien
catggctgccggtggaggggtcggg

SEQ ID NO: 623289 - DNA, 25 bp, Homo sapien
tgctggaggctgcttttcggggtgg

SEQ ID NO: 623290 - DNA, 25 bp, Homo sapien
gcagaacagttggtcagaacctcgt

SEQ ID NO: 623291 - DNA, 25 bp, Homo sapien
ctgctgccttcgcagaacagttggt

SEQ ID NO: 623292 - DNA, 25 bp, Homo sapien
agaacctcgtcttcccagaatttgg

SEQ ID NO: 623293 - DNA, 25 bp, Homo sapien
tcgaaaggaagtgatagcaagggct

SEQ ID NO: 623294 - DNA, 25 bp, Homo sapien
cttgcaaagatggtcaaggtcacag

SEQ ID NO: 623295 - DNA, 25 bp, Homo sapien
caaagatggtcaaggtcacagccat

SEQ ID NO: 623296 - DNA, 25 bp, Homo sapien
tgcaaagatggtcaaggtcacagcc

SEQ ID NO: 623297 - DNA, 25 bp, Homo sapien
gcaaagatggtcaaggtcacagcca

SEQ ID NO: 623298 - DNA, 25 bp, Homo sapien
ggtgggcacgggagcctgctctgta

SEQ ID NO: 623299 - DNA, 25 bp, Homo sapien
gggcacgggagcctgctctgtagca

SEQ ID NO: 623300 - DNA, 25 bp, Homo sapien
gggcggtgggcacgggagcctgctc

SEQ ID NO: 623301 - DNA, 25 bp, Homo sapien
gcacgggagcctgctctgtagcatt

SEQ ID NO: 623302 - DNA, 25 bp, Homo sapien
cgcctgtctggcttgtggtttggca

SEQ ID NO: 623303 - DNA, 25 bp, Homo sapien
ttggggaagttctgccgcctgtctg

SEQ ID NO: 623304 - DNA, 25 bp, Homo sapien
tcggatcctgggcttgagtctcatc

SEQ ID NO: 623305 - DNA, 25 bp, Homo sapien
ggtttggcagaccttcctggatgca

SEQ ID NO: 623306 - DNA, 25 bp, Homo sapien
taaatgtctgaatcaactttgcgca

SEQ ID NO: 623307 - DNA, 25 bp, Homo sapien
tggtcttgcggaaggcatgattcat

SEQ ID NO: 623308 - DNA, 25 bp, Homo sapien
gcaaacaccctgagtaatttctttg

SEQ ID NO: 623309 - DNA, 25 bp, Homo sapien
agccaaaggtttggtcttgcggaag

SEQ ID NO: 623310 - DNA, 25 bp, Homo sapien
tgtgtccctgaacctggtaggagtc

SEQ ID NO: 623311 - DNA, 25 bp, Homo sapien
gaatctttgtgtcattagctgtgcc

SEQ ID NO: 623312 - DNA, 25 bp, Homo sapien
ggtgagcgtggtatcctcccgagtc

SEQ ID NO: 623313 - DNA, 25 bp, Homo sapien
tgtcatggcagtaatcgaatctttg

SEQ ID NO: 623314 - DNA, 25 bp, Homo sapien
ctggggtgagcctggaagagcttgg

SEQ ID NO: 623315 - DNA, 25 bp, Homo sapien
cagaaaaaggttgcccatcctcgga

SEQ ID NO: 623316 - DNA, 25 bp, Homo sapien
gtctcttcgggtctgccagcagggt

SEQ ID NO: 623317 - DNA, 25 bp, Homo sapien
ggttggaatcaacaggcccatctgg

SEQ ID NO: 623318 - DNA, 25 bp, Homo sapien
catcctcggactggctgggaaggtt

SEQ ID NO: 623319 - DNA, 25 bp, Homo sapien
agacaatgggtgtggattcgcccca

SEQ ID NO: 623320 - DNA, 25 bp, Homo sapien
tgaaggcggacagtctcctgcgaaa

SEQ ID NO: 623321 - DNA, 25 bp, Homo sapien
gaagataggctagccccaagagcct

SEQ ID NO: 623322 - DNA, 25 bp, Homo sapien
gagagtaatattcggccacactgag

SEQ ID NO: 623323 - DNA, 25 bp, Homo sapien
aaatgatagtggttcctccctcccg

SEQ ID NO: 623324 - DNA, 25 bp, Homo sapien
taacaactaagatgtatccggcccc

SEQ ID NO: 623325 - DNA, 25 bp, Homo sapien
gaatcaacttcggaactagcgccag

SEQ ID NO: 623326 - DNA, 25 bp, Homo sapien
taaatggtagccactgccggtgtcg

SEQ ID NO: 623327 - DNA, 25 bp, Homo sapien
taagacaatgagacggctgcacaag

SEQ ID NO: 623328 - DNA, 25 bp, Homo sapien
ggttcccctggaggcacgatgttga

SEQ ID NO: 623329 - DNA, 25 bp, Homo sapien
cataacgagatgagggtaaggcttc

SEQ ID NO: 623330 - DNA, 25 bp, Homo sapien
tgagccctgaatgacgagaccatgc

SEQ ID NO: 623331 - DNA, 25 bp, Homo sapien
gcctgagagtctgcaagtttgggct

SEQ ID NO: 623332 - DNA, 25 bp, Homo sapien
gtctgcaagtttgggctcagggatc

SEQ ID NO: 623333 - DNA, 25 bp, Homo sapien
gcccactcccccatgtttgttcctg

SEQ ID NO: 623334 - DNA, 25 bp, Homo sapien
gctcagggatctctggaaggagcct

SEQ ID NO: 623335 - DNA, 25 bp, Homo sapien
gccacgaaacatgtagagatgctgc

SEQ ID NO: 623336 - DNA, 25 bp, Homo sapien
aaaatagatgggcatgacggccagt

SEQ ID NO: 623337 - DNA, 25 bp, Homo sapien
taccaggtgccacgaaacatgtaga

SEQ ID NO: 623338 - DNA, 25 bp, Homo sapien
atgctgctggcccatagaggagacg

SEQ ID NO: 623339 - DNA, 25 bp, Homo sapien
tctgaagtggacacatcccaaaggc

SEQ ID NO: 623340 - DNA, 25 bp, Homo sapien
cacaggctattcaggtaacacagga

SEQ ID NO: 623341 - DNA, 25 bp, Homo sapien
gagcaggcctccttgtctgatgaaa

SEQ ID NO: 623342 - DNA, 25 bp, Homo sapien
caaaggcatgactgtctgggctcaa

SEQ ID NO: 623343 - DNA, 25 bp, Homo sapien
tttcagaagtagaatgaatgagaat

SEQ ID NO: 623344 - DNA, 25 bp, Homo sapien
tgaatgagaatagacaaccaaaaat

SEQ ID NO: 623345 - DNA, 25 bp, Homo sapien
gaagtagaatgaatgagaatagaca

SEQ ID NO: 623346 - DNA, 25 bp, Homo sapien
gtagaatgaatgagaatagacaacc

SEQ ID NO: 623347 - DNA, 25 bp, Homo sapien
aaagcctgaaatgggctgtccttca

SEQ ID NO: 623348 - DNA, 25 bp, Homo sapien
gccttccagtggattcctgactcat

SEQ ID NO: 623349 - DNA, 25 bp, Homo sapien
tgactttcccaaactgggtacagct

SEQ ID NO: 623350 - DNA, 25 bp, Homo sapien
tcttggtgcctggatgaccatggtc

SEQ ID NO: 623351 - DNA, 25 bp, Homo sapien
ttttgccactgcgagcagtcacagg

SEQ ID NO: 623352 - DNA, 25 bp, Homo sapien
tctgggttttgccactgcgagcagt

SEQ ID NO: 623353 - DNA, 25 bp, Homo sapien
aggtggagctgtcgggcaccagagc

SEQ ID NO: 623354 - DNA, 25 bp, Homo sapien
ttaagcctcggtgccatcactgcag

SEQ ID NO: 623355 - DNA, 25 bp, Homo sapien
gagccccgatgctgcggtgcaaagt

SEQ ID NO: 623356 - DNA, 25 bp, Homo sapien
caggctaagtggctcaggggatcat

SEQ ID NO: 623357 - DNA, 25 bp, Homo sapien
gggatcatgagagccccgatgctgc

SEQ ID NO: 623358 - DNA, 25 bp, Homo sapien
catgagagccccgatgctgcggtgc

SEQ ID NO: 623359 - DNA, 25 bp, Homo sapien
gcctgcccagctgtctggcagggat

SEQ ID NO: 623360 - DNA, 25 bp, Homo sapien
gcagcctgcccagctgtctggcagg

SEQ ID NO: 623361 - DNA, 25 bp, Homo sapien
agcctgcccagctgtctggcaggga

SEQ ID NO: 623362 - DNA, 25 bp, Homo sapien
tggcagcctgcccagctgtctggca

SEQ ID NO: 623363 - DNA, 25 bp, Homo sapien
gagacaggtatgtccacaaggagcc

SEQ ID NO: 623364 - DNA, 25 bp, Homo sapien
gtctggagcactgggtccgcaccag

SEQ ID NO: 623365 - DNA, 25 bp, Homo sapien
tcctgttctttactcagcagagccg

SEQ ID NO: 623366 - DNA, 25 bp, Homo sapien
aaggagcccagcgtggaccacggca

SEQ ID NO: 623367 - DNA, 25 bp, Homo sapien
ctctcacctctcaaggcacagcccc

SEQ ID NO: 623368 - DNA, 25 bp, Homo sapien
ccactctcacctctcaaggcacagc

SEQ ID NO: 623369 - DNA, 25 bp, Homo sapien
ctcacctctcaaggcacagcccccc

SEQ ID NO: 623370 - DNA, 25 bp, Homo sapien
actctcacctctcaaggcacagccc

SEQ ID NO: 623371 - DNA, 25 bp, Homo sapien
ttgatgaggacccaaaaggctcgac

SEQ ID NO: 623372 - DNA, 25 bp, Homo sapien
caggtttatcccaacccagggctgg

SEQ ID NO: 623373 - DNA, 25 bp, Homo sapien
aaggctcgacatgctgttcagtcca

SEQ ID NO: 623374 - DNA, 25 bp, Homo sapien
ggcagaagcttcaaggaaagttgat

SEQ ID NO: 623375 - DNA, 25 bp, Homo sapien
tctgttcactgacgccatcctcagg

SEQ ID NO: 623376 - DNA, 25 bp, Homo sapien
tctgcagtaaccgcttcactctctg

SEQ ID NO: 623377 - DNA, 25 bp, Homo sapien
tcagtcaggacattgaatagtcctg

SEQ ID NO: 623378 - DNA, 25 bp, Homo sapien
ggtggcctttcagtcaggacattga

SEQ ID NO: 623379 - DNA, 25 bp, Homo sapien
tgtgaaggcctcagttgggccgtct

SEQ ID NO: 623380 - DNA, 25 bp, Homo sapien
ccaggaggcttttttgccaaatgaa

SEQ ID NO: 623381 - DNA, 25 bp, Homo sapien
tccctgtgaacctttctcctgcctg

SEQ ID NO: 623382 - DNA, 25 bp, Homo sapien
caatttaacgtcagtgtttcctcca

SEQ ID NO: 623383 - DNA, 25 bp, Homo sapien
tcattgagcagccacgtcttccgct

SEQ ID NO: 623384 - DNA, 25 bp, Homo sapien
tacacctcattgagcagccacgtct

SEQ ID NO: 623385 - DNA, 25 bp, Homo sapien
aatcttgttgtcataatttcccact

SEQ ID NO: 623386 - DNA, 25 bp, Homo sapien
cacgtcttccgcttgaaaagtccta

SEQ ID NO: 623387 - DNA, 25 bp, Homo sapien
gatcttggtttttacttgagaagac

SEQ ID NO: 623388 - DNA, 25 bp, Homo sapien
tggtttttacttgagaagacaaatg

SEQ ID NO: 623389 - DNA, 25 bp, Homo sapien
ctaggatcttggtttttacttgaga

SEQ ID NO: 623390 - DNA, 25 bp, Homo sapien
tcttggtttttacttgagaagacaa

SEQ ID NO: 623391 - DNA, 25 bp, Homo sapien
tgcaagggcatgattttggaagctc

SEQ ID NO: 623392 - DNA, 25 bp, Homo sapien
tttggaagctcgttcagagcctgga

SEQ ID NO: 623393 - DNA, 25 bp, Homo sapien
agagcctggagatgaaagtttgtag

SEQ ID NO: 623394 - DNA, 25 bp, Homo sapien
cctcctggtccaaggaggagtgcaa

SEQ ID NO: 623395 - DNA, 25 bp, Homo sapien
ctgagaggatgcgctgtcccggctc

SEQ ID NO: 623396 - DNA, 25 bp, Homo sapien
ctaacgctgacagagggccacatgc

SEQ ID NO: 623397 - DNA, 25 bp, Homo sapien
gctgtcccggctctaacgctgacag

SEQ ID NO: 623398 - DNA, 25 bp, Homo sapien
tgccaatccgagctgagaggatgcg

SEQ ID NO: 623399 - DNA, 25 bp, Homo sapien
cactgagaagatgacttgtttggtt

SEQ ID NO: 623400 - DNA, 25 bp, Homo sapien
ccatagataaaaaccaccactgaga

SEQ ID NO: 623401 - DNA, 25 bp, Homo sapien
gagagggcttttccatagataaaaa

SEQ ID NO: 623402 - DNA, 25 bp, Homo sapien
accactgagaagatgacttgtttgg

SEQ ID NO: 623403 - DNA, 25 bp, Homo sapien
aagccctggataagagcttgacccg

SEQ ID NO: 623404 - DNA, 25 bp, Homo sapien
gcttgacccgatggttgccagctgg

SEQ ID NO: 623405 - DNA, 25 bp, Homo sapien
cacggtaggcgcacaggacgtgttt

SEQ ID NO: 623406 - DNA, 25 bp, Homo sapien
ttttgaacgaaggacacactggctg

SEQ ID NO: 623407 - DNA, 25 bp, Homo sapien
ccttgaaaaatgaccatcgccagcc

SEQ ID NO: 623408 - DNA, 25 bp, Homo sapien
catcgccagcctcccgtccatagac

SEQ ID NO: 623409 - DNA, 25 bp, Homo sapien
ccgtccatagacaggatgacactgt

SEQ ID NO: 623410 - DNA, 25 bp, Homo sapien
cttgaaaaatgaccatcgccagcct

SEQ ID NO: 623411 - DNA, 25 bp, Homo sapien
tgcttctagcggacagcacccagca

SEQ ID NO: 623412 - DNA, 25 bp, Homo sapien
ttctagcggacagcacccagcaact

SEQ ID NO: 623413 - DNA, 25 bp, Homo sapien
gcttctagcggacagcacccagcaa

SEQ ID NO: 623414 - DNA, 25 bp, Homo sapien
ggctgcttctagcggacagcaccca

SEQ ID NO: 623415 - DNA, 25 bp, Homo sapien
cagagtgtggcctgcctggtgtgga

SEQ ID NO: 623416 - DNA, 25 bp, Homo sapien
gcccatgagtcacagagtgtggcct

SEQ ID NO: 623417 - DNA, 25 bp, Homo sapien
tattgccctgcggaataatgaatat

SEQ ID NO: 623418 - DNA, 25 bp, Homo sapien
gcctggtgtggagtattgccctgcg

SEQ ID NO: 623419 - DNA, 25 bp, Homo sapien
gctgcagcgtcctgaggctggaaca

SEQ ID NO: 623420 - DNA, 25 bp, Homo sapien
cctgatagaccacaagccctgtgag

SEQ ID NO: 623421 - DNA, 25 bp, Homo sapien
gaaagtttaatatcatgtccttttg

SEQ ID NO: 623422 - DNA, 25 bp, Homo sapien
tgtccttttggttaaatatagccat

SEQ ID NO: 623423 - DNA, 25 bp, Homo sapien
ggtgggtgtgggctgaatagccagc

SEQ ID NO: 623424 - DNA, 25 bp, Homo sapien
gaatagccagcaagagccttgaagt

SEQ ID NO: 623425 - DNA, 25 bp, Homo sapien
caggattgtagggttggacgaagag

SEQ ID NO: 623426 - DNA, 25 bp, Homo sapien
tgtgggctgaatagccagcaagagc

SEQ ID NO: 623427 - DNA, 25 bp, Homo sapien
gcccatcagcttttgtaggagtgtg

SEQ ID NO: 623428 - DNA, 25 bp, Homo sapien
cacaggtaacagccattcacagagc

SEQ ID NO: 623429 - DNA, 25 bp, Homo sapien
acacgcatgcatgtacgcactggaa

SEQ ID NO: 623430 - DNA, 25 bp, Homo sapien
acagacacgtggacgtgtaagcaca

SEQ ID NO: 623431 - DNA, 25 bp, Homo sapien
gaatatccgattgaaagacccatgg

SEQ ID NO: 623432 - DNA, 25 bp, Homo sapien
tcaggttttctaactgcagtctctg

SEQ ID NO: 623433 - DNA, 25 bp, Homo sapien
aagtcaaagcgagctggtgcaagtc

SEQ ID NO: 623434 - DNA, 25 bp, Homo sapien
gccaaagtcaaagcgagctggtgca

SEQ ID NO: 623435 - DNA, 25 bp, Homo sapien
caaagcgagctggtgcaagtcattg

SEQ ID NO: 623436 - DNA, 25 bp, Homo sapien
caggtgatatgaattgcatctgtgt

SEQ ID NO: 623437 - DNA, 25 bp, Homo sapien
ctccaggtgatatgaattgcatctg

SEQ ID NO: 623438 - DNA, 25 bp, Homo sapien
ccaggtgatatgaattgcatctgtg

SEQ ID NO: 623439 - DNA, 25 bp, Homo sapien
gtctccaggtgatatgaattgcatc

SEQ ID NO: 623440 - DNA, 25 bp, Homo sapien
gagacacagtcacgttcaaaccaat

SEQ ID NO: 623441 - DNA, 25 bp, Homo sapien
agacacagtcacgttcaaaccaatc

SEQ ID NO: 623442 - DNA, 25 bp, Homo sapien
gacacagtcacgttcaaaccaatct

SEQ ID NO: 623443 - DNA, 25 bp, Homo sapien
gttgttctgagagcctcgggaaaag

SEQ ID NO: 623444 - DNA, 25 bp, Homo sapien
caggtatcccctgaatcgccctcgt

SEQ ID NO: 623445 - DNA, 25 bp, Homo sapien
tcgttgttctgagagcctcgggaaa

SEQ ID NO: 623446 - DNA, 25 bp, Homo sapien
ctgtccaggtatcccctgaatcgcc

SEQ ID NO: 623447 - DNA, 25 bp, Homo sapien
tcagagagtctagaggggcagagga

SEQ ID NO: 623448 - DNA, 25 bp, Homo sapien
gtgtggatgccggtgttttaacctg

SEQ ID NO: 623449 - DNA, 25 bp, Homo sapien
tgccggtgttttaacctggaagtgc

SEQ ID NO: 623450 - DNA, 25 bp, Homo sapien
tggatgccggtgttttaacctggaa

SEQ ID NO: 623451 - DNA, 25 bp, Homo sapien
gagggatgatggcacactttctaat

SEQ ID NO: 623452 - DNA, 25 bp, Homo sapien
ggatgatggcacactttctaatggt

SEQ ID NO: 623453 - DNA, 25 bp, Homo sapien
ctaatggttgtacacagtgaggtgg

SEQ ID NO: 623454 - DNA, 25 bp, Homo sapien
ctttctaatggttgtacacagtgag

SEQ ID NO: 623455 - DNA, 25 bp, Homo sapien
tctcatggtcatgaccaacggcatc

SEQ ID NO: 623456 - DNA, 25 bp, Homo sapien
tggtcatgaccaacggcatcactgt

SEQ ID NO: 623457 - DNA, 25 bp, Homo sapien
gccatctcatggtcatgaccaacgg

SEQ ID NO: 623458 - DNA, 25 bp, Homo sapien
ggcagccatctcatggtcatgacca

SEQ ID NO: 623459 - DNA, 25 bp, Homo sapien
acagctgagagaggcccgatgaccc

SEQ ID NO: 623460 - DNA, 25 bp, Homo sapien
cagctgagagaggcccgatgaccca

SEQ ID NO: 623461 - DNA, 25 bp, Homo sapien
gctgttcacactgaacagggacccg

SEQ ID NO: 623462 - DNA, 25 bp, Homo sapien
gctgggagggagcatctaccatgaa

SEQ ID NO: 623463 - DNA, 25 bp, Homo sapien
ggagcatctaccatgaatcccagct

SEQ ID NO: 623464 - DNA, 25 bp, Homo sapien
acagggacccgagtgggtgtcatac

SEQ ID NO: 623465 - DNA, 25 bp, Homo sapien
gagcatgaagcgtatgaggacagca

SEQ ID NO: 623466 - DNA, 25 bp, Homo sapien
gaagcgtatgaggacagcagaattt

SEQ ID NO: 623467 - DNA, 25 bp, Homo sapien
catgaagcgtatgaggacagcagaa

SEQ ID NO: 623468 - DNA, 25 bp, Homo sapien
cagagagcatgaagcgtatgaggac

SEQ ID NO: 623469 - DNA, 25 bp, Homo sapien
tcctgtcacctcatcaattacagcc

SEQ ID NO: 623470 - DNA, 25 bp, Homo sapien
ctcctgtcacctcatcaattacagc

SEQ ID NO: 623471 - DNA, 25 bp, Homo sapien
tcaattacagccaactcctcgtggt

SEQ ID NO: 623472 - DNA, 25 bp, Homo sapien
tgtacagtgtaagggatgaggacaa

SEQ ID NO: 623473 - DNA, 25 bp, Homo sapien
tcagtgtgtacagtgtaagggatga

SEQ ID NO: 623474 - DNA, 25 bp, Homo sapien
acagtgtaagggatgaggacaacca

SEQ ID NO: 623475 - DNA, 25 bp, Homo sapien
ctctcagtgtgtacagtgtaaggga

SEQ ID NO: 623476 - DNA, 25 bp, Homo sapien
tggagtgaggacaaactcacaggtg

SEQ ID NO: 623477 - DNA, 25 bp, Homo sapien
tgcccctgtacctcttgggagatgc

SEQ ID NO: 623478 - DNA, 25 bp, Homo sapien
cttcccatggcggttgtgcccagtg

SEQ ID NO: 623479 - DNA, 25 bp, Homo sapien
agagagcggaggatcttacacggcc

SEQ ID NO: 623480 - DNA, 25 bp, Homo sapien
tggcgtccacatgcctttgcctcta

SEQ ID NO: 623481 - DNA, 25 bp, Homo sapien
tgctgaacactggaaccttctctgg

SEQ ID NO: 623482 - DNA, 25 bp, Homo sapien
tgaacactggaaccttctctggagg

SEQ ID NO: 623483 - DNA, 25 bp, Homo sapien
gctgaacactggaaccttctctgga

SEQ ID NO: 623484 - DNA, 25 bp, Homo sapien
aacactggaaccttctctggagggc

SEQ ID NO: 623485 - DNA, 25 bp, Homo sapien
gcatgagcccgtacaggatgctggc

SEQ ID NO: 623486 - DNA, 25 bp, Homo sapien
agctgataatatgccagcgcgcccc

SEQ ID NO: 623487 - DNA, 25 bp, Homo sapien
tgcaaggatccgatgcccgtgtctg

SEQ ID NO: 623488 - DNA, 25 bp, Homo sapien
gatgcccgtgtctggttgtaagcag

SEQ ID NO: 623489 - DNA, 25 bp, Homo sapien
gccactggcagcaaagagcacattt

SEQ ID NO: 623490 - DNA, 25 bp, Homo sapien
ctttgcccaggtagggcttgatggt

SEQ ID NO: 623491 - DNA, 25 bp, Homo sapien
gcaacagaaactgataccggccact

SEQ ID NO: 623492 - DNA, 25 bp, Homo sapien
cagggtctcgtatgggctttgccca

SEQ ID NO: 623493 - DNA, 25 bp, Homo sapien
actgggtggctcctccacaccaggt

SEQ ID NO: 623494 - DNA, 25 bp, Homo sapien
caaatgttgactgggtggctcctcc

SEQ ID NO: 623495 - DNA, 25 bp, Homo sapien
tgttgactgggtggctcctccacac

SEQ ID NO: 623496 - DNA, 25 bp, Homo sapien
gtggctcctccacaccaggtgtcat

SEQ ID NO: 623497 - DNA, 25 bp, Homo sapien
gcaggctccatcactgtctgtgcag

SEQ ID NO: 623498 - DNA, 25 bp, Homo sapien
tgggtgtctccgttcccgtgcacgt

SEQ ID NO: 623499 - DNA, 25 bp, Homo sapien
tggagcaggctccatcactgtctgt

SEQ ID NO: 623500 - DNA, 25 bp, Homo sapien
tccgttcccgtgcacgtgggctgtg

SEQ ID NO: 623501 - DNA, 25 bp, Homo sapien
ttaagagcggtgttctcagcgggaa

SEQ ID NO: 623502 - DNA, 25 bp, Homo sapien
tctccatgtgtggttggcgcgatct

SEQ ID NO: 623503 - DNA, 25 bp, Homo sapien
gagtgtctgccaagcgccaactttg

SEQ ID NO: 623504 - DNA, 25 bp, Homo sapien
tcaagttcttccctaatcccggcag

SEQ ID NO: 623505 - DNA, 25 bp, Homo sapien
cacctcgtctaccagaccttccgat

SEQ ID NO: 623506 - DNA, 25 bp, Homo sapien
accttccgattcaggggctgcgtct

SEQ ID NO: 623507 - DNA, 25 bp, Homo sapien
aggggctgcgtctttgagaacttcc

SEQ ID NO: 623508 - DNA, 25 bp, Homo sapien
gtctaccagaccttccgattcaggg

SEQ ID NO: 623509 - DNA, 25 bp, Homo sapien
catccccaaagatgggacaggctgt

SEQ ID NO: 623510 - DNA, 25 bp, Homo sapien
ttgcttctttcgtctggccccaggc

SEQ ID NO: 623511 - DNA, 25 bp, Homo sapien
gctggcagtccttcttgccccagtt

SEQ ID NO: 623512 - DNA, 25 bp, Homo sapien
ctgtggccggaacagctggcagtcc

SEQ ID NO: 623513 - DNA, 25 bp, Homo sapien
gaggtgcttgtgagcattcctggtc

SEQ ID NO: 623514 - DNA, 25 bp, Homo sapien
agccattcaggatgaacggtggagg

SEQ ID NO: 623515 - DNA, 25 bp, Homo sapien
tgcttgtgagcattcctggtctgga

SEQ ID NO: 623516 - DNA, 25 bp, Homo sapien
caggatgaacggtggaggtgcttgt

SEQ ID NO: 623517 - DNA, 25 bp, Homo sapien
tgctccaagcgctccaagtgttgtg

SEQ ID NO: 623518 - DNA, 25 bp, Homo sapien
aaaatgtaggttgatgaatgcagcg

SEQ ID NO: 623519 - DNA, 25 bp, Homo sapien
aatgacattcgatgtcggccacaag

SEQ ID NO: 623520 - DNA, 25 bp, Homo sapien
aagtgttgtgctggaagtggcttcc

SEQ ID NO: 623521 - DNA, 25 bp, Homo sapien
ctggtgacaggcgtagcatcgaatc

SEQ ID NO: 623522 - DNA, 25 bp, Homo sapien
gcgtagcatcgaatccatagcttca

SEQ ID NO: 623523 - DNA, 25 bp, Homo sapien
acccccacgacaggatgaggaacgg

SEQ ID NO: 623524 - DNA, 25 bp, Homo sapien
gatgaggaacggctgctggtgacag

SEQ ID NO: 623525 - DNA, 25 bp, Homo sapien
ggtccatcgtgtgggccaagaaaca

SEQ ID NO: 623526 - DNA, 25 bp, Homo sapien
caggttccacgaggtgtgacaggtc

SEQ ID NO: 623527 - DNA, 25 bp, Homo sapien
tgtgacaggtccatcgtgtgggcca

SEQ ID NO: 623528 - DNA, 25 bp, Homo sapien
tcagaggagtagttcaggttccacg

SEQ ID NO: 623529 - DNA, 25 bp, Homo sapien
aactcttcttgggcccaggtgcaca

SEQ ID NO: 623530 - DNA, 25 bp, Homo sapien
gcccaggtgcacaggtaaattcgga

SEQ ID NO: 623531 - DNA, 25 bp, Homo sapien
caggtaaattcggatctttcccaag

SEQ ID NO: 623532 - DNA, 25 bp, Homo sapien
gtgcacaggtaaattcggatctttc

SEQ ID NO: 623533 - DNA, 25 bp, Homo sapien
tgtgtcccttgaggaacctgaagtt

SEQ ID NO: 623534 - DNA, 25 bp, Homo sapien
catctgtgtcccttgaggaacctga

SEQ ID NO: 623535 - DNA, 25 bp, Homo sapien
tgacacatctgtgtcccttgaggaa

SEQ ID NO: 623536 - DNA, 25 bp, Homo sapien
acctgaagttttggtgaatccagaa

SEQ ID NO: 623537 - DNA, 25 bp, Homo sapien
tcagtgatgggttgggtcgagagct

SEQ ID NO: 623538 - DNA, 25 bp, Homo sapien
tgatgggttgggtcgagagctgatt

SEQ ID NO: 623539 - DNA, 25 bp, Homo sapien
gggttgggtcgagagctgattggcc

SEQ ID NO: 623540 - DNA, 25 bp, Homo sapien
gagctcagtgatgggttgggtcgag

SEQ ID NO: 623541 - DNA, 25 bp, Homo sapien
cacaacagtaggacttattttcctc

SEQ ID NO: 623542 - DNA, 25 bp, Homo sapien
ggcttcatgatcaggcaggatgagt

SEQ ID NO: 623543 - DNA, 25 bp, Homo sapien
tttttgctagttggcttcatgatca

SEQ ID NO: 623544 - DNA, 25 bp, Homo sapien
tagggccttactgcacaacagtagg

SEQ ID NO: 623545 - DNA, 25 bp, Homo sapien
ggttactcgtacgttcaaggtcaca

SEQ ID NO: 623546 - DNA, 25 bp, Homo sapien
ggttccagagtctagcccttatgca

SEQ ID NO: 623547 - DNA, 25 bp, Homo sapien
catggtgctgccctcaataaaggct

SEQ ID NO: 623548 - DNA, 25 bp, Homo sapien
gatgttccataaagcttcctgcgtg

SEQ ID NO: 623549 - DNA, 25 bp, Homo sapien
cttgctgaacccacgatcccgttgt

SEQ ID NO: 623550 - DNA, 25 bp, Homo sapien
tgaacccacgatcccgttgtgggtg

SEQ ID NO: 623551 - DNA, 25 bp, Homo sapien
ttcagctgctctgatgatggcttga

SEQ ID NO: 623552 - DNA, 25 bp, Homo sapien
gcttgaccctcagacactttcttca

SEQ ID NO: 623553 - DNA, 25 bp, Homo sapien
ctgattggaccagagctgtgccccg

SEQ ID NO: 623554 - DNA, 25 bp, Homo sapien
attggaccagagctgtgccccgatc

SEQ ID NO: 623555 - DNA, 25 bp, Homo sapien
gagctgtgccccgatccaaatcaag

SEQ ID NO: 623556 - DNA, 25 bp, Homo sapien
tgtgccccgatccaaatcaagttct

SEQ ID NO: 623557 - DNA, 25 bp, Homo sapien
ggcacacgaggtcaatccagtggcg

SEQ ID NO: 623558 - DNA, 25 bp, Homo sapien
ctggcacacgaggtcaatccagtgg

SEQ ID NO: 623559 - DNA, 25 bp, Homo sapien
tcagtccctagcctgggactctgca

SEQ ID NO: 623560 - DNA, 25 bp, Homo sapien
tctgcattctgaccatggactgggc

SEQ ID NO: 623561 - DNA, 25 bp, Homo sapien
tgggaaggaaatggccattttcctc

SEQ ID NO: 623562 - DNA, 25 bp, Homo sapien
ctgggaaggaaatggccattttcct

SEQ ID NO: 623563 - DNA, 25 bp, Homo sapien
taatacaaccgcagcaggttgcctg

SEQ ID NO: 623564 - DNA, 25 bp, Homo sapien
ttgcctgctccgaatggcagaacgt

SEQ ID NO: 623565 - DNA, 25 bp, Homo sapien
gccatcacataattaatacaaccgc

SEQ ID NO: 623566 - DNA, 25 bp, Homo sapien
tttatgatcccggtgggtcagctgg

SEQ ID NO: 623567 - DNA, 25 bp, Homo sapien
tctgttccactccccttgctgtctc

SEQ ID NO: 623568 - DNA, 25 bp, Homo sapien
gtgcctgttggaaggcacccctttc

SEQ ID NO: 623569 - DNA, 25 bp, Homo sapien
ctctgttccactccccttgctgtct

SEQ ID NO: 623570 - DNA, 25 bp, Homo sapien
cctgttggaaggcacccctttctct

SEQ ID NO: 623571 - DNA, 25 bp, Homo sapien
gtggaggacgagatgctttcagcct

SEQ ID NO: 623572 - DNA, 25 bp, Homo sapien
ccttggagagtggtatgggcgtgta

SEQ ID NO: 623573 - DNA, 25 bp, Homo sapien
gggtgcagccccgttcctggaatgc

SEQ ID NO: 623574 - DNA, 25 bp, Homo sapien
tgctctgggtgcagccccgttcctg

SEQ ID NO: 623575 - DNA, 25 bp, Homo sapien
tctggtctgcagtgtgatgccagtg

SEQ ID NO: 623576 - DNA, 25 bp, Homo sapien
ggatttgggattctgagacttcttg

SEQ ID NO: 623577 - DNA, 25 bp, Homo sapien
cagtgcccgggcttgagagctccag

SEQ ID NO: 623578 - DNA, 25 bp, Homo sapien
tgctcccacggttcccatggaaagt

SEQ ID NO: 623579 - DNA, 25 bp, Homo sapien
ggccatgaggatgcagcccaggggc

SEQ ID NO: 623580 - DNA, 25 bp, Homo sapien
aggggccatgaggatgcagcccagg

SEQ ID NO: 623581 - DNA, 25 bp, Homo sapien
gggccatgaggatgcagcccagggg

SEQ ID NO: 623582 - DNA, 25 bp, Homo sapien
ggggccatgaggatgcagcccaggg

SEQ ID NO: 623583 - DNA, 25 bp, Homo sapien
ctgacatattattagggaccaacag

SEQ ID NO: 623584 - DNA, 25 bp, Homo sapien
tcgtcatcgggctcttcaaaagcag

SEQ ID NO: 623585 - DNA, 25 bp, Homo sapien
tggagtcgtcatcgggctcttcaaa

SEQ ID NO: 623586 - DNA, 25 bp, Homo sapien
agaacgtggagtcgtcatcgggctc

SEQ ID NO: 623587 - DNA, 25 bp, Homo sapien
gagggagaacgtggagtcgtcatcg

SEQ ID NO: 623588 - DNA, 25 bp, Homo sapien
cttgtcttcattccaggttgtctgg

SEQ ID NO: 623589 - DNA, 25 bp, Homo sapien
cattccaggttgtctggttttgtgt

SEQ ID NO: 623590 - DNA, 25 bp, Homo sapien
gcaggccaagggtttcttgtcttca

SEQ ID NO: 623591 - DNA, 25 bp, Homo sapien
ttcttgccagtaccatggacagcag

SEQ ID NO: 623592 - DNA, 25 bp, Homo sapien
agtctggggttccactgttgtgaaa

SEQ ID NO: 623593 - DNA, 25 bp, Homo sapien
cagtctggggttccactgttgtgaa

SEQ ID NO: 623594 - DNA, 25 bp, Homo sapien
ttccagtctggggttccactgttgt

SEQ ID NO: 623595 - DNA, 25 bp, Homo sapien
tttggtgatggtagactcttgtaca

SEQ ID NO: 623596 - DNA, 25 bp, Homo sapien
ttggtgatggtagactcttgtacag

SEQ ID NO: 623597 - DNA, 25 bp, Homo sapien
tggtgatggtagactcttgtacagt

SEQ ID NO: 623598 - DNA, 25 bp, Homo sapien
ctgaagacgctgcagatccataggt

SEQ ID NO: 623599 - DNA, 25 bp, Homo sapien
gacgctgcagatccataggtctagg

SEQ ID NO: 623600 - DNA, 25 bp, Homo sapien
taggtctaggccctgactgtcagat

SEQ ID NO: 623601 - DNA, 25 bp, Homo sapien
gatccataggtctaggccctgactg

SEQ ID NO: 623602 - DNA, 25 bp, Homo sapien
tcgcagcttgtgtcaatttagagta

SEQ ID NO: 623603 - DNA, 25 bp, Homo sapien
ctgtgagacgttcgcagcttgtgtc

SEQ ID NO: 623604 - DNA, 25 bp, Homo sapien
tgagacgttcgcagcttgtgtcaat

SEQ ID NO: 623605 - DNA, 25 bp, Homo sapien
cgttcgcagcttgtgtcaatttaga

SEQ ID NO: 623606 - DNA, 25 bp, Homo sapien
tcagcagccagaaaacttggaggca

SEQ ID NO: 623607 - DNA, 25 bp, Homo sapien
tccattaagaatcgtcttagttcct

SEQ ID NO: 623608 - DNA, 25 bp, Homo sapien
ttcaacatgttggtcttccactcgc

SEQ ID NO: 623609 - DNA, 25 bp, Homo sapien
ggtattgtagcaagagtccattaag

SEQ ID NO: 623610 - DNA, 25 bp, Homo sapien
tcttctaaaggtcagcaactcattg

SEQ ID NO: 623611 - DNA, 25 bp, Homo sapien
ttctaaaggtcagcaactcattggg

SEQ ID NO: 623612 - DNA, 25 bp, Homo sapien
ggctgctgctgagcttatgatgatt

SEQ ID NO: 623613 - DNA, 25 bp, Homo sapien
gctgctgagcttatgatgatttttc

SEQ ID NO: 623614 - DNA, 25 bp, Homo sapien
ggtcttgaaggccatactaagtcca

SEQ ID NO: 623615 - DNA, 25 bp, Homo sapien
tgaaggccatactaagtccacaggc

SEQ ID NO: 623616 - DNA, 25 bp, Homo sapien
tcttgaaggccatactaagtccaca

SEQ ID NO: 623617 - DNA, 25 bp, Homo sapien
aggccatactaagtccacaggccat

SEQ ID NO: 623618 - DNA, 25 bp, Homo sapien
gtgacagtttcgatgggcagcatac

SEQ ID NO: 623619 - DNA, 25 bp, Homo sapien
aatgtgacagtttcgatgggcagca

SEQ ID NO: 623620 - DNA, 25 bp, Homo sapien
gaaatgtgacagtttcgatgggcag

SEQ ID NO: 623621 - DNA, 25 bp, Homo sapien
gtgaaatgtgacagtttcgatgggc

SEQ ID NO: 623622 - DNA, 25 bp, Homo sapien
ctgaggacacagagatatgcagtct

SEQ ID NO: 623623 - DNA, 25 bp, Homo sapien
tgaggacacagagatatgcagtctg

SEQ ID NO: 623624 - DNA, 25 bp, Homo sapien
caacaggagtttctattggctttga

SEQ ID NO: 623625 - DNA, 25 bp, Homo sapien
taagcatctgatctccaggatttcc

SEQ ID NO: 623626 - DNA, 25 bp, Homo sapien
tcagacccaagataaagcttgtggt

SEQ ID NO: 623627 - DNA, 25 bp, Homo sapien
gggctggtgaacaacaggagtttct

SEQ ID NO: 623628 - DNA, 25 bp, Homo sapien
cagtgcctcttacttcaccgagtct

SEQ ID NO: 623629 - DNA, 25 bp, Homo sapien
gtgcctcttacttcaccgagtcttc

SEQ ID NO: 623630 - DNA, 25 bp, Homo sapien
cttacttcaccgagtcttcctttca

SEQ ID NO: 623631 - DNA, 25 bp, Homo sapien
gcaggcagtggcactcgccacaacg

SEQ ID NO: 623632 - DNA, 25 bp, Homo sapien
cagggaatggatgctggccttgtct

SEQ ID NO: 623633 - DNA, 25 bp, Homo sapien
tcctttaagtccgttgtctgtgcaa

SEQ ID NO: 623634 - DNA, 25 bp, Homo sapien
aagcattaggctcagacaggcacca

SEQ ID NO: 623635 - DNA, 25 bp, Homo sapien
gtgtaagtccaaagcagatgagggc

SEQ ID NO: 623636 - DNA, 25 bp, Homo sapien
ccatgcggccttgcctttggttgca

SEQ ID NO: 623637 - DNA, 25 bp, Homo sapien
agctggttagaaacgaagaccctcg

SEQ ID NO: 623638 - DNA, 25 bp, Homo sapien
ttgattgaaggaacatactagcatg

SEQ ID NO: 623639 - DNA, 25 bp, Homo sapien
acgttgccggtaagcacccagtgtg

SEQ ID NO: 623640 - DNA, 25 bp, Homo sapien
gaatgccgtaaaaaaggcacacgtg

SEQ ID NO: 623641 - DNA, 25 bp, Homo sapien
gaatggatgagctgaatgccgtaaa

SEQ ID NO: 623642 - DNA, 25 bp, Homo sapien
gtaaaaaaggcacacgtgaaagtca

SEQ ID NO: 623643 - DNA, 25 bp, Homo sapien
tctactctttggttgtgaggaatgg

SEQ ID NO: 623644 - DNA, 25 bp, Homo sapien
acactgacagtccagggagtgcccc

SEQ ID NO: 623645 - DNA, 25 bp, Homo sapien
tgacagtccagggagtgccccaagc

SEQ ID NO: 623646 - DNA, 25 bp, Homo sapien
cagtccagggagtgccccaagcaca

SEQ ID NO: 623647 - DNA, 25 bp, Homo sapien
actgacagtccagggagtgccccaa

SEQ ID NO: 623648 - DNA, 25 bp, Homo sapien
caaggattccgcttcatttcgggct

SEQ ID NO: 623649 - DNA, 25 bp, Homo sapien
tggtgtcaatcaagcccacggtctc

SEQ ID NO: 623650 - DNA, 25 bp, Homo sapien
tagaaaccatttcccgctagcgctg

SEQ ID NO: 623651 - DNA, 25 bp, Homo sapien
ttctgggagctcaaacgggagccgt

SEQ ID NO: 623652 - DNA, 25 bp, Homo sapien
atctaggccctgaacaccatatcca

SEQ ID NO: 623653 - DNA, 25 bp, Homo sapien
cagtagagaccatctaggccctgaa

SEQ ID NO: 623654 - DNA, 25 bp, Homo sapien
tagccagtagagaccatctaggccc

SEQ ID NO: 623655 - DNA, 25 bp, Homo sapien
accatctaggccctgaacaccatat

SEQ ID NO: 623656 - DNA, 25 bp, Homo sapien
cacatacgggacctgtacatatttt

SEQ ID NO: 623657 - DNA, 25 bp, Homo sapien
aactctttattgttggtggcatata

SEQ ID NO: 623658 - DNA, 25 bp, Homo sapien
tatcacttttaaggtaagacattcg

SEQ ID NO: 623659 - DNA, 25 bp, Homo sapien
catgcaaacttgatatcatcactaa

SEQ ID NO: 623660 - DNA, 25 bp, Homo sapien
ccagttactaaaaatgagactggat

SEQ ID NO: 623661 - DNA, 25 bp, Homo sapien
taggtgggtctaggcactgacagca

SEQ ID NO: 623662 - DNA, 25 bp, Homo sapien
ggtgggctggaactggatctgatta

SEQ ID NO: 623663 - DNA, 25 bp, Homo sapien
cagtgttccagttactaaaaatgag

SEQ ID NO: 623664 - DNA, 25 bp, Homo sapien
atcaggggcctgtggacatcgttct

SEQ ID NO: 623665 - DNA, 25 bp, Homo sapien
cctgtggacatcgttctggatgagt

SEQ ID NO: 623666 - DNA, 25 bp, Homo sapien
gggcctgtggacatcgttctggatg

SEQ ID NO: 623667 - DNA, 25 bp, Homo sapien
tcaggggcctgtggacatcgttctg

SEQ ID NO: 623668 - DNA, 25 bp, Homo sapien
catcctgggatcagctcagggtgag

SEQ ID NO: 623669 - DNA, 25 bp, Homo sapien
caaattgatgtagaaagcagcacac

SEQ ID NO: 623670 - DNA, 25 bp, Homo sapien
tctgactggctgtattccaaagaag

SEQ ID NO: 623671 - DNA, 25 bp, Homo sapien
tatttgtgcccgcaattgactgcag

SEQ ID NO: 623672 - DNA, 25 bp, Homo sapien
gagtttgagacttggtcctctcctc

SEQ ID NO: 623673 - DNA, 25 bp, Homo sapien
ccgtggtcaccatggtcagaggaca

SEQ ID NO: 623674 - DNA, 25 bp, Homo sapien
gatccagagtgaggcatgttggttc

SEQ ID NO: 623675 - DNA, 25 bp, Homo sapien
gtgcggcaggcaaacctgtgctgct

SEQ ID NO: 623676 - DNA, 25 bp, Homo sapien
tcctgaagagacgaccaaggtgcgg

SEQ ID NO: 623677 - DNA, 25 bp, Homo sapien
gacagatatattccaggcatacttg

SEQ ID NO: 623678 - DNA, 25 bp, Homo sapien
gttgctcctccgcatgtctcagggt

SEQ ID NO: 623679 - DNA, 25 bp, Homo sapien
attagtcttgttgatgactgagggc

SEQ ID NO: 623680 - DNA, 25 bp, Homo sapien
tgtctcagggtttgcgccgactgca

SEQ ID NO: 623681 - DNA, 25 bp, Homo sapien
cacatacatcaaactctatttttag

SEQ ID NO: 623682 - DNA, 25 bp, Homo sapien
cctcagtgagtttcttcactggtcc

SEQ ID NO: 623683 - DNA, 25 bp, Homo sapien
tttcttcactggtccgtgccccatg

SEQ ID NO: 623684 - DNA, 25 bp, Homo sapien
catgctcggcaagttaagacattca

SEQ ID NO: 623685 - DNA, 25 bp, Homo sapien
gctgaagcatggctgtgaatctcag

SEQ ID NO: 623686 - DNA, 25 bp, Homo sapien
ctctctcgtaaccagggaagatggc

SEQ ID NO: 623687 - DNA, 25 bp, Homo sapien
tatcttccgagatgactttcaaggc

SEQ ID NO: 623688 - DNA, 25 bp, Homo sapien
actgttggggtcacatagaacctgc

SEQ ID NO: 623689 - DNA, 25 bp, Homo sapien
gcgccccgcaagctctggccctggg

SEQ ID NO: 623690 - DNA, 25 bp, Homo sapien
ctctgtgcgccccgcaagctctggc

SEQ ID NO: 623691 - DNA, 25 bp, Homo sapien
ggctctgtgcgccccgcaagctctg

SEQ ID NO: 623692 - DNA, 25 bp, Homo sapien
tgtgcgccccgcaagctctggccct

SEQ ID NO: 623693 - DNA, 25 bp, Homo sapien
tcatcctgacccacaaggttcatgc

SEQ ID NO: 623694 - DNA, 25 bp, Homo sapien
gttcatgcgttcagccgccgcggtg

SEQ ID NO: 623695 - DNA, 25 bp, Homo sapien
ccacaaggttcatgcgttcagccgc

SEQ ID NO: 623696 - DNA, 25 bp, Homo sapien
gacccacaaggttcatgcgttcagc

SEQ ID NO: 623697 - DNA, 25 bp, Homo sapien
gccgtgcttccgattcagccttcag

SEQ ID NO: 623698 - DNA, 25 bp, Homo sapien
cgattcagccttcagacggtatttc

SEQ ID NO: 623699 - DNA, 25 bp, Homo sapien
gccagttctgccgtgcttccgattc

SEQ ID NO: 623700 - DNA, 25 bp, Homo sapien
tgcttccgattcagccttcagacgg

SEQ ID NO: 623701 - DNA, 25 bp, Homo sapien
cggccggatgcggaaacgctcagga

SEQ ID NO: 623702 - DNA, 25 bp, Homo sapien
ggtcaccggccggatgcggaaacgc

SEQ ID NO: 623703 - DNA, 25 bp, Homo sapien
ggccggatgcggaaacgctcaggaa

SEQ ID NO: 623704 - DNA, 25 bp, Homo sapien
caccggccggatgcggaaacgctca

SEQ ID NO: 623705 - DNA, 25 bp, Homo sapien
acctttgcagcttctgatcgcatcg

SEQ ID NO: 623706 - DNA, 25 bp, Homo sapien
tgatcgcatcgtcgagctctaggca

SEQ ID NO: 623707 - DNA, 25 bp, Homo sapien
tcgagctctaggcacttgttcaggc

SEQ ID NO: 623708 - DNA, 25 bp, Homo sapien
tctcgtgcaaaagcacctttgcagc

SEQ ID NO: 623709 - DNA, 25 bp, Homo sapien
tggtgaccgatatgcagcacccctg

SEQ ID NO: 623710 - DNA, 25 bp, Homo sapien
tatctggatagagaaacacctgatc

SEQ ID NO: 623711 - DNA, 25 bp, Homo sapien
taaagccctgcatagaaattcccaa

SEQ ID NO: 623712 - DNA, 25 bp, Homo sapien
ccaagaatgggtgtggacgtgaaca

SEQ ID NO: 623713 - DNA, 25 bp, Homo sapien
ctgctctcttggatacagacatgac

SEQ ID NO: 623714 - DNA, 25 bp, Homo sapien
attgcttaggaagggtgccatttcc

SEQ ID NO: 623715 - DNA, 25 bp, Homo sapien
agattgcttaggaagggtgccattt

SEQ ID NO: 623716 - DNA, 25 bp, Homo sapien
ttgcttaggaagggtgccatttccc

SEQ ID NO: 623717 - DNA, 25 bp, Homo sapien
gattgcttaggaagggtgccatttc

SEQ ID NO: 623718 - DNA, 25 bp, Homo sapien
agggtgtggatgaggagccacaggg

SEQ ID NO: 623719 - DNA, 25 bp, Homo sapien
cgagggtgtggatgaggagccacag

SEQ ID NO: 623720 - DNA, 25 bp, Homo sapien
ggcgagggtgtggatgaggagccac

SEQ ID NO: 623721 - DNA, 25 bp, Homo sapien
tcaggcgagggtgtggatgaggagc

SEQ ID NO: 623722 - DNA, 25 bp, Homo sapien
tcagtgccacagaagtgtgagcctg

SEQ ID NO: 623723 - DNA, 25 bp, Homo sapien
gtgtgagcctggctccgtcctcaaa

SEQ ID NO: 623724 - DNA, 25 bp, Homo sapien
ggctccgtcctcaaagatctgctga

SEQ ID NO: 623725 - DNA, 25 bp, Homo sapien
gcctggctccgtcctcaaagatctg

SEQ ID NO: 623726 - DNA, 25 bp, Homo sapien
tcccgttaggccgttatacaccaga

SEQ ID NO: 623727 - DNA, 25 bp, Homo sapien
cactcttggtacttttgtgctctgt

SEQ ID NO: 623728 - DNA, 25 bp, Homo sapien
aggccgttatacaccagagattttc

SEQ ID NO: 623729 - DNA, 25 bp, Homo sapien
ttttccactcttggtacttttgtgc

SEQ ID NO: 623730 - DNA, 25 bp, Homo sapien
gccacggcggcctgtaggtgtcact

SEQ ID NO: 623731 - DNA, 25 bp, Homo sapien
acgaagaaaatcctctccgggcctg

SEQ ID NO: 623732 - DNA, 25 bp, Homo sapien
tcgaacgcagttgccgcaggtgcgc

SEQ ID NO: 623733 - DNA, 25 bp, Homo sapien
tgtaggtgtcactgcgagaccgcag

SEQ ID NO: 623734 - DNA, 25 bp, Homo sapien
ccacggacacttcctcgtgggctgc

SEQ ID NO: 623735 - DNA, 25 bp, Homo sapien
tcctttctggaagtcaatgcagtag

SEQ ID NO: 623736 - DNA, 25 bp, Homo sapien
tgtaaaagagatgccaccaactgtg

SEQ ID NO: 623737 - DNA, 25 bp, Homo sapien
tgcactccagtctattggtggaacc

SEQ ID NO: 623738 - DNA, 25 bp, Homo sapien
tgacttgaacttctcgcccaggact

SEQ ID NO: 623739 - DNA, 25 bp, Homo sapien
cttgctgaagtcatgggtgaaatta

SEQ ID NO: 623740 - DNA, 25 bp, Homo sapien
tcagtagatgccaactattatggtc

SEQ ID NO: 623741 - DNA, 25 bp, Homo sapien
tcttgctgaagtcatgggtgaaatt

SEQ ID NO: 623742 - DNA, 25 bp, Homo sapien
actattatggtctcagagttcaact

SEQ ID NO: 623743 - DNA, 25 bp, Homo sapien
gctgcccggcgatgtctctgtattt

SEQ ID NO: 623744 - DNA, 25 bp, Homo sapien
taaatctcccggttgctctgggaag

SEQ ID NO: 623745 - DNA, 25 bp, Homo sapien
ggtaaccgtttcctaacagcagcaa

SEQ ID NO: 623746 - DNA, 25 bp, Homo sapien
tccgtttgcctggtgaaaagaactg

SEQ ID NO: 623747 - DNA, 25 bp, Homo sapien
ctgcttttcctcccgtggagatctg

SEQ ID NO: 623748 - DNA, 25 bp, Homo sapien
ttttcctcccgtggagatctgatgg

SEQ ID NO: 623749 - DNA, 25 bp, Homo sapien
ttcctcccgtggagatctgatggga

SEQ ID NO: 623750 - DNA, 25 bp, Homo sapien
cctcccgtggagatctgatgggagt

SEQ ID NO: 623751 - DNA, 25 bp, Homo sapien
gggcactgtcccataagttgactta

SEQ ID NO: 623752 - DNA, 25 bp, Homo sapien
taagtccgtccagggaatgactgcc

SEQ ID NO: 623753 - DNA, 25 bp, Homo sapien
tgccccagacagtgatgacgaatat

SEQ ID NO: 623754 - DNA, 25 bp, Homo sapien
cagaagctgtgagcgtaagtccgtc

SEQ ID NO: 623755 - DNA, 25 bp, Homo sapien
ttgaggaaaggagagccaaatcttg

SEQ ID NO: 623756 - DNA, 25 bp, Homo sapien
tggttagaatgccttcacaattgac

SEQ ID NO: 623757 - DNA, 25 bp, Homo sapien
cattgaagcgaatgctggcattttc

SEQ ID NO: 623758 - DNA, 25 bp, Homo sapien
tcacaattgacattgaagcgaatgc

SEQ ID NO: 623759 - DNA, 25 bp, Homo sapien
ccaccatggcattgtgggtggtgat

SEQ ID NO: 623760 - DNA, 25 bp, Homo sapien
gtgcttgccaccatggcattgtggg

SEQ ID NO: 623761 - DNA, 25 bp, Homo sapien
tggcattgtgggtggtgatgtacat

SEQ ID NO: 623762 - DNA, 25 bp, Homo sapien
gcttgccaccatggcattgtgggtg

SEQ ID NO: 623763 - DNA, 25 bp, Homo sapien
cacctgtgttctagggaaggtgtct

SEQ ID NO: 623764 - DNA, 25 bp, Homo sapien
ctctcttccaagtggagctgtgtcc

SEQ ID NO: 623765 - DNA, 25 bp, Homo sapien
tgtgttctagggaaggtgtctgcca

SEQ ID NO: 623766 - DNA, 25 bp, Homo sapien
actctcttccaagtggagctgtgtc

SEQ ID NO: 623767 - DNA, 25 bp, Homo sapien
tcctggtggcattgttgaggacacc

SEQ ID NO: 623768 - DNA, 25 bp, Homo sapien
tttgggtccctgtggtctaacatag

SEQ ID NO: 623769 - DNA, 25 bp, Homo sapien
tctaacatagtgaatggcactggac

SEQ ID NO: 623770 - DNA, 25 bp, Homo sapien
tgaaagtcattagtggtgagtggta

SEQ ID NO: 623771 - DNA, 25 bp, Homo sapien
atcttgggacgccggccgcgtcacc

SEQ ID NO: 623772 - DNA, 25 bp, Homo sapien
ccatcttgggacgccggccgcgtca

SEQ ID NO: 623773 - DNA, 25 bp, Homo sapien
catcttgggacgccggccgcgtcac

SEQ ID NO: 623774 - DNA, 25 bp, Homo sapien
tcttgggacgccggccgcgtcacct

SEQ ID NO: 623775 - DNA, 25 bp, Homo sapien
cccgccttagcagccgggacgccgc

SEQ ID NO: 623776 - DNA, 25 bp, Homo sapien
gtaggtccggcctgtccgctgccag

SEQ ID NO: 623777 - DNA, 25 bp, Homo sapien
caagagcatcccctggcgccgctgc

SEQ ID NO: 623778 - DNA, 25 bp, Homo sapien
gccaggcccagcaagagcatcccct

SEQ ID NO: 623779 - DNA, 25 bp, Homo sapien
gccaggggcgcgggcccgccgccgc

SEQ ID NO: 623780 - DNA, 25 bp, Homo sapien
ggagccaggggcgcgggcccgccgc

SEQ ID NO: 623781 - DNA, 25 bp, Homo sapien
gagccaggggcgcgggcccgccgcc

SEQ ID NO: 623782 - DNA, 25 bp, Homo sapien
agccaggggcgcgggcccgccgccg

SEQ ID NO: 623783 - DNA, 25 bp, Homo sapien
cgagcagacacactttgagctccct

SEQ ID NO: 623784 - DNA, 25 bp, Homo sapien
gcagacacactttgagctccctcag

SEQ ID NO: 623785 - DNA, 25 bp, Homo sapien
agacacactttgagctccctcagcg

SEQ ID NO: 623786 - DNA, 25 bp, Homo sapien
agcagacacactttgagctccctca

SEQ ID NO: 623787 - DNA, 25 bp, Homo sapien
gcagacagcgtcttggacgtgggag

SEQ ID NO: 623788 - DNA, 25 bp, Homo sapien
gctggcagacagcgtcttggacgtg

SEQ ID NO: 623789 - DNA, 25 bp, Homo sapien
agacagcgtcttggacgtgggaggg

SEQ ID NO: 623790 - DNA, 25 bp, Homo sapien
tcccggccggacccgccgccactca

SEQ ID NO: 623791 - DNA, 25 bp, Homo sapien
tgtttgctctttgtggggcgggaag

SEQ ID NO: 623792 - DNA, 25 bp, Homo sapien
ggcgggaagagtccacgggctccag

SEQ ID NO: 623793 - DNA, 25 bp, Homo sapien
ctgtttgctctttgtggggcgggaa

SEQ ID NO: 623794 - DNA, 25 bp, Homo sapien
gtttgctctttgtggggcgggaaga

SEQ ID NO: 623795 - DNA, 25 bp, Homo sapien
gctgcttgtaaaacctaaagacctg

SEQ ID NO: 623796 - DNA, 25 bp, Homo sapien
tactttggaagacttggccaactcc

SEQ ID NO: 623797 - DNA, 25 bp, Homo sapien
ccaagagacaaagtaggctaatgct

SEQ ID NO: 623798 - DNA, 25 bp, Homo sapien
cctgacaagacaggaagctgaagct

SEQ ID NO: 623799 - DNA, 25 bp, Homo sapien
acaaaccgccacacaatactcgatt

SEQ ID NO: 623800 - DNA, 25 bp, Homo sapien
cgccacacaatactcgatttaccta

SEQ ID NO: 623801 - DNA, 25 bp, Homo sapien
tactcgatttacctacacctgtatc

SEQ ID NO: 623802 - DNA, 25 bp, Homo sapien
ctattgttgggttgatgtttggatc

SEQ ID NO: 623803 - DNA, 25 bp, Homo sapien
ttacagcgtatgtgtagtgtagagg

SEQ ID NO: 623804 - DNA, 25 bp, Homo sapien
gattagatgccaaggaggattccca

SEQ ID NO: 623805 - DNA, 25 bp, Homo sapien
tagatactgccttaaacaggaggcg

SEQ ID NO: 623806 - DNA, 25 bp, Homo sapien
gaggagagagggatcaacaactacc

SEQ ID NO: 623807 - DNA, 25 bp, Homo sapien
ggctctgaacactatggcacattga

SEQ ID NO: 623808 - DNA, 25 bp, Homo sapien
gggtattgctacagatcccaaaaca

SEQ ID NO: 623809 - DNA, 25 bp, Homo sapien
gagatacgatgaacaaattccttga

SEQ ID NO: 623810 - DNA, 25 bp, Homo sapien
gaggtcctgacaccagaactagaga

SEQ ID NO: 623811 - DNA, 25 bp, Homo sapien
tagttgcctgaataagcctttacag

SEQ ID NO: 623812 - DNA, 25 bp, Homo sapien
tatacactcaataacgaaagcttcg

SEQ ID NO: 623813 - DNA, 25 bp, Homo sapien
cacacatcagtagcggaatgcacat

SEQ ID NO: 623814 - DNA, 25 bp, Homo sapien
taggagcagtgctattaaatgagct

SEQ ID NO: 623815 - DNA, 25 bp, Homo sapien
tagtaaaaacactggagataggagc

SEQ ID NO: 623816 - DNA, 25 bp, Homo sapien
gacagaaccatatgagctaggccac

SEQ ID NO: 623817 - DNA, 25 bp, Homo sapien
tgattgcaacaccatcagagtggga

SEQ ID NO: 623818 - DNA, 25 bp, Homo sapien
tagatgactcccaaaagtaggtcac

SEQ ID NO: 623819 - DNA, 25 bp, Homo sapien
gtaggtcacgaaaggcactgcaaat

SEQ ID NO: 623820 - DNA, 25 bp, Homo sapien
tggtgccacctctgcttactgcaat

SEQ ID NO: 623821 - DNA, 25 bp, Homo sapien
gtgccacctctgcttactgcaatct

SEQ ID NO: 623822 - DNA, 25 bp, Homo sapien
cagtacagtggtgccacctctgctt

SEQ ID NO: 623823 - DNA, 25 bp, Homo sapien
tacagtggtgccacctctgcttact

SEQ ID NO: 623824 - DNA, 25 bp, Homo sapien
catgaatgtcaagcagcagcctggc

SEQ ID NO: 623825 - DNA, 25 bp, Homo sapien
taaagcagagtggtgcacaacggac

SEQ ID NO: 623826 - DNA, 25 bp, Homo sapien
taagcggcccatggaaatgatcctg

SEQ ID NO: 623827 - DNA, 25 bp, Homo sapien
ttaggtgaccacatagaaggctcca

SEQ ID NO: 623828 - DNA, 25 bp, Homo sapien
gatttctgagaggttaaaatcttgg

SEQ ID NO: 623829 - DNA, 25 bp, Homo sapien
acttcctcctcagcattaggattgg

SEQ ID NO: 623830 - DNA, 25 bp, Homo sapien
cctcagcattaggattggattcttt

SEQ ID NO: 623831 - DNA, 25 bp, Homo sapien
ggcctatcacatctgtaagaaccac

SEQ ID NO: 623832 - DNA, 25 bp, Homo sapien
caactagtgcaaggctgagtacgcc

SEQ ID NO: 623833 - DNA, 25 bp, Homo sapien
tgtggacggccatgaagattctacg

SEQ ID NO: 623834 - DNA, 25 bp, Homo sapien
cagatctagggtgtcttggccaagc

SEQ ID NO: 623835 - DNA, 25 bp, Homo sapien
tgaagtttaacctacctgccaagca

SEQ ID NO: 623836 - DNA, 25 bp, Homo sapien
cagccccagtcggaaacatcactta

SEQ ID NO: 623837 - DNA, 25 bp, Homo sapien
ttagactcaaccaacgctcagtctc

SEQ ID NO: 623838 - DNA, 25 bp, Homo sapien
gagacctaaatgatcagaatacaat

SEQ ID NO: 623839 - DNA, 25 bp, Homo sapien
tatgtaaagcacgtttccagcccca

SEQ ID NO: 623840 - DNA, 25 bp, Homo sapien
ccagattaggaatttatgtagctca

SEQ ID NO: 623841 - DNA, 25 bp, Homo sapien
tatcccagattaggaatttatgtag

SEQ ID NO: 623842 - DNA, 25 bp, Homo sapien
cagctgtatcccagattaggaattt

SEQ ID NO: 623843 - DNA, 25 bp, Homo sapien
gctgtatcccagattaggaatttat

SEQ ID NO: 623844 - DNA, 25 bp, Homo sapien
caaaggctggcctacgcaaatggaa

SEQ ID NO: 623845 - DNA, 25 bp, Homo sapien
catcggtggactctgtggctctaat

SEQ ID NO: 623846 - DNA, 25 bp, Homo sapien
gttggaactttcatttgggcctcag

SEQ ID NO: 623847 - DNA, 25 bp, Homo sapien
gagagagccccaaattatacacagt

SEQ ID NO: 623848 - DNA, 25 bp, Homo sapien
ggttagcaaaggtccagctgtccta

SEQ ID NO: 623849 - DNA, 25 bp, Homo sapien
gattcgtggctaacaggacagaacc

SEQ ID NO: 623850 - DNA, 25 bp, Homo sapien
ttcaggattctggtaagcgacacac

SEQ ID NO: 623851 - DNA, 25 bp, Homo sapien
tattactaataggaagggccacacg

SEQ ID NO: 623852 - DNA, 25 bp, Homo sapien
gaaggcaggtttgcatctcagagca

SEQ ID NO: 623853 - DNA, 25 bp, Homo sapien
ggtttgcatctcagagcaactactc

SEQ ID NO: 623854 - DNA, 25 bp, Homo sapien
tgtgatggtgcatcaggcaggctga

SEQ ID NO: 623855 - DNA, 25 bp, Homo sapien
aggctgaaggcaggtttgcatctca

SEQ ID NO: 623856 - DNA, 25 bp, Homo sapien
tgtgtgctcatcaggtggtgctcct

SEQ ID NO: 623857 - DNA, 25 bp, Homo sapien
gtgctcatcaggtggtgctcctctc

SEQ ID NO: 623858 - DNA, 25 bp, Homo sapien
gctggagtgtgtgctcatcaggtgg

SEQ ID NO: 623859 - DNA, 25 bp, Homo sapien
agtgtgtgctcatcaggtggtgctc

SEQ ID NO: 623860 - DNA, 25 bp, Homo sapien
gcgctttggcaaccctggacatgtg

SEQ ID NO: 623861 - DNA, 25 bp, Homo sapien
atatgggtctagagcaacacggcag

SEQ ID NO: 623862 - DNA, 25 bp, Homo sapien
aagacgtgtcttgtgtgatcctccc

SEQ ID NO: 623863 - DNA, 25 bp, Homo sapien
cacgcagtttgtactagaggacaga

SEQ ID NO: 623864 - DNA, 25 bp, Homo sapien
tatctgtgcctaagtagggctggca

SEQ ID NO: 623865 - DNA, 25 bp, Homo sapien
gaaggaacagcgtatccagaggcat

SEQ ID NO: 623866 - DNA, 25 bp, Homo sapien
tgaacatcagctctaggtcaggcac

SEQ ID NO: 623867 - DNA, 25 bp, Homo sapien
gaaacaggtgacaatcccatggatg

SEQ ID NO: 623868 - DNA, 25 bp, Homo sapien
taatgggatcactttcgggtttgct

SEQ ID NO: 623869 - DNA, 25 bp, Homo sapien
tggcaggttggatgtggcccaaaaa

SEQ ID NO: 623870 - DNA, 25 bp, Homo sapien
aaaagactggacgtccctgccatag

SEQ ID NO: 623871 - DNA, 25 bp, Homo sapien
gatctctgtaaaaacagtcattggg

SEQ ID NO: 623872 - DNA, 25 bp, Homo sapien
cacggtttctactcccaaggcatgg

SEQ ID NO: 623873 - DNA, 25 bp, Homo sapien
caaactttgaagtctagccctgctg

SEQ ID NO: 623874 - DNA, 25 bp, Homo sapien
gaagtttcatcggaatgcccaaggt

SEQ ID NO: 623875 - DNA, 25 bp, Homo sapien
tagtgatcccctgtaacacagcagg

SEQ ID NO: 623876 - DNA, 25 bp, Homo sapien
taaacgattatagctgcagccgacc

SEQ ID NO: 623877 - DNA, 25 bp, Homo sapien
attatagctgcagccgaccctcgat

SEQ ID NO: 623878 - DNA, 25 bp, Homo sapien
cgaccctcgatagtacattggtgct

SEQ ID NO: 623879 - DNA, 25 bp, Homo sapien
tgatatcataaacgattatagctgc

SEQ ID NO: 623880 - DNA, 25 bp, Homo sapien
cttacatcgataagatcacatttat

SEQ ID NO: 623881 - DNA, 25 bp, Homo sapien
ccatgctgtcgaagctctttcaccc

SEQ ID NO: 623882 - DNA, 25 bp, Homo sapien
tacaatattaggtgggccatgctgt

SEQ ID NO: 623883 - DNA, 25 bp, Homo sapien
atttcctgcaatggcaactacaata

SEQ ID NO: 623884 - DNA, 25 bp, Homo sapien
catttatgtttatcgcgttttttgc

SEQ ID NO: 623885 - DNA, 25 bp, Homo sapien
ttatcgcgttttttgcgctggtctc

SEQ ID NO: 623886 - DNA, 25 bp, Homo sapien
caaaaattgcatgaatagagtcggc

SEQ ID NO: 623887 - DNA, 25 bp, Homo sapien
tagagtcggcgtagtcctttgcatc

SEQ ID NO: 623888 - DNA, 25 bp, Homo sapien
atggataaggcacagagatactcac

SEQ ID NO: 623889 - DNA, 25 bp, Homo sapien
aatggataaggcacagagatactca

SEQ ID NO: 623890 - DNA, 25 bp, Homo sapien
aaatggataaggcacagagatactc

SEQ ID NO: 623891 - DNA, 25 bp, Homo sapien
gatcggacttctcatacactaccgg

SEQ ID NO: 623892 - DNA, 25 bp, Homo sapien
tgaaaactggttggcggtaaagctg

SEQ ID NO: 623893 - DNA, 25 bp, Homo sapien
cactaccggtatggttgtcaactag

SEQ ID NO: 623894 - DNA, 25 bp, Homo sapien
tgactacccaccagagacagaaggt

SEQ ID NO: 623895 - DNA, 25 bp, Homo sapien
tttcaaatgactagacactgctgtg

SEQ ID NO: 623896 - DNA, 25 bp, Homo sapien
gggagtacacagcatggtttctaca

SEQ ID NO: 623897 - DNA, 25 bp, Homo sapien
caaggctaagatggcctctccgctg

SEQ ID NO: 623898 - DNA, 25 bp, Homo sapien
cactttgagttgtctgcggatctgt

SEQ ID NO: 623899 - DNA, 25 bp, Homo sapien
cctggcctgctgccttctttttaac

SEQ ID NO: 623900 - DNA, 25 bp, Homo sapien
tagaggcgtgtaccgccacgcccgg

SEQ ID NO: 623901 - DNA, 25 bp, Homo sapien
gattagaggcgtgtaccgccacgcc

SEQ ID NO: 623902 - DNA, 25 bp, Homo sapien
tggcctgctgccttctttttaacag

SEQ ID NO: 623903 - DNA, 25 bp, Homo sapien
gcagcagctccgctttggctctgaa

SEQ ID NO: 623904 - DNA, 25 bp, Homo sapien
gagtttgaagcccttaccgccagat

SEQ ID NO: 623905 - DNA, 25 bp, Homo sapien
accgccagatggcaggttggcgtca

SEQ ID NO: 623906 - DNA, 25 bp, Homo sapien
ctgaaggctgtcttcggagtttgaa

SEQ ID NO: 623907 - DNA, 25 bp, Homo sapien
tttgcacggagaagactcaagactg

SEQ ID NO: 623908 - DNA, 25 bp, Homo sapien
caataacgtgtttggtggcacacac

SEQ ID NO: 623909 - DNA, 25 bp, Homo sapien
gtcaaaagccaacgatgtagtccct

SEQ ID NO: 623910 - DNA, 25 bp, Homo sapien
tgacaaggtcagaagcaaacccagg

SEQ ID NO: 623911 - DNA, 25 bp, Homo sapien
gattgtaagctaagtgctctatacc

SEQ ID NO: 623912 - DNA, 25 bp, Homo sapien
gagtctcccgttaagaggctgaaaa

SEQ ID NO: 623913 - DNA, 25 bp, Homo sapien
actgggcaggcatacgcaagactgg

SEQ ID NO: 623914 - DNA, 25 bp, Homo sapien
aataccaatgtgcttgagtctcccg

SEQ ID NO: 623915 - DNA, 25 bp, Homo sapien
aatgacttgaggttggagcttaatc

SEQ ID NO: 623916 - DNA, 25 bp, Homo sapien
ctgagggaaaagagtgttaaccact

SEQ ID NO: 623917 - DNA, 25 bp, Homo sapien
ttaccctcaggctagtaaggactag

SEQ ID NO: 623918 - DNA, 25 bp, Homo sapien
gatgctgtacaagctaaaagaaact

SEQ ID NO: 623919 - DNA, 25 bp, Homo sapien
gtaaaacttattctgaccacggctg

SEQ ID NO: 623920 - DNA, 25 bp, Homo sapien
tgtgtcatgcagtaagtccaaggcc

SEQ ID NO: 623921 - DNA, 25 bp, Homo sapien
gaagtcaagacaagcaactccgctg

SEQ ID NO: 623922 - DNA, 25 bp, Homo sapien
tcccagaatgttgcgaagccgaggc

SEQ ID NO: 623923 - DNA, 25 bp, Homo sapien
gtgcccggcgagctgacggcacgca

SEQ ID NO: 623924 - DNA, 25 bp, Homo sapien
ctggcccgctctggcggcgggaagc

SEQ ID NO: 623925 - DNA, 25 bp, Homo sapien
acgcacgcacgcagagtcgtacaca

SEQ ID NO: 623926 - DNA, 25 bp, Homo sapien
acgcacgcagagtcgtacacacgca

SEQ ID NO: 623927 - DNA, 25 bp, Homo sapien
gggggtcggtctacgcggtgcaggc

SEQ ID NO: 623928 - DNA, 25 bp, Homo sapien
gggtcggtctacgcggtgcaggcgc

SEQ ID NO: 623929 - DNA, 25 bp, Homo sapien
ggtcggtctacgcggtgcaggcgca

SEQ ID NO: 623930 - DNA, 25 bp, Homo sapien
ggggtcggtctacgcggtgcaggcg

SEQ ID NO: 623931 - DNA, 25 bp, Homo sapien
tgctgcgcccgctttaagttttaca

SEQ ID NO: 623932 - DNA, 25 bp, Homo sapien
cgggaagcgttaatgctgcgcccgc

SEQ ID NO: 623933 - DNA, 25 bp, Homo sapien
agcgttaatgctgcgcccgctttaa

SEQ ID NO: 623934 - DNA, 25 bp, Homo sapien
gctgcgcccgctttaagttttacaa

SEQ ID NO: 623935 - DNA, 25 bp, Homo sapien
ttagcggcggagcacctttggcggg

SEQ ID NO: 623936 - DNA, 25 bp, Homo sapien
ccttagcggcggagcacctttggcg

SEQ ID NO: 623937 - DNA, 25 bp, Homo sapien
gttccttagcggcggagcacctttg

SEQ ID NO: 623938 - DNA, 25 bp, Homo sapien
tccttagcggcggagcacctttggc

SEQ ID NO: 623939 - DNA, 25 bp, Homo sapien
tcggaatttgagctcgtgctgcggc

SEQ ID NO: 623940 - DNA, 25 bp, Homo sapien
ctcggaatttgagctcgtgctgcgg

SEQ ID NO: 623941 - DNA, 25 bp, Homo sapien
cggaatttgagctcgtgctgcggct

SEQ ID NO: 623942 - DNA, 25 bp, Homo sapien
acagctctgcggagaaaaaggatcc

SEQ ID NO: 623943 - DNA, 25 bp, Homo sapien
gagaaaccagggtcatggcttccca

SEQ ID NO: 623944 - DNA, 25 bp, Homo sapien
atcgccgcaggtgttgctccagaca

SEQ ID NO: 623945 - DNA, 25 bp, Homo sapien
ggaaaatgggcccaatcccatcaga

SEQ ID NO: 623946 - DNA, 25 bp, Homo sapien
tttaccctttgacagtctatttaca

SEQ ID NO: 623947 - DNA, 25 bp, Homo sapien
taaaatggagggacacggacattct

SEQ ID NO: 623948 - DNA, 25 bp, Homo sapien
gggacacggacattctaaagcaaaa

SEQ ID NO: 623949 - DNA, 25 bp, Homo sapien
aaatacactaaaatggagggacacg

SEQ ID NO: 623950 - DNA, 25 bp, Homo sapien
tgttgtgcaaagtgattgctcctct

SEQ ID NO: 623951 - DNA, 25 bp, Homo sapien
tgatgtagctacaatactttgaaac

SEQ ID NO: 623952 - DNA, 25 bp, Homo sapien
gcaaacacaaattaggtacagtatc

SEQ ID NO: 623953 - DNA, 25 bp, Homo sapien
tcaggtctcagctttccagatacaa

SEQ ID NO: 623954 - DNA, 25 bp, Homo sapien
acccactgtgcttggatttttgtca

SEQ ID NO: 623955 - DNA, 25 bp, Homo sapien
cccccaggacccactgtgcttggat

SEQ ID NO: 623956 - DNA, 25 bp, Homo sapien
caggacccactgtgcttggattttt

SEQ ID NO: 623957 - DNA, 25 bp, Homo sapien
cccactgtgcttggatttttgtcat

SEQ ID NO: 623958 - DNA, 25 bp, Homo sapien
acagagactgattgggggtctcatg

SEQ ID NO: 623959 - DNA, 25 bp, Homo sapien
ggggtctcatgaggaaagtttagaa

SEQ ID NO: 623960 - DNA, 25 bp, Homo sapien
agacagagactgattgggggtctca

SEQ ID NO: 623961 - DNA, 25 bp, Homo sapien
tgggggtctcatgaggaaagtttag

SEQ ID NO: 623962 - DNA, 25 bp, Homo sapien
cacacagtacctacgtggtgctgta

SEQ ID NO: 623963 - DNA, 25 bp, Homo sapien
taaaacacacatttcggtctgtcgg

SEQ ID NO: 623964 - DNA, 25 bp, Homo sapien
gatgattccgctgttgggcctcaca

SEQ ID NO: 623965 - DNA, 25 bp, Homo sapien
tgaggcccctgcatcgatgattccg

SEQ ID NO: 623966 - DNA, 25 bp, Homo sapien
gaagatcaggtcttgcagactcaag

SEQ ID NO: 623967 - DNA, 25 bp, Homo sapien
agtttcacgatgctatgaccaccag

SEQ ID NO: 623968 - DNA, 25 bp, Homo sapien
ggtgacaatgcatcccttacagggc

SEQ ID NO: 623969 - DNA, 25 bp, Homo sapien
caccataatgagagagacgagatgc

SEQ ID NO: 623970 - DNA, 25 bp, Homo sapien
gtttataccctagtgcacctgaaag

SEQ ID NO: 623971 - DNA, 25 bp, Homo sapien
ctaagggctctgtgcgtttataccc

SEQ ID NO: 623972 - DNA, 25 bp, Homo sapien
tgagagtaataagcctggttcatgg

SEQ ID NO: 623973 - DNA, 25 bp, Homo sapien
ggtgcactcctggttgactgctcca

SEQ ID NO: 623974 - DNA, 25 bp, Homo sapien
cagcgtattaaacaagagtgccagg

SEQ ID NO: 623975 - DNA, 25 bp, Homo sapien
ggtttccaaacaatccatgcatgat

SEQ ID NO: 623976 - DNA, 25 bp, Homo sapien
caacatttggaagctctgcaacact

SEQ ID NO: 623977 - DNA, 25 bp, Homo sapien
tcaaaaagtcacagacatggcttca

SEQ ID NO: 623978 - DNA, 25 bp, Homo sapien
aacagctattgcaccactcccaagt

SEQ ID NO: 623979 - DNA, 25 bp, Homo sapien
ccagctgtgaacagctattgcacca

SEQ ID NO: 623980 - DNA, 25 bp, Homo sapien
ctcccaagtctaccactctggagag

SEQ ID NO: 623981 - DNA, 25 bp, Homo sapien
gttctcccagctgtgaacagctatt

SEQ ID NO: 623982 - DNA, 25 bp, Homo sapien
ggaacatttaccgacctgggcttga

SEQ ID NO: 623983 - DNA, 25 bp, Homo sapien
gaaagcaggatagccgtggtctaca

SEQ ID NO: 623984 - DNA, 25 bp, Homo sapien
tgaaggccctgagctacaaggaagc

SEQ ID NO: 623985 - DNA, 25 bp, Homo sapien
tagatttatatctggcacccaggcc

SEQ ID NO: 623986 - DNA, 25 bp, Homo sapien
tggacgcccctggtgaagtaagcaa

SEQ ID NO: 623987 - DNA, 25 bp, Homo sapien
taccgtaaatgtctgctacaggcct

SEQ ID NO: 623988 - DNA, 25 bp, Homo sapien
tacaggccttacagaattgggaaac

SEQ ID NO: 623989 - DNA, 25 bp, Homo sapien
tcttatgtcttaggatggacgcccc

SEQ ID NO: 623990 - DNA, 25 bp, Homo sapien
acttttctcattgggatcataatcg

SEQ ID NO: 623991 - DNA, 25 bp, Homo sapien
tcataatcgaaaggctgtaacatca

SEQ ID NO: 623992 - DNA, 25 bp, Homo sapien
cagttggagcaaacatagactgaac

SEQ ID NO: 623993 - DNA, 25 bp, Homo sapien
gagcaaacatagactgaaccataaa

SEQ ID NO: 623994 - DNA, 25 bp, Homo sapien
aaggcgggacaatgaaaagtatcct

SEQ ID NO: 623995 - DNA, 25 bp, Homo sapien
cacactgagctcaggaaagtcagaa

SEQ ID NO: 623996 - DNA, 25 bp, Homo sapien
ccatccaccagtgcaaggagctgct

SEQ ID NO: 623997 - DNA, 25 bp, Homo sapien
gaaggcaatccctaaccatgcaaga

SEQ ID NO: 623998 - DNA, 25 bp, Homo sapien
catagatttaagcaggggggaaaat

SEQ ID NO: 623999 - DNA, 25 bp, Homo sapien
atgaagtcatcttaattttatcaaa

SEQ ID NO: 624000 - DNA, 25 bp, Homo sapien
aaagttaaacatagatttaagcagg

SEQ ID NO: 624001 - DNA, 25 bp, Homo sapien
tataaaaatgaagtcatcttaattt

SEQ ID NO: 624002 - DNA, 25 bp, Homo sapien
ttcttcctataactgacaatttcag

SEQ ID NO: 624003 - DNA, 25 bp, Homo sapien
tgaagtcttgctgcctgactcctca

SEQ ID NO: 624004 - DNA, 25 bp, Homo sapien
tattacacttcataaaccctgaagt

SEQ ID NO: 624005 - DNA, 25 bp, Homo sapien
aaatactcttaatgagaaagccctg

SEQ ID NO: 624006 - DNA, 25 bp, Homo sapien
acatctaagttttgaatccataagg

SEQ ID NO: 624007 - DNA, 25 bp, Homo sapien
tggcaattcaaacacacatctaagt

SEQ ID NO: 624008 - DNA, 25 bp, Homo sapien
agttttgaatccataaggtcttccg

SEQ ID NO: 624009 - DNA, 25 bp, Homo sapien
tctaagttttgaatccataaggtct

SEQ ID NO: 624010 - DNA, 25 bp, Homo sapien
taccagtatcaagagggcagaagcc

SEQ ID NO: 624011 - DNA, 25 bp, Homo sapien
gaaagcctaagtgtcaccgaccatg

SEQ ID NO: 624012 - DNA, 25 bp, Homo sapien
tttccagatgagaagagtaggccct

SEQ ID NO: 624013 - DNA, 25 bp, Homo sapien
taataatctaaagcaacagggccct

SEQ ID NO: 624014 - DNA, 25 bp, Homo sapien
gatgcagttgtggatataattttat

SEQ ID NO: 624015 - DNA, 25 bp, Homo sapien
ctttgatgcagttgtggatataatt

SEQ ID NO: 624016 - DNA, 25 bp, Homo sapien
tgatgcagttgtggatataatttta

SEQ ID NO: 624017 - DNA, 25 bp, Homo sapien
ttgatgcagttgtggatataatttt

SEQ ID NO: 624018 - DNA, 25 bp, Homo sapien
cttaacttcggtgtcatccaaagaa

SEQ ID NO: 624019 - DNA, 25 bp, Homo sapien
cataaccttcttaacttcggtgtca

SEQ ID NO: 624020 - DNA, 25 bp, Homo sapien
gaagaactcagagacttagacacta

SEQ ID NO: 624021 - DNA, 25 bp, Homo sapien
gacttagacactattggtgtttctg

SEQ ID NO: 624022 - DNA, 25 bp, Homo sapien
gatgacatgatatggtccaaccgca

SEQ ID NO: 624023 - DNA, 25 bp, Homo sapien
cgcattttgcaaacggagaaactgc

SEQ ID NO: 624024 - DNA, 25 bp, Homo sapien
tatggccatgtcttccggatgcttc

SEQ ID NO: 624025 - DNA, 25 bp, Homo sapien
catttcaaagacaagccaaggcacc

SEQ ID NO: 624026 - DNA, 25 bp, Homo sapien
gctaatgctgaaatggggctgttgc

SEQ ID NO: 624027 - DNA, 25 bp, Homo sapien
tgaaatggggctgttgctctgcact

SEQ ID NO: 624028 - DNA, 25 bp, Homo sapien
tcccagttggggctaatgctgaaat

SEQ ID NO: 624029 - DNA, 25 bp, Homo sapien
tgtcttcctcatccgcagtccatct

SEQ ID NO: 624030 - DNA, 25 bp, Homo sapien
ataattacaccaacgataaagaaca

SEQ ID NO: 624031 - DNA, 25 bp, Homo sapien
taattacaccaacgataaagaacaa

SEQ ID NO: 624032 - DNA, 25 bp, Homo sapien
gactactgtgtggagctgaccgcac

SEQ ID NO: 624033 - DNA, 25 bp, Homo sapien
taatccagcatcatgtaccaaggcc

SEQ ID NO: 624034 - DNA, 25 bp, Homo sapien
tcattttaagagaggtaatccagca

SEQ ID NO: 624035 - DNA, 25 bp, Homo sapien
ccaacaggcgaggaagggtgtcatt

SEQ ID NO: 624036 - DNA, 25 bp, Homo sapien
ttatgacgagtacgtctgatgctgc

SEQ ID NO: 624037 - DNA, 25 bp, Homo sapien
ggcttctgactctgttcatcagtcc

SEQ ID NO: 624038 - DNA, 25 bp, Homo sapien
gcttctgactctgttcatcagtccc

SEQ ID NO: 624039 - DNA, 25 bp, Homo sapien
gacgagtacgtctgatgctgccaca

SEQ ID NO: 624040 - DNA, 25 bp, Homo sapien
ccaaagcgctgggtcaatcagtcaa

SEQ ID NO: 624041 - DNA, 25 bp, Homo sapien
caactagtactagaaggattcgctg

SEQ ID NO: 624042 - DNA, 25 bp, Homo sapien
gacagttgttatttactgacccaga

SEQ ID NO: 624043 - DNA, 25 bp, Homo sapien
ggtaacctagagttgactgtcacta

SEQ ID NO: 624044 - DNA, 25 bp, Homo sapien
gaacgcccgttactagtctcaatgg

SEQ ID NO: 624045 - DNA, 25 bp, Homo sapien
tcctatcaaagacatgagggcctgg

SEQ ID NO: 624046 - DNA, 25 bp, Homo sapien
tacaggacttaactggctgcagcaa

SEQ ID NO: 624047 - DNA, 25 bp, Homo sapien
gactgtactgtacccctaggcactg

SEQ ID NO: 624048 - DNA, 25 bp, Homo sapien
taatcaaagcaatccatatcgtggc

SEQ ID NO: 624049 - DNA, 25 bp, Homo sapien
gaaaaaccggcaagtcaacgtgtga

SEQ ID NO: 624050 - DNA, 25 bp, Homo sapien
tgcaggcagccagttcggagaaaca

SEQ ID NO: 624051 - DNA, 25 bp, Homo sapien
agaaactcaattcgcgtagggccag

SEQ ID NO: 624052 - DNA, 25 bp, Homo sapien
taagctccaacgaaaaagactcggc

SEQ ID NO: 624053 - DNA, 25 bp, Homo sapien
tgatcactggcggaaatgaccttat

SEQ ID NO: 624054 - DNA, 25 bp, Homo sapien
tgtcaccattcgcatcccaaagagc

SEQ ID NO: 624055 - DNA, 25 bp, Homo sapien
tttgcacaagccctgatttccgcct

SEQ ID NO: 624056 - DNA, 25 bp, Homo sapien
taatgatggtttcagagggaagccc

SEQ ID NO: 624057 - DNA, 25 bp, Homo sapien
tccctatctctagctcttatcacag

SEQ ID NO: 624058 - DNA, 25 bp, Homo sapien
tctgtgaggttaatgatggtttcag

SEQ ID NO: 624059 - DNA, 25 bp, Homo sapien
tttgaacaattgtctgtgaggttaa

SEQ ID NO: 624060 - DNA, 25 bp, Homo sapien
gggtgcctccgcagtttgaagagtt

SEQ ID NO: 624061 - DNA, 25 bp, Homo sapien
tcacccctgctggttctttcgaaag

SEQ ID NO: 624062 - DNA, 25 bp, Homo sapien
gagttgcagattcacctgtcgaaag

SEQ ID NO: 624063 - DNA, 25 bp, Homo sapien
ccagctgtggaagcgcgcctctgct

SEQ ID NO: 624064 - DNA, 25 bp, Homo sapien
tcaacagccgggaaggctgagcgcg

SEQ ID NO: 624065 - DNA, 25 bp, Homo sapien
tcgcaacttcttcgcaggactccag

SEQ ID NO: 624066 - DNA, 25 bp, Homo sapien
cttgcgcaccgtggcagcgcccggc

SEQ ID NO: 624067 - DNA, 25 bp, Homo sapien
gggcgcaggaccctcgcaacttctt

SEQ ID NO: 624068 - DNA, 25 bp, Homo sapien
cagctgactcactcagatgagattt

SEQ ID NO: 624069 - DNA, 25 bp, Homo sapien
attcataaatgccataactctcccg

SEQ ID NO: 624070 - DNA, 25 bp, Homo sapien
taacttttcccatccgagtgattct

SEQ ID NO: 624071 - DNA, 25 bp, Homo sapien
aaggctcgtgcacttgatttcaagg

SEQ ID NO: 624072 - DNA, 25 bp, Homo sapien
gaggaaagctaaggatggctggtgg

SEQ ID NO: 624073 - DNA, 25 bp, Homo sapien
tggactttttcctattccctgttgc

SEQ ID NO: 624074 - DNA, 25 bp, Homo sapien
ctattccctgttgcctctggagagg

SEQ ID NO: 624075 - DNA, 25 bp, Homo sapien
gctggtgggcccacatcgggggtcc

SEQ ID NO: 624076 - DNA, 25 bp, Homo sapien
agggaaagctcataccgatttcagt

SEQ ID NO: 624077 - DNA, 25 bp, Homo sapien
gaagcaaattgatcgttttcctcac

SEQ ID NO: 624078 - DNA, 25 bp, Homo sapien
aagctcataccgatttcagtttcag

SEQ ID NO: 624079 - DNA, 25 bp, Homo sapien
acctcgagtctcatagaaaccagaa

SEQ ID NO: 624080 - DNA, 25 bp, Homo sapien
cctggaaagtgaggaacgctggacc

SEQ ID NO: 624081 - DNA, 25 bp, Homo sapien
tatctcaacagggtcagctcacctg

SEQ ID NO: 624082 - DNA, 25 bp, Homo sapien
aagtgtcgccccatcacaagggtga

SEQ ID NO: 624083 - DNA, 25 bp, Homo sapien
tgtaaaatggcctgaccgtaattcc

SEQ ID NO: 624084 - DNA, 25 bp, Homo sapien
tgcacccagtgctcaattcctggac

SEQ ID NO: 624085 - DNA, 25 bp, Homo sapien
cctggacatggtcttctaattccta

SEQ ID NO: 624086 - DNA, 25 bp, Homo sapien
tctaattcctacagggtggcacagc

SEQ ID NO: 624087 - DNA, 25 bp, Homo sapien
gactggatcctgcacccagtgctca

SEQ ID NO: 624088 - DNA, 25 bp, Homo sapien
agctgtgtgaccttcaacttctcac

SEQ ID NO: 624089 - DNA, 25 bp, Homo sapien
cagctgtgtgaccttcaacttctca

SEQ ID NO: 624090 - DNA, 25 bp, Homo sapien
ccccatgaagcgcactatggtgacc

SEQ ID NO: 624091 - DNA, 25 bp, Homo sapien
tccggatctgtctacgtcatcgcgt

SEQ ID NO: 624092 - DNA, 25 bp, Homo sapien
tcgcgtatctcattgctccaacagc

SEQ ID NO: 624093 - DNA, 25 bp, Homo sapien
tctgctcaggagacgatgcgctttc

SEQ ID NO: 624094 - DNA, 25 bp, Homo sapien
ggttgaaggacgatgcgtgactttc

SEQ ID NO: 624095 - DNA, 25 bp, Homo sapien
gaagaattagtggtttattaaggca

SEQ ID NO: 624096 - DNA, 25 bp, Homo sapien
ccgagtgttagcaggagttgtcccc

SEQ ID NO: 624097 - DNA, 25 bp, Homo sapien
ttttctaaatagcatattaggacca

SEQ ID NO: 624098 - DNA, 25 bp, Homo sapien
cagtcggtagactccaagcagaaac

SEQ ID NO: 624099 - DNA, 25 bp, Homo sapien
aaactgtgcaaaagtctcttgccgg

SEQ ID NO: 624100 - DNA, 25 bp, Homo sapien
cttgccggtgctccggaaattgcca

SEQ ID NO: 624101 - DNA, 25 bp, Homo sapien
cgcaaggcgagacggctaagttgct

SEQ ID NO: 624102 - DNA, 25 bp, Homo sapien
tccttttttaagctagcgtgagcca

SEQ ID NO: 624103 - DNA, 25 bp, Homo sapien
tttaagctagcgtgagccaaatgta

SEQ ID NO: 624104 - DNA, 25 bp, Homo sapien
cttggcctgaagaattgggacgttc

SEQ ID NO: 624105 - DNA, 25 bp, Homo sapien
gacgttctgcagtaaggtccataaa

SEQ ID NO: 624106 - DNA, 25 bp, Homo sapien
tggcttcccacaacgttcaggctga

SEQ ID NO: 624107 - DNA, 25 bp, Homo sapien
gaagagaggttgtcatccccaagga

SEQ ID NO: 624108 - DNA, 25 bp, Homo sapien
gtaagccatctagagccaccttggg

SEQ ID NO: 624109 - DNA, 25 bp, Homo sapien
taacgggtgaatcatctgggtccag

SEQ ID NO: 624110 - DNA, 25 bp, Homo sapien
gtgaatattagctacgatgattatc

SEQ ID NO: 624111 - DNA, 25 bp, Homo sapien
tagctacgatgattatcagaaagcc

SEQ ID NO: 624112 - DNA, 25 bp, Homo sapien
tattagctacgatgattatcagaaa

SEQ ID NO: 624113 - DNA, 25 bp, Homo sapien
tcatccagaaagcacgacagtccat

SEQ ID NO: 624114 - DNA, 25 bp, Homo sapien
tcccgggaaatgattaataagatgt

SEQ ID NO: 624115 - DNA, 25 bp, Homo sapien
tttgcctgcacagcattcccgggaa

SEQ ID NO: 624116 - DNA, 25 bp, Homo sapien
gtggctcctgaatgcctttgttttc

SEQ ID NO: 624117 - DNA, 25 bp, Homo sapien
gatgtttcatttaagtaccaagcaa

SEQ ID NO: 624118 - DNA, 25 bp, Homo sapien
cgtcaacagcaaggcgagccaggac

SEQ ID NO: 624119 - DNA, 25 bp, Homo sapien
cccagccaggtttgaccaaatgagc

SEQ ID NO: 624120 - DNA, 25 bp, Homo sapien
atgagccaggcgctaaaaggcccca

SEQ ID NO: 624121 - DNA, 25 bp, Homo sapien
gtttgaccaaatgagccaggcgcta

SEQ ID NO: 624122 - DNA, 25 bp, Homo sapien
acaagtgcggcaagctcggtgcaga

SEQ ID NO: 624123 - DNA, 25 bp, Homo sapien
cggcaagctcggtgcagagatgacc

SEQ ID NO: 624124 - DNA, 25 bp, Homo sapien
gcaagctcggtgcagagatgacccc

SEQ ID NO: 624125 - DNA, 25 bp, Homo sapien
ggagaccccacaagtgcggcaagct

SEQ ID NO: 624126 - DNA, 25 bp, Homo sapien
gaaatgttttttccggctgggcatg

SEQ ID NO: 624127 - DNA, 25 bp, Homo sapien
cacgtccaagggttagaattgggca

SEQ ID NO: 624128 - DNA, 25 bp, Homo sapien
gagaaggcatgtagcgaattcctcc

SEQ ID NO: 624129 - DNA, 25 bp, Homo sapien
ccaaattgctatgtccgtggagata

SEQ ID NO: 624130 - DNA, 25 bp, Homo sapien
tctgagttgatccaggacaggagcc

SEQ ID NO: 624131 - DNA, 25 bp, Homo sapien
gcccggcctggacagaatccgatgt

SEQ ID NO: 624132 - DNA, 25 bp, Homo sapien
gaacacggtcacataaggctccaag

SEQ ID NO: 624133 - DNA, 25 bp, Homo sapien
tagcagtacctgtctcccaaaccag

SEQ ID NO: 624134 - DNA, 25 bp, Homo sapien
tcacctgatggttaagtccctgcag

SEQ ID NO: 624135 - DNA, 25 bp, Homo sapien
gcaaagccaggagtactgacaccct

SEQ ID NO: 624136 - DNA, 25 bp, Homo sapien
acagtctctggctgactgcatggca

SEQ ID NO: 624137 - DNA, 25 bp, Homo sapien
caaccagtacggtggcttcaggcac

SEQ ID NO: 624138 - DNA, 25 bp, Homo sapien
gaaacgtgtagttactgcagcccag

SEQ ID NO: 624139 - DNA, 25 bp, Homo sapien
ccagagaagcattcgagtgggtgcc

SEQ ID NO: 624140 - DNA, 25 bp, Homo sapien
caatgtcgataatacctggtgtgga

SEQ ID NO: 624141 - DNA, 25 bp, Homo sapien
ggtccacagaggtatcccagagaag

SEQ ID NO: 624142 - DNA, 25 bp, Homo sapien
ccacactgtggtccggagttgggtt

SEQ ID NO: 624143 - DNA, 25 bp, Homo sapien
tgtcaacatgtaggcagtcaagaac

SEQ ID NO: 624144 - DNA, 25 bp, Homo sapien
gtcaagaacaagcttctccagtgtg

SEQ ID NO: 624145 - DNA, 25 bp, Homo sapien
tattacggagatgacaattttgaaa

SEQ ID NO: 624146 - DNA, 25 bp, Homo sapien
gttgcaaagaggaccagcgtggctg

SEQ ID NO: 624147 - DNA, 25 bp, Homo sapien
tcgaactaagggcacagacatggga

SEQ ID NO: 624148 - DNA, 25 bp, Homo sapien
cttctgatccatttcgaactaaggg

SEQ ID NO: 624149 - DNA, 25 bp, Homo sapien
gatccatttcgaactaagggcacag

SEQ ID NO: 624150 - DNA, 25 bp, Homo sapien
gattccatgtatatcaaagtccaga

SEQ ID NO: 624151 - DNA, 25 bp, Homo sapien
gaaaacatacgttcaagcagaagct

SEQ ID NO: 624152 - DNA, 25 bp, Homo sapien
tagaggcaaaaggtagcttagtggc

SEQ ID NO: 624153 - DNA, 25 bp, Homo sapien
caaaacgtagtatagcagacaatgg

SEQ ID NO: 624154 - DNA, 25 bp, Homo sapien
aggcaggccttcccggtagaccagg

SEQ ID NO: 624155 - DNA, 25 bp, Homo sapien
gcaggccttcccggtagaccagggc

SEQ ID NO: 624156 - DNA, 25 bp, Homo sapien
caaatgcagtgtttgcgacagcgcc

SEQ ID NO: 624157 - DNA, 25 bp, Homo sapien
aatgcagtgtttgcgacagcgccag

SEQ ID NO: 624158 - DNA, 25 bp, Homo sapien
gtgtttgcgacagcgccagacacag

SEQ ID NO: 624159 - DNA, 25 bp, Homo sapien
gcagtgtttgcgacagcgccagaca

SEQ ID NO: 624160 - DNA, 25 bp, Homo sapien
tgtcggcaggagtgctgtaattgcc

SEQ ID NO: 624161 - DNA, 25 bp, Homo sapien
tgtaattgccgtgtagcctgaggac

SEQ ID NO: 624162 - DNA, 25 bp, Homo sapien
ggagtgctgtaattgccgtgtagcc

SEQ ID NO: 624163 - DNA, 25 bp, Homo sapien
gcttttgtcggcaggagtgctgtaa

SEQ ID NO: 624164 - DNA, 25 bp, Homo sapien
aatgcccataaatccttgtcccctg

SEQ ID NO: 624165 - DNA, 25 bp, Homo sapien
tctcccatttgcacgggagctccca

SEQ ID NO: 624166 - DNA, 25 bp, Homo sapien
ggtcttcatgaacccttcccttatc

SEQ ID NO: 624167 - DNA, 25 bp, Homo sapien
ctggtaaggaccctctcccatttgc

SEQ ID NO: 624168 - DNA, 25 bp, Homo sapien
gttgtacttgtagttgtgaaggact

SEQ ID NO: 624169 - DNA, 25 bp, Homo sapien
ttgtacttgtagctgtgaaggacac

SEQ ID NO: 624170 - DNA, 25 bp, Homo sapien
agattggaatccttggttctgctcc

SEQ ID NO: 624171 - DNA, 25 bp, Homo sapien
tgaaggacaccagggttgtacttgt

SEQ ID NO: 624172 - DNA, 25 bp, Homo sapien
tgtctgaagtccagggtaggcaccc

SEQ ID NO: 624173 - DNA, 25 bp, Homo sapien
tgaaatgtgctcctcacggcaagct

SEQ ID NO: 624174 - DNA, 25 bp, Homo sapien
cgagagctacaggaaggcccttgct

SEQ ID NO: 624175 - DNA, 25 bp, Homo sapien
cagtccatagagagcaaattgcgca

SEQ ID NO: 624176 - DNA, 25 bp, Homo sapien
gcccacgtttatgcatctgcggatg

SEQ ID NO: 624177 - DNA, 25 bp, Homo sapien
tcagtcagagaagaggaacgatttc

SEQ ID NO: 624178 - DNA, 25 bp, Homo sapien
gaaagcgctggataccacgtgcact

SEQ ID NO: 624179 - DNA, 25 bp, Homo sapien
cgtttgtcaaatggaacccgagtca

SEQ ID NO: 624180 - DNA, 25 bp, Homo sapien
tagtgtgagtgtttccagccatcag

SEQ ID NO: 624181 - DNA, 25 bp, Homo sapien
tcctctatggctgcccgaactgtgg

SEQ ID NO: 624182 - DNA, 25 bp, Homo sapien
aactgtggtgggtatggcctgacct

SEQ ID NO: 624183 - DNA, 25 bp, Homo sapien
ggaccgttaagaaagctctcctcta

SEQ ID NO: 624184 - DNA, 25 bp, Homo sapien
tgtgtggacttggtggcccataaga

SEQ ID NO: 624185 - DNA, 25 bp, Homo sapien
caaaattgaacccagacttggccag

SEQ ID NO: 624186 - DNA, 25 bp, Homo sapien
gcacatcacacgacatggagcagat

SEQ ID NO: 624187 - DNA, 25 bp, Homo sapien
ccataagaggctctcggtgacgcgg

SEQ ID NO: 624188 - DNA, 25 bp, Homo sapien
tatttccaaacgtgtaacaggccac

SEQ ID NO: 624189 - DNA, 25 bp, Homo sapien
gaggcatccatccttgaccctcgga

SEQ ID NO: 624190 - DNA, 25 bp, Homo sapien
cagtcatcgggtagctgctcctggc

SEQ ID NO: 624191 - DNA, 25 bp, Homo sapien
gagtaagccgtttgcccactcgatt

SEQ ID NO: 624192 - DNA, 25 bp, Homo sapien
tgatgcagagaccagtagtaagcca

SEQ ID NO: 624193 - DNA, 25 bp, Homo sapien
taggagctggactcaaccatggaca

SEQ ID NO: 624194 - DNA, 25 bp, Homo sapien
gagcagctactattgccaggcaggg

SEQ ID NO: 624195 - DNA, 25 bp, Homo sapien
taatgtcagtctggtgagctcccac

SEQ ID NO: 624196 - DNA, 25 bp, Homo sapien
ataatcttagttaaggccactcagc

SEQ ID NO: 624197 - DNA, 25 bp, Homo sapien
catgataatcttagttaaggccact

SEQ ID NO: 624198 - DNA, 25 bp, Homo sapien
tgataatcttagttaaggccactca

SEQ ID NO: 624199 - DNA, 25 bp, Homo sapien
cacccatgataatcttagttaaggc

SEQ ID NO: 624200 - DNA, 25 bp, Homo sapien
cagcccacccggcatgccgtgccat

SEQ ID NO: 624201 - DNA, 25 bp, Homo sapien
ggagggaaccaacgcaggaagcata

SEQ ID NO: 624202 - DNA, 25 bp, Homo sapien
gaaccaacgcaggaagcatatgaca

SEQ ID NO: 624203 - DNA, 25 bp, Homo sapien
agggaaccaacgcaggaagcatatg

SEQ ID NO: 624204 - DNA, 25 bp, Homo sapien
ttttctcactgtggagatgtgatca

SEQ ID NO: 624205 - DNA, 25 bp, Homo sapien
ctgggacaattggtgtcttttctca

SEQ ID NO: 624206 - DNA, 25 bp, Homo sapien
tcttttctcactgtggagatgtgat

SEQ ID NO: 624207 - DNA, 25 bp, Homo sapien
tctgggacaattggtgtcttttctc

SEQ ID NO: 624208 - DNA, 25 bp, Homo sapien
gataaaacgtggtgtaactgagagg

SEQ ID NO: 624209 - DNA, 25 bp, Homo sapien
gggacccaagacacatgttatctgt

SEQ ID NO: 624210 - DNA, 25 bp, Homo sapien
ggagctagctattccagaatctggg

SEQ ID NO: 624211 - DNA, 25 bp, Homo sapien
tctgggtgctccgtttctcctgagg

SEQ ID NO: 624212 - DNA, 25 bp, Homo sapien
ccctcgagtgactttaagcctttag

SEQ ID NO: 624213 - DNA, 25 bp, Homo sapien
ctccctcgagtgactttaagccttt

SEQ ID NO: 624214 - DNA, 25 bp, Homo sapien
tccctcgagtgactttaagccttta

SEQ ID NO: 624215 - DNA, 25 bp, Homo sapien
tcccgtgtgctgagcgcttgcaaag

SEQ ID NO: 624216 - DNA, 25 bp, Homo sapien
atgttcccgcgcgttcgttgtgcaa

SEQ ID NO: 624217 - DNA, 25 bp, Homo sapien
cgcgtcctttgtttctgcgtggaac

SEQ ID NO: 624218 - DNA, 25 bp, Homo sapien
ggaacaaactttacacacgtgtgtg

SEQ ID NO: 624219 - DNA, 25 bp, Homo sapien
cgggcccgagcacggcacccacaaa

SEQ ID NO: 624220 - DNA, 25 bp, Homo sapien
aaacaggctggcgtcccgcgacgga

SEQ ID NO: 624221 - DNA, 25 bp, Homo sapien
agccgcccgggaggcttgaggccaa

SEQ ID NO: 624222 - DNA, 25 bp, Homo sapien
gcgcagagctgtgcggcggcgcctt

SEQ ID NO: 624223 - DNA, 25 bp, Homo sapien
ggtgctcctcgggcgccctgtttcg

SEQ ID NO: 624224 - DNA, 25 bp, Homo sapien
ctgcgacgctcgcaagccttgctcg

SEQ ID NO: 624225 - DNA, 25 bp, Homo sapien
tcttcctgtccgtccctcgcgagtg

SEQ ID NO: 624226 - DNA, 25 bp, Homo sapien
cttgctcgcaacgttccgggcgcgg

SEQ ID NO: 624227 - DNA, 25 bp, Homo sapien
cctccatccccggatctgactgcag

SEQ ID NO: 624228 - DNA, 25 bp, Homo sapien
ccctccatccccggatctgactgca

SEQ ID NO: 624229 - DNA, 25 bp, Homo sapien
tccctccatccccggatctgactgc

SEQ ID NO: 624230 - DNA, 25 bp, Homo sapien
ctccatccccggatctgactgcagc

SEQ ID NO: 624231 - DNA, 25 bp, Homo sapien
ctgctgaggccctgcccgacctcct

SEQ ID NO: 624232 - DNA, 25 bp, Homo sapien
ctgaggccctgcccgacctcctgac

SEQ ID NO: 624233 - DNA, 25 bp, Homo sapien
tgctgaggccctgcccgacctcctg

SEQ ID NO: 624234 - DNA, 25 bp, Homo sapien
gctgaggccctgcccgacctcctga

SEQ ID NO: 624235 - DNA, 25 bp, Homo sapien
tcacggaagcttctcgacaaggcct

SEQ ID NO: 624236 - DNA, 25 bp, Homo sapien
caatccggctctagactgggaggcc

SEQ ID NO: 624237 - DNA, 25 bp, Homo sapien
taggccctctttggacaaccggagc

SEQ ID NO: 624238 - DNA, 25 bp, Homo sapien
aaagatgcagctgtgcgcttcgcca

SEQ ID NO: 624239 - DNA, 25 bp, Homo sapien
gcgtcggttaaacgcctggtggcca

SEQ ID NO: 624240 - DNA, 25 bp, Homo sapien
gaattattccgcaacaacaagaaag

SEQ ID NO: 624241 - DNA, 25 bp, Homo sapien
ctgccggttttggatggaattattc

SEQ ID NO: 624242 - DNA, 25 bp, Homo sapien
caagaaagcgtcggttaaacgcctg

SEQ ID NO: 624243 - DNA, 25 bp, Homo sapien
cgcagcaatgctacgtgaatgcaga

SEQ ID NO: 624244 - DNA, 25 bp, Homo sapien
cagcaatgctacgtgaatgcagagg

SEQ ID NO: 624245 - DNA, 25 bp, Homo sapien
gcagcaatgctacgtgaatgcagag

SEQ ID NO: 624246 - DNA, 25 bp, Homo sapien
gaaaggcccaatgcttcccaatgtt

SEQ ID NO: 624247 - DNA, 25 bp, Homo sapien
gatttgggtctacgatccggcgacc

SEQ ID NO: 624248 - DNA, 25 bp, Homo sapien
gaagaggctagcaccttgagtctca

SEQ ID NO: 624249 - DNA, 25 bp, Homo sapien
ccaagaatgtggtcctgggatggct

SEQ ID NO: 624250 - DNA, 25 bp, Homo sapien
ggcagctaccaccacatcaggaata

SEQ ID NO: 624251 - DNA, 25 bp, Homo sapien
ggtttttgaccttccaatggcatgc

SEQ ID NO: 624252 - DNA, 25 bp, Homo sapien
tctgcagcggctccctggcatttaa

SEQ ID NO: 624253 - DNA, 25 bp, Homo sapien
gatgtactattgcaaacctcggtta

SEQ ID NO: 624254 - DNA, 25 bp, Homo sapien
atccagttggggaaagcacaaagaa

SEQ ID NO: 624255 - DNA, 25 bp, Homo sapien
ccccatcagtcccatccagttgggg

SEQ ID NO: 624256 - DNA, 25 bp, Homo sapien
catccagttggggaaagcacaaaga

SEQ ID NO: 624257 - DNA, 25 bp, Homo sapien
tcccacagttgccgtggctacagtc

SEQ ID NO: 624258 - DNA, 25 bp, Homo sapien
cacagttgccgtggctacagtcctt

SEQ ID NO: 624259 - DNA, 25 bp, Homo sapien
agttgccgtggctacagtccttctc

SEQ ID NO: 624260 - DNA, 25 bp, Homo sapien
cctcccacagttgccgtggctacag

SEQ ID NO: 624261 - DNA, 25 bp, Homo sapien
ttgctcaggcctcccctataaaggg

SEQ ID NO: 624262 - DNA, 25 bp, Homo sapien
ttcaaagaagcctctggacactgtc

SEQ ID NO: 624263 - DNA, 25 bp, Homo sapien
gagggccagacacttccctgggtaa

SEQ ID NO: 624264 - DNA, 25 bp, Homo sapien
gagatgccaatgtgaggccctgcgt

SEQ ID NO: 624265 - DNA, 25 bp, Homo sapien
gggagcaatccgtccctccctgcct

SEQ ID NO: 624266 - DNA, 25 bp, Homo sapien
ccttctgtgagcactgtactgagca

SEQ ID NO: 624267 - DNA, 25 bp, Homo sapien
ctgtgagcactgtactgagcactgc

SEQ ID NO: 624268 - DNA, 25 bp, Homo sapien
tgccttctgtgagcactgtactgag

SEQ ID NO: 624269 - DNA, 25 bp, Homo sapien
ctgatactgttgttaagtttcactg

SEQ ID NO: 624270 - DNA, 25 bp, Homo sapien
cctgatactgttgttaagtttcact

SEQ ID NO: 624271 - DNA, 25 bp, Homo sapien
tgatactgttgttaagtttcactga

SEQ ID NO: 624272 - DNA, 25 bp, Homo sapien
aaatatagagataaaaacacttgag

SEQ ID NO: 624273 - DNA, 25 bp, Homo sapien
cagctcttaatttccttggacatac

SEQ ID NO: 624274 - DNA, 25 bp, Homo sapien
catacttcagaacgtaaatttgact

SEQ ID NO: 624275 - DNA, 25 bp, Homo sapien
agaacgtaaatttgacttgatctgg

SEQ ID NO: 624276 - DNA, 25 bp, Homo sapien
ccagctcttaatttccttggacata

SEQ ID NO: 624277 - DNA, 25 bp, Homo sapien
ttgtcacaccaatcgctgcttctgg

SEQ ID NO: 624278 - DNA, 25 bp, Homo sapien
taggaggtggccgttttgtcacacc

SEQ ID NO: 624279 - DNA, 25 bp, Homo sapien
tctggatctaagctgatgcctgaca

SEQ ID NO: 624280 - DNA, 25 bp, Homo sapien
gacaccagtgccatacggtcatcag

SEQ ID NO: 624281 - DNA, 25 bp, Homo sapien
ttcatcttctgcttaatccggccaa

SEQ ID NO: 624282 - DNA, 25 bp, Homo sapien
ctgagtgatctcttgggtagttatc

SEQ ID NO: 624283 - DNA, 25 bp, Homo sapien
ctcaatggcatgttcctcttcgctg

SEQ ID NO: 624284 - DNA, 25 bp, Homo sapien
cttctgcttaatccggccaacatca

SEQ ID NO: 624285 - DNA, 25 bp, Homo sapien
ctgactgtgcgtgccggaagctggt

SEQ ID NO: 624286 - DNA, 25 bp, Homo sapien
accacgttcccaagcagccgcccct

SEQ ID NO: 624287 - DNA, 25 bp, Homo sapien
tagcctgactgtgcgtgccggaagc

SEQ ID NO: 624288 - DNA, 25 bp, Homo sapien
agcgaggccaccacgttcccaagca

SEQ ID NO: 624289 - DNA, 25 bp, Homo sapien
cagcagaggaagtgtttcaaggacc

SEQ ID NO: 624290 - DNA, 25 bp, Homo sapien
tatttgggaagaaaaggtctgctgg

SEQ ID NO: 624291 - DNA, 25 bp, Homo sapien
ttttacctattgaagagcagctctc

SEQ ID NO: 624292 - DNA, 25 bp, Homo sapien
cattccaagccagggtttcacatgg

SEQ ID NO: 624293 - DNA, 25 bp, Homo sapien
gagtgttatcgtctccatcatccat

SEQ ID NO: 624294 - DNA, 25 bp, Homo sapien
actgatgtgtcgaaaaaatgctggg

SEQ ID NO: 624295 - DNA, 25 bp, Homo sapien
tcatccattagtggtactgatgtgt

SEQ ID NO: 624296 - DNA, 25 bp, Homo sapien
ccgatggtaaagagtgttatcgtct

SEQ ID NO: 624297 - DNA, 25 bp, Homo sapien
cagaagatcgaggtctaggaggtga

SEQ ID NO: 624298 - DNA, 25 bp, Homo sapien
caacctgatgaatatacaagtcaac

SEQ ID NO: 624299 - DNA, 25 bp, Homo sapien
tcaactgtatcaatccactgacact

SEQ ID NO: 624300 - DNA, 25 bp, Homo sapien
aagatgcagaatggggtgcacagac

SEQ ID NO: 624301 - DNA, 25 bp, Homo sapien
tccacaagggcagataaacaaaacc

SEQ ID NO: 624302 - DNA, 25 bp, Homo sapien
gaaggcagcgtgttgaccactttcc

SEQ ID NO: 624303 - DNA, 25 bp, Homo sapien
gattcaaattccctaaaccagcagg

SEQ ID NO: 624304 - DNA, 25 bp, Homo sapien
tctaaagctctgaggccatagcagg

SEQ ID NO: 624305 - DNA, 25 bp, Homo sapien
tgttctacaatcatcgcccctaagt

SEQ ID NO: 624306 - DNA, 25 bp, Homo sapien
tcagaaatggactgtacaatctggc

SEQ ID NO: 624307 - DNA, 25 bp, Homo sapien
aatctggcgaatctctcgttcccgc

SEQ ID NO: 624308 - DNA, 25 bp, Homo sapien
cccctaagtccctgaatatttcatt

SEQ ID NO: 624309 - DNA, 25 bp, Homo sapien
ttatagggaatgacagtagcctatg

SEQ ID NO: 624310 - DNA, 25 bp, Homo sapien
gggaatgacagtagcctatgtatat

SEQ ID NO: 624311 - DNA, 25 bp, Homo sapien
tagggaatgacagtagcctatgtat

SEQ ID NO: 624312 - DNA, 25 bp, Homo sapien
cattaatgtttcttatacctttatg

SEQ ID NO: 624313 - DNA, 25 bp, Homo sapien
cagaatgctggttagtgccatcaca

SEQ ID NO: 624314 - DNA, 25 bp, Homo sapien
taagctcgcccctgtcataagtaga

SEQ ID NO: 624315 - DNA, 25 bp, Homo sapien
ttcaagtaagcagagaacaccaggt

SEQ ID NO: 624316 - DNA, 25 bp, Homo sapien
cagtgtcaggagctcgatggcagaa

SEQ ID NO: 624317 - DNA, 25 bp, Homo sapien
gaagctgtttcaaaccatcttcagt

SEQ ID NO: 624318 - DNA, 25 bp, Homo sapien
gttttgatacaggactgttcaacgt

SEQ ID NO: 624319 - DNA, 25 bp, Homo sapien
ctgttcaacgttatagtcaattctg

SEQ ID NO: 624320 - DNA, 25 bp, Homo sapien
cttgtgaagctgtttcaaaccatct

SEQ ID NO: 624321 - DNA, 25 bp, Homo sapien
cgatctctggtataggaagcgactg

SEQ ID NO: 624322 - DNA, 25 bp, Homo sapien
tagatttgctcactcccgcagagaa

SEQ ID NO: 624323 - DNA, 25 bp, Homo sapien
tccagaccttgctatggcacaggag

SEQ ID NO: 624324 - DNA, 25 bp, Homo sapien
tatggctagaaactccactgggtct

SEQ ID NO: 624325 - DNA, 25 bp, Homo sapien
ctagagaaatgccaaagggccccac

SEQ ID NO: 624326 - DNA, 25 bp, Homo sapien
cttaacaccgcatcctggaagctcg

SEQ ID NO: 624327 - DNA, 25 bp, Homo sapien
gcaggagcgggaactccatcatgcc

SEQ ID NO: 624328 - DNA, 25 bp, Homo sapien
ccgcatcctggaagctcggcaggag

SEQ ID NO: 624329 - DNA, 25 bp, Homo sapien
aataaaaacagacacgtgtgcccca

SEQ ID NO: 624330 - DNA, 25 bp, Homo sapien
gaaagatccctctgaggcgcgtcct

SEQ ID NO: 624331 - DNA, 25 bp, Homo sapien
ctaacgatacagcaaaggagccctc

SEQ ID NO: 624332 - DNA, 25 bp, Homo sapien
aggagccctccaagctcaatctggg

SEQ ID NO: 624333 - DNA, 25 bp, Homo sapien
ctggcaggtaggcaacagacacccg

SEQ ID NO: 624334 - DNA, 25 bp, Homo sapien
aggcaacagacacccggaagaggcc

SEQ ID NO: 624335 - DNA, 25 bp, Homo sapien
ctggaggaccgtacctggcaggtag

SEQ ID NO: 624336 - DNA, 25 bp, Homo sapien
aggtaggcaacagacacccggaaga

SEQ ID NO: 624337 - DNA, 25 bp, Homo sapien
tgttcccggtccgtgttcctggagc

SEQ ID NO: 624338 - DNA, 25 bp, Homo sapien
tgcacagttccttcaccgcggaagg

SEQ ID NO: 624339 - DNA, 25 bp, Homo sapien
tgggcctgcttctcccggcttttcc

SEQ ID NO: 624340 - DNA, 25 bp, Homo sapien
gcaagtgcccctgcagcacgggtcg

SEQ ID NO: 624341 - DNA, 25 bp, Homo sapien
taccctggacgtggaaatggatttg

SEQ ID NO: 624342 - DNA, 25 bp, Homo sapien
tggaagagccccatgatcctggtgc

SEQ ID NO: 624343 - DNA, 25 bp, Homo sapien
actgaggtctctgctacaggctaca

SEQ ID NO: 624344 - DNA, 25 bp, Homo sapien
tcgtttccagaatgaggcttccaga

SEQ ID NO: 624345 - DNA, 25 bp, Homo sapien
gacaacaatgagcacaatgatgatg

SEQ ID NO: 624346 - DNA, 25 bp, Homo sapien
atcacaagcatcttccgattcttct

SEQ ID NO: 624347 - DNA, 25 bp, Homo sapien
gcatcttccgattcttcttttgata

SEQ ID NO: 624348 - DNA, 25 bp, Homo sapien
ttcacgccaacgaggacaacaatga

SEQ ID NO: 624349 - DNA, 25 bp, Homo sapien
gctgcacccggacactttaaaggag

SEQ ID NO: 624350 - DNA, 25 bp, Homo sapien
tacggaagtctcacattgcagggct

SEQ ID NO: 624351 - DNA, 25 bp, Homo sapien
gagtccgtggatgcaaaggttcgct

SEQ ID NO: 624352 - DNA, 25 bp, Homo sapien
taacttggaacgtctcaaccatggg

SEQ ID NO: 624353 - DNA, 25 bp, Homo sapien
aatctgcgtgattgctttattgtac

SEQ ID NO: 624354 - DNA, 25 bp, Homo sapien
ttaaaattaatactaggattgcagg

SEQ ID NO: 624355 - DNA, 25 bp, Homo sapien
taaaattaatactaggattgcagga

SEQ ID NO: 624356 - DNA, 25 bp, Homo sapien
gcaagtcatgcctccaagtcattgg

SEQ ID NO: 624357 - DNA, 25 bp, Homo sapien
agagccagtggccaacatgcgagtt

SEQ ID NO: 624358 - DNA, 25 bp, Homo sapien
tatggcaaacgtctctccctcgaga

SEQ ID NO: 624359 - DNA, 25 bp, Homo sapien
tagtgctggttcaagactgggccac

SEQ ID NO: 624360 - DNA, 25 bp, Homo sapien
aagacctggagcctttggataggga

SEQ ID NO: 624361 - DNA, 25 bp, Homo sapien
tacttctgaacaccagcaaaattat

SEQ ID NO: 624362 - DNA, 25 bp, Homo sapien
gacctggagcctttggatagggagg

SEQ ID NO: 624363 - DNA, 25 bp, Homo sapien
ttctgaacaccagcaaaattatttt

SEQ ID NO: 624364 - DNA, 25 bp, Homo sapien
gtagttccataagccactcctgtta

SEQ ID NO: 624365 - DNA, 25 bp, Homo sapien
cataagccactcctgttattttgag

SEQ ID NO: 624366 - DNA, 25 bp, Homo sapien
tccataagccactcctgttattttg

SEQ ID NO: 624367 - DNA, 25 bp, Homo sapien
agttccataagccactcctgttatt

SEQ ID NO: 624368 - DNA, 25 bp, Homo sapien
gcagctgcttttgatccccagggac

SEQ ID NO: 624369 - DNA, 25 bp, Homo sapien
caagaagggtcatctggcacagtct

SEQ ID NO: 624370 - DNA, 25 bp, Homo sapien
caacatcctgattgctcaagggcct

SEQ ID NO: 624371 - DNA, 25 bp, Homo sapien
tcacttaatcggaggttccctggcg

SEQ ID NO: 624372 - DNA, 25 bp, Homo sapien
ccgctccgggctgctcgcgagacgt

SEQ ID NO: 624373 - DNA, 25 bp, Homo sapien
cgccgctccgggctgctcgcgagac

SEQ ID NO: 624374 - DNA, 25 bp, Homo sapien
ctccgggctgctcgcgagacgtgca

SEQ ID NO: 624375 - DNA, 25 bp, Homo sapien
gggctgctcgcgagacgtgcagggc

SEQ ID NO: 624376 - DNA, 25 bp, Homo sapien
gttcgccatcttcctgccggcccac

SEQ ID NO: 624377 - DNA, 25 bp, Homo sapien
cctgccggcccacgccccggccctg

SEQ ID NO: 624378 - DNA, 25 bp, Homo sapien
atcttcctgccggcccacgccccgg

SEQ ID NO: 624379 - DNA, 25 bp, Homo sapien
cgccatcttcctgccggcccacgcc

SEQ ID NO: 624380 - DNA, 25 bp, Homo sapien
tgtgggtccgaggtcccccgcgctc

SEQ ID NO: 624381 - DNA, 25 bp, Homo sapien
ctgtgggtccgaggtcccccgcgct

SEQ ID NO: 624382 - DNA, 25 bp, Homo sapien
tgggtccgaggtcccccgcgctcgc

SEQ ID NO: 624383 - DNA, 25 bp, Homo sapien
ctgcccgagcagcagcaggggccgg

SEQ ID NO: 624384 - DNA, 25 bp, Homo sapien
tgcccgagcagcagcaggggccggc

SEQ ID NO: 624385 - DNA, 25 bp, Homo sapien
gcccgagcagcagcaggggccggct

SEQ ID NO: 624386 - DNA, 25 bp, Homo sapien
agggcacgcggtgcaggtggtgcag

SEQ ID NO: 624387 - DNA, 25 bp, Homo sapien
ctgcagcttcccgcggacgtggctc

SEQ ID NO: 624388 - DNA, 25 bp, Homo sapien
ggacgtggctccagggcacgcggtg

SEQ ID NO: 624389 - DNA, 25 bp, Homo sapien
agcttcccgcggacgtggctccagg

SEQ ID NO: 624390 - DNA, 25 bp, Homo sapien
gacacagaggcttcaaacagcggcc

SEQ ID NO: 624391 - DNA, 25 bp, Homo sapien
aacactcggatagggcttaggcggc

SEQ ID NO: 624392 - DNA, 25 bp, Homo sapien
cagagctaactgtctctaggctggc

SEQ ID NO: 624393 - DNA, 25 bp, Homo sapien
gatgtgtcgcctctctgcagagcta

SEQ ID NO: 624394 - DNA, 25 bp, Homo sapien
gcagggcagccacggtggcgtagtt

SEQ ID NO: 624395 - DNA, 25 bp, Homo sapien
cgcgtgatgaagtgggcggccgagg

SEQ ID NO: 624396 - DNA, 25 bp, Homo sapien
ctgttgtgccggctcaccctgcagg

SEQ ID NO: 624397 - DNA, 25 bp, Homo sapien
ccacggtggcgtagttcaggtagag

SEQ ID NO: 624398 - DNA, 25 bp, Homo sapien
cagcgatgcgctccgggcggcaggc

SEQ ID NO: 624399 - DNA, 25 bp, Homo sapien
acaatgcagcgatgcgctccgggcg

SEQ ID NO: 624400 - DNA, 25 bp, Homo sapien
atgcagcgatgcgctccgggcggca

SEQ ID NO: 624401 - DNA, 25 bp, Homo sapien
cacaatgcagcgatgcgctccgggc

SEQ ID NO: 624402 - DNA, 25 bp, Homo sapien
cgctgcccgactaggagcaccgtgg

SEQ ID NO: 624403 - DNA, 25 bp, Homo sapien
gctgcccgactaggagcaccgtggc

SEQ ID NO: 624404 - DNA, 25 bp, Homo sapien
ctgtggcacatagggagacggcgtg

SEQ ID NO: 624405 - DNA, 25 bp, Homo sapien
tctttgaacgcctccggaacatcag

SEQ ID NO: 624406 - DNA, 25 bp, Homo sapien
agctgctctttgaacgcctccggaa

SEQ ID NO: 624407 - DNA, 25 bp, Homo sapien
gcagggagctgctctttgaacgcct

SEQ ID NO: 624408 - DNA, 25 bp, Homo sapien
gcccgttgtcttgtcccaccaggaa

SEQ ID NO: 624409 - DNA, 25 bp, Homo sapien
agggcacaggcggaagcaaagacct

SEQ ID NO: 624410 - DNA, 25 bp, Homo sapien
gcggaagcaaagacctccggctgct

SEQ ID NO: 624411 - DNA, 25 bp, Homo sapien
agaggcacctgagcggtgggtgaac

SEQ ID NO: 624412 - DNA, 25 bp, Homo sapien
tggatggcaggcctggaagtcagaa

SEQ ID NO: 624413 - DNA, 25 bp, Homo sapien
tggcaggcctggaagtcagaagaaa

SEQ ID NO: 624414 - DNA, 25 bp, Homo sapien
aggcctggaagtcagaagaaaatcc

SEQ ID NO: 624415 - DNA, 25 bp, Homo sapien
caggcctggaagtcagaagaaaatc

SEQ ID NO: 624416 - DNA, 25 bp, Homo sapien
ctggaagaccccagaccacggcgag

SEQ ID NO: 624417 - DNA, 25 bp, Homo sapien
tcggggctctgacgcaagagcgctc

SEQ ID NO: 624418 - DNA, 25 bp, Homo sapien
ggaagaccccagaccacggcgagct

SEQ ID NO: 624419 - DNA, 25 bp, Homo sapien
accacggcgagctcggggctctgac

SEQ ID NO: 624420 - DNA, 25 bp, Homo sapien
gagtcccacgcaagtccctcataaa

SEQ ID NO: 624421 - DNA, 25 bp, Homo sapien
tgagtgcttgaacctgctggccctc

SEQ ID NO: 624422 - DNA, 25 bp, Homo sapien
aagcagaagcactctacatcctgag

SEQ ID NO: 624423 - DNA, 25 bp, Homo sapien
tctgggccgttgctttcctcatgag

SEQ ID NO: 624424 - DNA, 25 bp, Homo sapien
cgccgtctgtggcattcgctaagca

SEQ ID NO: 624425 - DNA, 25 bp, Homo sapien
catctcattgcagggtgtgtccacg

SEQ ID NO: 624426 - DNA, 25 bp, Homo sapien
tgtgtccacgatgcgggctgctagc

SEQ ID NO: 624427 - DNA, 25 bp, Homo sapien
ggctgctagccgcacgccgtctgtg

SEQ ID NO: 624428 - DNA, 25 bp, Homo sapien
ttcctcatcccggatgatggttggg

SEQ ID NO: 624429 - DNA, 25 bp, Homo sapien
tcagttcctcatcccggatgatggt

SEQ ID NO: 624430 - DNA, 25 bp, Homo sapien
ctcatcccggatgatggttgggatg

SEQ ID NO: 624431 - DNA, 25 bp, Homo sapien
ttcagttcctcatcccggatgatgg

SEQ ID NO: 624432 - DNA, 25 bp, Homo sapien
cgatggtctgcgtggctccatctgg

SEQ ID NO: 624433 - DNA, 25 bp, Homo sapien
tttgcccacccaggcgatggtctgc

SEQ ID NO: 624434 - DNA, 25 bp, Homo sapien
tgtcatagacgatgcctttgcccac

SEQ ID NO: 624435 - DNA, 25 bp, Homo sapien
aggcctccagtgtcatagacgatgc

SEQ ID NO: 624436 - DNA, 25 bp, Homo sapien
tacatggacgttagcaatgacccga

SEQ ID NO: 624437 - DNA, 25 bp, Homo sapien
gaatgtagcggcttccagggtgacc

SEQ ID NO: 624438 - DNA, 25 bp, Homo sapien
tcaaaacgaagacgcggaacctgcg

SEQ ID NO: 624439 - DNA, 25 bp, Homo sapien
ggtctacccacagccacatgagatg

SEQ ID NO: 624440 - DNA, 25 bp, Homo sapien
ggtctttgcatcaatggctggagcc

SEQ ID NO: 624441 - DNA, 25 bp, Homo sapien
cacagtaacagctcaggaaaggcct

SEQ ID NO: 624442 - DNA, 25 bp, Homo sapien
tcaggattggggtctttgcatcaat

SEQ ID NO: 624443 - DNA, 25 bp, Homo sapien
tgatcccaaatccacgtagaacggt

SEQ ID NO: 624444 - DNA, 25 bp, Homo sapien
tccagtaatgcatttgaggcctgct

SEQ ID NO: 624445 - DNA, 25 bp, Homo sapien
gcaccatttgctctacaggcagcca

SEQ ID NO: 624446 - DNA, 25 bp, Homo sapien
tctgcgtttcacaccaggccgttgg

SEQ ID NO: 624447 - DNA, 25 bp, Homo sapien
gagaatgcctgctgcgttgcgtctg

SEQ ID NO: 624448 - DNA, 25 bp, Homo sapien
gttatttttaatgaattatacatgt

SEQ ID NO: 624449 - DNA, 25 bp, Homo sapien
gaacagcggatttaactgccacaga

SEQ ID NO: 624450 - DNA, 25 bp, Homo sapien
tagactacatcggaagcagacgcaa

SEQ ID NO: 624451 - DNA, 25 bp, Homo sapien
gacgcaaggtccctagctgtcttct

SEQ ID NO: 624452 - DNA, 25 bp, Homo sapien
ttcaactataaaatgcgtgaggcca

SEQ ID NO: 624453 - DNA, 25 bp, Homo sapien
cacgttagaatttccttgctgaagc

SEQ ID NO: 624454 - DNA, 25 bp, Homo sapien
ctgggaaaatgaaccaatgccaatt

SEQ ID NO: 624455 - DNA, 25 bp, Homo sapien
cattttccatattccgtgtgactca

SEQ ID NO: 624456 - DNA, 25 bp, Homo sapien
gactcataatgtactcctgctgttg

SEQ ID NO: 624457 - DNA, 25 bp, Homo sapien
aaagaggtccgggagccactgtatt

SEQ ID NO: 624458 - DNA, 25 bp, Homo sapien
gccactgtattcgtttccgtgccct

SEQ ID NO: 624459 - DNA, 25 bp, Homo sapien
accccctgtgctggagtatcaggcc

SEQ ID NO: 624460 - DNA, 25 bp, Homo sapien
gtccgggagccactgtattcgtttc

SEQ ID NO: 624461 - DNA, 25 bp, Homo sapien
cccgcagtctcgcttcatccccggc

SEQ ID NO: 624462 - DNA, 25 bp, Homo sapien
ccgcagtctcgcttcatccccggca

SEQ ID NO: 624463 - DNA, 25 bp, Homo sapien
cgcagtctcgcttcatccccggcat

SEQ ID NO: 624464 - DNA, 25 bp, Homo sapien
ggggacaagcatccgctggggagac

SEQ ID NO: 624465 - DNA, 25 bp, Homo sapien
gcatccgctggggagactcgggtag

SEQ ID NO: 624466 - DNA, 25 bp, Homo sapien
agaggggggacaagcatccgctggg

SEQ ID NO: 624467 - DNA, 25 bp, Homo sapien
tccgctggggagactcgggtaggac

SEQ ID NO: 624468 - DNA, 25 bp, Homo sapien
agctctgatgaaggcgggaagctct

SEQ ID NO: 624469 - DNA, 25 bp, Homo sapien
tctgatgaaggcgggaagctctggg

SEQ ID NO: 624470 - DNA, 25 bp, Homo sapien
tgatgaaggcgggaagctctggggg

SEQ ID NO: 624471 - DNA, 25 bp, Homo sapien
ctctgatgaaggcgggaagctctgg

SEQ ID NO: 624472 - DNA, 25 bp, Homo sapien
ggctccatgggaaggtcactcaagg

SEQ ID NO: 624473 - DNA, 25 bp, Homo sapien
acctgcccacgcaagagaggaaggg

SEQ ID NO: 624474 - DNA, 25 bp, Homo sapien
gttgctatgggtagtcttgaatttc

SEQ ID NO: 624475 - DNA, 25 bp, Homo sapien
gccactgagcaagggctaagcattg

SEQ ID NO: 624476 - DNA, 25 bp, Homo sapien
cctggtagcagaagcccgtcacaca

SEQ ID NO: 624477 - DNA, 25 bp, Homo sapien
gcctggtagcagaagcccgtcacac

SEQ ID NO: 624478 - DNA, 25 bp, Homo sapien
taaccagtgaaggagtagcgcacag

SEQ ID NO: 624479 - DNA, 25 bp, Homo sapien
cagccgtgtcccttggtagtttata

SEQ ID NO: 624480 - DNA, 25 bp, Homo sapien
ccttgagtgccagccgtgtcccttg

SEQ ID NO: 624481 - DNA, 25 bp, Homo sapien
tcccttggtagtttataaccagtga

SEQ ID NO: 624482 - DNA, 25 bp, Homo sapien
cattccagggagaagtgggtgttta

SEQ ID NO: 624483 - DNA, 25 bp, Homo sapien
catggacgccacagagatgagctcc

SEQ ID NO: 624484 - DNA, 25 bp, Homo sapien
gaataaatgacagcatgaccctgag

SEQ ID NO: 624485 - DNA, 25 bp, Homo sapien
tgtgtgtacagtgaccacggcctgt

SEQ ID NO: 624486 - DNA, 25 bp, Homo sapien
tgatgatatcggagccacctgtcag

SEQ ID NO: 624487 - DNA, 25 bp, Homo sapien
gtgatgatatcggagccacctgtca

SEQ ID NO: 624488 - DNA, 25 bp, Homo sapien
agggtgatgatatcggagccacctg

SEQ ID NO: 624489 - DNA, 25 bp, Homo sapien
gggtgatgatatcggagccacctgt

SEQ ID NO: 624490 - DNA, 25 bp, Homo sapien
cccgctcagtccttgagcctcacag

SEQ ID NO: 624491 - DNA, 25 bp, Homo sapien
cctgggtccccgctcagtccttgag

SEQ ID NO: 624492 - DNA, 25 bp, Homo sapien
gctcagtccttgagcctcacagatg

SEQ ID NO: 624493 - DNA, 25 bp, Homo sapien
agctgcgagtccctgagacctccct

SEQ ID NO: 624494 - DNA, 25 bp, Homo sapien
atctggccttgtcgcattgggcccc

SEQ ID NO: 624495 - DNA, 25 bp, Homo sapien
tgtcatctggccttgtcgcattggg

SEQ ID NO: 624496 - DNA, 25 bp, Homo sapien
gaacacagcgtggaggttgtctttg

SEQ ID NO: 624497 - DNA, 25 bp, Homo sapien
ccaccgagttctcagccaagcagaa

SEQ ID NO: 624498 - DNA, 25 bp, Homo sapien
catggtagagatccccgctcaggga

SEQ ID NO: 624499 - DNA, 25 bp, Homo sapien
gagtgccctcccgatatgcctggag

SEQ ID NO: 624500 - DNA, 25 bp, Homo sapien
aatgcagggtagaccacgagctcct

SEQ ID NO: 624501 - DNA, 25 bp, Homo sapien
ggatttcctgggacactggcatgag

SEQ ID NO: 624502 - DNA, 25 bp, Homo sapien
tcggcatccgtgttgttgatttcca

SEQ ID NO: 624503 - DNA, 25 bp, Homo sapien
ccaggatgatgtcggcccccaggtc

SEQ ID NO: 624504 - DNA, 25 bp, Homo sapien
ccccaggtccttgcaagcataggac

SEQ ID NO: 624505 - DNA, 25 bp, Homo sapien
tgcaagcataggacacgccatctgc

SEQ ID NO: 624506 - DNA, 25 bp, Homo sapien
cgggaagcgtgtggacgggacggca

SEQ ID NO: 624507 - DNA, 25 bp, Homo sapien
acacaggaggcggttcccggctctg

SEQ ID NO: 624508 - DNA, 25 bp, Homo sapien
cctcgtgcccagttatgaaaacttc

SEQ ID NO: 624509 - DNA, 25 bp, Homo sapien
ttccccaccttgaggtcaagagtgg

SEQ ID NO: 624510 - DNA, 25 bp, Homo sapien
actgagttcttcatgtccgccacag

SEQ ID NO: 624511 - DNA, 25 bp, Homo sapien
gcaccgcggcgtggtacttccctgt

SEQ ID NO: 624512 - DNA, 25 bp, Homo sapien
cacagctgaggtgaactcgctgaag

SEQ ID NO: 624513 - DNA, 25 bp, Homo sapien
ttcctgcccgccttcacacaggcgg

SEQ ID NO: 624514 - DNA, 25 bp, Homo sapien
tctcaagccctcgtctgcactgtgg

SEQ ID NO: 624515 - DNA, 25 bp, Homo sapien
gcaactgagccagacccaagactgg

SEQ ID NO: 624516 - DNA, 25 bp, Homo sapien
gctccaggttcgaggctccaaacct

SEQ ID NO: 624517 - DNA, 25 bp, Homo sapien
accatgagctaaggagtctgccccc

SEQ ID NO: 624518 - DNA, 25 bp, Homo sapien
tccgggccagtcgaagccgatgtgt

SEQ ID NO: 624519 - DNA, 25 bp, Homo sapien
catgcaccggtgcagcaatgtccag

SEQ ID NO: 624520 - DNA, 25 bp, Homo sapien
cagactccgggccagtcgaagccga

SEQ ID NO: 624521 - DNA, 25 bp, Homo sapien
tgtgtgaggcgatgaagaggccagc

SEQ ID NO: 624522 - DNA, 25 bp, Homo sapien
gacagggcccaggatcccctatgga

SEQ ID NO: 624523 - DNA, 25 bp, Homo sapien
acgtgccccacagtccccttctcag

SEQ ID NO: 624524 - DNA, 25 bp, Homo sapien
ggtcacagacagaagtttctgatga

SEQ ID NO: 624525 - DNA, 25 bp, Homo sapien
aagggtcgcacacagcagccactct

SEQ ID NO: 624526 - DNA, 25 bp, Homo sapien
tcctcagaggcacggccgaagagcg

SEQ ID NO: 624527 - DNA, 25 bp, Homo sapien
caccgaagcctgtggctcgctcacc

SEQ ID NO: 624528 - DNA, 25 bp, Homo sapien
ggtcctcagaggcacggccgaagag

SEQ ID NO: 624529 - DNA, 25 bp, Homo sapien
cacggccgaagagcgccagcaggag

SEQ ID NO: 624530 - DNA, 25 bp, Homo sapien
acaagcctgcgtctcttggagtccc

SEQ ID NO: 624531 - DNA, 25 bp, Homo sapien
cctgcgtctcttggagtccctcccc

SEQ ID NO: 624532 - DNA, 25 bp, Homo sapien
caagcctgcgtctcttggagtccct

SEQ ID NO: 624533 - DNA, 25 bp, Homo sapien
aagatccccgtttgtcagggccgag

SEQ ID NO: 624534 - DNA, 25 bp, Homo sapien
gtgcaaagtgaggtaaaagatcccc

SEQ ID NO: 624535 - DNA, 25 bp, Homo sapien
catatgaagggcaatctttcaattg

SEQ ID NO: 624536 - DNA, 25 bp, Homo sapien
gaagggcaatctttcaattgcttaa

SEQ ID NO: 624537 - DNA, 25 bp, Homo sapien
taagctgtctcctaaaacttcagct

SEQ ID NO: 624538 - DNA, 25 bp, Homo sapien
ccctaagctgtctcctaaaacttca

SEQ ID NO: 624539 - DNA, 25 bp, Homo sapien
cctaagctgtctcctaaaacttcag

SEQ ID NO: 624540 - DNA, 25 bp, Homo sapien
gctgtctcctaaaacttcagctgtt

SEQ ID NO: 624541 - DNA, 25 bp, Homo sapien
ccccaggggtagcagtttacagaag

SEQ ID NO: 624542 - DNA, 25 bp, Homo sapien
ggggtagcagtttacagaagatgtc

SEQ ID NO: 624543 - DNA, 25 bp, Homo sapien
ccaggggtagcagtttacagaagat

SEQ ID NO: 624544 - DNA, 25 bp, Homo sapien
ggccccaggggtagcagtttacaga

SEQ ID NO: 624545 - DNA, 25 bp, Homo sapien
gccctataaatcaggtcccctgcag

SEQ ID NO: 624546 - DNA, 25 bp, Homo sapien
ttctcttgccctataaatcaggtcc

SEQ ID NO: 624547 - DNA, 25 bp, Homo sapien
tctgagaggccggagtgtgacttct

SEQ ID NO: 624548 - DNA, 25 bp, Homo sapien
ctgtatttaattgaacctcaagtga

SEQ ID NO: 624549 - DNA, 25 bp, Homo sapien
gggctcctgtcatcaacactgggtt

SEQ ID NO: 624550 - DNA, 25 bp, Homo sapien
ggctgtagagagttcaggagcccac

SEQ ID NO: 624551 - DNA, 25 bp, Homo sapien
ctcgagagacagaacggcctccgtg

SEQ ID NO: 624552 - DNA, 25 bp, Homo sapien
aatcaaaatggtcaggaaggccagg

SEQ ID NO: 624553 - DNA, 25 bp, Homo sapien
tgccctttatcacctaggacagtgc

SEQ ID NO: 624554 - DNA, 25 bp, Homo sapien
gggcacggaagcacagtcgacctca

SEQ ID NO: 624555 - DNA, 25 bp, Homo sapien
ggctcccgggagatccgaattggct

SEQ ID NO: 624556 - DNA, 25 bp, Homo sapien
tcaggggttccctgaatcctggcgg

SEQ ID NO: 624557 - DNA, 25 bp, Homo sapien
cagccgccccatgaccctgttgcca

SEQ ID NO: 624558 - DNA, 25 bp, Homo sapien
ccagccgccccatgaccctgttgcc

SEQ ID NO: 624559 - DNA, 25 bp, Homo sapien
gccagccgccccatgaccctgttgc

SEQ ID NO: 624560 - DNA, 25 bp, Homo sapien
cgccagccgccccatgaccctgttg

SEQ ID NO: 624561 - DNA, 25 bp, Homo sapien
gcctacttggcgtggccatggtgat

SEQ ID NO: 624562 - DNA, 25 bp, Homo sapien
tcctagccccgcctacttggcgtgg

SEQ ID NO: 624563 - DNA, 25 bp, Homo sapien
tggtgatgctctcggccaagttcat

SEQ ID NO: 624564 - DNA, 25 bp, Homo sapien
tctgggataacatcacccaggtggg

SEQ ID NO: 624565 - DNA, 25 bp, Homo sapien
gagtgtgtatgtgcagccctgtgtg

SEQ ID NO: 624566 - DNA, 25 bp, Homo sapien
tcacagtggccttgagtgtgtatgt

SEQ ID NO: 624567 - DNA, 25 bp, Homo sapien
agtgtgtatgtgcagccctgtgtgc

SEQ ID NO: 624568 - DNA, 25 bp, Homo sapien
gaaatggtcatctacaatgacacag

SEQ ID NO: 624569 - DNA, 25 bp, Homo sapien
ggccacgacctggaaatggtcatct

SEQ ID NO: 624570 - DNA, 25 bp, Homo sapien
ttcctggcggatgccggtaaagctc

SEQ ID NO: 624571 - DNA, 25 bp, Homo sapien
ggatgccggtaaagctctcttcagc

SEQ ID NO: 624572 - DNA, 25 bp, Homo sapien
tgaggccggccgatgccctgaagac

SEQ ID NO: 624573 - DNA, 25 bp, Homo sapien
agacggcccgatggctaagtggtgg

SEQ ID NO: 624574 - DNA, 25 bp, Homo sapien
ccagccttccgcaacgccagggtct

SEQ ID NO: 624575 - DNA, 25 bp, Homo sapien
cggcccgatggctaagtggtgggtg

SEQ ID NO: 624576 - DNA, 25 bp, Homo sapien
ccacctttgctgacaaagacctgac

SEQ ID NO: 624577 - DNA, 25 bp, Homo sapien
tggtgccgccgctcccctggtttcc

SEQ ID NO: 624578 - DNA, 25 bp, Homo sapien
acctttgctgacaaagacctgacct

SEQ ID NO: 624579 - DNA, 25 bp, Homo sapien
cacctttgctgacaaagacctgacc

SEQ ID NO: 624580 - DNA, 25 bp, Homo sapien
ttaaacatccgtcacagcctgtggg

SEQ ID NO: 624581 - DNA, 25 bp, Homo sapien
catgggtcctagtggaactcacgca

SEQ ID NO: 624582 - DNA, 25 bp, Homo sapien
tgaacactaattcgccagggaacac

SEQ ID NO: 624583 - DNA, 25 bp, Homo sapien
cagtaattaatctgcagcgggaggt

SEQ ID NO: 624584 - DNA, 25 bp, Homo sapien
cagcccgattggagttgcacttaca

SEQ ID NO: 624585 - DNA, 25 bp, Homo sapien
gctgccgtgggttctaactgtgcca

SEQ ID NO: 624586 - DNA, 25 bp, Homo sapien
tgtgccatcggtgaacgtaaaccag

SEQ ID NO: 624587 - DNA, 25 bp, Homo sapien
gaacagatcgtttcagctggaggct

SEQ ID NO: 624588 - DNA, 25 bp, Homo sapien
tgagtttcttatgcagccaatggga

SEQ ID NO: 624589 - DNA, 25 bp, Homo sapien
gactgcatgccagtagtgcttagca

SEQ ID NO: 624590 - DNA, 25 bp, Homo sapien
gagggatctgcttttcagggactgc

SEQ ID NO: 624591 - DNA, 25 bp, Homo sapien
tattgttggacaaggaagctggctt

SEQ ID NO: 624592 - DNA, 25 bp, Homo sapien
gatctgcttttcagggactgcatgc

SEQ ID NO: 624593 - DNA, 25 bp, Homo sapien
cttccggaagccgttccacttgcag

SEQ ID NO: 624594 - DNA, 25 bp, Homo sapien
ttccggaagccgttccacttgcagg

SEQ ID NO: 624595 - DNA, 25 bp, Homo sapien
ccttccggaagccgttccacttgca

SEQ ID NO: 624596 - DNA, 25 bp, Homo sapien
tccttccggaagccgttccacttgc

SEQ ID NO: 624597 - DNA, 25 bp, Homo sapien
tcacaaacaacctgtgcgacctggg

SEQ ID NO: 624598 - DNA, 25 bp, Homo sapien
tttcacaaacaacctgtgcgacctg

SEQ ID NO: 624599 - DNA, 25 bp, Homo sapien
agcatacgtgaatctgctgggccat

SEQ ID NO: 624600 - DNA, 25 bp, Homo sapien
cttcatcagccagcatacgtgaatc

SEQ ID NO: 624601 - DNA, 25 bp, Homo sapien
tctatgagttgaacagagagtctgg

SEQ ID NO: 624602 - DNA, 25 bp, Homo sapien
agtgggtatgcgaaattcagtggac

SEQ ID NO: 624603 - DNA, 25 bp, Homo sapien
gatttggtcttcttcaggaatggtc

SEQ ID NO: 624604 - DNA, 25 bp, Homo sapien
gtttcaagaactccaactaactgtg

SEQ ID NO: 624605 - DNA, 25 bp, Homo sapien
ttgatcttcctcatgcggttccccc

SEQ ID NO: 624606 - DNA, 25 bp, Homo sapien
tcttcctcatgcggttccccctggt

SEQ ID NO: 624607 - DNA, 25 bp, Homo sapien
cttcctcatgcggttccccctggtt

SEQ ID NO: 624608 - DNA, 25 bp, Homo sapien
tcagcagaaacaccccagtctcctg

SEQ ID NO: 624609 - DNA, 25 bp, Homo sapien
cagggtcacttcgtcccccagcatg

SEQ ID NO: 624610 - DNA, 25 bp, Homo sapien
agggtcacttcgtcccccagcatgt

SEQ ID NO: 624611 - DNA, 25 bp, Homo sapien
ccccagcatgtcccgggatgaggag

SEQ ID NO: 624612 - DNA, 25 bp, Homo sapien
gtcccccagcatgtcccgggatgag

SEQ ID NO: 624613 - DNA, 25 bp, Homo sapien
agaggctccttgccatggcctggtt

SEQ ID NO: 624614 - DNA, 25 bp, Homo sapien
ctgggtgttcaggaaggtcaccgag

SEQ ID NO: 624615 - DNA, 25 bp, Homo sapien
gaggctccttgccatggcctggttc

SEQ ID NO: 624616 - DNA, 25 bp, Homo sapien
tcctgggtgttcaggaaggtcaccg

SEQ ID NO: 624617 - DNA, 25 bp, Homo sapien
ggatctcagttctccatcggcgaag

SEQ ID NO: 624618 - DNA, 25 bp, Homo sapien
tacttccaccccagtagctgatgtg

SEQ ID NO: 624619 - DNA, 25 bp, Homo sapien
tcctgagcaagttggtctgggatca

SEQ ID NO: 624620 - DNA, 25 bp, Homo sapien
tgagttagttaaactctctggatct

SEQ ID NO: 624621 - DNA, 25 bp, Homo sapien
gaacctggtatgtacggaggctcta

SEQ ID NO: 624622 - DNA, 25 bp, Homo sapien
gaggctctaccatatccaacacagg

SEQ ID NO: 624623 - DNA, 25 bp, Homo sapien
gccctggaccctgacaaatactaaa

SEQ ID NO: 624624 - DNA, 25 bp, Homo sapien
tcctagcgtctggaatgaagatcag

SEQ ID NO: 624625 - DNA, 25 bp, Homo sapien
gtgcaggagagatgaggtcatgagg

SEQ ID NO: 624626 - DNA, 25 bp, Homo sapien
tgcaggagagatgaggtcatgaggc

SEQ ID NO: 624627 - DNA, 25 bp, Homo sapien
tgtgcaggagagatgaggtcatgag

SEQ ID NO: 624628 - DNA, 25 bp, Homo sapien
ctgtgcaggagagatgaggtcatga

SEQ ID NO: 624629 - DNA, 25 bp, Homo sapien
tcactttgatcgacagatggtcgaa

SEQ ID NO: 624630 - DNA, 25 bp, Homo sapien
ggcgtccaacagtcctgccttttga

SEQ ID NO: 624631 - DNA, 25 bp, Homo sapien
gatggtcgaataaggaacactggcg

SEQ ID NO: 624632 - DNA, 25 bp, Homo sapien
gactgggcccattaacaccaagtgg

SEQ ID NO: 624633 - DNA, 25 bp, Homo sapien
cgtccagttttcaggctggttgtaa

SEQ ID NO: 624634 - DNA, 25 bp, Homo sapien
taagatcctgcctaagcacgtccag

SEQ ID NO: 624635 - DNA, 25 bp, Homo sapien
aacttgcggagtctgttgagtgttc

SEQ ID NO: 624636 - DNA, 25 bp, Homo sapien
ggctggttgtaaacttgcggagtct

SEQ ID NO: 624637 - DNA, 25 bp, Homo sapien
tggcctttggatacctcatgctgca

SEQ ID NO: 624638 - DNA, 25 bp, Homo sapien
actggactgcctgattgcctgctcg

SEQ ID NO: 624639 - DNA, 25 bp, Homo sapien
gcctgactgtcttaataccccaaga

SEQ ID NO: 624640 - DNA, 25 bp, Homo sapien
tgaagactctcctttcggtatggga

SEQ ID NO: 624641 - DNA, 25 bp, Homo sapien
tcatctggttgatttacttgctgaa

SEQ ID NO: 624642 - DNA, 25 bp, Homo sapien
catctggttgatttacttgctgaat

SEQ ID NO: 624643 - DNA, 25 bp, Homo sapien
tgtcatctggttgatttacttgctg

SEQ ID NO: 624644 - DNA, 25 bp, Homo sapien
atctggttgatttacttgctgaatc

SEQ ID NO: 624645 - DNA, 25 bp, Homo sapien
agtggttacttggttgatatatctt

SEQ ID NO: 624646 - DNA, 25 bp, Homo sapien
tggccttgaggtgatgttcctgcat

SEQ ID NO: 624647 - DNA, 25 bp, Homo sapien
gatcgttgacatcatcgctccagca

SEQ ID NO: 624648 - DNA, 25 bp, Homo sapien
gatgatgggctgatgaacactttgc

SEQ ID NO: 624649 - DNA, 25 bp, Homo sapien
tataagcttggccttgaggtgatgt

SEQ ID NO: 624650 - DNA, 25 bp, Homo sapien
gcttgcttggcttggtggaaccagt

SEQ ID NO: 624651 - DNA, 25 bp, Homo sapien
cattcgcttgcctcatgggtggccc

SEQ ID NO: 624652 - DNA, 25 bp, Homo sapien
ggcgaaatgaggcttccatcctggg

SEQ ID NO: 624653 - DNA, 25 bp, Homo sapien
cgtccctgttttaaagcagtcactc

SEQ ID NO: 624654 - DNA, 25 bp, Homo sapien
ccttggtatttgtggaaagcatctc

SEQ ID NO: 624655 - DNA, 25 bp, Homo sapien
cattcaggaaattagcccatctgac

SEQ ID NO: 624656 - DNA, 25 bp, Homo sapien
tttattccccacttgtcaggagtca

SEQ ID NO: 624657 - DNA, 25 bp, Homo sapien
tgaaacattctccacctcgatcaat

SEQ ID NO: 624658 - DNA, 25 bp, Homo sapien
cagtgcgagctccttggtggaagac

SEQ ID NO: 624659 - DNA, 25 bp, Homo sapien
cagagcctgccttcatagaaccttc

SEQ ID NO: 624660 - DNA, 25 bp, Homo sapien
gaaaattgccatctagtgcaactct

SEQ ID NO: 624661 - DNA, 25 bp, Homo sapien
tcatagaaccttctctaaaaagaac

SEQ ID NO: 624662 - DNA, 25 bp, Homo sapien
caatggccttcacagaaaatgtgtg

SEQ ID NO: 624663 - DNA, 25 bp, Homo sapien
tcaagtgttgctgggtgcattctgg

SEQ ID NO: 624664 - DNA, 25 bp, Homo sapien
ctcaggctgtaggtggtcaatggcc

SEQ ID NO: 624665 - DNA, 25 bp, Homo sapien
tctgcgatcgtcaggctcaggctgt

SEQ ID NO: 624666 - DNA, 25 bp, Homo sapien
cggctatttggtcactcatgctggg

SEQ ID NO: 624667 - DNA, 25 bp, Homo sapien
cttcttgggaaaggctagagcggct

SEQ ID NO: 624668 - DNA, 25 bp, Homo sapien
tttctccattatggacagaggatgg

SEQ ID NO: 624669 - DNA, 25 bp, Homo sapien
gctgggtcatcgcttctcccacgca

SEQ ID NO: 624670 - DNA, 25 bp, Homo sapien
ctgaaggaacagcttccttctggac

SEQ ID NO: 624671 - DNA, 25 bp, Homo sapien
tcagctttctgaaggaacagcttcc

SEQ ID NO: 624672 - DNA, 25 bp, Homo sapien
aggaacagcttccttctggacagtc

SEQ ID NO: 624673 - DNA, 25 bp, Homo sapien
gaaggaacagcttccttctggacag

SEQ ID NO: 624674 - DNA, 25 bp, Homo sapien
ggcagagacgcagtgaaccgttcca

SEQ ID NO: 624675 - DNA, 25 bp, Homo sapien
agggcagagacgcagtgaaccgttc

SEQ ID NO: 624676 - DNA, 25 bp, Homo sapien
gagacgcagtgaaccgttccatggc

SEQ ID NO: 624677 - DNA, 25 bp, Homo sapien
acgcagtgaaccgttccatggcgcc

SEQ ID NO: 624678 - DNA, 25 bp, Homo sapien
ggcaggaactggctcgcactgatga

SEQ ID NO: 624679 - DNA, 25 bp, Homo sapien
tggaatagagggttccagtggcccc

SEQ ID NO: 624680 - DNA, 25 bp, Homo sapien
tggccccgtgttcagggtcagtttc

SEQ ID NO: 624681 - DNA, 25 bp, Homo sapien
tctgcttttattggacgcacaggca

SEQ ID NO: 624682 - DNA, 25 bp, Homo sapien
gggatggaggacagctgtggcggac

SEQ ID NO: 624683 - DNA, 25 bp, Homo sapien
gacgggggggatggaggacagctgt

SEQ ID NO: 624684 - DNA, 25 bp, Homo sapien
gatggaggacagctgtggcggacat

SEQ ID NO: 624685 - DNA, 25 bp, Homo sapien
ggagacgggggggatggaggacagc

SEQ ID NO: 624686 - DNA, 25 bp, Homo sapien
agacagtaccccagcggactgcagc

SEQ ID NO: 624687 - DNA, 25 bp, Homo sapien
agttgtcaccatccatgtggaaaga

SEQ ID NO: 624688 - DNA, 25 bp, Homo sapien
cgactcccaagttgatcattggtga

SEQ ID NO: 624689 - DNA, 25 bp, Homo sapien
cactgtattaatagcaaggccatgg

SEQ ID NO: 624690 - DNA, 25 bp, Homo sapien
tccaaccagcggaagcctgttgagt

SEQ ID NO: 624691 - DNA, 25 bp, Homo sapien
cgtgtttatgtttgcggacgcagcc

SEQ ID NO: 624692 - DNA, 25 bp, Homo sapien
gacgcagccaagagacagtcggtag

SEQ ID NO: 624693 - DNA, 25 bp, Homo sapien
agtgttccagccagaaggcctctca

SEQ ID NO: 624694 - DNA, 25 bp, Homo sapien
taaaggtaagcaaaagagcaagctc

SEQ ID NO: 624695 - DNA, 25 bp, Homo sapien
aacagggtagggtccgttcagactg

SEQ ID NO: 624696 - DNA, 25 bp, Homo sapien
ggagaaagagaatggcgcactctca

SEQ ID NO: 624697 - DNA, 25 bp, Homo sapien
ctagcagggctaggatgccccacag

SEQ ID NO: 624698 - DNA, 25 bp, Homo sapien
atctgtctttctcgctgaagtcatc

SEQ ID NO: 624699 - DNA, 25 bp, Homo sapien
ctgtctttctcgctgaagtcatcgt

SEQ ID NO: 624700 - DNA, 25 bp, Homo sapien
tcatctgtctttctcgctgaagtca

SEQ ID NO: 624701 - DNA, 25 bp, Homo sapien
catctgtctttctcgctgaagtcat

SEQ ID NO: 624702 - DNA, 25 bp, Homo sapien
cagtgtgctgaaagttctcccattg

SEQ ID NO: 624703 - DNA, 25 bp, Homo sapien
gacttcagtgtgctgaaagttctcc

SEQ ID NO: 624704 - DNA, 25 bp, Homo sapien
cagttgggtgaactatctgcatgaa

SEQ ID NO: 624705 - DNA, 25 bp, Homo sapien
cccattgagagcacttatgcagttg

SEQ ID NO: 624706 - DNA, 25 bp, Homo sapien
tgcgtagagattgctcggagctgtc

SEQ ID NO: 624707 - DNA, 25 bp, Homo sapien
gaaaggagccttcgttctgtgcgta

SEQ ID NO: 624708 - DNA, 25 bp, Homo sapien
cgttctgtgcgtagagattgctcgg

SEQ ID NO: 624709 - DNA, 25 bp, Homo sapien
ttaaagggcgtaggatcagaaagga

SEQ ID NO: 624710 - DNA, 25 bp, Homo sapien
ctgctgcttttgaggtgtgcgtgtc

SEQ ID NO: 624711 - DNA, 25 bp, Homo sapien
tgcttttgaggtgtgcgtgtcttca

SEQ ID NO: 624712 - DNA, 25 bp, Homo sapien
tgcagagagtggctccgaagcacat

SEQ ID NO: 624713 - DNA, 25 bp, Homo sapien
gattccgcagcctaagactcgagag

SEQ ID NO: 624714 - DNA, 25 bp, Homo sapien
caccctatgaggtgagaagctggcc

SEQ ID NO: 624715 - DNA, 25 bp, Homo sapien
gaactttctaaagctccgcgccttg

SEQ ID NO: 624716 - DNA, 25 bp, Homo sapien
cgttgtaattatggcgagctcggcg

SEQ ID NO: 624717 - DNA, 25 bp, Homo sapien
tcaggctcggtctcgaagtcggtct

SEQ ID NO: 624718 - DNA, 25 bp, Homo sapien
tcctcgtgctcgtggtcagattccg

SEQ ID NO: 624719 - DNA, 25 bp, Homo sapien
gcgttaaggaagctccggcgctgtt

SEQ ID NO: 624720 - DNA, 25 bp, Homo sapien
tggatctttgtcctcgggcttgagc

SEQ ID NO: 624721 - DNA, 25 bp, Homo sapien
gcttcgcaacttgagagcgtgcaga

SEQ ID NO: 624722 - DNA, 25 bp, Homo sapien
tctttggcttgcagcgacgccgctg

SEQ ID NO: 624723 - DNA, 25 bp, Homo sapien
ttcaggctcggtctcgggctcagtg

SEQ ID NO: 624724 - DNA, 25 bp, Homo sapien
caaggagaatctggacggcgtcctc

SEQ ID NO: 624725 - DNA, 25 bp, Homo sapien
tgcgttcaaccctggtagcccgtag

SEQ ID NO: 624726 - DNA, 25 bp, Homo sapien
gaggtcccgcggcttaattgtcagc

SEQ ID NO: 624727 - DNA, 25 bp, Homo sapien
aggacgtctcctgctaagccgcatg

SEQ ID NO: 624728 - DNA, 25 bp, Homo sapien
aaaagcttggcaataccccgacgtg

SEQ ID NO: 624729 - DNA, 25 bp, Homo sapien
ggtttgcgaagtctatatagcaaaa

SEQ ID NO: 624730 - DNA, 25 bp, Homo sapien
cagagagaaggtttgcgaagtctat

SEQ ID NO: 624731 - DNA, 25 bp, Homo sapien
gagagaaggtttgcgaagtctatat

SEQ ID NO: 624732 - DNA, 25 bp, Homo sapien
gaaggtttgcgaagtctatatagca

SEQ ID NO: 624733 - DNA, 25 bp, Homo sapien
agagttaaaggctgtaagcaactcc

SEQ ID NO: 624734 - DNA, 25 bp, Homo sapien
tcagctttcttcctccttaaccttc

SEQ ID NO: 624735 - DNA, 25 bp, Homo sapien
actgaagtttcagctttcttcctcc

SEQ ID NO: 624736 - DNA, 25 bp, Homo sapien
tcttcctccttaaccttccacacag

SEQ ID NO: 624737 - DNA, 25 bp, Homo sapien
caacactgaagtttcagctttcttc

SEQ ID NO: 624738 - DNA, 25 bp, Homo sapien
cctgctgcctgggtttatgttggcc

SEQ ID NO: 624739 - DNA, 25 bp, Homo sapien
ctgctgcctgggtttatgttggcct

SEQ ID NO: 624740 - DNA, 25 bp, Homo sapien
ccctgtagccaacaaagagaaggca

SEQ ID NO: 624741 - DNA, 25 bp, Homo sapien
ggtttatccctgtagccaacaaaga

SEQ ID NO: 624742 - DNA, 25 bp, Homo sapien
cagctttctgggtttatccctgtag

SEQ ID NO: 624743 - DNA, 25 bp, Homo sapien
ttctgggtttatccctgtagccaac

SEQ ID NO: 624744 - DNA, 25 bp, Homo sapien
caagtggaaggtcagtagacattgg

SEQ ID NO: 624745 - DNA, 25 bp, Homo sapien
ggatgctgagcctgcacaagtggaa

SEQ ID NO: 624746 - DNA, 25 bp, Homo sapien
tggataaggagttgaggccccaggg

SEQ ID NO: 624747 - DNA, 25 bp, Homo sapien
agcagcccaggatggataaggagtt

SEQ ID NO: 624748 - DNA, 25 bp, Homo sapien
tgggaggtccaatagggggcgccgc

SEQ ID NO: 624749 - DNA, 25 bp, Homo sapien
gggggcgggtgtatggcggctaggc

SEQ ID NO: 624750 - DNA, 25 bp, Homo sapien
tgctggggtggttggaagccggtgg

SEQ ID NO: 624751 - DNA, 25 bp, Homo sapien
ttggaacgcccgaagaggtgctgct

SEQ ID NO: 624752 - DNA, 25 bp, Homo sapien
gactggacaacgctgtgcgcactga

SEQ ID NO: 624753 - DNA, 25 bp, Homo sapien
acagataaataccatgccgcgcggc

SEQ ID NO: 624754 - DNA, 25 bp, Homo sapien
ggtaaatgcccacaccacctggtgg

SEQ ID NO: 624755 - DNA, 25 bp, Homo sapien
caaagcggcctcagagtttcgcagg

SEQ ID NO: 624756 - DNA, 25 bp, Homo sapien
gactgatttggagtctttctcctcg

SEQ ID NO: 624757 - DNA, 25 bp, Homo sapien
tccctgactgatttggagtctttct

SEQ ID NO: 624758 - DNA, 25 bp, Homo sapien
aggcctcgcagggacgttttggctc

SEQ ID NO: 624759 - DNA, 25 bp, Homo sapien
gcagggacgttttggctccttccac

SEQ ID NO: 624760 - DNA, 25 bp, Homo sapien
gacgagcgtgccgattcggtccgaa

SEQ ID NO: 624761 - DNA, 25 bp, Homo sapien
tcggtccgaaaatcgccagtagcgc

SEQ ID NO: 624762 - DNA, 25 bp, Homo sapien
ttccagtgccgagctggctccggct

SEQ ID NO: 624763 - DNA, 25 bp, Homo sapien
gccagtcccgcctgcttggatctga

SEQ ID NO: 624764 - DNA, 25 bp, Homo sapien
cgtagaggcagttgcgcacgcccat

SEQ ID NO: 624765 - DNA, 25 bp, Homo sapien
acatattattgccgtagaggcagtt

SEQ ID NO: 624766 - DNA, 25 bp, Homo sapien
ctgacatattattgccgtagaggca

SEQ ID NO: 624767 - DNA, 25 bp, Homo sapien
ccgtagaggcagttgcgcacgccca

SEQ ID NO: 624768 - DNA, 25 bp, Homo sapien
cagcttccctgaatgccgggttgag

SEQ ID NO: 624769 - DNA, 25 bp, Homo sapien
ccaaaggtggttgctcgggctgttc

SEQ ID NO: 624770 - DNA, 25 bp, Homo sapien
aggcctcgccatcattctcgacggg

SEQ ID NO: 624771 - DNA, 25 bp, Homo sapien
cgttgtgaggcggttcggtctccat

SEQ ID NO: 624772 - DNA, 25 bp, Homo sapien
gtctggcaccactgaaggctccggg

SEQ ID NO: 624773 - DNA, 25 bp, Homo sapien
cctggtctggcaccactgaaggctc

SEQ ID NO: 624774 - DNA, 25 bp, Homo sapien
tggcaccactgaaggctccgggctc

SEQ ID NO: 624775 - DNA, 25 bp, Homo sapien
tggtctggcaccactgaaggctccg

SEQ ID NO: 624776 - DNA, 25 bp, Homo sapien
ctcaaatggcatagtctcctcaggg

SEQ ID NO: 624777 - DNA, 25 bp, Homo sapien
gctgctgcccgtgaagttagaagga

SEQ ID NO: 624778 - DNA, 25 bp, Homo sapien
ggacctgtaagagaagttgactgca

SEQ ID NO: 624779 - DNA, 25 bp, Homo sapien
tgtgcgataactcgggaaagccccg

SEQ ID NO: 624780 - DNA, 25 bp, Homo sapien
tgctgtcccggagtcgggatcttct

SEQ ID NO: 624781 - DNA, 25 bp, Homo sapien
agtcaggatcggctggtgctgtccc

SEQ ID NO: 624782 - DNA, 25 bp, Homo sapien
agtcgggatcggctgcgaatgcccc

SEQ ID NO: 624783 - DNA, 25 bp, Homo sapien
tgagatggatcttgcgtctggcccc

SEQ ID NO: 624784 - DNA, 25 bp, Homo sapien
ccttcatcgtagtacacgcggcggc

SEQ ID NO: 624785 - DNA, 25 bp, Homo sapien
gggactctcagatcgaccgaagcag

SEQ ID NO: 624786 - DNA, 25 bp, Homo sapien
gatgctgaaaccagcggaggcatcc

SEQ ID NO: 624787 - DNA, 25 bp, Homo sapien
ccccgaaggcttgcacgagaaagtt

SEQ ID NO: 624788 - DNA, 25 bp, Homo sapien
gcagcaggcggtgcgtacacatgta

SEQ ID NO: 624789 - DNA, 25 bp, Homo sapien
ttctgggcccgcttctccagggctt

SEQ ID NO: 624790 - DNA, 25 bp, Homo sapien
cgtttcttctctgcgcgcttctggg

SEQ ID NO: 624791 - DNA, 25 bp, Homo sapien
tgtttgtcgatgagcttactgcgtt

SEQ ID NO: 624792 - DNA, 25 bp, Homo sapien
ctgctgcccgcaggcagagtccgcc

SEQ ID NO: 624793 - DNA, 25 bp, Homo sapien
cggccctgctgcccgcaggcagagt

SEQ ID NO: 624794 - DNA, 25 bp, Homo sapien
ccgcaggcagagtccgccgcattac

SEQ ID NO: 624795 - DNA, 25 bp, Homo sapien
tgcccgcaggcagagtccgccgcat

SEQ ID NO: 624796 - DNA, 25 bp, Homo sapien
ttctagcaagttcttcccgcctttg

SEQ ID NO: 624797 - DNA, 25 bp, Homo sapien
tctagcaagttcttcccgcctttgg

SEQ ID NO: 624798 - DNA, 25 bp, Homo sapien
ctttctagcaagttcttcccgcctt

SEQ ID NO: 624799 - DNA, 25 bp, Homo sapien
gcctgtccagcttacggttgctggc

SEQ ID NO: 624800 - DNA, 25 bp, Homo sapien
ctcagtgtcgctcggcaccactttt

SEQ ID NO: 624801 - DNA, 25 bp, Homo sapien
tggcgctggcctgtccagccggaaa

SEQ ID NO: 624802 - DNA, 25 bp, Homo sapien
cagccggaaacgaccctcagtgtcg

SEQ ID NO: 624803 - DNA, 25 bp, Homo sapien
tttggcgaacgaatgagaagtgagg

SEQ ID NO: 624804 - DNA, 25 bp, Homo sapien
gcgggagggtttggcgaacgaatga

SEQ ID NO: 624805 - DNA, 25 bp, Homo sapien
ggcgaacgaatgagaagtgaggaaa

SEQ ID NO: 624806 - DNA, 25 bp, Homo sapien
gagggtttggcgaacgaatgagaag

SEQ ID NO: 624807 - DNA, 25 bp, Homo sapien
cctctttgcccccagctaaagctgc

SEQ ID NO: 624808 - DNA, 25 bp, Homo sapien
agcctctttgcccccagctaaagct

SEQ ID NO: 624809 - DNA, 25 bp, Homo sapien
aagcctctttgcccccagctaaagc

SEQ ID NO: 624810 - DNA, 25 bp, Homo sapien
gcctctttgcccccagctaaagctg

SEQ ID NO: 624811 - DNA, 25 bp, Homo sapien
tttggctaccagcacccgagaacaa

SEQ ID NO: 624812 - DNA, 25 bp, Homo sapien
aaagccaggacaaggtacaaggtga

SEQ ID NO: 624813 - DNA, 25 bp, Homo sapien
caaagccaggacaaggtacaaggtg

SEQ ID NO: 624814 - DNA, 25 bp, Homo sapien
tgcatccaaaggtgtttggctacca

SEQ ID NO: 624815 - DNA, 25 bp, Homo sapien
ggtgacaggtgacacttttacagga

SEQ ID NO: 624816 - DNA, 25 bp, Homo sapien
aggtggcattcgtctactgcttgag

SEQ ID NO: 624817 - DNA, 25 bp, Homo sapien
catagaacaatccaagctcaggtcc

SEQ ID NO: 624818 - DNA, 25 bp, Homo sapien
caattataaatgtggcaaggtggca

SEQ ID NO: 624819 - DNA, 25 bp, Homo sapien
cttcaattcccatgagctggcctgg

SEQ ID NO: 624820 - DNA, 25 bp, Homo sapien
cagagcacaactaggagaaccagcc

SEQ ID NO: 624821 - DNA, 25 bp, Homo sapien
taaggtatgtgaccacttgaaaccc

SEQ ID NO: 624822 - DNA, 25 bp, Homo sapien
gctctgaagcccttaagtgtccatt

SEQ ID NO: 624823 - DNA, 25 bp, Homo sapien
tgtcatttggcagtgacagccgctt

SEQ ID NO: 624824 - DNA, 25 bp, Homo sapien
tctcgttcttgcttgagctgactgt

SEQ ID NO: 624825 - DNA, 25 bp, Homo sapien
tagcctcttaacatctggtgctcca

SEQ ID NO: 624826 - DNA, 25 bp, Homo sapien
taacatctggtgctccaactctttc

SEQ ID NO: 624827 - DNA, 25 bp, Homo sapien
tgggaagtcagtgacagcgccgttc

SEQ ID NO: 624828 - DNA, 25 bp, Homo sapien
gcctgcacttcctgttgcatgccag

SEQ ID NO: 624829 - DNA, 25 bp, Homo sapien
agaggctctcaacacagcctgcact

SEQ ID NO: 624830 - DNA, 25 bp, Homo sapien
tctgcgtaagtctgcaccagaggct

SEQ ID NO: 624831 - DNA, 25 bp, Homo sapien
tcatctcttgtgctctgcgtaagtc

SEQ ID NO: 624832 - DNA, 25 bp, Homo sapien
caggcggcagcttccacaagtaact

SEQ ID NO: 624833 - DNA, 25 bp, Homo sapien
tgaagattctaggtggacacacaac

SEQ ID NO: 624834 - DNA, 25 bp, Homo sapien
aaaaggcagacccatcagcagaaca

SEQ ID NO: 624835 - DNA, 25 bp, Homo sapien
cacacaacttggatatcaacaggga

SEQ ID NO: 624836 - DNA, 25 bp, Homo sapien
acaaaaagagatgacatgtattact

SEQ ID NO: 624837 - DNA, 25 bp, Homo sapien
aaaagagatgacatgtattactttg

SEQ ID NO: 624838 - DNA, 25 bp, Homo sapien
cccatgagccccagcgtgggcagga

SEQ ID NO: 624839 - DNA, 25 bp, Homo sapien
atgagccccagcgtgggcaggaatg

SEQ ID NO: 624840 - DNA, 25 bp, Homo sapien
tccccatgagccccagcgtgggcag

SEQ ID NO: 624841 - DNA, 25 bp, Homo sapien
ccatgagccccagcgtgggcaggaa

SEQ ID NO: 624842 - DNA, 25 bp, Homo sapien
cttgatctttcctgactctctgatg

SEQ ID NO: 624843 - DNA, 25 bp, Homo sapien
ggggaggcaccatctgtgagagagg

SEQ ID NO: 624844 - DNA, 25 bp, Homo sapien
tctttcctgactctctgatggggag

SEQ ID NO: 624845 - DNA, 25 bp, Homo sapien
tgatctttcctgactctctgatggg

SEQ ID NO: 624846 - DNA, 25 bp, Homo sapien
tcaaagcctatgtcatgcagatgat

SEQ ID NO: 624847 - DNA, 25 bp, Homo sapien
tactgaagaattaactacatggcca

SEQ ID NO: 624848 - DNA, 25 bp, Homo sapien
tacattggccagtgtatttggaccc

SEQ ID NO: 624849 - DNA, 25 bp, Homo sapien
tctgagtaagaatgccttgtctacc

SEQ ID NO: 624850 - DNA, 25 bp, Homo sapien
atggcctcgaaacatttctttccaa

SEQ ID NO: 624851 - DNA, 25 bp, Homo sapien
gcctcgaaacatttctttccaacat

SEQ ID NO: 624852 - DNA, 25 bp, Homo sapien
ggcctcgaaacatttctttccaaca

SEQ ID NO: 624853 - DNA, 25 bp, Homo sapien
tggcctcgaaacatttctttccaac

SEQ ID NO: 624854 - DNA, 25 bp, Homo sapien
cagcaggtggaatcatgggtttaca

SEQ ID NO: 624855 - DNA, 25 bp, Homo sapien
ggtaagcaaatgacacccagagtgc

SEQ ID NO: 624856 - DNA, 25 bp, Homo sapien
gctcaggagacttgcttcatgccca

SEQ ID NO: 624857 - DNA, 25 bp, Homo sapien
cagtccagatgagagagctttccaa

SEQ ID NO: 624858 - DNA, 25 bp, Homo sapien
ttggccccttcaggtacactgctgc

SEQ ID NO: 624859 - DNA, 25 bp, Homo sapien
ttcaaccggatgactgaaattcccc

SEQ ID NO: 624860 - DNA, 25 bp, Homo sapien
tgctccacttcgagtaagaaaaggt

SEQ ID NO: 624861 - DNA, 25 bp, Homo sapien
ttgtacaaggcctcttttttatgaa

SEQ ID NO: 624862 - DNA, 25 bp, Homo sapien
tgtcccgccgcacactaggatatag

SEQ ID NO: 624863 - DNA, 25 bp, Homo sapien
taggtgtcagagagccgaattcgaa

SEQ ID NO: 624864 - DNA, 25 bp, Homo sapien
aattatttgcgacgcccggacggag

SEQ ID NO: 624865 - DNA, 25 bp, Homo sapien
tatagcagtgcacgggattaggagc

SEQ ID NO: 624866 - DNA, 25 bp, Homo sapien
aattttcggtgagtggtgtagccct

SEQ ID NO: 624867 - DNA, 25 bp, Homo sapien
gccctgggcggcgtgcaaagtgtgc

SEQ ID NO: 624868 - DNA, 25 bp, Homo sapien
tggtgtagccctgggcggcgtgcaa

SEQ ID NO: 624869 - DNA, 25 bp, Homo sapien
ggcggcgtgcaaagtgtgcgacggc

SEQ ID NO: 624870 - DNA, 25 bp, Homo sapien
aggcggtgggcgctcaaccccgcct

SEQ ID NO: 624871 - DNA, 25 bp, Homo sapien
gggcgcgggcgcgcccaaggcggtg

SEQ ID NO: 624872 - DNA, 25 bp, Homo sapien
gcccaaggcggtgggcgctcaaccc

SEQ ID NO: 624873 - DNA, 25 bp, Homo sapien
gtgcaggccggtgccgggaccgcgc

SEQ ID NO: 624874 - DNA, 25 bp, Homo sapien
gccccgatgacgccccagcctcttc

SEQ ID NO: 624875 - DNA, 25 bp, Homo sapien
cccagcctcttcagaggaccgaccc

SEQ ID NO: 624876 - DNA, 25 bp, Homo sapien
ccccagcctcttcagaggaccgacc

SEQ ID NO: 624877 - DNA, 25 bp, Homo sapien
ccccgatgacgccccagcctcttca

SEQ ID NO: 624878 - DNA, 25 bp, Homo sapien
gccggccagccacctgacgcagccc

SEQ ID NO: 624879 - DNA, 25 bp, Homo sapien
ctccgcggtgccgacgcgactgagt

SEQ ID NO: 624880 - DNA, 25 bp, Homo sapien
ggccagccacctgacgcagcccgct

SEQ ID NO: 624881 - DNA, 25 bp, Homo sapien
tgacgcagcccgctccgcggtgccg

SEQ ID NO: 624882 - DNA, 25 bp, Homo sapien
acgcaaggcagcgcctgccggccgc

SEQ ID NO: 624883 - DNA, 25 bp, Homo sapien
ctgcgccgggcgactcgcacttccg

SEQ ID NO: 624884 - DNA, 25 bp, Homo sapien
cgccgggcgactcgcacttccgcgg

SEQ ID NO: 624885 - DNA, 25 bp, Homo sapien
ggcgactcgcacttccgcgggaggc

SEQ ID NO: 624886 - DNA, 25 bp, Homo sapien
ccgggcgactcgcacttccgcggga

SEQ ID NO: 624887 - DNA, 25 bp, Homo sapien
tgccttgtcccggacccggcggctc

SEQ ID NO: 624888 - DNA, 25 bp, Homo sapien
ttgggcacgccaatggagaagagaa

SEQ ID NO: 624889 - DNA, 25 bp, Homo sapien
ctcaggcgctccttggtttggctct

SEQ ID NO: 624890 - DNA, 25 bp, Homo sapien
tggtttggctcttgggcacgccaat

SEQ ID NO: 624891 - DNA, 25 bp, Homo sapien
tgcaaaggcgcggatggcaggagtc

SEQ ID NO: 624892 - DNA, 25 bp, Homo sapien
aaaggcgcggatggcaggagtctgt

SEQ ID NO: 624893 - DNA, 25 bp, Homo sapien
gcgcggatggcaggagtctgtttac

SEQ ID NO: 624894 - DNA, 25 bp, Homo sapien
agtgcaaaggcgcggatggcaggag

SEQ ID NO: 624895 - DNA, 25 bp, Homo sapien
tcttgcgctccttgtctgttaggaa

SEQ ID NO: 624896 - DNA, 25 bp, Homo sapien
tcttggggttcttcgcgagcttctc

SEQ ID NO: 624897 - DNA, 25 bp, Homo sapien
gcggccgtcttcttctcgctctccg

SEQ ID NO: 624898 - DNA, 25 bp, Homo sapien
gcttcttctcgagcttcttgcgctc

SEQ ID NO: 624899 - DNA, 25 bp, Homo sapien
gagtccgtgtcccagtcagcccagg

SEQ ID NO: 624900 - DNA, 25 bp, Homo sapien
gcaggaagttgagcacccacgaggg

SEQ ID NO: 624901 - DNA, 25 bp, Homo sapien
gagaagaccaggaacaccacgaggg

SEQ ID NO: 624902 - DNA, 25 bp, Homo sapien
tcgtcctcgtcgctcgagtccgtgt

SEQ ID NO: 624903 - DNA, 25 bp, Homo sapien
aggcgcagcccaggaacactcggaa

SEQ ID NO: 624904 - DNA, 25 bp, Homo sapien
aacactcggaagcagcaggtcgccc

SEQ ID NO: 624905 - DNA, 25 bp, Homo sapien
cccaggaacactcggaagcagcagg

SEQ ID NO: 624906 - DNA, 25 bp, Homo sapien
gcagcccaggaacactcggaagcag

SEQ ID NO: 624907 - DNA, 25 bp, Homo sapien
gccgccgctcttattgcctcggccg

SEQ ID NO: 624908 - DNA, 25 bp, Homo sapien
gagggggctgatggccgccgccggg

SEQ ID NO: 624909 - DNA, 25 bp, Homo sapien
cgccgggccgaggcggaccagagca

SEQ ID NO: 624910 - DNA, 25 bp, Homo sapien
gccccgagccaaaagcgccgcggcg

SEQ ID NO: 624911 - DNA, 25 bp, Homo sapien
ggctcggctcctcggcaaggagcgc

SEQ ID NO: 624912 - DNA, 25 bp, Homo sapien
gctcggctcctcggcaaggagcgcg

SEQ ID NO: 624913 - DNA, 25 bp, Homo sapien
ctcggctcctcggcaaggagcgcgc

SEQ ID NO: 624914 - DNA, 25 bp, Homo sapien
tgcgccttctcctcgttgcgctggt

SEQ ID NO: 624915 - DNA, 25 bp, Homo sapien
ctcgttgcgctggtcctcggtctta

SEQ ID NO: 624916 - DNA, 25 bp, Homo sapien
tcctcgttgcgctggtcctcggtct

SEQ ID NO: 624917 - DNA, 25 bp, Homo sapien
ctcacgctgcgccttctcctcgttg

SEQ ID NO: 624918 - DNA, 25 bp, Homo sapien
ctgcagctgcttctcgatctttttg

SEQ ID NO: 624919 - DNA, 25 bp, Homo sapien
gctgcttctcgatctttttgttggc

SEQ ID NO: 624920 - DNA, 25 bp, Homo sapien
agctgcttctcgatctttttgttgg

SEQ ID NO: 624921 - DNA, 25 bp, Homo sapien
gcagctgcttctcgatctttttgtt

SEQ ID NO: 624922 - DNA, 25 bp, Homo sapien
cagcaggcggtgcgtggcccggtag

SEQ ID NO: 624923 - DNA, 25 bp, Homo sapien
gcagcaggcggtgcgtggcccggta

SEQ ID NO: 624924 - DNA, 25 bp, Homo sapien
agcaggcggtgcgtggcccggtaga

SEQ ID NO: 624925 - DNA, 25 bp, Homo sapien
gcaggcggtgcgtggcccggtagac

SEQ ID NO: 624926 - DNA, 25 bp, Homo sapien
caaacccctggcgtcgtgtaggcct

SEQ ID NO: 624927 - DNA, 25 bp, Homo sapien
gagagagacactgagcgggcaggcc

SEQ ID NO: 624928 - DNA, 25 bp, Homo sapien
gtaggcctcgcggaaaaagagagaa

SEQ ID NO: 624929 - DNA, 25 bp, Homo sapien
cgcccggccgaatccgcgcccctgg

SEQ ID NO: 624930 - DNA, 25 bp, Homo sapien
tggcttaagctgcagattcctaggc

SEQ ID NO: 624931 - DNA, 25 bp, Homo sapien
tttcataggcaaaaacagatccgtg

SEQ ID NO: 624932 - DNA, 25 bp, Homo sapien
tacagttcctgagaccctattagca

SEQ ID NO: 624933 - DNA, 25 bp, Homo sapien
aaagcactctcaatgtggccagcca

SEQ ID NO: 624934 - DNA, 25 bp, Homo sapien
agtatttcaccatccaaataacaaa

SEQ ID NO: 624935 - DNA, 25 bp, Homo sapien
ctgcagtatttcaccatccaaataa

SEQ ID NO: 624936 - DNA, 25 bp, Homo sapien
tttcaccatccaaataacaaacaag

SEQ ID NO: 624937 - DNA, 25 bp, Homo sapien
tatttcaccatccaaataacaaaca

SEQ ID NO: 624938 - DNA, 25 bp, Homo sapien
cttgacatttcgacgcagagaaaag

SEQ ID NO: 624939 - DNA, 25 bp, Homo sapien
acatttcgacgcagagaaaaggaaa

SEQ ID NO: 624940 - DNA, 25 bp, Homo sapien
aaaggaaatcaatgtccaattcagt

SEQ ID NO: 624941 - DNA, 25 bp, Homo sapien
ggaaatcaatgtccaattcagtgtc

SEQ ID NO: 624942 - DNA, 25 bp, Homo sapien
caggttatgaaggaggcattttaac

SEQ ID NO: 624943 - DNA, 25 bp, Homo sapien
gtttttccatagaagcaacatgcaa

SEQ ID NO: 624944 - DNA, 25 bp, Homo sapien
taacactttgggcagggaggtctgc

SEQ ID NO: 624945 - DNA, 25 bp, Homo sapien
aatgaaagtaagtctcaggttatga

SEQ ID NO: 624946 - DNA, 25 bp, Homo sapien
tcacaatggtgcttttaccagattc

SEQ ID NO: 624947 - DNA, 25 bp, Homo sapien
atggtgcttttaccagattctccag

SEQ ID NO: 624948 - DNA, 25 bp, Homo sapien
acaatggtgcttttaccagattctc

SEQ ID NO: 624949 - DNA, 25 bp, Homo sapien
ggtgcttttaccagattctccagca

SEQ ID NO: 624950 - DNA, 25 bp, Homo sapien
taaacccattaacatgcaggatcct

SEQ ID NO: 624951 - DNA, 25 bp, Homo sapien
acccattaacatgcaggatcctcat

SEQ ID NO: 624952 - DNA, 25 bp, Homo sapien
ccattaaacccattaacatgcagga

SEQ ID NO: 624953 - DNA, 25 bp, Homo sapien
tccattaaacccattaacatgcagg

SEQ ID NO: 624954 - DNA, 25 bp, Homo sapien
aatttgcagtgatcagcgtgggccg

SEQ ID NO: 624955 - DNA, 25 bp, Homo sapien
tattgtcaggatggcagtctccgct

SEQ ID NO: 624956 - DNA, 25 bp, Homo sapien
ttacacgagaacgatgggtaggccc

SEQ ID NO: 624957 - DNA, 25 bp, Homo sapien
aaactgtaaacacgggctgccactt

SEQ ID NO: 624958 - DNA, 25 bp, Homo sapien
taggctcccatgaggaatacccctg

SEQ ID NO: 624959 - DNA, 25 bp, Homo sapien
gaagaatcccacacctttgctgcag

SEQ ID NO: 624960 - DNA, 25 bp, Homo sapien
taacaaaacgcaagatcagggagga

SEQ ID NO: 624961 - DNA, 25 bp, Homo sapien
aaaatgtaatcagcatggcagcccg

SEQ ID NO: 624962 - DNA, 25 bp, Homo sapien
cgctgttgctccttgcagcctgcgg

SEQ ID NO: 624963 - DNA, 25 bp, Homo sapien
catcgctgttgctccttgcagcctg

SEQ ID NO: 624964 - DNA, 25 bp, Homo sapien
ttgcagcctgcgggtcctcttcgcc

SEQ ID NO: 624965 - DNA, 25 bp, Homo sapien
ccatcgctgttgctccttgcagcct

SEQ ID NO: 624966 - DNA, 25 bp, Homo sapien
tatccaccaagctaacgtaaagtgc

SEQ ID NO: 624967 - DNA, 25 bp, Homo sapien
tggtctcatgagaaatagccactcc

SEQ ID NO: 624968 - DNA, 25 bp, Homo sapien
tgagatgccctaaactaagtcaatg

SEQ ID NO: 624969 - DNA, 25 bp, Homo sapien
cagagctagagtggttacctggcat

SEQ ID NO: 624970 - DNA, 25 bp, Homo sapien
gacgtgcaggccaaggtattagtag

SEQ ID NO: 624971 - DNA, 25 bp, Homo sapien
catcgtttaaggtcaggtagcaggg

SEQ ID NO: 624972 - DNA, 25 bp, Homo sapien
tagaagttcctaagaccgagcaatt

SEQ ID NO: 624973 - DNA, 25 bp, Homo sapien
tcaagggtttagcaggacatctagt

SEQ ID NO: 624974 - DNA, 25 bp, Homo sapien
ttctgattcgctacaaaattgggac

SEQ ID NO: 624975 - DNA, 25 bp, Homo sapien
ccgcttcagctaactaagtggtggg

SEQ ID NO: 624976 - DNA, 25 bp, Homo sapien
acagaagacagacgcgagatacagg

SEQ ID NO: 624977 - DNA, 25 bp, Homo sapien
tctatgtatacagcagatgggatgc

SEQ ID NO: 624978 - DNA, 25 bp, Homo sapien
cactgctcttctacattgggtgaag

SEQ ID NO: 624979 - DNA, 25 bp, Homo sapien
taaatgtctgtgtacttctgggcct

SEQ ID NO: 624980 - DNA, 25 bp, Homo sapien
tcaagtgcgggcctgtcgacaggcc

SEQ ID NO: 624981 - DNA, 25 bp, Homo sapien
tcgacaggccttccacaaatcattt

SEQ ID NO: 624982 - DNA, 25 bp, Homo sapien
ggctgattcaccaattcatagactg

SEQ ID NO: 624983 - DNA, 25 bp, Homo sapien
ttgagagtcccagtttttgaagcat

SEQ ID NO: 624984 - DNA, 25 bp, Homo sapien
acatataatctctccagactagaac

SEQ ID NO: 624985 - DNA, 25 bp, Homo sapien
ttagcaagagcagacgagcagacga

SEQ ID NO: 624986 - DNA, 25 bp, Homo sapien
ctccagccagggcgagagtgagact

SEQ ID NO: 624987 - DNA, 25 bp, Homo sapien
cactccagccagggcgagagtgaga

SEQ ID NO: 624988 - DNA, 25 bp, Homo sapien
ccagccagggcgagagtgagactct

SEQ ID NO: 624989 - DNA, 25 bp, Homo sapien
agccagggcgagagtgagactctgt

SEQ ID NO: 624990 - DNA, 25 bp, Homo sapien
tgctagcatactgagagaaccagtg

SEQ ID NO: 624991 - DNA, 25 bp, Homo sapien
tggtcctatcaacatctgggtaggg

SEQ ID NO: 624992 - DNA, 25 bp, Homo sapien
ttagcaatcatgactgtaccagaag

SEQ ID NO: 624993 - DNA, 25 bp, Homo sapien
taatagttcattacaggagcccggg

SEQ ID NO: 624994 - DNA, 25 bp, Homo sapien
ttcaatcgcctctttcaggttgttt

SEQ ID NO: 624995 - DNA, 25 bp, Homo sapien
atgtcctgcactttggttgccttct

SEQ ID NO: 624996 - DNA, 25 bp, Homo sapien
caatcgcctctttcaggttgttttt

SEQ ID NO: 624997 - DNA, 25 bp, Homo sapien
gtcctgcactttggttgccttctca

SEQ ID NO: 624998 - DNA, 25 bp, Homo sapien
aaaatgatttagcaaagcggtcagg

SEQ ID NO: 624999 - DNA, 25 bp, Homo sapien
aaatgatttagcaaagcggtcaggg

SEQ ID NO: 625000 - DNA, 25 bp, Homo sapien
caggttgctcatggcggccacaatg

SEQ ID NO: 625001 - DNA, 25 bp, Homo sapien
tggttctcggggttggccagctcca

SEQ ID NO: 625002 - DNA, 25 bp, Homo sapien
ccaggttgctcatggcggccacaat

SEQ ID NO: 625003 - DNA, 25 bp, Homo sapien
ctgaactggttctcggggttggcca

SEQ ID NO: 625004 - DNA, 25 bp, Homo sapien
tcaaagtcaggcacgttcatcacac

SEQ ID NO: 625005 - DNA, 25 bp, Homo sapien
caaagtcaggcacgttcatcacact

SEQ ID NO: 625006 - DNA, 25 bp, Homo sapien
caaggtaccttagggcacttccagt

SEQ ID NO: 625007 - DNA, 25 bp, Homo sapien
aataattaagcctgccatagctcag

SEQ ID NO: 625008 - DNA, 25 bp, Homo sapien
gaagtgtggtttggatgctcctgcc

SEQ ID NO: 625009 - DNA, 25 bp, Homo sapien
cacttccagtggagtaaatggacaa

SEQ ID NO: 625010 - DNA, 25 bp, Homo sapien
aaagttcacgcaattagctgctggg

SEQ ID NO: 625011 - DNA, 25 bp, Homo sapien
gagcttgaactaatcaacaacactg

SEQ ID NO: 625012 - DNA, 25 bp, Homo sapien
acacaagaaagtttagagaaaggca

SEQ ID NO: 625013 - DNA, 25 bp, Homo sapien
gagaccagagttccctatgtgaccg

SEQ ID NO: 625014 - DNA, 25 bp, Homo sapien
ggtactcgttggagcgttcgtagca

SEQ ID NO: 625015 - DNA, 25 bp, Homo sapien
tggagcgttcgtagcaggcacgcac

SEQ ID NO: 625016 - DNA, 25 bp, Homo sapien
ttcgtagcaggcacgcactccttca

SEQ ID NO: 625017 - DNA, 25 bp, Homo sapien
tcagctggtactcgttggagcgttc

SEQ ID NO: 625018 - DNA, 25 bp, Homo sapien
tactagagtcgcttacctgagagca

SEQ ID NO: 625019 - DNA, 25 bp, Homo sapien
gagcacagccctatttccctaaatg

SEQ ID NO: 625020 - DNA, 25 bp, Homo sapien
gaggaggcgtagctatgtcttcacc

SEQ ID NO: 625021 - DNA, 25 bp, Homo sapien
cagattagaactttctgccagtggg

SEQ ID NO: 625022 - DNA, 25 bp, Homo sapien
gcaatggtaagtcaggtgttaggca

SEQ ID NO: 625023 - DNA, 25 bp, Homo sapien
gacagagggcgatccctgaggcaat

SEQ ID NO: 625024 - DNA, 25 bp, Homo sapien
tatcgggtacgatgtcctctgggag

SEQ ID NO: 625025 - DNA, 25 bp, Homo sapien
tcatttgccaacacaccaaccaggt

SEQ ID NO: 625026 - DNA, 25 bp, Homo sapien
tggcaccttggttctgattagctaa

SEQ ID NO: 625027 - DNA, 25 bp, Homo sapien
aaaggaatttcctatgggaaggcag

SEQ ID NO: 625028 - DNA, 25 bp, Homo sapien
tcttagcccttggtgagtcagcctg

SEQ ID NO: 625029 - DNA, 25 bp, Homo sapien
agattgcgcagaccctaacagaggc

SEQ ID NO: 625030 - DNA, 25 bp, Homo sapien
tgttgcttgactagacacacaggaa

SEQ ID NO: 625031 - DNA, 25 bp, Homo sapien
agttcaaccagaaacgtgccggcca

SEQ ID NO: 625032 - DNA, 25 bp, Homo sapien
caggctggcctatcacattctgtgc

SEQ ID NO: 625033 - DNA, 25 bp, Homo sapien
tcccctcaagggcacacgagattgt

SEQ ID NO: 625034 - DNA, 25 bp, Homo sapien
tcaggctcaacggaagtgaccgtcc

SEQ ID NO: 625035 - DNA, 25 bp, Homo sapien
tgaccgtcccacagttatgcagcac

SEQ ID NO: 625036 - DNA, 25 bp, Homo sapien
gaatcagggaactctagatgcgtct

SEQ ID NO: 625037 - DNA, 25 bp, Homo sapien
ttcacagcgctcacatcaatttgcc

SEQ ID NO: 625038 - DNA, 25 bp, Homo sapien
agcctgcttgatcacgtcgatcttg

SEQ ID NO: 625039 - DNA, 25 bp, Homo sapien
gatcgctcggcacatagtcagcctg

SEQ ID NO: 625040 - DNA, 25 bp, Homo sapien
tgatcgctcggcacatagtcagcct

SEQ ID NO: 625041 - DNA, 25 bp, Homo sapien
tgatcacgtcgatcttgtccaggaa

SEQ ID NO: 625042 - DNA, 25 bp, Homo sapien
agtttggaaagagggctcagagtcc

SEQ ID NO: 625043 - DNA, 25 bp, Homo sapien
taattgccaatctaaagcaaaggtc

SEQ ID NO: 625044 - DNA, 25 bp, Homo sapien
caatctaaagcaaaggtctggagta

SEQ ID NO: 625045 - DNA, 25 bp, Homo sapien
acagtaataattgccaatctaaagc

SEQ ID NO: 625046 - DNA, 25 bp, Homo sapien
agaagtcaggacacggcagcgaagc

SEQ ID NO: 625047 - DNA, 25 bp, Homo sapien
aagtcaggacacggcagcgaagcag

SEQ ID NO: 625048 - DNA, 25 bp, Homo sapien
gaagtcaggacacggcagcgaagca

SEQ ID NO: 625049 - DNA, 25 bp, Homo sapien
gtgaatgtcaagaaaccatgatctc

SEQ ID NO: 625050 - DNA, 25 bp, Homo sapien
gaggaggacagctggttattccaga

SEQ ID NO: 625051 - DNA, 25 bp, Homo sapien
tgtcaagaaaccatgatctctgtta

SEQ ID NO: 625052 - DNA, 25 bp, Homo sapien
gacagctggttattccagagggact

SEQ ID NO: 625053 - DNA, 25 bp, Homo sapien
tggatccacttgcggcgttcatcgc

SEQ ID NO: 625054 - DNA, 25 bp, Homo sapien
tcgcgctggccacccacgtcaaaca

SEQ ID NO: 625055 - DNA, 25 bp, Homo sapien
tccacttgcggcgttcatcgcgctg

SEQ ID NO: 625056 - DNA, 25 bp, Homo sapien
ttgcggcgttcatcgcgctggccac

SEQ ID NO: 625057 - DNA, 25 bp, Homo sapien
ttctttacgaacagccaagcccaca

SEQ ID NO: 625058 - DNA, 25 bp, Homo sapien
agcaaagcgttctttacgaacagcc

SEQ ID NO: 625059 - DNA, 25 bp, Homo sapien
gagcagcgaccctgatccctaacaa

SEQ ID NO: 625060 - DNA, 25 bp, Homo sapien
agcaaagccaagagcgtgagcagcg

SEQ ID NO: 625061 - DNA, 25 bp, Homo sapien
accacgaagatgatggcagtcacat

SEQ ID NO: 625062 - DNA, 25 bp, Homo sapien
caccacgaagatgatggcagtcaca

SEQ ID NO: 625063 - DNA, 25 bp, Homo sapien
ttgttccagatgctcttgaagaggt

SEQ ID NO: 625064 - DNA, 25 bp, Homo sapien
cagatgctcttgaagaggttcagag

SEQ ID NO: 625065 - DNA, 25 bp, Homo sapien
tgctcttgaagaggttcagagcctc

SEQ ID NO: 625066 - DNA, 25 bp, Homo sapien
ttccagatgctcttgaagaggttca

SEQ ID NO: 625067 - DNA, 25 bp, Homo sapien
cagcaaggactttctcagcgagcag

SEQ ID NO: 625068 - DNA, 25 bp, Homo sapien
tctggaaagtagtcctcaatcttcg

SEQ ID NO: 625069 - DNA, 25 bp, Homo sapien
catcctcaggagtagtgtagcgagc

SEQ ID NO: 625070 - DNA, 25 bp, Homo sapien
cagcgagcagatcttgcttgttgag

SEQ ID NO: 625071 - DNA, 25 bp, Homo sapien
agtgggagtgcgtttttcttgcttc

SEQ ID NO: 625072 - DNA, 25 bp, Homo sapien
tcagcctgaccgtttgaaaaagaac

SEQ ID NO: 625073 - DNA, 25 bp, Homo sapien
tagatcctttatggtttggtggtgg

SEQ ID NO: 625074 - DNA, 25 bp, Homo sapien
gaaaaagaaccaccgcaatgaacag

SEQ ID NO: 625075 - DNA, 25 bp, Homo sapien
tggcccgggtcacgcgtgggtcctc

SEQ ID NO: 625076 - DNA, 25 bp, Homo sapien
ggaaactaaagacaggctcgactca

SEQ ID NO: 625077 - DNA, 25 bp, Homo sapien
gacttgtcagtgacaccctcgccag

SEQ ID NO: 625078 - DNA, 25 bp, Homo sapien
tagctgaacccctgaatttggaatt

SEQ ID NO: 625079 - DNA, 25 bp, Homo sapien
tgtgcgtgaactaaaaccatggaac

SEQ ID NO: 625080 - DNA, 25 bp, Homo sapien
tactgacgaaggtgcatgcgctgaa

SEQ ID NO: 625081 - DNA, 25 bp, Homo sapien
tcagtgtccacagcgcaggtgaaat

SEQ ID NO: 625082 - DNA, 25 bp, Homo sapien
aatgagggtagcagtagtgacgccc

SEQ ID NO: 625083 - DNA, 25 bp, Homo sapien
aacacacggcggatgttctcagtgt

SEQ ID NO: 625084 - DNA, 25 bp, Homo sapien
tcgcaaaatcactcgggggaaggga

SEQ ID NO: 625085 - DNA, 25 bp, Homo sapien
gttaatcatgccctatggtgggtga

SEQ ID NO: 625086 - DNA, 25 bp, Homo sapien
aatttggaacatctaagcaagctga

SEQ ID NO: 625087 - DNA, 25 bp, Homo sapien
tgtaggccgccttaagctttctaaa

SEQ ID NO: 625088 - DNA, 25 bp, Homo sapien
atgctgcacaacacaatatttattt

SEQ ID NO: 625089 - DNA, 25 bp, Homo sapien
aatgctgcacaacacaatatttatt

SEQ ID NO: 625090 - DNA, 25 bp, Homo sapien
cactttgttggttgatgggcattta

SEQ ID NO: 625091 - DNA, 25 bp, Homo sapien
cattttccttatccactttgttggt

SEQ ID NO: 625092 - DNA, 25 bp, Homo sapien
cagagtcctgttctgtcaactaggc

SEQ ID NO: 625093 - DNA, 25 bp, Homo sapien
tgctagaaacatgcctgtgcaagtg

SEQ ID NO: 625094 - DNA, 25 bp, Homo sapien
tctgattgacgagcttgagtactgt

SEQ ID NO: 625095 - DNA, 25 bp, Homo sapien
tgtctctcagcaagcacattgtagc

SEQ ID NO: 625096 - DNA, 25 bp, Homo sapien
gagtactgtgtattgtgtctctcag

SEQ ID NO: 625097 - DNA, 25 bp, Homo sapien
acagccctgcagctaagcggtgtca

SEQ ID NO: 625098 - DNA, 25 bp, Homo sapien
taggtactgattcttcatgagtaac

SEQ ID NO: 625099 - DNA, 25 bp, Homo sapien
tcatgagtaactgcatttttgacca

SEQ ID NO: 625100 - DNA, 25 bp, Homo sapien
cttcatgagtaactgcatttttgac

SEQ ID NO: 625101 - DNA, 25 bp, Homo sapien
ttcttcatgagtaactgcatttttg

SEQ ID NO: 625102 - DNA, 25 bp, Homo sapien
ccaaagactgcagttcagagacgtt

SEQ ID NO: 625103 - DNA, 25 bp, Homo sapien
ttcctaggtattgaaactgggacca

SEQ ID NO: 625104 - DNA, 25 bp, Homo sapien
agactgcagttcagagacgttggtg

SEQ ID NO: 625105 - DNA, 25 bp, Homo sapien
tctttcctaggtattgaaactggga

SEQ ID NO: 625106 - DNA, 25 bp, Homo sapien
agcaaagttggcagctgtagtagcg

SEQ ID NO: 625107 - DNA, 25 bp, Homo sapien
gcaaagttggcagctgtagtagcgc

SEQ ID NO: 625108 - DNA, 25 bp, Homo sapien
gagcaaagttggcagctgtagtagc

SEQ ID NO: 625109 - DNA, 25 bp, Homo sapien
ctgagcaaagttggcagctgtagta

SEQ ID NO: 625110 - DNA, 25 bp, Homo sapien
gtaagaggtacagcggatgcgggag

SEQ ID NO: 625111 - DNA, 25 bp, Homo sapien
gaggtacagcggatgcgggagcagc

SEQ ID NO: 625112 - DNA, 25 bp, Homo sapien
aagaggtacagcggatgcgggagca

SEQ ID NO: 625113 - DNA, 25 bp, Homo sapien
aagtaagaggtacagcggatgcggg

SEQ ID NO: 625114 - DNA, 25 bp, Homo sapien
cagtcgatcccggagcgatgcccgg

SEQ ID NO: 625115 - DNA, 25 bp, Homo sapien
tttcccactggattcgtgcacagcc

SEQ ID NO: 625116 - DNA, 25 bp, Homo sapien
ggcttagctccggagagaggtttcc

SEQ ID NO: 625117 - DNA, 25 bp, Homo sapien
agtgtccaggacccacgaaagtgtt

SEQ ID NO: 625118 - DNA, 25 bp, Homo sapien
cctcccgcgagcgagcgcggcgcat

SEQ ID NO: 625119 - DNA, 25 bp, Homo sapien
agcgagcgcggcgcatgcgcgaggc

SEQ ID NO: 625120 - DNA, 25 bp, Homo sapien
cgcgagcgagcgcggcgcatgcgcg

SEQ ID NO: 625121 - DNA, 25 bp, Homo sapien
cgcatgcgcgaggcggggacgggcg

SEQ ID NO: 625122 - DNA, 25 bp, Homo sapien
tggcgcccggcacggcccccgccat

SEQ ID NO: 625123 - DNA, 25 bp, Homo sapien
gatggcgcccggcacggcccccgcc

SEQ ID NO: 625124 - DNA, 25 bp, Homo sapien
atggcgcccggcacggcccccgcca

SEQ ID NO: 625125 - DNA, 25 bp, Homo sapien
ctcgtcgccccactcggccgcgctc

SEQ ID NO: 625126 - DNA, 25 bp, Homo sapien
ggccgcgctcccgtagtagtcctcg

SEQ ID NO: 625127 - DNA, 25 bp, Homo sapien
ccgccgtcagcctcgtcgccccact

SEQ ID NO: 625128 - DNA, 25 bp, Homo sapien
cgctcccgtagtagtcctcgtccat

SEQ ID NO: 625129 - DNA, 25 bp, Homo sapien
aggcattcttgctgaacctccgcat

SEQ ID NO: 625130 - DNA, 25 bp, Homo sapien
gcattcttgctgaacctccgcatca

SEQ ID NO: 625131 - DNA, 25 bp, Homo sapien
ccatgatataatcccgggtggaaaa

SEQ ID NO: 625132 - DNA, 25 bp, Homo sapien
ggttccatgatataatcccgggtgg

SEQ ID NO: 625133 - DNA, 25 bp, Homo sapien
gcctttagttcagttcgcgttactc

SEQ ID NO: 625134 - DNA, 25 bp, Homo sapien
ttgctttacatagcaccttctgggt

SEQ ID NO: 625135 - DNA, 25 bp, Homo sapien
gcaattacacccgaatgaatggaat

SEQ ID NO: 625136 - DNA, 25 bp, Homo sapien
agcagccagggcaacgtaaggagcc

SEQ ID NO: 625137 - DNA, 25 bp, Homo sapien
cagataagagctggataacattctc

SEQ ID NO: 625138 - DNA, 25 bp, Homo sapien
agcggtgtagttttcagataagagc

SEQ ID NO: 625139 - DNA, 25 bp, Homo sapien
tcagataagagctggataacattct

SEQ ID NO: 625140 - DNA, 25 bp, Homo sapien
tgggccacagcggtgtagttttcag

SEQ ID NO: 625141 - DNA, 25 bp, Homo sapien
gaatgagccactcggccagcaggtt

SEQ ID NO: 625142 - DNA, 25 bp, Homo sapien
tgaatgagccactcggccagcaggt

SEQ ID NO: 625143 - DNA, 25 bp, Homo sapien
tgagccactcggccagcaggttcac

SEQ ID NO: 625144 - DNA, 25 bp, Homo sapien
ctgtctgaatgagccactcggccag

SEQ ID NO: 625145 - DNA, 25 bp, Homo sapien
taaaagccataatcacagccagtcc

SEQ ID NO: 625146 - DNA, 25 bp, Homo sapien
ccggctccgtggatttacagtaaga

SEQ ID NO: 625147 - DNA, 25 bp, Homo sapien
aatgagaatcacgtttgcaggctac

SEQ ID NO: 625148 - DNA, 25 bp, Homo sapien
tctaatcaccgggacagcagtgtgt

SEQ ID NO: 625149 - DNA, 25 bp, Homo sapien
tttgcgggggtcaaaatgtttgatc

SEQ ID NO: 625150 - DNA, 25 bp, Homo sapien
cacagtttcctgaacctgcactggc

SEQ ID NO: 625151 - DNA, 25 bp, Homo sapien
ttgcgggggtcaaaatgtttgatca

SEQ ID NO: 625152 - DNA, 25 bp, Homo sapien
gctttgcgggggtcaaaatgtttga

SEQ ID NO: 625153 - DNA, 25 bp, Homo sapien
ccacgtggtatgtgcaatcatctgt

SEQ ID NO: 625154 - DNA, 25 bp, Homo sapien
tggtatgtgcaatcatctgttccag

SEQ ID NO: 625155 - DNA, 25 bp, Homo sapien
cgtggtatgtgcaatcatctgttcc

SEQ ID NO: 625156 - DNA, 25 bp, Homo sapien
tgtgcaatcatctgttccagccacg

SEQ ID NO: 625157 - DNA, 25 bp, Homo sapien
ggatgggcttcagccagtttataaa

SEQ ID NO: 625158 - DNA, 25 bp, Homo sapien
cagcatcaaacagtctggatgggct

SEQ ID NO: 625159 - DNA, 25 bp, Homo sapien
tggatgggcttcagccagtttataa

SEQ ID NO: 625160 - DNA, 25 bp, Homo sapien
ttcagcatcaaacagtctggatggg

SEQ ID NO: 625161 - DNA, 25 bp, Homo sapien
tccttaactctagaactcttcctac

SEQ ID NO: 625162 - DNA, 25 bp, Homo sapien
tcaaaggaaacagaccaacaaccaa

SEQ ID NO: 625163 - DNA, 25 bp, Homo sapien
ccaacaaccaaaaataaacattcat

SEQ ID NO: 625164 - DNA, 25 bp, Homo sapien
aaacattcataaacacttttctcct

SEQ ID NO: 625165 - DNA, 25 bp, Homo sapien
gagaattcttgtatccctgctaaat

SEQ ID NO: 625166 - DNA, 25 bp, Homo sapien
cctgctatcacctaggtgtgtgccc

SEQ ID NO: 625167 - DNA, 25 bp, Homo sapien
tccacgggaagctggcttgtcagtg

SEQ ID NO: 625168 - DNA, 25 bp, Homo sapien
ggaagatcaagcaggcacgcctaaa

SEQ ID NO: 625169 - DNA, 25 bp, Homo sapien
taaaattgtagctagagaggtccgg

SEQ ID NO: 625170 - DNA, 25 bp, Homo sapien
ggagcactctcgagaacacttctag

SEQ ID NO: 625171 - DNA, 25 bp, Homo sapien
tagctagagaggtccggagcactct

SEQ ID NO: 625172 - DNA, 25 bp, Homo sapien
catgctgtggacacactggtgatct

SEQ ID NO: 625173 - DNA, 25 bp, Homo sapien
tggaaggtgccctcagaaatggaga

SEQ ID NO: 625174 - DNA, 25 bp, Homo sapien
aaggagcatctcatgcttgaaaacc

SEQ ID NO: 625175 - DNA, 25 bp, Homo sapien
cagcctccttctaatctgaggttca

SEQ ID NO: 625176 - DNA, 25 bp, Homo sapien
tactactgtagcacagacgggcgga

SEQ ID NO: 625177 - DNA, 25 bp, Homo sapien
tcctgggcaaagcgctgcacttcct

SEQ ID NO: 625178 - DNA, 25 bp, Homo sapien
gctgcacttcctgggcgatcctgcg

SEQ ID NO: 625179 - DNA, 25 bp, Homo sapien
aggtacgtgtgctccccgtggcaca

SEQ ID NO: 625180 - DNA, 25 bp, Homo sapien
gccagcacggacatcatggcctggg

SEQ ID NO: 625181 - DNA, 25 bp, Homo sapien
agcaagtttacctctacgttgaaca

SEQ ID NO: 625182 - DNA, 25 bp, Homo sapien
gctttggctgtggaacacgggccat

SEQ ID NO: 625183 - DNA, 25 bp, Homo sapien
tacctctacgttgaacagaaggagc

SEQ ID NO: 625184 - DNA, 25 bp, Homo sapien
gctgagcagaaacagggcctctcac

SEQ ID NO: 625185 - DNA, 25 bp, Homo sapien
tgatgagaaaaaccatagaccccgt

SEQ ID NO: 625186 - DNA, 25 bp, Homo sapien
tagaccccgttactaacaaggcagc

SEQ ID NO: 625187 - DNA, 25 bp, Homo sapien
tgagctcattttgcgacactgtaac

SEQ ID NO: 625188 - DNA, 25 bp, Homo sapien
tcacgagtatactgactgacccaca

SEQ ID NO: 625189 - DNA, 25 bp, Homo sapien
tgtgatctgactggcgtcatgacct

SEQ ID NO: 625190 - DNA, 25 bp, Homo sapien
cccaaggctagtgtgatctgactgg

SEQ ID NO: 625191 - DNA, 25 bp, Homo sapien
tgcccaaggctagtgtgatctgact

SEQ ID NO: 625192 - DNA, 25 bp, Homo sapien
ctgtgcccaaggctagtgtgatctg

SEQ ID NO: 625193 - DNA, 25 bp, Homo sapien
gcagggttcagggctcctttggaca

SEQ ID NO: 625194 - DNA, 25 bp, Homo sapien
ggtccatgcttgtgaacatcttgaa

SEQ ID NO: 625195 - DNA, 25 bp, Homo sapien
tcttgaacaggacggtgatgtcagc

SEQ ID NO: 625196 - DNA, 25 bp, Homo sapien
aagttcaaccggaggagggtccatg

SEQ ID NO: 625197 - DNA, 25 bp, Homo sapien
acattggggattcttgagaagcaac

SEQ ID NO: 625198 - DNA, 25 bp, Homo sapien
gatttgcattcacagccttcagaca

SEQ ID NO: 625199 - DNA, 25 bp, Homo sapien
agtcaccttaccagctgacattggg

SEQ ID NO: 625200 - DNA, 25 bp, Homo sapien
atatgcccagttcgggatggcaggc

SEQ ID NO: 625201 - DNA, 25 bp, Homo sapien
tgatccgagcccctggtttaaagag

SEQ ID NO: 625202 - DNA, 25 bp, Homo sapien
tgctgcgtacgccaagatgtggatg

SEQ ID NO: 625203 - DNA, 25 bp, Homo sapien
taaagagtgactgcatgaacaggtc

SEQ ID NO: 625204 - DNA, 25 bp, Homo sapien
ttcttccaggtctcaaccacgcttg

SEQ ID NO: 625205 - DNA, 25 bp, Homo sapien
cagagcattggagacattacgcaca

SEQ ID NO: 625206 - DNA, 25 bp, Homo sapien
ggtgtcggccacttcttgcaaagca

SEQ ID NO: 625207 - DNA, 25 bp, Homo sapien
tactagggagggtcaagatttcttg

SEQ ID NO: 625208 - DNA, 25 bp, Homo sapien
gaaaacacatgcctgatactaggga

SEQ ID NO: 625209 - DNA, 25 bp, Homo sapien
gttctcgttgcaacacaaattgtga

SEQ ID NO: 625210 - DNA, 25 bp, Homo sapien
gcttttgacgttgacttcagctcat

SEQ ID NO: 625211 - DNA, 25 bp, Homo sapien
tgaacggtttcgacagcttttgacg

SEQ ID NO: 625212 - DNA, 25 bp, Homo sapien
tgccactagttcagaggcccctttg

SEQ ID NO: 625213 - DNA, 25 bp, Homo sapien
ctgtgcctggcgtaagctctgctta

SEQ ID NO: 625214 - DNA, 25 bp, Homo sapien
tggatcagcagccactcaacatgcg

SEQ ID NO: 625215 - DNA, 25 bp, Homo sapien
gaggacacactatttctaggacacg

SEQ ID NO: 625216 - DNA, 25 bp, Homo sapien
tcaacatgcggtgcaagaagcagag

SEQ ID NO: 625217 - DNA, 25 bp, Homo sapien
tgaaagtaccttggttctgatacag

SEQ ID NO: 625218 - DNA, 25 bp, Homo sapien
atccagcaacgccaggtggacaggg

SEQ ID NO: 625219 - DNA, 25 bp, Homo sapien
gggtatggtcagtctgcagctgaaa

SEQ ID NO: 625220 - DNA, 25 bp, Homo sapien
gttctgatacagtccaatccaccca

SEQ ID NO: 625221 - DNA, 25 bp, Homo sapien
cactgtggaagaaggtcctgacacc

SEQ ID NO: 625222 - DNA, 25 bp, Homo sapien
gagcagtgtggtcacgctcagcaca

SEQ ID NO: 625223 - DNA, 25 bp, Homo sapien
ccaacgtaaacagcatgagacagac

SEQ ID NO: 625224 - DNA, 25 bp, Homo sapien
tctgcagtcaatgaagctaggtcct

SEQ ID NO: 625225 - DNA, 25 bp, Homo sapien
ctgggggtgcaggagctggtggcag

SEQ ID NO: 625226 - DNA, 25 bp, Homo sapien
tgggggtgcaggagctggtggcagg

SEQ ID NO: 625227 - DNA, 25 bp, Homo sapien
ggtgcaggagctggtggcaggtgct

SEQ ID NO: 625228 - DNA, 25 bp, Homo sapien
gcaggagctggtggcaggtgctgat

SEQ ID NO: 625229 - DNA, 25 bp, Homo sapien
tccagctgggagtgctcagtctcaa

SEQ ID NO: 625230 - DNA, 25 bp, Homo sapien
gagtgctcagtctcaaaaagcttaa

SEQ ID NO: 625231 - DNA, 25 bp, Homo sapien
tccatcacgtccagctgggagtgct

SEQ ID NO: 625232 - DNA, 25 bp, Homo sapien
ctcaaaaagcttaacaagcagctgc

SEQ ID NO: 625233 - DNA, 25 bp, Homo sapien
tcgactcagcaggtgaaccatcctg

SEQ ID NO: 625234 - DNA, 25 bp, Homo sapien
ctcgactcagcaggtgaaccatcct

SEQ ID NO: 625235 - DNA, 25 bp, Homo sapien
tctccagacactttcggatgtaact

SEQ ID NO: 625236 - DNA, 25 bp, Homo sapien
gacactttcggatgtaactgacaac

SEQ ID NO: 625237 - DNA, 25 bp, Homo sapien
ctcagtgacaaaatagcgaatgagt

SEQ ID NO: 625238 - DNA, 25 bp, Homo sapien
gacaaaatagcgaatgagtgaaatg

SEQ ID NO: 625239 - DNA, 25 bp, Homo sapien
ttaagccaaaaagggcagtgctagt

SEQ ID NO: 625240 - DNA, 25 bp, Homo sapien
agggcagtgctagtgtaaacagtat

SEQ ID NO: 625241 - DNA, 25 bp, Homo sapien
acatgaaaccaacggtgcattgctg

SEQ ID NO: 625242 - DNA, 25 bp, Homo sapien
gaaacatgaaaccaacggtgcattg

SEQ ID NO: 625243 - DNA, 25 bp, Homo sapien
taaagtgtgtcatacagctgctgca

SEQ ID NO: 625244 - DNA, 25 bp, Homo sapien
tggtaaacgagtatctgtcattgtc

SEQ ID NO: 625245 - DNA, 25 bp, Homo sapien
gtcatcactacatcagaaagcacag

SEQ ID NO: 625246 - DNA, 25 bp, Homo sapien
gacatccgggtgaaatggccatcag

SEQ ID NO: 625247 - DNA, 25 bp, Homo sapien
cgtgggggagcacagggtgacttct

SEQ ID NO: 625248 - DNA, 25 bp, Homo sapien
tgcgtgggggagcacagggtgactt

SEQ ID NO: 625249 - DNA, 25 bp, Homo sapien
gggagcacagggtgacttcttccgc

SEQ ID NO: 625250 - DNA, 25 bp, Homo sapien
agcacagggtgacttcttccgcaca

SEQ ID NO: 625251 - DNA, 25 bp, Homo sapien
ggaggaaaagttgcacgaagtcaga

SEQ ID NO: 625252 - DNA, 25 bp, Homo sapien
aagttgcacgaagtcagaggtataa

SEQ ID NO: 625253 - DNA, 25 bp, Homo sapien
tgcacgaagtcagaggtataaggag

SEQ ID NO: 625254 - DNA, 25 bp, Homo sapien
gaaaagttgcacgaagtcagaggta

SEQ ID NO: 625255 - DNA, 25 bp, Homo sapien
tccgtcacagggtcatgctcgcctt

SEQ ID NO: 625256 - DNA, 25 bp, Homo sapien
acagggtcatgctcgccttccgttt

SEQ ID NO: 625257 - DNA, 25 bp, Homo sapien
ctataaactccgtcacagggtcatg

SEQ ID NO: 625258 - DNA, 25 bp, Homo sapien
tgctcgccttccgttttgatggtac

SEQ ID NO: 625259 - DNA, 25 bp, Homo sapien
gacattttctattgtagtaaagggc

SEQ ID NO: 625260 - DNA, 25 bp, Homo sapien
tttctattgtagtaaagggctaggc

SEQ ID NO: 625261 - DNA, 25 bp, Homo sapien
tattgtagtaaagggctaggcagtc

SEQ ID NO: 625262 - DNA, 25 bp, Homo sapien
tagtaaagggctaggcagtcggcct

SEQ ID NO: 625263 - DNA, 25 bp, Homo sapien
catgatgaagttagatttgcagtga

SEQ ID NO: 625264 - DNA, 25 bp, Homo sapien
ttagttcaccatgatgaagttagat

SEQ ID NO: 625265 - DNA, 25 bp, Homo sapien
caccatgatgaagttagatttgcag

SEQ ID NO: 625266 - DNA, 25 bp, Homo sapien
agttcaccatgatgaagttagattt

SEQ ID NO: 625267 - DNA, 25 bp, Homo sapien
ttccacaacgggttctggaatgttc

SEQ ID NO: 625268 - DNA, 25 bp, Homo sapien
ctcccagcggtgcccattttcaaga

SEQ ID NO: 625269 - DNA, 25 bp, Homo sapien
gacgctgcccgagcctcttaaaaca

SEQ ID NO: 625270 - DNA, 25 bp, Homo sapien
cacaacgggttctggaatgttctgc

SEQ ID NO: 625271 - DNA, 25 bp, Homo sapien
tttcctttgtaaagaagtcatccac

SEQ ID NO: 625272 - DNA, 25 bp, Homo sapien
ttttcctttgtaaagaagtcatcca

SEQ ID NO: 625273 - DNA, 25 bp, Homo sapien
cattttcctttgtaaagaagtcatc

SEQ ID NO: 625274 - DNA, 25 bp, Homo sapien
cagagaagggactgtttgtaagggc

SEQ ID NO: 625275 - DNA, 25 bp, Homo sapien
agaagggactgtttgtaagggcagt

SEQ ID NO: 625276 - DNA, 25 bp, Homo sapien
ggactgtttgtaagggcagtttctc

SEQ ID NO: 625277 - DNA, 25 bp, Homo sapien
gggagcagtattggattgacagcag

SEQ ID NO: 625278 - DNA, 25 bp, Homo sapien
agcggcccgcggctgacggccagat

SEQ ID NO: 625279 - DNA, 25 bp, Homo sapien
ctgacggccagatctgtcctgaggg

SEQ ID NO: 625280 - DNA, 25 bp, Homo sapien
gcggctgacggccagatctgtcctg

SEQ ID NO: 625281 - DNA, 25 bp, Homo sapien
gcccgcggctgacggccagatctgt

SEQ ID NO: 625282 - DNA, 25 bp, Homo sapien
gaggctgcccgtgccttattcgcac

SEQ ID NO: 625283 - DNA, 25 bp, Homo sapien
tgaggctgcccgtgccttattcgca

SEQ ID NO: 625284 - DNA, 25 bp, Homo sapien
tgccttattcgcacacaaaaacaat

SEQ ID NO: 625285 - DNA, 25 bp, Homo sapien
tgcccgtgccttattcgcacacaaa

SEQ ID NO: 625286 - DNA, 25 bp, Homo sapien
tgcgacacaggaaacgatgggacct

SEQ ID NO: 625287 - DNA, 25 bp, Homo sapien
tacaaccttgccatcgaggagcact

SEQ ID NO: 625288 - DNA, 25 bp, Homo sapien
taaggccatgtcactagaagcgcag

SEQ ID NO: 625289 - DNA, 25 bp, Homo sapien
tcaatattggatggcgaggacagcg

SEQ ID NO: 625290 - DNA, 25 bp, Homo sapien
tccggaattcatggggtgaaccatg

SEQ ID NO: 625291 - DNA, 25 bp, Homo sapien
gtactggattgtccggaattcatgg

SEQ ID NO: 625292 - DNA, 25 bp, Homo sapien
tgagtactggattgtccggaattca

SEQ ID NO: 625293 - DNA, 25 bp, Homo sapien
tgtccggaattcatggggtgaacca

SEQ ID NO: 625294 - DNA, 25 bp, Homo sapien
ggtaatgacctgtccgtgtgggact

SEQ ID NO: 625295 - DNA, 25 bp, Homo sapien
ctgcggtaacgctggctcctgtgaa

SEQ ID NO: 625296 - DNA, 25 bp, Homo sapien
gcatccctgacgagacctgcaacaa

SEQ ID NO: 625297 - DNA, 25 bp, Homo sapien
cctgtccgtgcagaacgtcatcgac

SEQ ID NO: 625298 - DNA, 25 bp, Homo sapien
caggcaggactaggactgaatccca

SEQ ID NO: 625299 - DNA, 25 bp, Homo sapien
tctgctgaggtgacccaagctgggt

SEQ ID NO: 625300 - DNA, 25 bp, Homo sapien
gctacagcccatggcctaacctggt

SEQ ID NO: 625301 - DNA, 25 bp, Homo sapien
aatgcaaaatcactgagtccccagg

SEQ ID NO: 625302 - DNA, 25 bp, Homo sapien
cttggaaggtcagatccagccgctt

SEQ ID NO: 625303 - DNA, 25 bp, Homo sapien
gggatgatctcttctcagcacatac

SEQ ID NO: 625304 - DNA, 25 bp, Homo sapien
tgcgtcgccaacaggccttggaagg

SEQ ID NO: 625305 - DNA, 25 bp, Homo sapien
tgtggatggtgtcaactatgccagc

SEQ ID NO: 625306 - DNA, 25 bp, Homo sapien
cagtttctctgccgccgccaccgtc

SEQ ID NO: 625307 - DNA, 25 bp, Homo sapien
gtttctctgccgccgccaccgtctc

SEQ ID NO: 625308 - DNA, 25 bp, Homo sapien
tctctgccgccgccaccgtctccca

SEQ ID NO: 625309 - DNA, 25 bp, Homo sapien
ctgccgccgccaccgtctcccacat

SEQ ID NO: 625310 - DNA, 25 bp, Homo sapien
cctgtgcaggacataggcgaacact

SEQ ID NO: 625311 - DNA, 25 bp, Homo sapien
atgccggcacgaccccaaggtctgt

SEQ ID NO: 625312 - DNA, 25 bp, Homo sapien
ctgccttgccctcggactggtagaa

SEQ ID NO: 625313 - DNA, 25 bp, Homo sapien
gattgccaccttagtgccagcagtg

SEQ ID NO: 625314 - DNA, 25 bp, Homo sapien
cagctctcttgtccttgtttctgaa

SEQ ID NO: 625315 - DNA, 25 bp, Homo sapien
gctctcttgtccttgtttctgaagg

SEQ ID NO: 625316 - DNA, 25 bp, Homo sapien
tcagctctcttgtccttgtttctga

SEQ ID NO: 625317 - DNA, 25 bp, Homo sapien
ctcttgtccttgtttctgaaggtac

SEQ ID NO: 625318 - DNA, 25 bp, Homo sapien
gacatcggggcctgtctcaatttaa

SEQ ID NO: 625319 - DNA, 25 bp, Homo sapien
cagacttgacatggccgtggacatc

SEQ ID NO: 625320 - DNA, 25 bp, Homo sapien
cgtggacatcggggcctgtctcaat

SEQ ID NO: 625321 - DNA, 25 bp, Homo sapien
tggacatcggggcctgtctcaattt

SEQ ID NO: 625322 - DNA, 25 bp, Homo sapien
tgaaaggagcccctgttggccacaa

SEQ ID NO: 625323 - DNA, 25 bp, Homo sapien
ggtgtgaccggtgggcagccgtggc

SEQ ID NO: 625324 - DNA, 25 bp, Homo sapien
gaaggtgtgaccggtgggcagccgt

SEQ ID NO: 625325 - DNA, 25 bp, Homo sapien
cccctgttggccacaaaccgccttg

SEQ ID NO: 625326 - DNA, 25 bp, Homo sapien
agatcaaagacagctccatgatctt

SEQ ID NO: 625327 - DNA, 25 bp, Homo sapien
cgaagatcaaagacagctccatgat

SEQ ID NO: 625328 - DNA, 25 bp, Homo sapien
gaagatcaaagacagctccatgatc

SEQ ID NO: 625329 - DNA, 25 bp, Homo sapien
tccctcatcagagacacttcctctc

SEQ ID NO: 625330 - DNA, 25 bp, Homo sapien
ctccatatccttgcccaggagggtg

SEQ ID NO: 625331 - DNA, 25 bp, Homo sapien
agggcatccaggccaaacaccagct

SEQ ID NO: 625332 - DNA, 25 bp, Homo sapien
ctccaaccaggcaagggcatccagg

SEQ ID NO: 625333 - DNA, 25 bp, Homo sapien
cagctccatatccttgcccaggagg

SEQ ID NO: 625334 - DNA, 25 bp, Homo sapien
tgaccaagggtgtgtccaccccaga

SEQ ID NO: 625335 - DNA, 25 bp, Homo sapien
gaatccagagcttcggttcactggt

SEQ ID NO: 625336 - DNA, 25 bp, Homo sapien
ggtgtgagcccaacacaactgtggt

SEQ ID NO: 625337 - DNA, 25 bp, Homo sapien
ttcacggaatcctcagactctcaga

SEQ ID NO: 625338 - DNA, 25 bp, Homo sapien
cttggctccgatctggttgccacac

SEQ ID NO: 625339 - DNA, 25 bp, Homo sapien
tggctccgatctggttgccacactg

SEQ ID NO: 625340 - DNA, 25 bp, Homo sapien
tccgatctggttgccacactggcca

SEQ ID NO: 625341 - DNA, 25 bp, Homo sapien
cgatctggttgccacactggccaat

SEQ ID NO: 625342 - DNA, 25 bp, Homo sapien
gcttcgttgtagtacacgctgattc

SEQ ID NO: 625343 - DNA, 25 bp, Homo sapien
gtcgctcccagccaagtcgatcccg

SEQ ID NO: 625344 - DNA, 25 bp, Homo sapien
cttcgttgtagtacacgctgattct

SEQ ID NO: 625345 - DNA, 25 bp, Homo sapien
aagtcgatcccgtgttcctcaccaa

SEQ ID NO: 625346 - DNA, 25 bp, Homo sapien
taatttgctagatcgaatgctgtcc

SEQ ID NO: 625347 - DNA, 25 bp, Homo sapien
catggacaaaactgtcgggttgaaa

SEQ ID NO: 625348 - DNA, 25 bp, Homo sapien
tgtccatcgtcccaggttctaggtc

SEQ ID NO: 625349 - DNA, 25 bp, Homo sapien
tctaggtccaccaagactgctcggg

SEQ ID NO: 625350 - DNA, 25 bp, Homo sapien
caccagtaaagcatccccccctcct

SEQ ID NO: 625351 - DNA, 25 bp, Homo sapien
agaagggcaccagtaaagcatcccc

SEQ ID NO: 625352 - DNA, 25 bp, Homo sapien
aaaggtgaaaagagaagggcaccag

SEQ ID NO: 625353 - DNA, 25 bp, Homo sapien
gagaagggcaccagtaaagcatccc

SEQ ID NO: 625354 - DNA, 25 bp, Homo sapien
tctaggacattctcgatcagctcgg

SEQ ID NO: 625355 - DNA, 25 bp, Homo sapien
tcagctggtggatagacagaaccgc

SEQ ID NO: 625356 - DNA, 25 bp, Homo sapien
acaggcagccatggtattgcgggca

SEQ ID NO: 625357 - DNA, 25 bp, Homo sapien
ggaattcatgatccggtccgggtac

SEQ ID NO: 625358 - DNA, 25 bp, Homo sapien
agaactgctttggcatcttgaaatt

SEQ ID NO: 625359 - DNA, 25 bp, Homo sapien
aactgctttggcatcttgaaattgt

SEQ ID NO: 625360 - DNA, 25 bp, Homo sapien
gaactgctttggcatcttgaaattg

SEQ ID NO: 625361 - DNA, 25 bp, Homo sapien
aactgttctgtaagcgactccgcgg

SEQ ID NO: 625362 - DNA, 25 bp, Homo sapien
tatttactgcattgagggtcggagc

SEQ ID NO: 625363 - DNA, 25 bp, Homo sapien
tcagtccctgtgtcgaagctaatgg

SEQ ID NO: 625364 - DNA, 25 bp, Homo sapien
taccaagtgaggattccagggtgcc

SEQ ID NO: 625365 - DNA, 25 bp, Homo sapien
atttatttagtctgaaataaagcaa

SEQ ID NO: 625366 - DNA, 25 bp, Homo sapien
gtctgaaataaagcaattttgccat

SEQ ID NO: 625367 - DNA, 25 bp, Homo sapien
tagtctgaaataaagcaattttgcc

SEQ ID NO: 625368 - DNA, 25 bp, Homo sapien
gaatttatttagtctgaaataaagc

SEQ ID NO: 625369 - DNA, 25 bp, Homo sapien
ttctgaaaaaggtgtaatgccctaa

SEQ ID NO: 625370 - DNA, 25 bp, Homo sapien
tttcagctaaataaaacatcgctaa

SEQ ID NO: 625371 - DNA, 25 bp, Homo sapien
taaatgcacaacaagcaaatgaatt

SEQ ID NO: 625372 - DNA, 25 bp, Homo sapien
aaaactgacctattgataaaactat

SEQ ID NO: 625373 - DNA, 25 bp, Homo sapien
gcctgaaactaaccactgagtgaat

SEQ ID NO: 625374 - DNA, 25 bp, Homo sapien
tatttgggatgtcaagagggcagct

SEQ ID NO: 625375 - DNA, 25 bp, Homo sapien
tgctaaggcatgatatgtcaggtta

SEQ ID NO: 625376 - DNA, 25 bp, Homo sapien
cttgctctgaggcataaatcccagg

SEQ ID NO: 625377 - DNA, 25 bp, Homo sapien
taacatgactccaacaaaagtatgg

SEQ ID NO: 625378 - DNA, 25 bp, Homo sapien
cagcttgcacaagggagctcactta

SEQ ID NO: 625379 - DNA, 25 bp, Homo sapien
agagtactgtattgatttgcccaag

SEQ ID NO: 625380 - DNA, 25 bp, Homo sapien
cattggaactccacctgactttgga

SEQ ID NO: 625381 - DNA, 25 bp, Homo sapien
tactttggcgtggtctttgaatgtc

SEQ ID NO: 625382 - DNA, 25 bp, Homo sapien
ttggaccggtcagtgagccatagcc

SEQ ID NO: 625383 - DNA, 25 bp, Homo sapien
aaggtgaagaagttggaccggtcag

SEQ ID NO: 625384 - DNA, 25 bp, Homo sapien
caggtcctcctgattctactttggc

SEQ ID NO: 625385 - DNA, 25 bp, Homo sapien
cttcgaatgtgaatttcgggtgaac

SEQ ID NO: 625386 - DNA, 25 bp, Homo sapien
cgggtgaactctgaccaccaggatg

SEQ ID NO: 625387 - DNA, 25 bp, Homo sapien
aactcgttcatctacgcagcagagc

SEQ ID NO: 625388 - DNA, 25 bp, Homo sapien
tttcacaactcgttcatctacgcag

SEQ ID NO: 625389 - DNA, 25 bp, Homo sapien
gcgctacccggacatctctcagggt

SEQ ID NO: 625390 - DNA, 25 bp, Homo sapien
gagcacgtctttgagtaagtttggg

SEQ ID NO: 625391 - DNA, 25 bp, Homo sapien
gcgcgggtcggctccgtggagggca

SEQ ID NO: 625392 - DNA, 25 bp, Homo sapien
tgtgcctcgttgtcccctggcgcta

SEQ ID NO: 625393 - DNA, 25 bp, Homo sapien
gcctggcagtgtccggcgtaaagct

SEQ ID NO: 625394 - DNA, 25 bp, Homo sapien
tcattctgccatcacgtagcatcca

SEQ ID NO: 625395 - DNA, 25 bp, Homo sapien
tgcctgtctccggtctctggagagg

SEQ ID NO: 625396 - DNA, 25 bp, Homo sapien
cccacacggacgtgggcctggcagt

SEQ ID NO: 625397 - DNA, 25 bp, Homo sapien
ctgtattgtaataggaaattgaaat

SEQ ID NO: 625398 - DNA, 25 bp, Homo sapien
tgaagtcttgctgctaaaatgtcca

SEQ ID NO: 625399 - DNA, 25 bp, Homo sapien
cataaaggtgttataagttagtggg

SEQ ID NO: 625400 - DNA, 25 bp, Homo sapien
gaggatctgacttttcataaaggtg

SEQ ID NO: 625401 - DNA, 25 bp, Homo sapien
tgctggagaactctagggctttcca

SEQ ID NO: 625402 - DNA, 25 bp, Homo sapien
aagtcaagaggcctgccaagagctg

SEQ ID NO: 625403 - DNA, 25 bp, Homo sapien
agctgtgcatggaaggacaggatca

SEQ ID NO: 625404 - DNA, 25 bp, Homo sapien
tgtgcatggaaggacaggatcacag

SEQ ID NO: 625405 - DNA, 25 bp, Homo sapien
gtgcgcagctccttggagcatcctg

SEQ ID NO: 625406 - DNA, 25 bp, Homo sapien
ggtgtggccagtgcgcagctccttg

SEQ ID NO: 625407 - DNA, 25 bp, Homo sapien
cagtgcgcagctccttggagcatcc

SEQ ID NO: 625408 - DNA, 25 bp, Homo sapien
gccagtgcgcagctccttggagcat

SEQ ID NO: 625409 - DNA, 25 bp, Homo sapien
ggcccctgtaataggccttgcagag

SEQ ID NO: 625410 - DNA, 25 bp, Homo sapien
cagatcgttaagtggcccctgtaat

SEQ ID NO: 625411 - DNA, 25 bp, Homo sapien
agatcgttaagtggcccctgtaata

SEQ ID NO: 625412 - DNA, 25 bp, Homo sapien
aataggccttgcagaggggagtagt

SEQ ID NO: 625413 - DNA, 25 bp, Homo sapien
ccagtttgaggacagcaagtttttc

SEQ ID NO: 625414 - DNA, 25 bp, Homo sapien
aatccaatgatggatccagtccagt

SEQ ID NO: 625415 - DNA, 25 bp, Homo sapien
gcaagtttttctctatgactgttgg

SEQ ID NO: 625416 - DNA, 25 bp, Homo sapien
atccagtccagtttgaggacagcaa

SEQ ID NO: 625417 - DNA, 25 bp, Homo sapien
ataggatgcacagggaaaaacccag

SEQ ID NO: 625418 - DNA, 25 bp, Homo sapien
gcacttctgatcatcataggatgca

SEQ ID NO: 625419 - DNA, 25 bp, Homo sapien
cttctgatcatcataggatgcacag

SEQ ID NO: 625420 - DNA, 25 bp, Homo sapien
tcatcataggatgcacagggaaaaa

SEQ ID NO: 625421 - DNA, 25 bp, Homo sapien
gaagctaagaggacttcaggtgccc

SEQ ID NO: 625422 - DNA, 25 bp, Homo sapien
ctgagaagctaagaggacttcaggt

SEQ ID NO: 625423 - DNA, 25 bp, Homo sapien
tcctgtagcctctgtatctgtagcc

SEQ ID NO: 625424 - DNA, 25 bp, Homo sapien
ctaagaggacttcaggtgcccattt

SEQ ID NO: 625425 - DNA, 25 bp, Homo sapien
aacaacggctgtggcctccctttgg

SEQ ID NO: 625426 - DNA, 25 bp, Homo sapien
ctgaacaacggctgtggcctccctt

SEQ ID NO: 625427 - DNA, 25 bp, Homo sapien
catcctgaacaacggctgtggcctc

SEQ ID NO: 625428 - DNA, 25 bp, Homo sapien
aacatcctgaacaacggctgtggcc

SEQ ID NO: 625429 - DNA, 25 bp, Homo sapien
ctgaatttgttagaaccactgctgc

SEQ ID NO: 625430 - DNA, 25 bp, Homo sapien
tcaggctgaatttgttagaaccact

SEQ ID NO: 625431 - DNA, 25 bp, Homo sapien
aggctgaatttgttagaaccactgc

SEQ ID NO: 625432 - DNA, 25 bp, Homo sapien
tgaatttgttagaaccactgctgcc

SEQ ID NO: 625433 - DNA, 25 bp, Homo sapien
tacagaaagagtttacgaggtcagc

SEQ ID NO: 625434 - DNA, 25 bp, Homo sapien
taagggactcgatgctgttcagacc

SEQ ID NO: 625435 - DNA, 25 bp, Homo sapien
tcagctggtttgcagaatgtcacac

SEQ ID NO: 625436 - DNA, 25 bp, Homo sapien
cacattagactgactgcgagcagcc

SEQ ID NO: 625437 - DNA, 25 bp, Homo sapien
gagactccacagaaacaaaggcttg

SEQ ID NO: 625438 - DNA, 25 bp, Homo sapien
catgcacagagactccacagaaaca

SEQ ID NO: 625439 - DNA, 25 bp, Homo sapien
ggccatgcacagagactccacagaa

SEQ ID NO: 625440 - DNA, 25 bp, Homo sapien
caggccatgcacagagactccacag

SEQ ID NO: 625441 - DNA, 25 bp, Homo sapien
gtgacttgggtactgatgaccacaa

SEQ ID NO: 625442 - DNA, 25 bp, Homo sapien
tgagctgacacacatgaaggctatc

SEQ ID NO: 625443 - DNA, 25 bp, Homo sapien
cctggctttagtgcgggagctgact

SEQ ID NO: 625444 - DNA, 25 bp, Homo sapien
gaagtggtcccaagacccaagatgg

SEQ ID NO: 625445 - DNA, 25 bp, Homo sapien
tccacgagcactgattatacggcat

SEQ ID NO: 625446 - DNA, 25 bp, Homo sapien
gagggctccattgtccaatctcgga

SEQ ID NO: 625447 - DNA, 25 bp, Homo sapien
caatctcggattcttttccagtgca

SEQ ID NO: 625448 - DNA, 25 bp, Homo sapien
gtaattcacctgtgtcatggcctga

SEQ ID NO: 625449 - DNA, 25 bp, Homo sapien
gatggaggaccatttcatagggccc

SEQ ID NO: 625450 - DNA, 25 bp, Homo sapien
tcaagtcaaaggcaggacggcacct

SEQ ID NO: 625451 - DNA, 25 bp, Homo sapien
gaaaaccggtggctccgatgaggca

SEQ ID NO: 625452 - DNA, 25 bp, Homo sapien
catagggccccaaaagtgtgagtca

SEQ ID NO: 625453 - DNA, 25 bp, Homo sapien
gccgctctgttctaacccatcttca

SEQ ID NO: 625454 - DNA, 25 bp, Homo sapien
aacatcagaaatgtagcagtggtga

SEQ ID NO: 625455 - DNA, 25 bp, Homo sapien
agaaatgtagcagtggtgatgcttc

SEQ ID NO: 625456 - DNA, 25 bp, Homo sapien
cggccgctctgttctaacccatctt

SEQ ID NO: 625457 - DNA, 25 bp, Homo sapien
tccgttgggcagactcaaggagagc

SEQ ID NO: 625458 - DNA, 25 bp, Homo sapien
gagctccttgcccacaaaatgacag

SEQ ID NO: 625459 - DNA, 25 bp, Homo sapien
tgacagcgtgtgctggcgcggagta

SEQ ID NO: 625460 - DNA, 25 bp, Homo sapien
tgtgctggcgcggagtactggccac

SEQ ID NO: 625461 - DNA, 25 bp, Homo sapien
cgggtccagttccacaggatttggc

SEQ ID NO: 625462 - DNA, 25 bp, Homo sapien
tggagcaggcttaagatcttgttga

SEQ ID NO: 625463 - DNA, 25 bp, Homo sapien
gggtctggagcaggcttaagatctt

SEQ ID NO: 625464 - DNA, 25 bp, Homo sapien
tgttctctccgggtccagttccaca

SEQ ID NO: 625465 - DNA, 25 bp, Homo sapien
cagggtgctctaggcatgtatgtgc

SEQ ID NO: 625466 - DNA, 25 bp, Homo sapien
tcagggtgctctaggcatgtatgtg

SEQ ID NO: 625467 - DNA, 25 bp, Homo sapien
atcagggtgctctaggcatgtatgt

SEQ ID NO: 625468 - DNA, 25 bp, Homo sapien
agggtgctctaggcatgtatgtgca

SEQ ID NO: 625469 - DNA, 25 bp, Homo sapien
tgggtttacaggctcccaccaccaa

SEQ ID NO: 625470 - DNA, 25 bp, Homo sapien
caagcctggctaattttttctattt

SEQ ID NO: 625471 - DNA, 25 bp, Homo sapien
tagtagagacaaggtttcaccacgt

SEQ ID NO: 625472 - DNA, 25 bp, Homo sapien
tcgcctcagcctccctgggattaca

SEQ ID NO: 625473 - DNA, 25 bp, Homo sapien
tttggttcccctaacatccaccgca

SEQ ID NO: 625474 - DNA, 25 bp, Homo sapien
ggggaggcacgcactccgctttcca

SEQ ID NO: 625475 - DNA, 25 bp, Homo sapien
cagaagaggttgatcatcaccagcc

SEQ ID NO: 625476 - DNA, 25 bp, Homo sapien
aacatccaccgcatgctctctccat

SEQ ID NO: 625477 - DNA, 25 bp, Homo sapien
tatattccaatgcaggtgctgtcat

SEQ ID NO: 625478 - DNA, 25 bp, Homo sapien
cacttccctgaacttgctggagaga

SEQ ID NO: 625479 - DNA, 25 bp, Homo sapien
agcctgtctttcgttcctgtggatc

SEQ ID NO: 625480 - DNA, 25 bp, Homo sapien
tgaatgacagagaactgcgactccc

SEQ ID NO: 625481 - DNA, 25 bp, Homo sapien
cacaatttgtgaagacccaagtcct

SEQ ID NO: 625482 - DNA, 25 bp, Homo sapien
agagcaagcctcattcggaaaactg

SEQ ID NO: 625483 - DNA, 25 bp, Homo sapien
aactgcagtctgcattgactattct

SEQ ID NO: 625484 - DNA, 25 bp, Homo sapien
tgccaagagcaagcctcattcggaa

SEQ ID NO: 625485 - DNA, 25 bp, Homo sapien
aagcctcattcggaaaactgcagtc

SEQ ID NO: 625486 - DNA, 25 bp, Homo sapien
gatgtgaagtggcacagccattctg

SEQ ID NO: 625487 - DNA, 25 bp, Homo sapien
gggtggccatttcttaacaaatcaa

SEQ ID NO: 625488 - DNA, 25 bp, Homo sapien
taaaaagaagcataccgttgacaca

SEQ ID NO: 625489 - DNA, 25 bp, Homo sapien
gatccatttcggtgtggatgtgaag

SEQ ID NO: 625490 - DNA, 25 bp, Homo sapien
atttagggactagtgtggttgtgct

SEQ ID NO: 625491 - DNA, 25 bp, Homo sapien
tgatgggatttagggactagtgtgg

SEQ ID NO: 625492 - DNA, 25 bp, Homo sapien
tagggactagtgtggttgtgctttt

SEQ ID NO: 625493 - DNA, 25 bp, Homo sapien
tgggatttagggactagtgtggttg

SEQ ID NO: 625494 - DNA, 25 bp, Homo sapien
cacatacattgatcagtggtgcgta

SEQ ID NO: 625495 - DNA, 25 bp, Homo sapien
tgagccaacactcccgagcaagttt

SEQ ID NO: 625496 - DNA, 25 bp, Homo sapien
cttaatcatgtttggtggctgaaac

SEQ ID NO: 625497 - DNA, 25 bp, Homo sapien
tctactcttcactccaactggtaaa

SEQ ID NO: 625498 - DNA, 25 bp, Homo sapien
tagaccctgtacctgcaaggctgca

SEQ ID NO: 625499 - DNA, 25 bp, Homo sapien
tcttcacctgatacacccttggtgt

SEQ ID NO: 625500 - DNA, 25 bp, Homo sapien
acccttggtgtagaccctgtacctg

SEQ ID NO: 625501 - DNA, 25 bp, Homo sapien
agtcttcacctgatacacccttggt

SEQ ID NO: 625502 - DNA, 25 bp, Homo sapien
agccctcaccctgttgccatcccca

SEQ ID NO: 625503 - DNA, 25 bp, Homo sapien
gtcacctggactgaatgccaagccc

SEQ ID NO: 625504 - DNA, 25 bp, Homo sapien
ctctttgagcgagggaagggtccgg

SEQ ID NO: 625505 - DNA, 25 bp, Homo sapien
tgccaagccctcaccctgttgccat

SEQ ID NO: 625506 - DNA, 25 bp, Homo sapien
gctggctggtccctcgcaggagggg

SEQ ID NO: 625507 - DNA, 25 bp, Homo sapien
agctggctggtccctcgcaggaggg

SEQ ID NO: 625508 - DNA, 25 bp, Homo sapien
agggtcaggtgaggtgaggcctggc

SEQ ID NO: 625509 - DNA, 25 bp, Homo sapien
acagggcccagggtcaggtgaggtg

SEQ ID NO: 625510 - DNA, 25 bp, Homo sapien
ctggcggcagaaggacagggcccag

SEQ ID NO: 625511 - DNA, 25 bp, Homo sapien
cccagggtcaggtgaggtgaggcct

SEQ ID NO: 625512 - DNA, 25 bp, Homo sapien
caggaacacagtggggggggccagg

SEQ ID NO: 625513 - DNA, 25 bp, Homo sapien
acagtggggggggccaggccctgct

SEQ ID NO: 625514 - DNA, 25 bp, Homo sapien
ttcaggaacacagtggggggggcca

SEQ ID NO: 625515 - DNA, 25 bp, Homo sapien
acacagtggggggggccaggccctg

SEQ ID NO: 625516 - DNA, 25 bp, Homo sapien
gacaggcagagtgcccacgatgttc

SEQ ID NO: 625517 - DNA, 25 bp, Homo sapien
cagggctgagtatgaagggcacgtt

SEQ ID NO: 625518 - DNA, 25 bp, Homo sapien
caccgtgtggtacagtgggatgggc

SEQ ID NO: 625519 - DNA, 25 bp, Homo sapien
atctaggctgcccgtcactagcggg

SEQ ID NO: 625520 - DNA, 25 bp, Homo sapien
gcttcaggcagtcgcgaccacagtg

SEQ ID NO: 625521 - DNA, 25 bp, Homo sapien
tgtgggaccggatgtgcttctctag

SEQ ID NO: 625522 - DNA, 25 bp, Homo sapien
gaccacagtgcggacacaggtactt

SEQ ID NO: 625523 - DNA, 25 bp, Homo sapien
acagtgcggacacaggtacttgccc

SEQ ID NO: 625524 - DNA, 25 bp, Homo sapien
ttgttgaggtgcgtctgcgtccgcc

SEQ ID NO: 625525 - DNA, 25 bp, Homo sapien
tctgggtcttaaaggcgatgccgca

SEQ ID NO: 625526 - DNA, 25 bp, Homo sapien
cctcggactctgaggacagccggga

SEQ ID NO: 625527 - DNA, 25 bp, Homo sapien
gggtctctccgaggcgccttcgtgc

SEQ ID NO: 625528 - DNA, 25 bp, Homo sapien
ggacagggagcagcttcggtcctca

SEQ ID NO: 625529 - DNA, 25 bp, Homo sapien
tcggcaaatgcggaccctggacagg

SEQ ID NO: 625530 - DNA, 25 bp, Homo sapien
ctgggagcccaggtgacgccatggg

SEQ ID NO: 625531 - DNA, 25 bp, Homo sapien
caaggagcctctctgtcggcaaatg

SEQ ID NO: 625532 - DNA, 25 bp, Homo sapien
gcttcccggcggtcggcgacttctg

SEQ ID NO: 625533 - DNA, 25 bp, Homo sapien
gcttctccgctgccgtcgcctgctg

SEQ ID NO: 625534 - DNA, 25 bp, Homo sapien
tctgctctggcaacttacgccaggg

SEQ ID NO: 625535 - DNA, 25 bp, Homo sapien
ccggcggtcggcgacttctgctctg

SEQ ID NO: 625536 - DNA, 25 bp, Homo sapien
agcgcgacaggtaccccgagtcggt

SEQ ID NO: 625537 - DNA, 25 bp, Homo sapien
caggtaccccgagtcggtgctctca

SEQ ID NO: 625538 - DNA, 25 bp, Homo sapien
tccgcgctgtcggagcgcgacaggt

SEQ ID NO: 625539 - DNA, 25 bp, Homo sapien
tcggcgctgtgctccgaaaggctgt

SEQ ID NO: 625540 - DNA, 25 bp, Homo sapien
gcaggtcgatgctgccctgtttgga

SEQ ID NO: 625541 - DNA, 25 bp, Homo sapien
tccagcgcgcggatgtcaaagtgga

SEQ ID NO: 625542 - DNA, 25 bp, Homo sapien
tccttgtaggtgtagggcgtgggca

SEQ ID NO: 625543 - DNA, 25 bp, Homo sapien
acacattccacggtggtggagagct

SEQ ID NO: 625544 - DNA, 25 bp, Homo sapien
ctgcgtcctggaccaggggtcccgg

SEQ ID NO: 625545 - DNA, 25 bp, Homo sapien
gatgcccactgggaacgtcagtcga

SEQ ID NO: 625546 - DNA, 25 bp, Homo sapien
agcagttctctttgcgtctgtgtcc

SEQ ID NO: 625547 - DNA, 25 bp, Homo sapien
agtcgagcttagtcccgagcggcag

SEQ ID NO: 625548 - DNA, 25 bp, Homo sapien
gatccttttgaacgtctcatccccg

SEQ ID NO: 625549 - DNA, 25 bp, Homo sapien
gcccctgcggatatgtcctcatgga

SEQ ID NO: 625550 - DNA, 25 bp, Homo sapien
ttccaccctgggtcggtcactgtct

SEQ ID NO: 625551 - DNA, 25 bp, Homo sapien
tccggccaaactggcctgggagcct

SEQ ID NO: 625552 - DNA, 25 bp, Homo sapien
gcttagtgggttcagtcaccaagga

SEQ ID NO: 625553 - DNA, 25 bp, Homo sapien
ttctgggatgacaaagaggcaggct

SEQ ID NO: 625554 - DNA, 25 bp, Homo sapien
cccgggatcggcatcctgcttctgg

SEQ ID NO: 625555 - DNA, 25 bp, Homo sapien
tggttgcttccagctgtgcaggtcc

SEQ ID NO: 625556 - DNA, 25 bp, Homo sapien
ttccagctgtgcaggtcctccactt

SEQ ID NO: 625557 - DNA, 25 bp, Homo sapien
cagagagcactctaggagcctgagg

SEQ ID NO: 625558 - DNA, 25 bp, Homo sapien
tgctgagatgggcaactccctggct

SEQ ID NO: 625559 - DNA, 25 bp, Homo sapien
caaatgatgcccgttcttcaggcca

SEQ ID NO: 625560 - DNA, 25 bp, Homo sapien
ggtctctgcctgaggtaacctgagg

SEQ ID NO: 625561 - DNA, 25 bp, Homo sapien
cacccctgggactgttgggtaggag

SEQ ID NO: 625562 - DNA, 25 bp, Homo sapien
cattctggctcagacacctggtgct

SEQ ID NO: 625563 - DNA, 25 bp, Homo sapien
cttccattctggctcagacacctgg

SEQ ID NO: 625564 - DNA, 25 bp, Homo sapien
gcttgctgttcccacgagacatctt

SEQ ID NO: 625565 - DNA, 25 bp, Homo sapien
tgaacacagctctgcaagaaattcc

SEQ ID NO: 625566 - DNA, 25 bp, Homo sapien
gttggtgtgcgaagtctactggctc

SEQ ID NO: 625567 - DNA, 25 bp, Homo sapien
gcttcttcttcgcacccaggttggt

SEQ ID NO: 625568 - DNA, 25 bp, Homo sapien
ttcagtccctcaagtgcgggagggt

SEQ ID NO: 625569 - DNA, 25 bp, Homo sapien
cggcccaacgagaaagcagagagtt

SEQ ID NO: 625570 - DNA, 25 bp, Homo sapien
tcaagcacagcccaatgggcaattt

SEQ ID NO: 625571 - DNA, 25 bp, Homo sapien
tggtggtacagaccagcatttagcc

SEQ ID NO: 625572 - DNA, 25 bp, Homo sapien
gcagagagttgcatggtcccctggc

SEQ ID NO: 625573 - DNA, 25 bp, Homo sapien
tggagagcacagaggtgatatcgat

SEQ ID NO: 625574 - DNA, 25 bp, Homo sapien
gagagcacagaggtgatatcgatgg

SEQ ID NO: 625575 - DNA, 25 bp, Homo sapien
gagcacagaggtgatatcgatggca

SEQ ID NO: 625576 - DNA, 25 bp, Homo sapien
agcacagaggtgatatcgatggcac

SEQ ID NO: 625577 - DNA, 25 bp, Homo sapien
gtagcgggggctaccagctctctgc

SEQ ID NO: 625578 - DNA, 25 bp, Homo sapien
gaagagagctggtggtaagctcctc

SEQ ID NO: 625579 - DNA, 25 bp, Homo sapien
gagctggtggtaagctcctccatgg

SEQ ID NO: 625580 - DNA, 25 bp, Homo sapien
accagtgaccatcagaacctcccag

SEQ ID NO: 625581 - DNA, 25 bp, Homo sapien
tgccaatgtcgttcccggtggcatc

SEQ ID NO: 625582 - DNA, 25 bp, Homo sapien
aaacagatctgccaatgtcgttccc

SEQ ID NO: 625583 - DNA, 25 bp, Homo sapien
tgtcccggggaagcaaacagatctg

SEQ ID NO: 625584 - DNA, 25 bp, Homo sapien
gacagacagacacgagatgtcccgg

SEQ ID NO: 625585 - DNA, 25 bp, Homo sapien
cttgaatctcacactgacagaccgt

SEQ ID NO: 625586 - DNA, 25 bp, Homo sapien
tgaatctcacactgacagaccgtcg

SEQ ID NO: 625587 - DNA, 25 bp, Homo sapien
tctcacactgacagaccgtcgacat

SEQ ID NO: 625588 - DNA, 25 bp, Homo sapien
aatctcacactgacagaccgtcgac

SEQ ID NO: 625589 - DNA, 25 bp, Homo sapien
atgtgctaactgtcatgcacatgtg

SEQ ID NO: 625590 - DNA, 25 bp, Homo sapien
tgtttataatgctgagcatatgatg

SEQ ID NO: 625591 - DNA, 25 bp, Homo sapien
cagtatgtgctaactgtcatgcaca

SEQ ID NO: 625592 - DNA, 25 bp, Homo sapien
tgtgtttataatgctgagcatatga

SEQ ID NO: 625593 - DNA, 25 bp, Homo sapien
accatgagcatgcaggataagctgc

SEQ ID NO: 625594 - DNA, 25 bp, Homo sapien
catgcaggataagctgcagatgagg

SEQ ID NO: 625595 - DNA, 25 bp, Homo sapien
gccaacttccatggaacacgttggg

SEQ ID NO: 625596 - DNA, 25 bp, Homo sapien
cttccatggaacacgttgggaactg

SEQ ID NO: 625597 - DNA, 25 bp, Homo sapien
tttccatgatattgcgaaaattaat

SEQ ID NO: 625598 - DNA, 25 bp, Homo sapien
aatcaatttccatgatattgcgaaa

SEQ ID NO: 625599 - DNA, 25 bp, Homo sapien
caatttccatgatattgcgaaaatt

SEQ ID NO: 625600 - DNA, 25 bp, Homo sapien
gcaatcaatttccatgatattgcga

SEQ ID NO: 625601 - DNA, 25 bp, Homo sapien
ttgaggaccggctacattgctaggc

SEQ ID NO: 625602 - DNA, 25 bp, Homo sapien
catggaggagatgacctagcagctt

SEQ ID NO: 625603 - DNA, 25 bp, Homo sapien
gcccctggatgcaaacatggaggag

SEQ ID NO: 625604 - DNA, 25 bp, Homo sapien
tgctaggtcatcaagaaggactccc

SEQ ID NO: 625605 - DNA, 25 bp, Homo sapien
ttggcaagcgaagggtccgggagtc

SEQ ID NO: 625606 - DNA, 25 bp, Homo sapien
tcaccgtgcagcgattgggagcctg

SEQ ID NO: 625607 - DNA, 25 bp, Homo sapien
ggtccgggagtcctggtcaccgtgc

SEQ ID NO: 625608 - DNA, 25 bp, Homo sapien
gagcctgcattttgcggcagaatcc

SEQ ID NO: 625609 - DNA, 25 bp, Homo sapien
cacatcaccagtgtctcctgacttt

SEQ ID NO: 625610 - DNA, 25 bp, Homo sapien
cagtgtctcctgactttggagggat

SEQ ID NO: 625611 - DNA, 25 bp, Homo sapien
cagccacatcaccagtgtctcctga

SEQ ID NO: 625612 - DNA, 25 bp, Homo sapien
agaaagatgcagccacatcaccagt

SEQ ID NO: 625613 - DNA, 25 bp, Homo sapien
gatgagatggcttgactagggcacc

SEQ ID NO: 625614 - DNA, 25 bp, Homo sapien
gacttctcagaaaggcgacatcaga

SEQ ID NO: 625615 - DNA, 25 bp, Homo sapien
gcttaatccaaagagtagccaggga

SEQ ID NO: 625616 - DNA, 25 bp, Homo sapien
ttttgaagccaaactcgggagagag

SEQ ID NO: 625617 - DNA, 25 bp, Homo sapien
cttcatccttcacccgcactgatga

SEQ ID NO: 625618 - DNA, 25 bp, Homo sapien
ctgtctttccttcatccttcacccg

SEQ ID NO: 625619 - DNA, 25 bp, Homo sapien
tccttcatccttcacccgcactgat

SEQ ID NO: 625620 - DNA, 25 bp, Homo sapien
tttccttcatccttcacccgcactg

SEQ ID NO: 625621 - DNA, 25 bp, Homo sapien
gattctgaggtggcacaagatggct

SEQ ID NO: 625622 - DNA, 25 bp, Homo sapien
gtctgcagtcaccttccttcttctc

SEQ ID NO: 625623 - DNA, 25 bp, Homo sapien
acttgtaccaagagagagggttcct

SEQ ID NO: 625624 - DNA, 25 bp, Homo sapien
cccacaacaaggaggtgattctgag

SEQ ID NO: 625625 - DNA, 25 bp, Homo sapien
cagtgctgtgagtagtacagtcacc

SEQ ID NO: 625626 - DNA, 25 bp, Homo sapien
ccagggggtagaggcacgtcattaa

SEQ ID NO: 625627 - DNA, 25 bp, Homo sapien
ccaggcaggtgtcagattgcagaga

SEQ ID NO: 625628 - DNA, 25 bp, Homo sapien
cagcaacccaaggtcaagacctttg

SEQ ID NO: 625629 - DNA, 25 bp, Homo sapien
tatggtttgggatctgttgagactg

SEQ ID NO: 625630 - DNA, 25 bp, Homo sapien
tgtatggtttgggatctgttgagac

SEQ ID NO: 625631 - DNA, 25 bp, Homo sapien
tggtttgggatctgttgagactgaa

SEQ ID NO: 625632 - DNA, 25 bp, Homo sapien
agatgtatggtttgggatctgttga

SEQ ID NO: 625633 - DNA, 25 bp, Homo sapien
agagaaatacaaacggcagccacag

SEQ ID NO: 625634 - DNA, 25 bp, Homo sapien
tgaactagctgaacttggtcctgaa

SEQ ID NO: 625635 - DNA, 25 bp, Homo sapien
gactccagtggaaccgaatctgaaa

SEQ ID NO: 625636 - DNA, 25 bp, Homo sapien
ttctttgtccagatgaaggtctccc

SEQ ID NO: 625637 - DNA, 25 bp, Homo sapien
gtcactgaactctactcgagtttgc

SEQ ID NO: 625638 - DNA, 25 bp, Homo sapien
tcatatttctataactaatcggtct

SEQ ID NO: 625639 - DNA, 25 bp, Homo sapien
tctactcgagtttgctttctcattc

SEQ ID NO: 625640 - DNA, 25 bp, Homo sapien
taatcggtcttcatcgtcgctgctg

SEQ ID NO: 625641 - DNA, 25 bp, Homo sapien
gagaaagccagttgcctcgactgtg

SEQ ID NO: 625642 - DNA, 25 bp, Homo sapien
tatttacaactccaccaaggacgtg

SEQ ID NO: 625643 - DNA, 25 bp, Homo sapien
gatagagtttagttcttccgccagc

SEQ ID NO: 625644 - DNA, 25 bp, Homo sapien
aatctaaaaggctcccgtcacgacg

SEQ ID NO: 625645 - DNA, 25 bp, Homo sapien
tcatacagggtagaaatccagcaca

SEQ ID NO: 625646 - DNA, 25 bp, Homo sapien
aatatgatcacccatagagccaggc

SEQ ID NO: 625647 - DNA, 25 bp, Homo sapien
tttaacgacaagatctagctgggtg

SEQ ID NO: 625648 - DNA, 25 bp, Homo sapien
caacggtggctcctatagggacaga

SEQ ID NO: 625649 - DNA, 25 bp, Homo sapien
tggcaatggcccacccaacacagag

SEQ ID NO: 625650 - DNA, 25 bp, Homo sapien
gaacacaggcccttgataccatgac

SEQ ID NO: 625651 - DNA, 25 bp, Homo sapien
gggcctggcaatggcccacccaaca

SEQ ID NO: 625652 - DNA, 25 bp, Homo sapien
acagagctacacagacctggagaga

SEQ ID NO: 625653 - DNA, 25 bp, Homo sapien
ggctacctgagtgctgcctggctgc

SEQ ID NO: 625654 - DNA, 25 bp, Homo sapien
ccagtgaagtggtgaagcgctgcca

SEQ ID NO: 625655 - DNA, 25 bp, Homo sapien
gtgtggcccacgttccaaagggcta

SEQ ID NO: 625656 - DNA, 25 bp, Homo sapien
caggacctgggtgatcacagttgag

SEQ ID NO: 625657 - DNA, 25 bp, Homo sapien
ggttgaaggcgaagccgtggaagac

SEQ ID NO: 625658 - DNA, 25 bp, Homo sapien
gaagccgtggaagacggaccagagc

SEQ ID NO: 625659 - DNA, 25 bp, Homo sapien
ccagtgactcatcagcaacgttggt

SEQ ID NO: 625660 - DNA, 25 bp, Homo sapien
catcagcaacgttggttggagcttc

SEQ ID NO: 625661 - DNA, 25 bp, Homo sapien
acgtaatgtgcattacaagtgttcc

SEQ ID NO: 625662 - DNA, 25 bp, Homo sapien
tgccacgtaatgtgcattacaagtg

SEQ ID NO: 625663 - DNA, 25 bp, Homo sapien
cacgtaatgtgcattacaagtgttc

SEQ ID NO: 625664 - DNA, 25 bp, Homo sapien
gccacgtaatgtgcattacaagtgt

SEQ ID NO: 625665 - DNA, 25 bp, Homo sapien
cctttgaggatggtgtatgagttat

SEQ ID NO: 625666 - DNA, 25 bp, Homo sapien
ctttgaggatggtgtatgagttatc

SEQ ID NO: 625667 - DNA, 25 bp, Homo sapien
tttgaggatggtgtatgagttatcc

SEQ ID NO: 625668 - DNA, 25 bp, Homo sapien
ttgaggatggtgtatgagttatcca

SEQ ID NO: 625669 - DNA, 25 bp, Homo sapien
cacaagctgtatccctttaaagttc

SEQ ID NO: 625670 - DNA, 25 bp, Homo sapien
gagtccctgtgtccaccaaatgcag

SEQ ID NO: 625671 - DNA, 25 bp, Homo sapien
tttttcacaagctgtatccctttaa

SEQ ID NO: 625672 - DNA, 25 bp, Homo sapien
taaagttcatatagtgatgagtccc

SEQ ID NO: 625673 - DNA, 25 bp, Homo sapien
gaaatagatcgccaaggatccagga

SEQ ID NO: 625674 - DNA, 25 bp, Homo sapien
tgagaacataaaacgccgcacagag

SEQ ID NO: 625675 - DNA, 25 bp, Homo sapien
ctagttgaggtaaggaagttcagaa

SEQ ID NO: 625676 - DNA, 25 bp, Homo sapien
ccaggatgctgagaacataaaacgc

SEQ ID NO: 625677 - DNA, 25 bp, Homo sapien
cttgtggccgcgaaagggcactggg

SEQ ID NO: 625678 - DNA, 25 bp, Homo sapien
ggaccaggaggacggccgcttgtgg

SEQ ID NO: 625679 - DNA, 25 bp, Homo sapien
gaacctagatcaggcgccggagcac

SEQ ID NO: 625680 - DNA, 25 bp, Homo sapien
tggctgcggcggtcataaactttca

SEQ ID NO: 625681 - DNA, 25 bp, Homo sapien
cggcggaggtcactgtgagcccgaa

SEQ ID NO: 625682 - DNA, 25 bp, Homo sapien
ctgcggcggaggtcactgtgagccc

SEQ ID NO: 625683 - DNA, 25 bp, Homo sapien
ctgtgagcccgaaaaggagccacag

SEQ ID NO: 625684 - DNA, 25 bp, Homo sapien
gtgagcccgaaaaggagccacagcc

SEQ ID NO: 625685 - DNA, 25 bp, Homo sapien
aaagtttccaaagctctgcgcagtt

SEQ ID NO: 625686 - DNA, 25 bp, Homo sapien
gcaagctatctgcacccgttgaaaa

SEQ ID NO: 625687 - DNA, 25 bp, Homo sapien
cactctgtgaaaagcttgcaagcta

SEQ ID NO: 625688 - DNA, 25 bp, Homo sapien
tcctaagctgagtgtgcagacccct

SEQ ID NO: 625689 - DNA, 25 bp, Homo sapien
agcatccccagactgggagcaaggc

SEQ ID NO: 625690 - DNA, 25 bp, Homo sapien
ctgggacacgccgcgcctgccagca

SEQ ID NO: 625691 - DNA, 25 bp, Homo sapien
ggcctgggacacgccgcgcctgcca

SEQ ID NO: 625692 - DNA, 25 bp, Homo sapien
gccagcatccccagactgggagcaa

SEQ ID NO: 625693 - DNA, 25 bp, Homo sapien
tcggggccacagtcccctcgccagg

SEQ ID NO: 625694 - DNA, 25 bp, Homo sapien
tgtcggggccacagtcccctcgcca

SEQ ID NO: 625695 - DNA, 25 bp, Homo sapien
tcttcacagtccccctcagatctgg

SEQ ID NO: 625696 - DNA, 25 bp, Homo sapien
gtcggggccacagtcccctcgccag

SEQ ID NO: 625697 - DNA, 25 bp, Homo sapien
ggcttccagggcttggaccctgcag

SEQ ID NO: 625698 - DNA, 25 bp, Homo sapien
ccagggcttccagggcttggaccct

SEQ ID NO: 625699 - DNA, 25 bp, Homo sapien
cttccagggcttggaccctgcagtg

SEQ ID NO: 625700 - DNA, 25 bp, Homo sapien
agggcttccagggcttggaccctgc

SEQ ID NO: 625701 - DNA, 25 bp, Homo sapien
ggtggcaatagtagacacactcctt

SEQ ID NO: 625702 - DNA, 25 bp, Homo sapien
acgtgcagcgcctggatcggtggtg

SEQ ID NO: 625703 - DNA, 25 bp, Homo sapien
ttgtaggtgaagcacgtgcagcgcc

SEQ ID NO: 625704 - DNA, 25 bp, Homo sapien
tgaagcacgtgcagcgcctggatcg

SEQ ID NO: 625705 - DNA, 25 bp, Homo sapien
tcagttcacttcattcagagggagg

SEQ ID NO: 625706 - DNA, 25 bp, Homo sapien
caggatcaaactcaggattgagttt

SEQ ID NO: 625707 - DNA, 25 bp, Homo sapien
cacttcattcagagggagggctcct

SEQ ID NO: 625708 - DNA, 25 bp, Homo sapien
ctcaggggggatgtgggtcacaccc

SEQ ID NO: 625709 - DNA, 25 bp, Homo sapien
ccttagagggatgaacagatggcag

SEQ ID NO: 625710 - DNA, 25 bp, Homo sapien
tagtcatggccaggactcaagggca

SEQ ID NO: 625711 - DNA, 25 bp, Homo sapien
tggagtcttctccacaagtcgggac

SEQ ID NO: 625712 - DNA, 25 bp, Homo sapien
ttccagagggtcacagagaggcaac

SEQ ID NO: 625713 - DNA, 25 bp, Homo sapien
tagttgcttctgactctcggcaaag

SEQ ID NO: 625714 - DNA, 25 bp, Homo sapien
gcaatttgcgctccccaagttgtgg

SEQ ID NO: 625715 - DNA, 25 bp, Homo sapien
ccaccagcgggccagtcatgttttt

SEQ ID NO: 625716 - DNA, 25 bp, Homo sapien
agttgtggggcgaaactgtccacca

SEQ ID NO: 625717 - DNA, 25 bp, Homo sapien
tatcacttacctcaaactactgagt

SEQ ID NO: 625718 - DNA, 25 bp, Homo sapien
ctgagtctctattagagacacaggc

SEQ ID NO: 625719 - DNA, 25 bp, Homo sapien
aaagtttgtacatgagggagtgcct

SEQ ID NO: 625720 - DNA, 25 bp, Homo sapien
gccctgcaagagacccatggaaatc

SEQ ID NO: 625721 - DNA, 25 bp, Homo sapien
taacctaattgtctgtgtccttgtg

SEQ ID NO: 625722 - DNA, 25 bp, Homo sapien
caatgaccgtaaagatacgctcatc

SEQ ID NO: 625723 - DNA, 25 bp, Homo sapien
gacactcttgctaattttcaggaga

SEQ ID NO: 625724 - DNA, 25 bp, Homo sapien
tgagcaagacttatgcttaccatca

SEQ ID NO: 625725 - DNA, 25 bp, Homo sapien
taaagcctttttgcgacagtgaggg

SEQ ID NO: 625726 - DNA, 25 bp, Homo sapien
agcctttttgcgacagtgagggcaa

SEQ ID NO: 625727 - DNA, 25 bp, Homo sapien
cagtgagggcaaattgggccaggaa

SEQ ID NO: 625728 - DNA, 25 bp, Homo sapien
ataaagcctttttgcgacagtgagg

SEQ ID NO: 625729 - DNA, 25 bp, Homo sapien
ctgcaggtgtggcctgaacgccctg

SEQ ID NO: 625730 - DNA, 25 bp, Homo sapien
gctgcaggtgtggcctgaacgccct

SEQ ID NO: 625731 - DNA, 25 bp, Homo sapien
tgcaggtgtggcctgaacgccctgg

SEQ ID NO: 625732 - DNA, 25 bp, Homo sapien
ggacagtccatagggcaccgtctgt

SEQ ID NO: 625733 - DNA, 25 bp, Homo sapien
tcctctgtagttggacagtccatag

SEQ ID NO: 625734 - DNA, 25 bp, Homo sapien
tcttgccccggaagcttcctctgta

SEQ ID NO: 625735 - DNA, 25 bp, Homo sapien
ttgccccggaagcttcctctgtagt

SEQ ID NO: 625736 - DNA, 25 bp, Homo sapien
caagcgcagcgcaagtgtggccgat

SEQ ID NO: 625737 - DNA, 25 bp, Homo sapien
ccagagtttgggtgcaaaagtgcag

SEQ ID NO: 625738 - DNA, 25 bp, Homo sapien
aggcaggccttgtcatatctcccca

SEQ ID NO: 625739 - DNA, 25 bp, Homo sapien
tggccgatgtgagagctgcagattc

SEQ ID NO: 625740 - DNA, 25 bp, Homo sapien
ctgttttttctgccgtccttgaatt

SEQ ID NO: 625741 - DNA, 25 bp, Homo sapien
tgttttttctgccgtccttgaatta

SEQ ID NO: 625742 - DNA, 25 bp, Homo sapien
ttgacacaggcctctgttggcacct

SEQ ID NO: 625743 - DNA, 25 bp, Homo sapien
tgacacaggcctctgttggcacctc

SEQ ID NO: 625744 - DNA, 25 bp, Homo sapien
gtagcaggtgcccaacaagtctttg

SEQ ID NO: 625745 - DNA, 25 bp, Homo sapien
gactagactagaagcgatctgccac

SEQ ID NO: 625746 - DNA, 25 bp, Homo sapien
cagtttgactgcaggaaaccctcag

SEQ ID NO: 625747 - DNA, 25 bp, Homo sapien
tattatggttgctgacagatccctc

SEQ ID NO: 625748 - DNA, 25 bp, Homo sapien
ggtatgttatgaaagtgtagctctg

SEQ ID NO: 625749 - DNA, 25 bp, Homo sapien
aaaagaaaggtatgttatgaaagtg

SEQ ID NO: 625750 - DNA, 25 bp, Homo sapien
gaaaggtatgttatgaaagtgtagc

SEQ ID NO: 625751 - DNA, 25 bp, Homo sapien
aaggtatgttatgaaagtgtagctc

SEQ ID NO: 625752 - DNA, 25 bp, Homo sapien
gcttgctttgttggtccttgacttc

SEQ ID NO: 625753 - DNA, 25 bp, Homo sapien
ttgctttgttggtccttgacttcaa

SEQ ID NO: 625754 - DNA, 25 bp, Homo sapien
tgctttgttggtccttgacttcaac

SEQ ID NO: 625755 - DNA, 25 bp, Homo sapien
cttgctttgttggtccttgacttca

SEQ ID NO: 625756 - DNA, 25 bp, Homo sapien
cttcctgaaagaggcagcgggggca

SEQ ID NO: 625757 - DNA, 25 bp, Homo sapien
ctccttcctgaaagaggcagcgggg

SEQ ID NO: 625758 - DNA, 25 bp, Homo sapien
gatggagcgagggcgagtccactgc

SEQ ID NO: 625759 - DNA, 25 bp, Homo sapien
tggagcgagggcgagtccactgccg

SEQ ID NO: 625760 - DNA, 25 bp, Homo sapien
tgtgtgagcaatgacagaagcctcc

SEQ ID NO: 625761 - DNA, 25 bp, Homo sapien
ggcacatctgggatcattttactca

SEQ ID NO: 625762 - DNA, 25 bp, Homo sapien
aactggggtcattcggatttgggca

SEQ ID NO: 625763 - DNA, 25 bp, Homo sapien
cttcttgtctataaagaggtggaaa

SEQ ID NO: 625764 - DNA, 25 bp, Homo sapien
gcaaagagttagcttggagtccact

SEQ ID NO: 625765 - DNA, 25 bp, Homo sapien
gcacgggcattttgcatttattaca

SEQ ID NO: 625766 - DNA, 25 bp, Homo sapien
tacaagatggacatgtgtttacatt

SEQ ID NO: 625767 - DNA, 25 bp, Homo sapien
tatgaaagtcgcatgcttctgctgc

SEQ ID NO: 625768 - DNA, 25 bp, Homo sapien
tgataccatcttgccacggtgccaa

SEQ ID NO: 625769 - DNA, 25 bp, Homo sapien
tatgatctgtgtctaaagccgacgc

SEQ ID NO: 625770 - DNA, 25 bp, Homo sapien
tcacagtaagctcggctcggtggga

SEQ ID NO: 625771 - DNA, 25 bp, Homo sapien
gaactccactgtgtatcggcctggt

SEQ ID NO: 625772 - DNA, 25 bp, Homo sapien
aagcctgccacgtctgggcctcgga

SEQ ID NO: 625773 - DNA, 25 bp, Homo sapien
acctgttagtgcctcgagtgaacgc

SEQ ID NO: 625774 - DNA, 25 bp, Homo sapien
ctcggactgcccatgactcctggaa

SEQ ID NO: 625775 - DNA, 25 bp, Homo sapien
agaaaagcctgccacgtctgggcct

SEQ ID NO: 625776 - DNA, 25 bp, Homo sapien
ttggcgctaattccaggcccacagc

SEQ ID NO: 625777 - DNA, 25 bp, Homo sapien
tgggcctccgtgacgagggtgggaa

SEQ ID NO: 625778 - DNA, 25 bp, Homo sapien
ggtaccacctgtggttggcgctaat

SEQ ID NO: 625779 - DNA, 25 bp, Homo sapien
tgtggttggcgctaattccaggccc

SEQ ID NO: 625780 - DNA, 25 bp, Homo sapien
acaaggccctcttggctccggtgtc

SEQ ID NO: 625781 - DNA, 25 bp, Homo sapien
aagacttccttttcatcaggatcca

SEQ ID NO: 625782 - DNA, 25 bp, Homo sapien
ctccggtgtccttcggagctgtctg

SEQ ID NO: 625783 - DNA, 25 bp, Homo sapien
gtctgaaggactggctggaagactt

SEQ ID NO: 625784 - DNA, 25 bp, Homo sapien
ctagaaagcgaggatcaaccccaga

SEQ ID NO: 625785 - DNA, 25 bp, Homo sapien
gcaccagggccgtgctccattggct

SEQ ID NO: 625786 - DNA, 25 bp, Homo sapien
agaaagcgaggatcaaccccagagc

SEQ ID NO: 625787 - DNA, 25 bp, Homo sapien
agcgaggatcaaccccagagcacca

SEQ ID NO: 625788 - DNA, 25 bp, Homo sapien
aaggcttcctggatgccgctacccg

SEQ ID NO: 625789 - DNA, 25 bp, Homo sapien
gtgctttgaccacgctgcagaaggc

SEQ ID NO: 625790 - DNA, 25 bp, Homo sapien
aatagcttctcatctcttagtgctt

SEQ ID NO: 625791 - DNA, 25 bp, Homo sapien
ctggatgccgctacccgtaggatca

SEQ ID NO: 625792 - DNA, 25 bp, Homo sapien
tactggaatggctcacttggactga

SEQ ID NO: 625793 - DNA, 25 bp, Homo sapien
tatcataggccccaatagcctgagg

SEQ ID NO: 625794 - DNA, 25 bp, Homo sapien
tgacgcagaaatgcagaagcccagc

SEQ ID NO: 625795 - DNA, 25 bp, Homo sapien
taagatttatgatccagagctcccc

SEQ ID NO: 625796 - DNA, 25 bp, Homo sapien
gcgtgcactgggttagattctgtga

SEQ ID NO: 625797 - DNA, 25 bp, Homo sapien
aggcgcagagcctgggcgatccaga

SEQ ID NO: 625798 - DNA, 25 bp, Homo sapien
ccttgatcaataaatgaagccatgg

SEQ ID NO: 625799 - DNA, 25 bp, Homo sapien
atcaataaatgaagccatggctgcc

SEQ ID NO: 625800 - DNA, 25 bp, Homo sapien
tcggcccagaggaatagtggaggaa

SEQ ID NO: 625801 - DNA, 25 bp, Homo sapien
ggcagccgcgagagttccatgaagc

SEQ ID NO: 625802 - DNA, 25 bp, Homo sapien
agagttccatgaagcccagtcggcc

SEQ ID NO: 625803 - DNA, 25 bp, Homo sapien
tgggaagttctcagacctggtgtcc

SEQ ID NO: 625804 - DNA, 25 bp, Homo sapien
caggaggctgtgtcatggctttgtc

SEQ ID NO: 625805 - DNA, 25 bp, Homo sapien
ccaggaggctgtgtcatggctttgt

SEQ ID NO: 625806 - DNA, 25 bp, Homo sapien
ctcaacaaagttgctctgcttgagc

SEQ ID NO: 625807 - DNA, 25 bp, Homo sapien
ctcctcaacaaagttgctctgcttg

SEQ ID NO: 625808 - DNA, 25 bp, Homo sapien
agtgcctccgacgtgccagttccgg

SEQ ID NO: 625809 - DNA, 25 bp, Homo sapien
gcctcagtgcctccgacgtgccagt

SEQ ID NO: 625810 - DNA, 25 bp, Homo sapien
ctcccagcattgcggcaggtaggcg

SEQ ID NO: 625811 - DNA, 25 bp, Homo sapien
ctcagtgcctccgacgtgccagttc

SEQ ID NO: 625812 - DNA, 25 bp, Homo sapien
gggaccgcgtgctctttgattcgca

SEQ ID NO: 625813 - DNA, 25 bp, Homo sapien
tttgattcgcatcagcagcggctga

SEQ ID NO: 625814 - DNA, 25 bp, Homo sapien
ggctgatggcccctcaagtggttcc

SEQ ID NO: 625815 - DNA, 25 bp, Homo sapien
caactaatgggtggccagcgtgctt

SEQ ID NO: 625816 - DNA, 25 bp, Homo sapien
tctgggagtcgcagacacaggactg

SEQ ID NO: 625817 - DNA, 25 bp, Homo sapien
agcgcctgggccatccggttctggg

SEQ ID NO: 625818 - DNA, 25 bp, Homo sapien
gccatccggttctgggagtcgcaga

SEQ ID NO: 625819 - DNA, 25 bp, Homo sapien
gacacaggactggtggtgcagggtc

SEQ ID NO: 625820 - DNA, 25 bp, Homo sapien
tctctgagcaggtaggggcatccct

SEQ ID NO: 625821 - DNA, 25 bp, Homo sapien
gacggacatctgtgttgacaactgc

SEQ ID NO: 625822 - DNA, 25 bp, Homo sapien
caggcaggcgttgatgacggacatc

SEQ ID NO: 625823 - DNA, 25 bp, Homo sapien
catccagcgcccattctgggccagc

SEQ ID NO: 625824 - DNA, 25 bp, Homo sapien
gttccagctacctctagccctggca

SEQ ID NO: 625825 - DNA, 25 bp, Homo sapien
ggtgatgttccagctacctctagcc

SEQ ID NO: 625826 - DNA, 25 bp, Homo sapien
tgatgttccagctacctctagccct

SEQ ID NO: 625827 - DNA, 25 bp, Homo sapien
atgttccagctacctctagccctgg

SEQ ID NO: 625828 - DNA, 25 bp, Homo sapien
tgttcacacagacgggactccatcc

SEQ ID NO: 625829 - DNA, 25 bp, Homo sapien
ctgggtccgagccaactttcccact

SEQ ID NO: 625830 - DNA, 25 bp, Homo sapien
tgtgttcacacagacgggactccat

SEQ ID NO: 625831 - DNA, 25 bp, Homo sapien
ctctgggtccgagccaactttccca

SEQ ID NO: 625832 - DNA, 25 bp, Homo sapien
cagcaaacttggtggcagccaatag

SEQ ID NO: 625833 - DNA, 25 bp, Homo sapien
agcaaacttggtggcagccaatagc

SEQ ID NO: 625834 - DNA, 25 bp, Homo sapien
caggagttgctgcaacagatgaggt

SEQ ID NO: 625835 - DNA, 25 bp, Homo sapien
catctgtagatgcaggagttgctgc

SEQ ID NO: 625836 - DNA, 25 bp, Homo sapien
tctcccatatgtgaagagctgtagg

SEQ ID NO: 625837 - DNA, 25 bp, Homo sapien
tcccatatgtgaagagctgtagggt

SEQ ID NO: 625838 - DNA, 25 bp, Homo sapien
gggtcccttccacaaagcagctcaa

SEQ ID NO: 625839 - DNA, 25 bp, Homo sapien
aaggtctcagcgcattcccacttga

SEQ ID NO: 625840 - DNA, 25 bp, Homo sapien
cagcttgatgccttgggtgacagcc

SEQ ID NO: 625841 - DNA, 25 bp, Homo sapien
agatggcactagaacactttcccag

SEQ ID NO: 625842 - DNA, 25 bp, Homo sapien
tgacactatggcaaggatcctgcgc

SEQ ID NO: 625843 - DNA, 25 bp, Homo sapien
aattggagatggctcgcgataccgc

SEQ ID NO: 625844 - DNA, 25 bp, Homo sapien
gttcctgtagggcttgcagctctca

SEQ ID NO: 625845 - DNA, 25 bp, Homo sapien
gagttacacgtccaagcatgagaga

SEQ ID NO: 625846 - DNA, 25 bp, Homo sapien
agaggtagtccggtcaaatagtcag

SEQ ID NO: 625847 - DNA, 25 bp, Homo sapien
tcagcaggcattttgagggatgcca

SEQ ID NO: 625848 - DNA, 25 bp, Homo sapien
caagaggtagtccggtcaaatagtc

SEQ ID NO: 625849 - DNA, 25 bp, Homo sapien
gaggtagtccggtcaaatagtcagc

SEQ ID NO: 625850 - DNA, 25 bp, Homo sapien
gagataaagaacactgagataacca

SEQ ID NO: 625851 - DNA, 25 bp, Homo sapien
ccatagatgggtgttcaggactgtt

SEQ ID NO: 625852 - DNA, 25 bp, Homo sapien
caggagtcgccagggcattcaggaa

SEQ ID NO: 625853 - DNA, 25 bp, Homo sapien
tctgttggaagtcgtggcagtggcg

SEQ ID NO: 625854 - DNA, 25 bp, Homo sapien
tgtgctgtaccacgccaggttctcg

SEQ ID NO: 625855 - DNA, 25 bp, Homo sapien
catgctcaaggcttggaaaattgca

SEQ ID NO: 625856 - DNA, 25 bp, Homo sapien
tgtgctggtggcctaaaattcaacc

SEQ ID NO: 625857 - DNA, 25 bp, Homo sapien
gcgagacctgactggcactcgatat

SEQ ID NO: 625858 - DNA, 25 bp, Homo sapien
cgcatatcaatgaggaatgtatgca

SEQ ID NO: 625859 - DNA, 25 bp, Homo sapien
ttggtttccaatgacgcatatcaat

SEQ ID NO: 625860 - DNA, 25 bp, Homo sapien
gctgctgaagatgctcacacaatct

SEQ ID NO: 625861 - DNA, 25 bp, Homo sapien
gaagatgctcacacaatctttttcc

SEQ ID NO: 625862 - DNA, 25 bp, Homo sapien
aaaggttacggctctgatgttggct

SEQ ID NO: 625863 - DNA, 25 bp, Homo sapien
tcttgtctggtttctggctttggcg

SEQ ID NO: 625864 - DNA, 25 bp, Homo sapien
tgaagctgcaactctgagtggtgac

SEQ ID NO: 625865 - DNA, 25 bp, Homo sapien
ggctttggcgattggttcttcatga

SEQ ID NO: 625866 - DNA, 25 bp, Homo sapien
tggcctcaggccccctgttgaaggt

SEQ ID NO: 625867 - DNA, 25 bp, Homo sapien
aggtggcctcaggccccctgttgaa

SEQ ID NO: 625868 - DNA, 25 bp, Homo sapien
gcctcaggccccctgttgaaggtca

SEQ ID NO: 625869 - DNA, 25 bp, Homo sapien
cctcaggccccctgttgaaggtcat

SEQ ID NO: 625870 - DNA, 25 bp, Homo sapien
gagttgccggctaaaaaggtgaaca

SEQ ID NO: 625871 - DNA, 25 bp, Homo sapien
agagggctgtgcattgggcgctgga

SEQ ID NO: 625872 - DNA, 25 bp, Homo sapien
aaaggcagccttgactagggacagc

SEQ ID NO: 625873 - DNA, 25 bp, Homo sapien
atcccgctctagatagacaatgcca

SEQ ID NO: 625874 - DNA, 25 bp, Homo sapien
gagtttatgtccgaggcaagcctct

SEQ ID NO: 625875 - DNA, 25 bp, Homo sapien
tatgtccgaggcaagcctctgagtc

SEQ ID NO: 625876 - DNA, 25 bp, Homo sapien
tttgagtttatgtccgaggcaagcc

SEQ ID NO: 625877 - DNA, 25 bp, Homo sapien
ccgaggcaagcctctgagtccgtct

SEQ ID NO: 625878 - DNA, 25 bp, Homo sapien
tgaacactgttccttcgcacatcgc

SEQ ID NO: 625879 - DNA, 25 bp, Homo sapien
ctgagacaaagctgaacactgttcc

SEQ ID NO: 625880 - DNA, 25 bp, Homo sapien
aaagctgaacactgttccttcgcac

SEQ ID NO: 625881 - DNA, 25 bp, Homo sapien
gacaaagctgaacactgttccttcg

SEQ ID NO: 625882 - DNA, 25 bp, Homo sapien
aaggtgaaatgacgtagccacacgc

SEQ ID NO: 625883 - DNA, 25 bp, Homo sapien
aggtgaaatgacgtagccacacgcc

SEQ ID NO: 625884 - DNA, 25 bp, Homo sapien
aggcccaggccaccaatgtgcgaac

SEQ ID NO: 625885 - DNA, 25 bp, Homo sapien
aatgtgcgaaccaactgctcatgtt

SEQ ID NO: 625886 - DNA, 25 bp, Homo sapien
ctgtgcgctctcgcagatggagacg

SEQ ID NO: 625887 - DNA, 25 bp, Homo sapien
tgcgctctcgcagatggagacggtg

SEQ ID NO: 625888 - DNA, 25 bp, Homo sapien
cagcgcgggcgccatcctgggagag

SEQ ID NO: 625889 - DNA, 25 bp, Homo sapien
ggctctgcctgcagcgcgggcgcca

SEQ ID NO: 625890 - DNA, 25 bp, Homo sapien
ctggatgaggacagctcctgagctg

SEQ ID NO: 625891 - DNA, 25 bp, Homo sapien
gaggacagctcctgagctgtgtagc

SEQ ID NO: 625892 - DNA, 25 bp, Homo sapien
acagctcctgagctgtgtagcctgg

SEQ ID NO: 625893 - DNA, 25 bp, Homo sapien
ctgagctgtgtagcctgggccctcc

SEQ ID NO: 625894 - DNA, 25 bp, Homo sapien
ctgtttatccacactgtacattcaa

SEQ ID NO: 625895 - DNA, 25 bp, Homo sapien
cattcaatttttaacagacaccagc

SEQ ID NO: 625896 - DNA, 25 bp, Homo sapien
agacaccagcccttccacttaactt

SEQ ID NO: 625897 - DNA, 25 bp, Homo sapien
atccacactgtacattcaattttta

SEQ ID NO: 625898 - DNA, 25 bp, Homo sapien
gaattgcctcgtagaattgcatgca

SEQ ID NO: 625899 - DNA, 25 bp, Homo sapien
catctgtgaagttggatattttatc

SEQ ID NO: 625900 - DNA, 25 bp, Homo sapien
cagcagaattgcctcgtagaattgc

SEQ ID NO: 625901 - DNA, 25 bp, Homo sapien
ttgcatgcattttgccacctggaag

SEQ ID NO: 625902 - DNA, 25 bp, Homo sapien
ggttatataacctgatccattgctc

SEQ ID NO: 625903 - DNA, 25 bp, Homo sapien
gtaccactaccatgccgtttcagtt

SEQ ID NO: 625904 - DNA, 25 bp, Homo sapien
catcagtagtttgatagaactagca

SEQ ID NO: 625905 - DNA, 25 bp, Homo sapien
agctttgccagggtctaagtccaga

SEQ ID NO: 625906 - DNA, 25 bp, Homo sapien
ttgcgcaggatctcgggcggcggcg

SEQ ID NO: 625907 - DNA, 25 bp, Homo sapien
tccttaaagtaatggggtgacagct

SEQ ID NO: 625908 - DNA, 25 bp, Homo sapien
ggtgacagctgcgtggggatttgga

SEQ ID NO: 625909 - DNA, 25 bp, Homo sapien
cagacagcagtccttaaagtaatgg

SEQ ID NO: 625910 - DNA, 25 bp, Homo sapien
cagtccttaaagtaatggggtgaca

SEQ ID NO: 625911 - DNA, 25 bp, Homo sapien
ttccacatgtccacgcgtgaaccgt

SEQ ID NO: 625912 - DNA, 25 bp, Homo sapien
gcccacttcgtagtgtgaggcccaa

SEQ ID NO: 625913 - DNA, 25 bp, Homo sapien
gaaccgtccctggtgactggtgcac

SEQ ID NO: 625914 - DNA, 25 bp, Homo sapien
gagctgctgaattccctccaggaaa

SEQ ID NO: 625915 - DNA, 25 bp, Homo sapien
gattaagtactttacagagtaacca

SEQ ID NO: 625916 - DNA, 25 bp, Homo sapien
gcaccccgtcgcagcaactgtagat

SEQ ID NO: 625917 - DNA, 25 bp, Homo sapien
taagtactttacagagtaaccattc

SEQ ID NO: 625918 - DNA, 25 bp, Homo sapien
cagattcatgccaccagcaccccgt

SEQ ID NO: 625919 - DNA, 25 bp, Homo sapien
ccttggacctggcttgacgacgtag

SEQ ID NO: 625920 - DNA, 25 bp, Homo sapien
gtagccttgaacttcacttcctgca

SEQ ID NO: 625921 - DNA, 25 bp, Homo sapien
cctggcttgacgacgtagccttgaa

SEQ ID NO: 625922 - DNA, 25 bp, Homo sapien
gacgacgtagccttgaacttcactt

SEQ ID NO: 625923 - DNA, 25 bp, Homo sapien
agatagaagctcatcgaaggacccc

SEQ ID NO: 625924 - DNA, 25 bp, Homo sapien
gggcagccccgataacccaacactg

SEQ ID NO: 625925 - DNA, 25 bp, Homo sapien
cttgatccgaaaacccaaagccatt

SEQ ID NO: 625926 - DNA, 25 bp, Homo sapien
cttgatctccttgatccgaaaaccc

SEQ ID NO: 625927 - DNA, 25 bp, Homo sapien
cgcgtggaatcagagcatccgaggc

SEQ ID NO: 625928 - DNA, 25 bp, Homo sapien
ccattcttcagtctatattccaggg

SEQ ID NO: 625929 - DNA, 25 bp, Homo sapien
cgcggcctcgctttgttatttattc

SEQ ID NO: 625930 - DNA, 25 bp, Homo sapien
caagttagagcgagccgcgtggaat

SEQ ID NO: 625931 - DNA, 25 bp, Homo sapien
ctccccggcgtccgcggaggaggtg

SEQ ID NO: 625932 - DNA, 25 bp, Homo sapien
ggccccgcgacacgaggcagccgct

SEQ ID NO: 625933 - DNA, 25 bp, Homo sapien
gccgaggagtcggtgaggacgctgg

SEQ ID NO: 625934 - DNA, 25 bp, Homo sapien
cgctggggtcactctgcgagcggcc

SEQ ID NO: 625935 - DNA, 25 bp, Homo sapien
catgtctgttgttccaatgctgaca

SEQ ID NO: 625936 - DNA, 25 bp, Homo sapien
atgtctgttgttccaatgctgacag

SEQ ID NO: 625937 - DNA, 25 bp, Homo sapien
cacaggggtctgcaaggatgaggcg

SEQ ID NO: 625938 - DNA, 25 bp, Homo sapien
tctgcaaggatgaggcggaagcagg

SEQ ID NO: 625939 - DNA, 25 bp, Homo sapien
aggatgaggcggaagcaggcatggg

SEQ ID NO: 625940 - DNA, 25 bp, Homo sapien
gggtctgcaaggatgaggcggaagc

SEQ ID NO: 625941 - DNA, 25 bp, Homo sapien
gaatccttgtagaagccctccttga

SEQ ID NO: 625942 - DNA, 25 bp, Homo sapien
catcgcaaaccaggagatggctgct

SEQ ID NO: 625943 - DNA, 25 bp, Homo sapien
gttttgctccaacaggataagccca

SEQ ID NO: 625944 - DNA, 25 bp, Homo sapien
cattcccagtgtggagctgaagggt

SEQ ID NO: 625945 - DNA, 25 bp, Homo sapien
ttcatctggtccattcccacgtatc

SEQ ID NO: 625946 - DNA, 25 bp, Homo sapien
cccacgtatccttcaaacttcatat

SEQ ID NO: 625947 - DNA, 25 bp, Homo sapien
attcccacgtatccttcaaacttca

SEQ ID NO: 625948 - DNA, 25 bp, Homo sapien
ggtccattcccacgtatccttcaaa

SEQ ID NO: 625949 - DNA, 25 bp, Homo sapien
aacggtgacaggcttaaaacaggtg

SEQ ID NO: 625950 - DNA, 25 bp, Homo sapien
tgaccatctatcacagacagttggg

SEQ ID NO: 625951 - DNA, 25 bp, Homo sapien
tggctgacgaccatgaattctggag

SEQ ID NO: 625952 - DNA, 25 bp, Homo sapien
tctaaagtttggtccagccctggta

SEQ ID NO: 625953 - DNA, 25 bp, Homo sapien
gaatcaaagtgctatcaaagtctgc

SEQ ID NO: 625954 - DNA, 25 bp, Homo sapien
gacaagcaatttttcgccagcagat

SEQ ID NO: 625955 - DNA, 25 bp, Homo sapien
tcaaagtctcttaggaggacctcgt

SEQ ID NO: 625956 - DNA, 25 bp, Homo sapien
cgtggccactctggacaaacatgaa

SEQ ID NO: 625957 - DNA, 25 bp, Homo sapien
cccatacaggaaacaaaggtactgc

SEQ ID NO: 625958 - DNA, 25 bp, Homo sapien
ggtcactagaggacacacttacaga

SEQ ID NO: 625959 - DNA, 25 bp, Homo sapien
catggctagaggtaaaacaaaggtc

SEQ ID NO: 625960 - DNA, 25 bp, Homo sapien
ttggcctggccaactatgtaatccc

SEQ ID NO: 625961 - DNA, 25 bp, Homo sapien
cttcttcccaaattctaacgctctg

SEQ ID NO: 625962 - DNA, 25 bp, Homo sapien
aaattctaacgctctgcagaaaggc

SEQ ID NO: 625963 - DNA, 25 bp, Homo sapien
ctacatccggacctccacgggccat

SEQ ID NO: 625964 - DNA, 25 bp, Homo sapien
aaggctgccttctctacatccggac

SEQ ID NO: 625965 - DNA, 25 bp, Homo sapien
tctcagtgtgtattggcaagtccga

SEQ ID NO: 625966 - DNA, 25 bp, Homo sapien
tactctggaacgttccaggtctctt

SEQ ID NO: 625967 - DNA, 25 bp, Homo sapien
aggagatgccgcttaagccctgagc

SEQ ID NO: 625968 - DNA, 25 bp, Homo sapien
cataacctttagcagtttctcagtg

SEQ ID NO: 625969 - DNA, 25 bp, Homo sapien
cacactgcaggcacgcaatggcctt

SEQ ID NO: 625970 - DNA, 25 bp, Homo sapien
ttgtcgcacactgcaggcacgcaat

SEQ ID NO: 625971 - DNA, 25 bp, Homo sapien
caggcacgcaatggcctttgacttc

SEQ ID NO: 625972 - DNA, 25 bp, Homo sapien
tagctcttgtcgcacactgcaggca

SEQ ID NO: 625973 - DNA, 25 bp, Homo sapien
cttgggcttcctcccacaacacggg

SEQ ID NO: 625974 - DNA, 25 bp, Homo sapien
tgggcttcctcccacaacacgggca

SEQ ID NO: 625975 - DNA, 25 bp, Homo sapien
gggcttcctcccacaacacgggcat

SEQ ID NO: 625976 - DNA, 25 bp, Homo sapien
ttgggcttcctcccacaacacgggc

SEQ ID NO: 625977 - DNA, 25 bp, Homo sapien
aagtaccaaggtcagcgtaagcctg

SEQ ID NO: 625978 - DNA, 25 bp, Homo sapien
taagtaccaaggtcagcgtaagcct

SEQ ID NO: 625979 - DNA, 25 bp, Homo sapien
ttaagtaccaaggtcagcgtaagcc

SEQ ID NO: 625980 - DNA, 25 bp, Homo sapien
gtaccaaggtcagcgtaagcctgga

SEQ ID NO: 625981 - DNA, 25 bp, Homo sapien
ctaacatcagcaggtctccatcctt

SEQ ID NO: 625982 - DNA, 25 bp, Homo sapien
tccaaagcggtcacacccatttaca

SEQ ID NO: 625983 - DNA, 25 bp, Homo sapien
gcaacacttgccattgttatatgct

SEQ ID NO: 625984 - DNA, 25 bp, Homo sapien
ttttgctagtctgatgggtagatac

SEQ ID NO: 625985 - DNA, 25 bp, Homo sapien
tgggcctgtcgttggtccatacatc

SEQ ID NO: 625986 - DNA, 25 bp, Homo sapien
agactcatgggcctgtcgttggtcc

SEQ ID NO: 625987 - DNA, 25 bp, Homo sapien
catgggcctgtcgttggtccataca

SEQ ID NO: 625988 - DNA, 25 bp, Homo sapien
cctgtcgttggtccatacatcctgc

SEQ ID NO: 625989 - DNA, 25 bp, Homo sapien
ccagttgctacagccagccggagcc

SEQ ID NO: 625990 - DNA, 25 bp, Homo sapien
gatgtccttctgctggcgtcggtct

SEQ ID NO: 625991 - DNA, 25 bp, Homo sapien
tgtcctccacgtctccacccagttg

SEQ ID NO: 625992 - DNA, 25 bp, Homo sapien
ccttctgctggcgtcggtctgtcct

SEQ ID NO: 625993 - DNA, 25 bp, Homo sapien
ggtgagacttgaaccacggtcttaa

SEQ ID NO: 625994 - DNA, 25 bp, Homo sapien
gcagaagacgtatggtgcctccagt

SEQ ID NO: 625995 - DNA, 25 bp, Homo sapien
cacgggtattcactttcgtctgatg

SEQ ID NO: 625996 - DNA, 25 bp, Homo sapien
tacacaaaaggattggcaagcagcc

SEQ ID NO: 625997 - DNA, 25 bp, Homo sapien
gcaggtctaagagaatccaaggcct

SEQ ID NO: 625998 - DNA, 25 bp, Homo sapien
ctgtgagcaggtctaagagaatcca

SEQ ID NO: 625999 - DNA, 25 bp, Homo sapien
gaatccaaggcctgccccttgtcgt

SEQ ID NO: 626000 - DNA, 25 bp, Homo sapien
ggcctgccccttgtcgtgctgctga

SEQ ID NO: 626001 - DNA, 25 bp, Homo sapien
tcttcccttgtgtttgggagcccca

SEQ ID NO: 626002 - DNA, 25 bp, Homo sapien
agcccgggtacaagtcggaatcctg

SEQ ID NO: 626003 - DNA, 25 bp, Homo sapien
gggcctccacaggatagcagggtcc

SEQ ID NO: 626004 - DNA, 25 bp, Homo sapien
ctgaggcactgacagccgagggccc

SEQ ID NO: 626005 - DNA, 25 bp, Homo sapien
ctggatgaagggctttatcttcccc

SEQ ID NO: 626006 - DNA, 25 bp, Homo sapien
gatgaagggctttatcttccccaga

SEQ ID NO: 626007 - DNA, 25 bp, Homo sapien
tgaagggctttatcttccccagaac

SEQ ID NO: 626008 - DNA, 25 bp, Homo sapien
ggatgaagggctttatcttccccag

SEQ ID NO: 626009 - DNA, 25 bp, Homo sapien
tcaaagaacaacacgcaaaccacac

SEQ ID NO: 626010 - DNA, 25 bp, Homo sapien
aagaacaacacgcaaaccacactcc

SEQ ID NO: 626011 - DNA, 25 bp, Homo sapien
caaaaggactgttaatttcccatat

SEQ ID NO: 626012 - DNA, 25 bp, Homo sapien
caaagaacaacacgcaaaccacact

SEQ ID NO: 626013 - DNA, 25 bp, Homo sapien
gactaatacagtaccgatgcccatg

SEQ ID NO: 626014 - DNA, 25 bp, Homo sapien
tttgacccagagtcaccagaagaca

SEQ ID NO: 626015 - DNA, 25 bp, Homo sapien
tatagtttccacgtgttgcgggagg

SEQ ID NO: 626016 - DNA, 25 bp, Homo sapien
aatgagaactccctaaagcgatgcg

SEQ ID NO: 626017 - DNA, 25 bp, Homo sapien
ctgcatgatgttcgcaggcggttgc

SEQ ID NO: 626018 - DNA, 25 bp, Homo sapien
tgccaccaccagactgtaggaaggt

SEQ ID NO: 626019 - DNA, 25 bp, Homo sapien
ctaaatgaaaatgctgcgtaaactg

SEQ ID NO: 626020 - DNA, 25 bp, Homo sapien
tgccaccactggaccgtttctgaac

SEQ ID NO: 626021 - DNA, 25 bp, Homo sapien
caaatgcctgcacagttgtgggcac

SEQ ID NO: 626022 - DNA, 25 bp, Homo sapien
tcatcgggcattttcagagcatctc

SEQ ID NO: 626023 - DNA, 25 bp, Homo sapien
cgggcattttcagagcatctcccaa

SEQ ID NO: 626024 - DNA, 25 bp, Homo sapien
tctcccaaatgcctgcacagttgtg

SEQ ID NO: 626025 - DNA, 25 bp, Homo sapien
catagcacccggcaatcattgggct

SEQ ID NO: 626026 - DNA, 25 bp, Homo sapien
tagaagaagcactgaatggcatagc

SEQ ID NO: 626027 - DNA, 25 bp, Homo sapien
tgagcacctgcactatctccttgga

SEQ ID NO: 626028 - DNA, 25 bp, Homo sapien
tgcagagagttcacagtccacttgt

SEQ ID NO: 626029 - DNA, 25 bp, Homo sapien
gatgcaatcgcatgctgagaagaaa

SEQ ID NO: 626030 - DNA, 25 bp, Homo sapien
tcatgatatagatctgtgaggcctc

SEQ ID NO: 626031 - DNA, 25 bp, Homo sapien
tctatttccgtaaagtcatgatata

SEQ ID NO: 626032 - DNA, 25 bp, Homo sapien
cagtcttccagtagcaatcaataca

SEQ ID NO: 626033 - DNA, 25 bp, Homo sapien
ctaagctcctcaaataaatctcttg

SEQ ID NO: 626034 - DNA, 25 bp, Homo sapien
taagctcctcaaataaatctcttgt

SEQ ID NO: 626035 - DNA, 25 bp, Homo sapien
gatgatgatgataagagtattcatg

SEQ ID NO: 626036 - DNA, 25 bp, Homo sapien
gcagtgtgcaccttttcatgctgct

SEQ ID NO: 626037 - DNA, 25 bp, Homo sapien
tggcagtgtgcaccttttcatgctg

SEQ ID NO: 626038 - DNA, 25 bp, Homo sapien
gcttaattttgtaaccatatacatg

SEQ ID NO: 626039 - DNA, 25 bp, Homo sapien
atttcccatgagctgaagtggaaag

SEQ ID NO: 626040 - DNA, 25 bp, Homo sapien
attcaaatgcatttcccatgagctg

SEQ ID NO: 626041 - DNA, 25 bp, Homo sapien
gcatttcccatgagctgaagtggaa

SEQ ID NO: 626042 - DNA, 25 bp, Homo sapien
aatgcatttcccatgagctgaagtg

SEQ ID NO: 626043 - DNA, 25 bp, Homo sapien
ggagctaccatcacaaaggacataa

SEQ ID NO: 626044 - DNA, 25 bp, Homo sapien
accaggctgtgagcgagttgctcca

SEQ ID NO: 626045 - DNA, 25 bp, Homo sapien
gaacctgagtgataatgctatcccc

SEQ ID NO: 626046 - DNA, 25 bp, Homo sapien
tatcatggtttacgccagcaccagg

SEQ ID NO: 626047 - DNA, 25 bp, Homo sapien
cacacactggatttgacccttgtag

SEQ ID NO: 626048 - DNA, 25 bp, Homo sapien
agcccagccacagatactgcatctg

SEQ ID NO: 626049 - DNA, 25 bp, Homo sapien
tgacccttgtagatggtccaggtgg

SEQ ID NO: 626050 - DNA, 25 bp, Homo sapien
tcagagaccttggaggggtcttgct

SEQ ID NO: 626051 - DNA, 25 bp, Homo sapien
gagacgctttctggtgacaacacgc

SEQ ID NO: 626052 - DNA, 25 bp, Homo sapien
aaaacgacgcaaccattcacagctg

SEQ ID NO: 626053 - DNA, 25 bp, Homo sapien
tgccaccacttggaggagcagagac

SEQ ID NO: 626054 - DNA, 25 bp, Homo sapien
aacacaggatagacatacgccgcca

SEQ ID NO: 626055 - DNA, 25 bp, Homo sapien
gcagatgcatcctacacagcctggg

SEQ ID NO: 626056 - DNA, 25 bp, Homo sapien
agaagaatggccaccgcagatgcat

SEQ ID NO: 626057 - DNA, 25 bp, Homo sapien
agagcaaggcttgggccccatgagc

SEQ ID NO: 626058 - DNA, 25 bp, Homo sapien
caaagtcagtcctaggaaggacctc

SEQ ID NO: 626059 - DNA, 25 bp, Homo sapien
ccagtgcctgccctcacagtcctga

SEQ ID NO: 626060 - DNA, 25 bp, Homo sapien
agcatcttctctgggcctgagaccc

SEQ ID NO: 626061 - DNA, 25 bp, Homo sapien
ctgggcctgagacccagtgcctgcc

SEQ ID NO: 626062 - DNA, 25 bp, Homo sapien
agtgcctgccctcacagtcctgagg

SEQ ID NO: 626063 - DNA, 25 bp, Homo sapien
gcataccagtctaggcccatctgaa

SEQ ID NO: 626064 - DNA, 25 bp, Homo sapien
ccagtctaggcccatctgaagctta

SEQ ID NO: 626065 - DNA, 25 bp, Homo sapien
gtctaggcccatctgaagcttaaat

SEQ ID NO: 626066 - DNA, 25 bp, Homo sapien
tgtgcataccagtctaggcccatct

SEQ ID NO: 626067 - DNA, 25 bp, Homo sapien
taacaccaatacgtggagaccattg

SEQ ID NO: 626068 - DNA, 25 bp, Homo sapien
caccaatacgtggagaccattgtct

SEQ ID NO: 626069 - DNA, 25 bp, Homo sapien
ctgtaacaccaatacgtggagacca

SEQ ID NO: 626070 - DNA, 25 bp, Homo sapien
tacgtggagaccattgtctttgaac

SEQ ID NO: 626071 - DNA, 25 bp, Homo sapien
gctgccaaacgctggagccagggtc

SEQ ID NO: 626072 - DNA, 25 bp, Homo sapien
aataaacacctgctcgaccctgtga

SEQ ID NO: 626073 - DNA, 25 bp, Homo sapien
gactttgatgtccaccctttagtga

SEQ ID NO: 626074 - DNA, 25 bp, Homo sapien
tctcgtgcttgttgctgggtctcgc

SEQ ID NO: 626075 - DNA, 25 bp, Homo sapien
catctgtgggcgggtgcatgtggcc

SEQ ID NO: 626076 - DNA, 25 bp, Homo sapien
gccatctgtgggcgggtgcatgtgg

SEQ ID NO: 626077 - DNA, 25 bp, Homo sapien
ccatctgtgggcgggtgcatgtggc

SEQ ID NO: 626078 - DNA, 25 bp, Homo sapien
tccttcacaaaggatcggcagcaat

SEQ ID NO: 626079 - DNA, 25 bp, Homo sapien
ttcacaaaggatcggcagcaatcac

SEQ ID NO: 626080 - DNA, 25 bp, Homo sapien
gcagcaatcaccagaaacacacata

SEQ ID NO: 626081 - DNA, 25 bp, Homo sapien
ggatcggcagcaatcaccagaaaca

SEQ ID NO: 626082 - DNA, 25 bp, Homo sapien
gctggacggtgtggctaacacaagg

SEQ ID NO: 626083 - DNA, 25 bp, Homo sapien
ggagaagggctggacggtgtggcta

SEQ ID NO: 626084 - DNA, 25 bp, Homo sapien
tggacggtgtggctaacacaagggc

SEQ ID NO: 626085 - DNA, 25 bp, Homo sapien
aagggctggacggtgtggctaacac

SEQ ID NO: 626086 - DNA, 25 bp, Homo sapien
gaccagatattcaggacgcgccggg

SEQ ID NO: 626087 - DNA, 25 bp, Homo sapien
ctgagaccagatattcaggacgcgc

SEQ ID NO: 626088 - DNA, 25 bp, Homo sapien
gagaccagatattcaggacgcgccg

SEQ ID NO: 626089 - DNA, 25 bp, Homo sapien
attcaggacgcgccgggggcgtttg

SEQ ID NO: 626090 - DNA, 25 bp, Homo sapien
ggtggccagtttgctgttcctcctc

SEQ ID NO: 626091 - DNA, 25 bp, Homo sapien
gtggccagtttgctgttcctcctca

SEQ ID NO: 626092 - DNA, 25 bp, Homo sapien
aagcaatgtgcataaaccacagcta

SEQ ID NO: 626093 - DNA, 25 bp, Homo sapien
gcagtgcacgcagtagatattctac

SEQ ID NO: 626094 - DNA, 25 bp, Homo sapien
gcagtagatattctacagcgatcat

SEQ ID NO: 626095 - DNA, 25 bp, Homo sapien
cacagctaaagagcagtgcacgcag

SEQ ID NO: 626096 - DNA, 25 bp, Homo sapien
ttgatgagctcctctcggccttgcc

SEQ ID NO: 626097 - DNA, 25 bp, Homo sapien
gcagccccttcttgatgagctcctc

SEQ ID NO: 626098 - DNA, 25 bp, Homo sapien
ctcggccttgcctgccggccatctt

SEQ ID NO: 626099 - DNA, 25 bp, Homo sapien
tcggccttgcctgccggccatcttc

SEQ ID NO: 626100 - DNA, 25 bp, Homo sapien
tgctgatcatattccctctgccgca

SEQ ID NO: 626101 - DNA, 25 bp, Homo sapien
gatttgagcttgtcatcgctgctga

SEQ ID NO: 626102 - DNA, 25 bp, Homo sapien
aggactcatgccagacccatttcct

SEQ ID NO: 626103 - DNA, 25 bp, Homo sapien
ggaccctggaagagatttgagcttg

SEQ ID NO: 626104 - DNA, 25 bp, Homo sapien
tccgtctcttgaagctcggctgctg

SEQ ID NO: 626105 - DNA, 25 bp, Homo sapien
ctggtgctttccgtctcttgaagct

SEQ ID NO: 626106 - DNA, 25 bp, Homo sapien
gagggtctggcccttcacttgccat

SEQ ID NO: 626107 - DNA, 25 bp, Homo sapien
tgctttccgtctcttgaagctcggc

SEQ ID NO: 626108 - DNA, 25 bp, Homo sapien
tccatcggggttgcaagttttgctt

SEQ ID NO: 626109 - DNA, 25 bp, Homo sapien
tgggcatcttctgaagtcagcgtct

SEQ ID NO: 626110 - DNA, 25 bp, Homo sapien
tccgacttgggagtgggtggttcac

SEQ ID NO: 626111 - DNA, 25 bp, Homo sapien
gtacagatcggggtcctccatcggg

SEQ ID NO: 626112 - DNA, 25 bp, Homo sapien
catttgccacttgaggatctggctt

SEQ ID NO: 626113 - DNA, 25 bp, Homo sapien
ggctttgtctgccattagatgacat

SEQ ID NO: 626114 - DNA, 25 bp, Homo sapien
tgtcatggaattacccacaacacag

SEQ ID NO: 626115 - DNA, 25 bp, Homo sapien
acagagcgactgggcccagatgtgg

SEQ ID NO: 626116 - DNA, 25 bp, Homo sapien
ccccaggcagtggttaagggcagcc

SEQ ID NO: 626117 - DNA, 25 bp, Homo sapien
tgggaccagcataggccccaggcag

SEQ ID NO: 626118 - DNA, 25 bp, Homo sapien
ggaccagcataggccccaggcagtg

SEQ ID NO: 626119 - DNA, 25 bp, Homo sapien
ctgggaccagcataggccccaggca

SEQ ID NO: 626120 - DNA, 25 bp, Homo sapien
tccactcggtgcccagcagttgccc

SEQ ID NO: 626121 - DNA, 25 bp, Homo sapien
ggttcctccactcggtgcccagcag

SEQ ID NO: 626122 - DNA, 25 bp, Homo sapien
cctccactcggtgcccagcagttgc

SEQ ID NO: 626123 - DNA, 25 bp, Homo sapien
ttcctccactcggtgcccagcagtt

SEQ ID NO: 626124 - DNA, 25 bp, Homo sapien
ccgcttggcctgcatcactgactta

SEQ ID NO: 626125 - DNA, 25 bp, Homo sapien
cacataagacttcactagataagca

SEQ ID NO: 626126 - DNA, 25 bp, Homo sapien
cacatccctctgagctattgacagg

SEQ ID NO: 626127 - DNA, 25 bp, Homo sapien
tattgacaggttgtcccgcttggcc

SEQ ID NO: 626128 - DNA, 25 bp, Homo sapien
tggttttggagcttgccttgggtgg

SEQ ID NO: 626129 - DNA, 25 bp, Homo sapien
gggagctggcccacggatctctcca

SEQ ID NO: 626130 - DNA, 25 bp, Homo sapien
agtcagccccagctaaggcttggga

SEQ ID NO: 626131 - DNA, 25 bp, Homo sapien
gaggactgtccagggagtcagcccc

SEQ ID NO: 626132 - DNA, 25 bp, Homo sapien
gcagctcctcaatgacgcggcttgg

SEQ ID NO: 626133 - DNA, 25 bp, Homo sapien
ggtgagatgcggagaccccgtgggt

SEQ ID NO: 626134 - DNA, 25 bp, Homo sapien
ccgtgggtgtggagagctggccccg

SEQ ID NO: 626135 - DNA, 25 bp, Homo sapien
ctgtcctggcggtgcttcgtggcca

SEQ ID NO: 626136 - DNA, 25 bp, Homo sapien
gaaataatggagtcgttcagcgcct

SEQ ID NO: 626137 - DNA, 25 bp, Homo sapien
tcctcagattccttagcggcagttc

SEQ ID NO: 626138 - DNA, 25 bp, Homo sapien
ctcgtcctgatacaaaagcaagtcg

SEQ ID NO: 626139 - DNA, 25 bp, Homo sapien
gctggacgttctcgacagacggaca

SEQ ID NO: 626140 - DNA, 25 bp, Homo sapien
ccaggttctcacaagcatcctgcat

SEQ ID NO: 626141 - DNA, 25 bp, Homo sapien
tcccagcgagcatctccagcgccat

SEQ ID NO: 626142 - DNA, 25 bp, Homo sapien
gcatcccagcgagcatctccagcgc

SEQ ID NO: 626143 - DNA, 25 bp, Homo sapien
caggtcgtcctgagaccaggttctc

SEQ ID NO: 626144 - DNA, 25 bp, Homo sapien
cagagggccgttggaaaacaaaatg

SEQ ID NO: 626145 - DNA, 25 bp, Homo sapien
atgcagagggccgttggaaaacaaa

SEQ ID NO: 626146 - DNA, 25 bp, Homo sapien
ctcagactcagtggcagttcactac

SEQ ID NO: 626147 - DNA, 25 bp, Homo sapien
tggcaaaacaccgaactgactcaga

SEQ ID NO: 626148 - DNA, 25 bp, Homo sapien
gcatcacaggggaaggatattctga

SEQ ID NO: 626149 - DNA, 25 bp, Homo sapien
aatccaaacagtgtttacgactcag

SEQ ID NO: 626150 - DNA, 25 bp, Homo sapien
gttgaagtttcaggatggctccacc

SEQ ID NO: 626151 - DNA, 25 bp, Homo sapien
atgccgcgcacaatggccaccctga

SEQ ID NO: 626152 - DNA, 25 bp, Homo sapien
gctaagtgccatgccgcgcacaatg

SEQ ID NO: 626153 - DNA, 25 bp, Homo sapien
tgtgctaagtgccatgccgcgcaca

SEQ ID NO: 626154 - DNA, 25 bp, Homo sapien
cagctgtgctaagtgccatgccgcg

SEQ ID NO: 626155 - DNA, 25 bp, Homo sapien
actgcacagagggccctccatatac

SEQ ID NO: 626156 - DNA, 25 bp, Homo sapien
aactgcacagagggccctccatata

SEQ ID NO: 626157 - DNA, 25 bp, Homo sapien
tcaactgcacagagggccctccata

SEQ ID NO: 626158 - DNA, 25 bp, Homo sapien
caactgcacagagggccctccatat

SEQ ID NO: 626159 - DNA, 25 bp, Homo sapien
ggaagatgccacacgtctcgctaag

SEQ ID NO: 626160 - DNA, 25 bp, Homo sapien
ttctgaaggaagtagcgtctgagct

SEQ ID NO: 626161 - DNA, 25 bp, Homo sapien
caaaagctgcggagtgatctggtgc

SEQ ID NO: 626162 - DNA, 25 bp, Homo sapien
ccatacctggcactgaagagcaaag

SEQ ID NO: 626163 - DNA, 25 bp, Homo sapien
caagcaggaactgccttccacgctc

SEQ ID NO: 626164 - DNA, 25 bp, Homo sapien
aagcaggaactgccttccacgctcc

SEQ ID NO: 626165 - DNA, 25 bp, Homo sapien
tggaaagcttcatctcgatctgctg

SEQ ID NO: 626166 - DNA, 25 bp, Homo sapien
tccttagcttcacggccaggagctc

SEQ ID NO: 626167 - DNA, 25 bp, Homo sapien
tctagttcctgtttgcttggccggt

SEQ ID NO: 626168 - DNA, 25 bp, Homo sapien
tccttcttgcatttccgtggcagtg

SEQ ID NO: 626169 - DNA, 25 bp, Homo sapien
tacgcagcaagctccgaggggttct

SEQ ID NO: 626170 - DNA, 25 bp, Homo sapien
cgcaaactggggtacgcagcaagct

SEQ ID NO: 626171 - DNA, 25 bp, Homo sapien
cgaggggttctgaactccagtggct

SEQ ID NO: 626172 - DNA, 25 bp, Homo sapien
gcagtgtccgtgggcgcaaactggg

SEQ ID NO: 626173 - DNA, 25 bp, Homo sapien
gttgggaacactggggctcaagctc

SEQ ID NO: 626174 - DNA, 25 bp, Homo sapien
cccagcggagaccagaaacaaccct

SEQ ID NO: 626175 - DNA, 25 bp, Homo sapien
aaacactcaagtaaggattttggtg

SEQ ID NO: 626176 - DNA, 25 bp, Homo sapien
cactcaagtaaggattttggtggga

SEQ ID NO: 626177 - DNA, 25 bp, Homo sapien
cctgctccgggagtgacccatgtca

SEQ ID NO: 626178 - DNA, 25 bp, Homo sapien
cagcgcttgcggcagctcagccctg

SEQ ID NO: 626179 - DNA, 25 bp, Homo sapien
gagtgacccatgtcaggtgtgttcg

SEQ ID NO: 626180 - DNA, 25 bp, Homo sapien
tgtcaggtgtgttcgctcctcagtg

SEQ ID NO: 626181 - DNA, 25 bp, Homo sapien
cacaagtggatggaagcactgccaa

SEQ ID NO: 626182 - DNA, 25 bp, Homo sapien
aaattattcagcaaggcccaaccgc

SEQ ID NO: 626183 - DNA, 25 bp, Homo sapien
tataaaacaccacgacgggctctga

SEQ ID NO: 626184 - DNA, 25 bp, Homo sapien
gagatgtctcacctctgaagtcggg

SEQ ID NO: 626185 - DNA, 25 bp, Homo sapien
gaggtccctcctcatgtgtacacca

SEQ ID NO: 626186 - DNA, 25 bp, Homo sapien
tgaatatcaggaagccaaattcccc

SEQ ID NO: 626187 - DNA, 25 bp, Homo sapien
caatttcagagactgagcagacaaa

SEQ ID NO: 626188 - DNA, 25 bp, Homo sapien
taacaagaaccctcttcgagtcgag

SEQ ID NO: 626189 - DNA, 25 bp, Homo sapien
tactgacagtggtagccctggaggc

SEQ ID NO: 626190 - DNA, 25 bp, Homo sapien
caggactcagtaccattctagggac

SEQ ID NO: 626191 - DNA, 25 bp, Homo sapien
catatgcgaggaaggagacaggttc

SEQ ID NO: 626192 - DNA, 25 bp, Homo sapien
gaaattccatctaacccactgtgcg

SEQ ID NO: 626193 - DNA, 25 bp, Homo sapien
gccatcctctctccctcctgagcct

SEQ ID NO: 626194 - DNA, 25 bp, Homo sapien
ctctctccctcctgagcctcccaag

SEQ ID NO: 626195 - DNA, 25 bp, Homo sapien
caccatgcctagctgtttttaaatt

SEQ ID NO: 626196 - DNA, 25 bp, Homo sapien
catgcctagctgtttttaaatttct

SEQ ID NO: 626197 - DNA, 25 bp, Homo sapien
tctctgcacctccatggtctcacct

SEQ ID NO: 626198 - DNA, 25 bp, Homo sapien
tcctctctgcacctccatggtctca

SEQ ID NO: 626199 - DNA, 25 bp, Homo sapien
tgcacctccatggtctcacctggtg

SEQ ID NO: 626200 - DNA, 25 bp, Homo sapien
cctgggtgcagccagtctcctctct

SEQ ID NO: 626201 - DNA, 25 bp, Homo sapien
ttcacacgacgcattgatgcatcct

SEQ ID NO: 626202 - DNA, 25 bp, Homo sapien
ggcagatgtctcgtctgcttgcccc

SEQ ID NO: 626203 - DNA, 25 bp, Homo sapien
gacgcattgatgcatcctcagacat

SEQ ID NO: 626204 - DNA, 25 bp, Homo sapien
catcctcagacatctgatggtgaat

SEQ ID NO: 626205 - DNA, 25 bp, Homo sapien
gtttgaatcaacatctaaagtcacc

SEQ ID NO: 626206 - DNA, 25 bp, Homo sapien
tccttccatacaaggcagaatgcct

SEQ ID NO: 626207 - DNA, 25 bp, Homo sapien
tctaaagtcacctcagtgtggagca

SEQ ID NO: 626208 - DNA, 25 bp, Homo sapien
cagaaattgagaagcaattccttcc

SEQ ID NO: 626209 - DNA, 25 bp, Homo sapien
tcttccaccttcagccagcagagct

SEQ ID NO: 626210 - DNA, 25 bp, Homo sapien
tccaccttcagccagcagagctgca

SEQ ID NO: 626211 - DNA, 25 bp, Homo sapien
gcgtgctgagcccaggtctcttcca

SEQ ID NO: 626212 - DNA, 25 bp, Homo sapien
ctggcgtgctgagcccaggtctctt

SEQ ID NO: 626213 - DNA, 25 bp, Homo sapien
ttgagcctctgattccccaggtgaa

SEQ ID NO: 626214 - DNA, 25 bp, Homo sapien
tgagcctctgattccccaggtgaac

SEQ ID NO: 626215 - DNA, 25 bp, Homo sapien
gagcctctgattccccaggtgaaca

SEQ ID NO: 626216 - DNA, 25 bp, Homo sapien
agcctctgattccccaggtgaacac

SEQ ID NO: 626217 - DNA, 25 bp, Homo sapien
gagacgtggccggagcatagctggg

SEQ ID NO: 626218 - DNA, 25 bp, Homo sapien
ggctttgagcttcagtatcaagttg

SEQ ID NO: 626219 - DNA, 25 bp, Homo sapien
gtatcaagttgctctccgaggagcc

SEQ ID NO: 626220 - DNA, 25 bp, Homo sapien
ggccggagcatagctgggctttgga

SEQ ID NO: 626221 - DNA, 25 bp, Homo sapien
gaaggtgacactttagttgggatcc

SEQ ID NO: 626222 - DNA, 25 bp, Homo sapien
tagggtggttctgccaacccaacaa

SEQ ID NO: 626223 - DNA, 25 bp, Homo sapien
taggctctaatctgcacatgaatgg

SEQ ID NO: 626224 - DNA, 25 bp, Homo sapien
ggtgagcaagaagacccctgactgc

SEQ ID NO: 626225 - DNA, 25 bp, Homo sapien
caccggagcagtgtgtttaagcagc

SEQ ID NO: 626226 - DNA, 25 bp, Homo sapien
gtggctggcaaacccctatagatcg

SEQ ID NO: 626227 - DNA, 25 bp, Homo sapien
tgaactgctgagtagagccgcctgt

SEQ ID NO: 626228 - DNA, 25 bp, Homo sapien
tatagatcgcctcccaaaattggaa

SEQ ID NO: 626229 - DNA, 25 bp, Homo sapien
ccagctcttccacggcaggtctttg

SEQ ID NO: 626230 - DNA, 25 bp, Homo sapien
gctcttccacggcaggtctttggct

SEQ ID NO: 626231 - DNA, 25 bp, Homo sapien
ttccacggcaggtctttggctcagc

SEQ ID NO: 626232 - DNA, 25 bp, Homo sapien
tcttccacggcaggtctttggctca

SEQ ID NO: 626233 - DNA, 25 bp, Homo sapien
ttcttgtcaatctttgcttgatttc

SEQ ID NO: 626234 - DNA, 25 bp, Homo sapien
tcctgctctgtctgatcattccttt

SEQ ID NO: 626235 - DNA, 25 bp, Homo sapien
ctttcttgtcaatctttgcttgatt

SEQ ID NO: 626236 - DNA, 25 bp, Homo sapien
ctttcttcctgctctgtctgatcat

SEQ ID NO: 626237 - DNA, 25 bp, Homo sapien
tcttaattcatcaacagtgggtctc

SEQ ID NO: 626238 - DNA, 25 bp, Homo sapien
tgctgctgacagtctcgtccagggt

SEQ ID NO: 626239 - DNA, 25 bp, Homo sapien
cacgtaatcactgaatcgtatcaga

SEQ ID NO: 626240 - DNA, 25 bp, Homo sapien
gtcctgcgcttttgctacttccacg

SEQ ID NO: 626241 - DNA, 25 bp, Homo sapien
tagtcctaccaagctagtatgtagc

SEQ ID NO: 626242 - DNA, 25 bp, Homo sapien
gatttgatttcctttgcgtgtatac

SEQ ID NO: 626243 - DNA, 25 bp, Homo sapien
aacatagttgttaactgtagtgacc

SEQ ID NO: 626244 - DNA, 25 bp, Homo sapien
taaacaatattttgaggagtctcca

SEQ ID NO: 626245 - DNA, 25 bp, Homo sapien
ttgtactcatttaattctttacgaa

SEQ ID NO: 626246 - DNA, 25 bp, Homo sapien
actcatttaattctttacgaattgc

SEQ ID NO: 626247 - DNA, 25 bp, Homo sapien
tgtactcatttaattctttacgaat

SEQ ID NO: 626248 - DNA, 25 bp, Homo sapien
catttaattctttacgaattgctgc

SEQ ID NO: 626249 - DNA, 25 bp, Homo sapien
tgtcaagtgcttgcttgatgcatgt

SEQ ID NO: 626250 - DNA, 25 bp, Homo sapien
gtcaagtgcttgcttgatgcatgta

SEQ ID NO: 626251 - DNA, 25 bp, Homo sapien
cttgtcaagtgcttgcttgatgcat

SEQ ID NO: 626252 - DNA, 25 bp, Homo sapien
tcaagtgcttgcttgatgcatgtac

SEQ ID NO: 626253 - DNA, 25 bp, Homo sapien
gaaggcttgttgcatcacagtcatc

SEQ ID NO: 626254 - DNA, 25 bp, Homo sapien
tgggccttgagcatcttcagataaa

SEQ ID NO: 626255 - DNA, 25 bp, Homo sapien
taattactaccggtcatggccatgg

SEQ ID NO: 626256 - DNA, 25 bp, Homo sapien
caaagcaactgatacagttgaaggc

SEQ ID NO: 626257 - DNA, 25 bp, Homo sapien
gagcctgcacatgcacgttgcccgt

SEQ ID NO: 626258 - DNA, 25 bp, Homo sapien
tcctcttgcaggtaagtgtggtcaa

SEQ ID NO: 626259 - DNA, 25 bp, Homo sapien
tcacatgtccctcatgtcagaggcc

SEQ ID NO: 626260 - DNA, 25 bp, Homo sapien
aacacagcaggtagggtagtcttga

SEQ ID NO: 626261 - DNA, 25 bp, Homo sapien
caagtaacttgttgaatagcacaga

SEQ ID NO: 626262 - DNA, 25 bp, Homo sapien
tgtgtgagagagatatgaccatact

SEQ ID NO: 626263 - DNA, 25 bp, Homo sapien
cacagagcttggatttgtgcacaag

SEQ ID NO: 626264 - DNA, 25 bp, Homo sapien
caagctctgaaagtcatgctccaag

SEQ ID NO: 626265 - DNA, 25 bp, Homo sapien
tctgttggctgttaagtatataaac

SEQ ID NO: 626266 - DNA, 25 bp, Homo sapien
taaatatatgcaaatgcgtgtacat

SEQ ID NO: 626267 - DNA, 25 bp, Homo sapien
catcagtgtaatatgacttgtgaat

SEQ ID NO: 626268 - DNA, 25 bp, Homo sapien
taacttgatagttgtgatgtgcagg

SEQ ID NO: 626269 - DNA, 25 bp, Homo sapien
taggtgagaggtcaccagatacatg

SEQ ID NO: 626270 - DNA, 25 bp, Homo sapien
tatagtaagattcacatgccctcag

SEQ ID NO: 626271 - DNA, 25 bp, Homo sapien
gaaaggtgaggctagattgcatcat

SEQ ID NO: 626272 - DNA, 25 bp, Homo sapien
catcatagtctgaaccttgaagcag

SEQ ID NO: 626273 - DNA, 25 bp, Homo sapien
gctggctaagagaaccgaaatcaaa

SEQ ID NO: 626274 - DNA, 25 bp, Homo sapien
ttagtgatactgaaacagagtacag

SEQ ID NO: 626275 - DNA, 25 bp, Homo sapien
cagagtacagatgtgatgacagcaa

SEQ ID NO: 626276 - DNA, 25 bp, Homo sapien
gcaagactgatattagctggctaag

SEQ ID NO: 626277 - DNA, 25 bp, Homo sapien
ttttgatagtcaagtgaattatgag

SEQ ID NO: 626278 - DNA, 25 bp, Homo sapien
acaagattatgctgtgaaagcttat

SEQ ID NO: 626279 - DNA, 25 bp, Homo sapien
cacattattttagttattgcatgaa

SEQ ID NO: 626280 - DNA, 25 bp, Homo sapien
tgattctaggcatgatttctattac

SEQ ID NO: 626281 - DNA, 25 bp, Homo sapien
gggctcacatcatttagaacttcat

SEQ ID NO: 626282 - DNA, 25 bp, Homo sapien
gaagaagacttacctaggattggtc

SEQ ID NO: 626283 - DNA, 25 bp, Homo sapien
gaaacagcatgtacacattcctctg

SEQ ID NO: 626284 - DNA, 25 bp, Homo sapien
ccagcaattgtaaagtgatccacct

SEQ ID NO: 626285 - DNA, 25 bp, Homo sapien
cccatgctagcatgtagggtattga

SEQ ID NO: 626286 - DNA, 25 bp, Homo sapien
taaggatcttctacatggaatcaaa

SEQ ID NO: 626287 - DNA, 25 bp, Homo sapien
tattcctaggtttactgtttatgca

SEQ ID NO: 626288 - DNA, 25 bp, Homo sapien
catggttgcctggtttgaaaaatcc

SEQ ID NO: 626289 - DNA, 25 bp, Homo sapien
ccgtaacgcttttatctgcctgcag

SEQ ID NO: 626290 - DNA, 25 bp, Homo sapien
cgtaacgcttttatctgcctgcaga

SEQ ID NO: 626291 - DNA, 25 bp, Homo sapien
ggaaaatctttgcctcccccatctg

SEQ ID NO: 626292 - DNA, 25 bp, Homo sapien
aaaatctttgcctcccccatctgcc

SEQ ID NO: 626293 - DNA, 25 bp, Homo sapien
agctgggcctgatgcgtcccgcggc

SEQ ID NO: 626294 - DNA, 25 bp, Homo sapien
cgcggcggctcaatgcgcgacacgt

SEQ ID NO: 626295 - DNA, 25 bp, Homo sapien
tccacgtgcggccttttctggaccg

SEQ ID NO: 626296 - DNA, 25 bp, Homo sapien
caatgcgcgacacgtggctccacgt

SEQ ID NO: 626297 - DNA, 25 bp, Homo sapien
ttcggcttggcctttcaagccggca

SEQ ID NO: 626298 - DNA, 25 bp, Homo sapien
tccgacggttgaggcggagccgttg

SEQ ID NO: 626299 - DNA, 25 bp, Homo sapien
ggcaggttgagcagagtgcctgggt

SEQ ID NO: 626300 - DNA, 25 bp, Homo sapien
ttcaagccggcaggcgagaagcttc

SEQ ID NO: 626301 - DNA, 25 bp, Homo sapien
ggctccaccgacactacgcggacgc

SEQ ID NO: 626302 - DNA, 25 bp, Homo sapien
ctgaggcgcagagttgcgacgctcg

SEQ ID NO: 626303 - DNA, 25 bp, Homo sapien
gcagagttgcgacgctcggcggcat

SEQ ID NO: 626304 - DNA, 25 bp, Homo sapien
agttgcgacgctcggcggcataggg

SEQ ID NO: 626305 - DNA, 25 bp, Homo sapien
cgccttccgccgttcgccggaggcg

SEQ ID NO: 626306 - DNA, 25 bp, Homo sapien
ccttccgccgttcgccggaggcgct

SEQ ID NO: 626307 - DNA, 25 bp, Homo sapien
ctggcgcggattggacgggcgcttc

SEQ ID NO: 626308 - DNA, 25 bp, Homo sapien
gattggacgggcgcttcccgccttc

SEQ ID NO: 626309 - DNA, 25 bp, Homo sapien
cgattggacgcactatcgaccgcac

SEQ ID NO: 626310 - DNA, 25 bp, Homo sapien
gcggcgacgccgattggacgcacta

SEQ ID NO: 626311 - DNA, 25 bp, Homo sapien
gcgggacctggctggcggcgacgcc

SEQ ID NO: 626312 - DNA, 25 bp, Homo sapien
gacgccgattggacgcactatcgac

SEQ ID NO: 626313 - DNA, 25 bp, Homo sapien
catagcgcggggatgggcttctcct

SEQ ID NO: 626314 - DNA, 25 bp, Homo sapien
cagggccccagtcaaggcagcgagt

SEQ ID NO: 626315 - DNA, 25 bp, Homo sapien
tcacccaggagtcgtcggcccggcg

SEQ ID NO: 626316 - DNA, 25 bp, Homo sapien
agcgcgagaggacgggccgaagcgc

SEQ ID NO: 626317 - DNA, 25 bp, Homo sapien
gggaaaacacgcagaagactgagcg

SEQ ID NO: 626318 - DNA, 25 bp, Homo sapien
tcagaacgcgagcacggggaaaaca

SEQ ID NO: 626319 - DNA, 25 bp, Homo sapien
acgcagaagactgagcgccgaacac

SEQ ID NO: 626320 - DNA, 25 bp, Homo sapien
gcacggggaaaacacgcagaagact

SEQ ID NO: 626321 - DNA, 25 bp, Homo sapien
gcagagttgttgtatgtgtctttga

SEQ ID NO: 626322 - DNA, 25 bp, Homo sapien
tatatgccaggtcagcatgaggtat

SEQ ID NO: 626323 - DNA, 25 bp, Homo sapien
gcgtcagtagcagagttgttgtatg

SEQ ID NO: 626324 - DNA, 25 bp, Homo sapien
tgttgtatgtgtctttgagaaaagg

SEQ ID NO: 626325 - DNA, 25 bp, Homo sapien
cactgataaacgtagagccttggca

SEQ ID NO: 626326 - DNA, 25 bp, Homo sapien
ttaggtcagcaagcctgttagggcc

SEQ ID NO: 626327 - DNA, 25 bp, Homo sapien
taatattaagtgaacctcccgtgcc

SEQ ID NO: 626328 - DNA, 25 bp, Homo sapien
tagatatgagttaagagctgccaga

SEQ ID NO: 626329 - DNA, 25 bp, Homo sapien
tcttgttaagcatcagaagatgtca

SEQ ID NO: 626330 - DNA, 25 bp, Homo sapien
ttttgatgattaaggtgactatttt

SEQ ID NO: 626331 - DNA, 25 bp, Homo sapien
aaggtgttttcagcaatagccagag

SEQ ID NO: 626332 - DNA, 25 bp, Homo sapien
gagtccagttacaaggtggaactag

SEQ ID NO: 626333 - DNA, 25 bp, Homo sapien
actgcagcggacacgtgacgaggct

SEQ ID NO: 626334 - DNA, 25 bp, Homo sapien
ctgtttcgcgactgcagcggacacg

SEQ ID NO: 626335 - DNA, 25 bp, Homo sapien
tgtttcgcgactgcagcggacacgt

SEQ ID NO: 626336 - DNA, 25 bp, Homo sapien
ttcgcgactgcagcggacacgtgac

SEQ ID NO: 626337 - DNA, 25 bp, Homo sapien
tggtcctaccaccagtatcgggttg

SEQ ID NO: 626338 - DNA, 25 bp, Homo sapien
gcaaatggtcctaccaccagtatcg

SEQ ID NO: 626339 - DNA, 25 bp, Homo sapien
gattgcaaatggtcctaccaccagt

SEQ ID NO: 626340 - DNA, 25 bp, Homo sapien
ctattgattgcaaatggtcctacca

SEQ ID NO: 626341 - DNA, 25 bp, Homo sapien
ttcctgtagtgctcaaaatattctt

SEQ ID NO: 626342 - DNA, 25 bp, Homo sapien
ttggaaaggtctcctcaccaccgga

SEQ ID NO: 626343 - DNA, 25 bp, Homo sapien
aaatattcttgctcaatctgctgga

SEQ ID NO: 626344 - DNA, 25 bp, Homo sapien
tcctcttatatttggaaaggtctcc

SEQ ID NO: 626345 - DNA, 25 bp, Homo sapien
gagattcattcaccctattcctctt

SEQ ID NO: 626346 - DNA, 25 bp, Homo sapien
tgatgagattcattcaccctattcc

SEQ ID NO: 626347 - DNA, 25 bp, Homo sapien
ttctgatgagattcattcaccctat

SEQ ID NO: 626348 - DNA, 25 bp, Homo sapien
gatgagattcattcaccctattcct

SEQ ID NO: 626349 - DNA, 25 bp, Homo sapien
cactttattccaagatgggccagca

SEQ ID NO: 626350 - DNA, 25 bp, Homo sapien
ctgcttctcggctgggaagaagcgt

SEQ ID NO: 626351 - DNA, 25 bp, Homo sapien
tctttgaatgttgcactttattcca

SEQ ID NO: 626352 - DNA, 25 bp, Homo sapien
gattccttttgcgtcttgcttccgg

SEQ ID NO: 626353 - DNA, 25 bp, Homo sapien
ctcgaagattgagatctggaggtgt

SEQ ID NO: 626354 - DNA, 25 bp, Homo sapien
caggttttgtatggccctgaccagg

SEQ ID NO: 626355 - DNA, 25 bp, Homo sapien
tttccgaatcagagagatcacttgc

SEQ ID NO: 626356 - DNA, 25 bp, Homo sapien
gaggaatgggaattctttccgaatc

SEQ ID NO: 626357 - DNA, 25 bp, Homo sapien
tgcgttcagaagcagggccatatct

SEQ ID NO: 626358 - DNA, 25 bp, Homo sapien
ggccatatctcgtaggtcccaggag

SEQ ID NO: 626359 - DNA, 25 bp, Homo sapien
tcgggaagggcctgactttgaagcc

SEQ ID NO: 626360 - DNA, 25 bp, Homo sapien
ttgggaactcgaatgtgaccgctgg

SEQ ID NO: 626361 - DNA, 25 bp, Homo sapien
cctttttcctaggatgtgcatgtgc

SEQ ID NO: 626362 - DNA, 25 bp, Homo sapien
ccctttttcctaggatgtgcatgtg

SEQ ID NO: 626363 - DNA, 25 bp, Homo sapien
ctttttcctaggatgtgcatgtgct

SEQ ID NO: 626364 - DNA, 25 bp, Homo sapien
tttatatgtgttttgctttactccg

SEQ ID NO: 626365 - DNA, 25 bp, Homo sapien
tatgtgttttgctttactccgtttg

SEQ ID NO: 626366 - DNA, 25 bp, Homo sapien
tatatgtgttttgctttactccgtt

SEQ ID NO: 626367 - DNA, 25 bp, Homo sapien
tattttagtttatatgtgttttgct

SEQ ID NO: 626368 - DNA, 25 bp, Homo sapien
tctaacattgaggtacctgcaggtc

SEQ ID NO: 626369 - DNA, 25 bp, Homo sapien
tcaactataatgacatgggccgtat

SEQ ID NO: 626370 - DNA, 25 bp, Homo sapien
gatcataagtgaagtgccagccatg

SEQ ID NO: 626371 - DNA, 25 bp, Homo sapien
gggaggtaacaccactagctgctct

SEQ ID NO: 626372 - DNA, 25 bp, Homo sapien
caagttagttacaagtcttcagccc

SEQ ID NO: 626373 - DNA, 25 bp, Homo sapien
taaaatacagtaccaccaagagtta

SEQ ID NO: 626374 - DNA, 25 bp, Homo sapien
ttgtcacagggtatgaagtctatcc

SEQ ID NO: 626375 - DNA, 25 bp, Homo sapien
tccttttagctaggaggtatatggc

SEQ ID NO: 626376 - DNA, 25 bp, Homo sapien
tgtccaagcagaagcccaagccagg

SEQ ID NO: 626377 - DNA, 25 bp, Homo sapien
aagcccaagccaggcggggatgccc

SEQ ID NO: 626378 - DNA, 25 bp, Homo sapien
agaccactgtccaagcagaagccca

SEQ ID NO: 626379 - DNA, 25 bp, Homo sapien
cagccagaccactgtccaagcagaa

SEQ ID NO: 626380 - DNA, 25 bp, Homo sapien
cagaggtgagccagccgcagtgaaa

SEQ ID NO: 626381 - DNA, 25 bp, Homo sapien
gaggtgagccagccgcagtgaaagg

SEQ ID NO: 626382 - DNA, 25 bp, Homo sapien
gcagaggtgagccagccgcagtgaa

SEQ ID NO: 626383 - DNA, 25 bp, Homo sapien
ctgcagaggtgagccagccgcagtg

SEQ ID NO: 626384 - DNA, 25 bp, Homo sapien
tccatatggatcaagtaaacaccag

SEQ ID NO: 626385 - DNA, 25 bp, Homo sapien
gaggtgagaaggctggcattcgatg

SEQ ID NO: 626386 - DNA, 25 bp, Homo sapien
gaagtaaagcgctaggctcaagcct

SEQ ID NO: 626387 - DNA, 25 bp, Homo sapien
gtaaacaccagagaagtaaagcgct

SEQ ID NO: 626388 - DNA, 25 bp, Homo sapien
gtagaaactaaagccaccatggtcc

SEQ ID NO: 626389 - DNA, 25 bp, Homo sapien
accatggtcctgcacgtacacaaaa

SEQ ID NO: 626390 - DNA, 25 bp, Homo sapien
tggtcctgcacgtacacaaaagact

SEQ ID NO: 626391 - DNA, 25 bp, Homo sapien
taaagccaccatggtcctgcacgta

SEQ ID NO: 626392 - DNA, 25 bp, Homo sapien
tttcaggtcactttggcccagatgc

SEQ ID NO: 626393 - DNA, 25 bp, Homo sapien
gatgaccagtcctccaagctggtgg

SEQ ID NO: 626394 - DNA, 25 bp, Homo sapien
gacagacccagaacgtgcagctgat

SEQ ID NO: 626395 - DNA, 25 bp, Homo sapien
ggctgacttgtaagcttgaacatac

SEQ ID NO: 626396 - DNA, 25 bp, Homo sapien
agcgaggggtgcctcccggatctca

SEQ ID NO: 626397 - DNA, 25 bp, Homo sapien
cagcagcgaggggtgcctcccggat

SEQ ID NO: 626398 - DNA, 25 bp, Homo sapien
cagcagcagcgaggggtgcctcccg

SEQ ID NO: 626399 - DNA, 25 bp, Homo sapien
cgaggggtgcctcccggatctcatg

SEQ ID NO: 626400 - DNA, 25 bp, Homo sapien
tggccagtgtggtagcccctagcca

SEQ ID NO: 626401 - DNA, 25 bp, Homo sapien
tggctagtgctagtataggactgaa

SEQ ID NO: 626402 - DNA, 25 bp, Homo sapien
ccacatgtgactagaggccaatgca

SEQ ID NO: 626403 - DNA, 25 bp, Homo sapien
gagtttaaatcctgttctatgggca

SEQ ID NO: 626404 - DNA, 25 bp, Homo sapien
ggctcgtccgcgtcagaatctatca

SEQ ID NO: 626405 - DNA, 25 bp, Homo sapien
tacaatacaagaggccatggtgggt

SEQ ID NO: 626406 - DNA, 25 bp, Homo sapien
gatacctaaatcaccagggacagag

SEQ ID NO: 626407 - DNA, 25 bp, Homo sapien
gcatcagggctaacgataatatttg

SEQ ID NO: 626408 - DNA, 25 bp, Homo sapien
cacagccctgtaagagagtccacaa

SEQ ID NO: 626409 - DNA, 25 bp, Homo sapien
gctgatgcctcagcacaaatgaagg

SEQ ID NO: 626410 - DNA, 25 bp, Homo sapien
tgcacttgctcacgcacttgcagga

SEQ ID NO: 626411 - DNA, 25 bp, Homo sapien
gcagtggtaccaaactccccattgt

SEQ ID NO: 626412 - DNA, 25 bp, Homo sapien
tcctgttgaacactgtcaatgatac

SEQ ID NO: 626413 - DNA, 25 bp, Homo sapien
tgtttgcttagtaagatcatctgtt

SEQ ID NO: 626414 - DNA, 25 bp, Homo sapien
tttcctgttgaacactgtcaatgat

SEQ ID NO: 626415 - DNA, 25 bp, Homo sapien
gcttagtaagatcatctgtttcctg

SEQ ID NO: 626416 - DNA, 25 bp, Homo sapien
agctccaaggtggtgataacccatc

SEQ ID NO: 626417 - DNA, 25 bp, Homo sapien
cccatcttctcttggatcgccgtag

SEQ ID NO: 626418 - DNA, 25 bp, Homo sapien
atcttctcttggatcgccgtagagg

SEQ ID NO: 626419 - DNA, 25 bp, Homo sapien
caaggtggtgataacccatcttctc

SEQ ID NO: 626420 - DNA, 25 bp, Homo sapien
tcgacagggcggtgaacatatatcc

SEQ ID NO: 626421 - DNA, 25 bp, Homo sapien
cacaccaggtccactgattagatac

SEQ ID NO: 626422 - DNA, 25 bp, Homo sapien
aagatggtgtcatttctcgatcgac

SEQ ID NO: 626423 - DNA, 25 bp, Homo sapien
cttccgttctcatgatcttctagag

SEQ ID NO: 626424 - DNA, 25 bp, Homo sapien
cagcaccagcccttcccgtagatgg

SEQ ID NO: 626425 - DNA, 25 bp, Homo sapien
agcaccagcccttcccgtagatggc

SEQ ID NO: 626426 - DNA, 25 bp, Homo sapien
ccagcccttcccgtagatggcctct

SEQ ID NO: 626427 - DNA, 25 bp, Homo sapien
gcccttcccgtagatggcctctgct

SEQ ID NO: 626428 - DNA, 25 bp, Homo sapien
tatccacaatttttcctgttgagcg

SEQ ID NO: 626429 - DNA, 25 bp, Homo sapien
gcagattggttttcttgcacagtga

SEQ ID NO: 626430 - DNA, 25 bp, Homo sapien
tgagcgctccacaacatcaaaataa

SEQ ID NO: 626431 - DNA, 25 bp, Homo sapien
tcacatcactgatcctaatgttgaa

SEQ ID NO: 626432 - DNA, 25 bp, Homo sapien
tccactaaggcgatcaacccggaaa

SEQ ID NO: 626433 - DNA, 25 bp, Homo sapien
tgagaaatgaggaagtaaaggactt

SEQ ID NO: 626434 - DNA, 25 bp, Homo sapien
taagcagccagagagtcgtatttct

SEQ ID NO: 626435 - DNA, 25 bp, Homo sapien
caaatcgactgctaacatctgaaaa

SEQ ID NO: 626436 - DNA, 25 bp, Homo sapien
tcgtggatgacagtgacggttctcc

SEQ ID NO: 626437 - DNA, 25 bp, Homo sapien
gtggttgttgccttcttgcacatcc

SEQ ID NO: 626438 - DNA, 25 bp, Homo sapien
tgcacatccacgtgaacggtggtcg

SEQ ID NO: 626439 - DNA, 25 bp, Homo sapien
tcctgggtaaatgcaggcctgtggt

SEQ ID NO: 626440 - DNA, 25 bp, Homo sapien
cacggtgtgaaaacctcaggtgcag

SEQ ID NO: 626441 - DNA, 25 bp, Homo sapien
ctcaggtgcagacttctcacccaag

SEQ ID NO: 626442 - DNA, 25 bp, Homo sapien
tccctctagaatcctgaacacggtg

SEQ ID NO: 626443 - DNA, 25 bp, Homo sapien
tctcacccaagggtgattcttctcc

SEQ ID NO: 626444 - DNA, 25 bp, Homo sapien
taatatcccttcgttggtctcaggg

SEQ ID NO: 626445 - DNA, 25 bp, Homo sapien
gctgatgtaaatggagaatctcgat

SEQ ID NO: 626446 - DNA, 25 bp, Homo sapien
gaatctcgatcttgaaccaggagac

SEQ ID NO: 626447 - DNA, 25 bp, Homo sapien
ggtctcagggtcagtcgaaatgtca

SEQ ID NO: 626448 - DNA, 25 bp, Homo sapien
agagagaggatttcattagcacctg

SEQ ID NO: 626449 - DNA, 25 bp, Homo sapien
cagagagaggatttcattagcacct

SEQ ID NO: 626450 - DNA, 25 bp, Homo sapien
gagagaggatttcattagcacctgc

SEQ ID NO: 626451 - DNA, 25 bp, Homo sapien
ccagagagaggatttcattagcacc

SEQ ID NO: 626452 - DNA, 25 bp, Homo sapien
tcctcattctccacgacaatgatga

SEQ ID NO: 626453 - DNA, 25 bp, Homo sapien
cctcattctccacgacaatgatgag

SEQ ID NO: 626454 - DNA, 25 bp, Homo sapien
cacagaagacgagcctctcctcatt

SEQ ID NO: 626455 - DNA, 25 bp, Homo sapien
tcctctctcacagaagacgagcctc

SEQ ID NO: 626456 - DNA, 25 bp, Homo sapien
tgggtcgttggcgtctgtcacctgc

SEQ ID NO: 626457 - DNA, 25 bp, Homo sapien
ttggcgtctgtcacctgcacactca

SEQ ID NO: 626458 - DNA, 25 bp, Homo sapien
tctttattgacaatgaagctctggg

SEQ ID NO: 626459 - DNA, 25 bp, Homo sapien
tcctctttattgacaatgaagctct

SEQ ID NO: 626460 - DNA, 25 bp, Homo sapien
tctggatccatggcattaaaagttc

SEQ ID NO: 626461 - DNA, 25 bp, Homo sapien
ctggatccatggcattaaaagttcc

SEQ ID NO: 626462 - DNA, 25 bp, Homo sapien
tctcggtcaattggctccacggtga

SEQ ID NO: 626463 - DNA, 25 bp, Homo sapien
ttgtcgacgctgacccaatttgctg

SEQ ID NO: 626464 - DNA, 25 bp, Homo sapien
tccacggtgatgaccactccggagt

SEQ ID NO: 626465 - DNA, 25 bp, Homo sapien
catcaacagcgtgaatgatgattac

SEQ ID NO: 626466 - DNA, 25 bp, Homo sapien
cagacaggaagagcattagggtccc

SEQ ID NO: 626467 - DNA, 25 bp, Homo sapien
gacctccatgtagcgggaacgtggc

SEQ ID NO: 626468 - DNA, 25 bp, Homo sapien
ccggagagtcgggacgttgtcattg

SEQ ID NO: 626469 - DNA, 25 bp, Homo sapien
aagagcattagggtccctgtagcag

SEQ ID NO: 626470 - DNA, 25 bp, Homo sapien
cggatcctctgcctcgatgtggagg

SEQ ID NO: 626471 - DNA, 25 bp, Homo sapien
tcaaatgtaaatgggtcagagaacg

SEQ ID NO: 626472 - DNA, 25 bp, Homo sapien
aacggctccaggtccggatcctctg

SEQ ID NO: 626473 - DNA, 25 bp, Homo sapien
tttccccaggtattgtccaattcaa

SEQ ID NO: 626474 - DNA, 25 bp, Homo sapien
caaggttaaaagttcaactgattga

SEQ ID NO: 626475 - DNA, 25 bp, Homo sapien
tgtttgtctccaatgaagagtggca

SEQ ID NO: 626476 - DNA, 25 bp, Homo sapien
gagtggcaccaagtaattaccacgt

SEQ ID NO: 626477 - DNA, 25 bp, Homo sapien
taattaccacgtggcaggcttctca

SEQ ID NO: 626478 - DNA, 25 bp, Homo sapien
gaacagggcccccacatgaagcccc

SEQ ID NO: 626479 - DNA, 25 bp, Homo sapien
catgtgagcccactggcacaggggc

SEQ ID NO: 626480 - DNA, 25 bp, Homo sapien
catctgcaagctccacacatgtgag

SEQ ID NO: 626481 - DNA, 25 bp, Homo sapien
tgcaagctccacacatgtgagccca

SEQ ID NO: 626482 - DNA, 25 bp, Homo sapien
tgcgtcttagtcatctgtgtagcta

SEQ ID NO: 626483 - DNA, 25 bp, Homo sapien
agcacagttccagggtaccagtaga

SEQ ID NO: 626484 - DNA, 25 bp, Homo sapien
ctggcaaggccaaattgcgtcttag

SEQ ID NO: 626485 - DNA, 25 bp, Homo sapien
catgtataactcagtcatgaactgg

SEQ ID NO: 626486 - DNA, 25 bp, Homo sapien
gtgcctttgctctccgcattataca

SEQ ID NO: 626487 - DNA, 25 bp, Homo sapien
tttggtggccttcatcattggatac

SEQ ID NO: 626488 - DNA, 25 bp, Homo sapien
tatacatgaccagtgtttggtggcc

SEQ ID NO: 626489 - DNA, 25 bp, Homo sapien
aatagcatcgcaacagaaaaagcag

SEQ ID NO: 626490 - DNA, 25 bp, Homo sapien
cagatttggaatctacacccaggtc

SEQ ID NO: 626491 - DNA, 25 bp, Homo sapien
ggtcttagcatcacaagggccaagg

SEQ ID NO: 626492 - DNA, 25 bp, Homo sapien
tggtacaagaagagaacagagcccc

SEQ ID NO: 626493 - DNA, 25 bp, Homo sapien
catgaggttctcttgtcccactggc

SEQ ID NO: 626494 - DNA, 25 bp, Homo sapien
aactccctgcgtgggtcctgctgca

SEQ ID NO: 626495 - DNA, 25 bp, Homo sapien
gtgcagatgagcagagccggcctct

SEQ ID NO: 626496 - DNA, 25 bp, Homo sapien
cttaactccctgcgtgggtcctgct

SEQ ID NO: 626497 - DNA, 25 bp, Homo sapien
tgcagatgagcagagccggcctctg

SEQ ID NO: 626498 - DNA, 25 bp, Homo sapien
aatccagaagcaagtaaggggcatg

SEQ ID NO: 626499 - DNA, 25 bp, Homo sapien
tccttgtcagggaaaccaccaggaa

SEQ ID NO: 626500 - DNA, 25 bp, Homo sapien
ttccttgtcagggaaaccaccagga

SEQ ID NO: 626501 - DNA, 25 bp, Homo sapien
gtgcttgggctgactgactcgctgc

SEQ ID NO: 626502 - DNA, 25 bp, Homo sapien
ggctgactgactcgctgcagatgga

SEQ ID NO: 626503 - DNA, 25 bp, Homo sapien
ccagagcacagcgtgcttgggctga

SEQ ID NO: 626504 - DNA, 25 bp, Homo sapien
tgactcgctgcagatggaggcactt

SEQ ID NO: 626505 - DNA, 25 bp, Homo sapien
tagcagggagcaaccttctggaact

SEQ ID NO: 626506 - DNA, 25 bp, Homo sapien
agatggccgtagcagggagcaacct

SEQ ID NO: 626507 - DNA, 25 bp, Homo sapien
tagtcactagtgagatggccgtagc

SEQ ID NO: 626508 - DNA, 25 bp, Homo sapien
ttagtcactagtgagatggccgtag

SEQ ID NO: 626509 - DNA, 25 bp, Homo sapien
tcttggctcaaagggcttgccataa

SEQ ID NO: 626510 - DNA, 25 bp, Homo sapien
acacttcttggctcaaagggcttgc

SEQ ID NO: 626511 - DNA, 25 bp, Homo sapien
ttttcacacttcttggctcaaaggg

SEQ ID NO: 626512 - DNA, 25 bp, Homo sapien
acttcttggctcaaagggcttgcca

SEQ ID NO: 626513 - DNA, 25 bp, Homo sapien
atttgcacagcttttaggcagaaca

SEQ ID NO: 626514 - DNA, 25 bp, Homo sapien
gctcttatgccctcgagtcacggga

SEQ ID NO: 626515 - DNA, 25 bp, Homo sapien
cacgggataaatgtgccttaactac

SEQ ID NO: 626516 - DNA, 25 bp, Homo sapien
tgaggtcttagcaactcaacagcaa

SEQ ID NO: 626517 - DNA, 25 bp, Homo sapien
atctggcccatgtctgtggatctgg

SEQ ID NO: 626518 - DNA, 25 bp, Homo sapien
gctcatctggcccatgtctgtggat

SEQ ID NO: 626519 - DNA, 25 bp, Homo sapien
ctgcccattgtttcccatgatgggc

SEQ ID NO: 626520 - DNA, 25 bp, Homo sapien
cattgtttcccatgatgggctgctg

SEQ ID NO: 626521 - DNA, 25 bp, Homo sapien
ccctcctcgctcattttggcttctc

SEQ ID NO: 626522 - DNA, 25 bp, Homo sapien
actgcccctcctcgctcattttggc

SEQ ID NO: 626523 - DNA, 25 bp, Homo sapien
tctgtgcattgtggcatctgggtaa

SEQ ID NO: 626524 - DNA, 25 bp, Homo sapien
tccccaagagcctctgttctttctc

SEQ ID NO: 626525 - DNA, 25 bp, Homo sapien
ctggccatgaaagcctccccaagag

SEQ ID NO: 626526 - DNA, 25 bp, Homo sapien
ggccatgaaagcctccccaagagcc

SEQ ID NO: 626527 - DNA, 25 bp, Homo sapien
cccaagagcctctgttctttctctg

SEQ ID NO: 626528 - DNA, 25 bp, Homo sapien
caggagttcgtacagttccagaagt

SEQ ID NO: 626529 - DNA, 25 bp, Homo sapien
tcctcagctgacacaggagttcgta

SEQ ID NO: 626530 - DNA, 25 bp, Homo sapien
tctctaggtttgattcgaggaacac

SEQ ID NO: 626531 - DNA, 25 bp, Homo sapien
ggaacacatcaatgcagtagtaaca

SEQ ID NO: 626532 - DNA, 25 bp, Homo sapien
gtaggtagccggggtcatcttccag

SEQ ID NO: 626533 - DNA, 25 bp, Homo sapien
atcttccagcacattggcaacatgg

SEQ ID NO: 626534 - DNA, 25 bp, Homo sapien
ccagcacattggcaacatggagttt

SEQ ID NO: 626535 - DNA, 25 bp, Homo sapien
cctcgctgtagacgtgaggtaggta

SEQ ID NO: 626536 - DNA, 25 bp, Homo sapien
cggagtcgcttttgaacccaaagag

SEQ ID NO: 626537 - DNA, 25 bp, Homo sapien
gaacccaaagagtccagcaaatcag

SEQ ID NO: 626538 - DNA, 25 bp, Homo sapien
aatcaggttgcaactcctgttccaa

SEQ ID NO: 626539 - DNA, 25 bp, Homo sapien
gaatatatttcctcaaacggagtcg

SEQ ID NO: 626540 - DNA, 25 bp, Homo sapien
tcagtattacctgctgttcccaagt

SEQ ID NO: 626541 - DNA, 25 bp, Homo sapien
taatagtgtgtcctcatcctaggac

SEQ ID NO: 626542 - DNA, 25 bp, Homo sapien
tttaccctcaaagctaggctgccag

SEQ ID NO: 626543 - DNA, 25 bp, Homo sapien
gctgccagtggaagctaagaataac

SEQ ID NO: 626544 - DNA, 25 bp, Homo sapien
gattacgttaaccaccctgatctga

SEQ ID NO: 626545 - DNA, 25 bp, Homo sapien
tgagtcatgctaggatcagtacagc

SEQ ID NO: 626546 - DNA, 25 bp, Homo sapien
ttagggcatgagagacggcatttgc

SEQ ID NO: 626547 - DNA, 25 bp, Homo sapien
tagaaggtagaacagaggacacagc

SEQ ID NO: 626548 - DNA, 25 bp, Homo sapien
tctgacggcagtgaccagaatggct

SEQ ID NO: 626549 - DNA, 25 bp, Homo sapien
cagttaagattagacctggccatga

SEQ ID NO: 626550 - DNA, 25 bp, Homo sapien
taacaagggtcactggctctctagc

SEQ ID NO: 626551 - DNA, 25 bp, Homo sapien
caaggccacgtgcttcggttctgct

SEQ ID NO: 626552 - DNA, 25 bp, Homo sapien
cgtgtttccgtttaccagtctgcgt

SEQ ID NO: 626553 - DNA, 25 bp, Homo sapien
gtaaatgtcttgtggcaatcctcgc

SEQ ID NO: 626554 - DNA, 25 bp, Homo sapien
cagtctgcgttagtctccgtggcat

SEQ ID NO: 626555 - DNA, 25 bp, Homo sapien
tttcttgaaagagggtgttcgagcc

SEQ ID NO: 626556 - DNA, 25 bp, Homo sapien
gggaatgcgcactctggactcgaac

SEQ ID NO: 626557 - DNA, 25 bp, Homo sapien
cgattctcctctgtagtctcctggg

SEQ ID NO: 626558 - DNA, 25 bp, Homo sapien
gacagccctgcaattgtgaccacct

SEQ ID NO: 626559 - DNA, 25 bp, Homo sapien
cagctgcataaccttaaacaagtgg

SEQ ID NO: 626560 - DNA, 25 bp, Homo sapien
gaaacatggtgaactgccatccaca

SEQ ID NO: 626561 - DNA, 25 bp, Homo sapien
ttatttatgaccagggctttgcaca

SEQ ID NO: 626562 - DNA, 25 bp, Homo sapien
tgtctacctggataattgccatctc

SEQ ID NO: 626563 - DNA, 25 bp, Homo sapien
ttacatgcatattggataagcagtg

SEQ ID NO: 626564 - DNA, 25 bp, Homo sapien
taactatacctatgttgacagggca

SEQ ID NO: 626565 - DNA, 25 bp, Homo sapien
gctttcaagaacttccctgagactg

SEQ ID NO: 626566 - DNA, 25 bp, Homo sapien
gaatttcactgctaggactgtatcc

SEQ ID NO: 626567 - DNA, 25 bp, Homo sapien
catgcatgcatagaaaaagtgtgaa

SEQ ID NO: 626568 - DNA, 25 bp, Homo sapien
tgatgtcagtggtctctggcgcagc

SEQ ID NO: 626569 - DNA, 25 bp, Homo sapien
tccaggtaatcctaatgtgcagctc

SEQ ID NO: 626570 - DNA, 25 bp, Homo sapien
tagtcatcgcatggaagctccctga

SEQ ID NO: 626571 - DNA, 25 bp, Homo sapien
ggactttaaacatcctgaggcttgg

SEQ ID NO: 626572 - DNA, 25 bp, Homo sapien
tctacacacaatagtgaacatctga

SEQ ID NO: 626573 - DNA, 25 bp, Homo sapien
gcagaggacataattgtgtatatag

SEQ ID NO: 626574 - DNA, 25 bp, Homo sapien
tgtatatagaaagccctgatgactc

SEQ ID NO: 626575 - DNA, 25 bp, Homo sapien
gggcctccaatttgaaacgagcaag

SEQ ID NO: 626576 - DNA, 25 bp, Homo sapien
tctttcagagctacatcactgtggc

SEQ ID NO: 626577 - DNA, 25 bp, Homo sapien
tactggaccgttcttcttggaaggc

SEQ ID NO: 626578 - DNA, 25 bp, Homo sapien
tgggagcagttctgatcccctcggg

SEQ ID NO: 626579 - DNA, 25 bp, Homo sapien
caaacgttttcctagcagaatggct

SEQ ID NO: 626580 - DNA, 25 bp, Homo sapien
ccaggaaagtggattcccatattcc

SEQ ID NO: 626581 - DNA, 25 bp, Homo sapien
aggttatacatccaggaaagtggat

SEQ ID NO: 626582 - DNA, 25 bp, Homo sapien
tttgaatgtcacgatgaaaagccag

SEQ ID NO: 626583 - DNA, 25 bp, Homo sapien
ctgctggaaacaccacagccgtgac

SEQ ID NO: 626584 - DNA, 25 bp, Homo sapien
cgaaagccgctaccctttggaagca

SEQ ID NO: 626585 - DNA, 25 bp, Homo sapien
tattctggctgttgccgacactcag

SEQ ID NO: 626586 - DNA, 25 bp, Homo sapien
ttattctggctgttgccgacactca

SEQ ID NO: 626587 - DNA, 25 bp, Homo sapien
ttcacaagactccatgcaggacacc

SEQ ID NO: 626588 - DNA, 25 bp, Homo sapien
tgctgggtgttgcagtccacgcgat

SEQ ID NO: 626589 - DNA, 25 bp, Homo sapien
tcacaagactccatgcaggacacct

SEQ ID NO: 626590 - DNA, 25 bp, Homo sapien
tgcagtccacgcgatttcacaagac

SEQ ID NO: 626591 - DNA, 25 bp, Homo sapien
caaagtgggcttgtagcgtccggtc

SEQ ID NO: 626592 - DNA, 25 bp, Homo sapien
cctgagctgtgggaacgacttggtc

SEQ ID NO: 626593 - DNA, 25 bp, Homo sapien
gttcaattcccagcacatgccgcgt

SEQ ID NO: 626594 - DNA, 25 bp, Homo sapien
ttgcaaaagtttgccgtccgccaaa

SEQ ID NO: 626595 - DNA, 25 bp, Homo sapien
tgcaacttgggaagatcctaggcct

SEQ ID NO: 626596 - DNA, 25 bp, Homo sapien
tgtgggtagggcagtcatccagtcc

SEQ ID NO: 626597 - DNA, 25 bp, Homo sapien
cagacctgtcccataagtagtgcaa

SEQ ID NO: 626598 - DNA, 25 bp, Homo sapien
tgaaggatgctcctacaccagagat

SEQ ID NO: 626599 - DNA, 25 bp, Homo sapien
agagcctaccaacagctgctcagtg

SEQ ID NO: 626600 - DNA, 25 bp, Homo sapien
ggaaagccggaagaggagacctcac

SEQ ID NO: 626601 - DNA, 25 bp, Homo sapien
agaggagacctcacagcagagccta

SEQ ID NO: 626602 - DNA, 25 bp, Homo sapien
tcacagcagagcctaccaacagctg

SEQ ID NO: 626603 - DNA, 25 bp, Homo sapien
tgtggagtctttgcgcgctgcttga

SEQ ID NO: 626604 - DNA, 25 bp, Homo sapien
actgccgggccgaccaagacgcaga

SEQ ID NO: 626605 - DNA, 25 bp, Homo sapien
gctgcttgacatgtacactgccggg

SEQ ID NO: 626606 - DNA, 25 bp, Homo sapien
aagacgcagacgctccagcccatgg

SEQ ID NO: 626607 - DNA, 25 bp, Homo sapien
gaagcaccttcaggactccgtggag

SEQ ID NO: 626608 - DNA, 25 bp, Homo sapien
caaaagctgctaccaaccagtgaga

SEQ ID NO: 626609 - DNA, 25 bp, Homo sapien
gaatagggcctggtacctaacgcag

SEQ ID NO: 626610 - DNA, 25 bp, Homo sapien
gtaatacagctcctgagaaccgcca

SEQ ID NO: 626611 - DNA, 25 bp, Homo sapien
gaactggaaggcaacgtgcatttgg

SEQ ID NO: 626612 - DNA, 25 bp, Homo sapien
cagcacacagtaagggtttagtaat

SEQ ID NO: 626613 - DNA, 25 bp, Homo sapien
gaacccgtttctcgaagtgtcacca

SEQ ID NO: 626614 - DNA, 25 bp, Homo sapien
ggcagcaccgatttcattgctgaca

SEQ ID NO: 626615 - DNA, 25 bp, Homo sapien
acttctgaggaacgtggcacatggc

SEQ ID NO: 626616 - DNA, 25 bp, Homo sapien
tgtaaaaactaaccagcagcctgat

SEQ ID NO: 626617 - DNA, 25 bp, Homo sapien
gaggctttgcaccaagctgggcaca

SEQ ID NO: 626618 - DNA, 25 bp, Homo sapien
caccaagcagcgatgggatatatct

SEQ ID NO: 626619 - DNA, 25 bp, Homo sapien
tattgcagtaacatctggattcctt

SEQ ID NO: 626620 - DNA, 25 bp, Homo sapien
tgtttatggagtggttattgcagta

SEQ ID NO: 626621 - DNA, 25 bp, Homo sapien
gctgagaagccagttctcacagctg

SEQ ID NO: 626622 - DNA, 25 bp, Homo sapien
gagtggttattgcagtaacatctgg

SEQ ID NO: 626623 - DNA, 25 bp, Homo sapien
ccgtagccgtctgcctgccaataag

SEQ ID NO: 626624 - DNA, 25 bp, Homo sapien
cgtctgcctgccaataagggctgtg

SEQ ID NO: 626625 - DNA, 25 bp, Homo sapien
gtgcccgtagccgtctgcctgccaa

SEQ ID NO: 626626 - DNA, 25 bp, Homo sapien
tagccgtctgcctgccaataagggc

SEQ ID NO: 626627 - DNA, 25 bp, Homo sapien
tatatcagtctgctcaagtcatggt

SEQ ID NO: 626628 - DNA, 25 bp, Homo sapien
gatcatagtctgtaaaacgaacccc

SEQ ID NO: 626629 - DNA, 25 bp, Homo sapien
cactgtcagaaagttgtgtgctgga

SEQ ID NO: 626630 - DNA, 25 bp, Homo sapien
agtcaacagacaaaggtttcgggtg

SEQ ID NO: 626631 - DNA, 25 bp, Homo sapien
tggaaacatggcattggatcaagcc

SEQ ID NO: 626632 - DNA, 25 bp, Homo sapien
tatttggtgcagaactttgcagagc

SEQ ID NO: 626633 - DNA, 25 bp, Homo sapien
tcagccccttggagcgtcttgtgtc

SEQ ID NO: 626634 - DNA, 25 bp, Homo sapien
ctaaggtgtcccacgggcaagtagg

SEQ ID NO: 626635 - DNA, 25 bp, Homo sapien
tacctgctggatgaatgcacggtgc

SEQ ID NO: 626636 - DNA, 25 bp, Homo sapien
taggaagggacacaagtacgcagat

SEQ ID NO: 626637 - DNA, 25 bp, Homo sapien
caaaaggctaatgggcacgttcaag

SEQ ID NO: 626638 - DNA, 25 bp, Homo sapien
tgggcattttcacacagtcttggag

SEQ ID NO: 626639 - DNA, 25 bp, Homo sapien
tgtagataataaggttgtattccag

SEQ ID NO: 626640 - DNA, 25 bp, Homo sapien
tttgcaggacatgtgaaaagccaaa

SEQ ID NO: 626641 - DNA, 25 bp, Homo sapien
aagccaaaaataagtctcagtgaag

SEQ ID NO: 626642 - DNA, 25 bp, Homo sapien
agtgctgaacaaagcaatcagacaa

SEQ ID NO: 626643 - DNA, 25 bp, Homo sapien
ggaaaagaacgtgcatgaatctcgt

SEQ ID NO: 626644 - DNA, 25 bp, Homo sapien
ccgtccctgtggactcgaggcgctg

SEQ ID NO: 626645 - DNA, 25 bp, Homo sapien
gttcacttgttcatccaacagacgc

SEQ ID NO: 626646 - DNA, 25 bp, Homo sapien
gacgctcagcattgccgtccctgtg

SEQ ID NO: 626647 - DNA, 25 bp, Homo sapien
caggatacggcatcgggcctcggcg

SEQ ID NO: 626648 - DNA, 25 bp, Homo sapien
acggcatcgggcctcggcgtctccg

SEQ ID NO: 626649 - DNA, 25 bp, Homo sapien
gatacggcatcgggcctcggcgtct

SEQ ID NO: 626650 - DNA, 25 bp, Homo sapien
aaaacggccacaggatacggcgccg

SEQ ID NO: 626651 - DNA, 25 bp, Homo sapien
gaacatgagtaagatattaaacagc

SEQ ID NO: 626652 - DNA, 25 bp, Homo sapien
cgggtaaaatgggcggcagaataca

SEQ ID NO: 626653 - DNA, 25 bp, Homo sapien
tgagtaagatattaaacagcactgg

SEQ ID NO: 626654 - DNA, 25 bp, Homo sapien
caagtgaacatgagtaagatattaa

SEQ ID NO: 626655 - DNA, 25 bp, Homo sapien
ctccccacctcattggcctctctgc

SEQ ID NO: 626656 - DNA, 25 bp, Homo sapien
agcttttgggttggtcaagctgggg

SEQ ID NO: 626657 - DNA, 25 bp, Homo sapien
tcttccatggctggtgtcataacct

SEQ ID NO: 626658 - DNA, 25 bp, Homo sapien
tgccttccagcttttgggttggtca

SEQ ID NO: 626659 - DNA, 25 bp, Homo sapien
tgctgcttatggaacacttctggat

SEQ ID NO: 626660 - DNA, 25 bp, Homo sapien
aggctctgtgctaggggcacatgta

SEQ ID NO: 626661 - DNA, 25 bp, Homo sapien
taggggcacatgtaaatgcctttgt

SEQ ID NO: 626662 - DNA, 25 bp, Homo sapien
ggcaaactcttaataatagtcacag

SEQ ID NO: 626663 - DNA, 25 bp, Homo sapien
tttagtatgtgatgcacagggccgg

SEQ ID NO: 626664 - DNA, 25 bp, Homo sapien
gcagcagcaataaatgatctgattt

SEQ ID NO: 626665 - DNA, 25 bp, Homo sapien
taaatgcagctttagtatgtgatgc

SEQ ID NO: 626666 - DNA, 25 bp, Homo sapien
tccctttgctcttgggactgtaaat

SEQ ID NO: 626667 - DNA, 25 bp, Homo sapien
ggagccctgggaccaaactgttaca

SEQ ID NO: 626668 - DNA, 25 bp, Homo sapien
actgttacactcacggccagagcct

SEQ ID NO: 626669 - DNA, 25 bp, Homo sapien
ctccccttgggaatgttatcctcgc

SEQ ID NO: 626670 - DNA, 25 bp, Homo sapien
ccttgggaatgttatcctcgctgag

SEQ ID NO: 626671 - DNA, 25 bp, Homo sapien
agactattggtcagagagcctcccc

SEQ ID NO: 626672 - DNA, 25 bp, Homo sapien
gcaagcttctgtgggtcatcgttta

SEQ ID NO: 626673 - DNA, 25 bp, Homo sapien
tatagagagatacaacacagagaga

SEQ ID NO: 626674 - DNA, 25 bp, Homo sapien
tatcgctagcattgcccagtatgat

SEQ ID NO: 626675 - DNA, 25 bp, Homo sapien
tctgtgattgttccgggctttgtcc

SEQ ID NO: 626676 - DNA, 25 bp, Homo sapien
cctggcaaagggacacgtgcgtgaa

SEQ ID NO: 626677 - DNA, 25 bp, Homo sapien
gaatattaaacagaggcactacagc

SEQ ID NO: 626678 - DNA, 25 bp, Homo sapien
tctgcgtggaacaagagtggttgca

SEQ ID NO: 626679 - DNA, 25 bp, Homo sapien
gcagctgagtgagcatagacttgga

SEQ ID NO: 626680 - DNA, 25 bp, Homo sapien
tcctttgtcatttaccttgttattc

SEQ ID NO: 626681 - DNA, 25 bp, Homo sapien
tgagcatagacttggagctgcccat

SEQ ID NO: 626682 - DNA, 25 bp, Homo sapien
gttattcttgatgagcagctgagtg

SEQ ID NO: 626683 - DNA, 25 bp, Homo sapien
tgtggagatcacagagcacttcaga

SEQ ID NO: 626684 - DNA, 25 bp, Homo sapien
cagcataggacatttgacgaggaca

SEQ ID NO: 626685 - DNA, 25 bp, Homo sapien
tgaacagaagaggtgtcagctccag

SEQ ID NO: 626686 - DNA, 25 bp, Homo sapien
aagcagctccgtaaatgcccagcaa

SEQ ID NO: 626687 - DNA, 25 bp, Homo sapien
cagtactgacttgctccttgtggct

SEQ ID NO: 626688 - DNA, 25 bp, Homo sapien
caagttgccttaatgaattgcagta

SEQ ID NO: 626689 - DNA, 25 bp, Homo sapien
tcttgtctttgatgaacgctgtagc

SEQ ID NO: 626690 - DNA, 25 bp, Homo sapien
ggcaatcaatgctgctagttccttt

SEQ ID NO: 626691 - DNA, 25 bp, Homo sapien
tcctatgtcgtcttcaaaggccaag

SEQ ID NO: 626692 - DNA, 25 bp, Homo sapien
tcattttatgccatgacaccacact

SEQ ID NO: 626693 - DNA, 25 bp, Homo sapien
gctgaaatgcgtggttttctcaccc

SEQ ID NO: 626694 - DNA, 25 bp, Homo sapien
tcaagacaactagcaccagcagaga

SEQ ID NO: 626695 - DNA, 25 bp, Homo sapien
ctgcaccatcgttgactcatttctt

SEQ ID NO: 626696 - DNA, 25 bp, Homo sapien
caccatcgttgactcatttcttttc

SEQ ID NO: 626697 - DNA, 25 bp, Homo sapien
tgcaccatcgttgactcatttcttt

SEQ ID NO: 626698 - DNA, 25 bp, Homo sapien
gcaccatcgttgactcatttctttt

SEQ ID NO: 626699 - DNA, 25 bp, Homo sapien
gtgagttagttgcatgccagcatca

SEQ ID NO: 626700 - DNA, 25 bp, Homo sapien
tggtgagttagttgcatgccagcat

SEQ ID NO: 626701 - DNA, 25 bp, Homo sapien
acagctttgacccatcccctgcaca

SEQ ID NO: 626702 - DNA, 25 bp, Homo sapien
aatggtgagttagttgcatgccagc

SEQ ID NO: 626703 - DNA, 25 bp, Homo sapien
aagtttctgcttttgtgattggctc

SEQ ID NO: 626704 - DNA, 25 bp, Homo sapien
gtttctgcttttgtgattggctcac

SEQ ID NO: 626705 - DNA, 25 bp, Homo sapien
cagcttggccaagtttctgcttttg

SEQ ID NO: 626706 - DNA, 25 bp, Homo sapien
cttggccaagtttctgcttttgtga

SEQ ID NO: 626707 - DNA, 25 bp, Homo sapien
acaaaagcagaagcttcgtcaagct

SEQ ID NO: 626708 - DNA, 25 bp, Homo sapien
gccactgtggtcagaactgttcact

SEQ ID NO: 626709 - DNA, 25 bp, Homo sapien
caaattgtcctctgagccggtgtga

SEQ ID NO: 626710 - DNA, 25 bp, Homo sapien
tgatggtcacggtcagatgccagcc

SEQ ID NO: 626711 - DNA, 25 bp, Homo sapien
cctttgtcacatgggcgtgatggtc

SEQ ID NO: 626712 - DNA, 25 bp, Homo sapien
tcattccacggtttatgaaacaatt

SEQ ID NO: 626713 - DNA, 25 bp, Homo sapien
taacagaagccctttgatctcaaca

SEQ ID NO: 626714 - DNA, 25 bp, Homo sapien
caagaaggaaatggcacaattatgt

SEQ ID NO: 626715 - DNA, 25 bp, Homo sapien
tcatttgagtttacaagaaggtaac

SEQ ID NO: 626716 - DNA, 25 bp, Homo sapien
aaataaaacacgatgagactcatcc

SEQ ID NO: 626717 - DNA, 25 bp, Homo sapien
tgaaggtttgagaatgtgcgcgatg

SEQ ID NO: 626718 - DNA, 25 bp, Homo sapien
aataaaacacgatgagactcatccc

SEQ ID NO: 626719 - DNA, 25 bp, Homo sapien
gtttgagaatgtgcgcgatggccat

SEQ ID NO: 626720 - DNA, 25 bp, Homo sapien
aagtcagccaagaactcatcgaaat

SEQ ID NO: 626721 - DNA, 25 bp, Homo sapien
gaagtcagccaagaactcatcgaaa

SEQ ID NO: 626722 - DNA, 25 bp, Homo sapien
tgaagtcagccaagaactcatcgaa

SEQ ID NO: 626723 - DNA, 25 bp, Homo sapien
gagttccttgcatagttcctgtcat

SEQ ID NO: 626724 - DNA, 25 bp, Homo sapien
taggcatacaagcagggatgtcttg

SEQ ID NO: 626725 - DNA, 25 bp, Homo sapien
tagttcctgtcataggcatacaagc

SEQ ID NO: 626726 - DNA, 25 bp, Homo sapien
tgaggagttccttgcatagttcctg

SEQ ID NO: 626727 - DNA, 25 bp, Homo sapien
caggagcacagggcgatggcaaagt

SEQ ID NO: 626728 - DNA, 25 bp, Homo sapien
gcaaagtgctgatctgccctctgca

SEQ ID NO: 626729 - DNA, 25 bp, Homo sapien
tgcaaccaaaaccgtccccagattc

SEQ ID NO: 626730 - DNA, 25 bp, Homo sapien
ggagcacagggcgatggcaaagtgc

SEQ ID NO: 626731 - DNA, 25 bp, Homo sapien
taagttgatgtactcataaaagatg

SEQ ID NO: 626732 - DNA, 25 bp, Homo sapien
tactgggacataaactgtaagctaa

SEQ ID NO: 626733 - DNA, 25 bp, Homo sapien
aataacatttggagccttttactgg

SEQ ID NO: 626734 - DNA, 25 bp, Homo sapien
tctaaacgtaattgcaaataagttg

SEQ ID NO: 626735 - DNA, 25 bp, Homo sapien
tataaatgtgccatcctctggtgtc

SEQ ID NO: 626736 - DNA, 25 bp, Homo sapien
tgacccgtgctgcttaactgagagc

SEQ ID NO: 626737 - DNA, 25 bp, Homo sapien
tttcaagctcctatctgacccgtgc

SEQ ID NO: 626738 - DNA, 25 bp, Homo sapien
tcccgtgtcagctcaaatattcaat

SEQ ID NO: 626739 - DNA, 25 bp, Homo sapien
tctccacagaaatcgtatttggaat

SEQ ID NO: 626740 - DNA, 25 bp, Homo sapien
ttctccacagaaatcgtatttggaa

SEQ ID NO: 626741 - DNA, 25 bp, Homo sapien
tttctccacagaaatcgtatttgga

SEQ ID NO: 626742 - DNA, 25 bp, Homo sapien
cagagccgggaaattaggtcttacg

SEQ ID NO: 626743 - DNA, 25 bp, Homo sapien
taagcttgggaatggaccctggcct

SEQ ID NO: 626744 - DNA, 25 bp, Homo sapien
cacatgtgaacttagaaccctgggt

SEQ ID NO: 626745 - DNA, 25 bp, Homo sapien
caggtgagctcagttcttgaaaagg

SEQ ID NO: 626746 - DNA, 25 bp, Homo sapien
aaaagacggataggccaattccagg

SEQ ID NO: 626747 - DNA, 25 bp, Homo sapien
ctgctctgtgatccaacggggaaaa

SEQ ID NO: 626748 - DNA, 25 bp, Homo sapien
tctgtgatccaacggggaaaaagac

SEQ ID NO: 626749 - DNA, 25 bp, Homo sapien
aaaagtgaggtagaatttcacttct

SEQ ID NO: 626750 - DNA, 25 bp, Homo sapien
tccagcgtggacaacacccagaaca

SEQ ID NO: 626751 - DNA, 25 bp, Homo sapien
tagccctggaacatctggctcagtg

SEQ ID NO: 626752 - DNA, 25 bp, Homo sapien
aatgaaactggccttagccctggaa

SEQ ID NO: 626753 - DNA, 25 bp, Homo sapien
ctggcacgtccagcgtggacaacac

SEQ ID NO: 626754 - DNA, 25 bp, Homo sapien
ctgcagccaaccacctgctactcac

SEQ ID NO: 626755 - DNA, 25 bp, Homo sapien
tccaaaaacttggcatcagattaat

SEQ ID NO: 626756 - DNA, 25 bp, Homo sapien
ttactcattgtggttaaacaaccac

SEQ ID NO: 626757 - DNA, 25 bp, Homo sapien
tggttgctcataacatccaaaaact

SEQ ID NO: 626758 - DNA, 25 bp, Homo sapien
tactcattgtggttaaacaaccaca

SEQ ID NO: 626759 - DNA, 25 bp, Homo sapien
ccctgaagtcgtttcttccttgcag

SEQ ID NO: 626760 - DNA, 25 bp, Homo sapien
gcaccttggccacacccgtcctctc

SEQ ID NO: 626761 - DNA, 25 bp, Homo sapien
cctacctctgccaacaggcacactg

SEQ ID NO: 626762 - DNA, 25 bp, Homo sapien
ttctcactgctgtcaatatcggcat

SEQ ID NO: 626763 - DNA, 25 bp, Homo sapien
gcattgtcctggcccctacctctgc

SEQ ID NO: 626764 - DNA, 25 bp, Homo sapien
tcactgctgtcaatatcggcattgt

SEQ ID NO: 626765 - DNA, 25 bp, Homo sapien
aagggaccttgctgcccatgcctac

SEQ ID NO: 626766 - DNA, 25 bp, Homo sapien
aaagggaccttgctgcccatgccta

SEQ ID NO: 626767 - DNA, 25 bp, Homo sapien
ctaaagggaccttgctgcccatgcc

SEQ ID NO: 626768 - DNA, 25 bp, Homo sapien
ctctaaagggaccttgctgcccatg

SEQ ID NO: 626769 - DNA, 25 bp, Homo sapien
cagggttgagctgacttgacttgaa

SEQ ID NO: 626770 - DNA, 25 bp, Homo sapien
gggtctgagagacaacactcgctgt

SEQ ID NO: 626771 - DNA, 25 bp, Homo sapien
taggtaggagccatgtcatcatggc

SEQ ID NO: 626772 - DNA, 25 bp, Homo sapien
tcattgccggtgctcaatcagggtt

SEQ ID NO: 626773 - DNA, 25 bp, Homo sapien
tttgtgtggcgaagtcaagaccctg

SEQ ID NO: 626774 - DNA, 25 bp, Homo sapien
caacagttctttcggagtccctcaa

SEQ ID NO: 626775 - DNA, 25 bp, Homo sapien
ttggacgtgctctcaagttcttttg

SEQ ID NO: 626776 - DNA, 25 bp, Homo sapien
taagtctttaaactgcgggagagcc

SEQ ID NO: 626777 - DNA, 25 bp, Homo sapien
gcaaaattcccacagattggaatgg

SEQ ID NO: 626778 - DNA, 25 bp, Homo sapien
agcaaaattcccacagattggaatg

SEQ ID NO: 626779 - DNA, 25 bp, Homo sapien
ggaacacagcaaggacgtcttttct

SEQ ID NO: 626780 - DNA, 25 bp, Homo sapien
tcaccagttccattgaacactgtac

SEQ ID NO: 626781 - DNA, 25 bp, Homo sapien
gcaaggacgtcttttctcaccagtt

SEQ ID NO: 626782 - DNA, 25 bp, Homo sapien
ttcctcttcatatcaggaacacagc

SEQ ID NO: 626783 - DNA, 25 bp, Homo sapien
ggttgatgtgtcttgctccattgtt

SEQ ID NO: 626784 - DNA, 25 bp, Homo sapien
tcttgctccattgttgtctgttgtc

SEQ ID NO: 626785 - DNA, 25 bp, Homo sapien
gttgatgtgtcttgctccattgttg

SEQ ID NO: 626786 - DNA, 25 bp, Homo sapien
gtgtcttgctccattgttgtctgtt

SEQ ID NO: 626787 - DNA, 25 bp, Homo sapien
tgggctccctcgatcatgaagaagt

SEQ ID NO: 626788 - DNA, 25 bp, Homo sapien
tacttgagatggtagcaacaggccc

SEQ ID NO: 626789 - DNA, 25 bp, Homo sapien
ggaattgacaatagcctgggctccc

SEQ ID NO: 626790 - DNA, 25 bp, Homo sapien
tgggctgaaatgacccaacaacaga

SEQ ID NO: 626791 - DNA, 25 bp, Homo sapien
aattcaggttgctggactcaaaatc

SEQ ID NO: 626792 - DNA, 25 bp, Homo sapien
attcaggttgctggactcaaaatcc

SEQ ID NO: 626793 - DNA, 25 bp, Homo sapien
atgaggcctttctctgggggcccca

SEQ ID NO: 626794 - DNA, 25 bp, Homo sapien
tgaggcctttctctgggggccccat

SEQ ID NO: 626795 - DNA, 25 bp, Homo sapien
tatgaggcctttctctgggggcccc

SEQ ID NO: 626796 - DNA, 25 bp, Homo sapien
ttatgaggcctttctctgggggccc

SEQ ID NO: 626797 - DNA, 25 bp, Homo sapien
tcacaagcccgttccgaccacggga

SEQ ID NO: 626798 - DNA, 25 bp, Homo sapien
caccgccttcacaagcccgttccga

SEQ ID NO: 626799 - DNA, 25 bp, Homo sapien
cagcaccgccttcacaagcccgttc

SEQ ID NO: 626800 - DNA, 25 bp, Homo sapien
cccgttccgaccacgggaggctcat

SEQ ID NO: 626801 - DNA, 25 bp, Homo sapien
tattgtaggcatcccaaacggccct

SEQ ID NO: 626802 - DNA, 25 bp, Homo sapien
gaaagcacactctgtacacattggg

SEQ ID NO: 626803 - DNA, 25 bp, Homo sapien
taacgatgagtgaaggaagtccaac

SEQ ID NO: 626804 - DNA, 25 bp, Homo sapien
gaaatgtttgcatgaatccaccaga

SEQ ID NO: 626805 - DNA, 25 bp, Homo sapien
ctagatgtcggagaaactaagcatg

SEQ ID NO: 626806 - DNA, 25 bp, Homo sapien
tagatgtcggagaaactaagcatgg

SEQ ID NO: 626807 - DNA, 25 bp, Homo sapien
atgtcggagaaactaagcatggctt

SEQ ID NO: 626808 - DNA, 25 bp, Homo sapien
gatgtcggagaaactaagcatggct

SEQ ID NO: 626809 - DNA, 25 bp, Homo sapien
ctttatacaggagcattctggctgg

SEQ ID NO: 626810 - DNA, 25 bp, Homo sapien
tggtcactagacactttatacagga

SEQ ID NO: 626811 - DNA, 25 bp, Homo sapien
ggtccctgatcccatgccttgtgac

SEQ ID NO: 626812 - DNA, 25 bp, Homo sapien
tccaacagtggtcactagacacttt

SEQ ID NO: 626813 - DNA, 25 bp, Homo sapien
gtgattgtgctaccccatccgggaa

SEQ ID NO: 626814 - DNA, 25 bp, Homo sapien
actgactaggcggttggcgtgaccc

SEQ ID NO: 626815 - DNA, 25 bp, Homo sapien
gaaacagctatggttggagactccc

SEQ ID NO: 626816 - DNA, 25 bp, Homo sapien
aaacagcgagtgaatcctgcgccag

SEQ ID NO: 626817 - DNA, 25 bp, Homo sapien
tcaaaggattccaagctccgtgttt

SEQ ID NO: 626818 - DNA, 25 bp, Homo sapien
ggattccaagctccgtgtttgagtg

SEQ ID NO: 626819 - DNA, 25 bp, Homo sapien
aaggattccaagctccgtgtttgag

SEQ ID NO: 626820 - DNA, 25 bp, Homo sapien
ccaagctccgtgtttgagtggtcat

SEQ ID NO: 626821 - DNA, 25 bp, Homo sapien
gacttatgttcaaagggtggatttc

SEQ ID NO: 626822 - DNA, 25 bp, Homo sapien
aaacatagatttgggtcgtctcggc

SEQ ID NO: 626823 - DNA, 25 bp, Homo sapien
taaacataaaaatgcggcagcccgc

SEQ ID NO: 626824 - DNA, 25 bp, Homo sapien
ttatctgagttgtacagccaggaag

SEQ ID NO: 626825 - DNA, 25 bp, Homo sapien
taatcttgactgagattcatcaagg

SEQ ID NO: 626826 - DNA, 25 bp, Homo sapien
aacctttgcgccgagaggagcatgc

SEQ ID NO: 626827 - DNA, 25 bp, Homo sapien
acctcctggaacctttgcgccgaga

SEQ ID NO: 626828 - DNA, 25 bp, Homo sapien
aggagcatgcgggtgccttccaggc

SEQ ID NO: 626829 - DNA, 25 bp, Homo sapien
cacattcggctcctgagttcgaaca

SEQ ID NO: 626830 - DNA, 25 bp, Homo sapien
ctccacattcggctcctgagttcga

SEQ ID NO: 626831 - DNA, 25 bp, Homo sapien
ttcggctcctgagttcgaacactgg

SEQ ID NO: 626832 - DNA, 25 bp, Homo sapien
tcctgagttcgaacactggcctggt

SEQ ID NO: 626833 - DNA, 25 bp, Homo sapien
gcagggcgtgttcagcttccatcac

SEQ ID NO: 626834 - DNA, 25 bp, Homo sapien
ggcgtgttcagcttccatcactgct

SEQ ID NO: 626835 - DNA, 25 bp, Homo sapien
gaaaggccctggtattcatggacag

SEQ ID NO: 626836 - DNA, 25 bp, Homo sapien
catcactgctttagaaaggccctgg

SEQ ID NO: 626837 - DNA, 25 bp, Homo sapien
actggccatagggaactgggagccc

SEQ ID NO: 626838 - DNA, 25 bp, Homo sapien
cacaaggttctagagtttgacagca

SEQ ID NO: 626839 - DNA, 25 bp, Homo sapien
ggagccctcttcacgttctctgtgg

SEQ ID NO: 626840 - DNA, 25 bp, Homo sapien
gagatactccctaatgtacttgcag

SEQ ID NO: 626841 - DNA, 25 bp, Homo sapien
tcaaacattccaatgcactcaaaca

SEQ ID NO: 626842 - DNA, 25 bp, Homo sapien
caaacattccaatgcactcaaacat

SEQ ID NO: 626843 - DNA, 25 bp, Homo sapien
acaatgggacaccttgggtttgcat

SEQ ID NO: 626844 - DNA, 25 bp, Homo sapien
ctggttgtgacaatgggacaccttg

SEQ ID NO: 626845 - DNA, 25 bp, Homo sapien
tgacaatgggacaccttgggtttgc

SEQ ID NO: 626846 - DNA, 25 bp, Homo sapien
ttgtgacaatgggacaccttgggtt

SEQ ID NO: 626847 - DNA, 25 bp, Homo sapien
tttgtcatacctgggtacagccgcc

SEQ ID NO: 626848 - DNA, 25 bp, Homo sapien
tgtcatacctgggtacagccgccgt

SEQ ID NO: 626849 - DNA, 25 bp, Homo sapien
gtcatacctgggtacagccgccgtg

SEQ ID NO: 626850 - DNA, 25 bp, Homo sapien
tcatacctgggtacagccgccgtgt

SEQ ID NO: 626851 - DNA, 25 bp, Homo sapien
ccatcatgatttcctgccatcagct

SEQ ID NO: 626852 - DNA, 25 bp, Homo sapien
aaaataggtgttccatcatgatttc

SEQ ID NO: 626853 - DNA, 25 bp, Homo sapien
acaaaataggtgttccatcatgatt

SEQ ID NO: 626854 - DNA, 25 bp, Homo sapien
tccatcatgatttcctgccatcagc

SEQ ID NO: 626855 - DNA, 25 bp, Homo sapien
tctctgagtacctgagttttgaagt

SEQ ID NO: 626856 - DNA, 25 bp, Homo sapien
ggaagtgctctaccagctgcaagac

SEQ ID NO: 626857 - DNA, 25 bp, Homo sapien
cagctgcaagacaatggctatgagg

SEQ ID NO: 626858 - DNA, 25 bp, Homo sapien
tgctctaccagctgcaagacaatgg

SEQ ID NO: 626859 - DNA, 25 bp, Homo sapien
tatgaggggcaccatgaccatttta

SEQ ID NO: 626860 - DNA, 25 bp, Homo sapien
ccagcacgctgtatggtaacaaagg

SEQ ID NO: 626861 - DNA, 25 bp, Homo sapien
acagacctccctttgaagggccctg

SEQ ID NO: 626862 - DNA, 25 bp, Homo sapien
tatcatcacaacagtgacacagtct

SEQ ID NO: 626863 - DNA, 25 bp, Homo sapien
aagggccctgcactctatcatcaca

SEQ ID NO: 626864 - DNA, 25 bp, Homo sapien
agtgacacagtctctgggccctcac

SEQ ID NO: 626865 - DNA, 25 bp, Homo sapien
ttaacttagaccagcaaattggccc

SEQ ID NO: 626866 - DNA, 25 bp, Homo sapien
cacaggtatcctcagacccatcttg

SEQ ID NO: 626867 - DNA, 25 bp, Homo sapien
tgttgaattacttctcacaggtatc

SEQ ID NO: 626868 - DNA, 25 bp, Homo sapien
ccttgtcactccaatttaacttaga

SEQ ID NO: 626869 - DNA, 25 bp, Homo sapien
catctctagaaaaatggtctgaggc

SEQ ID NO: 626870 - DNA, 25 bp, Homo sapien
tctctagaaaaatggtctgaggccg

SEQ ID NO: 626871 - DNA, 25 bp, Homo sapien
tctagaaaaatggtctgaggccgga

SEQ ID NO: 626872 - DNA, 25 bp, Homo sapien
agaaaaatggtctgaggccggacgt

SEQ ID NO: 626873 - DNA, 25 bp, Homo sapien
gagagaaatggtcagcctactcacc

SEQ ID NO: 626874 - DNA, 25 bp, Homo sapien
ttccagaacgtggtacgcacaccag

SEQ ID NO: 626875 - DNA, 25 bp, Homo sapien
gaggagacgacctcggctctgtcat

SEQ ID NO: 626876 - DNA, 25 bp, Homo sapien
gagtccttccggtgattcagtgcca

SEQ ID NO: 626877 - DNA, 25 bp, Homo sapien
ggtgcctgtccaccagctcgaagcc

SEQ ID NO: 626878 - DNA, 25 bp, Homo sapien
caggtgcctgtccaccagctcgaag

SEQ ID NO: 626879 - DNA, 25 bp, Homo sapien
tgcctgtccaccagctcgaagccat

SEQ ID NO: 626880 - DNA, 25 bp, Homo sapien
aggtgcctgtccaccagctcgaagc

SEQ ID NO: 626881 - DNA, 25 bp, Homo sapien
tgaactcgctgaagcacaacattct

SEQ ID NO: 626882 - DNA, 25 bp, Homo sapien
gattttatgtgaactcgctgaagca

SEQ ID NO: 626883 - DNA, 25 bp, Homo sapien
ctttcctcaacaccgtcagagatga

SEQ ID NO: 626884 - DNA, 25 bp, Homo sapien
ccgtcagagatgattttatgtgaac

SEQ ID NO: 626885 - DNA, 25 bp, Homo sapien
ccaggaatccccatgctggagacca

SEQ ID NO: 626886 - DNA, 25 bp, Homo sapien
gacgtggtccaggaatccccatgct

SEQ ID NO: 626887 - DNA, 25 bp, Homo sapien
gtggtccaggaatccccatgctgga

SEQ ID NO: 626888 - DNA, 25 bp, Homo sapien
ggaatccccatgctggagaccactg

SEQ ID NO: 626889 - DNA, 25 bp, Homo sapien
ccttcccacttgtctggttcacagt

SEQ ID NO: 626890 - DNA, 25 bp, Homo sapien
gtgaattagctcttcatccaccttc

SEQ ID NO: 626891 - DNA, 25 bp, Homo sapien
ttcccacttgtctggttcacagtgt

SEQ ID NO: 626892 - DNA, 25 bp, Homo sapien
gtttcagtgaattagctcttcatcc

SEQ ID NO: 626893 - DNA, 25 bp, Homo sapien
ttggggagggaacattctcgggcat

SEQ ID NO: 626894 - DNA, 25 bp, Homo sapien
gttggggagggaacattctcgggca

SEQ ID NO: 626895 - DNA, 25 bp, Homo sapien
gagggaacattctcgggcatctcat

SEQ ID NO: 626896 - DNA, 25 bp, Homo sapien
caagcttccacaatcaggatgacct

SEQ ID NO: 626897 - DNA, 25 bp, Homo sapien
tggcaagaatgcctggtcctcctgc

SEQ ID NO: 626898 - DNA, 25 bp, Homo sapien
gcttccacaatcaggatgaccttgg

SEQ ID NO: 626899 - DNA, 25 bp, Homo sapien
tcctggcaagcttccacaatcagga

SEQ ID NO: 626900 - DNA, 25 bp, Homo sapien
accaggccgaataaaccaccaggct

SEQ ID NO: 626901 - DNA, 25 bp, Homo sapien
tttcctcctcatacaattactgtga

SEQ ID NO: 626902 - DNA, 25 bp, Homo sapien
tccgcacactgactgctggtttcct

SEQ ID NO: 626903 - DNA, 25 bp, Homo sapien
tggtctatccttcgcacagaactgt

SEQ ID NO: 626904 - DNA, 25 bp, Homo sapien
ctccgtttggcctgtggtccagact

SEQ ID NO: 626905 - DNA, 25 bp, Homo sapien
gctccgtttggcctgtggtccagac

SEQ ID NO: 626906 - DNA, 25 bp, Homo sapien
tgctccgtttggcctgtggtccaga

SEQ ID NO: 626907 - DNA, 25 bp, Homo sapien
tccgtttggcctgtggtccagactc

SEQ ID NO: 626908 - DNA, 25 bp, Homo sapien
agtttccatagactgttttcccagc

SEQ ID NO: 626909 - DNA, 25 bp, Homo sapien
cctttgccagtttccatagactgtt

SEQ ID NO: 626910 - DNA, 25 bp, Homo sapien
gccagtttccatagactgttttccc

SEQ ID NO: 626911 - DNA, 25 bp, Homo sapien
gtgtcctttgccagtttccatagac

SEQ ID NO: 626912 - DNA, 25 bp, Homo sapien
atccaccttgtggattgaaatgaca

SEQ ID NO: 626913 - DNA, 25 bp, Homo sapien
acaggctactcacaatccaccttgt

SEQ ID NO: 626914 - DNA, 25 bp, Homo sapien
caccttgtggattgaaatgacaggg

SEQ ID NO: 626915 - DNA, 25 bp, Homo sapien
ggctactcacaatccaccttgtgga

SEQ ID NO: 626916 - DNA, 25 bp, Homo sapien
acttaggaacagagtagaaacgctg

SEQ ID NO: 626917 - DNA, 25 bp, Homo sapien
catcaatgttagaggcccattcaca

SEQ ID NO: 626918 - DNA, 25 bp, Homo sapien
cagccaataggaacgggatgccttc

SEQ ID NO: 626919 - DNA, 25 bp, Homo sapien
aacgctgtggcgtttcagaagcatc

SEQ ID NO: 626920 - DNA, 25 bp, Homo sapien
cagaagtagtgacttctcaggaaaa

SEQ ID NO: 626921 - DNA, 25 bp, Homo sapien
accctccagcaaggatactgtgaag

SEQ ID NO: 626922 - DNA, 25 bp, Homo sapien
gtcataagacttcagggaaatcaga

SEQ ID NO: 626923 - DNA, 25 bp, Homo sapien
tactgtgaaggtgcaaacactccca

SEQ ID NO: 626924 - DNA, 25 bp, Homo sapien
tatccttcaaacttgttcccatttc

SEQ ID NO: 626925 - DNA, 25 bp, Homo sapien
tctaaacaatgtccaacctcagtca

SEQ ID NO: 626926 - DNA, 25 bp, Homo sapien
tatgaaagccactatattggaagca

SEQ ID NO: 626927 - DNA, 25 bp, Homo sapien
gtcaaaattcctgagtagcgactat

SEQ ID NO: 626928 - DNA, 25 bp, Homo sapien
accatctaatcctattactttgacc

SEQ ID NO: 626929 - DNA, 25 bp, Homo sapien
ctattactttgaccacagaaggcat

SEQ ID NO: 626930 - DNA, 25 bp, Homo sapien
tatccaaccatctaatcctattact

SEQ ID NO: 626931 - DNA, 25 bp, Homo sapien
ctggaaagatgtatccaaccatcta

SEQ ID NO: 626932 - DNA, 25 bp, Homo sapien
ggttcataggtgtactggctgatga

SEQ ID NO: 626933 - DNA, 25 bp, Homo sapien
acaggttcataggtgtactggctga

SEQ ID NO: 626934 - DNA, 25 bp, Homo sapien
aggttcataggtgtactggctgatg

SEQ ID NO: 626935 - DNA, 25 bp, Homo sapien
caggttcataggtgtactggctgat

SEQ ID NO: 626936 - DNA, 25 bp, Homo sapien
cattatggtaattggaaggtgatgg

SEQ ID NO: 626937 - DNA, 25 bp, Homo sapien
gatggaaaacatgggtaggtactgc

SEQ ID NO: 626938 - DNA, 25 bp, Homo sapien
gttatctctgccgaaataccctctt

SEQ ID NO: 626939 - DNA, 25 bp, Homo sapien
tgctggccgattctgttatctctgc

SEQ ID NO: 626940 - DNA, 25 bp, Homo sapien
accacacctctgatcactttctttt

SEQ ID NO: 626941 - DNA, 25 bp, Homo sapien
caaccaccacacctctgatcacttt

SEQ ID NO: 626942 - DNA, 25 bp, Homo sapien
ccaccacacctctgatcactttctt

SEQ ID NO: 626943 - DNA, 25 bp, Homo sapien
aaccaccacacctctgatcactttc

SEQ ID NO: 626944 - DNA, 25 bp, Homo sapien
cccaggcggcaggatatggttgttt

SEQ ID NO: 626945 - DNA, 25 bp, Homo sapien
tgcctcggtgcatgagtgcccaggc

SEQ ID NO: 626946 - DNA, 25 bp, Homo sapien
gtttaatttcaagaggccaattgtc

SEQ ID NO: 626947 - DNA, 25 bp, Homo sapien
ccatgcctcggtgcatgagtgccca

SEQ ID NO: 626948 - DNA, 25 bp, Homo sapien
gcttctccatgagttacggtggcct

SEQ ID NO: 626949 - DNA, 25 bp, Homo sapien
ttctccatgagttacggtggcctga

SEQ ID NO: 626950 - DNA, 25 bp, Homo sapien
ctccatgagttacggtggcctgaga

SEQ ID NO: 626951 - DNA, 25 bp, Homo sapien
agggcttctccatgagttacggtgg

SEQ ID NO: 626952 - DNA, 25 bp, Homo sapien
tgatgccagcacattccttcgctta

SEQ ID NO: 626953 - DNA, 25 bp, Homo sapien
cctgatgccagcacattccttcgct

SEQ ID NO: 626954 - DNA, 25 bp, Homo sapien
gatgccagcacattccttcgcttac

SEQ ID NO: 626955 - DNA, 25 bp, Homo sapien
agccctgatgccagcacattccttc

SEQ ID NO: 626956 - DNA, 25 bp, Homo sapien
ttttcagggcacaagtgtagaggct

SEQ ID NO: 626957 - DNA, 25 bp, Homo sapien
gctaagggtaacttgataggaggaa

SEQ ID NO: 626958 - DNA, 25 bp, Homo sapien
cgttggatggcatgcccgtggctac

SEQ ID NO: 626959 - DNA, 25 bp, Homo sapien
tctccacgataccagggctaagggt

SEQ ID NO: 626960 - DNA, 25 bp, Homo sapien
tggcttgcacatcctgaacgctgaa

SEQ ID NO: 626961 - DNA, 25 bp, Homo sapien
gaagtcttttggcttgtttcaggca

SEQ ID NO: 626962 - DNA, 25 bp, Homo sapien
gcacatcctgaacgctgaagtcttt

SEQ ID NO: 626963 - DNA, 25 bp, Homo sapien
tgaacgctgaagtcttttggcttgt

SEQ ID NO: 626964 - DNA, 25 bp, Homo sapien
agctcctttgtctcaggctttgtgg

SEQ ID NO: 626965 - DNA, 25 bp, Homo sapien
tcctttgtctcaggctttgtgggac

SEQ ID NO: 626966 - DNA, 25 bp, Homo sapien
tttgtctcaggctttgtgggactgg

SEQ ID NO: 626967 - DNA, 25 bp, Homo sapien
gctcctttgtctcaggctttgtggg

SEQ ID NO: 626968 - DNA, 25 bp, Homo sapien
tacacatggtccaatggtcagccca

SEQ ID NO: 626969 - DNA, 25 bp, Homo sapien
catggcgctgaaactcctggaacac

SEQ ID NO: 626970 - DNA, 25 bp, Homo sapien
gaagtgaggtgtctatccacaagca

SEQ ID NO: 626971 - DNA, 25 bp, Homo sapien
catctctgggtgcatacaataactg

SEQ ID NO: 626972 - DNA, 25 bp, Homo sapien
ccatgagcgagatggagtccgagca

SEQ ID NO: 626973 - DNA, 25 bp, Homo sapien
ccttccttcatcaggcggaggtgac

SEQ ID NO: 626974 - DNA, 25 bp, Homo sapien
tcatttcaaagccacgccatgagcg

SEQ ID NO: 626975 - DNA, 25 bp, Homo sapien
caaagagcagccgttcacacgagaa

SEQ ID NO: 626976 - DNA, 25 bp, Homo sapien
tcaaagcggaactctcacagtggcc

SEQ ID NO: 626977 - DNA, 25 bp, Homo sapien
gaggagtgactattctcaccggaca

SEQ ID NO: 626978 - DNA, 25 bp, Homo sapien
taaacagcaccagccaatggaagtc

SEQ ID NO: 626979 - DNA, 25 bp, Homo sapien
acagtggcctatccctgagcaggtc

SEQ ID NO: 626980 - DNA, 25 bp, Homo sapien
ctttaatgtcgactccagctggtgc

SEQ ID NO: 626981 - DNA, 25 bp, Homo sapien
cctttaatgtcgactccagctggtg

SEQ ID NO: 626982 - DNA, 25 bp, Homo sapien
gccctttaatgtcgactccagctgg

SEQ ID NO: 626983 - DNA, 25 bp, Homo sapien
gggccctttaatgtcgactccagct

SEQ ID NO: 626984 - DNA, 25 bp, Homo sapien
gacacatgcaaacgtcctgagactg

SEQ ID NO: 626985 - DNA, 25 bp, Homo sapien
gattaaaggcgatacagagactccc

SEQ ID NO: 626986 - DNA, 25 bp, Homo sapien
gccccgtgaggagatagcatgaact

SEQ ID NO: 626987 - DNA, 25 bp, Homo sapien
aagggtacttgcaatgggctggtca

SEQ ID NO: 626988 - DNA, 25 bp, Homo sapien
tgcaggcacaggcagcaacgcagcc

SEQ ID NO: 626989 - DNA, 25 bp, Homo sapien
gtcagcatgtaaacaatcacattca

SEQ ID NO: 626990 - DNA, 25 bp, Homo sapien
gggacatgatagtcagcatgtaaac

SEQ ID NO: 626991 - DNA, 25 bp, Homo sapien
caatcacattcacgggaagctgcag

SEQ ID NO: 626992 - DNA, 25 bp, Homo sapien
tcattcatccatgcgtttgttcagc

SEQ ID NO: 626993 - DNA, 25 bp, Homo sapien
cattcatccatgcgtttgttcagca

SEQ ID NO: 626994 - DNA, 25 bp, Homo sapien
attcatccatgcgtttgttcagcag

SEQ ID NO: 626995 - DNA, 25 bp, Homo sapien
gctttatctgaccacactagaggaa

SEQ ID NO: 626996 - DNA, 25 bp, Homo sapien
aaaaagaatctaaggacgggtgcag

SEQ ID NO: 626997 - DNA, 25 bp, Homo sapien
tgacgtacagaaatttagcagcttt

SEQ ID NO: 626998 - DNA, 25 bp, Homo sapien
tcagacacgctattatcaggagagg

SEQ ID NO: 626999 - DNA, 25 bp, Homo sapien
catcgagtgccattgtgctaggtgt

SEQ ID NO: 627000 - DNA, 25 bp, Homo sapien
gaatgcacttatttaggcttgagtg

SEQ ID NO: 627001 - DNA, 25 bp, Homo sapien
tgtacgaagccactttcacatcgag

SEQ ID NO: 627002 - DNA, 25 bp, Homo sapien
tgctgcccatggaaatagtgctccc

SEQ ID NO: 627003 - DNA, 25 bp, Homo sapien
tgactgcaggtgaagtaggatcaga

SEQ ID NO: 627004 - DNA, 25 bp, Homo sapien
cctgtggccatagctttgcaaaact

SEQ ID NO: 627005 - DNA, 25 bp, Homo sapien
ggatagggtgtctttagctgattga

SEQ ID NO: 627006 - DNA, 25 bp, Homo sapien
tgcagttgacttcaggccaccatct

SEQ ID NO: 627007 - DNA, 25 bp, Homo sapien
tcagtcaaccaagacaccagctggg

SEQ ID NO: 627008 - DNA, 25 bp, Homo sapien
cacagcccagatgttgaccactagg

SEQ ID NO: 627009 - DNA, 25 bp, Homo sapien
catattctaaggcaagagtgggagc

SEQ ID NO: 627010 - DNA, 25 bp, Homo sapien
ctctactaaaagagccaggctggtc

SEQ ID NO: 627011 - DNA, 25 bp, Homo sapien
ggagtcctcaggtatccagcatgtg

SEQ ID NO: 627012 - DNA, 25 bp, Homo sapien
cgatcaatcctgaaaatgagtgtcc

SEQ ID NO: 627013 - DNA, 25 bp, Homo sapien
tacggagtgatgcatccataagcca

SEQ ID NO: 627014 - DNA, 25 bp, Homo sapien
catggccacttgaaggctaccagta

SEQ ID NO: 627015 - DNA, 25 bp, Homo sapien
tcacatgcaaaagcagacggtcctt

SEQ ID NO: 627016 - DNA, 25 bp, Homo sapien
tttctacatgaaggacaaagcctca

SEQ ID NO: 627017 - DNA, 25 bp, Homo sapien
tgatttggtgactggcgcgttagca

SEQ ID NO: 627018 - DNA, 25 bp, Homo sapien
gaaggcaagcgctaccaagtttcca

SEQ ID NO: 627019 - DNA, 25 bp, Homo sapien
gaactggccggttgatatatgacaa

SEQ ID NO: 627020 - DNA, 25 bp, Homo sapien
tgttggaggacttcaaagccgctct

SEQ ID NO: 627021 - DNA, 25 bp, Homo sapien
catgggcacgcaggcaggaattgct

SEQ ID NO: 627022 - DNA, 25 bp, Homo sapien
gtagttactacaggaggcagcacca

SEQ ID NO: 627023 - DNA, 25 bp, Homo sapien
aaatgacagcatcaccatacaggtg

SEQ ID NO: 627024 - DNA, 25 bp, Homo sapien
catacaggtgatcaaagttgagccc

SEQ ID NO: 627025 - DNA, 25 bp, Homo sapien
tactccctaatcaccaaatgacagc

SEQ ID NO: 627026 - DNA, 25 bp, Homo sapien
tactcctgccagtcctatctaagat

SEQ ID NO: 627027 - DNA, 25 bp, Homo sapien
tgaagtcgactcgataaacatggag

SEQ ID NO: 627028 - DNA, 25 bp, Homo sapien
cagggaaagaacacatggctatctc

SEQ ID NO: 627029 - DNA, 25 bp, Homo sapien
tcaaaaataatagtgggcgagccta

SEQ ID NO: 627030 - DNA, 25 bp, Homo sapien
aaagaaagccaaactgtacccagca

SEQ ID NO: 627031 - DNA, 25 bp, Homo sapien
acagagttgagttcttctttactca

SEQ ID NO: 627032 - DNA, 25 bp, Homo sapien
cccactacagagttgagttcttctt

SEQ ID NO: 627033 - DNA, 25 bp, Homo sapien
ccccactacagagttgagttcttct

SEQ ID NO: 627034 - DNA, 25 bp, Homo sapien
tcattgttatccacaagggtgtgcc

SEQ ID NO: 627035 - DNA, 25 bp, Homo sapien
aaatattcccccgaaactcagcatc

SEQ ID NO: 627036 - DNA, 25 bp, Homo sapien
gaaactcagcatcctccgtgtgtcc

SEQ ID NO: 627037 - DNA, 25 bp, Homo sapien
gtcattgttatccacaagggtgtgc

SEQ ID NO: 627038 - DNA, 25 bp, Homo sapien
tcaggccgaagaaacctcttttcac

SEQ ID NO: 627039 - DNA, 25 bp, Homo sapien
agcccctgcgggctatagctgccgt

SEQ ID NO: 627040 - DNA, 25 bp, Homo sapien
tactataacaccagttttcaggccg

SEQ ID NO: 627041 - DNA, 25 bp, Homo sapien
gccgtgccacgtttctactataaca

SEQ ID NO: 627042 - DNA, 25 bp, Homo sapien
cagcaatattctccacgttttcttt

SEQ ID NO: 627043 - DNA, 25 bp, Homo sapien
atcagcaatattctccacgttttct

SEQ ID NO: 627044 - DNA, 25 bp, Homo sapien
tcagcaatattctccacgttttctt

SEQ ID NO: 627045 - DNA, 25 bp, Homo sapien
gcaatattctccacgttttctttct

SEQ ID NO: 627046 - DNA, 25 bp, Homo sapien
caaatcaattgtgcaaataccaagg

SEQ ID NO: 627047 - DNA, 25 bp, Homo sapien
tgaataagactccattgtacgaatg

SEQ ID NO: 627048 - DNA, 25 bp, Homo sapien
caagtgccaagtagtaggacatgac

SEQ ID NO: 627049 - DNA, 25 bp, Homo sapien
gacatgactgtcacattgggccaat

SEQ ID NO: 627050 - DNA, 25 bp, Homo sapien
gatcagccagaagtgagaccttagg

SEQ ID NO: 627051 - DNA, 25 bp, Homo sapien
caccgaagtctttagtggttagcta

SEQ ID NO: 627052 - DNA, 25 bp, Homo sapien
gctgagagccactgtttacttgtag

SEQ ID NO: 627053 - DNA, 25 bp, Homo sapien
ggttagctaactactggacatagac

SEQ ID NO: 627054 - DNA, 25 bp, Homo sapien
tcttgagcatatacttaggaaggaa

SEQ ID NO: 627055 - DNA, 25 bp, Homo sapien
ggagctgcaccacactagcagtata

SEQ ID NO: 627056 - DNA, 25 bp, Homo sapien
taatatgtgacattttctgacgaga

SEQ ID NO: 627057 - DNA, 25 bp, Homo sapien
cagactactttccaaggagctgcac

SEQ ID NO: 627058 - DNA, 25 bp, Homo sapien
gcacagtaatcagaccagggtaatt

SEQ ID NO: 627059 - DNA, 25 bp, Homo sapien
catttgtcattcgtttgtgttagga

SEQ ID NO: 627060 - DNA, 25 bp, Homo sapien
atataatgcacagtaatcagaccag

SEQ ID NO: 627061 - DNA, 25 bp, Homo sapien
cagtcatcttacagtgttatggaac

SEQ ID NO: 627062 - DNA, 25 bp, Homo sapien
ccagttgcttagaatgaccagttcc

SEQ ID NO: 627063 - DNA, 25 bp, Homo sapien
caaaaggtttttcacgctcaaatgc

SEQ ID NO: 627064 - DNA, 25 bp, Homo sapien
ccctccaaatcacggtgcttccaag

SEQ ID NO: 627065 - DNA, 25 bp, Homo sapien
aaggcagagcggaaactgggactca

SEQ ID NO: 627066 - DNA, 25 bp, Homo sapien
ctgcaccttgccttccaaaggctcc

SEQ ID NO: 627067 - DNA, 25 bp, Homo sapien
ttccaaaggctcccatatgatcaca

SEQ ID NO: 627068 - DNA, 25 bp, Homo sapien
ccaaaggctcccatatgatcacaat

SEQ ID NO: 627069 - DNA, 25 bp, Homo sapien
gccttccaaaggctcccatatgatc

SEQ ID NO: 627070 - DNA, 25 bp, Homo sapien
ccgtcgcgacatccaggacagagca

SEQ ID NO: 627071 - DNA, 25 bp, Homo sapien
gccgccctgtgctgacatcgaggag

SEQ ID NO: 627072 - DNA, 25 bp, Homo sapien
cgtcgcgacatccaggacagagcac

SEQ ID NO: 627073 - DNA, 25 bp, Homo sapien
ggtcagctgccgccctgtgctgaca

SEQ ID NO: 627074 - DNA, 25 bp, Homo sapien
cagcaaagtcagtgatttagtcaga

SEQ ID NO: 627075 - DNA, 25 bp, Homo sapien
aaaacagcaaagtcagtgatttagt

SEQ ID NO: 627076 - DNA, 25 bp, Homo sapien
caaagtcagtgatttagtcagatga

SEQ ID NO: 627077 - DNA, 25 bp, Homo sapien
aacagcaaagtcagtgatttagtca

SEQ ID NO: 627078 - DNA, 25 bp, Homo sapien
taaaagctcattgtgtcggtgaggt

SEQ ID NO: 627079 - DNA, 25 bp, Homo sapien
agctcattgtgtcggtgaggtgtgc

SEQ ID NO: 627080 - DNA, 25 bp, Homo sapien
gtaaaagctcattgtgtcggtgagg

SEQ ID NO: 627081 - DNA, 25 bp, Homo sapien
aaagctcattgtgtcggtgaggtgt

SEQ ID NO: 627082 - DNA, 25 bp, Homo sapien
catgacaaactgacggccatttagc

SEQ ID NO: 627083 - DNA, 25 bp, Homo sapien
gctgaaactcagttctcttctgggc

SEQ ID NO: 627084 - DNA, 25 bp, Homo sapien
tgcttattttgcacatgacaaactg

SEQ ID NO: 627085 - DNA, 25 bp, Homo sapien
ttttgcacatgacaaactgacggcc

SEQ ID NO: 627086 - DNA, 25 bp, Homo sapien
caaggtagcaagtgcatcccattca

SEQ ID NO: 627087 - DNA, 25 bp, Homo sapien
cagcctttctagacatggagctcca

SEQ ID NO: 627088 - DNA, 25 bp, Homo sapien
ccaggcggtgaatctgggttaaagc

SEQ ID NO: 627089 - DNA, 25 bp, Homo sapien
catggagctccaaggtagcaagtgc

SEQ ID NO: 627090 - DNA, 25 bp, Homo sapien
ctgaacacaactgcactaaagtccc

SEQ ID NO: 627091 - DNA, 25 bp, Homo sapien
cggtcctcatgagactcccttctga

SEQ ID NO: 627092 - DNA, 25 bp, Homo sapien
aagtggccccggtcctcatgagact

SEQ ID NO: 627093 - DNA, 25 bp, Homo sapien
acacgaaaatagcactgaggctcca

SEQ ID NO: 627094 - DNA, 25 bp, Homo sapien
tgcagcagcaagctcccctgcatat

SEQ ID NO: 627095 - DNA, 25 bp, Homo sapien
tgaaacgaaggcaagctttgttccc

SEQ ID NO: 627096 - DNA, 25 bp, Homo sapien
gagccattgttcatcttccgagtat

SEQ ID NO: 627097 - DNA, 25 bp, Homo sapien
tatttctgagagcttcgtgcagcag

SEQ ID NO: 627098 - DNA, 25 bp, Homo sapien
tcatgtgcatttgtttctgaaattg

SEQ ID NO: 627099 - DNA, 25 bp, Homo sapien
tttctgaaattgaaatgtgtcttgc

SEQ ID NO: 627100 - DNA, 25 bp, Homo sapien
tgtgcatttgtttctgaaattgaaa

SEQ ID NO: 627101 - DNA, 25 bp, Homo sapien
gtttctgaaattgaaatgtgtcttg

SEQ ID NO: 627102 - DNA, 25 bp, Homo sapien
tctgaccagagttgcaagtgctcgg

SEQ ID NO: 627103 - DNA, 25 bp, Homo sapien
tattagccctcagtaaatgcttggc

SEQ ID NO: 627104 - DNA, 25 bp, Homo sapien
agaaggctgcttcaaccgtccagga

SEQ ID NO: 627105 - DNA, 25 bp, Homo sapien
tgccttgggcaactacctgtgttaa

SEQ ID NO: 627106 - DNA, 25 bp, Homo sapien
gctccactgcatttagaagaggctc

SEQ ID NO: 627107 - DNA, 25 bp, Homo sapien
gcatttagaagaggctctttgcact

SEQ ID NO: 627108 - DNA, 25 bp, Homo sapien
cactgcatttagaagaggctctttg

SEQ ID NO: 627109 - DNA, 25 bp, Homo sapien
ctagctccactgcatttagaagagg

SEQ ID NO: 627110 - DNA, 25 bp, Homo sapien
gaggttcccaagtacaaggtcagat

SEQ ID NO: 627111 - DNA, 25 bp, Homo sapien
tgaggttcccaagtacaaggtcaga

SEQ ID NO: 627112 - DNA, 25 bp, Homo sapien
ggtgaggttcccaagtacaaggtca

SEQ ID NO: 627113 - DNA, 25 bp, Homo sapien
ggttcccaagtacaaggtcagatgc

SEQ ID NO: 627114 - DNA, 25 bp, Homo sapien
ttggccacaaacactctggatgcag

SEQ ID NO: 627115 - DNA, 25 bp, Homo sapien
tgcagaagcagagtctcttggctgc

SEQ ID NO: 627116 - DNA, 25 bp, Homo sapien
tggatgcagaagcagagtctcttgg

SEQ ID NO: 627117 - DNA, 25 bp, Homo sapien
caaacactctggatgcagaagcaga

SEQ ID NO: 627118 - DNA, 25 bp, Homo sapien
gtatatctggcgcagagcccctgtc

SEQ ID NO: 627119 - DNA, 25 bp, Homo sapien
ctgaagtatatctggcgcagagccc

SEQ ID NO: 627120 - DNA, 25 bp, Homo sapien
agacagaggctccactttgtacatt

SEQ ID NO: 627121 - DNA, 25 bp, Homo sapien
cctgtccttcaccaagggaggtgag

SEQ ID NO: 627122 - DNA, 25 bp, Homo sapien
gatttgcgatctgtgacagccgaca

SEQ ID NO: 627123 - DNA, 25 bp, Homo sapien
cgttcaccaattggacattgttggg

SEQ ID NO: 627124 - DNA, 25 bp, Homo sapien
tattcagctgccacgttcaccaatt

SEQ ID NO: 627125 - DNA, 25 bp, Homo sapien
gggaaattataggactcatttagat

SEQ ID NO: 627126 - DNA, 25 bp, Homo sapien
gtgtaagtccacagagctacttcaa

SEQ ID NO: 627127 - DNA, 25 bp, Homo sapien
gattttgtagtgagatgctgcagac

SEQ ID NO: 627128 - DNA, 25 bp, Homo sapien
tctcaaagcaggaatgaacggcagc

SEQ ID NO: 627129 - DNA, 25 bp, Homo sapien
gacttgtggcctgtacctgaatgga

SEQ ID NO: 627130 - DNA, 25 bp, Homo sapien
cagcctatctgccactggtggataa

SEQ ID NO: 627131 - DNA, 25 bp, Homo sapien
tttgcatctgcaagacctaggtctg

SEQ ID NO: 627132 - DNA, 25 bp, Homo sapien
aaactcagggtgcaaatgcagggac

SEQ ID NO: 627133 - DNA, 25 bp, Homo sapien
ctgtgtgtcgggctgtgtgcaaaac

SEQ ID NO: 627134 - DNA, 25 bp, Homo sapien
aaagggcaacgtcccacagtgatcg

SEQ ID NO: 627135 - DNA, 25 bp, Homo sapien
gaaataacaaggctcagcattttgc

SEQ ID NO: 627136 - DNA, 25 bp, Homo sapien
tctcccgctccactgatgcatgttt

SEQ ID NO: 627137 - DNA, 25 bp, Homo sapien
tcttcgtggtcatgaaaaaagggca

SEQ ID NO: 627138 - DNA, 25 bp, Homo sapien
ccagcaagacactcagccacagcat

SEQ ID NO: 627139 - DNA, 25 bp, Homo sapien
cacagggctgcatgtgcagcctcca

SEQ ID NO: 627140 - DNA, 25 bp, Homo sapien
tcccacagggctgcatgtgcagcct

SEQ ID NO: 627141 - DNA, 25 bp, Homo sapien
cctccaccagcaagacactcagcca

SEQ ID NO: 627142 - DNA, 25 bp, Homo sapien
tgaattctgggatagatcaaacaaa

SEQ ID NO: 627143 - DNA, 25 bp, Homo sapien
tagataatgaatgcctgcttgttgc

SEQ ID NO: 627144 - DNA, 25 bp, Homo sapien
ttatagataatgaatgcctgcttgt

SEQ ID NO: 627145 - DNA, 25 bp, Homo sapien
ttcagaatgaattctgggatagatc

SEQ ID NO: 627146 - DNA, 25 bp, Homo sapien
tgtatggatgaacgctgtgccacct

SEQ ID NO: 627147 - DNA, 25 bp, Homo sapien
atggatgaacgctgtgccaccttca

SEQ ID NO: 627148 - DNA, 25 bp, Homo sapien
ttgctaactgtatggatgaacgctg

SEQ ID NO: 627149 - DNA, 25 bp, Homo sapien
ctttgctaactgtatggatgaacgc

SEQ ID NO: 627150 - DNA, 25 bp, Homo sapien
ttctgcagagcctcgttggaaagca

SEQ ID NO: 627151 - DNA, 25 bp, Homo sapien
tttcaaagggcacactgatcttgag

SEQ ID NO: 627152 - DNA, 25 bp, Homo sapien
tccccttgaatgaggaatgcatcaa

SEQ ID NO: 627153 - DNA, 25 bp, Homo sapien
tagtcagaagcgtcaccaagagggt

SEQ ID NO: 627154 - DNA, 25 bp, Homo sapien
ggtggccctcggctttgctgacttg

SEQ ID NO: 627155 - DNA, 25 bp, Homo sapien
cctccttgtgcaggtccccaaagaa

SEQ ID NO: 627156 - DNA, 25 bp, Homo sapien
caacagcttctgaagatgcctccat

SEQ ID NO: 627157 - DNA, 25 bp, Homo sapien
ccttgtgcaggtccccaaagaaaat

SEQ ID NO: 627158 - DNA, 25 bp, Homo sapien
aatcaacagcttctgaagatgcctc

SEQ ID NO: 627159 - DNA, 25 bp, Homo sapien
ggcacacgagagtccactgagcata

SEQ ID NO: 627160 - DNA, 25 bp, Homo sapien
taaaaagtagcctacagctggccac

SEQ ID NO: 627161 - DNA, 25 bp, Homo sapien
taaggaatcctccaccataagtgag

SEQ ID NO: 627162 - DNA, 25 bp, Homo sapien
cctggcctcacttgggaaagaaaca

SEQ ID NO: 627163 - DNA, 25 bp, Homo sapien
tggccgtccaggtgcatgtgaatct

SEQ ID NO: 627164 - DNA, 25 bp, Homo sapien
tataagcatgactaggcaagctgga

SEQ ID NO: 627165 - DNA, 25 bp, Homo sapien
gagacttggtctcaccagccggagt

SEQ ID NO: 627166 - DNA, 25 bp, Homo sapien
gaggaattcccaggtgcagaaaagg

SEQ ID NO: 627167 - DNA, 25 bp, Homo sapien
gaatatggattaactgcaattacac

SEQ ID NO: 627168 - DNA, 25 bp, Homo sapien
ttttctggatctgaggtaggtgtat

SEQ ID NO: 627169 - DNA, 25 bp, Homo sapien
tctgaggtaggtgtatgtgaaccag

SEQ ID NO: 627170 - DNA, 25 bp, Homo sapien
attacactaagcttgtaataatggt

SEQ ID NO: 627171 - DNA, 25 bp, Homo sapien
tgctgtgcattgaaatctactcctg

SEQ ID NO: 627172 - DNA, 25 bp, Homo sapien
ctgctgtgcattgaaatctactcct

SEQ ID NO: 627173 - DNA, 25 bp, Homo sapien
gctgctgtgcattgaaatctactcc

SEQ ID NO: 627174 - DNA, 25 bp, Homo sapien
gaaatctactcctggatgtctcttc

SEQ ID NO: 627175 - DNA, 25 bp, Homo sapien
agtgtcgcttgtggcagtcctgtga

SEQ ID NO: 627176 - DNA, 25 bp, Homo sapien
tccattcagtgtcgcttgtggcagt

SEQ ID NO: 627177 - DNA, 25 bp, Homo sapien
gtcgcttgtggcagtcctgtgaagt

SEQ ID NO: 627178 - DNA, 25 bp, Homo sapien
cattcagtgtcgcttgtggcagtcc

SEQ ID NO: 627179 - DNA, 25 bp, Homo sapien
gctctggaaacccacagccgcaaag

SEQ ID NO: 627180 - DNA, 25 bp, Homo sapien
cctgcagggacggtcgctctggaaa

SEQ ID NO: 627181 - DNA, 25 bp, Homo sapien
agccgcaaagcccaacaggattgta

SEQ ID NO: 627182 - DNA, 25 bp, Homo sapien
ccaacaggattgtagcctgtgactt

SEQ ID NO: 627183 - DNA, 25 bp, Homo sapien
tttgcaggcagtttgaagtggcttt

SEQ ID NO: 627184 - DNA, 25 bp, Homo sapien
tgcaggcagtttgaagtggctttga

SEQ ID NO: 627185 - DNA, 25 bp, Homo sapien
ttgcaggcagtttgaagtggctttg

SEQ ID NO: 627186 - DNA, 25 bp, Homo sapien
cacgtggcttcagctctcttgtctt

SEQ ID NO: 627187 - DNA, 25 bp, Homo sapien
ctctcttgtcttggcagggagacac

SEQ ID NO: 627188 - DNA, 25 bp, Homo sapien
tgaactcgcatcctgctttacacag

SEQ ID NO: 627189 - DNA, 25 bp, Homo sapien
aatgccttcaggcttggtttactgg

SEQ ID NO: 627190 - DNA, 25 bp, Homo sapien
cactgatgacaactggttcagccat

SEQ ID NO: 627191 - DNA, 25 bp, Homo sapien
caatgatgaagaccatggcactgat

SEQ ID NO: 627192 - DNA, 25 bp, Homo sapien
tggcactgatgacaactggttcagc

SEQ ID NO: 627193 - DNA, 25 bp, Homo sapien
cgactgcttcgaagacaatgatgaa

SEQ ID NO: 627194 - DNA, 25 bp, Homo sapien
agaacacgttcaatacactaattgg

SEQ ID NO: 627195 - DNA, 25 bp, Homo sapien
aatacactaattggtcggaggcagc

SEQ ID NO: 627196 - DNA, 25 bp, Homo sapien
taattggtcggaggcagccattcct

SEQ ID NO: 627197 - DNA, 25 bp, Homo sapien
cacagaacacgttcaatacactaat

SEQ ID NO: 627198 - DNA, 25 bp, Homo sapien
cggccatgcctgtcatccacacatc

SEQ ID NO: 627199 - DNA, 25 bp, Homo sapien
cagccacggccatgcctgtcatcca

SEQ ID NO: 627200 - DNA, 25 bp, Homo sapien
ctctccaatgctctcagccacggcc

SEQ ID NO: 627201 - DNA, 25 bp, Homo sapien
ctcagccacggccatgcctgtcatc

SEQ ID NO: 627202 - DNA, 25 bp, Homo sapien
cagagttggcccatcacagtggtga

SEQ ID NO: 627203 - DNA, 25 bp, Homo sapien
ccacgtggaggaactaagacagcag

SEQ ID NO: 627204 - DNA, 25 bp, Homo sapien
cagagtttcttctggcacccggcat

SEQ ID NO: 627205 - DNA, 25 bp, Homo sapien
ggtgctcaacaagtgccacgtggag

SEQ ID NO: 627206 - DNA, 25 bp, Homo sapien
gtgatacagggcacaccatttttcg

SEQ ID NO: 627207 - DNA, 25 bp, Homo sapien
gatacagggcacaccatttttcggg

SEQ ID NO: 627208 - DNA, 25 bp, Homo sapien
catggtttggtgatacagggcacac

SEQ ID NO: 627209 - DNA, 25 bp, Homo sapien
cactgcccacatggtttggtgatac

SEQ ID NO: 627210 - DNA, 25 bp, Homo sapien
ttcgttggtgcacagattccgcctc

SEQ ID NO: 627211 - DNA, 25 bp, Homo sapien
tattcgttggtgcacagattccgcc

SEQ ID NO: 627212 - DNA, 25 bp, Homo sapien
ctattcgttggtgcacagattccgc

SEQ ID NO: 627213 - DNA, 25 bp, Homo sapien
cgttggtgcacagattccgcctcaa

SEQ ID NO: 627214 - DNA, 25 bp, Homo sapien
tttgcgagccagatatttgttgtca

SEQ ID NO: 627215 - DNA, 25 bp, Homo sapien
cagtatatctgtgaaagcgttttgc

SEQ ID NO: 627216 - DNA, 25 bp, Homo sapien
tcatgggccttcaacagtatatctg

SEQ ID NO: 627217 - DNA, 25 bp, Homo sapien
tgaaagcgttttgcgagccagatat

SEQ ID NO: 627218 - DNA, 25 bp, Homo sapien
tgtgtctgatccatgggcactgaac

SEQ ID NO: 627219 - DNA, 25 bp, Homo sapien
caaagcctggtcatatattagccct

SEQ ID NO: 627220 - DNA, 25 bp, Homo sapien
tgtaggacaaaacgctggaggatgt

SEQ ID NO: 627221 - DNA, 25 bp, Homo sapien
caatacagagcctgtgtctgatcca

SEQ ID NO: 627222 - DNA, 25 bp, Homo sapien
gaagtgagtgtggatctcatcaccc

SEQ ID NO: 627223 - DNA, 25 bp, Homo sapien
ggaagtgagtgtggatctcatcacc

SEQ ID NO: 627224 - DNA, 25 bp, Homo sapien
ctaccaagggccacagttttcactc

SEQ ID NO: 627225 - DNA, 25 bp, Homo sapien
taccaagggccacagttttcactcc

SEQ ID NO: 627226 - DNA, 25 bp, Homo sapien
ccaagggccacagttttcactccct

SEQ ID NO: 627227 - DNA, 25 bp, Homo sapien
caagggccacagttttcactccctc

SEQ ID NO: 627228 - DNA, 25 bp, Homo sapien
ccaggcaattagattggcaaaggac

SEQ ID NO: 627229 - DNA, 25 bp, Homo sapien
tctcatcctctttaatggccaggca

SEQ ID NO: 627230 - DNA, 25 bp, Homo sapien
cagctgatcggccatatatcctgag

SEQ ID NO: 627231 - DNA, 25 bp, Homo sapien
caaaggactgcatgaagtgtgagca

SEQ ID NO: 627232 - DNA, 25 bp, Homo sapien
ccagcttgccgttgtgtgtccaggt

SEQ ID NO: 627233 - DNA, 25 bp, Homo sapien
ggttgaaatattcaccatggatgaa

SEQ ID NO: 627234 - DNA, 25 bp, Homo sapien
tcgcacaggccgtgagtagcacgac

SEQ ID NO: 627235 - DNA, 25 bp, Homo sapien
tggatgaaaatgtatcgcacaggcc

SEQ ID NO: 627236 - DNA, 25 bp, Homo sapien
ggagctggcactgctttatggatga

SEQ ID NO: 627237 - DNA, 25 bp, Homo sapien
tcccacagcttctcataaagaggtc

SEQ ID NO: 627238 - DNA, 25 bp, Homo sapien
ggtccctcctcaacattgggagtca

SEQ ID NO: 627239 - DNA, 25 bp, Homo sapien
tcatccaggcaaccagaatctccag

SEQ ID NO: 627240 - DNA, 25 bp, Homo sapien
ccactgccaggagctcctgtccacc

SEQ ID NO: 627241 - DNA, 25 bp, Homo sapien
cttagcagtgtcctctccccactgc

SEQ ID NO: 627242 - DNA, 25 bp, Homo sapien
aggagctcctgtccaccccagacac

SEQ ID NO: 627243 - DNA, 25 bp, Homo sapien
tcctgtccaccccagacaccgccat

SEQ ID NO: 627244 - DNA, 25 bp, Homo sapien
tgacaccagacagcagggtccaaca

SEQ ID NO: 627245 - DNA, 25 bp, Homo sapien
ccaggttatacgcttcttgaatgaa

SEQ ID NO: 627246 - DNA, 25 bp, Homo sapien
cttctaccaggttatacgcttcttg

SEQ ID NO: 627247 - DNA, 25 bp, Homo sapien
tctaccaggttatacgcttcttgaa

SEQ ID NO: 627248 - DNA, 25 bp, Homo sapien
tgtgtcttctaccaggttatacgct

SEQ ID NO: 627249 - DNA, 25 bp, Homo sapien
caccattccaggggttccaccctgg

SEQ ID NO: 627250 - DNA, 25 bp, Homo sapien
acaccattccaggggttccaccctg

SEQ ID NO: 627251 - DNA, 25 bp, Homo sapien
tcagtggtgttggagatttgcaggc

SEQ ID NO: 627252 - DNA, 25 bp, Homo sapien
agtggtgttggagatttgcaggccc

SEQ ID NO: 627253 - DNA, 25 bp, Homo sapien
gaaattacgatttttgaggacgctc

SEQ ID NO: 627254 - DNA, 25 bp, Homo sapien
tccaaattccgtgagctttctcccg

SEQ ID NO: 627255 - DNA, 25 bp, Homo sapien
aaaaacgtaagaggaactagagctg

SEQ ID NO: 627256 - DNA, 25 bp, Homo sapien
tacagactttagaaccgtgagccaa

SEQ ID NO: 627257 - DNA, 25 bp, Homo sapien
agcactccagggtaaatgcccagtg

SEQ ID NO: 627258 - DNA, 25 bp, Homo sapien
cactccagggtaaatgcccagtgca

SEQ ID NO: 627259 - DNA, 25 bp, Homo sapien
cagggtaaatgcccagtgcacggca

SEQ ID NO: 627260 - DNA, 25 bp, Homo sapien
actccagggtaaatgcccagtgcac

SEQ ID NO: 627261 - DNA, 25 bp, Homo sapien
tgcgtggccgcgagtcactcctgtg

SEQ ID NO: 627262 - DNA, 25 bp, Homo sapien
tttagcatcacaggggagcccctct

SEQ ID NO: 627263 - DNA, 25 bp, Homo sapien
aatctgcattttagcctgctgccca

SEQ ID NO: 627264 - DNA, 25 bp, Homo sapien
tctgaaggcatagggattgctgctc

SEQ ID NO: 627265 - DNA, 25 bp, Homo sapien
ggaggtttcgaccagcaatttccaa

SEQ ID NO: 627266 - DNA, 25 bp, Homo sapien
caacatcacctcatcattgccataa

SEQ ID NO: 627267 - DNA, 25 bp, Homo sapien
acatcacctcatcattgccataagc

SEQ ID NO: 627268 - DNA, 25 bp, Homo sapien
ttggaggtttcgaccagcaatttcc

SEQ ID NO: 627269 - DNA, 25 bp, Homo sapien
ccctttgtcgggatattcttaatat

SEQ ID NO: 627270 - DNA, 25 bp, Homo sapien
ggacttggagcataaggatgcagac

SEQ ID NO: 627271 - DNA, 25 bp, Homo sapien
ccaactggttcagttcttaatgacc

SEQ ID NO: 627272 - DNA, 25 bp, Homo sapien
cttaatgaccacatggacttggagc

SEQ ID NO: 627273 - DNA, 25 bp, Homo sapien
gatgccacatgtggtgcagtgcagc

SEQ ID NO: 627274 - DNA, 25 bp, Homo sapien
gggttgttcgttgggaatgacatca

SEQ ID NO: 627275 - DNA, 25 bp, Homo sapien
tgacatcacgtggaccagatgccac

SEQ ID NO: 627276 - DNA, 25 bp, Homo sapien
gcagtgcagctgctatcaatctgca

SEQ ID NO: 627277 - DNA, 25 bp, Homo sapien
tgtttgcctctgataaaccataggc

SEQ ID NO: 627278 - DNA, 25 bp, Homo sapien
tgtccagttggaggcaatgctttgc

SEQ ID NO: 627279 - DNA, 25 bp, Homo sapien
ctggagtggaagataagccaacata

SEQ ID NO: 627280 - DNA, 25 bp, Homo sapien
ggcttctgactcattggcttaaggg

SEQ ID NO: 627281 - DNA, 25 bp, Homo sapien
tcctcgccccaactctcagatcctt

SEQ ID NO: 627282 - DNA, 25 bp, Homo sapien
agactaatacaacctcctcgcccca

SEQ ID NO: 627283 - DNA, 25 bp, Homo sapien
tacttaaatctaaggcctgagacta

SEQ ID NO: 627284 - DNA, 25 bp, Homo sapien
gccccaactctcagatcctttcatg

SEQ ID NO: 627285 - DNA, 25 bp, Homo sapien
gaaatcagaaagctaggagcaccag

SEQ ID NO: 627286 - DNA, 25 bp, Homo sapien
ccagctaatgcgtgaaaacatcaga

SEQ ID NO: 627287 - DNA, 25 bp, Homo sapien
tctgaagagtggatagcattaccct

SEQ ID NO: 627288 - DNA, 25 bp, Homo sapien
ccggctcaaggttccacgattgtga

SEQ ID NO: 627289 - DNA, 25 bp, Homo sapien
gctgctgccttcattcctgactcgt

SEQ ID NO: 627290 - DNA, 25 bp, Homo sapien
gagctggtgctttgatagtctttga

SEQ ID NO: 627291 - DNA, 25 bp, Homo sapien
tttcaaacgcgtgaaaggctgtcat

SEQ ID NO: 627292 - DNA, 25 bp, Homo sapien
ctgactcgtaggctggtgttggatt

SEQ ID NO: 627293 - DNA, 25 bp, Homo sapien
cattctgagtccaactagagggcca

SEQ ID NO: 627294 - DNA, 25 bp, Homo sapien
tgaacccagtgttggtcagaaccat

SEQ ID NO: 627295 - DNA, 25 bp, Homo sapien
cacataactgaggttgtctctggga

SEQ ID NO: 627296 - DNA, 25 bp, Homo sapien
tgtaaattcggccacactgaaccca

SEQ ID NO: 627297 - DNA, 25 bp, Homo sapien
tcaatgcctctgaaagcccacagag

SEQ ID NO: 627298 - DNA, 25 bp, Homo sapien
caatgcctctgaaagcccacagaga

SEQ ID NO: 627299 - DNA, 25 bp, Homo sapien
taagccaatgctctagacctatttt

SEQ ID NO: 627300 - DNA, 25 bp, Homo sapien
accttctgttggttaaggttctgct

SEQ ID NO: 627301 - DNA, 25 bp, Homo sapien
taaccttctgttggttaagccaatg

SEQ ID NO: 627302 - DNA, 25 bp, Homo sapien
ccaatgctctagacctatttttctc

SEQ ID NO: 627303 - DNA, 25 bp, Homo sapien
tcccaggttcctttcctcagcacaa

SEQ ID NO: 627304 - DNA, 25 bp, Homo sapien
ccaggttcctttcctcagcacaaat

SEQ ID NO: 627305 - DNA, 25 bp, Homo sapien
caggttcctttcctcagcacaaatt

SEQ ID NO: 627306 - DNA, 25 bp, Homo sapien
ctcccaggttcctttcctcagcaca

SEQ ID NO: 627307 - DNA, 25 bp, Homo sapien
gtctcccactgaggagcaagtggac

SEQ ID NO: 627308 - DNA, 25 bp, Homo sapien
atagaacaaaagtctcccactgagg

SEQ ID NO: 627309 - DNA, 25 bp, Homo sapien
ctcccactgaggagcaagtggacat

SEQ ID NO: 627310 - DNA, 25 bp, Homo sapien
acatagaacaaaagtctcccactga

SEQ ID NO: 627311 - DNA, 25 bp, Homo sapien
tcagaactggccaagggtgaaaatg

SEQ ID NO: 627312 - DNA, 25 bp, Homo sapien
cttgtagctagaggtagcttgtgga

SEQ ID NO: 627313 - DNA, 25 bp, Homo sapien
ataggccgctgatcccacagtcata

SEQ ID NO: 627314 - DNA, 25 bp, Homo sapien
tccctgtcctcctattcctctcact

SEQ ID NO: 627315 - DNA, 25 bp, Homo sapien
ggagggtcctagtctcttgaccata

SEQ ID NO: 627316 - DNA, 25 bp, Homo sapien
tgtgaacttagaatctggagggtcc

SEQ ID NO: 627317 - DNA, 25 bp, Homo sapien
cttgtaggcttcagtagggtagatg

SEQ ID NO: 627318 - DNA, 25 bp, Homo sapien
gaccataattgtcatagttggaccc

SEQ ID NO: 627319 - DNA, 25 bp, Homo sapien
aaggcggatttgaggctgaatcaca

SEQ ID NO: 627320 - DNA, 25 bp, Homo sapien
gaaggcggatttgaggctgaatcac

SEQ ID NO: 627321 - DNA, 25 bp, Homo sapien
gagaaggcggatttgaggctgaatc

SEQ ID NO: 627322 - DNA, 25 bp, Homo sapien
aggcggatttgaggctgaatcacac

SEQ ID NO: 627323 - DNA, 25 bp, Homo sapien
ccaatttatgctggagtaaactcac

SEQ ID NO: 627324 - DNA, 25 bp, Homo sapien
catctgtcagcacatttgtccttgg

SEQ ID NO: 627325 - DNA, 25 bp, Homo sapien
tgactccattcctttggagctggtg

SEQ ID NO: 627326 - DNA, 25 bp, Homo sapien
ttcatcctgctaaaaaaactcctcc

SEQ ID NO: 627327 - DNA, 25 bp, Homo sapien
ggaggctgttctgccagacttccct

SEQ ID NO: 627328 - DNA, 25 bp, Homo sapien
gagattaacacctcctgtagctcct

SEQ ID NO: 627329 - DNA, 25 bp, Homo sapien
tctggctgacgtcgacctgaaactc

SEQ ID NO: 627330 - DNA, 25 bp, Homo sapien
tcttcttcgagcaggatttgcgtca

SEQ ID NO: 627331 - DNA, 25 bp, Homo sapien
tgttattcgtgaaagaaattccact

SEQ ID NO: 627332 - DNA, 25 bp, Homo sapien
catgtgctgttgtctataaggtaat

SEQ ID NO: 627333 - DNA, 25 bp, Homo sapien
caggatattctgaattaagggagaa

SEQ ID NO: 627334 - DNA, 25 bp, Homo sapien
tggaaaaagtggctgtacatgtgct

SEQ ID NO: 627335 - DNA, 25 bp, Homo sapien
atcccccatgggtacggaggggcag

SEQ ID NO: 627336 - DNA, 25 bp, Homo sapien
ccccatgggtacggaggggcagctg

SEQ ID NO: 627337 - DNA, 25 bp, Homo sapien
ccatgggtacggaggggcagctgta

SEQ ID NO: 627338 - DNA, 25 bp, Homo sapien
catgggtacggaggggcagctgtac

SEQ ID NO: 627339 - DNA, 25 bp, Homo sapien
tagttgctaccatacctgttatcag

SEQ ID NO: 627340 - DNA, 25 bp, Homo sapien
gtctcatcgtagttgctaccatacc

SEQ ID NO: 627341 - DNA, 25 bp, Homo sapien
tacctgttatcagggctcagcgccc

SEQ ID NO: 627342 - DNA, 25 bp, Homo sapien
taccatacctgttatcagggctcag

SEQ ID NO: 627343 - DNA, 25 bp, Homo sapien
gagatctgggagatggcaggaggga

SEQ ID NO: 627344 - DNA, 25 bp, Homo sapien
agatggcaggagggaggtggctcat

SEQ ID NO: 627345 - DNA, 25 bp, Homo sapien
cgagatctgggagatggcaggaggg

SEQ ID NO: 627346 - DNA, 25 bp, Homo sapien
gggagatggcaggagggaggtggct

SEQ ID NO: 627347 - DNA, 25 bp, Homo sapien
tttgaagggctacgtgcagaagctg

SEQ ID NO: 627348 - DNA, 25 bp, Homo sapien
gtttttgaagggctacgtgcagaag

SEQ ID NO: 627349 - DNA, 25 bp, Homo sapien
agggctacgtgcagaagctgtttga

SEQ ID NO: 627350 - DNA, 25 bp, Homo sapien
agctgtttgagggtagccctcatct

SEQ ID NO: 627351 - DNA, 25 bp, Homo sapien
tctctcgagggcattggcaaatctg

SEQ ID NO: 627352 - DNA, 25 bp, Homo sapien
cattggcaaatctggtgacggtggc

SEQ ID NO: 627353 - DNA, 25 bp, Homo sapien
gtaggaatcaaggagcaggattctc

SEQ ID NO: 627354 - DNA, 25 bp, Homo sapien
tttctgtggcttcatagggcaaatg

SEQ ID NO: 627355 - DNA, 25 bp, Homo sapien
tgtttttacccatctgcaccaggat

SEQ ID NO: 627356 - DNA, 25 bp, Homo sapien
tgcatgtttttacccatctgcacca

SEQ ID NO: 627357 - DNA, 25 bp, Homo sapien
catgtttttacccatctgcaccagg

SEQ ID NO: 627358 - DNA, 25 bp, Homo sapien
gtgcatgtttttacccatctgcacc

SEQ ID NO: 627359 - DNA, 25 bp, Homo sapien
tccagtgtgcgagctgcagggattt

SEQ ID NO: 627360 - DNA, 25 bp, Homo sapien
gaatgttccagtgtgcgagctgcag

SEQ ID NO: 627361 - DNA, 25 bp, Homo sapien
atgttccagtgtgcgagctgcaggg

SEQ ID NO: 627362 - DNA, 25 bp, Homo sapien
gttccagtgtgcgagctgcagggat

SEQ ID NO: 627363 - DNA, 25 bp, Homo sapien
ggtagatcacactctgggttttcca

SEQ ID NO: 627364 - DNA, 25 bp, Homo sapien
caggagctcctggtagatcacactc

SEQ ID NO: 627365 - DNA, 25 bp, Homo sapien
gtagatcacactctgggttttccat

SEQ ID NO: 627366 - DNA, 25 bp, Homo sapien
ttgaaaccaggagctcctggtagat

SEQ ID NO: 627367 - DNA, 25 bp, Homo sapien
cttcgtatcacaggcccagcaggta

SEQ ID NO: 627368 - DNA, 25 bp, Homo sapien
ccatgatgtttcttcgtatcacagg

SEQ ID NO: 627369 - DNA, 25 bp, Homo sapien
gaaggaaaggatgtgcactcttttc

SEQ ID NO: 627370 - DNA, 25 bp, Homo sapien
ttcgaaggaaaggatgtgcactctt

SEQ ID NO: 627371 - DNA, 25 bp, Homo sapien
ggctgcggcaaaacacagacaactt

SEQ ID NO: 627372 - DNA, 25 bp, Homo sapien
aaagcctacagcttttattcggctg

SEQ ID NO: 627373 - DNA, 25 bp, Homo sapien
gcttttattcggctgcggcaaaaca

SEQ ID NO: 627374 - DNA, 25 bp, Homo sapien
gatcctggacattgtgcgtgtctgt

SEQ ID NO: 627375 - DNA, 25 bp, Homo sapien
aatacatgcctatcacattccagag

SEQ ID NO: 627376 - DNA, 25 bp, Homo sapien
gggtacaggtgcttaagaaacagat

SEQ ID NO: 627377 - DNA, 25 bp, Homo sapien
tctcaggctctgaactccaaccaag

SEQ ID NO: 627378 - DNA, 25 bp, Homo sapien
ggaagcttcccgcaagttccttctg

SEQ ID NO: 627379 - DNA, 25 bp, Homo sapien
ttgatgccagcaagcagacaatctc

SEQ ID NO: 627380 - DNA, 25 bp, Homo sapien
cttgatgccagcaagcagacaatct

SEQ ID NO: 627381 - DNA, 25 bp, Homo sapien
tgatgccagcaagcagacaatctcc

SEQ ID NO: 627382 - DNA, 25 bp, Homo sapien
tacatttgccagactcttttgtagc

SEQ ID NO: 627383 - DNA, 25 bp, Homo sapien
tgccagactcttttgtagctggtgc

SEQ ID NO: 627384 - DNA, 25 bp, Homo sapien
agactcttttgtagctggtgctgca

SEQ ID NO: 627385 - DNA, 25 bp, Homo sapien
catttgccagactcttttgtagctg

SEQ ID NO: 627386 - DNA, 25 bp, Homo sapien
ggctccaggtaagtggtaggattcc

SEQ ID NO: 627387 - DNA, 25 bp, Homo sapien
aggctccaggtaagtggtaggattc

SEQ ID NO: 627388 - DNA, 25 bp, Homo sapien
ggcagcaggcgattttcctggactt

SEQ ID NO: 627389 - DNA, 25 bp, Homo sapien
gaggcagcaggcgattttcctggac

SEQ ID NO: 627390 - DNA, 25 bp, Homo sapien
tgggtctttactcgcatgctgggtc

SEQ ID NO: 627391 - DNA, 25 bp, Homo sapien
tcatcataaccctgcgtgtcctcaa

SEQ ID NO: 627392 - DNA, 25 bp, Homo sapien
ggccccatccacacacggttgttga

SEQ ID NO: 627393 - DNA, 25 bp, Homo sapien
ggtccgtgagtgtgggccccttatc

SEQ ID NO: 627394 - DNA, 25 bp, Homo sapien
gcattccatttgatagtgtagcttc

SEQ ID NO: 627395 - DNA, 25 bp, Homo sapien
taacccttgaaactgaatataataa

SEQ ID NO: 627396 - DNA, 25 bp, Homo sapien
tcatgatgtatcagattcatagtag

SEQ ID NO: 627397 - DNA, 25 bp, Homo sapien
cattttcatacagctagcacaatca

SEQ ID NO: 627398 - DNA, 25 bp, Homo sapien
agcactggccagtgttatctaaaat

SEQ ID NO: 627399 - DNA, 25 bp, Homo sapien
aagtcctagccaatatctcactgag

SEQ ID NO: 627400 - DNA, 25 bp, Homo sapien
tgacaacataaccaaaagcactggc

SEQ ID NO: 627401 - DNA, 25 bp, Homo sapien
tgtattcacattttggccttgctaa

SEQ ID NO: 627402 - DNA, 25 bp, Homo sapien
tcctctttggcctgtgtggtagcga

SEQ ID NO: 627403 - DNA, 25 bp, Homo sapien
tcttcctatctgattccaggctggt

SEQ ID NO: 627404 - DNA, 25 bp, Homo sapien
tagcgatcctatgggaaatcccttg

SEQ ID NO: 627405 - DNA, 25 bp, Homo sapien
ttctcagggactgacccagtttctc

SEQ ID NO: 627406 - DNA, 25 bp, Homo sapien
tgtcaggccagtagtgctcttgatt

SEQ ID NO: 627407 - DNA, 25 bp, Homo sapien
ctgacatcaaaatgaatttggtgga

SEQ ID NO: 627408 - DNA, 25 bp, Homo sapien
ccagtgtcaggccagtagtgctctt

SEQ ID NO: 627409 - DNA, 25 bp, Homo sapien
aggccagtagtgctcttgattagga

SEQ ID NO: 627410 - DNA, 25 bp, Homo sapien
ctgttggaagtgacgtacccgagca

SEQ ID NO: 627411 - DNA, 25 bp, Homo sapien
catcatagccgttcacgaaagaagg

SEQ ID NO: 627412 - DNA, 25 bp, Homo sapien
catcctggttgcagacataggccac

SEQ ID NO: 627413 - DNA, 25 bp, Homo sapien
gcaagataaaccctgccatgtctgg

SEQ ID NO: 627414 - DNA, 25 bp, Homo sapien
agacaggcgggcagtctgtgatggt

SEQ ID NO: 627415 - DNA, 25 bp, Homo sapien
ctgtgatggtgaaagctcttagggt

SEQ ID NO: 627416 - DNA, 25 bp, Homo sapien
agctcttagggtggcggcctgtcct

SEQ ID NO: 627417 - DNA, 25 bp, Homo sapien
tgaaagctcttagggtggcggcctg

SEQ ID NO: 627418 - DNA, 25 bp, Homo sapien
gcttccgcggcagccattgtgccag

SEQ ID NO: 627419 - DNA, 25 bp, Homo sapien
tcagatccaagtgagggcttccgcg

SEQ ID NO: 627420 - DNA, 25 bp, Homo sapien
cgcggcagccattgtgccagcagct

SEQ ID NO: 627421 - DNA, 25 bp, Homo sapien
agatccaagtgagggcttccgcggc

SEQ ID NO: 627422 - DNA, 25 bp, Homo sapien
ctccatcatcccgtatttctttttc

SEQ ID NO: 627423 - DNA, 25 bp, Homo sapien
ttgactccatcatcccgtatttctt

SEQ ID NO: 627424 - DNA, 25 bp, Homo sapien
ttgaacttgactccatcatcccgta

SEQ ID NO: 627425 - DNA, 25 bp, Homo sapien
gaacttgactccatcatcccgtatt

SEQ ID NO: 627426 - DNA, 25 bp, Homo sapien
tttaccctgcaaggtgcactccagt

SEQ ID NO: 627427 - DNA, 25 bp, Homo sapien
tgcctttaccctgcaaggtgcactc

SEQ ID NO: 627428 - DNA, 25 bp, Homo sapien
gctgcctttaccctgcaaggtgcac

SEQ ID NO: 627429 - DNA, 25 bp, Homo sapien
cctttaccctgcaaggtgcactcca

SEQ ID NO: 627430 - DNA, 25 bp, Homo sapien
gcagatgatgggggctttccattgg

SEQ ID NO: 627431 - DNA, 25 bp, Homo sapien
ggcgtcttgcgactggcacttctgc

SEQ ID NO: 627432 - DNA, 25 bp, Homo sapien
gggcgtggtggaagttctctcacac

SEQ ID NO: 627433 - DNA, 25 bp, Homo sapien
cgacgtgatcaaatagagccacggg

SEQ ID NO: 627434 - DNA, 25 bp, Homo sapien
cagaagacgacgtgatcaaatagag

SEQ ID NO: 627435 - DNA, 25 bp, Homo sapien
gactttgagccacacttcaaacagc

SEQ ID NO: 627436 - DNA, 25 bp, Homo sapien
ccatctttatggatctgagtaaaaa

SEQ ID NO: 627437 - DNA, 25 bp, Homo sapien
ttatggatctgagtaaaaaacactt

SEQ ID NO: 627438 - DNA, 25 bp, Homo sapien
acactttgactttgagccacacttc

SEQ ID NO: 627439 - DNA, 25 bp, Homo sapien
tctggtctcgagaaagatattgtct

SEQ ID NO: 627440 - DNA, 25 bp, Homo sapien
cctgtcttgggtgcgtctggtctcg

SEQ ID NO: 627441 - DNA, 25 bp, Homo sapien
tccagcacaagtgagcactgcactg

SEQ ID NO: 627442 - DNA, 25 bp, Homo sapien
cactgcactgattagaaaacacctg

SEQ ID NO: 627443 - DNA, 25 bp, Homo sapien
taagcaggagcgaggttttagtcca

SEQ ID NO: 627444 - DNA, 25 bp, Homo sapien
gaagaatcgcatcaatgtgccagcg

SEQ ID NO: 627445 - DNA, 25 bp, Homo sapien
cttccgggatagaacagcaggtctg

SEQ ID NO: 627446 - DNA, 25 bp, Homo sapien
caatacagaggttgctagcgcagca

SEQ ID NO: 627447 - DNA, 25 bp, Homo sapien
gtcctctacatggtcatctgagctg

SEQ ID NO: 627448 - DNA, 25 bp, Homo sapien
gaaggcttgtcctctacatggtcat

SEQ ID NO: 627449 - DNA, 25 bp, Homo sapien
ctgtgtgcacgaaggaaggcttgtc

SEQ ID NO: 627450 - DNA, 25 bp, Homo sapien
gctgctgaatccaggatttgtgggt

SEQ ID NO: 627451 - DNA, 25 bp, Homo sapien
agtctggcgggtattcccgctggca

SEQ ID NO: 627452 - DNA, 25 bp, Homo sapien
tcccgagagtctggcgggtattccc

SEQ ID NO: 627453 - DNA, 25 bp, Homo sapien
caaggaggtcccgagagtctggcgg

SEQ ID NO: 627454 - DNA, 25 bp, Homo sapien
gccagtgtgaggaatgggtcttggg

SEQ ID NO: 627455 - DNA, 25 bp, Homo sapien
cgcatagtcagccagtatctccaga

SEQ ID NO: 627456 - DNA, 25 bp, Homo sapien
tgcacttggaaagcacaaggtcgca

SEQ ID NO: 627457 - DNA, 25 bp, Homo sapien
ctccctggaactggcgttgggcatg

SEQ ID NO: 627458 - DNA, 25 bp, Homo sapien
tcatagatagtatgcagaaatgttt

SEQ ID NO: 627459 - DNA, 25 bp, Homo sapien
caggcagcttgtcttgaagggcaca

SEQ ID NO: 627460 - DNA, 25 bp, Homo sapien
gacttcatggtcataggtgggacct

SEQ ID NO: 627461 - DNA, 25 bp, Homo sapien
aagtcatagacttcatggtcatagg

SEQ ID NO: 627462 - DNA, 25 bp, Homo sapien
cattttgggcatctgagtatcctga

SEQ ID NO: 627463 - DNA, 25 bp, Homo sapien
gagcatcctgccaatatgaagccag

SEQ ID NO: 627464 - DNA, 25 bp, Homo sapien
gaaaacctgcagtatatcctaggga

SEQ ID NO: 627465 - DNA, 25 bp, Homo sapien
taactgacaccaataagctcgaagc

SEQ ID NO: 627466 - DNA, 25 bp, Homo sapien
gatcaaagttagcatgggagaccaa

SEQ ID NO: 627467 - DNA, 25 bp, Homo sapien
tgcagccagggagaccctctggctt

SEQ ID NO: 627468 - DNA, 25 bp, Homo sapien
ctggcttccagtgttttactgcttt

SEQ ID NO: 627469 - DNA, 25 bp, Homo sapien
accctctggcttccagtgttttact

SEQ ID NO: 627470 - DNA, 25 bp, Homo sapien
cctggcaagaaaaactgcagccagg

SEQ ID NO: 627471 - DNA, 25 bp, Homo sapien
tttgtcctctgactcgcagtgggac

SEQ ID NO: 627472 - DNA, 25 bp, Homo sapien
ctttgtcctctgactcgcagtggga

SEQ ID NO: 627473 - DNA, 25 bp, Homo sapien
tccatcatgcgttacgtgccaggtg

SEQ ID NO: 627474 - DNA, 25 bp, Homo sapien
gacatagacagttcactctggaagc

SEQ ID NO: 627475 - DNA, 25 bp, Homo sapien
gaaacttgagattgagtcacccacc

SEQ ID NO: 627476 - DNA, 25 bp, Homo sapien
tgtgatccctcagtgtatagagcgt

SEQ ID NO: 627477 - DNA, 25 bp, Homo sapien
agtgctgggtaccttcctgtgacca

SEQ ID NO: 627478 - DNA, 25 bp, Homo sapien
tgaacagtgctgggtaccttcctgt

SEQ ID NO: 627479 - DNA, 25 bp, Homo sapien
acagtgctgggtaccttcctgtgac

SEQ ID NO: 627480 - DNA, 25 bp, Homo sapien
catgctgaacagtgctgggtacctt

SEQ ID NO: 627481 - DNA, 25 bp, Homo sapien
tgtggtgcaggtgtgaatgtctctg

SEQ ID NO: 627482 - DNA, 25 bp, Homo sapien
gcagacaaggaaccagaagcttcca

SEQ ID NO: 627483 - DNA, 25 bp, Homo sapien
atcgatgggagaatcagaagtgtga

SEQ ID NO: 627484 - DNA, 25 bp, Homo sapien
aatcagaagtgtgagcggagtcagc

SEQ ID NO: 627485 - DNA, 25 bp, Homo sapien
tcctgtcgatgtccatccactcctc

SEQ ID NO: 627486 - DNA, 25 bp, Homo sapien
ttcctgtcgatgtccatccactcct

SEQ ID NO: 627487 - DNA, 25 bp, Homo sapien
cttgcttcctgtcgatgtccatcca

SEQ ID NO: 627488 - DNA, 25 bp, Homo sapien
gtgcttgcttcctgtcgatgtccat

SEQ ID NO: 627489 - DNA, 25 bp, Homo sapien
ggccgccagaggcagttgctatgat

SEQ ID NO: 627490 - DNA, 25 bp, Homo sapien
gctgatgtgcgctcattcccaaaca

SEQ ID NO: 627491 - DNA, 25 bp, Homo sapien
ctggcgtgtgctgatgtgcgctcat

SEQ ID NO: 627492 - DNA, 25 bp, Homo sapien
aggcagttgctatgatgctgctaca

SEQ ID NO: 627493 - DNA, 25 bp, Homo sapien
gacgggtcatctttgttggcgttgt

SEQ ID NO: 627494 - DNA, 25 bp, Homo sapien
cttggttggtgttgtcgttggcatc

SEQ ID NO: 627495 - DNA, 25 bp, Homo sapien
tggcatcttctcttgggagacgggt

SEQ ID NO: 627496 - DNA, 25 bp, Homo sapien
tcttgggagacagggtcatcgtggt

SEQ ID NO: 627497 - DNA, 25 bp, Homo sapien
tggctgcgagaacatcatcattgat

SEQ ID NO: 627498 - DNA, 25 bp, Homo sapien
tttctgacctggctgcgagaacatc

SEQ ID NO: 627499 - DNA, 25 bp, Homo sapien
gacctggctgcgagaacatcatcat

SEQ ID NO: 627500 - DNA, 25 bp, Homo sapien
gcgagaacatcatcattgatgggca

SEQ ID NO: 627501 - DNA, 25 bp, Homo sapien
tgacaggcccctcgtcggaggcgca

SEQ ID NO: 627502 - DNA, 25 bp, Homo sapien
actgacaggcccctcgtcggaggcg

SEQ ID NO: 627503 - DNA, 25 bp, Homo sapien
tggactgacaggcccctcgtcggag

SEQ ID NO: 627504 - DNA, 25 bp, Homo sapien
gacaggcccctcgtcggaggcgcat

SEQ ID NO: 627505 - DNA, 25 bp, Homo sapien
cagatcgagtctggcattgttgaaa

SEQ ID NO: 627506 - DNA, 25 bp, Homo sapien
ttgaaaggaagtcggatagatccgt

SEQ ID NO: 627507 - DNA, 25 bp, Homo sapien
ctgaggcctccagatcgagtctggc

SEQ ID NO: 627508 - DNA, 25 bp, Homo sapien
tctggcattgttgaaaggaagtcgg

SEQ ID NO: 627509 - DNA, 25 bp, Homo sapien
ccaggagcctgaaaacgaagccagt

SEQ ID NO: 627510 - DNA, 25 bp, Homo sapien
aggtgccgggactctccgaggctct

SEQ ID NO: 627511 - DNA, 25 bp, Homo sapien
ggagcctttggagcactgcagccca

SEQ ID NO: 627512 - DNA, 25 bp, Homo sapien
gcaggagcctttggagcactgcagc

SEQ ID NO: 627513 - DNA, 25 bp, Homo sapien
ttaaacgtgagtgttgctttttaca

SEQ ID NO: 627514 - DNA, 25 bp, Homo sapien
atgtaaactgaaagttttagtgcct

SEQ ID NO: 627515 - DNA, 25 bp, Homo sapien
aacgtgagtgttgctttttacaatg

SEQ ID NO: 627516 - DNA, 25 bp, Homo sapien
caatgtaaactgaaagttttagtgc

SEQ ID NO: 627517 - DNA, 25 bp, Homo sapien
atgtgcttgatttgctagatagttt

SEQ ID NO: 627518 - DNA, 25 bp, Homo sapien
gtttgtgctgtctgacaactcccat

SEQ ID NO: 627519 - DNA, 25 bp, Homo sapien
taaaatcgtaaagacaatcggatct

SEQ ID NO: 627520 - DNA, 25 bp, Homo sapien
taatagatggtcagggtgtaaaatc

SEQ ID NO: 627521 - DNA, 25 bp, Homo sapien
gcttttgcatcttgaggaaccatcc

SEQ ID NO: 627522 - DNA, 25 bp, Homo sapien
cataatcaacaacccactcttggag

SEQ ID NO: 627523 - DNA, 25 bp, Homo sapien
tgcagcaggatttatcacagcagca

SEQ ID NO: 627524 - DNA, 25 bp, Homo sapien
gcttgtttccgactgcctgactcat

SEQ ID NO: 627525 - DNA, 25 bp, Homo sapien
taccttcttagggatctcaggggtc

SEQ ID NO: 627526 - DNA, 25 bp, Homo sapien
catagataggtgactgtaccttctt

SEQ ID NO: 627527 - DNA, 25 bp, Homo sapien
ctccatagataggtgactgtacctt

SEQ ID NO: 627528 - DNA, 25 bp, Homo sapien
ttagggatctcaggggtcccagttc

SEQ ID NO: 627529 - DNA, 25 bp, Homo sapien
cagtcttccgtcctgttggcccttg

SEQ ID NO: 627530 - DNA, 25 bp, Homo sapien
ctccaatggagctccagtcttccgt

SEQ ID NO: 627531 - DNA, 25 bp, Homo sapien
tgctcactccctccaatggagctcc

SEQ ID NO: 627532 - DNA, 25 bp, Homo sapien
tcctgttggcccttgtctctttgtc

SEQ ID NO: 627533 - DNA, 25 bp, Homo sapien
ctgctttaaaggttccgccagttgg

SEQ ID NO: 627534 - DNA, 25 bp, Homo sapien
acaacacatctttgaggggcagcgt

SEQ ID NO: 627535 - DNA, 25 bp, Homo sapien
acacatctttgaggggcagcgtctg

SEQ ID NO: 627536 - DNA, 25 bp, Homo sapien
acatctttgaggggcagcgtctgcc

SEQ ID NO: 627537 - DNA, 25 bp, Homo sapien
caacacatctttgaggggcagcgtc

SEQ ID NO: 627538 - DNA, 25 bp, Homo sapien
aggaggacctgtccgatgaattttc

SEQ ID NO: 627539 - DNA, 25 bp, Homo sapien
taaccttccctcttgtgggccttga

SEQ ID NO: 627540 - DNA, 25 bp, Homo sapien
tgtggcccaatatgcaacaacagga

SEQ ID NO: 627541 - DNA, 25 bp, Homo sapien
tgactgctgaccctggaatgcagat

SEQ ID NO: 627542 - DNA, 25 bp, Homo sapien
ttccgacaaggtgctgtggctgcgt

SEQ ID NO: 627543 - DNA, 25 bp, Homo sapien
ccagctccgatcagttccgacaagg

SEQ ID NO: 627544 - DNA, 25 bp, Homo sapien
agtggccgcgtgctcctgcgagtgg

SEQ ID NO: 627545 - DNA, 25 bp, Homo sapien
ggctccctgcaagtggttgtgaggg

SEQ ID NO: 627546 - DNA, 25 bp, Homo sapien
gccgtggggtctgcgtgtccctgta

SEQ ID NO: 627547 - DNA, 25 bp, Homo sapien
cctctgcgggcaggtctctgtgctg

SEQ ID NO: 627548 - DNA, 25 bp, Homo sapien
gtgctgccacactctccttttgcag

SEQ ID NO: 627549 - DNA, 25 bp, Homo sapien
tctaggccctctcgccgtggggtct

SEQ ID NO: 627550 - DNA, 25 bp, Homo sapien
ggaaaggcagtgggctcagaacctc

SEQ ID NO: 627551 - DNA, 25 bp, Homo sapien
gcagtgggctcagaacctctcaggg

SEQ ID NO: 627552 - DNA, 25 bp, Homo sapien
aggcagtgggctcagaacctctcag

SEQ ID NO: 627553 - DNA, 25 bp, Homo sapien
aaaggcagtgggctcagaacctctc

SEQ ID NO: 627554 - DNA, 25 bp, Homo sapien
ggtccctgagacgatgctgtcacaa

SEQ ID NO: 627555 - DNA, 25 bp, Homo sapien
gcgtcgtgccgtccatcctgtgctg

SEQ ID NO: 627556 - DNA, 25 bp, Homo sapien
ctgggcgtcgtgccgtccatcctgt

SEQ ID NO: 627557 - DNA, 25 bp, Homo sapien
caggtccctgagacgatgctgtcac

SEQ ID NO: 627558 - DNA, 25 bp, Homo sapien
tgtgacctcctgtatctgtatgtga

SEQ ID NO: 627559 - DNA, 25 bp, Homo sapien
taataattggatgaagcctagcaga

SEQ ID NO: 627560 - DNA, 25 bp, Homo sapien
tggactcctccatttgtacgcgaag

SEQ ID NO: 627561 - DNA, 25 bp, Homo sapien
cgtgaagttgctatggcctcctcca

SEQ ID NO: 627562 - DNA, 25 bp, Homo sapien
ctggtattgaggtaggctttgaggg

SEQ ID NO: 627563 - DNA, 25 bp, Homo sapien
gaggtaggctttgagggacgtctga

SEQ ID NO: 627564 - DNA, 25 bp, Homo sapien
tattgaggtaggctttgagggacgt

SEQ ID NO: 627565 - DNA, 25 bp, Homo sapien
ggtaggctttgagggacgtctgagt

SEQ ID NO: 627566 - DNA, 25 bp, Homo sapien
caggtcccacccatttgccactgct

SEQ ID NO: 627567 - DNA, 25 bp, Homo sapien
caatggtgagaacggatgggattct

SEQ ID NO: 627568 - DNA, 25 bp, Homo sapien
ggttctggctgccaactggctgcct

SEQ ID NO: 627569 - DNA, 25 bp, Homo sapien
ggtgtttcggctcctgcaggtccca

SEQ ID NO: 627570 - DNA, 25 bp, Homo sapien
gaccccagtgcagcagatccaggag

SEQ ID NO: 627571 - DNA, 25 bp, Homo sapien
accccagtgcagcagatccaggagg

SEQ ID NO: 627572 - DNA, 25 bp, Homo sapien
ctggggaccccagtgcagcagatcc

SEQ ID NO: 627573 - DNA, 25 bp, Homo sapien
gggaccccagtgcagcagatccagg

SEQ ID NO: 627574 - DNA, 25 bp, Homo sapien
tccaggaggtggacacctacagatg

SEQ ID NO: 627575 - DNA, 25 bp, Homo sapien
atccaggaggtggacacctacagat

SEQ ID NO: 627576 - DNA, 25 bp, Homo sapien
gatccaggaggtggacacctacaga

SEQ ID NO: 627577 - DNA, 25 bp, Homo sapien
ccaggaggtggacacctacagatga

SEQ ID NO: 627578 - DNA, 25 bp, Homo sapien
aactggagacctcgcgcagcacgat

SEQ ID NO: 627579 - DNA, 25 bp, Homo sapien
cgatctcgcttataataggtatagc

SEQ ID NO: 627580 - DNA, 25 bp, Homo sapien
cgctggaactggagacctcgcgcag

SEQ ID NO: 627581 - DNA, 25 bp, Homo sapien
tcgcttataataggtatagctggaa

SEQ ID NO: 627582 - DNA, 25 bp, Homo sapien
caggcaagtgtagcccactcgtggc

SEQ ID NO: 627583 - DNA, 25 bp, Homo sapien
caagtgtagcccactcgtggcccat

SEQ ID NO: 627584 - DNA, 25 bp, Homo sapien
gcacaggcaagtgtagcccactcgt

SEQ ID NO: 627585 - DNA, 25 bp, Homo sapien
gcaagtgtagcccactcgtggccca

SEQ ID NO: 627586 - DNA, 25 bp, Homo sapien
tgagtgccctgaggagcgcagtttc

SEQ ID NO: 627587 - DNA, 25 bp, Homo sapien
gagtaatccgtgtgctgagccgtga

SEQ ID NO: 627588 - DNA, 25 bp, Homo sapien
gaacccctgttgctccggcaaggtg

SEQ ID NO: 627589 - DNA, 25 bp, Homo sapien
tgttctcgcagatgggcttcggccc

SEQ ID NO: 627590 - DNA, 25 bp, Homo sapien
catcgatacggcaccagcttgctgc

SEQ ID NO: 627591 - DNA, 25 bp, Homo sapien
tgtccaacatggtccctcagggctt

SEQ ID NO: 627592 - DNA, 25 bp, Homo sapien
gagcttcctggagtgtcgttcaact

SEQ ID NO: 627593 - DNA, 25 bp, Homo sapien
cgttcaactccaggtcatgttcggc

SEQ ID NO: 627594 - DNA, 25 bp, Homo sapien
gatggaggggcagacagctctgggc

SEQ ID NO: 627595 - DNA, 25 bp, Homo sapien
ctgatggaggggcagacagctctgg

SEQ ID NO: 627596 - DNA, 25 bp, Homo sapien
ggaggggcagacagctctgggcact

SEQ ID NO: 627597 - DNA, 25 bp, Homo sapien
tggaggggcagacagctctgggcac

SEQ ID NO: 627598 - DNA, 25 bp, Homo sapien
agaagcacccataatgagaaatcat

SEQ ID NO: 627599 - DNA, 25 bp, Homo sapien
ctggagaagcacccataatgagaaa

SEQ ID NO: 627600 - DNA, 25 bp, Homo sapien
tggagaagcacccataatgagaaat

SEQ ID NO: 627601 - DNA, 25 bp, Homo sapien
ggagaagcacccataatgagaaatc

SEQ ID NO: 627602 - DNA, 25 bp, Homo sapien
tttgcaggaggtgagcaccgatggc

SEQ ID NO: 627603 - DNA, 25 bp, Homo sapien
ccatgcaatcctttatgagaagaag

SEQ ID NO: 627604 - DNA, 25 bp, Homo sapien
gaggtgagcaccgatggctgaaggt

SEQ ID NO: 627605 - DNA, 25 bp, Homo sapien
ccgatggctgaaggtagagtggaca

SEQ ID NO: 627606 - DNA, 25 bp, Homo sapien
gcttggaagccatggctgcaaaatg

SEQ ID NO: 627607 - DNA, 25 bp, Homo sapien
cttggaagccatggctgcaaaatgc

SEQ ID NO: 627608 - DNA, 25 bp, Homo sapien
tggaagccatggctgcaaaatgccc

SEQ ID NO: 627609 - DNA, 25 bp, Homo sapien
agcttggaagccatggctgcaaaat

SEQ ID NO: 627610 - DNA, 25 bp, Homo sapien
ctatgagagtgttcggatgtttaca

SEQ ID NO: 627611 - DNA, 25 bp, Homo sapien
cctggaagcagagtgaccagtacag

SEQ ID NO: 627612 - DNA, 25 bp, Homo sapien
tacagacctccgtgccttggcatga

SEQ ID NO: 627613 - DNA, 25 bp, Homo sapien
tgccttggcacgagcctcctggaag

SEQ ID NO: 627614 - DNA, 25 bp, Homo sapien
ctttcatagctaaaaggtccattta

SEQ ID NO: 627615 - DNA, 25 bp, Homo sapien
tccacttgtctggaagcatggcgtc

SEQ ID NO: 627616 - DNA, 25 bp, Homo sapien
gctgcagatggacacggtctccttc

SEQ ID NO: 627617 - DNA, 25 bp, Homo sapien
catggcgtccacagggaattcagag

SEQ ID NO: 627618 - DNA, 25 bp, Homo sapien
aatcacgtagggcatctgccgggcg

SEQ ID NO: 627619 - DNA, 25 bp, Homo sapien
gcccacttgtgaggaggtagaaaca

SEQ ID NO: 627620 - DNA, 25 bp, Homo sapien
tgagcctggtccaggtcaccaggta

SEQ ID NO: 627621 - DNA, 25 bp, Homo sapien
acttgtgaggaggtagaaacaaagc

SEQ ID NO: 627622 - DNA, 25 bp, Homo sapien
aatgaagcccacttgtgaggaggta

SEQ ID NO: 627623 - DNA, 25 bp, Homo sapien
aaaaaggcttcagggatgccttggg

SEQ ID NO: 627624 - DNA, 25 bp, Homo sapien
caacccagggctgaaaaaggcttca

SEQ ID NO: 627625 - DNA, 25 bp, Homo sapien
cagggctgaaaaaggcttcagggat

SEQ ID NO: 627626 - DNA, 25 bp, Homo sapien
acccagggctgaaaaaggcttcagg

SEQ ID NO: 627627 - DNA, 25 bp, Homo sapien
catcgatggttctgacgtgttgccg

SEQ ID NO: 627628 - DNA, 25 bp, Homo sapien
cagcttatcaatatgaggtggtttc

SEQ ID NO: 627629 - DNA, 25 bp, Homo sapien
ggtggtttcccatcgatggttctga

SEQ ID NO: 627630 - DNA, 25 bp, Homo sapien
tatcaatatgaggtggtttcccatc

SEQ ID NO: 627631 - DNA, 25 bp, Homo sapien
ccattgtacctgtggccaactcagg

SEQ ID NO: 627632 - DNA, 25 bp, Homo sapien
tctccattgtacctgtggccaactc

SEQ ID NO: 627633 - DNA, 25 bp, Homo sapien
ctccattgtacctgtggccaactca

SEQ ID NO: 627634 - DNA, 25 bp, Homo sapien
tccattgtacctgtggccaactcag

SEQ ID NO: 627635 - DNA, 25 bp, Homo sapien
ggtttcagttagcatggggccatct

SEQ ID NO: 627636 - DNA, 25 bp, Homo sapien
ggagatcttgatgcttccattcaaa

SEQ ID NO: 627637 - DNA, 25 bp, Homo sapien
tgtaaagagctagcttgaatactgg

SEQ ID NO: 627638 - DNA, 25 bp, Homo sapien
tctccaatgaaaaacgcctgtccca

SEQ ID NO: 627639 - DNA, 25 bp, Homo sapien
taagctacattgaagagcaggccat

SEQ ID NO: 627640 - DNA, 25 bp, Homo sapien
gatttcgctatgatttcctccggct

SEQ ID NO: 627641 - DNA, 25 bp, Homo sapien
gggtgggcaggacaattgaactaaa

SEQ ID NO: 627642 - DNA, 25 bp, Homo sapien
taccacccctcagcggcaggagggt

SEQ ID NO: 627643 - DNA, 25 bp, Homo sapien
ctcagccaatgagccttccaggatg

SEQ ID NO: 627644 - DNA, 25 bp, Homo sapien
aggatgggcctatcctgtccctgca

SEQ ID NO: 627645 - DNA, 25 bp, Homo sapien
aacttgagctgggaggcccgcgtct

SEQ ID NO: 627646 - DNA, 25 bp, Homo sapien
gggtcaccctgactttccatccaga

SEQ ID NO: 627647 - DNA, 25 bp, Homo sapien
gcagtaagagatggcggcccactct

SEQ ID NO: 627648 - DNA, 25 bp, Homo sapien
agaatcagtccccagcaacggttga

SEQ ID NO: 627649 - DNA, 25 bp, Homo sapien
tcttgaattctatgtagagctgaaa

SEQ ID NO: 627650 - DNA, 25 bp, Homo sapien
tctgaagcagatccaaatatagttc

SEQ ID NO: 627651 - DNA, 25 bp, Homo sapien
tactggttccagctcattggttatc

SEQ ID NO: 627652 - DNA, 25 bp, Homo sapien
ggttccagctcattggttatcctgg

SEQ ID NO: 627653 - DNA, 25 bp, Homo sapien
ctgacagatgagaagcccccttccc

SEQ ID NO: 627654 - DNA, 25 bp, Homo sapien
catcttactggttccagctcattgg

SEQ ID NO: 627655 - DNA, 25 bp, Homo sapien
gccgtttgggtgctcttctggaact

SEQ ID NO: 627656 - DNA, 25 bp, Homo sapien
tatgcttcagagttgaaaatcccag

SEQ ID NO: 627657 - DNA, 25 bp, Homo sapien
aagctgagtccatgtaaggccccat

SEQ ID NO: 627658 - DNA, 25 bp, Homo sapien
tctggaactggtaagaagctgagtc

SEQ ID NO: 627659 - DNA, 25 bp, Homo sapien
tggtcaaggatactctcaaggtcag

SEQ ID NO: 627660 - DNA, 25 bp, Homo sapien
tacttgcacatcagggtttggcttg

SEQ ID NO: 627661 - DNA, 25 bp, Homo sapien
tcctgccaggcactagttgagttag

SEQ ID NO: 627662 - DNA, 25 bp, Homo sapien
cagctggcttcgtatgatgagtgca

SEQ ID NO: 627663 - DNA, 25 bp, Homo sapien
tgtcaccatggtccccttgtagagc

SEQ ID NO: 627664 - DNA, 25 bp, Homo sapien
tgttgtcaccatggtccccttgtag

SEQ ID NO: 627665 - DNA, 25 bp, Homo sapien
ctaaagttgggcgttgttctccttg

SEQ ID NO: 627666 - DNA, 25 bp, Homo sapien
agtgttgtcaccatggtccccttgt

SEQ ID NO: 627667 - DNA, 25 bp, Homo sapien
tatgccagccccgaaaatggtgtga

SEQ ID NO: 627668 - DNA, 25 bp, Homo sapien
atgccagccccgaaaatggtgtgat

SEQ ID NO: 627669 - DNA, 25 bp, Homo sapien
tgccagccccgaaaatggtgtgatg

SEQ ID NO: 627670 - DNA, 25 bp, Homo sapien
ttatgccagccccgaaaatggtgtg

SEQ ID NO: 627671 - DNA, 25 bp, Homo sapien
cgattggctcagcctgagtagggtg

SEQ ID NO: 627672 - DNA, 25 bp, Homo sapien
ttggctcagcctgagtagggtgacc

SEQ ID NO: 627673 - DNA, 25 bp, Homo sapien
tggctcagcctgagtagggtgacca

SEQ ID NO: 627674 - DNA, 25 bp, Homo sapien
attggctcagcctgagtagggtgac

SEQ ID NO: 627675 - DNA, 25 bp, Homo sapien
ggtctcggtcctggctaaagggctg

SEQ ID NO: 627676 - DNA, 25 bp, Homo sapien
cagagttgacacctggatctcaacc

SEQ ID NO: 627677 - DNA, 25 bp, Homo sapien
gttgacacctggatctcaacccctg

SEQ ID NO: 627678 - DNA, 25 bp, Homo sapien
gagttgacacctggatctcaacccc

SEQ ID NO: 627679 - DNA, 25 bp, Homo sapien
acacctggatctcaacccctgcacc

SEQ ID NO: 627680 - DNA, 25 bp, Homo sapien
ggtgcccctgcagcactcttctctt

SEQ ID NO: 627681 - DNA, 25 bp, Homo sapien
tggtgccgtccgtcactctgtgagc

SEQ ID NO: 627682 - DNA, 25 bp, Homo sapien
gccgatggtgccgtccgtcactctg

SEQ ID NO: 627683 - DNA, 25 bp, Homo sapien
gtcactctgtgagctctcggtgccc

SEQ ID NO: 627684 - DNA, 25 bp, Homo sapien
ggaagtggatttgccacatgttcca

SEQ ID NO: 627685 - DNA, 25 bp, Homo sapien
ggtggacttgtgtctcaggcttgcc

SEQ ID NO: 627686 - DNA, 25 bp, Homo sapien
gtggacttgtgtctcaggcttgcca

SEQ ID NO: 627687 - DNA, 25 bp, Homo sapien
ccacatgttccagggcccctgaccc

SEQ ID NO: 627688 - DNA, 25 bp, Homo sapien
tcaacatcgactgtagagaagggac

SEQ ID NO: 627689 - DNA, 25 bp, Homo sapien
tcgactgtagagaagggactgccgt

SEQ ID NO: 627690 - DNA, 25 bp, Homo sapien
cttcaacatcgactgtagagaaggg

SEQ ID NO: 627691 - DNA, 25 bp, Homo sapien
aacatcgactgtagagaagggactg

SEQ ID NO: 627692 - DNA, 25 bp, Homo sapien
cgggacccagtgtaggatggctctt

SEQ ID NO: 627693 - DNA, 25 bp, Homo sapien
gctcttcaggaaaggcgctggcgat

SEQ ID NO: 627694 - DNA, 25 bp, Homo sapien
catgagcctgtgctattgtttgcag

SEQ ID NO: 627695 - DNA, 25 bp, Homo sapien
cagagctgcagttccgggacccagt

SEQ ID NO: 627696 - DNA, 25 bp, Homo sapien
aagcagccatcatgtaggccgtcat

SEQ ID NO: 627697 - DNA, 25 bp, Homo sapien
ttaatgatgctttgtgaagatgttt

SEQ ID NO: 627698 - DNA, 25 bp, Homo sapien
aagatgtttcgcatctccccagagt

SEQ ID NO: 627699 - DNA, 25 bp, Homo sapien
ccaattgcgcggaggttaatgatgc

SEQ ID NO: 627700 - DNA, 25 bp, Homo sapien
cccttcctggcggatgaggtgccat

SEQ ID NO: 627701 - DNA, 25 bp, Homo sapien
agagcccttcctggcggatgaggtg

SEQ ID NO: 627702 - DNA, 25 bp, Homo sapien
agcccttcctggcggatgaggtgcc

SEQ ID NO: 627703 - DNA, 25 bp, Homo sapien
gcccttcctggcggatgaggtgcca

SEQ ID NO: 627704 - DNA, 25 bp, Homo sapien
tcctcgatgaggcagtgtttatctg

SEQ ID NO: 627705 - DNA, 25 bp, Homo sapien
cgtcctcgatgaggcagtgtttatc

SEQ ID NO: 627706 - DNA, 25 bp, Homo sapien
gaggcagtgtttatctggcagggct

SEQ ID NO: 627707 - DNA, 25 bp, Homo sapien
gcagtgtttatctggcagggctggg

SEQ ID NO: 627708 - DNA, 25 bp, Homo sapien
cttgtctgttcctccgagaggctgg

SEQ ID NO: 627709 - DNA, 25 bp, Homo sapien
ctgagggtaggtgcgcggggagcgg

SEQ ID NO: 627710 - DNA, 25 bp, Homo sapien
tggagctgagggtaggtgcgcgggg

SEQ ID NO: 627711 - DNA, 25 bp, Homo sapien
gtctgttcctccgagaggctggagc

SEQ ID NO: 627712 - DNA, 25 bp, Homo sapien
gaccaccatggtagtggttgctgag

SEQ ID NO: 627713 - DNA, 25 bp, Homo sapien
tctaagtcgtggacgcttcccaagg

SEQ ID NO: 627714 - DNA, 25 bp, Homo sapien
tttgttcacccagcatagatttggg

SEQ ID NO: 627715 - DNA, 25 bp, Homo sapien
tccacagggtcaagacgttcatttg

SEQ ID NO: 627716 - DNA, 25 bp, Homo sapien
tcggcacggcctccctggttggctt

SEQ ID NO: 627717 - DNA, 25 bp, Homo sapien
tgttggcagctaagcatattctgcc

SEQ ID NO: 627718 - DNA, 25 bp, Homo sapien
gtgcttttcttcctcggcacggcct

SEQ ID NO: 627719 - DNA, 25 bp, Homo sapien
gggatactgccatgcgctgttggca

SEQ ID NO: 627720 - DNA, 25 bp, Homo sapien
gagatccgagagtcttatcgtcaga

SEQ ID NO: 627721 - DNA, 25 bp, Homo sapien
gcagtaagcgtctttccaagtatca

SEQ ID NO: 627722 - DNA, 25 bp, Homo sapien
ggagacttgagcatagcagtaagcg

SEQ ID NO: 627723 - DNA, 25 bp, Homo sapien
tatcgtcagatgtgccctgtcttcc

SEQ ID NO: 627724 - DNA, 25 bp, Homo sapien
taatttatcacagttgaacatgcgc

SEQ ID NO: 627725 - DNA, 25 bp, Homo sapien
tcacagttgaacatgcgctttgttc

SEQ ID NO: 627726 - DNA, 25 bp, Homo sapien
aacatgcgctttgttcaatgacagg

SEQ ID NO: 627727 - DNA, 25 bp, Homo sapien
tgaacatgcgctttgttcaatgaca

SEQ ID NO: 627728 - DNA, 25 bp, Homo sapien
cgaagctggaactgcctctcctgct

SEQ ID NO: 627729 - DNA, 25 bp, Homo sapien
ggcttggggactgccaaggctggtg

SEQ ID NO: 627730 - DNA, 25 bp, Homo sapien
tgcctctcctgcttgtggagggctt

SEQ ID NO: 627731 - DNA, 25 bp, Homo sapien
ttctggggctcgaagctggaactgc

SEQ ID NO: 627732 - DNA, 25 bp, Homo sapien
gcctacacagcaaaaggctgtcaga

SEQ ID NO: 627733 - DNA, 25 bp, Homo sapien
gccacaggtcttttcaatggagcac

SEQ ID NO: 627734 - DNA, 25 bp, Homo sapien
gtcttttcaatggagcaccaccagc

SEQ ID NO: 627735 - DNA, 25 bp, Homo sapien
caggtcttttcaatggagcaccacc

SEQ ID NO: 627736 - DNA, 25 bp, Homo sapien
gggcgggcagctccaactcattcca

SEQ ID NO: 627737 - DNA, 25 bp, Homo sapien
tcaccgggccagctcaaagctgctg

SEQ ID NO: 627738 - DNA, 25 bp, Homo sapien
tcatcgatgggcaatgacctggaac

SEQ ID NO: 627739 - DNA, 25 bp, Homo sapien
ctgctgctggttgtggtcatcgatg

SEQ ID NO: 627740 - DNA, 25 bp, Homo sapien
tctttattcgagttgtctggaaggg

SEQ ID NO: 627741 - DNA, 25 bp, Homo sapien
tgagagccacgcagctttattgata

SEQ ID NO: 627742 - DNA, 25 bp, Homo sapien
tagttccatccgtgacatctgagag

SEQ ID NO: 627743 - DNA, 25 bp, Homo sapien
gagccagcttaaccccttaatcact

SEQ ID NO: 627744 - DNA, 25 bp, Homo sapien
cttggcctttgcatcggcagctggg

SEQ ID NO: 627745 - DNA, 25 bp, Homo sapien
attctgctggccatacttggccttt

SEQ ID NO: 627746 - DNA, 25 bp, Homo sapien
ctgctggccatacttggcctttgca

SEQ ID NO: 627747 - DNA, 25 bp, Homo sapien
tctgctggccatacttggcctttgc

SEQ ID NO: 627748 - DNA, 25 bp, Homo sapien
aggcaggggccgatggagatgctca

SEQ ID NO: 627749 - DNA, 25 bp, Homo sapien
ccaggcaggggccgatggagatgct

SEQ ID NO: 627750 - DNA, 25 bp, Homo sapien
caggcaggggccgatggagatgctc

SEQ ID NO: 627751 - DNA, 25 bp, Homo sapien
ggcaggggccgatggagatgctcac

SEQ ID NO: 627752 - DNA, 25 bp, Homo sapien
aggatggaggcgacatccgcagagg

SEQ ID NO: 627753 - DNA, 25 bp, Homo sapien
atggaggcgacatccgcagagggtc

SEQ ID NO: 627754 - DNA, 25 bp, Homo sapien
tcctgatgaggatggaggcgacatc

SEQ ID NO: 627755 - DNA, 25 bp, Homo sapien
cctgatgaggatggaggcgacatcc

SEQ ID NO: 627756 - DNA, 25 bp, Homo sapien
cctggtgaggatggaggtggcactc

SEQ ID NO: 627757 - DNA, 25 bp, Homo sapien
atcctggtgaggatggaggtggcac

SEQ ID NO: 627758 - DNA, 25 bp, Homo sapien
tggtgaggatggaggtggcactcat

SEQ ID NO: 627759 - DNA, 25 bp, Homo sapien
aggggatcctggtgaggatggaggt

SEQ ID NO: 627760 - DNA, 25 bp, Homo sapien
ctgagtgaggatggcggtgacacca

SEQ ID NO: 627761 - DNA, 25 bp, Homo sapien
tatggatggcgaggacattcacaga

SEQ ID NO: 627762 - DNA, 25 bp, Homo sapien
gtatggatggcgaggacattcacag

SEQ ID NO: 627763 - DNA, 25 bp, Homo sapien
agtatggatggcgaggacattcaca

SEQ ID NO: 627764 - DNA, 25 bp, Homo sapien
ggagtatggatggcgaggacattca

SEQ ID NO: 627765 - DNA, 25 bp, Homo sapien
ggctgagctctacgctgcagccgtg

SEQ ID NO: 627766 - DNA, 25 bp, Homo sapien
tgcacctacacctgcatctaaatct

SEQ ID NO: 627767 - DNA, 25 bp, Homo sapien
aactgcacacctacatctgtacctg

SEQ ID NO: 627768 - DNA, 25 bp, Homo sapien
tgaaactgcacacctacatctgtac

SEQ ID NO: 627769 - DNA, 25 bp, Homo sapien
atctacatctacagctgcgtctcca

SEQ ID NO: 627770 - DNA, 25 bp, Homo sapien
aatctctccagatgtgtcagagcac

SEQ ID NO: 627771 - DNA, 25 bp, Homo sapien
gcacccagaccatattccagattga

SEQ ID NO: 627772 - DNA, 25 bp, Homo sapien
tcggcttcactttagcacccacaaa

SEQ ID NO: 627773 - DNA, 25 bp, Homo sapien
tttttcggcttcactttagcaccca

SEQ ID NO: 627774 - DNA, 25 bp, Homo sapien
agtcagagtattaactccctttaag

SEQ ID NO: 627775 - DNA, 25 bp, Homo sapien
ggaatttagtcagagtattaactcc

SEQ ID NO: 627776 - DNA, 25 bp, Homo sapien
gttagtggggcctccttacgcagga

SEQ ID NO: 627777 - DNA, 25 bp, Homo sapien
ggcctccttacgcaggaatttagtc

SEQ ID NO: 627778 - DNA, 25 bp, Homo sapien
cagagatgcgcacagccggtgcgcc

SEQ ID NO: 627779 - DNA, 25 bp, Homo sapien
tctcggacgctaggtggcgctgtct

SEQ ID NO: 627780 - DNA, 25 bp, Homo sapien
agtctcgcccagagatgcgcacagc

SEQ ID NO: 627781 - DNA, 25 bp, Homo sapien
ggtgcgccgtggctctcggacgcta

SEQ ID NO: 627782 - DNA, 25 bp, Homo sapien
tgggatgaaagtgaatctcagtgtc

SEQ ID NO: 627783 - DNA, 25 bp, Homo sapien
tgtctcaatgaagcccaccacagtg

SEQ ID NO: 627784 - DNA, 25 bp, Homo sapien
taagcaagggagatgtcagaagcca

SEQ ID NO: 627785 - DNA, 25 bp, Homo sapien
tggaaggcttttggagtaagcaagg

SEQ ID NO: 627786 - DNA, 25 bp, Homo sapien
gaaagggtgctccgatgttggtcca

SEQ ID NO: 627787 - DNA, 25 bp, Homo sapien
agaaagggtgctccgatgttggtcc

SEQ ID NO: 627788 - DNA, 25 bp, Homo sapien
aaagggtgctccgatgttggtccat

SEQ ID NO: 627789 - DNA, 25 bp, Homo sapien
tagaaagggtgctccgatgttggtc

SEQ ID NO: 627790 - DNA, 25 bp, Homo sapien
cctccggggtagtcttagctccctg

SEQ ID NO: 627791 - DNA, 25 bp, Homo sapien
ttctgaggtctaaaccaaagtcagg

SEQ ID NO: 627792 - DNA, 25 bp, Homo sapien
tggaaaattcaatggcagcatagcc

SEQ ID NO: 627793 - DNA, 25 bp, Homo sapien
aattcaatggcagcatagccacctc

SEQ ID NO: 627794 - DNA, 25 bp, Homo sapien
cctccaggggcatgtatttgcatag

SEQ ID NO: 627795 - DNA, 25 bp, Homo sapien
accaggttcaggatgtaccacttgc

SEQ ID NO: 627796 - DNA, 25 bp, Homo sapien
aggttcaggatgtaccacttgcttt

SEQ ID NO: 627797 - DNA, 25 bp, Homo sapien
ccaggttcaggatgtaccacttgct

SEQ ID NO: 627798 - DNA, 25 bp, Homo sapien
caggttcaggatgtaccacttgctt

SEQ ID NO: 627799 - DNA, 25 bp, Homo sapien
tttgctgtctcaagactggtttctt

SEQ ID NO: 627800 - DNA, 25 bp, Homo sapien
cacttttgctgtctcaagactggtt

SEQ ID NO: 627801 - DNA, 25 bp, Homo sapien
gagaatgaaaagcatctctgacatt

SEQ ID NO: 627802 - DNA, 25 bp, Homo sapien
tgtggcttggacacattgtgtgaga

SEQ ID NO: 627803 - DNA, 25 bp, Homo sapien
ccaacaccttcctgagacttcagtt

SEQ ID NO: 627804 - DNA, 25 bp, Homo sapien
aatgtttccgctccaacaccttcct

SEQ ID NO: 627805 - DNA, 25 bp, Homo sapien
tccaacaccttcctgagacttcagt

SEQ ID NO: 627806 - DNA, 25 bp, Homo sapien
cttccaaatgtttccgctccaacac

SEQ ID NO: 627807 - DNA, 25 bp, Homo sapien
tgtctctggctggtttatagaagca

SEQ ID NO: 627808 - DNA, 25 bp, Homo sapien
acagggaggccaacgacagggccct

SEQ ID NO: 627809 - DNA, 25 bp, Homo sapien
tcacagggaggccaacgacagggcc

SEQ ID NO: 627810 - DNA, 25 bp, Homo sapien
ctggctccacctcgcatcatgtctg

SEQ ID NO: 627811 - DNA, 25 bp, Homo sapien
ttactctgaatgcagcagcaaagat

SEQ ID NO: 627812 - DNA, 25 bp, Homo sapien
tggcctgggctagggatgtacccta

SEQ ID NO: 627813 - DNA, 25 bp, Homo sapien
ggtgtctccttgctaactcccctga

SEQ ID NO: 627814 - DNA, 25 bp, Homo sapien
agaggccaaggacgctcgttttcca

SEQ ID NO: 627815 - DNA, 25 bp, Homo sapien
cagagggccacgctgagatttcagc

SEQ ID NO: 627816 - DNA, 25 bp, Homo sapien
gcaccgggagcccgctccctgccgc

SEQ ID NO: 627817 - DNA, 25 bp, Homo sapien
cggtgcccggcaccgggagcccgct

SEQ ID NO: 627818 - DNA, 25 bp, Homo sapien
cccggcaccgggagcccgctccctg

SEQ ID NO: 627819 - DNA, 25 bp, Homo sapien
ccggcaccgggagcccgctccctgc

SEQ ID NO: 627820 - DNA, 25 bp, Homo sapien
cagcagaaggagcacgccggcgccc

SEQ ID NO: 627821 - DNA, 25 bp, Homo sapien
gcagcagaaggagcacgccggcgcc

SEQ ID NO: 627822 - DNA, 25 bp, Homo sapien
agcagaaggagcacgccggcgcccg

SEQ ID NO: 627823 - DNA, 25 bp, Homo sapien
cagaaggagcacgccggcgcccgcg

SEQ ID NO: 627824 - DNA, 25 bp, Homo sapien
gatggggtggacgacagggccctcc

SEQ ID NO: 627825 - DNA, 25 bp, Homo sapien
ggtggacgacagggccctccgacca

SEQ ID NO: 627826 - DNA, 25 bp, Homo sapien
acgacagggccctccgaccaagctt

SEQ ID NO: 627827 - DNA, 25 bp, Homo sapien
tggacgacagggccctccgaccaag

SEQ ID NO: 627828 - DNA, 25 bp, Homo sapien
gattaatgccgtgtaatcatcttca

SEQ ID NO: 627829 - DNA, 25 bp, Homo sapien
tctctctagttgtaagatcctcatt

SEQ ID NO: 627830 - DNA, 25 bp, Homo sapien
tgggagattaatgccgtgtaatcat

SEQ ID NO: 627831 - DNA, 25 bp, Homo sapien
tattttgggagattaatgccgtgta

SEQ ID NO: 627832 - DNA, 25 bp, Homo sapien
tcagttctggagggaaaagtttaca

SEQ ID NO: 627833 - DNA, 25 bp, Homo sapien
cagttctggagggaaaagtttacat

SEQ ID NO: 627834 - DNA, 25 bp, Homo sapien
tcactgctggtcttatggctgtggc

SEQ ID NO: 627835 - DNA, 25 bp, Homo sapien
ctggtcttatggctgtggccctgaa

SEQ ID NO: 627836 - DNA, 25 bp, Homo sapien
tggccctgaacatctgggtccgatc

SEQ ID NO: 627837 - DNA, 25 bp, Homo sapien
ctgtctgcacgtgacagtggtgctc

SEQ ID NO: 627838 - DNA, 25 bp, Homo sapien
taagattgaatgaaggaaccactga

SEQ ID NO: 627839 - DNA, 25 bp, Homo sapien
gtaagattgaatgaaggagccactg

SEQ ID NO: 627840 - DNA, 25 bp, Homo sapien
taagattgaatgaaggagccactga

SEQ ID NO: 627841 - DNA, 25 bp, Homo sapien
gattgaatgaaggaaccactgaggt

SEQ ID NO: 627842 - DNA, 25 bp, Homo sapien
aggtgagccgggcaacatcaccaga

SEQ ID NO: 627843 - DNA, 25 bp, Homo sapien
catcaccagaaccacgtgggctttc

SEQ ID NO: 627844 - DNA, 25 bp, Homo sapien
tcaggtgtccggatctgggatgcct

SEQ ID NO: 627845 - DNA, 25 bp, Homo sapien
gcgccaggtcttctaatgaggcaga

SEQ ID NO: 627846 - DNA, 25 bp, Homo sapien
tatcttggtgtcatatgctgttttc

SEQ ID NO: 627847 - DNA, 25 bp, Homo sapien
gatatggggatatcttggtgtcata

SEQ ID NO: 627848 - DNA, 25 bp, Homo sapien
gggatatcttggtgtcatatgctgt

SEQ ID NO: 627849 - DNA, 25 bp, Homo sapien
aagtctcgttggatatggggatatc

SEQ ID NO: 627850 - DNA, 25 bp, Homo sapien
tgagatttcaaacacgaccaggcct

SEQ ID NO: 627851 - DNA, 25 bp, Homo sapien
tccctcatcagacactcgggctaag

SEQ ID NO: 627852 - DNA, 25 bp, Homo sapien
gtggctggagactcacagtgaagca

SEQ ID NO: 627853 - DNA, 25 bp, Homo sapien
caggccccacgtagtgcacgattga

SEQ ID NO: 627854 - DNA, 25 bp, Homo sapien
tgaggaaactcgtgcaaattcaccc

SEQ ID NO: 627855 - DNA, 25 bp, Homo sapien
tcgtgcaaattcacccttgctggct

SEQ ID NO: 627856 - DNA, 25 bp, Homo sapien
cccactctgacatgtcccttgagga

SEQ ID NO: 627857 - DNA, 25 bp, Homo sapien
tcacacggaaaaaacgcttcccaga

SEQ ID NO: 627858 - DNA, 25 bp, Homo sapien
tacgggagagtcgtcaacgcaaagc

SEQ ID NO: 627859 - DNA, 25 bp, Homo sapien
catctattaggatggtgagttcccc

SEQ ID NO: 627860 - DNA, 25 bp, Homo sapien
cagctgagcactgtgaatcccaggc

SEQ ID NO: 627861 - DNA, 25 bp, Homo sapien
cccaggctggtgtcttctgcaaagc

SEQ ID NO: 627862 - DNA, 25 bp, Homo sapien
tcaactgattctcaatgaattgggc

SEQ ID NO: 627863 - DNA, 25 bp, Homo sapien
gaattgggcaatcgaccctctgaag

SEQ ID NO: 627864 - DNA, 25 bp, Homo sapien
gagaatctacattgacaatctcccc

SEQ ID NO: 627865 - DNA, 25 bp, Homo sapien
gaccctctgaagtgagaatctacat

SEQ ID NO: 627866 - DNA, 25 bp, Homo sapien
atcccggggtctacaaggccctatg

SEQ ID NO: 627867 - DNA, 25 bp, Homo sapien
tacaaggccctatgggccatgctgc

SEQ ID NO: 627868 - DNA, 25 bp, Homo sapien
caccagaataaaaccccgctcctat

SEQ ID NO: 627869 - DNA, 25 bp, Homo sapien
gggccatgctgcctacctctgctgt

SEQ ID NO: 627870 - DNA, 25 bp, Homo sapien
gtagacacaggatgcagccctggca

SEQ ID NO: 627871 - DNA, 25 bp, Homo sapien
cacaggatgcagccctggcaggcca

SEQ ID NO: 627872 - DNA, 25 bp, Homo sapien
cagcagtagacacaggatgcagccc

SEQ ID NO: 627873 - DNA, 25 bp, Homo sapien
gcagtagacacaggatgcagccctg

SEQ ID NO: 627874 - DNA, 25 bp, Homo sapien
tcagctgccacctggctaaaagcag

SEQ ID NO: 627875 - DNA, 25 bp, Homo sapien
tggctaaaagcagggcctcccttcc

SEQ ID NO: 627876 - DNA, 25 bp, Homo sapien
ccccaaccccagtcagttctctgac

SEQ ID NO: 627877 - DNA, 25 bp, Homo sapien
ctcggggaaggcctccatcagctgc

SEQ ID NO: 627878 - DNA, 25 bp, Homo sapien
tgcatggatcccagagccgggagct

SEQ ID NO: 627879 - DNA, 25 bp, Homo sapien
cctgtctatagaggaggaaacccct

SEQ ID NO: 627880 - DNA, 25 bp, Homo sapien
tgtcaaaagcccttcctggcagtgc

SEQ ID NO: 627881 - DNA, 25 bp, Homo sapien
gcagtgctggcttgaatccttttcc

SEQ ID NO: 627882 - DNA, 25 bp, Homo sapien
ggacaagtcgtgtgtattgaggtat

SEQ ID NO: 627883 - DNA, 25 bp, Homo sapien
gaggtattcaatgtccactggacac

SEQ ID NO: 627884 - DNA, 25 bp, Homo sapien
caacccgggcctcagagcccgaagg

SEQ ID NO: 627885 - DNA, 25 bp, Homo sapien
tattgaggtattcaatgtccactgg

SEQ ID NO: 627886 - DNA, 25 bp, Homo sapien
agctggcagggtgaaaacacgtccg

SEQ ID NO: 627887 - DNA, 25 bp, Homo sapien
ctatacgacggctggttgaaggctt

SEQ ID NO: 627888 - DNA, 25 bp, Homo sapien
aaacacgtccgcagcgtctgacact

SEQ ID NO: 627889 - DNA, 25 bp, Homo sapien
gcttttcccgatggcactgagagct

SEQ ID NO: 627890 - DNA, 25 bp, Homo sapien
acacacaggccttggtaggggctcg

SEQ ID NO: 627891 - DNA, 25 bp, Homo sapien
tctggggaataaccagacagtccac

SEQ ID NO: 627892 - DNA, 25 bp, Homo sapien
gggaagggattgttcaaatgcagaa

SEQ ID NO: 627893 - DNA, 25 bp, Homo sapien
gattgttcaaatgcagaatgagctg

SEQ ID NO: 627894 - DNA, 25 bp, Homo sapien
gtctccacgggagccccatggcctc

SEQ ID NO: 627895 - DNA, 25 bp, Homo sapien
ctgctctgtgcgtgatgaggtctcc

SEQ ID NO: 627896 - DNA, 25 bp, Homo sapien
tgtcctccagatgccgggacccagc

SEQ ID NO: 627897 - DNA, 25 bp, Homo sapien
cgttctggactcgagccttcgcctt

SEQ ID NO: 627898 - DNA, 25 bp, Homo sapien
cctctgtgtgacttccccacaggag

SEQ ID NO: 627899 - DNA, 25 bp, Homo sapien
ctttcaggggtagatggggcatcca

SEQ ID NO: 627900 - DNA, 25 bp, Homo sapien
tcaggaagacatggagtttggcttt

SEQ ID NO: 627901 - DNA, 25 bp, Homo sapien
cacagacaacggctgggccatcagg

SEQ ID NO: 627902 - DNA, 25 bp, Homo sapien
gaggcgaagcgtgtgcgggtagaca

SEQ ID NO: 627903 - DNA, 25 bp, Homo sapien
gagtccacagtacagctgctcagca

SEQ ID NO: 627904 - DNA, 25 bp, Homo sapien
tgaggtgggtctgcaaatagagcca

SEQ ID NO: 627905 - DNA, 25 bp, Homo sapien
cgggtagacacgtgagcacgctgtt

SEQ ID NO: 627906 - DNA, 25 bp, Homo sapien
tcatagcgtgtacagtttttgttga

SEQ ID NO: 627907 - DNA, 25 bp, Homo sapien
catagcgtgtacagtttttgttgag

SEQ ID NO: 627908 - DNA, 25 bp, Homo sapien
atagcgtgtacagtttttgttgagc

SEQ ID NO: 627909 - DNA, 25 bp, Homo sapien
ctcccaggggtcccccatgccaggg

SEQ ID NO: 627910 - DNA, 25 bp, Homo sapien
caggggtcccccatgccagggtctt

SEQ ID NO: 627911 - DNA, 25 bp, Homo sapien
tctgccttttcaggagggcccatgg

SEQ ID NO: 627912 - DNA, 25 bp, Homo sapien
gggatttgccaacctcctgatctga

SEQ ID NO: 627913 - DNA, 25 bp, Homo sapien
ctgatctgagcgttcatctcatggt

SEQ ID NO: 627914 - DNA, 25 bp, Homo sapien
gccaacctcctgatctgagcgttca

SEQ ID NO: 627915 - DNA, 25 bp, Homo sapien
tgttcttgtccaggggatttgccaa

SEQ ID NO: 627916 - DNA, 25 bp, Homo sapien
acagtacgggttcagtgcatgccag

SEQ ID NO: 627917 - DNA, 25 bp, Homo sapien
cagaaggaaagagcttacagtacgg

SEQ ID NO: 627918 - DNA, 25 bp, Homo sapien
gagcttacagtacgggttcagtgca

SEQ ID NO: 627919 - DNA, 25 bp, Homo sapien
tggaaccactggtgagtaagaagtt

SEQ ID NO: 627920 - DNA, 25 bp, Homo sapien
ttgttgtcccaccaagggacccaga

SEQ ID NO: 627921 - DNA, 25 bp, Homo sapien
gccccgaagccctctggtgctgcag

SEQ ID NO: 627922 - DNA, 25 bp, Homo sapien
caggagcccttgttgtcccaccaag

SEQ ID NO: 627923 - DNA, 25 bp, Homo sapien
acccagagaagcttctcgcatcccc

SEQ ID NO: 627924 - DNA, 25 bp, Homo sapien
taaagggccgcactgtaaaacatca

SEQ ID NO: 627925 - DNA, 25 bp, Homo sapien
cgttgtaccacactgactctgggag

SEQ ID NO: 627926 - DNA, 25 bp, Homo sapien
tcgtctaatagtaagaacaccaggg

SEQ ID NO: 627927 - DNA, 25 bp, Homo sapien
tactttacaggacgggagaggctca

SEQ ID NO: 627928 - DNA, 25 bp, Homo sapien
tatttgacgctgtatccaggcagag

SEQ ID NO: 627929 - DNA, 25 bp, Homo sapien
tttgacgctgtatccaggcagagca

SEQ ID NO: 627930 - DNA, 25 bp, Homo sapien
tgacgctgtatccaggcagagcaga

SEQ ID NO: 627931 - DNA, 25 bp, Homo sapien
ttgacgctgtatccaggcagagcag

SEQ ID NO: 627932 - DNA, 25 bp, Homo sapien
cgtcataggtaagctatcgtaactt

SEQ ID NO: 627933 - DNA, 25 bp, Homo sapien
ggtaagctatcgtaacttatgacgg

SEQ ID NO: 627934 - DNA, 25 bp, Homo sapien
cttatgacggtaacataagttaccg

SEQ ID NO: 627935 - DNA, 25 bp, Homo sapien
gctatcgtaacttatgacggtaaca

SEQ ID NO: 627936 - DNA, 25 bp, Homo sapien
tgatgtgattgccagaacttctccc

SEQ ID NO: 627937 - DNA, 25 bp, Homo sapien
caccgcgagggcagtggcatttaga

SEQ ID NO: 627938 - DNA, 25 bp, Homo sapien
ggcatttagacacctgatgtgattg

SEQ ID NO: 627939 - DNA, 25 bp, Homo sapien
tgtgattgccagaacttctccccat

SEQ ID NO: 627940 - DNA, 25 bp, Homo sapien
tgatacaaacgattggatttgaaat

SEQ ID NO: 627941 - DNA, 25 bp, Homo sapien
ctgatacaaacgattggatttgaaa

SEQ ID NO: 627942 - DNA, 25 bp, Homo sapien
gtcacattcgtgctcatcactgtcc

SEQ ID NO: 627943 - DNA, 25 bp, Homo sapien
gtgtgggtcacattcgtgctcatca

SEQ ID NO: 627944 - DNA, 25 bp, Homo sapien
tgggtcacattcgtgctcatcactg

SEQ ID NO: 627945 - DNA, 25 bp, Homo sapien
gggtggtcttcaagtgtgggtcaca

SEQ ID NO: 627946 - DNA, 25 bp, Homo sapien
ccaaacacatctcgcaatggaacag

SEQ ID NO: 627947 - DNA, 25 bp, Homo sapien
ggctgccaaacacatctcgcaatgg

SEQ ID NO: 627948 - DNA, 25 bp, Homo sapien
ggaacaggggtgctgacttcaattt

SEQ ID NO: 627949 - DNA, 25 bp, Homo sapien
aaatgaagcacagcatgccaattca

SEQ ID NO: 627950 - DNA, 25 bp, Homo sapien
agggccctggtgtgctaactgcagc

SEQ ID NO: 627951 - DNA, 25 bp, Homo sapien
gggccctggtgtgctaactgcagcc

SEQ ID NO: 627952 - DNA, 25 bp, Homo sapien
ggagggccctggtgtgctaactgca

SEQ ID NO: 627953 - DNA, 25 bp, Homo sapien
ggccctggtgtgctaactgcagcct

SEQ ID NO: 627954 - DNA, 25 bp, Homo sapien
ttcagctgtgcatctccgggaccca

SEQ ID NO: 627955 - DNA, 25 bp, Homo sapien
ctggcagagtgaatgggctctgtgc

SEQ ID NO: 627956 - DNA, 25 bp, Homo sapien
agctgtgcatctccgggacccaaca

SEQ ID NO: 627957 - DNA, 25 bp, Homo sapien
cgtctggcagagcaccgtggagctc

SEQ ID NO: 627958 - DNA, 25 bp, Homo sapien
caaggaatgcagcagcattggacat

SEQ ID NO: 627959 - DNA, 25 bp, Homo sapien
ggatgaaacaaggaatgcagcagca

SEQ ID NO: 627960 - DNA, 25 bp, Homo sapien
tgtggaaggatgaaacaaggaatgc

SEQ ID NO: 627961 - DNA, 25 bp, Homo sapien
agcatggcggtgtggaaggatgaaa

SEQ ID NO: 627962 - DNA, 25 bp, Homo sapien
ttgctgagccatgagcgttcagagc

SEQ ID NO: 627963 - DNA, 25 bp, Homo sapien
gagctacagccagtcttgtcctcct

SEQ ID NO: 627964 - DNA, 25 bp, Homo sapien
cctggatctgacaatgcttcccgga

SEQ ID NO: 627965 - DNA, 25 bp, Homo sapien
aaatcctaaggccagcacatgccgg

SEQ ID NO: 627966 - DNA, 25 bp, Homo sapien
gtccgaagctcctttccatgagcag

SEQ ID NO: 627967 - DNA, 25 bp, Homo sapien
tccatgagcagtgaggaccaccgta

SEQ ID NO: 627968 - DNA, 25 bp, Homo sapien
ctgggtgtccgaagctcctttccat

SEQ ID NO: 627969 - DNA, 25 bp, Homo sapien
gagcagtgaggaccaccgtaagcat

SEQ ID NO: 627970 - DNA, 25 bp, Homo sapien
agggtagaaaggaggcgctgagaat

SEQ ID NO: 627971 - DNA, 25 bp, Homo sapien
ttgttctgaaccaggcacacctgca

SEQ ID NO: 627972 - DNA, 25 bp, Homo sapien
gaaaggaggcgctgagaatgaagtc

SEQ ID NO: 627973 - DNA, 25 bp, Homo sapien
cagctgccgttcatcgaatccttgt

SEQ ID NO: 627974 - DNA, 25 bp, Homo sapien
agggtctcctcatcgtccccaaagc

SEQ ID NO: 627975 - DNA, 25 bp, Homo sapien
agccttgctcataagccctgttcct

SEQ ID NO: 627976 - DNA, 25 bp, Homo sapien
ccaaagccttgctcataagccctgt

SEQ ID NO: 627977 - DNA, 25 bp, Homo sapien
aaagccttgctcataagccctgttc

SEQ ID NO: 627978 - DNA, 25 bp, Homo sapien
tggactctccgtggccaagtacgta

SEQ ID NO: 627979 - DNA, 25 bp, Homo sapien
gccaggtaaacaccaacacttttca

SEQ ID NO: 627980 - DNA, 25 bp, Homo sapien
gccaagtacgtagccaggtaaacac

SEQ ID NO: 627981 - DNA, 25 bp, Homo sapien
ggtaaacaccaacacttttcagcat

SEQ ID NO: 627982 - DNA, 25 bp, Homo sapien
ctgaaaagcagccaccacacgtgtc

SEQ ID NO: 627983 - DNA, 25 bp, Homo sapien
gaaaagcagccaccacacgtgtctg

SEQ ID NO: 627984 - DNA, 25 bp, Homo sapien
aagcagccaccacacgtgtctgcgc

SEQ ID NO: 627985 - DNA, 25 bp, Homo sapien
aaagcagccaccacacgtgtctgcg

SEQ ID NO: 627986 - DNA, 25 bp, Homo sapien
gctggatgtttaacgaggggctggg

SEQ ID NO: 627987 - DNA, 25 bp, Homo sapien
gggctggatgtttaacgaggggctg

SEQ ID NO: 627988 - DNA, 25 bp, Homo sapien
ggctggatgtttaacgaggggctgg

SEQ ID NO: 627989 - DNA, 25 bp, Homo sapien
ctggatgtttaacgaggggctgggg

SEQ ID NO: 627990 - DNA, 25 bp, Homo sapien
tgaccaactctgtgccgagatcaag

SEQ ID NO: 627991 - DNA, 25 bp, Homo sapien
cgagatcaagggtagtgccaccacg

SEQ ID NO: 627992 - DNA, 25 bp, Homo sapien
gcggagcgtgtgctttctgaccaac

SEQ ID NO: 627993 - DNA, 25 bp, Homo sapien
tttgcatgtggcaaagacgctgtca

SEQ ID NO: 627994 - DNA, 25 bp, Homo sapien
tgaagaatgagcactaaacccttgc

SEQ ID NO: 627995 - DNA, 25 bp, Homo sapien
aatgagcactaaacccttgcagtag

SEQ ID NO: 627996 - DNA, 25 bp, Homo sapien
gagtgaagaatgagcactaaaccct

SEQ ID NO: 627997 - DNA, 25 bp, Homo sapien
cactaaacccttgcagtagcgtcat

SEQ ID NO: 627998 - DNA, 25 bp, Homo sapien
gtggtggacagggcttcatgagtgt

SEQ ID NO: 627999 - DNA, 25 bp, Homo sapien
ggcaccactaatgcgaggcagtcat

SEQ ID NO: 628000 - DNA, 25 bp, Homo sapien
gaggcccttctagacagcggtcagg

SEQ ID NO: 628001 - DNA, 25 bp, Homo sapien
aggcagtcatgtctcaggtgggcat

SEQ ID NO: 628002 - DNA, 25 bp, Homo sapien
agagtcggcgggcaccactaatgcg

SEQ ID NO: 628003 - DNA, 25 bp, Homo sapien
agagagatacagacggccgggctca

SEQ ID NO: 628004 - DNA, 25 bp, Homo sapien
ctgggtcagagagatacagacggcc

SEQ ID NO: 628005 - DNA, 25 bp, Homo sapien
acggccgggctcacgaaccagagat

SEQ ID NO: 628006 - DNA, 25 bp, Homo sapien
tcacgaaccagagatcctgagaggc

SEQ ID NO: 628007 - DNA, 25 bp, Homo sapien
cggccgttgcactgcctgttggcaa

SEQ ID NO: 628008 - DNA, 25 bp, Homo sapien
aaatcagcacaggccggccgttgca

SEQ ID NO: 628009 - DNA, 25 bp, Homo sapien
tggcaacacagtgggggccgatcac

SEQ ID NO: 628010 - DNA, 25 bp, Homo sapien
aacaggaaatgcgactaaaatcagc

SEQ ID NO: 628011 - DNA, 25 bp, Homo sapien
tttccgcggaagacaacagcccgca

SEQ ID NO: 628012 - DNA, 25 bp, Homo sapien
acagcccgcagccgggtgaacaagg

SEQ ID NO: 628013 - DNA, 25 bp, Homo sapien
ctgcgccgtgcgtgcagttccgagt

SEQ ID NO: 628014 - DNA, 25 bp, Homo sapien
tttccgcggaagacaacagcccgcg

SEQ ID NO: 628015 - DNA, 25 bp, Homo sapien
ctaccaactggtctgcaggccacat

SEQ ID NO: 628016 - DNA, 25 bp, Homo sapien
ggcactgccagatgcacctgcgtgt

SEQ ID NO: 628017 - DNA, 25 bp, Homo sapien
acctgcgtgtcggcagctttgtgtg

SEQ ID NO: 628018 - DNA, 25 bp, Homo sapien
gaggccggtggctgatggagctacc

SEQ ID NO: 628019 - DNA, 25 bp, Homo sapien
ctggtgtgggttgccttccctggca

SEQ ID NO: 628020 - DNA, 25 bp, Homo sapien
tggtgtgggttgccttccctggcac

SEQ ID NO: 628021 - DNA, 25 bp, Homo sapien
tttctgcaggtccaggtcttctcca

SEQ ID NO: 628022 - DNA, 25 bp, Homo sapien
aatcgcacgaatgcaggtgtccagg

SEQ ID NO: 628023 - DNA, 25 bp, Homo sapien
tgacccaagcccacggttgaatgcg

SEQ ID NO: 628024 - DNA, 25 bp, Homo sapien
aatgcgggaataggatgccgacaca

SEQ ID NO: 628025 - DNA, 25 bp, Homo sapien
tgaacacaggacagggcctctcccc

SEQ ID NO: 628026 - DNA, 25 bp, Homo sapien
atgaacacaggacagggcctctccc

SEQ ID NO: 628027 - DNA, 25 bp, Homo sapien
catgaacacaggacagggcctctcc

SEQ ID NO: 628028 - DNA, 25 bp, Homo sapien
aacacaggacagggcctctccccat

SEQ ID NO: 628029 - DNA, 25 bp, Homo sapien
gcctagagatgaactattggcatag

SEQ ID NO: 628030 - DNA, 25 bp, Homo sapien
cagctgattctttccaacacgtatt

SEQ ID NO: 628031 - DNA, 25 bp, Homo sapien
gattctttccaacacgtattcagca

SEQ ID NO: 628032 - DNA, 25 bp, Homo sapien
attggcatagatattagttgtcctg

SEQ ID NO: 628033 - DNA, 25 bp, Homo sapien
tcaaatatagcaggtcaggtccaag

SEQ ID NO: 628034 - DNA, 25 bp, Homo sapien
caaatatagcaggtcaggtccaagg

SEQ ID NO: 628035 - DNA, 25 bp, Homo sapien
gctcaaatatagcaggtcaggtcca

SEQ ID NO: 628036 - DNA, 25 bp, Homo sapien
atatagcaggtcaggtccaaggtct

SEQ ID NO: 628037 - DNA, 25 bp, Homo sapien
tggccccttttgtggggtccatgcc

SEQ ID NO: 628038 - DNA, 25 bp, Homo sapien
tgcctcctgggtggccccttttgtg

SEQ ID NO: 628039 - DNA, 25 bp, Homo sapien
gtgctcagggcttgggtgcctcctg

SEQ ID NO: 628040 - DNA, 25 bp, Homo sapien
cttgggtgcctcctgggtggcccct

SEQ ID NO: 628041 - DNA, 25 bp, Homo sapien
cccctgccccacaccagctggcatt

SEQ ID NO: 628042 - DNA, 25 bp, Homo sapien
cctgccccacaccagctggcattcc

SEQ ID NO: 628043 - DNA, 25 bp, Homo sapien
cttgaagctgtctccccctgcccca

SEQ ID NO: 628044 - DNA, 25 bp, Homo sapien
tccccctgccccacaccagctggca

SEQ ID NO: 628045 - DNA, 25 bp, Homo sapien
tgttgtggatccctccatctccttg

SEQ ID NO: 628046 - DNA, 25 bp, Homo sapien
ccatcgccctgccactccttgtctg

SEQ ID NO: 628047 - DNA, 25 bp, Homo sapien
cagtcctgggtgtccgatccttccc

SEQ ID NO: 628048 - DNA, 25 bp, Homo sapien
gcccctgcaggctcggagttggcgg

SEQ ID NO: 628049 - DNA, 25 bp, Homo sapien
gagttgtggtcggaggacgggccga

SEQ ID NO: 628050 - DNA, 25 bp, Homo sapien
tctcggtgttgttgccccggagttg

SEQ ID NO: 628051 - DNA, 25 bp, Homo sapien
cgcgggcttacacgggtggcctcta

SEQ ID NO: 628052 - DNA, 25 bp, Homo sapien
gcactggagaagcacgcgggcttac

SEQ ID NO: 628053 - DNA, 25 bp, Homo sapien
ggcaggtccagaggccgcaggccag

SEQ ID NO: 628054 - DNA, 25 bp, Homo sapien
tagccccagagagctacaaaatcct

SEQ ID NO: 628055 - DNA, 25 bp, Homo sapien
tcttttgcctgatacgcatttcctg

SEQ ID NO: 628056 - DNA, 25 bp, Homo sapien
gcctgatacgcatttcctgagcatc

SEQ ID NO: 628057 - DNA, 25 bp, Homo sapien
cgcactggcaagcaagaagccccgg

SEQ ID NO: 628058 - DNA, 25 bp, Homo sapien
ctggcaagcaagaagccccgggaag

SEQ ID NO: 628059 - DNA, 25 bp, Homo sapien
ggcaagcaagaagccccgggaagcc

SEQ ID NO: 628060 - DNA, 25 bp, Homo sapien
cactggcaagcaagaagccccggga

SEQ ID NO: 628061 - DNA, 25 bp, Homo sapien
cctgctgggcagcattccaaggcct

SEQ ID NO: 628062 - DNA, 25 bp, Homo sapien
ggacctggggatggctcacgttcct

SEQ ID NO: 628063 - DNA, 25 bp, Homo sapien
ctcacgttcctggaagctaagccct

SEQ ID NO: 628064 - DNA, 25 bp, Homo sapien
gcattccaaggcctctgtggactca

SEQ ID NO: 628065 - DNA, 25 bp, Homo sapien
gaagcaattcgggtcaagctcaagg

SEQ ID NO: 628066 - DNA, 25 bp, Homo sapien
taagtaaggcacgtacatacaggtg

SEQ ID NO: 628067 - DNA, 25 bp, Homo sapien
ggtagcccagctcattaaagtagaa

SEQ ID NO: 628068 - DNA, 25 bp, Homo sapien
tgctgaagcccaaagtgtacgtctg

SEQ ID NO: 628069 - DNA, 25 bp, Homo sapien
caggaccagcgttgcaaatcacttg

SEQ ID NO: 628070 - DNA, 25 bp, Homo sapien
tcggaaggccctcgaaggcacatta

SEQ ID NO: 628071 - DNA, 25 bp, Homo sapien
tctctgcacgctggcttctcggaag

SEQ ID NO: 628072 - DNA, 25 bp, Homo sapien
taagcgcttggctaagtctctgcac

SEQ ID NO: 628073 - DNA, 25 bp, Homo sapien
taggcacatcatattcaccaagagg

SEQ ID NO: 628074 - DNA, 25 bp, Homo sapien
gatggttcttgtgggactcaccctg

SEQ ID NO: 628075 - DNA, 25 bp, Homo sapien
tcaaccatgaatccttgccatccag

SEQ ID NO: 628076 - DNA, 25 bp, Homo sapien
ccatccagcacattacttggcacag

SEQ ID NO: 628077 - DNA, 25 bp, Homo sapien
tgcacggctgagaagattgctcctg

SEQ ID NO: 628078 - DNA, 25 bp, Homo sapien
attgctcctgtgttgtgtgcggcga

SEQ ID NO: 628079 - DNA, 25 bp, Homo sapien
gcttcagcttcaaccaggaacagga

SEQ ID NO: 628080 - DNA, 25 bp, Homo sapien
ggagaggccgttcctctaccctgtg

SEQ ID NO: 628081 - DNA, 25 bp, Homo sapien
ggagtcaaacgctttgccagcccct

SEQ ID NO: 628082 - DNA, 25 bp, Homo sapien
aggtgcattcttgggagtcaaacgc

SEQ ID NO: 628083 - DNA, 25 bp, Homo sapien
atgaggacctgctgcattcaccaga

SEQ ID NO: 628084 - DNA, 25 bp, Homo sapien
gacctgctgcattcaccagaaagca

SEQ ID NO: 628085 - DNA, 25 bp, Homo sapien
caagtaggaagaacaagtgcagtcc

SEQ ID NO: 628086 - DNA, 25 bp, Homo sapien
gaagaacaagtgcagtccttaacgc

SEQ ID NO: 628087 - DNA, 25 bp, Homo sapien
caaaattgagaggatcaagtaggaa

SEQ ID NO: 628088 - DNA, 25 bp, Homo sapien
agtgcagtccttaacgcccagtggg

SEQ ID NO: 628089 - DNA, 25 bp, Homo sapien
tgcgagctgtggtggaccacgttct

SEQ ID NO: 628090 - DNA, 25 bp, Homo sapien
cacagagcaatgaggaagtgcaggt

SEQ ID NO: 628091 - DNA, 25 bp, Homo sapien
aaatacctccagatacccgtggcag

SEQ ID NO: 628092 - DNA, 25 bp, Homo sapien
agagcacagcgtccaacatgcagaa

SEQ ID NO: 628093 - DNA, 25 bp, Homo sapien
gagcacgtgacatctcctggaattt

SEQ ID NO: 628094 - DNA, 25 bp, Homo sapien
cagagaatgaggagcacgtgacatc

SEQ ID NO: 628095 - DNA, 25 bp, Homo sapien
tccctgtggaacttgctgcgtgtcg

SEQ ID NO: 628096 - DNA, 25 bp, Homo sapien
agggccaccccatgcacttcttttg

SEQ ID NO: 628097 - DNA, 25 bp, Homo sapien
tcgttttctgctttgtacacaacac

SEQ ID NO: 628098 - DNA, 25 bp, Homo sapien
gctgttcatggtcgttttctgcttt

SEQ ID NO: 628099 - DNA, 25 bp, Homo sapien
cacaacacagagatgatggaagaat

SEQ ID NO: 628100 - DNA, 25 bp, Homo sapien
acacctttatcggccctcctggagg

SEQ ID NO: 628101 - DNA, 25 bp, Homo sapien
ctggcctcctatgctgcaggttctg

SEQ ID NO: 628102 - DNA, 25 bp, Homo sapien
ttctgtggccccagtcaactgctct

SEQ ID NO: 628103 - DNA, 25 bp, Homo sapien
tgtttctgggatcaaggggcgcctg

SEQ ID NO: 628104 - DNA, 25 bp, Homo sapien
tctccgagcgggtctgtactatccc

SEQ ID NO: 628105 - DNA, 25 bp, Homo sapien
tcctccacatcaaagggatcctgca

SEQ ID NO: 628106 - DNA, 25 bp, Homo sapien
atcaaagggatcctgcaccaggccg

SEQ ID NO: 628107 - DNA, 25 bp, Homo sapien
accaggccgtctggacacccctgca

SEQ ID NO: 628108 - DNA, 25 bp, Homo sapien
ccacatcaaagggatcctgcaccag

SEQ ID NO: 628109 - DNA, 25 bp, Homo sapien
cagggaagggaggggtgagaacaag

SEQ ID NO: 628110 - DNA, 25 bp, Homo sapien
gcagggaagggaggggtgagaacaa

SEQ ID NO: 628111 - DNA, 25 bp, Homo sapien
gaggggtgagaacaagtcctgggcc

SEQ ID NO: 628112 - DNA, 25 bp, Homo sapien
aagggaggggtgagaacaagtcctg

SEQ ID NO: 628113 - DNA, 25 bp, Homo sapien
aggtagggcgcagacccctgaaagg

SEQ ID NO: 628114 - DNA, 25 bp, Homo sapien
cacgcgtccccacacgggagaatgg

SEQ ID NO: 628115 - DNA, 25 bp, Homo sapien
cacacgggagaatggctgggccaca

SEQ ID NO: 628116 - DNA, 25 bp, Homo sapien
tcagggttgtgtccacgcgtcccca

SEQ ID NO: 628117 - DNA, 25 bp, Homo sapien
caattatgacgaagccgagctgggt

SEQ ID NO: 628118 - DNA, 25 bp, Homo sapien
cagaaggcaattatgacgaagccga

SEQ ID NO: 628119 - DNA, 25 bp, Homo sapien
gggtttgggttcagcatctgacaca

SEQ ID NO: 628120 - DNA, 25 bp, Homo sapien
tgtgagatagccagataattttctg

SEQ ID NO: 628121 - DNA, 25 bp, Homo sapien
ttgtaagaagagactcccgggagct

SEQ ID NO: 628122 - DNA, 25 bp, Homo sapien
ttttggatccagctcacagcatgtg

SEQ ID NO: 628123 - DNA, 25 bp, Homo sapien
tcttatccactgttccaaaaggcag

SEQ ID NO: 628124 - DNA, 25 bp, Homo sapien
cagatgggatcaagagttacaagca

SEQ ID NO: 628125 - DNA, 25 bp, Homo sapien
tcggcaggccgcagcccctgcaggg

SEQ ID NO: 628126 - DNA, 25 bp, Homo sapien
gcagcccctgcaggggtgtgctcat

SEQ ID NO: 628127 - DNA, 25 bp, Homo sapien
cgcagcccctgcaggggtgtgctca

SEQ ID NO: 628128 - DNA, 25 bp, Homo sapien
ggccgcagcccctgcaggggtgtgc

SEQ ID NO: 628129 - DNA, 25 bp, Homo sapien
cagccatagaagggggaagagccca

SEQ ID NO: 628130 - DNA, 25 bp, Homo sapien
gcagccatagaagggggaagagccc

SEQ ID NO: 628131 - DNA, 25 bp, Homo sapien
ctggcagccatagaagggggaagag

SEQ ID NO: 628132 - DNA, 25 bp, Homo sapien
ggcagccatagaagggggaagagcc

SEQ ID NO: 628133 - DNA, 25 bp, Homo sapien
cacaggatgggtctgtgatgcaaaa

SEQ ID NO: 628134 - DNA, 25 bp, Homo sapien
agacgtgctcctcttgaccctgggc

SEQ ID NO: 628135 - DNA, 25 bp, Homo sapien
tctttgaactctctgccagacgtgc

SEQ ID NO: 628136 - DNA, 25 bp, Homo sapien
ggtcttcgcccttgatgtagttgga

SEQ ID NO: 628137 - DNA, 25 bp, Homo sapien
gctgctctgcggtttccaaatatcc

SEQ ID NO: 628138 - DNA, 25 bp, Homo sapien
aagctgctctgcggtttccaaatat

SEQ ID NO: 628139 - DNA, 25 bp, Homo sapien
aagtggataccgagcccccgttcag

SEQ ID NO: 628140 - DNA, 25 bp, Homo sapien
gagcccccgttcagccacgcgcgct

SEQ ID NO: 628141 - DNA, 25 bp, Homo sapien
ctgaccagatggcccccgatggcca

SEQ ID NO: 628142 - DNA, 25 bp, Homo sapien
aggaggttggtgcaagtcccctgca

SEQ ID NO: 628143 - DNA, 25 bp, Homo sapien
aggttggtgcaagtcccctgcagca

SEQ ID NO: 628144 - DNA, 25 bp, Homo sapien
ggagaggaggttggtgcaagtcccc

SEQ ID NO: 628145 - DNA, 25 bp, Homo sapien
cacggagctgagaacgttgaggaca

SEQ ID NO: 628146 - DNA, 25 bp, Homo sapien
ccaagctcggaatggtgaagccgcg

SEQ ID NO: 628147 - DNA, 25 bp, Homo sapien
tacacttgccctgacagaggttgcg

SEQ ID NO: 628148 - DNA, 25 bp, Homo sapien
cattaattggacagcacaacctggt

SEQ ID NO: 628149 - DNA, 25 bp, Homo sapien
tggacctgtgtcccgatcctgggcc

SEQ ID NO: 628150 - DNA, 25 bp, Homo sapien
ctggacctgtgtcccgatcctgggc

SEQ ID NO: 628151 - DNA, 25 bp, Homo sapien
gctgggcagcattgtcatcaatacc

SEQ ID NO: 628152 - DNA, 25 bp, Homo sapien
agtcagggccatgggttctaccccg

SEQ ID NO: 628153 - DNA, 25 bp, Homo sapien
tggtttgcttcatgtcgacactgcc

SEQ ID NO: 628154 - DNA, 25 bp, Homo sapien
ttgtcatcaataccatggtggaggg

SEQ ID NO: 628155 - DNA, 25 bp, Homo sapien
tcctaagctaccagcgctggaggcc

SEQ ID NO: 628156 - DNA, 25 bp, Homo sapien
aactgatccgtagacccgctgtgct

SEQ ID NO: 628157 - DNA, 25 bp, Homo sapien
tgagccgaaccgaggttccaggaac

SEQ ID NO: 628158 - DNA, 25 bp, Homo sapien
gatgggcatgtcctgatcgcttgga

SEQ ID NO: 628159 - DNA, 25 bp, Homo sapien
gctttgtccgaatcattaagaacaa

SEQ ID NO: 628160 - DNA, 25 bp, Homo sapien
gccaatggacgctttgtccgaatca

SEQ ID NO: 628161 - DNA, 25 bp, Homo sapien
tggacgctttgtccgaatcattaag

SEQ ID NO: 628162 - DNA, 25 bp, Homo sapien
gttttgccaatggacgctttgtccg

SEQ ID NO: 628163 - DNA, 25 bp, Homo sapien
caaggtcgcactcagctttcatacg

SEQ ID NO: 628164 - DNA, 25 bp, Homo sapien
cttgcttcaactttgacggctctgg

SEQ ID NO: 628165 - DNA, 25 bp, Homo sapien
gctttcatacgcttcagaagaatga

SEQ ID NO: 628166 - DNA, 25 bp, Homo sapien
caactttgacggctctggctcaagg

SEQ ID NO: 628167 - DNA, 25 bp, Homo sapien
ataaaccaaacgcagaagccagaga

SEQ ID NO: 628168 - DNA, 25 bp, Homo sapien
gaagggctgaacgtgctccctctgc

SEQ ID NO: 628169 - DNA, 25 bp, Homo sapien
ccagtgagcaatatttgagcacata

SEQ ID NO: 628170 - DNA, 25 bp, Homo sapien
ccccagatcggctgttgtacaccat

SEQ ID NO: 628171 - DNA, 25 bp, Homo sapien
tcagttccatcatccacgtggaaga

SEQ ID NO: 628172 - DNA, 25 bp, Homo sapien
cagttccatcatccacgtggaagac

SEQ ID NO: 628173 - DNA, 25 bp, Homo sapien
agaccctccgtccctgcaccaccat

SEQ ID NO: 628174 - DNA, 25 bp, Homo sapien
ccacgtggaagaccctccgtccctg

SEQ ID NO: 628175 - DNA, 25 bp, Homo sapien
gcttggtggagacggccccttggac

SEQ ID NO: 628176 - DNA, 25 bp, Homo sapien
gtggagacggccccttggaccactc

SEQ ID NO: 628177 - DNA, 25 bp, Homo sapien
ggagacggccccttggaccactcag

SEQ ID NO: 628178 - DNA, 25 bp, Homo sapien
ttggtggagacggccccttggacca

SEQ ID NO: 628179 - DNA, 25 bp, Homo sapien
caccacacggatcaagtccaaagtc

SEQ ID NO: 628180 - DNA, 25 bp, Homo sapien
ccaccacacggatcaagtccaaagt

SEQ ID NO: 628181 - DNA, 25 bp, Homo sapien
tccaccacacggatcaagtccaaag

SEQ ID NO: 628182 - DNA, 25 bp, Homo sapien
aaaagcaaggtgcttccccaccagc

SEQ ID NO: 628183 - DNA, 25 bp, Homo sapien
tctgctgttcacaaaagcaaggtgc

SEQ ID NO: 628184 - DNA, 25 bp, Homo sapien
accttttctgctgttcacaaaagca

SEQ ID NO: 628185 - DNA, 25 bp, Homo sapien
cgcaatgtcttatcaccttttctgc

SEQ ID NO: 628186 - DNA, 25 bp, Homo sapien
caaagtggtaactgcggtgcttaaa

SEQ ID NO: 628187 - DNA, 25 bp, Homo sapien
atggtgcaaagtggtaactgcggtg

SEQ ID NO: 628188 - DNA, 25 bp, Homo sapien
ttgcaagaaggaagacgcccgctca

SEQ ID NO: 628189 - DNA, 25 bp, Homo sapien
cgcccgctcacccatgagcatggtg

SEQ ID NO: 628190 - DNA, 25 bp, Homo sapien
cgccgactgccctccactaccgcct

SEQ ID NO: 628191 - DNA, 25 bp, Homo sapien
tgcagacacacgggcgatgctgcca

SEQ ID NO: 628192 - DNA, 25 bp, Homo sapien
tgccaaacagcaggcggcactcccc

SEQ ID NO: 628193 - DNA, 25 bp, Homo sapien
acacacgggcgatgctgccaaacag

SEQ ID NO: 628194 - DNA, 25 bp, Homo sapien
tgcggcccatagagcacagaactaa

SEQ ID NO: 628195 - DNA, 25 bp, Homo sapien
ccaggaggtgcggcccatagagcac

SEQ ID NO: 628196 - DNA, 25 bp, Homo sapien
ctgtggaatccggagcaggatgggg

SEQ ID NO: 628197 - DNA, 25 bp, Homo sapien
gaggtgcggcccatagagcacagaa

SEQ ID NO: 628198 - DNA, 25 bp, Homo sapien
agaggtcgtctctgttgttcatcag

SEQ ID NO: 628199 - DNA, 25 bp, Homo sapien
tagtcctgactttccaaccatggct

SEQ ID NO: 628200 - DNA, 25 bp, Homo sapien
ttgagagatagtcctgactttccaa

SEQ ID NO: 628201 - DNA, 25 bp, Homo sapien
ctagaggtcgtctctgttgttcatc

SEQ ID NO: 628202 - DNA, 25 bp, Homo sapien
ctggtgccaatggtcactggcggct

SEQ ID NO: 628203 - DNA, 25 bp, Homo sapien
tcccagctgcttttcggctcctgtt

SEQ ID NO: 628204 - DNA, 25 bp, Homo sapien
tgccaatggtcactggcggctccca

SEQ ID NO: 628205 - DNA, 25 bp, Homo sapien
ccagctgcttttcggctcctgtttc

SEQ ID NO: 628206 - DNA, 25 bp, Homo sapien
cggcgcttttccgattctacaaaca

SEQ ID NO: 628207 - DNA, 25 bp, Homo sapien
ggcgcttttccgattctacaaacat

SEQ ID NO: 628208 - DNA, 25 bp, Homo sapien
aggcgtcccgctggaaacggcgctt

SEQ ID NO: 628209 - DNA, 25 bp, Homo sapien
ggcttggcaggaggcgtcccgctgg

SEQ ID NO: 628210 - DNA, 25 bp, Homo sapien
cagagactgagtgttggtttggaat

SEQ ID NO: 628211 - DNA, 25 bp, Homo sapien
tgggacttgaactccaaaagctcct

SEQ ID NO: 628212 - DNA, 25 bp, Homo sapien
ccaggacttgctaggaagccactgt

SEQ ID NO: 628213 - DNA, 25 bp, Homo sapien
tgttcatgtccatcacttcaccagg

SEQ ID NO: 628214 - DNA, 25 bp, Homo sapien
gtacagaaccactgggagcggcggc

SEQ ID NO: 628215 - DNA, 25 bp, Homo sapien
ggagcggcggctgtgagtgggatga

SEQ ID NO: 628216 - DNA, 25 bp, Homo sapien
ctggaggtacagaaccactgggagc

SEQ ID NO: 628217 - DNA, 25 bp, Homo sapien
tgggagcggcggctgtgagtgggat

SEQ ID NO: 628218 - DNA, 25 bp, Homo sapien
cccagaaagtcggagcaagagtgct

SEQ ID NO: 628219 - DNA, 25 bp, Homo sapien
gagcagacccagaaagtcggagcaa

SEQ ID NO: 628220 - DNA, 25 bp, Homo sapien
caagagtgctttgatgcgggaacag

SEQ ID NO: 628221 - DNA, 25 bp, Homo sapien
ttgatgcgggaacagcacgtgtgaa

SEQ ID NO: 628222 - DNA, 25 bp, Homo sapien
gcccacgaacaaagtcactgtgaca

SEQ ID NO: 628223 - DNA, 25 bp, Homo sapien
ggcagtcagcccacatggcatgtag

SEQ ID NO: 628224 - DNA, 25 bp, Homo sapien
tagtgtggtgggaagaccatgaggc

SEQ ID NO: 628225 - DNA, 25 bp, Homo sapien
cagcccacatggcatgtagtgtggt

SEQ ID NO: 628226 - DNA, 25 bp, Homo sapien
gggctatcgtctgcgctgggcctca

SEQ ID NO: 628227 - DNA, 25 bp, Homo sapien
gattcataggttcttgaatatctgc

SEQ ID NO: 628228 - DNA, 25 bp, Homo sapien
caggttgattcgtgtgactgtgcgc

SEQ ID NO: 628229 - DNA, 25 bp, Homo sapien
tgcgcgctttgtgtgcgctgtgtcc

SEQ ID NO: 628230 - DNA, 25 bp, Homo sapien
ctggggaagacgatggtgcttgccg

SEQ ID NO: 628231 - DNA, 25 bp, Homo sapien
cagagcaacagccatcaccaggcgc

SEQ ID NO: 628232 - DNA, 25 bp, Homo sapien
agcaacagccatcaccaggcgcctg

SEQ ID NO: 628233 - DNA, 25 bp, Homo sapien
aagacgatggtgcttgccgggaggg

SEQ ID NO: 628234 - DNA, 25 bp, Homo sapien
tctccctggagtgggtcccgagtgc

SEQ ID NO: 628235 - DNA, 25 bp, Homo sapien
tcacacatctccctggagtgggtcc

SEQ ID NO: 628236 - DNA, 25 bp, Homo sapien
tggcccctctgtcgtttttcctgtc

SEQ ID NO: 628237 - DNA, 25 bp, Homo sapien
tctggcccctctgtcgtttttcctg

SEQ ID NO: 628238 - DNA, 25 bp, Homo sapien
tcctcggccgacacgggactgcctg

SEQ ID NO: 628239 - DNA, 25 bp, Homo sapien
ccatcctcggccgacacgggactgc

SEQ ID NO: 628240 - DNA, 25 bp, Homo sapien
ctgttccatcctcggccgacacggg

SEQ ID NO: 628241 - DNA, 25 bp, Homo sapien
ctggtacccacagccgctacctgcc

SEQ ID NO: 628242 - DNA, 25 bp, Homo sapien
tgcagggaagccgcagaccagcctg

SEQ ID NO: 628243 - DNA, 25 bp, Homo sapien
gcagggaagccgcagaccagcctgc

SEQ ID NO: 628244 - DNA, 25 bp, Homo sapien
gggccctagggacactgcagcccca

SEQ ID NO: 628245 - DNA, 25 bp, Homo sapien
cagggaagccgcagaccagcctgct

SEQ ID NO: 628246 - DNA, 25 bp, Homo sapien
atgtcctcccgtgtctcccgcccca

SEQ ID NO: 628247 - DNA, 25 bp, Homo sapien
gggattcccatgtcctcccgtgtct

SEQ ID NO: 628248 - DNA, 25 bp, Homo sapien
ctcccgtgtctcccgccccaggact

SEQ ID NO: 628249 - DNA, 25 bp, Homo sapien
tgggattcccatgtcctcccgtgtc

SEQ ID NO: 628250 - DNA, 25 bp, Homo sapien
atattgtgtccccttggtccccaca

SEQ ID NO: 628251 - DNA, 25 bp, Homo sapien
gtccccacacagctgctgaacttga

SEQ ID NO: 628252 - DNA, 25 bp, Homo sapien
ggtccccacacagctgctgaacttg

SEQ ID NO: 628253 - DNA, 25 bp, Homo sapien
ctcatattgtgtccccttggtcccc

SEQ ID NO: 628254 - DNA, 25 bp, Homo sapien
ccacctgctcggaggggacctgcag

SEQ ID NO: 628255 - DNA, 25 bp, Homo sapien
atgcagtcaccgtgaacgccacctg

SEQ ID NO: 628256 - DNA, 25 bp, Homo sapien
tcccgggtggcgaagactgtcccat

SEQ ID NO: 628257 - DNA, 25 bp, Homo sapien
gcaaccgcaccacggcgtcccattt

SEQ ID NO: 628258 - DNA, 25 bp, Homo sapien
ttgtgtccagagtgcggggacgagg

SEQ ID NO: 628259 - DNA, 25 bp, Homo sapien
tgtgtccagagtgcggggacgaggt

SEQ ID NO: 628260 - DNA, 25 bp, Homo sapien
cttgtgtccagagtgcggggacgag

SEQ ID NO: 628261 - DNA, 25 bp, Homo sapien
ccgaggaggaggtgactgtctgtcc

SEQ ID NO: 628262 - DNA, 25 bp, Homo sapien
agggcaggggtgcttggttggcaat

SEQ ID NO: 628263 - DNA, 25 bp, Homo sapien
ggcaggggtgcttggttggcaatgg

SEQ ID NO: 628264 - DNA, 25 bp, Homo sapien
gcaggggtgcttggttggcaatggc

SEQ ID NO: 628265 - DNA, 25 bp, Homo sapien
gagggcaggggtgcttggttggcaa

SEQ ID NO: 628266 - DNA, 25 bp, Homo sapien
ccaggacaccagcaatccggtgtca

SEQ ID NO: 628267 - DNA, 25 bp, Homo sapien
cagcaatccggtgtcaccttgatca

SEQ ID NO: 628268 - DNA, 25 bp, Homo sapien
ggtgtcaccttgatcatctatagag

SEQ ID NO: 628269 - DNA, 25 bp, Homo sapien
atcatctatagaggctggcatcacg

SEQ ID NO: 628270 - DNA, 25 bp, Homo sapien
cttggaatggcacccgttcctcatc

SEQ ID NO: 628271 - DNA, 25 bp, Homo sapien
agtggaagggcctgggtagcagcag

SEQ ID NO: 628272 - DNA, 25 bp, Homo sapien
gcccttggaatggcacccgttcctc

SEQ ID NO: 628273 - DNA, 25 bp, Homo sapien
gtggaagggcctgggtagcagcaga

SEQ ID NO: 628274 - DNA, 25 bp, Homo sapien
cagtggacacagtggcgcagcctgc

SEQ ID NO: 628275 - DNA, 25 bp, Homo sapien
agtggacacagtggcgcagcctgcc

SEQ ID NO: 628276 - DNA, 25 bp, Homo sapien
ctgcccagtgctgagcagggacagg

SEQ ID NO: 628277 - DNA, 25 bp, Homo sapien
cagtgctgagcagggacagggccat

SEQ ID NO: 628278 - DNA, 25 bp, Homo sapien
cccagtgctgagcagggacagggcc

SEQ ID NO: 628279 - DNA, 25 bp, Homo sapien
tgcccagtgctgagcagggacaggg

SEQ ID NO: 628280 - DNA, 25 bp, Homo sapien
ctctggtgccaccccggacctgcta

SEQ ID NO: 628281 - DNA, 25 bp, Homo sapien
ctggcaggccacactccacacggca

SEQ ID NO: 628282 - DNA, 25 bp, Homo sapien
ggacctgctactgccccgggggctg

SEQ ID NO: 628283 - DNA, 25 bp, Homo sapien
aggccacactccacacggcagggaa

SEQ ID NO: 628284 - DNA, 25 bp, Homo sapien
gtcctacttttatctcccatgagtg

SEQ ID NO: 628285 - DNA, 25 bp, Homo sapien
cccatgagtgtttctgggcctggaa

SEQ ID NO: 628286 - DNA, 25 bp, Homo sapien
ccccagggatgtttcatggagccgt

SEQ ID NO: 628287 - DNA, 25 bp, Homo sapien
gagccgtccttgacaggatgagacc

SEQ ID NO: 628288 - DNA, 25 bp, Homo sapien
tctgctaagatgatctgtactgccc

SEQ ID NO: 628289 - DNA, 25 bp, Homo sapien
tgctaagatgatctgtactgcccga

SEQ ID NO: 628290 - DNA, 25 bp, Homo sapien
ctaagatgatctgtactgcccgaga

SEQ ID NO: 628291 - DNA, 25 bp, Homo sapien
ggcatctgctaagatgatctgtact

SEQ ID NO: 628292 - DNA, 25 bp, Homo sapien
cttcggaggcggagaggggtccaga

SEQ ID NO: 628293 - DNA, 25 bp, Homo sapien
ggatgacccagtcccgtttgcgccg

SEQ ID NO: 628294 - DNA, 25 bp, Homo sapien
ccgcgcgagttctcgggcacgttga

SEQ ID NO: 628295 - DNA, 25 bp, Homo sapien
cctcagcccgttggcgttctggtgc

SEQ ID NO: 628296 - DNA, 25 bp, Homo sapien
gggcacgttgatgggcgggatgacc

SEQ ID NO: 628297 - DNA, 25 bp, Homo sapien
gccaggacagcagaatatcccagtt

SEQ ID NO: 628298 - DNA, 25 bp, Homo sapien
taacagtcagatgccgctggtaccc

SEQ ID NO: 628299 - DNA, 25 bp, Homo sapien
gagccaggacagcagaatatcccag

SEQ ID NO: 628300 - DNA, 25 bp, Homo sapien
acagagataacagtcagatgccgct

SEQ ID NO: 628301 - DNA, 25 bp, Homo sapien
agaagccacaatggaaattccattt

SEQ ID NO: 628302 - DNA, 25 bp, Homo sapien
cattttccgttcactaaaggtccat

SEQ ID NO: 628303 - DNA, 25 bp, Homo sapien
taagctcggtttggatgcccactcc

SEQ ID NO: 628304 - DNA, 25 bp, Homo sapien
tgagccacagcgatacttgcaggga

SEQ ID NO: 628305 - DNA, 25 bp, Homo sapien
gcttgccgccccgcatcaggctgca

SEQ ID NO: 628306 - DNA, 25 bp, Homo sapien
gctgcattcaccaccgtctctgtga

SEQ ID NO: 628307 - DNA, 25 bp, Homo sapien
ctgtgctcagcttgccgccccgcat

SEQ ID NO: 628308 - DNA, 25 bp, Homo sapien
caggagccgtctcccctacaacact

SEQ ID NO: 628309 - DNA, 25 bp, Homo sapien
tgaaatgccttaatgagcgcagaac

SEQ ID NO: 628310 - DNA, 25 bp, Homo sapien
gggaagagtattctgcctcctcctc

SEQ ID NO: 628311 - DNA, 25 bp, Homo sapien
gaatgaaatgccttaatgagcgcag

SEQ ID NO: 628312 - DNA, 25 bp, Homo sapien
atgccttaatgagcgcagaactgca

SEQ ID NO: 628313 - DNA, 25 bp, Homo sapien
agagacgtgatattccttccaagga

SEQ ID NO: 628314 - DNA, 25 bp, Homo sapien
atttccctctgcgtggtgccgttag

SEQ ID NO: 628315 - DNA, 25 bp, Homo sapien
tgccgttagtgcttaggaagagacg

SEQ ID NO: 628316 - DNA, 25 bp, Homo sapien
tgctttgccacagatacccctggct

SEQ ID NO: 628317 - DNA, 25 bp, Homo sapien
actgtcccgaggaactgggcttaca

SEQ ID NO: 628318 - DNA, 25 bp, Homo sapien
cacaggatatcggagggccttgaga

SEQ ID NO: 628319 - DNA, 25 bp, Homo sapien
catctgagggcctcgagaactgtcc

SEQ ID NO: 628320 - DNA, 25 bp, Homo sapien
gagaactgtcccgaggaactgggat

SEQ ID NO: 628321 - DNA, 25 bp, Homo sapien
cctgaagtgtaggtgatgggccaat

SEQ ID NO: 628322 - DNA, 25 bp, Homo sapien
gccaatggaagtgccacgctgtttt

SEQ ID NO: 628323 - DNA, 25 bp, Homo sapien
aggtgggccctgaagtgtaggtgat

SEQ ID NO: 628324 - DNA, 25 bp, Homo sapien
tgatgggccaatggaagtgccacgc

SEQ ID NO: 628325 - DNA, 25 bp, Homo sapien
catcttgggattgcgtcttcagaac

SEQ ID NO: 628326 - DNA, 25 bp, Homo sapien
gaaccacactcaagacggtcatggg

SEQ ID NO: 628327 - DNA, 25 bp, Homo sapien
cagggcgatcgtgttcatcttggga

SEQ ID NO: 628328 - DNA, 25 bp, Homo sapien
ctgccgggcgactcgcagactgcag

SEQ ID NO: 628329 - DNA, 25 bp, Homo sapien
gcagatgcatccgtaggccatctcg

SEQ ID NO: 628330 - DNA, 25 bp, Homo sapien
ggtgcagatgcatccgtaggccatc

SEQ ID NO: 628331 - DNA, 25 bp, Homo sapien
agatgcatccgtaggccatctcggg

SEQ ID NO: 628332 - DNA, 25 bp, Homo sapien
gatgcatccgtaggccatctcgggc

SEQ ID NO: 628333 - DNA, 25 bp, Homo sapien
ggataagcagaggtccgagagagcc

SEQ ID NO: 628334 - DNA, 25 bp, Homo sapien
caggataagcagaggtccgagagag

SEQ ID NO: 628335 - DNA, 25 bp, Homo sapien
ataagcagaggtccgagagagcccc

SEQ ID NO: 628336 - DNA, 25 bp, Homo sapien
gaggtccgagagagccccctgctct

SEQ ID NO: 628337 - DNA, 25 bp, Homo sapien
gcccagaagtacttatgcagatgct

SEQ ID NO: 628338 - DNA, 25 bp, Homo sapien
ctcagtgaagcccagaagtacttat

SEQ ID NO: 628339 - DNA, 25 bp, Homo sapien
ccaaactcagtgaagcccagaagta

SEQ ID NO: 628340 - DNA, 25 bp, Homo sapien
tgaagcccagaagtacttatgcaga

SEQ ID NO: 628341 - DNA, 25 bp, Homo sapien
tggtcccggatcatggttttgtctt

SEQ ID NO: 628342 - DNA, 25 bp, Homo sapien
gattcagaattgtgcacaccacgtg

SEQ ID NO: 628343 - DNA, 25 bp, Homo sapien
ccagaagctagcgaaaagctggtat

SEQ ID NO: 628344 - DNA, 25 bp, Homo sapien
tatgttgcggagaaatccctgtccc

SEQ ID NO: 628345 - DNA, 25 bp, Homo sapien
tgtggcctgccggacatttgctttg

SEQ ID NO: 628346 - DNA, 25 bp, Homo sapien
tgtcccagtgcacgtgcacggtcgg

SEQ ID NO: 628347 - DNA, 25 bp, Homo sapien
ccacgagtgacacccccttaagttg

SEQ ID NO: 628348 - DNA, 25 bp, Homo sapien
acggtcgggaaggtctctctcagtc

SEQ ID NO: 628349 - DNA, 25 bp, Homo sapien
agtcagcccgcagacggacacagac

SEQ ID NO: 628350 - DNA, 25 bp, Homo sapien
ggcataggtgtgacacccagcagag

SEQ ID NO: 628351 - DNA, 25 bp, Homo sapien
ctgcaactgccccacgtgtggcata

SEQ ID NO: 628352 - DNA, 25 bp, Homo sapien
ccccacgtgtggcataggtgtgaca

SEQ ID NO: 628353 - DNA, 25 bp, Homo sapien
cacgtgtggcataggtgtgacaccc

SEQ ID NO: 628354 - DNA, 25 bp, Homo sapien
gaaaggcaggagcaaagcgagaaga

SEQ ID NO: 628355 - DNA, 25 bp, Homo sapien
ctgaaaggcaggagcaaagcgagaa

SEQ ID NO: 628356 - DNA, 25 bp, Homo sapien
tgaaaggcaggagcaaagcgagaag

SEQ ID NO: 628357 - DNA, 25 bp, Homo sapien
tgtcattgtctttgtcggaccggat

SEQ ID NO: 628358 - DNA, 25 bp, Homo sapien
tacatccggccggacatggagtcaa

SEQ ID NO: 628359 - DNA, 25 bp, Homo sapien
actcccgtgatgctgtaccggatgg

SEQ ID NO: 628360 - DNA, 25 bp, Homo sapien
tggtaagaggcgtgctcctcccggt

SEQ ID NO: 628361 - DNA, 25 bp, Homo sapien
ttgtagacgcgtgttgacggcagcc

SEQ ID NO: 628362 - DNA, 25 bp, Homo sapien
tcagccggagtctctggttggttct

SEQ ID NO: 628363 - DNA, 25 bp, Homo sapien
aaagcccgttttgggagccagcagc

SEQ ID NO: 628364 - DNA, 25 bp, Homo sapien
gttgagttccggttcctgagcctgt

SEQ ID NO: 628365 - DNA, 25 bp, Homo sapien
cccccaccgccctgggctccctcat

SEQ ID NO: 628366 - DNA, 25 bp, Homo sapien
agcagccccacccccaccgccctgg

SEQ ID NO: 628367 - DNA, 25 bp, Homo sapien
caccagcagccccacccccaccgcc

SEQ ID NO: 628368 - DNA, 25 bp, Homo sapien
ctttcaccagcagccccacccccac

SEQ ID NO: 628369 - DNA, 25 bp, Homo sapien
gcgatgtgggatgactgcatttctc

SEQ ID NO: 628370 - DNA, 25 bp, Homo sapien
tgataaaactaatgatctccacgag

SEQ ID NO: 628371 - DNA, 25 bp, Homo sapien
gagcttgctcctagaacctggtgtg

SEQ ID NO: 628372 - DNA, 25 bp, Homo sapien
cctagaacctggtgtgcaggaggca

SEQ ID NO: 628373 - DNA, 25 bp, Homo sapien
cgtgttgtgcgtttgaatgtttaca

SEQ ID NO: 628374 - DNA, 25 bp, Homo sapien
gcgtgttgtgcgtttgaatgtttac

SEQ ID NO: 628375 - DNA, 25 bp, Homo sapien
cacttgtgcgtgttgtgcgtttgaa

SEQ ID NO: 628376 - DNA, 25 bp, Homo sapien
cagtgagcacttgtgcgtgttgtgc

SEQ ID NO: 628377 - DNA, 25 bp, Homo sapien
cgatgacgtagatgtacaggtcgat

SEQ ID NO: 628378 - DNA, 25 bp, Homo sapien
ttcatgtccacagcgtgggctcgga

SEQ ID NO: 628379 - DNA, 25 bp, Homo sapien
cggttgtcattcatgtcgatgacgt

SEQ ID NO: 628380 - DNA, 25 bp, Homo sapien
tccacggagccgttgtagacctggt

SEQ ID NO: 628381 - DNA, 25 bp, Homo sapien
gtgtctgcgcccaagtcccgtggca

SEQ ID NO: 628382 - DNA, 25 bp, Homo sapien
ctgtggtctgcaacccccttgaccc

SEQ ID NO: 628383 - DNA, 25 bp, Homo sapien
gctgtgtgtctgcgcccaagtcccg

SEQ ID NO: 628384 - DNA, 25 bp, Homo sapien
tgtgtgtctgcgcccaagtcccgtg

SEQ ID NO: 628385 - DNA, 25 bp, Homo sapien
cacagacggcagagatgcaagacat

SEQ ID NO: 628386 - DNA, 25 bp, Homo sapien
caccggtgccagagtgaagtctcgg

SEQ ID NO: 628387 - DNA, 25 bp, Homo sapien
gcaagacatgacacgctcagctagg

SEQ ID NO: 628388 - DNA, 25 bp, Homo sapien
gcgccaccaccggtgccagagtgaa

SEQ ID NO: 628389 - DNA, 25 bp, Homo sapien
aagctggccgtgaggctacggtcat

SEQ ID NO: 628390 - DNA, 25 bp, Homo sapien
acgaagccatccctccacccggcag

SEQ ID NO: 628391 - DNA, 25 bp, Homo sapien
gcagcgaagctggccgtgaggctac

SEQ ID NO: 628392 - DNA, 25 bp, Homo sapien
gcgaagctggccgtgaggctacggt

SEQ ID NO: 628393 - DNA, 25 bp, Homo sapien
tcctggcaggccagcgtctgggaac

SEQ ID NO: 628394 - DNA, 25 bp, Homo sapien
gcaggccagcgtctgggaaccagac

SEQ ID NO: 628395 - DNA, 25 bp, Homo sapien
cgtctgggaaccagacctcaggcat

SEQ ID NO: 628396 - DNA, 25 bp, Homo sapien
ccagcgtctgggaaccagacctcag

SEQ ID NO: 628397 - DNA, 25 bp, Homo sapien
cagacagccagagggtcccccgggt

SEQ ID NO: 628398 - DNA, 25 bp, Homo sapien
cctggggggctgcatgctgatctgc

SEQ ID NO: 628399 - DNA, 25 bp, Homo sapien
ccaaaggcaccctggggggctgcat

SEQ ID NO: 628400 - DNA, 25 bp, Homo sapien
catgctgatctgcaggcagacagcc

SEQ ID NO: 628401 - DNA, 25 bp, Homo sapien
acagcctcgtctttcacgtgggaga

SEQ ID NO: 628402 - DNA, 25 bp, Homo sapien
cctcgtctttcacgtgggagatgct

SEQ ID NO: 628403 - DNA, 25 bp, Homo sapien
catcaaggaagcagcgagttgggac

SEQ ID NO: 628404 - DNA, 25 bp, Homo sapien
tgagtatttccccatcaaggaagca

SEQ ID NO: 628405 - DNA, 25 bp, Homo sapien
tgcaggaaagatgtggccagcagtc

SEQ ID NO: 628406 - DNA, 25 bp, Homo sapien
aagatgtggccagcagtccctcacc

SEQ ID NO: 628407 - DNA, 25 bp, Homo sapien
caggaaagatgtggccagcagtccc

SEQ ID NO: 628408 - DNA, 25 bp, Homo sapien
tgtggccagcagtccctcacctgtg

SEQ ID NO: 628409 - DNA, 25 bp, Homo sapien
gggctccgttccacagaggctgtaa

SEQ ID NO: 628410 - DNA, 25 bp, Homo sapien
ggatctgggccatgctcaagtgcga

SEQ ID NO: 628411 - DNA, 25 bp, Homo sapien
tcctgtgctgtaagcagtgctggct

SEQ ID NO: 628412 - DNA, 25 bp, Homo sapien
tctcgcttctccagtgacgcaggat

SEQ ID NO: 628413 - DNA, 25 bp, Homo sapien
gacgtggtctctgtggcttgggtca

SEQ ID NO: 628414 - DNA, 25 bp, Homo sapien
tcctgggatcagcagacgtggtctc

SEQ ID NO: 628415 - DNA, 25 bp, Homo sapien
gcatgtgctgcgttccccacaggct

SEQ ID NO: 628416 - DNA, 25 bp, Homo sapien
ccaagtggcaggatgttcgatggac

SEQ ID NO: 628417 - DNA, 25 bp, Homo sapien
tcggtcctctcatgggcgccgtccg

SEQ ID NO: 628418 - DNA, 25 bp, Homo sapien
tttgtctcataagggtctgcccggg

SEQ ID NO: 628419 - DNA, 25 bp, Homo sapien
gataatcgggtttgtctcataaggg

SEQ ID NO: 628420 - DNA, 25 bp, Homo sapien
ggtggagataatcgggtttgtctca

SEQ ID NO: 628421 - DNA, 25 bp, Homo sapien
ttagtctcagaataaaggccagtcc

SEQ ID NO: 628422 - DNA, 25 bp, Homo sapien
aaatcataggaaagacttagtctca

SEQ ID NO: 628423 - DNA, 25 bp, Homo sapien
cataggaaagacttagtctcagaat

SEQ ID NO: 628424 - DNA, 25 bp, Homo sapien
gaaagacttagtctcagaataaagg

SEQ ID NO: 628425 - DNA, 25 bp, Homo sapien
gactgtgccagaagcccagggtgcg

SEQ ID NO: 628426 - DNA, 25 bp, Homo sapien
ctgttggacatttgctggactgtgc

SEQ ID NO: 628427 - DNA, 25 bp, Homo sapien
tggcacacagatgccctgttggaca

SEQ ID NO: 628428 - DNA, 25 bp, Homo sapien
gaagcccagggtgcggggcggcctc

SEQ ID NO: 628429 - DNA, 25 bp, Homo sapien
tggctctgcacacgtgtgtgctcag

SEQ ID NO: 628430 - DNA, 25 bp, Homo sapien
gaactctggaagctcgggtgcccgg

SEQ ID NO: 628431 - DNA, 25 bp, Homo sapien
aactctggaagctcgggtgcccggc

SEQ ID NO: 628432 - DNA, 25 bp, Homo sapien
gacgatatctccagtctcgctgttg

SEQ ID NO: 628433 - DNA, 25 bp, Homo sapien
gctgtcgtcagcatcgttggccgtg

SEQ ID NO: 628434 - DNA, 25 bp, Homo sapien
aggccagccgccactgtgacgatat

SEQ ID NO: 628435 - DNA, 25 bp, Homo sapien
tcccgttggccgtggtgctgtcgtc

SEQ ID NO: 628436 - DNA, 25 bp, Homo sapien
aaggactcgctcatagcagccggtg

SEQ ID NO: 628437 - DNA, 25 bp, Homo sapien
cagccggtgctgagtgctccagagc

SEQ ID NO: 628438 - DNA, 25 bp, Homo sapien
gcctgttctggaaatctcacaagga

SEQ ID NO: 628439 - DNA, 25 bp, Homo sapien
gggagactgtcgatcactccccgac

SEQ ID NO: 628440 - DNA, 25 bp, Homo sapien
cagcaagaccgaggagctgccagaa

SEQ ID NO: 628441 - DNA, 25 bp, Homo sapien
ggagctgccagaaagtggcgctgtg

SEQ ID NO: 628442 - DNA, 25 bp, Homo sapien
ccagcaagaccgaggagctgccaga

SEQ ID NO: 628443 - DNA, 25 bp, Homo sapien
ctgccagaaagtggcgctgtggcct

SEQ ID NO: 628444 - DNA, 25 bp, Homo sapien
ccagagctcgagggccgtgacgcac

SEQ ID NO: 628445 - DNA, 25 bp, Homo sapien
agctcgagggccgtgacgcactcag

SEQ ID NO: 628446 - DNA, 25 bp, Homo sapien
agggccgtgacgcactcagaagccg

SEQ ID NO: 628447 - DNA, 25 bp, Homo sapien
ctcgagggccgtgacgcactcagaa

SEQ ID NO: 628448 - DNA, 25 bp, Homo sapien
tgccacttccttgccagtcccggcc

SEQ ID NO: 628449 - DNA, 25 bp, Homo sapien
ggccccaaaagcgacaccagcaagc

SEQ ID NO: 628450 - DNA, 25 bp, Homo sapien
aagccccggtgacaggttggcagcc

SEQ ID NO: 628451 - DNA, 25 bp, Homo sapien
tggaaggaggacctgccacttcctt

SEQ ID NO: 628452 - DNA, 25 bp, Homo sapien
gacctggatgttcctaggcttgggc

SEQ ID NO: 628453 - DNA, 25 bp, Homo sapien
gcacgtgctgcccatgaaggtcttg

SEQ ID NO: 628454 - DNA, 25 bp, Homo sapien
cctaggcttgggctcggtttgaaag

SEQ ID NO: 628455 - DNA, 25 bp, Homo sapien
catgaaggtcttgttttgatcgtgg

SEQ ID NO: 628456 - DNA, 25 bp, Homo sapien
tgggtttactaatgcctggcaacgg

SEQ ID NO: 628457 - DNA, 25 bp, Homo sapien
tcagtggccgcctgcgtgggtttac

SEQ ID NO: 628458 - DNA, 25 bp, Homo sapien
tacgccaagccagacagaaatcagc

SEQ ID NO: 628459 - DNA, 25 bp, Homo sapien
tgctgctgaaaatccgacaacgtgc

SEQ ID NO: 628460 - DNA, 25 bp, Homo sapien
acctcctcattaggccataaatatt

SEQ ID NO: 628461 - DNA, 25 bp, Homo sapien
cgggcggcacgttcacctcctcatt

SEQ ID NO: 628462 - DNA, 25 bp, Homo sapien
ctcgggcggcacgttcacctcctca

SEQ ID NO: 628463 - DNA, 25 bp, Homo sapien
ggctcgggcggcacgttcacctcct

SEQ ID NO: 628464 - DNA, 25 bp, Homo sapien
cagaaagccacgccgctctcagagg

SEQ ID NO: 628465 - DNA, 25 bp, Homo sapien
gaggctcgctgtctgggagaaatgc

SEQ ID NO: 628466 - DNA, 25 bp, Homo sapien
agaggctcgctgtctgggagaaatg

SEQ ID NO: 628467 - DNA, 25 bp, Homo sapien
agccacgccgctctcagagggaaag

SEQ ID NO: 628468 - DNA, 25 bp, Homo sapien
ttctcaccgctgtccttccctctct

SEQ ID NO: 628469 - DNA, 25 bp, Homo sapien
tctgtttcggagggaggtggaagcc

SEQ ID NO: 628470 - DNA, 25 bp, Homo sapien
gagccgaggcctctgtttcggaggg

SEQ ID NO: 628471 - DNA, 25 bp, Homo sapien
tgggtccaccttctcaccgctgtcc

SEQ ID NO: 628472 - DNA, 25 bp, Homo sapien
caggggtggcggcctctgcgtcctg

SEQ ID NO: 628473 - DNA, 25 bp, Homo sapien
gtgccccacacttgggggacgccat

SEQ ID NO: 628474 - DNA, 25 bp, Homo sapien
gctcagtgccccacacttgggggac

SEQ ID NO: 628475 - DNA, 25 bp, Homo sapien
gtcctcttggggctgctcagtgccc

SEQ ID NO: 628476 - DNA, 25 bp, Homo sapien
ctagctctggccgtgttcactggtg

SEQ ID NO: 628477 - DNA, 25 bp, Homo sapien
gaagcgtgtctcactcaaccttctg

SEQ ID NO: 628478 - DNA, 25 bp, Homo sapien
gggcctccggtgtccctagctctgg

SEQ ID NO: 628479 - DNA, 25 bp, Homo sapien
gctgcctcagctcttgtgggtttta

SEQ ID NO: 628480 - DNA, 25 bp, Homo sapien
ctttaaactcgtggaccgtccactg

SEQ ID NO: 628481 - DNA, 25 bp, Homo sapien
tggaccgtccactgccactgtctct

SEQ ID NO: 628482 - DNA, 25 bp, Homo sapien
tctggctccgcagactttgcctcct

SEQ ID NO: 628483 - DNA, 25 bp, Homo sapien
acttctggctccgcagactttgcct

SEQ ID NO: 628484 - DNA, 25 bp, Homo sapien
gctggcggtaaattctggcgggttg

SEQ ID NO: 628485 - DNA, 25 bp, Homo sapien
tgctggcggtaaattctggcgggtt

SEQ ID NO: 628486 - DNA, 25 bp, Homo sapien
tggcggtaaattctggcgggttgtc

SEQ ID NO: 628487 - DNA, 25 bp, Homo sapien
gtggcctgaacgatgactgtgtact

SEQ ID NO: 628488 - DNA, 25 bp, Homo sapien
cactgtcattgctatcatgactgac

SEQ ID NO: 628489 - DNA, 25 bp, Homo sapien
gctatcatgactgacacacagctct

SEQ ID NO: 628490 - DNA, 25 bp, Homo sapien
gctggtgtgccactgtcattgctat

SEQ ID NO: 628491 - DNA, 25 bp, Homo sapien
gtgcccgaggggcacctccacagat

SEQ ID NO: 628492 - DNA, 25 bp, Homo sapien
ttcctgaccattgctcactggccgg

SEQ ID NO: 628493 - DNA, 25 bp, Homo sapien
tgggcctggacgttattattcttca

SEQ ID NO: 628494 - DNA, 25 bp, Homo sapien
tcactggccggaagagagcaaatag

SEQ ID NO: 628495 - DNA, 25 bp, Homo sapien
ctgtccggccagctgtgtgggtgca

SEQ ID NO: 628496 - DNA, 25 bp, Homo sapien
ttctcccctccctccctgccatcac

SEQ ID NO: 628497 - DNA, 25 bp, Homo sapien
cttctcccctccctccctgccatca

SEQ ID NO: 628498 - DNA, 25 bp, Homo sapien
agaagtcagggactcacagggcttg

SEQ ID NO: 628499 - DNA, 25 bp, Homo sapien
tccggctggtcctaatgaggccttg

SEQ ID NO: 628500 - DNA, 25 bp, Homo sapien
ggccagcgtgggattgatgctttca

SEQ ID NO: 628501 - DNA, 25 bp, Homo sapien
gccacccggcgttgggtgctgcttc

SEQ ID NO: 628502 - DNA, 25 bp, Homo sapien
tgagctgccgcttactcagaagcgt

SEQ ID NO: 628503 - DNA, 25 bp, Homo sapien
caggtctgaatgagcggaaatggga

SEQ ID NO: 628504 - DNA, 25 bp, Homo sapien
atgagcggaaatgggactctgctgc

SEQ ID NO: 628505 - DNA, 25 bp, Homo sapien
tctgaatgagcggaaatgggactct

SEQ ID NO: 628506 - DNA, 25 bp, Homo sapien
ggagcaggtctgaatgagcggaaat

SEQ ID NO: 628507 - DNA, 25 bp, Homo sapien
ctgcaacgagcacgggagcggttct

SEQ ID NO: 628508 - DNA, 25 bp, Homo sapien
tggcatttagggcactgcccataga

SEQ ID NO: 628509 - DNA, 25 bp, Homo sapien
atagaccccgggtctccgtggctgg

SEQ ID NO: 628510 - DNA, 25 bp, Homo sapien
cctctgtggatctgcccttgcactc

SEQ ID NO: 628511 - DNA, 25 bp, Homo sapien
tcaacggccgctcatttgcctgcaa

SEQ ID NO: 628512 - DNA, 25 bp, Homo sapien
tgtgggtggggctacgggccctgca

SEQ ID NO: 628513 - DNA, 25 bp, Homo sapien
tcatgcccctaacatccaatccctg

SEQ ID NO: 628514 - DNA, 25 bp, Homo sapien
ccaatccctggtggaggccccgatg

SEQ ID NO: 628515 - DNA, 25 bp, Homo sapien
aggccccgatgacggctcccgccag

SEQ ID NO: 628516 - DNA, 25 bp, Homo sapien
tcactcccgtccttctgaggaggga

SEQ ID NO: 628517 - DNA, 25 bp, Homo sapien
ggtgggtcctggtgttgtctgctgt

SEQ ID NO: 628518 - DNA, 25 bp, Homo sapien
ggagcgcggcgctctctgcgtccat

SEQ ID NO: 628519 - DNA, 25 bp, Homo sapien
gctgttttagcgagggcctgtctga

SEQ ID NO: 628520 - DNA, 25 bp, Homo sapien
gaacaaagccggctggaggaagcat

SEQ ID NO: 628521 - DNA, 25 bp, Homo sapien
gcctgagaacaaagccggctggagg

SEQ ID NO: 628522 - DNA, 25 bp, Homo sapien
gtgaatctgaaggtgttgggttggt

SEQ ID NO: 628523 - DNA, 25 bp, Homo sapien
ttggttgggagccgccattcgcagc

SEQ ID NO: 628524 - DNA, 25 bp, Homo sapien
atcacacgttttgagccgcccagga

SEQ ID NO: 628525 - DNA, 25 bp, Homo sapien
agatcgtcccccagcaggacaagga

SEQ ID NO: 628526 - DNA, 25 bp, Homo sapien
tgtcttcccttcatcacacgttttg

SEQ ID NO: 628527 - DNA, 25 bp, Homo sapien
ggccatggttggagatccatatgtt

SEQ ID NO: 628528 - DNA, 25 bp, Homo sapien
cccaaagaagggagccttgtgaggt

SEQ ID NO: 628529 - DNA, 25 bp, Homo sapien
agcagaccgcgtctgccacaggcag

SEQ ID NO: 628530 - DNA, 25 bp, Homo sapien
ggaaacgggcgtcgggcggccagca

SEQ ID NO: 628531 - DNA, 25 bp, Homo sapien
ttggacagggcgatgtcccacggcc

SEQ ID NO: 628532 - DNA, 25 bp, Homo sapien
ctgtcccttcggtaagaaagagtct

SEQ ID NO: 628533 - DNA, 25 bp, Homo sapien
gcctcccatggtcaggaccctgcag

SEQ ID NO: 628534 - DNA, 25 bp, Homo sapien
acagctgtcccttcggtaagaaaga

SEQ ID NO: 628535 - DNA, 25 bp, Homo sapien
ccggcctcccatggtcaggaccctg

SEQ ID NO: 628536 - DNA, 25 bp, Homo sapien
gggctgatctcggtccatcaccgtg

SEQ ID NO: 628537 - DNA, 25 bp, Homo sapien
tgaccatgccctcgttggttacggg

SEQ ID NO: 628538 - DNA, 25 bp, Homo sapien
cccactgatgatgcggtaaacggca

SEQ ID NO: 628539 - DNA, 25 bp, Homo sapien
catcaccgtgaggtttgcgaccacg

SEQ ID NO: 628540 - DNA, 25 bp, Homo sapien
tcactcctgtttgactggtcctagg

SEQ ID NO: 628541 - DNA, 25 bp, Homo sapien
tttgactggtcctagggagtgtgca

SEQ ID NO: 628542 - DNA, 25 bp, Homo sapien
cctgtttgactggtcctagggagtg

SEQ ID NO: 628543 - DNA, 25 bp, Homo sapien
tggcagggtgtgagaagagtacgca

SEQ ID NO: 628544 - DNA, 25 bp, Homo sapien
cttgcttttccttacgcttcggcat

SEQ ID NO: 628545 - DNA, 25 bp, Homo sapien
catcctgagaaccagcgttctgtag

SEQ ID NO: 628546 - DNA, 25 bp, Homo sapien
gacatgcttcgggaaaccccattct

SEQ ID NO: 628547 - DNA, 25 bp, Homo sapien
gctcgcaggcagcactcatcaacat

SEQ ID NO: 628548 - DNA, 25 bp, Homo sapien
ccattctcaccacgtagacagaggc

SEQ ID NO: 628549 - DNA, 25 bp, Homo sapien
caggcagtgctgtaggaacttggtt

SEQ ID NO: 628550 - DNA, 25 bp, Homo sapien
ctaggtcatgaagacttgagccagc

SEQ ID NO: 628551 - DNA, 25 bp, Homo sapien
ctgtaggaacttggtttgctcctcc

SEQ ID NO: 628552 - DNA, 25 bp, Homo sapien
catgaagacttgagccagctgcagc

SEQ ID NO: 628553 - DNA, 25 bp, Homo sapien
ctggtatcggtgcccaacgtcactg

SEQ ID NO: 628554 - DNA, 25 bp, Homo sapien
tatcggtgcccaacgtcactgtagc

SEQ ID NO: 628555 - DNA, 25 bp, Homo sapien
tgcccaacgtcactgtagctgatca

SEQ ID NO: 628556 - DNA, 25 bp, Homo sapien
tcggtgcccaacgtcactgtagctg

SEQ ID NO: 628557 - DNA, 25 bp, Homo sapien
tttcatgataaacagtgtaagacat

SEQ ID NO: 628558 - DNA, 25 bp, Homo sapien
ctttcatgataaacagtgtaagaca

SEQ ID NO: 628559 - DNA, 25 bp, Homo sapien
aactttcatgataaacagtgtaaga

SEQ ID NO: 628560 - DNA, 25 bp, Homo sapien
actttcatgataaacagtgtaagac

SEQ ID NO: 628561 - DNA, 25 bp, Homo sapien
gacacagcgcttccacgcaattatg

SEQ ID NO: 628562 - DNA, 25 bp, Homo sapien
tgcaggttcctcctacttctaggaa

SEQ ID NO: 628563 - DNA, 25 bp, Homo sapien
gacatgcttccacgcaatcatcatg

SEQ ID NO: 628564 - DNA, 25 bp, Homo sapien
cacgcttccacgcaaccatgacatg

SEQ ID NO: 628565 - DNA, 25 bp, Homo sapien
tttccacacaatcaccatgacacgg

SEQ ID NO: 628566 - DNA, 25 bp, Homo sapien
cacacaatcaccatgacacggtgct

SEQ ID NO: 628567 - DNA, 25 bp, Homo sapien
gcaatcacaccacgtttccatgcaa

SEQ ID NO: 628568 - DNA, 25 bp, Homo sapien
tgcaatcacaccacgtttccatgca

SEQ ID NO: 628569 - DNA, 25 bp, Homo sapien
gcacagctcccgtgggagtgggcat

SEQ ID NO: 628570 - DNA, 25 bp, Homo sapien
tggcacagctcccgtgggagtgggc

SEQ ID NO: 628571 - DNA, 25 bp, Homo sapien
ctggcacagctcccgtgggagtggg

SEQ ID NO: 628572 - DNA, 25 bp, Homo sapien
ggcacagctcccgtgggagtgggca

SEQ ID NO: 628573 - DNA, 25 bp, Homo sapien
aaagctctgttgagctcgtagtcga

SEQ ID NO: 628574 - DNA, 25 bp, Homo sapien
gaaagctctgttgagctcgtagtcg

SEQ ID NO: 628575 - DNA, 25 bp, Homo sapien
atgaaccggtcagggtccacagctg

SEQ ID NO: 628576 - DNA, 25 bp, Homo sapien
cccctgccgtggactggaaggacat

SEQ ID NO: 628577 - DNA, 25 bp, Homo sapien
tcctccaggcggatcagcttgtggt

SEQ ID NO: 628578 - DNA, 25 bp, Homo sapien
gaaggacatctggattccgctggcc

SEQ ID NO: 628579 - DNA, 25 bp, Homo sapien
cagccagctcgctgggtctgacagc

SEQ ID NO: 628580 - DNA, 25 bp, Homo sapien
caggaaggtggcctcgtagacgttg

SEQ ID NO: 628581 - DNA, 25 bp, Homo sapien
ttggtgtagagggactcacggtcca

SEQ ID NO: 628582 - DNA, 25 bp, Homo sapien
agcactgccgccgtggtgatctggc

SEQ ID NO: 628583 - DNA, 25 bp, Homo sapien
gcaagggctgccggctgaaagcatt

SEQ ID NO: 628584 - DNA, 25 bp, Homo sapien
gtcagagacacgagggcggcacccc

SEQ ID NO: 628585 - DNA, 25 bp, Homo sapien
ctgccggctgaaagcatttgaaaac

SEQ ID NO: 628586 - DNA, 25 bp, Homo sapien
ggctgccggctgaaagcatttgaaa

SEQ ID NO: 628587 - DNA, 25 bp, Homo sapien
aggttccagccgacacactcgggct

SEQ ID NO: 628588 - DNA, 25 bp, Homo sapien
ggttccagccgacacactcgggctg

SEQ ID NO: 628589 - DNA, 25 bp, Homo sapien
ctgtgttccacccactgatgagcag

SEQ ID NO: 628590 - DNA, 25 bp, Homo sapien
ttccacccactgatgagcagcggca

SEQ ID NO: 628591 - DNA, 25 bp, Homo sapien
cacatttaaggtgacgcagcgcggc

SEQ ID NO: 628592 - DNA, 25 bp, Homo sapien
agcgcggcgctacctttgaaaactg

SEQ ID NO: 628593 - DNA, 25 bp, Homo sapien
tgagatgtagctgatggcacggcac

SEQ ID NO: 628594 - DNA, 25 bp, Homo sapien
caaccacgtgttttgactgaggcag

SEQ ID NO: 628595 - DNA, 25 bp, Homo sapien
aaacaaccacgtgcaacatacacag

SEQ ID NO: 628596 - DNA, 25 bp, Homo sapien
agctccacacaggacacgcacacaa

SEQ ID NO: 628597 - DNA, 25 bp, Homo sapien
caggtcaccacacgggccactcctg

SEQ ID NO: 628598 - DNA, 25 bp, Homo sapien
gccactcctggtactccatgaccaa

SEQ ID NO: 628599 - DNA, 25 bp, Homo sapien
gacaaagggcagctcgaagacgtag

SEQ ID NO: 628600 - DNA, 25 bp, Homo sapien
ggtgatggtccagttcttccgcacg

SEQ ID NO: 628601 - DNA, 25 bp, Homo sapien
ggttgggcttctcgcagatctgcgc

SEQ ID NO: 628602 - DNA, 25 bp, Homo sapien
tcaatgagatagatctggagggtcc

SEQ ID NO: 628603 - DNA, 25 bp, Homo sapien
tccccgtggcctaaggcgggctcac

SEQ ID NO: 628604 - DNA, 25 bp, Homo sapien
ctccccgtggcctaaggcgggctca

SEQ ID NO: 628605 - DNA, 25 bp, Homo sapien
acagtaaacattcaaccagagcccg

SEQ ID NO: 628606 - DNA, 25 bp, Homo sapien
tggtgcaaagcaacagtaaacattc

SEQ ID NO: 628607 - DNA, 25 bp, Homo sapien
ctggtgcaaagcaacagtaaacatt

SEQ ID NO: 628608 - DNA, 25 bp, Homo sapien
gtaaacattcaaccagagcccggcc

SEQ ID NO: 628609 - DNA, 25 bp, Homo sapien
aatggtggtgcagtccccgttgtca

SEQ ID NO: 628610 - DNA, 25 bp, Homo sapien
ttgtcatcacatgggcacaccttga

SEQ ID NO: 628611 - DNA, 25 bp, Homo sapien
caccttgactttgatgatggacgtg

SEQ ID NO: 628612 - DNA, 25 bp, Homo sapien
ttccagagtctgtgacgatgatggg

SEQ ID NO: 628613 - DNA, 25 bp, Homo sapien
ttccctctgctaagtccacctggga

SEQ ID NO: 628614 - DNA, 25 bp, Homo sapien
cttccctctgctaagtccacctggg

SEQ ID NO: 628615 - DNA, 25 bp, Homo sapien
gagctgcccacaggcgtcacaggtc

SEQ ID NO: 628616 - DNA, 25 bp, Homo sapien
ctgggagctgcccacaggcgtcaca

SEQ ID NO: 628617 - DNA, 25 bp, Homo sapien
aggtgcccacgactgggcagaagcc

SEQ ID NO: 628618 - DNA, 25 bp, Homo sapien
gcggatctgctgttgaccgtggccc

SEQ ID NO: 628619 - DNA, 25 bp, Homo sapien
tgccctcgagagtggcccaggtctc

SEQ ID NO: 628620 - DNA, 25 bp, Homo sapien
actgcggatgccctccactgcggct

SEQ ID NO: 628621 - DNA, 25 bp, Homo sapien
gattccgaagcggagtggaggcttg

SEQ ID NO: 628622 - DNA, 25 bp, Homo sapien
cctgatgtcgtgaggaggattccga

SEQ ID NO: 628623 - DNA, 25 bp, Homo sapien
tgccaacccgattaattggctgtgg

SEQ ID NO: 628624 - DNA, 25 bp, Homo sapien
ggaggagctctgtgggtattggcgg

SEQ ID NO: 628625 - DNA, 25 bp, Homo sapien
gattcttcctgccttccgaggtccg

SEQ ID NO: 628626 - DNA, 25 bp, Homo sapien
gcatacgtgtatctgcaggaggacg

SEQ ID NO: 628627 - DNA, 25 bp, Homo sapien
ggcatgtacatgcaggtggcacaca

SEQ ID NO: 628628 - DNA, 25 bp, Homo sapien
tgcatacgtgtatccgcaggagtcg

SEQ ID NO: 628629 - DNA, 25 bp, Homo sapien
ctgtgggggagggctgcccgtgagc

SEQ ID NO: 628630 - DNA, 25 bp, Homo sapien
gggagggctgcccgtgagcagggtg

SEQ ID NO: 628631 - DNA, 25 bp, Homo sapien
gagggctgcccgtgagcagggtgtg

SEQ ID NO: 628632 - DNA, 25 bp, Homo sapien
gtgggggagggctgcccgtgagcag

SEQ ID NO: 628633 - DNA, 25 bp, Homo sapien
gatgttgtcgcggacgtcgtcctcg

SEQ ID NO: 628634 - DNA, 25 bp, Homo sapien
accgccttcctcgtcatacttgagg

SEQ ID NO: 628635 - DNA, 25 bp, Homo sapien
tctcgccgcttcatccacatgacaa

SEQ ID NO: 628636 - DNA, 25 bp, Homo sapien
gcagctgcttcgtgtggcgctcctt

SEQ ID NO: 628637 - DNA, 25 bp, Homo sapien
ggtgcggcaccatgggcctgatcgg

SEQ ID NO: 628638 - DNA, 25 bp, Homo sapien
ggctttgcttggcacgtgccccatg

SEQ ID NO: 628639 - DNA, 25 bp, Homo sapien
caccatgggcctgatcgggtactgg

SEQ ID NO: 628640 - DNA, 25 bp, Homo sapien
caccgatgtcgcctgggtgcggcac

SEQ ID NO: 628641 - DNA, 25 bp, Homo sapien
tgttggtcaagtcaagtcccctcca

SEQ ID NO: 628642 - DNA, 25 bp, Homo sapien
tcctaagacctatctaacagtgggc

SEQ ID NO: 628643 - DNA, 25 bp, Homo sapien
tgtaggaatttcatctgtggcccag

SEQ ID NO: 628644 - DNA, 25 bp, Homo sapien
gaattcttacgaagcccctgctgtg

SEQ ID NO: 628645 - DNA, 25 bp, Homo sapien
ccagtcgttgaggtaatcgtagtct

SEQ ID NO: 628646 - DNA, 25 bp, Homo sapien
gggtcgttgtcagcagcgcggagtc

SEQ ID NO: 628647 - DNA, 25 bp, Homo sapien
tcttggtccccggaactggatgagt

SEQ ID NO: 628648 - DNA, 25 bp, Homo sapien
tcccctcgtagtcgaagaccagcag

SEQ ID NO: 628649 - DNA, 25 bp, Homo sapien
tgctcatgctagacagctcaacgtg

SEQ ID NO: 628650 - DNA, 25 bp, Homo sapien
ggacagcagcaagtttggacccggc

SEQ ID NO: 628651 - DNA, 25 bp, Homo sapien
tggtttggacaactcactcttctgg

SEQ ID NO: 628652 - DNA, 25 bp, Homo sapien
gctcacaagcgtctggcgggaatca

SEQ ID NO: 628653 - DNA, 25 bp, Homo sapien
gcacgaggcttccccacgtggggcc

SEQ ID NO: 628654 - DNA, 25 bp, Homo sapien
ccctgccgcagcccaaggcgcccag

SEQ ID NO: 628655 - DNA, 25 bp, Homo sapien
cacgaggcttccccacgtggggcct

SEQ ID NO: 628656 - DNA, 25 bp, Homo sapien
acgaggcttccccacgtggggcctg

SEQ ID NO: 628657 - DNA, 25 bp, Homo sapien
ttcctcgggaagccagttgtcactg

SEQ ID NO: 628658 - DNA, 25 bp, Homo sapien
cctcgggaagccagttgtcactggc

SEQ ID NO: 628659 - DNA, 25 bp, Homo sapien
ccttcctcgggaagccagttgtcac

SEQ ID NO: 628660 - DNA, 25 bp, Homo sapien
ctccttcctcgggaagccagttgtc

SEQ ID NO: 628661 - DNA, 25 bp, Homo sapien
gaccttagccatggggaagggccat

SEQ ID NO: 628662 - DNA, 25 bp, Homo sapien
cgggaacatgccgtgagcctggcac

SEQ ID NO: 628663 - DNA, 25 bp, Homo sapien
tgtgtgcactcaaggccaaagctgt

SEQ ID NO: 628664 - DNA, 25 bp, Homo sapien
accctgacatccaacgggaacatgc

SEQ ID NO: 628665 - DNA, 25 bp, Homo sapien
caaggaggcctcgaaatttcagaga

SEQ ID NO: 628666 - DNA, 25 bp, Homo sapien
catactccgaaggactgaagcatgg

SEQ ID NO: 628667 - DNA, 25 bp, Homo sapien
aacatcagcccggagttcagggaac

SEQ ID NO: 628668 - DNA, 25 bp, Homo sapien
gaaaggagttcatgctgccctggct

SEQ ID NO: 628669 - DNA, 25 bp, Homo sapien
gaacgtttaacctcgcgatgctcag

SEQ ID NO: 628670 - DNA, 25 bp, Homo sapien
gacattgctctgacacgttggtggc

SEQ ID NO: 628671 - DNA, 25 bp, Homo sapien
tattcattctctggagcagcgcgcc

SEQ ID NO: 628672 - DNA, 25 bp, Homo sapien
ccaattgtacagagaggtggtcccc

SEQ ID NO: 628673 - DNA, 25 bp, Homo sapien
ggtcgcagtgctcctcgttgtcggt

SEQ ID NO: 628674 - DNA, 25 bp, Homo sapien
cggccacggtgcatcgtcagtgaga

SEQ ID NO: 628675 - DNA, 25 bp, Homo sapien
ggtgcatacagtcgcaatgctcatc

SEQ ID NO: 628676 - DNA, 25 bp, Homo sapien
acggtgcatacagtcgcaatgctca

SEQ ID NO: 628677 - DNA, 25 bp, Homo sapien
tggtgacacccggaacggtgtgcag

SEQ ID NO: 628678 - DNA, 25 bp, Homo sapien
atctagggtcctgcagtcgcctggg

SEQ ID NO: 628679 - DNA, 25 bp, Homo sapien
gggcatctagggtcctgcagtcgcc

SEQ ID NO: 628680 - DNA, 25 bp, Homo sapien
tgacacccggaacggtgtgcaggca

SEQ ID NO: 628681 - DNA, 25 bp, Homo sapien
cccaggaggacgcagtcctgcgaac

SEQ ID NO: 628682 - DNA, 25 bp, Homo sapien
ttggcaccacaacccccaggtagaa

SEQ ID NO: 628683 - DNA, 25 bp, Homo sapien
tgcgaaccccgcgaaggcttatctc

SEQ ID NO: 628684 - DNA, 25 bp, Homo sapien
tatctccagggagtaaaagactcgg

SEQ ID NO: 628685 - DNA, 25 bp, Homo sapien
agagggcaccagacgttggaaccca

SEQ ID NO: 628686 - DNA, 25 bp, Homo sapien
ccagacgttggaacccaagaggcat

SEQ ID NO: 628687 - DNA, 25 bp, Homo sapien
ggcaccagacgttggaacccaagag

SEQ ID NO: 628688 - DNA, 25 bp, Homo sapien
gagggcaccagacgttggaacccaa

SEQ ID NO: 628689 - DNA, 25 bp, Homo sapien
gcacgtcgggtcgttgccggtggaa

SEQ ID NO: 628690 - DNA, 25 bp, Homo sapien
cagtccctgcacgtcgggtcgttgc

SEQ ID NO: 628691 - DNA, 25 bp, Homo sapien
gtccctgcacgtcgggtcgttgccg

SEQ ID NO: 628692 - DNA, 25 bp, Homo sapien
cacagtccctgcacgtcgggtcgtt

SEQ ID NO: 628693 - DNA, 25 bp, Homo sapien
gacaggaacacaaaacacgcagctg

SEQ ID NO: 628694 - DNA, 25 bp, Homo sapien
caggaacacaaaacacgcagctgcc

SEQ ID NO: 628695 - DNA, 25 bp, Homo sapien
ctggccgcagagacaggaacacaaa

SEQ ID NO: 628696 - DNA, 25 bp, Homo sapien
gagacaggaacacaaaacacgcagc

SEQ ID NO: 628697 - DNA, 25 bp, Homo sapien
caattccaggctgcggtggacccag

SEQ ID NO: 628698 - DNA, 25 bp, Homo sapien
cagccacgagaacgagctcccagga

SEQ ID NO: 628699 - DNA, 25 bp, Homo sapien
cccagccagccacgagaacgagctc

SEQ ID NO: 628700 - DNA, 25 bp, Homo sapien
tccaggctgcggtggacccagccag

SEQ ID NO: 628701 - DNA, 25 bp, Homo sapien
tcacttcagacttcacttcttggcc

SEQ ID NO: 628702 - DNA, 25 bp, Homo sapien
tggtggtccctgggccgcctcagaa

SEQ ID NO: 628703 - DNA, 25 bp, Homo sapien
cagccctctgggtcacttcagactt

SEQ ID NO: 628704 - DNA, 25 bp, Homo sapien
ctctgggtcacttcagacttcactt

SEQ ID NO: 628705 - DNA, 25 bp, Homo sapien
tggtccaggtccagcactgtctgct

SEQ ID NO: 628706 - DNA, 25 bp, Homo sapien
ccaggtccagcactgtctgctgatg

SEQ ID NO: 628707 - DNA, 25 bp, Homo sapien
cctggtccaggtccagcactgtctg

SEQ ID NO: 628708 - DNA, 25 bp, Homo sapien
gtccaggtccagcactgtctgctga

SEQ ID NO: 628709 - DNA, 25 bp, Homo sapien
tctgttcttgagacccgtagctgct

SEQ ID NO: 628710 - DNA, 25 bp, Homo sapien
tcatcacagatttgctggctgccct

SEQ ID NO: 628711 - DNA, 25 bp, Homo sapien
gaagaccgggtctgcaggcatgttt

SEQ ID NO: 628712 - DNA, 25 bp, Homo sapien
catggtgacttgaggcttaggccaa

SEQ ID NO: 628713 - DNA, 25 bp, Homo sapien
gaatcatcaaaagactgtttctcgg

SEQ ID NO: 628714 - DNA, 25 bp, Homo sapien
gtttctcggtgtgaatcaagtgttg

SEQ ID NO: 628715 - DNA, 25 bp, Homo sapien
acttgcactgtgttttttagctaaa

SEQ ID NO: 628716 - DNA, 25 bp, Homo sapien
tattttgtcagtaattgtacataac

SEQ ID NO: 628717 - DNA, 25 bp, Homo sapien
gaacacaaaggcctgtggatactct

SEQ ID NO: 628718 - DNA, 25 bp, Homo sapien
actcatcttgattgagtggccttcc

SEQ ID NO: 628719 - DNA, 25 bp, Homo sapien
gatactcttaaaggacaattaaatc

SEQ ID NO: 628720 - DNA, 25 bp, Homo sapien
agaaaacacgtttctgtaacagaga

SEQ ID NO: 628721 - DNA, 25 bp, Homo sapien
tccggctgctggcttagttttgtcc

SEQ ID NO: 628722 - DNA, 25 bp, Homo sapien
tgatgaggtcgctcagtcttccggc

SEQ ID NO: 628723 - DNA, 25 bp, Homo sapien
tgttctgcggcaggcatgctgttcc

SEQ ID NO: 628724 - DNA, 25 bp, Homo sapien
cccgagccgctcctcagtgatgagg

SEQ ID NO: 628725 - DNA, 25 bp, Homo sapien
tgtgctgtgggtgcgtagggctgag

SEQ ID NO: 628726 - DNA, 25 bp, Homo sapien
ggtgtgctgtgggtgcgtagggctg

SEQ ID NO: 628727 - DNA, 25 bp, Homo sapien
tgggtgtgctgtgggtgcgtagggc

SEQ ID NO: 628728 - DNA, 25 bp, Homo sapien
gtgtgctgtgggtgcgtagggctga

SEQ ID NO: 628729 - DNA, 25 bp, Homo sapien
agcttttcaccctctctcgtgtgca

SEQ ID NO: 628730 - DNA, 25 bp, Homo sapien
tcgtgtcactgcatcaggagcttcc

SEQ ID NO: 628731 - DNA, 25 bp, Homo sapien
tcatcgtgctgatgtcccgggcact

SEQ ID NO: 628732 - DNA, 25 bp, Homo sapien
acttcatcctgctgatgtcccgtag

SEQ ID NO: 628733 - DNA, 25 bp, Homo sapien
gaatctcagttagaatgccgcgggc

SEQ ID NO: 628734 - DNA, 25 bp, Homo sapien
gacacttggaggctgctgataccat

SEQ ID NO: 628735 - DNA, 25 bp, Homo sapien
gaatgacgtgtttccaccagtaccg

SEQ ID NO: 628736 - DNA, 25 bp, Homo sapien
agcttccatagttcccatcagggtg

SEQ ID NO: 628737 - DNA, 25 bp, Homo sapien
ccattgctcgaatctgctctgaaaa

SEQ ID NO: 628738 - DNA, 25 bp, Homo sapien
taggaatcgagtacaggccactgag

SEQ ID NO: 628739 - DNA, 25 bp, Homo sapien
tctgagctaccttttggcgtctggc

SEQ ID NO: 628740 - DNA, 25 bp, Homo sapien
ccctgctttcagaagttgcaaagga

SEQ ID NO: 628741 - DNA, 25 bp, Homo sapien
tgagaatgtcaggtttgacattggg

SEQ ID NO: 628742 - DNA, 25 bp, Homo sapien
ggcactgggacggacactgaagcct

SEQ ID NO: 628743 - DNA, 25 bp, Homo sapien
tgtgtgcacttaagtctgcgtccat

SEQ ID NO: 628744 - DNA, 25 bp, Homo sapien
cgtcccattcccatgtgtgcactta

SEQ ID NO: 628745 - DNA, 25 bp, Homo sapien
gtacttctctgcacttattaaactt

SEQ ID NO: 628746 - DNA, 25 bp, Homo sapien
ttctctgcacttattaaactttctg

SEQ ID NO: 628747 - DNA, 25 bp, Homo sapien
caagtgcacggtgcacactgagtgg

SEQ ID NO: 628748 - DNA, 25 bp, Homo sapien
gcacttattaaactttctgtgaaga

SEQ ID NO: 628749 - DNA, 25 bp, Homo sapien
agctagcgaccgtctggctgcccag

SEQ ID NO: 628750 - DNA, 25 bp, Homo sapien
ttgagtcgagccaagtgctgtgctg

SEQ ID NO: 628751 - DNA, 25 bp, Homo sapien
ccttggctgtgaacacgctgtttga

SEQ ID NO: 628752 - DNA, 25 bp, Homo sapien
gttgggcgcgcacggcccttggctg

SEQ ID NO: 628753 - DNA, 25 bp, Homo sapien
gcagcaagccgtgggtgggttggtg

SEQ ID NO: 628754 - DNA, 25 bp, Homo sapien
ggcagcaagccgtgggtgggttggt

SEQ ID NO: 628755 - DNA, 25 bp, Homo sapien
taagcattcctgttgagtcgcagag

SEQ ID NO: 628756 - DNA, 25 bp, Homo sapien
tcagggtgaacttctcactcggagt

SEQ ID NO: 628757 - DNA, 25 bp, Homo sapien
tcatgagtagaagtctccacgggtt

SEQ ID NO: 628758 - DNA, 25 bp, Homo sapien
tcgcagaggaattaacgagtgaaac

SEQ ID NO: 628759 - DNA, 25 bp, Homo sapien
tttcctggcgggctcgttggcgtcc

SEQ ID NO: 628760 - DNA, 25 bp, Homo sapien
tgtgattccgctccctggagtgctg

SEQ ID NO: 628761 - DNA, 25 bp, Homo sapien
gatgctgctgtgtcgtcctatccag

SEQ ID NO: 628762 - DNA, 25 bp, Homo sapien
agattcgttgcctgcactgaccggg

SEQ ID NO: 628763 - DNA, 25 bp, Homo sapien
tagtattgggctttggcatgaaaag

SEQ ID NO: 628764 - DNA, 25 bp, Homo sapien
taaattagtattgggctttggcatg

SEQ ID NO: 628765 - DNA, 25 bp, Homo sapien
ctaaattagtattgggctttggcat

SEQ ID NO: 628766 - DNA, 25 bp, Homo sapien
aattagtattgggctttggcatgaa

SEQ ID NO: 628767 - DNA, 25 bp, Homo sapien
gaaggaggccatcgtattgtggagg

SEQ ID NO: 628768 - DNA, 25 bp, Homo sapien
ccacgtgtttatccatgaggttcca

SEQ ID NO: 628769 - DNA, 25 bp, Homo sapien
tgaattgagtactgagaagaggtga

SEQ ID NO: 628770 - DNA, 25 bp, Homo sapien
tacggagagcctcctgaatcaggcc

SEQ ID NO: 628771 - DNA, 25 bp, Homo sapien
cctggaggacgagggcttggacgcc

SEQ ID NO: 628772 - DNA, 25 bp, Homo sapien
cacgttccgaccttggacccaggct

SEQ ID NO: 628773 - DNA, 25 bp, Homo sapien
tcaaggtgtgcggtgcctggaggac

SEQ ID NO: 628774 - DNA, 25 bp, Homo sapien
cgagggcttggacgcccagcctgga

SEQ ID NO: 628775 - DNA, 25 bp, Homo sapien
ggcccttgttagctcctttgtcctg

SEQ ID NO: 628776 - DNA, 25 bp, Homo sapien
ctgccacacacgcatcttggcaggt

SEQ ID NO: 628777 - DNA, 25 bp, Homo sapien
cacacacgcatcttggcaggtggct

SEQ ID NO: 628778 - DNA, 25 bp, Homo sapien
tgttagctcctttgtcctgccacct

SEQ ID NO: 628779 - DNA, 25 bp, Homo sapien
tctgtgcatattctggttactgttc

SEQ ID NO: 628780 - DNA, 25 bp, Homo sapien
cgtattaattataggagttctgtgc

SEQ ID NO: 628781 - DNA, 25 bp, Homo sapien
tgtgggtaaccttctgtgaaatgtc

SEQ ID NO: 628782 - DNA, 25 bp, Homo sapien
tctatgtttattgtttgtgggtaac

SEQ ID NO: 628783 - DNA, 25 bp, Homo sapien
ggtgacccgaaaagagcgctgaatt

SEQ ID NO: 628784 - DNA, 25 bp, Homo sapien
tggtgtttgagcacccaggatgcgc

SEQ ID NO: 628785 - DNA, 25 bp, Homo sapien
tagaaacagtgtatgccattccgac

SEQ ID NO: 628786 - DNA, 25 bp, Homo sapien
caggtgtacctaggccaaacagtgg

SEQ ID NO: 628787 - DNA, 25 bp, Homo sapien
tgtgttttcatgtcggcgttgtgag

SEQ ID NO: 628788 - DNA, 25 bp, Homo sapien
ctgtgttttcatgtcggcgttgtga

SEQ ID NO: 628789 - DNA, 25 bp, Homo sapien
tttcatgtcggcgttgtgagttttc

SEQ ID NO: 628790 - DNA, 25 bp, Homo sapien
tgtcggcgttgtgagttttcttttc

SEQ ID NO: 628791 - DNA, 25 bp, Homo sapien
gagtgcttgcacgtgcagggattct

SEQ ID NO: 628792 - DNA, 25 bp, Homo sapien
gttgaaagtttcaccgccatcgtct

SEQ ID NO: 628793 - DNA, 25 bp, Homo sapien
caaacaggcgcgctgttgaaagttt

SEQ ID NO: 628794 - DNA, 25 bp, Homo sapien
tgcagggattctgcgcctgttctct

SEQ ID NO: 628795 - DNA, 25 bp, Homo sapien
ttctcagcgcccctttcttgtgcgg

SEQ ID NO: 628796 - DNA, 25 bp, Homo sapien
tctcagcgcccctttcttgtgcggg

SEQ ID NO: 628797 - DNA, 25 bp, Homo sapien
cagcgcccctttcttgtgcgggggt

SEQ ID NO: 628798 - DNA, 25 bp, Homo sapien
tcttctcagcgcccctttcttgtgc

SEQ ID NO: 628799 - DNA, 25 bp, Homo sapien
gggacggagcctggtgaccgaggtg

SEQ ID NO: 628800 - DNA, 25 bp, Homo sapien
ccgaggtggtcatgcggggagagga

SEQ ID NO: 628801 - DNA, 25 bp, Homo sapien
tgggggacggagcctggtgaccgag

SEQ ID NO: 628802 - DNA, 25 bp, Homo sapien
ccagtggaggcacagtgcagatgct

SEQ ID NO: 628803 - DNA, 25 bp, Homo sapien
gcaccgtgtttagtctttgtgacga

SEQ ID NO: 628804 - DNA, 25 bp, Homo sapien
tccgtgacaggttgggtttctgcag

SEQ ID NO: 628805 - DNA, 25 bp, Homo sapien
cagtttgtcaggtgtcctccgtgag

SEQ ID NO: 628806 - DNA, 25 bp, Homo sapien
tgagtacttacaactccagcgtgtg

SEQ ID NO: 628807 - DNA, 25 bp, Homo sapien
ggccatgctgtgctgcggggatgca

SEQ ID NO: 628808 - DNA, 25 bp, Homo sapien
agggagtccacggtgcaggacgcag

SEQ ID NO: 628809 - DNA, 25 bp, Homo sapien
catggccctgcaggggtttggtcgt

SEQ ID NO: 628810 - DNA, 25 bp, Homo sapien
ctgcggtgctcggtggccatgctgt

SEQ ID NO: 628811 - DNA, 25 bp, Homo sapien
atttagcctgcaccccgctactgca

SEQ ID NO: 628812 - DNA, 25 bp, Homo sapien
catttagcctgcaccccgctactgc

SEQ ID NO: 628813 - DNA, 25 bp, Homo sapien
tcatttagcctgcaccccgctactg

SEQ ID NO: 628814 - DNA, 25 bp, Homo sapien
tttagcctgcaccccgctactgcac

SEQ ID NO: 628815 - DNA, 25 bp, Homo sapien
ctagaagagccgtaggaggctgccc

SEQ ID NO: 628816 - DNA, 25 bp, Homo sapien
catgttggcgtgcacaaattcacag

SEQ ID NO: 628817 - DNA, 25 bp, Homo sapien
tgttgcaaggttggcgtctctcctg

SEQ ID NO: 628818 - DNA, 25 bp, Homo sapien
aagagagtccccttccacagagacg

SEQ ID NO: 628819 - DNA, 25 bp, Homo sapien
gtcagtccgcggtggtcccaggctc

SEQ ID NO: 628820 - DNA, 25 bp, Homo sapien
tgcaggatgatgtagtgaagtgccc

SEQ ID NO: 628821 - DNA, 25 bp, Homo sapien
tggtgtccgctgttggtcagtccgc

SEQ ID NO: 628822 - DNA, 25 bp, Homo sapien
tggagcaggccatgctgcagtgtgc

SEQ ID NO: 628823 - DNA, 25 bp, Homo sapien
ttggatttggcgagtccaggcccat

SEQ ID NO: 628824 - DNA, 25 bp, Homo sapien
tgggtggcggcatgcagacggccac

SEQ ID NO: 628825 - DNA, 25 bp, Homo sapien
taatcgcgctgttgggacgggttgg

SEQ ID NO: 628826 - DNA, 25 bp, Homo sapien
ccaggcccatgctgggtggcggcat

SEQ ID NO: 628827 - DNA, 25 bp, Homo sapien
gggtgctgtctggagcattggttcc

SEQ ID NO: 628828 - DNA, 25 bp, Homo sapien
gtgggtgctgtctggagcattggtt

SEQ ID NO: 628829 - DNA, 25 bp, Homo sapien
ggtgctgtctggagcattggttccc

SEQ ID NO: 628830 - DNA, 25 bp, Homo sapien
gtgctgtctggagcattggttccca

SEQ ID NO: 628831 - DNA, 25 bp, Homo sapien
gctacagttcgaacaggcacaaggg

SEQ ID NO: 628832 - DNA, 25 bp, Homo sapien
tgctgctgtcgagaaacaagcctgg

SEQ ID NO: 628833 - DNA, 25 bp, Homo sapien
cacaagggtccagttcgggtctgct

SEQ ID NO: 628834 - DNA, 25 bp, Homo sapien
ggtccgaggcaaggaagcgtctctc

SEQ ID NO: 628835 - DNA, 25 bp, Homo sapien
cacagagatactaaaatttggcggg

SEQ ID NO: 628836 - DNA, 25 bp, Homo sapien
gtaaacttggaaggcccactgagct

SEQ ID NO: 628837 - DNA, 25 bp, Homo sapien
gactccccaccacatgaacattagg

SEQ ID NO: 628838 - DNA, 25 bp, Homo sapien
ttccgggttgaaacagtgcttatga

SEQ ID NO: 628839 - DNA, 25 bp, Homo sapien
aatcacaaaggccaagagtccaaaa

SEQ ID NO: 628840 - DNA, 25 bp, Homo sapien
agatggtgctcactcacattgaggg

SEQ ID NO: 628841 - DNA, 25 bp, Homo sapien
tccatccttcaagccaatcaggttg

SEQ ID NO: 628842 - DNA, 25 bp, Homo sapien
cacatcatcacaaggtaaagttcca

SEQ ID NO: 628843 - DNA, 25 bp, Homo sapien
tgaacatccaacctatagcaagctg

SEQ ID NO: 628844 - DNA, 25 bp, Homo sapien
ggtgacagcacattcgaagcagcag

SEQ ID NO: 628845 - DNA, 25 bp, Homo sapien
acttctggttcagcacagcgtgcag

SEQ ID NO: 628846 - DNA, 25 bp, Homo sapien
tttcttgtgcaagtgacatcccagg

SEQ ID NO: 628847 - DNA, 25 bp, Homo sapien
taaggcttcttgataggcaggtgca

SEQ ID NO: 628848 - DNA, 25 bp, Homo sapien
gggcctttgctcagcccatggtctt

SEQ ID NO: 628849 - DNA, 25 bp, Homo sapien
tatacccaagtgtgtgcttgagatg

SEQ ID NO: 628850 - DNA, 25 bp, Homo sapien
catggtcttgtctggaaagccacct

SEQ ID NO: 628851 - DNA, 25 bp, Homo sapien
cctttgggaagctgccatagtcctt

SEQ ID NO: 628852 - DNA, 25 bp, Homo sapien
ctttgggaagctgccatagtccttg

SEQ ID NO: 628853 - DNA, 25 bp, Homo sapien
tgctggatcagacatggggctcccg

SEQ ID NO: 628854 - DNA, 25 bp, Homo sapien
gctggatcagacatggggctcccgc

SEQ ID NO: 628855 - DNA, 25 bp, Homo sapien
ggtggccgcgcttgtccatgcaaga

SEQ ID NO: 628856 - DNA, 25 bp, Homo sapien
tgccatgatgcccaaaaggaccctg

SEQ ID NO: 628857 - DNA, 25 bp, Homo sapien
catgcaagaaatgatccggccaggg

SEQ ID NO: 628858 - DNA, 25 bp, Homo sapien
tttcctccagtgtcagcccggtgtg

SEQ ID NO: 628859 - DNA, 25 bp, Homo sapien
tgtgattggactactgcacgcaggg

SEQ ID NO: 628860 - DNA, 25 bp, Homo sapien
agctgtgattggactactgcacgca

SEQ ID NO: 628861 - DNA, 25 bp, Homo sapien
actactgcacgcaggggtggcagca

SEQ ID NO: 628862 - DNA, 25 bp, Homo sapien
gactactgcacgcaggggtggcagc

SEQ ID NO: 628863 - DNA, 25 bp, Homo sapien
tcagatcacggaccaatattgggtc

SEQ ID NO: 628864 - DNA, 25 bp, Homo sapien
tactccgcgtgattagtgaccgagg

SEQ ID NO: 628865 - DNA, 25 bp, Homo sapien
cgagggcgcgcggtgtgtgcttttt

SEQ ID NO: 628866 - DNA, 25 bp, Homo sapien
tccgtcttgaccgtgaacatcatca

SEQ ID NO: 628867 - DNA, 25 bp, Homo sapien
cgcgggcaccgagcgaaccaagaag

SEQ ID NO: 628868 - DNA, 25 bp, Homo sapien
gcctgcgcgggcaccgagcgaacca

SEQ ID NO: 628869 - DNA, 25 bp, Homo sapien
ctgcgcgggcaccgagcgaaccaag

SEQ ID NO: 628870 - DNA, 25 bp, Homo sapien
gcgaaccaagaaggggcgcgcgact

SEQ ID NO: 628871 - DNA, 25 bp, Homo sapien
cgccacggtggagttgtcggtgtcg

SEQ ID NO: 628872 - DNA, 25 bp, Homo sapien
gatcttgctgcccagatacggggtg

SEQ ID NO: 628873 - DNA, 25 bp, Homo sapien
tgctgcccagatacggggtgcctga

SEQ ID NO: 628874 - DNA, 25 bp, Homo sapien
gcgccacggtggagttgtcggtgtc

SEQ ID NO: 628875 - DNA, 25 bp, Homo sapien
gcccgctgacgggagccgccctgct

SEQ ID NO: 628876 - DNA, 25 bp, Homo sapien
ggaggaggcccgctgacgggagccg

SEQ ID NO: 628877 - DNA, 25 bp, Homo sapien
aggaggcccgctgacgggagccgcc

SEQ ID NO: 628878 - DNA, 25 bp, Homo sapien
ccgctgacgggagccgccctgctcc

SEQ ID NO: 628879 - DNA, 25 bp, Homo sapien
gccccagctgtctaataagttccag

SEQ ID NO: 628880 - DNA, 25 bp, Homo sapien
cattaggacgcggtatttgttcagg

SEQ ID NO: 628881 - DNA, 25 bp, Homo sapien
caggattcgcgtgttgtgaccccac

SEQ ID NO: 628882 - DNA, 25 bp, Homo sapien
ttgttcaggatcaaggccccagctg

SEQ ID NO: 628883 - DNA, 25 bp, Homo sapien
aaaagacggcgacacttgctcagag

SEQ ID NO: 628884 - DNA, 25 bp, Homo sapien
tggtgaagctccagacaacagacag

SEQ ID NO: 628885 - DNA, 25 bp, Homo sapien
taatgccccgattttcaatggacag

SEQ ID NO: 628886 - DNA, 25 bp, Homo sapien
tgctgataatgcaccaattggtgaa

SEQ ID NO: 628887 - DNA, 25 bp, Homo sapien
tggagaaagagaagcgttattgttg

SEQ ID NO: 628888 - DNA, 25 bp, Homo sapien
aagagaagcgttattgttgtcctca

SEQ ID NO: 628889 - DNA, 25 bp, Homo sapien
agaagcgttattgttgtcctcagcc

SEQ ID NO: 628890 - DNA, 25 bp, Homo sapien
agaaagagaagcgttattgttgtcc

SEQ ID NO: 628891 - DNA, 25 bp, Homo sapien
ctgtgggacggtcttcagtgccaaa

SEQ ID NO: 628892 - DNA, 25 bp, Homo sapien
ggacggtcttcagtgccaaaggacc

SEQ ID NO: 628893 - DNA, 25 bp, Homo sapien
tgtgggacggtcttcagtgccaaag

SEQ ID NO: 628894 - DNA, 25 bp, Homo sapien
tgggacggtcttcagtgccaaagga

SEQ ID NO: 628895 - DNA, 25 bp, Homo sapien
aacaatggcgggatcctgcgggagt

SEQ ID NO: 628896 - DNA, 25 bp, Homo sapien
gaaaatgatgtactcataaatctcc

SEQ ID NO: 628897 - DNA, 25 bp, Homo sapien
gatcctgcgggagtgtgtgctgagc

SEQ ID NO: 628898 - DNA, 25 bp, Homo sapien
gctttcggaggttcacacacagtga

SEQ ID NO: 628899 - DNA, 25 bp, Homo sapien
aatgcagtctgaaccccagaggagc

SEQ ID NO: 628900 - DNA, 25 bp, Homo sapien
tatgcccgaaacatcacaggtccag

SEQ ID NO: 628901 - DNA, 25 bp, Homo sapien
catgtaacgactgggcgtaacccga

SEQ ID NO: 628902 - DNA, 25 bp, Homo sapien
ttctgtgagagcagcaacagcctgg

SEQ ID NO: 628903 - DNA, 25 bp, Homo sapien
caagtttccagtatggtgagagctg

SEQ ID NO: 628904 - DNA, 25 bp, Homo sapien
gtttccagtatggtgagagctgcct

SEQ ID NO: 628905 - DNA, 25 bp, Homo sapien
cttggggtgcaagtttccagtatgg

SEQ ID NO: 628906 - DNA, 25 bp, Homo sapien
ggtgcaagtttccagtatggtgaga

SEQ ID NO: 628907 - DNA, 25 bp, Homo sapien
cagcctgcacccttgagatgctgga

SEQ ID NO: 628908 - DNA, 25 bp, Homo sapien
ctgggaaacaagcaccgtcccatca

SEQ ID NO: 628909 - DNA, 25 bp, Homo sapien
gcacccttgagatgctggaggagcc

SEQ ID NO: 628910 - DNA, 25 bp, Homo sapien
gggaaacaagcaccgtcccatcagc

SEQ ID NO: 628911 - DNA, 25 bp, Homo sapien
agacatcgggtgagaacggcgaagg

SEQ ID NO: 628912 - DNA, 25 bp, Homo sapien
atcgggtgagaacggcgaaggccat

SEQ ID NO: 628913 - DNA, 25 bp, Homo sapien
catcaccccgcacgccttcatcagg

SEQ ID NO: 628914 - DNA, 25 bp, Homo sapien
acgccttcatcagggcgcttgttca

SEQ ID NO: 628915 - DNA, 25 bp, Homo sapien
aagggcgaggcggaggcagaaccca

SEQ ID NO: 628916 - DNA, 25 bp, Homo sapien
ctggaagggcgaggcggaggcagaa

SEQ ID NO: 628917 - DNA, 25 bp, Homo sapien
cgaggcggaggcagaacccagggaa

SEQ ID NO: 628918 - DNA, 25 bp, Homo sapien
aggcggaggcagaacccagggaaga

SEQ ID NO: 628919 - DNA, 25 bp, Homo sapien
cctcggaaagggctgtaaggcacgt

SEQ ID NO: 628920 - DNA, 25 bp, Homo sapien
ggaaagggctgtaaggcacgtgcgg

SEQ ID NO: 628921 - DNA, 25 bp, Homo sapien
ccctcggaaagggctgtaaggcacg

SEQ ID NO: 628922 - DNA, 25 bp, Homo sapien
tcggaaagggctgtaaggcacgtgc

SEQ ID NO: 628923 - DNA, 25 bp, Homo sapien
ccagggaggcggcatactgctggct

SEQ ID NO: 628924 - DNA, 25 bp, Homo sapien
tggccgccagcgggccgtagggcgc

SEQ ID NO: 628925 - DNA, 25 bp, Homo sapien
acccagggaggcggcatactgctgg

SEQ ID NO: 628926 - DNA, 25 bp, Homo sapien
gagctggccgccagcgggccgtagg

SEQ ID NO: 628927 - DNA, 25 bp, Homo sapien
gacagttacacgcaagggtagttta

SEQ ID NO: 628928 - DNA, 25 bp, Homo sapien
aacaaaacagtctacaagctgagca

SEQ ID NO: 628929 - DNA, 25 bp, Homo sapien
acagtctacaagctgagcatgacag

SEQ ID NO: 628930 - DNA, 25 bp, Homo sapien
gtttaccagacagaaacaggtcact

SEQ ID NO: 628931 - DNA, 25 bp, Homo sapien
caagtcaagctctgaaacgggctgt

SEQ ID NO: 628932 - DNA, 25 bp, Homo sapien
gacaagtcaagctctgaaacgggct

SEQ ID NO: 628933 - DNA, 25 bp, Homo sapien
gaggacaagtcaagctctgaaacgg

SEQ ID NO: 628934 - DNA, 25 bp, Homo sapien
aagtcaagctctgaaacgggctgtg

SEQ ID NO: 628935 - DNA, 25 bp, Homo sapien
agaatggtttgcaagacagcatgca

SEQ ID NO: 628936 - DNA, 25 bp, Homo sapien
tgatctgctacagctactgtcattc

SEQ ID NO: 628937 - DNA, 25 bp, Homo sapien
ggcaaatgatctgctacagctactg

SEQ ID NO: 628938 - DNA, 25 bp, Homo sapien
aaatgatctgctacagctactgtca

SEQ ID NO: 628939 - DNA, 25 bp, Homo sapien
tctgctacagctactgtcattctgt

SEQ ID NO: 628940 - DNA, 25 bp, Homo sapien
aaaagatctagaaaccccacaggtg

SEQ ID NO: 628941 - DNA, 25 bp, Homo sapien
tctggaaagtgtcctctggcgggaa

SEQ ID NO: 628942 - DNA, 25 bp, Homo sapien
gacaggtggtgtacactggccagct

SEQ ID NO: 628943 - DNA, 25 bp, Homo sapien
tcaaagggcaggttggaacgactct

SEQ ID NO: 628944 - DNA, 25 bp, Homo sapien
gacctgtagggactctaaacaggac

SEQ ID NO: 628945 - DNA, 25 bp, Homo sapien
ggttccaggacctgtagggactcta

SEQ ID NO: 628946 - DNA, 25 bp, Homo sapien
tgggtgtaagtgaacagagatctga

SEQ ID NO: 628947 - DNA, 25 bp, Homo sapien
ggactctaaacaggacaatgtggga

SEQ ID NO: 628948 - DNA, 25 bp, Homo sapien
tgacttccgagacgtagcagcctac

SEQ ID NO: 628949 - DNA, 25 bp, Homo sapien
tcaaggacaggaaaaacaccgtgcc

SEQ ID NO: 628950 - DNA, 25 bp, Homo sapien
tatgcctatgaaactgcagtccgag

SEQ ID NO: 628951 - DNA, 25 bp, Homo sapien
ccaagttagggaacctcaaggacag

SEQ ID NO: 628952 - DNA, 25 bp, Homo sapien
tgtggtgcccttgccaggtaacagc

SEQ ID NO: 628953 - DNA, 25 bp, Homo sapien
ctcggctgggcctgacgaccgttga

SEQ ID NO: 628954 - DNA, 25 bp, Homo sapien
tgcccttgccaggtaacagcttttt

SEQ ID NO: 628955 - DNA, 25 bp, Homo sapien
gttgagctgcgtccctgtggtgccc

SEQ ID NO: 628956 - DNA, 25 bp, Homo sapien
tgttctcgtcattcacctgcccttg

SEQ ID NO: 628957 - DNA, 25 bp, Homo sapien
tgatcgcctcctctgaggtcttctg

SEQ ID NO: 628958 - DNA, 25 bp, Homo sapien
gaggtcttctgttctcgtcattcac

SEQ ID NO: 628959 - DNA, 25 bp, Homo sapien
ccttgagcttgcacagctgccggct

SEQ ID NO: 628960 - DNA, 25 bp, Homo sapien
gcactctcgaaatcaaagtcaccct

SEQ ID NO: 628961 - DNA, 25 bp, Homo sapien
aaagtcaccctcaaatttgattgtg

SEQ ID NO: 628962 - DNA, 25 bp, Homo sapien
tttgccctctggagcgattccttgt

SEQ ID NO: 628963 - DNA, 25 bp, Homo sapien
tcctctcggttgaactgggcatttg

SEQ ID NO: 628964 - DNA, 25 bp, Homo sapien
ctcagcgggcgcttcggcactctgg

SEQ ID NO: 628965 - DNA, 25 bp, Homo sapien
tcagaagagatgttgtcgaagaacg

SEQ ID NO: 628966 - DNA, 25 bp, Homo sapien
cagttgggccccagaaggtcttcct

SEQ ID NO: 628967 - DNA, 25 bp, Homo sapien
acgacttggatttgtcatagtagca

SEQ ID NO: 628968 - DNA, 25 bp, Homo sapien
tggcccctaactggccagtcagcag

SEQ ID NO: 628969 - DNA, 25 bp, Homo sapien
gcaccacgcttcagcacaaaaccct

SEQ ID NO: 628970 - DNA, 25 bp, Homo sapien
cactctcaccaaggacgccgtaaaa

SEQ ID NO: 628971 - DNA, 25 bp, Homo sapien
taaaacatcagaccgcaccacgctt

SEQ ID NO: 628972 - DNA, 25 bp, Homo sapien
cgctgttgctcgctgggcacagaga

SEQ ID NO: 628973 - DNA, 25 bp, Homo sapien
gatactagttggctaccaaggcagc

SEQ ID NO: 628974 - DNA, 25 bp, Homo sapien
aggagacctgagaccggaccatgaa

SEQ ID NO: 628975 - DNA, 25 bp, Homo sapien
tgagaccggaccatgaagtggaccc

SEQ ID NO: 628976 - DNA, 25 bp, Homo sapien
ggtgctccctgccacgtttccaacc

SEQ ID NO: 628977 - DNA, 25 bp, Homo sapien
gccccgtcagctctggagcccagct

SEQ ID NO: 628978 - DNA, 25 bp, Homo sapien
gggatcgggatccatctctaccatc

SEQ ID NO: 628979 - DNA, 25 bp, Homo sapien
gtttccaaccaggactgtctccaca

SEQ ID NO: 628980 - DNA, 25 bp, Homo sapien
gacaccccaaaggtctctgtgttga

SEQ ID NO: 628981 - DNA, 25 bp, Homo sapien
gttgcgacgggtggtcccattgccc

SEQ ID NO: 628982 - DNA, 25 bp, Homo sapien
tgcggccacgaagaaacctccctga

SEQ ID NO: 628983 - DNA, 25 bp, Homo sapien
gccccgagaactgcggccacgaaga

SEQ ID NO: 628984 - DNA, 25 bp, Homo sapien
ctgagaatcctacttgtacaataca

SEQ ID NO: 628985 - DNA, 25 bp, Homo sapien
agtcaagcatctgctgggataagct

SEQ ID NO: 628986 - DNA, 25 bp, Homo sapien
cagagtcagactggctacccccatt

SEQ ID NO: 628987 - DNA, 25 bp, Homo sapien
gataagctagcactgttgcccctgc

SEQ ID NO: 628988 - DNA, 25 bp, Homo sapien
cacacagcgtcagttatgcgccact

SEQ ID NO: 628989 - DNA, 25 bp, Homo sapien
taagtgcagcgttttcctcgcgtcc

SEQ ID NO: 628990 - DNA, 25 bp, Homo sapien
cacctctccctgtaagtgcagcgtt

SEQ ID NO: 628991 - DNA, 25 bp, Homo sapien
ctccgtaaacaaagtgaccacctct

SEQ ID NO: 628992 - DNA, 25 bp, Homo sapien
taagtccaaaacacaagtagcagta

SEQ ID NO: 628993 - DNA, 25 bp, Homo sapien
ttaagtccaaaacacaagtagcagt

SEQ ID NO: 628994 - DNA, 25 bp, Homo sapien
aaaacacaagtagcagtatgggtct

SEQ ID NO: 628995 - DNA, 25 bp, Homo sapien
gtccaaaacacaagtagcagtatgg

SEQ ID NO: 628996 - DNA, 25 bp, Homo sapien
gaggttacccatgaatacttcccca

SEQ ID NO: 628997 - DNA, 25 bp, Homo sapien
caagtggttctaactcagaccatgt

SEQ ID NO: 628998 - DNA, 25 bp, Homo sapien
ctaactcagaccatgtccaagttca

SEQ ID NO: 628999 - DNA, 25 bp, Homo sapien
gataaagagacctcaaagaggttac

SEQ ID NO: 629000 - DNA, 25 bp, Homo sapien
aaaccttagaattaggctatgcgca

SEQ ID NO: 629001 - DNA, 25 bp, Homo sapien
ccaacctggaagcttgtggacacca

SEQ ID NO: 629002 - DNA, 25 bp, Homo sapien
caacatgatccatgggaaaacccct

SEQ ID NO: 629003 - DNA, 25 bp, Homo sapien
cagggtggtctggttcacttataca

SEQ ID NO: 629004 - DNA, 25 bp, Homo sapien
tccaagtggatgagaacgccagtgt

SEQ ID NO: 629005 - DNA, 25 bp, Homo sapien
gcttgtttccaagtggatgagaacg

SEQ ID NO: 629006 - DNA, 25 bp, Homo sapien
ccagagtccagcaatgactgaccgg

SEQ ID NO: 629007 - DNA, 25 bp, Homo sapien
agcaatgactgaccggcccaggtca

SEQ ID NO: 629008 - DNA, 25 bp, Homo sapien
atgcaacaaatgtagaccccaccct

SEQ ID NO: 629009 - DNA, 25 bp, Homo sapien
aaacaacgatgtacaacagagggga

SEQ ID NO: 629010 - DNA, 25 bp, Homo sapien
caacgatgtacaacagaggggaaat

SEQ ID NO: 629011 - DNA, 25 bp, Homo sapien
tcatgcaacaaatgtagaccccacc

SEQ ID NO: 629012 - DNA, 25 bp, Homo sapien
tatactaaagttctgacccatcgac

SEQ ID NO: 629013 - DNA, 25 bp, Homo sapien
tattttcgacaaaatgccctgtcac

SEQ ID NO: 629014 - DNA, 25 bp, Homo sapien
tttacattactccaacagaggagcc

SEQ ID NO: 629015 - DNA, 25 bp, Homo sapien
tgtcactcagaggacgcatgcgtat

SEQ ID NO: 629016 - DNA, 25 bp, Homo sapien
agaacctgaacgctcctgagctggg

SEQ ID NO: 629017 - DNA, 25 bp, Homo sapien
tgagaacctgaacgctcctgagctg

SEQ ID NO: 629018 - DNA, 25 bp, Homo sapien
taacatgctctacggtgcctgagaa

SEQ ID NO: 629019 - DNA, 25 bp, Homo sapien
ggctgtgtaacatgctctacggtgc

SEQ ID NO: 629020 - DNA, 25 bp, Homo sapien
gactaaaatgggatgctctgagcct

SEQ ID NO: 629021 - DNA, 25 bp, Homo sapien
gagcctagaaccagccatgtctttg

SEQ ID NO: 629022 - DNA, 25 bp, Homo sapien
gaactcatgcagctggtgtgtctcc

SEQ ID NO: 629023 - DNA, 25 bp, Homo sapien
tctgagggccacttttaaggtcacc

SEQ ID NO: 629024 - DNA, 25 bp, Homo sapien
tagccctgggttcattctgtagagc

SEQ ID NO: 629025 - DNA, 25 bp, Homo sapien
gttgtagacacagaatgacttccgt

SEQ ID NO: 629026 - DNA, 25 bp, Homo sapien
taagccagtgtgagacacaggttcc

SEQ ID NO: 629027 - DNA, 25 bp, Homo sapien
ccctgagccaccgtaattgagcttt

SEQ ID NO: 629028 - DNA, 25 bp, Homo sapien
tacgatgagtttagcgggataccac

SEQ ID NO: 629029 - DNA, 25 bp, Homo sapien
gataggttccgctgccagtcagtta

SEQ ID NO: 629030 - DNA, 25 bp, Homo sapien
tcagttagaatagccttgctgccgg

SEQ ID NO: 629031 - DNA, 25 bp, Homo sapien
tcaccgccgatgcaaggatagtcat

SEQ ID NO: 629032 - DNA, 25 bp, Homo sapien
cccgtggtcatcgaggtggatactc

SEQ ID NO: 629033 - DNA, 25 bp, Homo sapien
tggtcatcgaggtggatactccggc

SEQ ID NO: 629034 - DNA, 25 bp, Homo sapien
ctcagcccgtggtcatcgaggtgga

SEQ ID NO: 629035 - DNA, 25 bp, Homo sapien
tcgaggtggatactccggctgcgct

SEQ ID NO: 629036 - DNA, 25 bp, Homo sapien
gtttgctgcgtaacctcccctttgc

SEQ ID NO: 629037 - DNA, 25 bp, Homo sapien
tctggatggtttgctgcgtaacctc

SEQ ID NO: 629038 - DNA, 25 bp, Homo sapien
ttggccgggcagacgcgaaggccac

SEQ ID NO: 629039 - DNA, 25 bp, Homo sapien
ctcttggccgggcagacgcgaaggc

SEQ ID NO: 629040 - DNA, 25 bp, Homo sapien
cactaaccaaaatgagcgcagaaaa

SEQ ID NO: 629041 - DNA, 25 bp, Homo sapien
aagctggctgcggagcgcgacaagc

SEQ ID NO: 629042 - DNA, 25 bp, Homo sapien
tgagcgcagaaaacgagtaccgccc

SEQ ID NO: 629043 - DNA, 25 bp, Homo sapien
ccaaaatgagcgcagaaaacgagta

SEQ ID NO: 629044 - DNA, 25 bp, Homo sapien
gggccgggctgcgtaacgatgcccc

SEQ ID NO: 629045 - DNA, 25 bp, Homo sapien
cgggctgcgtaacgatgccccgcaa

SEQ ID NO: 629046 - DNA, 25 bp, Homo sapien
ctgcgtaacgatgccccgcaaatgg

SEQ ID NO: 629047 - DNA, 25 bp, Homo sapien
gatcgggacgcgtccttccgtgcct

SEQ ID NO: 629048 - DNA, 25 bp, Homo sapien
ctaccaggcaaaaacctgggtgagg

SEQ ID NO: 629049 - DNA, 25 bp, Homo sapien
agtgtcctcatggttgtcctttcta

SEQ ID NO: 629050 - DNA, 25 bp, Homo sapien
gaggccagctctgccgattctggaa

SEQ ID NO: 629051 - DNA, 25 bp, Homo sapien
caatgacaacctgtgtggggccctg

SEQ ID NO: 629052 - DNA, 25 bp, Homo sapien
tgtacccaaaccaagggcactcgat

SEQ ID NO: 629053 - DNA, 25 bp, Homo sapien
tttccggaagggctacggtctgatc

SEQ ID NO: 629054 - DNA, 25 bp, Homo sapien
cactcgatgactggccggcattctt

SEQ ID NO: 629055 - DNA, 25 bp, Homo sapien
ggaatggacgcactttcagacccgc

SEQ ID NO: 629056 - DNA, 25 bp, Homo sapien
ggtgagggagagtccacctgccagg

SEQ ID NO: 629057 - DNA, 25 bp, Homo sapien
aggtgagggagagtccacctgccag

SEQ ID NO: 629058 - DNA, 25 bp, Homo sapien
caggagagccggctctttcaaggtg

SEQ ID NO: 629059 - DNA, 25 bp, Homo sapien
gcaggcacaggagagccggctcttt

SEQ ID NO: 629060 - DNA, 25 bp, Homo sapien
gagccggctctttcaaggtgtccac

SEQ ID NO: 629061 - DNA, 25 bp, Homo sapien
gcagacaccacacaggacgcccaca

SEQ ID NO: 629062 - DNA, 25 bp, Homo sapien
ctgcacgtagtcaggacgtgctgag

SEQ ID NO: 629063 - DNA, 25 bp, Homo sapien
tagtcaggacgtgctgagtctggtg

SEQ ID NO: 629064 - DNA, 25 bp, Homo sapien
acgtagtcaggacgtgctgagtctg

SEQ ID NO: 629065 - DNA, 25 bp, Homo sapien
cacgtagtcaggacgtgctgagtct

SEQ ID NO: 629066 - DNA, 25 bp, Homo sapien
gcactccccaaatcaagcggcccaa

SEQ ID NO: 629067 - DNA, 25 bp, Homo sapien
atcaagcggcccaaggccttgcgtc

SEQ ID NO: 629068 - DNA, 25 bp, Homo sapien
tcccaaagcgcctcctgaacgtgct

SEQ ID NO: 629069 - DNA, 25 bp, Homo sapien
ccaaatcaagcggcccaaggccttg

SEQ ID NO: 629070 - DNA, 25 bp, Homo sapien
ccaggatgcactggatcaggtggtg

SEQ ID NO: 629071 - DNA, 25 bp, Homo sapien
aggatgcactggatcaggtggtggt

SEQ ID NO: 629072 - DNA, 25 bp, Homo sapien
caggatgcactggatcaggtggtgg

SEQ ID NO: 629073 - DNA, 25 bp, Homo sapien
tgttccggtgtatggcgggcactca

SEQ ID NO: 629074 - DNA, 25 bp, Homo sapien
gacaccctccaagtgttccggtgta

SEQ ID NO: 629075 - DNA, 25 bp, Homo sapien
gttccggtgtatggcgggcactcac

SEQ ID NO: 629076 - DNA, 25 bp, Homo sapien
cctccaagtgttccggtgtatggcg

SEQ ID NO: 629077 - DNA, 25 bp, Homo sapien
ctcctgggacatatctggcctccgt

SEQ ID NO: 629078 - DNA, 25 bp, Homo sapien
gggactcctgggacttatctgatct

SEQ ID NO: 629079 - DNA, 25 bp, Homo sapien
cctgggacatatctggcctccgtgc

SEQ ID NO: 629080 - DNA, 25 bp, Homo sapien
ctgggacttatctgatctctgtgct

SEQ ID NO: 629081 - DNA, 25 bp, Homo sapien
ggccaggtataccaggttccggtgc

SEQ ID NO: 629082 - DNA, 25 bp, Homo sapien
gaagcagggactgcatgttctggtt

SEQ ID NO: 629083 - DNA, 25 bp, Homo sapien
catgttctggttggagtctgcgatc

SEQ ID NO: 629084 - DNA, 25 bp, Homo sapien
gcgatcgtggccaggtataccaggt

SEQ ID NO: 629085 - DNA, 25 bp, Homo sapien
gcccgtgctgatggcgtcactcagg

SEQ ID NO: 629086 - DNA, 25 bp, Homo sapien
tcaggctgccctgagagtgcaggcc

SEQ ID NO: 629087 - DNA, 25 bp, Homo sapien
cgttgccaatctggccctgcaggag

SEQ ID NO: 629088 - DNA, 25 bp, Homo sapien
tggctggagccgctctgagtcaggg

SEQ ID NO: 629089 - DNA, 25 bp, Homo sapien
cagcactattaatgattaagtgact

SEQ ID NO: 629090 - DNA, 25 bp, Homo sapien
gctatcaacagcactattaatgatt

SEQ ID NO: 629091 - DNA, 25 bp, Homo sapien
ttaagtgactaataaataagtggcc

SEQ ID NO: 629092 - DNA, 25 bp, Homo sapien
tgaaggtgaagacaccccaatttcc

SEQ ID NO: 629093 - DNA, 25 bp, Homo sapien
acgtagttgccgatggtgccttgcc

SEQ ID NO: 629094 - DNA, 25 bp, Homo sapien
cccagagatgctcatggaggtggtg

SEQ ID NO: 629095 - DNA, 25 bp, Homo sapien
ggcagcgtgttaggcgccgtctgct

SEQ ID NO: 629096 - DNA, 25 bp, Homo sapien
ggaggtggtgggcagcgtgttaggc

SEQ ID NO: 629097 - DNA, 25 bp, Homo sapien
ggagggccggtagggcgccatgggc

SEQ ID NO: 629098 - DNA, 25 bp, Homo sapien
cgccctgcgccgagctgtagtgcga

SEQ ID NO: 629099 - DNA, 25 bp, Homo sapien
ctgtagtgcgacgtggccgcctgct

SEQ ID NO: 629100 - DNA, 25 bp, Homo sapien
catcatggcgatggacgactggccc

SEQ ID NO: 629101 - DNA, 25 bp, Homo sapien
gtggctgtactgctcgccatagtac

SEQ ID NO: 629102 - DNA, 25 bp, Homo sapien
tgtactgctcgccatagtactcctc

SEQ ID NO: 629103 - DNA, 25 bp, Homo sapien
cgccatagtactcctcctggcccag

SEQ ID NO: 629104 - DNA, 25 bp, Homo sapien
gggtagtactgctggcccatgggct

SEQ ID NO: 629105 - DNA, 25 bp, Homo sapien
tgcgtggactcctcgaaggaccggt

SEQ ID NO: 629106 - DNA, 25 bp, Homo sapien
tctgctccgtgtaggatgactgctg

SEQ ID NO: 629107 - DNA, 25 bp, Homo sapien
tgctggtaggcgtaatcgccatggc

SEQ ID NO: 629108 - DNA, 25 bp, Homo sapien
tcgaaggaccggtcgtagctctgct

SEQ ID NO: 629109 - DNA, 25 bp, Homo sapien
cccagcacgcagccgtgctccttac

SEQ ID NO: 629110 - DNA, 25 bp, Homo sapien
agcccagcacgcagccgtgctcctt

SEQ ID NO: 629111 - DNA, 25 bp, Homo sapien
gctcgagcccagcacgcagccgtgc

SEQ ID NO: 629112 - DNA, 25 bp, Homo sapien
tcgagcccagcacgcagccgtgctc

SEQ ID NO: 629113 - DNA, 25 bp, Homo sapien
aagggtgcagcgtcttaactctgct

SEQ ID NO: 629114 - DNA, 25 bp, Homo sapien
ctaagggtgcagcgtcttaactctg

SEQ ID NO: 629115 - DNA, 25 bp, Homo sapien
taactctgctgcgtgtggcgcttac

SEQ ID NO: 629116 - DNA, 25 bp, Homo sapien
tcttaactctgctgcgtgtggcgct

SEQ ID NO: 629117 - DNA, 25 bp, Homo sapien
tatgtgcctacacttgcgtgcttta

SEQ ID NO: 629118 - DNA, 25 bp, Homo sapien
taactgacatttcaacgttgcaggc

SEQ ID NO: 629119 - DNA, 25 bp, Homo sapien
cattcgtagcgcacaccgtgatgtt

SEQ ID NO: 629120 - DNA, 25 bp, Homo sapien
caggtttacaaaggtgtaactgaca

SEQ ID NO: 629121 - DNA, 25 bp, Homo sapien
ttgtccattggctgacggtgtgagt

SEQ ID NO: 629122 - DNA, 25 bp, Homo sapien
gtgtttgtccattggctgacggtgt

SEQ ID NO: 629123 - DNA, 25 bp, Homo sapien
ttttggtgtttgtccattggctgac

SEQ ID NO: 629124 - DNA, 25 bp, Homo sapien
tggtgtttgtccattggctgacggt

SEQ ID NO: 629125 - DNA, 25 bp, Homo sapien
acgctggtcaccacctggcgagggc

SEQ ID NO: 629126 - DNA, 25 bp, Homo sapien
caccctgtcgtccactcctgggaca

SEQ ID NO: 629127 - DNA, 25 bp, Homo sapien
ggccacaccaccctgtcgtccactc

SEQ ID NO: 629128 - DNA, 25 bp, Homo sapien
acacgctggtcaccacctggcgagg

SEQ ID NO: 629129 - DNA, 25 bp, Homo sapien
cgctcaaagccgtgtcacataaaaa

SEQ ID NO: 629130 - DNA, 25 bp, Homo sapien
ggaacatgtgaacgacgctcaaagc

SEQ ID NO: 629131 - DNA, 25 bp, Homo sapien
aaacacagtgatccacacgaggacg

SEQ ID NO: 629132 - DNA, 25 bp, Homo sapien
cacacgaggacgcagccaaggcggc

SEQ ID NO: 629133 - DNA, 25 bp, Homo sapien
tcaggcgatctagtgggaactggca

SEQ ID NO: 629134 - DNA, 25 bp, Homo sapien
cccagtgggtgctcaggcgatctag

SEQ ID NO: 629135 - DNA, 25 bp, Homo sapien
ccagtgggtgctcaggcgatctagt

SEQ ID NO: 629136 - DNA, 25 bp, Homo sapien
gtgctcaggcgatctagtgggaact

SEQ ID NO: 629137 - DNA, 25 bp, Homo sapien
aagtatcttgagtcttgaacttcca

SEQ ID NO: 629138 - DNA, 25 bp, Homo sapien
ttctctatccaggaagtatcttgag

SEQ ID NO: 629139 - DNA, 25 bp, Homo sapien
tctatccaggaagtatcttgagtct

SEQ ID NO: 629140 - DNA, 25 bp, Homo sapien
ccaggaagtatcttgagtcttgaac

SEQ ID NO: 629141 - DNA, 25 bp, Homo sapien
tacagtgtgtgccagcgtgcccaga

SEQ ID NO: 629142 - DNA, 25 bp, Homo sapien
accctgctggtacccggcctgctgc

SEQ ID NO: 629143 - DNA, 25 bp, Homo sapien
tgggagtacgtctgctgctgcgcgg

SEQ ID NO: 629144 - DNA, 25 bp, Homo sapien
gctgctgggagtacgtctgctgctg

SEQ ID NO: 629145 - DNA, 25 bp, Homo sapien
cggcaccctgctggtacccggcctg

SEQ ID NO: 629146 - DNA, 25 bp, Homo sapien
gggtactgagcacgtacccatgtgt

SEQ ID NO: 629147 - DNA, 25 bp, Homo sapien
actgagcacgtacccatgtgtggca

SEQ ID NO: 629148 - DNA, 25 bp, Homo sapien
gtactgagcacgtacccatgtgtgg

SEQ ID NO: 629149 - DNA, 25 bp, Homo sapien
tgagcacgtacccatgtgtggcagg

SEQ ID NO: 629150 - DNA, 25 bp, Homo sapien
ggggccccgaggagcgtgctcgcct

SEQ ID NO: 629151 - DNA, 25 bp, Homo sapien
ggccccgaggagcgtgctcgcctct

SEQ ID NO: 629152 - DNA, 25 bp, Homo sapien
ctggggggccccgaggagcgtgctc

SEQ ID NO: 629153 - DNA, 25 bp, Homo sapien
cccgaggagcgtgctcgcctcttac

SEQ ID NO: 629154 - DNA, 25 bp, Homo sapien
actggctgctgtaacttgtcactga

SEQ ID NO: 629155 - DNA, 25 bp, Homo sapien
acttgtcactgaactaccacgggag

SEQ ID NO: 629156 - DNA, 25 bp, Homo sapien
ctccagaacccgctggccccagtca

SEQ ID NO: 629157 - DNA, 25 bp, Homo sapien
ccagaacccgctggccccagtcaca

SEQ ID NO: 629158 - DNA, 25 bp, Homo sapien
cccaccagcatggcgagggctgatg

SEQ ID NO: 629159 - DNA, 25 bp, Homo sapien
gcatggcgagggctgatgggctctc

SEQ ID NO: 629160 - DNA, 25 bp, Homo sapien
ccagcatggcgagggctgatgggct

SEQ ID NO: 629161 - DNA, 25 bp, Homo sapien
atggcgagggctgatgggctctctc

SEQ ID NO: 629162 - DNA, 25 bp, Homo sapien
tgctgctgggcagacggcgctgtct

SEQ ID NO: 629163 - DNA, 25 bp, Homo sapien
ggtagcttccgtactgctggccttg

SEQ ID NO: 629164 - DNA, 25 bp, Homo sapien
ctgcggtgctcggtagcttccgtac

SEQ ID NO: 629165 - DNA, 25 bp, Homo sapien
tgttcatagccgtagggccgctgct

SEQ ID NO: 629166 - DNA, 25 bp, Homo sapien
cggcggatgggcacatctggaaaca

SEQ ID NO: 629167 - DNA, 25 bp, Homo sapien
cacatctggaaacatccagaaagct

SEQ ID NO: 629168 - DNA, 25 bp, Homo sapien
ttatgtctcgacaggcgcggcggat

SEQ ID NO: 629169 - DNA, 25 bp, Homo sapien
tcttcattatgtctcgacaggcgcg

SEQ ID NO: 629170 - DNA, 25 bp, Homo sapien
ccacaggggaagacaacggatcatc

SEQ ID NO: 629171 - DNA, 25 bp, Homo sapien
acaacggatcatcatctgcatgcct

SEQ ID NO: 629172 - DNA, 25 bp, Homo sapien
caggggaagacaacggatcatcatc

SEQ ID NO: 629173 - DNA, 25 bp, Homo sapien
agacaacggatcatcatctgcatgc

SEQ ID NO: 629174 - DNA, 25 bp, Homo sapien
tgggcagcaaaacggagcatcggac

SEQ ID NO: 629175 - DNA, 25 bp, Homo sapien
gaagagaaactagagagcctgtgcc

SEQ ID NO: 629176 - DNA, 25 bp, Homo sapien
ccaggtgtgatagtacgtgcttgta

SEQ ID NO: 629177 - DNA, 25 bp, Homo sapien
agaaactagagagcctgtgccccac

SEQ ID NO: 629178 - DNA, 25 bp, Homo sapien
ggatgaacacgctaccacaagggct

SEQ ID NO: 629179 - DNA, 25 bp, Homo sapien
ggcactgggcgaacaggtaaccaac

SEQ ID NO: 629180 - DNA, 25 bp, Homo sapien
cgcttcacatgcagacgtggcactg

SEQ ID NO: 629181 - DNA, 25 bp, Homo sapien
aacatgtcacaattcaccagagctg

SEQ ID NO: 629182 - DNA, 25 bp, Homo sapien
cagtggtgtgcgctcggcgtcatac

SEQ ID NO: 629183 - DNA, 25 bp, Homo sapien
ccagtggtgtgcgctcggcgtcata

SEQ ID NO: 629184 - DNA, 25 bp, Homo sapien
tcacgccagtggtgtgcgctcggcg

SEQ ID NO: 629185 - DNA, 25 bp, Homo sapien
cgccagtggtgtgcgctcggcgtca

SEQ ID NO: 629186 - DNA, 25 bp, Homo sapien
aaagtatcacaccaccaagcgctgt

SEQ ID NO: 629187 - DNA, 25 bp, Homo sapien
taccgctggccctgggttaggcaat

SEQ ID NO: 629188 - DNA, 25 bp, Homo sapien
gcaatttgtccacggcccttaggga

SEQ ID NO: 629189 - DNA, 25 bp, Homo sapien
cactacaacactgcatgaggaggaa

SEQ ID NO: 629190 - DNA, 25 bp, Homo sapien
tgtgactttcagacatccctaaaag

SEQ ID NO: 629191 - DNA, 25 bp, Homo sapien
gcaagtgtgctgtctttaatgttca

SEQ ID NO: 629192 - DNA, 25 bp, Homo sapien
gatcaaatgtccatgctacttgtta

SEQ ID NO: 629193 - DNA, 25 bp, Homo sapien
taggcctcatatatcaagcattgga

SEQ ID NO: 629194 - DNA, 25 bp, Homo sapien
tgcgtgacatccgtctcctaggaga

SEQ ID NO: 629195 - DNA, 25 bp, Homo sapien
gaacacaatcaagggagatgactcc

SEQ ID NO: 629196 - DNA, 25 bp, Homo sapien
taaattctaaagcacccgactctgg

SEQ ID NO: 629197 - DNA, 25 bp, Homo sapien
caggactggtattcaacacaggcaa

SEQ ID NO: 629198 - DNA, 25 bp, Homo sapien
cataaagactgttggcatgagttct

SEQ ID NO: 629199 - DNA, 25 bp, Homo sapien
gaaaacagtcgtcttctttgtacag

SEQ ID NO: 629200 - DNA, 25 bp, Homo sapien
aatttatacgtcaaactccgactga

SEQ ID NO: 629201 - DNA, 25 bp, Homo sapien
tcagcacttctgaaaactggccatc

SEQ ID NO: 629202 - DNA, 25 bp, Homo sapien
cgggagccgaggtgacgatctacct

SEQ ID NO: 629203 - DNA, 25 bp, Homo sapien
aatccggtgcggacgcacgcgaact

SEQ ID NO: 629204 - DNA, 25 bp, Homo sapien
gacgcacgcgaactctgcccgggag

SEQ ID NO: 629205 - DNA, 25 bp, Homo sapien
cctggtctcggtaataagtatttgc

SEQ ID NO: 629206 - DNA, 25 bp, Homo sapien
gtctgacgaggacaccgccgttgcc

SEQ ID NO: 629207 - DNA, 25 bp, Homo sapien
gaacctcccgggtctgacgaggaca

SEQ ID NO: 629208 - DNA, 25 bp, Homo sapien
cgggtctgacgaggacaccgccgtt

SEQ ID NO: 629209 - DNA, 25 bp, Homo sapien
cccgggtctgacgaggacaccgccg

SEQ ID NO: 629210 - DNA, 25 bp, Homo sapien
gagggatgcggagcgctcagctgca

SEQ ID NO: 629211 - DNA, 25 bp, Homo sapien
gaagcaggagcaacggcaggaggga

SEQ ID NO: 629212 - DNA, 25 bp, Homo sapien
acggcaggagggatgcggagcgctc

SEQ ID NO: 629213 - DNA, 25 bp, Homo sapien
ctcgctgcccgagcacaaggacagc

SEQ ID NO: 629214 - DNA, 25 bp, Homo sapien
cttttggctccggaagcccaaggct

SEQ ID NO: 629215 - DNA, 25 bp, Homo sapien
gtcacttccggagcgtcgcaagcgg

SEQ ID NO: 629216 - DNA, 25 bp, Homo sapien
agtgcgcaggtgcagaaaacacgcc

SEQ ID NO: 629217 - DNA, 25 bp, Homo sapien
ggctcgggaaagcacgtcacttccg

SEQ ID NO: 629218 - DNA, 25 bp, Homo sapien
caagacttctgaccccaaaacgcgg

SEQ ID NO: 629219 - DNA, 25 bp, Homo sapien
acacggcacccatcccgtgacagag

SEQ ID NO: 629220 - DNA, 25 bp, Homo sapien
tcccgtgacagagcaccaccggggt

SEQ ID NO: 629221 - DNA, 25 bp, Homo sapien
tggctgacaagacttctgaccccaa

SEQ ID NO: 629222 - DNA, 25 bp, Homo sapien
aagcatcagccaccacgccctggcc

SEQ ID NO: 629223 - DNA, 25 bp, Homo sapien
acaagcatcagccaccacgccctgg

SEQ ID NO: 629224 - DNA, 25 bp, Homo sapien
ggttggagagcaatggtgggatctt

SEQ ID NO: 629225 - DNA, 25 bp, Homo sapien
cttttttatttgaggcagagtttca

SEQ ID NO: 629226 - DNA, 25 bp, Homo sapien
ctccgtatctgtggggtcaacaaac

SEQ ID NO: 629227 - DNA, 25 bp, Homo sapien
agccttgacttcctgtacttaagag

SEQ ID NO: 629228 - DNA, 25 bp, Homo sapien
gccttgacttcctgtacttaagaga

SEQ ID NO: 629229 - DNA, 25 bp, Homo sapien
tagagaaaatggtgtcccctccaga

SEQ ID NO: 629230 - DNA, 25 bp, Homo sapien
gaatcacttaagagtcagtcgccga

SEQ ID NO: 629231 - DNA, 25 bp, Homo sapien
taaagaccaagccacgatgagaagc

SEQ ID NO: 629232 - DNA, 25 bp, Homo sapien
gatgagaagcctggacctttcggcc

SEQ ID NO: 629233 - DNA, 25 bp, Homo sapien
acacggtcctcaatcttgctgagaa

SEQ ID NO: 629234 - DNA, 25 bp, Homo sapien
ccctgaaacacggtcctcaatcttg

SEQ ID NO: 629235 - DNA, 25 bp, Homo sapien
gagaagcccgctgtggcagtagccg

SEQ ID NO: 629236 - DNA, 25 bp, Homo sapien
gcagtagccggctgggcttcaggcc

SEQ ID NO: 629237 - DNA, 25 bp, Homo sapien
ttccccgggagttcctgatgcttgg

SEQ ID NO: 629238 - DNA, 25 bp, Homo sapien
aggtccgcacggccgaccgagagca

SEQ ID NO: 629239 - DNA, 25 bp, Homo sapien
cttcttccccgggagttcctgatgc

SEQ ID NO: 629240 - DNA, 25 bp, Homo sapien
tggcgaggtccgcacggccgaccga

SEQ ID NO: 629241 - DNA, 25 bp, Homo sapien
gcaagctgctctaactccaggagtc

SEQ ID NO: 629242 - DNA, 25 bp, Homo sapien
caccctgtgccttctgaggaggaga

SEQ ID NO: 629243 - DNA, 25 bp, Homo sapien
cgtgggatttagcacgcaggcctgc

SEQ ID NO: 629244 - DNA, 25 bp, Homo sapien
aaaatgagcagcctgtatcacggct

SEQ ID NO: 629245 - DNA, 25 bp, Homo sapien
ttgaatttattagagacaattcatg

SEQ ID NO: 629246 - DNA, 25 bp, Homo sapien
cttgaatttattagagacaattcat

SEQ ID NO: 629247 - DNA, 25 bp, Homo sapien
agtaatgcttatctggagcccctcc

SEQ ID NO: 629248 - DNA, 25 bp, Homo sapien
aaacgaagggagtcataaacgtgca

SEQ ID NO: 629249 - DNA, 25 bp, Homo sapien
gctgtttgtcccagtaatgcttatc

SEQ ID NO: 629250 - DNA, 25 bp, Homo sapien
attcagcaggaaacgaagggagtca

SEQ ID NO: 629251 - DNA, 25 bp, Homo sapien
caagcctgtgctaacgcttcagcta

SEQ ID NO: 629252 - DNA, 25 bp, Homo sapien
gggaggagacaagcctgtgctaacg

SEQ ID NO: 629253 - DNA, 25 bp, Homo sapien
ctgtgctaacgcttcagctatttga

SEQ ID NO: 629254 - DNA, 25 bp, Homo sapien
gagacaagcctgtgctaacgcttca

SEQ ID NO: 629255 - DNA, 25 bp, Homo sapien
gctgttctgtaggtcactaaggtag

SEQ ID NO: 629256 - DNA, 25 bp, Homo sapien
actgtgcccggctaggaaagctgtt

SEQ ID NO: 629257 - DNA, 25 bp, Homo sapien
tgtaggtcactaaggtaggtgcaat

SEQ ID NO: 629258 - DNA, 25 bp, Homo sapien
gcccggctaggaaagctgttctgta

SEQ ID NO: 629259 - DNA, 25 bp, Homo sapien
ccacagacaagcactctccgatagt

SEQ ID NO: 629260 - DNA, 25 bp, Homo sapien
gacaagcactctccgatagtccaca

SEQ ID NO: 629261 - DNA, 25 bp, Homo sapien
tctccgatagtccacaaagtacctt

SEQ ID NO: 629262 - DNA, 25 bp, Homo sapien
gcactctccgatagtccacaaagta

SEQ ID NO: 629263 - DNA, 25 bp, Homo sapien
cctccaaactccttgcggggctcac

SEQ ID NO: 629264 - DNA, 25 bp, Homo sapien
gcctgcccatacatcaggtttttag

SEQ ID NO: 629265 - DNA, 25 bp, Homo sapien
tgcccatacatcaggtttttagttc

SEQ ID NO: 629266 - DNA, 25 bp, Homo sapien
aaatgcacatgcagtctcggggccc

SEQ ID NO: 629267 - DNA, 25 bp, Homo sapien
tcaaatgcacatgcagtctcggggc

SEQ ID NO: 629268 - DNA, 25 bp, Homo sapien
cactgcgcctagctgggttttaaaa

SEQ ID NO: 629269 - DNA, 25 bp, Homo sapien
tgatatccatacatcagggtttttt

SEQ ID NO: 629270 - DNA, 25 bp, Homo sapien
aaaatgatatccatacatcagggtt

SEQ ID NO: 629271 - DNA, 25 bp, Homo sapien
tataaaaatgatatccatacatcag

SEQ ID NO: 629272 - DNA, 25 bp, Homo sapien
ggtgcagcagaagttacaaaaccag

SEQ ID NO: 629273 - DNA, 25 bp, Homo sapien
cgctatgcgtctatgctgagtgtga

SEQ ID NO: 629274 - DNA, 25 bp, Homo sapien
tttcacgcgaccgacatgtcagctt

SEQ ID NO: 629275 - DNA, 25 bp, Homo sapien
gtgttacgacaaccatggcctattg

SEQ ID NO: 629276 - DNA, 25 bp, Homo sapien
aaagcaagaacaagaatctcagtcc

SEQ ID NO: 629277 - DNA, 25 bp, Homo sapien
taaagcaagaacaagaatctcagtc

SEQ ID NO: 629278 - DNA, 25 bp, Homo sapien
ctaaagcaagaacaagaatctcagt

SEQ ID NO: 629279 - DNA, 25 bp, Homo sapien
cactgcgcccgaagcagtttttact

SEQ ID NO: 629280 - DNA, 25 bp, Homo sapien
agaggacggcgccactgcgcccgaa

SEQ ID NO: 629281 - DNA, 25 bp, Homo sapien
gacgacagggacttgacttgctggt

SEQ ID NO: 629282 - DNA, 25 bp, Homo sapien
ctgaaaccctggtaccgcgacagga

SEQ ID NO: 629283 - DNA, 25 bp, Homo sapien
aattcagctcgcgaaggagacgcag

SEQ ID NO: 629284 - DNA, 25 bp, Homo sapien
tttcctagctgtgggcatcaagcca

SEQ ID NO: 629285 - DNA, 25 bp, Homo sapien
catctaagagacgagtgaattcagc

SEQ ID NO: 629286 - DNA, 25 bp, Homo sapien
tgtgagaccctggtacaaatgcccg

SEQ ID NO: 629287 - DNA, 25 bp, Homo sapien
cgcaagacaggtcggccacaactct

SEQ ID NO: 629288 - DNA, 25 bp, Homo sapien
cccacgcaagacaggtcggccacaa

SEQ ID NO: 629289 - DNA, 25 bp, Homo sapien
cacgcaagacaggtcggccacaact

SEQ ID NO: 629290 - DNA, 25 bp, Homo sapien
tcatctcccacgcaagacaggtcgg

SEQ ID NO: 629291 - DNA, 25 bp, Homo sapien
tggagaactcgctgctgtcctggct

SEQ ID NO: 629292 - DNA, 25 bp, Homo sapien
tcctggctgtccaggggtacaggtc

SEQ ID NO: 629293 - DNA, 25 bp, Homo sapien
tgggccaccgtcttgagctccaggt

SEQ ID NO: 629294 - DNA, 25 bp, Homo sapien
caggaagaagcggttgcctttccct

SEQ ID NO: 629295 - DNA, 25 bp, Homo sapien
ttcgtagtggacgatcccgacgtgg

SEQ ID NO: 629296 - DNA, 25 bp, Homo sapien
ccacggcgggtctggcgtttgaaat

SEQ ID NO: 629297 - DNA, 25 bp, Homo sapien
ctgctatttgtaggtggccttcgta

SEQ ID NO: 629298 - DNA, 25 bp, Homo sapien
tggtgaacgggtaggaagccacggc

SEQ ID NO: 629299 - DNA, 25 bp, Homo sapien
ctttgggagaattctggaagttcta

SEQ ID NO: 629300 - DNA, 25 bp, Homo sapien
tttgggagaattctggaagttctac

SEQ ID NO: 629301 - DNA, 25 bp, Homo sapien
ctgattttcatagagaacaggctga

SEQ ID NO: 629302 - DNA, 25 bp, Homo sapien
gattttcatagagaacaggctgatg

SEQ ID NO: 629303 - DNA, 25 bp, Homo sapien
aacaggctgatgaaaattgtttaaa

SEQ ID NO: 629304 - DNA, 25 bp, Homo sapien
atagagaacaggctgatgaaaattg

SEQ ID NO: 629305 - DNA, 25 bp, Homo sapien
ttttattctctcaaacggcacaagg

SEQ ID NO: 629306 - DNA, 25 bp, Homo sapien
gcacaaggaaagcttttaagtcacg

SEQ ID NO: 629307 - DNA, 25 bp, Homo sapien
tactgtcctcggctggaatttcaat

SEQ ID NO: 629308 - DNA, 25 bp, Homo sapien
tgctgagcttccacagatgagaggg

SEQ ID NO: 629309 - DNA, 25 bp, Homo sapien
gagaaagatccaccacgaacaagag

SEQ ID NO: 629310 - DNA, 25 bp, Homo sapien
taaatcgtcaacttgagtccacggc

SEQ ID NO: 629311 - DNA, 25 bp, Homo sapien
tctggtgggcgcctcgtatgatgcc

SEQ ID NO: 629312 - DNA, 25 bp, Homo sapien
cgaacaagagaaagcggcagcgctc

SEQ ID NO: 629313 - DNA, 25 bp, Homo sapien
gggcacggaatgcttcccaacatga

SEQ ID NO: 629314 - DNA, 25 bp, Homo sapien
tgcattcaaaaccaccgaattcaca

SEQ ID NO: 629315 - DNA, 25 bp, Homo sapien
gtccacaaggcactttatgcattca

SEQ ID NO: 629316 - DNA, 25 bp, Homo sapien
tcacacccaggtttgctcagacaga

SEQ ID NO: 629317 - DNA, 25 bp, Homo sapien
agcaactggctcatcagtcggtgca

SEQ ID NO: 629318 - DNA, 25 bp, Homo sapien
aactggctcatcagtcggtgcaggc

SEQ ID NO: 629319 - DNA, 25 bp, Homo sapien
tggctcatcagtcggtgcaggctga

SEQ ID NO: 629320 - DNA, 25 bp, Homo sapien
ctcatcagtcggtgcaggctgacag

SEQ ID NO: 629321 - DNA, 25 bp, Homo sapien
ggcagggccaccccgttatgggcac

SEQ ID NO: 629322 - DNA, 25 bp, Homo sapien
gcagggccaccccgttatgggcacc

SEQ ID NO: 629323 - DNA, 25 bp, Homo sapien
aagccatggaagcacgacgggcact

SEQ ID NO: 629324 - DNA, 25 bp, Homo sapien
cagccccagtgtggatccagaggtc

SEQ ID NO: 629325 - DNA, 25 bp, Homo sapien
gctgctggacaacgggccagacgca

SEQ ID NO: 629326 - DNA, 25 bp, Homo sapien
tgctgagctcatccgagagtccacg

SEQ ID NO: 629327 - DNA, 25 bp, Homo sapien
ccaccccttgcgcagcagtgaggcc

SEQ ID NO: 629328 - DNA, 25 bp, Homo sapien
cttctcagacggctgatggagaaaa

SEQ ID NO: 629329 - DNA, 25 bp, Homo sapien
gacggctgatggagaaaagctcaca

SEQ ID NO: 629330 - DNA, 25 bp, Homo sapien
gtgaggccccccgagacactggtgc

SEQ ID NO: 629331 - DNA, 25 bp, Homo sapien
cacgcagccaggtcggatattgggt

SEQ ID NO: 629332 - DNA, 25 bp, Homo sapien
cattcagtcgtgaagcctgaggctt

SEQ ID NO: 629333 - DNA, 25 bp, Homo sapien
tattgggtgcattcagtcgtgaagc

SEQ ID NO: 629334 - DNA, 25 bp, Homo sapien
cagccagaaacacgcagccaggtcg

SEQ ID NO: 629335 - DNA, 25 bp, Homo sapien
catgggcctggcttggatgcatcag

SEQ ID NO: 629336 - DNA, 25 bp, Homo sapien
cagtctcgacggtcaaatgcagggc

SEQ ID NO: 629337 - DNA, 25 bp, Homo sapien
taactgcctggcgtagcacaagggt

SEQ ID NO: 629338 - DNA, 25 bp, Homo sapien
aaccacagacaggaaaggcgctgct

SEQ ID NO: 629339 - DNA, 25 bp, Homo sapien
gccaccgtgcccagaatgttctgtt

SEQ ID NO: 629340 - DNA, 25 bp, Homo sapien
ccaccgtgcccagaatgttctgttt

SEQ ID NO: 629341 - DNA, 25 bp, Homo sapien
accgtgcccagaatgttctgttttt

SEQ ID NO: 629342 - DNA, 25 bp, Homo sapien
tgccgtctctcctccaagggctggg

SEQ ID NO: 629343 - DNA, 25 bp, Homo sapien
tgggggtccccttctgatcatcctt

SEQ ID NO: 629344 - DNA, 25 bp, Homo sapien
ctgaggctgccgtctctcctccaag

SEQ ID NO: 629345 - DNA, 25 bp, Homo sapien
ttctgatcatccttctctgcttctt

SEQ ID NO: 629346 - DNA, 25 bp, Homo sapien
ctagctgcagatttgatgtgagatc

SEQ ID NO: 629347 - DNA, 25 bp, Homo sapien
tttctaggatagaaggacctttgaa

SEQ ID NO: 629348 - DNA, 25 bp, Homo sapien
gaaaaagcaaatagatgcaaaaccc

SEQ ID NO: 629349 - DNA, 25 bp, Homo sapien
aacggaattgctcctgaaagcccag

SEQ ID NO: 629350 - DNA, 25 bp, Homo sapien
gggtcgagccacaaggcatcttgag

SEQ ID NO: 629351 - DNA, 25 bp, Homo sapien
ctgcaagagcatcaagatgaaagcc

SEQ ID NO: 629352 - DNA, 25 bp, Homo sapien
tgaaagccagggataattaacgccg

SEQ ID NO: 629353 - DNA, 25 bp, Homo sapien
gcatcttgagcctcccctgcaagag

SEQ ID NO: 629354 - DNA, 25 bp, Homo sapien
gctgtcagcttttagaacgcgatgg

SEQ ID NO: 629355 - DNA, 25 bp, Homo sapien
gaagccaagtgtagctttaccctac

SEQ ID NO: 629356 - DNA, 25 bp, Homo sapien
gaaagttctgggcaaccttcgtggc

SEQ ID NO: 629357 - DNA, 25 bp, Homo sapien
ggtatgtgaatcatatatcccattt

SEQ ID NO: 629358 - DNA, 25 bp, Homo sapien
tgagacgctccggttgcctcagcat

SEQ ID NO: 629359 - DNA, 25 bp, Homo sapien
aggtccccggcacgtgtgttcactg

SEQ ID NO: 629360 - DNA, 25 bp, Homo sapien
tgttcactgatgagacgctccggtt

SEQ ID NO: 629361 - DNA, 25 bp, Homo sapien
tgcagcctctttagcggcaccagga

SEQ ID NO: 629362 - DNA, 25 bp, Homo sapien
attctaacaccaacgggtgtgcagc

SEQ ID NO: 629363 - DNA, 25 bp, Homo sapien
aattctaacaccaacgggtgtgcag

SEQ ID NO: 629364 - DNA, 25 bp, Homo sapien
ggtgctgctagagatgtccccagat

SEQ ID NO: 629365 - DNA, 25 bp, Homo sapien
gccagtcctggcagtaagaatatga

SEQ ID NO: 629366 - DNA, 25 bp, Homo sapien
cggcaaagcccaggagggatgtttc

SEQ ID NO: 629367 - DNA, 25 bp, Homo sapien
gaattattcgaacagcaggcagggt

SEQ ID NO: 629368 - DNA, 25 bp, Homo sapien
aggcctgtcttgcaccccatgggtt

SEQ ID NO: 629369 - DNA, 25 bp, Homo sapien
gaaagaagaaacgatcaggtagccc

SEQ ID NO: 629370 - DNA, 25 bp, Homo sapien
ggtggtagttcccatgcaggcctgt

SEQ ID NO: 629371 - DNA, 25 bp, Homo sapien
tgtgggccatcaggtcattagggca

SEQ ID NO: 629372 - DNA, 25 bp, Homo sapien
ggcctgcacagtactcacaacgggc

SEQ ID NO: 629373 - DNA, 25 bp, Homo sapien
agaccggcctgcacagtactcacaa

SEQ ID NO: 629374 - DNA, 25 bp, Homo sapien
atggagaccggcctgcacagtactc

SEQ ID NO: 629375 - DNA, 25 bp, Homo sapien
gcagccagatggagaccggcctgca

SEQ ID NO: 629376 - DNA, 25 bp, Homo sapien
ttagatttaacttgctgcgggagcc

SEQ ID NO: 629377 - DNA, 25 bp, Homo sapien
caaagtttaaatatgcctgaggagc

SEQ ID NO: 629378 - DNA, 25 bp, Homo sapien
tttcactgtgcggaggacctggtaa

SEQ ID NO: 629379 - DNA, 25 bp, Homo sapien
gtttcagcagttgcacacagccggc

SEQ ID NO: 629380 - DNA, 25 bp, Homo sapien
gatcaaacagggcttggcttccagg

SEQ ID NO: 629381 - DNA, 25 bp, Homo sapien
cccaggcctttagagaggacattct

SEQ ID NO: 629382 - DNA, 25 bp, Homo sapien
tccagtctcctctgcgacgtgacag

SEQ ID NO: 629383 - DNA, 25 bp, Homo sapien
caggaacgccgggtgccttggcatt

SEQ ID NO: 629384 - DNA, 25 bp, Homo sapien
gatctttactaggtcacgaggccaa

SEQ ID NO: 629385 - DNA, 25 bp, Homo sapien
tcaccagtgggtggatttcatgacc

SEQ ID NO: 629386 - DNA, 25 bp, Homo sapien
gtttgcaacagccaatcaagtgggt

SEQ ID NO: 629387 - DNA, 25 bp, Homo sapien
caagcaggcactccaagcataggga

SEQ ID NO: 629388 - DNA, 25 bp, Homo sapien
cactagagacgtgccgggaccagga

SEQ ID NO: 629389 - DNA, 25 bp, Homo sapien
gcgccactagagacgtgccgggacc

SEQ ID NO: 629390 - DNA, 25 bp, Homo sapien
tggtgggccactgtcagtcggcgcc

SEQ ID NO: 629391 - DNA, 25 bp, Homo sapien
gtcagtcggcgccactagagacgtg

SEQ ID NO: 629392 - DNA, 25 bp, Homo sapien
ctggacgcgggtccctcggttgccg

SEQ ID NO: 629393 - DNA, 25 bp, Homo sapien
gccggccgagctcactgccgccccg

SEQ ID NO: 629394 - DNA, 25 bp, Homo sapien
gacccactgacaccgaggcggaagt

SEQ ID NO: 629395 - DNA, 25 bp, Homo sapien
gtaggcccgcgacccactgacaccg

SEQ ID NO: 629396 - DNA, 25 bp, Homo sapien
aattttggcatacttagcttccaga

SEQ ID NO: 629397 - DNA, 25 bp, Homo sapien
ttttggcatacttagcttccagaag

SEQ ID NO: 629398 - DNA, 25 bp, Homo sapien
ttggcatacttagcttccagaagtt

SEQ ID NO: 629399 - DNA, 25 bp, Homo sapien
aaaattttggcatacttagcttcca

SEQ ID NO: 629400 - DNA, 25 bp, Homo sapien
gtgctcttctactgaatcatcgtat

SEQ ID NO: 629401 - DNA, 25 bp, Homo sapien
tggaaaaatccaatagacactgaag

SEQ ID NO: 629402 - DNA, 25 bp, Homo sapien
tccacatctacagtgtaaggaattt

SEQ ID NO: 629403 - DNA, 25 bp, Homo sapien
actgcccctgacatgtgctcttcta

SEQ ID NO: 629404 - DNA, 25 bp, Homo sapien
gcatcaaagaattcttcctctccgt

SEQ ID NO: 629405 - DNA, 25 bp, Homo sapien
caaagaattcttcctctccgttcat

SEQ ID NO: 629406 - DNA, 25 bp, Homo sapien
ctgtgacggcatcaaagaattcttc

SEQ ID NO: 629407 - DNA, 25 bp, Homo sapien
gtgacggcatcaaagaattcttcct

SEQ ID NO: 629408 - DNA, 25 bp, Homo sapien
cagggacgttcacccttccagtacg

SEQ ID NO: 629409 - DNA, 25 bp, Homo sapien
tccagtacgtccccagttggttctc

SEQ ID NO: 629410 - DNA, 25 bp, Homo sapien
aatccagggacgttcacccttccag

SEQ ID NO: 629411 - DNA, 25 bp, Homo sapien
cagtacgtccccagttggttctctt

SEQ ID NO: 629412 - DNA, 25 bp, Homo sapien
gccactttaaaccatcgtgcgaaag

SEQ ID NO: 629413 - DNA, 25 bp, Homo sapien
caaatgaaaatatccgcaccccagg

SEQ ID NO: 629414 - DNA, 25 bp, Homo sapien
ccgtgtttgggatcgtgaacgctca

SEQ ID NO: 629415 - DNA, 25 bp, Homo sapien
gaagatggctatctcaggagacaaa

SEQ ID NO: 629416 - DNA, 25 bp, Homo sapien
ccatagagaccctgacagatccttg

SEQ ID NO: 629417 - DNA, 25 bp, Homo sapien
gacagatccttgagcggcagtaacc

SEQ ID NO: 629418 - DNA, 25 bp, Homo sapien
ggcagtaaccgcagaagtgcttcta

SEQ ID NO: 629419 - DNA, 25 bp, Homo sapien
actggaggtgccaacggagccatcg

SEQ ID NO: 629420 - DNA, 25 bp, Homo sapien
ggtgggccacttctatcggattcaa

SEQ ID NO: 629421 - DNA, 25 bp, Homo sapien
ccaaggctgcgatgcgcccgttgtg

SEQ ID NO: 629422 - DNA, 25 bp, Homo sapien
tctgaaacacgcctgctgacagtgt

SEQ ID NO: 629423 - DNA, 25 bp, Homo sapien
cggattcaaacccatcccaaggctg

SEQ ID NO: 629424 - DNA, 25 bp, Homo sapien
ctgtgcgagacaagaaaatggtcat

SEQ ID NO: 629425 - DNA, 25 bp, Homo sapien
aattccccagaagagttatcagaat

SEQ ID NO: 629426 - DNA, 25 bp, Homo sapien
ccccagaagagttatcagaatcaaa

SEQ ID NO: 629427 - DNA, 25 bp, Homo sapien
ttccccagaagagttatcagaatca

SEQ ID NO: 629428 - DNA, 25 bp, Homo sapien
ccagaagagttatcagaatcaaagc

SEQ ID NO: 629429 - DNA, 25 bp, Homo sapien
taagtcaatcattcccgtgactttc

SEQ ID NO: 629430 - DNA, 25 bp, Homo sapien
tctgaattccgttctcttgagaggg

SEQ ID NO: 629431 - DNA, 25 bp, Homo sapien
tttttgctggtgtctaagtcaatca

SEQ ID NO: 629432 - DNA, 25 bp, Homo sapien
gtgtttctgaattccgttctcttga

SEQ ID NO: 629433 - DNA, 25 bp, Homo sapien
gacctccagagtgatgaaagcacga

SEQ ID NO: 629434 - DNA, 25 bp, Homo sapien
gggtcagggcacactactggtgtca

SEQ ID NO: 629435 - DNA, 25 bp, Homo sapien
gacctgaattaaaagctgttccgcc

SEQ ID NO: 629436 - DNA, 25 bp, Homo sapien
gaaaggacatggcagctatgaggca

SEQ ID NO: 629437 - DNA, 25 bp, Homo sapien
cttcaggatggtccacacgctgaag

SEQ ID NO: 629438 - DNA, 25 bp, Homo sapien
cgctgaagtcgcttctgctgaacat

SEQ ID NO: 629439 - DNA, 25 bp, Homo sapien
tggtccacacgctgaagtcgcttct

SEQ ID NO: 629440 - DNA, 25 bp, Homo sapien
cacacgctgaagtcgcttctgctga

SEQ ID NO: 629441 - DNA, 25 bp, Homo sapien
tataccctgaagacaatgacaagtg

SEQ ID NO: 629442 - DNA, 25 bp, Homo sapien
tgagtgagtcacaactgcgtgccgg

SEQ ID NO: 629443 - DNA, 25 bp, Homo sapien
aaaagagacgcagacatgaggccgc

SEQ ID NO: 629444 - DNA, 25 bp, Homo sapien
tctccctggacaagtagatgatgcc

SEQ ID NO: 629445 - DNA, 25 bp, Homo sapien
gctcagaggctcgttgaaggcgatt

SEQ ID NO: 629446 - DNA, 25 bp, Homo sapien
tgatccgctgcaagaagctcagagg

SEQ ID NO: 629447 - DNA, 25 bp, Homo sapien
tccatgtactccgtgatccgctgca

SEQ ID NO: 629448 - DNA, 25 bp, Homo sapien
ggatgaggtacacgtgctccatgta

SEQ ID NO: 629449 - DNA, 25 bp, Homo sapien
gattaattcatacgtttctcccaag

SEQ ID NO: 629450 - DNA, 25 bp, Homo sapien
gattaaatggtttgccggtcctctc

SEQ ID NO: 629451 - DNA, 25 bp, Homo sapien
tctcccaagagtggattaaatggtt

SEQ ID NO: 629452 - DNA, 25 bp, Homo sapien
ggaagccacagccgaaacagcaaaa

SEQ ID NO: 629453 - DNA, 25 bp, Homo sapien
tcaggaaaggacttggtccacgtcc

SEQ ID NO: 629454 - DNA, 25 bp, Homo sapien
gaagtgaactcatgacagacgacgt

SEQ ID NO: 629455 - DNA, 25 bp, Homo sapien
gacactggcaaggacgatctggaag

SEQ ID NO: 629456 - DNA, 25 bp, Homo sapien
tctcggcgttgcgaaggtgcatagc

SEQ ID NO: 629457 - DNA, 25 bp, Homo sapien
gacatcgcacttggcctaatgttgg

SEQ ID NO: 629458 - DNA, 25 bp, Homo sapien
acatgacatcgcacttggcctaatg

SEQ ID NO: 629459 - DNA, 25 bp, Homo sapien
caaacacgacatcgcacttggccta

SEQ ID NO: 629460 - DNA, 25 bp, Homo sapien
caaacatgacatcgcacttggccta

SEQ ID NO: 629461 - DNA, 25 bp, Homo sapien
gcagctcagacatcatgtggagccc

SEQ ID NO: 629462 - DNA, 25 bp, Homo sapien
gccacaacatgtggcggaaacaccc

SEQ ID NO: 629463 - DNA, 25 bp, Homo sapien
agacacattaatggcagcaaaataa

SEQ ID NO: 629464 - DNA, 25 bp, Homo sapien
tgacatcgcactcggcctaacggca

SEQ ID NO: 629465 - DNA, 25 bp, Homo sapien
gactgacctgttccgatataaatct

SEQ ID NO: 629466 - DNA, 25 bp, Homo sapien
gaagtcatggttgagaccttccgag

SEQ ID NO: 629467 - DNA, 25 bp, Homo sapien
cctgttccgatataaatctgaatcc

SEQ ID NO: 629468 - DNA, 25 bp, Homo sapien
cttccgagtggaacgcactgatggg

SEQ ID NO: 629469 - DNA, 25 bp, Homo sapien
tagcggccggcatttgttggagact

SEQ ID NO: 629470 - DNA, 25 bp, Homo sapien
ttggagacttgtgttttgctctgag

SEQ ID NO: 629471 - DNA, 25 bp, Homo sapien
ttagcggccggcatttgttggagac

SEQ ID NO: 629472 - DNA, 25 bp, Homo sapien
ttgttggagacttgtgttttgctct

SEQ ID NO: 629473 - DNA, 25 bp, Homo sapien
ggacctgctgcctacaacaagactg

SEQ ID NO: 629474 - DNA, 25 bp, Homo sapien
caggcaaggtgtcgtttattactta

SEQ ID NO: 629475 - DNA, 25 bp, Homo sapien
tcacgtctcagaactggtggcccag

SEQ ID NO: 629476 - DNA, 25 bp, Homo sapien
gcatccggtctgtgtctgtcgggtc

SEQ ID NO: 629477 - DNA, 25 bp, Homo sapien
ttgtggaaccttctagccaccatcc

SEQ ID NO: 629478 - DNA, 25 bp, Homo sapien
caggtccttgtggaaccttctagcc

SEQ ID NO: 629479 - DNA, 25 bp, Homo sapien
ggcactcggccataccagccccagg

SEQ ID NO: 629480 - DNA, 25 bp, Homo sapien
actgcacaacaggcactcggccata

SEQ ID NO: 629481 - DNA, 25 bp, Homo sapien
atgacgttgtggacgcagcaggtgg

SEQ ID NO: 629482 - DNA, 25 bp, Homo sapien
ccatactgctctatccacagcttcc

SEQ ID NO: 629483 - DNA, 25 bp, Homo sapien
gatgatgacgttgtggacgcagcag

SEQ ID NO: 629484 - DNA, 25 bp, Homo sapien
cactgtcccatactgctctatccac

SEQ ID NO: 629485 - DNA, 25 bp, Homo sapien
aactctgtaacaggagaagcgcggt

SEQ ID NO: 629486 - DNA, 25 bp, Homo sapien
caccggtcagagtcaagtctaggca

SEQ ID NO: 629487 - DNA, 25 bp, Homo sapien
tcttgaacgaggagcattcatggcc

SEQ ID NO: 629488 - DNA, 25 bp, Homo sapien
tcaagcctagacagtggccaacggc

SEQ ID NO: 629489 - DNA, 25 bp, Homo sapien
tccacacggtttaaagtgaagcaca

SEQ ID NO: 629490 - DNA, 25 bp, Homo sapien
gtgaagcacacacttatgtccagtt

SEQ ID NO: 629491 - DNA, 25 bp, Homo sapien
caaataatccacacggtttaaagtg

SEQ ID NO: 629492 - DNA, 25 bp, Homo sapien
cacggtttaaagtgaagcacacact

SEQ ID NO: 629493 - DNA, 25 bp, Homo sapien
cttctaacgtggacacacaggctgt

SEQ ID NO: 629494 - DNA, 25 bp, Homo sapien
ccatgaacacttggcaaggacctac

SEQ ID NO: 629495 - DNA, 25 bp, Homo sapien
tgtacccgcgtctcatgcacgtagg

SEQ ID NO: 629496 - DNA, 25 bp, Homo sapien
cacaggctgtagtggtgccccatga

SEQ ID NO: 629497 - DNA, 25 bp, Homo sapien
catttgccatagatcataaagagct

SEQ ID NO: 629498 - DNA, 25 bp, Homo sapien
gatctatgccccacaaacattccgt

SEQ ID NO: 629499 - DNA, 25 bp, Homo sapien
cttgaaggattcatacgaaacagga

SEQ ID NO: 629500 - DNA, 25 bp, Homo sapien
agcttggcctttctcaggtggtcac

SEQ ID NO: 629501 - DNA, 25 bp, Homo sapien
cactggtgcccacggtttatagcag

SEQ ID NO: 629502 - DNA, 25 bp, Homo sapien
caaaatacagatatgccggctgggt

SEQ ID NO: 629503 - DNA, 25 bp, Homo sapien
caattatgtatgactcgtgggcact

SEQ ID NO: 629504 - DNA, 25 bp, Homo sapien
tctaggtcacctcaaggagcaggaa

SEQ ID NO: 629505 - DNA, 25 bp, Homo sapien
caggcgtttcccttcgcagagacga

SEQ ID NO: 629506 - DNA, 25 bp, Homo sapien
gccaggcgtgtttcccttcgggaga

SEQ ID NO: 629507 - DNA, 25 bp, Homo sapien
gccaggcgtgtttcccttcacagag

SEQ ID NO: 629508 - DNA, 25 bp, Homo sapien
tgtccatcactgtacggagaggagc

SEQ ID NO: 629509 - DNA, 25 bp, Homo sapien
tgccaggaatgacctgcacggtctc

SEQ ID NO: 629510 - DNA, 25 bp, Homo sapien
aggcacgtcgtcagccacgtcgctg

SEQ ID NO: 629511 - DNA, 25 bp, Homo sapien
gctgtcagccttcccggagtcttca

SEQ ID NO: 629512 - DNA, 25 bp, Homo sapien
gccgggtgttgatcctccagagcag

SEQ ID NO: 629513 - DNA, 25 bp, Homo sapien
tccagctcgttgaggctcacagtga

SEQ ID NO: 629514 - DNA, 25 bp, Homo sapien
tccatgccgcggatgtcagggcgca

SEQ ID NO: 629515 - DNA, 25 bp, Homo sapien
tgggtggcagggtcttctccatgcc

SEQ ID NO: 629516 - DNA, 25 bp, Homo sapien
cgcaggcggcagtccgtgggtggca

SEQ ID NO: 629517 - DNA, 25 bp, Homo sapien
caagcaaacagtttaggtcagacag

SEQ ID NO: 629518 - DNA, 25 bp, Homo sapien
aacaggttctgtgatcgggagacca

SEQ ID NO: 629519 - DNA, 25 bp, Homo sapien
tatgcacctagatctctagttggca

SEQ ID NO: 629520 - DNA, 25 bp, Homo sapien
tagttggcatgtctcactgtggctg

SEQ ID NO: 629521 - DNA, 25 bp, Homo sapien
ttggcccgctccctccgtgcttctc

SEQ ID NO: 629522 - DNA, 25 bp, Homo sapien
cttggcccgctccctccgtgcttct

SEQ ID NO: 629523 - DNA, 25 bp, Homo sapien
gtgaagatcagcctgagtggcactg

SEQ ID NO: 629524 - DNA, 25 bp, Homo sapien
tagaacaaactacagccagcttagg

SEQ ID NO: 629525 - DNA, 25 bp, Homo sapien
ccagcttaggacagttacagaaaca

SEQ ID NO: 629526 - DNA, 25 bp, Homo sapien
cacagcacacgggatttaattttca

SEQ ID NO: 629527 - DNA, 25 bp, Homo sapien
tccgctcaaagtaatcccctgcata

SEQ ID NO: 629528 - DNA, 25 bp, Homo sapien
ctgggcagtcggagaaattccgctc

SEQ ID NO: 629529 - DNA, 25 bp, Homo sapien
gagaaattccgctcaaagtaatccc

SEQ ID NO: 629530 - DNA, 25 bp, Homo sapien
aatcccctgcatacaaccagtcggg

SEQ ID NO: 629531 - DNA, 25 bp, Homo sapien
tcactgacaacagggcagcgaatcg

SEQ ID NO: 629532 - DNA, 25 bp, Homo sapien
gatcagggatgatgctatctccgcg

SEQ ID NO: 629533 - DNA, 25 bp, Homo sapien
aaaagttggtttctgctgtgacgag

SEQ ID NO: 629534 - DNA, 25 bp, Homo sapien
gggatttcctgtcacgctctcgatg

SEQ ID NO: 629535 - DNA, 25 bp, Homo sapien
tcacggagcggttctgttcagacac

SEQ ID NO: 629536 - DNA, 25 bp, Homo sapien
agaagtgccggcctgagtaacctgg

SEQ ID NO: 629537 - DNA, 25 bp, Homo sapien
ccagaagtgcttccgtcacaggtgt

SEQ ID NO: 629538 - DNA, 25 bp, Homo sapien
taacctggactccatgcaaccgcgt

SEQ ID NO: 629539 - DNA, 25 bp, Homo sapien
gaataacgccacaatcctgaatcct

SEQ ID NO: 629540 - DNA, 25 bp, Homo sapien
cgttaaacctccctaaatgcagtca

SEQ ID NO: 629541 - DNA, 25 bp, Homo sapien
ttaaaataacctcgacacacagccg

SEQ ID NO: 629542 - DNA, 25 bp, Homo sapien
tttcttggagaaggagccggttcac

SEQ ID NO: 629543 - DNA, 25 bp, Homo sapien
acccaaacgcgtggcccacgagaag

SEQ ID NO: 629544 - DNA, 25 bp, Homo sapien
ggtcaaggccatactcacacccaaa

SEQ ID NO: 629545 - DNA, 25 bp, Homo sapien
gcaccaagacccttggtcaaggcca

SEQ ID NO: 629546 - DNA, 25 bp, Homo sapien
aaagcaccaagacccttggtcaagg

SEQ ID NO: 629547 - DNA, 25 bp, Homo sapien
tgttcaaggccaatgccccagatgg

SEQ ID NO: 629548 - DNA, 25 bp, Homo sapien
caccagactgcttgtcgggcagagt

SEQ ID NO: 629549 - DNA, 25 bp, Homo sapien
catgctcagacacgtggacagtggg

SEQ ID NO: 629550 - DNA, 25 bp, Homo sapien
cccagacagcagtctcgggagggtc

SEQ ID NO: 629551 - DNA, 25 bp, Homo sapien
aaacccctggagcattccgagagca

SEQ ID NO: 629552 - DNA, 25 bp, Homo sapien
gcaacttacggcagaaggcaggcag

SEQ ID NO: 629553 - DNA, 25 bp, Homo sapien
tacgctcctgaaaagcacgaaggtg

SEQ ID NO: 629554 - DNA, 25 bp, Homo sapien
tctgcaggtccggaagtcagcgtca

SEQ ID NO: 629555 - DNA, 25 bp, Homo sapien
cttgttgggagatgcgttggtgttg

SEQ ID NO: 629556 - DNA, 25 bp, Homo sapien
cgttggtgttgatgctggcagctcc

SEQ ID NO: 629557 - DNA, 25 bp, Homo sapien
atgctggcagctccagtcctttcat

SEQ ID NO: 629558 - DNA, 25 bp, Homo sapien
ccttgttgggagatgcgttggtgtt

SEQ ID NO: 629559 - DNA, 25 bp, Homo sapien
tctttaggtgtgtgttttcactcac

SEQ ID NO: 629560 - DNA, 25 bp, Homo sapien
gctctctgaggtctttaggtgtgtg

SEQ ID NO: 629561 - DNA, 25 bp, Homo sapien
ggtctttaggtgtgtgttttcactc

SEQ ID NO: 629562 - DNA, 25 bp, Homo sapien
gtgctctctgaggtctttaggtgtg

SEQ ID NO: 629563 - DNA, 25 bp, Homo sapien
aggccacagggtaaaaaggcggcag

SEQ ID NO: 629564 - DNA, 25 bp, Homo sapien
tctggacgcctggatgggaaaggcc

SEQ ID NO: 629565 - DNA, 25 bp, Homo sapien
ccacagggtaaaaaggcggcagtcg

SEQ ID NO: 629566 - DNA, 25 bp, Homo sapien
cctctggacgcctggatgggaaagg

SEQ ID NO: 629567 - DNA, 25 bp, Homo sapien
ttggcgagggcgaccgtccatcgca

SEQ ID NO: 629568 - DNA, 25 bp, Homo sapien
ctgccaacgattggcgagggcgacc

SEQ ID NO: 629569 - DNA, 25 bp, Homo sapien
gcttggaccagagcggcccctattg

SEQ ID NO: 629570 - DNA, 25 bp, Homo sapien
cggcggctcttttccggcggaagcg

SEQ ID NO: 629571 - DNA, 25 bp, Homo sapien
gcgccgtccgggctcgctcttcctc

SEQ ID NO: 629572 - DNA, 25 bp, Homo sapien
acactcgttcgagaggcgccgtccg

SEQ ID NO: 629573 - DNA, 25 bp, Homo sapien
gctctcgccgccgattgagccccgt

SEQ ID NO: 629574 - DNA, 25 bp, Homo sapien
cgtaagccgcgcagccggctctaac

SEQ ID NO: 629575 - DNA, 25 bp, Homo sapien
ctaggcttgacgccgtctccgcggg

SEQ ID NO: 629576 - DNA, 25 bp, Homo sapien
gggcaccagcctcgacgcgccaccc

SEQ ID NO: 629577 - DNA, 25 bp, Homo sapien
gcctcgacgcgccaccccggcgacc

SEQ ID NO: 629578 - DNA, 25 bp, Homo sapien
gtggggccggccctaggcttgacgc

SEQ ID NO: 629579 - DNA, 25 bp, Homo sapien
cgcccgcactcggcgctgggccggg

SEQ ID NO: 629580 - DNA, 25 bp, Homo sapien
ctgggccggggcagccccgccaagc

SEQ ID NO: 629581 - DNA, 25 bp, Homo sapien
cgcactcggcgctgggccggggcag

SEQ ID NO: 629582 - DNA, 25 bp, Homo sapien
ccgcactcggcgctgggccggggca

SEQ ID NO: 629583 - DNA, 25 bp, Homo sapien
cgcggcggtcactgtcgcctgcggt

SEQ ID NO: 629584 - DNA, 25 bp, Homo sapien
gagaggacgctgagacgcggcggtc

SEQ ID NO: 629585 - DNA, 25 bp, Homo sapien
agagctgcctaaggcagactcagac

SEQ ID NO: 629586 - DNA, 25 bp, Homo sapien
acgccgggctgcctttccgcgtttg

SEQ ID NO: 629587 - DNA, 25 bp, Homo sapien
gagtcgtccgtctgctgaatgtaca

SEQ ID NO: 629588 - DNA, 25 bp, Homo sapien
gagtcacggtggtccccttcaggga

SEQ ID NO: 629589 - DNA, 25 bp, Homo sapien
cagaagtgaataagcgagtcgtccg

SEQ ID NO: 629590 - DNA, 25 bp, Homo sapien
agccctttccgcttatccggagtca

SEQ ID NO: 629591 - DNA, 25 bp, Homo sapien
tgctgctgcggctcagggacactca

SEQ ID NO: 629592 - DNA, 25 bp, Homo sapien
caccgcgaactccaaagcgaggact

SEQ ID NO: 629593 - DNA, 25 bp, Homo sapien
ccgagaagtcgcctgtcctgctgct

SEQ ID NO: 629594 - DNA, 25 bp, Homo sapien
atcagcagggcagtcgatgacggcc

SEQ ID NO: 629595 - DNA, 25 bp, Homo sapien
tcagagacagcccatgaaaggcaag

SEQ ID NO: 629596 - DNA, 25 bp, Homo sapien
tttctgagacgtgctggaaacaaca

SEQ ID NO: 629597 - DNA, 25 bp, Homo sapien
gagtcagtggcgcagatggcatcac

SEQ ID NO: 629598 - DNA, 25 bp, Homo sapien
cattcccagagtagttaaaaagtca

SEQ ID NO: 629599 - DNA, 25 bp, Homo sapien
agtcgtcagggaagatgatcaagtc

SEQ ID NO: 629600 - DNA, 25 bp, Homo sapien
gggcactgcggcacccgcttgaact

SEQ ID NO: 629601 - DNA, 25 bp, Homo sapien
tccagaagaaaagccgcttggaccc

SEQ ID NO: 629602 - DNA, 25 bp, Homo sapien
ggaccctgccttgaacttcagcacg

SEQ ID NO: 629603 - DNA, 25 bp, Homo sapien
ttcagcacgtagaccctcccgctgg

SEQ ID NO: 629604 - DNA, 25 bp, Homo sapien
gagggcactgggcatcgttagaacc

SEQ ID NO: 629605 - DNA, 25 bp, Homo sapien
tggaaatttcacaccgcaatcggtt

SEQ ID NO: 629606 - DNA, 25 bp, Homo sapien
tctagacccaaaagacgctctgcag

SEQ ID NO: 629607 - DNA, 25 bp, Homo sapien
tagaaccagggccagcatgtctgtc

SEQ ID NO: 629608 - DNA, 25 bp, Homo sapien
tgctctcatggcaaagcagggacgg

SEQ ID NO: 629609 - DNA, 25 bp, Homo sapien
ccccgaatggctatggaagctgcag

SEQ ID NO: 629610 - DNA, 25 bp, Homo sapien
gaaaaacacgttctacaccagcagg

SEQ ID NO: 629611 - DNA, 25 bp, Homo sapien
tgtcagaagcatcgacctgcgagct

SEQ ID NO: 629612 - DNA, 25 bp, Homo sapien
ggcgcgtgtgcctggccacacaatg

SEQ ID NO: 629613 - DNA, 25 bp, Homo sapien
aggcgcgtgtgcctggccacacaat

SEQ ID NO: 629614 - DNA, 25 bp, Homo sapien
cagaggcgcgtgtgcctggccacac

SEQ ID NO: 629615 - DNA, 25 bp, Homo sapien
caggtgagggacctgagacgcagag

SEQ ID NO: 629616 - DNA, 25 bp, Homo sapien
agggccaccacagccatcctctgac

SEQ ID NO: 629617 - DNA, 25 bp, Homo sapien
ccagggccaccacagccatcctctg

SEQ ID NO: 629618 - DNA, 25 bp, Homo sapien
cagggccaccacagccatcctctga

SEQ ID NO: 629619 - DNA, 25 bp, Homo sapien
caagaggaagggcatgtaagggcag

SEQ ID NO: 629620 - DNA, 25 bp, Homo sapien
ggcatgtaagggcaggagctggcgc

SEQ ID NO: 629621 - DNA, 25 bp, Homo sapien
ctgcaagaggaagggcatgtaaggg

SEQ ID NO: 629622 - DNA, 25 bp, Homo sapien
ggaagggcatgtaagggcaggagct

SEQ ID NO: 629623 - DNA, 25 bp, Homo sapien
tgttcagatactcgttgactttccg

SEQ ID NO: 629624 - DNA, 25 bp, Homo sapien
tttccggcaatgctcctcatcctgg

SEQ ID NO: 629625 - DNA, 25 bp, Homo sapien
cctagcgcagagagttcgtggccgc

SEQ ID NO: 629626 - DNA, 25 bp, Homo sapien
cgcctagcgcagagagttcgtggcc

SEQ ID NO: 629627 - DNA, 25 bp, Homo sapien
ctgagggggcgagtcatccacagta

SEQ ID NO: 629628 - DNA, 25 bp, Homo sapien
cgagtcatccacagtagactctggc

SEQ ID NO: 629629 - DNA, 25 bp, Homo sapien
aacctgtgctgagggggcgagtcat

SEQ ID NO: 629630 - DNA, 25 bp, Homo sapien
gggcgagtcatccacagtagactct

SEQ ID NO: 629631 - DNA, 25 bp, Homo sapien
ggtgggatgcagacccgtcctaccc

SEQ ID NO: 629632 - DNA, 25 bp, Homo sapien
caccacttgaagtgaggcgacggtg

SEQ ID NO: 629633 - DNA, 25 bp, Homo sapien
ggagctcacagggtctctaactttt

SEQ ID NO: 629634 - DNA, 25 bp, Homo sapien
cgacggtgggatgcagacccgtcct

SEQ ID NO: 629635 - DNA, 25 bp, Homo sapien
gagcaccgcactcggctgcccctga

SEQ ID NO: 629636 - DNA, 25 bp, Homo sapien
cctgcgcctctgctgagcaccgcac

SEQ ID NO: 629637 - DNA, 25 bp, Homo sapien
ctctgctgagcaccgcactcggctg

SEQ ID NO: 629638 - DNA, 25 bp, Homo sapien
gatccacgcgggccccaccgcactg

SEQ ID NO: 629639 - DNA, 25 bp, Homo sapien
ggaaaacactgcagctcaggcgggc

SEQ ID NO: 629640 - DNA, 25 bp, Homo sapien
tggaaaacactgcagctcaggcggg

SEQ ID NO: 629641 - DNA, 25 bp, Homo sapien
ctggaaaacactgcagctcaggcgg

SEQ ID NO: 629642 - DNA, 25 bp, Homo sapien
ccgatgagctgcatgagctggctgt

SEQ ID NO: 629643 - DNA, 25 bp, Homo sapien
ctggtccgatgagctgcatgagctg

SEQ ID NO: 629644 - DNA, 25 bp, Homo sapien
ctggctgtggctcatgtttcccagc

SEQ ID NO: 629645 - DNA, 25 bp, Homo sapien
gctggctgtggctcatgtttcccag

SEQ ID NO: 629646 - DNA, 25 bp, Homo sapien
tacccagctctagccacaggcaaac

SEQ ID NO: 629647 - DNA, 25 bp, Homo sapien
aggctccccgacactacgcagacag

SEQ ID NO: 629648 - DNA, 25 bp, Homo sapien
cactacgcagacagagccagcagaa

SEQ ID NO: 629649 - DNA, 25 bp, Homo sapien
ggcaaacaagcgcattcccaaaggg

SEQ ID NO: 629650 - DNA, 25 bp, Homo sapien
tcctccagccccaccgctcggccag

SEQ ID NO: 629651 - DNA, 25 bp, Homo sapien
cacgggtctgcactccatgagctgg

SEQ ID NO: 629652 - DNA, 25 bp, Homo sapien
caagcatttctgaagggccaagcac

SEQ ID NO: 629653 - DNA, 25 bp, Homo sapien
caaggaaatgcgagctcaggatgcc

SEQ ID NO: 629654 - DNA, 25 bp, Homo sapien
ggagcaggaattcccaacaccaaag

SEQ ID NO: 629655 - DNA, 25 bp, Homo sapien
gcccactgctccccagtaagctggc

SEQ ID NO: 629656 - DNA, 25 bp, Homo sapien
tgaccgctgccgactggctccggga

SEQ ID NO: 629657 - DNA, 25 bp, Homo sapien
gtgctggctccattcccggaactgg

SEQ ID NO: 629658 - DNA, 25 bp, Homo sapien
ggctcgggctagttgctgaggcagc

SEQ ID NO: 629659 - DNA, 25 bp, Homo sapien
gtggatgacggggtgaccgctgccg

SEQ ID NO: 629660 - DNA, 25 bp, Homo sapien
gcccggctggtacgttcatcgtggc

SEQ ID NO: 629661 - DNA, 25 bp, Homo sapien
tggcccggctggtacgttcatcgtg

SEQ ID NO: 629662 - DNA, 25 bp, Homo sapien
gctggcccggctggtacgttcatcg

SEQ ID NO: 629663 - DNA, 25 bp, Homo sapien
cggctggtacgttcatcgtggccag

SEQ ID NO: 629664 - DNA, 25 bp, Homo sapien
aacacggccatcagctcgatgacag

SEQ ID NO: 629665 - DNA, 25 bp, Homo sapien
catggaaggcatgcaagcagggact

SEQ ID NO: 629666 - DNA, 25 bp, Homo sapien
ggcgcgcacactaggcagatgcctt

SEQ ID NO: 629667 - DNA, 25 bp, Homo sapien
gacagcctaagtgcccacatggaag

SEQ ID NO: 629668 - DNA, 25 bp, Homo sapien
gctcctggacatccgcgttggcgag

SEQ ID NO: 629669 - DNA, 25 bp, Homo sapien
cgttggcgaggatgggagccattat

SEQ ID NO: 629670 - DNA, 25 bp, Homo sapien
ccccagatggcaagtagggaagcag

SEQ ID NO: 629671 - DNA, 25 bp, Homo sapien
ggagccattatctccggcgtcagca

SEQ ID NO: 629672 - DNA, 25 bp, Homo sapien
tggaactggggcgaggtcagggtat

SEQ ID NO: 629673 - DNA, 25 bp, Homo sapien
tcagggtattctggatctcatccgc

SEQ ID NO: 629674 - DNA, 25 bp, Homo sapien
ggcgaggtcagggtattctggatct

SEQ ID NO: 629675 - DNA, 25 bp, Homo sapien
gtattctggatctcatccgcggtct

SEQ ID NO: 629676 - DNA, 25 bp, Homo sapien
caagaagagccaggcgagggctgag

SEQ ID NO: 629677 - DNA, 25 bp, Homo sapien
agctgccagctctgcgggtcaggca

SEQ ID NO: 629678 - DNA, 25 bp, Homo sapien
ccagctctgcgggtcaggcacatga

SEQ ID NO: 629679 - DNA, 25 bp, Homo sapien
tgcgggtcaggcacatgaagcactg

SEQ ID NO: 629680 - DNA, 25 bp, Homo sapien
ctctgcaggcagaccgaactggcac

SEQ ID NO: 629681 - DNA, 25 bp, Homo sapien
aggcagaccgaactggcacatgagg

SEQ ID NO: 629682 - DNA, 25 bp, Homo sapien
ccaaggctgcgctgaacatgcccag

SEQ ID NO: 629683 - DNA, 25 bp, Homo sapien
gccccgaggccaaggctgcgctgaa

SEQ ID NO: 629684 - DNA, 25 bp, Homo sapien
taaagacacaaggtggtgtctaacc

SEQ ID NO: 629685 - DNA, 25 bp, Homo sapien
gatcaaagcgatgggatcaagggca

SEQ ID NO: 629686 - DNA, 25 bp, Homo sapien
ctagaacacgttaaagacacaaggt

SEQ ID NO: 629687 - DNA, 25 bp, Homo sapien
gtgtctaacccttgcccagaactgg

SEQ ID NO: 629688 - DNA, 25 bp, Homo sapien
tcgtgtcgccctctttctgctcggg

SEQ ID NO: 629689 - DNA, 25 bp, Homo sapien
cttcttgtccttcgtgtcgccctct

SEQ ID NO: 629690 - DNA, 25 bp, Homo sapien
ccctctttctgctcgggcttggcgt

SEQ ID NO: 629691 - DNA, 25 bp, Homo sapien
gcttggcgttgttctgcatggcttt

SEQ ID NO: 629692 - DNA, 25 bp, Homo sapien
agttcctcggaggacggcgcgtggc

SEQ ID NO: 629693 - DNA, 25 bp, Homo sapien
cagttcctcggaggacggcgcgtgg

SEQ ID NO: 629694 - DNA, 25 bp, Homo sapien
gactttattaataatcagtgggtgg

SEQ ID NO: 629695 - DNA, 25 bp, Homo sapien
ggtgggaggtgagggtgtgcaacgc

SEQ ID NO: 629696 - DNA, 25 bp, Homo sapien
tattaataatcagtgggtgggaggt

SEQ ID NO: 629697 - DNA, 25 bp, Homo sapien
ctttattaataatcagtgggtggga

SEQ ID NO: 629698 - DNA, 25 bp, Homo sapien
tggcctttcgccaggtgctctaggg

SEQ ID NO: 629699 - DNA, 25 bp, Homo sapien
atctggcgggcaccaagtggagacc

SEQ ID NO: 629700 - DNA, 25 bp, Homo sapien
catggacctgcgagaggctttgaac

SEQ ID NO: 629701 - DNA, 25 bp, Homo sapien
ctttgaaccgggcagtggacgccac

SEQ ID NO: 629702 - DNA, 25 bp, Homo sapien
catgtggcaagccaagccatcgagg

SEQ ID NO: 629703 - DNA, 25 bp, Homo sapien
tcctgtgtaccccacaggctgcagt

SEQ ID NO: 629704 - DNA, 25 bp, Homo sapien
gacgctgagtctgggcgagcgcttg

SEQ ID NO: 629705 - DNA, 25 bp, Homo sapien
ctctttccttgtgtccattccctga

SEQ ID NO: 629706 - DNA, 25 bp, Homo sapien
gagcttttgctatacaccccagggt

SEQ ID NO: 629707 - DNA, 25 bp, Homo sapien
aaagcagtattgattcccgaggccc

SEQ ID NO: 629708 - DNA, 25 bp, Homo sapien
tggaacaccagttcaggcccttgct

SEQ ID NO: 629709 - DNA, 25 bp, Homo sapien
gagcagtaggtgcttccaacctcag

SEQ ID NO: 629710 - DNA, 25 bp, Homo sapien
gaaggtctccgaatacccagccctg

SEQ ID NO: 629711 - DNA, 25 bp, Homo sapien
ctggagcggtccatggacttcggcc

SEQ ID NO: 629712 - DNA, 25 bp, Homo sapien
tgggcaggccctccgtgaccaggct

SEQ ID NO: 629713 - DNA, 25 bp, Homo sapien
agttctttgcctgtgagtctctgcc

SEQ ID NO: 629714 - DNA, 25 bp, Homo sapien
cctgggagcatgggaatccaggcgc

SEQ ID NO: 629715 - DNA, 25 bp, Homo sapien
ctgacgccctctcggcccacaggtc

SEQ ID NO: 629716 - DNA, 25 bp, Homo sapien
cctacgtcctcatcaagtttgccaa

SEQ ID NO: 629717 - DNA, 25 bp, Homo sapien
cacgtggcctacgtcctcatcaagt

SEQ ID NO: 629718 - DNA, 25 bp, Homo sapien
cttggggccctaggcttccaggcct

SEQ ID NO: 629719 - DNA, 25 bp, Homo sapien
ggtgactgtaggtcttgtgcagctc

SEQ ID NO: 629720 - DNA, 25 bp, Homo sapien
tctgtggtcttttcatgggggaccc

SEQ ID NO: 629721 - DNA, 25 bp, Homo sapien
tctcagtccggctcagtccagtggg

SEQ ID NO: 629722 - DNA, 25 bp, Homo sapien
gcacagaaccatgtagcagcggaaa

SEQ ID NO: 629723 - DNA, 25 bp, Homo sapien
catgtagcagcggaaaggtcagcac

SEQ ID NO: 629724 - DNA, 25 bp, Homo sapien
aagccaggggtctgcgctcgctccg

SEQ ID NO: 629725 - DNA, 25 bp, Homo sapien
tctgcgctcgctccgggtcatggcg

SEQ ID NO: 629726 - DNA, 25 bp, Homo sapien
cagactgtctgaccagcgcctgttg

SEQ ID NO: 629727 - DNA, 25 bp, Homo sapien
actgtctgaccagcgcctgttgagg

SEQ ID NO: 629728 - DNA, 25 bp, Homo sapien
gccagactgtctgaccagcgcctgt

SEQ ID NO: 629729 - DNA, 25 bp, Homo sapien
gactgtctgaccagcgcctgttgag

SEQ ID NO: 629730 - DNA, 25 bp, Homo sapien
ggctggctgaagggagctgagcccc

SEQ ID NO: 629731 - DNA, 25 bp, Homo sapien
tccccagaagccactaggtggtgtc

SEQ ID NO: 629732 - DNA, 25 bp, Homo sapien
tgtccccagaagccactaggtggtg

SEQ ID NO: 629733 - DNA, 25 bp, Homo sapien
agcactgtccccagaagccactagg

SEQ ID NO: 629734 - DNA, 25 bp, Homo sapien
cactgtccccagaagccactaggtg

SEQ ID NO: 629735 - DNA, 25 bp, Homo sapien
tgagcgcctcgggagccccgaatag

SEQ ID NO: 629736 - DNA, 25 bp, Homo sapien
tccgcttccggcaaggaggttctcg

SEQ ID NO: 629737 - DNA, 25 bp, Homo sapien
tgggttgtgccccacggacgcagtc

SEQ ID NO: 629738 - DNA, 25 bp, Homo sapien
tcgttgccgtgtgtggcgtcttagc

SEQ ID NO: 629739 - DNA, 25 bp, Homo sapien
agagagaaaggaagcagctagtcac

SEQ ID NO: 629740 - DNA, 25 bp, Homo sapien
tagggtcacggccccagccgcaccc

SEQ ID NO: 629741 - DNA, 25 bp, Homo sapien
ctagggtcacggccccagccgcacc

SEQ ID NO: 629742 - DNA, 25 bp, Homo sapien
gaaccgtgccccggctcccggcgca

SEQ ID NO: 629743 - DNA, 25 bp, Homo sapien
catttccgcggcacgtacaggtcca

SEQ ID NO: 629744 - DNA, 25 bp, Homo sapien
cgaactcgccggcgtcgttctgcat

SEQ ID NO: 629745 - DNA, 25 bp, Homo sapien
caggtccacgaactcgccggcgtcg

SEQ ID NO: 629746 - DNA, 25 bp, Homo sapien
cgcggcacgtacaggtccacgaact

SEQ ID NO: 629747 - DNA, 25 bp, Homo sapien
caccgatgatgcgattgctagcgga

SEQ ID NO: 629748 - DNA, 25 bp, Homo sapien
cttggcaccgatgatgcgattgcta

SEQ ID NO: 629749 - DNA, 25 bp, Homo sapien
accgatgatgcgattgctagcggag

SEQ ID NO: 629750 - DNA, 25 bp, Homo sapien
tggcaccgatgatgcgattgctagc

SEQ ID NO: 629751 - DNA, 25 bp, Homo sapien
acatatatcacaaccttcccgcctc

SEQ ID NO: 629752 - DNA, 25 bp, Homo sapien
gctcctccacaatgggacagcctgc

SEQ ID NO: 629753 - DNA, 25 bp, Homo sapien
acagcctgcctttcccgcacatata

SEQ ID NO: 629754 - DNA, 25 bp, Homo sapien
tttcccgcacatatatcacaacctt

SEQ ID NO: 629755 - DNA, 25 bp, Homo sapien
gaaagagaagaagggtcacaaacca

SEQ ID NO: 629756 - DNA, 25 bp, Homo sapien
gaatggccccgcagatagcataagt

SEQ ID NO: 629757 - DNA, 25 bp, Homo sapien
gcataagttttaaactggccattaa

SEQ ID NO: 629758 - DNA, 25 bp, Homo sapien
ggccccgcagatagcataagtttta

SEQ ID NO: 629759 - DNA, 25 bp, Homo sapien
catcctacgaatggccccgcagata

SEQ ID NO: 629760 - DNA, 25 bp, Homo sapien
taaagtccacgatgtcccgaagtga

SEQ ID NO: 629761 - DNA, 25 bp, Homo sapien
tgtcccgaagtgatgagcaaagccc

SEQ ID NO: 629762 - DNA, 25 bp, Homo sapien
cacggtaaagtccacgatgtcccga

SEQ ID NO: 629763 - DNA, 25 bp, Homo sapien
tcacacactccaatgcgcacggtaa

SEQ ID NO: 629764 - DNA, 25 bp, Homo sapien
cagcctgcagcctgactatggtgga

SEQ ID NO: 629765 - DNA, 25 bp, Homo sapien
ccccgctgagcgaatggagacaggc

SEQ ID NO: 629766 - DNA, 25 bp, Homo sapien
gtccagctggctcaaactactctgc

SEQ ID NO: 629767 - DNA, 25 bp, Homo sapien
taagaatatttccactccggctgcc

SEQ ID NO: 629768 - DNA, 25 bp, Homo sapien
gccttggccaatcggagaatggaat

SEQ ID NO: 629769 - DNA, 25 bp, Homo sapien
gccatcggccttggccaatcggaga

SEQ ID NO: 629770 - DNA, 25 bp, Homo sapien
ttgagacgatgccatcggccttggc

SEQ ID NO: 629771 - DNA, 25 bp, Homo sapien
tttgagacgatgccatcggccttgg

SEQ ID NO: 629772 - DNA, 25 bp, Homo sapien
ttaagaccacgcctctggagcagtc

SEQ ID NO: 629773 - DNA, 25 bp, Homo sapien
acgcctctggagcagtcctagtcca

SEQ ID NO: 629774 - DNA, 25 bp, Homo sapien
aggacaacgttaagaccacgcctct

SEQ ID NO: 629775 - DNA, 25 bp, Homo sapien
ctggagcagtcctagtccactcact

SEQ ID NO: 629776 - DNA, 25 bp, Homo sapien
tgacaaatattccacatctgtgatt

SEQ ID NO: 629777 - DNA, 25 bp, Homo sapien
tatgacaaatattccacatctgtga

SEQ ID NO: 629778 - DNA, 25 bp, Homo sapien
tatttatgacaaatattccacatct

SEQ ID NO: 629779 - DNA, 25 bp, Homo sapien
tttatgacaaatattccacatctgt

SEQ ID NO: 629780 - DNA, 25 bp, Homo sapien
accccagcagtggtgcaggacagct

SEQ ID NO: 629781 - DNA, 25 bp, Homo sapien
aattctgctatcacagaactccacc

SEQ ID NO: 629782 - DNA, 25 bp, Homo sapien
cgaccccagcagtggtgcaggacag

SEQ ID NO: 629783 - DNA, 25 bp, Homo sapien
acccgaccccagcagtggtgcagga

SEQ ID NO: 629784 - DNA, 25 bp, Homo sapien
aagagacgtcgctttcatccccaag

SEQ ID NO: 629785 - DNA, 25 bp, Homo sapien
tgcaggcagggtcatgacatcgagc

SEQ ID NO: 629786 - DNA, 25 bp, Homo sapien
gaaaggtttcgattcaacaggcgcg

SEQ ID NO: 629787 - DNA, 25 bp, Homo sapien
gtaccaggaccttttgttcacagcg

SEQ ID NO: 629788 - DNA, 25 bp, Homo sapien
tgctcagggaacagtaacttctcgg

SEQ ID NO: 629789 - DNA, 25 bp, Homo sapien
ccaaaagcaagtgggaactctgggc

SEQ ID NO: 629790 - DNA, 25 bp, Homo sapien
taactttgccattgcctaatgccca

SEQ ID NO: 629791 - DNA, 25 bp, Homo sapien
ctgttacaacaaggctgctcaggga

SEQ ID NO: 629792 - DNA, 25 bp, Homo sapien
ttaaaatgtgcgctcgatggaggcc

SEQ ID NO: 629793 - DNA, 25 bp, Homo sapien
gcaggtcccaagacggggactcgaa

SEQ ID NO: 629794 - DNA, 25 bp, Homo sapien
gaggccatccgcgaaggccgccata

SEQ ID NO: 629795 - DNA, 25 bp, Homo sapien
aggccgccatacagcaaagggaaca

SEQ ID NO: 629796 - DNA, 25 bp, Homo sapien
tgttccgctctgtgatccacttggg

SEQ ID NO: 629797 - DNA, 25 bp, Homo sapien
ctctgtgatccacttgggctgggct

SEQ ID NO: 629798 - DNA, 25 bp, Homo sapien
atggctgttccgctctgtgatccac

SEQ ID NO: 629799 - DNA, 25 bp, Homo sapien
gctggccgtggcgaggccttgggca

SEQ ID NO: 629800 - DNA, 25 bp, Homo sapien
cttgggcggctcctttatgggcgtc

SEQ ID NO: 629801 - DNA, 25 bp, Homo sapien
cggctcctttatgggcgtcggccca

SEQ ID NO: 629802 - DNA, 25 bp, Homo sapien
ggctcccttgggcggctcctttatg

SEQ ID NO: 629803 - DNA, 25 bp, Homo sapien
cccaggcccgcaggcaccatgggct

SEQ ID NO: 629804 - DNA, 25 bp, Homo sapien
gagaggcggggagcccagtgatgcc

SEQ ID NO: 629805 - DNA, 25 bp, Homo sapien
agccggcctggcagacgtccttgga

SEQ ID NO: 629806 - DNA, 25 bp, Homo sapien
gcttctctggttgagtgccctcgga

SEQ ID NO: 629807 - DNA, 25 bp, Homo sapien
tcctgccccaaagagcctgctgggg

SEQ ID NO: 629808 - DNA, 25 bp, Homo sapien
gataagcgggcgcagccacaggggt

SEQ ID NO: 629809 - DNA, 25 bp, Homo sapien
tcacaagaggataagcgggcgcagc

SEQ ID NO: 629810 - DNA, 25 bp, Homo sapien
agcaggggactcctctgccgctgtg

SEQ ID NO: 629811 - DNA, 25 bp, Homo sapien
acaagaggataagcgggcgcagcca

SEQ ID NO: 629812 - DNA, 25 bp, Homo sapien
agcttggactcctgcgaggagagcc

SEQ ID NO: 629813 - DNA, 25 bp, Homo sapien
gcttggactcctgcgaggagagccg

SEQ ID NO: 629814 - DNA, 25 bp, Homo sapien
tatggtcagcccacggtgagctgag

SEQ ID NO: 629815 - DNA, 25 bp, Homo sapien
cagcccacggtgagctgagctgtga

SEQ ID NO: 629816 - DNA, 25 bp, Homo sapien
gagacagcacatttgctcactccca

SEQ ID NO: 629817 - DNA, 25 bp, Homo sapien
aggccctaccacctgtcccgaggtg

SEQ ID NO: 629818 - DNA, 25 bp, Homo sapien
gatgacccagccctcatcccaaacc

SEQ ID NO: 629819 - DNA, 25 bp, Homo sapien
tgagtgggagggcatcgtggggcca

SEQ ID NO: 629820 - DNA, 25 bp, Homo sapien
gggcctccacgaagttcccaggcca

SEQ ID NO: 629821 - DNA, 25 bp, Homo sapien
cagagctggagtggcccatgctgac

SEQ ID NO: 629822 - DNA, 25 bp, Homo sapien
gagaggactcacttcccggttcata

SEQ ID NO: 629823 - DNA, 25 bp, Homo sapien
caacttgttccacgtccggagagga

SEQ ID NO: 629824 - DNA, 25 bp, Homo sapien
atagacggcaccatctcgggtcctc

SEQ ID NO: 629825 - DNA, 25 bp, Homo sapien
cctggagccgcttgtagaaggacac

SEQ ID NO: 629826 - DNA, 25 bp, Homo sapien
cagggggccgacgatgttgcctgga

SEQ ID NO: 629827 - DNA, 25 bp, Homo sapien
gacctccagcgacattcgacctcct

SEQ ID NO: 629828 - DNA, 25 bp, Homo sapien
acaggcacaacctgcacgggcacct

SEQ ID NO: 629829 - DNA, 25 bp, Homo sapien
ctggagttcagggtaggaggctgct

SEQ ID NO: 629830 - DNA, 25 bp, Homo sapien
aaaatagggtgactagcagtgagac

SEQ ID NO: 629831 - DNA, 25 bp, Homo sapien
aaatagggtgactagcagtgagacc

SEQ ID NO: 629832 - DNA, 25 bp, Homo sapien
aatagggtgactagcagtgagacca

SEQ ID NO: 629833 - DNA, 25 bp, Homo sapien
agcagagtgtggacagacggacaac

SEQ ID NO: 629834 - DNA, 25 bp, Homo sapien
cagaaggccctgacttcacacagta

SEQ ID NO: 629835 - DNA, 25 bp, Homo sapien
cacagtacaacgtctcaatgcagca

SEQ ID NO: 629836 - DNA, 25 bp, Homo sapien
taagtcacgtgtgctcatggagcag

SEQ ID NO: 629837 - DNA, 25 bp, Homo sapien
tacatagagaagcatccagcaggaa

SEQ ID NO: 629838 - DNA, 25 bp, Homo sapien
tgtacgaatgacacggagcggttca

SEQ ID NO: 629839 - DNA, 25 bp, Homo sapien
cgatgatggcggcacaaacttgtga

SEQ ID NO: 629840 - DNA, 25 bp, Homo sapien
gagcggttcaccttaagagggctga

SEQ ID NO: 629841 - DNA, 25 bp, Homo sapien
tttactctcgttaaattcccacagc

SEQ ID NO: 629842 - DNA, 25 bp, Homo sapien
gtcacgggccatgcgccctggagca

SEQ ID NO: 629843 - DNA, 25 bp, Homo sapien
ctggagcaccacgtctttggaagga

SEQ ID NO: 629844 - DNA, 25 bp, Homo sapien
cccggtggtggtcacgggccatgcg

SEQ ID NO: 629845 - DNA, 25 bp, Homo sapien
ccctggagcaccacgtctttggaag

SEQ ID NO: 629846 - DNA, 25 bp, Homo sapien
atgcagagcaggagcggcatcccac

SEQ ID NO: 629847 - DNA, 25 bp, Homo sapien
cagggcaagttgatgcagagcagga

SEQ ID NO: 629848 - DNA, 25 bp, Homo sapien
gatgcagagcaggagcggcatccca

SEQ ID NO: 629849 - DNA, 25 bp, Homo sapien
agcaggcagggcaagttgatgcaga

SEQ ID NO: 629850 - DNA, 25 bp, Homo sapien
tgctggtggatacagctgcacacac

SEQ ID NO: 629851 - DNA, 25 bp, Homo sapien
ccctgctggtggatacagctgcaca

SEQ ID NO: 629852 - DNA, 25 bp, Homo sapien
aggccctgctggtggatacagctgc

SEQ ID NO: 629853 - DNA, 25 bp, Homo sapien
ggccagggttctgggtcctcaagcc

SEQ ID NO: 629854 - DNA, 25 bp, Homo sapien
gagactcaggttttccagggagaac

SEQ ID NO: 629855 - DNA, 25 bp, Homo sapien
ctttgggtggtggttggcagcgagc

SEQ ID NO: 629856 - DNA, 25 bp, Homo sapien
ttggcagcgagcacagagaaggagg

SEQ ID NO: 629857 - DNA, 25 bp, Homo sapien
ctgataagagggggccctggtccct

SEQ ID NO: 629858 - DNA, 25 bp, Homo sapien
gggtcgtgccggtgtctgctgccag

SEQ ID NO: 629859 - DNA, 25 bp, Homo sapien
tgagggtcgtgccggtgtctgctgc

SEQ ID NO: 629860 - DNA, 25 bp, Homo sapien
agggtcgtgccggtgtctgctgcca

SEQ ID NO: 629861 - DNA, 25 bp, Homo sapien
ggtgagggtcgtgccggtgtctgct

SEQ ID NO: 629862 - DNA, 25 bp, Homo sapien
ttcacctacacagcccggtcggtgg

SEQ ID NO: 629863 - DNA, 25 bp, Homo sapien
gtacacatggcactgagtcgaccgg

SEQ ID NO: 629864 - DNA, 25 bp, Homo sapien
gctgcatgtagctcaaggagggcct

SEQ ID NO: 629865 - DNA, 25 bp, Homo sapien
tgcctctgggctcggagtggcccaa

SEQ ID NO: 629866 - DNA, 25 bp, Homo sapien
ccctcctttcagtgccgccccaggg

SEQ ID NO: 629867 - DNA, 25 bp, Homo sapien
tgagacccggatgtgcgtgtgcacc

SEQ ID NO: 629868 - DNA, 25 bp, Homo sapien
gatgagcggcgtcgggccctccttt

SEQ ID NO: 629869 - DNA, 25 bp, Homo sapien
tgcccagtctccaacagatggagcc

SEQ ID NO: 629870 - DNA, 25 bp, Homo sapien
caggctctgctgtggcaactccgca

SEQ ID NO: 629871 - DNA, 25 bp, Homo sapien
cggatttccatgatgggaatctggt

SEQ ID NO: 629872 - DNA, 25 bp, Homo sapien
ctgatcccggtaaaaccccagctgg

SEQ ID NO: 629873 - DNA, 25 bp, Homo sapien
acttggccccgactcggatttccat

SEQ ID NO: 629874 - DNA, 25 bp, Homo sapien
ttggccccactgctggacggcgtcg

SEQ ID NO: 629875 - DNA, 25 bp, Homo sapien
gctccagccgccttatttattatct

SEQ ID NO: 629876 - DNA, 25 bp, Homo sapien
ttattatctgataacgcgctcttgg

SEQ ID NO: 629877 - DNA, 25 bp, Homo sapien
tgtgcggccgccaagatgttgacac

SEQ ID NO: 629878 - DNA, 25 bp, Homo sapien
gagcgaggccggatccacagcctca

SEQ ID NO: 629879 - DNA, 25 bp, Homo sapien
gggacatcagacttgccttcggaag

SEQ ID NO: 629880 - DNA, 25 bp, Homo sapien
gaagttggccagtacccggtgtcca

SEQ ID NO: 629881 - DNA, 25 bp, Homo sapien
cgaggccggatccacagcctcaggg

SEQ ID NO: 629882 - DNA, 25 bp, Homo sapien
ctgcctcctccagggtgtgtggaca

SEQ ID NO: 629883 - DNA, 25 bp, Homo sapien
gcctcctccagggtgtgtggacagc

SEQ ID NO: 629884 - DNA, 25 bp, Homo sapien
agttcgtgggctccgggctgcctcc

SEQ ID NO: 629885 - DNA, 25 bp, Homo sapien
ggctgcctcctccagggtgtgtgga

SEQ ID NO: 629886 - DNA, 25 bp, Homo sapien
aggagggcgccgcacctggaaatcc

SEQ ID NO: 629887 - DNA, 25 bp, Homo sapien
ggacctgggcatactgacttcccat

SEQ ID NO: 629888 - DNA, 25 bp, Homo sapien
aatccccaaagaccttgcagcggcc

SEQ ID NO: 629889 - DNA, 25 bp, Homo sapien
aaagtgtccaccaagaccctcggtg

SEQ ID NO: 629890 - DNA, 25 bp, Homo sapien
cagggctcatgctgggcgttgggtc

SEQ ID NO: 629891 - DNA, 25 bp, Homo sapien
tcagggctcatgctgggcgttgggt

SEQ ID NO: 629892 - DNA, 25 bp, Homo sapien
agggctcatgctgggcgttgggtcc

SEQ ID NO: 629893 - DNA, 25 bp, Homo sapien
tctgcgttctgaaacatccccggtc

SEQ ID NO: 629894 - DNA, 25 bp, Homo sapien
ctatcctctgcgttctgaaacatcc

SEQ ID NO: 629895 - DNA, 25 bp, Homo sapien
tcctctgcgttctgaaacatccccg

SEQ ID NO: 629896 - DNA, 25 bp, Homo sapien
ctctgcgttctgaaacatccccggt

SEQ ID NO: 629897 - DNA, 25 bp, Homo sapien
tgctcatgagggctcggtaacccgg

SEQ ID NO: 629898 - DNA, 25 bp, Homo sapien
gcaagtaaaaagcacgaatccctcc

SEQ ID NO: 629899 - DNA, 25 bp, Homo sapien
gtcaaagagagaccctcgcggagac

SEQ ID NO: 629900 - DNA, 25 bp, Homo sapien
agctttgctgcgctagagccctctg

SEQ ID NO: 629901 - DNA, 25 bp, Homo sapien
cctccctggggccgttcctgggcag

SEQ ID NO: 629902 - DNA, 25 bp, Homo sapien
ctccctggggccgttcctgggcaga

SEQ ID NO: 629903 - DNA, 25 bp, Homo sapien
cgaaaacaaactcgctttgagctcc

SEQ ID NO: 629904 - DNA, 25 bp, Homo sapien
agtgcctgccctgccgaatgcggag

SEQ ID NO: 629905 - DNA, 25 bp, Homo sapien
tgaaaacagattcggttacacaggc

SEQ ID NO: 629906 - DNA, 25 bp, Homo sapien
gcgatgtggccgagagctgttttcc

SEQ ID NO: 629907 - DNA, 25 bp, Homo sapien
tacacgtagaggcatgtgtgcgagt

SEQ ID NO: 629908 - DNA, 25 bp, Homo sapien
tgtgagcacacgtgcccatgggcgt

SEQ ID NO: 629909 - DNA, 25 bp, Homo sapien
cccaccctgagcctgacgagggtga

SEQ ID NO: 629910 - DNA, 25 bp, Homo sapien
ccatcgtcgcgtggaaaaacagcac

SEQ ID NO: 629911 - DNA, 25 bp, Homo sapien
gaacgtaaagtatccgagctctcgc

SEQ ID NO: 629912 - DNA, 25 bp, Homo sapien
tgtcccatggcttagtccagcgccg

SEQ ID NO: 629913 - DNA, 25 bp, Homo sapien
ggtcagcgcctcagagaacgtaaag

SEQ ID NO: 629914 - DNA, 25 bp, Homo sapien
tccagcgccgctgaaagatgtctgt

SEQ ID NO: 629915 - DNA, 25 bp, Homo sapien
gaggttcctgcccagaggggcctct

SEQ ID NO: 629916 - DNA, 25 bp, Homo sapien
tgccccaggtgagaggttcctgccc

SEQ ID NO: 629917 - DNA, 25 bp, Homo sapien
ccgtgccccaggtgagaggttcctg

SEQ ID NO: 629918 - DNA, 25 bp, Homo sapien
agaggttcctgcccagaggggcctc

SEQ ID NO: 629919 - DNA, 25 bp, Homo sapien
ggttgcacaggcgtcactgccccag

SEQ ID NO: 629920 - DNA, 25 bp, Homo sapien
tctatagttagagccccgcagttca

SEQ ID NO: 629921 - DNA, 25 bp, Homo sapien
ggcaggttgcacaggcgtcactgcc

SEQ ID NO: 629922 - DNA, 25 bp, Homo sapien
cagggtctctatagttagagccccg

SEQ ID NO: 629923 - DNA, 25 bp, Homo sapien
gaagccctgtggccctgtgatcagc

SEQ ID NO: 629924 - DNA, 25 bp, Homo sapien
ctgtggccctgtgatcagcagctcc

SEQ ID NO: 629925 - DNA, 25 bp, Homo sapien
agccctgtggccctgtgatcagcag

SEQ ID NO: 629926 - DNA, 25 bp, Homo sapien
tggccctgtgatcagcagctccctc

SEQ ID NO: 629927 - DNA, 25 bp, Homo sapien
cctttggagtaatcaccttcctggg

SEQ ID NO: 629928 - DNA, 25 bp, Homo sapien
cagcctggggaaggtaaatggcctt

SEQ ID NO: 629929 - DNA, 25 bp, Homo sapien
tgggagcctttggagtaatcacctt

SEQ ID NO: 629930 - DNA, 25 bp, Homo sapien
tggagtaatcaccttcctgggtgcc

SEQ ID NO: 629931 - DNA, 25 bp, Homo sapien
catggaaatcgccactgctgaccca

SEQ ID NO: 629932 - DNA, 25 bp, Homo sapien
caggtggagacacacgggtcacccg

SEQ ID NO: 629933 - DNA, 25 bp, Homo sapien
ccaggtggagacacacgggtcaccc

SEQ ID NO: 629934 - DNA, 25 bp, Homo sapien
gccctctgcatggaaatcgccactg

SEQ ID NO: 629935 - DNA, 25 bp, Homo sapien
ccctgcgtgtggctgctcagacagg

SEQ ID NO: 629936 - DNA, 25 bp, Homo sapien
ggccctgcgtgtggctgctcagaca

SEQ ID NO: 629937 - DNA, 25 bp, Homo sapien
aggccctgcgtgtggctgctcagac

SEQ ID NO: 629938 - DNA, 25 bp, Homo sapien
cctgcgtgtggctgctcagacaggg

SEQ ID NO: 629939 - DNA, 25 bp, Homo sapien
aagggggctcaggtggaggacgcac

SEQ ID NO: 629940 - DNA, 25 bp, Homo sapien
tcgggaagggggctcaggtggagga

SEQ ID NO: 629941 - DNA, 25 bp, Homo sapien
ccagcagggtccggggctcgggaag

SEQ ID NO: 629942 - DNA, 25 bp, Homo sapien
cagcagggtccggggctcgggaagg

SEQ ID NO: 629943 - DNA, 25 bp, Homo sapien
gcatcaacaatttctcctcgtttcg

SEQ ID NO: 629944 - DNA, 25 bp, Homo sapien
aatggtcgtttgtgtctaagcatgc

SEQ ID NO: 629945 - DNA, 25 bp, Homo sapien
tcgtttcgtgtgaaataaatggtcg

SEQ ID NO: 629946 - DNA, 25 bp, Homo sapien
aaatgagagtttcggggcccatcca

SEQ ID NO: 629947 - DNA, 25 bp, Homo sapien
ttgacgtttccgactttctgaactg

SEQ ID NO: 629948 - DNA, 25 bp, Homo sapien
gctgctgtggagacgaacacgctcc

SEQ ID NO: 629949 - DNA, 25 bp, Homo sapien
ctcctctgggtatgcgagggcagct

SEQ ID NO: 629950 - DNA, 25 bp, Homo sapien
tccagccagcgcatcctcggagctg

SEQ ID NO: 629951 - DNA, 25 bp, Homo sapien
tcttgacctgcacagcgaccgcaaa

SEQ ID NO: 629952 - DNA, 25 bp, Homo sapien
ttcctgcagaggctcgcccatccca

SEQ ID NO: 629953 - DNA, 25 bp, Homo sapien
cctgcacagcgaccgcaaaaataaa

SEQ ID NO: 629954 - DNA, 25 bp, Homo sapien
cagcgaccgcaaaaataaaccagga

SEQ ID NO: 629955 - DNA, 25 bp, Homo sapien
ctggtggtgaagctccgcacacacc

SEQ ID NO: 629956 - DNA, 25 bp, Homo sapien
ccacgttggacacggcctcggactc

SEQ ID NO: 629957 - DNA, 25 bp, Homo sapien
gggcccacgctctggattctgaccg

SEQ ID NO: 629958 - DNA, 25 bp, Homo sapien
cgcacacaccgggcgttttctccgg

SEQ ID NO: 629959 - DNA, 25 bp, Homo sapien
acacgaatcccaacccacgacagca

SEQ ID NO: 629960 - DNA, 25 bp, Homo sapien
gaatcccaacccacgacagcagagg

SEQ ID NO: 629961 - DNA, 25 bp, Homo sapien
caacccacgacagcagaggcagaca

SEQ ID NO: 629962 - DNA, 25 bp, Homo sapien
tgcacacacgaatcccaacccacga

SEQ ID NO: 629963 - DNA, 25 bp, Homo sapien
gctggccccagcagacctgctctcc

SEQ ID NO: 629964 - DNA, 25 bp, Homo sapien
agctggccccagcagacctgctctc

SEQ ID NO: 629965 - DNA, 25 bp, Homo sapien
gagctggccccagcagacctgctct

SEQ ID NO: 629966 - DNA, 25 bp, Homo sapien
acccggccctccgttgagcccatgg

SEQ ID NO: 629967 - DNA, 25 bp, Homo sapien
ccgttgagcccatgggtcagggcaa

SEQ ID NO: 629968 - DNA, 25 bp, Homo sapien
gccctccgttgagcccatgggtcag

SEQ ID NO: 629969 - DNA, 25 bp, Homo sapien
gcccctctcatctgctcgagagctt

SEQ ID NO: 629970 - DNA, 25 bp, Homo sapien
tggcaggggtgaccaggaagaggag

SEQ ID NO: 629971 - DNA, 25 bp, Homo sapien
gcagggacgtggagagccagcgcat

SEQ ID NO: 629972 - DNA, 25 bp, Homo sapien
aggagcagggacgtggagagccagc

SEQ ID NO: 629973 - DNA, 25 bp, Homo sapien
ggaggagcagggacgtggagagcca

SEQ ID NO: 629974 - DNA, 25 bp, Homo sapien
gagtagggcgaggtcaagcaccaga

SEQ ID NO: 629975 - DNA, 25 bp, Homo sapien
gcgaggtcaagcaccagaggaaggg

SEQ ID NO: 629976 - DNA, 25 bp, Homo sapien
agggcgaggtcaagcaccagaggaa

SEQ ID NO: 629977 - DNA, 25 bp, Homo sapien
gggagtagggcgaggtcaagcacca

SEQ ID NO: 629978 - DNA, 25 bp, Homo sapien
cccatgatcaggtccaaggagcggg

SEQ ID NO: 629979 - DNA, 25 bp, Homo sapien
atcaggtccaaggagcggggccggc

SEQ ID NO: 629980 - DNA, 25 bp, Homo sapien
tcaggtccaaggagcggggccggcg

SEQ ID NO: 629981 - DNA, 25 bp, Homo sapien
ctgcccatgatcaggtccaaggagc

SEQ ID NO: 629982 - DNA, 25 bp, Homo sapien
gagcttgctctggtgcccgcatggc

SEQ ID NO: 629983 - DNA, 25 bp, Homo sapien
gcttgctctggtgcccgcatggccg

SEQ ID NO: 629984 - DNA, 25 bp, Homo sapien
ggagcttgctctggtgcccgcatgg

SEQ ID NO: 629985 - DNA, 25 bp, Homo sapien
ttgctctggtgcccgcatggccggt

SEQ ID NO: 629986 - DNA, 25 bp, Homo sapien
cctgtgctctggggtccccacacgc

SEQ ID NO: 629987 - DNA, 25 bp, Homo sapien
tgtgctctggggtccccacacgcac

SEQ ID NO: 629988 - DNA, 25 bp, Homo sapien
ctgtgctctggggtccccacacgca

SEQ ID NO: 629989 - DNA, 25 bp, Homo sapien
gagagtttgctgacaacaagggtcg

SEQ ID NO: 629990 - DNA, 25 bp, Homo sapien
tttgctgacaacaagggtcgtggcc

SEQ ID NO: 629991 - DNA, 25 bp, Homo sapien
tcagagagtttgctgacaacaaggg

SEQ ID NO: 629992 - DNA, 25 bp, Homo sapien
tgctgacaacaagggtcgtggcccg

SEQ ID NO: 629993 - DNA, 25 bp, Homo sapien
tcatgtcggccagccgggccctgtg

SEQ ID NO: 629994 - DNA, 25 bp, Homo sapien
cctgtgacgtaggtccacccttgag

SEQ ID NO: 629995 - DNA, 25 bp, Homo sapien
cacagctgttctgcctaacagcatg

SEQ ID NO: 629996 - DNA, 25 bp, Homo sapien
gagccaaacctcatgtccagggcat

SEQ ID NO: 629997 - DNA, 25 bp, Homo sapien
cacttccatcatgggtcggtccagg

SEQ ID NO: 629998 - DNA, 25 bp, Homo sapien
tggacgcctcctggaaccaaacaca

SEQ ID NO: 629999 - DNA, 25 bp, Homo sapien
gaaccaaacacacttccatcatggg

SEQ ID NO: 630000 - DNA, 25 bp, Homo sapien
atcatgggtcggtccaggaacacct

SEQ ID NO: 630001 - DNA, 25 bp, Homo sapien
ccagcacacggtcggacgggctcct

SEQ ID NO: 630002 - DNA, 25 bp, Homo sapien
gcacacggtcggacgggctcctcca

SEQ ID NO: 630003 - DNA, 25 bp, Homo sapien
ggagcagatgctggccctcgactcc

SEQ ID NO: 630004 - DNA, 25 bp, Homo sapien
agggccagcacacggtcggacgggc

SEQ ID NO: 630005 - DNA, 25 bp, Homo sapien
cgatgttgttgtacacgttgatgcc

SEQ ID NO: 630006 - DNA, 25 bp, Homo sapien
tgatgacgatgttgttgtacacgtt

SEQ ID NO: 630007 - DNA, 25 bp, Homo sapien
ttgtacacgttgatgccgtcacccc

SEQ ID NO: 630008 - DNA, 25 bp, Homo sapien
gcccctgggcatggattcagctccc

SEQ ID NO: 630009 - DNA, 25 bp, Homo sapien
ctgagcagagaagcggctataggcc

SEQ ID NO: 630010 - DNA, 25 bp, Homo sapien
ggtgtccccgcggtgacagagcaca

SEQ ID NO: 630011 - DNA, 25 bp, Homo sapien
tgtgcagaggtgtccccgcggtgac

SEQ ID NO: 630012 - DNA, 25 bp, Homo sapien
agaagcggctataggccttgtgcag

SEQ ID NO: 630013 - DNA, 25 bp, Homo sapien
gaggtggcattgtcctgccttcggg

SEQ ID NO: 630014 - DNA, 25 bp, Homo sapien
agggacagcaactcgcccaagggca

SEQ ID NO: 630015 - DNA, 25 bp, Homo sapien
cattgtcctgccttcggggagcaag

SEQ ID NO: 630016 - DNA, 25 bp, Homo sapien
ggagcaagggacagcaactcgccca

SEQ ID NO: 630017 - DNA, 25 bp, Homo sapien
tcgactgtccaatggatttggtccc

SEQ ID NO: 630018 - DNA, 25 bp, Homo sapien
aaatgctttgctagagctggtaaaa

SEQ ID NO: 630019 - DNA, 25 bp, Homo sapien
taaaatggaaccaaatcgactgtcc

SEQ ID NO: 630020 - DNA, 25 bp, Homo sapien
gacgtcgctgttcctcggatctggg

SEQ ID NO: 630021 - DNA, 25 bp, Homo sapien
gagcctcagggacctcccttgtcag

SEQ ID NO: 630022 - DNA, 25 bp, Homo sapien
agcctcagggacctcccttgtcagc

SEQ ID NO: 630023 - DNA, 25 bp, Homo sapien
ggagcctcagggacctcccttgtca

SEQ ID NO: 630024 - DNA, 25 bp, Homo sapien
gcctcagggacctcccttgtcagcc

SEQ ID NO: 630025 - DNA, 25 bp, Homo sapien
gccccaggagctaggggcggtcgct

SEQ ID NO: 630026 - DNA, 25 bp, Homo sapien
ctcccctacccggaggctgctggag

SEQ ID NO: 630027 - DNA, 25 bp, Homo sapien
gagctaggggcggtcgctgtggtga

SEQ ID NO: 630028 - DNA, 25 bp, Homo sapien
ccctcccctacccggaggctgctgg

SEQ ID NO: 630029 - DNA, 25 bp, Homo sapien
tggtttctgcccaaaatggccaccg

SEQ ID NO: 630030 - DNA, 25 bp, Homo sapien
tggggcaagagacaccttcccctgg

SEQ ID NO: 630031 - DNA, 25 bp, Homo sapien
gggccaagctcagacccggccatgg

SEQ ID NO: 630032 - DNA, 25 bp, Homo sapien
aggagggactgttggcttccaccgc

SEQ ID NO: 630033 - DNA, 25 bp, Homo sapien
gcatcttcaccaaggacgctggttg

SEQ ID NO: 630034 - DNA, 25 bp, Homo sapien
gggaagtcgtttggtgccgcatctt

SEQ ID NO: 630035 - DNA, 25 bp, Homo sapien
gacgctggttgtagtgtcccctgtg

SEQ ID NO: 630036 - DNA, 25 bp, Homo sapien
gtgccgcatcttcaccaaggacgct

SEQ ID NO: 630037 - DNA, 25 bp, Homo sapien
actgatgaggacatgtcccgcaatg

SEQ ID NO: 630038 - DNA, 25 bp, Homo sapien
cgcaatgtctctgcacactgggtgg

SEQ ID NO: 630039 - DNA, 25 bp, Homo sapien
gggaacaccggcagaatcgagagcc

SEQ ID NO: 630040 - DNA, 25 bp, Homo sapien
gacacacacttgtgcgtggagctgg

SEQ ID NO: 630041 - DNA, 25 bp, Homo sapien
caggagggacccagctaccttctgt

SEQ ID NO: 630042 - DNA, 25 bp, Homo sapien
ctaccttctgtcgtcccttccccag

SEQ ID NO: 630043 - DNA, 25 bp, Homo sapien
ggagggtgtcaagtccaggagggac

SEQ ID NO: 630044 - DNA, 25 bp, Homo sapien
tgcccccttggagggtgtcaagtcc

SEQ ID NO: 630045 - DNA, 25 bp, Homo sapien
ggctgccccattggggtgcaagtgt

SEQ ID NO: 630046 - DNA, 25 bp, Homo sapien
caggcgggctgccccattggggtgc

SEQ ID NO: 630047 - DNA, 25 bp, Homo sapien
cgggctgccccattggggtgcaagt

SEQ ID NO: 630048 - DNA, 25 bp, Homo sapien
ggcgggctgccccattggggtgcaa

SEQ ID NO: 630049 - DNA, 25 bp, Homo sapien
aaagcattagtgttttggaattagg

SEQ ID NO: 630050 - DNA, 25 bp, Homo sapien
gttttggaattaggtttgactgagc

SEQ ID NO: 630051 - DNA, 25 bp, Homo sapien
aaaagcattagtgttttggaattag

SEQ ID NO: 630052 - DNA, 25 bp, Homo sapien
ggaattaggtttgactgagcagtaa

SEQ ID NO: 630053 - DNA, 25 bp, Homo sapien
aggcgcagcccacacgagatgctgg

SEQ ID NO: 630054 - DNA, 25 bp, Homo sapien
cggaggcatgtagcctccaaggaag

SEQ ID NO: 630055 - DNA, 25 bp, Homo sapien
cctcccggctgtagggcaaggcaga

SEQ ID NO: 630056 - DNA, 25 bp, Homo sapien
gcaaggcagaggaactcggaggcat

SEQ ID NO: 630057 - DNA, 25 bp, Homo sapien
caagacaagagcgagtttggaaaag

SEQ ID NO: 630058 - DNA, 25 bp, Homo sapien
tcagccggcagaaagggccacgtgt

SEQ ID NO: 630059 - DNA, 25 bp, Homo sapien
acaagagcgagtttggaaaagggca

SEQ ID NO: 630060 - DNA, 25 bp, Homo sapien
gaggcacaagacaagagcgagtttg

SEQ ID NO: 630061 - DNA, 25 bp, Homo sapien
gggccgtggctggaaagcacggagt

SEQ ID NO: 630062 - DNA, 25 bp, Homo sapien
ttcagcttgctgactgcggcagagg

SEQ ID NO: 630063 - DNA, 25 bp, Homo sapien
ctggaaagcacggagtggtggcggc

SEQ ID NO: 630064 - DNA, 25 bp, Homo sapien
gggaggcggcctccggcaggcgcgg

SEQ ID NO: 630065 - DNA, 25 bp, Homo sapien
gaacttgcagtatcccccactgagg

SEQ ID NO: 630066 - DNA, 25 bp, Homo sapien
cagggattcccgagctgagcggcgg

SEQ ID NO: 630067 - DNA, 25 bp, Homo sapien
cccggccgggactcggcacttctgc

SEQ ID NO: 630068 - DNA, 25 bp, Homo sapien
attcccgagctgagcggcggcgagg

SEQ ID NO: 630069 - DNA, 25 bp, Homo sapien
cgactggcatttgtcatgacttggg

SEQ ID NO: 630070 - DNA, 25 bp, Homo sapien
tcaccacctgatcctggccccaatt

SEQ ID NO: 630071 - DNA, 25 bp, Homo sapien
ggcttgagagtctccggaaacccag

SEQ ID NO: 630072 - DNA, 25 bp, Homo sapien
cttgcctctgtccaaggcgactggc

SEQ ID NO: 630073 - DNA, 25 bp, Homo sapien
agagatgggacgaccagccagcgtc

SEQ ID NO: 630074 - DNA, 25 bp, Homo sapien
gggacgaccagccagcgtcacacag

SEQ ID NO: 630075 - DNA, 25 bp, Homo sapien
agcctgtgaggacagtctgccagtt

SEQ ID NO: 630076 - DNA, 25 bp, Homo sapien
gcctgtgaggacagtctgccagttc

SEQ ID NO: 630077 - DNA, 25 bp, Homo sapien
tgtgcctgccaccaacgagcggggt

SEQ ID NO: 630078 - DNA, 25 bp, Homo sapien
gctcattgtccccatcacacgggcc

SEQ ID NO: 630079 - DNA, 25 bp, Homo sapien
attgtccccatcacacgggcctgtg

SEQ ID NO: 630080 - DNA, 25 bp, Homo sapien
ctgtgcctgccaccaacgagcgggg

SEQ ID NO: 630081 - DNA, 25 bp, Homo sapien
taaagtggggacagcaaaatgctct

SEQ ID NO: 630082 - DNA, 25 bp, Homo sapien
gagtgcagcatagagcccctgcaga

SEQ ID NO: 630083 - DNA, 25 bp, Homo sapien
tcctcttagggatgccttgagtgca

SEQ ID NO: 630084 - DNA, 25 bp, Homo sapien
taagtgctgtgtgccggctgttact

SEQ ID NO: 630085 - DNA, 25 bp, Homo sapien
ggcctcgtggtcagccccgcaaggg

SEQ ID NO: 630086 - DNA, 25 bp, Homo sapien
gctgtcggggcttactgcttgctcc

SEQ ID NO: 630087 - DNA, 25 bp, Homo sapien
tgcttgggtccttgctcaggcgtcc

SEQ ID NO: 630088 - DNA, 25 bp, Homo sapien
tggccttgctgtcggggcttactgc

SEQ ID NO: 630089 - DNA, 25 bp, Homo sapien
ccgctgtcccatacggcgccagcta

SEQ ID NO: 630090 - DNA, 25 bp, Homo sapien
cgccagctacatgagcctcctgaag

SEQ ID NO: 630091 - DNA, 25 bp, Homo sapien
tggcgctgggcctgtctccacattc

SEQ ID NO: 630092 - DNA, 25 bp, Homo sapien
ctggcgctgggcctgtctccacatt

SEQ ID NO: 630093 - DNA, 25 bp, Homo sapien
gccccctgctccccggctgctcctt

SEQ ID NO: 630094 - DNA, 25 bp, Homo sapien
ctgctccccggctgctccttccggc

SEQ ID NO: 630095 - DNA, 25 bp, Homo sapien
tgcaaggcgggactccaggccctgc

SEQ ID NO: 630096 - DNA, 25 bp, Homo sapien
ctgcaaggcgggactccaggccctg

SEQ ID NO: 630097 - DNA, 25 bp, Homo sapien
gtttgctctggcaccatccaggcca

SEQ ID NO: 630098 - DNA, 25 bp, Homo sapien
atccaggccacagtctccgtgctcc

SEQ ID NO: 630099 - DNA, 25 bp, Homo sapien
ctcctgtttgctctggcaccatcca

SEQ ID NO: 630100 - DNA, 25 bp, Homo sapien
cctgtttgctctggcaccatccagg

SEQ ID NO: 630101 - DNA, 25 bp, Homo sapien
ctccgcagaccggatggtgtggccc

SEQ ID NO: 630102 - DNA, 25 bp, Homo sapien
acttgggacactcagcggtggccca

SEQ ID NO: 630103 - DNA, 25 bp, Homo sapien
gcttgtgtggtgaactcccctcgtg

SEQ ID NO: 630104 - DNA, 25 bp, Homo sapien
aatcagatggtccttcccggcaatg

SEQ ID NO: 630105 - DNA, 25 bp, Homo sapien
agaccccgaatccacggctgtggcg

SEQ ID NO: 630106 - DNA, 25 bp, Homo sapien
tgtgccacattctgagcacagacat

SEQ ID NO: 630107 - DNA, 25 bp, Homo sapien
gtgtgaatttctgcccacgatagag

SEQ ID NO: 630108 - DNA, 25 bp, Homo sapien
ccctgccggggcgtgtgtgccacat

SEQ ID NO: 630109 - DNA, 25 bp, Homo sapien
tcctgctggtgcaggaatgccaagg

SEQ ID NO: 630110 - DNA, 25 bp, Homo sapien
ggtgagagacctgccctcatccaca

SEQ ID NO: 630111 - DNA, 25 bp, Homo sapien
aaagctgaacacatatgaacgcggc

SEQ ID NO: 630112 - DNA, 25 bp, Homo sapien
tggcactggtgaggcgcctccctca

SEQ ID NO: 630113 - DNA, 25 bp, Homo sapien
tgaccctccaagggtactggccctg

SEQ ID NO: 630114 - DNA, 25 bp, Homo sapien
gtgcacctcccccactgaataagcc

SEQ ID NO: 630115 - DNA, 25 bp, Homo sapien
gtgggagcagccctcatcaagccac

SEQ ID NO: 630116 - DNA, 25 bp, Homo sapien
aagccaccgctgactgggaccacgg

SEQ ID NO: 630117 - DNA, 25 bp, Homo sapien
aaatactggcttcaagaaacccaag

SEQ ID NO: 630118 - DNA, 25 bp, Homo sapien
gccgcggtgggcgactagggacagc

SEQ ID NO: 630119 - DNA, 25 bp, Homo sapien
gggcgactagggacagctcgggtgt

SEQ ID NO: 630120 - DNA, 25 bp, Homo sapien
ctgctgggacgtaagatactatggg

SEQ ID NO: 630121 - DNA, 25 bp, Homo sapien
tgagtgggccgctggtccgggcaca

SEQ ID NO: 630122 - DNA, 25 bp, Homo sapien
agtgggccgctggtccgggcacagt

SEQ ID NO: 630123 - DNA, 25 bp, Homo sapien
gtgggccgctggtccgggcacagtg

SEQ ID NO: 630124 - DNA, 25 bp, Homo sapien
ctgctgggagcccattgttcgtgga

SEQ ID NO: 630125 - DNA, 25 bp, Homo sapien
tgttcgtggatttccagaaagaggg

SEQ ID NO: 630126 - DNA, 25 bp, Homo sapien
gctgggagcccattgttcgtggatt

SEQ ID NO: 630127 - DNA, 25 bp, Homo sapien
ggagcccattgttcgtggatttcca

SEQ ID NO: 630128 - DNA, 25 bp, Homo sapien
agctgtggggtcagctccagggaag

SEQ ID NO: 630129 - DNA, 25 bp, Homo sapien
gctccagggaagtggcctgctcagc

SEQ ID NO: 630130 - DNA, 25 bp, Homo sapien
gtcagctccagggaagtggcctgct

SEQ ID NO: 630131 - DNA, 25 bp, Homo sapien
gctgtggggtcagctccagggaagt

SEQ ID NO: 630132 - DNA, 25 bp, Homo sapien
tgcagtgaacaagaagcgcacagcc

SEQ ID NO: 630133 - DNA, 25 bp, Homo sapien
ccagagccggaacaaaagacagaga

SEQ ID NO: 630134 - DNA, 25 bp, Homo sapien
cacagcttaacacgagctttggagg

SEQ ID NO: 630135 - DNA, 25 bp, Homo sapien
cagcccgagagagccctaagtgttc

SEQ ID NO: 630136 - DNA, 25 bp, Homo sapien
tggctcctccgccttttggctgctg

SEQ ID NO: 630137 - DNA, 25 bp, Homo sapien
ggtgctgtattagtcaggtcttgca

SEQ ID NO: 630138 - DNA, 25 bp, Homo sapien
tctgtcatcagctgacaagcctgtg

SEQ ID NO: 630139 - DNA, 25 bp, Homo sapien
tatgaggagaggtttagctggctca

SEQ ID NO: 630140 - DNA, 25 bp, Homo sapien
taagtatgcattaatagctgtaatc

SEQ ID NO: 630141 - DNA, 25 bp, Homo sapien
ttaagtatgcattaatagctgtaat

SEQ ID NO: 630142 - DNA, 25 bp, Homo sapien
agtatgcattaatagctgtaatcac

SEQ ID NO: 630143 - DNA, 25 bp, Homo sapien
aagtatgcattaatagctgtaatca

SEQ ID NO: 630144 - DNA, 25 bp, Homo sapien
ggcaaaggtgacatcagcaaggatt

SEQ ID NO: 630145 - DNA, 25 bp, Homo sapien
caaaggtgacatcagcaaggattgg

SEQ ID NO: 630146 - DNA, 25 bp, Homo sapien
aaaggtgacatcagcaaggattggg

SEQ ID NO: 630147 - DNA, 25 bp, Homo sapien
ctggcaaaggtgacatcagcaagga

SEQ ID NO: 630148 - DNA, 25 bp, Homo sapien
gacatgagtccagcagcgattttcc

SEQ ID NO: 630149 - DNA, 25 bp, Homo sapien
cgatggtagccacattgatgatgcc

SEQ ID NO: 630150 - DNA, 25 bp, Homo sapien
cggtttcatccacgcaggctgacat

SEQ ID NO: 630151 - DNA, 25 bp, Homo sapien
tggagaaacgtctcagaggtccccg

SEQ ID NO: 630152 - DNA, 25 bp, Homo sapien
agccacgcgccgcttcattcatccg

SEQ ID NO: 630153 - DNA, 25 bp, Homo sapien
ggcagccacgcgccgcttcattcat

SEQ ID NO: 630154 - DNA, 25 bp, Homo sapien
cacgcgccgcttcattcatccgctg

SEQ ID NO: 630155 - DNA, 25 bp, Homo sapien
ccggcagccacgcgccgcttcattc

SEQ ID NO: 630156 - DNA, 25 bp, Homo sapien
aatttggcctccgattccgctcggt

SEQ ID NO: 630157 - DNA, 25 bp, Homo sapien
ggaagcggcgaatttggcctccgat

SEQ ID NO: 630158 - DNA, 25 bp, Homo sapien
ttcgcctcggtcctcctgcgggcga

SEQ ID NO: 630159 - DNA, 25 bp, Homo sapien
gactcgggagctcctacctgcgcag

SEQ ID NO: 630160 - DNA, 25 bp, Homo sapien
tgtaggcacaatactaagctcgatg

SEQ ID NO: 630161 - DNA, 25 bp, Homo sapien
catccggatcgaagaccttgtaggc

SEQ ID NO: 630162 - DNA, 25 bp, Homo sapien
gacccaacacgttccagtggacgag

SEQ ID NO: 630163 - DNA, 25 bp, Homo sapien
taacactcatggagacatccggatc

SEQ ID NO: 630164 - DNA, 25 bp, Homo sapien
tgacctcgcacaggcgagcaggcag

SEQ ID NO: 630165 - DNA, 25 bp, Homo sapien
aagccattgctttgtatggggccga

SEQ ID NO: 630166 - DNA, 25 bp, Homo sapien
tgtatggggccgacaatgaaggatt

SEQ ID NO: 630167 - DNA, 25 bp, Homo sapien
ctggtgacctcgcacaggcgagcag

SEQ ID NO: 630168 - DNA, 25 bp, Homo sapien
gcagcggcttcttccgatccacacc

SEQ ID NO: 630169 - DNA, 25 bp, Homo sapien
tgcatggatacagcccccactacgg

SEQ ID NO: 630170 - DNA, 25 bp, Homo sapien
tgatgcatggatacagcccccacta

SEQ ID NO: 630171 - DNA, 25 bp, Homo sapien
ggcttcttccgatccacaccctcag

SEQ ID NO: 630172 - DNA, 25 bp, Homo sapien
catggatacgtcctaagcactggca

SEQ ID NO: 630173 - DNA, 25 bp, Homo sapien
catttactgagcgtgccgttctgag

SEQ ID NO: 630174 - DNA, 25 bp, Homo sapien
cgtgcggtgcaggacttacatttca

SEQ ID NO: 630175 - DNA, 25 bp, Homo sapien
tgactcagggctaaaggacaacagg

SEQ ID NO: 630176 - DNA, 25 bp, Homo sapien
gtgcagccgctgttgaccttggaca

SEQ ID NO: 630177 - DNA, 25 bp, Homo sapien
gctgttgaccttggacactgccggg

SEQ ID NO: 630178 - DNA, 25 bp, Homo sapien
gccgtatttggaggcctcggacagc

SEQ ID NO: 630179 - DNA, 25 bp, Homo sapien
cagagattccacagcattcatgcct

SEQ ID NO: 630180 - DNA, 25 bp, Homo sapien
gaggtctcgccctctcagcgaatgg

SEQ ID NO: 630181 - DNA, 25 bp, Homo sapien
gctgctgtgaagaatcccgctgggt

SEQ ID NO: 630182 - DNA, 25 bp, Homo sapien
agccccaggctccttgggacgaagg

SEQ ID NO: 630183 - DNA, 25 bp, Homo sapien
gcagggtgctaacacccgctgtgca

SEQ ID NO: 630184 - DNA, 25 bp, Homo sapien
acgcagtgggagtggcctcagcggg

SEQ ID NO: 630185 - DNA, 25 bp, Homo sapien
ggagtggccaagtggtatccgaggg

SEQ ID NO: 630186 - DNA, 25 bp, Homo sapien
tgacctcgaggcttcagccacgcag

SEQ ID NO: 630187 - DNA, 25 bp, Homo sapien
ctcgaggcttcagccacgcagtggg

SEQ ID NO: 630188 - DNA, 25 bp, Homo sapien
gccatgcttctcggcccagagctgg

SEQ ID NO: 630189 - DNA, 25 bp, Homo sapien
gtgtgcccggggatgccctcctgct

SEQ ID NO: 630190 - DNA, 25 bp, Homo sapien
ggtgtggtcaagcccgttttccatg

SEQ ID NO: 630191 - DNA, 25 bp, Homo sapien
gagacgtaccgcacctcatgggtcc

SEQ ID NO: 630192 - DNA, 25 bp, Homo sapien
cagtcatcccctgcaggaatgcggc

SEQ ID NO: 630193 - DNA, 25 bp, Homo sapien
aacaggatgcccttgggcgtgttga

SEQ ID NO: 630194 - DNA, 25 bp, Homo sapien
ggaatgcggccgcacacaggaagaa

SEQ ID NO: 630195 - DNA, 25 bp, Homo sapien
cccgctctggtagctgtgcaggtca

SEQ ID NO: 630196 - DNA, 25 bp, Homo sapien
ttggcagggcacgtcctgacacccg

SEQ ID NO: 630197 - DNA, 25 bp, Homo sapien
tgtccgcacacaccgcgccggggtt

SEQ ID NO: 630198 - DNA, 25 bp, Homo sapien
gggttggcagggcacgtcctgacac

SEQ ID NO: 630199 - DNA, 25 bp, Homo sapien
cacgtcctgacacccgcgtccaact

SEQ ID NO: 630200 - DNA, 25 bp, Homo sapien
ttgacgttctcatccaggtaggtga

SEQ ID NO: 630201 - DNA, 25 bp, Homo sapien
catgaagaccagctggtagcgggac

SEQ ID NO: 630202 - DNA, 25 bp, Homo sapien
taggtgacgcccagcgtgtagaggg

SEQ ID NO: 630203 - DNA, 25 bp, Homo sapien
tggcacccacgccatgcaggaactg

SEQ ID NO: 630204 - DNA, 25 bp, Homo sapien
aatgtagacgggcgagcagctggac

SEQ ID NO: 630205 - DNA, 25 bp, Homo sapien
caatgtagacgggcgagcagctgga

SEQ ID NO: 630206 - DNA, 25 bp, Homo sapien
cgtcggcccatttccgtgtagatat

SEQ ID NO: 630207 - DNA, 25 bp, Homo sapien
tcagcagggcacctccaatcaggta

SEQ ID NO: 630208 - DNA, 25 bp, Homo sapien
gcacctccaatcaggtagccggcag

SEQ ID NO: 630209 - DNA, 25 bp, Homo sapien
catttccgtgtagatattcagcagg

SEQ ID NO: 630210 - DNA, 25 bp, Homo sapien
cagctgccgagggtaaccaaggatg

SEQ ID NO: 630211 - DNA, 25 bp, Homo sapien
aacggcggtgaagaaagcagcggcc

SEQ ID NO: 630212 - DNA, 25 bp, Homo sapien
aggaagccgacccaccaggcgccga

SEQ ID NO: 630213 - DNA, 25 bp, Homo sapien
cgacccacagtgggctctcggtggt

SEQ ID NO: 630214 - DNA, 25 bp, Homo sapien
tctcatgaccgcgtagcgctgggag

SEQ ID NO: 630215 - DNA, 25 bp, Homo sapien
gtccttcaactggtgcatttccgcc

SEQ ID NO: 630216 - DNA, 25 bp, Homo sapien
gcaggtctctgatggttttcccaaa

SEQ ID NO: 630217 - DNA, 25 bp, Homo sapien
agtccgggttgctcgcctccccacg

SEQ ID NO: 630218 - DNA, 25 bp, Homo sapien
gctcggctgaaattctcgtgttgaa

SEQ ID NO: 630219 - DNA, 25 bp, Homo sapien
gaaaaaggcaagacgatggaggaca

SEQ ID NO: 630220 - DNA, 25 bp, Homo sapien
tggctgcgttaggaggccctgactc

SEQ ID NO: 630221 - DNA, 25 bp, Homo sapien
tcttaatcactgattgctcggctga

SEQ ID NO: 630222 - DNA, 25 bp, Homo sapien
ttcctgacttgaggattgaaaagcc

SEQ ID NO: 630223 - DNA, 25 bp, Homo sapien
ctcttctttctggttaactacttgg

SEQ ID NO: 630224 - DNA, 25 bp, Homo sapien
aatttatttcctgacttgaggattg

SEQ ID NO: 630225 - DNA, 25 bp, Homo sapien
tttatttcctgacttgaggattgaa

SEQ ID NO: 630226 - DNA, 25 bp, Homo sapien
acacctagagcctggttccgatgaa

SEQ ID NO: 630227 - DNA, 25 bp, Homo sapien
gcctggaacattcaaatgctcttgt

SEQ ID NO: 630228 - DNA, 25 bp, Homo sapien
aacgcaactctgaatgcctggaaca

SEQ ID NO: 630229 - DNA, 25 bp, Homo sapien
tcttgtttgaggaggtggccaaatg

SEQ ID NO: 630230 - DNA, 25 bp, Homo sapien
caggatgaacgtggggttcttcagc

SEQ ID NO: 630231 - DNA, 25 bp, Homo sapien
aggcagagcaggatgaacgtggggt

SEQ ID NO: 630232 - DNA, 25 bp, Homo sapien
tggacatgccggtgatgagagtggc

SEQ ID NO: 630233 - DNA, 25 bp, Homo sapien
ctgaacgtggacatgccggtgatga

SEQ ID NO: 630234 - DNA, 25 bp, Homo sapien
tctgaggcactcaggctgaactggg

SEQ ID NO: 630235 - DNA, 25 bp, Homo sapien
tgaactgggactccaagaacttggg

SEQ ID NO: 630236 - DNA, 25 bp, Homo sapien
gtggcagcttctgaggcactcaggc

SEQ ID NO: 630237 - DNA, 25 bp, Homo sapien
caaacaaggtggcagcttctgaggc

SEQ ID NO: 630238 - DNA, 25 bp, Homo sapien
tgtgacgcccgccatgggcacactg

SEQ ID NO: 630239 - DNA, 25 bp, Homo sapien
ctcccgccgtagctggctgtgacgc

SEQ ID NO: 630240 - DNA, 25 bp, Homo sapien
ccagcaggctgacaacggtgcagaa

SEQ ID NO: 630241 - DNA, 25 bp, Homo sapien
agaacttgatgaccgcggagccccg

SEQ ID NO: 630242 - DNA, 25 bp, Homo sapien
ctcacgcaaggaaggcacacccatg

SEQ ID NO: 630243 - DNA, 25 bp, Homo sapien
ccttctggtgatagaatggtttttc

SEQ ID NO: 630244 - DNA, 25 bp, Homo sapien
ttcctcctcacgcaaggaaggcaca

SEQ ID NO: 630245 - DNA, 25 bp, Homo sapien
catgccccccagcaccgtccgcctg

SEQ ID NO: 630246 - DNA, 25 bp, Homo sapien
gagccgttaggttcaggtggccttc

SEQ ID NO: 630247 - DNA, 25 bp, Homo sapien
ctgcgtggcacagtgagaagtacat

SEQ ID NO: 630248 - DNA, 25 bp, Homo sapien
caggcagcgttgcagggagccgtta

SEQ ID NO: 630249 - DNA, 25 bp, Homo sapien
atgaggccgtccgagccgcacacag

SEQ ID NO: 630250 - DNA, 25 bp, Homo sapien
tggccgtccacattcgtctccgtgg

SEQ ID NO: 630251 - DNA, 25 bp, Homo sapien
gtccacattcgtctccgtggctgca

SEQ ID NO: 630252 - DNA, 25 bp, Homo sapien
ttctggccgtccacattcgtctccg

SEQ ID NO: 630253 - DNA, 25 bp, Homo sapien
attcgtctccgtggctgcagggcac

SEQ ID NO: 630254 - DNA, 25 bp, Homo sapien
ccaacaatagctccgattacaaggg

SEQ ID NO: 630255 - DNA, 25 bp, Homo sapien
ggaagcccaacaatagctccgatta

SEQ ID NO: 630256 - DNA, 25 bp, Homo sapien
ctgggaagcccaacaatagctccga

SEQ ID NO: 630257 - DNA, 25 bp, Homo sapien
gcccaacaatagctccgattacaag

SEQ ID NO: 630258 - DNA, 25 bp, Homo sapien
caagttgaagtgcatttccctgcag

SEQ ID NO: 630259 - DNA, 25 bp, Homo sapien
tccctgcagtggcatggccaaaacc

SEQ ID NO: 630260 - DNA, 25 bp, Homo sapien
ctttctctgacaagttgaagtgcat

SEQ ID NO: 630261 - DNA, 25 bp, Homo sapien
gggatacagctacagtctcggtaca

SEQ ID NO: 630262 - DNA, 25 bp, Homo sapien
gtagagttgccgttagtgcaggaat

SEQ ID NO: 630263 - DNA, 25 bp, Homo sapien
tagagttgccgttagtgcaggaatg

SEQ ID NO: 630264 - DNA, 25 bp, Homo sapien
cgtagagttgccgttagtgcaggaa

SEQ ID NO: 630265 - DNA, 25 bp, Homo sapien
tgcaaggaaagctctggacaagcgc

SEQ ID NO: 630266 - DNA, 25 bp, Homo sapien
cagacaggcccgcttagacctgggt

SEQ ID NO: 630267 - DNA, 25 bp, Homo sapien
tgcaatagaaaaccacagcgtcagc

SEQ ID NO: 630268 - DNA, 25 bp, Homo sapien
agtgggaagcccctcgtcagagatc

SEQ ID NO: 630269 - DNA, 25 bp, Homo sapien
ccagggcaaaggatctctgagggtc

SEQ ID NO: 630270 - DNA, 25 bp, Homo sapien
cagggcaaaggatctctgagggtca

SEQ ID NO: 630271 - DNA, 25 bp, Homo sapien
ggatctctgagggtcacggacacat

SEQ ID NO: 630272 - DNA, 25 bp, Homo sapien
gcaaaggatctctgagggtcacgga

SEQ ID NO: 630273 - DNA, 25 bp, Homo sapien
agtgagcacactgtgcaactgacca

SEQ ID NO: 630274 - DNA, 25 bp, Homo sapien
gtgagcacactgtgcaactgaccat

SEQ ID NO: 630275 - DNA, 25 bp, Homo sapien
tgagcacactgtgcaactgaccatg

SEQ ID NO: 630276 - DNA, 25 bp, Homo sapien
gagcacactgtgcaactgaccatgg

SEQ ID NO: 630277 - DNA, 25 bp, Homo sapien
gatactggccgttggagttctcagg

SEQ ID NO: 630278 - DNA, 25 bp, Homo sapien
ggcattggggctgcgagtttcccat

SEQ ID NO: 630279 - DNA, 25 bp, Homo sapien
cctttctttgggcattcggcattgg

SEQ ID NO: 630280 - DNA, 25 bp, Homo sapien
ggaaggtgatactggccgttggagt

SEQ ID NO: 630281 - DNA, 25 bp, Homo sapien
cagcagacaggccttgtcgatcacc

SEQ ID NO: 630282 - DNA, 25 bp, Homo sapien
gtacaggagccccatgatgagtatg

SEQ ID NO: 630283 - DNA, 25 bp, Homo sapien
gatgagtatgtagcggctcatggcc

SEQ ID NO: 630284 - DNA, 25 bp, Homo sapien
ttctggtacaccaagcaggagccct

SEQ ID NO: 630285 - DNA, 25 bp, Homo sapien
ctgtcccctccctgggcctgcttac

SEQ ID NO: 630286 - DNA, 25 bp, Homo sapien
ctctgtcccctccctgggcctgctt

SEQ ID NO: 630287 - DNA, 25 bp, Homo sapien
tctgtcccctccctgggcctgctta

SEQ ID NO: 630288 - DNA, 25 bp, Homo sapien
cctctgtcccctccctgggcctgct

SEQ ID NO: 630289 - DNA, 25 bp, Homo sapien
gtgaaacctcagatgagggggaaac

SEQ ID NO: 630290 - DNA, 25 bp, Homo sapien
aacctcagatgagggggaaaccgag

SEQ ID NO: 630291 - DNA, 25 bp, Homo sapien
agtgaaacctcagatgagggggaaa

SEQ ID NO: 630292 - DNA, 25 bp, Homo sapien
tgaaacctcagatgagggggaaacc

SEQ ID NO: 630293 - DNA, 25 bp, Homo sapien
cagagacgcgcctaacagagagtca

SEQ ID NO: 630294 - DNA, 25 bp, Homo sapien
taagggtagtactaagcccagccaa

SEQ ID NO: 630295 - DNA, 25 bp, Homo sapien
catgaatagcctggacacgctggac

SEQ ID NO: 630296 - DNA, 25 bp, Homo sapien
caaagggagaatccgagtcctgggc

SEQ ID NO: 630297 - DNA, 25 bp, Homo sapien
cggctccctgggaaagtacagcagc

SEQ ID NO: 630298 - DNA, 25 bp, Homo sapien
gatgcatccaacacagcaaagagag

SEQ ID NO: 630299 - DNA, 25 bp, Homo sapien
gatggctgcgtgtggagggctctca

SEQ ID NO: 630300 - DNA, 25 bp, Homo sapien
cccagctaagggatgcatccaacac

SEQ ID NO: 630301 - DNA, 25 bp, Homo sapien
cactatgatttccacgctgggcgtg

SEQ ID NO: 630302 - DNA, 25 bp, Homo sapien
cagagcctttggatactggtgggcc

SEQ ID NO: 630303 - DNA, 25 bp, Homo sapien
caattaacatggacgcatgcgctgc

SEQ ID NO: 630304 - DNA, 25 bp, Homo sapien
taaccggtttgtagagcagacgcca

SEQ ID NO: 630305 - DNA, 25 bp, Homo sapien
ccgacaggggcttgtataagaagca

SEQ ID NO: 630306 - DNA, 25 bp, Homo sapien
cgacaggggcttgtataagaagcag

SEQ ID NO: 630307 - DNA, 25 bp, Homo sapien
tcagacgctgctctggagctggcta

SEQ ID NO: 630308 - DNA, 25 bp, Homo sapien
cagacgctgctctggagctggctat

SEQ ID NO: 630309 - DNA, 25 bp, Homo sapien
catagaaataaagcacgcggtacgg

SEQ ID NO: 630310 - DNA, 25 bp, Homo sapien
gttgcaggtcaaatagaagttcccg

SEQ ID NO: 630311 - DNA, 25 bp, Homo sapien
gattgcatcacccaacggcactgtt

SEQ ID NO: 630312 - DNA, 25 bp, Homo sapien
tccacagggctgactacaggacgtg

SEQ ID NO: 630313 - DNA, 25 bp, Homo sapien
aacaattttactgtgacacgtttat

SEQ ID NO: 630314 - DNA, 25 bp, Homo sapien
gaacatatgtacactcatgtatgta

SEQ ID NO: 630315 - DNA, 25 bp, Homo sapien
cacgtttatataagaacatatgtac

SEQ ID NO: 630316 - DNA, 25 bp, Homo sapien
tccatctcccacaaaaactgcattt

SEQ ID NO: 630317 - DNA, 25 bp, Homo sapien
ccagcatacacccagtcgctttggg

SEQ ID NO: 630318 - DNA, 25 bp, Homo sapien
cgaagtctcactgccggcagggaga

SEQ ID NO: 630319 - DNA, 25 bp, Homo sapien
gatggatgccttgcaatgccgatga

SEQ ID NO: 630320 - DNA, 25 bp, Homo sapien
gcttggtggcctcatccatcacgca

SEQ ID NO: 630321 - DNA, 25 bp, Homo sapien
cattcgggctggtgcactttttgac

SEQ ID NO: 630322 - DNA, 25 bp, Homo sapien
cattctttctgattgacggccaagc

SEQ ID NO: 630323 - DNA, 25 bp, Homo sapien
ggccaagcaagacccactgtgtgga

SEQ ID NO: 630324 - DNA, 25 bp, Homo sapien
gatttacctactcatcagccagttg

SEQ ID NO: 630325 - DNA, 25 bp, Homo sapien
cgcgtggtcacgtgagatctttgcg

SEQ ID NO: 630326 - DNA, 25 bp, Homo sapien
gcgtggtcacgtgagatctttgcgt

SEQ ID NO: 630327 - DNA, 25 bp, Homo sapien
catcacggccttggtgaaaatccaa

SEQ ID NO: 630328 - DNA, 25 bp, Homo sapien
tatttccttagaacgggcgcatctg

SEQ ID NO: 630329 - DNA, 25 bp, Homo sapien
gaagcaaatgcattctctcccagga

SEQ ID NO: 630330 - DNA, 25 bp, Homo sapien
acgttgtcagaaagccgagactcca

SEQ ID NO: 630331 - DNA, 25 bp, Homo sapien
cttggccttcagtgtagacgcccca

SEQ ID NO: 630332 - DNA, 25 bp, Homo sapien
gctgtgtggcgtttggtcaacttca

SEQ ID NO: 630333 - DNA, 25 bp, Homo sapien
gacgccactgcgtggtttcttccgc

SEQ ID NO: 630334 - DNA, 25 bp, Homo sapien
tgccctggacgccactgcgtggttt

SEQ ID NO: 630335 - DNA, 25 bp, Homo sapien
ccttagagaccgtccatttatggga

SEQ ID NO: 630336 - DNA, 25 bp, Homo sapien
tgtcagaggaaattaactgtgctcg

SEQ ID NO: 630337 - DNA, 25 bp, Homo sapien
gatgagggcctgacttgattcctta

SEQ ID NO: 630338 - DNA, 25 bp, Homo sapien
tggctccaagactaaccacaggagg

SEQ ID NO: 630339 - DNA, 25 bp, Homo sapien
ggtgatgtctgcgagccctggcttc

SEQ ID NO: 630340 - DNA, 25 bp, Homo sapien
ctggcttctgcacgagcaccggtgt

SEQ ID NO: 630341 - DNA, 25 bp, Homo sapien
cctcagtgcctagggtgatgtctgc

SEQ ID NO: 630342 - DNA, 25 bp, Homo sapien
ttcgggcagctggtatcctcagtgc

SEQ ID NO: 630343 - DNA, 25 bp, Homo sapien
cgcgcaggcgcaaagcaggcacaga

SEQ ID NO: 630344 - DNA, 25 bp, Homo sapien
gggtcgttcacctgccgcgcaggcg

SEQ ID NO: 630345 - DNA, 25 bp, Homo sapien
gggctggggtcgttcacctgccgcg

SEQ ID NO: 630346 - DNA, 25 bp, Homo sapien
ccgcgcaggcgcaaagcaggcacag

SEQ ID NO: 630347 - DNA, 25 bp, Homo sapien
caagtgggttcctggtggccgtggg

SEQ ID NO: 630348 - DNA, 25 bp, Homo sapien
ccactcaccggttgccaagtgggtt

SEQ ID NO: 630349 - DNA, 25 bp, Homo sapien
ttctgcggggtcacagagagcccat

SEQ ID NO: 630350 - DNA, 25 bp, Homo sapien
gggtcacagagagcccatccctcat

SEQ ID NO: 630351 - DNA, 25 bp, Homo sapien
agtgtggacccccttttggtcacag

SEQ ID NO: 630352 - DNA, 25 bp, Homo sapien
gtgcctccggccatgcgcttctgca

SEQ ID NO: 630353 - DNA, 25 bp, Homo sapien
caaaaacgttggcacaggagggcac

SEQ ID NO: 630354 - DNA, 25 bp, Homo sapien
ggaatctcttttagcaaccagcaag

SEQ ID NO: 630355 - DNA, 25 bp, Homo sapien
agcaggaagagagcacggtccacgt

SEQ ID NO: 630356 - DNA, 25 bp, Homo sapien
gaagagagcacggtccacgttgccc

SEQ ID NO: 630357 - DNA, 25 bp, Homo sapien
caggaagagagcacggtccacgttg

SEQ ID NO: 630358 - DNA, 25 bp, Homo sapien
gagagcacggtccacgttgcccaca

SEQ ID NO: 630359 - DNA, 25 bp, Homo sapien
agagcggctctccatgtggagcagc

SEQ ID NO: 630360 - DNA, 25 bp, Homo sapien
gtgtccaggagaccgggcccggaga

SEQ ID NO: 630361 - DNA, 25 bp, Homo sapien
ccagcttgctggactgtgaacaggg

SEQ ID NO: 630362 - DNA, 25 bp, Homo sapien
gggagaaaccttgcccacgaagctc

SEQ ID NO: 630363 - DNA, 25 bp, Homo sapien
ttgccgtggctgtcttgtgcgctag

SEQ ID NO: 630364 - DNA, 25 bp, Homo sapien
ctttgcctgagtgggacacactcgg

SEQ ID NO: 630365 - DNA, 25 bp, Homo sapien
ctctgcctttgcctgagtgggacac

SEQ ID NO: 630366 - DNA, 25 bp, Homo sapien
tggaggggggtcacacactctgcct

SEQ ID NO: 630367 - DNA, 25 bp, Homo sapien
cattggctagcttaccctgagtccc

SEQ ID NO: 630368 - DNA, 25 bp, Homo sapien
gtgggggtccctgcttgtttcattg

SEQ ID NO: 630369 - DNA, 25 bp, Homo sapien
tgagtccctccaacgctcagttggc

SEQ ID NO: 630370 - DNA, 25 bp, Homo sapien
ctcagttggcgctcactgggtttgt

SEQ ID NO: 630371 - DNA, 25 bp, Homo sapien
gaggcatgtccttattaccaagcaa

SEQ ID NO: 630372 - DNA, 25 bp, Homo sapien
tttaaagaaagtgccggtgaggtgc

SEQ ID NO: 630373 - DNA, 25 bp, Homo sapien
tcactgacacgtgaagtcgggcacg

SEQ ID NO: 630374 - DNA, 25 bp, Homo sapien
cagaagcccttcctaaacagctgag

SEQ ID NO: 630375 - DNA, 25 bp, Homo sapien
gttccaggtgcctccgatctccaaa

SEQ ID NO: 630376 - DNA, 25 bp, Homo sapien
ggctcggcgcttgccacgggttcca

SEQ ID NO: 630377 - DNA, 25 bp, Homo sapien
cagaacccgtggttcctcgggctgt

SEQ ID NO: 630378 - DNA, 25 bp, Homo sapien
gtccagtcgggaagcgccagaccca

SEQ ID NO: 630379 - DNA, 25 bp, Homo sapien
tgtatgacgaccttgacggtggcag

SEQ ID NO: 630380 - DNA, 25 bp, Homo sapien
ggtgcacccagatgaagttgtacag

SEQ ID NO: 630381 - DNA, 25 bp, Homo sapien
tggtaatgcaccgtgctctgcaggc

SEQ ID NO: 630382 - DNA, 25 bp, Homo sapien
gagtagatgtcggtgttcacgtcca

SEQ ID NO: 630383 - DNA, 25 bp, Homo sapien
cctctgcgattggacgagtgcctgt

SEQ ID NO: 630384 - DNA, 25 bp, Homo sapien
catcagcatcggatggaggagcacc

SEQ ID NO: 630385 - DNA, 25 bp, Homo sapien
tggaaactacgttctccaagggtgc

SEQ ID NO: 630386 - DNA, 25 bp, Homo sapien
ggttgatacgtcacaggcctctgcg

SEQ ID NO: 630387 - DNA, 25 bp, Homo sapien
ggcccggctcgagatgctgctggga

SEQ ID NO: 630388 - DNA, 25 bp, Homo sapien
gcctggaaagccgtacattgccgcg

SEQ ID NO: 630389 - DNA, 25 bp, Homo sapien
gggacacgcctgactcatggtggat

SEQ ID NO: 630390 - DNA, 25 bp, Homo sapien
cattgccgcgtggtcagcagtgacc

SEQ ID NO: 630391 - DNA, 25 bp, Homo sapien
cactgagagtgaccttaatgaggag

SEQ ID NO: 630392 - DNA, 25 bp, Homo sapien
taatgaggagaatttggcatcgaca

SEQ ID NO: 630393 - DNA, 25 bp, Homo sapien
tgaggagaatttggcatcgacagtg

SEQ ID NO: 630394 - DNA, 25 bp, Homo sapien
ggcatcgacagtgccagatcagaca

SEQ ID NO: 630395 - DNA, 25 bp, Homo sapien
aaagggagcacgtccatcggcagcg

SEQ ID NO: 630396 - DNA, 25 bp, Homo sapien
ctccacaacaagcaaagggagcacg

SEQ ID NO: 630397 - DNA, 25 bp, Homo sapien
gactcggaggaaagcctgcgatgct

SEQ ID NO: 630398 - DNA, 25 bp, Homo sapien
acaagcaaagggagcacgtccatcg

SEQ ID NO: 630399 - DNA, 25 bp, Homo sapien
aacacggctggctgcaaaaatagct

SEQ ID NO: 630400 - DNA, 25 bp, Homo sapien
caacacggctggctgcaaaaatagc

SEQ ID NO: 630401 - DNA, 25 bp, Homo sapien
acacggctggctgcaaaaatagcta

SEQ ID NO: 630402 - DNA, 25 bp, Homo sapien
tgcttgggcgtccggatctgaggcc

SEQ ID NO: 630403 - DNA, 25 bp, Homo sapien
ggcgtccggatctgaggccgtcccg

SEQ ID NO: 630404 - DNA, 25 bp, Homo sapien
cttgggcgtccggatctgaggccgt

SEQ ID NO: 630405 - DNA, 25 bp, Homo sapien
gtccggatctgaggccgtcccgcgt

SEQ ID NO: 630406 - DNA, 25 bp, Homo sapien
gatggtgttcaggaccgagatgacc

SEQ ID NO: 630407 - DNA, 25 bp, Homo sapien
ccatgctgaatgtgctgtgctcgcc

SEQ ID NO: 630408 - DNA, 25 bp, Homo sapien
gaccctgccaggctcgatggccatg

SEQ ID NO: 630409 - DNA, 25 bp, Homo sapien
gcctggcgtaccatgacggtcagct

SEQ ID NO: 630410 - DNA, 25 bp, Homo sapien
cctgctgtgggcttcgccagccctg

SEQ ID NO: 630411 - DNA, 25 bp, Homo sapien
tggtcctcagggttccgataggatg

SEQ ID NO: 630412 - DNA, 25 bp, Homo sapien
ctgctgtgggcttcgccagccctga

SEQ ID NO: 630413 - DNA, 25 bp, Homo sapien
ttccgataggatgggcgttgccctg

SEQ ID NO: 630414 - DNA, 25 bp, Homo sapien
gcacagagacgtgggctcagagacc

SEQ ID NO: 630415 - DNA, 25 bp, Homo sapien
aggcacagagacgtgggctcagaga

SEQ ID NO: 630416 - DNA, 25 bp, Homo sapien
cagagacgtgggctcagagacccac

SEQ ID NO: 630417 - DNA, 25 bp, Homo sapien
ctgaggcacagagacgtgggctcag

SEQ ID NO: 630418 - DNA, 25 bp, Homo sapien
cagcagaccacaaaggcgatgacca

SEQ ID NO: 630419 - DNA, 25 bp, Homo sapien
ggagtccactgctcatccgagatgt

SEQ ID NO: 630420 - DNA, 25 bp, Homo sapien
gatgtagcagaacatgaggcgccgc

SEQ ID NO: 630421 - DNA, 25 bp, Homo sapien
tgaggcgccgcacgtggtagggcag

SEQ ID NO: 630422 - DNA, 25 bp, Homo sapien
agatgtggcggaagttggcagagac

SEQ ID NO: 630423 - DNA, 25 bp, Homo sapien
aagtagtggtagaagtcatagagga

SEQ ID NO: 630424 - DNA, 25 bp, Homo sapien
tggagctgacgtagaagagtgcgtt

SEQ ID NO: 630425 - DNA, 25 bp, Homo sapien
cagagacgaggttgtacaggatggg

SEQ ID NO: 630426 - DNA, 25 bp, Homo sapien
gccttcctcgagaaggctggcctct

SEQ ID NO: 630427 - DNA, 25 bp, Homo sapien
tggttgctggacacgctgtcggcct

SEQ ID NO: 630428 - DNA, 25 bp, Homo sapien
tggacacgctgtcggccttcctcga

SEQ ID NO: 630429 - DNA, 25 bp, Homo sapien
acgctgtcggccttcctcgagaagg

SEQ ID NO: 630430 - DNA, 25 bp, Homo sapien
ggcccgggagacactaatgagaaac

SEQ ID NO: 630431 - DNA, 25 bp, Homo sapien
agggtctgcacgtgaggcccaaagc

SEQ ID NO: 630432 - DNA, 25 bp, Homo sapien
tggactccccgagctagacagaggg

SEQ ID NO: 630433 - DNA, 25 bp, Homo sapien
tttcctatctgggagaggagcgctc

SEQ ID NO: 630434 - DNA, 25 bp, Homo sapien
gccacggccactcgggcaggtgctg

SEQ ID NO: 630435 - DNA, 25 bp, Homo sapien
gagaccaggcccctgatccggcgtc

SEQ ID NO: 630436 - DNA, 25 bp, Homo sapien
gtcccttctgccgagcccgagaggc

SEQ ID NO: 630437 - DNA, 25 bp, Homo sapien
tcccatgtggtgtcctggcagagcc

SEQ ID NO: 630438 - DNA, 25 bp, Homo sapien
caagcaaagcacacggaatgcgcac

SEQ ID NO: 630439 - DNA, 25 bp, Homo sapien
tgggacctggcatcttactcagaga

SEQ ID NO: 630440 - DNA, 25 bp, Homo sapien
ccaaggaggcgccagctttttcaac

SEQ ID NO: 630441 - DNA, 25 bp, Homo sapien
ctgccgccgccagaaggtgacaaat

SEQ ID NO: 630442 - DNA, 25 bp, Homo sapien
cttaggcgaccttcttaagccaggg

SEQ ID NO: 630443 - DNA, 25 bp, Homo sapien
ctcctggctggtcccggccagcttc

SEQ ID NO: 630444 - DNA, 25 bp, Homo sapien
gactgtcttctcttaggcttaggcg

SEQ ID NO: 630445 - DNA, 25 bp, Homo sapien
cctggctagtcatgtgctctgtgga

SEQ ID NO: 630446 - DNA, 25 bp, Homo sapien
cacgtctaccgagggtctagggcag

SEQ ID NO: 630447 - DNA, 25 bp, Homo sapien
catcaagacatcaacgggaaaagcc

SEQ ID NO: 630448 - DNA, 25 bp, Homo sapien
gatccaagcgactgcagatactgta

SEQ ID NO: 630449 - DNA, 25 bp, Homo sapien
caaagtttggcaggaagtgcagcga

SEQ ID NO: 630450 - DNA, 25 bp, Homo sapien
atgacctggccgcaagctagtgata

SEQ ID NO: 630451 - DNA, 25 bp, Homo sapien
acgcactcatggcacgcagggccag

SEQ ID NO: 630452 - DNA, 25 bp, Homo sapien
gactccatgaccgacgcactcatgg

SEQ ID NO: 630453 - DNA, 25 bp, Homo sapien
tagtgatacgagatcaggtgtcgtg

SEQ ID NO: 630454 - DNA, 25 bp, Homo sapien
cttcggccacctttattgagagata

SEQ ID NO: 630455 - DNA, 25 bp, Homo sapien
tattgagagatacacggggtttgtt

SEQ ID NO: 630456 - DNA, 25 bp, Homo sapien
aggcccttcggccacctttattgag

SEQ ID NO: 630457 - DNA, 25 bp, Homo sapien
atcgaggcccttcggccacctttat

SEQ ID NO: 630458 - DNA, 25 bp, Homo sapien
gtgtccaactctggggacgaatcgg

SEQ ID NO: 630459 - DNA, 25 bp, Homo sapien
tctggggacgaatcggggtgtggac

SEQ ID NO: 630460 - DNA, 25 bp, Homo sapien
agtcgagggcccgggtaccgctctg

SEQ ID NO: 630461 - DNA, 25 bp, Homo sapien
acatcacggagtgtccaactctggg

SEQ ID NO: 630462 - DNA, 25 bp, Homo sapien
ctgggccacctccagagtgacagga

SEQ ID NO: 630463 - DNA, 25 bp, Homo sapien
ggcaccaggctccactgttggtgga

SEQ ID NO: 630464 - DNA, 25 bp, Homo sapien
ctggttgcaggcagtgctataccct

SEQ ID NO: 630465 - DNA, 25 bp, Homo sapien
agtgacaggagcgggtggcaccagg

SEQ ID NO: 630466 - DNA, 25 bp, Homo sapien
cttgttgcctcgctgctccagctcc

SEQ ID NO: 630467 - DNA, 25 bp, Homo sapien
tcctccttggcacagagcccaggga

SEQ ID NO: 630468 - DNA, 25 bp, Homo sapien
tccttggcacagagcccagggatcc

SEQ ID NO: 630469 - DNA, 25 bp, Homo sapien
agctccttcctccttggcacagagc

SEQ ID NO: 630470 - DNA, 25 bp, Homo sapien
tccagtaatgggacgctggcagtgc

SEQ ID NO: 630471 - DNA, 25 bp, Homo sapien
gaggcaccgtactgggttcatccaa

SEQ ID NO: 630472 - DNA, 25 bp, Homo sapien
caagctccttgaccagagtccagta

SEQ ID NO: 630473 - DNA, 25 bp, Homo sapien
tcatccaaggccagcttaggtcctg

SEQ ID NO: 630474 - DNA, 25 bp, Homo sapien
cacgccattagatagactggccagg

SEQ ID NO: 630475 - DNA, 25 bp, Homo sapien
tggggcaaagccatcagacaggtgg

SEQ ID NO: 630476 - DNA, 25 bp, Homo sapien
tggggaccacgccattagatagact

SEQ ID NO: 630477 - DNA, 25 bp, Homo sapien
cattagatagactggccagggacca

SEQ ID NO: 630478 - DNA, 25 bp, Homo sapien
atcaaatagaccagggaccaagcca

SEQ ID NO: 630479 - DNA, 25 bp, Homo sapien
ccacaccatcaaatagaccagggac

SEQ ID NO: 630480 - DNA, 25 bp, Homo sapien
agaccagggaccaagccatcagaca

SEQ ID NO: 630481 - DNA, 25 bp, Homo sapien
gggaccacgccatcagacaggccgg

SEQ ID NO: 630482 - DNA, 25 bp, Homo sapien
cagatagataggtcggggaccacac

SEQ ID NO: 630483 - DNA, 25 bp, Homo sapien
tcagatagataggtcggggaccaca

SEQ ID NO: 630484 - DNA, 25 bp, Homo sapien
cttggcggctggtggaaaggggcct

SEQ ID NO: 630485 - DNA, 25 bp, Homo sapien
ctctgggactcacggctgcgctctc

SEQ ID NO: 630486 - DNA, 25 bp, Homo sapien
gctcctctcctattcgctgggagct

SEQ ID NO: 630487 - DNA, 25 bp, Homo sapien
gggagctggagcaaagcatcaggct

SEQ ID NO: 630488 - DNA, 25 bp, Homo sapien
ggtggggggcttgtgcctctgccca

SEQ ID NO: 630489 - DNA, 25 bp, Homo sapien
cgtgggctcctctcctattcgctgg

SEQ ID NO: 630490 - DNA, 25 bp, Homo sapien
catcttcttcaggagaggtgtcaga

SEQ ID NO: 630491 - DNA, 25 bp, Homo sapien
gtccatcttgctccccttcccgtgg

SEQ ID NO: 630492 - DNA, 25 bp, Homo sapien
tcttcttcaggagaggtgtcagata

SEQ ID NO: 630493 - DNA, 25 bp, Homo sapien
cttcttcaggagaggtgtcagatag

SEQ ID NO: 630494 - DNA, 25 bp, Homo sapien
acccaggtccacagcgtcacctctg

SEQ ID NO: 630495 - DNA, 25 bp, Homo sapien
gtgggcggtgctctccctgccgggt

SEQ ID NO: 630496 - DNA, 25 bp, Homo sapien
tggtcagcagcttgatttgacttga

SEQ ID NO: 630497 - DNA, 25 bp, Homo sapien
tgacttgaaacgtggggcccaccca

SEQ ID NO: 630498 - DNA, 25 bp, Homo sapien
ctagacttggacaattattgttccc

SEQ ID NO: 630499 - DNA, 25 bp, Homo sapien
gatgcccccagcactagacttggac

SEQ ID NO: 630500 - DNA, 25 bp, Homo sapien
ccccagcactagacttggacaatta

SEQ ID NO: 630501 - DNA, 25 bp, Homo sapien
tgctgactgaaaggcgggctggttg

SEQ ID NO: 630502 - DNA, 25 bp, Homo sapien
cctctgccactcatacctgagaccc

SEQ ID NO: 630503 - DNA, 25 bp, Homo sapien
ctgacatggctgatgggactgctcc

SEQ ID NO: 630504 - DNA, 25 bp, Homo sapien
tgacatggctgatgggactgctccc

SEQ ID NO: 630505 - DNA, 25 bp, Homo sapien
tgctccctctgccactcatacctga

SEQ ID NO: 630506 - DNA, 25 bp, Homo sapien
ctccgccgggtacgcgctcgggctc

SEQ ID NO: 630507 - DNA, 25 bp, Homo sapien
gcgcagccgaggtctcgggtccctt

SEQ ID NO: 630508 - DNA, 25 bp, Homo sapien
caggcgcggccacgagctccgcgca

SEQ ID NO: 630509 - DNA, 25 bp, Homo sapien
tcacgcgccggcgtcggcgcaggcg

SEQ ID NO: 630510 - DNA, 25 bp, Homo sapien
ccccgggcccttgtcgcctgcggcg

SEQ ID NO: 630511 - DNA, 25 bp, Homo sapien
tcctccgccgggctggtggccgcct

SEQ ID NO: 630512 - DNA, 25 bp, Homo sapien
acctcggggctccacaccactgtct

SEQ ID NO: 630513 - DNA, 25 bp, Homo sapien
accactgtctcctccgccgggctgg

SEQ ID NO: 630514 - DNA, 25 bp, Homo sapien
cgacgggcttgtggcccagcatggc

SEQ ID NO: 630515 - DNA, 25 bp, Homo sapien
tgtggcccagcatggcgtggaagag

SEQ ID NO: 630516 - DNA, 25 bp, Homo sapien
ggcttgtggcccagcatggcgtgga

SEQ ID NO: 630517 - DNA, 25 bp, Homo sapien
cccagcatggcgtggaagaggcaca

SEQ ID NO: 630518 - DNA, 25 bp, Homo sapien
aatcatgtggaagtgtcggttcaca

SEQ ID NO: 630519 - DNA, 25 bp, Homo sapien
tggtgctcagatggtcccagatgac

SEQ ID NO: 630520 - DNA, 25 bp, Homo sapien
cttgtcccgaatacaaatcatgtgg

SEQ ID NO: 630521 - DNA, 25 bp, Homo sapien
tgccgcccgatgttctggctgaact

SEQ ID NO: 630522 - DNA, 25 bp, Homo sapien
tccttaaggacgagcctcactgcag

SEQ ID NO: 630523 - DNA, 25 bp, Homo sapien
tgacaatggcctaagggcccgggac

SEQ ID NO: 630524 - DNA, 25 bp, Homo sapien
gagcccctgaaaagctagccagctg

SEQ ID NO: 630525 - DNA, 25 bp, Homo sapien
tagccagctgctagcactgtgtttg

SEQ ID NO: 630526 - DNA, 25 bp, Homo sapien
gctccaagctctgcgaggactggaa

SEQ ID NO: 630527 - DNA, 25 bp, Homo sapien
aggactggaactctacttgtctgac

SEQ ID NO: 630528 - DNA, 25 bp, Homo sapien
tggccaccctgcttacctagttaac

SEQ ID NO: 630529 - DNA, 25 bp, Homo sapien
gctcgcccgtcacacagtgccagct

SEQ ID NO: 630530 - DNA, 25 bp, Homo sapien
gacccaccacctcctgctgccacag

SEQ ID NO: 630531 - DNA, 25 bp, Homo sapien
tggacccaccacctcctgctgccac

SEQ ID NO: 630532 - DNA, 25 bp, Homo sapien
ggacccaccacctcctgctgccaca

SEQ ID NO: 630533 - DNA, 25 bp, Homo sapien
ctggcacagactctccaccagcaca

SEQ ID NO: 630534 - DNA, 25 bp, Homo sapien
ctctccaccagcacaggtccccact

SEQ ID NO: 630535 - DNA, 25 bp, Homo sapien
tggcacagactctccaccagcacag

SEQ ID NO: 630536 - DNA, 25 bp, Homo sapien
tccaccagcacaggtccccactcct

SEQ ID NO: 630537 - DNA, 25 bp, Homo sapien
aggtcgcacagaccagagggagaga

SEQ ID NO: 630538 - DNA, 25 bp, Homo sapien
ggtcgcacagaccagagggagagac

SEQ ID NO: 630539 - DNA, 25 bp, Homo sapien
gtcgcacagaccagagggagagacc

SEQ ID NO: 630540 - DNA, 25 bp, Homo sapien
gaagatgcagtttcaagaagtcact

SEQ ID NO: 630541 - DNA, 25 bp, Homo sapien
ctcgagttctcatccacgtggcagg

SEQ ID NO: 630542 - DNA, 25 bp, Homo sapien
gaggccaatgagcacacatcactgt

SEQ ID NO: 630543 - DNA, 25 bp, Homo sapien
tagagccgtgtaagagccacttggg

SEQ ID NO: 630544 - DNA, 25 bp, Homo sapien
ctggattcgggaatggaagaatctc

SEQ ID NO: 630545 - DNA, 25 bp, Homo sapien
tgaatgatctcttctggaaggacga

SEQ ID NO: 630546 - DNA, 25 bp, Homo sapien
tctcttctggaaggacgaagttcct

SEQ ID NO: 630547 - DNA, 25 bp, Homo sapien
gatctcttctggaaggacgaagttc

SEQ ID NO: 630548 - DNA, 25 bp, Homo sapien
aatgatctcttctggaaggacgaag

SEQ ID NO: 630549 - DNA, 25 bp, Homo sapien
accacccaagcacaggtagggcggg

SEQ ID NO: 630550 - DNA, 25 bp, Homo sapien
tccaatcccggaggttccaagacca

SEQ ID NO: 630551 - DNA, 25 bp, Homo sapien
ggccttttctgaatcccaagcccaa

SEQ ID NO: 630552 - DNA, 25 bp, Homo sapien
tctggccttttctgaatcccaagcc

SEQ ID NO: 630553 - DNA, 25 bp, Homo sapien
aggccagggactgctccgacgcttg

SEQ ID NO: 630554 - DNA, 25 bp, Homo sapien
cggtggtggccgacgctgggggatg

SEQ ID NO: 630555 - DNA, 25 bp, Homo sapien
agggactgctccgacgcttgctgcc

SEQ ID NO: 630556 - DNA, 25 bp, Homo sapien
tgacgctcaccgaaaacccacggtg

SEQ ID NO: 630557 - DNA, 25 bp, Homo sapien
tcatctcctcttctatcatcacttt

SEQ ID NO: 630558 - DNA, 25 bp, Homo sapien
gggggtccacgtcttccttcatctc

SEQ ID NO: 630559 - DNA, 25 bp, Homo sapien
atctcctcttctatcatcacttttc

SEQ ID NO: 630560 - DNA, 25 bp, Homo sapien
catcgtcagccccattgtgggggtc

SEQ ID NO: 630561 - DNA, 25 bp, Homo sapien
ggatttttctgatgctttccccaaa

SEQ ID NO: 630562 - DNA, 25 bp, Homo sapien
ttttctgatgctttccccaaactcc

SEQ ID NO: 630563 - DNA, 25 bp, Homo sapien
ctggatttttctgatgctttcccca

SEQ ID NO: 630564 - DNA, 25 bp, Homo sapien
atttttctgatgctttccccaaact

SEQ ID NO: 630565 - DNA, 25 bp, Homo sapien
ctgtttgcggtcaggactttgtcgg

SEQ ID NO: 630566 - DNA, 25 bp, Homo sapien
ctttgtcggtgacccggctgcgctt

SEQ ID NO: 630567 - DNA, 25 bp, Homo sapien
ccgcttggcagcactgggactggaa

SEQ ID NO: 630568 - DNA, 25 bp, Homo sapien
gccttctttgcaccccaagtctgag

SEQ ID NO: 630569 - DNA, 25 bp, Homo sapien
gctcatggcactgggatggtatcac

SEQ ID NO: 630570 - DNA, 25 bp, Homo sapien
gaaggccacgttccaatgtcacagt

SEQ ID NO: 630571 - DNA, 25 bp, Homo sapien
aatatctgagctggaccgatcctgg

SEQ ID NO: 630572 - DNA, 25 bp, Homo sapien
cagtcagcgcagaaagaggcttgca

SEQ ID NO: 630573 - DNA, 25 bp, Homo sapien
gagaagcaacgtcaagctgaagaca

SEQ ID NO: 630574 - DNA, 25 bp, Homo sapien
gaagtgcttgtcacagtccacaaaa

SEQ ID NO: 630575 - DNA, 25 bp, Homo sapien
gacagatggccagggatgttcccag

SEQ ID NO: 630576 - DNA, 25 bp, Homo sapien
gaacgctggatttcactctgtgacc

SEQ ID NO: 630577 - DNA, 25 bp, Homo sapien
cctaacaggagagatcagacgggca

SEQ ID NO: 630578 - DNA, 25 bp, Homo sapien
gatttgtcccggctctatagaaaag

SEQ ID NO: 630579 - DNA, 25 bp, Homo sapien
taggctttcctagcacaatctgagg

SEQ ID NO: 630580 - DNA, 25 bp, Homo sapien
gatcacatggcacgggattcctggc

SEQ ID NO: 630581 - DNA, 25 bp, Homo sapien
aggcttccaggctcaacatcagcgg

SEQ ID NO: 630582 - DNA, 25 bp, Homo sapien
gaaaatgtctctgcggcagcaggtg

SEQ ID NO: 630583 - DNA, 25 bp, Homo sapien
tgacccgttcagatcttgtcccgag

SEQ ID NO: 630584 - DNA, 25 bp, Homo sapien
gagtgcacagtgtaccacgtctcgc

SEQ ID NO: 630585 - DNA, 25 bp, Homo sapien
gaagcgaaaccgaaagcagaggaag

SEQ ID NO: 630586 - DNA, 25 bp, Homo sapien
gcgtccgcgcgcaacgcccctccct

SEQ ID NO: 630587 - DNA, 25 bp, Homo sapien
aggcggaagcgaaaccgaaagcaga

SEQ ID NO: 630588 - DNA, 25 bp, Homo sapien
ctggaggcggaagcgaaaccgaaag

SEQ ID NO: 630589 - DNA, 25 bp, Homo sapien
tcgcagtcctcgtcctccgcgtcct

SEQ ID NO: 630590 - DNA, 25 bp, Homo sapien
tcctcccaggtggagtcgcagtcgg

SEQ ID NO: 630591 - DNA, 25 bp, Homo sapien
ctcgcagtcctcgtcctccgcgtcc

SEQ ID NO: 630592 - DNA, 25 bp, Homo sapien
tcctcctcccaggtggagtcgcagt

SEQ ID NO: 630593 - DNA, 25 bp, Homo sapien
tcgtcccctgcgtccgcgtccctcg

SEQ ID NO: 630594 - DNA, 25 bp, Homo sapien
ctcgtcccctgcgtccgcgtccctc

SEQ ID NO: 630595 - DNA, 25 bp, Homo sapien
gtcctcgtcccctgcgtccgcgtcc

SEQ ID NO: 630596 - DNA, 25 bp, Homo sapien
tcgtcctcgtcccctgcgtccgcgt

SEQ ID NO: 630597 - DNA, 25 bp, Homo sapien
tggccaggcgcaaacgcaaacagtg

SEQ ID NO: 630598 - DNA, 25 bp, Homo sapien
gactgcgacagtgtggcgttcccag

SEQ ID NO: 630599 - DNA, 25 bp, Homo sapien
aatccatgcggagccgtcgagttcc

SEQ ID NO: 630600 - DNA, 25 bp, Homo sapien
gcaacaaaagtaaccccggcgatga

SEQ ID NO: 630601 - DNA, 25 bp, Homo sapien
tgtacactaaagtcaccaggctgtg

SEQ ID NO: 630602 - DNA, 25 bp, Homo sapien
gcttcaatctctggaggaactggga

SEQ ID NO: 630603 - DNA, 25 bp, Homo sapien
aatgggcgtatttgtccagggcaac

SEQ ID NO: 630604 - DNA, 25 bp, Homo sapien
gatttgggcctcagtaacgcatccc

SEQ ID NO: 630605 - DNA, 25 bp, Homo sapien
gatacctacacatgtccctcgtggc

SEQ ID NO: 630606 - DNA, 25 bp, Homo sapien
gctcgccagtttctggaccctgtca

SEQ ID NO: 630607 - DNA, 25 bp, Homo sapien
tgtccctcgtggctcgccagtttct

SEQ ID NO: 630608 - DNA, 25 bp, Homo sapien
gatagttgtgccgatacctacacat

SEQ ID NO: 630609 - DNA, 25 bp, Homo sapien
tatggccatgtttgcaaggcgacgg

SEQ ID NO: 630610 - DNA, 25 bp, Homo sapien
tgtgtgggcggtatcacggacccca

SEQ ID NO: 630611 - DNA, 25 bp, Homo sapien
catcacgaggctggcactatggcca

SEQ ID NO: 630612 - DNA, 25 bp, Homo sapien
cagccttccagtagaacctgggaca

SEQ ID NO: 630613 - DNA, 25 bp, Homo sapien
gggacagcagggatccatcagacac

SEQ ID NO: 630614 - DNA, 25 bp, Homo sapien
gcagggatccatcagacacaagctg

SEQ ID NO: 630615 - DNA, 25 bp, Homo sapien
ctccgtgtctttcggggaggcgcat

SEQ ID NO: 630616 - DNA, 25 bp, Homo sapien
gacagcagggatccatcagacacaa

SEQ ID NO: 630617 - DNA, 25 bp, Homo sapien
gaagcggatctcatttctgtagaaa

SEQ ID NO: 630618 - DNA, 25 bp, Homo sapien
cattgcagtctcgttccaccagatc

SEQ ID NO: 630619 - DNA, 25 bp, Homo sapien
aggtttggcgtgtccccattgcagt

SEQ ID NO: 630620 - DNA, 25 bp, Homo sapien
caggaagcggatctcatttctgtag

SEQ ID NO: 630621 - DNA, 25 bp, Homo sapien
tgcggagatcccaagccggggatcc

SEQ ID NO: 630622 - DNA, 25 bp, Homo sapien
ggctatttgaaagccgtggccctgg

SEQ ID NO: 630623 - DNA, 25 bp, Homo sapien
tggccctggtaatcgccgggtacat

SEQ ID NO: 630624 - DNA, 25 bp, Homo sapien
atcctggagtccctctggccgcctc

SEQ ID NO: 630625 - DNA, 25 bp, Homo sapien
atgaggtcgtgcaggagttcagtag

SEQ ID NO: 630626 - DNA, 25 bp, Homo sapien
cttagctcgttggtttacatgtggc

SEQ ID NO: 630627 - DNA, 25 bp, Homo sapien
gctatccttagctcgttggtttaca

SEQ ID NO: 630628 - DNA, 25 bp, Homo sapien
tataaaagctatccttagctcgttg

SEQ ID NO: 630629 - DNA, 25 bp, Homo sapien
tgaagaatgtcctcaatgaaacagc

SEQ ID NO: 630630 - DNA, 25 bp, Homo sapien
gagtgattgtcctcaaggaggtcat

SEQ ID NO: 630631 - DNA, 25 bp, Homo sapien
cactggatgtaggagtgattgtcct

SEQ ID NO: 630632 - DNA, 25 bp, Homo sapien
ggaggtcatagttgtccgtccagtt

SEQ ID NO: 630633 - DNA, 25 bp, Homo sapien
aggaggtcatagttgtccgtccagt

SEQ ID NO: 630634 - DNA, 25 bp, Homo sapien
actcctggttctcgcagaggaaaca

SEQ ID NO: 630635 - DNA, 25 bp, Homo sapien
cactcctggttctcgcagaggaaac

SEQ ID NO: 630636 - DNA, 25 bp, Homo sapien
tcactcctggttctcgcagaggaaa

SEQ ID NO: 630637 - DNA, 25 bp, Homo sapien
ctcctggttctcgcagaggaaacag

SEQ ID NO: 630638 - DNA, 25 bp, Homo sapien
ctcgacctccctgagcgtgaggggc

SEQ ID NO: 630639 - DNA, 25 bp, Homo sapien
ctccctgagcgtgaggggcttggca

SEQ ID NO: 630640 - DNA, 25 bp, Homo sapien
cgacctccctgagcgtgaggggctt

SEQ ID NO: 630641 - DNA, 25 bp, Homo sapien
acctccctgagcgtgaggggcttgg

SEQ ID NO: 630642 - DNA, 25 bp, Homo sapien
gccggatcccgtagaagcccagcat

SEQ ID NO: 630643 - DNA, 25 bp, Homo sapien
ctcggtcctccagccggatcccgta

SEQ ID NO: 630644 - DNA, 25 bp, Homo sapien
aggcccggacaagccgctcctggat

SEQ ID NO: 630645 - DNA, 25 bp, Homo sapien
ttctggaagcgcttctggtagttct

SEQ ID NO: 630646 - DNA, 25 bp, Homo sapien
ctggaagtgctcgaggcccagctca

SEQ ID NO: 630647 - DNA, 25 bp, Homo sapien
aggaagaagcggaccagcggcgcct

SEQ ID NO: 630648 - DNA, 25 bp, Homo sapien
cccagcgacttgaggatgcgtgtga

SEQ ID NO: 630649 - DNA, 25 bp, Homo sapien
gatgcggaggttgttgtggctgcgc

SEQ ID NO: 630650 - DNA, 25 bp, Homo sapien
tgtcggcagcgcacggcgaacatga

SEQ ID NO: 630651 - DNA, 25 bp, Homo sapien
catgaagtagtccagggcactctgc

SEQ ID NO: 630652 - DNA, 25 bp, Homo sapien
ctcccaggcgaagtgcaccagctgg

SEQ ID NO: 630653 - DNA, 25 bp, Homo sapien
ttgaacctccgcagcttgtcttggg

SEQ ID NO: 630654 - DNA, 25 bp, Homo sapien
tgctggcctcgtggtcggggtcccc

SEQ ID NO: 630655 - DNA, 25 bp, Homo sapien
tgggtgctggcctcgtggtcggggt

SEQ ID NO: 630656 - DNA, 25 bp, Homo sapien
cctgggtgctggcctcgtggtcggg

SEQ ID NO: 630657 - DNA, 25 bp, Homo sapien
ggtgctggcctcgtggtcggggtcc

SEQ ID NO: 630658 - DNA, 25 bp, Homo sapien
ccacccttgctatgctctggcccac

SEQ ID NO: 630659 - DNA, 25 bp, Homo sapien
tggggctccacgctccgtggctggg

SEQ ID NO: 630660 - DNA, 25 bp, Homo sapien
agggctccggcctatcttccccgtg

SEQ ID NO: 630661 - DNA, 25 bp, Homo sapien
ttgctatgctctggcccacaggtcc

SEQ ID NO: 630662 - DNA, 25 bp, Homo sapien
ccctccaaattcagagcgatcttct

SEQ ID NO: 630663 - DNA, 25 bp, Homo sapien
gtcctgaccgcccacttcctgggtc

SEQ ID NO: 630664 - DNA, 25 bp, Homo sapien
gagggcacacccctccaaattcaga

SEQ ID NO: 630665 - DNA, 25 bp, Homo sapien
aattcagagcgatcttctccacctc

SEQ ID NO: 630666 - DNA, 25 bp, Homo sapien
gcttcctcaccttgtcggccaccct

SEQ ID NO: 630667 - DNA, 25 bp, Homo sapien
accttgtcggccaccctggctccca

SEQ ID NO: 630668 - DNA, 25 bp, Homo sapien
ccctggctcccaggggttggcggca

SEQ ID NO: 630669 - DNA, 25 bp, Homo sapien
cttcctccgcttcctcaccttgtcg

SEQ ID NO: 630670 - DNA, 25 bp, Homo sapien
tgggccccgttcgaccttctgtgtc

SEQ ID NO: 630671 - DNA, 25 bp, Homo sapien
tccagccttggggtgccccgatggg

SEQ ID NO: 630672 - DNA, 25 bp, Homo sapien
tctgtgtcctcctcaaccccgttct

SEQ ID NO: 630673 - DNA, 25 bp, Homo sapien
tcaaccccgttctcactgtgtccag

SEQ ID NO: 630674 - DNA, 25 bp, Homo sapien
tctccgatgggctctcggctggctc

SEQ ID NO: 630675 - DNA, 25 bp, Homo sapien
tccgatgggctctcggctggctcgt

SEQ ID NO: 630676 - DNA, 25 bp, Homo sapien
ccgatgggctctcggctggctcgtc

SEQ ID NO: 630677 - DNA, 25 bp, Homo sapien
gggtctccgatgggctctcggctgg

SEQ ID NO: 630678 - DNA, 25 bp, Homo sapien
tctccgatgggctctcggctggctc

SEQ ID NO: 630679 - DNA, 25 bp, Homo sapien
tccgatgggctctcggctggctcgt

SEQ ID NO: 630680 - DNA, 25 bp, Homo sapien
ccgatgggctctcggctggctcgtc

SEQ ID NO: 630681 - DNA, 25 bp, Homo sapien
gggtctccgatgggctctcggctgg

SEQ ID NO: 630682 - DNA, 25 bp, Homo sapien
tccgatgggctctcggctggctcat

SEQ ID NO: 630683 - DNA, 25 bp, Homo sapien
ctccgatgggctctcggctggctca

SEQ ID NO: 630684 - DNA, 25 bp, Homo sapien
ccgatgggctctcggctggctcatc

SEQ ID NO: 630685 - DNA, 25 bp, Homo sapien
gtctccgatgggctctcggctggct

SEQ ID NO: 630686 - DNA, 25 bp, Homo sapien
atcccttgtaggtcctgccgggctg

SEQ ID NO: 630687 - DNA, 25 bp, Homo sapien
tccgatgggctctcggctggctcgt

SEQ ID NO: 630688 - DNA, 25 bp, Homo sapien
gctggctcatcccttgtaggtcctg

SEQ ID NO: 630689 - DNA, 25 bp, Homo sapien
gaagactccacctctgcgtcctgca

SEQ ID NO: 630690 - DNA, 25 bp, Homo sapien
gactccacctctgcgtcctgcaact

SEQ ID NO: 630691 - DNA, 25 bp, Homo sapien
agaagactccacctctgcgtcctgc

SEQ ID NO: 630692 - DNA, 25 bp, Homo sapien
tccacctctgcgtcctgcaactctg

SEQ ID NO: 630693 - DNA, 25 bp, Homo sapien
caagacgccgacgggcactcctttc

SEQ ID NO: 630694 - DNA, 25 bp, Homo sapien
ccaagacgccgacgggcactccttt

SEQ ID NO: 630695 - DNA, 25 bp, Homo sapien
ggagcccgcagcagctccggaggcc

SEQ ID NO: 630696 - DNA, 25 bp, Homo sapien
cagagcctgaggggagcccgcagca

SEQ ID NO: 630697 - DNA, 25 bp, Homo sapien
agcctgaggggagcccgcagcagct

SEQ ID NO: 630698 - DNA, 25 bp, Homo sapien
aggggagcccgcagcagctccggag

SEQ ID NO: 630699 - DNA, 25 bp, Homo sapien
ctggtggctgctatagtggccccac

SEQ ID NO: 630700 - DNA, 25 bp, Homo sapien
tggctgctatagtggccccacagga

SEQ ID NO: 630701 - DNA, 25 bp, Homo sapien
ggtggctgctatagtggccccacag

SEQ ID NO: 630702 - DNA, 25 bp, Homo sapien
ggccagcactgtgggtcatgggtca

SEQ ID NO: 630703 - DNA, 25 bp, Homo sapien
ttggtatcagactaagaaaagcagc

SEQ ID NO: 630704 - DNA, 25 bp, Homo sapien
gccttgcttggtatcagactaagaa

SEQ ID NO: 630705 - DNA, 25 bp, Homo sapien
ggtatcagactaagaaaagcagccc

SEQ ID NO: 630706 - DNA, 25 bp, Homo sapien
agaaaaggccttgcttggtatcaga

SEQ ID NO: 630707 - DNA, 25 bp, Homo sapien
tgagcggagtctgagctgcggcgtc

SEQ ID NO: 630708 - DNA, 25 bp, Homo sapien
ggctgagcggagtctgagctgcggc

SEQ ID NO: 630709 - DNA, 25 bp, Homo sapien
agcggagtctgagctgcggcgtcgg

SEQ ID NO: 630710 - DNA, 25 bp, Homo sapien
gctgagcggagtctgagctgcggcg

SEQ ID NO: 630711 - DNA, 25 bp, Homo sapien
gcggccgccagaagctccccgagca

SEQ ID NO: 630712 - DNA, 25 bp, Homo sapien
ggcggccgccagaagctccccgagc

SEQ ID NO: 630713 - DNA, 25 bp, Homo sapien
gaaaactcattaaggagcgcaggtg

SEQ ID NO: 630714 - DNA, 25 bp, Homo sapien
aactcattaaggagcgcaggtgccc

SEQ ID NO: 630715 - DNA, 25 bp, Homo sapien
ggagaaaactcattaaggagcgcag

SEQ ID NO: 630716 - DNA, 25 bp, Homo sapien
ggcctgcgacgaccgccgctctcct

SEQ ID NO: 630717 - DNA, 25 bp, Homo sapien
tcaatgccgtcctggccgggcttcc

SEQ ID NO: 630718 - DNA, 25 bp, Homo sapien
gtcaatgccgtcctggccgggcttc

SEQ ID NO: 630719 - DNA, 25 bp, Homo sapien
atgccgtcctggccgggcttcccgg

SEQ ID NO: 630720 - DNA, 25 bp, Homo sapien
caatgccgtcctggccgggcttccc

SEQ ID NO: 630721 - DNA, 25 bp, Homo sapien
ctcagtgccggcattctgggtggag

SEQ ID NO: 630722 - DNA, 25 bp, Homo sapien
tgggtggaggaccaccacatgacac

SEQ ID NO: 630723 - DNA, 25 bp, Homo sapien
gtggaggaccaccacatgacaccct

SEQ ID NO: 630724 - DNA, 25 bp, Homo sapien
tcagtgccggcattctgggtggagg

SEQ ID NO: 630725 - DNA, 25 bp, Homo sapien
cgggggcccaggcagacctggagga

SEQ ID NO: 630726 - DNA, 25 bp, Homo sapien
gggggcccaggcagacctggaggac

SEQ ID NO: 630727 - DNA, 25 bp, Homo sapien
atccacacccggcagtcccggcagc

SEQ ID NO: 630728 - DNA, 25 bp, Homo sapien
cagcctctcctggtttccccggctt

SEQ ID NO: 630729 - DNA, 25 bp, Homo sapien
cagcccagcctctcctggtttcccc

SEQ ID NO: 630730 - DNA, 25 bp, Homo sapien
tccacacccggcagtcccggcagcc

SEQ ID NO: 630731 - DNA, 25 bp, Homo sapien
ggggtccatctcgtccagtcagacc

SEQ ID NO: 630732 - DNA, 25 bp, Homo sapien
ccagggggtccatctcgtccagtca

SEQ ID NO: 630733 - DNA, 25 bp, Homo sapien
gtccagggggtccatctcgtccagt

SEQ ID NO: 630734 - DNA, 25 bp, Homo sapien
agggggtccatctcgtccagtcaga

SEQ ID NO: 630735 - DNA, 25 bp, Homo sapien
ccactgggttcggcgcaggcactta

SEQ ID NO: 630736 - DNA, 25 bp, Homo sapien
cactgggttcggcgcaggcacttac

SEQ ID NO: 630737 - DNA, 25 bp, Homo sapien
gccactgggttcggcgcaggcactt

SEQ ID NO: 630738 - DNA, 25 bp, Homo sapien
ctggagggaagtaaagagaggtggg

SEQ ID NO: 630739 - DNA, 25 bp, Homo sapien
gggccgcggaggccgatcccacctg

SEQ ID NO: 630740 - DNA, 25 bp, Homo sapien
ctgagtgaggtgcccggcttctccc

SEQ ID NO: 630741 - DNA, 25 bp, Homo sapien
ccactcccacggactgtgctggtgt

SEQ ID NO: 630742 - DNA, 25 bp, Homo sapien
cgtcctgaggtcgggtctggatcat

SEQ ID NO: 630743 - DNA, 25 bp, Homo sapien
gggtctggatcattggccagggctt

SEQ ID NO: 630744 - DNA, 25 bp, Homo sapien
ccagggaggccggggagtccagaag

SEQ ID NO: 630745 - DNA, 25 bp, Homo sapien
gaccagggaggccggggagtccaga

SEQ ID NO: 630746 - DNA, 25 bp, Homo sapien
cagggaggccggggagtccagaagg

SEQ ID NO: 630747 - DNA, 25 bp, Homo sapien
ctgaaggtcagtagcgccttcaggg

SEQ ID NO: 630748 - DNA, 25 bp, Homo sapien
cagtagcgccttcagggaggactcc

SEQ ID NO: 630749 - DNA, 25 bp, Homo sapien
tgaaggtcagtagcgccttcaggga

SEQ ID NO: 630750 - DNA, 25 bp, Homo sapien
ggtcagtagcgccttcagggaggac

SEQ ID NO: 630751 - DNA, 25 bp, Homo sapien
gacctggcgggcagatacttgggca

SEQ ID NO: 630752 - DNA, 25 bp, Homo sapien
gccgacttccccctgctcgcctttg

SEQ ID NO: 630753 - DNA, 25 bp, Homo sapien
ccgtccttgccgacttccccctgct

SEQ ID NO: 630754 - DNA, 25 bp, Homo sapien
gtccttgccgacttccccctgctcg

SEQ ID NO: 630755 - DNA, 25 bp, Homo sapien
gacttccccctgctcgcctttgtag

SEQ ID NO: 630756 - DNA, 25 bp, Homo sapien
cacagttccagagcagtcccgcgag

SEQ ID NO: 630757 - DNA, 25 bp, Homo sapien
agcagtcccgcgagtctcggtggcc

SEQ ID NO: 630758 - DNA, 25 bp, Homo sapien
ttccagagcagtcccgcgagtctcg

SEQ ID NO: 630759 - DNA, 25 bp, Homo sapien
tccagccacgctaaagggcatccca

SEQ ID NO: 630760 - DNA, 25 bp, Homo sapien
cagccccacgctgcccgggaggccg

SEQ ID NO: 630761 - DNA, 25 bp, Homo sapien
gccccacgctgcccgggaggccggc

SEQ ID NO: 630762 - DNA, 25 bp, Homo sapien
cacgctgcccgggaggccggcgggc

SEQ ID NO: 630763 - DNA, 25 bp, Homo sapien
tgcagccccacgctgcccgggaggc

SEQ ID NO: 630764 - DNA, 25 bp, Homo sapien
ccctggcagtcctcgtaatccccgg

SEQ ID NO: 630765 - DNA, 25 bp, Homo sapien
cctggcagtcctcgtaatccccggg

SEQ ID NO: 630766 - DNA, 25 bp, Homo sapien
ctggcagtcctcgtaatccccgggg

SEQ ID NO: 630767 - DNA, 25 bp, Homo sapien
caggcgctcctgggatcccaggcgg

SEQ ID NO: 630768 - DNA, 25 bp, Homo sapien
aggcgctcctgggatcccaggcggc

SEQ ID NO: 630769 - DNA, 25 bp, Homo sapien
ggcgctcctgggatcccaggcggcc

SEQ ID NO: 630770 - DNA, 25 bp, Homo sapien
ctgggcccctctcgcctcggtcacc

SEQ ID NO: 630771 - DNA, 25 bp, Homo sapien
cggctctccgcttggcccggccact

SEQ ID NO: 630772 - DNA, 25 bp, Homo sapien
ctccgcttggcccggccactccggg

SEQ ID NO: 630773 - DNA, 25 bp, Homo sapien
ctctccgcttggcccggccactccg

SEQ ID NO: 630774 - DNA, 25 bp, Homo sapien
ggctctccgcttggcccggccactc

SEQ ID NO: 630775 - DNA, 25 bp, Homo sapien
ttctggccatcgagtcctggcacgc

SEQ ID NO: 630776 - DNA, 25 bp, Homo sapien
tcgagtcctggcacgccattctggc

SEQ ID NO: 630777 - DNA, 25 bp, Homo sapien
cattctggccgtccttgcccggcat

SEQ ID NO: 630778 - DNA, 25 bp, Homo sapien
tggcacgccattctggccgtccttg

SEQ ID NO: 630779 - DNA, 25 bp, Homo sapien
cggagcaccgttgcgaccagcctct

SEQ ID NO: 630780 - DNA, 25 bp, Homo sapien
ccttctctcccggagcaccgttgcg

SEQ ID NO: 630781 - DNA, 25 bp, Homo sapien
gagcaccgttgcgaccagcctctcc

SEQ ID NO: 630782 - DNA, 25 bp, Homo sapien
tctcccggagcaccgttgcgaccag

SEQ ID NO: 630783 - DNA, 25 bp, Homo sapien
ctcgcctttggaccccgctcgtcca

SEQ ID NO: 630784 - DNA, 25 bp, Homo sapien
ttctcgcctttggaccccgctcgtc

SEQ ID NO: 630785 - DNA, 25 bp, Homo sapien
ccttctcgcctttggaccccgctcg

SEQ ID NO: 630786 - DNA, 25 bp, Homo sapien
ctttggaccccgctcgtccagggag

SEQ ID NO: 630787 - DNA, 25 bp, Homo sapien
agtgcctgcctacacctgcactggg

SEQ ID NO: 630788 - DNA, 25 bp, Homo sapien
aggagagctgtgagtgcctgcctac

SEQ ID NO: 630789 - DNA, 25 bp, Homo sapien
gagagaaagcggctgcagccacata

SEQ ID NO: 630790 - DNA, 25 bp, Homo sapien
ctgtgagtgcctgcctacacctgca

SEQ ID NO: 630791 - DNA, 25 bp, Homo sapien
ctggctctccagaggggccggcctc

SEQ ID NO: 630792 - DNA, 25 bp, Homo sapien
agggacgcctggctctccagagggg

SEQ ID NO: 630793 - DNA, 25 bp, Homo sapien
tctccagaggggccggcctcaccca

SEQ ID NO: 630794 - DNA, 25 bp, Homo sapien
cagaggggccggcctcacccagctc

SEQ ID NO: 630795 - DNA, 25 bp, Homo sapien
cggtggccagcctcaccgcgctccc

SEQ ID NO: 630796 - DNA, 25 bp, Homo sapien
cgctgagccccggtggccagcctca

SEQ ID NO: 630797 - DNA, 25 bp, Homo sapien
agccccggtggccagcctcaccgcg

SEQ ID NO: 630798 - DNA, 25 bp, Homo sapien
gctgagccccggtggccagcctcac

SEQ ID NO: 630799 - DNA, 25 bp, Homo sapien
cagcgggtgagggacaagaagatgg

SEQ ID NO: 630800 - DNA, 25 bp, Homo sapien
gggacaagaagatggggccccacac

SEQ ID NO: 630801 - DNA, 25 bp, Homo sapien
cacctcctggcatcctaggcttttg

SEQ ID NO: 630802 - DNA, 25 bp, Homo sapien
ctaggcttttgtgggcctggcccat

SEQ ID NO: 630803 - DNA, 25 bp, Homo sapien
ccaggggctccgggagggccttgtg

SEQ ID NO: 630804 - DNA, 25 bp, Homo sapien
ctggaagcctcggacaccaggggct

SEQ ID NO: 630805 - DNA, 25 bp, Homo sapien
tggaagcctcggacaccaggggctc

SEQ ID NO: 630806 - DNA, 25 bp, Homo sapien
ctccgggagggccttgtgggccgag

SEQ ID NO: 630807 - DNA, 25 bp, Homo sapien
ggtcgcccacgtcacctcggaggcc

SEQ ID NO: 630808 - DNA, 25 bp, Homo sapien
gtcgcccacgtcacctcggaggccc

SEQ ID NO: 630809 - DNA, 25 bp, Homo sapien
cggtcgcccacgtcacctcggaggc

SEQ ID NO: 630810 - DNA, 25 bp, Homo sapien
ccggtcgcccacgtcacctcggagg

SEQ ID NO: 630811 - DNA, 25 bp, Homo sapien
ttgtaacacccgtgaattcgtgcgg

SEQ ID NO: 630812 - DNA, 25 bp, Homo sapien
ggaatccctaaagtgagcctgccct

SEQ ID NO: 630813 - DNA, 25 bp, Homo sapien
tcctggaggcttctcgggattgaca

SEQ ID NO: 630814 - DNA, 25 bp, Homo sapien
tgcctggaggccaataaacagcccg

SEQ ID NO: 630815 - DNA, 25 bp, Homo sapien
ctcccttagggcctgcggcacctcc

SEQ ID NO: 630816 - DNA, 25 bp, Homo sapien
ctggtctcccttagggcctgcggca

SEQ ID NO: 630817 - DNA, 25 bp, Homo sapien
tagggcctgcggcacctcccggacc

SEQ ID NO: 630818 - DNA, 25 bp, Homo sapien
cccttagggcctgcggcacctcccg

SEQ ID NO: 630819 - DNA, 25 bp, Homo sapien
ttctgttgcacccagagccatgcag

SEQ ID NO: 630820 - DNA, 25 bp, Homo sapien
attggtgcctcctggactagaagca

SEQ ID NO: 630821 - DNA, 25 bp, Homo sapien
ccctttgagagttcccattggtgcc

SEQ ID NO: 630822 - DNA, 25 bp, Homo sapien
tctggccagctgtttgcacccagga

SEQ ID NO: 630823 - DNA, 25 bp, Homo sapien
gcctccgtaggtgtaatgttcatct

SEQ ID NO: 630824 - DNA, 25 bp, Homo sapien
cctgctctcaagcctccgtaggtgt

SEQ ID NO: 630825 - DNA, 25 bp, Homo sapien
ctgttcatgcatgagtagggacttc

SEQ ID NO: 630826 - DNA, 25 bp, Homo sapien
gctgccttttaacccgctccaaaca

SEQ ID NO: 630827 - DNA, 25 bp, Homo sapien
ggaagaccgtcggaacctgcaatac

SEQ ID NO: 630828 - DNA, 25 bp, Homo sapien
cccaggaagaccgtcggaacctgca

SEQ ID NO: 630829 - DNA, 25 bp, Homo sapien
gaagaccgtcggaacctgcaatacc

SEQ ID NO: 630830 - DNA, 25 bp, Homo sapien
caggaagaccgtcggaacctgcaat

SEQ ID NO: 630831 - DNA, 25 bp, Homo sapien
cacctgagttttaggcctgtggaag

SEQ ID NO: 630832 - DNA, 25 bp, Homo sapien
tctatttcacccagacgcaaaggaa

SEQ ID NO: 630833 - DNA, 25 bp, Homo sapien
tgaggtcttttgtccccaggcataa

SEQ ID NO: 630834 - DNA, 25 bp, Homo sapien
ggactcacgactgctccatttgtta

SEQ ID NO: 630835 - DNA, 25 bp, Homo sapien
tcctttgggtccgaccaggccgctg

SEQ ID NO: 630836 - DNA, 25 bp, Homo sapien
tctcctttgggtccgaccaggccgc

SEQ ID NO: 630837 - DNA, 25 bp, Homo sapien
tgggtccgaccaggccgctgggacc

SEQ ID NO: 630838 - DNA, 25 bp, Homo sapien
tttgggtccgaccaggccgctggga

SEQ ID NO: 630839 - DNA, 25 bp, Homo sapien
gtgtcatcggaacagtcgccgggca

SEQ ID NO: 630840 - DNA, 25 bp, Homo sapien
cagcaggcgcccatggatggtgtca

SEQ ID NO: 630841 - DNA, 25 bp, Homo sapien
tacatctcggatctgggcagtgccc

SEQ ID NO: 630842 - DNA, 25 bp, Homo sapien
agcttttttacatctcggatctggg

SEQ ID NO: 630843 - DNA, 25 bp, Homo sapien
gagcccagagccaccccgacgtgct

SEQ ID NO: 630844 - DNA, 25 bp, Homo sapien
ggagcccagagccaccccgacgtgc

SEQ ID NO: 630845 - DNA, 25 bp, Homo sapien
cggcttccccgtgatgccaggaaca

SEQ ID NO: 630846 - DNA, 25 bp, Homo sapien
gggacaccctgaacaccgctggtgc

SEQ ID NO: 630847 - DNA, 25 bp, Homo sapien
gaacaccgctggtgccgttgggacc

SEQ ID NO: 630848 - DNA, 25 bp, Homo sapien
gtgatgccaggaacacccgggacgc

SEQ ID NO: 630849 - DNA, 25 bp, Homo sapien
agctggaaaagccggaaaagcgacg

SEQ ID NO: 630850 - DNA, 25 bp, Homo sapien
tccttccggaaaaaacacgatctca

SEQ ID NO: 630851 - DNA, 25 bp, Homo sapien
aaaaaacacgatctcaaccctgtga

SEQ ID NO: 630852 - DNA, 25 bp, Homo sapien
tgaaagctggaaaagccggaaaagc

SEQ ID NO: 630853 - DNA, 25 bp, Homo sapien
cacattcgtcagcatgggggcggca

SEQ ID NO: 630854 - DNA, 25 bp, Homo sapien
tggaattcaccccacacattcgtca

SEQ ID NO: 630855 - DNA, 25 bp, Homo sapien
gggcggcagcctcggtgaggcattc

SEQ ID NO: 630856 - DNA, 25 bp, Homo sapien
cacacattcgtcagcatgggggcgg

SEQ ID NO: 630857 - DNA, 25 bp, Homo sapien
cctgatgcgctgctcgctggcctcc

SEQ ID NO: 630858 - DNA, 25 bp, Homo sapien
tccctgatgcgctgctcgctggcct

SEQ ID NO: 630859 - DNA, 25 bp, Homo sapien
ccctgatgcgctgctcgctggcctc

SEQ ID NO: 630860 - DNA, 25 bp, Homo sapien
ctccctgatgcgctgctcgctggcc

SEQ ID NO: 630861 - DNA, 25 bp, Homo sapien
tgcagccggtgcacgtggctgactt

SEQ ID NO: 630862 - DNA, 25 bp, Homo sapien
cagccggtgcacgtggctgacttac

SEQ ID NO: 630863 - DNA, 25 bp, Homo sapien
tctgtgtagccccaggcacgggacc

SEQ ID NO: 630864 - DNA, 25 bp, Homo sapien
tgtagccccaggcacgggaccccca

SEQ ID NO: 630865 - DNA, 25 bp, Homo sapien
tatctacacggtgctgtcttccaga

SEQ ID NO: 630866 - DNA, 25 bp, Homo sapien
tcatcagaagtattgttacgtaaag

SEQ ID NO: 630867 - DNA, 25 bp, Homo sapien
caggcgtttactcgagagaggatca

SEQ ID NO: 630868 - DNA, 25 bp, Homo sapien
gggtgtttagggacctgccctgcca

SEQ ID NO: 630869 - DNA, 25 bp, Homo sapien
agctggaccgggccgaccaatggac

SEQ ID NO: 630870 - DNA, 25 bp, Homo sapien
taggtgcgcggctaactgtgcaatt

SEQ ID NO: 630871 - DNA, 25 bp, Homo sapien
aaggcttccttaggtgcgcggctaa

SEQ ID NO: 630872 - DNA, 25 bp, Homo sapien
caatggacccgggtgccaaaggctt

SEQ ID NO: 630873 - DNA, 25 bp, Homo sapien
gctccccagtgggaccgcggtatcc

SEQ ID NO: 630874 - DNA, 25 bp, Homo sapien
ccgcggtatccagggggtcctcgag

SEQ ID NO: 630875 - DNA, 25 bp, Homo sapien
gcggtatccagggggtcctcgagcg

SEQ ID NO: 630876 - DNA, 25 bp, Homo sapien
agctccccagtgggaccgcggtatc

SEQ ID NO: 630877 - DNA, 25 bp, Homo sapien
ctgctcctgccgcgcctttgtctcc

SEQ ID NO: 630878 - DNA, 25 bp, Homo sapien
tttgtctcctctgtcaccctggttt

SEQ ID NO: 630879 - DNA, 25 bp, Homo sapien
ttgtctcctctgtcaccctggtttc

SEQ ID NO: 630880 - DNA, 25 bp, Homo sapien
ctcctgccgcgcctttgtctcctct

SEQ ID NO: 630881 - DNA, 25 bp, Homo sapien
ttggggcccctggtctccttcaggc

SEQ ID NO: 630882 - DNA, 25 bp, Homo sapien
ctggtctccttcaggcccgtccagc

SEQ ID NO: 630883 - DNA, 25 bp, Homo sapien
cttggggcccctggtctccttcagg

SEQ ID NO: 630884 - DNA, 25 bp, Homo sapien
gcccctggtctccttcaggcccgtc

SEQ ID NO: 630885 - DNA, 25 bp, Homo sapien
tgaggtgtcgcagatccccggtgtc

SEQ ID NO: 630886 - DNA, 25 bp, Homo sapien
tcctggccgtccttgctggtgccgg

SEQ ID NO: 630887 - DNA, 25 bp, Homo sapien
tcgccgggagcaccgtcctggccgt

SEQ ID NO: 630888 - DNA, 25 bp, Homo sapien
cccctgggccccaatggcacctgga

SEQ ID NO: 630889 - DNA, 25 bp, Homo sapien
gcttcgagagcctgatttctccccg

SEQ ID NO: 630890 - DNA, 25 bp, Homo sapien
ttatgagcttcgagagcctgatttc

SEQ ID NO: 630891 - DNA, 25 bp, Homo sapien
tgagcttcgagagcctgatttctcc

SEQ ID NO: 630892 - DNA, 25 bp, Homo sapien
ttcgagagcctgatttctccccgac

SEQ ID NO: 630893 - DNA, 25 bp, Homo sapien
tcacctcgtggagttgtacacaacc

SEQ ID NO: 630894 - DNA, 25 bp, Homo sapien
gtccactgtgcttcgggcgtccttg

SEQ ID NO: 630895 - DNA, 25 bp, Homo sapien
gcttacaggtttattagctagggcc

SEQ ID NO: 630896 - DNA, 25 bp, Homo sapien
tttgaggtatgctgtcaggcgacag

SEQ ID NO: 630897 - DNA, 25 bp, Homo sapien
ttttgttactctgtagccagtcatt

SEQ ID NO: 630898 - DNA, 25 bp, Homo sapien
tttgttactctgtagccagtcatta

SEQ ID NO: 630899 - DNA, 25 bp, Homo sapien
ttgttactctgtagccagtcattaa

SEQ ID NO: 630900 - DNA, 25 bp, Homo sapien
tgactcaagctgacgggactccagt

SEQ ID NO: 630901 - DNA, 25 bp, Homo sapien
tccagtagggactttgagagcacat

SEQ ID NO: 630902 - DNA, 25 bp, Homo sapien
cagactagacctttgtatgggagag

SEQ ID NO: 630903 - DNA, 25 bp, Homo sapien
tagtctgactcgaaaagggcgtgac

SEQ ID NO: 630904 - DNA, 25 bp, Homo sapien
agaccggactccttggtgacctgtc

SEQ ID NO: 630905 - DNA, 25 bp, Homo sapien
cagaccggactccttggtgacctgt

SEQ ID NO: 630906 - DNA, 25 bp, Homo sapien
aaaactggccgaaggctaaagctga

SEQ ID NO: 630907 - DNA, 25 bp, Homo sapien
taaatccccttgtgaggtaagacac

SEQ ID NO: 630908 - DNA, 25 bp, Homo sapien
tcttcactgcaggaatttgagagcg

SEQ ID NO: 630909 - DNA, 25 bp, Homo sapien
ggcccattagcggttgaaacgttca

SEQ ID NO: 630910 - DNA, 25 bp, Homo sapien
tgactcaagtgtgctccagcagagg

SEQ ID NO: 630911 - DNA, 25 bp, Homo sapien
aaaggtggaaatgactcaagtgtgc

SEQ ID NO: 630912 - DNA, 25 bp, Homo sapien
acaacagaatcttactcagccatga

SEQ ID NO: 630913 - DNA, 25 bp, Homo sapien
gaaacagggacccaaatggatgctt

SEQ ID NO: 630914 - DNA, 25 bp, Homo sapien
aattgtcctgaaaggtgaattctat

SEQ ID NO: 630915 - DNA, 25 bp, Homo sapien
catttaattgtcctgaaaggtgaat

SEQ ID NO: 630916 - DNA, 25 bp, Homo sapien
tttaattgtcctgaaaggtgaattc

SEQ ID NO: 630917 - DNA, 25 bp, Homo sapien
ttcatttaattgtcctgaaaggtga

SEQ ID NO: 630918 - DNA, 25 bp, Homo sapien
tcatattggaagtcctcgatttcca

SEQ ID NO: 630919 - DNA, 25 bp, Homo sapien
gtctccgagtcctcgtcatattgga

SEQ ID NO: 630920 - DNA, 25 bp, Homo sapien
tcctcgtcatattggaagtcctcga

SEQ ID NO: 630921 - DNA, 25 bp, Homo sapien
cctcgatttccacctcgtcatgaaa

SEQ ID NO: 630922 - DNA, 25 bp, Homo sapien
ttctccacacgcaaactgatctttg

SEQ ID NO: 630923 - DNA, 25 bp, Homo sapien
tttctccacacgcaaactgatcttt

SEQ ID NO: 630924 - DNA, 25 bp, Homo sapien
cacaacacgcctacagaacagcaaa

SEQ ID NO: 630925 - DNA, 25 bp, Homo sapien
tcatttccagctgttcagggttcgg

SEQ ID NO: 630926 - DNA, 25 bp, Homo sapien
aaagaatccacaacacgcctacaga

SEQ ID NO: 630927 - DNA, 25 bp, Homo sapien
ggctgtgtctccacgaagccaggag

SEQ ID NO: 630928 - DNA, 25 bp, Homo sapien
gcccaggctgccgtgtaatggcgcg

SEQ ID NO: 630929 - DNA, 25 bp, Homo sapien
ccaggctgccgtgtaatggcgcgat

SEQ ID NO: 630930 - DNA, 25 bp, Homo sapien
tgtgccaccaccccggcaaattttg

SEQ ID NO: 630931 - DNA, 25 bp, Homo sapien
ggctgccgtgtaatggcgcgatctt

SEQ ID NO: 630932 - DNA, 25 bp, Homo sapien
ctgggattacaaacgcatcccacca

SEQ ID NO: 630933 - DNA, 25 bp, Homo sapien
ttacaaacgcatcccaccacgcccg

SEQ ID NO: 630934 - DNA, 25 bp, Homo sapien
ggattacaaacgcatcccaccacgc

SEQ ID NO: 630935 - DNA, 25 bp, Homo sapien
tgggattacaaacgcatcccaccac

SEQ ID NO: 630936 - DNA, 25 bp, Homo sapien
tcagcgccaggcaatagtttgtctt

SEQ ID NO: 630937 - DNA, 25 bp, Homo sapien
gacatttacatcttgcgagttgcat

SEQ ID NO: 630938 - DNA, 25 bp, Homo sapien
gtgagggctcgtctcttcagcgcca

SEQ ID NO: 630939 - DNA, 25 bp, Homo sapien
gctcctgtgtctacgtcatggtggg

SEQ ID NO: 630940 - DNA, 25 bp, Homo sapien
acggaggtggagtacacgcagctgc

SEQ ID NO: 630941 - DNA, 25 bp, Homo sapien
gcctggtggagatgacggaggtgga

SEQ ID NO: 630942 - DNA, 25 bp, Homo sapien
aggtggagtacacgcagctgcagca

SEQ ID NO: 630943 - DNA, 25 bp, Homo sapien
tggagatgacggaggtggagtacac

SEQ ID NO: 630944 - DNA, 25 bp, Homo sapien
tgcaacagcctcaactgcggtgaag

SEQ ID NO: 630945 - DNA, 25 bp, Homo sapien
catgagaacatggaacgacctaggt

SEQ ID NO: 630946 - DNA, 25 bp, Homo sapien
tccgaacaagcgtatgggtccacag

SEQ ID NO: 630947 - DNA, 25 bp, Homo sapien
tcagcctttttctaacgcggagaag

SEQ ID NO: 630948 - DNA, 25 bp, Homo sapien
tctgtatcccgggaaaagtacgctc

SEQ ID NO: 630949 - DNA, 25 bp, Homo sapien
tccttgaacgtggaacaagacttgt

SEQ ID NO: 630950 - DNA, 25 bp, Homo sapien
tctgagacgggaactagtgatcact

SEQ ID NO: 630951 - DNA, 25 bp, Homo sapien
tgttggtccagtttcgccttctgag

SEQ ID NO: 630952 - DNA, 25 bp, Homo sapien
gacttgaaatattgtcaggtaagca

SEQ ID NO: 630953 - DNA, 25 bp, Homo sapien
gctgctcgaatggaaagggctcttt

SEQ ID NO: 630954 - DNA, 25 bp, Homo sapien
tttctctgaggtctttatacattag

SEQ ID NO: 630955 - DNA, 25 bp, Homo sapien
caggaggaaacaccgccctctgtag

SEQ ID NO: 630956 - DNA, 25 bp, Homo sapien
ctcccggatggcaccgggacaagga

SEQ ID NO: 630957 - DNA, 25 bp, Homo sapien
gccccagggactttgatccacgata

SEQ ID NO: 630958 - DNA, 25 bp, Homo sapien
gactttagaaaagtaacagctagtg

SEQ ID NO: 630959 - DNA, 25 bp, Homo sapien
tgacggggacacacaaaagccccag

SEQ ID NO: 630960 - DNA, 25 bp, Homo sapien
gaggaaatctctttggcgaaacttg

SEQ ID NO: 630961 - DNA, 25 bp, Homo sapien
tatctaaagagctttccacgtggaa

SEQ ID NO: 630962 - DNA, 25 bp, Homo sapien
aaagagaggccagcgagatctgtga

SEQ ID NO: 630963 - DNA, 25 bp, Homo sapien
ccatcgtgttctgcgtgaggaaatc

SEQ ID NO: 630964 - DNA, 25 bp, Homo sapien
cataggacctttcggagctgtggat

SEQ ID NO: 630965 - DNA, 25 bp, Homo sapien
aaagatgaatactcgggaaagcctc

SEQ ID NO: 630966 - DNA, 25 bp, Homo sapien
cctcggcattctcggtgtcacagag

SEQ ID NO: 630967 - DNA, 25 bp, Homo sapien
ggtgaagtcccacatcagcaccgtc

SEQ ID NO: 630968 - DNA, 25 bp, Homo sapien
tgagttcacacctagaacactgtcc

SEQ ID NO: 630969 - DNA, 25 bp, Homo sapien
ttcgaacttcgaaggccacacactc

SEQ ID NO: 630970 - DNA, 25 bp, Homo sapien
ggtattctacatgtgactggctttc

SEQ ID NO: 630971 - DNA, 25 bp, Homo sapien
taggccccacggtaagtgagttcac

SEQ ID NO: 630972 - DNA, 25 bp, Homo sapien
cacgccgcagcgacaatgaagtttc

SEQ ID NO: 630973 - DNA, 25 bp, Homo sapien
tcaaaatgtattggccccgggtgct

SEQ ID NO: 630974 - DNA, 25 bp, Homo sapien
tccgaaatgcggtgctcaggtgagt

SEQ ID NO: 630975 - DNA, 25 bp, Homo sapien
tgttctgcaggtgatagaggcgcct

SEQ ID NO: 630976 - DNA, 25 bp, Homo sapien
tccaaggcttccgtggagtgccctg

SEQ ID NO: 630977 - DNA, 25 bp, Homo sapien
ggcagcatctttagctggacaggaa

SEQ ID NO: 630978 - DNA, 25 bp, Homo sapien
tggatcagagcggttccttgtgact

SEQ ID NO: 630979 - DNA, 25 bp, Homo sapien
agtttgcaccctgacttggagtcgc

SEQ ID NO: 630980 - DNA, 25 bp, Homo sapien
ggaaaagtgtccaagctttcagtgt

SEQ ID NO: 630981 - DNA, 25 bp, Homo sapien
ttcagccatttgtatcagcagtctc

SEQ ID NO: 630982 - DNA, 25 bp, Homo sapien
ggattcaaccagctgcagattggaa

SEQ ID NO: 630983 - DNA, 25 bp, Homo sapien
tggagcaggtaaggtatcaacactg

SEQ ID NO: 630984 - DNA, 25 bp, Homo sapien
tcaaggccggcttttctgctctaaa

SEQ ID NO: 630985 - DNA, 25 bp, Homo sapien
gaagagcccggattcgcttttctga

SEQ ID NO: 630986 - DNA, 25 bp, Homo sapien
agctggtttccctaggcattctcgg

SEQ ID NO: 630987 - DNA, 25 bp, Homo sapien
tgaagagtgtgtccttacctccccg

SEQ ID NO: 630988 - DNA, 25 bp, Homo sapien
cagtagttctgagtgtaggattgac

SEQ ID NO: 630989 - DNA, 25 bp, Homo sapien
gctttctatccccaccgacttgaag

SEQ ID NO: 630990 - DNA, 25 bp, Homo sapien
tcttaagagcgaaatcctggcggag

SEQ ID NO: 630991 - DNA, 25 bp, Homo sapien
cagcaggtagggtcttcaagttgga

SEQ ID NO: 630992 - DNA, 25 bp, Homo sapien
gaaggaggcttataacagcggaaag

SEQ ID NO: 630993 - DNA, 25 bp, Homo sapien
acctattaagcttcctgctggagcg

SEQ ID NO: 630994 - DNA, 25 bp, Homo sapien
ttccctgaaactttgcgtggcatgg

SEQ ID NO: 630995 - DNA, 25 bp, Homo sapien
tgcggaccctgagtcttaggaagga

SEQ ID NO: 630996 - DNA, 25 bp, Homo sapien
gttactcggtgactggagaccctcc

SEQ ID NO: 630997 - DNA, 25 bp, Homo sapien
aaaggagaccccacttgcttgcggg

SEQ ID NO: 630998 - DNA, 25 bp, Homo sapien
tgtctgcgcgttgaagcgagttccc

SEQ ID NO: 630999 - DNA, 25 bp, Homo sapien
ttgttgagcgcgtcctcactcgagg

SEQ ID NO: 631000 - DNA, 25 bp, Homo sapien
gcgagccgatgaccaatgaagcgcc

SEQ ID NO: 631001 - DNA, 25 bp, Homo sapien
gcactacgggttggcgccagagtca

SEQ ID NO: 631002 - DNA, 25 bp, Homo sapien
cctctcgcgacagcaagagagcgcg

SEQ ID NO: 631003 - DNA, 25 bp, Homo sapien
tcagcttccgtacttgcgcagaact

SEQ ID NO: 631004 - DNA, 25 bp, Homo sapien
cggcgcttccaaggcccccagagcg

SEQ ID NO: 631005 - DNA, 25 bp, Homo sapien
ccggcgcttccaaggcccccagagc

SEQ ID NO: 631006 - DNA, 25 bp, Homo sapien
ggggcggcgcgcaccccggccacat

SEQ ID NO: 631007 - DNA, 25 bp, Homo sapien
accccggccacatcccgcctgcccg

SEQ ID NO: 631008 - DNA, 25 bp, Homo sapien
ttacgtgcgcccatgaaaagcaaca

SEQ ID NO: 631009 - DNA, 25 bp, Homo sapien
ttctctcggcccattcggtgatcgg

SEQ ID NO: 631010 - DNA, 25 bp, Homo sapien
aaaacacccgtgtgctgaagactcc

SEQ ID NO: 631011 - DNA, 25 bp, Homo sapien
cctgttagcaggaagaactcggtag

SEQ ID NO: 631012 - DNA, 25 bp, Homo sapien
cgtagatagggaatgagaatcgcca

SEQ ID NO: 631013 - DNA, 25 bp, Homo sapien
aaaacttgatgtggagcggcaggta

SEQ ID NO: 631014 - DNA, 25 bp, Homo sapien
gacagattaccggacaaaagagagg

SEQ ID NO: 631015 - DNA, 25 bp, Homo sapien
ggtttcaagcatgagaggccctgca

SEQ ID NO: 631016 - DNA, 25 bp, Homo sapien
tctggtatcaggagaacggactgtg

SEQ ID NO: 631017 - DNA, 25 bp, Homo sapien
tgtggcgcacagaactgcatgttta

SEQ ID NO: 631018 - DNA, 25 bp, Homo sapien
gaagcaccgttcaaagcggcaggaa

SEQ ID NO: 631019 - DNA, 25 bp, Homo sapien
catgtacggaaagacaacgctgccg

SEQ ID NO: 631020 - DNA, 25 bp, Homo sapien
gaggcggttcatgtctgctctctgg

SEQ ID NO: 631021 - DNA, 25 bp, Homo sapien
tgaccaggtagttcatgatgaggcg

SEQ ID NO: 631022 - DNA, 25 bp, Homo sapien
tctctggacatgcaagttattgagc

SEQ ID NO: 631023 - DNA, 25 bp, Homo sapien
ttttccatccactcatctttcgtga

SEQ ID NO: 631024 - DNA, 25 bp, Homo sapien
gtcatcaaacctcagtgctacagca

SEQ ID NO: 631025 - DNA, 25 bp, Homo sapien
tatttttgcagactggccagaagag

SEQ ID NO: 631026 - DNA, 25 bp, Homo sapien
tgagttgggcatactttccagaaac

SEQ ID NO: 631027 - DNA, 25 bp, Homo sapien
gtaactgtaaaactgtcaaaggctg

SEQ ID NO: 631028 - DNA, 25 bp, Homo sapien
tgtttccagatccacactaggttcg

SEQ ID NO: 631029 - DNA, 25 bp, Homo sapien
gattcgttcatcaagtgtttccaga

SEQ ID NO: 631030 - DNA, 25 bp, Homo sapien
aagataccggtttgtgtccaagagc

SEQ ID NO: 631031 - DNA, 25 bp, Homo sapien
gctgttgatcaaggcgatggcctcc

SEQ ID NO: 631032 - DNA, 25 bp, Homo sapien
caaaaaaccgcttctgaactacata

SEQ ID NO: 631033 - DNA, 25 bp, Homo sapien
tccccctcacatgcattgaaataac

SEQ ID NO: 631034 - DNA, 25 bp, Homo sapien
cgcttctgaactacataaaagagca

SEQ ID NO: 631035 - DNA, 25 bp, Homo sapien
ccaatcaaaagtacatcacagaggg

SEQ ID NO: 631036 - DNA, 25 bp, Homo sapien
gactcctcgggactgtcaaaggcca

SEQ ID NO: 631037 - DNA, 25 bp, Homo sapien
cagggtacgctccatctctgtgagg

SEQ ID NO: 631038 - DNA, 25 bp, Homo sapien
tggcggatcagctcgatcaaatgct

SEQ ID NO: 631039 - DNA, 25 bp, Homo sapien
tgagtctgtgcaaactccagcgccg

SEQ ID NO: 631040 - DNA, 25 bp, Homo sapien
gattttcataatctagcacagcttg

SEQ ID NO: 631041 - DNA, 25 bp, Homo sapien
cttctggtccagctcgttctgagcc

SEQ ID NO: 631042 - DNA, 25 bp, Homo sapien
tgccagtttgggtgttgactcgcga

SEQ ID NO: 631043 - DNA, 25 bp, Homo sapien
agctcgttctgagcccaaagtagta

SEQ ID NO: 631044 - DNA, 25 bp, Homo sapien
cagtaagaatcttgcagtcgcaggc

SEQ ID NO: 631045 - DNA, 25 bp, Homo sapien
tattttgagtgggatgcagcctaac

SEQ ID NO: 631046 - DNA, 25 bp, Homo sapien
tggtagaccgaatccttcagcagcc

SEQ ID NO: 631047 - DNA, 25 bp, Homo sapien
ttccagattcttcagcgagtgccag

SEQ ID NO: 631048 - DNA, 25 bp, Homo sapien
taatcgcaagggtcacatctgggag

SEQ ID NO: 631049 - DNA, 25 bp, Homo sapien
tacttgagaataaggcgagatccca

SEQ ID NO: 631050 - DNA, 25 bp, Homo sapien
ccatgaggccctattgtgaacaacg

SEQ ID NO: 631051 - DNA, 25 bp, Homo sapien
caactacagttccaagaggcgagct

SEQ ID NO: 631052 - DNA, 25 bp, Homo sapien
gaactctgcaatgacgacaaatgga

SEQ ID NO: 631053 - DNA, 25 bp, Homo sapien
tgaggactggatgggcacacaaatc

SEQ ID NO: 631054 - DNA, 25 bp, Homo sapien
tgatgtgggcgtgatacagagaaac

SEQ ID NO: 631055 - DNA, 25 bp, Homo sapien
tataaacgagcacagacgaaccctg

SEQ ID NO: 631056 - DNA, 25 bp, Homo sapien
cagtcccagcgcgcttccgtctggt

SEQ ID NO: 631057 - DNA, 25 bp, Homo sapien
agtcccagcgcgcttccgtctggtt

SEQ ID NO: 631058 - DNA, 25 bp, Homo sapien
tcagtcccagcgcgcttccgtctgg

SEQ ID NO: 631059 - DNA, 25 bp, Homo sapien
cccacccgggcagcaccgcccaagt

SEQ ID NO: 631060 - DNA, 25 bp, Homo sapien
gggcagcaccgcccaagtccacgtg

SEQ ID NO: 631061 - DNA, 25 bp, Homo sapien
acccgggcagcaccgcccaagtcca

SEQ ID NO: 631062 - DNA, 25 bp, Homo sapien
gctgacccacccgggcagcaccgcc

SEQ ID NO: 631063 - DNA, 25 bp, Homo sapien
tgtccccggccatgtccctgcgggc

SEQ ID NO: 631064 - DNA, 25 bp, Homo sapien
cactgggtgtccccggccatgtccc

SEQ ID NO: 631065 - DNA, 25 bp, Homo sapien
gggcctcgtctgggggtggctgcat

SEQ ID NO: 631066 - DNA, 25 bp, Homo sapien
tccccggccatgtccctgcgggcct

SEQ ID NO: 631067 - DNA, 25 bp, Homo sapien
gatagggcacttgccaggtccggtc

SEQ ID NO: 631068 - DNA, 25 bp, Homo sapien
cactggctgggatagggcacttgcc

SEQ ID NO: 631069 - DNA, 25 bp, Homo sapien
aggtccggtcctggaatctcatggc

SEQ ID NO: 631070 - DNA, 25 bp, Homo sapien
aaggacagggcactcacttccttcc

SEQ ID NO: 631071 - DNA, 25 bp, Homo sapien
gaggggtatgcctcctgactgtcca

SEQ ID NO: 631072 - DNA, 25 bp, Homo sapien
ctggcgaggggtatgcctcctgact

SEQ ID NO: 631073 - DNA, 25 bp, Homo sapien
tgactgtccaggacaatgcccctgg

SEQ ID NO: 631074 - DNA, 25 bp, Homo sapien
gtccaggacaatgcccctggcctgg

SEQ ID NO: 631075 - DNA, 25 bp, Homo sapien
ctggcctcctgactgtcctggcgcc

SEQ ID NO: 631076 - DNA, 25 bp, Homo sapien
tcctgactgtcctggcgcctgcttg

SEQ ID NO: 631077 - DNA, 25 bp, Homo sapien
cctggcgcctgcttgtcagggtcat

SEQ ID NO: 631078 - DNA, 25 bp, Homo sapien
tcctggcgcctgcttgtcagggtca

SEQ ID NO: 631079 - DNA, 25 bp, Homo sapien
caggtgggcacaggggcaccctcca

SEQ ID NO: 631080 - DNA, 25 bp, Homo sapien
ggtggtgctggccaggtgggcacag

SEQ ID NO: 631081 - DNA, 25 bp, Homo sapien
ccccttctctgagctgggcaggtgg

SEQ ID NO: 631082 - DNA, 25 bp, Homo sapien
acagccccttctctgagctgggcag

SEQ ID NO: 631083 - DNA, 25 bp, Homo sapien
ggcgcagtacagaaggcatgtgccc

SEQ ID NO: 631084 - DNA, 25 bp, Homo sapien
agatgggcatgctggagcgggcgca

SEQ ID NO: 631085 - DNA, 25 bp, Homo sapien
tccttcttgttccagccgaagtcct

SEQ ID NO: 631086 - DNA, 25 bp, Homo sapien
agtcctggctcatggagacggtgca

SEQ ID NO: 631087 - DNA, 25 bp, Homo sapien
ccatgaggatgcgtgagaaggtcat

SEQ ID NO: 631088 - DNA, 25 bp, Homo sapien
gggtgacggccgtgatggagcccca

SEQ ID NO: 631089 - DNA, 25 bp, Homo sapien
ttggagcaagcccatgaggatgcgt

SEQ ID NO: 631090 - DNA, 25 bp, Homo sapien
atgcgtgagaaggtcatgaaggcca

SEQ ID NO: 631091 - DNA, 25 bp, Homo sapien
tgtaggtgaaggctcgctcactctc

SEQ ID NO: 631092 - DNA, 25 bp, Homo sapien
agccggcgcccacgatgctgtaggt

SEQ ID NO: 631093 - DNA, 25 bp, Homo sapien
cccacgatgctgtaggtgaaggctc

SEQ ID NO: 631094 - DNA, 25 bp, Homo sapien
caccttctgcgacagcaggctggtc

SEQ ID NO: 631095 - DNA, 25 bp, Homo sapien
gcctacaatttgtcatgtggatcct

SEQ ID NO: 631096 - DNA, 25 bp, Homo sapien
ctgtggaactcacattgtttttcac

SEQ ID NO: 631097 - DNA, 25 bp, Homo sapien
ggaccagccacgcatgtgtcccagt

SEQ ID NO: 631098 - DNA, 25 bp, Homo sapien
catgtgtcccagtcgggcggctgct

SEQ ID NO: 631099 - DNA, 25 bp, Homo sapien
cccaaagcaaggtgaggccgccgga

SEQ ID NO: 631100 - DNA, 25 bp, Homo sapien
tgccagccgtaccattccaggagca

SEQ ID NO: 631101 - DNA, 25 bp, Homo sapien
gctctgccagccgtaccattccagg

SEQ ID NO: 631102 - DNA, 25 bp, Homo sapien
tgtacacgtaccacacccaaagcaa

SEQ ID NO: 631103 - DNA, 25 bp, Homo sapien
gaaccttccagatcgaattgggtgg

SEQ ID NO: 631104 - DNA, 25 bp, Homo sapien
tgcctcaggttgcacatgggcgcca

SEQ ID NO: 631105 - DNA, 25 bp, Homo sapien
caaactgatggctatcagggcggga

SEQ ID NO: 631106 - DNA, 25 bp, Homo sapien
ccttagccctagatggaaccttcca

SEQ ID NO: 631107 - DNA, 25 bp, Homo sapien
acagcaggcttccggaagagccgtc

SEQ ID NO: 631108 - DNA, 25 bp, Homo sapien
agcaggcttccggaagagccgtctc

SEQ ID NO: 631109 - DNA, 25 bp, Homo sapien
ggcttccggaagagccgtctccagg

SEQ ID NO: 631110 - DNA, 25 bp, Homo sapien
tggacaccggccggctttgggccag

SEQ ID NO: 631111 - DNA, 25 bp, Homo sapien
ggctcaagggctgtcaggtccggcc

SEQ ID NO: 631112 - DNA, 25 bp, Homo sapien
ggccaggttcacacccccatggtca

SEQ ID NO: 631113 - DNA, 25 bp, Homo sapien
cccatggtcaccggccctgccgctg

SEQ ID NO: 631114 - DNA, 25 bp, Homo sapien
tgtcaggtccggccaggttcacacc

SEQ ID NO: 631115 - DNA, 25 bp, Homo sapien
agagagctgggagacgacggctgcc

SEQ ID NO: 631116 - DNA, 25 bp, Homo sapien
cttggcgtcggggaaggtctcctcg

SEQ ID NO: 631117 - DNA, 25 bp, Homo sapien
tggtgcagctcaagcctcgtgcctt

SEQ ID NO: 631118 - DNA, 25 bp, Homo sapien
tgggcgctccttcaccctgcgggag

SEQ ID NO: 631119 - DNA, 25 bp, Homo sapien
ctctgaagtcgggttctgtgggcca

SEQ ID NO: 631120 - DNA, 25 bp, Homo sapien
gaggagccgagggttccaccatctg

SEQ ID NO: 631121 - DNA, 25 bp, Homo sapien
tgatgagatgatcagagagaaaccc

SEQ ID NO: 631122 - DNA, 25 bp, Homo sapien
caaggaaccacgttgaagatccagc

SEQ ID NO: 631123 - DNA, 25 bp, Homo sapien
gctgaatagactggccggaatcgcc

SEQ ID NO: 631124 - DNA, 25 bp, Homo sapien
ggaatcgccaccaaccaaggaacca

SEQ ID NO: 631125 - DNA, 25 bp, Homo sapien
gtcccatcccgaatggctgcagagg

SEQ ID NO: 631126 - DNA, 25 bp, Homo sapien
ggctcccgttagccctttcgtgctg

SEQ ID NO: 631127 - DNA, 25 bp, Homo sapien
gggtcccatcccgaatggctgcaga

SEQ ID NO: 631128 - DNA, 25 bp, Homo sapien
cctttcgtgctgacaccccagaggg

SEQ ID NO: 631129 - DNA, 25 bp, Homo sapien
catgagcttccgcaccgtgatggct

SEQ ID NO: 631130 - DNA, 25 bp, Homo sapien
tgcatgagcttccgcaccgtgatgg

SEQ ID NO: 631131 - DNA, 25 bp, Homo sapien
gcatgagcttccgcaccgtgatggc

SEQ ID NO: 631132 - DNA, 25 bp, Homo sapien
ctgcatgagcttccgcaccgtgatg

SEQ ID NO: 631133 - DNA, 25 bp, Homo sapien
gaggccgatggaggctgatgcaaag

SEQ ID NO: 631134 - DNA, 25 bp, Homo sapien
ggtctggaggccgatggaggctgat

SEQ ID NO: 631135 - DNA, 25 bp, Homo sapien
caaagacgctggagaggccaaggcc

SEQ ID NO: 631136 - DNA, 25 bp, Homo sapien
cacagagcaaagacgctggagaggc

SEQ ID NO: 631137 - DNA, 25 bp, Homo sapien
caagtcctggatgttaacagaaatg

SEQ ID NO: 631138 - DNA, 25 bp, Homo sapien
cgcaggacggggccaagtcctggat

SEQ ID NO: 631139 - DNA, 25 bp, Homo sapien
caaacagaaagccggcgcaggacgg

SEQ ID NO: 631140 - DNA, 25 bp, Homo sapien
gggccaagtcctggatgttaacaga

SEQ ID NO: 631141 - DNA, 25 bp, Homo sapien
gcaaagctggggtaaggcaaggtcc

SEQ ID NO: 631142 - DNA, 25 bp, Homo sapien
ggcaaagctggggtaaggcaaggtc

SEQ ID NO: 631143 - DNA, 25 bp, Homo sapien
caaagctggggtaaggcaaggtcct

SEQ ID NO: 631144 - DNA, 25 bp, Homo sapien
ccaaggccccggctgtgttggccac

SEQ ID NO: 631145 - DNA, 25 bp, Homo sapien
gccaaggccccggctgtgttggcca

SEQ ID NO: 631146 - DNA, 25 bp, Homo sapien
ggctaccaggatgggaacatatctg

SEQ ID NO: 631147 - DNA, 25 bp, Homo sapien
gcagatggcgactcatgagccacct

SEQ ID NO: 631148 - DNA, 25 bp, Homo sapien
cacctgccgtcagcaaagtccagtg

SEQ ID NO: 631149 - DNA, 25 bp, Homo sapien
caagtcccctttgtcccgctgaaag

SEQ ID NO: 631150 - DNA, 25 bp, Homo sapien
catcaagtagccgcctagacacaca

SEQ ID NO: 631151 - DNA, 25 bp, Homo sapien
tcaagtagccgcctagacacacacc

SEQ ID NO: 631152 - DNA, 25 bp, Homo sapien
tagccgcctagacacacacccacga

SEQ ID NO: 631153 - DNA, 25 bp, Homo sapien
aagtagccgcctagacacacaccca

SEQ ID NO: 631154 - DNA, 25 bp, Homo sapien
ttgaacaggcaagtccaggagcccg

SEQ ID NO: 631155 - DNA, 25 bp, Homo sapien
ctagaggtcctcatgggtagagctc

SEQ ID NO: 631156 - DNA, 25 bp, Homo sapien
ggtcctcatgggtagagctcaggtc

SEQ ID NO: 631157 - DNA, 25 bp, Homo sapien
ggttgctgatgatggccacaaggtt

SEQ ID NO: 631158 - DNA, 25 bp, Homo sapien
gaggccagggatacctttaagcatc

SEQ ID NO: 631159 - DNA, 25 bp, Homo sapien
gaggctgcgcctactaacaataacc

SEQ ID NO: 631160 - DNA, 25 bp, Homo sapien
aacactgttagtgcggagggatcca

SEQ ID NO: 631161 - DNA, 25 bp, Homo sapien
tgacatggagtgaccaagtcccaca

SEQ ID NO: 631162 - DNA, 25 bp, Homo sapien
gagacagcaattcattcacaacgca

SEQ ID NO: 631163 - DNA, 25 bp, Homo sapien
gcggtggctgcacaatgcgaatgta

SEQ ID NO: 631164 - DNA, 25 bp, Homo sapien
agagcagccacacttacggtcgaga

SEQ ID NO: 631165 - DNA, 25 bp, Homo sapien
ctgataaaaccgaaggacactctgc

SEQ ID NO: 631166 - DNA, 25 bp, Homo sapien
catgctggcgtggcccccaggaggg

SEQ ID NO: 631167 - DNA, 25 bp, Homo sapien
tggcgtggcccccaggagggtgcag

SEQ ID NO: 631168 - DNA, 25 bp, Homo sapien
gtgcaggctgggataggagactggg

SEQ ID NO: 631169 - DNA, 25 bp, Homo sapien
gagggtgcaggctgggataggagac

SEQ ID NO: 631170 - DNA, 25 bp, Homo sapien
cgggggcaggccagcgcttcctcat

SEQ ID NO: 631171 - DNA, 25 bp, Homo sapien
cgcgtcggaggggtgagcatagaga

SEQ ID NO: 631172 - DNA, 25 bp, Homo sapien
gagggaaagccgggggcaggccagc

SEQ ID NO: 631173 - DNA, 25 bp, Homo sapien
cgtgcttctcctgtgcgcgtcggag

SEQ ID NO: 631174 - DNA, 25 bp, Homo sapien
gaagccctcgctttcattccaagca

SEQ ID NO: 631175 - DNA, 25 bp, Homo sapien
tgagccgagaagtcagtgacacctg

SEQ ID NO: 631176 - DNA, 25 bp, Homo sapien
cctgagctgagaagtcggtgaagcc

SEQ ID NO: 631177 - DNA, 25 bp, Homo sapien
attccaagcaccatagacaaacggg

SEQ ID NO: 631178 - DNA, 25 bp, Homo sapien
gaagcttattctcctccagacccca

SEQ ID NO: 631179 - DNA, 25 bp, Homo sapien
tgaatgccaacaggcccatgctgct

SEQ ID NO: 631180 - DNA, 25 bp, Homo sapien
catgctgctggtggaagaaacggag

SEQ ID NO: 631181 - DNA, 25 bp, Homo sapien
ctatgaaccagtgaatgccaacagg

SEQ ID NO: 631182 - DNA, 25 bp, Homo sapien
tgggtccacgtaatgcaaaccggtg

SEQ ID NO: 631183 - DNA, 25 bp, Homo sapien
gacccacgatgctgtctgatggcca

SEQ ID NO: 631184 - DNA, 25 bp, Homo sapien
gagagactcgtcacaagggtgttca

SEQ ID NO: 631185 - DNA, 25 bp, Homo sapien
tgatggccacaaggcatctgacagg

SEQ ID NO: 631186 - DNA, 25 bp, Homo sapien
atgcacgacctaaacgacgcgctgg

SEQ ID NO: 631187 - DNA, 25 bp, Homo sapien
actatatcctcatgcaggcgcaggc

SEQ ID NO: 631188 - DNA, 25 bp, Homo sapien
tgctgctcgccaagaactatatcct

SEQ ID NO: 631189 - DNA, 25 bp, Homo sapien
tgcaaacactgtcacgagaagccgt

SEQ ID NO: 631190 - DNA, 25 bp, Homo sapien
atggcggagacggcaggttcctcca

SEQ ID NO: 631191 - DNA, 25 bp, Homo sapien
accccagctcggaggggcgctcgat

SEQ ID NO: 631192 - DNA, 25 bp, Homo sapien
agcgtccaaccccagctcggagggg

SEQ ID NO: 631193 - DNA, 25 bp, Homo sapien
gcggagacggcaggttcctccagct

SEQ ID NO: 631194 - DNA, 25 bp, Homo sapien
tctgcgctccgctgaatccgtgagt

SEQ ID NO: 631195 - DNA, 25 bp, Homo sapien
gaagggtattggatgagatccccga

SEQ ID NO: 631196 - DNA, 25 bp, Homo sapien
gctgcgaggaagcatgatttgccct

SEQ ID NO: 631197 - DNA, 25 bp, Homo sapien
tgaactctaaactggtcaccgcaga

SEQ ID NO: 631198 - DNA, 25 bp, Homo sapien
agagctcttgccgtgaggaaggccg

SEQ ID NO: 631199 - DNA, 25 bp, Homo sapien
gctcttgccgtgaggaaggccgggt

SEQ ID NO: 631200 - DNA, 25 bp, Homo sapien
agctcttgccgtgaggaaggccggg

SEQ ID NO: 631201 - DNA, 25 bp, Homo sapien
gagctcttgccgtgaggaaggccgg

SEQ ID NO: 631202 - DNA, 25 bp, Homo sapien
accgcctgcactcggctgagctgcc

SEQ ID NO: 631203 - DNA, 25 bp, Homo sapien
ctgccaccgcctgcactcggctgag

SEQ ID NO: 631204 - DNA, 25 bp, Homo sapien
tgccccagctgtgcggggctccacg

SEQ ID NO: 631205 - DNA, 25 bp, Homo sapien
ctgcactcggctgagctgccccagc

SEQ ID NO: 631206 - DNA, 25 bp, Homo sapien
cgtgatgaatgcactggacgccgcc

SEQ ID NO: 631207 - DNA, 25 bp, Homo sapien
tcacggcagcacacgcgtgatgaat

SEQ ID NO: 631208 - DNA, 25 bp, Homo sapien
tgcatggacgttggcaaacttgagc

SEQ ID NO: 631209 - DNA, 25 bp, Homo sapien
tgaattcccgaagcccagttgtcca

SEQ ID NO: 631210 - DNA, 25 bp, Homo sapien
cgtgaccctgcatgcgtgtcctgcg

SEQ ID NO: 631211 - DNA, 25 bp, Homo sapien
tgacccgtgaccctgcatgcgtgtc

SEQ ID NO: 631212 - DNA, 25 bp, Homo sapien
gtgaccctgcatgcgtgtcctgctg

SEQ ID NO: 631213 - DNA, 25 bp, Homo sapien
gaccctgcatgcgtgtcctgctggt

SEQ ID NO: 631214 - DNA, 25 bp, Homo sapien
caggcctgacacaggtgacggagca

SEQ ID NO: 631215 - DNA, 25 bp, Homo sapien
cagtgccatctggattggatcgtcc

SEQ ID NO: 631216 - DNA, 25 bp, Homo sapien
gatcgtccgtttgtccacaggatgg

SEQ ID NO: 631217 - DNA, 25 bp, Homo sapien
gatggcacagcagatgcaaccgtgg

SEQ ID NO: 631218 - DNA, 25 bp, Homo sapien
acctatgcagggtcatcacacccgg

SEQ ID NO: 631219 - DNA, 25 bp, Homo sapien
tttgtcccttttcggccaagctcag

SEQ ID NO: 631220 - DNA, 25 bp, Homo sapien
gggctgtcaaacctatgcagggtca

SEQ ID NO: 631221 - DNA, 25 bp, Homo sapien
ggacacagggctgtcaaacctatgc

SEQ ID NO: 631222 - DNA, 25 bp, Homo sapien
tccacccatgggaataggattcagc

SEQ ID NO: 631223 - DNA, 25 bp, Homo sapien
gaagtctgacactcgctaccaggta

SEQ ID NO: 631224 - DNA, 25 bp, Homo sapien
gaatggaggacaaaatgcggtccat

SEQ ID NO: 631225 - DNA, 25 bp, Homo sapien
gctgaaaggtggaaacagcacagtt

SEQ ID NO: 631226 - DNA, 25 bp, Homo sapien
gttaacatcgttgtccccaggatcg

SEQ ID NO: 631227 - DNA, 25 bp, Homo sapien
acctggcctggtccagagactgcgc

SEQ ID NO: 631228 - DNA, 25 bp, Homo sapien
gagactgcgcctgtccctgagttaa

SEQ ID NO: 631229 - DNA, 25 bp, Homo sapien
tgcagagatcgagtgtgtgcaccac

SEQ ID NO: 631230 - DNA, 25 bp, Homo sapien
ttcccctgacattcccggtcggcag

SEQ ID NO: 631231 - DNA, 25 bp, Homo sapien
cagtgcccacgttcccctgacattc

SEQ ID NO: 631232 - DNA, 25 bp, Homo sapien
tcccctgacattcccggtcagccgt

SEQ ID NO: 631233 - DNA, 25 bp, Homo sapien
tcccctgacattcccggtcggcagt

SEQ ID NO: 631234 - DNA, 25 bp, Homo sapien
cacatgcacggccagaatgctcttg

SEQ ID NO: 631235 - DNA, 25 bp, Homo sapien
caacagggggcctttcatgcccgaa

SEQ ID NO: 631236 - DNA, 25 bp, Homo sapien
gctgccaggctcgacctcaacaggg

SEQ ID NO: 631237 - DNA, 25 bp, Homo sapien
tctccaggctccgataggacagacg

SEQ ID NO: 631238 - DNA, 25 bp, Homo sapien
tggggtgaacgcctgggtcagtggg

SEQ ID NO: 631239 - DNA, 25 bp, Homo sapien
cctagagagtggtcactgcctgcag

SEQ ID NO: 631240 - DNA, 25 bp, Homo sapien
ccttcaagttgaccgcactcggcct

SEQ ID NO: 631241 - DNA, 25 bp, Homo sapien
cccttcaagttgaccgcactcggcc

SEQ ID NO: 631242 - DNA, 25 bp, Homo sapien
tctgagtcctgccacatggacggtc

SEQ ID NO: 631243 - DNA, 25 bp, Homo sapien
tcagtgctccatacgccacatcaag

SEQ ID NO: 631244 - DNA, 25 bp, Homo sapien
tggacggtcagtgctccatacgcca

SEQ ID NO: 631245 - DNA, 25 bp, Homo sapien
ggcctgcccgtttgctcctctgtgg

SEQ ID NO: 631246 - DNA, 25 bp, Homo sapien
tggtgggcactttggaccttggctt

SEQ ID NO: 631247 - DNA, 25 bp, Homo sapien
agtcctgcccttttttagcaagtcg

SEQ ID NO: 631248 - DNA, 25 bp, Homo sapien
cagagacagattgctgggacatcca

SEQ ID NO: 631249 - DNA, 25 bp, Homo sapien
tcttgctacggcctctgttccgggc

SEQ ID NO: 631250 - DNA, 25 bp, Homo sapien
caaaggctctcagttgcttggcgat

SEQ ID NO: 631251 - DNA, 25 bp, Homo sapien
tcagtcgaacagaggacataccggg

SEQ ID NO: 631252 - DNA, 25 bp, Homo sapien
tggcgatgactgaaccgagagctga

SEQ ID NO: 631253 - DNA, 25 bp, Homo sapien
tcactgtgtctgtgtatgcctgggc

SEQ ID NO: 631254 - DNA, 25 bp, Homo sapien
ggaggaatcaccatcaccgtaacca

SEQ ID NO: 631255 - DNA, 25 bp, Homo sapien
ctcaaaataagtactcgtaaaatgt

SEQ ID NO: 631256 - DNA, 25 bp, Homo sapien
gtaaccatcacagaccagcgcatat

SEQ ID NO: 631257 - DNA, 25 bp, Homo sapien
gccgcgccatcctccggaaggagga

SEQ ID NO: 631258 - DNA, 25 bp, Homo sapien
cctgtgccccttgaccaggctgttt

SEQ ID NO: 631259 - DNA, 25 bp, Homo sapien
ggacttgatggccccggagcagtct

SEQ ID NO: 631260 - DNA, 25 bp, Homo sapien
gtgccccttgaccaggctgtttctg

SEQ ID NO: 631261 - DNA, 25 bp, Homo sapien
tggccccggagcagtctccaggcag

SEQ ID NO: 631262 - DNA, 25 bp, Homo sapien
gcagggccaccgggcatctcaccca

SEQ ID NO: 631263 - DNA, 25 bp, Homo sapien
tgcagggccaccgggcatctcaccc

SEQ ID NO: 631264 - DNA, 25 bp, Homo sapien
agggccaccgggcatctcacccatc

SEQ ID NO: 631265 - DNA, 25 bp, Homo sapien
cagggccaccgggcatctcacccat

SEQ ID NO: 631266 - DNA, 25 bp, Homo sapien
cggaagccgatacaatgcccgtggg

SEQ ID NO: 631267 - DNA, 25 bp, Homo sapien
gcatccccgagattggaggctccat

SEQ ID NO: 631268 - DNA, 25 bp, Homo sapien
ggctccatccgaagcacagcgtgat

SEQ ID NO: 631269 - DNA, 25 bp, Homo sapien
aaatggagcccgttctcttgcagga

SEQ ID NO: 631270 - DNA, 25 bp, Homo sapien
ttccattgaattggccgcgtggtac

SEQ ID NO: 631271 - DNA, 25 bp, Homo sapien
tgcacattcccgcttgcagtttggt

SEQ ID NO: 631272 - DNA, 25 bp, Homo sapien
tccgggctggttctgatgcacattc

SEQ ID NO: 631273 - DNA, 25 bp, Homo sapien
ctgaaggacaaaccggagtgcaacc

SEQ ID NO: 631274 - DNA, 25 bp, Homo sapien
ctggcaccgagcacggcctccgcac

SEQ ID NO: 631275 - DNA, 25 bp, Homo sapien
cacctgccacgtccctgaccccagg

SEQ ID NO: 631276 - DNA, 25 bp, Homo sapien
gagcctggcaccgagcacggcctcc

SEQ ID NO: 631277 - DNA, 25 bp, Homo sapien
ggcctccgcacctgccacgtccctg

SEQ ID NO: 631278 - DNA, 25 bp, Homo sapien
tgctgggcgggaaaacagagcatct

SEQ ID NO: 631279 - DNA, 25 bp, Homo sapien
gagttaaagccaaccctagcctctg

SEQ ID NO: 631280 - DNA, 25 bp, Homo sapien
tctgagggctgaaacaggctctgtc

SEQ ID NO: 631281 - DNA, 25 bp, Homo sapien
agaatgtcgtatggcctgtgggtcc

SEQ ID NO: 631282 - DNA, 25 bp, Homo sapien
gctgggtgtcaatgccggggctgcc

SEQ ID NO: 631283 - DNA, 25 bp, Homo sapien
tgctgggtgtcaatgccggggctgc

SEQ ID NO: 631284 - DNA, 25 bp, Homo sapien
gtgtcaatgccggggctgcctttgc

SEQ ID NO: 631285 - DNA, 25 bp, Homo sapien
ggcaaatcactgttgatctcatccg

SEQ ID NO: 631286 - DNA, 25 bp, Homo sapien
ttcctcagggaggaatcagggcttg

SEQ ID NO: 631287 - DNA, 25 bp, Homo sapien
cagtctcctgtacttccagtggggt

SEQ ID NO: 631288 - DNA, 25 bp, Homo sapien
tgttgatctcatccggcctgactgg

SEQ ID NO: 631289 - DNA, 25 bp, Homo sapien
aatggaacgagtttgtcccaccgca

SEQ ID NO: 631290 - DNA, 25 bp, Homo sapien
gctgaaaatgcaaggccggagtctg

SEQ ID NO: 631291 - DNA, 25 bp, Homo sapien
ccaaggaccaaactaggaggcttca

SEQ ID NO: 631292 - DNA, 25 bp, Homo sapien
ccggagtctgtaggaagtgccaacc

SEQ ID NO: 631293 - DNA, 25 bp, Homo sapien
catggagggcagtttcacaagagct

SEQ ID NO: 631294 - DNA, 25 bp, Homo sapien
gagtgtagggctgaacttacctgcc

SEQ ID NO: 631295 - DNA, 25 bp, Homo sapien
ccacagtgaatggagctgtccgcct

SEQ ID NO: 631296 - DNA, 25 bp, Homo sapien
caaatgtaagccctggtggagacaa

SEQ ID NO: 631297 - DNA, 25 bp, Homo sapien
tgtttctgtgtctcgtgttcataga

SEQ ID NO: 631298 - DNA, 25 bp, Homo sapien
tgtgtctcgtgttcatagatccaac

SEQ ID NO: 631299 - DNA, 25 bp, Homo sapien
tctgtgtctcgtgttcatagatcca

SEQ ID NO: 631300 - DNA, 25 bp, Homo sapien
ggtgtttctgtgtctcgtgttcata

SEQ ID NO: 631301 - DNA, 25 bp, Homo sapien
cagtggcccatggactacgatggtt

SEQ ID NO: 631302 - DNA, 25 bp, Homo sapien
gaacacagtgaccacgggagaatga

SEQ ID NO: 631303 - DNA, 25 bp, Homo sapien
ctaaatagtccacacacagcaagag

SEQ ID NO: 631304 - DNA, 25 bp, Homo sapien
ggtgatgacgaacccctcagtgaag

SEQ ID NO: 631305 - DNA, 25 bp, Homo sapien
gggcgtgagccggtgttgaagcctc

SEQ ID NO: 631306 - DNA, 25 bp, Homo sapien
tgagccggtgttgaagcctccaggt

SEQ ID NO: 631307 - DNA, 25 bp, Homo sapien
aggaaagggcgtgagccggtgttga

SEQ ID NO: 631308 - DNA, 25 bp, Homo sapien
gaaagggcgtgagccggtgttgaag

SEQ ID NO: 631309 - DNA, 25 bp, Homo sapien
aggagtgtgggccggcgtcagagcc

SEQ ID NO: 631310 - DNA, 25 bp, Homo sapien
ggagtgtgggccggcgtcagagcct

SEQ ID NO: 631311 - DNA, 25 bp, Homo sapien
gaaggagtgtgggccggcgtcagag

SEQ ID NO: 631312 - DNA, 25 bp, Homo sapien
agtgtgggccggcgtcagagcctcc

SEQ ID NO: 631313 - DNA, 25 bp, Homo sapien
ggcccatctcgggatctcctggaat

SEQ ID NO: 631314 - DNA, 25 bp, Homo sapien
tcttgttttgtgtttggcccatctc

SEQ ID NO: 631315 - DNA, 25 bp, Homo sapien
tgccacagatattgaagcccccggt

SEQ ID NO: 631316 - DNA, 25 bp, Homo sapien
ctcctggaatttcgggtcagtggga

SEQ ID NO: 631317 - DNA, 25 bp, Homo sapien
ggaaacactactgaagtgaggcagg

SEQ ID NO: 631318 - DNA, 25 bp, Homo sapien
atagaggccgacctgcagacgtgaa

SEQ ID NO: 631319 - DNA, 25 bp, Homo sapien
agacgtgaacgcagctgaccaggtg

SEQ ID NO: 631320 - DNA, 25 bp, Homo sapien
ggagcagaacgtccttggctggaca

SEQ ID NO: 631321 - DNA, 25 bp, Homo sapien
tgtggggttgccgtgaggccgaagt

SEQ ID NO: 631322 - DNA, 25 bp, Homo sapien
tgccgtgaggccgaagtcacaagtg

SEQ ID NO: 631323 - DNA, 25 bp, Homo sapien
ccgtgaggccgaagtcacaagtgag

SEQ ID NO: 631324 - DNA, 25 bp, Homo sapien
gggttgccgtgaggccgaagtcaca

SEQ ID NO: 631325 - DNA, 25 bp, Homo sapien
gtgcatggcgtcggcaggatgtggg

SEQ ID NO: 631326 - DNA, 25 bp, Homo sapien
tgcatggcgtcggcaggatgtgggt

SEQ ID NO: 631327 - DNA, 25 bp, Homo sapien
ggctctgttgccgcagcctcaaagc

SEQ ID NO: 631328 - DNA, 25 bp, Homo sapien
cctgggtctggcatcaggagcgtgt

SEQ ID NO: 631329 - DNA, 25 bp, Homo sapien
gagcgtgtcccaccggctctgttgc

SEQ ID NO: 631330 - DNA, 25 bp, Homo sapien
gtctggcatcaggagcgtgtcccac

SEQ ID NO: 631331 - DNA, 25 bp, Homo sapien
gccatggtgctctcgagagccaaag

SEQ ID NO: 631332 - DNA, 25 bp, Homo sapien
catctgcagccatacggcagcagct

SEQ ID NO: 631333 - DNA, 25 bp, Homo sapien
gcagcgttggatcctctgaccacag

SEQ ID NO: 631334 - DNA, 25 bp, Homo sapien
tgggccgtgtggacccagatcagca

SEQ ID NO: 631335 - DNA, 25 bp, Homo sapien
tgtggggtacacagcacccatgaca

SEQ ID NO: 631336 - DNA, 25 bp, Homo sapien
ttgtggctgtttgtcgcccacgggc

SEQ ID NO: 631337 - DNA, 25 bp, Homo sapien
ggactggactggaaaccgtgcccat

SEQ ID NO: 631338 - DNA, 25 bp, Homo sapien
tgattcagggagaaccggacggtca

SEQ ID NO: 631339 - DNA, 25 bp, Homo sapien
cggacggtcaggcactggtttactc

SEQ ID NO: 631340 - DNA, 25 bp, Homo sapien
tgaaaagcagaagctacgtccaggg

SEQ ID NO: 631341 - DNA, 25 bp, Homo sapien
ggctaaacgaatgaacagtttttga

SEQ ID NO: 631342 - DNA, 25 bp, Homo sapien
ggtttctgggcctcaaattgcgcag

SEQ ID NO: 631343 - DNA, 25 bp, Homo sapien
gcagcaggctctgaattgcccttta

SEQ ID NO: 631344 - DNA, 25 bp, Homo sapien
accttgagggttccagtgtgtgttg

SEQ ID NO: 631345 - DNA, 25 bp, Homo sapien
ctttcagtaggatgggaccttgagg

SEQ ID NO: 631346 - DNA, 25 bp, Homo sapien
ctggctttcagtaggatgggacctt

SEQ ID NO: 631347 - DNA, 25 bp, Homo sapien
gaccttgagggttccagtgtgtgtt

SEQ ID NO: 631348 - DNA, 25 bp, Homo sapien
atcatccatccggcagggggggacc

SEQ ID NO: 631349 - DNA, 25 bp, Homo sapien
tcatccatccggcagggggggacct

SEQ ID NO: 631350 - DNA, 25 bp, Homo sapien
gcagggggggacctccttctgtctg

SEQ ID NO: 631351 - DNA, 25 bp, Homo sapien
catccatccggcagggggggacctc

SEQ ID NO: 631352 - DNA, 25 bp, Homo sapien
cgcggcggagagtccgggctcgtgg

SEQ ID NO: 631353 - DNA, 25 bp, Homo sapien
gtcttagcagccgattgcgcagctc

SEQ ID NO: 631354 - DNA, 25 bp, Homo sapien
agactcccaagacggagggcaccgg

SEQ ID NO: 631355 - DNA, 25 bp, Homo sapien
gggacactcaggctctaactcacgt

SEQ ID NO: 631356 - DNA, 25 bp, Homo sapien
tcagctgacacgttgctgtaacgtc

SEQ ID NO: 631357 - DNA, 25 bp, Homo sapien
tcgaaccctgtcagctgcgggtaag

SEQ ID NO: 631358 - DNA, 25 bp, Homo sapien
tgtaacgtctcctccgtttcatgct

SEQ ID NO: 631359 - DNA, 25 bp, Homo sapien
tgcgtctacgcccatcatttcagct

SEQ ID NO: 631360 - DNA, 25 bp, Homo sapien
gcatcgcggaaaacgggattcgcct

SEQ ID NO: 631361 - DNA, 25 bp, Homo sapien
aaattaagtggcagcgtccactgcg

SEQ ID NO: 631362 - DNA, 25 bp, Homo sapien
gctggttagaaacgcggactctgcc

SEQ ID NO: 631363 - DNA, 25 bp, Homo sapien
tgatagaaaccatttccgccgctga

SEQ ID NO: 631364 - DNA, 25 bp, Homo sapien
ttcttcaaacgggacacaccagagt

SEQ ID NO: 631365 - DNA, 25 bp, Homo sapien
gaaacacagcagttggcctgaccgt

SEQ ID NO: 631366 - DNA, 25 bp, Homo sapien
gatcagggattccaaacacccatgg

SEQ ID NO: 631367 - DNA, 25 bp, Homo sapien
tccagtcttctaaaggtcaagggtc

SEQ ID NO: 631368 - DNA, 25 bp, Homo sapien
ttggttcacagccaaggcagtgttg

SEQ ID NO: 631369 - DNA, 25 bp, Homo sapien
gcgtgaacttgtggcaaagacactg

SEQ ID NO: 631370 - DNA, 25 bp, Homo sapien
caggcgtgaacttgtggcaaagaca

SEQ ID NO: 631371 - DNA, 25 bp, Homo sapien
gcagtgttggtcaaagctggcacag

SEQ ID NO: 631372 - DNA, 25 bp, Homo sapien
ctcccacctcttccatagtttccag

SEQ ID NO: 631373 - DNA, 25 bp, Homo sapien
ctgcttctaagcagcacctctggca

SEQ ID NO: 631374 - DNA, 25 bp, Homo sapien
caggctctcttcttcgtccttggtg

SEQ ID NO: 631375 - DNA, 25 bp, Homo sapien
ggacaggcaagatggcaaggtgtgc

SEQ ID NO: 631376 - DNA, 25 bp, Homo sapien
aggctctcttcttcgtccttggtgc

SEQ ID NO: 631377 - DNA, 25 bp, Homo sapien
agaggggacaggcaagatggcaagg

SEQ ID NO: 631378 - DNA, 25 bp, Homo sapien
gtggcgcccatcaagcatgtagaga

SEQ ID NO: 631379 - DNA, 25 bp, Homo sapien
gcccatcaagcatgtagagagggcc

SEQ ID NO: 631380 - DNA, 25 bp, Homo sapien
ggcgcccatcaagcatgtagagagg

SEQ ID NO: 631381 - DNA, 25 bp, Homo sapien
cccagtgcccggtggcgcccatcaa

SEQ ID NO: 631382 - DNA, 25 bp, Homo sapien
tgctggtgccatttctaggttcagt

SEQ ID NO: 631383 - DNA, 25 bp, Homo sapien
tagccaagtctgttggtgctggtgc

SEQ ID NO: 631384 - DNA, 25 bp, Homo sapien
tgcccgctctttactgcacgaaaca

SEQ ID NO: 631385 - DNA, 25 bp, Homo sapien
tttgtttaaagagccgtggagaatc

SEQ ID NO: 631386 - DNA, 25 bp, Homo sapien
ttgcttcctttcagagaattgcatc

SEQ ID NO: 631387 - DNA, 25 bp, Homo sapien
ggataatgatcgcatttgcttcctt

SEQ ID NO: 631388 - DNA, 25 bp, Homo sapien
aagaggataatgatcgcatttgctt

SEQ ID NO: 631389 - DNA, 25 bp, Homo sapien
gcatctctcatcctggggcaacgca

SEQ ID NO: 631390 - DNA, 25 bp, Homo sapien
agtccaagctgcctccggatggggc

SEQ ID NO: 631391 - DNA, 25 bp, Homo sapien
ggctgtgcttgtgtgaacgttattt

SEQ ID NO: 631392 - DNA, 25 bp, Homo sapien
cagaatgagcaaacgtggagtccaa

SEQ ID NO: 631393 - DNA, 25 bp, Homo sapien
tttgccacgaattctttttggcaga

SEQ ID NO: 631394 - DNA, 25 bp, Homo sapien
caggacagcccggttagaacgaccg

SEQ ID NO: 631395 - DNA, 25 bp, Homo sapien
gtgaacactgccgtgggatgccgct

SEQ ID NO: 631396 - DNA, 25 bp, Homo sapien
acagcattgcgtgtccgaggacgcg

SEQ ID NO: 631397 - DNA, 25 bp, Homo sapien
tagaacgaccgacagcattgcgtgt

SEQ ID NO: 631398 - DNA, 25 bp, Homo sapien
ctggaagacgaaggaggcttcacat

SEQ ID NO: 631399 - DNA, 25 bp, Homo sapien
gcttcacatgatgggaggcaacgag

SEQ ID NO: 631400 - DNA, 25 bp, Homo sapien
cagggttagggagggcgagaaagtg

SEQ ID NO: 631401 - DNA, 25 bp, Homo sapien
ggcattggcgagagagttgacgctt

SEQ ID NO: 631402 - DNA, 25 bp, Homo sapien
ggaaacaccttcttcggcagaaagc

SEQ ID NO: 631403 - DNA, 25 bp, Homo sapien
gaaacaccttcttcggcagaaagcc

SEQ ID NO: 631404 - DNA, 25 bp, Homo sapien
ctgacgggaaacaccttcttcggca

SEQ ID NO: 631405 - DNA, 25 bp, Homo sapien
gacgggaaacaccttcttcggcaga

SEQ ID NO: 631406 - DNA, 25 bp, Homo sapien
tgcaatgacatctaggctggctcct

SEQ ID NO: 631407 - DNA, 25 bp, Homo sapien
tcccctgagggtccgatctgtgtgg

SEQ ID NO: 631408 - DNA, 25 bp, Homo sapien
ttattggtggccgatgtcccctgag

SEQ ID NO: 631409 - DNA, 25 bp, Homo sapien
tacttggctgtgagtgcctgcacag

SEQ ID NO: 631410 - DNA, 25 bp, Homo sapien
ttgaaggagcctctgagagcgatct

SEQ ID NO: 631411 - DNA, 25 bp, Homo sapien
ggaggacatacactccagtcctgag

SEQ ID NO: 631412 - DNA, 25 bp, Homo sapien
cagtcctgagaagagcttcgaagtc

SEQ ID NO: 631413 - DNA, 25 bp, Homo sapien
tttacagatgctcaagatgtccttg

SEQ ID NO: 631414 - DNA, 25 bp, Homo sapien
cttggacatctcagccaggcctgga

SEQ ID NO: 631415 - DNA, 25 bp, Homo sapien
gctgcctcttggacatctcagccag

SEQ ID NO: 631416 - DNA, 25 bp, Homo sapien
cctctgccctttagcaggtgcagaa

SEQ ID NO: 631417 - DNA, 25 bp, Homo sapien
tctgccctttagcaggtgcagaaga

SEQ ID NO: 631418 - DNA, 25 bp, Homo sapien
tccgtgacccagtgcgctccatgtg

SEQ ID NO: 631419 - DNA, 25 bp, Homo sapien
tgtggccagtgcactgtgggctgcc

SEQ ID NO: 631420 - DNA, 25 bp, Homo sapien
tccagagctccgtgacccagtgcgc

SEQ ID NO: 631421 - DNA, 25 bp, Homo sapien
cagtgcgctccatgtggccagtgca

SEQ ID NO: 631422 - DNA, 25 bp, Homo sapien
tgatggaggactccttagcctcccc

SEQ ID NO: 631423 - DNA, 25 bp, Homo sapien
cataggacgcccaatgggctctgca

SEQ ID NO: 631424 - DNA, 25 bp, Homo sapien
cagctagcgccccaagtgagtcatc

SEQ ID NO: 631425 - DNA, 25 bp, Homo sapien
attgcagggccctccgtcataggac

SEQ ID NO: 631426 - DNA, 25 bp, Homo sapien
cagctgtgacaaagtctggatgtcc

SEQ ID NO: 631427 - DNA, 25 bp, Homo sapien
cacagggccaacttcagggcagctg

SEQ ID NO: 631428 - DNA, 25 bp, Homo sapien
gctgtgacaaagtctggatgtccac

SEQ ID NO: 631429 - DNA, 25 bp, Homo sapien
tgtgacaaagtctggatgtccaccc

SEQ ID NO: 631430 - DNA, 25 bp, Homo sapien
ctcatccaaagtttcatggacacca

SEQ ID NO: 631431 - DNA, 25 bp, Homo sapien
ggcgcgtctgcgaggtctctgcatt

SEQ ID NO: 631432 - DNA, 25 bp, Homo sapien
tggtgcatccaggtgcccgtgatcc

SEQ ID NO: 631433 - DNA, 25 bp, Homo sapien
acctggcgtgtcgttccctgagctg

SEQ ID NO: 631434 - DNA, 25 bp, Homo sapien
ggtgccctgttggatgtcctgtagc

SEQ ID NO: 631435 - DNA, 25 bp, Homo sapien
cgggtgccctgttggatgtcctgta

SEQ ID NO: 631436 - DNA, 25 bp, Homo sapien
gttggatgtcctgtagcgaatttgt

SEQ ID NO: 631437 - DNA, 25 bp, Homo sapien
gccctgttggatgtcctgtagcgaa

SEQ ID NO: 631438 - DNA, 25 bp, Homo sapien
ggtggtttcaacattcgctgcagcc

SEQ ID NO: 631439 - DNA, 25 bp, Homo sapien
gaactggtggtttcaacattcgctg

SEQ ID NO: 631440 - DNA, 25 bp, Homo sapien
aatgggaactggtggtttcaacatt

SEQ ID NO: 631441 - DNA, 25 bp, Homo sapien
ttcaacattcgctgcagccgtgctc

SEQ ID NO: 631442 - DNA, 25 bp, Homo sapien
tgaaagcctccgaatagcgtgggat

SEQ ID NO: 631443 - DNA, 25 bp, Homo sapien
gccatccgtgaaagcctccgaatag

SEQ ID NO: 631444 - DNA, 25 bp, Homo sapien
ctacgggtcaggtggctccggcggg

SEQ ID NO: 631445 - DNA, 25 bp, Homo sapien
tcttgtccgccatccgtgaaagcct

SEQ ID NO: 631446 - DNA, 25 bp, Homo sapien
gcctcggtgcgcacaaaggccggcg

SEQ ID NO: 631447 - DNA, 25 bp, Homo sapien
ccgcctctccggagcacacggataa

SEQ ID NO: 631448 - DNA, 25 bp, Homo sapien
tccgcgggggcctagtctcgccttg

SEQ ID NO: 631449 - DNA, 25 bp, Homo sapien
gggtctgtgcttcccccgctccgcg

SEQ ID NO: 631450 - DNA, 25 bp, Homo sapien
gagcaccttcgtccttcccacttta

SEQ ID NO: 631451 - DNA, 25 bp, Homo sapien
gggcagggtggatcgccgcccctgg

SEQ ID NO: 631452 - DNA, 25 bp, Homo sapien
cactttacctttggcggagggctct

SEQ ID NO: 631453 - DNA, 25 bp, Homo sapien
tcttttccgtacaggaccggctcca

SEQ ID NO: 631454 - DNA, 25 bp, Homo sapien
gccgccagttcccgcctgctcttcg

SEQ ID NO: 631455 - DNA, 25 bp, Homo sapien
ccgccagttcccgcctgctcttcgg

SEQ ID NO: 631456 - DNA, 25 bp, Homo sapien
gaggccgcttgcccggctcgccccg

SEQ ID NO: 631457 - DNA, 25 bp, Homo sapien
cgaatgcggttaaaagaacgaatct

SEQ ID NO: 631458 - DNA, 25 bp, Homo sapien
ttttacaacccagcgagctcgtcct

SEQ ID NO: 631459 - DNA, 25 bp, Homo sapien
gatgaaaactcgtctctttttacaa

SEQ ID NO: 631460 - DNA, 25 bp, Homo sapien
gaacgaatctcgatgctcaaagatg

SEQ ID NO: 631461 - DNA, 25 bp, Homo sapien
ggaggcgcctctcttggcattcacc

SEQ ID NO: 631462 - DNA, 25 bp, Homo sapien
ctgaccgtgacagagtccaggaagc

SEQ ID NO: 631463 - DNA, 25 bp, Homo sapien
ggcatcaggagaggtagctccctga

SEQ ID NO: 631464 - DNA, 25 bp, Homo sapien
tcaggagaggtagctccctgaccgt

SEQ ID NO: 631465 - DNA, 25 bp, Homo sapien
ggtagctccctgaccgtgacagagt

SEQ ID NO: 631466 - DNA, 25 bp, Homo sapien
agttctgcctgtgcccctaggtgga

SEQ ID NO: 631467 - DNA, 25 bp, Homo sapien
cctaggtggatggttgtgtgccaca

SEQ ID NO: 631468 - DNA, 25 bp, Homo sapien
ttggtctgtgtgctgcgtggacatc

SEQ ID NO: 631469 - DNA, 25 bp, Homo sapien
tgtgccacatggttgtactttgaga

SEQ ID NO: 631470 - DNA, 25 bp, Homo sapien
ccttcctgggatggaagacatccct

SEQ ID NO: 631471 - DNA, 25 bp, Homo sapien
ccgggggtccctgcatgaggcagtg

SEQ ID NO: 631472 - DNA, 25 bp, Homo sapien
ccccagggccatatggggagcagct

SEQ ID NO: 631473 - DNA, 25 bp, Homo sapien
cagctgatgttgggggctgaccact

SEQ ID NO: 631474 - DNA, 25 bp, Homo sapien
cagagtaaagggagtgcctgcagcc

SEQ ID NO: 631475 - DNA, 25 bp, Homo sapien
cacagagtaaagggagtgcctgcag

SEQ ID NO: 631476 - DNA, 25 bp, Homo sapien
agtaaagggagtgcctgcagcctga

SEQ ID NO: 631477 - DNA, 25 bp, Homo sapien
ccccctggggtctgtgtaagcctag

SEQ ID NO: 631478 - DNA, 25 bp, Homo sapien
cctgggcagtagagtccgtggagtt

SEQ ID NO: 631479 - DNA, 25 bp, Homo sapien
gtggaacggtcccacatgggacagt

SEQ ID NO: 631480 - DNA, 25 bp, Homo sapien
ggaagccctgggcagtagagtccgt

SEQ ID NO: 631481 - DNA, 25 bp, Homo sapien
ccacatgggacagtgggtcctagag

SEQ ID NO: 631482 - DNA, 25 bp, Homo sapien
acagccggagagctttgggatgtgg

SEQ ID NO: 631483 - DNA, 25 bp, Homo sapien
ccccactgtgggagcacggtgcagc

SEQ ID NO: 631484 - DNA, 25 bp, Homo sapien
gccaggagcacgctgggatttgcgc

SEQ ID NO: 631485 - DNA, 25 bp, Homo sapien
agcacggtgcagcagactgcaggcc

SEQ ID NO: 631486 - DNA, 25 bp, Homo sapien
tttggttttgcaggtggaccaggcc

SEQ ID NO: 631487 - DNA, 25 bp, Homo sapien
aaatgacgagtccagcaggtttggt

SEQ ID NO: 631488 - DNA, 25 bp, Homo sapien
gggacccttgtcatcaccaaggaga

SEQ ID NO: 631489 - DNA, 25 bp, Homo sapien
atcaccaaggagagcagtccccaac

SEQ ID NO: 631490 - DNA, 25 bp, Homo sapien
agagctggtgtcatggttcccctgc

SEQ ID NO: 631491 - DNA, 25 bp, Homo sapien
ggctcgtccaagctgggctaacgta

SEQ ID NO: 631492 - DNA, 25 bp, Homo sapien
gggcctcagaataccaggtccctag

SEQ ID NO: 631493 - DNA, 25 bp, Homo sapien
tcacgggaggagacctcaaggtgca

SEQ ID NO: 631494 - DNA, 25 bp, Homo sapien
gggctttggccaccacttgtgagac

SEQ ID NO: 631495 - DNA, 25 bp, Homo sapien
ggtgatgaggcccttggcggctttg

SEQ ID NO: 631496 - DNA, 25 bp, Homo sapien
aagaggagactttctgtgggtgggc

SEQ ID NO: 631497 - DNA, 25 bp, Homo sapien
ggagtaggtggtgcacaggtgatga

SEQ ID NO: 631498 - DNA, 25 bp, Homo sapien
tgcgtcgctcagctcgtgcaagagg

SEQ ID NO: 631499 - DNA, 25 bp, Homo sapien
catacgttgtcaccagctggaccag

SEQ ID NO: 631500 - DNA, 25 bp, Homo sapien
gctaatcaggcttcaggtgtcggaa

SEQ ID NO: 631501 - DNA, 25 bp, Homo sapien
gaaggattatctgggaggcgaccct

SEQ ID NO: 631502 - DNA, 25 bp, Homo sapien
tggagttaaaagaagcgcctgggcc

SEQ ID NO: 631503 - DNA, 25 bp, Homo sapien
tctttggtaggacagaaatgccctc

SEQ ID NO: 631504 - DNA, 25 bp, Homo sapien
tgatctcaccataggaggcccgtga

SEQ ID NO: 631505 - DNA, 25 bp, Homo sapien
taactgtggctaactttcgggtgca

SEQ ID NO: 631506 - DNA, 25 bp, Homo sapien
gaaaacgtgtctgttctgacaggcc

SEQ ID NO: 631507 - DNA, 25 bp, Homo sapien
aagtgtgttttcaacctcgagtggc

SEQ ID NO: 631508 - DNA, 25 bp, Homo sapien
tggtggttattccagtgcccagcaa

SEQ ID NO: 631509 - DNA, 25 bp, Homo sapien
caaatactctggagccttctcggga

SEQ ID NO: 631510 - DNA, 25 bp, Homo sapien
tcactgtcctggtgtccgattgggc

SEQ ID NO: 631511 - DNA, 25 bp, Homo sapien
taccacctggagtttgagttgaagc

SEQ ID NO: 631512 - DNA, 25 bp, Homo sapien
gaaaatggtgcccatgcctgacgct

SEQ ID NO: 631513 - DNA, 25 bp, Homo sapien
gatccttaccgtcctagagagcaga

SEQ ID NO: 631514 - DNA, 25 bp, Homo sapien
tgccggcactcagccatctaagaag

SEQ ID NO: 631515 - DNA, 25 bp, Homo sapien
taatcacaagacgatgaggttatcc

SEQ ID NO: 631516 - DNA, 25 bp, Homo sapien
cgggtactttgttgagatagctcca

SEQ ID NO: 631517 - DNA, 25 bp, Homo sapien
taagaaggcccctaagctcggagtg

SEQ ID NO: 631518 - DNA, 25 bp, Homo sapien
taagcacctcttgtagcagagcctg

SEQ ID NO: 631519 - DNA, 25 bp, Homo sapien
gagcctgcattgtctcactgctgaa

SEQ ID NO: 631520 - DNA, 25 bp, Homo sapien
cttgctgtttgaacgagggccccga

SEQ ID NO: 631521 - DNA, 25 bp, Homo sapien
gagcacatgacgttaaataacaaat

SEQ ID NO: 631522 - DNA, 25 bp, Homo sapien
ggctggactgtccagacacactcct

SEQ ID NO: 631523 - DNA, 25 bp, Homo sapien
ccaagaggcgctgggaacaagggag

SEQ ID NO: 631524 - DNA, 25 bp, Homo sapien
tgcagaggtgtgtggggctagcgca

SEQ ID NO: 631525 - DNA, 25 bp, Homo sapien
tgtgtggggctagcgcacgggtacc

SEQ ID NO: 631526 - DNA, 25 bp, Homo sapien
tgagcttggccgtcaaagacattag

SEQ ID NO: 631527 - DNA, 25 bp, Homo sapien
cactagctgcgtgtgtctgctggaa

SEQ ID NO: 631528 - DNA, 25 bp, Homo sapien
ctttctgggagtgtgaaggatcagc

SEQ ID NO: 631529 - DNA, 25 bp, Homo sapien
ccacaagttacagaatgcccaccag

SEQ ID NO: 631530 - DNA, 25 bp, Homo sapien
aacactggctctgaccaggtttgca

SEQ ID NO: 631531 - DNA, 25 bp, Homo sapien
gggctgatggccaatctcagaatat

SEQ ID NO: 631532 - DNA, 25 bp, Homo sapien
aatctcagaatatgcccagctggcc

SEQ ID NO: 631533 - DNA, 25 bp, Homo sapien
gacaccctgggaggggagtatccca

SEQ ID NO: 631534 - DNA, 25 bp, Homo sapien
cagtcagcggccagtcatagaagga

SEQ ID NO: 631535 - DNA, 25 bp, Homo sapien
gtgggaccatcaccggctgcccagt

SEQ ID NO: 631536 - DNA, 25 bp, Homo sapien
tagaaggaggccagacgcaactcct

SEQ ID NO: 631537 - DNA, 25 bp, Homo sapien
cagcagctcgggtggcacctcagca

SEQ ID NO: 631538 - DNA, 25 bp, Homo sapien
atgagagcttcagctggaggggagc

SEQ ID NO: 631539 - DNA, 25 bp, Homo sapien
ctggggtgcggagagatgctggccc

SEQ ID NO: 631540 - DNA, 25 bp, Homo sapien
tggggtgcggagagatgctggcccc

SEQ ID NO: 631541 - DNA, 25 bp, Homo sapien
gtgtccttccaaggctatgagagct

SEQ ID NO: 631542 - DNA, 25 bp, Homo sapien
cacttggcatgctccgtccaggggt

SEQ ID NO: 631543 - DNA, 25 bp, Homo sapien
tccaggggtcgtccccgcgcttcca

SEQ ID NO: 631544 - DNA, 25 bp, Homo sapien
aagcacctcaccttgtcctgatggc

SEQ ID NO: 631545 - DNA, 25 bp, Homo sapien
aggcccccatagcagaagaagcacc

SEQ ID NO: 631546 - DNA, 25 bp, Homo sapien
atgatcagacccggggccccgcagg

SEQ ID NO: 631547 - DNA, 25 bp, Homo sapien
catgatcagacccggggccccgcag

SEQ ID NO: 631548 - DNA, 25 bp, Homo sapien
tgatcagacccggggccccgcaggg

SEQ ID NO: 631549 - DNA, 25 bp, Homo sapien
ccatgatcagacccggggccccgca

SEQ ID NO: 631550 - DNA, 25 bp, Homo sapien
aaagtgggtacctgccggccagaag

SEQ ID NO: 631551 - DNA, 25 bp, Homo sapien
gcctggtgttgggtcgacagagccg

SEQ ID NO: 631552 - DNA, 25 bp, Homo sapien
aagtgggtacctgccggccagaagc

SEQ ID NO: 631553 - DNA, 25 bp, Homo sapien
tcgacagagccgttgggggcccacc

SEQ ID NO: 631554 - DNA, 25 bp, Homo sapien
ggcttcagggtagtcccatgggaga

SEQ ID NO: 631555 - DNA, 25 bp, Homo sapien
tgcttcaagcccttggatccccggg

SEQ ID NO: 631556 - DNA, 25 bp, Homo sapien
cagatgccccagagatgtaggttgg

SEQ ID NO: 631557 - DNA, 25 bp, Homo sapien
ccactgtctgcttcaagcccttgga

SEQ ID NO: 631558 - DNA, 25 bp, Homo sapien
ctcttccttttgaccggagcaggaa

SEQ ID NO: 631559 - DNA, 25 bp, Homo sapien
ctgggagtgagtctcctgcacactg

SEQ ID NO: 631560 - DNA, 25 bp, Homo sapien
tctcttccttttgaccggagcagga

SEQ ID NO: 631561 - DNA, 25 bp, Homo sapien
ggagtgagtctcctgcacactgtgg

SEQ ID NO: 631562 - DNA, 25 bp, Homo sapien
ggccacaggggctgcgtcttccggt

SEQ ID NO: 631563 - DNA, 25 bp, Homo sapien
gccacaggggctgcgtcttccggtt

SEQ ID NO: 631564 - DNA, 25 bp, Homo sapien
ctgcgtcttccggttcttcccacgg

SEQ ID NO: 631565 - DNA, 25 bp, Homo sapien
gggctgcgtcttccggttcttccca

SEQ ID NO: 631566 - DNA, 25 bp, Homo sapien
gggcactttcagactggacctctct

SEQ ID NO: 631567 - DNA, 25 bp, Homo sapien
tcctgggcactttcagactggacct

SEQ ID NO: 631568 - DNA, 25 bp, Homo sapien
gctcctgggcactttcagactggac

SEQ ID NO: 631569 - DNA, 25 bp, Homo sapien
ctgggcactttcagactggacctct

SEQ ID NO: 631570 - DNA, 25 bp, Homo sapien
tcacccagggggtcccgggcctgca

SEQ ID NO: 631571 - DNA, 25 bp, Homo sapien
ccatggaaggtcggggtccctcagc

SEQ ID NO: 631572 - DNA, 25 bp, Homo sapien
ggccatggaaggtcggggtccctca

SEQ ID NO: 631573 - DNA, 25 bp, Homo sapien
caccctctatgggccatggaaggtc

SEQ ID NO: 631574 - DNA, 25 bp, Homo sapien
ccctctatgggccatggaaggtcgg

SEQ ID NO: 631575 - DNA, 25 bp, Homo sapien
caagaacccaccacgccctctgggc

SEQ ID NO: 631576 - DNA, 25 bp, Homo sapien
tcaagaacccaccacgccctctggg

SEQ ID NO: 631577 - DNA, 25 bp, Homo sapien
aagacgatggacacggcgcggtcca

SEQ ID NO: 631578 - DNA, 25 bp, Homo sapien
aggccgggggcacactcagcacaga

SEQ ID NO: 631579 - DNA, 25 bp, Homo sapien
accaggtggccgcacggcacaaaga

SEQ ID NO: 631580 - DNA, 25 bp, Homo sapien
aggaaggtgcgcacgcggctgcgga

SEQ ID NO: 631581 - DNA, 25 bp, Homo sapien
caaacaggtacagttaagccatccc

SEQ ID NO: 631582 - DNA, 25 bp, Homo sapien
tccaaacaggtacagttaagccatc

SEQ ID NO: 631583 - DNA, 25 bp, Homo sapien
gcatccaaacaggtacagttaagcc

SEQ ID NO: 631584 - DNA, 25 bp, Homo sapien
ccccacgccaagcaagggcctcctt

SEQ ID NO: 631585 - DNA, 25 bp, Homo sapien
gtgcagaaaacctgacccttggtct

SEQ ID NO: 631586 - DNA, 25 bp, Homo sapien
tgagtaaagaccaagtggcagccct

SEQ ID NO: 631587 - DNA, 25 bp, Homo sapien
ggttgccatgggaaacccatctcag

SEQ ID NO: 631588 - DNA, 25 bp, Homo sapien
ccatgagcctggactacagatctgg

SEQ ID NO: 631589 - DNA, 25 bp, Homo sapien
caagggacactagagcatcgttgca

SEQ ID NO: 631590 - DNA, 25 bp, Homo sapien
tacagtgtagtgctcagtgggctgc

SEQ ID NO: 631591 - DNA, 25 bp, Homo sapien
tggaggctgctctaacgttcacgag

SEQ ID NO: 631592 - DNA, 25 bp, Homo sapien
gcagatgaagcgtccgagaaaacct

SEQ ID NO: 631593 - DNA, 25 bp, Homo sapien
acctgtcctcaggtgtgactcacac

SEQ ID NO: 631594 - DNA, 25 bp, Homo sapien
agccccttaagcgacagacctgttg

SEQ ID NO: 631595 - DNA, 25 bp, Homo sapien
ggaccatcagcttttactctctgga

SEQ ID NO: 631596 - DNA, 25 bp, Homo sapien
caaagtccagttccgggcaagggtg

SEQ ID NO: 631597 - DNA, 25 bp, Homo sapien
gcacaaggtcctggcctgaacaagc

SEQ ID NO: 631598 - DNA, 25 bp, Homo sapien
cactcggcctgcgtttgtgctgact

SEQ ID NO: 631599 - DNA, 25 bp, Homo sapien
tgaatacactgggtttactaagaaa

SEQ ID NO: 631600 - DNA, 25 bp, Homo sapien
atggcagccgctaaaaatgaataca

SEQ ID NO: 631601 - DNA, 25 bp, Homo sapien
gagtcgacaacattgcctgtgggcc

SEQ ID NO: 631602 - DNA, 25 bp, Homo sapien
agttctcccggtttcatctgaaacg

SEQ ID NO: 631603 - DNA, 25 bp, Homo sapien
tgcggacagctctgccgggaaccca

SEQ ID NO: 631604 - DNA, 25 bp, Homo sapien
agagcagcgactgaatggtggcccc

SEQ ID NO: 631605 - DNA, 25 bp, Homo sapien
tgcacagaagcatccgagtgaggga

SEQ ID NO: 631606 - DNA, 25 bp, Homo sapien
tggttgatgcgtcccctgaggttgc

SEQ ID NO: 631607 - DNA, 25 bp, Homo sapien
tagtaccagggagagtctgacggcc

SEQ ID NO: 631608 - DNA, 25 bp, Homo sapien
tcagccgagggcttatagtaccagg

SEQ ID NO: 631609 - DNA, 25 bp, Homo sapien
gctgctgctaggcactaaatgtcgg

SEQ ID NO: 631610 - DNA, 25 bp, Homo sapien
catgctctgtgctggaagagcccac

SEQ ID NO: 631611 - DNA, 25 bp, Homo sapien
taaatgtcggcttgacacagcctga

SEQ ID NO: 631612 - DNA, 25 bp, Homo sapien
gctgcgctggtctggtgtccacgtt

SEQ ID NO: 631613 - DNA, 25 bp, Homo sapien
cgtctcgtactgtgtcgggctcagg

SEQ ID NO: 631614 - DNA, 25 bp, Homo sapien
taatgatccgaatgcttgagcaaga

SEQ ID NO: 631615 - DNA, 25 bp, Homo sapien
ctgagattaaagatgaggtcccaaa

SEQ ID NO: 631616 - DNA, 25 bp, Homo sapien
taccaagatgtagtcgagcggctcc

SEQ ID NO: 631617 - DNA, 25 bp, Homo sapien
cagccagcagccgaagcaaccagaa

SEQ ID NO: 631618 - DNA, 25 bp, Homo sapien
ccagcagccgaagcaaccagaaaat

SEQ ID NO: 631619 - DNA, 25 bp, Homo sapien
ccgccgtccccactacagccagcag

SEQ ID NO: 631620 - DNA, 25 bp, Homo sapien
cagccgaagcaaccagaaaatgcac

SEQ ID NO: 631621 - DNA, 25 bp, Homo sapien
tgaccgagtggtgggcattaccagc

SEQ ID NO: 631622 - DNA, 25 bp, Homo sapien
acagccagagcggtaccaacactgg

SEQ ID NO: 631623 - DNA, 25 bp, Homo sapien
ctgggcttccatggtcccgagggac

SEQ ID NO: 631624 - DNA, 25 bp, Homo sapien
ggaaactcttcctgtgtgatcggag

SEQ ID NO: 631625 - DNA, 25 bp, Homo sapien
ctgcccacgacggtgccgcctgggt

SEQ ID NO: 631626 - DNA, 25 bp, Homo sapien
agcgcgtggggttggcccggggctg

SEQ ID NO: 631627 - DNA, 25 bp, Homo sapien
gagagaagcgcgtggggttggcccg

SEQ ID NO: 631628 - DNA, 25 bp, Homo sapien
ggagagaagcgcgtggggttggccc

SEQ ID NO: 631629 - DNA, 25 bp, Homo sapien
tagggccgccgcactgcaatgagga

SEQ ID NO: 631630 - DNA, 25 bp, Homo sapien
tgcaatgaggatgcgcccggtcgcc

SEQ ID NO: 631631 - DNA, 25 bp, Homo sapien
agggccgaggtagggccgccgcact

SEQ ID NO: 631632 - DNA, 25 bp, Homo sapien
gcactgcaatgaggatgcgcccggt

SEQ ID NO: 631633 - DNA, 25 bp, Homo sapien
ccgagtcctgggtccgaaggagctc

SEQ ID NO: 631634 - DNA, 25 bp, Homo sapien
cctgactgggatgtgtccaggccga

SEQ ID NO: 631635 - DNA, 25 bp, Homo sapien
ggtggaagccccaccgggcttcaga

SEQ ID NO: 631636 - DNA, 25 bp, Homo sapien
agaggccacctgactgggatgtgtc

SEQ ID NO: 631637 - DNA, 25 bp, Homo sapien
ggtccgcagggaccacttactgaag

SEQ ID NO: 631638 - DNA, 25 bp, Homo sapien
actgctgccgctttgcttaagctta

SEQ ID NO: 631639 - DNA, 25 bp, Homo sapien
gaagaccatatcattactgctgccg

SEQ ID NO: 631640 - DNA, 25 bp, Homo sapien
ggtcacaggaccactcgcagcaggg

SEQ ID NO: 631641 - DNA, 25 bp, Homo sapien
tgcaccctgacttctttaagaacct

SEQ ID NO: 631642 - DNA, 25 bp, Homo sapien
ctgacttctttaagaaccttcctgg

SEQ ID NO: 631643 - DNA, 25 bp, Homo sapien
cctgacttctttaagaaccttcctg

SEQ ID NO: 631644 - DNA, 25 bp, Homo sapien
tgacccactgaggattgaacgcgcc

SEQ ID NO: 631645 - DNA, 25 bp, Homo sapien
ccagatgccgtaggtcacactgacc

SEQ ID NO: 631646 - DNA, 25 bp, Homo sapien
actgaggattgaacgcgccacactc

SEQ ID NO: 631647 - DNA, 25 bp, Homo sapien
aggcagatccagatgccgtaggtca

SEQ ID NO: 631648 - DNA, 25 bp, Homo sapien
ttatccctaaagagggccgcggctc

SEQ ID NO: 631649 - DNA, 25 bp, Homo sapien
tgcaaggaccagcaaggatcgtaat

SEQ ID NO: 631650 - DNA, 25 bp, Homo sapien
gatcgtaatcctcctgagactccag

SEQ ID NO: 631651 - DNA, 25 bp, Homo sapien
cacttgtccatagtaacagagcgca

SEQ ID NO: 631652 - DNA, 25 bp, Homo sapien
caccatggacggcagcgtcctgggc

SEQ ID NO: 631653 - DNA, 25 bp, Homo sapien
ctctctgccttcggccagagcgacc

SEQ ID NO: 631654 - DNA, 25 bp, Homo sapien
gtgcaccatggacggcagcgtcctg

SEQ ID NO: 631655 - DNA, 25 bp, Homo sapien
tgcaccatggacggcagcgtcctgg

SEQ ID NO: 631656 - DNA, 25 bp, Homo sapien
gcagtgcaaagccttccgtcagaag

SEQ ID NO: 631657 - DNA, 25 bp, Homo sapien
ccgtcagaagcacgtggatgtggca

SEQ ID NO: 631658 - DNA, 25 bp, Homo sapien
gcctggaatcaagccggagttgccc

SEQ ID NO: 631659 - DNA, 25 bp, Homo sapien
cacctggaaggcgtgcggagcttac

SEQ ID NO: 631660 - DNA, 25 bp, Homo sapien
aatgccagcctcatgggcaacacga

SEQ ID NO: 631661 - DNA, 25 bp, Homo sapien
ctgctcgggctcaggtgctgaaacc

SEQ ID NO: 631662 - DNA, 25 bp, Homo sapien
tcgggctcaggtgctgaaaccccag

SEQ ID NO: 631663 - DNA, 25 bp, Homo sapien
tgggcaacacgagaggcctccacag

SEQ ID NO: 631664 - DNA, 25 bp, Homo sapien
ccgaggtcatcattcagccagtctt

SEQ ID NO: 631665 - DNA, 25 bp, Homo sapien
ttgataggagccgaggtcatcattc

SEQ ID NO: 631666 - DNA, 25 bp, Homo sapien
agccttgtccgaggaggcggtcaca

SEQ ID NO: 631667 - DNA, 25 bp, Homo sapien
tcaaaagccttgtccgaggaggcgg

SEQ ID NO: 631668 - DNA, 25 bp, Homo sapien
tgcaatcagaccctgcaccgcgcat

SEQ ID NO: 631669 - DNA, 25 bp, Homo sapien
aggcgtccccagctctcaagtcctt

SEQ ID NO: 631670 - DNA, 25 bp, Homo sapien
aagggaagcagccctacccaccaga

SEQ ID NO: 631671 - DNA, 25 bp, Homo sapien
gggtcactgcaatacatctaagacc

SEQ ID NO: 631672 - DNA, 25 bp, Homo sapien
tcttctgaggcggtggcgtgttccc

SEQ ID NO: 631673 - DNA, 25 bp, Homo sapien
caaaccccacgtagcgattcccctg

SEQ ID NO: 631674 - DNA, 25 bp, Homo sapien
ttctgaggcggtggcgtgttcccaa

SEQ ID NO: 631675 - DNA, 25 bp, Homo sapien
tttcttctgaggcggtggcgtgttc

SEQ ID NO: 631676 - DNA, 25 bp, Homo sapien
actgccctccagtctgcagcctggg

SEQ ID NO: 631677 - DNA, 25 bp, Homo sapien
accactgccctccagtctgcagcct

SEQ ID NO: 631678 - DNA, 25 bp, Homo sapien
gccctccagtctgcagcctgggcga

SEQ ID NO: 631679 - DNA, 25 bp, Homo sapien
tgccctccagtctgcagcctgggcg

SEQ ID NO: 631680 - DNA, 25 bp, Homo sapien
tgccgaggcaaaccggctggctcca

SEQ ID NO: 631681 - DNA, 25 bp, Homo sapien
ctgccgaggcaaaccggctggctcc

SEQ ID NO: 631682 - DNA, 25 bp, Homo sapien
ccttggctgccgaggcaaaccggct

SEQ ID NO: 631683 - DNA, 25 bp, Homo sapien
ccctccttggctgccgaggcaaacc

SEQ ID NO: 631684 - DNA, 25 bp, Homo sapien
ggaccaccctggctggtactgcgtt

SEQ ID NO: 631685 - DNA, 25 bp, Homo sapien
tcagggcgggacccctttgccagca

SEQ ID NO: 631686 - DNA, 25 bp, Homo sapien
tggtactgcgttggcacagcccatg

SEQ ID NO: 631687 - DNA, 25 bp, Homo sapien
catggttacagcacccagaaaccct

SEQ ID NO: 631688 - DNA, 25 bp, Homo sapien
cttctgactcgcttgggatccaaac

SEQ ID NO: 631689 - DNA, 25 bp, Homo sapien
tctgactcgcttgggatccaaactt

SEQ ID NO: 631690 - DNA, 25 bp, Homo sapien
tcgcttgggatccaaactttgtagc

SEQ ID NO: 631691 - DNA, 25 bp, Homo sapien
gactcgcttgggatccaaactttgt

SEQ ID NO: 631692 - DNA, 25 bp, Homo sapien
gtgacgtcagactcaggatagtttc

SEQ ID NO: 631693 - DNA, 25 bp, Homo sapien
cgtcagactcaggatagtttcagat

SEQ ID NO: 631694 - DNA, 25 bp, Homo sapien
cagactcaggatagtttcagatgca

SEQ ID NO: 631695 - DNA, 25 bp, Homo sapien
gactcaggatagtttcagatgcacc

SEQ ID NO: 631696 - DNA, 25 bp, Homo sapien
tgtgattctgaacccgaggacagcc

SEQ ID NO: 631697 - DNA, 25 bp, Homo sapien
aaaaacatgcaaaggcctgaggcca

SEQ ID NO: 631698 - DNA, 25 bp, Homo sapien
ttgcctcgaagtgcagacgcgtcca

SEQ ID NO: 631699 - DNA, 25 bp, Homo sapien
aggaaacgagtttggccctgcaggc

SEQ ID NO: 631700 - DNA, 25 bp, Homo sapien
tgggaggcccacgaaaaagccagat

SEQ ID NO: 631701 - DNA, 25 bp, Homo sapien
tgacggatgggcacctcgtgagaaa

SEQ ID NO: 631702 - DNA, 25 bp, Homo sapien
gtgagaaaggacaccctcgcccagg

SEQ ID NO: 631703 - DNA, 25 bp, Homo sapien
tgcgcgagcgactgcacctcaggac

SEQ ID NO: 631704 - DNA, 25 bp, Homo sapien
aggctctcagcaacacaaccctgga

SEQ ID NO: 631705 - DNA, 25 bp, Homo sapien
gggtgccgcaacactaaggcagcac

SEQ ID NO: 631706 - DNA, 25 bp, Homo sapien
ttagtaaccagcagcgccttcgaac

SEQ ID NO: 631707 - DNA, 25 bp, Homo sapien
acactaaggcagcaccgggcaggct

SEQ ID NO: 631708 - DNA, 25 bp, Homo sapien
tccggctgctgcttgtgaccccaaa

SEQ ID NO: 631709 - DNA, 25 bp, Homo sapien
cggctccggctgctgcttgtgaccc

SEQ ID NO: 631710 - DNA, 25 bp, Homo sapien
ccggctgctgcttgtgaccccaaaa

SEQ ID NO: 631711 - DNA, 25 bp, Homo sapien
gctccggctgctgcttgtgacccca

SEQ ID NO: 631712 - DNA, 25 bp, Homo sapien
agcgtgcgcacatgtgaggtgacac

SEQ ID NO: 631713 - DNA, 25 bp, Homo sapien
gaagccaagcacattctcggcggag

SEQ ID NO: 631714 - DNA, 25 bp, Homo sapien
gagcagcacggatcaaaggccggaa

SEQ ID NO: 631715 - DNA, 25 bp, Homo sapien
gaactcgtcacagagcaaagatcct

SEQ ID NO: 631716 - DNA, 25 bp, Homo sapien
tccttcctccccaggcaggcaccga

SEQ ID NO: 631717 - DNA, 25 bp, Homo sapien
ttcctccccaggcaggcaccgagtc

SEQ ID NO: 631718 - DNA, 25 bp, Homo sapien
cctccccaggcaggcaccgagtccc

SEQ ID NO: 631719 - DNA, 25 bp, Homo sapien
tccccaggcaggcaccgagtccccc

SEQ ID NO: 631720 - DNA, 25 bp, Homo sapien
tgcctgaggccaacgccggctgcag

SEQ ID NO: 631721 - DNA, 25 bp, Homo sapien
cctgtgcctgaggccaacgccggct

SEQ ID NO: 631722 - DNA, 25 bp, Homo sapien
gccaccatgcggccctgccgggccg

SEQ ID NO: 631723 - DNA, 25 bp, Homo sapien
tgtgcctgaggccaacgccggctgc

SEQ ID NO: 631724 - DNA, 25 bp, Homo sapien
gaccgcggcccccaccaattcttgc

SEQ ID NO: 631725 - DNA, 25 bp, Homo sapien
ggcccccaccaattcttgcaggaag

SEQ ID NO: 631726 - DNA, 25 bp, Homo sapien
ccccaccaattcttgcaggaaggtc

SEQ ID NO: 631727 - DNA, 25 bp, Homo sapien
gcggcccccaccaattcttgcagga

SEQ ID NO: 631728 - DNA, 25 bp, Homo sapien
agcacgagcttcaccagcaggaggg

SEQ ID NO: 631729 - DNA, 25 bp, Homo sapien
tttgcacacaacacccgaagggcag

SEQ ID NO: 631730 - DNA, 25 bp, Homo sapien
ccaccacgggacacgggtcggcagt

SEQ ID NO: 631731 - DNA, 25 bp, Homo sapien
gatacaagcgcagggagcaggaaac

SEQ ID NO: 631732 - DNA, 25 bp, Homo sapien
ctgtaggaagggaagtcacgtgagc

SEQ ID NO: 631733 - DNA, 25 bp, Homo sapien
taggaagggaagtcacgtgagcccc

SEQ ID NO: 631734 - DNA, 25 bp, Homo sapien
tgtaggaagggaagtcacgtgagcc

SEQ ID NO: 631735 - DNA, 25 bp, Homo sapien
cctgcgcaggcttgaggacgttctc

SEQ ID NO: 631736 - DNA, 25 bp, Homo sapien
tgcgcaggcttgaggacgttctcgt

SEQ ID NO: 631737 - DNA, 25 bp, Homo sapien
ctcctgcgcaggcttgaggacgttc

SEQ ID NO: 631738 - DNA, 25 bp, Homo sapien
caggcttgaggacgttctcgttcag

SEQ ID NO: 631739 - DNA, 25 bp, Homo sapien
ttggcctcgctgagtcccagctgct

SEQ ID NO: 631740 - DNA, 25 bp, Homo sapien
gctgctggacaaacaatccccctaa

SEQ ID NO: 631741 - DNA, 25 bp, Homo sapien
acacccacgtcccctggagtgaagg

SEQ ID NO: 631742 - DNA, 25 bp, Homo sapien
gcactgcaagggaggccctaggcca

SEQ ID NO: 631743 - DNA, 25 bp, Homo sapien
ctcctctgggcacagctccgcggcc

SEQ ID NO: 631744 - DNA, 25 bp, Homo sapien
cagagcctcctctgggcacagctcc

SEQ ID NO: 631745 - DNA, 25 bp, Homo sapien
cctctgggcacagctccgcggccag

SEQ ID NO: 631746 - DNA, 25 bp, Homo sapien
gcctcctctgggcacagctccgcgg

SEQ ID NO: 631747 - DNA, 25 bp, Homo sapien
gcgggagagatgaaagcttaaagct

SEQ ID NO: 631748 - DNA, 25 bp, Homo sapien
ttgtcccagtcaggccccgaaggag

SEQ ID NO: 631749 - DNA, 25 bp, Homo sapien
aaatagcaacgtgacctaaggacag

SEQ ID NO: 631750 - DNA, 25 bp, Homo sapien
gaaaccatgtcactgtgaggcctgg

SEQ ID NO: 631751 - DNA, 25 bp, Homo sapien
tggacgccaactgagagaccccact

SEQ ID NO: 631752 - DNA, 25 bp, Homo sapien
ggacgccaactgagagaccccactg

SEQ ID NO: 631753 - DNA, 25 bp, Homo sapien
cccagggccgtggaatatggagact

SEQ ID NO: 631754 - DNA, 25 bp, Homo sapien
tgtgcccgcgtatctggcaggctcc

SEQ ID NO: 631755 - DNA, 25 bp, Homo sapien
agactggcttcgactgtgcccgcgt

SEQ ID NO: 631756 - DNA, 25 bp, Homo sapien
tgctctcacgcccagggccgtggaa

SEQ ID NO: 631757 - DNA, 25 bp, Homo sapien
ggcagctctcctcccgtctcagagg

SEQ ID NO: 631758 - DNA, 25 bp, Homo sapien
gagaagtgacagttagtggctgacc

SEQ ID NO: 631759 - DNA, 25 bp, Homo sapien
acagttagtggctgaccgggccgca

SEQ ID NO: 631760 - DNA, 25 bp, Homo sapien
ccgcagtgggccaagttgtttccat

SEQ ID NO: 631761 - DNA, 25 bp, Homo sapien
gcctcgtgcacagacctcaagagct

SEQ ID NO: 631762 - DNA, 25 bp, Homo sapien
aggacaaaatgcacgccccaaatgg

SEQ ID NO: 631763 - DNA, 25 bp, Homo sapien
tgatggcagcaaagacggcgctggc

SEQ ID NO: 631764 - DNA, 25 bp, Homo sapien
tgtgtgcgggacatggcagcgagga

SEQ ID NO: 631765 - DNA, 25 bp, Homo sapien
ttaggcaggccctgtcgcggcacag

SEQ ID NO: 631766 - DNA, 25 bp, Homo sapien
gacgggaagagaggttaggcaggcc

SEQ ID NO: 631767 - DNA, 25 bp, Homo sapien
ggcacgcgccgtcccgctgagaaga

SEQ ID NO: 631768 - DNA, 25 bp, Homo sapien
aacaaggggtgcctcgcacacacgt

SEQ ID NO: 631769 - DNA, 25 bp, Homo sapien
tcccgccatcccttactaccgactc

SEQ ID NO: 631770 - DNA, 25 bp, Homo sapien
tgtccaaggggccctctgctttccc

SEQ ID NO: 631771 - DNA, 25 bp, Homo sapien
gcccgatgagatccccggtggttcc

SEQ ID NO: 631772 - DNA, 25 bp, Homo sapien
tagtgggcagtgcatctgtgcccac

SEQ ID NO: 631773 - DNA, 25 bp, Homo sapien
gccaggcccgatgagatccccggtg

SEQ ID NO: 631774 - DNA, 25 bp, Homo sapien
aaggccaggcccgatgagatccccg

SEQ ID NO: 631775 - DNA, 25 bp, Homo sapien
gaccgctgttctgataactgtggcc

SEQ ID NO: 631776 - DNA, 25 bp, Homo sapien
ttggaagtggtccagaccgctgttc

SEQ ID NO: 631777 - DNA, 25 bp, Homo sapien
agaccgctgttctgataactgtggc

SEQ ID NO: 631778 - DNA, 25 bp, Homo sapien
tttggaagtggtccagaccgctgtt

SEQ ID NO: 631779 - DNA, 25 bp, Homo sapien
tcggtggaggtgtccgcgcacgtcc

SEQ ID NO: 631780 - DNA, 25 bp, Homo sapien
gacttgcgggtcttggtgggctcag

SEQ ID NO: 631781 - DNA, 25 bp, Homo sapien
cttggtgggctcagcacttccaaag

SEQ ID NO: 631782 - DNA, 25 bp, Homo sapien
gcacgtccagctgtcgctgctcggg

SEQ ID NO: 631783 - DNA, 25 bp, Homo sapien
cacggccggcggcactgccttcttg

SEQ ID NO: 631784 - DNA, 25 bp, Homo sapien
catcatcagtgggcacggccggcgg

SEQ ID NO: 631785 - DNA, 25 bp, Homo sapien
gccatcatcagtgggcacggccggc

SEQ ID NO: 631786 - DNA, 25 bp, Homo sapien
ggcacggccggcggcactgccttct

SEQ ID NO: 631787 - DNA, 25 bp, Homo sapien
gagccccggccttgagtccaagaat

SEQ ID NO: 631788 - DNA, 25 bp, Homo sapien
gatactgcgtagtgaactggccgct

SEQ ID NO: 631789 - DNA, 25 bp, Homo sapien
tatctcaacgagaagggacacctca

SEQ ID NO: 631790 - DNA, 25 bp, Homo sapien
agagtgcaaacacgaagtcgcccgg

SEQ ID NO: 631791 - DNA, 25 bp, Homo sapien
gagccacagagggttacgaccgacg

SEQ ID NO: 631792 - DNA, 25 bp, Homo sapien
cagcgtgagcgccagtatcatttcc

SEQ ID NO: 631793 - DNA, 25 bp, Homo sapien
gacgcgggtctgacagcacaggccc

SEQ ID NO: 631794 - DNA, 25 bp, Homo sapien
agggtggtcggatggcagcgtgagc

SEQ ID NO: 631795 - DNA, 25 bp, Homo sapien
ccagggtgttccaggatggtcaagt

SEQ ID NO: 631796 - DNA, 25 bp, Homo sapien
gggtgttccaggatggtcaagttcc

SEQ ID NO: 631797 - DNA, 25 bp, Homo sapien
tggtgaacttggtggtgggacggtg

SEQ ID NO: 631798 - DNA, 25 bp, Homo sapien
gtgttccaggatggtcaagttccag

SEQ ID NO: 631799 - DNA, 25 bp, Homo sapien
caggagggctcgctgaaatctcggt

SEQ ID NO: 631800 - DNA, 25 bp, Homo sapien
tggaaacaggcacatgtggaacacc

SEQ ID NO: 631801 - DNA, 25 bp, Homo sapien
gtacaaactgcacgagcttcgggcg

SEQ ID NO: 631802 - DNA, 25 bp, Homo sapien
gcaggtggctgcttcggtgatcaaa

SEQ ID NO: 631803 - DNA, 25 bp, Homo sapien
gctgactgcacttcccatcaaaagg

SEQ ID NO: 631804 - DNA, 25 bp, Homo sapien
aaggccatcaccctccgtggacggg

SEQ ID NO: 631805 - DNA, 25 bp, Homo sapien
atcaccctccgtggacggggtctcg

SEQ ID NO: 631806 - DNA, 25 bp, Homo sapien
tggggcagagtgggccgtcccccta

SEQ ID NO: 631807 - DNA, 25 bp, Homo sapien
cccagcaccggtcccaggcccacct

SEQ ID NO: 631808 - DNA, 25 bp, Homo sapien
ccagcaccggtcccaggcccacctg

SEQ ID NO: 631809 - DNA, 25 bp, Homo sapien
ttggaatgctgtcaggtccgcgcct

SEQ ID NO: 631810 - DNA, 25 bp, Homo sapien
gctttattggaatgctgtcaggtcc

SEQ ID NO: 631811 - DNA, 25 bp, Homo sapien
cccgtatgctttattggaatgctgt

SEQ ID NO: 631812 - DNA, 25 bp, Homo sapien
catgttcccgtatgctttattggaa

SEQ ID NO: 631813 - DNA, 25 bp, Homo sapien
aaccccagcatcaggtggcaccttg

SEQ ID NO: 631814 - DNA, 25 bp, Homo sapien
tgccctaaagcgctgccccagagca

SEQ ID NO: 631815 - DNA, 25 bp, Homo sapien
caggatgacccttgggagccaccca

SEQ ID NO: 631816 - DNA, 25 bp, Homo sapien
tcctggatacgggctgggatcgtcc

SEQ ID NO: 631817 - DNA, 25 bp, Homo sapien
caggcgcgatgagtgggtggccagg

SEQ ID NO: 631818 - DNA, 25 bp, Homo sapien
cagcaatgccagcaggcgcgatgag

SEQ ID NO: 631819 - DNA, 25 bp, Homo sapien
agcatccactgggtcacgccagtat

SEQ ID NO: 631820 - DNA, 25 bp, Homo sapien
ggtggccaggggaaacccagtgcac

SEQ ID NO: 631821 - DNA, 25 bp, Homo sapien
tctctcctggggtgtgctggtccac

SEQ ID NO: 631822 - DNA, 25 bp, Homo sapien
tggggtgtgctggtccactctggtc

SEQ ID NO: 631823 - DNA, 25 bp, Homo sapien
gggtgtgctggtccactctggtcct

SEQ ID NO: 631824 - DNA, 25 bp, Homo sapien
gtgctggtccactctggtcctgctg

SEQ ID NO: 631825 - DNA, 25 bp, Homo sapien
ccgaggtgtgcagggtctccggagc

SEQ ID NO: 631826 - DNA, 25 bp, Homo sapien
gccgaggtgtgcagggtctccggag

SEQ ID NO: 631827 - DNA, 25 bp, Homo sapien
cgaggtgtgcagggtctccggagct

SEQ ID NO: 631828 - DNA, 25 bp, Homo sapien
gcactggggcagacacaatgaccca

SEQ ID NO: 631829 - DNA, 25 bp, Homo sapien
ctgcagtaggggcagctatttttgg

SEQ ID NO: 631830 - DNA, 25 bp, Homo sapien
cactggggcagacacaatgacccat

SEQ ID NO: 631831 - DNA, 25 bp, Homo sapien
actggggcagacacaatgacccatt

SEQ ID NO: 631832 - DNA, 25 bp, Homo sapien
tacatgtgtgcgtccatgccaagac

SEQ ID NO: 631833 - DNA, 25 bp, Homo sapien
cgtccatgccaagacgaggctgcct

SEQ ID NO: 631834 - DNA, 25 bp, Homo sapien
caagacgaggctgcctcccgcgatg

SEQ ID NO: 631835 - DNA, 25 bp, Homo sapien
tgtgcacgttggtacatgtgtgcgt

SEQ ID NO: 631836 - DNA, 25 bp, Homo sapien
tcccctccgactctctccacttcat

SEQ ID NO: 631837 - DNA, 25 bp, Homo sapien
tagccgaggccgctcccctccgact

SEQ ID NO: 631838 - DNA, 25 bp, Homo sapien
gaggccgctcccctccgactctctc

SEQ ID NO: 631839 - DNA, 25 bp, Homo sapien
tctctccacttcatctgcagccggt

SEQ ID NO: 631840 - DNA, 25 bp, Homo sapien
tgcccaccaaagacacagacatgag

SEQ ID NO: 631841 - DNA, 25 bp, Homo sapien
cctgaaaaggtgtcctcaaggccct

SEQ ID NO: 631842 - DNA, 25 bp, Homo sapien
aatggacggctgttacacaccacgg

SEQ ID NO: 631843 - DNA, 25 bp, Homo sapien
caaactagtccatgctgttggaggc

SEQ ID NO: 631844 - DNA, 25 bp, Homo sapien
cagtgagctcgaagatctgcaaggt

SEQ ID NO: 631845 - DNA, 25 bp, Homo sapien
aactccctccgagctagcaggaagc

SEQ ID NO: 631846 - DNA, 25 bp, Homo sapien
tcttggtggtcagtatcacctcctg

SEQ ID NO: 631847 - DNA, 25 bp, Homo sapien
ggtcagtatcacctcctgttccgag

SEQ ID NO: 631848 - DNA, 25 bp, Homo sapien
agtgcgcggatcctggcttggtgtg

SEQ ID NO: 631849 - DNA, 25 bp, Homo sapien
caggagtgcgcggatcctggcttgg

SEQ ID NO: 631850 - DNA, 25 bp, Homo sapien
ggagtgcgcggatcctggcttggtg

SEQ ID NO: 631851 - DNA, 25 bp, Homo sapien
agggtctgggctccccgtgtgggag

SEQ ID NO: 631852 - DNA, 25 bp, Homo sapien
ctgggaacatggcaactttaagtta

SEQ ID NO: 631853 - DNA, 25 bp, Homo sapien
aagttaaagccagagaccgtgtggt

SEQ ID NO: 631854 - DNA, 25 bp, Homo sapien
ttaagttaaagccagagaccgtgtg

SEQ ID NO: 631855 - DNA, 25 bp, Homo sapien
taagttaaagccagagaccgtgtgg

SEQ ID NO: 631856 - DNA, 25 bp, Homo sapien
ctgctcccagtggcctggcttgagt

SEQ ID NO: 631857 - DNA, 25 bp, Homo sapien
ctcccagtggcctggcttgagtgaa

SEQ ID NO: 631858 - DNA, 25 bp, Homo sapien
tcccagtggcctggcttgagtgaac

SEQ ID NO: 631859 - DNA, 25 bp, Homo sapien
gctcccagtggcctggcttgagtga

SEQ ID NO: 631860 - DNA, 25 bp, Homo sapien
ccgtggggcgaccgaagaggcccag

SEQ ID NO: 631861 - DNA, 25 bp, Homo sapien
ggccagacccccggggagatgcctg

SEQ ID NO: 631862 - DNA, 25 bp, Homo sapien
cgtggggcgaccgaagaggcccagc

SEQ ID NO: 631863 - DNA, 25 bp, Homo sapien
gtggggcgaccgaagaggcccagct

SEQ ID NO: 631864 - DNA, 25 bp, Homo sapien
cgcagcgcggcgctgtggaggcaaa

SEQ ID NO: 631865 - DNA, 25 bp, Homo sapien
gagggtgggcaccacaaagagcccc

SEQ ID NO: 631866 - DNA, 25 bp, Homo sapien
gggcaccacaaagagccccagcaga

SEQ ID NO: 631867 - DNA, 25 bp, Homo sapien
ggcaaagccgccatccccggtctgg

SEQ ID NO: 631868 - DNA, 25 bp, Homo sapien
ctacttggaccttatccggcccgat

SEQ ID NO: 631869 - DNA, 25 bp, Homo sapien
ggaagtgactgtggccaatgctcca

SEQ ID NO: 631870 - DNA, 25 bp, Homo sapien
gaagtccttgacctgctggaagtga

SEQ ID NO: 631871 - DNA, 25 bp, Homo sapien
tcaaagggtgcgatgacactggcca

SEQ ID NO: 631872 - DNA, 25 bp, Homo sapien
ccccttgtagcggaggcggcgcaca

SEQ ID NO: 631873 - DNA, 25 bp, Homo sapien
gctgagggagttcaggtcccactca

SEQ ID NO: 631874 - DNA, 25 bp, Homo sapien
tcaggtcccactcagtctgagcatc

SEQ ID NO: 631875 - DNA, 25 bp, Homo sapien
gcatccccgctgtactgagtcaggc

SEQ ID NO: 631876 - DNA, 25 bp, Homo sapien
gcagtgtgcacatcgtcctgggact

SEQ ID NO: 631877 - DNA, 25 bp, Homo sapien
gggacttgccgtccgtcaccagaat

SEQ ID NO: 631878 - DNA, 25 bp, Homo sapien
gctgcctctggacggaggccagccg

SEQ ID NO: 631879 - DNA, 25 bp, Homo sapien
acagcgaagacgttcacgcccaggt

SEQ ID NO: 631880 - DNA, 25 bp, Homo sapien
ggccgggggagccgcatggtgctca

SEQ ID NO: 631881 - DNA, 25 bp, Homo sapien
gccgggggagccgcatggtgctcac

SEQ ID NO: 631882 - DNA, 25 bp, Homo sapien
ggaccaggtgcccaatgcaagctcc

SEQ ID NO: 631883 - DNA, 25 bp, Homo sapien
aacaccaggcgattggaaaggagca

SEQ ID NO: 631884 - DNA, 25 bp, Homo sapien
tgtgccatcgcctctgagtgccagg

SEQ ID NO: 631885 - DNA, 25 bp, Homo sapien
gctccgtgccgcagatgtggaagct

SEQ ID NO: 631886 - DNA, 25 bp, Homo sapien
acgctgtggacggtgatgtccctcg

SEQ ID NO: 631887 - DNA, 25 bp, Homo sapien
gcacgctgtggacggtgatgtccct

SEQ ID NO: 631888 - DNA, 25 bp, Homo sapien
tccagcacgctgtggacggtgatgt

SEQ ID NO: 631889 - DNA, 25 bp, Homo sapien
gagcctctggcagatgagacggctg

SEQ ID NO: 631890 - DNA, 25 bp, Homo sapien
agtccaggacaggcggatgctggag

SEQ ID NO: 631891 - DNA, 25 bp, Homo sapien
gagtccaggacaggcggatgctgga

SEQ ID NO: 631892 - DNA, 25 bp, Homo sapien
ggagtccaggacaggcggatgctgg

SEQ ID NO: 631893 - DNA, 25 bp, Homo sapien
tggagtccaggacaggcggatgctg

SEQ ID NO: 631894 - DNA, 25 bp, Homo sapien
ggtgccacctctagaggctcgccaa

SEQ ID NO: 631895 - DNA, 25 bp, Homo sapien
cgccaaacgatcagatacttgaggg

SEQ ID NO: 631896 - DNA, 25 bp, Homo sapien
tagaggctcgccaaacgatcagata

SEQ ID NO: 631897 - DNA, 25 bp, Homo sapien
cacctctagaggctcgccaaacgat

SEQ ID NO: 631898 - DNA, 25 bp, Homo sapien
accaggtactctgtgcgggaggcca

SEQ ID NO: 631899 - DNA, 25 bp, Homo sapien
tcatagatggggaacacggagacca

SEQ ID NO: 631900 - DNA, 25 bp, Homo sapien
gggaacacggagaccaggtactctg

SEQ ID NO: 631901 - DNA, 25 bp, Homo sapien
ttgtgcagctccgtggaggcggcgg

SEQ ID NO: 631902 - DNA, 25 bp, Homo sapien
gaagcaggagaacatcgcaccaggt

SEQ ID NO: 631903 - DNA, 25 bp, Homo sapien
ccaggtgaggtggacggttctgggc

SEQ ID NO: 631904 - DNA, 25 bp, Homo sapien
atcgcaccaggtagtgggtggcccc

SEQ ID NO: 631905 - DNA, 25 bp, Homo sapien
cggttctgggcgtcactgcggccag

SEQ ID NO: 631906 - DNA, 25 bp, Homo sapien
ggctctgcaccgagacctcatagtc

SEQ ID NO: 631907 - DNA, 25 bp, Homo sapien
accgagacctcatagtccctgccag

SEQ ID NO: 631908 - DNA, 25 bp, Homo sapien
gagacctcatagtccctgccaggtt

SEQ ID NO: 631909 - DNA, 25 bp, Homo sapien
gggtcctggcacggatgccccgggc

SEQ ID NO: 631910 - DNA, 25 bp, Homo sapien
cgcgtcgtggctcacgtctgagaag

SEQ ID NO: 631911 - DNA, 25 bp, Homo sapien
tcacgtctgagaagcccaggtgtct

SEQ ID NO: 631912 - DNA, 25 bp, Homo sapien
ggacacataggtgaccctgaccagg

SEQ ID NO: 631913 - DNA, 25 bp, Homo sapien
ccagaacactcgtgccgcgtcgtgg

SEQ ID NO: 631914 - DNA, 25 bp, Homo sapien
ggtgacacggacagtgtaggtggtg

SEQ ID NO: 631915 - DNA, 25 bp, Homo sapien
gccccagcgtggccgaggtggcgtt

SEQ ID NO: 631916 - DNA, 25 bp, Homo sapien
gcaggtgacacggacagtgtaggtg

SEQ ID NO: 631917 - DNA, 25 bp, Homo sapien
cagcgtggccgaggtggcgttccca

SEQ ID NO: 631918 - DNA, 25 bp, Homo sapien
cctggcagctccgtcatggacagct

SEQ ID NO: 631919 - DNA, 25 bp, Homo sapien
ccgtcatggacagctggcttgggct

SEQ ID NO: 631920 - DNA, 25 bp, Homo sapien
acgccagctggactgcatcccctgg

SEQ ID NO: 631921 - DNA, 25 bp, Homo sapien
gtccacgtgatctggtagacaagca

SEQ ID NO: 631922 - DNA, 25 bp, Homo sapien
tgtagtaggccaagatggtgacgtc

SEQ ID NO: 631923 - DNA, 25 bp, Homo sapien
gacacagggtcactgcgggccccgt

SEQ ID NO: 631924 - DNA, 25 bp, Homo sapien
tgacgtcgtactctgtgtgcctccc

SEQ ID NO: 631925 - DNA, 25 bp, Homo sapien
caggacggccgtgccgaggttccct

SEQ ID NO: 631926 - DNA, 25 bp, Homo sapien
cagtaatggagcacgcggccaagcg

SEQ ID NO: 631927 - DNA, 25 bp, Homo sapien
ggatttctcgggtcccaagccagag

SEQ ID NO: 631928 - DNA, 25 bp, Homo sapien
gatttctcgggtcccaagccagagg

SEQ ID NO: 631929 - DNA, 25 bp, Homo sapien
gcgggggcgtaggtgagccagtaat

SEQ ID NO: 631930 - DNA, 25 bp, Homo sapien
gagaccaggaccctgtacttcgtgg

SEQ ID NO: 631931 - DNA, 25 bp, Homo sapien
tgcaggtcgggcagtgtcacgtggc

SEQ ID NO: 631932 - DNA, 25 bp, Homo sapien
ggtcgggcagtgtcacgtggctcct

SEQ ID NO: 631933 - DNA, 25 bp, Homo sapien
tacttcgtggctgcctgcaggtcgg

SEQ ID NO: 631934 - DNA, 25 bp, Homo sapien
agggagccgtcagggcggagggctg

SEQ ID NO: 631935 - DNA, 25 bp, Homo sapien
ctgggagggagccgtcagggcggag

SEQ ID NO: 631936 - DNA, 25 bp, Homo sapien
tgggagggagccgtcagggcggagg

SEQ ID NO: 631937 - DNA, 25 bp, Homo sapien
gagccgtcagggcggagggctgggc

SEQ ID NO: 631938 - DNA, 25 bp, Homo sapien
ctgaaggccaccatcaggtcaaacc

SEQ ID NO: 631939 - DNA, 25 bp, Homo sapien
gccccggatggacgcataagccttt

SEQ ID NO: 631940 - DNA, 25 bp, Homo sapien
tgtcagctgggcgtccttgaagagc

SEQ ID NO: 631941 - DNA, 25 bp, Homo sapien
aggcagagggctccatggccacgcc

SEQ ID NO: 631942 - DNA, 25 bp, Homo sapien
aagacgatggtgtgctctggaggta

SEQ ID NO: 631943 - DNA, 25 bp, Homo sapien
cgcgaaggcctcacggggtgtctcg

SEQ ID NO: 631944 - DNA, 25 bp, Homo sapien
gggctggaagtcctcggctgtcatc

SEQ ID NO: 631945 - DNA, 25 bp, Homo sapien
gaagtaggcgcacaaggaagacgat

SEQ ID NO: 631946 - DNA, 25 bp, Homo sapien
tgggggcgacgcggggcccacgtca

SEQ ID NO: 631947 - DNA, 25 bp, Homo sapien
tgctgggggcgacgcggggcccacg

SEQ ID NO: 631948 - DNA, 25 bp, Homo sapien
tgactgctgggggcgacgcggggcc

SEQ ID NO: 631949 - DNA, 25 bp, Homo sapien
tcctcctgactgctgggggcgacgc

SEQ ID NO: 631950 - DNA, 25 bp, Homo sapien
tggaggtgaccctcaatgtggccca

SEQ ID NO: 631951 - DNA, 25 bp, Homo sapien
ccaagctggaggtgaccctcaatgt

SEQ ID NO: 631952 - DNA, 25 bp, Homo sapien
tggagcaggtgagaacgggctgcaa

SEQ ID NO: 631953 - DNA, 25 bp, Homo sapien
gtgccaagctggaggtgaccctcaa

SEQ ID NO: 631954 - DNA, 25 bp, Homo sapien
ggtcacggtggaagtaggtcaggga

SEQ ID NO: 631955 - DNA, 25 bp, Homo sapien
tcacggtggaagtaggtcagggact

SEQ ID NO: 631956 - DNA, 25 bp, Homo sapien
ttcctgcgggtcgaaggtggcctcc

SEQ ID NO: 631957 - DNA, 25 bp, Homo sapien
gtggaagtaggtcagggacttcttc

SEQ ID NO: 631958 - DNA, 25 bp, Homo sapien
aagctcccgaagaaaatcttcctca

SEQ ID NO: 631959 - DNA, 25 bp, Homo sapien
cttgtggaagctcccgaagaaaatc

SEQ ID NO: 631960 - DNA, 25 bp, Homo sapien
tggaagctcccgaagaaaatcttcc

SEQ ID NO: 631961 - DNA, 25 bp, Homo sapien
tgtggaagctcccgaagaaaatctt

SEQ ID NO: 631962 - DNA, 25 bp, Homo sapien
agcctgaccttggagcggcccacag

SEQ ID NO: 631963 - DNA, 25 bp, Homo sapien
ccagcgtgacgaagcccgcagcggg

SEQ ID NO: 631964 - DNA, 25 bp, Homo sapien
agtccacatagagcctgaccttgga

SEQ ID NO: 631965 - DNA, 25 bp, Homo sapien
gccaccttccggcagtccacataga

SEQ ID NO: 631966 - DNA, 25 bp, Homo sapien
agcaccggtcctcatcggcccaggt

SEQ ID NO: 631967 - DNA, 25 bp, Homo sapien
gtgtcactgcacacgatctgcagca

SEQ ID NO: 631968 - DNA, 25 bp, Homo sapien
gtcctcatcggcccaggtgtcactg

SEQ ID NO: 631969 - DNA, 25 bp, Homo sapien
ccaggtgtcactgcacacgatctgc

SEQ ID NO: 631970 - DNA, 25 bp, Homo sapien
ctcagtgggcacttgccctaacttg

SEQ ID NO: 631971 - DNA, 25 bp, Homo sapien
cacttgccctaacttgcttcgtgga

SEQ ID NO: 631972 - DNA, 25 bp, Homo sapien
tgggcacttgccctaacttgcttcg

SEQ ID NO: 631973 - DNA, 25 bp, Homo sapien
ccctaacttgcttcgtggaacaggg

SEQ ID NO: 631974 - DNA, 25 bp, Homo sapien
aggcggggcaggtctctccatccct

SEQ ID NO: 631975 - DNA, 25 bp, Homo sapien
aaggcggggcaggtctctccatccc

SEQ ID NO: 631976 - DNA, 25 bp, Homo sapien
gaaggcggggcaggtctctccatcc

SEQ ID NO: 631977 - DNA, 25 bp, Homo sapien
cgaaggcggggcaggtctctccatc

SEQ ID NO: 631978 - DNA, 25 bp, Homo sapien
ggaagccccagccgtcacctgtggg

SEQ ID NO: 631979 - DNA, 25 bp, Homo sapien
cccctgagtagacaaggctgtggac

SEQ ID NO: 631980 - DNA, 25 bp, Homo sapien
gagtgtgcttgaccggtcccagagc

SEQ ID NO: 631981 - DNA, 25 bp, Homo sapien
actgagctcagagagagtgtgcttg

SEQ ID NO: 631982 - DNA, 25 bp, Homo sapien
agccctgctctcctggggtgccatt

SEQ ID NO: 631983 - DNA, 25 bp, Homo sapien
ccctgctctcctggggtgccattcc

SEQ ID NO: 631984 - DNA, 25 bp, Homo sapien
ctggggtgccattcctcccagggag

SEQ ID NO: 631985 - DNA, 25 bp, Homo sapien
tgctctcctggggtgccattcctcc

SEQ ID NO: 631986 - DNA, 25 bp, Homo sapien
tgaacaacagacacatcaacgggac

SEQ ID NO: 631987 - DNA, 25 bp, Homo sapien
gcccatctggcatcgacatcttaaa

SEQ ID NO: 631988 - DNA, 25 bp, Homo sapien
taatacaaaagaggaccagcccatc

SEQ ID NO: 631989 - DNA, 25 bp, Homo sapien
tctgtaggaagagaccatccccaca

SEQ ID NO: 631990 - DNA, 25 bp, Homo sapien
tggaccccaaaacactagactcagg

SEQ ID NO: 631991 - DNA, 25 bp, Homo sapien
tcagattttcgacggatgcagcaat

SEQ ID NO: 631992 - DNA, 25 bp, Homo sapien
gggcgctgcagaaatcaccgaggaa

SEQ ID NO: 631993 - DNA, 25 bp, Homo sapien
catggataacgagaattcagcgacc

SEQ ID NO: 631994 - DNA, 25 bp, Homo sapien
ctgggtccccggcgagccctgctgg

SEQ ID NO: 631995 - DNA, 25 bp, Homo sapien
tgggtccccggcgagccctgctggc

SEQ ID NO: 631996 - DNA, 25 bp, Homo sapien
ctggacagcgaagcggagggggcac

SEQ ID NO: 631997 - DNA, 25 bp, Homo sapien
gctggacagcgaagcggagggggca

SEQ ID NO: 631998 - DNA, 25 bp, Homo sapien
gaagatgggctggacagcgaagcgg

SEQ ID NO: 631999 - DNA, 25 bp, Homo sapien
gatgggctggacagcgaagcggagg

SEQ ID NO: 632000 - DNA, 25 bp, Homo sapien
ttctctcctttgacccctggtggac

SEQ ID NO: 632001 - DNA, 25 bp, Homo sapien
ggaagcccatggtctcccttctctc

SEQ ID NO: 632002 - DNA, 25 bp, Homo sapien
gcaagcctggaagcccatggtctcc

SEQ ID NO: 632003 - DNA, 25 bp, Homo sapien
ccttctctcctttgacccctggtgg

SEQ ID NO: 632004 - DNA, 25 bp, Homo sapien
gaggccaactctcccggggatgccc

SEQ ID NO: 632005 - DNA, 25 bp, Homo sapien
ggccaactctcccggggatgccctg

SEQ ID NO: 632006 - DNA, 25 bp, Homo sapien
aactctcccggggatgccctggtgg

SEQ ID NO: 632007 - DNA, 25 bp, Homo sapien
ccaactctcccggggatgccctggt

SEQ ID NO: 632008 - DNA, 25 bp, Homo sapien
ggtccaggcaggccagcagttccct

SEQ ID NO: 632009 - DNA, 25 bp, Homo sapien
gggtccaggcaggccagcagttccc

SEQ ID NO: 632010 - DNA, 25 bp, Homo sapien
tccaggcaggccagcagttccctcc

SEQ ID NO: 632011 - DNA, 25 bp, Homo sapien
caggggtccaggcaggccagcagtt

SEQ ID NO: 632012 - DNA, 25 bp, Homo sapien
gcatagacacagaagtcagggtttg

SEQ ID NO: 632013 - DNA, 25 bp, Homo sapien
ctgcatagacacagaagtcagggtt

SEQ ID NO: 632014 - DNA, 25 bp, Homo sapien
catagacacagaagtcagggtttgg

SEQ ID NO: 632015 - DNA, 25 bp, Homo sapien
tgcatagacacagaagtcagggttt

SEQ ID NO: 632016 - DNA, 25 bp, Homo sapien
ctctccactagtgcccctggcccct

SEQ ID NO: 632017 - DNA, 25 bp, Homo sapien
cctcgctctccactagtgcccctgg

SEQ ID NO: 632018 - DNA, 25 bp, Homo sapien
tcctcgctctccactagtgcccctg

SEQ ID NO: 632019 - DNA, 25 bp, Homo sapien
ctcgctctccactagtgcccctggc

SEQ ID NO: 632020 - DNA, 25 bp, Homo sapien
aattcccagatcctaggagcctgtg

SEQ ID NO: 632021 - DNA, 25 bp, Homo sapien
caaaggacttgcctctggctgtaga

SEQ ID NO: 632022 - DNA, 25 bp, Homo sapien
agatggcctgagaccacacgtgaca

SEQ ID NO: 632023 - DNA, 25 bp, Homo sapien
tgcacccgagagcaggcatgtgaga

SEQ ID NO: 632024 - DNA, 25 bp, Homo sapien
ctcgttcccctttgggccctggcag

SEQ ID NO: 632025 - DNA, 25 bp, Homo sapien
tcacaagctggtagagggtggcaag

SEQ ID NO: 632026 - DNA, 25 bp, Homo sapien
agagggtggcaagggactgcggctc

SEQ ID NO: 632027 - DNA, 25 bp, Homo sapien
ggtagagggtggcaagggactgcgg

SEQ ID NO: 632028 - DNA, 25 bp, Homo sapien
gggtggcaagggactgcggctcgcc

SEQ ID NO: 632029 - DNA, 25 bp, Homo sapien
gtgaaggcggcctccctcggcctgg

SEQ ID NO: 632030 - DNA, 25 bp, Homo sapien
acccggggatgcgaggcctgtgcag

SEQ ID NO: 632031 - DNA, 25 bp, Homo sapien
gcctgtgcaggccacgccaggacac

SEQ ID NO: 632032 - DNA, 25 bp, Homo sapien
tggcccaggtgtgctaacgatgggt

SEQ ID NO: 632033 - DNA, 25 bp, Homo sapien
aaggagtcgaactttgacacgtgtg

SEQ ID NO: 632034 - DNA, 25 bp, Homo sapien
tctgccctcaaggtggcggccacca

SEQ ID NO: 632035 - DNA, 25 bp, Homo sapien
gtgttctcgtggaaggagtcgaact

SEQ ID NO: 632036 - DNA, 25 bp, Homo sapien
ggcctggtgttctcgtggaaggagt

SEQ ID NO: 632037 - DNA, 25 bp, Homo sapien
caactccctccccaagagccaggag

SEQ ID NO: 632038 - DNA, 25 bp, Homo sapien
ggccacaactccctccccaagagcc

SEQ ID NO: 632039 - DNA, 25 bp, Homo sapien
ccacaactccctccccaagagccag

SEQ ID NO: 632040 - DNA, 25 bp, Homo sapien
cggccacaactccctccccaagagc

SEQ ID NO: 632041 - DNA, 25 bp, Homo sapien
gctgctgtgctgacacagattgaag

SEQ ID NO: 632042 - DNA, 25 bp, Homo sapien
ctgtgctgacacagattgaagcccc

SEQ ID NO: 632043 - DNA, 25 bp, Homo sapien
cagcaccccagaggctggacagtgg

SEQ ID NO: 632044 - DNA, 25 bp, Homo sapien
tggacagtggcatctccagcaggag

SEQ ID NO: 632045 - DNA, 25 bp, Homo sapien
gggccctgtgatagtgcctgtcacc

SEQ ID NO: 632046 - DNA, 25 bp, Homo sapien
tgtcaccctcatctagacaggtggg

SEQ ID NO: 632047 - DNA, 25 bp, Homo sapien
tattctgagtagtgatgtacccctc

SEQ ID NO: 632048 - DNA, 25 bp, Homo sapien
cagcaggtctggtccttagatggga

SEQ ID NO: 632049 - DNA, 25 bp, Homo sapien
cagggctgcccatctgaccaacagc

SEQ ID NO: 632050 - DNA, 25 bp, Homo sapien
aggccctgggtgctagccccctgct

SEQ ID NO: 632051 - DNA, 25 bp, Homo sapien
agaggccctgggtgctagccccctg

SEQ ID NO: 632052 - DNA, 25 bp, Homo sapien
cccagggctgcccatctgaccaaca

SEQ ID NO: 632053 - DNA, 25 bp, Homo sapien
gatgtggtcgctctcggtgtccaga

SEQ ID NO: 632054 - DNA, 25 bp, Homo sapien
ctcggtgtccagacaaacccaggga

SEQ ID NO: 632055 - DNA, 25 bp, Homo sapien
tcagcgttcctcggggcagtgcaga

SEQ ID NO: 632056 - DNA, 25 bp, Homo sapien
gctcagcgttcctcggggcagtgca

SEQ ID NO: 632057 - DNA, 25 bp, Homo sapien
tcagtttcccgaagacagccggact

SEQ ID NO: 632058 - DNA, 25 bp, Homo sapien
gaaaccaagtgagagcaaccaagct

SEQ ID NO: 632059 - DNA, 25 bp, Homo sapien
tgcacaaggaactcagcacagggct

SEQ ID NO: 632060 - DNA, 25 bp, Homo sapien
ggaaccatctgttgcctgcgtgagg

SEQ ID NO: 632061 - DNA, 25 bp, Homo sapien
cttcctgttgttggaatatgaccca

SEQ ID NO: 632062 - DNA, 25 bp, Homo sapien
tggaatatgacccaacagtggaaac

SEQ ID NO: 632063 - DNA, 25 bp, Homo sapien
gttgttggaatatgacccaacagtg

SEQ ID NO: 632064 - DNA, 25 bp, Homo sapien
ccgattccgggccagcctttctcct

SEQ ID NO: 632065 - DNA, 25 bp, Homo sapien
gaaatgcggatgtctgaacgcccat

SEQ ID NO: 632066 - DNA, 25 bp, Homo sapien
tctggaaatgcggatgtctgaacgc

SEQ ID NO: 632067 - DNA, 25 bp, Homo sapien
tgcggatgtctgaacgcccatttca

SEQ ID NO: 632068 - DNA, 25 bp, Homo sapien
actcttctggaaatgcggatgtctg

SEQ ID NO: 632069 - DNA, 25 bp, Homo sapien
atcccagcaaatggggctatgctaa

SEQ ID NO: 632070 - DNA, 25 bp, Homo sapien
cccagcaaatggggctatgctaatc

SEQ ID NO: 632071 - DNA, 25 bp, Homo sapien
tcccagcaaatggggctatgctaat

SEQ ID NO: 632072 - DNA, 25 bp, Homo sapien
catcccagcaaatggggctatgcta

SEQ ID NO: 632073 - DNA, 25 bp, Homo sapien
ctttgtggatatgatgtaattcact

SEQ ID NO: 632074 - DNA, 25 bp, Homo sapien
tctttgtggatatgatgtaattcac

SEQ ID NO: 632075 - DNA, 25 bp, Homo sapien
ggctcacgaccttcgaggagtcaga

SEQ ID NO: 632076 - DNA, 25 bp, Homo sapien
tgtgtgtgtccgtagctccttgctg

SEQ ID NO: 632077 - DNA, 25 bp, Homo sapien
taagcaccgtggattgacctctccg

SEQ ID NO: 632078 - DNA, 25 bp, Homo sapien
ctatgacttagagcttcatccgtgc

SEQ ID NO: 632079 - DNA, 25 bp, Homo sapien
tctgtgttgtgattccccggagctg

SEQ ID NO: 632080 - DNA, 25 bp, Homo sapien
ctgagggtttccaccttggcgcgca

SEQ ID NO: 632081 - DNA, 25 bp, Homo sapien
gaaggacttcctgctacagtagctg

SEQ ID NO: 632082 - DNA, 25 bp, Homo sapien
tcccgaatggagtccagacctgggc

SEQ ID NO: 632083 - DNA, 25 bp, Homo sapien
ccttccctggaagtcagtgtgacag

SEQ ID NO: 632084 - DNA, 25 bp, Homo sapien
ccgcctggttttgtggtgcggtcaa

SEQ ID NO: 632085 - DNA, 25 bp, Homo sapien
cctctgactcgccagctgctagaga

SEQ ID NO: 632086 - DNA, 25 bp, Homo sapien
aggagacccaaagcagtcctcggcc

SEQ ID NO: 632087 - DNA, 25 bp, Homo sapien
gtgcgcctgggctcccctctggacg

SEQ ID NO: 632088 - DNA, 25 bp, Homo sapien
tcttgggtctctgcggaggtaccag

SEQ ID NO: 632089 - DNA, 25 bp, Homo sapien
tgcaggcggacagagagtcctgaac

SEQ ID NO: 632090 - DNA, 25 bp, Homo sapien
cctctggacgcctcttgggtctctg

SEQ ID NO: 632091 - DNA, 25 bp, Homo sapien
tgagaccgcttgaccctgtggaagc

SEQ ID NO: 632092 - DNA, 25 bp, Homo sapien
gccggcttgagaccgcttgaccctg

SEQ ID NO: 632093 - DNA, 25 bp, Homo sapien
gagagccgccggcttgagaccgctt

SEQ ID NO: 632094 - DNA, 25 bp, Homo sapien
cgcttgaccctgtggaagcctgggc

SEQ ID NO: 632095 - DNA, 25 bp, Homo sapien
gatgaaacctacatgggagcccagg

SEQ ID NO: 632096 - DNA, 25 bp, Homo sapien
gtaactgtctacaaagagcctggca

SEQ ID NO: 632097 - DNA, 25 bp, Homo sapien
aatctcatgggagcttctacgggcc

SEQ ID NO: 632098 - DNA, 25 bp, Homo sapien
tggatgtcattagcaggcggccagc

SEQ ID NO: 632099 - DNA, 25 bp, Homo sapien
aaggacccaggccggctcacaggga

SEQ ID NO: 632100 - DNA, 25 bp, Homo sapien
ggccggctcacagggacctgtccag

SEQ ID NO: 632101 - DNA, 25 bp, Homo sapien
ccagctgggtcccaatcgttacact

SEQ ID NO: 632102 - DNA, 25 bp, Homo sapien
gctgggtcccaatcgttacactcct

SEQ ID NO: 632103 - DNA, 25 bp, Homo sapien
cttgttgataaggaaacggcactgg

SEQ ID NO: 632104 - DNA, 25 bp, Homo sapien
gaaacggcactggttgacagaactc

SEQ ID NO: 632105 - DNA, 25 bp, Homo sapien
taaggaaacggcactggttgacaga

SEQ ID NO: 632106 - DNA, 25 bp, Homo sapien
gcactggttgacagaactctccacc

SEQ ID NO: 632107 - DNA, 25 bp, Homo sapien
gagacgtgatgagctatttgtagac

SEQ ID NO: 632108 - DNA, 25 bp, Homo sapien
tggtggctgcgttggctccgctcat

SEQ ID NO: 632109 - DNA, 25 bp, Homo sapien
ttttgaaacgacacagcacttctgg

SEQ ID NO: 632110 - DNA, 25 bp, Homo sapien
tcagagacaccatcggagccgtgaa

SEQ ID NO: 632111 - DNA, 25 bp, Homo sapien
ttccttcgcagccacggagctgagc

SEQ ID NO: 632112 - DNA, 25 bp, Homo sapien
gcaggcactgtgtcctcgggtctcg

SEQ ID NO: 632113 - DNA, 25 bp, Homo sapien
tgagccaagcgttttccatcctgtt

SEQ ID NO: 632114 - DNA, 25 bp, Homo sapien
ctcacccgctagtgccagagggaag

SEQ ID NO: 632115 - DNA, 25 bp, Homo sapien
tcttcattgctttgtgtagagccaa

SEQ ID NO: 632116 - DNA, 25 bp, Homo sapien
ttcttgtcgagtagatctgagggcc

SEQ ID NO: 632117 - DNA, 25 bp, Homo sapien
gaagtcagctgtgattcttagatcc

SEQ ID NO: 632118 - DNA, 25 bp, Homo sapien
tctgcttccttgagtgatttatgac

SEQ ID NO: 632119 - DNA, 25 bp, Homo sapien
gcgccctgtagggtgatttataccc

SEQ ID NO: 632120 - DNA, 25 bp, Homo sapien
acacagggtgcaggtgtccatccac

SEQ ID NO: 632121 - DNA, 25 bp, Homo sapien
ctggccaggtgacgagcgccctgta

SEQ ID NO: 632122 - DNA, 25 bp, Homo sapien
tgacgagcgccctgtagggtgattt

SEQ ID NO: 632123 - DNA, 25 bp, Homo sapien
gctgagtcgggtgcggtgctgtgga

SEQ ID NO: 632124 - DNA, 25 bp, Homo sapien
ttcggacgccaggtggacctgtgca

SEQ ID NO: 632125 - DNA, 25 bp, Homo sapien
gattcaacctggacggtgtgtggcc

SEQ ID NO: 632126 - DNA, 25 bp, Homo sapien
tgtgcactcagtaaaacgcagtgat

SEQ ID NO: 632127 - DNA, 25 bp, Homo sapien
ccagcatggagttcctgcggcagga

SEQ ID NO: 632128 - DNA, 25 bp, Homo sapien
catgtcgacaggcacggctgcattg

SEQ ID NO: 632129 - DNA, 25 bp, Homo sapien
cattgtcaagatcgtgcgctccagc

SEQ ID NO: 632130 - DNA, 25 bp, Homo sapien
ctccacgggccagaagaacttctcg

SEQ ID NO: 632131 - DNA, 25 bp, Homo sapien
taaccagagatgaaccactgtggcc

SEQ ID NO: 632132 - DNA, 25 bp, Homo sapien
tcatctcagccatgcaggcgtgagc

SEQ ID NO: 632133 - DNA, 25 bp, Homo sapien
cgttcactggttgagatgccgctgc

SEQ ID NO: 632134 - DNA, 25 bp, Homo sapien
tggacctgacagaagtgaccttacc

SEQ ID NO: 632135 - DNA, 25 bp, Homo sapien
tctctgcagcatgcgattctgttgg

SEQ ID NO: 632136 - DNA, 25 bp, Homo sapien
caagaatgaggtttgccgcatcgat

SEQ ID NO: 632137 - DNA, 25 bp, Homo sapien
gatagcgttttacccagtggacctc

SEQ ID NO: 632138 - DNA, 25 bp, Homo sapien
agtggacctcctttcagcatcgcag

SEQ ID NO: 632139 - DNA, 25 bp, Homo sapien
agaaaaagcagcgtctgagcaccca

SEQ ID NO: 632140 - DNA, 25 bp, Homo sapien
tggttccagaccactacggtagaga

SEQ ID NO: 632141 - DNA, 25 bp, Homo sapien
aagttatgtttacaggctgggcacc

SEQ ID NO: 632142 - DNA, 25 bp, Homo sapien
tagagatacggcaataaagcgagtc

SEQ ID NO: 632143 - DNA, 25 bp, Homo sapien
cacggttggaacgagaggcagcaac

SEQ ID NO: 632144 - DNA, 25 bp, Homo sapien
tcagcacgcgggagttggctttcct

SEQ ID NO: 632145 - DNA, 25 bp, Homo sapien
gcttcctgcgaagtgggtttctctc

SEQ ID NO: 632146 - DNA, 25 bp, Homo sapien
cacggtcaaggtgaaggcgtctctc

SEQ ID NO: 632147 - DNA, 25 bp, Homo sapien
tcagctgctcatagcgtgaaaggtc

SEQ ID NO: 632148 - DNA, 25 bp, Homo sapien
cattatgtgtcttaaggcctcttct

SEQ ID NO: 632149 - DNA, 25 bp, Homo sapien
tacataacctggaagtccaaggggc

SEQ ID NO: 632150 - DNA, 25 bp, Homo sapien
taaggaatgggcttacataacctgg

SEQ ID NO: 632151 - DNA, 25 bp, Homo sapien
gtcgtgaatcgagcctggaacagca

SEQ ID NO: 632152 - DNA, 25 bp, Homo sapien
tgaagcacggccgtggtccttcccg

SEQ ID NO: 632153 - DNA, 25 bp, Homo sapien
tgtggtcccgggtgcttctgaagca

SEQ ID NO: 632154 - DNA, 25 bp, Homo sapien
tgcttcagactgtgtggtcccgggt

SEQ ID NO: 632155 - DNA, 25 bp, Homo sapien
ggcgggcggaggactggtgtctcct

SEQ ID NO: 632156 - DNA, 25 bp, Homo sapien
gcggcagctggatagggcaggacct

SEQ ID NO: 632157 - DNA, 25 bp, Homo sapien
cagtgccttcgagctggaagccgtg

SEQ ID NO: 632158 - DNA, 25 bp, Homo sapien
aagccgtgggcctgtggcggcgggc

SEQ ID NO: 632159 - DNA, 25 bp, Homo sapien
ctttctgctcatccccggggccctg

SEQ ID NO: 632160 - DNA, 25 bp, Homo sapien
tttctgctcatccccggggccctgc

SEQ ID NO: 632161 - DNA, 25 bp, Homo sapien
gctttctgctcatccccggggccct

SEQ ID NO: 632162 - DNA, 25 bp, Homo sapien
ttcctaccgagacaacagcaccatg

SEQ ID NO: 632163 - DNA, 25 bp, Homo sapien
ttccagccttcctaccgagacaaca

SEQ ID NO: 632164 - DNA, 25 bp, Homo sapien
taccgagacaacagcaccatggact

SEQ ID NO: 632165 - DNA, 25 bp, Homo sapien
ctaccgagacaacagcaccatggac

SEQ ID NO: 632166 - DNA, 25 bp, Homo sapien
gggacgtgtccacatgaggcttggg

SEQ ID NO: 632167 - DNA, 25 bp, Homo sapien
tgtccctgcgtggatgtcgacacca

SEQ ID NO: 632168 - DNA, 25 bp, Homo sapien
ccctgtgttgtgtggtgtccctgcg

SEQ ID NO: 632169 - DNA, 25 bp, Homo sapien
acctgtggacatggatgacggcaga

SEQ ID NO: 632170 - DNA, 25 bp, Homo sapien
tttgaatgcggatcaatgtgccact

SEQ ID NO: 632171 - DNA, 25 bp, Homo sapien
tgtttctaagtcagcagggcccctg

SEQ ID NO: 632172 - DNA, 25 bp, Homo sapien
ccccacacactgagtggctggattc

SEQ ID NO: 632173 - DNA, 25 bp, Homo sapien
tgtgccacttgtttctaagtcagca

SEQ ID NO: 632174 - DNA, 25 bp, Homo sapien
gctctgagttgtcccattgagtgtt

SEQ ID NO: 632175 - DNA, 25 bp, Homo sapien
tctgagttgtcccattgagtgttct

SEQ ID NO: 632176 - DNA, 25 bp, Homo sapien
gagttgtcccattgagtgttctggg

SEQ ID NO: 632177 - DNA, 25 bp, Homo sapien
ctgctctgagttgtcccattgagtg

SEQ ID NO: 632178 - DNA, 25 bp, Homo sapien
catctgtgtcacgtgatggccgccg

SEQ ID NO: 632179 - DNA, 25 bp, Homo sapien
tgcctgatgcgtgcgatgttcccca

SEQ ID NO: 632180 - DNA, 25 bp, Homo sapien
gattctcagtcccattggtcagcgg

SEQ ID NO: 632181 - DNA, 25 bp, Homo sapien
gagtcactccacacgatgcctgatg

SEQ ID NO: 632182 - DNA, 25 bp, Homo sapien
tcggagaggtcaagttgtgagaacc

SEQ ID NO: 632183 - DNA, 25 bp, Homo sapien
ttggacccggggtagccactgtctg

SEQ ID NO: 632184 - DNA, 25 bp, Homo sapien
tctgggcatccctgttggacccggg

SEQ ID NO: 632185 - DNA, 25 bp, Homo sapien
ccaccagtgtctggcttcggagagg

SEQ ID NO: 632186 - DNA, 25 bp, Homo sapien
gcgtgttaggcagcatttggtctgt

SEQ ID NO: 632187 - DNA, 25 bp, Homo sapien
gctggtgcagctcaccgcccggctc

SEQ ID NO: 632188 - DNA, 25 bp, Homo sapien
tggcccggcatggactggcccgtgt

SEQ ID NO: 632189 - DNA, 25 bp, Homo sapien
cctccacttgggaggcctgatggcc

SEQ ID NO: 632190 - DNA, 25 bp, Homo sapien
tactaccggactcaaaggtgaccgc

SEQ ID NO: 632191 - DNA, 25 bp, Homo sapien
aggcaggtccacttggttagtacta

SEQ ID NO: 632192 - DNA, 25 bp, Homo sapien
ggactcaaaggtgaccgcagggtca

SEQ ID NO: 632193 - DNA, 25 bp, Homo sapien
cacttggttagtactaccggactca

SEQ ID NO: 632194 - DNA, 25 bp, Homo sapien
gtagaacccatggtgccaggcgaac

SEQ ID NO: 632195 - DNA, 25 bp, Homo sapien
tcagagacgcactcgaagatgacac

SEQ ID NO: 632196 - DNA, 25 bp, Homo sapien
caggcgaacgtgcaaacaggctgga

SEQ ID NO: 632197 - DNA, 25 bp, Homo sapien
ccagcgattcagcagagggcctttc

SEQ ID NO: 632198 - DNA, 25 bp, Homo sapien
tctggcagtacaatcttcatgttct

SEQ ID NO: 632199 - DNA, 25 bp, Homo sapien
gacagatgagctggccttgatcggc

SEQ ID NO: 632200 - DNA, 25 bp, Homo sapien
tctctggtcgcttagtgcagcccag

SEQ ID NO: 632201 - DNA, 25 bp, Homo sapien
ccttgatcggcaggagcagccagtt

SEQ ID NO: 632202 - DNA, 25 bp, Homo sapien
tgtggcgctagatgaccttgtcctg

SEQ ID NO: 632203 - DNA, 25 bp, Homo sapien
cagcctctggtgtgcagcttggaga

SEQ ID NO: 632204 - DNA, 25 bp, Homo sapien
gctgtgacagtccatgggccttgcc

SEQ ID NO: 632205 - DNA, 25 bp, Homo sapien
caagccgggaaattgactcacctgg

SEQ ID NO: 632206 - DNA, 25 bp, Homo sapien
tgtccgagccgggaactggactcac

SEQ ID NO: 632207 - DNA, 25 bp, Homo sapien
cgagccgggaactggactcacctgg

SEQ ID NO: 632208 - DNA, 25 bp, Homo sapien
gacttcccgtgcgagaccagggaag

SEQ ID NO: 632209 - DNA, 25 bp, Homo sapien
acttcccgtgcgagaccagggaaga

SEQ ID NO: 632210 - DNA, 25 bp, Homo sapien
tgtccgagccaggaactggactcac

SEQ ID NO: 632211 - DNA, 25 bp, Homo sapien
agaggggcgtgtccgagccaggaac

SEQ ID NO: 632212 - DNA, 25 bp, Homo sapien
aggggcgtgtccgagccaggaactg

SEQ ID NO: 632213 - DNA, 25 bp, Homo sapien
gcgtgtccgagccaggaactggact

SEQ ID NO: 632214 - DNA, 25 bp, Homo sapien
ctctctagatgctcccttgggaaca

SEQ ID NO: 632215 - DNA, 25 bp, Homo sapien
cgagccgcagggatggacacatcat

SEQ ID NO: 632216 - DNA, 25 bp, Homo sapien
cctgggtgagagcaattgacctaaa

SEQ ID NO: 632217 - DNA, 25 bp, Homo sapien
tgctctcttcaattcaaccagtggg

SEQ ID NO: 632218 - DNA, 25 bp, Homo sapien
gccagaggccctcggtcagcgactg

SEQ ID NO: 632219 - DNA, 25 bp, Homo sapien
ggatgctcgccatcaaggtccagtg

SEQ ID NO: 632220 - DNA, 25 bp, Homo sapien
tcagcgactggatgctcgccatcaa

SEQ ID NO: 632221 - DNA, 25 bp, Homo sapien
tcttcaagaggaaaggcgcccccgc

SEQ ID NO: 632222 - DNA, 25 bp, Homo sapien
gccagagagcggccttggccttgct

SEQ ID NO: 632223 - DNA, 25 bp, Homo sapien
acggtggccccggggtgatggcctg

SEQ ID NO: 632224 - DNA, 25 bp, Homo sapien
gcgacggtggccccggggtgatggc

SEQ ID NO: 632225 - DNA, 25 bp, Homo sapien
tgcctgcgacggtggccccggggtg

SEQ ID NO: 632226 - DNA, 25 bp, Homo sapien
gacatcgacactgacaaagcatgag

SEQ ID NO: 632227 - DNA, 25 bp, Homo sapien
taacgaaagttcagaccaagcccca

SEQ ID NO: 632228 - DNA, 25 bp, Homo sapien
ctgagattgagggttgagtcttacc

SEQ ID NO: 632229 - DNA, 25 bp, Homo sapien
aacactttgggctttcgacatcgac

SEQ ID NO: 632230 - DNA, 25 bp, Homo sapien
agcccatttgcagagaagaccgcgg

SEQ ID NO: 632231 - DNA, 25 bp, Homo sapien
ggacgcgcccacttatatgcgcggg

SEQ ID NO: 632232 - DNA, 25 bp, Homo sapien
tcggcgcacgatcacgggtggcggg

SEQ ID NO: 632233 - DNA, 25 bp, Homo sapien
aagccgcgccacgacagagaggcgc

SEQ ID NO: 632234 - DNA, 25 bp, Homo sapien
ccgccgcgctgggttatttaccgag

SEQ ID NO: 632235 - DNA, 25 bp, Homo sapien
tcatgaagggcgctccccagcgggt

SEQ ID NO: 632236 - DNA, 25 bp, Homo sapien
ccgagcgggtggaacaaaggcgctt

SEQ ID NO: 632237 - DNA, 25 bp, Homo sapien
cgggtcagcggccttccgtcatgaa

SEQ ID NO: 632238 - DNA, 25 bp, Homo sapien
gctttagcttgctggctggtgggat

SEQ ID NO: 632239 - DNA, 25 bp, Homo sapien
gccggtagtagtcgtgggtggccac

SEQ ID NO: 632240 - DNA, 25 bp, Homo sapien
agccgctggaggggatggccgccat

SEQ ID NO: 632241 - DNA, 25 bp, Homo sapien
gggtggccacgagcgagccgctgga

SEQ ID NO: 632242 - DNA, 25 bp, Homo sapien
tcgtgggtggccacgagcgagccgc

SEQ ID NO: 632243 - DNA, 25 bp, Homo sapien
aggccgagcgctggttccgcagcct

SEQ ID NO: 632244 - DNA, 25 bp, Homo sapien
gagaggagaggtcccgtcagcaacg

SEQ ID NO: 632245 - DNA, 25 bp, Homo sapien
ggccttcaggccgagcgctggttcc

SEQ ID NO: 632246 - DNA, 25 bp, Homo sapien
ggcactggcgccagcagagcatccg

SEQ ID NO: 632247 - DNA, 25 bp, Homo sapien
gcttccccggggcactcggtactgc

SEQ ID NO: 632248 - DNA, 25 bp, Homo sapien
ggcactcggtactgctgcaggagct

SEQ ID NO: 632249 - DNA, 25 bp, Homo sapien
cggggcactcggtactgctgcagga

SEQ ID NO: 632250 - DNA, 25 bp, Homo sapien
ttccccggggcactcggtactgctg

SEQ ID NO: 632251 - DNA, 25 bp, Homo sapien
ggagaaaggggcgatcctgcactca

SEQ ID NO: 632252 - DNA, 25 bp, Homo sapien
aagcgaagtggggtcttgatgctgc

SEQ ID NO: 632253 - DNA, 25 bp, Homo sapien
ctgagagaagcgaagtggggtcttg

SEQ ID NO: 632254 - DNA, 25 bp, Homo sapien
gaagtggggtcttgatgctgccagc

SEQ ID NO: 632255 - DNA, 25 bp, Homo sapien
ctggcccaccaatgacccgggtcag

SEQ ID NO: 632256 - DNA, 25 bp, Homo sapien
gcccaccaatgacccgggtcagcct

SEQ ID NO: 632257 - DNA, 25 bp, Homo sapien
caccaatgacccgggtcagccttgg

SEQ ID NO: 632258 - DNA, 25 bp, Homo sapien
accaatgacccgggtcagccttggg

SEQ ID NO: 632259 - DNA, 25 bp, Homo sapien
gaggttccgagtgctctgcggactc

SEQ ID NO: 632260 - DNA, 25 bp, Homo sapien
ggctgtgctggactgaccgccgggc

SEQ ID NO: 632261 - DNA, 25 bp, Homo sapien
tccgagtgctctgcggactccaaca

SEQ ID NO: 632262 - DNA, 25 bp, Homo sapien
gtgctggactgaccgccgggctgct

SEQ ID NO: 632263 - DNA, 25 bp, Homo sapien
tctggtggactagcgcctccgcagg

SEQ ID NO: 632264 - DNA, 25 bp, Homo sapien
gtggactagcgcctccgcaggcctg

SEQ ID NO: 632265 - DNA, 25 bp, Homo sapien
ggctctggtggactagcgcctccgc

SEQ ID NO: 632266 - DNA, 25 bp, Homo sapien
tggactagcgcctccgcaggcctgg

SEQ ID NO: 632267 - DNA, 25 bp, Homo sapien
ggtgtcaggaaagctagcgagtgct

SEQ ID NO: 632268 - DNA, 25 bp, Homo sapien
tgtcaggaaagctagcgagtgctgg

SEQ ID NO: 632269 - DNA, 25 bp, Homo sapien
tgtgttgatgcgaaggtctgcttgc

SEQ ID NO: 632270 - DNA, 25 bp, Homo sapien
tctgctgtgttgatgcgaaggtctg

SEQ ID NO: 632271 - DNA, 25 bp, Homo sapien
tttattttccgcttggtgccaggtg

SEQ ID NO: 632272 - DNA, 25 bp, Homo sapien
ggagtttattttccgcttggtgcca

SEQ ID NO: 632273 - DNA, 25 bp, Homo sapien
cttggagtttattttccgcttggtg

SEQ ID NO: 632274 - DNA, 25 bp, Homo sapien
ttttccgcttggtgccaggtgcaca

SEQ ID NO: 632275 - DNA, 25 bp, Homo sapien
cctcacagcgtgaggaggcccagaa

SEQ ID NO: 632276 - DNA, 25 bp, Homo sapien
tcacactcaaatggaacctcgggcc

SEQ ID NO: 632277 - DNA, 25 bp, Homo sapien
gggcctgaatccctcagaggaccag

SEQ ID NO: 632278 - DNA, 25 bp, Homo sapien
cagtgaggtcgggagggattcagcc

SEQ ID NO: 632279 - DNA, 25 bp, Homo sapien
gaaggagtctactaagctcacagcc

SEQ ID NO: 632280 - DNA, 25 bp, Homo sapien
gaactgagtcaatccctgtaggctc

SEQ ID NO: 632281 - DNA, 25 bp, Homo sapien
cctataccaggccagaatgatgcag

SEQ ID NO: 632282 - DNA, 25 bp, Homo sapien
ggccacacatcaagtctccagctat

SEQ ID NO: 632283 - DNA, 25 bp, Homo sapien
taccttagagtgtgcagtccaaccc

SEQ ID NO: 632284 - DNA, 25 bp, Homo sapien
tgggcttcatctggacactgcaaaa

SEQ ID NO: 632285 - DNA, 25 bp, Homo sapien
cctgtggacaggacaaaggctcagc

SEQ ID NO: 632286 - DNA, 25 bp, Homo sapien
ttctttccaagcagggtggacccac

SEQ ID NO: 632287 - DNA, 25 bp, Homo sapien
agtcccggcttctagtgatccacct

SEQ ID NO: 632288 - DNA, 25 bp, Homo sapien
tggacttgaagtcccggcttctagt

SEQ ID NO: 632289 - DNA, 25 bp, Homo sapien
gaagtcccggcttctagtgatccac

SEQ ID NO: 632290 - DNA, 25 bp, Homo sapien
agctggacttgaagtcccggcttct

SEQ ID NO: 632291 - DNA, 25 bp, Homo sapien
tatttcaccgttgaggccattctaa

SEQ ID NO: 632292 - DNA, 25 bp, Homo sapien
cctgctccgctgtgaaatagaccat

SEQ ID NO: 632293 - DNA, 25 bp, Homo sapien
tattggaccatgcagtcaaccctaa

SEQ ID NO: 632294 - DNA, 25 bp, Homo sapien
gatgtcagagtcaagtcgggccttg

SEQ ID NO: 632295 - DNA, 25 bp, Homo sapien
agggtccccagctaggtctgagcca

SEQ ID NO: 632296 - DNA, 25 bp, Homo sapien
tcagcagaaaagctccaacctgggc

SEQ ID NO: 632297 - DNA, 25 bp, Homo sapien
gtctgagccagaccccttagtgggt

SEQ ID NO: 632298 - DNA, 25 bp, Homo sapien
tactctgtgcacaccgtcagcagaa

SEQ ID NO: 632299 - DNA, 25 bp, Homo sapien
tctccacccccacggaggtcagtgc

SEQ ID NO: 632300 - DNA, 25 bp, Homo sapien
tccacccccacggaggtcagtgctg

SEQ ID NO: 632301 - DNA, 25 bp, Homo sapien
atctccacccccacggaggtcagtg

SEQ ID NO: 632302 - DNA, 25 bp, Homo sapien
catctccacccccacggaggtcagt

SEQ ID NO: 632303 - DNA, 25 bp, Homo sapien
agccgcgcgcggacttcccagagcc

SEQ ID NO: 632304 - DNA, 25 bp, Homo sapien
cctgcctctgaagcggagccgcgcg

SEQ ID NO: 632305 - DNA, 25 bp, Homo sapien
ggagccgcgcgcggacttcccagag

SEQ ID NO: 632306 - DNA, 25 bp, Homo sapien
gcggagccgcgcgcggacttcccag

SEQ ID NO: 632307 - DNA, 25 bp, Homo sapien
gccgccccaggaccgcgcccacttg

SEQ ID NO: 632308 - DNA, 25 bp, Homo sapien
cgccgccgccccaggaccgcgccca

SEQ ID NO: 632309 - DNA, 25 bp, Homo sapien
ccgccgccccaggaccgcgcccact

SEQ ID NO: 632310 - DNA, 25 bp, Homo sapien
cttctcgagacccccagccctcctc

SEQ ID NO: 632311 - DNA, 25 bp, Homo sapien
ggacggcgtggtcctaagcagcaca

SEQ ID NO: 632312 - DNA, 25 bp, Homo sapien
tactgacaaccagtggcctgtggga

SEQ ID NO: 632313 - DNA, 25 bp, Homo sapien
ttctggccagaaccgcctgacctgt

SEQ ID NO: 632314 - DNA, 25 bp, Homo sapien
agggaagaactaggactgcggactt

SEQ ID NO: 632315 - DNA, 25 bp, Homo sapien
tcaaacacgacaggcatcttggtgc

SEQ ID NO: 632316 - DNA, 25 bp, Homo sapien
cacggccatggtcgagctgttccaa

SEQ ID NO: 632317 - DNA, 25 bp, Homo sapien
tagtaggagcacttacgcagcagct

SEQ ID NO: 632318 - DNA, 25 bp, Homo sapien
gaggtcaggaactcacgcagggcat

SEQ ID NO: 632319 - DNA, 25 bp, Homo sapien
ggctggatggtgacgaaccagcgca

SEQ ID NO: 632320 - DNA, 25 bp, Homo sapien
ctggctggatggtgacgaaccagcg

SEQ ID NO: 632321 - DNA, 25 bp, Homo sapien
tggatggtgacgaaccagcgcagcc

SEQ ID NO: 632322 - DNA, 25 bp, Homo sapien
ggcccagtcctggtgagccgccgac

SEQ ID NO: 632323 - DNA, 25 bp, Homo sapien
acactgggcgcactcctgctgtgtc

SEQ ID NO: 632324 - DNA, 25 bp, Homo sapien
gggatgacgccacactgggcgcact

SEQ ID NO: 632325 - DNA, 25 bp, Homo sapien
cgcaactcatactgctccgatgtgg

SEQ ID NO: 632326 - DNA, 25 bp, Homo sapien
ccagcagcctgaagcgcaactcata

SEQ ID NO: 632327 - DNA, 25 bp, Homo sapien
accagcgtggaggtctcggccctct

SEQ ID NO: 632328 - DNA, 25 bp, Homo sapien
aacttataggatcggttgggcagca

SEQ ID NO: 632329 - DNA, 25 bp, Homo sapien
gggcagcaggtttcggacgtcgaag

SEQ ID NO: 632330 - DNA, 25 bp, Homo sapien
ggtctcggccctcttgatggtgaac

SEQ ID NO: 632331 - DNA, 25 bp, Homo sapien
tgagggcgggcccctccaggggctc

SEQ ID NO: 632332 - DNA, 25 bp, Homo sapien
gagtggctgagggcgggcccctcca

SEQ ID NO: 632333 - DNA, 25 bp, Homo sapien
tcagacagagtggctgagggcgggc

SEQ ID NO: 632334 - DNA, 25 bp, Homo sapien
cagagtggctgagggcgggcccctc

SEQ ID NO: 632335 - DNA, 25 bp, Homo sapien
ttacactcttctttattagtggata

SEQ ID NO: 632336 - DNA, 25 bp, Homo sapien
cactcttctttattagtggataaat

SEQ ID NO: 632337 - DNA, 25 bp, Homo sapien
ctcttctttattagtggataaatat

SEQ ID NO: 632338 - DNA, 25 bp, Homo sapien
acactcttctttattagtggataaa

SEQ ID NO: 632339 - DNA, 25 bp, Homo sapien
ccagcatctgttactggaacagaga

SEQ ID NO: 632340 - DNA, 25 bp, Homo sapien
tcagcccaagctcaggacaaggagg

SEQ ID NO: 632341 - DNA, 25 bp, Homo sapien
ttccaccctggactgagtgttcggg

SEQ ID NO: 632342 - DNA, 25 bp, Homo sapien
ggctgtatgtttctcgcacgctcac

SEQ ID NO: 632343 - DNA, 25 bp, Homo sapien
ctcttcgtccaccacatgggcatgg

SEQ ID NO: 632344 - DNA, 25 bp, Homo sapien
tcggccctggcctgaatgttgaccc

SEQ ID NO: 632345 - DNA, 25 bp, Homo sapien
tgttgaccccggcacgtatacctgg

SEQ ID NO: 632346 - DNA, 25 bp, Homo sapien
gggcaccctgttcaccgttgagctg

SEQ ID NO: 632347 - DNA, 25 bp, Homo sapien
cgcagacggaggctgcggcagcacc

SEQ ID NO: 632348 - DNA, 25 bp, Homo sapien
gggagctcaacgctgacgacgccat

SEQ ID NO: 632349 - DNA, 25 bp, Homo sapien
caggagacgcagtgaaggaagacgt

SEQ ID NO: 632350 - DNA, 25 bp, Homo sapien
tggagtccacggaggctgaggatgc

SEQ ID NO: 632351 - DNA, 25 bp, Homo sapien
cctgcccctgatggcgacgggcgca

SEQ ID NO: 632352 - DNA, 25 bp, Homo sapien
agtttgcacacagcgccgtggagat

SEQ ID NO: 632353 - DNA, 25 bp, Homo sapien
agggccgccgcaagcaacagtttgt

SEQ ID NO: 632354 - DNA, 25 bp, Homo sapien
tgcatctgtcgcgtggacccccagg

SEQ ID NO: 632355 - DNA, 25 bp, Homo sapien
agcatgcagcggtatgaccctacgg

SEQ ID NO: 632356 - DNA, 25 bp, Homo sapien
tcacgagtgcgtctgccttgacagc

SEQ ID NO: 632357 - DNA, 25 bp, Homo sapien
gaggaccttctcaaccacgtacaga

SEQ ID NO: 632358 - DNA, 25 bp, Homo sapien
agaacacgggttttcatggctgcct

SEQ ID NO: 632359 - DNA, 25 bp, Homo sapien
gactatcctggcaattaccctgtga

SEQ ID NO: 632360 - DNA, 25 bp, Homo sapien
cacgtgtgagagctccctggactat

SEQ ID NO: 632361 - DNA, 25 bp, Homo sapien
cagtgagtccggaacgcacgtgtga

SEQ ID NO: 632362 - DNA, 25 bp, Homo sapien
aatatacacaagtgttgagggccca

SEQ ID NO: 632363 - DNA, 25 bp, Homo sapien
catggcttaacacctgcaatcctga

SEQ ID NO: 632364 - DNA, 25 bp, Homo sapien
taaggcttagaagataaaatcgtta

SEQ ID NO: 632365 - DNA, 25 bp, Homo sapien
gcagcctcggctgttggggttttaa

SEQ ID NO: 632366 - DNA, 25 bp, Homo sapien
acaggctgcagagtcggccctgcag

SEQ ID NO: 632367 - DNA, 25 bp, Homo sapien
gcgacctgacggaagataacatgga

SEQ ID NO: 632368 - DNA, 25 bp, Homo sapien
gacctgacggaagataacatggaga

SEQ ID NO: 632369 - DNA, 25 bp, Homo sapien
cctgacggaagataacatggagaca

SEQ ID NO: 632370 - DNA, 25 bp, Homo sapien
ggggcgacctgacggaagataacat

SEQ ID NO: 632371 - DNA, 25 bp, Homo sapien
tgtgtgggtcagaggggcatgtttc

SEQ ID NO: 632372 - DNA, 25 bp, Homo sapien
ggcatgtttctagaaatggatgtgt

SEQ ID NO: 632373 - DNA, 25 bp, Homo sapien
gaggggcatgtttctagaaatggat

SEQ ID NO: 632374 - DNA, 25 bp, Homo sapien
catgtttctagaaatggatgtgtgg

SEQ ID NO: 632375 - DNA, 25 bp, Homo sapien
ttggtgacgaccaacttggcccctc

SEQ ID NO: 632376 - DNA, 25 bp, Homo sapien
gtggttgtgacaactccggacactg

SEQ ID NO: 632377 - DNA, 25 bp, Homo sapien
tccggacactgcagtggacggcagt

SEQ ID NO: 632378 - DNA, 25 bp, Homo sapien
tgaagaccgtgttggtgacgaccaa

SEQ ID NO: 632379 - DNA, 25 bp, Homo sapien
cctcaggcgatccgcctcccaaagt

SEQ ID NO: 632380 - DNA, 25 bp, Homo sapien
gacctcaggcgatccgcctcccaaa

SEQ ID NO: 632381 - DNA, 25 bp, Homo sapien
tttagtatttttagtcaagacagga

SEQ ID NO: 632382 - DNA, 25 bp, Homo sapien
tagtatttttagtcaagacaggatt

SEQ ID NO: 632383 - DNA, 25 bp, Homo sapien
tggaggcctgaaggtaccgccctgc

SEQ ID NO: 632384 - DNA, 25 bp, Homo sapien
acctgcggcgttaggagctgacagt

SEQ ID NO: 632385 - DNA, 25 bp, Homo sapien
tgaccatcgtccctcggcccggccg

SEQ ID NO: 632386 - DNA, 25 bp, Homo sapien
gcgccgtccgtccactgaccatcgt

SEQ ID NO: 632387 - DNA, 25 bp, Homo sapien
ggcatgttccgcgtgagtccgcgca

SEQ ID NO: 632388 - DNA, 25 bp, Homo sapien
tccacagcctcgtgttcaggcgtcc

SEQ ID NO: 632389 - DNA, 25 bp, Homo sapien
tcggctgtgggactgcgataggatc

SEQ ID NO: 632390 - DNA, 25 bp, Homo sapien
tgggagcgccgtggctggctgagcc

SEQ ID NO: 632391 - DNA, 25 bp, Homo sapien
tcaggagagccagtcctgcggtgca

SEQ ID NO: 632392 - DNA, 25 bp, Homo sapien
agagccagtcctgcggtgcagagga

SEQ ID NO: 632393 - DNA, 25 bp, Homo sapien
gaggaagaaacccagcacagaggcc

SEQ ID NO: 632394 - DNA, 25 bp, Homo sapien
tgcggtgcagaggaagaaacccagc

SEQ ID NO: 632395 - DNA, 25 bp, Homo sapien
gaatccgggatcctgcagacaggca

SEQ ID NO: 632396 - DNA, 25 bp, Homo sapien
attacagcccctccgaagtgcagtg

SEQ ID NO: 632397 - DNA, 25 bp, Homo sapien
ggagcacgttctactttactgggaa

SEQ ID NO: 632398 - DNA, 25 bp, Homo sapien
tcctcctacaagtgtgagcacaggg

SEQ ID NO: 632399 - DNA, 25 bp, Homo sapien
tagaccgcgtgaaccctctcatatt

SEQ ID NO: 632400 - DNA, 25 bp, Homo sapien
cagataaatgacacacatagaccgc

SEQ ID NO: 632401 - DNA, 25 bp, Homo sapien
ttatttccaaaacgtgacgataggc

SEQ ID NO: 632402 - DNA, 25 bp, Homo sapien
gacgataggcaaactcagataaatg

SEQ ID NO: 632403 - DNA, 25 bp, Homo sapien
gttctcttaggacccagagccaggg

SEQ ID NO: 632404 - DNA, 25 bp, Homo sapien
ttggacgcccagtgctggccttgga

SEQ ID NO: 632405 - DNA, 25 bp, Homo sapien
ccttggaggacggtcagctggagga

SEQ ID NO: 632406 - DNA, 25 bp, Homo sapien
aacttccatcctgcgggaggccttg

SEQ ID NO: 632407 - DNA, 25 bp, Homo sapien
agctccggccgccacttgcgcctct

SEQ ID NO: 632408 - DNA, 25 bp, Homo sapien
cggccgccacttgcgcctctccagc

SEQ ID NO: 632409 - DNA, 25 bp, Homo sapien
tccggccgccacttgcgcctctcca

SEQ ID NO: 632410 - DNA, 25 bp, Homo sapien
gcagctccggccgccacttgcgcct

SEQ ID NO: 632411 - DNA, 25 bp, Homo sapien
caagtgggcagttgggctcagttct

SEQ ID NO: 632412 - DNA, 25 bp, Homo sapien
cctaattcttagtaacccaaggctg

SEQ ID NO: 632413 - DNA, 25 bp, Homo sapien
gctcagttcttgtgtggaggccctg

SEQ ID NO: 632414 - DNA, 25 bp, Homo sapien
cgatttcttcaaccaggcaaaggaa

SEQ ID NO: 632415 - DNA, 25 bp, Homo sapien
tgagatagtgctcggagaagcccca

SEQ ID NO: 632416 - DNA, 25 bp, Homo sapien
ggcaggcagcacttcttcgtggctt

SEQ ID NO: 632417 - DNA, 25 bp, Homo sapien
acatgcgaatgccatgcgtgcccac

SEQ ID NO: 632418 - DNA, 25 bp, Homo sapien
taatgtccactgacggcacatgcga

SEQ ID NO: 632419 - DNA, 25 bp, Homo sapien
tgaaaatttgaaaacggctgcgcct

SEQ ID NO: 632420 - DNA, 25 bp, Homo sapien
ggtcagcccagcgtcacggatgttt

SEQ ID NO: 632421 - DNA, 25 bp, Homo sapien
tactgctcgagtgtgagccgaccgc

SEQ ID NO: 632422 - DNA, 25 bp, Homo sapien
ccagctcagagttttcgcgggcaga

SEQ ID NO: 632423 - DNA, 25 bp, Homo sapien
agaacagacgcggacacactgaatg

SEQ ID NO: 632424 - DNA, 25 bp, Homo sapien
ggacacactgaatgtcggcccttcc

SEQ ID NO: 632425 - DNA, 25 bp, Homo sapien
cagacgcggacacactgaatgtcgg

SEQ ID NO: 632426 - DNA, 25 bp, Homo sapien
agggctcagccaacgccgcggcgcc

SEQ ID NO: 632427 - DNA, 25 bp, Homo sapien
ggtctgtgcgaaaaaaccactccga

SEQ ID NO: 632428 - DNA, 25 bp, Homo sapien
gaacatcttagggtctcgggcactc

SEQ ID NO: 632429 - DNA, 25 bp, Homo sapien
tgcactgggacacaacgctgttctc

SEQ ID NO: 632430 - DNA, 25 bp, Homo sapien
taagcgatgcgagcatgtgcactgg

SEQ ID NO: 632431 - DNA, 25 bp, Homo sapien
gacattccaggaccttggtcatgta

SEQ ID NO: 632432 - DNA, 25 bp, Homo sapien
aagggaagtctacggtcacaccatt

SEQ ID NO: 632433 - DNA, 25 bp, Homo sapien
cacaccattcaggactatcttgggc

SEQ ID NO: 632434 - DNA, 25 bp, Homo sapien
tccaggaccttggtcatgtactcct

SEQ ID NO: 632435 - DNA, 25 bp, Homo sapien
ggcactcctaagtctgtcaccctca

SEQ ID NO: 632436 - DNA, 25 bp, Homo sapien
ttccaagtgaggctggccaccggct

SEQ ID NO: 632437 - DNA, 25 bp, Homo sapien
ggctgcccctctaatggaaatgctt

SEQ ID NO: 632438 - DNA, 25 bp, Homo sapien
tgacccgtgaatatcagctgctcct

SEQ ID NO: 632439 - DNA, 25 bp, Homo sapien
ctgaacggagttcggagcaagggtt

SEQ ID NO: 632440 - DNA, 25 bp, Homo sapien
cagctctttgcagatgcagaggcca

SEQ ID NO: 632441 - DNA, 25 bp, Homo sapien
ctgagacaagcttcggcagccagcg

SEQ ID NO: 632442 - DNA, 25 bp, Homo sapien
gacaagcttcggcagccagcgggca

SEQ ID NO: 632443 - DNA, 25 bp, Homo sapien
tgacaaggcccgatccgggaaaagc

SEQ ID NO: 632444 - DNA, 25 bp, Homo sapien
atgccgtctcggaggtgttctcgcc

SEQ ID NO: 632445 - DNA, 25 bp, Homo sapien
gggaaaagctctccttgcgccctct

SEQ ID NO: 632446 - DNA, 25 bp, Homo sapien
ccctctcggcaatcttgcgggcaga

SEQ ID NO: 632447 - DNA, 25 bp, Homo sapien
aaaggcaggtggcattcggctaact

SEQ ID NO: 632448 - DNA, 25 bp, Homo sapien
agacaacgttctcacgtatcaaagg

SEQ ID NO: 632449 - DNA, 25 bp, Homo sapien
gaagtcacggttctcagacaacgtt

SEQ ID NO: 632450 - DNA, 25 bp, Homo sapien
tgaccagacacaagcaagcacagaa

SEQ ID NO: 632451 - DNA, 25 bp, Homo sapien
aggaggtgttccgaagctcgttgat

SEQ ID NO: 632452 - DNA, 25 bp, Homo sapien
gtgggtcctggaggcgtaaataatc

SEQ ID NO: 632453 - DNA, 25 bp, Homo sapien
cctggaggcgtaaataatctttggg

SEQ ID NO: 632454 - DNA, 25 bp, Homo sapien
tccgaagctcgttgatgacctgtgt

SEQ ID NO: 632455 - DNA, 25 bp, Homo sapien
gtcagaggaagtgagcataactgaa

SEQ ID NO: 632456 - DNA, 25 bp, Homo sapien
acacgcaggagcctcggcggtcaga

SEQ ID NO: 632457 - DNA, 25 bp, Homo sapien
agcataactgaaacgtggcccgggc

SEQ ID NO: 632458 - DNA, 25 bp, Homo sapien
agtgagcataactgaaacgtggccc

SEQ ID NO: 632459 - DNA, 25 bp, Homo sapien
ccgtgggtcgaggaggagctgtctc

SEQ ID NO: 632460 - DNA, 25 bp, Homo sapien
ccaacacccacagcgtggccctgca

SEQ ID NO: 632461 - DNA, 25 bp, Homo sapien
tgggagagagcaccgtgggtcgagg

SEQ ID NO: 632462 - DNA, 25 bp, Homo sapien
gaggagctgtctccaacacccacag

SEQ ID NO: 632463 - DNA, 25 bp, Homo sapien
ctgtagatggttactctcttgtttc

SEQ ID NO: 632464 - DNA, 25 bp, Homo sapien
gacttgccaccttcttacggcacaa

SEQ ID NO: 632465 - DNA, 25 bp, Homo sapien
ggagcgacttgccaccttcttacgg

SEQ ID NO: 632466 - DNA, 25 bp, Homo sapien
tgtagaaatgacaggagcgacttgc

SEQ ID NO: 632467 - DNA, 25 bp, Homo sapien
aatgacaggagcgacttgccacctt

SEQ ID NO: 632468 - DNA, 25 bp, Homo sapien
gcacacactccaacccgaccctggt

SEQ ID NO: 632469 - DNA, 25 bp, Homo sapien
cacacactccaacccgaccctggtc

SEQ ID NO: 632470 - DNA, 25 bp, Homo sapien
tgcacacactccaacccgaccctgg

SEQ ID NO: 632471 - DNA, 25 bp, Homo sapien
acaggaccgccgatgccttctgagt

SEQ ID NO: 632472 - DNA, 25 bp, Homo sapien
gggagcgccgccctaaatacaagag

SEQ ID NO: 632473 - DNA, 25 bp, Homo sapien
tcagggtcctcagtcctggcacact

SEQ ID NO: 632474 - DNA, 25 bp, Homo sapien
tcagcaaacgtgagtgcagaaagca

SEQ ID NO: 632475 - DNA, 25 bp, Homo sapien
ccatagcaacagaccagccaatcag

SEQ ID NO: 632476 - DNA, 25 bp, Homo sapien
aggcactgccgcacagcggcacttg

SEQ ID NO: 632477 - DNA, 25 bp, Homo sapien
agcaccatagcaacagaccagccaa

SEQ ID NO: 632478 - DNA, 25 bp, Homo sapien
ctgggcagcaccatagcaacagacc

SEQ ID NO: 632479 - DNA, 25 bp, Homo sapien
tgaccaagtcctcaatgtccaggat

SEQ ID NO: 632480 - DNA, 25 bp, Homo sapien
ctgtgcttgcttccgctcttgacca

SEQ ID NO: 632481 - DNA, 25 bp, Homo sapien
tccgctcttgaccaagtcctcaatg

SEQ ID NO: 632482 - DNA, 25 bp, Homo sapien
ttgcttccgctcttgaccaagtcct

SEQ ID NO: 632483 - DNA, 25 bp, Homo sapien
gcatgaatatgatgtcggcttgctg

SEQ ID NO: 632484 - DNA, 25 bp, Homo sapien
tgtacggcatgaatatgatgtcggc

SEQ ID NO: 632485 - DNA, 25 bp, Homo sapien
catccaacaagtaattgtacggcat

SEQ ID NO: 632486 - DNA, 25 bp, Homo sapien
caagtaattgtacggcatgaatatg

SEQ ID NO: 632487 - DNA, 25 bp, Homo sapien
ggctcggctgtttgccacacgtttg

SEQ ID NO: 632488 - DNA, 25 bp, Homo sapien
gagatgctgggcgactttccatgtg

SEQ ID NO: 632489 - DNA, 25 bp, Homo sapien
gagtggctacacaacttcacagcga

SEQ ID NO: 632490 - DNA, 25 bp, Homo sapien
tccatgtgctcaactggtcattcca

SEQ ID NO: 632491 - DNA, 25 bp, Homo sapien
gcttcgtcaaagatcacgactgtcc

SEQ ID NO: 632492 - DNA, 25 bp, Homo sapien
agcttcgtcaaagatcacgactgtc

SEQ ID NO: 632493 - DNA, 25 bp, Homo sapien
cttcgtcaaagatcacgactgtccc

SEQ ID NO: 632494 - DNA, 25 bp, Homo sapien
gagcttcgtcaaagatcacgactgt

SEQ ID NO: 632495 - DNA, 25 bp, Homo sapien
cagagcccctccagaaaggtttgcg

SEQ ID NO: 632496 - DNA, 25 bp, Homo sapien
ggctcttgacaaaaaggccagaagc

SEQ ID NO: 632497 - DNA, 25 bp, Homo sapien
tctcaagccatgtggccggaagggc

SEQ ID NO: 632498 - DNA, 25 bp, Homo sapien
agacactgcaggcaagaccacaagc

SEQ ID NO: 632499 - DNA, 25 bp, Homo sapien
cagcacctggtctatgacgtccagt

SEQ ID NO: 632500 - DNA, 25 bp, Homo sapien
gcacctggtctatgacgtccagtcc

SEQ ID NO: 632501 - DNA, 25 bp, Homo sapien
ccagcacctggtctatgacgtccag

SEQ ID NO: 632502 - DNA, 25 bp, Homo sapien
tccagcacctggtctatgacgtcca

SEQ ID NO: 632503 - DNA, 25 bp, Homo sapien
cttcagctttgcaatgtcttccagc

SEQ ID NO: 632504 - DNA, 25 bp, Homo sapien
agctttgcaatgtcttccagctcca

SEQ ID NO: 632505 - DNA, 25 bp, Homo sapien
tcagctttgcaatgtcttccagctc

SEQ ID NO: 632506 - DNA, 25 bp, Homo sapien
ttcagctttgcaatgtcttccagct

SEQ ID NO: 632507 - DNA, 25 bp, Homo sapien
ctgtgggtcgaggaggtgtcaccca

SEQ ID NO: 632508 - DNA, 25 bp, Homo sapien
ccacctcctcgcaaggaggaggccc

SEQ ID NO: 632509 - DNA, 25 bp, Homo sapien
tcacccacctcctcgcaaggaggag

SEQ ID NO: 632510 - DNA, 25 bp, Homo sapien
aggtgtcacccacctcctcgcaagg

SEQ ID NO: 632511 - DNA, 25 bp, Homo sapien
gtgacaccgctgtcgtctccaggca

SEQ ID NO: 632512 - DNA, 25 bp, Homo sapien
gctgtcgtctccaggcagctcaaca

SEQ ID NO: 632513 - DNA, 25 bp, Homo sapien
ggcagctcaacagcatcgatggccc

SEQ ID NO: 632514 - DNA, 25 bp, Homo sapien
ccctggcttggtgacaccgctgtcg

SEQ ID NO: 632515 - DNA, 25 bp, Homo sapien
ggcggctgtgcgctcaggagagccc

SEQ ID NO: 632516 - DNA, 25 bp, Homo sapien
gcggctgtgcgctcaggagagcccc

SEQ ID NO: 632517 - DNA, 25 bp, Homo sapien
ggctgtgcgctcaggagagccccca

SEQ ID NO: 632518 - DNA, 25 bp, Homo sapien
ctcggcggctgtgcgctcaggagag

SEQ ID NO: 632519 - DNA, 25 bp, Homo sapien
ctggcggggggaccagactgcagct

SEQ ID NO: 632520 - DNA, 25 bp, Homo sapien
cgaggagaagaaggcaggctcgagc

SEQ ID NO: 632521 - DNA, 25 bp, Homo sapien
gccgaggagaagaaggcaggctcga

SEQ ID NO: 632522 - DNA, 25 bp, Homo sapien
tgccgaggagaagaaggcaggctcg

SEQ ID NO: 632523 - DNA, 25 bp, Homo sapien
ctgccgaggagaagaaggcaggctc

SEQ ID NO: 632524 - DNA, 25 bp, Homo sapien
tgcagcccttggtctgaaacgtgat

SEQ ID NO: 632525 - DNA, 25 bp, Homo sapien
tggatgatctggtccagcgagtcca

SEQ ID NO: 632526 - DNA, 25 bp, Homo sapien
ggtctgaaacgtgatctgggcttca

SEQ ID NO: 632527 - DNA, 25 bp, Homo sapien
gatgatctggtccagcgagtccagg

SEQ ID NO: 632528 - DNA, 25 bp, Homo sapien
ctggagggcagcagggcgctgacac

SEQ ID NO: 632529 - DNA, 25 bp, Homo sapien
agggcagcagggcgctgacacccac

SEQ ID NO: 632530 - DNA, 25 bp, Homo sapien
ggagggcagcagggcgctgacaccc

SEQ ID NO: 632531 - DNA, 25 bp, Homo sapien
gggcagcagggcgctgacacccaca

SEQ ID NO: 632532 - DNA, 25 bp, Homo sapien
ccggccgtgttggtgaacactccag

SEQ ID NO: 632533 - DNA, 25 bp, Homo sapien
agtccggccgtgttggtgaacactc

SEQ ID NO: 632534 - DNA, 25 bp, Homo sapien
cagtccggccgtgttggtgaacact

SEQ ID NO: 632535 - DNA, 25 bp, Homo sapien
tccggccgtgttggtgaacactcca

SEQ ID NO: 632536 - DNA, 25 bp, Homo sapien
ggagccaacgcgggtgagcactgtg

SEQ ID NO: 632537 - DNA, 25 bp, Homo sapien
tcaggagccaacgcgggtgagcact

SEQ ID NO: 632538 - DNA, 25 bp, Homo sapien
gctcaggagccaacgcgggtgagca

SEQ ID NO: 632539 - DNA, 25 bp, Homo sapien
aggagccaacgcgggtgagcactgt

SEQ ID NO: 632540 - DNA, 25 bp, Homo sapien
ctgccctcggaggggtccacactga

SEQ ID NO: 632541 - DNA, 25 bp, Homo sapien
ataggactgtaaggcccccagccct

SEQ ID NO: 632542 - DNA, 25 bp, Homo sapien
ttataggactgtaaggcccccagcc

SEQ ID NO: 632543 - DNA, 25 bp, Homo sapien
tataggactgtaaggcccccagccc

SEQ ID NO: 632544 - DNA, 25 bp, Homo sapien
cttataggactgtaaggcccccagc

SEQ ID NO: 632545 - DNA, 25 bp, Homo sapien
tccaggcatcagaccgctgagccgt

SEQ ID NO: 632546 - DNA, 25 bp, Homo sapien
gctgagccgtcctccggtgaccagc

SEQ ID NO: 632547 - DNA, 25 bp, Homo sapien
agccgtcctccggtgaccagcatca

SEQ ID NO: 632548 - DNA, 25 bp, Homo sapien
gtcctccggtgaccagcatcaggat

SEQ ID NO: 632549 - DNA, 25 bp, Homo sapien
ccgggcactgcacccgggcgggcgg

SEQ ID NO: 632550 - DNA, 25 bp, Homo sapien
cctgtggcatggtggtgccgggcac

SEQ ID NO: 632551 - DNA, 25 bp, Homo sapien
tgaggagaatgctctggattggcct

SEQ ID NO: 632552 - DNA, 25 bp, Homo sapien
ctgggcatgtgcctagcctgtggca

SEQ ID NO: 632553 - DNA, 25 bp, Homo sapien
tcctagaagggcttgaccgactggc

SEQ ID NO: 632554 - DNA, 25 bp, Homo sapien
caggcccttggaatctgtgcaccgg

SEQ ID NO: 632555 - DNA, 25 bp, Homo sapien
gaaactgtgacatgcggctcagggc

SEQ ID NO: 632556 - DNA, 25 bp, Homo sapien
cgggaattcaacacggcacaagcag

SEQ ID NO: 632557 - DNA, 25 bp, Homo sapien
tgaagcaccagtagctcagcacctt

SEQ ID NO: 632558 - DNA, 25 bp, Homo sapien
accagctcgtgcatgctgtggccgg

SEQ ID NO: 632559 - DNA, 25 bp, Homo sapien
gtaaggatgagggagcggacgccct

SEQ ID NO: 632560 - DNA, 25 bp, Homo sapien
ccagcgtgccgctggtaaggatgag

SEQ ID NO: 632561 - DNA, 25 bp, Homo sapien
atctgcatctccagagcaaaggagg

SEQ ID NO: 632562 - DNA, 25 bp, Homo sapien
tctgcatctccagagcaaaggagga

SEQ ID NO: 632563 - DNA, 25 bp, Homo sapien
ctgcatctccagagcaaaggaggac

SEQ ID NO: 632564 - DNA, 25 bp, Homo sapien
ctcaggccctggcaggggtggcccg

SEQ ID NO: 632565 - DNA, 25 bp, Homo sapien
ggtgctcaggccctggcaggggtgg

SEQ ID NO: 632566 - DNA, 25 bp, Homo sapien
tcaggccctggcaggggtggcccgt

SEQ ID NO: 632567 - DNA, 25 bp, Homo sapien
tgctcaggccctggcaggggtggcc

SEQ ID NO: 632568 - DNA, 25 bp, Homo sapien
ggaagtgcaccagcacccctttagc

SEQ ID NO: 632569 - DNA, 25 bp, Homo sapien
gacagtggggaagtgcaccagcacc

SEQ ID NO: 632570 - DNA, 25 bp, Homo sapien
cccagcacccggctcatggggaccc

SEQ ID NO: 632571 - DNA, 25 bp, Homo sapien
cagcacccctttagccctcgaggcc

SEQ ID NO: 632572 - DNA, 25 bp, Homo sapien
tgcttgtcgatgatgtgtgggttct

SEQ ID NO: 632573 - DNA, 25 bp, Homo sapien
atctggtgcttgtcgatgatgtgtg

SEQ ID NO: 632574 - DNA, 25 bp, Homo sapien
tcaaacgcggagctcaactgggctc

SEQ ID NO: 632575 - DNA, 25 bp, Homo sapien
ttgtcgatgatgtgtgggttctcca

SEQ ID NO: 632576 - DNA, 25 bp, Homo sapien
cagggaggataagcactcctcggaa

SEQ ID NO: 632577 - DNA, 25 bp, Homo sapien
agggaggataagcactcctcggaaa

SEQ ID NO: 632578 - DNA, 25 bp, Homo sapien
gggaggataagcactcctcggaaaa

SEQ ID NO: 632579 - DNA, 25 bp, Homo sapien
gcccatagggcaccacgcgggcgat

SEQ ID NO: 632580 - DNA, 25 bp, Homo sapien
atcaggagcccatagggcaccacgc

SEQ ID NO: 632581 - DNA, 25 bp, Homo sapien
catagggcaccacgcgggcgatgtt

SEQ ID NO: 632582 - DNA, 25 bp, Homo sapien
gaagaagatcaggagcccatagggc

SEQ ID NO: 632583 - DNA, 25 bp, Homo sapien
cgccagaactccaggctcttctcca

SEQ ID NO: 632584 - DNA, 25 bp, Homo sapien
ccgccagaactccaggctcttctcc

SEQ ID NO: 632585 - DNA, 25 bp, Homo sapien
gccagaactccaggctcttctccat

SEQ ID NO: 632586 - DNA, 25 bp, Homo sapien
ccatcttcctggccaagtcgcgggc

SEQ ID NO: 632587 - DNA, 25 bp, Homo sapien
ctcggagaagctgcctttgctcctg

SEQ ID NO: 632588 - DNA, 25 bp, Homo sapien
aacagcggcttcagcgcctccatct

SEQ ID NO: 632589 - DNA, 25 bp, Homo sapien
tcctgggctccacaaacagcggctt

SEQ ID NO: 632590 - DNA, 25 bp, Homo sapien
actagggctactcagacaggagggc

SEQ ID NO: 632591 - DNA, 25 bp, Homo sapien
gataagaggcaacactcagggccag

SEQ ID NO: 632592 - DNA, 25 bp, Homo sapien
gatgaaggatcgtcctagccaggaa

SEQ ID NO: 632593 - DNA, 25 bp, Homo sapien
gaagcttcttcctggcacggatccc

SEQ ID NO: 632594 - DNA, 25 bp, Homo sapien
acccaggggcggcaacccttgcata

SEQ ID NO: 632595 - DNA, 25 bp, Homo sapien
caacccttgcatagtaagcactgat

SEQ ID NO: 632596 - DNA, 25 bp, Homo sapien
ggcaacccttgcatagtaagcactg

SEQ ID NO: 632597 - DNA, 25 bp, Homo sapien
gggcggcaacccttgcatagtaagc

SEQ ID NO: 632598 - DNA, 25 bp, Homo sapien
aactgcatcttgaggacaacccggg

SEQ ID NO: 632599 - DNA, 25 bp, Homo sapien
accacggccattcgtgtctgagaag

SEQ ID NO: 632600 - DNA, 25 bp, Homo sapien
tacgggaggcccgtgacaatcacac

SEQ ID NO: 632601 - DNA, 25 bp, Homo sapien
gaggcccgtgacaatcacaccacgg

SEQ ID NO: 632602 - DNA, 25 bp, Homo sapien
agtcctggcggtgccggatcactcg

SEQ ID NO: 632603 - DNA, 25 bp, Homo sapien
ggtgccggatcactcgcccgatggc

SEQ ID NO: 632604 - DNA, 25 bp, Homo sapien
ctccgtagtcctggcggtgccggat

SEQ ID NO: 632605 - DNA, 25 bp, Homo sapien
tggcggtgccggatcactcgcccga

SEQ ID NO: 632606 - DNA, 25 bp, Homo sapien
gggtgtgggcgtgtcccctggcgcc

SEQ ID NO: 632607 - DNA, 25 bp, Homo sapien
ttcaagggttcagttcaccgaagtg

SEQ ID NO: 632608 - DNA, 25 bp, Homo sapien
tgaccccgagtagccggagaggctc

SEQ ID NO: 632609 - DNA, 25 bp, Homo sapien
tgcccacagccgcttcaagggttca

SEQ ID NO: 632610 - DNA, 25 bp, Homo sapien
cagttgggctcttgcgtcggcaaag

SEQ ID NO: 632611 - DNA, 25 bp, Homo sapien
ggctcttgcgtcggcaaaggcgaac

SEQ ID NO: 632612 - DNA, 25 bp, Homo sapien
ggcagttgggctcttgcgtcggcaa

SEQ ID NO: 632613 - DNA, 25 bp, Homo sapien
agggcagttgggctcttgcgtcggc

SEQ ID NO: 632614 - DNA, 25 bp, Homo sapien
cacgtctcggatgacatggccaaag

SEQ ID NO: 632615 - DNA, 25 bp, Homo sapien
ctcggatgacatggccaaagttgtc

SEQ ID NO: 632616 - DNA, 25 bp, Homo sapien
ccacgtctcggatgacatggccaaa

SEQ ID NO: 632617 - DNA, 25 bp, Homo sapien
ggccacgtctcggatgacatggcca

SEQ ID NO: 632618 - DNA, 25 bp, Homo sapien
gggtggacccatttctggctcctct

SEQ ID NO: 632619 - DNA, 25 bp, Homo sapien
gtgggtggacccatttctggctcct

SEQ ID NO: 632620 - DNA, 25 bp, Homo sapien
tgggtggacccatttctggctcctc

SEQ ID NO: 632621 - DNA, 25 bp, Homo sapien
aggcgacttggcctcgctgacagca

SEQ ID NO: 632622 - DNA, 25 bp, Homo sapien
ttggcctcgctgacagcatcttctc

SEQ ID NO: 632623 - DNA, 25 bp, Homo sapien
gccaggcgacttggcctcgctgaca

SEQ ID NO: 632624 - DNA, 25 bp, Homo sapien
gacttggcctcgctgacagcatctt

SEQ ID NO: 632625 - DNA, 25 bp, Homo sapien
ggctggggacatgcaggtccagact

SEQ ID NO: 632626 - DNA, 25 bp, Homo sapien
ctggggacatgcaggtccagactct

SEQ ID NO: 632627 - DNA, 25 bp, Homo sapien
tcaggctggggacatgcaggtccag

SEQ ID NO: 632628 - DNA, 25 bp, Homo sapien
ctgaggacctctgcttcaggctggg

SEQ ID NO: 632629 - DNA, 25 bp, Homo sapien
tccccgcccgctgttcgctgtgctc

SEQ ID NO: 632630 - DNA, 25 bp, Homo sapien
tcatactccacacacaggctactct

SEQ ID NO: 632631 - DNA, 25 bp, Homo sapien
tccacacacaggctactctcggggt

SEQ ID NO: 632632 - DNA, 25 bp, Homo sapien
ctgctcatactccacacacaggcta

SEQ ID NO: 632633 - DNA, 25 bp, Homo sapien
gtccagggaagacagtccgaccaca

SEQ ID NO: 632634 - DNA, 25 bp, Homo sapien
cagcggctcatgaggctcgcaggtg

SEQ ID NO: 632635 - DNA, 25 bp, Homo sapien
tcatgaggctcgcaggtggtgactt

SEQ ID NO: 632636 - DNA, 25 bp, Homo sapien
gtggtgacttgtaagagcaggtcca

SEQ ID NO: 632637 - DNA, 25 bp, Homo sapien
ctcctcgcggttcttctgccggcct

SEQ ID NO: 632638 - DNA, 25 bp, Homo sapien
tccctcctcgcggttcttctgccgg

SEQ ID NO: 632639 - DNA, 25 bp, Homo sapien
ctccctcctcgcggttcttctgccg

SEQ ID NO: 632640 - DNA, 25 bp, Homo sapien
cctcgcggttcttctgccggcctct

SEQ ID NO: 632641 - DNA, 25 bp, Homo sapien
gaacattgagcgttccctgggacag

SEQ ID NO: 632642 - DNA, 25 bp, Homo sapien
gattccagctgggactcatgagccc

SEQ ID NO: 632643 - DNA, 25 bp, Homo sapien
caaagggtagattggctctgcctca

SEQ ID NO: 632644 - DNA, 25 bp, Homo sapien
cacacttgagggaaatgccagggcc

SEQ ID NO: 632645 - DNA, 25 bp, Homo sapien
agcaggttgtgcttcttggggtcct

SEQ ID NO: 632646 - DNA, 25 bp, Homo sapien
gcaggttgtgcttcttggggtcctc

SEQ ID NO: 632647 - DNA, 25 bp, Homo sapien
ggcttggctcaactcctgcttcacg

SEQ ID NO: 632648 - DNA, 25 bp, Homo sapien
tcagctggatacagacctcctcaaa

SEQ ID NO: 632649 - DNA, 25 bp, Homo sapien
aactgctgcttatggtggggccgca

SEQ ID NO: 632650 - DNA, 25 bp, Homo sapien
tggggccgcacaaactggtagaagc

SEQ ID NO: 632651 - DNA, 25 bp, Homo sapien
agcctcgtcctgtcagctggataca

SEQ ID NO: 632652 - DNA, 25 bp, Homo sapien
aatgctgtgctcaggccgatagcca

SEQ ID NO: 632653 - DNA, 25 bp, Homo sapien
tgtgcccgctgccttcggggaatgc

SEQ ID NO: 632654 - DNA, 25 bp, Homo sapien
ccttcggggaatgctgtgctcaggc

SEQ ID NO: 632655 - DNA, 25 bp, Homo sapien
gtccaggaccggctgtgcccgctgc

SEQ ID NO: 632656 - DNA, 25 bp, Homo sapien
agccacaaagctggtcgagagcatc

SEQ ID NO: 632657 - DNA, 25 bp, Homo sapien
gagccacaaagctggtcgagagcat

SEQ ID NO: 632658 - DNA, 25 bp, Homo sapien
gctgcagccgtggacacggtcagct

SEQ ID NO: 632659 - DNA, 25 bp, Homo sapien
gcagccgtggacacggtcagcttgg

SEQ ID NO: 632660 - DNA, 25 bp, Homo sapien
tgcagccgtggacacggtcagcttg

SEQ ID NO: 632661 - DNA, 25 bp, Homo sapien
ctgcagccgtggacacggtcagctt

SEQ ID NO: 632662 - DNA, 25 bp, Homo sapien
ctccagacccccactgtggttggct

SEQ ID NO: 632663 - DNA, 25 bp, Homo sapien
tgcttccctgctctgggcactccag

SEQ ID NO: 632664 - DNA, 25 bp, Homo sapien
agacccccactgtggttggctgcca

SEQ ID NO: 632665 - DNA, 25 bp, Homo sapien
ccccactgtggttggctgccagggt

SEQ ID NO: 632666 - DNA, 25 bp, Homo sapien
catcagccaggtaggcgctcacggc

SEQ ID NO: 632667 - DNA, 25 bp, Homo sapien
cagccaggtaggcgctcacggcgtg

SEQ ID NO: 632668 - DNA, 25 bp, Homo sapien
atcagccaggtaggcgctcacggcg

SEQ ID NO: 632669 - DNA, 25 bp, Homo sapien
tcagccaggtaggcgctcacggcgt

SEQ ID NO: 632670 - DNA, 25 bp, Homo sapien
ttgcttataggctgtcagcgctgcc

SEQ ID NO: 632671 - DNA, 25 bp, Homo sapien
aagagttggctacagcccgcggacc

SEQ ID NO: 632672 - DNA, 25 bp, Homo sapien
gcaccttgtcgaggtcgtcgtcttg

SEQ ID NO: 632673 - DNA, 25 bp, Homo sapien
ctttgcagtggtcagggcggccaac

SEQ ID NO: 632674 - DNA, 25 bp, Homo sapien
aagcacaggaggcacggcaagcctc

SEQ ID NO: 632675 - DNA, 25 bp, Homo sapien
cggccggtcaggtctgtgcacgtct

SEQ ID NO: 632676 - DNA, 25 bp, Homo sapien
tgtggacgcacaaacatgctgaacc

SEQ ID NO: 632677 - DNA, 25 bp, Homo sapien
cacgtctgtgagaagcgctgcttgt

SEQ ID NO: 632678 - DNA, 25 bp, Homo sapien
ctgtctaaggaaggacgagatcttg

SEQ ID NO: 632679 - DNA, 25 bp, Homo sapien
gctggcctctgtctaaggaaggacg

SEQ ID NO: 632680 - DNA, 25 bp, Homo sapien
ctgggacctgcatcctcaccgcccg

SEQ ID NO: 632681 - DNA, 25 bp, Homo sapien
taaggaaggacgagatcttgctctg

SEQ ID NO: 632682 - DNA, 25 bp, Homo sapien
tgcccagcgatgtctctcccatgag

SEQ ID NO: 632683 - DNA, 25 bp, Homo sapien
gggcaccacgtcctctgccccacag

SEQ ID NO: 632684 - DNA, 25 bp, Homo sapien
gcaggcttggcagcgctggaagtca

SEQ ID NO: 632685 - DNA, 25 bp, Homo sapien
gaaggtgccgttgccagcaggcttg

SEQ ID NO: 632686 - DNA, 25 bp, Homo sapien
gcaggaactgtagtggccaggcacc

SEQ ID NO: 632687 - DNA, 25 bp, Homo sapien
agcaggaactgtagtggccaggcac

SEQ ID NO: 632688 - DNA, 25 bp, Homo sapien
ggaactgtagtggccaggcaccaac

SEQ ID NO: 632689 - DNA, 25 bp, Homo sapien
aggaactgtagtggccaggcaccaa

SEQ ID NO: 632690 - DNA, 25 bp, Homo sapien
cggcccactgcacacgtctgccagg

SEQ ID NO: 632691 - DNA, 25 bp, Homo sapien
tgtgagacaaccggcccactgcaca

SEQ ID NO: 632692 - DNA, 25 bp, Homo sapien
actgcacacgtctgccaggcgttgc

SEQ ID NO: 632693 - DNA, 25 bp, Homo sapien
ctgccaggcgttgccaccaggacaa

SEQ ID NO: 632694 - DNA, 25 bp, Homo sapien
ggccagaagacctgcatgacgctct

SEQ ID NO: 632695 - DNA, 25 bp, Homo sapien
ttcctggaggcggtgtggcaggctg

SEQ ID NO: 632696 - DNA, 25 bp, Homo sapien
cctgcatgacgctctgcttcctgga

SEQ ID NO: 632697 - DNA, 25 bp, Homo sapien
aagacctgcatgacgctctgcttcc

SEQ ID NO: 632698 - DNA, 25 bp, Homo sapien
ttagagagccctgtcccctgattaa

SEQ ID NO: 632699 - DNA, 25 bp, Homo sapien
catgggctggcctattctgttgggt

SEQ ID NO: 632700 - DNA, 25 bp, Homo sapien
cctgattaaaagtggacacgtgccc

SEQ ID NO: 632701 - DNA, 25 bp, Homo sapien
caaggtagctcagggcttctcagag

SEQ ID NO: 632702 - DNA, 25 bp, Homo sapien
ccagagctcagtccaagggtggttc

SEQ ID NO: 632703 - DNA, 25 bp, Homo sapien
ctggtgtgtcggtggatcccctacc

SEQ ID NO: 632704 - DNA, 25 bp, Homo sapien
taccaactgcagcttggctgcggct

SEQ ID NO: 632705 - DNA, 25 bp, Homo sapien
tgctgctgccctacatatatgggcg

SEQ ID NO: 632706 - DNA, 25 bp, Homo sapien
tccccgcagaggacgttgcagtagc

SEQ ID NO: 632707 - DNA, 25 bp, Homo sapien
gcagcgctctaggtagttccagaac

SEQ ID NO: 632708 - DNA, 25 bp, Homo sapien
ttccagaactgcgtgtagtggcgcg

SEQ ID NO: 632709 - DNA, 25 bp, Homo sapien
gggtgtttctgccactccgcgtaca

SEQ ID NO: 632710 - DNA, 25 bp, Homo sapien
gtggcgtggcaagcccgtgcctcct

SEQ ID NO: 632711 - DNA, 25 bp, Homo sapien
agaaaccagcgtgcgcgaagaagcc

SEQ ID NO: 632712 - DNA, 25 bp, Homo sapien
aatcacgccggcaccaggtggacac

SEQ ID NO: 632713 - DNA, 25 bp, Homo sapien
gacacgatgcgtgctccaagcagaa

SEQ ID NO: 632714 - DNA, 25 bp, Homo sapien
ccctggtgctgagggggaagccagt

SEQ ID NO: 632715 - DNA, 25 bp, Homo sapien
cacagggtgtcatgggaggaagagc

SEQ ID NO: 632716 - DNA, 25 bp, Homo sapien
cccagggccgtgcagttgcggtggg

SEQ ID NO: 632717 - DNA, 25 bp, Homo sapien
acggctggcactgcgtgttctggct

SEQ ID NO: 632718 - DNA, 25 bp, Homo sapien
gagtgagggcacaagtgggcctggc

SEQ ID NO: 632719 - DNA, 25 bp, Homo sapien
gccagctggcatgcctcaggctaga

SEQ ID NO: 632720 - DNA, 25 bp, Homo sapien
cctcaggctagatgcacgtgcaggg

SEQ ID NO: 632721 - DNA, 25 bp, Homo sapien
ccagagccagctggcatgcctcagg

SEQ ID NO: 632722 - DNA, 25 bp, Homo sapien
taggagagttaccatcaggcctcgg

SEQ ID NO: 632723 - DNA, 25 bp, Homo sapien
cagtggttaacattgggcctcggtt

SEQ ID NO: 632724 - DNA, 25 bp, Homo sapien
ggaccggacctgacttgatgttaag

SEQ ID NO: 632725 - DNA, 25 bp, Homo sapien
cccctcgggcagttaggagattgct

SEQ ID NO: 632726 - DNA, 25 bp, Homo sapien
ggaggcagcggtccgatcatttcac

SEQ ID NO: 632727 - DNA, 25 bp, Homo sapien
ggtggggaggcagcggtccgatcat

SEQ ID NO: 632728 - DNA, 25 bp, Homo sapien
ggcagcggtccgatcatttcaccca

SEQ ID NO: 632729 - DNA, 25 bp, Homo sapien
ggggaggcagcggtccgatcatttc

SEQ ID NO: 632730 - DNA, 25 bp, Homo sapien
aggagctccgtgagccgccgacgca

SEQ ID NO: 632731 - DNA, 25 bp, Homo sapien
ccacaaagtcgatgacggcacgctc

SEQ ID NO: 632732 - DNA, 25 bp, Homo sapien
cgccgacgcagcttcagctgcaagg

SEQ ID NO: 632733 - DNA, 25 bp, Homo sapien
aggaagcgctcacggacgctccgct

SEQ ID NO: 632734 - DNA, 25 bp, Homo sapien
ggtgccaaggatgtagaataaataa

SEQ ID NO: 632735 - DNA, 25 bp, Homo sapien
caaggatgtagaataaataagaggg

SEQ ID NO: 632736 - DNA, 25 bp, Homo sapien
tgccaaggatgtagaataaataaga

SEQ ID NO: 632737 - DNA, 25 bp, Homo sapien
ctctttcagtgcaagtggggtgcca

SEQ ID NO: 632738 - DNA, 25 bp, Homo sapien
gtttgagcctaagggcaacctcgct

SEQ ID NO: 632739 - DNA, 25 bp, Homo sapien
tgagtgcctcctttcggctcagaga

SEQ ID NO: 632740 - DNA, 25 bp, Homo sapien
tgttcactggtcatgcctgaagccg

SEQ ID NO: 632741 - DNA, 25 bp, Homo sapien
gacagagtgcggcatcctcaggtga

SEQ ID NO: 632742 - DNA, 25 bp, Homo sapien
agcgcgccggtggctcgctgctccc

SEQ ID NO: 632743 - DNA, 25 bp, Homo sapien
cgcgccggtggctcgctgctcccgg

SEQ ID NO: 632744 - DNA, 25 bp, Homo sapien
gggagcgcgccggtggctcgctgct

SEQ ID NO: 632745 - DNA, 25 bp, Homo sapien
gctcctggggagcgcgccggtggct

SEQ ID NO: 632746 - DNA, 25 bp, Homo sapien
tgggacgcggttcagctcattccct

SEQ ID NO: 632747 - DNA, 25 bp, Homo sapien
ctgcttgtcggggagcctcagacct

SEQ ID NO: 632748 - DNA, 25 bp, Homo sapien
ctcgaggtgggacgcgggtgtgaca

SEQ ID NO: 632749 - DNA, 25 bp, Homo sapien
gcaggtaggccgcaggctgtgcggt

SEQ ID NO: 632750 - DNA, 25 bp, Homo sapien
ccccagcagccgatcggcacttcct

SEQ ID NO: 632751 - DNA, 25 bp, Homo sapien
gatcggcacttcctcccgagcgccg

SEQ ID NO: 632752 - DNA, 25 bp, Homo sapien
ttttcgccccagcagccgatcggca

SEQ ID NO: 632753 - DNA, 25 bp, Homo sapien
gcagccgatcggcacttcctcccga

SEQ ID NO: 632754 - DNA, 25 bp, Homo sapien
tcctccgcgcggtttcccagccgca

SEQ ID NO: 632755 - DNA, 25 bp, Homo sapien
gcagccacagagagcccgccggcct

SEQ ID NO: 632756 - DNA, 25 bp, Homo sapien
ctccgcgcggtttcccagccgcagc

SEQ ID NO: 632757 - DNA, 25 bp, Homo sapien
ccgcagccacagagagcccgccggc

SEQ ID NO: 632758 - DNA, 25 bp, Homo sapien
gggagacaccggctcagaggcacag

SEQ ID NO: 632759 - DNA, 25 bp, Homo sapien
agctcccagcgcagaggtcgcagcc

SEQ ID NO: 632760 - DNA, 25 bp, Homo sapien
cttcccttccgagccgccgtgggct

SEQ ID NO: 632761 - DNA, 25 bp, Homo sapien
gccgctagccgggtcccgcgtcact

SEQ ID NO: 632762 - DNA, 25 bp, Homo sapien
ctgagagagggaggcgctggaccag

SEQ ID NO: 632763 - DNA, 25 bp, Homo sapien
gccgactccaggctctcctcgtcca

SEQ ID NO: 632764 - DNA, 25 bp, Homo sapien
ccgactccaggctctcctcgtccat

SEQ ID NO: 632765 - DNA, 25 bp, Homo sapien
tgcagctggcgcaggtcagcctgct

SEQ ID NO: 632766 - DNA, 25 bp, Homo sapien
cagctgcgcacggtaggtctgcaag

SEQ ID NO: 632767 - DNA, 25 bp, Homo sapien
gctcagacgaatccaggccggcgcc

SEQ ID NO: 632768 - DNA, 25 bp, Homo sapien
gcctcggtgagctcgatgagctcct

SEQ ID NO: 632769 - DNA, 25 bp, Homo sapien
gctcttcgtccagcgcggccaacaa

SEQ ID NO: 632770 - DNA, 25 bp, Homo sapien
gggcgctcttcgtccagcgcggcca

SEQ ID NO: 632771 - DNA, 25 bp, Homo sapien
ttcgtccagcgcggccaacaagctg

SEQ ID NO: 632772 - DNA, 25 bp, Homo sapien
gcggcccgggcgctcttcgtccagc

SEQ ID NO: 632773 - DNA, 25 bp, Homo sapien
tgctggtgcctccaccgcctcagtg

SEQ ID NO: 632774 - DNA, 25 bp, Homo sapien
cgctgctggtgcctccaccgcctca

SEQ ID NO: 632775 - DNA, 25 bp, Homo sapien
ggtgcctccaccgcctcagtgatgg

SEQ ID NO: 632776 - DNA, 25 bp, Homo sapien
ctggtgcctccaccgcctcagtgat

SEQ ID NO: 632777 - DNA, 25 bp, Homo sapien
gctttaggaacggtctctgatccgg

SEQ ID NO: 632778 - DNA, 25 bp, Homo sapien
ctgccgcagattctggccccgcctc

SEQ ID NO: 632779 - DNA, 25 bp, Homo sapien
tttaggaacggtctctgatccggac

SEQ ID NO: 632780 - DNA, 25 bp, Homo sapien
ctctgctttaggaacggtctctgat

SEQ ID NO: 632781 - DNA, 25 bp, Homo sapien
tctccctcttcctcctcctgcccac

SEQ ID NO: 632782 - DNA, 25 bp, Homo sapien
tcctctccctcttcctcctcctgcc

SEQ ID NO: 632783 - DNA, 25 bp, Homo sapien
ctcagctcttcctcgtcctctccct

SEQ ID NO: 632784 - DNA, 25 bp, Homo sapien
tcagctcttcctcgtcctctccctc

SEQ ID NO: 632785 - DNA, 25 bp, Homo sapien
gaagaacgggcacggcttcagagac

SEQ ID NO: 632786 - DNA, 25 bp, Homo sapien
tccttaaagcggcactttccctcca

SEQ ID NO: 632787 - DNA, 25 bp, Homo sapien
gtaaagcacacggacacccgccgag

SEQ ID NO: 632788 - DNA, 25 bp, Homo sapien
cgttcccaccaccatggcgttgtga

SEQ ID NO: 632789 - DNA, 25 bp, Homo sapien
ctactagaaggcttggtaaatattt

SEQ ID NO: 632790 - DNA, 25 bp, Homo sapien
ccttggccgggaaacgtctactcag

SEQ ID NO: 632791 - DNA, 25 bp, Homo sapien
cttggccgggaaacgtctactcagg

SEQ ID NO: 632792 - DNA, 25 bp, Homo sapien
tggccgggaaacgtctactcaggag

SEQ ID NO: 632793 - DNA, 25 bp, Homo sapien
gccgggaaacgtctactcaggaggc

SEQ ID NO: 632794 - DNA, 25 bp, Homo sapien
ggaagcctagacatttgaatgacta

SEQ ID NO: 632795 - DNA, 25 bp, Homo sapien
aatagaaactgttcctgaggaagcc

SEQ ID NO: 632796 - DNA, 25 bp, Homo sapien
aaactgttcctgaggaagcctagac

SEQ ID NO: 632797 - DNA, 25 bp, Homo sapien
aagaaattaatagaaactgttcctg

SEQ ID NO: 632798 - DNA, 25 bp, Homo sapien
gggcgcagctcatccagagagacca

SEQ ID NO: 632799 - DNA, 25 bp, Homo sapien
cggtgatgcgtgctgcgtgccagag

SEQ ID NO: 632800 - DNA, 25 bp, Homo sapien
tggccagacacgcagagccggcctg

SEQ ID NO: 632801 - DNA, 25 bp, Homo sapien
cagaggccatcctggtgcttggcca

SEQ ID NO: 632802 - DNA, 25 bp, Homo sapien
ggtcagaatccttgacagcaggtgc

SEQ ID NO: 632803 - DNA, 25 bp, Homo sapien
tgcaggtcagaatccttgacagcag

SEQ ID NO: 632804 - DNA, 25 bp, Homo sapien
aagctgcaggtcagaatccttgaca

SEQ ID NO: 632805 - DNA, 25 bp, Homo sapien
tcagaatccttgacagcaggtgcca

SEQ ID NO: 632806 - DNA, 25 bp, Homo sapien
gactgtgtagtagccgttgtccaca

SEQ ID NO: 632807 - DNA, 25 bp, Homo sapien
agcagcagcgagtcaaacttgactg

SEQ ID NO: 632808 - DNA, 25 bp, Homo sapien
tgtctgagtcggactctgtggcctc

SEQ ID NO: 632809 - DNA, 25 bp, Homo sapien
cgtcgctgtctgagtcggactctgt

SEQ ID NO: 632810 - DNA, 25 bp, Homo sapien
ctggcatagctggagtcacccgtac

SEQ ID NO: 632811 - DNA, 25 bp, Homo sapien
tctggcatagctggagtcacccgta

SEQ ID NO: 632812 - DNA, 25 bp, Homo sapien
ctctggcatagctggagtcacccgt

SEQ ID NO: 632813 - DNA, 25 bp, Homo sapien
tggctcctgggctccgcagctgctg

SEQ ID NO: 632814 - DNA, 25 bp, Homo sapien
tcctgggctccgcagctgctgccat

SEQ ID NO: 632815 - DNA, 25 bp, Homo sapien
cttcctggctcctgggctccgcagc

SEQ ID NO: 632816 - DNA, 25 bp, Homo sapien
ctgggctccgcagctgctgccatac

SEQ ID NO: 632817 - DNA, 25 bp, Homo sapien
gtgccctcaccggccaggagcctct

SEQ ID NO: 632818 - DNA, 25 bp, Homo sapien
ccaggagcctctcagggtgacccca

SEQ ID NO: 632819 - DNA, 25 bp, Homo sapien
ttagatggttggtgccctcaccggc

SEQ ID NO: 632820 - DNA, 25 bp, Homo sapien
tggttggtgccctcaccggccagga

SEQ ID NO: 632821 - DNA, 25 bp, Homo sapien
gccctcacagagtccttggttcagt

SEQ ID NO: 632822 - DNA, 25 bp, Homo sapien
tccttgaagataaaggccgccacgg

SEQ ID NO: 632823 - DNA, 25 bp, Homo sapien
ttgtgcatggtgacccgggctttga

SEQ ID NO: 632824 - DNA, 25 bp, Homo sapien
gcacccaggtcccaagtctgagaag

SEQ ID NO: 632825 - DNA, 25 bp, Homo sapien
cagaggactgtgcagagtccacggc

SEQ ID NO: 632826 - DNA, 25 bp, Homo sapien
gtgcagagtccacggcgtccgaccc

SEQ ID NO: 632827 - DNA, 25 bp, Homo sapien
gactgtgcagagtccacggcgtccg

SEQ ID NO: 632828 - DNA, 25 bp, Homo sapien
gagtccacggcgtccgaccccacca

SEQ ID NO: 632829 - DNA, 25 bp, Homo sapien
tcatagcccatcttggtgaggagtc

SEQ ID NO: 632830 - DNA, 25 bp, Homo sapien
gagcctatacctcgcgtgtgcacct

SEQ ID NO: 632831 - DNA, 25 bp, Homo sapien
ctcatagcccatcttggtgaggagt

SEQ ID NO: 632832 - DNA, 25 bp, Homo sapien
tggtgaggagtctggagcctatacc

SEQ ID NO: 632833 - DNA, 25 bp, Homo sapien
gctggacctgggctatgctgcagca

SEQ ID NO: 632834 - DNA, 25 bp, Homo sapien
ggaccctgggaacccgatggctgcg

SEQ ID NO: 632835 - DNA, 25 bp, Homo sapien
tgggaacccgatggctgcgggaccc

SEQ ID NO: 632836 - DNA, 25 bp, Homo sapien
ctggacctgggctatgctgcagcag

SEQ ID NO: 632837 - DNA, 25 bp, Homo sapien
agtgctgtggccgtaggaccctggg

SEQ ID NO: 632838 - DNA, 25 bp, Homo sapien
gtgctgtggccgtaggaccctggga

SEQ ID NO: 632839 - DNA, 25 bp, Homo sapien
gctgtggccgtaggaccctgggaat

SEQ ID NO: 632840 - DNA, 25 bp, Homo sapien
cggaggcacggggatggcagtgctg

SEQ ID NO: 632841 - DNA, 25 bp, Homo sapien
ggaggcacggggatggcagtgctgt

SEQ ID NO: 632842 - DNA, 25 bp, Homo sapien
gatggcagtgctgtggctgcgggac

SEQ ID NO: 632843 - DNA, 25 bp, Homo sapien
ctgcggaggcacggggatggcagtg

SEQ ID NO: 632844 - DNA, 25 bp, Homo sapien
cacagcatggatgggctccacccgg

SEQ ID NO: 632845 - DNA, 25 bp, Homo sapien
gccagccttgccaaccctggtctgc

SEQ ID NO: 632846 - DNA, 25 bp, Homo sapien
ctggggggcttgttggtgccagcct

SEQ ID NO: 632847 - DNA, 25 bp, Homo sapien
tggtccagcgacttccctcgaggca

SEQ ID NO: 632848 - DNA, 25 bp, Homo sapien
gggttcgctcgatcttctcctcagt

SEQ ID NO: 632849 - DNA, 25 bp, Homo sapien
cctgatgtcccgctgggttcgctcg

SEQ ID NO: 632850 - DNA, 25 bp, Homo sapien
gcttggcactcttgctggcatggta

SEQ ID NO: 632851 - DNA, 25 bp, Homo sapien
cgttgcgggcgagagcctcctggat

SEQ ID NO: 632852 - DNA, 25 bp, Homo sapien
tcaggtgacctccagcatgtatccc

SEQ ID NO: 632853 - DNA, 25 bp, Homo sapien
tgggtcgccctttgccctgagctgg

SEQ ID NO: 632854 - DNA, 25 bp, Homo sapien
cagggccaccctgggtcgccctttg

SEQ ID NO: 632855 - DNA, 25 bp, Homo sapien
cctccagcatgtatcccgggggcag

SEQ ID NO: 632856 - DNA, 25 bp, Homo sapien
ccaaccccagtctgccgtacccact

SEQ ID NO: 632857 - DNA, 25 bp, Homo sapien
gggtcctgggccatgccaccaaccc

SEQ ID NO: 632858 - DNA, 25 bp, Homo sapien
gctcactagtcagcgtggggtcctg

SEQ ID NO: 632859 - DNA, 25 bp, Homo sapien
tgcggaggggctcactagtcagcgt

SEQ ID NO: 632860 - DNA, 25 bp, Homo sapien
ccagctggcgctgggctcctgccag

SEQ ID NO: 632861 - DNA, 25 bp, Homo sapien
ctgagcccggagctgccccagctgg

SEQ ID NO: 632862 - DNA, 25 bp, Homo sapien
gccggcttcctgagcccggagctgc

SEQ ID NO: 632863 - DNA, 25 bp, Homo sapien
gctggcgctgggctcctgccagctt

SEQ ID NO: 632864 - DNA, 25 bp, Homo sapien
tcttcttgtgggtgtctgccttcct

SEQ ID NO: 632865 - DNA, 25 bp, Homo sapien
ttcttgtgggtgtctgccttcctct

SEQ ID NO: 632866 - DNA, 25 bp, Homo sapien
tcttgtgggtgtctgccttcctctg

SEQ ID NO: 632867 - DNA, 25 bp, Homo sapien
catcttcttgtgggtgtctgccttc

SEQ ID NO: 632868 - DNA, 25 bp, Homo sapien
taatgtccttgccaaggaaatgccc

SEQ ID NO: 632869 - DNA, 25 bp, Homo sapien
gggtcccacgcttcgtccatagtgc

SEQ ID NO: 632870 - DNA, 25 bp, Homo sapien
agcagtgtctgcacgccccaggcca

SEQ ID NO: 632871 - DNA, 25 bp, Homo sapien
cctcctcgggcaacactggtcttcc

SEQ ID NO: 632872 - DNA, 25 bp, Homo sapien
accctgcagccagctgatctccact

SEQ ID NO: 632873 - DNA, 25 bp, Homo sapien
cagagaccctgcagccagctgatct

SEQ ID NO: 632874 - DNA, 25 bp, Homo sapien
ctgcagccagctgatctccactgaa

SEQ ID NO: 632875 - DNA, 25 bp, Homo sapien
agagaccctgcagccagctgatctc

SEQ ID NO: 632876 - DNA, 25 bp, Homo sapien
caagagtgccccacgtggtgggcca

SEQ ID NO: 632877 - DNA, 25 bp, Homo sapien
tgccttggtcagagaagggtaagaa

SEQ ID NO: 632878 - DNA, 25 bp, Homo sapien
taagaagggagaatgccggcctcct

SEQ ID NO: 632879 - DNA, 25 bp, Homo sapien
ctgtgggtgtcaggcagcctggcgg

SEQ ID NO: 632880 - DNA, 25 bp, Homo sapien
tagcccgcactgttctgacagccta

SEQ ID NO: 632881 - DNA, 25 bp, Homo sapien
agatgaaacgtgtgcgcctctagcc

SEQ ID NO: 632882 - DNA, 25 bp, Homo sapien
aggaaggtctttgtgcagccctcgg

SEQ ID NO: 632883 - DNA, 25 bp, Homo sapien
cccgcccgaagcctagatgaaacgt

SEQ ID NO: 632884 - DNA, 25 bp, Homo sapien
tgaggtgaactagggctgctctgcc

SEQ ID NO: 632885 - DNA, 25 bp, Homo sapien
cgttccagctctgactcagcacagg

SEQ ID NO: 632886 - DNA, 25 bp, Homo sapien
gcctggctgactgacccagctgcag

SEQ ID NO: 632887 - DNA, 25 bp, Homo sapien
tgcgggtgaccacggtaacacccag

SEQ ID NO: 632888 - DNA, 25 bp, Homo sapien
acagaagaaaggggcgctgggggct

SEQ ID NO: 632889 - DNA, 25 bp, Homo sapien
gacagaagaaaggggcgctgggggc

SEQ ID NO: 632890 - DNA, 25 bp, Homo sapien
gccaaggggacctggcgccacctgg

SEQ ID NO: 632891 - DNA, 25 bp, Homo sapien
cgccacctggcagccccaaatctgc

SEQ ID NO: 632892 - DNA, 25 bp, Homo sapien
cagggcgcagcaccctagaacccag

SEQ ID NO: 632893 - DNA, 25 bp, Homo sapien
agcagggcgcagcaccctagaaccc

SEQ ID NO: 632894 - DNA, 25 bp, Homo sapien
agggcgcagcaccctagaacccaga

SEQ ID NO: 632895 - DNA, 25 bp, Homo sapien
gcagggcgcagcaccctagaaccca

SEQ ID NO: 632896 - DNA, 25 bp, Homo sapien
gccgccgtcgcactgccctgcagcc

SEQ ID NO: 632897 - DNA, 25 bp, Homo sapien
tggtccccgggacagcctggcactc

SEQ ID NO: 632898 - DNA, 25 bp, Homo sapien
gtccccgggacagcctggcactcac

SEQ ID NO: 632899 - DNA, 25 bp, Homo sapien
ctggtccccgggacagcctggcact

SEQ ID NO: 632900 - DNA, 25 bp, Homo sapien
cctggtccccgggacagcctggcac

SEQ ID NO: 632901 - DNA, 25 bp, Homo sapien
ctggtcggtgccctgcggaccccac

SEQ ID NO: 632902 - DNA, 25 bp, Homo sapien
aggaaggctggtcggtgccctgcgg

SEQ ID NO: 632903 - DNA, 25 bp, Homo sapien
aggctggtcggtgccctgcggaccc

SEQ ID NO: 632904 - DNA, 25 bp, Homo sapien
gaaggctggtcggtgccctgcggac

SEQ ID NO: 632905 - DNA, 25 bp, Homo sapien
gggagcagaggtgggtccgcctcag

SEQ ID NO: 632906 - DNA, 25 bp, Homo sapien
gagcagaggtgggtccgcctcagta

SEQ ID NO: 632907 - DNA, 25 bp, Homo sapien
agaggtgggtccgcctcagtaggga

SEQ ID NO: 632908 - DNA, 25 bp, Homo sapien
gcagaggtgggtccgcctcagtagg

SEQ ID NO: 632909 - DNA, 25 bp, Homo sapien
tgctgctgcgcgggccccggtgcag

SEQ ID NO: 632910 - DNA, 25 bp, Homo sapien
cccggtgcagctcgtgcagtctggt

SEQ ID NO: 632911 - DNA, 25 bp, Homo sapien
agggcagagttcactccgggcaggg

SEQ ID NO: 632912 - DNA, 25 bp, Homo sapien
gttggcacgcgctgcacagtaagcc

SEQ ID NO: 632913 - DNA, 25 bp, Homo sapien
gcaggagcgggtctggcccaggggt

SEQ ID NO: 632914 - DNA, 25 bp, Homo sapien
tctggcccaggggttggcacgcgct

SEQ ID NO: 632915 - DNA, 25 bp, Homo sapien
gaggccagcgcaccctgcggtggct

SEQ ID NO: 632916 - DNA, 25 bp, Homo sapien
cggtccggtgatgtccctggacacc

SEQ ID NO: 632917 - DNA, 25 bp, Homo sapien
cagccccacgttggaataggtggcc

SEQ ID NO: 632918 - DNA, 25 bp, Homo sapien
gctgcctgcggtccggtgatgtccc

SEQ ID NO: 632919 - DNA, 25 bp, Homo sapien
gggtcacctcagtcttcccctgctg

SEQ ID NO: 632920 - DNA, 25 bp, Homo sapien
tgcgcttctggacgcgggcatactc

SEQ ID NO: 632921 - DNA, 25 bp, Homo sapien
ggactgcgatgggtccctttgcgct

SEQ ID NO: 632922 - DNA, 25 bp, Homo sapien
tggccgccaggctgaccccgggaag

SEQ ID NO: 632923 - DNA, 25 bp, Homo sapien
cagctcccggatgctctcatacacg

SEQ ID NO: 632924 - DNA, 25 bp, Homo sapien
catacacgttttccagggggccgct

SEQ ID NO: 632925 - DNA, 25 bp, Homo sapien
ccctgagcgggagggtctggtaggc

SEQ ID NO: 632926 - DNA, 25 bp, Homo sapien
tgggtccctccttttaggcttgcag

SEQ ID NO: 632927 - DNA, 25 bp, Homo sapien
ctggaagcagggggcgtcccagccc

SEQ ID NO: 632928 - DNA, 25 bp, Homo sapien
cagctggaagcagggggcgtcccag

SEQ ID NO: 632929 - DNA, 25 bp, Homo sapien
tccagcccctccctaggctggggca

SEQ ID NO: 632930 - DNA, 25 bp, Homo sapien
agcccctccctaggctggggcagct

SEQ ID NO: 632931 - DNA, 25 bp, Homo sapien
tcagggcagggaggcagggaggggt

SEQ ID NO: 632932 - DNA, 25 bp, Homo sapien
gaggaaggagcacaggtccttgagt

SEQ ID NO: 632933 - DNA, 25 bp, Homo sapien
tctggaggaaggagcacaggtcctt

SEQ ID NO: 632934 - DNA, 25 bp, Homo sapien
tggaggaaggagcacaggtccttga

SEQ ID NO: 632935 - DNA, 25 bp, Homo sapien
ggaaggagcacaggtccttgagtgt

SEQ ID NO: 632936 - DNA, 25 bp, Homo sapien
aggacctcacggacctcacgggctg

SEQ ID NO: 632937 - DNA, 25 bp, Homo sapien
acgcgggccttctctggagcccggg

SEQ ID NO: 632938 - DNA, 25 bp, Homo sapien
tgcgctggcgctttatttagacgcg

SEQ ID NO: 632939 - DNA, 25 bp, Homo sapien
gggaggccgcggctgtcagagcggc

SEQ ID NO: 632940 - DNA, 25 bp, Homo sapien
ctgactctcaggacgcggccccggg

SEQ ID NO: 632941 - DNA, 25 bp, Homo sapien
gctgactctcaggacgcggccccgg

SEQ ID NO: 632942 - DNA, 25 bp, Homo sapien
cagcggcgagggctgactctcagga

SEQ ID NO: 632943 - DNA, 25 bp, Homo sapien
ctcggcccgcagcgcactggggtcc

SEQ ID NO: 632944 - DNA, 25 bp, Homo sapien
tcggcccgcagcgcactggggtccc

SEQ ID NO: 632945 - DNA, 25 bp, Homo sapien
gcagactcagcggaggcggtggccg

SEQ ID NO: 632946 - DNA, 25 bp, Homo sapien
gggcccgaagtttgggcagcactga

SEQ ID NO: 632947 - DNA, 25 bp, Homo sapien
ctcgaaaaccggctgcggccggtgt

SEQ ID NO: 632948 - DNA, 25 bp, Homo sapien
gacgccatctttgcagcgagagaaa

SEQ ID NO: 632949 - DNA, 25 bp, Homo sapien
ctgcggccgcgcgaactccaagccc

SEQ ID NO: 632950 - DNA, 25 bp, Homo sapien
tccaagcccgcgaagccgccgccca

SEQ ID NO: 632951 - DNA, 25 bp, Homo sapien
cgctgggacggggatgtgcgccgac

SEQ ID NO: 632952 - DNA, 25 bp, Homo sapien
gggatgtgcgccgacggagtccggg

SEQ ID NO: 632953 - DNA, 25 bp, Homo sapien
agggattcctggacagtcgccccat

SEQ ID NO: 632954 - DNA, 25 bp, Homo sapien
tgagttctccacatcgcgggcttgg

SEQ ID NO: 632955 - DNA, 25 bp, Homo sapien
taaccagggttgtgcaacagcagct

SEQ ID NO: 632956 - DNA, 25 bp, Homo sapien
gactcccagtcatcgatcatttctg

SEQ ID NO: 632957 - DNA, 25 bp, Homo sapien
ctcgtccagccgggcttttcctggg

SEQ ID NO: 632958 - DNA, 25 bp, Homo sapien
gctgaaggctgcaaccggggccccc

SEQ ID NO: 632959 - DNA, 25 bp, Homo sapien
tgagggtgcgggagtccattttaga

SEQ ID NO: 632960 - DNA, 25 bp, Homo sapien
ccacacccctaaatgcagacatctg

SEQ ID NO: 632961 - DNA, 25 bp, Homo sapien
ctgagggtgcgggagtccattttag

SEQ ID NO: 632962 - DNA, 25 bp, Homo sapien
cccacacccctaaatgcagacatct

SEQ ID NO: 632963 - DNA, 25 bp, Homo sapien
caggaaagggttggcagacgtgtgt

SEQ ID NO: 632964 - DNA, 25 bp, Homo sapien
tcaccaagtccggtgagactggtgg

SEQ ID NO: 632965 - DNA, 25 bp, Homo sapien
gactggtgggcagagcgtcttggag

SEQ ID NO: 632966 - DNA, 25 bp, Homo sapien
cgtgtgtggccagccgcgtggaggt

SEQ ID NO: 632967 - DNA, 25 bp, Homo sapien
agaggactggtcactggccaggtcc

SEQ ID NO: 632968 - DNA, 25 bp, Homo sapien
ggtggacggagaggactggtcactg

SEQ ID NO: 632969 - DNA, 25 bp, Homo sapien
cggagaggactggtcactggccagg

SEQ ID NO: 632970 - DNA, 25 bp, Homo sapien
tggacggagaggactggtcactggc

SEQ ID NO: 632971 - DNA, 25 bp, Homo sapien
tcagccgccacacccgcccctccct

SEQ ID NO: 632972 - DNA, 25 bp, Homo sapien
agggtcaggctcagccgccacaccc

SEQ ID NO: 632973 - DNA, 25 bp, Homo sapien
gcagcaacaggggccagggtcaggc

SEQ ID NO: 632974 - DNA, 25 bp, Homo sapien
gggccagggtcaggctcagccgcca

SEQ ID NO: 632975 - DNA, 25 bp, Homo sapien
agacactggaacatgacctgggccg

SEQ ID NO: 632976 - DNA, 25 bp, Homo sapien
ccaggtgcaccaggcggatgtgtct

SEQ ID NO: 632977 - DNA, 25 bp, Homo sapien
actggaacatgacctgggccgggct

SEQ ID NO: 632978 - DNA, 25 bp, Homo sapien
tctgcatcgccgacgccgtgctcag

SEQ ID NO: 632979 - DNA, 25 bp, Homo sapien
gccgggcctcacaaccccagccaac

SEQ ID NO: 632980 - DNA, 25 bp, Homo sapien
ctcacaaccccagccaacccgcagg

SEQ ID NO: 632981 - DNA, 25 bp, Homo sapien
agtgggagctgaaggggtggcctgg

SEQ ID NO: 632982 - DNA, 25 bp, Homo sapien
cctggccgggcctcacaaccccagc

SEQ ID NO: 632983 - DNA, 25 bp, Homo sapien
actctgctcaggctctgcctgcctc

SEQ ID NO: 632984 - DNA, 25 bp, Homo sapien
atcactctgctcaggctctgcctgc

SEQ ID NO: 632985 - DNA, 25 bp, Homo sapien
tcactctgctcaggctctgcctgcc

SEQ ID NO: 632986 - DNA, 25 bp, Homo sapien
catcactctgctcaggctctgcctg

SEQ ID NO: 632987 - DNA, 25 bp, Homo sapien
gctggacagcccgtcggtcagcgtg

SEQ ID NO: 632988 - DNA, 25 bp, Homo sapien
catccagctctgtgtagtagaagtc

SEQ ID NO: 632989 - DNA, 25 bp, Homo sapien
tcggtcagcgtgtccacaccaacat

SEQ ID NO: 632990 - DNA, 25 bp, Homo sapien
ccagctctgtgtagtagaagtcctc

SEQ ID NO: 632991 - DNA, 25 bp, Homo sapien
gttagcaacggtgctcaggacaggg

SEQ ID NO: 632992 - DNA, 25 bp, Homo sapien
gactgggggttagcaacggtgctca

SEQ ID NO: 632993 - DNA, 25 bp, Homo sapien
cactgtgacaggactgggggttagc

SEQ ID NO: 632994 - DNA, 25 bp, Homo sapien
caggactgggggttagcaacggtgc

SEQ ID NO: 632995 - DNA, 25 bp, Homo sapien
ggagacacagccagggcttcactcc

SEQ ID NO: 632996 - DNA, 25 bp, Homo sapien
gacccgccccagctgccacccgtgg

SEQ ID NO: 632997 - DNA, 25 bp, Homo sapien
agctgccacccgtggcctcacccac

SEQ ID NO: 632998 - DNA, 25 bp, Homo sapien
ctacagggagacacagccagggctt

SEQ ID NO: 632999 - DNA, 25 bp, Homo sapien
ctcagggtgactccgatcctggagg

SEQ ID NO: 633000 - DNA, 25 bp, Homo sapien
aggctccgacctccgtgggctgcgg

SEQ ID NO: 633001 - DNA, 25 bp, Homo sapien
actccgatcctggaggacaaggcgg

SEQ ID NO: 633002 - DNA, 25 bp, Homo sapien
cagggtgactccgatcctggaggac

SEQ ID NO: 633003 - DNA, 25 bp, Homo sapien
tgcggggggtcacaggacatggggt

SEQ ID NO: 633004 - DNA, 25 bp, Homo sapien
gctgtgcaccagaggtcccggcgct

SEQ ID NO: 633005 - DNA, 25 bp, Homo sapien
ccggcacttcttcgcgtcgccgcgg

SEQ ID NO: 633006 - DNA, 25 bp, Homo sapien
ggcgctccatgccatacaccttccg

SEQ ID NO: 633007 - DNA, 25 bp, Homo sapien
tacaccttccggcacttcttcgcgt

SEQ ID NO: 633008 - DNA, 25 bp, Homo sapien
cccgagagccgttgagttaagtgcg

SEQ ID NO: 633009 - DNA, 25 bp, Homo sapien
gctgggcccataacacccttgataa

SEQ ID NO: 633010 - DNA, 25 bp, Homo sapien
ggcactttgagtggtgggacccctc

SEQ ID NO: 633011 - DNA, 25 bp, Homo sapien
cttgataaatctacgggccgacagg

SEQ ID NO: 633012 - DNA, 25 bp, Homo sapien
taatcgctcggtgggaaatcatggc

SEQ ID NO: 633013 - DNA, 25 bp, Homo sapien
ctgtgacgggattagcttagacatc

SEQ ID NO: 633014 - DNA, 25 bp, Homo sapien
aagtttctgcctaggcgcctgtgcg

SEQ ID NO: 633015 - DNA, 25 bp, Homo sapien
cagatgcctcctgcgtctcagatga

SEQ ID NO: 633016 - DNA, 25 bp, Homo sapien
tcaacatgctttcaacctgtcaaca

SEQ ID NO: 633017 - DNA, 25 bp, Homo sapien
aaaaaagggcagtgtttgaagattg

SEQ ID NO: 633018 - DNA, 25 bp, Homo sapien
gtgttttgtatgcagcccttttaga

SEQ ID NO: 633019 - DNA, 25 bp, Homo sapien
gacatgtgcgactcttaagaaagcc

SEQ ID NO: 633020 - DNA, 25 bp, Homo sapien
gaactacttgtagtgagggtgctgt

SEQ ID NO: 633021 - DNA, 25 bp, Homo sapien
aaagccatacttaatggtggtggtt

SEQ ID NO: 633022 - DNA, 25 bp, Homo sapien
cagggctacgtagggaactgactca

SEQ ID NO: 633023 - DNA, 25 bp, Homo sapien
caggtgagcacgtccatctcaggag

SEQ ID NO: 633024 - DNA, 25 bp, Homo sapien
gccgactgaagagtgtgggatttcc

SEQ ID NO: 633025 - DNA, 25 bp, Homo sapien
ccccaagtgtttgctgcgtggcaga

SEQ ID NO: 633026 - DNA, 25 bp, Homo sapien
acaggccaccactgcggtgctgtgc

SEQ ID NO: 633027 - DNA, 25 bp, Homo sapien
caggccaccactgcggtgctgtgcc

SEQ ID NO: 633028 - DNA, 25 bp, Homo sapien
caggacctgcccgtgtgaagacccc

SEQ ID NO: 633029 - DNA, 25 bp, Homo sapien
tgtgctgtggtgcaccgcctggctt

SEQ ID NO: 633030 - DNA, 25 bp, Homo sapien
gctgcctagactcacagcctcggga

SEQ ID NO: 633031 - DNA, 25 bp, Homo sapien
aaaagcaaaggtcccacggtgtgtg

SEQ ID NO: 633032 - DNA, 25 bp, Homo sapien
tgccacggcctgtcttctcgttcag

SEQ ID NO: 633033 - DNA, 25 bp, Homo sapien
cactcgaagaaactatatagggttg

SEQ ID NO: 633034 - DNA, 25 bp, Homo sapien
ctcgaagaaactatatagggttgtt

SEQ ID NO: 633035 - DNA, 25 bp, Homo sapien
atttttctcactcgaagaaactata

SEQ ID NO: 633036 - DNA, 25 bp, Homo sapien
tctcactcgaagaaactatataggg

SEQ ID NO: 633037 - DNA, 25 bp, Homo sapien
cctgacaaggacttcgcctggctct

SEQ ID NO: 633038 - DNA, 25 bp, Homo sapien
gaagggagagcacggtcctaagtcc

SEQ ID NO: 633039 - DNA, 25 bp, Homo sapien
gagcaggtgcagagttttacagaca

SEQ ID NO: 633040 - DNA, 25 bp, Homo sapien
cctggcttggacacgtgatgggcct

SEQ ID NO: 633041 - DNA, 25 bp, Homo sapien
gcgtgacacagctcactacaacttt

SEQ ID NO: 633042 - DNA, 25 bp, Homo sapien
tcactacaactttgacctcccgggc

SEQ ID NO: 633043 - DNA, 25 bp, Homo sapien
tgacacagctcactacaactttgac

SEQ ID NO: 633044 - DNA, 25 bp, Homo sapien
cactacaactttgacctcccgggct

SEQ ID NO: 633045 - DNA, 25 bp, Homo sapien
cagatcgacacctctcatggcgtgg

SEQ ID NO: 633046 - DNA, 25 bp, Homo sapien
ccagagttggctcccgctggcatga

SEQ ID NO: 633047 - DNA, 25 bp, Homo sapien
tttgggacagaactgcgggtgcctc

SEQ ID NO: 633048 - DNA, 25 bp, Homo sapien
gagccggcgtttgctttgacctcag

SEQ ID NO: 633049 - DNA, 25 bp, Homo sapien
gggttggccagctgatcaaagcgtt

SEQ ID NO: 633050 - DNA, 25 bp, Homo sapien
gatcaaagcgttcaaacacctgcct

SEQ ID NO: 633051 - DNA, 25 bp, Homo sapien
tcatgggtggagacctcgggcattt

SEQ ID NO: 633052 - DNA, 25 bp, Homo sapien
gttcaaacacctgcctccagcgaga

SEQ ID NO: 633053 - DNA, 25 bp, Homo sapien
accctctgttggaatcacttggctc

SEQ ID NO: 633054 - DNA, 25 bp, Homo sapien
tgcagtccagaggtgttcacgctcc

SEQ ID NO: 633055 - DNA, 25 bp, Homo sapien
aaaccctctgttggaatcacttggc

SEQ ID NO: 633056 - DNA, 25 bp, Homo sapien
gaggtgttcacgctccgacttcctc

SEQ ID NO: 633057 - DNA, 25 bp, Homo sapien
ttgcagagaacagttgcagcttgtc

SEQ ID NO: 633058 - DNA, 25 bp, Homo sapien
cgtcaggaggcgttttgcagagaac

SEQ ID NO: 633059 - DNA, 25 bp, Homo sapien
gcttctgaccagctcgttactggag

SEQ ID NO: 633060 - DNA, 25 bp, Homo sapien
tttcctgcggggacggcttctgacc

SEQ ID NO: 633061 - DNA, 25 bp, Homo sapien
tgggctggcgcatcgtgcaggaaat

SEQ ID NO: 633062 - DNA, 25 bp, Homo sapien
aacaaacagcgtccggccgtggcaa

SEQ ID NO: 633063 - DNA, 25 bp, Homo sapien
tgcccagttctcctcgtcatgaatg

SEQ ID NO: 633064 - DNA, 25 bp, Homo sapien
catgaatgcgccgtggttcaacaaa

SEQ ID NO: 633065 - DNA, 25 bp, Homo sapien
taagtctctcaacaccgtgcgggag

SEQ ID NO: 633066 - DNA, 25 bp, Homo sapien
tctgacgccgtctgctgatctgaag

SEQ ID NO: 633067 - DNA, 25 bp, Homo sapien
tgatctgaagcgttgaactcacgga

SEQ ID NO: 633068 - DNA, 25 bp, Homo sapien
tcattgcagcttgtggcgtagcccc

SEQ ID NO: 633069 - DNA, 25 bp, Homo sapien
tcttcaaggcgcacaagaacgtcct

SEQ ID NO: 633070 - DNA, 25 bp, Homo sapien
tacttcaagacgctctactgccagg

SEQ ID NO: 633071 - DNA, 25 bp, Homo sapien
tactgccaggtgcagaagacgtcgg

SEQ ID NO: 633072 - DNA, 25 bp, Homo sapien
ccagcaggaacgtcatcgaggtgat

SEQ ID NO: 633073 - DNA, 25 bp, Homo sapien
gtaccaccggtctcgctgtcgaaag

SEQ ID NO: 633074 - DNA, 25 bp, Homo sapien
tctcgctgtcgaaagacgactctgc

SEQ ID NO: 633075 - DNA, 25 bp, Homo sapien
gatgtggatagtaccaccggtctcg

SEQ ID NO: 633076 - DNA, 25 bp, Homo sapien
tggagatgatgtggatagtaccacc

SEQ ID NO: 633077 - DNA, 25 bp, Homo sapien
cgttcagcttccgtgagtgtcccct

SEQ ID NO: 633078 - DNA, 25 bp, Homo sapien
cctgtgggaaggtccgttcagcttc

SEQ ID NO: 633079 - DNA, 25 bp, Homo sapien
ctgtgggaaggtccgttcagcttcc

SEQ ID NO: 633080 - DNA, 25 bp, Homo sapien
ccgttcagcttccgtgagtgtcccc

SEQ ID NO: 633081 - DNA, 25 bp, Homo sapien
cgcgctgtccgcggggtttcctcac

SEQ ID NO: 633082 - DNA, 25 bp, Homo sapien
cccttggctccaccgagtctgcacc

SEQ ID NO: 633083 - DNA, 25 bp, Homo sapien
cgaacgtggagagccccttgagtgc

SEQ ID NO: 633084 - DNA, 25 bp, Homo sapien
tcggccaagcccatggcgaagtgcc

SEQ ID NO: 633085 - DNA, 25 bp, Homo sapien
aacgtggaaggcgaacgtggagagc

SEQ ID NO: 633086 - DNA, 25 bp, Homo sapien
tatggggggacacaggcaagatgtg

SEQ ID NO: 633087 - DNA, 25 bp, Homo sapien
caggcctgtgccgaaccccaggacc

SEQ ID NO: 633088 - DNA, 25 bp, Homo sapien
tgttgctcccttgggcataatatgg

SEQ ID NO: 633089 - DNA, 25 bp, Homo sapien
tctggcaggtttgctgaggaccgcg

SEQ ID NO: 633090 - DNA, 25 bp, Homo sapien
ttcccagcggggtagagctcacctg

SEQ ID NO: 633091 - DNA, 25 bp, Homo sapien
cttcccagcggggtagagctcacct

SEQ ID NO: 633092 - DNA, 25 bp, Homo sapien
catttttagtgcatccagtaagatc

SEQ ID NO: 633093 - DNA, 25 bp, Homo sapien
ggcatgtgagaccatgatcagctca

SEQ ID NO: 633094 - DNA, 25 bp, Homo sapien
ccttcagctcagacttgggctctcg

SEQ ID NO: 633095 - DNA, 25 bp, Homo sapien
gctgtggccccttttcagaatagca

SEQ ID NO: 633096 - DNA, 25 bp, Homo sapien
tgctcacctgcacctactgcacctg

SEQ ID NO: 633097 - DNA, 25 bp, Homo sapien
tgcacctgcaccttctgcacttgtg

SEQ ID NO: 633098 - DNA, 25 bp, Homo sapien
tcactgcacctatgcccacctgtac

SEQ ID NO: 633099 - DNA, 25 bp, Homo sapien
tgcacctgcactcactgcacctatg

SEQ ID NO: 633100 - DNA, 25 bp, Homo sapien
gtgtccactgtacctgtgcccactg

SEQ ID NO: 633101 - DNA, 25 bp, Homo sapien
tcacctgcactcactgcacctatgc

SEQ ID NO: 633102 - DNA, 25 bp, Homo sapien
gcccacctgtgtccactgtacctgt

SEQ ID NO: 633103 - DNA, 25 bp, Homo sapien
tgcacctgtgcccactgtacctgca

SEQ ID NO: 633104 - DNA, 25 bp, Homo sapien
gatgctttgagtatcttgggtgatg

SEQ ID NO: 633105 - DNA, 25 bp, Homo sapien
tgctttgagtatcttgggtgatgtg

SEQ ID NO: 633106 - DNA, 25 bp, Homo sapien
atgctttgagtatcttgggtgatgt

SEQ ID NO: 633107 - DNA, 25 bp, Homo sapien
gctttgagtatcttgggtgatgtga

SEQ ID NO: 633108 - DNA, 25 bp, Homo sapien
cagaggtggcaagtaaccagcgtca

SEQ ID NO: 633109 - DNA, 25 bp, Homo sapien
taactaatgcattcagccagtgtgc

SEQ ID NO: 633110 - DNA, 25 bp, Homo sapien
cactgtatccttgacgctgctgtta

SEQ ID NO: 633111 - DNA, 25 bp, Homo sapien
tcacgtttgcaggtttaggacttca

SEQ ID NO: 633112 - DNA, 25 bp, Homo sapien
tgcgctctctgttcgcttaatgtta

SEQ ID NO: 633113 - DNA, 25 bp, Homo sapien
agggctggctcgtcttcttcgggat

SEQ ID NO: 633114 - DNA, 25 bp, Homo sapien
gttattgataacaacctcattttgt

SEQ ID NO: 633115 - DNA, 25 bp, Homo sapien
atccattagcatcccgggtgcgctc

SEQ ID NO: 633116 - DNA, 25 bp, Homo sapien
cctgggacactgttgctgtttttgc

SEQ ID NO: 633117 - DNA, 25 bp, Homo sapien
cttcagtgtggaaattgctagagac

SEQ ID NO: 633118 - DNA, 25 bp, Homo sapien
tctggcccctgggacactgttgctg

SEQ ID NO: 633119 - DNA, 25 bp, Homo sapien
ttgctttcttcagtgtggaaattgc

SEQ ID NO: 633120 - DNA, 25 bp, Homo sapien
gacaaagcggctgtcagtgctccga

SEQ ID NO: 633121 - DNA, 25 bp, Homo sapien
ggtgaaatgcgtgtcccgtgactga

SEQ ID NO: 633122 - DNA, 25 bp, Homo sapien
tcggaaatcattagcagacaccctc

SEQ ID NO: 633123 - DNA, 25 bp, Homo sapien
taacattcagggaggccgagaagtg

SEQ ID NO: 633124 - DNA, 25 bp, Homo sapien
agccgagatcgtgctgtggcactcc

SEQ ID NO: 633125 - DNA, 25 bp, Homo sapien
gagccgagatcgtgctgtggcactc

SEQ ID NO: 633126 - DNA, 25 bp, Homo sapien
tgtagtcccagatcttcgggaggat

SEQ ID NO: 633127 - DNA, 25 bp, Homo sapien
gtcccagatcttcgggaggatgagg

SEQ ID NO: 633128 - DNA, 25 bp, Homo sapien
gctgggttttgcatgcgtgtacacg

SEQ ID NO: 633129 - DNA, 25 bp, Homo sapien
tatcggttccgcttgatcagggctg

SEQ ID NO: 633130 - DNA, 25 bp, Homo sapien
tgtacacgtgtcagctctagggaga

SEQ ID NO: 633131 - DNA, 25 bp, Homo sapien
tggtgtaggactgagcccagccttg

SEQ ID NO: 633132 - DNA, 25 bp, Homo sapien
tggccgtgtcctgtgctcgccgtgt

SEQ ID NO: 633133 - DNA, 25 bp, Homo sapien
ctcctaacagcagccgttgactgat

SEQ ID NO: 633134 - DNA, 25 bp, Homo sapien
cagccgttgactgatggtgcatctt

SEQ ID NO: 633135 - DNA, 25 bp, Homo sapien
tgttttcgtgcttgccgggttggcc

SEQ ID NO: 633136 - DNA, 25 bp, Homo sapien
ggcccgtggtctggaattccgagac

SEQ ID NO: 633137 - DNA, 25 bp, Homo sapien
aacacactcataatccactcattgg

SEQ ID NO: 633138 - DNA, 25 bp, Homo sapien
ttatgaagaaactcgaaggcctggt

SEQ ID NO: 633139 - DNA, 25 bp, Homo sapien
tggaggggcacatccagacacacag

SEQ ID NO: 633140 - DNA, 25 bp, Homo sapien
cagagattagaagcttctgagttat

SEQ ID NO: 633141 - DNA, 25 bp, Homo sapien
gcagtgttgattcgccgctttccca

SEQ ID NO: 633142 - DNA, 25 bp, Homo sapien
gttgattcgccgctttcccaactga

SEQ ID NO: 633143 - DNA, 25 bp, Homo sapien
tgattcgccgctttcccaactgact

SEQ ID NO: 633144 - DNA, 25 bp, Homo sapien
ctgtcgcagtgttgattcgccgctt

SEQ ID NO: 633145 - DNA, 25 bp, Homo sapien
ctgcttcccggagagtggattgctg

SEQ ID NO: 633146 - DNA, 25 bp, Homo sapien
cactgtacgtaggaggcagcttttg

SEQ ID NO: 633147 - DNA, 25 bp, Homo sapien
gcgagtcatattccaaaccctgctt

SEQ ID NO: 633148 - DNA, 25 bp, Homo sapien
cagtcatccggtcctggtggagcga

SEQ ID NO: 633149 - DNA, 25 bp, Homo sapien
ctcctgtttcggatgttcgggttgg

SEQ ID NO: 633150 - DNA, 25 bp, Homo sapien
gtgccctgcgtcctccgtccctccc

SEQ ID NO: 633151 - DNA, 25 bp, Homo sapien
gatgttcgggttgggtggactgtta

SEQ ID NO: 633152 - DNA, 25 bp, Homo sapien
ttccactcctgtttcggatgttcgg

SEQ ID NO: 633153 - DNA, 25 bp, Homo sapien
cgattgtagaatctttcatattggc

SEQ ID NO: 633154 - DNA, 25 bp, Homo sapien
ggcattttaattgtatcgattgtag

SEQ ID NO: 633155 - DNA, 25 bp, Homo sapien
tcccgtttgggtaacagactggata

SEQ ID NO: 633156 - DNA, 25 bp, Homo sapien
ggctctattatcagagctaacttcc

SEQ ID NO: 633157 - DNA, 25 bp, Homo sapien
cgcttggaatggagaccggtcgaca

SEQ ID NO: 633158 - DNA, 25 bp, Homo sapien
aatggagaccggtcgacagttggct

SEQ ID NO: 633159 - DNA, 25 bp, Homo sapien
agcaggcgcttggaatggagaccgg

SEQ ID NO: 633160 - DNA, 25 bp, Homo sapien
ccggtcgacagttggctgtggcagc

SEQ ID NO: 633161 - DNA, 25 bp, Homo sapien
gcgggcccctgaagggcaggaccat

SEQ ID NO: 633162 - DNA, 25 bp, Homo sapien
tggtagggcgggcccctgaagggca

SEQ ID NO: 633163 - DNA, 25 bp, Homo sapien
tagggcgggcccctgaagggcagga

SEQ ID NO: 633164 - DNA, 25 bp, Homo sapien
ggcgggcccctgaagggcaggacca

SEQ ID NO: 633165 - DNA, 25 bp, Homo sapien
ttgcagttgccgacccacttagggt

SEQ ID NO: 633166 - DNA, 25 bp, Homo sapien
acagggcatccaagacgtgcgagca

SEQ ID NO: 633167 - DNA, 25 bp, Homo sapien
caacagaaaggaagtacccacaggg

SEQ ID NO: 633168 - DNA, 25 bp, Homo sapien
taacaacgcccacgagaaaggcagt

SEQ ID NO: 633169 - DNA, 25 bp, Homo sapien
tttcagcccagtccgccctgcgact

SEQ ID NO: 633170 - DNA, 25 bp, Homo sapien
ctgcgttccctccacgaagggttgg

SEQ ID NO: 633171 - DNA, 25 bp, Homo sapien
tggctttcagcccagtccgccctgc

SEQ ID NO: 633172 - DNA, 25 bp, Homo sapien
ttggggccatgacccggcagtctct

SEQ ID NO: 633173 - DNA, 25 bp, Homo sapien
gctgtccagcggagggcgggttccc

SEQ ID NO: 633174 - DNA, 25 bp, Homo sapien
cggctccagcagggtgagcccccac

SEQ ID NO: 633175 - DNA, 25 bp, Homo sapien
gagcccccacatccgcagccccacc

SEQ ID NO: 633176 - DNA, 25 bp, Homo sapien
ccaggtcccgagccagtgctccccg

SEQ ID NO: 633177 - DNA, 25 bp, Homo sapien
gactgactccaattccctcagcggg

SEQ ID NO: 633178 - DNA, 25 bp, Homo sapien
gcacctgagccccaattctcccagc

SEQ ID NO: 633179 - DNA, 25 bp, Homo sapien
gggcagttgctccacggaacaaagg

SEQ ID NO: 633180 - DNA, 25 bp, Homo sapien
cctctcgctggatccggaggcagtg

SEQ ID NO: 633181 - DNA, 25 bp, Homo sapien
ggtgaggttggatgacctgagtgga

SEQ ID NO: 633182 - DNA, 25 bp, Homo sapien
ggagggtgaggttggatgacctgag

SEQ ID NO: 633183 - DNA, 25 bp, Homo sapien
gagggtgaggttggatgacctgagt

SEQ ID NO: 633184 - DNA, 25 bp, Homo sapien
agggtgaggttggatgacctgagtg

SEQ ID NO: 633185 - DNA, 25 bp, Homo sapien
attccgccccgtgaggcgatccgct

SEQ ID NO: 633186 - DNA, 25 bp, Homo sapien
ccgtgaggcgatccgctccggcttt

SEQ ID NO: 633187 - DNA, 25 bp, Homo sapien
gatccgctccggcttttcacgcgtt

SEQ ID NO: 633188 - DNA, 25 bp, Homo sapien
ttttcacgcgttgcccctcggagac

SEQ ID NO: 633189 - DNA, 25 bp, Homo sapien
cacttctgctgtcggacacacgggc

SEQ ID NO: 633190 - DNA, 25 bp, Homo sapien
tcactggctcgtacagaaacagacc

SEQ ID NO: 633191 - DNA, 25 bp, Homo sapien
aggtgtgtcctgagcgccactgcag

SEQ ID NO: 633192 - DNA, 25 bp, Homo sapien
tacgtacagagagtcttatctaggg

SEQ ID NO: 633193 - DNA, 25 bp, Homo sapien
tgatgaacccaaggttctgcccgtc

SEQ ID NO: 633194 - DNA, 25 bp, Homo sapien
agagatgatgaacccaaggttctgc

SEQ ID NO: 633195 - DNA, 25 bp, Homo sapien
cccagagatgatgaacccaaggttc

SEQ ID NO: 633196 - DNA, 25 bp, Homo sapien
ccacccatgatttgagcagctactg

SEQ ID NO: 633197 - DNA, 25 bp, Homo sapien
cagtcttaggggataccggctcccg

SEQ ID NO: 633198 - DNA, 25 bp, Homo sapien
ccggctcccggacaagccctgatgg

SEQ ID NO: 633199 - DNA, 25 bp, Homo sapien
ggatcgccgcgagaggcacagggca

SEQ ID NO: 633200 - DNA, 25 bp, Homo sapien
gcacagggcagtcttaggggatacc

SEQ ID NO: 633201 - DNA, 25 bp, Homo sapien
gagcggtggccctaacgcccagccg

SEQ ID NO: 633202 - DNA, 25 bp, Homo sapien
catagtgtcgatctcgttgccgtca

SEQ ID NO: 633203 - DNA, 25 bp, Homo sapien
ccttcacgaagcagatgacgcacat

SEQ ID NO: 633204 - DNA, 25 bp, Homo sapien
ggtagatcttgaacacgcgcaccag

SEQ ID NO: 633205 - DNA, 25 bp, Homo sapien
tgctggcggcggtccatgaacatag

SEQ ID NO: 633206 - DNA, 25 bp, Homo sapien
aggaacagtgcgaggcgccggcgcc

SEQ ID NO: 633207 - DNA, 25 bp, Homo sapien
tcttcgcagcgtgcacggtaggagc

SEQ ID NO: 633208 - DNA, 25 bp, Homo sapien
agggctgaagtgagtcgcctccacg

SEQ ID NO: 633209 - DNA, 25 bp, Homo sapien
acgttcttgaggtgcttccgagcca

SEQ ID NO: 633210 - DNA, 25 bp, Homo sapien
tggggaggtgaaccaagaaggccag

SEQ ID NO: 633211 - DNA, 25 bp, Homo sapien
ttcaagtgcgtgatcccccactggg

SEQ ID NO: 633212 - DNA, 25 bp, Homo sapien
caatggttggcggtatggggaggtg

SEQ ID NO: 633213 - DNA, 25 bp, Homo sapien
caggagttcaagtgcgtgatccccc

SEQ ID NO: 633214 - DNA, 25 bp, Homo sapien
taacctttcattcccttaggagctg

SEQ ID NO: 633215 - DNA, 25 bp, Homo sapien
caaaagtatttgtaggaggaagaga

SEQ ID NO: 633216 - DNA, 25 bp, Homo sapien
aaggagagcaccaagtccccgtgtt

SEQ ID NO: 633217 - DNA, 25 bp, Homo sapien
gtcagaacgcccctgtgaaggaagg

SEQ ID NO: 633218 - DNA, 25 bp, Homo sapien
tacgcgggttactctgaaaaagatc

SEQ ID NO: 633219 - DNA, 25 bp, Homo sapien
aaaaagatcgcgattcgtcccctcg

SEQ ID NO: 633220 - DNA, 25 bp, Homo sapien
gatactctggaacaggatgcctgac

SEQ ID NO: 633221 - DNA, 25 bp, Homo sapien
gttgaagcgcaaccaggatactctg

SEQ ID NO: 633222 - DNA, 25 bp, Homo sapien
tccggaccgctgtcgcgggcgctat

SEQ ID NO: 633223 - DNA, 25 bp, Homo sapien
cgccgggagaagctcgccgcgtaca

SEQ ID NO: 633224 - DNA, 25 bp, Homo sapien
gccgcgtacacactagccagcggaa

SEQ ID NO: 633225 - DNA, 25 bp, Homo sapien
cagctccgcggcgtttcgtaatccg

SEQ ID NO: 633226 - DNA, 25 bp, Homo sapien
aggaagcggtctgggccgcgggcaa

SEQ ID NO: 633227 - DNA, 25 bp, Homo sapien
gcgggcaaaaaacacaccacgacca

SEQ ID NO: 633228 - DNA, 25 bp, Homo sapien
tcataagcttcgaggtcagtggccc

SEQ ID NO: 633229 - DNA, 25 bp, Homo sapien
ccacgaccatcataagcttcgaggt

SEQ ID NO: 633230 - DNA, 25 bp, Homo sapien
gacaaaatgaggccacaaagtgtca

SEQ ID NO: 633231 - DNA, 25 bp, Homo sapien
acaaaatgaggccacaaagtgtcaa

SEQ ID NO: 633232 - DNA, 25 bp, Homo sapien
caaaatgaggccacaaagtgtcaaa

SEQ ID NO: 633233 - DNA, 25 bp, Homo sapien
cagacctttgttaggagaattcagg

SEQ ID NO: 633234 - DNA, 25 bp, Homo sapien
ctgtgtcgacaggaacatccgtcat

SEQ ID NO: 633235 - DNA, 25 bp, Homo sapien
gtcagacagcagacctttgttagga

SEQ ID NO: 633236 - DNA, 25 bp, Homo sapien
gaacatccgtcatggagtcagacag

SEQ ID NO: 633237 - DNA, 25 bp, Homo sapien
cagcctctgtcagaccctcaacagc

SEQ ID NO: 633238 - DNA, 25 bp, Homo sapien
tctgtcagaccctcaacagcaggag

SEQ ID NO: 633239 - DNA, 25 bp, Homo sapien
ctctgtcagaccctcaacagcagga

SEQ ID NO: 633240 - DNA, 25 bp, Homo sapien
gcctctgtcagaccctcaacagcag

SEQ ID NO: 633241 - DNA, 25 bp, Homo sapien
agcctcctcttgagctctccacagt

SEQ ID NO: 633242 - DNA, 25 bp, Homo sapien
ggacctggcgcagagtgacaatttc

SEQ ID NO: 633243 - DNA, 25 bp, Homo sapien
gcagagtgacaatttcctcttccac

SEQ ID NO: 633244 - DNA, 25 bp, Homo sapien
cctcttgagctctccacagtgcctc

SEQ ID NO: 633245 - DNA, 25 bp, Homo sapien
tcaactccacggctgcaactcgtcc

SEQ ID NO: 633246 - DNA, 25 bp, Homo sapien
gtgtggtgcccgttctcttcagccc

SEQ ID NO: 633247 - DNA, 25 bp, Homo sapien
ggcacgtgtggtgcccgttctcttc

SEQ ID NO: 633248 - DNA, 25 bp, Homo sapien
caactcgtccctgggcatgacgacg

SEQ ID NO: 633249 - DNA, 25 bp, Homo sapien
aagtttctcagaagttttcacatag

SEQ ID NO: 633250 - DNA, 25 bp, Homo sapien
tctgactgggtcactttctcattcc

SEQ ID NO: 633251 - DNA, 25 bp, Homo sapien
ttctcattccactctccaagtttct

SEQ ID NO: 633252 - DNA, 25 bp, Homo sapien
cactctccaagtttctcagaagttt

SEQ ID NO: 633253 - DNA, 25 bp, Homo sapien
ctagaacaccctgctcaagccgggt

SEQ ID NO: 633254 - DNA, 25 bp, Homo sapien
tagaacaccctgctcaagccgggtg

SEQ ID NO: 633255 - DNA, 25 bp, Homo sapien
aacaccctgctcaagccgggtgcag

SEQ ID NO: 633256 - DNA, 25 bp, Homo sapien
ccctagaacaccctgctcaagccgg

SEQ ID NO: 633257 - DNA, 25 bp, Homo sapien
cctgaagctgactaggagaggcacc

SEQ ID NO: 633258 - DNA, 25 bp, Homo sapien
gccaggaagagcacgcgccatggcc

SEQ ID NO: 633259 - DNA, 25 bp, Homo sapien
acaaacacgtgggtcaggatgcagg

SEQ ID NO: 633260 - DNA, 25 bp, Homo sapien
tggaggtacatctacagcccatctc

SEQ ID NO: 633261 - DNA, 25 bp, Homo sapien
tgtggccgcattgcagcctcatggg

SEQ ID NO: 633262 - DNA, 25 bp, Homo sapien
tccagggcgccaatagctgaaagga

SEQ ID NO: 633263 - DNA, 25 bp, Homo sapien
gaacacagctgctctcgcattcaga

SEQ ID NO: 633264 - DNA, 25 bp, Homo sapien
gacatgacccactgagaatgtggcc

SEQ ID NO: 633265 - DNA, 25 bp, Homo sapien
cagccattagtccagggagacccat

SEQ ID NO: 633266 - DNA, 25 bp, Homo sapien
caagggaacctcctctagaaacagg

SEQ ID NO: 633267 - DNA, 25 bp, Homo sapien
taagtaccacccacacaaggaggat

SEQ ID NO: 633268 - DNA, 25 bp, Homo sapien
aagtgaaccagctcataactgcagg

SEQ ID NO: 633269 - DNA, 25 bp, Homo sapien
caacctggagagctggcaaacccag

SEQ ID NO: 633270 - DNA, 25 bp, Homo sapien
gatgactggcgccagagaaggcaca

SEQ ID NO: 633271 - DNA, 25 bp, Homo sapien
aatgatgggccttccggagccctta

SEQ ID NO: 633272 - DNA, 25 bp, Homo sapien
gcggcaccaggtcccaatgatgggc

SEQ ID NO: 633273 - DNA, 25 bp, Homo sapien
tgactacagagaacacgccccattt

SEQ ID NO: 633274 - DNA, 25 bp, Homo sapien
catttgcctgctagagcggacgggc

SEQ ID NO: 633275 - DNA, 25 bp, Homo sapien
tgcctgatacccactaagctcgctt

SEQ ID NO: 633276 - DNA, 25 bp, Homo sapien
gctttctcatctcacaacccaattt

SEQ ID NO: 633277 - DNA, 25 bp, Homo sapien
gaaagagtttcctgagtcttcttgt

SEQ ID NO: 633278 - DNA, 25 bp, Homo sapien
gtgaaagagtttcctgagtcttctt

SEQ ID NO: 633279 - DNA, 25 bp, Homo sapien
aagagtttcctgagtcttcttgtag

SEQ ID NO: 633280 - DNA, 25 bp, Homo sapien
ctgtgaaagagtttcctgagtcttc

SEQ ID NO: 633281 - DNA, 25 bp, Homo sapien
tgtggacagggcagctgaagtcttc

SEQ ID NO: 633282 - DNA, 25 bp, Homo sapien
ccactgtggacagggcagctgaagt

SEQ ID NO: 633283 - DNA, 25 bp, Homo sapien
cagagcccactgtggacagggcagc

SEQ ID NO: 633284 - DNA, 25 bp, Homo sapien
agcccactgtggacagggcagctga

SEQ ID NO: 633285 - DNA, 25 bp, Homo sapien
ttaggaagcctgcacccatctttgc

SEQ ID NO: 633286 - DNA, 25 bp, Homo sapien
gctacagggaggcactccctgagat

SEQ ID NO: 633287 - DNA, 25 bp, Homo sapien
cctttaggaagcctgcacccatctt

SEQ ID NO: 633288 - DNA, 25 bp, Homo sapien
ccatctttgccaggattgggtcaga

SEQ ID NO: 633289 - DNA, 25 bp, Homo sapien
tgtgccagcgtcactgcaacaggaa

SEQ ID NO: 633290 - DNA, 25 bp, Homo sapien
caaatgcccagatcaaaaccctagg

SEQ ID NO: 633291 - DNA, 25 bp, Homo sapien
tgagaccagcattttcgggaagaaa

SEQ ID NO: 633292 - DNA, 25 bp, Homo sapien
taagagtgggcaaacgcctcctgat

SEQ ID NO: 633293 - DNA, 25 bp, Homo sapien
catccagcagcgcaaaggtgtgaaa

SEQ ID NO: 633294 - DNA, 25 bp, Homo sapien
tgaaatgtgccacagcatgacagct

SEQ ID NO: 633295 - DNA, 25 bp, Homo sapien
acacctgtttggagaagccacagca

SEQ ID NO: 633296 - DNA, 25 bp, Homo sapien
atcacgtcagctgagggagcacacg

SEQ ID NO: 633297 - DNA, 25 bp, Homo sapien
tcaacaggaggctctcgcaagatca

SEQ ID NO: 633298 - DNA, 25 bp, Homo sapien
cgcaagatcatgactagcaactgct

SEQ ID NO: 633299 - DNA, 25 bp, Homo sapien
ggaggctctcgcaagatcatgacta

SEQ ID NO: 633300 - DNA, 25 bp, Homo sapien
ggaagaccctccaggacggctcctc

SEQ ID NO: 633301 - DNA, 25 bp, Homo sapien
aaaggagtgtgaaaatggatgagcc

SEQ ID NO: 633302 - DNA, 25 bp, Homo sapien
taaaggagtgtgaaaatggatgagc

SEQ ID NO: 633303 - DNA, 25 bp, Homo sapien
ctaaaggagtgtgaaaatggatgag

SEQ ID NO: 633304 - DNA, 25 bp, Homo sapien
aaggggtgatcccactttcactgcc

SEQ ID NO: 633305 - DNA, 25 bp, Homo sapien
gcctggacgccaggccagttattca

SEQ ID NO: 633306 - DNA, 25 bp, Homo sapien
gctccttttcaggagtaaactcagg

SEQ ID NO: 633307 - DNA, 25 bp, Homo sapien
gtcgatcccacgctgctgctttgtt

SEQ ID NO: 633308 - DNA, 25 bp, Homo sapien
aagaaatcacagattgttctgggcc

SEQ ID NO: 633309 - DNA, 25 bp, Homo sapien
gagagcactgccataggaagctgtg

SEQ ID NO: 633310 - DNA, 25 bp, Homo sapien
cctttgggaggcacacctatgggct

SEQ ID NO: 633311 - DNA, 25 bp, Homo sapien
cctatgggctctcgggtagtaaaca

SEQ ID NO: 633312 - DNA, 25 bp, Homo sapien
atggctggcatacttattgagtggc

SEQ ID NO: 633313 - DNA, 25 bp, Homo sapien
catggctggcatacttattgagtgg

SEQ ID NO: 633314 - DNA, 25 bp, Homo sapien
tcatggctggcatacttattgagtg

SEQ ID NO: 633315 - DNA, 25 bp, Homo sapien
ctcatggctggcatacttattgagt

SEQ ID NO: 633316 - DNA, 25 bp, Homo sapien
tggaaaccccttgactgtgcagctg

SEQ ID NO: 633317 - DNA, 25 bp, Homo sapien
tgtttccgtgaaggctgagaccgtg

SEQ ID NO: 633318 - DNA, 25 bp, Homo sapien
tttaccggcccttagtcatcagagg

SEQ ID NO: 633319 - DNA, 25 bp, Homo sapien
cccaggtcaaaagtgaggtcggcca

SEQ ID NO: 633320 - DNA, 25 bp, Homo sapien
atggtcccaactcggtcctcaaacg

SEQ ID NO: 633321 - DNA, 25 bp, Homo sapien
ctttatggtcccaactcggtcctca

SEQ ID NO: 633322 - DNA, 25 bp, Homo sapien
ccaactcggtcctcaaacgacttga

SEQ ID NO: 633323 - DNA, 25 bp, Homo sapien
gtcctcaaacgacttgaaggtcgca

SEQ ID NO: 633324 - DNA, 25 bp, Homo sapien
caagaccatcaaacagtccaggtac

SEQ ID NO: 633325 - DNA, 25 bp, Homo sapien
aagaccatcaaacagtccaggtaca

SEQ ID NO: 633326 - DNA, 25 bp, Homo sapien
tatgtaacacgaacactgctcagca

SEQ ID NO: 633327 - DNA, 25 bp, Homo sapien
caattatacaaagggagagtggact

SEQ ID NO: 633328 - DNA, 25 bp, Homo sapien
tcagcatggccaagaaggtaccagg

SEQ ID NO: 633329 - DNA, 25 bp, Homo sapien
ggtctccagagaacgatgccaaatg

SEQ ID NO: 633330 - DNA, 25 bp, Homo sapien
aggggcttgtcaccactccccgctg

SEQ ID NO: 633331 - DNA, 25 bp, Homo sapien
gaagggaggttgtcactgccgttct

SEQ ID NO: 633332 - DNA, 25 bp, Homo sapien
ttagaaaggtgcgggatccgacagg

SEQ ID NO: 633333 - DNA, 25 bp, Homo sapien
gttgtcactgccgttctctctgtca

SEQ ID NO: 633334 - DNA, 25 bp, Homo sapien
tcaaattcatgcaaacgcggcagcc

SEQ ID NO: 633335 - DNA, 25 bp, Homo sapien
ttcgcgtaacaatcaggcagctgct

SEQ ID NO: 633336 - DNA, 25 bp, Homo sapien
tcactgacgaatgtgagccgggcca

SEQ ID NO: 633337 - DNA, 25 bp, Homo sapien
aaaagactgtaacggcaatcctggc

SEQ ID NO: 633338 - DNA, 25 bp, Homo sapien
tggcccctgcatctctgtcgtgtgt

SEQ ID NO: 633339 - DNA, 25 bp, Homo sapien
gacacggctgtcagaggacacttgc

SEQ ID NO: 633340 - DNA, 25 bp, Homo sapien
ccccaagggtgtctgaactgtccgg

SEQ ID NO: 633341 - DNA, 25 bp, Homo sapien
gtcgtgtgtggagtgccatccccaa

SEQ ID NO: 633342 - DNA, 25 bp, Homo sapien
gaaaagatacatcggtcaacacccg

SEQ ID NO: 633343 - DNA, 25 bp, Homo sapien
agatacatcggtcaacacccgcaca

SEQ ID NO: 633344 - DNA, 25 bp, Homo sapien
tattgacaaattacccattattata

SEQ ID NO: 633345 - DNA, 25 bp, Homo sapien
aaggaaaagatacatcggtcaacac

SEQ ID NO: 633346 - DNA, 25 bp, Homo sapien
ccaagggtgcggactcattagggca

SEQ ID NO: 633347 - DNA, 25 bp, Homo sapien
cacaggttggccatataccattctc

SEQ ID NO: 633348 - DNA, 25 bp, Homo sapien
caagacgctgggtctgacctcacag

SEQ ID NO: 633349 - DNA, 25 bp, Homo sapien
tgtcccagcattgaggacctgccct

SEQ ID NO: 633350 - DNA, 25 bp, Homo sapien
gccgagcggaggctccgtccatgaa

SEQ ID NO: 633351 - DNA, 25 bp, Homo sapien
tgggtcccgggtggacacgccatgt

SEQ ID NO: 633352 - DNA, 25 bp, Homo sapien
aggacgtgggctccggcgtgtcgga

SEQ ID NO: 633353 - DNA, 25 bp, Homo sapien
tgcgcatgcgctcagagagccgagc

SEQ ID NO: 633354 - DNA, 25 bp, Homo sapien
cgctccccgattcgcggcgctgctg

SEQ ID NO: 633355 - DNA, 25 bp, Homo sapien
agcggccgacgcactcctcagcctg

SEQ ID NO: 633356 - DNA, 25 bp, Homo sapien
cagcggccgacgcactcctcagcct

SEQ ID NO: 633357 - DNA, 25 bp, Homo sapien
gcggctccgctccccgattcgcggc

SEQ ID NO: 633358 - DNA, 25 bp, Homo sapien
aattccccgagctataaacacaacg

SEQ ID NO: 633359 - DNA, 25 bp, Homo sapien
taagaccagcgatggcccagcttct

SEQ ID NO: 633360 - DNA, 25 bp, Homo sapien
aacgacccagggactaaattatctg

SEQ ID NO: 633361 - DNA, 25 bp, Homo sapien
ttatctgcctccctaagaccagcga

SEQ ID NO: 633362 - DNA, 25 bp, Homo sapien
gagaaatcatggcttcggcacacga

SEQ ID NO: 633363 - DNA, 25 bp, Homo sapien
taagggcagacgtgtctaaccacca

SEQ ID NO: 633364 - DNA, 25 bp, Homo sapien
caagttagaacctgaacggacgagt

SEQ ID NO: 633365 - DNA, 25 bp, Homo sapien
tcaaatcttcccaaccaagcctaag

SEQ ID NO: 633366 - DNA, 25 bp, Homo sapien
ggtcttcacttctggactctagcaa

SEQ ID NO: 633367 - DNA, 25 bp, Homo sapien
gtcttcacttctggactctagcaat

SEQ ID NO: 633368 - DNA, 25 bp, Homo sapien
tgagatgctggttggacgatcactt

SEQ ID NO: 633369 - DNA, 25 bp, Homo sapien
gatgctggttggacgatcacttgag

SEQ ID NO: 633370 - DNA, 25 bp, Homo sapien
taacagctagtcctatcgcagcagc

SEQ ID NO: 633371 - DNA, 25 bp, Homo sapien
catctgagggctacgaacttggcaa

SEQ ID NO: 633372 - DNA, 25 bp, Homo sapien
gaaaaatccgatgggactgctcagc

SEQ ID NO: 633373 - DNA, 25 bp, Homo sapien
caaagtgctgtggtaaaaggccccg

SEQ ID NO: 633374 - DNA, 25 bp, Homo sapien
aactgtttaagacccaccctgcatg

SEQ ID NO: 633375 - DNA, 25 bp, Homo sapien
cacctgttcaacaaaccacggtttg

SEQ ID NO: 633376 - DNA, 25 bp, Homo sapien
tatactcgagaatctaaaaaactgt

SEQ ID NO: 633377 - DNA, 25 bp, Homo sapien
gattacggctaatgcatattcggca

SEQ ID NO: 633378 - DNA, 25 bp, Homo sapien
gggacagtgtgaacacagtccctcc

SEQ ID NO: 633379 - DNA, 25 bp, Homo sapien
agtgtgaacacagtccctccactac

SEQ ID NO: 633380 - DNA, 25 bp, Homo sapien
gacagtgtgaacacagtccctccac

SEQ ID NO: 633381 - DNA, 25 bp, Homo sapien
cagtgtgaacacagtccctccacta

SEQ ID NO: 633382 - DNA, 25 bp, Homo sapien
aggctctcctgaggatccccagcca

SEQ ID NO: 633383 - DNA, 25 bp, Homo sapien
tctggtctggtgcacgccctggccc

SEQ ID NO: 633384 - DNA, 25 bp, Homo sapien
tctcctgaggatccccagccagatg

SEQ ID NO: 633385 - DNA, 25 bp, Homo sapien
tgaggatccccagccagatgagtct

SEQ ID NO: 633386 - DNA, 25 bp, Homo sapien
cacgagtggtcttccgttaccgcag

SEQ ID NO: 633387 - DNA, 25 bp, Homo sapien
gacacctgggtagcgactattcaat

SEQ ID NO: 633388 - DNA, 25 bp, Homo sapien
caatgaggccacaggttatgacacc

SEQ ID NO: 633389 - DNA, 25 bp, Homo sapien
tgcaacactagagaagaaagctcct

SEQ ID NO: 633390 - DNA, 25 bp, Homo sapien
ttgaacctagaagtttgatcattct

SEQ ID NO: 633391 - DNA, 25 bp, Homo sapien
gaacctagaagtttgatcattctgg

SEQ ID NO: 633392 - DNA, 25 bp, Homo sapien
aacctagaagtttgatcattctggg

SEQ ID NO: 633393 - DNA, 25 bp, Homo sapien
acctagaagtttgatcattctgggc

SEQ ID NO: 633394 - DNA, 25 bp, Homo sapien
aggcatctgccgccatgcccagata

SEQ ID NO: 633395 - DNA, 25 bp, Homo sapien
ggcatctgccgccatgcccagataa

SEQ ID NO: 633396 - DNA, 25 bp, Homo sapien
gccaggttggactcaaactcccggc

SEQ ID NO: 633397 - DNA, 25 bp, Homo sapien
ttttgctatattggccaggttggac

SEQ ID NO: 633398 - DNA, 25 bp, Homo sapien
cctgtgtggtcaggcaaaatacagc

SEQ ID NO: 633399 - DNA, 25 bp, Homo sapien
tggggggaggtctacagaaggctgc

SEQ ID NO: 633400 - DNA, 25 bp, Homo sapien
gcaagaattaatactctgggaaagg

SEQ ID NO: 633401 - DNA, 25 bp, Homo sapien
gcctgtgtggtcaggcaaaatacag

SEQ ID NO: 633402 - DNA, 25 bp, Homo sapien
cctgaacagatggaccggctggagc

SEQ ID NO: 633403 - DNA, 25 bp, Homo sapien
ctgaacagatggaccggctggagct

SEQ ID NO: 633404 - DNA, 25 bp, Homo sapien
tacaaactgtaaaacgtgcgtttga

SEQ ID NO: 633405 - DNA, 25 bp, Homo sapien
tcttccgtggcgctgtcctgtgcgt

SEQ ID NO: 633406 - DNA, 25 bp, Homo sapien
ggcacatgtccacacagccgggtgc

SEQ ID NO: 633407 - DNA, 25 bp, Homo sapien
cgggtgcgtcctcttccgtggcgct

SEQ ID NO: 633408 - DNA, 25 bp, Homo sapien
ttccgtggcgctgtcctgtgcgtcc

SEQ ID NO: 633409 - DNA, 25 bp, Homo sapien
acagagtgccgggtcccacgtcagc

SEQ ID NO: 633410 - DNA, 25 bp, Homo sapien
cacctgccgtctcttcaacaccctg

SEQ ID NO: 633411 - DNA, 25 bp, Homo sapien
acgtcagcccctgacgcacctgccg

SEQ ID NO: 633412 - DNA, 25 bp, Homo sapien
cacagagcacagagtgccgggtccc

SEQ ID NO: 633413 - DNA, 25 bp, Homo sapien
agtgagcgctgtctctggtctgcca

SEQ ID NO: 633414 - DNA, 25 bp, Homo sapien
tgcgttcttgtccaacccaaggacg

SEQ ID NO: 633415 - DNA, 25 bp, Homo sapien
ccaacccaaggacgtggtacaatga

SEQ ID NO: 633416 - DNA, 25 bp, Homo sapien
cgtggtacaatgactccccagaggt

SEQ ID NO: 633417 - DNA, 25 bp, Homo sapien
cctttttgtggcgtccgtgaggatg

SEQ ID NO: 633418 - DNA, 25 bp, Homo sapien
gctggacagcacgaagtaggtgttc

SEQ ID NO: 633419 - DNA, 25 bp, Homo sapien
gatggcgtgcgcgttgttgatctcc

SEQ ID NO: 633420 - DNA, 25 bp, Homo sapien
gaagtaggtgttcacgttctcttcc

SEQ ID NO: 633421 - DNA, 25 bp, Homo sapien
gcagcagtagcagcacgtgaggagg

SEQ ID NO: 633422 - DNA, 25 bp, Homo sapien
cgtgaggaggccgcagaagacaaac

SEQ ID NO: 633423 - DNA, 25 bp, Homo sapien
agcacgtgaggaggccgcagaagac

SEQ ID NO: 633424 - DNA, 25 bp, Homo sapien
agtagcagcacgtgaggaggccgca

SEQ ID NO: 633425 - DNA, 25 bp, Homo sapien
gggacacgtagaactccgtctcctc

SEQ ID NO: 633426 - DNA, 25 bp, Homo sapien
cctcgccttcaggcgccttgggctt

SEQ ID NO: 633427 - DNA, 25 bp, Homo sapien
acacgtagaactccgtctcctcgcc

SEQ ID NO: 633428 - DNA, 25 bp, Homo sapien
cgccttcaggcgccttgggcttaca

SEQ ID NO: 633429 - DNA, 25 bp, Homo sapien
ccctctcgtcagactgcagctgtgc

SEQ ID NO: 633430 - DNA, 25 bp, Homo sapien
tctcgtcagactgcagctgtgcctc

SEQ ID NO: 633431 - DNA, 25 bp, Homo sapien
tcgtcagactgcagctgtgcctcca

SEQ ID NO: 633432 - DNA, 25 bp, Homo sapien
cagactgcagctgtgcctccagatc

SEQ ID NO: 633433 - DNA, 25 bp, Homo sapien
caccacaaacactcgcggcacagtg

SEQ ID NO: 633434 - DNA, 25 bp, Homo sapien
agctgccaccacaaacactcgcggc

SEQ ID NO: 633435 - DNA, 25 bp, Homo sapien
ctcagggtccacgttcacacctcaa

SEQ ID NO: 633436 - DNA, 25 bp, Homo sapien
gttcacacctcaacagtcccagctg

SEQ ID NO: 633437 - DNA, 25 bp, Homo sapien
ccggctgtatgacgatcggcgtgtc

SEQ ID NO: 633438 - DNA, 25 bp, Homo sapien
ctgtgagctgggtggtctcggtggc

SEQ ID NO: 633439 - DNA, 25 bp, Homo sapien
ttgaacccgtcagtgtggtagctgg

SEQ ID NO: 633440 - DNA, 25 bp, Homo sapien
tctcggtggcggatgccggctgtat

SEQ ID NO: 633441 - DNA, 25 bp, Homo sapien
cacttcgtgggtcaagggtcgacgc

SEQ ID NO: 633442 - DNA, 25 bp, Homo sapien
catgattctaaggttggcgtggcca

SEQ ID NO: 633443 - DNA, 25 bp, Homo sapien
tcacctttcaggatgggccaaacaa

SEQ ID NO: 633444 - DNA, 25 bp, Homo sapien
ctctgatgggtaccgaagggccttg

SEQ ID NO: 633445 - DNA, 25 bp, Homo sapien
caaagccttaaagccaacagggcag

SEQ ID NO: 633446 - DNA, 25 bp, Homo sapien
cagggcagagcgctgaaaacggttc

SEQ ID NO: 633447 - DNA, 25 bp, Homo sapien
tccaggccccgagtgtctgggcttc

SEQ ID NO: 633448 - DNA, 25 bp, Homo sapien
gaaacagtccactcaagaaagagag

SEQ ID NO: 633449 - DNA, 25 bp, Homo sapien
aaagggacattctgtgcccatggcc

SEQ ID NO: 633450 - DNA, 25 bp, Homo sapien
tgctggctgcactaacaacatagag

SEQ ID NO: 633451 - DNA, 25 bp, Homo sapien
aattgtacttgtcacttcaccaggg

SEQ ID NO: 633452 - DNA, 25 bp, Homo sapien
catgaatgacactcctgctgcgtga

SEQ ID NO: 633453 - DNA, 25 bp, Homo sapien
cctgggtcaggtgagcatgacacac

SEQ ID NO: 633454 - DNA, 25 bp, Homo sapien
aaccagtgcatggacaagcagcttc

SEQ ID NO: 633455 - DNA, 25 bp, Homo sapien
ggacgccagtgacaaaaccagtgca

SEQ ID NO: 633456 - DNA, 25 bp, Homo sapien
cactgaccgtatctgctgctcagaa

SEQ ID NO: 633457 - DNA, 25 bp, Homo sapien
gggcatttatccacatctggaccag

SEQ ID NO: 633458 - DNA, 25 bp, Homo sapien
tccaaaaccagggatctgcgggact

SEQ ID NO: 633459 - DNA, 25 bp, Homo sapien
agggaagcaaggttccagccgcaag

SEQ ID NO: 633460 - DNA, 25 bp, Homo sapien
gactagcgagtaagacatacgtggg

SEQ ID NO: 633461 - DNA, 25 bp, Homo sapien
ttcccgtcaggacaagtcgctggag

SEQ ID NO: 633462 - DNA, 25 bp, Homo sapien
cagataactgaatcagcctcccggg

SEQ ID NO: 633463 - DNA, 25 bp, Homo sapien
tgggtctcacaagaggcaggctgtt

SEQ ID NO: 633464 - DNA, 25 bp, Homo sapien
cctagaacccatagcttggtggcca

SEQ ID NO: 633465 - DNA, 25 bp, Homo sapien
catcgagggtgtcatcaagcagtac

SEQ ID NO: 633466 - DNA, 25 bp, Homo sapien
cagtgtgttggtgcaagttacccca

SEQ ID NO: 633467 - DNA, 25 bp, Homo sapien
tgattgccccaacgcagaactgcag

SEQ ID NO: 633468 - DNA, 25 bp, Homo sapien
ggtggtccccaggttacaggcatta

SEQ ID NO: 633469 - DNA, 25 bp, Homo sapien
ggcacgcaatccaaagaggccttcg

SEQ ID NO: 633470 - DNA, 25 bp, Homo sapien
aggccttcgccatcggtgagagcag

SEQ ID NO: 633471 - DNA, 25 bp, Homo sapien
cacctctgggacctatctgtgccgg

SEQ ID NO: 633472 - DNA, 25 bp, Homo sapien
ccagaatgatcatcgaggccctgga

SEQ ID NO: 633473 - DNA, 25 bp, Homo sapien
actgggcgctctccccggaagcgga

SEQ ID NO: 633474 - DNA, 25 bp, Homo sapien
gagttcttatgtacccccaatgagc

SEQ ID NO: 633475 - DNA, 25 bp, Homo sapien
catccgagtacatccctctctgcag

SEQ ID NO: 633476 - DNA, 25 bp, Homo sapien
tgtgggccggccatgccagcgggta

SEQ ID NO: 633477 - DNA, 25 bp, Homo sapien
cggggaggtggctgtgtcccctgtg

SEQ ID NO: 633478 - DNA, 25 bp, Homo sapien
ggggaggtggctgtgtcccctgtgc

SEQ ID NO: 633479 - DNA, 25 bp, Homo sapien
gggaggtggctgtgtcccctgtgcc

SEQ ID NO: 633480 - DNA, 25 bp, Homo sapien
gcggggaggtggctgtgtcccctgt

SEQ ID NO: 633481 - DNA, 25 bp, Homo sapien
caggctgagaaaagcgagaccgcgt

SEQ ID NO: 633482 - DNA, 25 bp, Homo sapien
gagctcttgagaaaggcactcctgg

SEQ ID NO: 633483 - DNA, 25 bp, Homo sapien
ggcaggccaacgctagataagcact

SEQ ID NO: 633484 - DNA, 25 bp, Homo sapien
ccatgatctgtgcagggcaggtcct

SEQ ID NO: 633485 - DNA, 25 bp, Homo sapien
gtgaccatctgtccccggtcctcgt

SEQ ID NO: 633486 - DNA, 25 bp, Homo sapien
gacgggccatcactgtatgtattaa

SEQ ID NO: 633487 - DNA, 25 bp, Homo sapien
gcgccctggtcccgagtggcgtggg

SEQ ID NO: 633488 - DNA, 25 bp, Homo sapien
gcggaggctgccgaactacgggtcc

SEQ ID NO: 633489 - DNA, 25 bp, Homo sapien
aagtgtttatttgcgagatgtttca

SEQ ID NO: 633490 - DNA, 25 bp, Homo sapien
ccagttctcagtacataagtgcatt

SEQ ID NO: 633491 - DNA, 25 bp, Homo sapien
gatgtttcaacggtgagttcgggcc

SEQ ID NO: 633492 - DNA, 25 bp, Homo sapien
ttttgaaagaggttccagctatcac

SEQ ID NO: 633493 - DNA, 25 bp, Homo sapien
ctaagggtttcctggtgcagacggt

SEQ ID NO: 633494 - DNA, 25 bp, Homo sapien
cagtagtagggagacaagttccagg

SEQ ID NO: 633495 - DNA, 25 bp, Homo sapien
cactcgcaatccgacatttggtgct

SEQ ID NO: 633496 - DNA, 25 bp, Homo sapien
gaggcagtactgactgggcactgcc

SEQ ID NO: 633497 - DNA, 25 bp, Homo sapien
tgcctgcctggtcccgaaggctgtg

SEQ ID NO: 633498 - DNA, 25 bp, Homo sapien
tcctgaaggctgtgtccagccccct

SEQ ID NO: 633499 - DNA, 25 bp, Homo sapien
gtgtccagccctgcggcaggtgcct

SEQ ID NO: 633500 - DNA, 25 bp, Homo sapien
ggtcccgaaggctgtgtccagccct

SEQ ID NO: 633501 - DNA, 25 bp, Homo sapien
agcaagccagtctcggtcggcagac

SEQ ID NO: 633502 - DNA, 25 bp, Homo sapien
cattgtggtcagcaagccggtgaca

SEQ ID NO: 633503 - DNA, 25 bp, Homo sapien
tgtgacagttacgaaacccgtgccg

SEQ ID NO: 633504 - DNA, 25 bp, Homo sapien
cccattacggtaacaaagcttgtga

SEQ ID NO: 633505 - DNA, 25 bp, Homo sapien
aaagtgtcgccgtcgtcgcgtcacc

SEQ ID NO: 633506 - DNA, 25 bp, Homo sapien
gacgtccgatgcactccgtagcaaa

SEQ ID NO: 633507 - DNA, 25 bp, Homo sapien
gcgacgaccaaggctaggaaggaaa

SEQ ID NO: 633508 - DNA, 25 bp, Homo sapien
gagactctaggcttcgacgtccgat

SEQ ID NO: 633509 - DNA, 25 bp, Homo sapien
ccgaggggcgcgggcatccctagga

SEQ ID NO: 633510 - DNA, 25 bp, Homo sapien
agccccggcacgtagccgaggggcg

SEQ ID NO: 633511 - DNA, 25 bp, Homo sapien
aggggcgcgggcatccctaggaacg

SEQ ID NO: 633512 - DNA, 25 bp, Homo sapien
ccggcacgtagccgaggggcgcggg

SEQ ID NO: 633513 - DNA, 25 bp, Homo sapien
tgtgtcacatctaggcggcaagcag

SEQ ID NO: 633514 - DNA, 25 bp, Homo sapien
gggattaagccgatccaccaagcgt

SEQ ID NO: 633515 - DNA, 25 bp, Homo sapien
tcttacagaccaaaacactgggctg

SEQ ID NO: 633516 - DNA, 25 bp, Homo sapien
cgtctttcagactgcgcggccatag

SEQ ID NO: 633517 - DNA, 25 bp, Homo sapien
ccaaataggataataacgactgctc

SEQ ID NO: 633518 - DNA, 25 bp, Homo sapien
agcactgggttctaaatctggtcct

SEQ ID NO: 633519 - DNA, 25 bp, Homo sapien
ccttagtgagcttgtgtgtgcccca

SEQ ID NO: 633520 - DNA, 25 bp, Homo sapien
tcgtcaccgtttctacagccctaag

SEQ ID NO: 633521 - DNA, 25 bp, Homo sapien
tccactcctggttatcacttactaa

SEQ ID NO: 633522 - DNA, 25 bp, Homo sapien
gacaccgggtgtctgaataactctg

SEQ ID NO: 633523 - DNA, 25 bp, Homo sapien
tcctggtgacaatgaactgcagtct

SEQ ID NO: 633524 - DNA, 25 bp, Homo sapien
gaactgcagtctcaaacacttctga

SEQ ID NO: 633525 - DNA, 25 bp, Homo sapien
tgtctgaccgcgtggtgaagccagt

SEQ ID NO: 633526 - DNA, 25 bp, Homo sapien
ggtgtcatttagatcctcgtcgtca

SEQ ID NO: 633527 - DNA, 25 bp, Homo sapien
cacagggtcatttgcatcacgggcg

SEQ ID NO: 633528 - DNA, 25 bp, Homo sapien
ggtgcatggcgatcatccacagggt

SEQ ID NO: 633529 - DNA, 25 bp, Homo sapien
ccagggctgcatagatagcatctgc

SEQ ID NO: 633530 - DNA, 25 bp, Homo sapien
ttcctcatcatctttctcgtagggt

SEQ ID NO: 633531 - DNA, 25 bp, Homo sapien
ccatccttttatccagggctgcata

SEQ ID NO: 633532 - DNA, 25 bp, Homo sapien
catctttctcgtagggtccacttga

SEQ ID NO: 633533 - DNA, 25 bp, Homo sapien
gcactcttggctcacgggagcgagc

SEQ ID NO: 633534 - DNA, 25 bp, Homo sapien
gcttccgttcgttgcctgtgcttgt

SEQ ID NO: 633535 - DNA, 25 bp, Homo sapien
cacctggcttccgttcgttgcctgt

SEQ ID NO: 633536 - DNA, 25 bp, Homo sapien
tgagttcactgtagaggtacctatt

SEQ ID NO: 633537 - DNA, 25 bp, Homo sapien
tggggcgttccatacgatatttctc

SEQ ID NO: 633538 - DNA, 25 bp, Homo sapien
ggcgttccatacgatatttctctat

SEQ ID NO: 633539 - DNA, 25 bp, Homo sapien
tttggggcgttccatacgatatttc

SEQ ID NO: 633540 - DNA, 25 bp, Homo sapien
ggattttggggcgttccatacgata

SEQ ID NO: 633541 - DNA, 25 bp, Homo sapien
cactgaggtatggttctctccggtc

SEQ ID NO: 633542 - DNA, 25 bp, Homo sapien
tttggcaaagaaactgtcaggaaca

SEQ ID NO: 633543 - DNA, 25 bp, Homo sapien
tcagcttctcatagcgtgggttccg

SEQ ID NO: 633544 - DNA, 25 bp, Homo sapien
tatttctggcatcgccaacctcggg

SEQ ID NO: 633545 - DNA, 25 bp, Homo sapien
tgatctaacaggactaaatgggcca

SEQ ID NO: 633546 - DNA, 25 bp, Homo sapien
cactgatctaacaggactaaatggg

SEQ ID NO: 633547 - DNA, 25 bp, Homo sapien
cctgccactgatctaacaggactaa

SEQ ID NO: 633548 - DNA, 25 bp, Homo sapien
attcctgccactgatctaacaggac

SEQ ID NO: 633549 - DNA, 25 bp, Homo sapien
ccccagtggcctgacatatgcacag

SEQ ID NO: 633550 - DNA, 25 bp, Homo sapien
agctgtgcagacagactcggccaca

SEQ ID NO: 633551 - DNA, 25 bp, Homo sapien
tagccatgacctgcagaagcattga

SEQ ID NO: 633552 - DNA, 25 bp, Homo sapien
aaaacaacggtttgcactgcatgcc

SEQ ID NO: 633553 - DNA, 25 bp, Homo sapien
ctggatagggtgtgttaagacctcc

SEQ ID NO: 633554 - DNA, 25 bp, Homo sapien
agggtgtgttaagacctccaaattg

SEQ ID NO: 633555 - DNA, 25 bp, Homo sapien
atagggtgtgttaagacctccaaat

SEQ ID NO: 633556 - DNA, 25 bp, Homo sapien
ggatagggtgtgttaagacctccaa

SEQ ID NO: 633557 - DNA, 25 bp, Homo sapien
tgttcctcgcttggccaatcttcct

SEQ ID NO: 633558 - DNA, 25 bp, Homo sapien
tcatgtccatcagagtgttcctcgc

SEQ ID NO: 633559 - DNA, 25 bp, Homo sapien
cacctgggtatggagtgtttagtcc

SEQ ID NO: 633560 - DNA, 25 bp, Homo sapien
tgtcatcagtcctggcgtcattcca

SEQ ID NO: 633561 - DNA, 25 bp, Homo sapien
gacggtctgtccactcacggagtca

SEQ ID NO: 633562 - DNA, 25 bp, Homo sapien
tctcctccgtgtgtcgggatcatgg

SEQ ID NO: 633563 - DNA, 25 bp, Homo sapien
gggtcaacgacggtctgtccactca

SEQ ID NO: 633564 - DNA, 25 bp, Homo sapien
atttaaatccgtcaggtagcctttg

SEQ ID NO: 633565 - DNA, 25 bp, Homo sapien
gcttcccagtgacttcttccaggcg

SEQ ID NO: 633566 - DNA, 25 bp, Homo sapien
tgagggttcgtctcccgaacagact

SEQ ID NO: 633567 - DNA, 25 bp, Homo sapien
ttccaggcgggctgatgcaatccag

SEQ ID NO: 633568 - DNA, 25 bp, Homo sapien
gataaggttccgagctacttgtagc

SEQ ID NO: 633569 - DNA, 25 bp, Homo sapien
gaagaacccgcttctttgcacgaat

SEQ ID NO: 633570 - DNA, 25 bp, Homo sapien
taaatcctgacagactgtgggagat

SEQ ID NO: 633571 - DNA, 25 bp, Homo sapien
gaatgtccgtttccagctctgcggc

SEQ ID NO: 633572 - DNA, 25 bp, Homo sapien
tctgcggctctgatgtaaatcctga

SEQ ID NO: 633573 - DNA, 25 bp, Homo sapien
tctggggcagacacaaacaaggaca

SEQ ID NO: 633574 - DNA, 25 bp, Homo sapien
accgagtttggaacatgctcgaggg

SEQ ID NO: 633575 - DNA, 25 bp, Homo sapien
ggctgctttccacaagcgaaccgag

SEQ ID NO: 633576 - DNA, 25 bp, Homo sapien
caagcgaaccgagtttggaacatgc

SEQ ID NO: 633577 - DNA, 25 bp, Homo sapien
ttcttccagctcaacggctgctttc

SEQ ID NO: 633578 - DNA, 25 bp, Homo sapien
gaaatcccacttagcttagaggcaa

SEQ ID NO: 633579 - DNA, 25 bp, Homo sapien
caatgttttctatcacgctgccacc

SEQ ID NO: 633580 - DNA, 25 bp, Homo sapien
cacagacgagcaggatgaggctact

SEQ ID NO: 633581 - DNA, 25 bp, Homo sapien
caaagagcagtcatgcggagctgac

SEQ ID NO: 633582 - DNA, 25 bp, Homo sapien
cttgcgggcattttcataggtctcc

SEQ ID NO: 633583 - DNA, 25 bp, Homo sapien
tgtaggaatgttctcccgcgccttg

SEQ ID NO: 633584 - DNA, 25 bp, Homo sapien
tagcagccgtgatccagatatgtcg

SEQ ID NO: 633585 - DNA, 25 bp, Homo sapien
cgcgccttgttcaagaccttgcggg

SEQ ID NO: 633586 - DNA, 25 bp, Homo sapien
cacggcacgcatgacggcctggcag

SEQ ID NO: 633587 - DNA, 25 bp, Homo sapien
ccatccaggtatgcttccgatcttc

SEQ ID NO: 633588 - DNA, 25 bp, Homo sapien
agcatcctccatccaggtatgcttc

SEQ ID NO: 633589 - DNA, 25 bp, Homo sapien
ccaatcccaatcacggcacgcatga

SEQ ID NO: 633590 - DNA, 25 bp, Homo sapien
aacacctgcagggcgtaggcgtaga

SEQ ID NO: 633591 - DNA, 25 bp, Homo sapien
ttcttctcgaagtacgcggcgcgca

SEQ ID NO: 633592 - DNA, 25 bp, Homo sapien
catggttcttctcgaagtacgcggc

SEQ ID NO: 633593 - DNA, 25 bp, Homo sapien
agatggctcgtgcacactccagggc

SEQ ID NO: 633594 - DNA, 25 bp, Homo sapien
ggtacagggagcatcacccgaggac

SEQ ID NO: 633595 - DNA, 25 bp, Homo sapien
cagccacttggacttggcgcccatg

SEQ ID NO: 633596 - DNA, 25 bp, Homo sapien
ccctctgcaggagtgcttccaggga

SEQ ID NO: 633597 - DNA, 25 bp, Homo sapien
tctgcaggagtgcttccagggactc

SEQ ID NO: 633598 - DNA, 25 bp, Homo sapien
cctgccagccacttggacttggcgc

SEQ ID NO: 633599 - DNA, 25 bp, Homo sapien
tcgtactcatcattctcggactcca

SEQ ID NO: 633600 - DNA, 25 bp, Homo sapien
ggcccgctcgtactcatcattctcg

SEQ ID NO: 633601 - DNA, 25 bp, Homo sapien
cgctcgtactcatcattctcggact

SEQ ID NO: 633602 - DNA, 25 bp, Homo sapien
tactcatcattctcggactccagct

SEQ ID NO: 633603 - DNA, 25 bp, Homo sapien
tcgatctgccccttcatcatccaca

SEQ ID NO: 633604 - DNA, 25 bp, Homo sapien
tggttataggcttcccgcgccttct

SEQ ID NO: 633605 - DNA, 25 bp, Homo sapien
ggaagtcctcatagtgccgcagggc

SEQ ID NO: 633606 - DNA, 25 bp, Homo sapien
agggcctcctcgcacagatcttggg

SEQ ID NO: 633607 - DNA, 25 bp, Homo sapien
cccgtgctcgagtaagctgcccaat

SEQ ID NO: 633608 - DNA, 25 bp, Homo sapien
gggttcttcagacgagacttttcca

SEQ ID NO: 633609 - DNA, 25 bp, Homo sapien
ccaaaatggcccgtgctcgagtaag

SEQ ID NO: 633610 - DNA, 25 bp, Homo sapien
tccagccgagagagcaaaagccaca

SEQ ID NO: 633611 - DNA, 25 bp, Homo sapien
agacaggcccccggaggtcccacag

SEQ ID NO: 633612 - DNA, 25 bp, Homo sapien
tgaggagacaggcccccggaggtcc

SEQ ID NO: 633613 - DNA, 25 bp, Homo sapien
ctgaggagacaggcccccggaggtc

SEQ ID NO: 633614 - DNA, 25 bp, Homo sapien
gagacaggcccccggaggtcccaca

SEQ ID NO: 633615 - DNA, 25 bp, Homo sapien
ggccatgagtgtatttgcgatgttc

SEQ ID NO: 633616 - DNA, 25 bp, Homo sapien
tatttgcgatgttcttcagccccgc

SEQ ID NO: 633617 - DNA, 25 bp, Homo sapien
gcacggtactccagccgcacggact

SEQ ID NO: 633618 - DNA, 25 bp, Homo sapien
gagtgtatttgcgatgttcttcagc

SEQ ID NO: 633619 - DNA, 25 bp, Homo sapien
gagtatagctgaaacttttgactga

SEQ ID NO: 633620 - DNA, 25 bp, Homo sapien
tcattaagttgtcttaacggccgag

SEQ ID NO: 633621 - DNA, 25 bp, Homo sapien
taaagtccgtctgaagcctgagccc

SEQ ID NO: 633622 - DNA, 25 bp, Homo sapien
tcaggaagtgccagccctgcggagt

SEQ ID NO: 633623 - DNA, 25 bp, Homo sapien
ggccttgcctcgaggaagatggcct

SEQ ID NO: 633624 - DNA, 25 bp, Homo sapien
ccaggagcacatgggggtcatgctc

SEQ ID NO: 633625 - DNA, 25 bp, Homo sapien
gggggtcatgctcacacttcttcag

SEQ ID NO: 633626 - DNA, 25 bp, Homo sapien
gccttgcctcgaggaagatggcctc

SEQ ID NO: 633627 - DNA, 25 bp, Homo sapien
gctgccgggcatctttacaatgacc

SEQ ID NO: 633628 - DNA, 25 bp, Homo sapien
gcccattaggaccccgaggttcagc

SEQ ID NO: 633629 - DNA, 25 bp, Homo sapien
cacatgcgtccccagtgagtctctg

SEQ ID NO: 633630 - DNA, 25 bp, Homo sapien
gaggatcggggaagcccaccctgct

SEQ ID NO: 633631 - DNA, 25 bp, Homo sapien
agaatcaaaagccagcactaggaag

SEQ ID NO: 633632 - DNA, 25 bp, Homo sapien
aggaccaaggtagcaccaggcagac

SEQ ID NO: 633633 - DNA, 25 bp, Homo sapien
tgcactatcagagtgtcacccagaa

SEQ ID NO: 633634 - DNA, 25 bp, Homo sapien
gaagccggacacaggagagctcctg

SEQ ID NO: 633635 - DNA, 25 bp, Homo sapien
ggagatgaaactaaacctgacacaa

SEQ ID NO: 633636 - DNA, 25 bp, Homo sapien
ttcacacgcagggaaagatcttcca

SEQ ID NO: 633637 - DNA, 25 bp, Homo sapien
ttagggtcagatacaaggagatgaa

SEQ ID NO: 633638 - DNA, 25 bp, Homo sapien
agatcttccaactccgtaaaattag

SEQ ID NO: 633639 - DNA, 25 bp, Homo sapien
ttccagcagaaggacgtgaacccag

SEQ ID NO: 633640 - DNA, 25 bp, Homo sapien
caggggaacggcttcagggccatca

SEQ ID NO: 633641 - DNA, 25 bp, Homo sapien
ggtgctcccctcaagaaggcctgag

SEQ ID NO: 633642 - DNA, 25 bp, Homo sapien
agtggctgcaggacggtattctggg

SEQ ID NO: 633643 - DNA, 25 bp, Homo sapien
agtgcggtggaaccactccctggcc

SEQ ID NO: 633644 - DNA, 25 bp, Homo sapien
tcaaacttgtagaagaaggcccagg

SEQ ID NO: 633645 - DNA, 25 bp, Homo sapien
ggtgatcttccgctgactccaaaac

SEQ ID NO: 633646 - DNA, 25 bp, Homo sapien
cccaggtccgagtcaatcttcacag

SEQ ID NO: 633647 - DNA, 25 bp, Homo sapien
tccccatgccgaggctctgcactct

SEQ ID NO: 633648 - DNA, 25 bp, Homo sapien
tggcgatgtccttggacacggcgca

SEQ ID NO: 633649 - DNA, 25 bp, Homo sapien
cagcctaaggatgtccccgatcttc

SEQ ID NO: 633650 - DNA, 25 bp, Homo sapien
tgtccttggacacggcgcaccacag

SEQ ID NO: 633651 - DNA, 25 bp, Homo sapien
aggtgttcttgatgcggccggccac

SEQ ID NO: 633652 - DNA, 25 bp, Homo sapien
tgccccacggagaccggccatggca

SEQ ID NO: 633653 - DNA, 25 bp, Homo sapien
gccccacggagaccggccatggcaa

SEQ ID NO: 633654 - DNA, 25 bp, Homo sapien
tcagagcccttccacatgcggccca

SEQ ID NO: 633655 - DNA, 25 bp, Homo sapien
ccacatgcggcccaaccctgcccca

SEQ ID NO: 633656 - DNA, 25 bp, Homo sapien
cgagacataaaaacttttaatgaag

SEQ ID NO: 633657 - DNA, 25 bp, Homo sapien
cacgagacataaaaacttttaatga

SEQ ID NO: 633658 - DNA, 25 bp, Homo sapien
gaagtatcccctgaacatggcctga

SEQ ID NO: 633659 - DNA, 25 bp, Homo sapien
catggacaatgtaagcgctccggaa

SEQ ID NO: 633660 - DNA, 25 bp, Homo sapien
taacttgtccgtcccagagatactg

SEQ ID NO: 633661 - DNA, 25 bp, Homo sapien
tgcaagacgacatcacctaacgagg

SEQ ID NO: 633662 - DNA, 25 bp, Homo sapien
gcagggtgtgcactgccgcaccagg

SEQ ID NO: 633663 - DNA, 25 bp, Homo sapien
aggtccaacaccagccaaccgcttc

SEQ ID NO: 633664 - DNA, 25 bp, Homo sapien
agcaggccacgcacatgatcctggg

SEQ ID NO: 633665 - DNA, 25 bp, Homo sapien
ggcttttgaagttggctcctccaag

SEQ ID NO: 633666 - DNA, 25 bp, Homo sapien
tcatagcgagaaccagagcctgact

SEQ ID NO: 633667 - DNA, 25 bp, Homo sapien
gacgtgtcaccaatcaagaaaggct

SEQ ID NO: 633668 - DNA, 25 bp, Homo sapien
aacatcaaggagacagctgacggcc

SEQ ID NO: 633669 - DNA, 25 bp, Homo sapien
tctctgagcgaatgaaatggacgtg

SEQ ID NO: 633670 - DNA, 25 bp, Homo sapien
gcccagagtgcaggcttagggggta

SEQ ID NO: 633671 - DNA, 25 bp, Homo sapien
cgcccagagtgcaggcttagggggt

SEQ ID NO: 633672 - DNA, 25 bp, Homo sapien
ccggggaataggcgcggcttggcgc

SEQ ID NO: 633673 - DNA, 25 bp, Homo sapien
caggccggggaataggcgcggcttg

SEQ ID NO: 633674 - DNA, 25 bp, Homo sapien
ggcctgcagatcctcgaagatgatg

SEQ ID NO: 633675 - DNA, 25 bp, Homo sapien
tggcgcgatagtggcggagcacgtc

SEQ ID NO: 633676 - DNA, 25 bp, Homo sapien
tcctcgaagatgatggcgcgatagt

SEQ ID NO: 633677 - DNA, 25 bp, Homo sapien
cagatcctcgaagatgatggcgcga

SEQ ID NO: 633678 - DNA, 25 bp, Homo sapien
gtctagtcaggtttttctgtatgaa

SEQ ID NO: 633679 - DNA, 25 bp, Homo sapien
ccgagctcccgggtctagtcaggtt

SEQ ID NO: 633680 - DNA, 25 bp, Homo sapien
ttctgggcgccacaggaggcccgag

SEQ ID NO: 633681 - DNA, 25 bp, Homo sapien
cgggtctagtcaggtttttctgtat

SEQ ID NO: 633682 - DNA, 25 bp, Homo sapien
gccggcgagcttgggtaggggcgcc

SEQ ID NO: 633683 - DNA, 25 bp, Homo sapien
ggccggcgagcttgggtaggggcgc

SEQ ID NO: 633684 - DNA, 25 bp, Homo sapien
gggtccgacccagggacgagatgga

SEQ ID NO: 633685 - DNA, 25 bp, Homo sapien
acccagggacgagatggacaggagg

SEQ ID NO: 633686 - DNA, 25 bp, Homo sapien
gtccgacccagggacgagatggaca

SEQ ID NO: 633687 - DNA, 25 bp, Homo sapien
ccgacccagggacgagatggacagg

SEQ ID NO: 633688 - DNA, 25 bp, Homo sapien
tcggtgcgcacagccacggtccaag

SEQ ID NO: 633689 - DNA, 25 bp, Homo sapien
gtgcgcacagccacggtccaagcag

SEQ ID NO: 633690 - DNA, 25 bp, Homo sapien
agcgtcctgcagtggcgccgcatca

SEQ ID NO: 633691 - DNA, 25 bp, Homo sapien
tggcgcagcgtcctgcagtggcgcc

SEQ ID NO: 633692 - DNA, 25 bp, Homo sapien
acagggcggtcagcgaatgcgcacg

SEQ ID NO: 633693 - DNA, 25 bp, Homo sapien
agggagacgcgacccagcccgactt

SEQ ID NO: 633694 - DNA, 25 bp, Homo sapien
ttcagcctagggccgtggagccccg

SEQ ID NO: 633695 - DNA, 25 bp, Homo sapien
agcccgacttcagcctagggccgtg

SEQ ID NO: 633696 - DNA, 25 bp, Homo sapien
cgggcagggcgcatcttgggccgcc

SEQ ID NO: 633697 - DNA, 25 bp, Homo sapien
agggcgcatcttgggccgccggctc

SEQ ID NO: 633698 - DNA, 25 bp, Homo sapien
agcaggtggcgacggcgtccagggc

SEQ ID NO: 633699 - DNA, 25 bp, Homo sapien
ggcgcgcagcgcgaagagcttctcc

SEQ ID NO: 633700 - DNA, 25 bp, Homo sapien
tttattgaggccttcggcgcgtgga

SEQ ID NO: 633701 - DNA, 25 bp, Homo sapien
agaacgaggcgcgtctccaggctct

SEQ ID NO: 633702 - DNA, 25 bp, Homo sapien
gggccgaggtcaccaacaagtctac

SEQ ID NO: 633703 - DNA, 25 bp, Homo sapien
caagtctacagaacgaggcgcgtct

SEQ ID NO: 633704 - DNA, 25 bp, Homo sapien
ctaggcccacagagaggcaggcgaa

SEQ ID NO: 633705 - DNA, 25 bp, Homo sapien
cccacagagaggcaggcgaagggag

SEQ ID NO: 633706 - DNA, 25 bp, Homo sapien
ggcccacagagaggcaggcgaaggg

SEQ ID NO: 633707 - DNA, 25 bp, Homo sapien
taggcccacagagaggcaggcgaag

SEQ ID NO: 633708 - DNA, 25 bp, Homo sapien
gatcccacagaatgccagaggcaca

SEQ ID NO: 633709 - DNA, 25 bp, Homo sapien
cctccggaggcagcaggaaatagcc

SEQ ID NO: 633710 - DNA, 25 bp, Homo sapien
actcccagacctgcgcatcagatgg

SEQ ID NO: 633711 - DNA, 25 bp, Homo sapien
taacaggtgtcaggtactttacctc

SEQ ID NO: 633712 - DNA, 25 bp, Homo sapien
tgcgtatctctaataacaaagtctg

SEQ ID NO: 633713 - DNA, 25 bp, Homo sapien
aaggcgcagggtctcacctacgttc

SEQ ID NO: 633714 - DNA, 25 bp, Homo sapien
taaggccctacagggactggctcaa

SEQ ID NO: 633715 - DNA, 25 bp, Homo sapien
cctggaacccatgctagaacagctg

SEQ ID NO: 633716 - DNA, 25 bp, Homo sapien
gagccagtgatgctcggccttgcgc

SEQ ID NO: 633717 - DNA, 25 bp, Homo sapien
tctacaaccagattgtattaatatt

SEQ ID NO: 633718 - DNA, 25 bp, Homo sapien
tacatttttgaagcacctgctcctt

SEQ ID NO: 633719 - DNA, 25 bp, Homo sapien
ggcagagttgccagggttacatttt

SEQ ID NO: 633720 - DNA, 25 bp, Homo sapien
tggacctcaccgagttcgaccagta

SEQ ID NO: 633721 - DNA, 25 bp, Homo sapien
attacagcgcgtgcatctccggcta

SEQ ID NO: 633722 - DNA, 25 bp, Homo sapien
gagagcagcctgatctccgcgctgt

SEQ ID NO: 633723 - DNA, 25 bp, Homo sapien
gccagcagcgcggtctattacagcg

SEQ ID NO: 633724 - DNA, 25 bp, Homo sapien
ctcgcctccgaaagtctggcagcac

SEQ ID NO: 633725 - DNA, 25 bp, Homo sapien
gcctccgaaagtctggcagcaccgg

SEQ ID NO: 633726 - DNA, 25 bp, Homo sapien
gggaacggcaaccagcgggacactg

SEQ ID NO: 633727 - DNA, 25 bp, Homo sapien
gaacggcaaccagcgggacactgcc

SEQ ID NO: 633728 - DNA, 25 bp, Homo sapien
ttagcaccgagtagaagagaccctg

SEQ ID NO: 633729 - DNA, 25 bp, Homo sapien
cacacaaacatcactgggaaggccg

SEQ ID NO: 633730 - DNA, 25 bp, Homo sapien
gaaccggacctgtcattggccaaga

SEQ ID NO: 633731 - DNA, 25 bp, Homo sapien
tagagagagcttccgccaagtggta

SEQ ID NO: 633732 - DNA, 25 bp, Homo sapien
gccccaacaggcgtctggggagaaa

SEQ ID NO: 633733 - DNA, 25 bp, Homo sapien
tcagaatttgcacccagaggctgac

SEQ ID NO: 633734 - DNA, 25 bp, Homo sapien
tcagaaccatcgattctcctgtggg

SEQ ID NO: 633735 - DNA, 25 bp, Homo sapien
gccctcggcagctgaagaactttcc

SEQ ID NO: 633736 - DNA, 25 bp, Homo sapien
cggaaatgcacgtagcctgaagggt

SEQ ID NO: 633737 - DNA, 25 bp, Homo sapien
cgccgcagtcccagttgaagtgttg

SEQ ID NO: 633738 - DNA, 25 bp, Homo sapien
gagagggtcaacgtcccagaagcat

SEQ ID NO: 633739 - DNA, 25 bp, Homo sapien
ggctgtgcagttgtgcatacgccgc

SEQ ID NO: 633740 - DNA, 25 bp, Homo sapien
gagagctgcaagttcctaagagtgg

SEQ ID NO: 633741 - DNA, 25 bp, Homo sapien
gctcccgtcaagatgatgtcagctg

SEQ ID NO: 633742 - DNA, 25 bp, Homo sapien
ggagttaagtgtccgcctcacaggg

SEQ ID NO: 633743 - DNA, 25 bp, Homo sapien
tgtgaaactggagttaagtgtccgc

SEQ ID NO: 633744 - DNA, 25 bp, Homo sapien
cctcacagggctcccgtcaagatga

SEQ ID NO: 633745 - DNA, 25 bp, Homo sapien
tgcaaagtcagctaccagggagcag

SEQ ID NO: 633746 - DNA, 25 bp, Homo sapien
gcatcctaggatgcgtagtccacgc

SEQ ID NO: 633747 - DNA, 25 bp, Homo sapien
cattcgggcttctgagtagagttac

SEQ ID NO: 633748 - DNA, 25 bp, Homo sapien
tgggctctgcacgttgaccactgtg

SEQ ID NO: 633749 - DNA, 25 bp, Homo sapien
ggcgatccgcgcaatctcctcttcc

SEQ ID NO: 633750 - DNA, 25 bp, Homo sapien
tcttgtccagcctccgggcgatccg

SEQ ID NO: 633751 - DNA, 25 bp, Homo sapien
atcttgtccagcctccgggcgatcc

SEQ ID NO: 633752 - DNA, 25 bp, Homo sapien
agcctccgggcgatccgcgcaatct

SEQ ID NO: 633753 - DNA, 25 bp, Homo sapien
gaagggtgcggagcctgtgactgcg

SEQ ID NO: 633754 - DNA, 25 bp, Homo sapien
gttgcgggagtgaacggcagggctg

SEQ ID NO: 633755 - DNA, 25 bp, Homo sapien
caaggtccaggcctgatcgcggcct

SEQ ID NO: 633756 - DNA, 25 bp, Homo sapien
tgcgtcccggttagtctctgccggg

SEQ ID NO: 633757 - DNA, 25 bp, Homo sapien
ctatgggagacggagggtgacaaac

SEQ ID NO: 633758 - DNA, 25 bp, Homo sapien
tatgggagacggagggtgacaaacg

SEQ ID NO: 633759 - DNA, 25 bp, Homo sapien
ctccaaactgttgccggcgacaaat

SEQ ID NO: 633760 - DNA, 25 bp, Homo sapien
ctcagactccaaactgttgccggcg

SEQ ID NO: 633761 - DNA, 25 bp, Homo sapien
actccaaactgttgccggcgacaaa

SEQ ID NO: 633762 - DNA, 25 bp, Homo sapien
agactccaaactgttgccggcgaca

SEQ ID NO: 633763 - DNA, 25 bp, Homo sapien
acaggtatctggctggcctgtgaag

SEQ ID NO: 633764 - DNA, 25 bp, Homo sapien
ccacaggcaagacaggtatctggct

SEQ ID NO: 633765 - DNA, 25 bp, Homo sapien
gctccagaagaaaaggggatccaac

SEQ ID NO: 633766 - DNA, 25 bp, Homo sapien
tattagagaaacctggttcttgtgg

SEQ ID NO: 633767 - DNA, 25 bp, Homo sapien
cggagggtgtccacataactaccca

SEQ ID NO: 633768 - DNA, 25 bp, Homo sapien
aaagtctcgctgtggccgcaagaca

SEQ ID NO: 633769 - DNA, 25 bp, Homo sapien
taagcacaccggctcttttcggagg

SEQ ID NO: 633770 - DNA, 25 bp, Homo sapien
cacaacccaagttgctgcgggctaa

SEQ ID NO: 633771 - DNA, 25 bp, Homo sapien
cctgtgtcttgatgccctgatgcgc

SEQ ID NO: 633772 - DNA, 25 bp, Homo sapien
tgacttcgttgtaaccacctcaggt

SEQ ID NO: 633773 - DNA, 25 bp, Homo sapien
cagggaacccttactgctcagtcaa

SEQ ID NO: 633774 - DNA, 25 bp, Homo sapien
tgtcccgagctgaggccaaactttc

SEQ ID NO: 633775 - DNA, 25 bp, Homo sapien
aggagaacacaaggcagtgacaatt

SEQ ID NO: 633776 - DNA, 25 bp, Homo sapien
gagattcaacctggggtcaaaaaga

SEQ ID NO: 633777 - DNA, 25 bp, Homo sapien
aatttggagattcaacctggggtca

SEQ ID NO: 633778 - DNA, 25 bp, Homo sapien
gaggagaacacaaggcagtgacaat

SEQ ID NO: 633779 - DNA, 25 bp, Homo sapien
ccttcataaaggactttagatctca

SEQ ID NO: 633780 - DNA, 25 bp, Homo sapien
aacagacaatatcacctccttctgc

SEQ ID NO: 633781 - DNA, 25 bp, Homo sapien
ggactttagatctcaacagacaata

SEQ ID NO: 633782 - DNA, 25 bp, Homo sapien
gaggaccttcataaaggactttaga

SEQ ID NO: 633783 - DNA, 25 bp, Homo sapien
gccttcagctcccgcagcaaatcca

SEQ ID NO: 633784 - DNA, 25 bp, Homo sapien
ccttcagctcccgcagcaaatccat

SEQ ID NO: 633785 - DNA, 25 bp, Homo sapien
caggtgcagcgtgataggcatggcc

SEQ ID NO: 633786 - DNA, 25 bp, Homo sapien
ggagcaggtgcagcgtgataggcat

SEQ ID NO: 633787 - DNA, 25 bp, Homo sapien
gagagacttggccagtgcaatgacc

SEQ ID NO: 633788 - DNA, 25 bp, Homo sapien
gttgacagacatcccgactcgggtg

SEQ ID NO: 633789 - DNA, 25 bp, Homo sapien
aatgacctcctcatccgagctctgc

SEQ ID NO: 633790 - DNA, 25 bp, Homo sapien
cttccgaagggcgttgacagacatc

SEQ ID NO: 633791 - DNA, 25 bp, Homo sapien
cccagcactcagtgggcaccgcctg

SEQ ID NO: 633792 - DNA, 25 bp, Homo sapien
ccagcactcagtgggcaccgcctga

SEQ ID NO: 633793 - DNA, 25 bp, Homo sapien
cagcactcagtgggcaccgcctgag

SEQ ID NO: 633794 - DNA, 25 bp, Homo sapien
tgaggcatccctcgaggacgtgggc

SEQ ID NO: 633795 - DNA, 25 bp, Homo sapien
tctgaggcatccctcgaggacgtgg

SEQ ID NO: 633796 - DNA, 25 bp, Homo sapien
ctgaggcatccctcgaggacgtggg

SEQ ID NO: 633797 - DNA, 25 bp, Homo sapien
atcctcggagtcgacggtgccctgg

SEQ ID NO: 633798 - DNA, 25 bp, Homo sapien
gaaatgtggtgatcctcggagtcga

SEQ ID NO: 633799 - DNA, 25 bp, Homo sapien
gcacggcatcacaggtgacaggcac

SEQ ID NO: 633800 - DNA, 25 bp, Homo sapien
cggtcagcatctcgcggcacttgtt

SEQ ID NO: 633801 - DNA, 25 bp, Homo sapien
ctgtgaaccacagcgggtgtcagga

SEQ ID NO: 633802 - DNA, 25 bp, Homo sapien
aagaggcccacgatccaggcacagg

SEQ ID NO: 633803 - DNA, 25 bp, Homo sapien
caagagggagccctgactagcttcc

SEQ ID NO: 633804 - DNA, 25 bp, Homo sapien
cagcttagagggcacatccgggtcc

SEQ ID NO: 633805 - DNA, 25 bp, Homo sapien
aggcgctcgcagtccgcaccgatgg

SEQ ID NO: 633806 - DNA, 25 bp, Homo sapien
tcgcagtccgcaccgatggccacgt

SEQ ID NO: 633807 - DNA, 25 bp, Homo sapien
gcagtccgcaccgatggccacgtgg

SEQ ID NO: 633808 - DNA, 25 bp, Homo sapien
gtccgcaccgatggccacgtggtca

SEQ ID NO: 633809 - DNA, 25 bp, Homo sapien
ccaggcccacagcccctacccaaag

SEQ ID NO: 633810 - DNA, 25 bp, Homo sapien
cccacagcccctacccaaaggatat

SEQ ID NO: 633811 - DNA, 25 bp, Homo sapien
gcccacagcccctacccaaaggata

SEQ ID NO: 633812 - DNA, 25 bp, Homo sapien
cagaaacccaggcccacagccccta

SEQ ID NO: 633813 - DNA, 25 bp, Homo sapien
gcaggtgacccctggacagctgggc

SEQ ID NO: 633814 - DNA, 25 bp, Homo sapien
cttcagctggtccgggggccctcct

SEQ ID NO: 633815 - DNA, 25 bp, Homo sapien
cagacagaatcagcccttcagctgg

SEQ ID NO: 633816 - DNA, 25 bp, Homo sapien
cctgaccacccaggcaggtgaccac

SEQ ID NO: 633817 - DNA, 25 bp, Homo sapien
ccagccacacaggggtcggtctgcc

SEQ ID NO: 633818 - DNA, 25 bp, Homo sapien
acccagcttcaggctacagccccag

SEQ ID NO: 633819 - DNA, 25 bp, Homo sapien
ctgaggacaacgtcgctgccctcca

SEQ ID NO: 633820 - DNA, 25 bp, Homo sapien
gcccacccacacctggtggagaggt

SEQ ID NO: 633821 - DNA, 25 bp, Homo sapien
ctgtgtttccaacgtcccggaagat

SEQ ID NO: 633822 - DNA, 25 bp, Homo sapien
tgtgtttccaacgtcccggaagatg

SEQ ID NO: 633823 - DNA, 25 bp, Homo sapien
gtgtttccaacgtcccggaagatgc

SEQ ID NO: 633824 - DNA, 25 bp, Homo sapien
tctgaggtcatcacagcgatctgct

SEQ ID NO: 633825 - DNA, 25 bp, Homo sapien
ttcaggttggagatacgactccgta

SEQ ID NO: 633826 - DNA, 25 bp, Homo sapien
acattccgccgcaggtcagggttct

SEQ ID NO: 633827 - DNA, 25 bp, Homo sapien
tgttatggccccacacagcacattc

SEQ ID NO: 633828 - DNA, 25 bp, Homo sapien
accgctccgagggagcagccctcca

SEQ ID NO: 633829 - DNA, 25 bp, Homo sapien
ggggccagtggcttagcccaccgct

SEQ ID NO: 633830 - DNA, 25 bp, Homo sapien
cgctccgagggagcagccctccagc

SEQ ID NO: 633831 - DNA, 25 bp, Homo sapien
agtggcttagcccaccgctccgagg

SEQ ID NO: 633832 - DNA, 25 bp, Homo sapien
catggccttacggatctccttcagc

SEQ ID NO: 633833 - DNA, 25 bp, Homo sapien
aacaggtctgtctgcgtgccgccag

SEQ ID NO: 633834 - DNA, 25 bp, Homo sapien
cgtgccgccagtgcgggccatctgg

SEQ ID NO: 633835 - DNA, 25 bp, Homo sapien
ttggtcatggccttacggatctcct

SEQ ID NO: 633836 - DNA, 25 bp, Homo sapien
gggggagggtgcccagcggccgctc

SEQ ID NO: 633837 - DNA, 25 bp, Homo sapien
cgggggagggtgcccagcggccgct

SEQ ID NO: 633838 - DNA, 25 bp, Homo sapien
ggggagggtgcccagcggccgctca

SEQ ID NO: 633839 - DNA, 25 bp, Homo sapien
gggagggtgcccagcggccgctcac

SEQ ID NO: 633840 - DNA, 25 bp, Homo sapien
aacccagggtcacctccatgctccg

SEQ ID NO: 633841 - DNA, 25 bp, Homo sapien
gtgaacccagggtcacctccatgct

SEQ ID NO: 633842 - DNA, 25 bp, Homo sapien
ggtgaacccagggtcacctccatgc

SEQ ID NO: 633843 - DNA, 25 bp, Homo sapien
ctgggtgaacccagggtcacctcca

SEQ ID NO: 633844 - DNA, 25 bp, Homo sapien
agacaacaaaggtggtcatgggctc

SEQ ID NO: 633845 - DNA, 25 bp, Homo sapien
cacactcgttgcagacaacaaaggt

SEQ ID NO: 633846 - DNA, 25 bp, Homo sapien
tcgttgcagacaacaaaggtggtca

SEQ ID NO: 633847 - DNA, 25 bp, Homo sapien
tcatgggctcatcagagctgcgggt

SEQ ID NO: 633848 - DNA, 25 bp, Homo sapien
gtggccacatgagatcccccagagt

SEQ ID NO: 633849 - DNA, 25 bp, Homo sapien
tccagccttgtggccacatgagatc

SEQ ID NO: 633850 - DNA, 25 bp, Homo sapien
gacaccccacctccagagaatggag

SEQ ID NO: 633851 - DNA, 25 bp, Homo sapien
gccgcacaggctcacccaaggctgg

SEQ ID NO: 633852 - DNA, 25 bp, Homo sapien
aggctgcagcacatctacacgaggg

SEQ ID NO: 633853 - DNA, 25 bp, Homo sapien
tgtgtcaacggaggacgtgggccgg

SEQ ID NO: 633854 - DNA, 25 bp, Homo sapien
ctgtgtcaacggaggacgtgggccg

SEQ ID NO: 633855 - DNA, 25 bp, Homo sapien
ccaaggctgcagcacatctacacga

SEQ ID NO: 633856 - DNA, 25 bp, Homo sapien
agggcaggacatgccgccttctagg

SEQ ID NO: 633857 - DNA, 25 bp, Homo sapien
tgagggcaggacatgccgccttcta

SEQ ID NO: 633858 - DNA, 25 bp, Homo sapien
caggacatgccgccttctagggtct

SEQ ID NO: 633859 - DNA, 25 bp, Homo sapien
ggcaggacatgccgccttctagggt

SEQ ID NO: 633860 - DNA, 25 bp, Homo sapien
gagccagggctccactatgagcacc

SEQ ID NO: 633861 - DNA, 25 bp, Homo sapien
tcgtgcctccactgtcgtggaagtc

SEQ ID NO: 633862 - DNA, 25 bp, Homo sapien
ccgccgatcggtcctttgcagcagc

SEQ ID NO: 633863 - DNA, 25 bp, Homo sapien
aagtcccacacggatggcaaagcag

SEQ ID NO: 633864 - DNA, 25 bp, Homo sapien
tctatgcctctatgccccaatgacc

SEQ ID NO: 633865 - DNA, 25 bp, Homo sapien
cccaatgacccctatgaggggcgcg

SEQ ID NO: 633866 - DNA, 25 bp, Homo sapien
tgacccctatgaggggcgcgtccac

SEQ ID NO: 633867 - DNA, 25 bp, Homo sapien
gctggagaagccggctctatgcctc

SEQ ID NO: 633868 - DNA, 25 bp, Homo sapien
gatctcagcatttccgttagccctt

SEQ ID NO: 633869 - DNA, 25 bp, Homo sapien
ttagcccttgaaaaacacgtgaatc

SEQ ID NO: 633870 - DNA, 25 bp, Homo sapien
tcatcgtcaggccttggcagcaata

SEQ ID NO: 633871 - DNA, 25 bp, Homo sapien
aataaacatgcttttagatctcagc

SEQ ID NO: 633872 - DNA, 25 bp, Homo sapien
acaatatgcaaggatactagggata

SEQ ID NO: 633873 - DNA, 25 bp, Homo sapien
ccacagattaaagcctgacacaggc

SEQ ID NO: 633874 - DNA, 25 bp, Homo sapien
ttctgggcaggcgaaacaatatgca

SEQ ID NO: 633875 - DNA, 25 bp, Homo sapien
cagattaaagcctgacacaggctgc

SEQ ID NO: 633876 - DNA, 25 bp, Homo sapien
gctccagaaggggaggggctatgca

SEQ ID NO: 633877 - DNA, 25 bp, Homo sapien
tccagaaggggaggggctatgcagg

SEQ ID NO: 633878 - DNA, 25 bp, Homo sapien
tgcagctccagaaggggaggggcta

SEQ ID NO: 633879 - DNA, 25 bp, Homo sapien
agaaggggaggggctatgcaggctg

SEQ ID NO: 633880 - DNA, 25 bp, Homo sapien
tcttctcagcagacgccagaccaga

SEQ ID NO: 633881 - DNA, 25 bp, Homo sapien
agaccagacgcagcagccgagtgag

SEQ ID NO: 633882 - DNA, 25 bp, Homo sapien
tcagccggctggcagtcgagcacag

SEQ ID NO: 633883 - DNA, 25 bp, Homo sapien
cagccgagtgagccggcagcccgaa

SEQ ID NO: 633884 - DNA, 25 bp, Homo sapien
gacacacagaaatgcccaaacctgc

SEQ ID NO: 633885 - DNA, 25 bp, Homo sapien
agaaatgcccaaacctgccctcacg

SEQ ID NO: 633886 - DNA, 25 bp, Homo sapien
aaatgcccaaacctgccctcacgca

SEQ ID NO: 633887 - DNA, 25 bp, Homo sapien
atgcccaaacctgccctcacgcaca

SEQ ID NO: 633888 - DNA, 25 bp, Homo sapien
gcctggaggcagctacaccccagga

SEQ ID NO: 633889 - DNA, 25 bp, Homo sapien
cacccacagggactgatgaacacac

SEQ ID NO: 633890 - DNA, 25 bp, Homo sapien
cctggaggcagctacaccccaggac

SEQ ID NO: 633891 - DNA, 25 bp, Homo sapien
tgcctggaggcagctacaccccagg

SEQ ID NO: 633892 - DNA, 25 bp, Homo sapien
gctgcagtgccagacacacgcccag

SEQ ID NO: 633893 - DNA, 25 bp, Homo sapien
gtgccagacacacgcccagcggagg

SEQ ID NO: 633894 - DNA, 25 bp, Homo sapien
cagtgccagacacacgcccagcgga

SEQ ID NO: 633895 - DNA, 25 bp, Homo sapien
tgcagtgccagacacacgcccagcg

SEQ ID NO: 633896 - DNA, 25 bp, Homo sapien
cctgcaaatccactctgtacggtac

SEQ ID NO: 633897 - DNA, 25 bp, Homo sapien
ggtggctgccgtagataacctccca

SEQ ID NO: 633898 - DNA, 25 bp, Homo sapien
ccgtagataacctcccagaacggcg

SEQ ID NO: 633899 - DNA, 25 bp, Homo sapien
ctgaaggtggctgccgtagataacc

SEQ ID NO: 633900 - DNA, 25 bp, Homo sapien
agataacctcccagaacggcgcggg

SEQ ID NO: 633901 - DNA, 25 bp, Homo sapien
cacgatggtgaccttgagcccgagg

SEQ ID NO: 633902 - DNA, 25 bp, Homo sapien
cccacgatggtgaccttgagcccga

SEQ ID NO: 633903 - DNA, 25 bp, Homo sapien
aggagccctccgacacacacggcca

SEQ ID NO: 633904 - DNA, 25 bp, Homo sapien
acggccaggtagagccccacgatgg

SEQ ID NO: 633905 - DNA, 25 bp, Homo sapien
gacaggaaccttggggcccagccta

SEQ ID NO: 633906 - DNA, 25 bp, Homo sapien
cccagccccttcagttctctcttct

SEQ ID NO: 633907 - DNA, 25 bp, Homo sapien
tgtccccagccccttcagttctctc

SEQ ID NO: 633908 - DNA, 25 bp, Homo sapien
tccccagccccttcagttctctctt

SEQ ID NO: 633909 - DNA, 25 bp, Homo sapien
gctgtccccagccccttcagttctc

SEQ ID NO: 633910 - DNA, 25 bp, Homo sapien
tctgtaagaacatatcaaaaggctt

SEQ ID NO: 633911 - DNA, 25 bp, Homo sapien
agccctaagggaaagagtctgctcc

SEQ ID NO: 633912 - DNA, 25 bp, Homo sapien
ccttgcttttgagtcccctccatga

SEQ ID NO: 633913 - DNA, 25 bp, Homo sapien
ttagagccctaagggaaagagtctg

SEQ ID NO: 633914 - DNA, 25 bp, Homo sapien
ttgcttttgagtcccctccatgacc

SEQ ID NO: 633915 - DNA, 25 bp, Homo sapien
ggcaatgactgtcttgcacagcgca

SEQ ID NO: 633916 - DNA, 25 bp, Homo sapien
catagcgatccacactcatggcagt

SEQ ID NO: 633917 - DNA, 25 bp, Homo sapien
gccgagcccatgatggcaacgggaa

SEQ ID NO: 633918 - DNA, 25 bp, Homo sapien
cagatggccacattgacagcctggg

SEQ ID NO: 633919 - DNA, 25 bp, Homo sapien
ccagaggagccacccgggagccagg

SEQ ID NO: 633920 - DNA, 25 bp, Homo sapien
agaggagccacccgggagccaggga

SEQ ID NO: 633921 - DNA, 25 bp, Homo sapien
gaggagccacccgggagccagggag

SEQ ID NO: 633922 - DNA, 25 bp, Homo sapien
cagaggagccacccgggagccaggg

SEQ ID NO: 633923 - DNA, 25 bp, Homo sapien
tgcagggagagaaacggggtcagag

SEQ ID NO: 633924 - DNA, 25 bp, Homo sapien
ctgcagggagagaaacggggtcaga

SEQ ID NO: 633925 - DNA, 25 bp, Homo sapien
gggtagggatctccaccaggcactc

SEQ ID NO: 633926 - DNA, 25 bp, Homo sapien
ggggtagggatctccaccaggcact

SEQ ID NO: 633927 - DNA, 25 bp, Homo sapien
gtagggatctccaccaggcactcga

SEQ ID NO: 633928 - DNA, 25 bp, Homo sapien
agggatctccaccaggcactcgatc

SEQ ID NO: 633929 - DNA, 25 bp, Homo sapien
agatgcagatggcaaacaccgggcc

SEQ ID NO: 633930 - DNA, 25 bp, Homo sapien
tagcagacagagatgacgagcacgg

SEQ ID NO: 633931 - DNA, 25 bp, Homo sapien
gaacttgcggaagcaggccttgaag

SEQ ID NO: 633932 - DNA, 25 bp, Homo sapien
ggcagatgcacagcagaacttgcgg

SEQ ID NO: 633933 - DNA, 25 bp, Homo sapien
tggaggtggccctaatgctttgacc

SEQ ID NO: 633934 - DNA, 25 bp, Homo sapien
tgtgtccgcctagagagcagtgacc

SEQ ID NO: 633935 - DNA, 25 bp, Homo sapien
tgatgtcactaggtcctcctctggg

SEQ ID NO: 633936 - DNA, 25 bp, Homo sapien
tctgtgttgggcgtagatgggctct

SEQ ID NO: 633937 - DNA, 25 bp, Homo sapien
ggttgacggtccacagcatgatagt

SEQ ID NO: 633938 - DNA, 25 bp, Homo sapien
tcaagaccaggaaaacgaggcctcc

SEQ ID NO: 633939 - DNA, 25 bp, Homo sapien
gatagttcattgcaccgctggaggg

SEQ ID NO: 633940 - DNA, 25 bp, Homo sapien
tacgtgcacaggaagtaacgcttgc

SEQ ID NO: 633941 - DNA, 25 bp, Homo sapien
gcctttctagatgacaacttccgga

SEQ ID NO: 633942 - DNA, 25 bp, Homo sapien
tacagcaacgagctgcaggtcccaa

SEQ ID NO: 633943 - DNA, 25 bp, Homo sapien
tacttcctagccgtgatgagcgtgg

SEQ ID NO: 633944 - DNA, 25 bp, Homo sapien
cgtgtctacacgttggtcctgggct

SEQ ID NO: 633945 - DNA, 25 bp, Homo sapien
ccagctcctgatttagggccctcat

SEQ ID NO: 633946 - DNA, 25 bp, Homo sapien
cccagctcctgatttagggccctca

SEQ ID NO: 633947 - DNA, 25 bp, Homo sapien
tacacagccgatgttctcttctgaa

SEQ ID NO: 633948 - DNA, 25 bp, Homo sapien
tctggaagatacaaaggatacacag

SEQ ID NO: 633949 - DNA, 25 bp, Homo sapien
aaaggatacacagccgatgttctct

SEQ ID NO: 633950 - DNA, 25 bp, Homo sapien
tctgcgccccgctccctgccaggag

SEQ ID NO: 633951 - DNA, 25 bp, Homo sapien
tttccaaatcacagacgatcccaga

SEQ ID NO: 633952 - DNA, 25 bp, Homo sapien
ccaagttaatgaagcagcttgcaaa

SEQ ID NO: 633953 - DNA, 25 bp, Homo sapien
gaaacgcgggaacattctgccaccg

SEQ ID NO: 633954 - DNA, 25 bp, Homo sapien
tgactgatgaggaccagaaacgcgg

SEQ ID NO: 633955 - DNA, 25 bp, Homo sapien
gatatgtccggacacatcccgggct

SEQ ID NO: 633956 - DNA, 25 bp, Homo sapien
tgggctgacgtgatatgtccggaca

SEQ ID NO: 633957 - DNA, 25 bp, Homo sapien
tgacgtgatatgtccggacacatcc

SEQ ID NO: 633958 - DNA, 25 bp, Homo sapien
ttcccagcactcagcgccacctggg

SEQ ID NO: 633959 - DNA, 25 bp, Homo sapien
tgaccgtggatgcattagggtttga

SEQ ID NO: 633960 - DNA, 25 bp, Homo sapien
tagggtttgaggggcatttgccata

SEQ ID NO: 633961 - DNA, 25 bp, Homo sapien
ccgggagagtccagccccgtgtgtg

SEQ ID NO: 633962 - DNA, 25 bp, Homo sapien
caggttgaccgtggatgcattaggg

SEQ ID NO: 633963 - DNA, 25 bp, Homo sapien
cctcaggttctgcaggtgtctgtcc

SEQ ID NO: 633964 - DNA, 25 bp, Homo sapien
ctcctggtcctcaggttctgcaggt

SEQ ID NO: 633965 - DNA, 25 bp, Homo sapien
tggtcctcaggttctgcaggtgtct

SEQ ID NO: 633966 - DNA, 25 bp, Homo sapien
tcctcaggttctgcaggtgtctgtc

SEQ ID NO: 633967 - DNA, 25 bp, Homo sapien
ccctgatgccgagggaagctcccat

SEQ ID NO: 633968 - DNA, 25 bp, Homo sapien
tgatgccgagggaagctcccatcac

SEQ ID NO: 633969 - DNA, 25 bp, Homo sapien
cagcttcccctgatgccgagggaag

SEQ ID NO: 633970 - DNA, 25 bp, Homo sapien
gcttcccctgatgccgagggaagct

SEQ ID NO: 633971 - DNA, 25 bp, Homo sapien
aactgccacactaggtccagcctga

SEQ ID NO: 633972 - DNA, 25 bp, Homo sapien
tctcggaactgccacactaggtcca

SEQ ID NO: 633973 - DNA, 25 bp, Homo sapien
tgccacactaggtccagcctgaaac

SEQ ID NO: 633974 - DNA, 25 bp, Homo sapien
ggaactgccacactaggtccagcct

SEQ ID NO: 633975 - DNA, 25 bp, Homo sapien
gaaggtcccgcagagcgtcatcctg

SEQ ID NO: 633976 - DNA, 25 bp, Homo sapien
aggaaggtcccgcagagcgtcatcc

SEQ ID NO: 633977 - DNA, 25 bp, Homo sapien
ccgcagagcgtcatcctggccaggg

SEQ ID NO: 633978 - DNA, 25 bp, Homo sapien
aggtcccgcagagcgtcatcctggc

SEQ ID NO: 633979 - DNA, 25 bp, Homo sapien
ggcagcgttcacagggctctgtgcc

SEQ ID NO: 633980 - DNA, 25 bp, Homo sapien
tgtgccgtcagcacttctgcaagcc

SEQ ID NO: 633981 - DNA, 25 bp, Homo sapien
cgttcacagggctctgtgccgtcag

SEQ ID NO: 633982 - DNA, 25 bp, Homo sapien
gcacttctgcaagccacgggatccg

SEQ ID NO: 633983 - DNA, 25 bp, Homo sapien
ccgcagatgggcgcctgccttaatg

SEQ ID NO: 633984 - DNA, 25 bp, Homo sapien
cttctgaaagcttccccgcagatgg

SEQ ID NO: 633985 - DNA, 25 bp, Homo sapien
cccgcagatgggcgcctgccttaat

SEQ ID NO: 633986 - DNA, 25 bp, Homo sapien
aagcttccccgcagatgggcgcctg

SEQ ID NO: 633987 - DNA, 25 bp, Homo sapien
aaataactcctgtctgactggcggg

SEQ ID NO: 633988 - DNA, 25 bp, Homo sapien
ggagcaggcttaatgatcgcttagc

SEQ ID NO: 633989 - DNA, 25 bp, Homo sapien
gccgcactcgctgagaaagcgcttt

SEQ ID NO: 633990 - DNA, 25 bp, Homo sapien
aacagatccctgcttgtaagtgaca

SEQ ID NO: 633991 - DNA, 25 bp, Homo sapien
cagagcgcctcagtctttgttctcc

SEQ ID NO: 633992 - DNA, 25 bp, Homo sapien
ggaagcttctgagctcgcaccagta

SEQ ID NO: 633993 - DNA, 25 bp, Homo sapien
agctatcgctgaactctgggctccg

SEQ ID NO: 633994 - DNA, 25 bp, Homo sapien
gaagtctgatcagcacttcggacag

SEQ ID NO: 633995 - DNA, 25 bp, Homo sapien
tgctatgagcagtttccgaagatga

SEQ ID NO: 633996 - DNA, 25 bp, Homo sapien
cccaccgggaggttaaagtgctatg

SEQ ID NO: 633997 - DNA, 25 bp, Homo sapien
aacttgaaatcggtgcctgctggca

SEQ ID NO: 633998 - DNA, 25 bp, Homo sapien
gcgctgccaggaggagcattcagaa

SEQ ID NO: 633999 - DNA, 25 bp, Homo sapien
ccaaaccttcggcattcagaaattc

SEQ ID NO: 634000 - DNA, 25 bp, Homo sapien
aactcttatcggcaggctgcaggct

SEQ ID NO: 634001 - DNA, 25 bp, Homo sapien
ctaggatgtcttacaccccaaacct

SEQ ID NO: 634002 - DNA, 25 bp, Homo sapien
gaaattctattaaactcttatcggc

SEQ ID NO: 634003 - DNA, 25 bp, Homo sapien
ggcaaacgattgtccattatcataa

SEQ ID NO: 634004 - DNA, 25 bp, Homo sapien
cagagtattcttgtttgcggcccaa

SEQ ID NO: 634005 - DNA, 25 bp, Homo sapien
tgataaatcaggcaaacgattgtcc

SEQ ID NO: 634006 - DNA, 25 bp, Homo sapien
caaatctccttcttgtactgataaa

SEQ ID NO: 634007 - DNA, 25 bp, Homo sapien
gaggaggctcctttgtaaatacgct

SEQ ID NO: 634008 - DNA, 25 bp, Homo sapien
tagtgtgcgaactcctaagccagct

SEQ ID NO: 634009 - DNA, 25 bp, Homo sapien
gcctgcgtgcgggtttcaattaaat

SEQ ID NO: 634010 - DNA, 25 bp, Homo sapien
taagccagctaaaggcgacgtctca

SEQ ID NO: 634011 - DNA, 25 bp, Homo sapien
ggcagggctcaacctcaagaaggaa

SEQ ID NO: 634012 - DNA, 25 bp, Homo sapien
gaggaataattcagaactgctcaac

SEQ ID NO: 634013 - DNA, 25 bp, Homo sapien
gacttgggatgctttcctcaggccc

SEQ ID NO: 634014 - DNA, 25 bp, Homo sapien
caagaaggaacagagtggaggaata

SEQ ID NO: 634015 - DNA, 25 bp, Homo sapien
caaaccaaatcacaggacgggctct

SEQ ID NO: 634016 - DNA, 25 bp, Homo sapien
ctgcagtaataatgactttccaaac

SEQ ID NO: 634017 - DNA, 25 bp, Homo sapien
ccaaatcacaggacgggctctccag

SEQ ID NO: 634018 - DNA, 25 bp, Homo sapien
ctttccaaaccaaatcacaggacgg

SEQ ID NO: 634019 - DNA, 25 bp, Homo sapien
aaaggcagaccagcttttgctgagt

SEQ ID NO: 634020 - DNA, 25 bp, Homo sapien
agggagttggcaattctatagcttt

SEQ ID NO: 634021 - DNA, 25 bp, Homo sapien
aattctatagctttgcacatttctc

SEQ ID NO: 634022 - DNA, 25 bp, Homo sapien
gcagaccagcttttgctgagtttag

SEQ ID NO: 634023 - DNA, 25 bp, Homo sapien
tgtccacctctgatttaacagctca

SEQ ID NO: 634024 - DNA, 25 bp, Homo sapien
gctggccttgcctccgtgtgtccac

SEQ ID NO: 634025 - DNA, 25 bp, Homo sapien
cttgcctccgtgtgtccacctctga

SEQ ID NO: 634026 - DNA, 25 bp, Homo sapien
taacagctcacctcggaactcattt

SEQ ID NO: 634027 - DNA, 25 bp, Homo sapien
cttgcagtgtctgcccaggtgtctt

SEQ ID NO: 634028 - DNA, 25 bp, Homo sapien
ttgcagtgtctgcccaggtgtcttg

SEQ ID NO: 634029 - DNA, 25 bp, Homo sapien
tgcagtgtctgcccaggtgtcttga

SEQ ID NO: 634030 - DNA, 25 bp, Homo sapien
gcagtgtctgcccaggtgtcttgag

SEQ ID NO: 634031 - DNA, 25 bp, Homo sapien
tcctgcgggagccaaaatatgagcg

SEQ ID NO: 634032 - DNA, 25 bp, Homo sapien
tgaagttcccactacaactgcatag

SEQ ID NO: 634033 - DNA, 25 bp, Homo sapien
cattctcgccaccagattcaaaaga

SEQ ID NO: 634034 - DNA, 25 bp, Homo sapien
tccaacatggatcagcagagcactg

SEQ ID NO: 634035 - DNA, 25 bp, Homo sapien
tttctcaagaacgtctgctctgttt

SEQ ID NO: 634036 - DNA, 25 bp, Homo sapien
tgctgggccggcaacctttctcaag

SEQ ID NO: 634037 - DNA, 25 bp, Homo sapien
gctgggccggcaacctttctcaaga

SEQ ID NO: 634038 - DNA, 25 bp, Homo sapien
acctttctcaagaacgtctgctctg

SEQ ID NO: 634039 - DNA, 25 bp, Homo sapien
acagactcagccaccagcggcagtg

SEQ ID NO: 634040 - DNA, 25 bp, Homo sapien
cagtgctgggtcgtccagtggcttc

SEQ ID NO: 634041 - DNA, 25 bp, Homo sapien
actcagccaccagcggcagtgctgg

SEQ ID NO: 634042 - DNA, 25 bp, Homo sapien
agtggcttctgaccccaacgtgtcc

SEQ ID NO: 634043 - DNA, 25 bp, Homo sapien
ccttggatcgggtgcgagctcgctt

SEQ ID NO: 634044 - DNA, 25 bp, Homo sapien
ctcgcagggccttggatcgggtgcg

SEQ ID NO: 634045 - DNA, 25 bp, Homo sapien
cagggccttggatcgggtgcgagct

SEQ ID NO: 634046 - DNA, 25 bp, Homo sapien
gatcgggtgcgagctcgcttgtctt

SEQ ID NO: 634047 - DNA, 25 bp, Homo sapien
ctgaggtctgcagctgtggtctctg

SEQ ID NO: 634048 - DNA, 25 bp, Homo sapien
gaggtctgcagctgtggtctctggg

SEQ ID NO: 634049 - DNA, 25 bp, Homo sapien
tctgcagctgtggtctctgggggtc

SEQ ID NO: 634050 - DNA, 25 bp, Homo sapien
ggtctgcagctgtggtctctggggg

SEQ ID NO: 634051 - DNA, 25 bp, Homo sapien
tggagtacttgccccggacgtgccc

SEQ ID NO: 634052 - DNA, 25 bp, Homo sapien
ctggagtacttgccccggacgtgcc

SEQ ID NO: 634053 - DNA, 25 bp, Homo sapien
gattcatccgaaacagaggcgtcct

SEQ ID NO: 634054 - DNA, 25 bp, Homo sapien
gaggcgtccttcacctcagtgtcct

SEQ ID NO: 634055 - DNA, 25 bp, Homo sapien
gatgaatctcgtcctgtcctgacgt

SEQ ID NO: 634056 - DNA, 25 bp, Homo sapien
agagttccttccgattcatccgaaa

SEQ ID NO: 634057 - DNA, 25 bp, Homo sapien
ctggtcctcaatcacctgaagctca

SEQ ID NO: 634058 - DNA, 25 bp, Homo sapien
tgaagctcaacctgaggtgtttcct

SEQ ID NO: 634059 - DNA, 25 bp, Homo sapien
ggcaccccgtcttcagaggctccat

SEQ ID NO: 634060 - DNA, 25 bp, Homo sapien
tcaatcacctgaagctcaacctgag

SEQ ID NO: 634061 - DNA, 25 bp, Homo sapien
agggctaggagctccaacatggcag

SEQ ID NO: 634062 - DNA, 25 bp, Homo sapien
ggctaggagctccaacatggcagtc

SEQ ID NO: 634063 - DNA, 25 bp, Homo sapien
gggctaggagctccaacatggcagt

SEQ ID NO: 634064 - DNA, 25 bp, Homo sapien
gctaggagctccaacatggcagtcc

SEQ ID NO: 634065 - DNA, 25 bp, Homo sapien
gatctaggactatgttgattccacg

SEQ ID NO: 634066 - DNA, 25 bp, Homo sapien
ttctgaaatccatctcagacccttc

SEQ ID NO: 634067 - DNA, 25 bp, Homo sapien
acgggacagcgcactcactccagag

SEQ ID NO: 634068 - DNA, 25 bp, Homo sapien
aggactatgttgattccacgggaca

SEQ ID NO: 634069 - DNA, 25 bp, Homo sapien
agtccaagcccaggttgacagctga

SEQ ID NO: 634070 - DNA, 25 bp, Homo sapien
gccagcacgtcccacagtggtagga

SEQ ID NO: 634071 - DNA, 25 bp, Homo sapien
agtggtaggaatgggccctgccatc

SEQ ID NO: 634072 - DNA, 25 bp, Homo sapien
gccccgtagggttgtcagcaaggac

SEQ ID NO: 634073 - DNA, 25 bp, Homo sapien
gataaacctgcattgtatacaatgg

SEQ ID NO: 634074 - DNA, 25 bp, Homo sapien
gcttaagcagcaagtcagattttaa

SEQ ID NO: 634075 - DNA, 25 bp, Homo sapien
tactttcccaaatcagataaacctg

SEQ ID NO: 634076 - DNA, 25 bp, Homo sapien
taatgttcctctcccatcacgttta

SEQ ID NO: 634077 - DNA, 25 bp, Homo sapien
ggatttggtatggacctttctgtca

SEQ ID NO: 634078 - DNA, 25 bp, Homo sapien
gagcacgtgggaagactccaggtct

SEQ ID NO: 634079 - DNA, 25 bp, Homo sapien
aatccagaaatcacggtgaatatat

SEQ ID NO: 634080 - DNA, 25 bp, Homo sapien
tcactctttatacgggagccaaggg

SEQ ID NO: 634081 - DNA, 25 bp, Homo sapien
aagttgcgatgattccctggtagct

SEQ ID NO: 634082 - DNA, 25 bp, Homo sapien
tggatccaaaatgggacttgacggg

SEQ ID NO: 634083 - DNA, 25 bp, Homo sapien
caatttgacccaagttcaggagaga

SEQ ID NO: 634084 - DNA, 25 bp, Homo sapien
tcggtggtgacttcgacgacctcct

SEQ ID NO: 634085 - DNA, 25 bp, Homo sapien
tcttcgtgactcaggatgcctttct

SEQ ID NO: 634086 - DNA, 25 bp, Homo sapien
tcctcttcgtgactcaggatgcctt

SEQ ID NO: 634087 - DNA, 25 bp, Homo sapien
caggatgcctttctgcttgctggac

SEQ ID NO: 634088 - DNA, 25 bp, Homo sapien
cgtcctcctcttcgtgactcaggat

SEQ ID NO: 634089 - DNA, 25 bp, Homo sapien
tgggcagaggtgtgagaggtgtctt

SEQ ID NO: 634090 - DNA, 25 bp, Homo sapien
ggtgtcttcctgaaagatcacatca

SEQ ID NO: 634091 - DNA, 25 bp, Homo sapien
agaggtgtgagaggtgtcttcctga

SEQ ID NO: 634092 - DNA, 25 bp, Homo sapien
tgtcttcctgaaagatcacatcagg

SEQ ID NO: 634093 - DNA, 25 bp, Homo sapien
ttgtcatcatccgagcggacctcca

SEQ ID NO: 634094 - DNA, 25 bp, Homo sapien
gactgttgacttccgggagtgggtg

SEQ ID NO: 634095 - DNA, 25 bp, Homo sapien
tgcatctccgactcgtcagtgactg

SEQ ID NO: 634096 - DNA, 25 bp, Homo sapien
aggtttccccgggtcatcatgtcct

SEQ ID NO: 634097 - DNA, 25 bp, Homo sapien
gtagtaactcttccgcacagtgtcc

SEQ ID NO: 634098 - DNA, 25 bp, Homo sapien
tgtagtaactcttccgcacagtgtc

SEQ ID NO: 634099 - DNA, 25 bp, Homo sapien
agcccggctcgcagactgtgcgcac

SEQ ID NO: 634100 - DNA, 25 bp, Homo sapien
agtaactcttccgcacagtgtccag

SEQ ID NO: 634101 - DNA, 25 bp, Homo sapien
aaggctgcggtggtgagggtacaac

SEQ ID NO: 634102 - DNA, 25 bp, Homo sapien
cctatccttgtggggacagccagaa

SEQ ID NO: 634103 - DNA, 25 bp, Homo sapien
gacacttgatctcacgcttctcagc

SEQ ID NO: 634104 - DNA, 25 bp, Homo sapien
gtggccagtgccatcacagcctggt

SEQ ID NO: 634105 - DNA, 25 bp, Homo sapien
agcacgttctcatgcatggctaaga

SEQ ID NO: 634106 - DNA, 25 bp, Homo sapien
ttcagcacgttctcatgcatggcta

SEQ ID NO: 634107 - DNA, 25 bp, Homo sapien
gttcacgtgaccctggcctgtgcag

SEQ ID NO: 634108 - DNA, 25 bp, Homo sapien
gcggttgctgttcacgtgaccctgg

SEQ ID NO: 634109 - DNA, 25 bp, Homo sapien
ctgaggatccgatcggaattggagc

SEQ ID NO: 634110 - DNA, 25 bp, Homo sapien
ttggagctactcttggaaggatctc

SEQ ID NO: 634111 - DNA, 25 bp, Homo sapien
gctgcttctcatgggatttggctaa

SEQ ID NO: 634112 - DNA, 25 bp, Homo sapien
atttttcggcggcagcaatgggaca

SEQ ID NO: 634113 - DNA, 25 bp, Homo sapien
tatggagggacctcgagctgcttca

SEQ ID NO: 634114 - DNA, 25 bp, Homo sapien
gttgggccggtagctcccatatgga

SEQ ID NO: 634115 - DNA, 25 bp, Homo sapien
caagcatgcgtttgccaaaaacctg

SEQ ID NO: 634116 - DNA, 25 bp, Homo sapien
aaaaacctgagcatcgaaacttgcg

SEQ ID NO: 634117 - DNA, 25 bp, Homo sapien
gaagtgctcctcacataactactgg

SEQ ID NO: 634118 - DNA, 25 bp, Homo sapien
gatgaagtgctcctcacataactac

SEQ ID NO: 634119 - DNA, 25 bp, Homo sapien
tgctcctcacataactactggaggg

SEQ ID NO: 634120 - DNA, 25 bp, Homo sapien
gaggatgaagtgctcctcacataac

SEQ ID NO: 634121 - DNA, 25 bp, Homo sapien
tctcccagcagcgcgtggagaggtt

SEQ ID NO: 634122 - DNA, 25 bp, Homo sapien
ctcggcgtcctgcgagtagtcaaag

SEQ ID NO: 634123 - DNA, 25 bp, Homo sapien
tcggcgtcctgcgagtagtcaaagc

SEQ ID NO: 634124 - DNA, 25 bp, Homo sapien
catctcccagcagcgcgtggagagg

SEQ ID NO: 634125 - DNA, 25 bp, Homo sapien
ctctcccaagaaaggctctgtggca

SEQ ID NO: 634126 - DNA, 25 bp, Homo sapien
aaggctctgtggcagatgtactaac

SEQ ID NO: 634127 - DNA, 25 bp, Homo sapien
gaaaggctctgtggcagatgtacta

SEQ ID NO: 634128 - DNA, 25 bp, Homo sapien
ccaagaaaggctctgtggcagatgt

SEQ ID NO: 634129 - DNA, 25 bp, Homo sapien
tcgtttgcggtgtttgtgcatgctc

SEQ ID NO: 634130 - DNA, 25 bp, Homo sapien
tttcgtctacctcgatatccacaga

SEQ ID NO: 634131 - DNA, 25 bp, Homo sapien
gggaggcgtcgggagacttcacacc

SEQ ID NO: 634132 - DNA, 25 bp, Homo sapien
tcaagtccagggttccattttcgtc

SEQ ID NO: 634133 - DNA, 25 bp, Homo sapien
ctctcaggcggctaggcttggtgta

SEQ ID NO: 634134 - DNA, 25 bp, Homo sapien
tggactggggagaggtcatggagct

SEQ ID NO: 634135 - DNA, 25 bp, Homo sapien
ctcctctctcaggcggctaggcttg

SEQ ID NO: 634136 - DNA, 25 bp, Homo sapien
tcccactcgtcctggcgggaggcct

SEQ ID NO: 634137 - DNA, 25 bp, Homo sapien
gaagcaaaagaatgggctgctggct

SEQ ID NO: 634138 - DNA, 25 bp, Homo sapien
tggtcagggtgacttcccccggata

SEQ ID NO: 634139 - DNA, 25 bp, Homo sapien
aaattctcttccgacacttcctggt

SEQ ID NO: 634140 - DNA, 25 bp, Homo sapien
aacttcagcttaaagttggtcaggg

SEQ ID NO: 634141 - DNA, 25 bp, Homo sapien
tcccggtgatgtggccgctgccgtc

SEQ ID NO: 634142 - DNA, 25 bp, Homo sapien
cgtagttcccggtgatgtggccgct

SEQ ID NO: 634143 - DNA, 25 bp, Homo sapien
tgggaggcgtagttcccggtgatgt

SEQ ID NO: 634144 - DNA, 25 bp, Homo sapien
ctgcggtgggaggcgtagttcccgg

SEQ ID NO: 634145 - DNA, 25 bp, Homo sapien
ccaggccagacggacccgagcagga

SEQ ID NO: 634146 - DNA, 25 bp, Homo sapien
agcacccaggccagacggacccgag

SEQ ID NO: 634147 - DNA, 25 bp, Homo sapien
acccaggccagacggacccgagcag

SEQ ID NO: 634148 - DNA, 25 bp, Homo sapien
cacccaggccagacggacccgagca

SEQ ID NO: 634149 - DNA, 25 bp, Homo sapien
ccatgaggtttctgaggctcttgtc

SEQ ID NO: 634150 - DNA, 25 bp, Homo sapien
gaggctcttgtcagcaagagggcaa

SEQ ID NO: 634151 - DNA, 25 bp, Homo sapien
ctgaggctcttgtcagcaagagggc

SEQ ID NO: 634152 - DNA, 25 bp, Homo sapien
tgggcagccatgaggtttctgaggc

SEQ ID NO: 634153 - DNA, 25 bp, Homo sapien
ctccggtgtgaagcgtagttccctg

SEQ ID NO: 634154 - DNA, 25 bp, Homo sapien
tgaagcgtagttccctgtgatgtgg

SEQ ID NO: 634155 - DNA, 25 bp, Homo sapien
tgtgaagcgtagttccctgtgatgt

SEQ ID NO: 634156 - DNA, 25 bp, Homo sapien
ggtgtgaagcgtagttccctgtgat

SEQ ID NO: 634157 - DNA, 25 bp, Homo sapien
tgccaccttgactccacttttcttt

SEQ ID NO: 634158 - DNA, 25 bp, Homo sapien
cacttttctttgcacgagggcagcc

SEQ ID NO: 634159 - DNA, 25 bp, Homo sapien
gccaccttgactccacttttctttg

SEQ ID NO: 634160 - DNA, 25 bp, Homo sapien
ttttctttgcacgagggcagccgga

SEQ ID NO: 634161 - DNA, 25 bp, Homo sapien
cgaaaatctcaattccgcaatgcaa

SEQ ID NO: 634162 - DNA, 25 bp, Homo sapien
tccgcaatgcaatgaaagagccagc

SEQ ID NO: 634163 - DNA, 25 bp, Homo sapien
acacgaaaatctcaattccgcaatg

SEQ ID NO: 634164 - DNA, 25 bp, Homo sapien
tctcaattccgcaatgcaatgaaag

SEQ ID NO: 634165 - DNA, 25 bp, Homo sapien
ttaatgaaaagggaatctagtagga

SEQ ID NO: 634166 - DNA, 25 bp, Homo sapien
agttaggtgacccgttgtattaatg

SEQ ID NO: 634167 - DNA, 25 bp, Homo sapien
tcagttaggtgacccgttgtattaa

SEQ ID NO: 634168 - DNA, 25 bp, Homo sapien
taggtgacccgttgtattaatgaaa

SEQ ID NO: 634169 - DNA, 25 bp, Homo sapien
atgtcagctctgaaagtacctcggt

SEQ ID NO: 634170 - DNA, 25 bp, Homo sapien
agatgtcagctctgaaagtacctcg

SEQ ID NO: 634171 - DNA, 25 bp, Homo sapien
gatgtcagctctgaaagtacctcgg

SEQ ID NO: 634172 - DNA, 25 bp, Homo sapien
tgaggaaactcccattggcgtggcc

SEQ ID NO: 634173 - DNA, 25 bp, Homo sapien
gatgcgctcctgtgagaggcgtatt

SEQ ID NO: 634174 - DNA, 25 bp, Homo sapien
cgtatttcccgctgatgtgaccgag

SEQ ID NO: 634175 - DNA, 25 bp, Homo sapien
agaatgacgagccattgagggaccc

SEQ ID NO: 634176 - DNA, 25 bp, Homo sapien
acccaccacgaccatcccagggtca

SEQ ID NO: 634177 - DNA, 25 bp, Homo sapien
cagggtcacataccacggccagccc

SEQ ID NO: 634178 - DNA, 25 bp, Homo sapien
cccagggtcacataccacggccagc

SEQ ID NO: 634179 - DNA, 25 bp, Homo sapien
gggtcacataccacggccagccccg

SEQ ID NO: 634180 - DNA, 25 bp, Homo sapien
aggccacatatcattcaccagccca

SEQ ID NO: 634181 - DNA, 25 bp, Homo sapien
gcagaggccacatatcattcaccag

SEQ ID NO: 634182 - DNA, 25 bp, Homo sapien
agcagaggccacatatcattcacca

SEQ ID NO: 634183 - DNA, 25 bp, Homo sapien
agaggccacatatcattcaccagcc

SEQ ID NO: 634184 - DNA, 25 bp, Homo sapien
catcccctgacagttttcccttctt

SEQ ID NO: 634185 - DNA, 25 bp, Homo sapien
tccagcaaaggttgctctgggacag

SEQ ID NO: 634186 - DNA, 25 bp, Homo sapien
cagccatgagcagggaaatccagga

SEQ ID NO: 634187 - DNA, 25 bp, Homo sapien
acccagccatgagcagggaaatcca

SEQ ID NO: 634188 - DNA, 25 bp, Homo sapien
ctggcacccagccatgagcagggaa

SEQ ID NO: 634189 - DNA, 25 bp, Homo sapien
gccatgagcagggaaatccaggaag

SEQ ID NO: 634190 - DNA, 25 bp, Homo sapien
tcagagccaaggtccgaaaggctgt

SEQ ID NO: 634191 - DNA, 25 bp, Homo sapien
ttacagcaggcatgacctcctcagg

SEQ ID NO: 634192 - DNA, 25 bp, Homo sapien
cagtggtcaccaaagccgcaggtta

SEQ ID NO: 634193 - DNA, 25 bp, Homo sapien
tctgatcccagtggtcaccaaagcc

SEQ ID NO: 634194 - DNA, 25 bp, Homo sapien
gagttggactcgttcaggtctcgga

SEQ ID NO: 634195 - DNA, 25 bp, Homo sapien
tctccgagttggactcgttcaggtc

SEQ ID NO: 634196 - DNA, 25 bp, Homo sapien
tggactcgttcaggtctcggatctc

SEQ ID NO: 634197 - DNA, 25 bp, Homo sapien
tccatctccgagttggactcgttca

SEQ ID NO: 634198 - DNA, 25 bp, Homo sapien
agactttggatgagggcctggctca

SEQ ID NO: 634199 - DNA, 25 bp, Homo sapien
cggatattggcgagactttggatga

SEQ ID NO: 634200 - DNA, 25 bp, Homo sapien
gaaggcggatattggcgagactttg

SEQ ID NO: 634201 - DNA, 25 bp, Homo sapien
catgtgcggaaggcggatattggcg

SEQ ID NO: 634202 - DNA, 25 bp, Homo sapien
gctcacataggcatcgaaattctgt

SEQ ID NO: 634203 - DNA, 25 bp, Homo sapien
cttgttctccgggtcctggttggag

SEQ ID NO: 634204 - DNA, 25 bp, Homo sapien
cgaaattctgttcgcatattggctc

SEQ ID NO: 634205 - DNA, 25 bp, Homo sapien
agtacatgtcggtgagggtgctcac

SEQ ID NO: 634206 - DNA, 25 bp, Homo sapien
tcttcagtgcccctatgcacacaga

SEQ ID NO: 634207 - DNA, 25 bp, Homo sapien
tcactgtgagttgggcatccccacg

SEQ ID NO: 634208 - DNA, 25 bp, Homo sapien
gagcctcgtgggagcggccaatttc

SEQ ID NO: 634209 - DNA, 25 bp, Homo sapien
ggccccaaacgggaagtcactgtga

SEQ ID NO: 634210 - DNA, 25 bp, Homo sapien
tggagactttgagctgctcttcaga

SEQ ID NO: 634211 - DNA, 25 bp, Homo sapien
ggaatactgtggttgcaaactccaa

SEQ ID NO: 634212 - DNA, 25 bp, Homo sapien
taccctcccagcctcgacagacaaa

SEQ ID NO: 634213 - DNA, 25 bp, Homo sapien
aaaggaatactgtggttgcaaactc

SEQ ID NO: 634214 - DNA, 25 bp, Homo sapien
tactgtggttgcaaactccaaaact

SEQ ID NO: 634215 - DNA, 25 bp, Homo sapien
ccagacccagggtctaaaggctgca

SEQ ID NO: 634216 - DNA, 25 bp, Homo sapien
cattaggctgattttcaggagtctc

SEQ ID NO: 634217 - DNA, 25 bp, Homo sapien
caactgtctggagtatcctctggga

SEQ ID NO: 634218 - DNA, 25 bp, Homo sapien
gggctgcgatgcttgtcaactgtct

SEQ ID NO: 634219 - DNA, 25 bp, Homo sapien
tggatgcagaggtcaagctcggcca

SEQ ID NO: 634220 - DNA, 25 bp, Homo sapien
cacctccgtcaccatggatgcagag

SEQ ID NO: 634221 - DNA, 25 bp, Homo sapien
gccatgacccggagaatgtggcagt

SEQ ID NO: 634222 - DNA, 25 bp, Homo sapien
aagctcggccatgacccggagaatg

SEQ ID NO: 634223 - DNA, 25 bp, Homo sapien
gggttcaacgcgcttcctgaggaag

SEQ ID NO: 634224 - DNA, 25 bp, Homo sapien
ggattctatttacacggtagggaca

SEQ ID NO: 634225 - DNA, 25 bp, Homo sapien
ccatttgctgttatccgtgcctgaa

SEQ ID NO: 634226 - DNA, 25 bp, Homo sapien
tgcaaacacaccacggagtgctgtg

SEQ ID NO: 634227 - DNA, 25 bp, Homo sapien
gaagaaaagtggaccgtgacatcag

SEQ ID NO: 634228 - DNA, 25 bp, Homo sapien
cctggctactcagtccgtgctggga

SEQ ID NO: 634229 - DNA, 25 bp, Homo sapien
tatatactgagcactctacatgggt

SEQ ID NO: 634230 - DNA, 25 bp, Homo sapien
ggtactagtatgacctccaagaaga

SEQ ID NO: 634231 - DNA, 25 bp, Homo sapien
agcagcgccgctccaacctcggccg

SEQ ID NO: 634232 - DNA, 25 bp, Homo sapien
tccctcgtgtgtccgcggccgagca

SEQ ID NO: 634233 - DNA, 25 bp, Homo sapien
caggctcggccggccgacgggttcg

SEQ ID NO: 634234 - DNA, 25 bp, Homo sapien
cctcggccgccgtaaacatccgccg

SEQ ID NO: 634235 - DNA, 25 bp, Homo sapien
cccgctcgccgcaggccggaccgag

SEQ ID NO: 634236 - DNA, 25 bp, Homo sapien
cgctcgccgcaggccggaccgaggg

SEQ ID NO: 634237 - DNA, 25 bp, Homo sapien
cacccgctcgccgcaggccggaccg

SEQ ID NO: 634238 - DNA, 25 bp, Homo sapien
acccgctcgccgcaggccggaccga

SEQ ID NO: 634239 - DNA, 25 bp, Homo sapien
gagctgtttagccattcccttgaga

SEQ ID NO: 634240 - DNA, 25 bp, Homo sapien
gacttatttgaggtgcaacgctgga

SEQ ID NO: 634241 - DNA, 25 bp, Homo sapien
cgatgtgtttactgggatgcgaccc

SEQ ID NO: 634242 - DNA, 25 bp, Homo sapien
aagcgtggccacaacaatttctgag

SEQ ID NO: 634243 - DNA, 25 bp, Homo sapien
tggaaaatcgcataccgtcctcagt

SEQ ID NO: 634244 - DNA, 25 bp, Homo sapien
taagaagcaaattggagctggccgg

SEQ ID NO: 634245 - DNA, 25 bp, Homo sapien
ggtaatctaacactccctcgcactg

SEQ ID NO: 634246 - DNA, 25 bp, Homo sapien
tgttagattacggtccacagccagc

SEQ ID NO: 634247 - DNA, 25 bp, Homo sapien
ttcaccagcactcacagcaccgccc

SEQ ID NO: 634248 - DNA, 25 bp, Homo sapien
ctcagtccggatatactgtgcttct

SEQ ID NO: 634249 - DNA, 25 bp, Homo sapien
cagctcagtccggatatactgtgct

SEQ ID NO: 634250 - DNA, 25 bp, Homo sapien
attgtcttcaccagcactcacagca

SEQ ID NO: 634251 - DNA, 25 bp, Homo sapien
ccatgcttccatgccaagtctttat

SEQ ID NO: 634252 - DNA, 25 bp, Homo sapien
aattcttcaagataatagtctgcac

SEQ ID NO: 634253 - DNA, 25 bp, Homo sapien
taatagtctgcacgatcgatagctc

SEQ ID NO: 634254 - DNA, 25 bp, Homo sapien
cgatcgatagctctgaaagcctgct

SEQ ID NO: 634255 - DNA, 25 bp, Homo sapien
ctgcagatctagggcttccatcacc

SEQ ID NO: 634256 - DNA, 25 bp, Homo sapien
atctagggcttccatcacctccgag

SEQ ID NO: 634257 - DNA, 25 bp, Homo sapien
tagggcttccatcacctccgagtag

SEQ ID NO: 634258 - DNA, 25 bp, Homo sapien
tgcagatctagggcttccatcacct

SEQ ID NO: 634259 - DNA, 25 bp, Homo sapien
tgcccaggttcagaaacgagagtcc

SEQ ID NO: 634260 - DNA, 25 bp, Homo sapien
actgcccaggttcagaaacgagagt

SEQ ID NO: 634261 - DNA, 25 bp, Homo sapien
ctgcccaggttcagaaacgagagtc

SEQ ID NO: 634262 - DNA, 25 bp, Homo sapien
gcccaggttcagaaacgagagtcca

SEQ ID NO: 634263 - DNA, 25 bp, Homo sapien
agtccacccgtaaatcctgtcagtt

SEQ ID NO: 634264 - DNA, 25 bp, Homo sapien
tctcaaagcacagggatcacaacag

SEQ ID NO: 634265 - DNA, 25 bp, Homo sapien
tcagctacgttggaggaaatcacaa

SEQ ID NO: 634266 - DNA, 25 bp, Homo sapien
cacctgaaggtagcaatctatagca

SEQ ID NO: 634267 - DNA, 25 bp, Homo sapien
tactctgaacgtcaagaccttctga

SEQ ID NO: 634268 - DNA, 25 bp, Homo sapien
caagaccttctgacaactccgactt

SEQ ID NO: 634269 - DNA, 25 bp, Homo sapien
tgaattactctgaacgtcaagacct

SEQ ID NO: 634270 - DNA, 25 bp, Homo sapien
agaccttctgacaactccgacttca

SEQ ID NO: 634271 - DNA, 25 bp, Homo sapien
tttgccgacaaaggcaaaacggtca

SEQ ID NO: 634272 - DNA, 25 bp, Homo sapien
ctttctggaagatgcaacactggtg

SEQ ID NO: 634273 - DNA, 25 bp, Homo sapien
ggaagatgcaacactggtgaacttt

SEQ ID NO: 634274 - DNA, 25 bp, Homo sapien
gacaaaggcaaaacggtcatcacct

SEQ ID NO: 634275 - DNA, 25 bp, Homo sapien
aggtaacatttaagacgattctgtt

SEQ ID NO: 634276 - DNA, 25 bp, Homo sapien
gaggtaacatttaagacgattctgt

SEQ ID NO: 634277 - DNA, 25 bp, Homo sapien
agaggtaacatttaagacgattctg

SEQ ID NO: 634278 - DNA, 25 bp, Homo sapien
taacatttaagacgattctgttttc

SEQ ID NO: 634279 - DNA, 25 bp, Homo sapien
tccaccccatggttcacaccaaaag

SEQ ID NO: 634280 - DNA, 25 bp, Homo sapien
caccccatggttcacaccaaaagga

SEQ ID NO: 634281 - DNA, 25 bp, Homo sapien
gttccaccccatggttcacaccaaa

SEQ ID NO: 634282 - DNA, 25 bp, Homo sapien
aagttccaccccatggttcacacca

SEQ ID NO: 634283 - DNA, 25 bp, Homo sapien
ttgcatactctatcacatctgagtg

SEQ ID NO: 634284 - DNA, 25 bp, Homo sapien
tttctgctttgcatactctatcaca

SEQ ID NO: 634285 - DNA, 25 bp, Homo sapien
aactatcacttgttctgatgaagaa

SEQ ID NO: 634286 - DNA, 25 bp, Homo sapien
cacttgttctgatgaagaagtccag

SEQ ID NO: 634287 - DNA, 25 bp, Homo sapien
ccaggcaattcccagtaacaaagga

SEQ ID NO: 634288 - DNA, 25 bp, Homo sapien
aacaatccggagaaatctccaggca

SEQ ID NO: 634289 - DNA, 25 bp, Homo sapien
caaaggaaggttcacagaagtcaaa

SEQ ID NO: 634290 - DNA, 25 bp, Homo sapien
tacacgatcatactgagaacaatcc

SEQ ID NO: 634291 - DNA, 25 bp, Homo sapien
aagtgtttaaatgagccttgccctg

SEQ ID NO: 634292 - DNA, 25 bp, Homo sapien
aaacttgtcatcttggatgcctggg

SEQ ID NO: 634293 - DNA, 25 bp, Homo sapien
gaatctggtggcttaacacactcca

SEQ ID NO: 634294 - DNA, 25 bp, Homo sapien
gatgcctgggcaattatcctcatgc

SEQ ID NO: 634295 - DNA, 25 bp, Homo sapien
aagctgaaggacctgtgcgtgttat

SEQ ID NO: 634296 - DNA, 25 bp, Homo sapien
gacctgtgcgtgttatcttagtcaa

SEQ ID NO: 634297 - DNA, 25 bp, Homo sapien
aaggacctgtgcgtgttatcttagt

SEQ ID NO: 634298 - DNA, 25 bp, Homo sapien
gctgaaggacctgtgcgtgttatct

SEQ ID NO: 634299 - DNA, 25 bp, Homo sapien
gtaactggacaagtcttgattttcc

SEQ ID NO: 634300 - DNA, 25 bp, Homo sapien
taactggacaagtcttgattttcct

SEQ ID NO: 634301 - DNA, 25 bp, Homo sapien
ttgattttcctgactctgaatggca

SEQ ID NO: 634302 - DNA, 25 bp, Homo sapien
attttcctgactctgaatggcaggg

SEQ ID NO: 634303 - DNA, 25 bp, Homo sapien
tatgtgcgtcctcggctttcaatgg

SEQ ID NO: 634304 - DNA, 25 bp, Homo sapien
tcaatggtgtgaccggcaacagctc

SEQ ID NO: 634305 - DNA, 25 bp, Homo sapien
caaataggctaagtctcccacatgg

SEQ ID NO: 634306 - DNA, 25 bp, Homo sapien
taaccttgtctacccatgaggcagc

SEQ ID NO: 634307 - DNA, 25 bp, Homo sapien
ggcccctggtagtgagtaagtagca

SEQ ID NO: 634308 - DNA, 25 bp, Homo sapien
gaaaggcctgcacagaatctcagca

SEQ ID NO: 634309 - DNA, 25 bp, Homo sapien
tctgcttgggataaggaacgtggct

SEQ ID NO: 634310 - DNA, 25 bp, Homo sapien
tagacagattacttccagagccact

SEQ ID NO: 634311 - DNA, 25 bp, Homo sapien
gaatatgttacaagaatatgagagc

SEQ ID NO: 634312 - DNA, 25 bp, Homo sapien
caattagtgctctaatttacaatca

SEQ ID NO: 634313 - DNA, 25 bp, Homo sapien
tatgagagcatgctaagcaaatgtc

SEQ ID NO: 634314 - DNA, 25 bp, Homo sapien
aagcaaatgtcaattagtgctctaa

SEQ ID NO: 634315 - DNA, 25 bp, Homo sapien
tcaaatgcatcggagtgacaccacc

SEQ ID NO: 634316 - DNA, 25 bp, Homo sapien
cacagtcaaatgcatcggagtgaca

SEQ ID NO: 634317 - DNA, 25 bp, Homo sapien
cagtcaaatgcatcggagtgacacc

SEQ ID NO: 634318 - DNA, 25 bp, Homo sapien
aatgcatcggagtgacaccaccaca

SEQ ID NO: 634319 - DNA, 25 bp, Homo sapien
tggaaatccgactggcaaagacttc

SEQ ID NO: 634320 - DNA, 25 bp, Homo sapien
cgtttccattcgacggcggcgaact

SEQ ID NO: 634321 - DNA, 25 bp, Homo sapien
ccttctggcgtaggaagttcactgg

SEQ ID NO: 634322 - DNA, 25 bp, Homo sapien
aatctttttaatggtgccccggatg

SEQ ID NO: 634323 - DNA, 25 bp, Homo sapien
cacttggtaagatagaaagctctcc

SEQ ID NO: 634324 - DNA, 25 bp, Homo sapien
tatacatgcaaactggactgtgtgg

SEQ ID NO: 634325 - DNA, 25 bp, Homo sapien
gacttcagtgtttcgtcagagccga

SEQ ID NO: 634326 - DNA, 25 bp, Homo sapien
aaattcaaacttggacgcaggtgcg

SEQ ID NO: 634327 - DNA, 25 bp, Homo sapien
gattttcccaagttccagactggta

SEQ ID NO: 634328 - DNA, 25 bp, Homo sapien
gacatgatttgtgtttaccagctca

SEQ ID NO: 634329 - DNA, 25 bp, Homo sapien
actgaattctggtataaggtgcgca

SEQ ID NO: 634330 - DNA, 25 bp, Homo sapien
tatcctgactacctttattgacatg

SEQ ID NO: 634331 - DNA, 25 bp, Homo sapien
ctacatctattgtgactgtcacaga

SEQ ID NO: 634332 - DNA, 25 bp, Homo sapien
tgaaaagaacatattcaagaattgg

SEQ ID NO: 634333 - DNA, 25 bp, Homo sapien
attgtgactgtcacagaatcaagca

SEQ ID NO: 634334 - DNA, 25 bp, Homo sapien
catctattgtgactgtcacagaatc

SEQ ID NO: 634335 - DNA, 25 bp, Homo sapien
tacagacaggcaaacgtgagtctcc

SEQ ID NO: 634336 - DNA, 25 bp, Homo sapien
tcatcccactatgaggttggccaat

SEQ ID NO: 634337 - DNA, 25 bp, Homo sapien
tctgcagacggatcaaggaggctca

SEQ ID NO: 634338 - DNA, 25 bp, Homo sapien
gattcccagagaccattacccttca

SEQ ID NO: 634339 - DNA, 25 bp, Homo sapien
gacataagcacaaggtccacagttg

SEQ ID NO: 634340 - DNA, 25 bp, Homo sapien
gaacctcaagtgctaatttggacat

SEQ ID NO: 634341 - DNA, 25 bp, Homo sapien
cctgcccgtgtggtctatgactcca

SEQ ID NO: 634342 - DNA, 25 bp, Homo sapien
cattctggttccaacatagtggagc

SEQ ID NO: 634343 - DNA, 25 bp, Homo sapien
ccatggagcgcccagaaaatacagc

SEQ ID NO: 634344 - DNA, 25 bp, Homo sapien
gagtatcgcccatgtatccataagg

SEQ ID NO: 634345 - DNA, 25 bp, Homo sapien
catttgttacagagggtccaatcta

SEQ ID NO: 634346 - DNA, 25 bp, Homo sapien
tatcaatggaggacgcatggacttc

SEQ ID NO: 634347 - DNA, 25 bp, Homo sapien
gtcagccacgtaggagattgagatg

SEQ ID NO: 634348 - DNA, 25 bp, Homo sapien
tgtcagccacgtaggagattgagat

SEQ ID NO: 634349 - DNA, 25 bp, Homo sapien
gtgtcagccacgtaggagattgaga

SEQ ID NO: 634350 - DNA, 25 bp, Homo sapien
agaatccacgtatacgaaaattcca

SEQ ID NO: 634351 - DNA, 25 bp, Homo sapien
tgtcacccctctagaatccacgtat

SEQ ID NO: 634352 - DNA, 25 bp, Homo sapien
acccctctagaatccacgtatacga

SEQ ID NO: 634353 - DNA, 25 bp, Homo sapien
cctctagaatccacgtatacgaaaa

SEQ ID NO: 634354 - DNA, 25 bp, Homo sapien
gggcctggaatggccgacgtgagga

SEQ ID NO: 634355 - DNA, 25 bp, Homo sapien
tgggactgatgactgcatgatcttc

SEQ ID NO: 634356 - DNA, 25 bp, Homo sapien
gggactgatgactgcatgatcttct

SEQ ID NO: 634357 - DNA, 25 bp, Homo sapien
ccaaagcccaacacccccaagtgtg

SEQ ID NO: 634358 - DNA, 25 bp, Homo sapien
caaagcccaacacccccaagtgtgc

SEQ ID NO: 634359 - DNA, 25 bp, Homo sapien
aatcattttaagatgctcgaatttg

SEQ ID NO: 634360 - DNA, 25 bp, Homo sapien
tctttgtatcagtgctcagctgagt

SEQ ID NO: 634361 - DNA, 25 bp, Homo sapien
ttgaatcattttaagatgctcgaat

SEQ ID NO: 634362 - DNA, 25 bp, Homo sapien
tcattttaagatgctcgaatttgtc

SEQ ID NO: 634363 - DNA, 25 bp, Homo sapien
gacaatctcacaggaagatgggatg

SEQ ID NO: 634364 - DNA, 25 bp, Homo sapien
tatacaataagcaagccaattttta

SEQ ID NO: 634365 - DNA, 25 bp, Homo sapien
gagttaaatgctacaaagacaatct

SEQ ID NO: 634366 - DNA, 25 bp, Homo sapien
gagatagcgtttcatcatcttggtc

SEQ ID NO: 634367 - DNA, 25 bp, Homo sapien
tgatagttcttcattgaatcctgga

SEQ ID NO: 634368 - DNA, 25 bp, Homo sapien
aataagaggaattcatatggatcag

SEQ ID NO: 634369 - DNA, 25 bp, Homo sapien
acaaggtgatagttcttcattgaat

SEQ ID NO: 634370 - DNA, 25 bp, Homo sapien
ttaacaaggtgatagttcttcattg

SEQ ID NO: 634371 - DNA, 25 bp, Homo sapien
ggccttatccataccttcaagtttg

SEQ ID NO: 634372 - DNA, 25 bp, Homo sapien
tcagggccttatccataccttcaag

SEQ ID NO: 634373 - DNA, 25 bp, Homo sapien
ttatccataccttcaagtttgctct

SEQ ID NO: 634374 - DNA, 25 bp, Homo sapien
atgactcagggccttatccatacct

SEQ ID NO: 634375 - DNA, 25 bp, Homo sapien
caggttctgctctacttaaaagttt

SEQ ID NO: 634376 - DNA, 25 bp, Homo sapien
ggcgagcaagtggttagaaaatcat

SEQ ID NO: 634377 - DNA, 25 bp, Homo sapien
gttttccttgttggcgagcaagtgg

SEQ ID NO: 634378 - DNA, 25 bp, Homo sapien
ttcaggttctgctctacttaaaagt

SEQ ID NO: 634379 - DNA, 25 bp, Homo sapien
cagcttcttcgcaaggcagcatgaa

SEQ ID NO: 634380 - DNA, 25 bp, Homo sapien
aaggcagcatgaagaagtgccgagc

SEQ ID NO: 634381 - DNA, 25 bp, Homo sapien
cctaaccatatcagtaggcatgtgt

SEQ ID NO: 634382 - DNA, 25 bp, Homo sapien
aagaggaagcaagccagcttcttcg

SEQ ID NO: 634383 - DNA, 25 bp, Homo sapien
ctggatacaggtcttgataggtctc

SEQ ID NO: 634384 - DNA, 25 bp, Homo sapien
gatacaggtcttgataggtctcttg

SEQ ID NO: 634385 - DNA, 25 bp, Homo sapien
tacaggtcttgataggtctcttgat

SEQ ID NO: 634386 - DNA, 25 bp, Homo sapien
ggtcttgataggtctcttgatgtca

SEQ ID NO: 634387 - DNA, 25 bp, Homo sapien
aaatctccttatcatctacctggta

SEQ ID NO: 634388 - DNA, 25 bp, Homo sapien
aatctccttatcatctacctggtaa

SEQ ID NO: 634389 - DNA, 25 bp, Homo sapien
tcaccagaatgttgatgtggcttct

SEQ ID NO: 634390 - DNA, 25 bp, Homo sapien
cataatttcccacttagacatccta

SEQ ID NO: 634391 - DNA, 25 bp, Homo sapien
tcctgcaatagcctgttactttatt

SEQ ID NO: 634392 - DNA, 25 bp, Homo sapien
gatgatgtaatcctgcagcacactc

SEQ ID NO: 634393 - DNA, 25 bp, Homo sapien
aacagcagaataatgagaaccagaa

SEQ ID NO: 634394 - DNA, 25 bp, Homo sapien
ctgtgagtacctcaaacagcagaat

SEQ ID NO: 634395 - DNA, 25 bp, Homo sapien
caaacagcagaataatgagaaccag

SEQ ID NO: 634396 - DNA, 25 bp, Homo sapien
cagcagaataatgagaaccagaaac

SEQ ID NO: 634397 - DNA, 25 bp, Homo sapien
ttgttgtactttccacgctaggcta

SEQ ID NO: 634398 - DNA, 25 bp, Homo sapien
cacagttgctattagaggcccctga

SEQ ID NO: 634399 - DNA, 25 bp, Homo sapien
gctaggctacctcgatcacagaaat

SEQ ID NO: 634400 - DNA, 25 bp, Homo sapien
caggtacaaggagtgtgcaatcggt

SEQ ID NO: 634401 - DNA, 25 bp, Homo sapien
gtgctcactgaccaggcccacagaa

SEQ ID NO: 634402 - DNA, 25 bp, Homo sapien
caaccacaaaattccttgtccctgt

SEQ ID NO: 634403 - DNA, 25 bp, Homo sapien
aagttctttgcctcacagcacagaa

SEQ ID NO: 634404 - DNA, 25 bp, Homo sapien
ctctctggtgcctctccaaccacaa

SEQ ID NO: 634405 - DNA, 25 bp, Homo sapien
ttattcatgtttctttgctagtttt

SEQ ID NO: 634406 - DNA, 25 bp, Homo sapien
tattcatgtttctttgctagttttt

SEQ ID NO: 634407 - DNA, 25 bp, Homo sapien
attcatgtttctttgctagtttttt

SEQ ID NO: 634408 - DNA, 25 bp, Homo sapien
tgatccaaggctccaggtgctggga

SEQ ID NO: 634409 - DNA, 25 bp, Homo sapien
tctgaatggagatccggtcctggaa

SEQ ID NO: 634410 - DNA, 25 bp, Homo sapien
gactgtagatcagggtctgaatgga

SEQ ID NO: 634411 - DNA, 25 bp, Homo sapien
taatcagaaattcccacctggccca

SEQ ID NO: 634412 - DNA, 25 bp, Homo sapien
gaagggtagtggctcttccacagga

SEQ ID NO: 634413 - DNA, 25 bp, Homo sapien
gaatgttgaggatgacatccatgtc

SEQ ID NO: 634414 - DNA, 25 bp, Homo sapien
gggtagtggctcttccacaggaatg

SEQ ID NO: 634415 - DNA, 25 bp, Homo sapien
ggaatgttgaggatgacatccatgt

SEQ ID NO: 634416 - DNA, 25 bp, Homo sapien
acatcctcaaatatgacctctcggg

SEQ ID NO: 634417 - DNA, 25 bp, Homo sapien
cacctcggcccttaatacaggcatg

SEQ ID NO: 634418 - DNA, 25 bp, Homo sapien
ttgggtctccgaagcagaacatcct

SEQ ID NO: 634419 - DNA, 25 bp, Homo sapien
gcccttaatacaggcatgttctcct

SEQ ID NO: 634420 - DNA, 25 bp, Homo sapien
caaggtgcggctggcttccaagtta

SEQ ID NO: 634421 - DNA, 25 bp, Homo sapien
tgtcactgggacttgctggactcca

SEQ ID NO: 634422 - DNA, 25 bp, Homo sapien
ctggcagagatagtgaagggcatac

SEQ ID NO: 634423 - DNA, 25 bp, Homo sapien
caagtgacagtaatggcaccggcaa

SEQ ID NO: 634424 - DNA, 25 bp, Homo sapien
ctacagggaccaccaccttccttgc

SEQ ID NO: 634425 - DNA, 25 bp, Homo sapien
accaccaccttccttgcccacgcac

SEQ ID NO: 634426 - DNA, 25 bp, Homo sapien
ggaccaccaccttccttgcccacgc

SEQ ID NO: 634427 - DNA, 25 bp, Homo sapien
cagggaccaccaccttccttgccca

SEQ ID NO: 634428 - DNA, 25 bp, Homo sapien
gagcctcttcatagggacgctgggt

SEQ ID NO: 634429 - DNA, 25 bp, Homo sapien
gcctcttcatagggacgctgggttt

SEQ ID NO: 634430 - DNA, 25 bp, Homo sapien
cttctgtaggagagcctcttcatag

SEQ ID NO: 634431 - DNA, 25 bp, Homo sapien
agcctcttcatagggacgctgggtt

SEQ ID NO: 634432 - DNA, 25 bp, Homo sapien
agcagaacatggtagagaccgatgg

SEQ ID NO: 634433 - DNA, 25 bp, Homo sapien
gcagcagaacatggtagagaccgat

SEQ ID NO: 634434 - DNA, 25 bp, Homo sapien
gggcagcagaacatggtagagaccg

SEQ ID NO: 634435 - DNA, 25 bp, Homo sapien
gtagagaccgatggggctgcagtgg

SEQ ID NO: 634436 - DNA, 25 bp, Homo sapien
tcccacacagcaactggctactcac

SEQ ID NO: 634437 - DNA, 25 bp, Homo sapien
ggggtgagacctggatccccgctcc

SEQ ID NO: 634438 - DNA, 25 bp, Homo sapien
gctcccacacagcaactggctactc

SEQ ID NO: 634439 - DNA, 25 bp, Homo sapien
tgagacctggatccccgctcccaca

SEQ ID NO: 634440 - DNA, 25 bp, Homo sapien
ttgtcagacaaggattccaggacct

SEQ ID NO: 634441 - DNA, 25 bp, Homo sapien
ttctgcgcatctcaccgaggtcatc

SEQ ID NO: 634442 - DNA, 25 bp, Homo sapien
cagacaaggattccaggacctttct

SEQ ID NO: 634443 - DNA, 25 bp, Homo sapien
gacctttctgcgcatctcaccgagg

SEQ ID NO: 634444 - DNA, 25 bp, Homo sapien
ggagccagcagaagggtgttggtca

SEQ ID NO: 634445 - DNA, 25 bp, Homo sapien
gagccagcagaagggtgttggtcac

SEQ ID NO: 634446 - DNA, 25 bp, Homo sapien
agccagcagaagggtgttggtcacc

SEQ ID NO: 634447 - DNA, 25 bp, Homo sapien
ctgcagctggcgcataagagtggag

SEQ ID NO: 634448 - DNA, 25 bp, Homo sapien
gcgcataagagtggagatctggaca

SEQ ID NO: 634449 - DNA, 25 bp, Homo sapien
cgcataagagtggagatctggacag

SEQ ID NO: 634450 - DNA, 25 bp, Homo sapien
agctggcgcataagagtggagatct

SEQ ID NO: 634451 - DNA, 25 bp, Homo sapien
agtgctcaggaagttcacttcctcc

SEQ ID NO: 634452 - DNA, 25 bp, Homo sapien
ggggttagggaggtcagcagggaca

SEQ ID NO: 634453 - DNA, 25 bp, Homo sapien
ggttagggaggtcagcagggacagg

SEQ ID NO: 634454 - DNA, 25 bp, Homo sapien
ttagggaggtcagcagggacaggag

SEQ ID NO: 634455 - DNA, 25 bp, Homo sapien
tggggaggggttagggaggtcagca

SEQ ID NO: 634456 - DNA, 25 bp, Homo sapien
tttgagtactccaagatgtcgatga

SEQ ID NO: 634457 - DNA, 25 bp, Homo sapien
agtactccaagatgtcgatgatggt

SEQ ID NO: 634458 - DNA, 25 bp, Homo sapien
tcttcttgtttgagtactccaagat

SEQ ID NO: 634459 - DNA, 25 bp, Homo sapien
cttgtttgagtactccaagatgtcg

SEQ ID NO: 634460 - DNA, 25 bp, Homo sapien
gaggaagttctcacggcttcggagc

SEQ ID NO: 634461 - DNA, 25 bp, Homo sapien
tggtctcgatcagctcccggttgag

SEQ ID NO: 634462 - DNA, 25 bp, Homo sapien
gcttcggagctctcgcagagcggcc

SEQ ID NO: 634463 - DNA, 25 bp, Homo sapien
tgcagggtcgtgctgttctccatct

SEQ ID NO: 634464 - DNA, 25 bp, Homo sapien
cctgctggtaaacgcggcccaagct

SEQ ID NO: 634465 - DNA, 25 bp, Homo sapien
ctcctgctggtaaacgcggcccaag

SEQ ID NO: 634466 - DNA, 25 bp, Homo sapien
tgggcggttccccattgtctgcgcc

SEQ ID NO: 634467 - DNA, 25 bp, Homo sapien
ccaagctgggcggttccccattgtc

SEQ ID NO: 634468 - DNA, 25 bp, Homo sapien
caccgtagtgggcttgaagtgaaac

SEQ ID NO: 634469 - DNA, 25 bp, Homo sapien
cgccttctatgtagttctcttggat

SEQ ID NO: 634470 - DNA, 25 bp, Homo sapien
tctcttggattcttcggctggcagc

SEQ ID NO: 634471 - DNA, 25 bp, Homo sapien
ccagattttggcatgcatcttccca

SEQ ID NO: 634472 - DNA, 25 bp, Homo sapien
cccgggagtgcaccattaatgagag

SEQ ID NO: 634473 - DNA, 25 bp, Homo sapien
caagaactaatgagccagacagtcc

SEQ ID NO: 634474 - DNA, 25 bp, Homo sapien
cagagtctggcaggcctgaatccaa

SEQ ID NO: 634475 - DNA, 25 bp, Homo sapien
tataatgtgacactagaccgagggt

SEQ ID NO: 634476 - DNA, 25 bp, Homo sapien
agcagccacgcaaaactccaactgg

SEQ ID NO: 634477 - DNA, 25 bp, Homo sapien
acaacaccagacgaaggcacagcag

SEQ ID NO: 634478 - DNA, 25 bp, Homo sapien
tctctgaaacactctaagggctgtg

SEQ ID NO: 634479 - DNA, 25 bp, Homo sapien
gaccacaacaccagacgaaggcaca

SEQ ID NO: 634480 - DNA, 25 bp, Homo sapien
tctgcctgtcgtgcaatgacatggg

SEQ ID NO: 634481 - DNA, 25 bp, Homo sapien
gcttcaggtacaacccagctcatct

SEQ ID NO: 634482 - DNA, 25 bp, Homo sapien
tgacatgggacaaatcgcccaggtg

SEQ ID NO: 634483 - DNA, 25 bp, Homo sapien
cgcccaggtggatccagctgtactc

SEQ ID NO: 634484 - DNA, 25 bp, Homo sapien
tagcctaccctaatataagtggtgt

SEQ ID NO: 634485 - DNA, 25 bp, Homo sapien
gggcattgtttattacatcagttag

SEQ ID NO: 634486 - DNA, 25 bp, Homo sapien
tattacatcagttagcctaccctaa

SEQ ID NO: 634487 - DNA, 25 bp, Homo sapien
ctaatataagtggtgtcaccaagag

SEQ ID NO: 634488 - DNA, 25 bp, Homo sapien
ctggttggaccctagtcaaagtctt

SEQ ID NO: 634489 - DNA, 25 bp, Homo sapien
ggttggaccctagtcaaagtcttca

SEQ ID NO: 634490 - DNA, 25 bp, Homo sapien
tggttggaccctagtcaaagtcttc

SEQ ID NO: 634491 - DNA, 25 bp, Homo sapien
gttggaccctagtcaaagtcttcat

SEQ ID NO: 634492 - DNA, 25 bp, Homo sapien
ttgcttgtatgaaggctgttggctt

SEQ ID NO: 634493 - DNA, 25 bp, Homo sapien
gcttgtatgaaggctgttggcttgt

SEQ ID NO: 634494 - DNA, 25 bp, Homo sapien
cttgtatgaaggctgttggcttgtt

SEQ ID NO: 634495 - DNA, 25 bp, Homo sapien
tgcttgtatgaaggctgttggcttg

SEQ ID NO: 634496 - DNA, 25 bp, Homo sapien
tatggagtgagtcccagagtgcttg

SEQ ID NO: 634497 - DNA, 25 bp, Homo sapien
ctatggagtgagtcccagagtgctt

SEQ ID NO: 634498 - DNA, 25 bp, Homo sapien
atggagtgagtcccagagtgcttgg

SEQ ID NO: 634499 - DNA, 25 bp, Homo sapien
gactatggagtgagtcccagagtgc

SEQ ID NO: 634500 - DNA, 25 bp, Homo sapien
gattggagtctcgaaccagaaactg

SEQ ID NO: 634501 - DNA, 25 bp, Homo sapien
aagcagcaattcgaaacaggattgg

SEQ ID NO: 634502 - DNA, 25 bp, Homo sapien
tcgaaccagaaactgcagtttaccg

SEQ ID NO: 634503 - DNA, 25 bp, Homo sapien
gaaacaggattggagtctcgaacca

SEQ ID NO: 634504 - DNA, 25 bp, Homo sapien
gaagtcccgagacccgatgctttcg

SEQ ID NO: 634505 - DNA, 25 bp, Homo sapien
tctcagtgtagatcgcgcggtaacc

SEQ ID NO: 634506 - DNA, 25 bp, Homo sapien
gatcttctggtataactactcggct

SEQ ID NO: 634507 - DNA, 25 bp, Homo sapien
gagtctgtgagaccctgatcttctg

SEQ ID NO: 634508 - DNA, 25 bp, Homo sapien
gggcaagatgagctggcctttcctc

SEQ ID NO: 634509 - DNA, 25 bp, Homo sapien
gaacacctgatggaacttcctgccc

SEQ ID NO: 634510 - DNA, 25 bp, Homo sapien
cccccaggataggtgggcaagatga

SEQ ID NO: 634511 - DNA, 25 bp, Homo sapien
tgtgttcacgaacacctgatggaac

SEQ ID NO: 634512 - DNA, 25 bp, Homo sapien
ggttcttgtggagacacctgctata

SEQ ID NO: 634513 - DNA, 25 bp, Homo sapien
tgttgtcactgggtaagatgccgtg

SEQ ID NO: 634514 - DNA, 25 bp, Homo sapien
cactgggtaagatgccgtggttctt

SEQ ID NO: 634515 - DNA, 25 bp, Homo sapien
gctatactcgacataacaagatcct

SEQ ID NO: 634516 - DNA, 25 bp, Homo sapien
gctgtgggccgttagcaaagctgct

SEQ ID NO: 634517 - DNA, 25 bp, Homo sapien
gaaacgccaaatcctcgagagcgag

SEQ ID NO: 634518 - DNA, 25 bp, Homo sapien
caaagctgctagcatgaaatcgtcg

SEQ ID NO: 634519 - DNA, 25 bp, Homo sapien
aaatcgtcgagcaccgcttgcgaaa

SEQ ID NO: 634520 - DNA, 25 bp, Homo sapien
tcctcttccggaacgagacggtgga

SEQ ID NO: 634521 - DNA, 25 bp, Homo sapien
tcctacgcgtctacgaggagaagcg

SEQ ID NO: 634522 - DNA, 25 bp, Homo sapien
tacaaatgcgagatcgagctgcgcc

SEQ ID NO: 634523 - DNA, 25 bp, Homo sapien
gacttcgtggtaggagcgcttatcc

SEQ ID NO: 634524 - DNA, 25 bp, Homo sapien
catcgtgtgcaacctctgtggcaag

SEQ ID NO: 634525 - DNA, 25 bp, Homo sapien
tctgtcaccaataacgactgcggag

SEQ ID NO: 634526 - DNA, 25 bp, Homo sapien
caaagcagtgcacaattccgtggca

SEQ ID NO: 634527 - DNA, 25 bp, Homo sapien
tacttgggagatacggaacggacca

SEQ ID NO: 634528 - DNA, 25 bp, Homo sapien
taaaatgtacttgggagataggcca

SEQ ID NO: 634529 - DNA, 25 bp, Homo sapien
caatagctacgaaccctagagaagc

SEQ ID NO: 634530 - DNA, 25 bp, Homo sapien
gaggtcatgggccaactaagtgtta

SEQ ID NO: 634531 - DNA, 25 bp, Homo sapien
gctagctggagctcatgtgcaactc

SEQ ID NO: 634532 - DNA, 25 bp, Homo sapien
agtccaccaatcagcaggtcccgtg

SEQ ID NO: 634533 - DNA, 25 bp, Homo sapien
caaaatgttacgagtggagaagtca

SEQ ID NO: 634534 - DNA, 25 bp, Homo sapien
atcagaaggaattggcagtaaggcc

SEQ ID NO: 634535 - DNA, 25 bp, Homo sapien
cagctgcaccctgaataatctttgg

SEQ ID NO: 634536 - DNA, 25 bp, Homo sapien
cactagctgtcgtgtctctctgggc

SEQ ID NO: 634537 - DNA, 25 bp, Homo sapien
aggaagtcactatgctcgggccaca

SEQ ID NO: 634538 - DNA, 25 bp, Homo sapien
ggcggtttctcacatagcaacatga

SEQ ID NO: 634539 - DNA, 25 bp, Homo sapien
acatcactgttggtgctgcgtcagg

SEQ ID NO: 634540 - DNA, 25 bp, Homo sapien
ttcatgaggtcatttcacacatttg

SEQ ID NO: 634541 - DNA, 25 bp, Homo sapien
gcctggcccactcatttctaaagtt

SEQ ID NO: 634542 - DNA, 25 bp, Homo sapien
cacacatttgtaatacggtgaagat

SEQ ID NO: 634543 - DNA, 25 bp, Homo sapien
tacttaggtcagcacgttttcctct

SEQ ID NO: 634544 - DNA, 25 bp, Homo sapien
gctgccacccattgaatccttacta

SEQ ID NO: 634545 - DNA, 25 bp, Homo sapien
aacagatgcaaatgagttgaagtac

SEQ ID NO: 634546 - DNA, 25 bp, Homo sapien
taatggatatcaaccaatgcacagt

SEQ ID NO: 634547 - DNA, 25 bp, Homo sapien
tagagactcataacaataagcaaag

SEQ ID NO: 634548 - DNA, 25 bp, Homo sapien
gccgctgtgcagtttatactattat

SEQ ID NO: 634549 - DNA, 25 bp, Homo sapien
aggtacgtatcaccaagaccagcta

SEQ ID NO: 634550 - DNA, 25 bp, Homo sapien
actacaggtacgtatcaccaagacc

SEQ ID NO: 634551 - DNA, 25 bp, Homo sapien
aagtactcaatagccgctgtgcagt

SEQ ID NO: 634552 - DNA, 25 bp, Homo sapien
ggcatgcgccaacacctccagttaa

SEQ ID NO: 634553 - DNA, 25 bp, Homo sapien
gcgccaacacctccagttaattttg

SEQ ID NO: 634554 - DNA, 25 bp, Homo sapien
ggtatgagccactggctttttttgt

SEQ ID NO: 634555 - DNA, 25 bp, Homo sapien
gccaacacctccagttaattttgta

SEQ ID NO: 634556 - DNA, 25 bp, Homo sapien
tatcaatgttccagttcttgtgtca

SEQ ID NO: 634557 - DNA, 25 bp, Homo sapien
tcaggatagacattacctcaggtga

SEQ ID NO: 634558 - DNA, 25 bp, Homo sapien
gatgggatggtaaaggaattcattg

SEQ ID NO: 634559 - DNA, 25 bp, Homo sapien
taatgttctggaagaatcaggatag

SEQ ID NO: 634560 - DNA, 25 bp, Homo sapien
tcccagctactcaggaggctgagga

SEQ ID NO: 634561 - DNA, 25 bp, Homo sapien
gctgggtgtggtagcgcacacttgt

SEQ ID NO: 634562 - DNA, 25 bp, Homo sapien
gaggaaagagaatcgcttgaaccca

SEQ ID NO: 634563 - DNA, 25 bp, Homo sapien
tgggtgtggtagcgcacacttgtaa

SEQ ID NO: 634564 - DNA, 25 bp, Homo sapien
catctctaaataaataagtggccaa

SEQ ID NO: 634565 - DNA, 25 bp, Homo sapien
tctctaaataaataagtggccaaaa

SEQ ID NO: 634566 - DNA, 25 bp, Homo sapien
tccatctctaaataaataagtggcc

SEQ ID NO: 634567 - DNA, 25 bp, Homo sapien
ataaataagtggccaaaaacataca

SEQ ID NO: 634568 - DNA, 25 bp, Homo sapien
gatggatcgatcactcagatggctg

SEQ ID NO: 634569 - DNA, 25 bp, Homo sapien
aatgttaagagtgagtgtctcggcc

SEQ ID NO: 634570 - DNA, 25 bp, Homo sapien
tcaccacgtagagctttccacaggg

SEQ ID NO: 634571 - DNA, 25 bp, Homo sapien
cttgagtgccctcgcatgacagctg

SEQ ID NO: 634572 - DNA, 25 bp, Homo sapien
ccttaagaacagggacctctgtctt

SEQ ID NO: 634573 - DNA, 25 bp, Homo sapien
taagaacagggacctctgtcttggt

SEQ ID NO: 634574 - DNA, 25 bp, Homo sapien
gccctcacttgctccttaagaacag

SEQ ID NO: 634575 - DNA, 25 bp, Homo sapien
ccctcacttgctccttaagaacagg

SEQ ID NO: 634576 - DNA, 25 bp, Homo sapien
ccaaatcagtttggcagtgagtaag

SEQ ID NO: 634577 - DNA, 25 bp, Homo sapien
gagaggccataagcattgaaaagat

SEQ ID NO: 634578 - DNA, 25 bp, Homo sapien
cagctacagggtcagagacagatct

SEQ ID NO: 634579 - DNA, 25 bp, Homo sapien
gattgtggtacctatcacacaccgt

SEQ ID NO: 634580 - DNA, 25 bp, Homo sapien
gcagggacaagcgtccagcgtcaga

SEQ ID NO: 634581 - DNA, 25 bp, Homo sapien
aagcgtccagcgtcagatggaagca

SEQ ID NO: 634582 - DNA, 25 bp, Homo sapien
cgtcagatggaagcaggctcgcgtc

SEQ ID NO: 634583 - DNA, 25 bp, Homo sapien
tgacggcaggtgtctcggaatgagc

SEQ ID NO: 634584 - DNA, 25 bp, Homo sapien
cctcgggcacgtcgcacttcgagtt

SEQ ID NO: 634585 - DNA, 25 bp, Homo sapien
cccgaggttaccgagatgatcgcgg

SEQ ID NO: 634586 - DNA, 25 bp, Homo sapien
ttacatacaggaatcaggtattggg

SEQ ID NO: 634587 - DNA, 25 bp, Homo sapien
agcatcgcagacctggttttcacct

SEQ ID NO: 634588 - DNA, 25 bp, Homo sapien
tagtgatgggccgtttgcacctcgg

SEQ ID NO: 634589 - DNA, 25 bp, Homo sapien
tcaagtccgtgtgatttgggcccga

SEQ ID NO: 634590 - DNA, 25 bp, Homo sapien
ttaagcttggtgctccggctctggg

SEQ ID NO: 634591 - DNA, 25 bp, Homo sapien
gagagaccatcgacttggccagtga

SEQ ID NO: 634592 - DNA, 25 bp, Homo sapien
caacttaaaggagggcctgcaagca

SEQ ID NO: 634593 - DNA, 25 bp, Homo sapien
tgtattcctaagctgggacaaagcc

SEQ ID NO: 634594 - DNA, 25 bp, Homo sapien
tagattaactgaatgaccaaagagc

SEQ ID NO: 634595 - DNA, 25 bp, Homo sapien
cattggcctgcagagtagattaact

SEQ ID NO: 634596 - DNA, 25 bp, Homo sapien
tgaggcatggtataaacacctggtc

SEQ ID NO: 634597 - DNA, 25 bp, Homo sapien
tgcagagagccacttcacctgagac

SEQ ID NO: 634598 - DNA, 25 bp, Homo sapien
catgggacggacactgacagacagt

SEQ ID NO: 634599 - DNA, 25 bp, Homo sapien
ccccagctatgggaagtgccatcag

SEQ ID NO: 634600 - DNA, 25 bp, Homo sapien
tttgcccacactcaaaagggaggag

SEQ ID NO: 634601 - DNA, 25 bp, Homo sapien
gacagctgtcatactagatttgccc

SEQ ID NO: 634602 - DNA, 25 bp, Homo sapien
aattggcacctcaaactggacatgc

SEQ ID NO: 634603 - DNA, 25 bp, Homo sapien
ctgtctagggcagctacaccagaga

SEQ ID NO: 634604 - DNA, 25 bp, Homo sapien
tccctgtcatatgctcctcagagtt

SEQ ID NO: 634605 - DNA, 25 bp, Homo sapien
cctgtcatatgctcctcagagttct

SEQ ID NO: 634606 - DNA, 25 bp, Homo sapien
catatgctcctcagagttcttcttc

SEQ ID NO: 634607 - DNA, 25 bp, Homo sapien
tgtcatatgctcctcagagttcttc

SEQ ID NO: 634608 - DNA, 25 bp, Homo sapien
gtgcccagcctgttcttttctattt

SEQ ID NO: 634609 - DNA, 25 bp, Homo sapien
cagccaccaaagtaagctgggatta

SEQ ID NO: 634610 - DNA, 25 bp, Homo sapien
tgatctcgaactcccaaactttggg

SEQ ID NO: 634611 - DNA, 25 bp, Homo sapien
tgcctcagccaccaaagtaagctgg

SEQ ID NO: 634612 - DNA, 25 bp, Homo sapien
tttctttcttttcttctcagagtct

SEQ ID NO: 634613 - DNA, 25 bp, Homo sapien
tctttcttttcttctcagagtctct

SEQ ID NO: 634614 - DNA, 25 bp, Homo sapien
ttcttttcttctcagagtctctctc

SEQ ID NO: 634615 - DNA, 25 bp, Homo sapien
ctttcttttcttctcagagtctctc

SEQ ID NO: 634616 - DNA, 25 bp, Homo sapien
gattctatggtgacttgtgaggctg

SEQ ID NO: 634617 - DNA, 25 bp, Homo sapien
catcgtgcccaaccatgtctataaa

SEQ ID NO: 634618 - DNA, 25 bp, Homo sapien
taaaggcaatgtggcctgactcatg

SEQ ID NO: 634619 - DNA, 25 bp, Homo sapien
ggtgtcaacactctcagctgccatg

SEQ ID NO: 634620 - DNA, 25 bp, Homo sapien
tgtggccctatcttgccgagctcat

SEQ ID NO: 634621 - DNA, 25 bp, Homo sapien
gttggaggggcacaatgactttccc

SEQ ID NO: 634622 - DNA, 25 bp, Homo sapien
gaagatgtggccctatcttgccgag

SEQ ID NO: 634623 - DNA, 25 bp, Homo sapien
gagaaacagaatagatgctcaagac

SEQ ID NO: 634624 - DNA, 25 bp, Homo sapien
tggaaaagggactgacggtgcagcg

SEQ ID NO: 634625 - DNA, 25 bp, Homo sapien
gctcggttaagggatgggtcttcca

SEQ ID NO: 634626 - DNA, 25 bp, Homo sapien
ttcccggtaggagcccggagacaga

SEQ ID NO: 634627 - DNA, 25 bp, Homo sapien
gcccggcgaggagaagcggtttcta

SEQ ID NO: 634628 - DNA, 25 bp, Homo sapien
aaaaggacgcagttggtgtggagca

SEQ ID NO: 634629 - DNA, 25 bp, Homo sapien
tctagggaaaaggacgcagttggtg

SEQ ID NO: 634630 - DNA, 25 bp, Homo sapien
tagggaaaaggacgcagttggtgtg

SEQ ID NO: 634631 - DNA, 25 bp, Homo sapien
ggaaaaggacgcagttggtgtggag

SEQ ID NO: 634632 - DNA, 25 bp, Homo sapien
agattccgtccatcttcgggccctg

SEQ ID NO: 634633 - DNA, 25 bp, Homo sapien
ggacgctgtagtgggcgagtctgag

SEQ ID NO: 634634 - DNA, 25 bp, Homo sapien
tgggaaggacacaactgaatgaggc

SEQ ID NO: 634635 - DNA, 25 bp, Homo sapien
tgtgcagaggcgacagattccgtcc

SEQ ID NO: 634636 - DNA, 25 bp, Homo sapien
gctggggacgcctccctagcggttc

SEQ ID NO: 634637 - DNA, 25 bp, Homo sapien
gaacagtggtctccgcacggaggct

SEQ ID NO: 634638 - DNA, 25 bp, Homo sapien
agtggtctccgcacggaggctccta

SEQ ID NO: 634639 - DNA, 25 bp, Homo sapien
ctgtggccttgaacagtggtctccg

SEQ ID NO: 634640 - DNA, 25 bp, Homo sapien
ccttgaacagtggtctccgcacgga

SEQ ID NO: 634641 - DNA, 25 bp, Homo sapien
tgccttttcccgttctctgtcgtgg

SEQ ID NO: 634642 - DNA, 25 bp, Homo sapien
ctcctcctccgacggtccttcgctt

SEQ ID NO: 634643 - DNA, 25 bp, Homo sapien
tcctccgacggtccttcgctttcag

SEQ ID NO: 634644 - DNA, 25 bp, Homo sapien
tcctctccagacctctcgccctcct

SEQ ID NO: 634645 - DNA, 25 bp, Homo sapien
cctttgggcaatcttctgtgcagac

SEQ ID NO: 634646 - DNA, 25 bp, Homo sapien
tgagctgcccacatggcctaagatg

SEQ ID NO: 634647 - DNA, 25 bp, Homo sapien
cattttccgcaatgccagtggccag

SEQ ID NO: 634648 - DNA, 25 bp, Homo sapien
tgcagactatccagcccaagaggga

SEQ ID NO: 634649 - DNA, 25 bp, Homo sapien
gggtggaggacaggtttggcccaga

SEQ ID NO: 634650 - DNA, 25 bp, Homo sapien
actttggatatggatttaaatggtc

SEQ ID NO: 634651 - DNA, 25 bp, Homo sapien
caggtggctctggatatactttgga

SEQ ID NO: 634652 - DNA, 25 bp, Homo sapien
atgcaggaactagaaacacatcttc

SEQ ID NO: 634653 - DNA, 25 bp, Homo sapien
gaatgccctggtataccctgaaggc

SEQ ID NO: 634654 - DNA, 25 bp, Homo sapien
aaccatttcggtgtcccaggataga

SEQ ID NO: 634655 - DNA, 25 bp, Homo sapien
gattaaatgagatcccagaatgccc

SEQ ID NO: 634656 - DNA, 25 bp, Homo sapien
gtggatcattctggtcactgctgag

SEQ ID NO: 634657 - DNA, 25 bp, Homo sapien
tgtgagaacagattacctggagccc

SEQ ID NO: 634658 - DNA, 25 bp, Homo sapien
agagttgtgtcttaacctgggctga

SEQ ID NO: 634659 - DNA, 25 bp, Homo sapien
tcctttccaacgatctcttaccagt

SEQ ID NO: 634660 - DNA, 25 bp, Homo sapien
ccccatggtgaaaggccgtagagtt

SEQ ID NO: 634661 - DNA, 25 bp, Homo sapien
tctgctgatcgatgggacgaggaac

SEQ ID NO: 634662 - DNA, 25 bp, Homo sapien
gattctgcaagtggagcccgcagga

SEQ ID NO: 634663 - DNA, 25 bp, Homo sapien
ggctggttcaagacccctgagatga

SEQ ID NO: 634664 - DNA, 25 bp, Homo sapien
cgggagaaaaattaaagcggcgcat

SEQ ID NO: 634665 - DNA, 25 bp, Homo sapien
ctgtatctgtgggtaccacactgga

SEQ ID NO: 634666 - DNA, 25 bp, Homo sapien
atatatatttagagtagtgcttgtc

SEQ ID NO: 634667 - DNA, 25 bp, Homo sapien
tctgcaagttaggacagttggccct

SEQ ID NO: 634668 - DNA, 25 bp, Homo sapien
gtgtaacaaatcactgcaggctcaa

SEQ ID NO: 634669 - DNA, 25 bp, Homo sapien
caaatgtaactctcgtaaccaccaa

SEQ ID NO: 634670 - DNA, 25 bp, Homo sapien
tactcattgtaagtatgcagtcagg

SEQ ID NO: 634671 - DNA, 25 bp, Homo sapien
tgtaaccagcatggatacaatcgct

SEQ ID NO: 634672 - DNA, 25 bp, Homo sapien
tataacataggcatgatttctgcct

SEQ ID NO: 634673 - DNA, 25 bp, Homo sapien
tttgggatggttgaaacgttattgc

SEQ ID NO: 634674 - DNA, 25 bp, Homo sapien
gggatggttgaaacgttattgccac

SEQ ID NO: 634675 - DNA, 25 bp, Homo sapien
gatggttgaaacgttattgccacat

SEQ ID NO: 634676 - DNA, 25 bp, Homo sapien
tggttgaaacgttattgccacattg

SEQ ID NO: 634677 - DNA, 25 bp, Homo sapien
gaagggcctgttctagcaactggaa

SEQ ID NO: 634678 - DNA, 25 bp, Homo sapien
ggcagtcaaccgtcgcagaggatga

SEQ ID NO: 634679 - DNA, 25 bp, Homo sapien
gtgacgtgaccatcatcatagcagg

SEQ ID NO: 634680 - DNA, 25 bp, Homo sapien
cactctgtgctggtcggaggttact

SEQ ID NO: 634681 - DNA, 25 bp, Homo sapien
tcttcagaagctcccgtgttcctgg

SEQ ID NO: 634682 - DNA, 25 bp, Homo sapien
tcttggcacatggacaagttctcgt

SEQ ID NO: 634683 - DNA, 25 bp, Homo sapien
taaagtctggtgttgagcaagtgaa

SEQ ID NO: 634684 - DNA, 25 bp, Homo sapien
gcataaggtctaaacccagcaaggc

SEQ ID NO: 634685 - DNA, 25 bp, Homo sapien
cattcccactgagcggtggccaagg

SEQ ID NO: 634686 - DNA, 25 bp, Homo sapien
gcatccagatcagagaccattccca

SEQ ID NO: 634687 - DNA, 25 bp, Homo sapien
tgcccaaggtctcctagccagtcaa

SEQ ID NO: 634688 - DNA, 25 bp, Homo sapien
caagactgtaggtactgcccaaggt

SEQ ID NO: 634689 - DNA, 25 bp, Homo sapien
caatgacagggagaatcctggtgtc

SEQ ID NO: 634690 - DNA, 25 bp, Homo sapien
tttgccctgatgaatacaccactgt

SEQ ID NO: 634691 - DNA, 25 bp, Homo sapien
cactgggaatatctgccgcatcatc

SEQ ID NO: 634692 - DNA, 25 bp, Homo sapien
gataaacattctccttccgaggcca

SEQ ID NO: 634693 - DNA, 25 bp, Homo sapien
tttcaggccagagtgaatctaaaac

SEQ ID NO: 634694 - DNA, 25 bp, Homo sapien
gaatctaaaacaaacctggctttgc

SEQ ID NO: 634695 - DNA, 25 bp, Homo sapien
aaaatacaagtacatggctgcttca

SEQ ID NO: 634696 - DNA, 25 bp, Homo sapien
tagtgtaactcagcggacagggctc

SEQ ID NO: 634697 - DNA, 25 bp, Homo sapien
tcaagtcagacccaaaaaacgacgc

SEQ ID NO: 634698 - DNA, 25 bp, Homo sapien
aaaacgacgccaaggtagtgagtgg

SEQ ID NO: 634699 - DNA, 25 bp, Homo sapien
agtttccaacgacatttccaaccag

SEQ ID NO: 634700 - DNA, 25 bp, Homo sapien
gaccagcagttgacgagtcaagtca

SEQ ID NO: 634701 - DNA, 25 bp, Homo sapien
gtctaggccctaaaaatgagcttcc

SEQ ID NO: 634702 - DNA, 25 bp, Homo sapien
cctctgtgtcaggtaggctctgcta

SEQ ID NO: 634703 - DNA, 25 bp, Homo sapien
aaggcaaacacaaacgggcagggca

SEQ ID NO: 634704 - DNA, 25 bp, Homo sapien
cacttgactggaaacgcccatgtga

SEQ ID NO: 634705 - DNA, 25 bp, Homo sapien
tcccaatccttccatggaagggtga

SEQ ID NO: 634706 - DNA, 25 bp, Homo sapien
ctcccaatccttccatggaagggtg

SEQ ID NO: 634707 - DNA, 25 bp, Homo sapien
ttccacccctcccaatccttccatg

SEQ ID NO: 634708 - DNA, 25 bp, Homo sapien
acccctcccaatccttccatggaag

SEQ ID NO: 634709 - DNA, 25 bp, Homo sapien
ttaatgtgatgtaagaggaaggtct

SEQ ID NO: 634710 - DNA, 25 bp, Homo sapien
aatgtgatgtaagaggaaggtcttc

SEQ ID NO: 634711 - DNA, 25 bp, Homo sapien
cttaatgtgatgtaagaggaaggtc

SEQ ID NO: 634712 - DNA, 25 bp, Homo sapien
tgtgatgtaagaggaaggtcttctc

SEQ ID NO: 634713 - DNA, 25 bp, Homo sapien
gcttggtcaggacatcttttgttcg

SEQ ID NO: 634714 - DNA, 25 bp, Homo sapien
ttcacaaagcggttggtccttggct

SEQ ID NO: 634715 - DNA, 25 bp, Homo sapien
acagccagtgcagccgctccaagtg

SEQ ID NO: 634716 - DNA, 25 bp, Homo sapien
cttcaggccgcagaagtccccgaaa

SEQ ID NO: 634717 - DNA, 25 bp, Homo sapien
tctttatgataaagacccatatgtc

SEQ ID NO: 634718 - DNA, 25 bp, Homo sapien
ggcagagcctttcattgctgggaaa

SEQ ID NO: 634719 - DNA, 25 bp, Homo sapien
cactggcctaagctcagatctctgg

SEQ ID NO: 634720 - DNA, 25 bp, Homo sapien
gcaaaactacaccacataggctgcg

SEQ ID NO: 634721 - DNA, 25 bp, Homo sapien
tcatagggcaagtcctgagggatct

SEQ ID NO: 634722 - DNA, 25 bp, Homo sapien
agcggcctcccgagcaagttcggat

SEQ ID NO: 634723 - DNA, 25 bp, Homo sapien
ccaggacttcctgctcgcgatacaa

SEQ ID NO: 634724 - DNA, 25 bp, Homo sapien
cctgctctgctgatcagtgtctcat

SEQ ID NO: 634725 - DNA, 25 bp, Homo sapien
aggaagaagtcatataaccgcacga

SEQ ID NO: 634726 - DNA, 25 bp, Homo sapien
agaagtcatataaccgcacgacgtg

SEQ ID NO: 634727 - DNA, 25 bp, Homo sapien
gaagaagtcatataaccgcacgacg

SEQ ID NO: 634728 - DNA, 25 bp, Homo sapien
gaagtcatataaccgcacgacgtgc

SEQ ID NO: 634729 - DNA, 25 bp, Homo sapien
ggcaaagatggtccctacctcagca

SEQ ID NO: 634730 - DNA, 25 bp, Homo sapien
agggcaaagatggtccctacctcag

SEQ ID NO: 634731 - DNA, 25 bp, Homo sapien
gagggcaaagatggtccctacctca

SEQ ID NO: 634732 - DNA, 25 bp, Homo sapien
gggcaaagatggtccctacctcagc

SEQ ID NO: 634733 - DNA, 25 bp, Homo sapien
tgtcaactacaggaacgagaagcag

SEQ ID NO: 634734 - DNA, 25 bp, Homo sapien
tctctgggccttatagcgctggtga

SEQ ID NO: 634735 - DNA, 25 bp, Homo sapien
tagctgccagacacggtgagtcacg

SEQ ID NO: 634736 - DNA, 25 bp, Homo sapien
tatctcactgggtgctcgcctactg

SEQ ID NO: 634737 - DNA, 25 bp, Homo sapien
tcttgtggcaataacctcaacatct

SEQ ID NO: 634738 - DNA, 25 bp, Homo sapien
aacaaaacatcacatgggatttgca

SEQ ID NO: 634739 - DNA, 25 bp, Homo sapien
acacatttccaactaaacagagaag

SEQ ID NO: 634740 - DNA, 25 bp, Homo sapien
gatcccacaggactttgtgtttctc

SEQ ID NO: 634741 - DNA, 25 bp, Homo sapien
ctagatgtaaactcaagggatgggc

SEQ ID NO: 634742 - DNA, 25 bp, Homo sapien
gattgctggtgactggaacaactgg

SEQ ID NO: 634743 - DNA, 25 bp, Homo sapien
caatgaggaaactgcgctcggcttg

SEQ ID NO: 634744 - DNA, 25 bp, Homo sapien
aaagagcacagtccccaaaaatgct

SEQ ID NO: 634745 - DNA, 25 bp, Homo sapien
caatgatgggcatcagatagtttaa

SEQ ID NO: 634746 - DNA, 25 bp, Homo sapien
ttcacctggtcaatgatgggcatca

SEQ ID NO: 634747 - DNA, 25 bp, Homo sapien
gctctggattcacctggtcaatgat

SEQ ID NO: 634748 - DNA, 25 bp, Homo sapien
cagatagtttaatatatgcttggtg

SEQ ID NO: 634749 - DNA, 25 bp, Homo sapien
tggttaccaaacacttagatcaggg

SEQ ID NO: 634750 - DNA, 25 bp, Homo sapien
gctgaggagtgatgcccgtcgtctt

SEQ ID NO: 634751 - DNA, 25 bp, Homo sapien
ctggagggagacaattcaataagcc

SEQ ID NO: 634752 - DNA, 25 bp, Homo sapien
caaactcctaaaaaagctgaccaga

SEQ ID NO: 634753 - DNA, 25 bp, Homo sapien
agggatgttgccagcctctcgccta

SEQ ID NO: 634754 - DNA, 25 bp, Homo sapien
gcagctgagggttgcgctccaagat

SEQ ID NO: 634755 - DNA, 25 bp, Homo sapien
cagcagaaatgtgaccacaatgtca

SEQ ID NO: 634756 - DNA, 25 bp, Homo sapien
taccaccagcagaaatgtgaccaca

SEQ ID NO: 634757 - DNA, 25 bp, Homo sapien
ttaacaaggaggtcgaagaaggcca

SEQ ID NO: 634758 - DNA, 25 bp, Homo sapien
gcagaatttcaactatgggagccac

SEQ ID NO: 634759 - DNA, 25 bp, Homo sapien
caggatttctatcaacagcgcacag

SEQ ID NO: 634760 - DNA, 25 bp, Homo sapien
cagatgccaccctaaccaagttgct

SEQ ID NO: 634761 - DNA, 25 bp, Homo sapien
ttttggttcaggctttcacagtggg

SEQ ID NO: 634762 - DNA, 25 bp, Homo sapien
tcttacacaaacagggaatggcctc

SEQ ID NO: 634763 - DNA, 25 bp, Homo sapien
ctgctctttaatgccagactgatgg

SEQ ID NO: 634764 - DNA, 25 bp, Homo sapien
tatgtatgcgcaaggtaccatcgtt

SEQ ID NO: 634765 - DNA, 25 bp, Homo sapien
agggaaccgccgcaatgaccgccgg

SEQ ID NO: 634766 - DNA, 25 bp, Homo sapien
aatgaccgccggacgtccagcaaca

SEQ ID NO: 634767 - DNA, 25 bp, Homo sapien
ggacgtccagcaacacttgttggta

SEQ ID NO: 634768 - DNA, 25 bp, Homo sapien
ccttgctcatctgccgtaggttctt

SEQ ID NO: 634769 - DNA, 25 bp, Homo sapien
tcagtgggatcactgttcagagcct

SEQ ID NO: 634770 - DNA, 25 bp, Homo sapien
tcactgatagccatgcgtctaaggg

SEQ ID NO: 634771 - DNA, 25 bp, Homo sapien
tcagagcctggtgtatctctgccac

SEQ ID NO: 634772 - DNA, 25 bp, Homo sapien
agcttgggccacacttttcgtctga

SEQ ID NO: 634773 - DNA, 25 bp, Homo sapien
caacctccctgtcccaggttcaagt

SEQ ID NO: 634774 - DNA, 25 bp, Homo sapien
aacctccctgtcccaggttcaagtg

SEQ ID NO: 634775 - DNA, 25 bp, Homo sapien
gcaccaccacgctttgctaattttt

SEQ ID NO: 634776 - DNA, 25 bp, Homo sapien
caccaccacgctttgctaatttttt

SEQ ID NO: 634777 - DNA, 25 bp, Homo sapien
tgtctcctattgcttccagatacct

SEQ ID NO: 634778 - DNA, 25 bp, Homo sapien
gtctcctattgcttccagatacctt

SEQ ID NO: 634779 - DNA, 25 bp, Homo sapien
ttgtctcctattgcttccagatacc

SEQ ID NO: 634780 - DNA, 25 bp, Homo sapien
ctcctattgcttccagataccttct

SEQ ID NO: 634781 - DNA, 25 bp, Homo sapien
ttttggcactctgtgggaacgcaac

SEQ ID NO: 634782 - DNA, 25 bp, Homo sapien
tctgtgggaacgcaacaaatacgtg

SEQ ID NO: 634783 - DNA, 25 bp, Homo sapien
ggcactctgtgggaacgcaacaaat

SEQ ID NO: 634784 - DNA, 25 bp, Homo sapien
tagtttagttattgttcctctggaa

SEQ ID NO: 634785 - DNA, 25 bp, Homo sapien
tagaggtcttggctatcataaccat

SEQ ID NO: 634786 - DNA, 25 bp, Homo sapien
tgataccttccaaattcctttatag

SEQ ID NO: 634787 - DNA, 25 bp, Homo sapien
agatagtgcactattattccaaagc

SEQ ID NO: 634788 - DNA, 25 bp, Homo sapien
tagtgcactattattccaaagctga

SEQ ID NO: 634789 - DNA, 25 bp, Homo sapien
cgtcgccctgcgcactccggagggc

SEQ ID NO: 634790 - DNA, 25 bp, Homo sapien
gcgccgccgtcccagtggccggagg

SEQ ID NO: 634791 - DNA, 25 bp, Homo sapien
cgccgtcccagtggccggaggtggg

SEQ ID NO: 634792 - DNA, 25 bp, Homo sapien
ggccgtcgccctgcgcactccggag

SEQ ID NO: 634793 - DNA, 25 bp, Homo sapien
gagccccggctggtggcggagccgg

SEQ ID NO: 634794 - DNA, 25 bp, Homo sapien
acgcggctccgaccgcgggacgtag

SEQ ID NO: 634795 - DNA, 25 bp, Homo sapien
gcatcggcaggctcccctccgtcgg

SEQ ID NO: 634796 - DNA, 25 bp, Homo sapien
ggcggagccgggagaagacgcggct

SEQ ID NO: 634797 - DNA, 25 bp, Homo sapien
cactaggggccgaagagagttagca

SEQ ID NO: 634798 - DNA, 25 bp, Homo sapien
agagttagcagtccccttaagctgg

SEQ ID NO: 634799 - DNA, 25 bp, Homo sapien
caacatcccaagtagacagcagtcc

SEQ ID NO: 634800 - DNA, 25 bp, Homo sapien
tatctaggtaagttcctatacaact

SEQ ID NO: 634801 - DNA, 25 bp, Homo sapien
cctccaatgacaccttggactgagg

SEQ ID NO: 634802 - DNA, 25 bp, Homo sapien
ggcttgtcagcttaccattggcagg

SEQ ID NO: 634803 - DNA, 25 bp, Homo sapien
tatggttacccccaatgcagcagct

SEQ ID NO: 634804 - DNA, 25 bp, Homo sapien
tcaagtctcagtctctgtcaggccc

SEQ ID NO: 634805 - DNA, 25 bp, Homo sapien
gcatggtggatatcccgctgtccct

SEQ ID NO: 634806 - DNA, 25 bp, Homo sapien
ccagatgcaagggagcttcatccaa

SEQ ID NO: 634807 - DNA, 25 bp, Homo sapien
gtttaccaggtaaccagtgcccatg

SEQ ID NO: 634808 - DNA, 25 bp, Homo sapien
gactactgcagtctccatgacccag

SEQ ID NO: 634809 - DNA, 25 bp, Homo sapien
ccatgcccggcacctagtgagtttt

SEQ ID NO: 634810 - DNA, 25 bp, Homo sapien
gtcacttgggcttgagtactgtggc

SEQ ID NO: 634811 - DNA, 25 bp, Homo sapien
caattaattctcgtcctttggcctc

SEQ ID NO: 634812 - DNA, 25 bp, Homo sapien
cttgggcttgagtactgtggcacaa

SEQ ID NO: 634813 - DNA, 25 bp, Homo sapien
atgaactttggaaagaccagtcagc

SEQ ID NO: 634814 - DNA, 25 bp, Homo sapien
tcaacacacagaagcaaggtcctct

SEQ ID NO: 634815 - DNA, 25 bp, Homo sapien
catggagttcttggaactgttcaac

SEQ ID NO: 634816 - DNA, 25 bp, Homo sapien
tccccagtgtatagcaaagaccagg

SEQ ID NO: 634817 - DNA, 25 bp, Homo sapien
gggaagtcggattcaggataaacca

SEQ ID NO: 634818 - DNA, 25 bp, Homo sapien
ggtcaccagggagtttacatgcaag

SEQ ID NO: 634819 - DNA, 25 bp, Homo sapien
caaaaggttttaatgaggattgcat

SEQ ID NO: 634820 - DNA, 25 bp, Homo sapien
gaactgagcatgaccttaccacaca

SEQ ID NO: 634821 - DNA, 25 bp, Homo sapien
cattctagggcataaaagggtcaag

SEQ ID NO: 634822 - DNA, 25 bp, Homo sapien
taagcaatgcagacacaggtagtgc

SEQ ID NO: 634823 - DNA, 25 bp, Homo sapien
caatttccgagctacaaggataggg

SEQ ID NO: 634824 - DNA, 25 bp, Homo sapien
tgatgcctaggcgagaaaggcctgt

SEQ ID NO: 634825 - DNA, 25 bp, Homo sapien
gaagtctccacctaaatgcagcagc

SEQ ID NO: 634826 - DNA, 25 bp, Homo sapien
tagctctagcatgaaacctgtacag

SEQ ID NO: 634827 - DNA, 25 bp, Homo sapien
taaagtgatgtaagcgaccagcaag

SEQ ID NO: 634828 - DNA, 25 bp, Homo sapien
taggataaccccactgaagcgctta

SEQ ID NO: 634829 - DNA, 25 bp, Homo sapien
ctctgctcaggcatcaggagacaga

SEQ ID NO: 634830 - DNA, 25 bp, Homo sapien
tgctcaggcatcaggagacagatag

SEQ ID NO: 634831 - DNA, 25 bp, Homo sapien
caggcatcaggagacagatagggcc

SEQ ID NO: 634832 - DNA, 25 bp, Homo sapien
tcaggcatcaggagacagatagggc

SEQ ID NO: 634833 - DNA, 25 bp, Homo sapien
aacaggcatcccaagggggttggca

SEQ ID NO: 634834 - DNA, 25 bp, Homo sapien
gaacaggcatcccaagggggttggc

SEQ ID NO: 634835 - DNA, 25 bp, Homo sapien
gaaggggttggcactgaagaaatcc

SEQ ID NO: 634836 - DNA, 25 bp, Homo sapien
tgccagaggtccaaggggtgaaggg

SEQ ID NO: 634837 - DNA, 25 bp, Homo sapien
ctgccagaggtccaaggggtgaagg

SEQ ID NO: 634838 - DNA, 25 bp, Homo sapien
gggtgaaggggttggcactgaagaa

SEQ ID NO: 634839 - DNA, 25 bp, Homo sapien
ttggcgctgctgacgggcgtactgc

SEQ ID NO: 634840 - DNA, 25 bp, Homo sapien
tgccccctggcatgctagatgaacc

SEQ ID NO: 634841 - DNA, 25 bp, Homo sapien
gcgtactgccccctggcatgctaga

SEQ ID NO: 634842 - DNA, 25 bp, Homo sapien
tagatgaacccattcgagcctggtc

SEQ ID NO: 634843 - DNA, 25 bp, Homo sapien
ctgtgggctagatatctggactcac

SEQ ID NO: 634844 - DNA, 25 bp, Homo sapien
gtggtcatatcgcagcagtttgtcc

SEQ ID NO: 634845 - DNA, 25 bp, Homo sapien
gcagtaagccgtgactggtggtcat

SEQ ID NO: 634846 - DNA, 25 bp, Homo sapien
gcgttcccatcgctttcgagagtgt

SEQ ID NO: 634847 - DNA, 25 bp, Homo sapien
tcactgtggacaaagcgttcccatc

SEQ ID NO: 634848 - DNA, 25 bp, Homo sapien
gttacttgacaggacgtgaccgctt

SEQ ID NO: 634849 - DNA, 25 bp, Homo sapien
aagagggatccaaactcaagagggt

SEQ ID NO: 634850 - DNA, 25 bp, Homo sapien
tgggacaacaaagctaactggagac

SEQ ID NO: 634851 - DNA, 25 bp, Homo sapien
agggtagtcttgcaccgctctgcca

SEQ ID NO: 634852 - DNA, 25 bp, Homo sapien
tcaccatgcatggagtcgagggtct

SEQ ID NO: 634853 - DNA, 25 bp, Homo sapien
gactggagcgcagccacatgttcat

SEQ ID NO: 634854 - DNA, 25 bp, Homo sapien
gccacatgttcattgctctctgtag

SEQ ID NO: 634855 - DNA, 25 bp, Homo sapien
tagtctggactactgccacacatca

SEQ ID NO: 634856 - DNA, 25 bp, Homo sapien
gatatcattgaaacgtggatctaat

SEQ ID NO: 634857 - DNA, 25 bp, Homo sapien
aacgtggatctaattcaatgttgta

SEQ ID NO: 634858 - DNA, 25 bp, Homo sapien
ctgcccaagatatcattgaaacgtg

SEQ ID NO: 634859 - DNA, 25 bp, Homo sapien
gaaacgtggatctaattcaatgttg

SEQ ID NO: 634860 - DNA, 25 bp, Homo sapien
ggtagctcccgaaacatcaatctaa

SEQ ID NO: 634861 - DNA, 25 bp, Homo sapien
tcaaaaggctaagctggtagctccc

SEQ ID NO: 634862 - DNA, 25 bp, Homo sapien
tcctcttgaaatgtcaccctggtga

SEQ ID NO: 634863 - DNA, 25 bp, Homo sapien
gggaagctcccattgcacactcaaa

SEQ ID NO: 634864 - DNA, 25 bp, Homo sapien
aaatggctccttccgaaagatcata

SEQ ID NO: 634865 - DNA, 25 bp, Homo sapien
gaaaaatggctccttccgaaagatc

SEQ ID NO: 634866 - DNA, 25 bp, Homo sapien
ttccgaaagatcatacttgccagca

SEQ ID NO: 634867 - DNA, 25 bp, Homo sapien
gctccttccgaaagatcatacttgc

SEQ ID NO: 634868 - DNA, 25 bp, Homo sapien
aactcactgttattatctgtgaatc

SEQ ID NO: 634869 - DNA, 25 bp, Homo sapien
cactgttattatctgtgaatcctca

SEQ ID NO: 634870 - DNA, 25 bp, Homo sapien
gttattatctgtgaatcctcaggct

SEQ ID NO: 634871 - DNA, 25 bp, Homo sapien
ctgcataaaagtaaactcactgtta

SEQ ID NO: 634872 - DNA, 25 bp, Homo sapien
caactcggacattatattcttggcc

SEQ ID NO: 634873 - DNA, 25 bp, Homo sapien
gccaaaccccagtctattagtcgta

SEQ ID NO: 634874 - DNA, 25 bp, Homo sapien
gctcaggacctttgaagtatcggga

SEQ ID NO: 634875 - DNA, 25 bp, Homo sapien
gatagtctacaagtagctcaggacc

SEQ ID NO: 634876 - DNA, 25 bp, Homo sapien
tgtgtgttagcccaacccctggcaa

SEQ ID NO: 634877 - DNA, 25 bp, Homo sapien
gaaactgacactggcacaattcaga

SEQ ID NO: 634878 - DNA, 25 bp, Homo sapien
tattatatggtatggatatgccagt

SEQ ID NO: 634879 - DNA, 25 bp, Homo sapien
ttttcactaagcatgagatccatcc

SEQ ID NO: 634880 - DNA, 25 bp, Homo sapien
aatatagttgcattcatatataggc

SEQ ID NO: 634881 - DNA, 25 bp, Homo sapien
ctgcacccagcttttccccccaatt

SEQ ID NO: 634882 - DNA, 25 bp, Homo sapien
agctattacaaatatagttgcattc

SEQ ID NO: 634883 - DNA, 25 bp, Homo sapien
atagttgcattcatatataggcttt

SEQ ID NO: 634884 - DNA, 25 bp, Homo sapien
cacgtttccgggcttagaagatgaa

SEQ ID NO: 634885 - DNA, 25 bp, Homo sapien
aaatatttctcaactgccgaatagg

SEQ ID NO: 634886 - DNA, 25 bp, Homo sapien
ccgaataggtactagggcctgtgac

SEQ ID NO: 634887 - DNA, 25 bp, Homo sapien
aataaggcgagaagccacgtttccg

SEQ ID NO: 634888 - DNA, 25 bp, Homo sapien
tctgtgctcatgatcaatcatgaca

SEQ ID NO: 634889 - DNA, 25 bp, Homo sapien
gacatctctgtgcataattcccatg

SEQ ID NO: 634890 - DNA, 25 bp, Homo sapien
cataattcccatgctgtgacaataa

SEQ ID NO: 634891 - DNA, 25 bp, Homo sapien
catgacattatggggcttgacatct

SEQ ID NO: 634892 - DNA, 25 bp, Homo sapien
tgggatgaacgggtcagaaaggagt

SEQ ID NO: 634893 - DNA, 25 bp, Homo sapien
gcctgaataatacgtaagagtcctt

SEQ ID NO: 634894 - DNA, 25 bp, Homo sapien
tgaataatacgtaagagtcctttac

SEQ ID NO: 634895 - DNA, 25 bp, Homo sapien
ggagttagcctgaataatacgtaag

SEQ ID NO: 634896 - DNA, 25 bp, Homo sapien
tctaccatcaattgactatttaaca

SEQ ID NO: 634897 - DNA, 25 bp, Homo sapien
ggcttttctaccatcaattgactat

SEQ ID NO: 634898 - DNA, 25 bp, Homo sapien
acaaagttaatctgctggcttttct

SEQ ID NO: 634899 - DNA, 25 bp, Homo sapien
gggtcttactctgtgctactgcact

SEQ ID NO: 634900 - DNA, 25 bp, Homo sapien
agtctgttaacgtctggtacaattg

SEQ ID NO: 634901 - DNA, 25 bp, Homo sapien
gtaaaatcgaatatcatagtctgtt

SEQ ID NO: 634902 - DNA, 25 bp, Homo sapien
aatcgaatatcatagtctgttaacg

SEQ ID NO: 634903 - DNA, 25 bp, Homo sapien
tagtctgttaacgtctggtacaatt

SEQ ID NO: 634904 - DNA, 25 bp, Homo sapien
gatacgttaatatgcactgacaccc

SEQ ID NO: 634905 - DNA, 25 bp, Homo sapien
gccctgcagatcaccagtgggtatg

SEQ ID NO: 634906 - DNA, 25 bp, Homo sapien
tgcggaagctataatccactgtcag

SEQ ID NO: 634907 - DNA, 25 bp, Homo sapien
caaatatactgcctccttagtaggg

SEQ ID NO: 634908 - DNA, 25 bp, Homo sapien
gccactggatagactggaattctga

SEQ ID NO: 634909 - DNA, 25 bp, Homo sapien
taatggttagcaacgtcttctgaca

SEQ ID NO: 634910 - DNA, 25 bp, Homo sapien
tactggactggtggaaaggcaaatc

SEQ ID NO: 634911 - DNA, 25 bp, Homo sapien
tagcccacagtttatgaggaatcct

SEQ ID NO: 634912 - DNA, 25 bp, Homo sapien
gaagtctgtgttgtttacgtgttca

SEQ ID NO: 634913 - DNA, 25 bp, Homo sapien
tctgtgttgtttacgtgttcaaaaa

SEQ ID NO: 634914 - DNA, 25 bp, Homo sapien
agtctgtgttgtttacgtgttcaaa

SEQ ID NO: 634915 - DNA, 25 bp, Homo sapien
aagtctgtgttgtttacgtgttcaa

SEQ ID NO: 634916 - DNA, 25 bp, Homo sapien
tcagctctggcgggccttgctaaca

SEQ ID NO: 634917 - DNA, 25 bp, Homo sapien
ctcagctctggcgggccttgctaac

SEQ ID NO: 634918 - DNA, 25 bp, Homo sapien
tctcagctctggcgggccttgctaa

SEQ ID NO: 634919 - DNA, 25 bp, Homo sapien
agctctggcgggccttgctaacacc

SEQ ID NO: 634920 - DNA, 25 bp, Homo sapien
gtgtgatgatgttgggacctcctct

SEQ ID NO: 634921 - DNA, 25 bp, Homo sapien
gatgttgggacctcctctcaaattc

SEQ ID NO: 634922 - DNA, 25 bp, Homo sapien
tacaatgtctgccagtgtgatgatg

SEQ ID NO: 634923 - DNA, 25 bp, Homo sapien
acagggtcttttacaatgtctgcca

SEQ ID NO: 634924 - DNA, 25 bp, Homo sapien
tatcaattaggatgaaacatgggcc

SEQ ID NO: 634925 - DNA, 25 bp, Homo sapien
tttcagagtatttcaacacgtagtg

SEQ ID NO: 634926 - DNA, 25 bp, Homo sapien
cttatgagcacaccttgaaggaaga

SEQ ID NO: 634927 - DNA, 25 bp, Homo sapien
tattccaaagaccagacacttctgc

SEQ ID NO: 634928 - DNA, 25 bp, Homo sapien
aaatgaacccctccattctaaagag

SEQ ID NO: 634929 - DNA, 25 bp, Homo sapien
gtcccactgcacctcctttataaag

SEQ ID NO: 634930 - DNA, 25 bp, Homo sapien
tattctgcagagcatatcttaaaca

SEQ ID NO: 634931 - DNA, 25 bp, Homo sapien
ccacatctgttctagtatggaatcc

SEQ ID NO: 634932 - DNA, 25 bp, Homo sapien
tctcctgaatagtctaaaacagtgc

SEQ ID NO: 634933 - DNA, 25 bp, Homo sapien
gcttatattataaagccttctcctg

SEQ ID NO: 634934 - DNA, 25 bp, Homo sapien
actgtgcctgggcttatattataaa

SEQ ID NO: 634935 - DNA, 25 bp, Homo sapien
tattataaagccttctcctgaatag

SEQ ID NO: 634936 - DNA, 25 bp, Homo sapien
taagcctcaagcacatgatagcaga

SEQ ID NO: 634937 - DNA, 25 bp, Homo sapien
ttccaggctgatgatccaggtccag

SEQ ID NO: 634938 - DNA, 25 bp, Homo sapien
caggtccaatgcaaagtggtaccca

SEQ ID NO: 634939 - DNA, 25 bp, Homo sapien
tacataccacagttagaacaggtcc

SEQ ID NO: 634940 - DNA, 25 bp, Homo sapien
tggaccttgctacttaatacagaga

SEQ ID NO: 634941 - DNA, 25 bp, Homo sapien
caatggacttgcattactgcagggc

SEQ ID NO: 634942 - DNA, 25 bp, Homo sapien
tcccaatatatgacagtgcacagca

SEQ ID NO: 634943 - DNA, 25 bp, Homo sapien
taccactcacatcacctaagcaagg

SEQ ID NO: 634944 - DNA, 25 bp, Homo sapien
taagtattaggcaataactgggaga

SEQ ID NO: 634945 - DNA, 25 bp, Homo sapien
gactgtacctttgctcccttactct

SEQ ID NO: 634946 - DNA, 25 bp, Homo sapien
tctgccacaacctagctatatgagt

SEQ ID NO: 634947 - DNA, 25 bp, Homo sapien
gtttcccgatctgtcaaataagcag

SEQ ID NO: 634948 - DNA, 25 bp, Homo sapien
ttcattatttgtgatgttgatggct

SEQ ID NO: 634949 - DNA, 25 bp, Homo sapien
tcggcctaattttcgaaccagctgg

SEQ ID NO: 634950 - DNA, 25 bp, Homo sapien
tgatggcttcaaatacttcactgta

SEQ ID NO: 634951 - DNA, 25 bp, Homo sapien
cttcactgtatttacctcggcctaa

SEQ ID NO: 634952 - DNA, 25 bp, Homo sapien
tagagacggcgggtcctcaccgtgt

SEQ ID NO: 634953 - DNA, 25 bp, Homo sapien
gagacggcgggtcctcaccgtgtta

SEQ ID NO: 634954 - DNA, 25 bp, Homo sapien
tctttctaatcccaaactgtttaca

SEQ ID NO: 634955 - DNA, 25 bp, Homo sapien
taatcccaaactgtttacatcttta

SEQ ID NO: 634956 - DNA, 25 bp, Homo sapien
gtttacatctttattggcacatgac

SEQ ID NO: 634957 - DNA, 25 bp, Homo sapien
caattattctttctaatcccaaact

SEQ ID NO: 634958 - DNA, 25 bp, Homo sapien
tacctagggtatggcctacggctcc

SEQ ID NO: 634959 - DNA, 25 bp, Homo sapien
gctgttcaggcagactacaactgtt

SEQ ID NO: 634960 - DNA, 25 bp, Homo sapien
cggctcctaggatacaaatgtgtac

SEQ ID NO: 634961 - DNA, 25 bp, Homo sapien
gccaggtgcccatacagaataccgt

SEQ ID NO: 634962 - DNA, 25 bp, Homo sapien
tctggccctgcttggcacgggtccc

SEQ ID NO: 634963 - DNA, 25 bp, Homo sapien
ttctcgaggtctgtgtgtattaaca

SEQ ID NO: 634964 - DNA, 25 bp, Homo sapien
taatcccagtattctcgaggtctgt

SEQ ID NO: 634965 - DNA, 25 bp, Homo sapien
caccacatgtgactcgtaatcccag

SEQ ID NO: 634966 - DNA, 25 bp, Homo sapien
tgtttggagatctggcagtcactgt

SEQ ID NO: 634967 - DNA, 25 bp, Homo sapien
tcagaagcagctgggggtaagacct

SEQ ID NO: 634968 - DNA, 25 bp, Homo sapien
aagcagctgggggtaagaccttgtt

SEQ ID NO: 634969 - DNA, 25 bp, Homo sapien
tggacttgatgtttggagatctggc

SEQ ID NO: 634970 - DNA, 25 bp, Homo sapien
aggagttggaggccagcctgggcaa

SEQ ID NO: 634971 - DNA, 25 bp, Homo sapien
aggctgatacaggaagattgcttgt

SEQ ID NO: 634972 - DNA, 25 bp, Homo sapien
tgggcaaaacagcaagaccttgtct

SEQ ID NO: 634973 - DNA, 25 bp, Homo sapien
tgatacaggaagattgcttgtgccc

SEQ ID NO: 634974 - DNA, 25 bp, Homo sapien
catacattgctagtgtgaacgcaaa

SEQ ID NO: 634975 - DNA, 25 bp, Homo sapien
cattaggatatactgagggaagcat

SEQ ID NO: 634976 - DNA, 25 bp, Homo sapien
gacatatcacggttatggcaagatg

SEQ ID NO: 634977 - DNA, 25 bp, Homo sapien
tgactggcccagtttcttagtgttg

SEQ ID NO: 634978 - DNA, 25 bp, Homo sapien
gtagtcccagcaggaggataaggca

SEQ ID NO: 634979 - DNA, 25 bp, Homo sapien
ggcagaggttgcagtgagctgagat

SEQ ID NO: 634980 - DNA, 25 bp, Homo sapien
ggagaatcgcttgaacccgggaggc

SEQ ID NO: 634981 - DNA, 25 bp, Homo sapien
tgagctgagatcatgccactgcact

SEQ ID NO: 634982 - DNA, 25 bp, Homo sapien
tatgaagcacactatgaagcattcc

SEQ ID NO: 634983 - DNA, 25 bp, Homo sapien
aagtacctcttctacagggccaaag

SEQ ID NO: 634984 - DNA, 25 bp, Homo sapien
ctcttggtggatgccccgtgtttca

SEQ ID NO: 634985 - DNA, 25 bp, Homo sapien
ggaaatcctactcacccttcaagaa

SEQ ID NO: 634986 - DNA, 25 bp, Homo sapien
tttatgaggttccacgctgcatgat

SEQ ID NO: 634987 - DNA, 25 bp, Homo sapien
gaaactagtcagtatgggtgaatga

SEQ ID NO: 634988 - DNA, 25 bp, Homo sapien
gggtgaatgatgtttcttggagatt

SEQ ID NO: 634989 - DNA, 25 bp, Homo sapien
catgtgatgagcacactgcttgaca

SEQ ID NO: 634990 - DNA, 25 bp, Homo sapien
tcttctgttctacagcaagggactg

SEQ ID NO: 634991 - DNA, 25 bp, Homo sapien
ataaccttcccaatgtcagaggtag

SEQ ID NO: 634992 - DNA, 25 bp, Homo sapien
aaaacattcgtctagattcacagcc

SEQ ID NO: 634993 - DNA, 25 bp, Homo sapien
tcactgttaaaccagcaagtccatg

SEQ ID NO: 634994 - DNA, 25 bp, Homo sapien
tttaatgtctaagactgaaagacag

SEQ ID NO: 634995 - DNA, 25 bp, Homo sapien
tgccactcttagcagtatcttgtga

SEQ ID NO: 634996 - DNA, 25 bp, Homo sapien
tgtaaagaagcttgccgaccatagc

SEQ ID NO: 634997 - DNA, 25 bp, Homo sapien
agcaactgttgctacgtagggtttt

SEQ ID NO: 634998 - DNA, 25 bp, Homo sapien
tagaaaagggtactcagggaacata

SEQ ID NO: 634999 - DNA, 25 bp, Homo sapien
tgattctctattggctggaccagga

SEQ ID NO: 635000 - DNA, 25 bp, Homo sapien
tagtagaccagttaacattcatgtg

SEQ ID NO: 635001 - DNA, 25 bp, Homo sapien
gattctagactagctctagggctga

SEQ ID NO: 635002 - DNA, 25 bp, Homo sapien
caagaaacaggcacaggttccactc

SEQ ID NO: 635003 - DNA, 25 bp, Homo sapien
gattatcttacagaagtcagtgggc

SEQ ID NO: 635004 - DNA, 25 bp, Homo sapien
cacaagggctaaatgagggtatcca

SEQ ID NO: 635005 - DNA, 25 bp, Homo sapien
taggactgagttcccacttccttgc

SEQ ID NO: 635006 - DNA, 25 bp, Homo sapien
caaaggtttcccatctaaagcttat

SEQ ID NO: 635007 - DNA, 25 bp, Homo sapien
aaggattcatctctctctcaaatgc

SEQ ID NO: 635008 - DNA, 25 bp, Homo sapien
gtcccaaatctcattcatctattca

SEQ ID NO: 635009 - DNA, 25 bp, Homo sapien
gcttatcatttcagaagtcccaaat

SEQ ID NO: 635010 - DNA, 25 bp, Homo sapien
tgcttaatctagcaatgttccaaca

SEQ ID NO: 635011 - DNA, 25 bp, Homo sapien
ctgcttaatctagcaatgttccaac

SEQ ID NO: 635012 - DNA, 25 bp, Homo sapien
ttctgccccacgtcttggtcccttc

SEQ ID NO: 635013 - DNA, 25 bp, Homo sapien
ctttcgccccagcaaccccgcctgg

SEQ ID NO: 635014 - DNA, 25 bp, Homo sapien
cagacgttctgccccacgtcttggt

SEQ ID NO: 635015 - DNA, 25 bp, Homo sapien
tccaactccagacgttctgccccac

SEQ ID NO: 635016 - DNA, 25 bp, Homo sapien
tcacacagacaatatggcggcgatg

SEQ ID NO: 635017 - DNA, 25 bp, Homo sapien
cacagacaatatggcggcgatggag

SEQ ID NO: 635018 - DNA, 25 bp, Homo sapien
gctcacacagacaatatggcggcga

SEQ ID NO: 635019 - DNA, 25 bp, Homo sapien
tgctcacacagacaatatggcggcg

SEQ ID NO: 635020 - DNA, 25 bp, Homo sapien
ctaccaggaggcggggcgagacagc

SEQ ID NO: 635021 - DNA, 25 bp, Homo sapien
gggcgagacagcttccgactccgcc

SEQ ID NO: 635022 - DNA, 25 bp, Homo sapien
gcggggcgagacagcttccgactcc

SEQ ID NO: 635023 - DNA, 25 bp, Homo sapien
aggaggcggggcgagacagcttccg

SEQ ID NO: 635024 - DNA, 25 bp, Homo sapien
acaagcgcacttcgttctcgtcctg

SEQ ID NO: 635025 - DNA, 25 bp, Homo sapien
tcgtcctgcccgtggtttggtgctg

SEQ ID NO: 635026 - DNA, 25 bp, Homo sapien
ggacagatggcataacacacgcctt

SEQ ID NO: 635027 - DNA, 25 bp, Homo sapien
tgcctgagcggcttgagaacctgga

SEQ ID NO: 635028 - DNA, 25 bp, Homo sapien
tcatggactgaaggcaaaaaggacc

SEQ ID NO: 635029 - DNA, 25 bp, Homo sapien
catggactgaaggcaaaaaggaccg

SEQ ID NO: 635030 - DNA, 25 bp, Homo sapien
atggactgaaggcaaaaaggaccgg

SEQ ID NO: 635031 - DNA, 25 bp, Homo sapien
tctgcaaatctggtctggattagac

SEQ ID NO: 635032 - DNA, 25 bp, Homo sapien
caggcccatggggtctgcaaatctg

SEQ ID NO: 635033 - DNA, 25 bp, Homo sapien
gattagacacgctgagaagcaaacg

SEQ ID NO: 635034 - DNA, 25 bp, Homo sapien
gtctggattagacacgctgagaagc

SEQ ID NO: 635035 - DNA, 25 bp, Homo sapien
cagcactctctttttgtagtgcttc

SEQ ID NO: 635036 - DNA, 25 bp, Homo sapien
tcttcagcactctctttttgtagtg

SEQ ID NO: 635037 - DNA, 25 bp, Homo sapien
gcactctctttttgtagtgcttcat

SEQ ID NO: 635038 - DNA, 25 bp, Homo sapien
caaatatgccatagtcttcagcact

SEQ ID NO: 635039 - DNA, 25 bp, Homo sapien
cctaataaaagcctcataaaatggg

SEQ ID NO: 635040 - DNA, 25 bp, Homo sapien
aacctaataaaagcctcataaaatg

SEQ ID NO: 635041 - DNA, 25 bp, Homo sapien
aaaagcctcataaaatgggagtggc

SEQ ID NO: 635042 - DNA, 25 bp, Homo sapien
ataaaagcctcataaaatgggagtg

SEQ ID NO: 635043 - DNA, 25 bp, Homo sapien
gttaagaacatctgataaacagcag

SEQ ID NO: 635044 - DNA, 25 bp, Homo sapien
gggactctcctcagctcagaacgac

SEQ ID NO: 635045 - DNA, 25 bp, Homo sapien
catatcagacacctaacagttgtta

SEQ ID NO: 635046 - DNA, 25 bp, Homo sapien
tctgacctccgatgtccacgggact

SEQ ID NO: 635047 - DNA, 25 bp, Homo sapien
gtcaccaacagtctttgtttttcca

SEQ ID NO: 635048 - DNA, 25 bp, Homo sapien
agagctgggcaggctgaatggatcc

SEQ ID NO: 635049 - DNA, 25 bp, Homo sapien
aaaagttctgccttgtctctgacca

SEQ ID NO: 635050 - DNA, 25 bp, Homo sapien
gttctgccttgtctctgaccagcca

SEQ ID NO: 635051 - DNA, 25 bp, Homo sapien
tgcccagagtgtcccggaacaggcc

SEQ ID NO: 635052 - DNA, 25 bp, Homo sapien
ctccaggatcgggtggagatgtccc

SEQ ID NO: 635053 - DNA, 25 bp, Homo sapien
agtgtcccggaacaggccatggtcc

SEQ ID NO: 635054 - DNA, 25 bp, Homo sapien
cacagctctccaggatcgggtggag

SEQ ID NO: 635055 - DNA, 25 bp, Homo sapien
ctgtccagccagtggctggctcctg

SEQ ID NO: 635056 - DNA, 25 bp, Homo sapien
tgtccagccagtggctggctcctgg

SEQ ID NO: 635057 - DNA, 25 bp, Homo sapien
tcctggggtcttcttccctgtccag

SEQ ID NO: 635058 - DNA, 25 bp, Homo sapien
gggcttggctcctggggtcttcttc

SEQ ID NO: 635059 - DNA, 25 bp, Homo sapien
catctccgtggccctcgaagggggg

SEQ ID NO: 635060 - DNA, 25 bp, Homo sapien
tcatctccgtggccctcgaaggggg

SEQ ID NO: 635061 - DNA, 25 bp, Homo sapien
tgccccccaggtcacgacggccacc

SEQ ID NO: 635062 - DNA, 25 bp, Homo sapien
cttttctacttctttcccatatgat

SEQ ID NO: 635063 - DNA, 25 bp, Homo sapien
ctcggttggcggtttgtggcctcct

SEQ ID NO: 635064 - DNA, 25 bp, Homo sapien
aggctctcggttggcggtttgtggc

SEQ ID NO: 635065 - DNA, 25 bp, Homo sapien
ctcaggctctcggttggcggtttgt

SEQ ID NO: 635066 - DNA, 25 bp, Homo sapien
ctctcggttggcggtttgtggcctc

SEQ ID NO: 635067 - DNA, 25 bp, Homo sapien
aggtgcagatggagcgcggctggcg

SEQ ID NO: 635068 - DNA, 25 bp, Homo sapien
aaggtgcagatggagcgcggctggc

SEQ ID NO: 635069 - DNA, 25 bp, Homo sapien
tgcagatggagcgcggctggcggcc

SEQ ID NO: 635070 - DNA, 25 bp, Homo sapien
ggtgcagatggagcgcggctggcgg

SEQ ID NO: 635071 - DNA, 25 bp, Homo sapien
tcttggacagcttgcggtccaccgg

SEQ ID NO: 635072 - DNA, 25 bp, Homo sapien
gctgcccgtcgtcggccgagtcgcc

SEQ ID NO: 635073 - DNA, 25 bp, Homo sapien
cagcttgcggtccaccggctcggtg

SEQ ID NO: 635074 - DNA, 25 bp, Homo sapien
gtcgtcggccgagtcgcccagcagc

SEQ ID NO: 635075 - DNA, 25 bp, Homo sapien
tggccgcctgccgctgtcgcaccac

SEQ ID NO: 635076 - DNA, 25 bp, Homo sapien
ggccgcctgccgctgtcgcaccacc

SEQ ID NO: 635077 - DNA, 25 bp, Homo sapien
cgcctgccgctgtcgcaccaccacc

SEQ ID NO: 635078 - DNA, 25 bp, Homo sapien
ttggccgcctgccgctgtcgcacca

SEQ ID NO: 635079 - DNA, 25 bp, Homo sapien
ggtccgacgcgtcgctctcgctgcg

SEQ ID NO: 635080 - DNA, 25 bp, Homo sapien
gacgcgtcgctctcgctgcggttct

SEQ ID NO: 635081 - DNA, 25 bp, Homo sapien
gctctcgctgcggttctcctcgtcc

SEQ ID NO: 635082 - DNA, 25 bp, Homo sapien
gactggtccgacgcgtcgctctcgc

SEQ ID NO: 635083 - DNA, 25 bp, Homo sapien
gcgccgacgggccgcagcagcgcga

SEQ ID NO: 635084 - DNA, 25 bp, Homo sapien
tccgggtacagcacgtgcgcgccga

SEQ ID NO: 635085 - DNA, 25 bp, Homo sapien
gtccgggtacagcacgtgcgcgccg

SEQ ID NO: 635086 - DNA, 25 bp, Homo sapien
tgcgcgccgacgggccgcagcagcg

SEQ ID NO: 635087 - DNA, 25 bp, Homo sapien
gccggccgcgtccctccgtgcgccg

SEQ ID NO: 635088 - DNA, 25 bp, Homo sapien
gggcgccggccgcgtccctccgtgc

SEQ ID NO: 635089 - DNA, 25 bp, Homo sapien
gcgccggccgcgtccctccgtgcgc

SEQ ID NO: 635090 - DNA, 25 bp, Homo sapien
cgccggccgcgtccctccgtgcgcc

SEQ ID NO: 635091 - DNA, 25 bp, Homo sapien
tccaggggtgttccaaaaggcctca

SEQ ID NO: 635092 - DNA, 25 bp, Homo sapien
tcagggcttgccgtcgtgattcaca

SEQ ID NO: 635093 - DNA, 25 bp, Homo sapien
gccgtcgtgattcacaattggagaa

SEQ ID NO: 635094 - DNA, 25 bp, Homo sapien
tcacaattggagaaagcgaggcatg

SEQ ID NO: 635095 - DNA, 25 bp, Homo sapien
tcctttgcaaactgtggctgatgag

SEQ ID NO: 635096 - DNA, 25 bp, Homo sapien
tttctcctttgcaaactgtggctga

SEQ ID NO: 635097 - DNA, 25 bp, Homo sapien
tgcaaactgtggctgatgagggcca

SEQ ID NO: 635098 - DNA, 25 bp, Homo sapien
caaactgtggctgatgagggccatc

SEQ ID NO: 635099 - DNA, 25 bp, Homo sapien
tacagagggttaaagcaagccagcc

SEQ ID NO: 635100 - DNA, 25 bp, Homo sapien
gaactccatgctggactgaggaatt

SEQ ID NO: 635101 - DNA, 25 bp, Homo sapien
tggctggcccataaaatccaccgga

SEQ ID NO: 635102 - DNA, 25 bp, Homo sapien
ccggctgagcggaaatcagattttg

SEQ ID NO: 635103 - DNA, 25 bp, Homo sapien
aacagcgctggtaacatccacttgc

SEQ ID NO: 635104 - DNA, 25 bp, Homo sapien
agctaatgggttctctgtccccaca

SEQ ID NO: 635105 - DNA, 25 bp, Homo sapien
ggtctcagctctaacaatgtaaccc

SEQ ID NO: 635106 - DNA, 25 bp, Homo sapien
gctgggcattcttcccttatatgaa

SEQ ID NO: 635107 - DNA, 25 bp, Homo sapien
ctctcagagcactgggattaaagtg

SEQ ID NO: 635108 - DNA, 25 bp, Homo sapien
cagagcactgggattaaagtgtgag

SEQ ID NO: 635109 - DNA, 25 bp, Homo sapien
tctcagagcactgggattaaagtgt

SEQ ID NO: 635110 - DNA, 25 bp, Homo sapien
tgtcttggcctctcagagcactggg

SEQ ID NO: 635111 - DNA, 25 bp, Homo sapien
ttggaatgatactagatttacagag

SEQ ID NO: 635112 - DNA, 25 bp, Homo sapien
ttttggaatgatactagatttacag

SEQ ID NO: 635113 - DNA, 25 bp, Homo sapien
ggaatgatactagatttacagagaa

SEQ ID NO: 635114 - DNA, 25 bp, Homo sapien
tttattttggaatgatactagattt

SEQ ID NO: 635115 - DNA, 25 bp, Homo sapien
aaggtcaacatcttacatcaccatg

SEQ ID NO: 635116 - DNA, 25 bp, Homo sapien
caaggtcaacatcttacatcaccat

SEQ ID NO: 635117 - DNA, 25 bp, Homo sapien
aggtcaacatcttacatcaccatgg

SEQ ID NO: 635118 - DNA, 25 bp, Homo sapien
ccaaggtcaacatcttacatcacca

SEQ ID NO: 635119 - DNA, 25 bp, Homo sapien
tgttccaagacccaatccaggatgc

SEQ ID NO: 635120 - DNA, 25 bp, Homo sapien
gaatgcatgggaaaagctcttgtcc

SEQ ID NO: 635121 - DNA, 25 bp, Homo sapien
gaataagcctgagctagcctgctgg

SEQ ID NO: 635122 - DNA, 25 bp, Homo sapien
gagtgaccaagttcccttagagggc

SEQ ID NO: 635123 - DNA, 25 bp, Homo sapien
agcccaaattgccaacccataggat

SEQ ID NO: 635124 - DNA, 25 bp, Homo sapien
aagctaactggtacacaattctgca

SEQ ID NO: 635125 - DNA, 25 bp, Homo sapien
agcagaactgccctgttgagcccag

SEQ ID NO: 635126 - DNA, 25 bp, Homo sapien
gccaacccataggattgtgggaaaa

SEQ ID NO: 635127 - DNA, 25 bp, Homo sapien
tctgttccctgctgtcttagctttg

SEQ ID NO: 635128 - DNA, 25 bp, Homo sapien
tagctttgtttgcagctagaggtgc

SEQ ID NO: 635129 - DNA, 25 bp, Homo sapien
cacgattggtctattcagccatgac

SEQ ID NO: 635130 - DNA, 25 bp, Homo sapien
tcttggtaatgggatcccagtttta

SEQ ID NO: 635131 - DNA, 25 bp, Homo sapien
tctgatagaaggtgacgggtccagc

SEQ ID NO: 635132 - DNA, 25 bp, Homo sapien
ttaaggcaaaaggatccaagacgtg

SEQ ID NO: 635133 - DNA, 25 bp, Homo sapien
tgggaccatgaagtaacgagcactg

SEQ ID NO: 635134 - DNA, 25 bp, Homo sapien
taccttcgtggagttgttgaaccaa

SEQ ID NO: 635135 - DNA, 25 bp, Homo sapien
cggtaatgcttcaagggtaaggcca

SEQ ID NO: 635136 - DNA, 25 bp, Homo sapien
tcccacactgtacagtgagtccaag

SEQ ID NO: 635137 - DNA, 25 bp, Homo sapien
taaggccatgatcctattgtcacag

SEQ ID NO: 635138 - DNA, 25 bp, Homo sapien
gaccctctcgccaggtgcaaagaga

SEQ ID NO: 635139 - DNA, 25 bp, Homo sapien
tgcaagtctggtgtggatgctccca

SEQ ID NO: 635140 - DNA, 25 bp, Homo sapien
gcaagtctggtgtggatgctcccag

SEQ ID NO: 635141 - DNA, 25 bp, Homo sapien
ctttgatccagaggacatcgatggg

SEQ ID NO: 635142 - DNA, 25 bp, Homo sapien
agtagaagtagtcacctccctgggc

SEQ ID NO: 635143 - DNA, 25 bp, Homo sapien
tgcagttgctggtaggccgcgtagc

SEQ ID NO: 635144 - DNA, 25 bp, Homo sapien
gggcccctttgatccagaggacatc

SEQ ID NO: 635145 - DNA, 25 bp, Homo sapien
tcagcggcacgttgtgcaccgcggc

SEQ ID NO: 635146 - DNA, 25 bp, Homo sapien
caccgcggcgatgcggcccgagtgg

SEQ ID NO: 635147 - DNA, 25 bp, Homo sapien
ttggcggggtccaacacggacggca

SEQ ID NO: 635148 - DNA, 25 bp, Homo sapien
ggcagcggccggatgagcacgctca

SEQ ID NO: 635149 - DNA, 25 bp, Homo sapien
ccagcgttcctcctgcacgcagccc

SEQ ID NO: 635150 - DNA, 25 bp, Homo sapien
cccagcgttcctcctgcacgcagcc

SEQ ID NO: 635151 - DNA, 25 bp, Homo sapien
gggcccgtgccagggcagcgcgcgt

SEQ ID NO: 635152 - DNA, 25 bp, Homo sapien
ggccataccattccgcgcggccggg

SEQ ID NO: 635153 - DNA, 25 bp, Homo sapien
cttaactccggccgggccataccat

SEQ ID NO: 635154 - DNA, 25 bp, Homo sapien
tccggccgggccataccattccgcg

SEQ ID NO: 635155 - DNA, 25 bp, Homo sapien
tgcagttatagacccgctgttcaag

SEQ ID NO: 635156 - DNA, 25 bp, Homo sapien
gttatagacccgctgttcaaggtca

SEQ ID NO: 635157 - DNA, 25 bp, Homo sapien
tatagacccgctgttcaaggtcagc

SEQ ID NO: 635158 - DNA, 25 bp, Homo sapien
taggtgcagttatagacccgctgtt

SEQ ID NO: 635159 - DNA, 25 bp, Homo sapien
aaggtggacgatcccagactcggtc

SEQ ID NO: 635160 - DNA, 25 bp, Homo sapien
gagtccaaactgtggggccacttaa

SEQ ID NO: 635161 - DNA, 25 bp, Homo sapien
cccagactcggtcgaagacaagcat

SEQ ID NO: 635162 - DNA, 25 bp, Homo sapien
accaccaactccaagcaggaaggtg

SEQ ID NO: 635163 - DNA, 25 bp, Homo sapien
tttgccttccaccagttgctgacac

SEQ ID NO: 635164 - DNA, 25 bp, Homo sapien
tccaccagttgctgacactttctga

SEQ ID NO: 635165 - DNA, 25 bp, Homo sapien
ctttgccttccaccagttgctgaca

SEQ ID NO: 635166 - DNA, 25 bp, Homo sapien
gccttccaccagttgctgacacttt

SEQ ID NO: 635167 - DNA, 25 bp, Homo sapien
gttagatgtactttcatgagacatg

SEQ ID NO: 635168 - DNA, 25 bp, Homo sapien
gatgtactttcatgagacatggatg

SEQ ID NO: 635169 - DNA, 25 bp, Homo sapien
tagatgtactttcatgagacatgga

SEQ ID NO: 635170 - DNA, 25 bp, Homo sapien
cagttagatgtactttcatgagaca

SEQ ID NO: 635171 - DNA, 25 bp, Homo sapien
tccgggagagttgcatagacatggc

SEQ ID NO: 635172 - DNA, 25 bp, Homo sapien
gctatttacagggtcaacgcctcca

SEQ ID NO: 635173 - DNA, 25 bp, Homo sapien
tctggagccctagggaagtgcccct

SEQ ID NO: 635174 - DNA, 25 bp, Homo sapien
tggagctgagcaaaggcccattcac

SEQ ID NO: 635175 - DNA, 25 bp, Homo sapien
tcagggacagatcggagacttcaag

SEQ ID NO: 635176 - DNA, 25 bp, Homo sapien
tgaagattagatccccagatggaca

SEQ ID NO: 635177 - DNA, 25 bp, Homo sapien
tccttagcgagtgcaggctctgaag

SEQ ID NO: 635178 - DNA, 25 bp, Homo sapien
tgtgaatggccagacctaaggcctg

SEQ ID NO: 635179 - DNA, 25 bp, Homo sapien
cgggcatggacacgtaggccttgcc

SEQ ID NO: 635180 - DNA, 25 bp, Homo sapien
caggccgcctcgcagtgcttgtgga

SEQ ID NO: 635181 - DNA, 25 bp, Homo sapien
tcttgtcgcactggcggcagcggta

SEQ ID NO: 635182 - DNA, 25 bp, Homo sapien
acgtcgggcatttgcgcgccagctg

SEQ ID NO: 635183 - DNA, 25 bp, Homo sapien
cgtccatggagtagctgtcggtcac

SEQ ID NO: 635184 - DNA, 25 bp, Homo sapien
ggcgtccatggagtagctgtcggtc

SEQ ID NO: 635185 - DNA, 25 bp, Homo sapien
ctcggcgcacgcgtgccggtgcccg

SEQ ID NO: 635186 - DNA, 25 bp, Homo sapien
aaggcgtccatggagtagctgtcgg

SEQ ID NO: 635187 - DNA, 25 bp, Homo sapien
cgacaggctcgactgcgggctttcg

SEQ ID NO: 635188 - DNA, 25 bp, Homo sapien
ttcggggtcgctgtactcctccggc

SEQ ID NO: 635189 - DNA, 25 bp, Homo sapien
tctggtccgcatcgtagctgctcgg

SEQ ID NO: 635190 - DNA, 25 bp, Homo sapien
ccctcggaagtagcgcgccgacagg

SEQ ID NO: 635191 - DNA, 25 bp, Homo sapien
tctagaagtcgtcggaagtccgcag

SEQ ID NO: 635192 - DNA, 25 bp, Homo sapien
agcctgctctagaagtcgtcggaag

SEQ ID NO: 635193 - DNA, 25 bp, Homo sapien
tcggaagtccgcagtgagaattccc

SEQ ID NO: 635194 - DNA, 25 bp, Homo sapien
aagtcgtcggaagtccgcagtgaga

SEQ ID NO: 635195 - DNA, 25 bp, Homo sapien
gggattccgtaggggattctcatgg

SEQ ID NO: 635196 - DNA, 25 bp, Homo sapien
ggtttgagtgattggtgggtgggca

SEQ ID NO: 635197 - DNA, 25 bp, Homo sapien
ttccgtaggggattctcatgggcag

SEQ ID NO: 635198 - DNA, 25 bp, Homo sapien
gtttgagtgattggtgggtgggcag

SEQ ID NO: 635199 - DNA, 25 bp, Homo sapien
gagagtttctggcagacaaactttt

SEQ ID NO: 635200 - DNA, 25 bp, Homo sapien
ggagagtttctggcagacaaacttt

SEQ ID NO: 635201 - DNA, 25 bp, Homo sapien
ccaaaggcctggcagctggtacatc

SEQ ID NO: 635202 - DNA, 25 bp, Homo sapien
aaaggcctggcagctggtacatctg

SEQ ID NO: 635203 - DNA, 25 bp, Homo sapien
aggcctggcagctggtacatctgcc

SEQ ID NO: 635204 - DNA, 25 bp, Homo sapien
gcctggcagctggtacatctgccca

SEQ ID NO: 635205 - DNA, 25 bp, Homo sapien
gcattggacttggacctcagatctg

SEQ ID NO: 635206 - DNA, 25 bp, Homo sapien
ttggactgaatgttggaccttgacc

SEQ ID NO: 635207 - DNA, 25 bp, Homo sapien
ctgaagtttgacgtaggcattggac

SEQ ID NO: 635208 - DNA, 25 bp, Homo sapien
tgacctagactttgaacctgggcct

SEQ ID NO: 635209 - DNA, 25 bp, Homo sapien
gtgggtgaagtgcttggaaatccca

SEQ ID NO: 635210 - DNA, 25 bp, Homo sapien
ctggtgtggcagagtgatggaatgt

SEQ ID NO: 635211 - DNA, 25 bp, Homo sapien
tgaagtgcttggaaatcccagaggt

SEQ ID NO: 635212 - DNA, 25 bp, Homo sapien
tggcagagtgatggaatgtgggtga

SEQ ID NO: 635213 - DNA, 25 bp, Homo sapien
actggaagccgtcccctttgatctt

SEQ ID NO: 635214 - DNA, 25 bp, Homo sapien
gcgccaggcagcacgtaggctgtct

SEQ ID NO: 635215 - DNA, 25 bp, Homo sapien
gcagcacgtaggctgtctccaaggg

SEQ ID NO: 635216 - DNA, 25 bp, Homo sapien
gccggcaccccgctgcactggaagc

SEQ ID NO: 635217 - DNA, 25 bp, Homo sapien
tggagatcaggtggtcccctagcaa

SEQ ID NO: 635218 - DNA, 25 bp, Homo sapien
tatatgggacgcaggctggagatca

SEQ ID NO: 635219 - DNA, 25 bp, Homo sapien
tccggctgccggctttatatgggac

SEQ ID NO: 635220 - DNA, 25 bp, Homo sapien
gctcggcgctctaatccatcaaatg

SEQ ID NO: 635221 - DNA, 25 bp, Homo sapien
gtggtgctgccttgtccaactccag

SEQ ID NO: 635222 - DNA, 25 bp, Homo sapien
ggtgctgccttgtccaactccagga

SEQ ID NO: 635223 - DNA, 25 bp, Homo sapien
gtgctgccttgtccaactccaggag

SEQ ID NO: 635224 - DNA, 25 bp, Homo sapien
ctgtggtgctgccttgtccaactcc

SEQ ID NO: 635225 - DNA, 25 bp, Homo sapien
ttgaggatttgcgtcaggtaaccac

SEQ ID NO: 635226 - DNA, 25 bp, Homo sapien
tgaggatttgcgtcaggtaaccacc

SEQ ID NO: 635227 - DNA, 25 bp, Homo sapien
gggtgcggaccccggaggcgccgca

SEQ ID NO: 635228 - DNA, 25 bp, Homo sapien
tcagctcggccccgcgggggcggcg

SEQ ID NO: 635229 - DNA, 25 bp, Homo sapien
gtgcggaccccggaggcgccgcagg

SEQ ID NO: 635230 - DNA, 25 bp, Homo sapien
ccgcgggggcggcgcaggagggaag

SEQ ID NO: 635231 - DNA, 25 bp, Homo sapien
cgggccgggtccgcagctgacggtg

SEQ ID NO: 635232 - DNA, 25 bp, Homo sapien
ggccgggtccgcagctgacggtggg

SEQ ID NO: 635233 - DNA, 25 bp, Homo sapien
ccgggtccgcagctgacggtggggg

SEQ ID NO: 635234 - DNA, 25 bp, Homo sapien
gccgggccgggtccgcagctgacgg

SEQ ID NO: 635235 - DNA, 25 bp, Homo sapien
accttacagcgggtggctctacggt

SEQ ID NO: 635236 - DNA, 25 bp, Homo sapien
ttctcaaccttacagcgggtggctc

SEQ ID NO: 635237 - DNA, 25 bp, Homo sapien
ctctacggtacgagctgagggtgaa

SEQ ID NO: 635238 - DNA, 25 bp, Homo sapien
tacagcgggtggctctacggtacga

SEQ ID NO: 635239 - DNA, 25 bp, Homo sapien
ctgagaacagggcaagcgggccgta

SEQ ID NO: 635240 - DNA, 25 bp, Homo sapien
ctttaaatgccctgtcgggagctgg

SEQ ID NO: 635241 - DNA, 25 bp, Homo sapien
acctttaaatgccctgtcgggagct

SEQ ID NO: 635242 - DNA, 25 bp, Homo sapien
gcaagcgggccgtacctttaaatgc

SEQ ID NO: 635243 - DNA, 25 bp, Homo sapien
gaagcagaccgtcagaatgcagccc

SEQ ID NO: 635244 - DNA, 25 bp, Homo sapien
acttggaagcagaccgtcagaatgc

SEQ ID NO: 635245 - DNA, 25 bp, Homo sapien
aggaaagggcgctcagcctcgcgct

SEQ ID NO: 635246 - DNA, 25 bp, Homo sapien
tcagcctcgcgctgcagatggactt

SEQ ID NO: 635247 - DNA, 25 bp, Homo sapien
caactgccctcttggctccaaagtg

SEQ ID NO: 635248 - DNA, 25 bp, Homo sapien
aactgccctcttggctccaaagtgt

SEQ ID NO: 635249 - DNA, 25 bp, Homo sapien
agcatcttcagccttacggaattct

SEQ ID NO: 635250 - DNA, 25 bp, Homo sapien
agccttacggaattctgaagcagaa

SEQ ID NO: 635251 - DNA, 25 bp, Homo sapien
tccttggaagtatgtcagggttgtc

SEQ ID NO: 635252 - DNA, 25 bp, Homo sapien
aacaccctcttagaatgggaactca

SEQ ID NO: 635253 - DNA, 25 bp, Homo sapien
ccagggtccttggaagtatgtcagg

SEQ ID NO: 635254 - DNA, 25 bp, Homo sapien
tgccttgggccctagacgatccacc

SEQ ID NO: 635255 - DNA, 25 bp, Homo sapien
ccaggctagtgtcgaacttctgatc

SEQ ID NO: 635256 - DNA, 25 bp, Homo sapien
ggctagtgtcgaacttctgatctca

SEQ ID NO: 635257 - DNA, 25 bp, Homo sapien
gctagtgtcgaacttctgatctcat

SEQ ID NO: 635258 - DNA, 25 bp, Homo sapien
caggctagtgtcgaacttctgatct

SEQ ID NO: 635259 - DNA, 25 bp, Homo sapien
cagcccaggagagagggagggccat

SEQ ID NO: 635260 - DNA, 25 bp, Homo sapien
ccagcccaggagagagggagggcca

SEQ ID NO: 635261 - DNA, 25 bp, Homo sapien
tgccagcccaggagagagggagggc

SEQ ID NO: 635262 - DNA, 25 bp, Homo sapien
ctgccagcccaggagagagggaggg

SEQ ID NO: 635263 - DNA, 25 bp, Homo sapien
tgttcttaaacactctagagcaaac

SEQ ID NO: 635264 - DNA, 25 bp, Homo sapien
aaattgtgttgtgcagtcatctgac

SEQ ID NO: 635265 - DNA, 25 bp, Homo sapien
gccagttttacaagccagggatgtt

SEQ ID NO: 635266 - DNA, 25 bp, Homo sapien
gatgttttcccaaggacctaggagc

SEQ ID NO: 635267 - DNA, 25 bp, Homo sapien
tccatgggcagataggagcctaact

SEQ ID NO: 635268 - DNA, 25 bp, Homo sapien
cagcgactgataaaagtgctcgtgt

SEQ ID NO: 635269 - DNA, 25 bp, Homo sapien
tggtggcaagcaaacgaaacctcta

SEQ ID NO: 635270 - DNA, 25 bp, Homo sapien
tctctggaagggtaaacagcgactg

SEQ ID NO: 635271 - DNA, 25 bp, Homo sapien
caaggagcctgttttcgttgttgaa

SEQ ID NO: 635272 - DNA, 25 bp, Homo sapien
ggtacttactctccaactagtgggc

SEQ ID NO: 635273 - DNA, 25 bp, Homo sapien
tagagccgcaccttgcatttccagg

SEQ ID NO: 635274 - DNA, 25 bp, Homo sapien
cacttctaggttgtgcagactgcca

SEQ ID NO: 635275 - DNA, 25 bp, Homo sapien
tggaatccccactgcatgcatgaag

SEQ ID NO: 635276 - DNA, 25 bp, Homo sapien
agagggaacatgagcagcgctccga

SEQ ID NO: 635277 - DNA, 25 bp, Homo sapien
gacagtgcagattgcagaagtccgc

SEQ ID NO: 635278 - DNA, 25 bp, Homo sapien
tgacgtaactgaggcagccgctgaa

SEQ ID NO: 635279 - DNA, 25 bp, Homo sapien
agccgctgaaaagcacccacgaggc

SEQ ID NO: 635280 - DNA, 25 bp, Homo sapien
gaacccacggaatactctctaggtg

SEQ ID NO: 635281 - DNA, 25 bp, Homo sapien
ccatgatcagggcaagggcccttga

SEQ ID NO: 635282 - DNA, 25 bp, Homo sapien
cccttgagagaaggcccctgctgag

SEQ ID NO: 635283 - DNA, 25 bp, Homo sapien
tctctaggtgcgaggagcgccttct

SEQ ID NO: 635284 - DNA, 25 bp, Homo sapien
taggggtgaggggtacgcagcggga

SEQ ID NO: 635285 - DNA, 25 bp, Homo sapien
gggtgaggggtacgcagcgggagca

SEQ ID NO: 635286 - DNA, 25 bp, Homo sapien
gtgaggggtacgcagcgggagcagc

SEQ ID NO: 635287 - DNA, 25 bp, Homo sapien
tgaggggtacgcagcgggagcagcc

SEQ ID NO: 635288 - DNA, 25 bp, Homo sapien
atggccatgttgtagcccccaaagc

SEQ ID NO: 635289 - DNA, 25 bp, Homo sapien
caggtcccaagcacggagaggaccc

SEQ ID NO: 635290 - DNA, 25 bp, Homo sapien
cccaaagcaggtcccaagcacggag

SEQ ID NO: 635291 - DNA, 25 bp, Homo sapien
ggccatgttgtagcccccaaagcag

SEQ ID NO: 635292 - DNA, 25 bp, Homo sapien
cttataaacgggaacctcagtggct

SEQ ID NO: 635293 - DNA, 25 bp, Homo sapien
ggcagggccgaaatcctgggaatta

SEQ ID NO: 635294 - DNA, 25 bp, Homo sapien
caatgatggtcaacgcttaggctgg

SEQ ID NO: 635295 - DNA, 25 bp, Homo sapien
tagaactgtggctctaagggaacca

SEQ ID NO: 635296 - DNA, 25 bp, Homo sapien
ccaccagggtatagatgaaggccag

SEQ ID NO: 635297 - DNA, 25 bp, Homo sapien
gtgagcgcgttgacgaaggccacca

SEQ ID NO: 635298 - DNA, 25 bp, Homo sapien
ttgacgctggaggacaaagaacgcc

SEQ ID NO: 635299 - DNA, 25 bp, Homo sapien
aggcaactggcccataggacaggca

SEQ ID NO: 635300 - DNA, 25 bp, Homo sapien
tgggacaagggtgcttccattccgg

SEQ ID NO: 635301 - DNA, 25 bp, Homo sapien
ctccaggtgggacaagggtgcttcc

SEQ ID NO: 635302 - DNA, 25 bp, Homo sapien
gagggcggacaccaaagctctggga

SEQ ID NO: 635303 - DNA, 25 bp, Homo sapien
tccattccggggagggcggacacca

SEQ ID NO: 635304 - DNA, 25 bp, Homo sapien
tgacattgacgcaggtagtgagacc

SEQ ID NO: 635305 - DNA, 25 bp, Homo sapien
gatgatgcaggtgacggttcccacg

SEQ ID NO: 635306 - DNA, 25 bp, Homo sapien
gcacccaggaggtcatattccagag

SEQ ID NO: 635307 - DNA, 25 bp, Homo sapien
gctcatgaacggcaggaaggtcact

SEQ ID NO: 635308 - DNA, 25 bp, Homo sapien
gctttctcagatcagcctgcagcgg

SEQ ID NO: 635309 - DNA, 25 bp, Homo sapien
tttctcagatcagcctgcagcgggg

SEQ ID NO: 635310 - DNA, 25 bp, Homo sapien
agaggctttctcagatcagcctgca

SEQ ID NO: 635311 - DNA, 25 bp, Homo sapien
ctgggccagaggctttctcagatca

SEQ ID NO: 635312 - DNA, 25 bp, Homo sapien
tttcctaaccgtgattcatgaaaga

SEQ ID NO: 635313 - DNA, 25 bp, Homo sapien
aagaaaagttcaatccgacacacaa

SEQ ID NO: 635314 - DNA, 25 bp, Homo sapien
gaaaagttcaatccgacacacaaaa

SEQ ID NO: 635315 - DNA, 25 bp, Homo sapien
agagaagcctttcctaaccgtgatt

SEQ ID NO: 635316 - DNA, 25 bp, Homo sapien
cgttttgtagatgggagacgaggtc

SEQ ID NO: 635317 - DNA, 25 bp, Homo sapien
cctcagttcacgctgcagtctttaa

SEQ ID NO: 635318 - DNA, 25 bp, Homo sapien
ttttgtagagacacgctaactgggc

SEQ ID NO: 635319 - DNA, 25 bp, Homo sapien
actgggccaatcttcacgttttgta

SEQ ID NO: 635320 - DNA, 25 bp, Homo sapien
aggcaagggcctccccaaatctagg

SEQ ID NO: 635321 - DNA, 25 bp, Homo sapien
gctgaaattgagctggggctgccct

SEQ ID NO: 635322 - DNA, 25 bp, Homo sapien
tggagccttcccaatctcctctggg

SEQ ID NO: 635323 - DNA, 25 bp, Homo sapien
tggacagctgggctgaaattgagct

SEQ ID NO: 635324 - DNA, 25 bp, Homo sapien
aaagaagccttctgataccatgtac

SEQ ID NO: 635325 - DNA, 25 bp, Homo sapien
ttatgagtgggtgtggtaatgtacc

SEQ ID NO: 635326 - DNA, 25 bp, Homo sapien
gatactgccttaaccaaggaattgg

SEQ ID NO: 635327 - DNA, 25 bp, Homo sapien
taccatgtactaagaaggacacaac

SEQ ID NO: 635328 - DNA, 25 bp, Homo sapien
tgggtccagaacagccggttgttca

SEQ ID NO: 635329 - DNA, 25 bp, Homo sapien
ctcttgatgagtggccttggccttt

SEQ ID NO: 635330 - DNA, 25 bp, Homo sapien
ccagaacagccggttgttcaacggt

SEQ ID NO: 635331 - DNA, 25 bp, Homo sapien
agaacagccggttgttcaacggtat

SEQ ID NO: 635332 - DNA, 25 bp, Homo sapien
ggagagacaggaaacgagttatatt

SEQ ID NO: 635333 - DNA, 25 bp, Homo sapien
ggaagaaaattggaagggtgtgatg

SEQ ID NO: 635334 - DNA, 25 bp, Homo sapien
cgagttatatttcctatcctagata

SEQ ID NO: 635335 - DNA, 25 bp, Homo sapien
gaagggtgtgatggagctcatggtc

SEQ ID NO: 635336 - DNA, 25 bp, Homo sapien
caatgtgaaataatcctctccaatt

SEQ ID NO: 635337 - DNA, 25 bp, Homo sapien
ttcaatgtgaaataatcctctccaa

SEQ ID NO: 635338 - DNA, 25 bp, Homo sapien
tttattcaatgtgaaataatcctct

SEQ ID NO: 635339 - DNA, 25 bp, Homo sapien
ctgtaagtttattcaatgtgaaata

SEQ ID NO: 635340 - DNA, 25 bp, Homo sapien
tgaccacgtccacgaccacatctgc

SEQ ID NO: 635341 - DNA, 25 bp, Homo sapien
caccagggggcacagaacaccgtct

SEQ ID NO: 635342 - DNA, 25 bp, Homo sapien
cagggggcacagaacaccgtctgta

SEQ ID NO: 635343 - DNA, 25 bp, Homo sapien
gggcacagaacaccgtctgtaggta

SEQ ID NO: 635344 - DNA, 25 bp, Homo sapien
ctccgggggcagatgtagggtggca

SEQ ID NO: 635345 - DNA, 25 bp, Homo sapien
tccgggggcagatgtagggtggcag

SEQ ID NO: 635346 - DNA, 25 bp, Homo sapien
tctctggacggctgcggtgtagggt

SEQ ID NO: 635347 - DNA, 25 bp, Homo sapien
ggctgcggtgtagggtggcaggaac

SEQ ID NO: 635348 - DNA, 25 bp, Homo sapien
actgttccttcacgcagccccggga

SEQ ID NO: 635349 - DNA, 25 bp, Homo sapien
cacgcagccccgggacttgagagac

SEQ ID NO: 635350 - DNA, 25 bp, Homo sapien
aactgttccttcacgcagccccggg

SEQ ID NO: 635351 - DNA, 25 bp, Homo sapien
cttcacgcagccccgggacttgaga

SEQ ID NO: 635352 - DNA, 25 bp, Homo sapien
cttggcagctgtagggtccggggct

SEQ ID NO: 635353 - DNA, 25 bp, Homo sapien
ttggcagctgtagggtccggggctg

SEQ ID NO: 635354 - DNA, 25 bp, Homo sapien
gcagctgtagggtccggggctgggg

SEQ ID NO: 635355 - DNA, 25 bp, Homo sapien
ggcagctgtagggtccggggctggg

SEQ ID NO: 635356 - DNA, 25 bp, Homo sapien
ttgcgcaaactcagcttgccggagc

SEQ ID NO: 635357 - DNA, 25 bp, Homo sapien
ggcgcagccgggtacgtgcggaccg

SEQ ID NO: 635358 - DNA, 25 bp, Homo sapien
ctggaccagcgggttcacttgcccg

SEQ ID NO: 635359 - DNA, 25 bp, Homo sapien
gcggccgccggaagttgcgcaaact

SEQ ID NO: 635360 - DNA, 25 bp, Homo sapien
gccctggtggagcgaggcttccttt

SEQ ID NO: 635361 - DNA, 25 bp, Homo sapien
tggtggagcgaggcttcctttccca

SEQ ID NO: 635362 - DNA, 25 bp, Homo sapien
gtggagcgaggcttcctttcccatc

SEQ ID NO: 635363 - DNA, 25 bp, Homo sapien
ggtggagcgaggcttcctttcccat

SEQ ID NO: 635364 - DNA, 25 bp, Homo sapien
gcaatgcccgcgtgatcaagtggtt

SEQ ID NO: 635365 - DNA, 25 bp, Homo sapien
cacaggacggatcttacagaggcaa

SEQ ID NO: 635366 - DNA, 25 bp, Homo sapien
taaagccctcgggatatgcagcagc

SEQ ID NO: 635367 - DNA, 25 bp, Homo sapien
tcatcgacttgtgtgacagccccgt

SEQ ID NO: 635368 - DNA, 25 bp, Homo sapien
gctcaaactgggcaggcatttttag

SEQ ID NO: 635369 - DNA, 25 bp, Homo sapien
tctgcagtgggatcctgggaaaggt

SEQ ID NO: 635370 - DNA, 25 bp, Homo sapien
cattatttggtcttgagctggtctc

SEQ ID NO: 635371 - DNA, 25 bp, Homo sapien
cacatgtggatcactgaggcctggg

SEQ ID NO: 635372 - DNA, 25 bp, Homo sapien
cacagggaggttgtgcaacttgttt

SEQ ID NO: 635373 - DNA, 25 bp, Homo sapien
cagtgttaccagtttgctacagagg

SEQ ID NO: 635374 - DNA, 25 bp, Homo sapien
catcagaaagcaagtctggtcaatt

SEQ ID NO: 635375 - DNA, 25 bp, Homo sapien
taaggtcacatagatatcgagtggt

SEQ ID NO: 635376 - DNA, 25 bp, Homo sapien
cgacgctgtcagctttcggaagcat

SEQ ID NO: 635377 - DNA, 25 bp, Homo sapien
taaggatgctgatactggtgttgcc

SEQ ID NO: 635378 - DNA, 25 bp, Homo sapien
tcttctcatttaaggatgctgatac

SEQ ID NO: 635379 - DNA, 25 bp, Homo sapien
tggtgttgccaaggcgacgctgtca

SEQ ID NO: 635380 - DNA, 25 bp, Homo sapien
tgtactcagggaactctctccccag

SEQ ID NO: 635381 - DNA, 25 bp, Homo sapien
acgcagagatctcagaaatgatgga

SEQ ID NO: 635382 - DNA, 25 bp, Homo sapien
ctttgctgggaacaacgcagagatc

SEQ ID NO: 635383 - DNA, 25 bp, Homo sapien
cacgagtttggtggtagatgcccag

SEQ ID NO: 635384 - DNA, 25 bp, Homo sapien
caagtgttttccataggaacccgca

SEQ ID NO: 635385 - DNA, 25 bp, Homo sapien
agtctaggctcgagaccacaccagc

SEQ ID NO: 635386 - DNA, 25 bp, Homo sapien
ggctggcacctatgagctgtggccc

SEQ ID NO: 635387 - DNA, 25 bp, Homo sapien
cgcagatgcaggtatcctagaggct

SEQ ID NO: 635388 - DNA, 25 bp, Homo sapien
cagttatgtgagtcaatttattcct

SEQ ID NO: 635389 - DNA, 25 bp, Homo sapien
aatcatggagacgagggagctcccc

SEQ ID NO: 635390 - DNA, 25 bp, Homo sapien
gaatttctatcccttatacctgagt

SEQ ID NO: 635391 - DNA, 25 bp, Homo sapien
ctcacttgcctttacccttagactt

SEQ ID NO: 635392 - DNA, 25 bp, Homo sapien
taacagtccctgtaattgagcctgg

SEQ ID NO: 635393 - DNA, 25 bp, Homo sapien
tcatccaggagaaaaccttctgagg

SEQ ID NO: 635394 - DNA, 25 bp, Homo sapien
ggacatgagcctataacacagacag

SEQ ID NO: 635395 - DNA, 25 bp, Homo sapien
tacagggagtcctaagggaagccac

SEQ ID NO: 635396 - DNA, 25 bp, Homo sapien
ggtctgttctcagcccattcaaggt

SEQ ID NO: 635397 - DNA, 25 bp, Homo sapien
caagtccgagcttctcctgtgtggt

SEQ ID NO: 635398 - DNA, 25 bp, Homo sapien
tccatgtcacagacggaggggagtt

SEQ ID NO: 635399 - DNA, 25 bp, Homo sapien
ttcaaggtactgtgaccctcaggca

SEQ ID NO: 635400 - DNA, 25 bp, Homo sapien
tgaagtagtgccagcggatgccgtc

SEQ ID NO: 635401 - DNA, 25 bp, Homo sapien
tgtccaaaggccgtatcatcatgcg

SEQ ID NO: 635402 - DNA, 25 bp, Homo sapien
cgttgaggtttgacaggccacaggc

SEQ ID NO: 635403 - DNA, 25 bp, Homo sapien
tatcatcatgcgagaggcacgcagt

SEQ ID NO: 635404 - DNA, 25 bp, Homo sapien
gacagtggtcgttgtctgagtcaag

SEQ ID NO: 635405 - DNA, 25 bp, Homo sapien
tgcagagacagtggtcgttgtctga

SEQ ID NO: 635406 - DNA, 25 bp, Homo sapien
tctgagtcaagggtgctaaagctgg

SEQ ID NO: 635407 - DNA, 25 bp, Homo sapien
tcgttgtctgagtcaagggtgctaa

SEQ ID NO: 635408 - DNA, 25 bp, Homo sapien
agccgctgtacccgaccacagaaag

SEQ ID NO: 635409 - DNA, 25 bp, Homo sapien
agctccacacgcagagagtaggctg

SEQ ID NO: 635410 - DNA, 25 bp, Homo sapien
caggtggaaatgttcgtactgggca

SEQ ID NO: 635411 - DNA, 25 bp, Homo sapien
gggcataggcctcgtggccttccca

SEQ ID NO: 635412 - DNA, 25 bp, Homo sapien
tgagctggtgcaccacttcattgcc

SEQ ID NO: 635413 - DNA, 25 bp, Homo sapien
ccgctgaaaattcacggtgccattc

SEQ ID NO: 635414 - DNA, 25 bp, Homo sapien
ttccgctgaaaattcacggtgccat

SEQ ID NO: 635415 - DNA, 25 bp, Homo sapien
gtgccattctcacggcgctggatga

SEQ ID NO: 635416 - DNA, 25 bp, Homo sapien
ctcacggcgctggatgagggtccac

SEQ ID NO: 635417 - DNA, 25 bp, Homo sapien
gcttcgttgcattggacacctggat

SEQ ID NO: 635418 - DNA, 25 bp, Homo sapien
cgttgcattggacacctggatggtg

SEQ ID NO: 635419 - DNA, 25 bp, Homo sapien
tggatggtgtagacaccactggcac

SEQ ID NO: 635420 - DNA, 25 bp, Homo sapien
cttcctgggcttcgttgcattggac

SEQ ID NO: 635421 - DNA, 25 bp, Homo sapien
gaacacctgctcacctgccattatg

SEQ ID NO: 635422 - DNA, 25 bp, Homo sapien
acctgctcacctgccattatgaagg

SEQ ID NO: 635423 - DNA, 25 bp, Homo sapien
tgcacagtcctggaacacctgctca

SEQ ID NO: 635424 - DNA, 25 bp, Homo sapien
ctgcacagtcctggaacacctgctc

SEQ ID NO: 635425 - DNA, 25 bp, Homo sapien
gccgaggcgttagccctttcttgca

SEQ ID NO: 635426 - DNA, 25 bp, Homo sapien
ggccgaggcgttagccctttcttgc

SEQ ID NO: 635427 - DNA, 25 bp, Homo sapien
ccgaggcgttagccctttcttgcac

SEQ ID NO: 635428 - DNA, 25 bp, Homo sapien
gcaggccgcgctcgatgttggtgag

SEQ ID NO: 635429 - DNA, 25 bp, Homo sapien
tggagttgtgcctgacaccgcgcag

SEQ ID NO: 635430 - DNA, 25 bp, Homo sapien
aggtgccgcaacaacaccagcagct

SEQ ID NO: 635431 - DNA, 25 bp, Homo sapien
ctcagcgtgttcagcagcttcgcct

SEQ ID NO: 635432 - DNA, 25 bp, Homo sapien
cttgttggtggacagaaaggtctct

SEQ ID NO: 635433 - DNA, 25 bp, Homo sapien
ccagcttgttggtggacagaaaggt

SEQ ID NO: 635434 - DNA, 25 bp, Homo sapien
ttggtggacagaaaggtctctggca

SEQ ID NO: 635435 - DNA, 25 bp, Homo sapien
tggtggacagaaaggtctctggcat

SEQ ID NO: 635436 - DNA, 25 bp, Homo sapien
gggcatccattcttgatgtctggtt

SEQ ID NO: 635437 - DNA, 25 bp, Homo sapien
ccattcttgatgtctggttcaggag

SEQ ID NO: 635438 - DNA, 25 bp, Homo sapien
ctgggcatccattcttgatgtctgg

SEQ ID NO: 635439 - DNA, 25 bp, Homo sapien
gcatccattcttgatgtctggttca

SEQ ID NO: 635440 - DNA, 25 bp, Homo sapien
tggtgcccagctctagcatgggggc

SEQ ID NO: 635441 - DNA, 25 bp, Homo sapien
gagcctccatgtcggtcagcttgcg

SEQ ID NO: 635442 - DNA, 25 bp, Homo sapien
cagcttgcggatctgggcagtggtc

SEQ ID NO: 635443 - DNA, 25 bp, Homo sapien
tgggcagtggtctggttcaggaggc

SEQ ID NO: 635444 - DNA, 25 bp, Homo sapien
tcaagatcgtcttgatggccctctc

SEQ ID NO: 635445 - DNA, 25 bp, Homo sapien
gacctcaagatcgtcttgatggccc

SEQ ID NO: 635446 - DNA, 25 bp, Homo sapien
agatcgtcttgatggccctctctag

SEQ ID NO: 635447 - DNA, 25 bp, Homo sapien
gcttcgacctcaagatcgtcttgat

SEQ ID NO: 635448 - DNA, 25 bp, Homo sapien
cagccacttcctccttcatctcttc

SEQ ID NO: 635449 - DNA, 25 bp, Homo sapien
ggccaggctccagccacttcctcct

SEQ ID NO: 635450 - DNA, 25 bp, Homo sapien
agccacttcctccttcatctcttct

SEQ ID NO: 635451 - DNA, 25 bp, Homo sapien
cttggctcgggccaggctccagcca

SEQ ID NO: 635452 - DNA, 25 bp, Homo sapien
tgaaaggccacaaggagaagatgag

SEQ ID NO: 635453 - DNA, 25 bp, Homo sapien
catcccaggtgaaaggccacaagga

SEQ ID NO: 635454 - DNA, 25 bp, Homo sapien
ggtggcaggtccagtgttcatccca

SEQ ID NO: 635455 - DNA, 25 bp, Homo sapien
gaaaggccacaaggagaagatgagg

SEQ ID NO: 635456 - DNA, 25 bp, Homo sapien
tggactacaagtgtctcgcagcccc

SEQ ID NO: 635457 - DNA, 25 bp, Homo sapien
caagaaggtgtagctacagtggccg

SEQ ID NO: 635458 - DNA, 25 bp, Homo sapien
cagtgggttggccagtgattctctc

SEQ ID NO: 635459 - DNA, 25 bp, Homo sapien
tcctgccttgtctgttgagccacag

SEQ ID NO: 635460 - DNA, 25 bp, Homo sapien
ctgcagcatggctagctgggagagc

SEQ ID NO: 635461 - DNA, 25 bp, Homo sapien
ggctgccctgcagcatggctagctg

SEQ ID NO: 635462 - DNA, 25 bp, Homo sapien
tggcaaccacaaggaggaggctgcc

SEQ ID NO: 635463 - DNA, 25 bp, Homo sapien
tgccctgcagcatggctagctggga

SEQ ID NO: 635464 - DNA, 25 bp, Homo sapien
agatgtgtcaatggcgagggatgtc

SEQ ID NO: 635465 - DNA, 25 bp, Homo sapien
gaagatgtgtcaatggcgagggatg

SEQ ID NO: 635466 - DNA, 25 bp, Homo sapien
tgtgtcaatggcgagggatgtctgc

SEQ ID NO: 635467 - DNA, 25 bp, Homo sapien
tcaatggcgagggatgtctgctcag

SEQ ID NO: 635468 - DNA, 25 bp, Homo sapien
attgaaagctactcagttacagaga

SEQ ID NO: 635469 - DNA, 25 bp, Homo sapien
gacagtgtgacaaaatccatgactc

SEQ ID NO: 635470 - DNA, 25 bp, Homo sapien
tcttcttatatatgagtcttattca

SEQ ID NO: 635471 - DNA, 25 bp, Homo sapien
tcagttacagagaagggtgttctca

SEQ ID NO: 635472 - DNA, 25 bp, Homo sapien
caatcactgaggatgttgtcactgt

SEQ ID NO: 635473 - DNA, 25 bp, Homo sapien
aatacaaggaataacagcactgaca

SEQ ID NO: 635474 - DNA, 25 bp, Homo sapien
ttaacacatactgccccaatcactg

SEQ ID NO: 635475 - DNA, 25 bp, Homo sapien
gcactgacaacaatcacagggtcaa

SEQ ID NO: 635476 - DNA, 25 bp, Homo sapien
gccaacggcagccacactgtggtgt

SEQ ID NO: 635477 - DNA, 25 bp, Homo sapien
tggaaccagattgtccttcagtcct

SEQ ID NO: 635478 - DNA, 25 bp, Homo sapien
tgtaaaagtctgcaggacggtcagc

SEQ ID NO: 635479 - DNA, 25 bp, Homo sapien
cagcccgggaggacattccatgtgg

SEQ ID NO: 635480 - DNA, 25 bp, Homo sapien
tgcgacctgttcctggttgactgcc

SEQ ID NO: 635481 - DNA, 25 bp, Homo sapien
tcctgctaggagagaaccgcaacac

SEQ ID NO: 635482 - DNA, 25 bp, Homo sapien
aacacgaccccgtttcagaaatgcg

SEQ ID NO: 635483 - DNA, 25 bp, Homo sapien
gaaatgcgctccttgacaagcctgg

SEQ ID NO: 635484 - DNA, 25 bp, Homo sapien
ctcaatcctccagagaatgtgggag

SEQ ID NO: 635485 - DNA, 25 bp, Homo sapien
agaggcccctcaatcctccagagaa

SEQ ID NO: 635486 - DNA, 25 bp, Homo sapien
tgtaagaagggagtgggcgatgccc

SEQ ID NO: 635487 - DNA, 25 bp, Homo sapien
gtgggcgatgcccacctgacagcag

SEQ ID NO: 635488 - DNA, 25 bp, Homo sapien
atttgaaaggattggagctgggggc

SEQ ID NO: 635489 - DNA, 25 bp, Homo sapien
gggatttgaaaggattggagctggg

SEQ ID NO: 635490 - DNA, 25 bp, Homo sapien
tgtggacgagtgcacggatcttccc

SEQ ID NO: 635491 - DNA, 25 bp, Homo sapien
ggcgtcacagcgaagcacagatgct

SEQ ID NO: 635492 - DNA, 25 bp, Homo sapien
aataacaacggagcatttcagaggc

SEQ ID NO: 635493 - DNA, 25 bp, Homo sapien
cacaaacgtttgcagaagagaagct

SEQ ID NO: 635494 - DNA, 25 bp, Homo sapien
ggagtgccgatgagggtggcaggca

SEQ ID NO: 635495 - DNA, 25 bp, Homo sapien
aaaaaggggcatggaacccatgaga

SEQ ID NO: 635496 - DNA, 25 bp, Homo sapien
ggaaaaaggggcatggaacccatga

SEQ ID NO: 635497 - DNA, 25 bp, Homo sapien
cctgtgggggagtgccgatgagggt

SEQ ID NO: 635498 - DNA, 25 bp, Homo sapien
aggttgtgaccctccacggccagct

SEQ ID NO: 635499 - DNA, 25 bp, Homo sapien
ggggaggtgtccaagccaggcctct

SEQ ID NO: 635500 - DNA, 25 bp, Homo sapien
agaggccaggttgtgaccctccacg

SEQ ID NO: 635501 - DNA, 25 bp, Homo sapien
cacccagaggccaggttgtgaccct

SEQ ID NO: 635502 - DNA, 25 bp, Homo sapien
ctaggaccagagagtcgggagagcc

SEQ ID NO: 635503 - DNA, 25 bp, Homo sapien
ttctttaagttgtagatagagaaag

SEQ ID NO: 635504 - DNA, 25 bp, Homo sapien
ggccttcaggattcacctgtgctgt

SEQ ID NO: 635505 - DNA, 25 bp, Homo sapien
gagagagaaggatgcggtgaaggac

SEQ ID NO: 635506 - DNA, 25 bp, Homo sapien
ctgtccttgcgtgggcgccggtcct

SEQ ID NO: 635507 - DNA, 25 bp, Homo sapien
ttgcgtgggcgccggtccttcctgc

SEQ ID NO: 635508 - DNA, 25 bp, Homo sapien
gtccttgcgtgggcgccggtccttc

SEQ ID NO: 635509 - DNA, 25 bp, Homo sapien
cagcttcctgtccttgcgtgggcgc

SEQ ID NO: 635510 - DNA, 25 bp, Homo sapien
gacattctcctacattgcttgggcc

SEQ ID NO: 635511 - DNA, 25 bp, Homo sapien
tagagaccctctgagcctagtggca

SEQ ID NO: 635512 - DNA, 25 bp, Homo sapien
tttgaacacgatgaacctgaggctc

SEQ ID NO: 635513 - DNA, 25 bp, Homo sapien
accacagcatggttgggagcaaggc

SEQ ID NO: 635514 - DNA, 25 bp, Homo sapien
tgcagagctgactgtgcaggcctca

SEQ ID NO: 635515 - DNA, 25 bp, Homo sapien
cactgaggccaactcccactctgag

SEQ ID NO: 635516 - DNA, 25 bp, Homo sapien
cgcccactctgagctcttggggagc

SEQ ID NO: 635517 - DNA, 25 bp, Homo sapien
gctccccacgcccactctgagctct

SEQ ID NO: 635518 - DNA, 25 bp, Homo sapien
ctggatgggacatttccttgactca

SEQ ID NO: 635519 - DNA, 25 bp, Homo sapien
tccttgactcagaaagcacctggca

SEQ ID NO: 635520 - DNA, 25 bp, Homo sapien
agggcctctggatgggacatttcct

SEQ ID NO: 635521 - DNA, 25 bp, Homo sapien
ttccttgactcagaaagcacctggc

SEQ ID NO: 635522 - DNA, 25 bp, Homo sapien
caggccccaagccgagccgcaggtc

SEQ ID NO: 635523 - DNA, 25 bp, Homo sapien
cgagccgcaggtctttccattgtgt

SEQ ID NO: 635524 - DNA, 25 bp, Homo sapien
cctggcactcccgtgtgttctggtg

SEQ ID NO: 635525 - DNA, 25 bp, Homo sapien
tgtacaagtaaaactgcctcttgca

SEQ ID NO: 635526 - DNA, 25 bp, Homo sapien
ctggtgggccaaagtgcccggcggg

SEQ ID NO: 635527 - DNA, 25 bp, Homo sapien
cccttgtacaagtaaaactgcctct

SEQ ID NO: 635528 - DNA, 25 bp, Homo sapien
agcatttgggtcaggactcagtgtc

SEQ ID NO: 635529 - DNA, 25 bp, Homo sapien
catttgggtcaggactcagtgtctc

SEQ ID NO: 635530 - DNA, 25 bp, Homo sapien
atttgggtcaggactcagtgtctcc

SEQ ID NO: 635531 - DNA, 25 bp, Homo sapien
tttgggtcaggactcagtgtctcct

SEQ ID NO: 635532 - DNA, 25 bp, Homo sapien
ccttcccggcggatgaacaggaaga

SEQ ID NO: 635533 - DNA, 25 bp, Homo sapien
gggacagtcgtgcaggcacttgccg

SEQ ID NO: 635534 - DNA, 25 bp, Homo sapien
ctcctggccgcggatgccgaagtac

SEQ ID NO: 635535 - DNA, 25 bp, Homo sapien
tggcaggtggaacagccgttctcct

SEQ ID NO: 635536 - DNA, 25 bp, Homo sapien
ctgggttcctgaacaatactcagca

SEQ ID NO: 635537 - DNA, 25 bp, Homo sapien
cctgctgggttcctgaacaatactc

SEQ ID NO: 635538 - DNA, 25 bp, Homo sapien
tcctgctgggttcctgaacaatact

SEQ ID NO: 635539 - DNA, 25 bp, Homo sapien
tgctgggttcctgaacaatactcag

SEQ ID NO: 635540 - DNA, 25 bp, Homo sapien
tcagtcctccatgcagagtccctta

SEQ ID NO: 635541 - DNA, 25 bp, Homo sapien
cagtcctccatgcagagtcccttac

SEQ ID NO: 635542 - DNA, 25 bp, Homo sapien
ccttgctaagttcccagtgctgtgc

SEQ ID NO: 635543 - DNA, 25 bp, Homo sapien
tactgacgccttgctaagttcccag

SEQ ID NO: 635544 - DNA, 25 bp, Homo sapien
cttcttcggtgtccgcttgacctca

SEQ ID NO: 635545 - DNA, 25 bp, Homo sapien
gctgaggccttcttcggtgtccgct

SEQ ID NO: 635546 - DNA, 25 bp, Homo sapien
ctaacaccgggaattgtggaggcca

SEQ ID NO: 635547 - DNA, 25 bp, Homo sapien
catcagggtagtgacagctgtctct

SEQ ID NO: 635548 - DNA, 25 bp, Homo sapien
cagagttttctaacaccgggaattg

SEQ ID NO: 635549 - DNA, 25 bp, Homo sapien
agcagcatcagggtagtgacagctg

SEQ ID NO: 635550 - DNA, 25 bp, Homo sapien
gagaatgagacagcatgacatatct

SEQ ID NO: 635551 - DNA, 25 bp, Homo sapien
aagagaatgagacagcatgacatat

SEQ ID NO: 635552 - DNA, 25 bp, Homo sapien
caacatacaggggagaaatcaaccc

SEQ ID NO: 635553 - DNA, 25 bp, Homo sapien
gaatgagacagcatgacatatctcc

SEQ ID NO: 635554 - DNA, 25 bp, Homo sapien
gggacgaggaagtaaaagcatgccc

SEQ ID NO: 635555 - DNA, 25 bp, Homo sapien
catctgattcggtttttccagcccg

SEQ ID NO: 635556 - DNA, 25 bp, Homo sapien
aggaagtaaaagcatgcccgcaggc

SEQ ID NO: 635557 - DNA, 25 bp, Homo sapien
caggcagcatctgattcggtttttc

SEQ ID NO: 635558 - DNA, 25 bp, Homo sapien
gaatctggcatgctcaaaatgacct

SEQ ID NO: 635559 - DNA, 25 bp, Homo sapien
gggcgtcacatgcatagtcatcttg

SEQ ID NO: 635560 - DNA, 25 bp, Homo sapien
tctgacatcaggctcgaacgttctg

SEQ ID NO: 635561 - DNA, 25 bp, Homo sapien
aacgttctgtacactaggaagagcc

SEQ ID NO: 635562 - DNA, 25 bp, Homo sapien
atgctgctgttccaccgggctagga

SEQ ID NO: 635563 - DNA, 25 bp, Homo sapien
catggtggttatggactcaggcttt

SEQ ID NO: 635564 - DNA, 25 bp, Homo sapien
acctgggagcacatcacgacctttc

SEQ ID NO: 635565 - DNA, 25 bp, Homo sapien
taatagggtcaagccacttcatggg

SEQ ID NO: 635566 - DNA, 25 bp, Homo sapien
attcagggcgattagaaacaagcat

SEQ ID NO: 635567 - DNA, 25 bp, Homo sapien
gattcagggcgattagaaacaagca

SEQ ID NO: 635568 - DNA, 25 bp, Homo sapien
tagctgtcagattcagggcgattag

SEQ ID NO: 635569 - DNA, 25 bp, Homo sapien
ctgtcagattcagggcgattagaaa

SEQ ID NO: 635570 - DNA, 25 bp, Homo sapien
tccttcggttcagggcgagcatgtc

SEQ ID NO: 635571 - DNA, 25 bp, Homo sapien
ttcttccttcggttcagggcgagca

SEQ ID NO: 635572 - DNA, 25 bp, Homo sapien
cttgcttcttccttcggttcagggc

SEQ ID NO: 635573 - DNA, 25 bp, Homo sapien
ttcagggcgagcatgtccacggcgt

SEQ ID NO: 635574 - DNA, 25 bp, Homo sapien
gccggatccgggctggcgctcccca

SEQ ID NO: 635575 - DNA, 25 bp, Homo sapien
gcgcatccgccaggcgcgggtcggt

SEQ ID NO: 635576 - DNA, 25 bp, Homo sapien
tcggtccggccgccaggtctagtga

SEQ ID NO: 635577 - DNA, 25 bp, Homo sapien
tctagtgagggcgttggcggagccg

SEQ ID NO: 635578 - DNA, 25 bp, Homo sapien
acagtcatttctggttttatattca

SEQ ID NO: 635579 - DNA, 25 bp, Homo sapien
cttcttcctgtggttgaagttgtaa

SEQ ID NO: 635580 - DNA, 25 bp, Homo sapien
tggtcagctgggatagggtttttct

SEQ ID NO: 635581 - DNA, 25 bp, Homo sapien
tttaatacagtcatttctggtttta

SEQ ID NO: 635582 - DNA, 25 bp, Homo sapien
tgccctgctgcagttgaccgtctgg

SEQ ID NO: 635583 - DNA, 25 bp, Homo sapien
tgaaccagttgtggaaaatgccaca

SEQ ID NO: 635584 - DNA, 25 bp, Homo sapien
tgccacaaaggaagaggagtaaccg

SEQ ID NO: 635585 - DNA, 25 bp, Homo sapien
tgcagttgaccgtctggttggacag

SEQ ID NO: 635586 - DNA, 25 bp, Homo sapien
tgattttttccacctgattcacttt

SEQ ID NO: 635587 - DNA, 25 bp, Homo sapien
ctagagacaaagtcaggggaggtga

SEQ ID NO: 635588 - DNA, 25 bp, Homo sapien
tcactttcagctctcctctgcccat

SEQ ID NO: 635589 - DNA, 25 bp, Homo sapien
gtgatgctttctgctgatattcctt

SEQ ID NO: 635590 - DNA, 25 bp, Homo sapien
tgggttattcaagcaaggatccctg

SEQ ID NO: 635591 - DNA, 25 bp, Homo sapien
cactcactggctgatttgtgcttgg

SEQ ID NO: 635592 - DNA, 25 bp, Homo sapien
gaaacagcaaaaggcaggatgtgga

SEQ ID NO: 635593 - DNA, 25 bp, Homo sapien
tccctgactccgagagacaggatgg

SEQ ID NO: 635594 - DNA, 25 bp, Homo sapien
aaaggaacccaccaagcatggagag

SEQ ID NO: 635595 - DNA, 25 bp, Homo sapien
gccacatggaatgaagctgtctgaa

SEQ ID NO: 635596 - DNA, 25 bp, Homo sapien
tgaagcaggaaaggatgatattacc

SEQ ID NO: 635597 - DNA, 25 bp, Homo sapien
tggacggaggcctgcttctgatcct

SEQ ID NO: 635598 - DNA, 25 bp, Homo sapien
tcacagaccctgctggtgccgagcc

SEQ ID NO: 635599 - DNA, 25 bp, Homo sapien
ttcagaagggctttcagggtttaga

SEQ ID NO: 635600 - DNA, 25 bp, Homo sapien
cagaagggctttcagggtttagatt

SEQ ID NO: 635601 - DNA, 25 bp, Homo sapien
tgccgagccacttctaagagaccaa

SEQ ID NO: 635602 - DNA, 25 bp, Homo sapien
tgagtgaccaatcgcatcagcacct

SEQ ID NO: 635603 - DNA, 25 bp, Homo sapien
tctcctggactcctaaaactgccat

SEQ ID NO: 635604 - DNA, 25 bp, Homo sapien
ctaaaactgccatttctctgagagg

SEQ ID NO: 635605 - DNA, 25 bp, Homo sapien
tccaaaaggactaagcagggttctg

SEQ ID NO: 635606 - DNA, 25 bp, Homo sapien
tgtggcaggctgatgtacaatggga

SEQ ID NO: 635607 - DNA, 25 bp, Homo sapien
ctgtggcaggctgatgtacaatggg

SEQ ID NO: 635608 - DNA, 25 bp, Homo sapien
caggctgatgtacaatgggatggtc

SEQ ID NO: 635609 - DNA, 25 bp, Homo sapien
ctgatgtacaatgggatggtcctgg

SEQ ID NO: 635610 - DNA, 25 bp, Homo sapien
ggtcccaaacttgtcatgctcattg

SEQ ID NO: 635611 - DNA, 25 bp, Homo sapien
ttcagcttgcccatggtaaatccca

SEQ ID NO: 635612 - DNA, 25 bp, Homo sapien
gcttgcccatggtaaatcccatgat

SEQ ID NO: 635613 - DNA, 25 bp, Homo sapien
caggagttgagggtcccaaacttgt

SEQ ID NO: 635614 - DNA, 25 bp, Homo sapien
tctgagtttcaacttgactgttgcc

SEQ ID NO: 635615 - DNA, 25 bp, Homo sapien
catggctgttccttgtatcttctga

SEQ ID NO: 635616 - DNA, 25 bp, Homo sapien
tgcttccttcatggaagtcatcact

SEQ ID NO: 635617 - DNA, 25 bp, Homo sapien
tccctgatcaccctatagtaagtag

SEQ ID NO: 635618 - DNA, 25 bp, Homo sapien
taagagttaaggtgaagaatgttgc

SEQ ID NO: 635619 - DNA, 25 bp, Homo sapien
aaaccaaacccacgtgttgtgagtg

SEQ ID NO: 635620 - DNA, 25 bp, Homo sapien
ggagactcatcacgggcaaaaaacc

SEQ ID NO: 635621 - DNA, 25 bp, Homo sapien
aatgttgccgcggaagaggagtggg

SEQ ID NO: 635622 - DNA, 25 bp, Homo sapien
aaccaccctcaaccacaattggagc

SEQ ID NO: 635623 - DNA, 25 bp, Homo sapien
ccaccctcaaccacaattggagctg

SEQ ID NO: 635624 - DNA, 25 bp, Homo sapien
accaccctcaaccacaattggagct

SEQ ID NO: 635625 - DNA, 25 bp, Homo sapien
caaccaccctcaaccacaattggag

SEQ ID NO: 635626 - DNA, 25 bp, Homo sapien
ccaggttccatgtgggcaccagcag

SEQ ID NO: 635627 - DNA, 25 bp, Homo sapien
ctctgtgccaggttccatgtgggca

SEQ ID NO: 635628 - DNA, 25 bp, Homo sapien
aacagactcccctctgtgccaggtt

SEQ ID NO: 635629 - DNA, 25 bp, Homo sapien
gtgccaggttccatgtgggcaccag

SEQ ID NO: 635630 - DNA, 25 bp, Homo sapien
gcagctcccaaatactggggcagga

SEQ ID NO: 635631 - DNA, 25 bp, Homo sapien
caaacacagtcgctggtactgaagc

SEQ ID NO: 635632 - DNA, 25 bp, Homo sapien
atccagcctgtactggatatctggg

SEQ ID NO: 635633 - DNA, 25 bp, Homo sapien
ggcaggagacagatatccagcctgt

SEQ ID NO: 635634 - DNA, 25 bp, Homo sapien
gaggtctgcagtgccaaattagagt

SEQ ID NO: 635635 - DNA, 25 bp, Homo sapien
caaattagagtggagtaaggactcc

SEQ ID NO: 635636 - DNA, 25 bp, Homo sapien
gactccatgctgagtaaggaaagaa

SEQ ID NO: 635637 - DNA, 25 bp, Homo sapien
ggagtaaggactccatgctgagtaa

SEQ ID NO: 635638 - DNA, 25 bp, Homo sapien
cctggagatactccacaagtcctca

SEQ ID NO: 635639 - DNA, 25 bp, Homo sapien
ctggagatactccacaagtcctcac

SEQ ID NO: 635640 - DNA, 25 bp, Homo sapien
cccctggagatactccacaagtcct

SEQ ID NO: 635641 - DNA, 25 bp, Homo sapien
ccctggagatactccacaagtcctc

SEQ ID NO: 635642 - DNA, 25 bp, Homo sapien
cggtaggagcccgtggcccatgcat

SEQ ID NO: 635643 - DNA, 25 bp, Homo sapien
gcatcaggagggtcggtaggagccc

SEQ ID NO: 635644 - DNA, 25 bp, Homo sapien
ccatgcatggcagactcaggtggcc

SEQ ID NO: 635645 - DNA, 25 bp, Homo sapien
tgagcatgggcatcagggattggca

SEQ ID NO: 635646 - DNA, 25 bp, Homo sapien
tgagatctagcctgcatatgtgtgg

SEQ ID NO: 635647 - DNA, 25 bp, Homo sapien
agatctagcctgcatatgtgtggaa

SEQ ID NO: 635648 - DNA, 25 bp, Homo sapien
gtcttgagatctagcctgcatatgt

SEQ ID NO: 635649 - DNA, 25 bp, Homo sapien
aagagtcagccacagggggtgtcct

SEQ ID NO: 635650 - DNA, 25 bp, Homo sapien
ccattctgcccatcaggataatgct

SEQ ID NO: 635651 - DNA, 25 bp, Homo sapien
ctccatgacgctaggctccccttcc

SEQ ID NO: 635652 - DNA, 25 bp, Homo sapien
ctgtccttctccatgacgctaggct

SEQ ID NO: 635653 - DNA, 25 bp, Homo sapien
ttctccatgacgctaggctcccctt

SEQ ID NO: 635654 - DNA, 25 bp, Homo sapien
agactggtacccttagcaaacaaag

SEQ ID NO: 635655 - DNA, 25 bp, Homo sapien
tacttggatatagggccgctaggga

SEQ ID NO: 635656 - DNA, 25 bp, Homo sapien
gaactgaattgtatccctccccaaa

SEQ ID NO: 635657 - DNA, 25 bp, Homo sapien
gtcagaagggtagggtactaatcca

SEQ ID NO: 635658 - DNA, 25 bp, Homo sapien
tttgtttctcactaagggcattcct

SEQ ID NO: 635659 - DNA, 25 bp, Homo sapien
tgtttctcactaagggcattccttc

SEQ ID NO: 635660 - DNA, 25 bp, Homo sapien
catttgtttctcactaagggcattc

SEQ ID NO: 635661 - DNA, 25 bp, Homo sapien
gtttctcactaagggcattccttcc

SEQ ID NO: 635662 - DNA, 25 bp, Homo sapien
gtttcaactctgagccgttttgtca

SEQ ID NO: 635663 - DNA, 25 bp, Homo sapien
cttggagaagtggtttcaactctga

SEQ ID NO: 635664 - DNA, 25 bp, Homo sapien
cgggcagcagttgtgtctccttgga

SEQ ID NO: 635665 - DNA, 25 bp, Homo sapien
gaaatttgatagtgggtcaggagct

SEQ ID NO: 635666 - DNA, 25 bp, Homo sapien
ttttgtggatgggaagtctgcctct

SEQ ID NO: 635667 - DNA, 25 bp, Homo sapien
tgtggatgggaagtctgcctctcag

SEQ ID NO: 635668 - DNA, 25 bp, Homo sapien
ttgtggatgggaagtctgcctctca

SEQ ID NO: 635669 - DNA, 25 bp, Homo sapien
ggatgggaagtctgcctctcagcaa

SEQ ID NO: 635670 - DNA, 25 bp, Homo sapien
ttagggccagtcttgtggacctggc

SEQ ID NO: 635671 - DNA, 25 bp, Homo sapien
tgccaggattttgcctaagaagaca

SEQ ID NO: 635672 - DNA, 25 bp, Homo sapien
tagcctgggcaatcaggagctctga

SEQ ID NO: 635673 - DNA, 25 bp, Homo sapien
taaagaatgcttccagtgccaggat

SEQ ID NO: 635674 - DNA, 25 bp, Homo sapien
tacaagccagtatcctttatgaata

SEQ ID NO: 635675 - DNA, 25 bp, Homo sapien
tcttcacatagtcctccaaaaaata

SEQ ID NO: 635676 - DNA, 25 bp, Homo sapien
tgataaccagtaccaaagacatgac

SEQ ID NO: 635677 - DNA, 25 bp, Homo sapien
tcttctgtgaagctagtattatcct

SEQ ID NO: 635678 - DNA, 25 bp, Homo sapien
gtgcagacagtgttcacacccagtg

SEQ ID NO: 635679 - DNA, 25 bp, Homo sapien
gccacaggtacagattagcagctgg

SEQ ID NO: 635680 - DNA, 25 bp, Homo sapien
aggttgttgatactagttgtgccac

SEQ ID NO: 635681 - DNA, 25 bp, Homo sapien
tagttgtgccacgaaaccacagctg

SEQ ID NO: 635682 - DNA, 25 bp, Homo sapien
gagacggagtcacacacacggtgcc

SEQ ID NO: 635683 - DNA, 25 bp, Homo sapien
tctggagacggagtcacacacacgg

SEQ ID NO: 635684 - DNA, 25 bp, Homo sapien
tggagacggagtcacacacacggtg

SEQ ID NO: 635685 - DNA, 25 bp, Homo sapien
ggattctggagacggagtcacacac

SEQ ID NO: 635686 - DNA, 25 bp, Homo sapien
tatatcctcgaccagatgcagtgct

SEQ ID NO: 635687 - DNA, 25 bp, Homo sapien
gactccggcaaccttcagcaacata

SEQ ID NO: 635688 - DNA, 25 bp, Homo sapien
gctcccaaagagaaatcagtgtgtc

SEQ ID NO: 635689 - DNA, 25 bp, Homo sapien
gctcatgtgtttgcagaccggctgg

SEQ ID NO: 635690 - DNA, 25 bp, Homo sapien
catgagtaatcatcaaggagcaagt

SEQ ID NO: 635691 - DNA, 25 bp, Homo sapien
aagaaaccacacacccattggcatg

SEQ ID NO: 635692 - DNA, 25 bp, Homo sapien
tgtagaacccaaaagattggagcct

SEQ ID NO: 635693 - DNA, 25 bp, Homo sapien
tggagccttaacaataaacatcagc

SEQ ID NO: 635694 - DNA, 25 bp, Homo sapien
tgggagaaagcgacacaacagtgga

SEQ ID NO: 635695 - DNA, 25 bp, Homo sapien
gatgtttaactcactggactgaagg

SEQ ID NO: 635696 - DNA, 25 bp, Homo sapien
cctaccagtaggagcagatatttga

SEQ ID NO: 635697 - DNA, 25 bp, Homo sapien
tgtgcctacttggagcctgggagaa

SEQ ID NO: 635698 - DNA, 25 bp, Homo sapien
tggcttagaaggcatgtgctctcaa

SEQ ID NO: 635699 - DNA, 25 bp, Homo sapien
cactttactactatatgagggagac

SEQ ID NO: 635700 - DNA, 25 bp, Homo sapien
attcagactgaaggatgcctcccca

SEQ ID NO: 635701 - DNA, 25 bp, Homo sapien
tagggtctctacaccagtggcttag

SEQ ID NO: 635702 - DNA, 25 bp, Homo sapien
catcctccaagagcagcggtttcca

SEQ ID NO: 635703 - DNA, 25 bp, Homo sapien
caaggccctatgtgagctcagttta

SEQ ID NO: 635704 - DNA, 25 bp, Homo sapien
gaggatgggcaacctttcaaacagc

SEQ ID NO: 635705 - DNA, 25 bp, Homo sapien
gatgatcagggctgaaagggacccc

SEQ ID NO: 635706 - DNA, 25 bp, Homo sapien
tgtccggattgactcgagcctcacg

SEQ ID NO: 635707 - DNA, 25 bp, Homo sapien
taggcgggcgtagtacatctccagt

SEQ ID NO: 635708 - DNA, 25 bp, Homo sapien
cactcaccaggaaaacgagggcgga

SEQ ID NO: 635709 - DNA, 25 bp, Homo sapien
tctcatgcgcaggttaatggagccg

SEQ ID NO: 635710 - DNA, 25 bp, Homo sapien
tgcaagaggagttaccccacccaag

SEQ ID NO: 635711 - DNA, 25 bp, Homo sapien
agaggcgagaagagggacactctct

SEQ ID NO: 635712 - DNA, 25 bp, Homo sapien
gacctggactagaaccacaggaggg

SEQ ID NO: 635713 - DNA, 25 bp, Homo sapien
catgactaggtcaaagccaaatgcc

SEQ ID NO: 635714 - DNA, 25 bp, Homo sapien
aactcatacccctgtgctggtggca

SEQ ID NO: 635715 - DNA, 25 bp, Homo sapien
caaactcatacccctgtgctggtgg

SEQ ID NO: 635716 - DNA, 25 bp, Homo sapien
actcatacccctgtgctggtggcat

SEQ ID NO: 635717 - DNA, 25 bp, Homo sapien
ctgcaaactcatacccctgtgctgg

SEQ ID NO: 635718 - DNA, 25 bp, Homo sapien
cttgagagcaggcataagtttgaat

SEQ ID NO: 635719 - DNA, 25 bp, Homo sapien
tgtttatcagcaaccgtgagcacct

SEQ ID NO: 635720 - DNA, 25 bp, Homo sapien
atccagctgtttatcagcaaccgtg

SEQ ID NO: 635721 - DNA, 25 bp, Homo sapien
caaccgtgagcaccttgagagcagg

SEQ ID NO: 635722 - DNA, 25 bp, Homo sapien
tgcctccacaccctggaagaaatct

SEQ ID NO: 635723 - DNA, 25 bp, Homo sapien
gccacaaacagggaccagcagtggg

SEQ ID NO: 635724 - DNA, 25 bp, Homo sapien
agtgcccagccacaaacagggacca

SEQ ID NO: 635725 - DNA, 25 bp, Homo sapien
tttcccagactgatatattgatgcc

SEQ ID NO: 635726 - DNA, 25 bp, Homo sapien
cagttacacaaaggccgtgcccaat

SEQ ID NO: 635727 - DNA, 25 bp, Homo sapien
tcatgcccaggttcagagatattca

SEQ ID NO: 635728 - DNA, 25 bp, Homo sapien
cgtgcccaattaccctaacataagc

SEQ ID NO: 635729 - DNA, 25 bp, Homo sapien
agttaggacatctctctgtttcatg

SEQ ID NO: 635730 - DNA, 25 bp, Homo sapien
cagacacccagaagtcacgtagtgt

SEQ ID NO: 635731 - DNA, 25 bp, Homo sapien
aggtcctgaaaggaacactccagtt

SEQ ID NO: 635732 - DNA, 25 bp, Homo sapien
gaccccaccagttactaatttcatc

SEQ ID NO: 635733 - DNA, 25 bp, Homo sapien
ggatcttcgggccacgcgagtaccc

SEQ ID NO: 635734 - DNA, 25 bp, Homo sapien
gcacacgcaggtccacgctgttgta

SEQ ID NO: 635735 - DNA, 25 bp, Homo sapien
tagacacacgcacgagttgtacaca

SEQ ID NO: 635736 - DNA, 25 bp, Homo sapien
gctgttgtacccaaagttgcgcgca

SEQ ID NO: 635737 - DNA, 25 bp, Homo sapien
acaaaacccagtcgatagacacacg

SEQ ID NO: 635738 - DNA, 25 bp, Homo sapien
ggagccactgccgaggcgcacgtac

SEQ ID NO: 635739 - DNA, 25 bp, Homo sapien
cctcaccacgctggggcgaagggcg

SEQ ID NO: 635740 - DNA, 25 bp, Homo sapien
cgccttcctgcagccggcgtacgcc

SEQ ID NO: 635741 - DNA, 25 bp, Homo sapien
gcgagggtgcgtcctctccggtgcc

SEQ ID NO: 635742 - DNA, 25 bp, Homo sapien
cgcccggagagttagcaaggagagg

SEQ ID NO: 635743 - DNA, 25 bp, Homo sapien
ttggagcccgcggtccacgggcgca

SEQ ID NO: 635744 - DNA, 25 bp, Homo sapien
ccaggcagatctggatcgccggcgc

SEQ ID NO: 635745 - DNA, 25 bp, Homo sapien
tcgccggcgcctgggcttagggaac

SEQ ID NO: 635746 - DNA, 25 bp, Homo sapien
cagctgaatcgtgtggtctcggtta

SEQ ID NO: 635747 - DNA, 25 bp, Homo sapien
gaatcgtgcaggttccgggaagaca

SEQ ID NO: 635748 - DNA, 25 bp, Homo sapien
agtgcctagagtaccaaattcatgg

SEQ ID NO: 635749 - DNA, 25 bp, Homo sapien
taagatgagtccagcgaagtgccta

SEQ ID NO: 635750 - DNA, 25 bp, Homo sapien
ccctttccacctggtctgtatggat

SEQ ID NO: 635751 - DNA, 25 bp, Homo sapien
ccacctggtctgtatggatctccca

SEQ ID NO: 635752 - DNA, 25 bp, Homo sapien
ggtctgtatggatctcccagccttg

SEQ ID NO: 635753 - DNA, 25 bp, Homo sapien
ccagccttggggaataaaagtcttg

SEQ ID NO: 635754 - DNA, 25 bp, Homo sapien
catcagctttcccgttgtggcgcat

SEQ ID NO: 635755 - DNA, 25 bp, Homo sapien
ccttctaggtaactggtttgagatc

SEQ ID NO: 635756 - DNA, 25 bp, Homo sapien
taggtaactggtttgagatcttccc

SEQ ID NO: 635757 - DNA, 25 bp, Homo sapien
gtaactggtttgagatcttccctct

SEQ ID NO: 635758 - DNA, 25 bp, Homo sapien
ggtaactggtttgagatcttccctc

SEQ ID NO: 635759 - DNA, 25 bp, Homo sapien
taaacacataaagctctgtttcctt

SEQ ID NO: 635760 - DNA, 25 bp, Homo sapien
ataaacacataaagctctgtttcct

SEQ ID NO: 635761 - DNA, 25 bp, Homo sapien
tataaacacataaagctctgtttcc

SEQ ID NO: 635762 - DNA, 25 bp, Homo sapien
tcatcttcatggtcttcacactgag

SEQ ID NO: 635763 - DNA, 25 bp, Homo sapien
cataaggaagataaatatattttct

SEQ ID NO: 635764 - DNA, 25 bp, Homo sapien
atcttcatggtcttcacactgagta

SEQ ID NO: 635765 - DNA, 25 bp, Homo sapien
tcttcatcttcatggtcttcacact

SEQ ID NO: 635766 - DNA, 25 bp, Homo sapien
agtagttcttttagagcaagtgtgc

SEQ ID NO: 635767 - DNA, 25 bp, Homo sapien
gtgtgctggcaatggattatcttca

SEQ ID NO: 635768 - DNA, 25 bp, Homo sapien
tgctgggtacaaaatcctggttgac

SEQ ID NO: 635769 - DNA, 25 bp, Homo sapien
tccttaattggagaatgtgtttatt

SEQ ID NO: 635770 - DNA, 25 bp, Homo sapien
gatgtaaatcagtgaagtcacttta

SEQ ID NO: 635771 - DNA, 25 bp, Homo sapien
gaaatgatgttgtctcctaaggtca

SEQ ID NO: 635772 - DNA, 25 bp, Homo sapien
taaaatgtgtatgtgaccggccatc

SEQ ID NO: 635773 - DNA, 25 bp, Homo sapien
gggaatccatcctcggttagctagc

SEQ ID NO: 635774 - DNA, 25 bp, Homo sapien
cccaagtaagaaggccatgttatca

SEQ ID NO: 635775 - DNA, 25 bp, Homo sapien
agatgccatgaaggtttagtgtcag

SEQ ID NO: 635776 - DNA, 25 bp, Homo sapien
taacttagcatccttcatcttgtga

SEQ ID NO: 635777 - DNA, 25 bp, Homo sapien
cctgggtgagtaaggtaacttagca

SEQ ID NO: 635778 - DNA, 25 bp, Homo sapien
ttagatgccatgaaggtttagtgtc

SEQ ID NO: 635779 - DNA, 25 bp, Homo sapien
cgaccctcccaacagcaagggcgag

SEQ ID NO: 635780 - DNA, 25 bp, Homo sapien
ggcgaggagcgtgtgtcagtgccaa

SEQ ID NO: 635781 - DNA, 25 bp, Homo sapien
tggagtagagctctccagccgaccc

SEQ ID NO: 635782 - DNA, 25 bp, Homo sapien
gccaatgccatcaaaaggccttttg

SEQ ID NO: 635783 - DNA, 25 bp, Homo sapien
cacactgggcattgttgaggccctg

SEQ ID NO: 635784 - DNA, 25 bp, Homo sapien
tgaaagaattcagcatggcatggga

SEQ ID NO: 635785 - DNA, 25 bp, Homo sapien
gcatgggaagtaccacggggaatca

SEQ ID NO: 635786 - DNA, 25 bp, Homo sapien
gaggccctggatcttattgaaggtg

SEQ ID NO: 635787 - DNA, 25 bp, Homo sapien
ggattaggcatttacctaatcttac

SEQ ID NO: 635788 - DNA, 25 bp, Homo sapien
tgccaggggattaggcatttaccta

SEQ ID NO: 635789 - DNA, 25 bp, Homo sapien
aatgccaggggattaggcatttacc

SEQ ID NO: 635790 - DNA, 25 bp, Homo sapien
tggggtaaatgccaggggattaggc

SEQ ID NO: 635791 - DNA, 25 bp, Homo sapien
gaatttttagggatggaagtctcac

SEQ ID NO: 635792 - DNA, 25 bp, Homo sapien
atcctgtgatgctttagagttggaa

SEQ ID NO: 635793 - DNA, 25 bp, Homo sapien
tcatcctgtgatgctttagagttgg

SEQ ID NO: 635794 - DNA, 25 bp, Homo sapien
cctcatcctgtgatgctttagagtt

SEQ ID NO: 635795 - DNA, 25 bp, Homo sapien
tcctcatcctgtgatgctttagagt

SEQ ID NO: 635796 - DNA, 25 bp, Homo sapien
caggtagagggggggcactggctct

SEQ ID NO: 635797 - DNA, 25 bp, Homo sapien
ctgaagtcaggtagagggggggcac

SEQ ID NO: 635798 - DNA, 25 bp, Homo sapien
gggggcactggctcttgctcccctt

SEQ ID NO: 635799 - DNA, 25 bp, Homo sapien
gagggggggcactggctcttgctcc

SEQ ID NO: 635800 - DNA, 25 bp, Homo sapien
tcagatcccgcatctatgcaaaggt

SEQ ID NO: 635801 - DNA, 25 bp, Homo sapien
tggcccacagtgttgagggtcctct

SEQ ID NO: 635802 - DNA, 25 bp, Homo sapien
gaccaccggtgtgggtcacgagggc

SEQ ID NO: 635803 - DNA, 25 bp, Homo sapien
cctgggactgtggtggccggtggcc

SEQ ID NO: 635804 - DNA, 25 bp, Homo sapien
ggaggaacagcaagtcggaaatgta

SEQ ID NO: 635805 - DNA, 25 bp, Homo sapien
tacatttccgacttgctgttcctcc

SEQ ID NO: 635806 - DNA, 25 bp, Homo sapien
gaatcaattacctttgcggacaggg

SEQ ID NO: 635807 - DNA, 25 bp, Homo sapien
ggggaatcaattacctttgcggaca

SEQ ID NO: 635808 - DNA, 25 bp, Homo sapien
tgggggaatcaattacctttgcgga

SEQ ID NO: 635809 - DNA, 25 bp, Homo sapien
tcaatagttttgggggaatcaatta

SEQ ID NO: 635810 - DNA, 25 bp, Homo sapien
agcgtttaaacagcctgcctccgtg

SEQ ID NO: 635811 - DNA, 25 bp, Homo sapien
gaaaaagctctcacaaagaacgtag

SEQ ID NO: 635812 - DNA, 25 bp, Homo sapien
caagagaatcggctgcctgtgggcc

SEQ ID NO: 635813 - DNA, 25 bp, Homo sapien
ggcccagttgcgactttaagcagcg

SEQ ID NO: 635814 - DNA, 25 bp, Homo sapien
tgcaacccatcatccgagggtggtt

SEQ ID NO: 635815 - DNA, 25 bp, Homo sapien
cttaagcagcaggccggctgcaacc

SEQ ID NO: 635816 - DNA, 25 bp, Homo sapien
cggctgcaacccatcatccgagggt

SEQ ID NO: 635817 - DNA, 25 bp, Homo sapien
catcatccgagggtggttgcccttt

SEQ ID NO: 635818 - DNA, 25 bp, Homo sapien
cgggaagccccccctgcctgccctg

SEQ ID NO: 635819 - DNA, 25 bp, Homo sapien
ccccctgcctgccctgccctgcagt

SEQ ID NO: 635820 - DNA, 25 bp, Homo sapien
ccctgcctgccctgccctgcagtgg

SEQ ID NO: 635821 - DNA, 25 bp, Homo sapien
ctgcctgccctgccctgcagtggct

SEQ ID NO: 635822 - DNA, 25 bp, Homo sapien
gagtggtccatggtgtggtggagca

SEQ ID NO: 635823 - DNA, 25 bp, Homo sapien
agtggtccatggtgtggtggagcag

SEQ ID NO: 635824 - DNA, 25 bp, Homo sapien
tggagtggtccatggtgtggtggag

SEQ ID NO: 635825 - DNA, 25 bp, Homo sapien
gtggtccatggtgtggtggagcagg

SEQ ID NO: 635826 - DNA, 25 bp, Homo sapien
agggtgacaacgttcccagccgtgg

SEQ ID NO: 635827 - DNA, 25 bp, Homo sapien
cagccgtggccagaatctccatgat

SEQ ID NO: 635828 - DNA, 25 bp, Homo sapien
tggtcagggtgacaacgttcccagc

SEQ ID NO: 635829 - DNA, 25 bp, Homo sapien
ccatgtgctcgtagatcacactggg

SEQ ID NO: 635830 - DNA, 25 bp, Homo sapien
ggaggaggcaagtaagcgatcaccc

SEQ ID NO: 635831 - DNA, 25 bp, Homo sapien
cactgctagaggacaccactgatgg

SEQ ID NO: 635832 - DNA, 25 bp, Homo sapien
agtaagcgatcaccctaaggattgg

SEQ ID NO: 635833 - DNA, 25 bp, Homo sapien
cccgagcctgtcagatgagggtccc

SEQ ID NO: 635834 - DNA, 25 bp, Homo sapien
ctcgtgctcctggacttagtgatcc

SEQ ID NO: 635835 - DNA, 25 bp, Homo sapien
aagcaagctgcccaaagacctgagc

SEQ ID NO: 635836 - DNA, 25 bp, Homo sapien
acagcaaccttaggaagaggatgct

SEQ ID NO: 635837 - DNA, 25 bp, Homo sapien
agccctacgaacaccgtcttactga

SEQ ID NO: 635838 - DNA, 25 bp, Homo sapien
tcttgatcacgaagccgacgtggcc

SEQ ID NO: 635839 - DNA, 25 bp, Homo sapien
gcagaactccctttgaccagagaga

SEQ ID NO: 635840 - DNA, 25 bp, Homo sapien
ttcagcccgataacattctgcccgt

SEQ ID NO: 635841 - DNA, 25 bp, Homo sapien
acctcacacacgtagtggttggtga

SEQ ID NO: 635842 - DNA, 25 bp, Homo sapien
atcttatcgcctgatgccttcttca

SEQ ID NO: 635843 - DNA, 25 bp, Homo sapien
ttgtgcgagctccacccagcacagt

SEQ ID NO: 635844 - DNA, 25 bp, Homo sapien
caccacgacaatcttatcgcctgat

SEQ ID NO: 635845 - DNA, 25 bp, Homo sapien
acagtcacgcccgtcaatctgcagg

SEQ ID NO: 635846 - DNA, 25 bp, Homo sapien
ggatctcgcgcaccccgggcttgat

SEQ ID NO: 635847 - DNA, 25 bp, Homo sapien
ttgccgcgctcgtccttgcacaggt

SEQ ID NO: 635848 - DNA, 25 bp, Homo sapien
tccttgcacaggtggatctcgcgca

SEQ ID NO: 635849 - DNA, 25 bp, Homo sapien
gcacgcccaggctgtacccggttac

SEQ ID NO: 635850 - DNA, 25 bp, Homo sapien
gagaggagacgtggctccacgcggc

SEQ ID NO: 635851 - DNA, 25 bp, Homo sapien
tcccctaggggcgagaggagacgtg

SEQ ID NO: 635852 - DNA, 25 bp, Homo sapien
cccgtggggaccctgtgcctcagga

SEQ ID NO: 635853 - DNA, 25 bp, Homo sapien
gggcgagaggagacgtggctccacg

SEQ ID NO: 635854 - DNA, 25 bp, Homo sapien
cagatccagggaaggttagtctaaa

SEQ ID NO: 635855 - DNA, 25 bp, Homo sapien
caggaaccgtatgctgaaaacaaca

SEQ ID NO: 635856 - DNA, 25 bp, Homo sapien
aagaatagcgagaggaatcaccacc

SEQ ID NO: 635857 - DNA, 25 bp, Homo sapien
gcctcaaatgagtaaagtcaactgc

SEQ ID NO: 635858 - DNA, 25 bp, Homo sapien
tctgtgacagttctctatcatcata

SEQ ID NO: 635859 - DNA, 25 bp, Homo sapien
tcagatcctcgttttggcagtggct

SEQ ID NO: 635860 - DNA, 25 bp, Homo sapien
tgcctttcacagcacgaccatgaag

SEQ ID NO: 635861 - DNA, 25 bp, Homo sapien
cactgtggagaaacaccccagggtg

SEQ ID NO: 635862 - DNA, 25 bp, Homo sapien
ctggaatctgaagcaggctctcctg

SEQ ID NO: 635863 - DNA, 25 bp, Homo sapien
tcttgggtgaggctctgacctgggc

SEQ ID NO: 635864 - DNA, 25 bp, Homo sapien
gtggtggggaaatggctgttgcctg

SEQ ID NO: 635865 - DNA, 25 bp, Homo sapien
agggctggcatcttgggtgaggctc

SEQ ID NO: 635866 - DNA, 25 bp, Homo sapien
ggggaaatggctgttgcctggactg

SEQ ID NO: 635867 - DNA, 25 bp, Homo sapien
gcttggtccacttttaggtcctcta

SEQ ID NO: 635868 - DNA, 25 bp, Homo sapien
ggtccacttttaggtcctctagaga

SEQ ID NO: 635869 - DNA, 25 bp, Homo sapien
taggtcctctagagatgggtacagg

SEQ ID NO: 635870 - DNA, 25 bp, Homo sapien
cacttttaggtcctctagagatggg

SEQ ID NO: 635871 - DNA, 25 bp, Homo sapien
tgaaatcgagctttaaactcccctg

SEQ ID NO: 635872 - DNA, 25 bp, Homo sapien
ggcctcggaacaccatttgtagcct

SEQ ID NO: 635873 - DNA, 25 bp, Homo sapien
tgaaggaggaggacttataagattc

SEQ ID NO: 635874 - DNA, 25 bp, Homo sapien
cggattggaggctgcgcgggtgaaa

SEQ ID NO: 635875 - DNA, 25 bp, Homo sapien
tcttgtctggccgtgacttctgacc

SEQ ID NO: 635876 - DNA, 25 bp, Homo sapien
ttcttgtctggccgtgacttctgac

SEQ ID NO: 635877 - DNA, 25 bp, Homo sapien
ccgtttcttgtctggccgtgacttc

SEQ ID NO: 635878 - DNA, 25 bp, Homo sapien
tgtctggccgtgacttctgacccag

SEQ ID NO: 635879 - DNA, 25 bp, Homo sapien
ccctccctgaaacgtagccctgtct

SEQ ID NO: 635880 - DNA, 25 bp, Homo sapien
tgcaggcaaggtgctgctccacgac

SEQ ID NO: 635881 - DNA, 25 bp, Homo sapien
aggcaaggtgctgctccacgacctt

SEQ ID NO: 635882 - DNA, 25 bp, Homo sapien
gcaaggtgctgctccacgaccttct

SEQ ID NO: 635883 - DNA, 25 bp, Homo sapien
tcagtctccgtatttggccagggaa

SEQ ID NO: 635884 - DNA, 25 bp, Homo sapien
caaggcaacacaccccaagagtggt

SEQ ID NO: 635885 - DNA, 25 bp, Homo sapien
gaatctgggtagtgcagcaagaccc

SEQ ID NO: 635886 - DNA, 25 bp, Homo sapien
tattgagctcctgcacactgggtgc

SEQ ID NO: 635887 - DNA, 25 bp, Homo sapien
aatgtccttcatgctatttctgagc

SEQ ID NO: 635888 - DNA, 25 bp, Homo sapien
tcctgtggcgtgaacaccaaagatg

SEQ ID NO: 635889 - DNA, 25 bp, Homo sapien
tttggtctccaaacacaatgtcctt

SEQ ID NO: 635890 - DNA, 25 bp, Homo sapien
tgtccactatgagcatttggtctcc

SEQ ID NO: 635891 - DNA, 25 bp, Homo sapien
gctactacccgtcaagggctggcag

SEQ ID NO: 635892 - DNA, 25 bp, Homo sapien
gtgctccagcccaaatgacagatgt

SEQ ID NO: 635893 - DNA, 25 bp, Homo sapien
taaggtaggccaggttatgctgcag

SEQ ID NO: 635894 - DNA, 25 bp, Homo sapien
tctcaaaggccgtcagaagccacgg

SEQ ID NO: 635895 - DNA, 25 bp, Homo sapien
ggattagaggctacatactgggtac

SEQ ID NO: 635896 - DNA, 25 bp, Homo sapien
ccagcgcagagagacatgaagctat

SEQ ID NO: 635897 - DNA, 25 bp, Homo sapien
tggagatagacaaactgagccctgg

SEQ ID NO: 635898 - DNA, 25 bp, Homo sapien
cactgctcagttgacaggtgtacca

SEQ ID NO: 635899 - DNA, 25 bp, Homo sapien
gactgctagcctgggaatgttgccc

SEQ ID NO: 635900 - DNA, 25 bp, Homo sapien
taatgcagccagactatggcacagg

SEQ ID NO: 635901 - DNA, 25 bp, Homo sapien
tcttcaccgcacctgaggatccagg

SEQ ID NO: 635902 - DNA, 25 bp, Homo sapien
agtttgtctaatctccaaaatggca

SEQ ID NO: 635903 - DNA, 25 bp, Homo sapien
gaatagctagcttctaatctcaggg

SEQ ID NO: 635904 - DNA, 25 bp, Homo sapien
taagccccagacactagaggcggaa

SEQ ID NO: 635905 - DNA, 25 bp, Homo sapien
tgagcgagacagtatgaggacagcc

SEQ ID NO: 635906 - DNA, 25 bp, Homo sapien
catcctggccggaagcagcatttga

SEQ ID NO: 635907 - DNA, 25 bp, Homo sapien
ctcataggctgagtattatggagac

SEQ ID NO: 635908 - DNA, 25 bp, Homo sapien
tcataggctgagtattatggagacc

SEQ ID NO: 635909 - DNA, 25 bp, Homo sapien
tgatgctctcaaggacccctgttcc

SEQ ID NO: 635910 - DNA, 25 bp, Homo sapien
ctctgatgctctcaaggacccctgt

SEQ ID NO: 635911 - DNA, 25 bp, Homo sapien
tctgatgctctcaaggacccctgtt

SEQ ID NO: 635912 - DNA, 25 bp, Homo sapien
gatgctctcaaggacccctgttcct

SEQ ID NO: 635913 - DNA, 25 bp, Homo sapien
tgagaagtggtcagtctgccaacat

SEQ ID NO: 635914 - DNA, 25 bp, Homo sapien
gtacataaccatgaaggcctgccct

SEQ ID NO: 635915 - DNA, 25 bp, Homo sapien
aactctttcaagctcatctcgccag

SEQ ID NO: 635916 - DNA, 25 bp, Homo sapien
taatgttcaccaaggtcgaatttcc

SEQ ID NO: 635917 - DNA, 25 bp, Homo sapien
tcctgcctcaagaggaagacctgat

SEQ ID NO: 635918 - DNA, 25 bp, Homo sapien
cacagtttgggaatggacccaagca

SEQ ID NO: 635919 - DNA, 25 bp, Homo sapien
gaaccaagagttctactacttctag

SEQ ID NO: 635920 - DNA, 25 bp, Homo sapien
tacttggtgtatgcctcatggagag

SEQ ID NO: 635921 - DNA, 25 bp, Homo sapien
cacatagattggttcctatattagc

SEQ ID NO: 635922 - DNA, 25 bp, Homo sapien
tgttccatgggttgtgcttttggtg

SEQ ID NO: 635923 - DNA, 25 bp, Homo sapien
tagctgtagcgttttgcattctcac

SEQ ID NO: 635924 - DNA, 25 bp, Homo sapien
tcgccaaaccacaaaccacatagat

SEQ ID NO: 635925 - DNA, 25 bp, Homo sapien
cttagttgggctaaatttatcaaca

SEQ ID NO: 635926 - DNA, 25 bp, Homo sapien
gggctaaatttatcaacattgtttg

SEQ ID NO: 635927 - DNA, 25 bp, Homo sapien
ttcttagttgggctaaatttatcaa

SEQ ID NO: 635928 - DNA, 25 bp, Homo sapien
gttgggctaaatttatcaacattgt

SEQ ID NO: 635929 - DNA, 25 bp, Homo sapien
gaatttcttctctgttatcaacatg

SEQ ID NO: 635930 - DNA, 25 bp, Homo sapien
tgttgagtttcttcaaaatggctat

SEQ ID NO: 635931 - DNA, 25 bp, Homo sapien
gacaaattctgctgttaggagactc

SEQ ID NO: 635932 - DNA, 25 bp, Homo sapien
agagtttctgcttggttctgtttaa

SEQ ID NO: 635933 - DNA, 25 bp, Homo sapien
agaggcatacagtttaattccatca

SEQ ID NO: 635934 - DNA, 25 bp, Homo sapien
atgagtgagaggcatacagtttaat

SEQ ID NO: 635935 - DNA, 25 bp, Homo sapien
gcatacagtttaattccatcacaac

SEQ ID NO: 635936 - DNA, 25 bp, Homo sapien
gagtgagaggcatacagtttaattc

SEQ ID NO: 635937 - DNA, 25 bp, Homo sapien
tagaaggatgttgaagtccacgctg

SEQ ID NO: 635938 - DNA, 25 bp, Homo sapien
tgttcagtgcatactattttagggt

SEQ ID NO: 635939 - DNA, 25 bp, Homo sapien
tttagggttgttgagtcctcttggc

SEQ ID NO: 635940 - DNA, 25 bp, Homo sapien
cacgctgtaattgtggatttatcta

SEQ ID NO: 635941 - DNA, 25 bp, Homo sapien
aaaatccttgccagacaatcccaac

SEQ ID NO: 635942 - DNA, 25 bp, Homo sapien
gcatctgttgattgcctgttctcat

SEQ ID NO: 635943 - DNA, 25 bp, Homo sapien
gtaccatcttggtattggcatctgt

SEQ ID NO: 635944 - DNA, 25 bp, Homo sapien
cagacaatcccaacatcagtaccat

SEQ ID NO: 635945 - DNA, 25 bp, Homo sapien
gacaggtggtagtcaacagggctct

SEQ ID NO: 635946 - DNA, 25 bp, Homo sapien
tacgtgaacactacgaaagcctctg

SEQ ID NO: 635947 - DNA, 25 bp, Homo sapien
tctagtgcccaggttgaaatacgtg

SEQ ID NO: 635948 - DNA, 25 bp, Homo sapien
tagagtgtccatagcatcccatggg

SEQ ID NO: 635949 - DNA, 25 bp, Homo sapien
tatgaatcacatgctcagaccaaag

SEQ ID NO: 635950 - DNA, 25 bp, Homo sapien
tacccctggtggtcgaagtacagtc

SEQ ID NO: 635951 - DNA, 25 bp, Homo sapien
gctactgctcattgatcccagggag

SEQ ID NO: 635952 - DNA, 25 bp, Homo sapien
gaggaaaattctggtgcatcactta

SEQ ID NO: 635953 - DNA, 25 bp, Homo sapien
cctagagcagcttaatgctagtctc

SEQ ID NO: 635954 - DNA, 25 bp, Homo sapien
gcttatatagttagtgtatgagatt

SEQ ID NO: 635955 - DNA, 25 bp, Homo sapien
tctttagaattgcttatatagttag

SEQ ID NO: 635956 - DNA, 25 bp, Homo sapien
gtttttatgatagagaagtttcatt

SEQ ID NO: 635957 - DNA, 25 bp, Homo sapien
taaaacttgagactcataaatggtg

SEQ ID NO: 635958 - DNA, 25 bp, Homo sapien
taataaaacttgagactcataaatg

SEQ ID NO: 635959 - DNA, 25 bp, Homo sapien
tgcaataataaaacttgagactcat

SEQ ID NO: 635960 - DNA, 25 bp, Homo sapien
cataaagcacttttattgcaataat

SEQ ID NO: 635961 - DNA, 25 bp, Homo sapien
caccaaatcactacacaggacagca

SEQ ID NO: 635962 - DNA, 25 bp, Homo sapien
tcaccaaatcactacacaggacagc

SEQ ID NO: 635963 - DNA, 25 bp, Homo sapien
tctcaccaaatcactacacaggaca

SEQ ID NO: 635964 - DNA, 25 bp, Homo sapien
ctcaccaaatcactacacaggacag

SEQ ID NO: 635965 - DNA, 25 bp, Homo sapien
ccaattcctattctaatgttaacct

SEQ ID NO: 635966 - DNA, 25 bp, Homo sapien
cattgcagtgaacatgatctacttt

SEQ ID NO: 635967 - DNA, 25 bp, Homo sapien
ttctaatgttaacctaccacttgtg

SEQ ID NO: 635968 - DNA, 25 bp, Homo sapien
tgcagtgaacatgatctactttcaa

SEQ ID NO: 635969 - DNA, 25 bp, Homo sapien
tatacaaagtggagtggaacatcag

SEQ ID NO: 635970 - DNA, 25 bp, Homo sapien
aaacagaggtgtcggaagcaaagct

SEQ ID NO: 635971 - DNA, 25 bp, Homo sapien
gactgaaactgaatcttcaccccaa

SEQ ID NO: 635972 - DNA, 25 bp, Homo sapien
ggaacatcaggaaaagctccatatg

SEQ ID NO: 635973 - DNA, 25 bp, Homo sapien
gcagtggcgacagccacgatgccat

SEQ ID NO: 635974 - DNA, 25 bp, Homo sapien
gtgttctttgtgtgcagtggcgaca

SEQ ID NO: 635975 - DNA, 25 bp, Homo sapien
acgatgccatctgccacgccaaatc

SEQ ID NO: 635976 - DNA, 25 bp, Homo sapien
ttctttgtgtgcagtggcgacagcc

SEQ ID NO: 635977 - DNA, 25 bp, Homo sapien
ggattttggcctaggtgcagacctc

SEQ ID NO: 635978 - DNA, 25 bp, Homo sapien
ggtttagggtttgacctgggcatca

SEQ ID NO: 635979 - DNA, 25 bp, Homo sapien
gactctcatgtgcagtccagactga

SEQ ID NO: 635980 - DNA, 25 bp, Homo sapien
aatgactcagctctcaaagaacagg

SEQ ID NO: 635981 - DNA, 25 bp, Homo sapien
ggatggcagccatttgttgtggctt

SEQ ID NO: 635982 - DNA, 25 bp, Homo sapien
gctctgactgccatcacaaatagga

SEQ ID NO: 635983 - DNA, 25 bp, Homo sapien
gatgtgcacaacaggaccaggttac

SEQ ID NO: 635984 - DNA, 25 bp, Homo sapien
aggccttggctgtgaccctctggtt

SEQ ID NO: 635985 - DNA, 25 bp, Homo sapien
gaggcccctaagatcccttcctaga

SEQ ID NO: 635986 - DNA, 25 bp, Homo sapien
taggcagtaaccacaaaccacagtg

SEQ ID NO: 635987 - DNA, 25 bp, Homo sapien
tcactcactgataagctggcctggg

SEQ ID NO: 635988 - DNA, 25 bp, Homo sapien
gccgcagaagctaggacatgatatt

SEQ ID NO: 635989 - DNA, 25 bp, Homo sapien
gcatacactaataacactgaaagga

SEQ ID NO: 635990 - DNA, 25 bp, Homo sapien
tctccatgagttgaactgggaacat

SEQ ID NO: 635991 - DNA, 25 bp, Homo sapien
catacacatgccaattcctttcctt

SEQ ID NO: 635992 - DNA, 25 bp, Homo sapien
aaacgctgggcataacatgggagga

SEQ ID NO: 635993 - DNA, 25 bp, Homo sapien
ggagctaagggaggaggccattcct

SEQ ID NO: 635994 - DNA, 25 bp, Homo sapien
gaacagggagctaagggaggaggcc

SEQ ID NO: 635995 - DNA, 25 bp, Homo sapien
gagctaagggaggaggccattcctg

SEQ ID NO: 635996 - DNA, 25 bp, Homo sapien
ccaagaacagggagctaagggagga

SEQ ID NO: 635997 - DNA, 25 bp, Homo sapien
gaagctccacatcgaagacgagagt

SEQ ID NO: 635998 - DNA, 25 bp, Homo sapien
tggcaccataggcataatctggaga

SEQ ID NO: 635999 - DNA, 25 bp, Homo sapien
aatctggagatatagtcagtttggc

SEQ ID NO: 636000 - DNA, 25 bp, Homo sapien
gtttggctctctgacccacactcat

SEQ ID NO: 636001 - DNA, 25 bp, Homo sapien
tgagtgaccagtaaggagagatttc

SEQ ID NO: 636002 - DNA, 25 bp, Homo sapien
catgtgtatgttcccgactttccaa

SEQ ID NO: 636003 - DNA, 25 bp, Homo sapien
ttccaactccaccagacagaggatg

SEQ ID NO: 636004 - DNA, 25 bp, Homo sapien
tgtgaagcgtctagtccttgctccc

SEQ ID NO: 636005 - DNA, 25 bp, Homo sapien
tctcgatggcagatacagcactcag

SEQ ID NO: 636006 - DNA, 25 bp, Homo sapien
cacaccagggattagtcatgagaaa

SEQ ID NO: 636007 - DNA, 25 bp, Homo sapien
tttcataggcatatccacaccaggg

SEQ ID NO: 636008 - DNA, 25 bp, Homo sapien
ggactccacgcctgcaaacatgtaa

SEQ ID NO: 636009 - DNA, 25 bp, Homo sapien
gcttgtttctgtcccgggaggaatc

SEQ ID NO: 636010 - DNA, 25 bp, Homo sapien
gcagcagagcactcatcagagatgc

SEQ ID NO: 636011 - DNA, 25 bp, Homo sapien
cactggacatctaaggagttgcgac

SEQ ID NO: 636012 - DNA, 25 bp, Homo sapien
gtaccagagatgagcggcagtccac

SEQ ID NO: 636013 - DNA, 25 bp, Homo sapien
actgcagtatctagggagggtttcc

SEQ ID NO: 636014 - DNA, 25 bp, Homo sapien
ctcgaggtgcacactatgtctagaa

SEQ ID NO: 636015 - DNA, 25 bp, Homo sapien
tatattgctcctccattgttcagtg

SEQ ID NO: 636016 - DNA, 25 bp, Homo sapien
tcacacacagtgcaagaagcaatat

SEQ ID NO: 636017 - DNA, 25 bp, Homo sapien
aaataactgtggtccctcgaggtgc

SEQ ID NO: 636018 - DNA, 25 bp, Homo sapien
aactggtgagctggggtatgcattt

SEQ ID NO: 636019 - DNA, 25 bp, Homo sapien
tcgtttaccagaatgcagtcaccac

SEQ ID NO: 636020 - DNA, 25 bp, Homo sapien
gctcattcgtttaccagaatgcagt

SEQ ID NO: 636021 - DNA, 25 bp, Homo sapien
tgcatttagctcattcgtttaccag

SEQ ID NO: 636022 - DNA, 25 bp, Homo sapien
ccaaggtcagaaccacggagtggca

SEQ ID NO: 636023 - DNA, 25 bp, Homo sapien
cctatacgggtcagtttgggcacta

SEQ ID NO: 636024 - DNA, 25 bp, Homo sapien
taaggaaaccgactccaaggctcag

SEQ ID NO: 636025 - DNA, 25 bp, Homo sapien
taatggcaggacttgaacagttctc

SEQ ID NO: 636026 - DNA, 25 bp, Homo sapien
caaagactcgggaagaaagttcctg

SEQ ID NO: 636027 - DNA, 25 bp, Homo sapien
ctgctgtgaagtctactgggatctt

SEQ ID NO: 636028 - DNA, 25 bp, Homo sapien
gcaggcagcaagtcaagtctcagca

SEQ ID NO: 636029 - DNA, 25 bp, Homo sapien
gagctggagcccttgaacagtgaaa

SEQ ID NO: 636030 - DNA, 25 bp, Homo sapien
tttcctaaagaaagcgtgccctgct

SEQ ID NO: 636031 - DNA, 25 bp, Homo sapien
gaaaccacctgccaagttagtgcca

SEQ ID NO: 636032 - DNA, 25 bp, Homo sapien
ttggagactcataaaactcacagcc

SEQ ID NO: 636033 - DNA, 25 bp, Homo sapien
tcataaaactcacagccttcgtacc

SEQ ID NO: 636034 - DNA, 25 bp, Homo sapien
gactcataaaactcacagccttcgt

SEQ ID NO: 636035 - DNA, 25 bp, Homo sapien
ggagactcataaaactcacagcctt

SEQ ID NO: 636036 - DNA, 25 bp, Homo sapien
cggtgtagtgcaccacgcaggtctg

SEQ ID NO: 636037 - DNA, 25 bp, Homo sapien
ggtctggccgcgcttggggaaggtg

SEQ ID NO: 636038 - DNA, 25 bp, Homo sapien
gtgtagtgcaccacgcaggtctggc

SEQ ID NO: 636039 - DNA, 25 bp, Homo sapien
tctggccgcgcttggggaaggtgcg

SEQ ID NO: 636040 - DNA, 25 bp, Homo sapien
tgcgcgcggcggcagaggtactccg

SEQ ID NO: 636041 - DNA, 25 bp, Homo sapien
cgcggcggcagaggtactccgagcc

SEQ ID NO: 636042 - DNA, 25 bp, Homo sapien
gatgcgcgcggcggcagaggtactc

SEQ ID NO: 636043 - DNA, 25 bp, Homo sapien
ggcagaggtactccgagccgccgcg

SEQ ID NO: 636044 - DNA, 25 bp, Homo sapien
ggggagatggtttccacctgcactc

SEQ ID NO: 636045 - DNA, 25 bp, Homo sapien
agatggtttccacctgcactcccat

SEQ ID NO: 636046 - DNA, 25 bp, Homo sapien
gggagatggtttccacctgcactcc

SEQ ID NO: 636047 - DNA, 25 bp, Homo sapien
ctcctggggagatggtttccacctg

SEQ ID NO: 636048 - DNA, 25 bp, Homo sapien
ctctgcctagtacctcggcgcgtcg

SEQ ID NO: 636049 - DNA, 25 bp, Homo sapien
ctgcctagtacctcggcgcgtcgcc

SEQ ID NO: 636050 - DNA, 25 bp, Homo sapien
tctgcctagtacctcggcgcgtcgc

SEQ ID NO: 636051 - DNA, 25 bp, Homo sapien
gctctgcctagtacctcggcgcgtc

SEQ ID NO: 636052 - DNA, 25 bp, Homo sapien
gtgcgcgccccacacggcgcgcgac

SEQ ID NO: 636053 - DNA, 25 bp, Homo sapien
ctgcgtgcgcgccccacacggcgcg

SEQ ID NO: 636054 - DNA, 25 bp, Homo sapien
tgcgtgcgcgccccacacggcgcgc

SEQ ID NO: 636055 - DNA, 25 bp, Homo sapien
cgtgcgcgccccacacggcgcgcga

SEQ ID NO: 636056 - DNA, 25 bp, Homo sapien
tagaagagtctttaacagcacagcc

SEQ ID NO: 636057 - DNA, 25 bp, Homo sapien
tgagttcttggtacctgatggtgaa

SEQ ID NO: 636058 - DNA, 25 bp, Homo sapien
tgaagttgggtagggcacagacttt

SEQ ID NO: 636059 - DNA, 25 bp, Homo sapien
tctgaatcccacattccgaatgtcc

SEQ ID NO: 636060 - DNA, 25 bp, Homo sapien
ggatgttctgcctcaccgctgttat

SEQ ID NO: 636061 - DNA, 25 bp, Homo sapien
taatggcgctttcctcctaagacgg

SEQ ID NO: 636062 - DNA, 25 bp, Homo sapien
tcttatgatgctttcctaatggcgc

SEQ ID NO: 636063 - DNA, 25 bp, Homo sapien
tacacgatactggaaggtctagccc

SEQ ID NO: 636064 - DNA, 25 bp, Homo sapien
agggtggctacacattggtgccacc

SEQ ID NO: 636065 - DNA, 25 bp, Homo sapien
tgagccaggatttaccccagggtgt

SEQ ID NO: 636066 - DNA, 25 bp, Homo sapien
ggctacacattggtgccacctccca

SEQ ID NO: 636067 - DNA, 25 bp, Homo sapien
caccaagcaggagatgcagtacagt

SEQ ID NO: 636068 - DNA, 25 bp, Homo sapien
caggagatgcagtacagtgtgccca

SEQ ID NO: 636069 - DNA, 25 bp, Homo sapien
gccagcaccaagcaggagatgcagt

SEQ ID NO: 636070 - DNA, 25 bp, Homo sapien
ctaactgttccttcacccccagagc

SEQ ID NO: 636071 - DNA, 25 bp, Homo sapien
taccacactggtttgattatagaag

SEQ ID NO: 636072 - DNA, 25 bp, Homo sapien
gaaatctggaagcatgagccctgaa

SEQ ID NO: 636073 - DNA, 25 bp, Homo sapien
gattatgcagttgccccggcactgt

SEQ ID NO: 636074 - DNA, 25 bp, Homo sapien
cctcttgtatttgggtcattgatcc

SEQ ID NO: 636075 - DNA, 25 bp, Homo sapien
catgacaagagataactacacacct

SEQ ID NO: 636076 - DNA, 25 bp, Homo sapien
gcctggccggcaaggactcttaaaa

SEQ ID NO: 636077 - DNA, 25 bp, Homo sapien
gaagctaagtagcacccaaaaatct

SEQ ID NO: 636078 - DNA, 25 bp, Homo sapien
tgtgcagtgcaacagccactctggg

SEQ ID NO: 636079 - DNA, 25 bp, Homo sapien
gtttttaatggtcaaggtgacaaca

SEQ ID NO: 636080 - DNA, 25 bp, Homo sapien
caagacctggcaagattagataccc

SEQ ID NO: 636081 - DNA, 25 bp, Homo sapien
gagtttccgtacaacatgctggtga

SEQ ID NO: 636082 - DNA, 25 bp, Homo sapien
acctgctggagaaaacaccgtgaca

SEQ ID NO: 636083 - DNA, 25 bp, Homo sapien
tattctcgtgggaacaagtggtggc

SEQ ID NO: 636084 - DNA, 25 bp, Homo sapien
gatctaagaacccagagctatggag

SEQ ID NO: 636085 - DNA, 25 bp, Homo sapien
tgcaactaaggagaaaacaaacgtc

SEQ ID NO: 636086 - DNA, 25 bp, Homo sapien
caaacgtccaaccaagatctaagaa

SEQ ID NO: 636087 - DNA, 25 bp, Homo sapien
tatggaggagacgttgcactggact

SEQ ID NO: 636088 - DNA, 25 bp, Homo sapien
catccacgatgaagagtcggatgtc

SEQ ID NO: 636089 - DNA, 25 bp, Homo sapien
gctgcacgatgacagcattgagcag

SEQ ID NO: 636090 - DNA, 25 bp, Homo sapien
gatgaagagtcggatgtcgctgatc

SEQ ID NO: 636091 - DNA, 25 bp, Homo sapien
tatgttaaccgctgcacgatgacag

SEQ ID NO: 636092 - DNA, 25 bp, Homo sapien
gaaagctacgctcaggcatgtggga

SEQ ID NO: 636093 - DNA, 25 bp, Homo sapien
cctgtggaaagctaaacacctcgca

SEQ ID NO: 636094 - DNA, 25 bp, Homo sapien
tcagggccaggaatcgtttctccag

SEQ ID NO: 636095 - DNA, 25 bp, Homo sapien
cacatctaagggcatggacctgcag

SEQ ID NO: 636096 - DNA, 25 bp, Homo sapien
ccgtctgcaagccgaatttggatgt

SEQ ID NO: 636097 - DNA, 25 bp, Homo sapien
caagccgaatttggatgtttgtggt

SEQ ID NO: 636098 - DNA, 25 bp, Homo sapien
agccgaatttggatgtttgtggtag

SEQ ID NO: 636099 - DNA, 25 bp, Homo sapien
tctgcaagccgaatttggatgtttg

SEQ ID NO: 636100 - DNA, 25 bp, Homo sapien
aggagagaggatggcatcagaacac

SEQ ID NO: 636101 - DNA, 25 bp, Homo sapien
tcagaacacaagcagaaacaaggcc

SEQ ID NO: 636102 - DNA, 25 bp, Homo sapien
catcagaacacaagcagaaacaagg

SEQ ID NO: 636103 - DNA, 25 bp, Homo sapien
gagaggatggcatcagaacacaagc

SEQ ID NO: 636104 - DNA, 25 bp, Homo sapien
ggtgctgctgatctattgacccaga

SEQ ID NO: 636105 - DNA, 25 bp, Homo sapien
ccctcgctcctgagtaatgtgggca

SEQ ID NO: 636106 - DNA, 25 bp, Homo sapien
ttgacccagacagggaaaatcgtgc

SEQ ID NO: 636107 - DNA, 25 bp, Homo sapien
tactgagcatttgcaatgcgcctgg

SEQ ID NO: 636108 - DNA, 25 bp, Homo sapien
caactgaacaagggcttgaagggag

SEQ ID NO: 636109 - DNA, 25 bp, Homo sapien
tcaactgaacaagggcttgaaggga

SEQ ID NO: 636110 - DNA, 25 bp, Homo sapien
aactgaacaagggcttgaagggagg

SEQ ID NO: 636111 - DNA, 25 bp, Homo sapien
catacaatgaacaggacacggtgtc

SEQ ID NO: 636112 - DNA, 25 bp, Homo sapien
gaactataacgttttcaggcaggcc

SEQ ID NO: 636113 - DNA, 25 bp, Homo sapien
caattagactttaggcagcctgtcc

SEQ ID NO: 636114 - DNA, 25 bp, Homo sapien
catacatccactattgagggcaggg

SEQ ID NO: 636115 - DNA, 25 bp, Homo sapien
caaggcctggtatttaggaaatcct

SEQ ID NO: 636116 - DNA, 25 bp, Homo sapien
tggacttggctgtgtagcttctgac

SEQ ID NO: 636117 - DNA, 25 bp, Homo sapien
gagataatgtgcacgcaaggcctgg

SEQ ID NO: 636118 - DNA, 25 bp, Homo sapien
gggtttgcttcccagcacgtcccat

SEQ ID NO: 636119 - DNA, 25 bp, Homo sapien
tcctttgggcttcacaaagtcctcg

SEQ ID NO: 636120 - DNA, 25 bp, Homo sapien
caaagtcctcgtcccgatggtcctc

SEQ ID NO: 636121 - DNA, 25 bp, Homo sapien
ctttgggcttcacaaagtcctcgtc

SEQ ID NO: 636122 - DNA, 25 bp, Homo sapien
cctttgggcttcacaaagtcctcgt

SEQ ID NO: 636123 - DNA, 25 bp, Homo sapien
gtccaccgtgagctagcctccgaag

SEQ ID NO: 636124 - DNA, 25 bp, Homo sapien
tgtccaccgtgagctagcctccgaa

SEQ ID NO: 636125 - DNA, 25 bp, Homo sapien
ccgtgagctagcctccgaagctctg

SEQ ID NO: 636126 - DNA, 25 bp, Homo sapien
ccaccgtgagctagcctccgaagct

SEQ ID NO: 636127 - DNA, 25 bp, Homo sapien
ttggatgggtcttggtagcttctga

SEQ ID NO: 636128 - DNA, 25 bp, Homo sapien
tgggcattggatgggtcttggtagc

SEQ ID NO: 636129 - DNA, 25 bp, Homo sapien
cattggatgggtcttggtagcttct

SEQ ID NO: 636130 - DNA, 25 bp, Homo sapien
ggcattggatgggtcttggtagctt

SEQ ID NO: 636131 - DNA, 25 bp, Homo sapien
tgccccaaggcggtagccacctcct

SEQ ID NO: 636132 - DNA, 25 bp, Homo sapien
atcttggctggaatgctgcctcttt

SEQ ID NO: 636133 - DNA, 25 bp, Homo sapien
ggcggtagccacctcctgcaaatgg

SEQ ID NO: 636134 - DNA, 25 bp, Homo sapien
ttttctcctgccacataggcagact

SEQ ID NO: 636135 - DNA, 25 bp, Homo sapien
gctccacagctacagctccatgctc

SEQ ID NO: 636136 - DNA, 25 bp, Homo sapien
ttggtcactcgctccacagctacag

SEQ ID NO: 636137 - DNA, 25 bp, Homo sapien
ctcgctccacagctacagctccatg

SEQ ID NO: 636138 - DNA, 25 bp, Homo sapien
tccacagctacagctccatgctctt

SEQ ID NO: 636139 - DNA, 25 bp, Homo sapien
cagctcgttgggacttttcttcctg

SEQ ID NO: 636140 - DNA, 25 bp, Homo sapien
ccagctcgttgggacttttcttcct

SEQ ID NO: 636141 - DNA, 25 bp, Homo sapien
acctcaccttgccattcatgtgaca

SEQ ID NO: 636142 - DNA, 25 bp, Homo sapien
tcaccttgccattcatgtgacacac

SEQ ID NO: 636143 - DNA, 25 bp, Homo sapien
taagtcagagccgtgaggttcaaat

SEQ ID NO: 636144 - DNA, 25 bp, Homo sapien
taatgcacacaggtaaggtggtgtg

SEQ ID NO: 636145 - DNA, 25 bp, Homo sapien
ttccccaaagactgaccatgatgag

SEQ ID NO: 636146 - DNA, 25 bp, Homo sapien
tgaaaaccagttgtcatgcagcctg

SEQ ID NO: 636147 - DNA, 25 bp, Homo sapien
aaaaatatgcatgcccttgacctgg

SEQ ID NO: 636148 - DNA, 25 bp, Homo sapien
ccgaggcagatcctgtggagaacca

SEQ ID NO: 636149 - DNA, 25 bp, Homo sapien
gattccacacgagagcatgctttat

SEQ ID NO: 636150 - DNA, 25 bp, Homo sapien
tgctgtgcaagagatctaaaaaaga

SEQ ID NO: 636151 - DNA, 25 bp, Homo sapien
ctagattggaattgttctagattcc

SEQ ID NO: 636152 - DNA, 25 bp, Homo sapien
tctgtaaccacactctgtcgattgt

SEQ ID NO: 636153 - DNA, 25 bp, Homo sapien
gacttcctaagatataacccacaca

SEQ ID NO: 636154 - DNA, 25 bp, Homo sapien
ggtgatttacacattaccctggact

SEQ ID NO: 636155 - DNA, 25 bp, Homo sapien
tttaccaggtcctgttctaggtgat

SEQ ID NO: 636156 - DNA, 25 bp, Homo sapien
cagaccagcccacagtagtaatggc

SEQ ID NO: 636157 - DNA, 25 bp, Homo sapien
tcctcctcatcttcatcttggtcat

SEQ ID NO: 636158 - DNA, 25 bp, Homo sapien
ttcctcctcatcttcatcttggtca

SEQ ID NO: 636159 - DNA, 25 bp, Homo sapien
gaatgaggtctctgaaggatgtcac

SEQ ID NO: 636160 - DNA, 25 bp, Homo sapien
gtctctgaaggatgtcactctatta

SEQ ID NO: 636161 - DNA, 25 bp, Homo sapien
tctgaaggatgtcactctattatca

SEQ ID NO: 636162 - DNA, 25 bp, Homo sapien
ggtctctgaaggatgtcactctatt

SEQ ID NO: 636163 - DNA, 25 bp, Homo sapien
taggcactatcattaccatttgaca

SEQ ID NO: 636164 - DNA, 25 bp, Homo sapien
caaagcttttacttaagtggcagag

SEQ ID NO: 636165 - DNA, 25 bp, Homo sapien
gggatttgaaccaacgcagtcaggc

SEQ ID NO: 636166 - DNA, 25 bp, Homo sapien
ttgacaggcgaggaaaatgaggaac

SEQ ID NO: 636167 - DNA, 25 bp, Homo sapien
cagttacaagatcactttcctccta

SEQ ID NO: 636168 - DNA, 25 bp, Homo sapien
caacatgtcccaagcagtaataccc

SEQ ID NO: 636169 - DNA, 25 bp, Homo sapien
tgtgccatcaccaacatctcatagg

SEQ ID NO: 636170 - DNA, 25 bp, Homo sapien
gttagcacgtgcaaacagttacaag

SEQ ID NO: 636171 - DNA, 25 bp, Homo sapien
caggcctgaacgctctggtcagaaa

SEQ ID NO: 636172 - DNA, 25 bp, Homo sapien
ggattgaaccataaaccacacccag

SEQ ID NO: 636173 - DNA, 25 bp, Homo sapien
tataggaaatgactgaggcctgctg

SEQ ID NO: 636174 - DNA, 25 bp, Homo sapien
tgtagcgataattgaagctggccct

SEQ ID NO: 636175 - DNA, 25 bp, Homo sapien
cctgcgaaatggtcacaatgtcttc

SEQ ID NO: 636176 - DNA, 25 bp, Homo sapien
tgcctgcgaaatggtcacaatgtct

SEQ ID NO: 636177 - DNA, 25 bp, Homo sapien
gcctgcgaaatggtcacaatgtctt

SEQ ID NO: 636178 - DNA, 25 bp, Homo sapien
tcccagccggccgactcgagaaaga

SEQ ID NO: 636179 - DNA, 25 bp, Homo sapien
ccagccggccgactcgagaaagaag

SEQ ID NO: 636180 - DNA, 25 bp, Homo sapien
gtcaccgccacgaactccctcagcg

SEQ ID NO: 636181 - DNA, 25 bp, Homo sapien
agccggccgactcgagaaagaagcg

SEQ ID NO: 636182 - DNA, 25 bp, Homo sapien
ttcgccccgtgcgccttccaaagcg

SEQ ID NO: 636183 - DNA, 25 bp, Homo sapien
cttcgccccgtgcgccttccaaagc

SEQ ID NO: 636184 - DNA, 25 bp, Homo sapien
ttatcttgcatttgcctcagggccg

SEQ ID NO: 636185 - DNA, 25 bp, Homo sapien
tcagaccttgaacaggctaggcctc

SEQ ID NO: 636186 - DNA, 25 bp, Homo sapien
tactgagagctatcaatggcccgac

SEQ ID NO: 636187 - DNA, 25 bp, Homo sapien
gattcccagttattcattgacgcag

SEQ ID NO: 636188 - DNA, 25 bp, Homo sapien
catgattgtaagtgacgctccctca

SEQ ID NO: 636189 - DNA, 25 bp, Homo sapien
gacaagaactgaagattcccgcact

SEQ ID NO: 636190 - DNA, 25 bp, Homo sapien
aggtcagcccactcctttctaggaa

SEQ ID NO: 636191 - DNA, 25 bp, Homo sapien
caggcaatgtgtttactagcgcgta

SEQ ID NO: 636192 - DNA, 25 bp, Homo sapien
ggaagcccctgtcaaatggtgtttg

SEQ ID NO: 636193 - DNA, 25 bp, Homo sapien
tgttattaccagtttatagacaagg

SEQ ID NO: 636194 - DNA, 25 bp, Homo sapien
agacaaggaaactgagagaaacaaa

SEQ ID NO: 636195 - DNA, 25 bp, Homo sapien
aggaaactgagagaaacaaactcac

SEQ ID NO: 636196 - DNA, 25 bp, Homo sapien
ttattaccagtttatagacaaggaa

SEQ ID NO: 636197 - DNA, 25 bp, Homo sapien
ccatgtatgtagttcaggcgtttac

SEQ ID NO: 636198 - DNA, 25 bp, Homo sapien
cagatttccgagactgtgtgcttca

SEQ ID NO: 636199 - DNA, 25 bp, Homo sapien
caaatgtcactttatcaggaggcct

SEQ ID NO: 636200 - DNA, 25 bp, Homo sapien
tcttgtgcaagtcaagcacgctcct

SEQ ID NO: 636201 - DNA, 25 bp, Homo sapien
ggaggaggtaagctctgagagagca

SEQ ID NO: 636202 - DNA, 25 bp, Homo sapien
cgggaggaggtaagctctgagagag

SEQ ID NO: 636203 - DNA, 25 bp, Homo sapien
tctcgggaggaggtaagctctgaga

SEQ ID NO: 636204 - DNA, 25 bp, Homo sapien
tcgggaggaggtaagctctgagaga

SEQ ID NO: 636205 - DNA, 25 bp, Homo sapien
agagtcagctttcaaccacgtttca

SEQ ID NO: 636206 - DNA, 25 bp, Homo sapien
cacgtttcaggattcaatgagggtg

SEQ ID NO: 636207 - DNA, 25 bp, Homo sapien
gctttcaaccacgtttcaggattca

SEQ ID NO: 636208 - DNA, 25 bp, Homo sapien
caaccacgtttcaggattcaatgag

SEQ ID NO: 636209 - DNA, 25 bp, Homo sapien
ctggagaagagtcagcttacaggat

SEQ ID NO: 636210 - DNA, 25 bp, Homo sapien
tccagttagtggagaaccacctcca

SEQ ID NO: 636211 - DNA, 25 bp, Homo sapien
ggagaaccacctccatgctttcctg

SEQ ID NO: 636212 - DNA, 25 bp, Homo sapien
tagtggagaaccacctccatgcttt

SEQ ID NO: 636213 - DNA, 25 bp, Homo sapien
gttagtggagaaccacctccatgct

SEQ ID NO: 636214 - DNA, 25 bp, Homo sapien
caaggaggtcttgaacaggccaaaa

SEQ ID NO: 636215 - DNA, 25 bp, Homo sapien
tagctagctgggcattgaactcagg

SEQ ID NO: 636216 - DNA, 25 bp, Homo sapien
cattttagagggaagcccggtgcaa

SEQ ID NO: 636217 - DNA, 25 bp, Homo sapien
catgtcagggcttctcagtccacta

SEQ ID NO: 636218 - DNA, 25 bp, Homo sapien
ccagggccagtaggagtgcagccaa

SEQ ID NO: 636219 - DNA, 25 bp, Homo sapien
tgctaaggtgttcatggctcctgct

SEQ ID NO: 636220 - DNA, 25 bp, Homo sapien
acaggtgcgaacacaaccaggaggc

SEQ ID NO: 636221 - DNA, 25 bp, Homo sapien
aaggtaattgccttcagccccagga

SEQ ID NO: 636222 - DNA, 25 bp, Homo sapien
tccagtgtcgctgtgcatagcctca

SEQ ID NO: 636223 - DNA, 25 bp, Homo sapien
cattcttggtggcaggttagcccca

SEQ ID NO: 636224 - DNA, 25 bp, Homo sapien
gaacctgcccattacactaggaagg

SEQ ID NO: 636225 - DNA, 25 bp, Homo sapien
tggccctggctatgagaaagttcgt

SEQ ID NO: 636226 - DNA, 25 bp, Homo sapien
cattgactccactgaggtgggtacg

SEQ ID NO: 636227 - DNA, 25 bp, Homo sapien
tgcctgtgggggactcattgactcc

SEQ ID NO: 636228 - DNA, 25 bp, Homo sapien
ttgactccactgaggtgggtacgct

SEQ ID NO: 636229 - DNA, 25 bp, Homo sapien
actccactgaggtgggtacgctcac

SEQ ID NO: 636230 - DNA, 25 bp, Homo sapien
gacatctcagttgcaggttcactgg

SEQ ID NO: 636231 - DNA, 25 bp, Homo sapien
cactggtgaattctgcctctttgga

SEQ ID NO: 636232 - DNA, 25 bp, Homo sapien
tctcagttgcaggttcactggtgaa

SEQ ID NO: 636233 - DNA, 25 bp, Homo sapien
gttggagacatctcagttgcaggtt

SEQ ID NO: 636234 - DNA, 25 bp, Homo sapien
gatgatccacaggtctggttcaggg

SEQ ID NO: 636235 - DNA, 25 bp, Homo sapien
tacacagtaataggtgcctgcatcc

SEQ ID NO: 636236 - DNA, 25 bp, Homo sapien
catcctcactggagacgttttgcag

SEQ ID NO: 636237 - DNA, 25 bp, Homo sapien
caaagttgtaaatggcctcccggct

SEQ ID NO: 636238 - DNA, 25 bp, Homo sapien
caagcactgaggtgccttcatccga

SEQ ID NO: 636239 - DNA, 25 bp, Homo sapien
tatcataccatcagtgcaggagccg

SEQ ID NO: 636240 - DNA, 25 bp, Homo sapien
gatcatgggcattaccccagggaag

SEQ ID NO: 636241 - DNA, 25 bp, Homo sapien
ccatcaaacctcacacagtggtagg

SEQ ID NO: 636242 - DNA, 25 bp, Homo sapien
tcgggctgtagcacctgccagtcat

SEQ ID NO: 636243 - DNA, 25 bp, Homo sapien
cgggctgtagcacctgccagtcatt

SEQ ID NO: 636244 - DNA, 25 bp, Homo sapien
aagcagggaggcaagtgggccaggc

SEQ ID NO: 636245 - DNA, 25 bp, Homo sapien
gggacaaggaccagtgccagcagca

SEQ ID NO: 636246 - DNA, 25 bp, Homo sapien
ctgaggggacaaggaccagtgccag

SEQ ID NO: 636247 - DNA, 25 bp, Homo sapien
gaagcagggaggcaagtgggccagg

SEQ ID NO: 636248 - DNA, 25 bp, Homo sapien
tctgctctcttgtgagtgttggagt

SEQ ID NO: 636249 - DNA, 25 bp, Homo sapien
tgtggtccccaagacttggggctcc

SEQ ID NO: 636250 - DNA, 25 bp, Homo sapien
ctctgctctcttgtgagtgttggag

SEQ ID NO: 636251 - DNA, 25 bp, Homo sapien
ttctgtggtccccaagacttggggc

SEQ ID NO: 636252 - DNA, 25 bp, Homo sapien
gcagtttctgcgtctcttggccaca

SEQ ID NO: 636253 - DNA, 25 bp, Homo sapien
tgcaataggaaggagcccggtcaaa

SEQ ID NO: 636254 - DNA, 25 bp, Homo sapien
aagggtttcctgcttttgtgtctgg

SEQ ID NO: 636255 - DNA, 25 bp, Homo sapien
tcattgcagcaacacaaggctgttg

SEQ ID NO: 636256 - DNA, 25 bp, Homo sapien
aaaggataggcaatctttatgttca

SEQ ID NO: 636257 - DNA, 25 bp, Homo sapien
aaggataggcaatctttatgttcaa

SEQ ID NO: 636258 - DNA, 25 bp, Homo sapien
aaaaggataggcaatctttatgttc

SEQ ID NO: 636259 - DNA, 25 bp, Homo sapien
taaaaggataggcaatctttatgtt

SEQ ID NO: 636260 - DNA, 25 bp, Homo sapien
ctgggatatcctctatgtccttctt

SEQ ID NO: 636261 - DNA, 25 bp, Homo sapien
tgtccttcttgatgtatgatttggg

SEQ ID NO: 636262 - DNA, 25 bp, Homo sapien
atgtcctttttgaagtatgattggg

SEQ ID NO: 636263 - DNA, 25 bp, Homo sapien
tgatttggggacatcctctatgtcc

SEQ ID NO: 636264 - DNA, 25 bp, Homo sapien
taggcatcaggttggctttactgta

SEQ ID NO: 636265 - DNA, 25 bp, Homo sapien
ttggctttactgtagaaccgttggc

SEQ ID NO: 636266 - DNA, 25 bp, Homo sapien
catcaggttggctttactgtagaac

SEQ ID NO: 636267 - DNA, 25 bp, Homo sapien
cacccataggcatcaggttggcttt

SEQ ID NO: 636268 - DNA, 25 bp, Homo sapien
ggcaggtcctcctctaagtccagtc

SEQ ID NO: 636269 - DNA, 25 bp, Homo sapien
aggtcctcctctaagtccagtcctc

SEQ ID NO: 636270 - DNA, 25 bp, Homo sapien
catggcaggtcctcctctaagtcca

SEQ ID NO: 636271 - DNA, 25 bp, Homo sapien
tcatggcaggtcctcctctaagtcc

SEQ ID NO: 636272 - DNA, 25 bp, Homo sapien
tggaggactgcctttgcggggtcta

SEQ ID NO: 636273 - DNA, 25 bp, Homo sapien
tcactgtggaggactgcctttgcgg

SEQ ID NO: 636274 - DNA, 25 bp, Homo sapien
ggactgcctttgcggggtctatgac

SEQ ID NO: 636275 - DNA, 25 bp, Homo sapien
gaggactgcctttgcggggtctatg

SEQ ID NO: 636276 - DNA, 25 bp, Homo sapien
acacagatggcagaaagttccagca

SEQ ID NO: 636277 - DNA, 25 bp, Homo sapien
ggacacagatggcagaaagttccag

SEQ ID NO: 636278 - DNA, 25 bp, Homo sapien
aagaaaggctcctcctaaggacaca

SEQ ID NO: 636279 - DNA, 25 bp, Homo sapien
aggaaggagttgcacacaggggtac

SEQ ID NO: 636280 - DNA, 25 bp, Homo sapien
cactctgaagtgttgaccaggatat

SEQ ID NO: 636281 - DNA, 25 bp, Homo sapien
tatgattgtcttgggtgaatgtgcc

SEQ ID NO: 636282 - DNA, 25 bp, Homo sapien
caagtgcctcacaggtcttgaagta

SEQ ID NO: 636283 - DNA, 25 bp, Homo sapien
gccacacttggcaggtgaactgttt

SEQ ID NO: 636284 - DNA, 25 bp, Homo sapien
gggagatgttcacgtgccctctgag

SEQ ID NO: 636285 - DNA, 25 bp, Homo sapien
gaagcatctgcatgcgggaagacct

SEQ ID NO: 636286 - DNA, 25 bp, Homo sapien
tgagattcactagttggcctgggct

SEQ ID NO: 636287 - DNA, 25 bp, Homo sapien
ccagttgaggtgcaggtgagattca

SEQ ID NO: 636288 - DNA, 25 bp, Homo sapien
tattcagctgcagtcgcgcgcagtg

SEQ ID NO: 636289 - DNA, 25 bp, Homo sapien
tcaccaccttgtaaatgtatctgca

SEQ ID NO: 636290 - DNA, 25 bp, Homo sapien
taatctaaaggagttccacttcctc

SEQ ID NO: 636291 - DNA, 25 bp, Homo sapien
gataaattgcccacatccggtacta

SEQ ID NO: 636292 - DNA, 25 bp, Homo sapien
ccatccgtgtacacaggccatacta

SEQ ID NO: 636293 - DNA, 25 bp, Homo sapien
tttgcattccatccgtgtacacagg

SEQ ID NO: 636294 - DNA, 25 bp, Homo sapien
gcattccatccgtgtacacaggcca

SEQ ID NO: 636295 - DNA, 25 bp, Homo sapien
acaaatttgcattccatccgtgtac

SEQ ID NO: 636296 - DNA, 25 bp, Homo sapien
atcttcatgtaggcttcctttctgg

SEQ ID NO: 636297 - DNA, 25 bp, Homo sapien
tcttcatgtaggcttcctttctgga

SEQ ID NO: 636298 - DNA, 25 bp, Homo sapien
cttcatgtaggcttcctttctggaa

SEQ ID NO: 636299 - DNA, 25 bp, Homo sapien
tcatgtaggcttcctttctggaatt

SEQ ID NO: 636300 - DNA, 25 bp, Homo sapien
gatgtctgaaacagttcttatccag

SEQ ID NO: 636301 - DNA, 25 bp, Homo sapien
tacagatggaatagtttgtgctctt

SEQ ID NO: 636302 - DNA, 25 bp, Homo sapien
tgtgatgtctgaaacagttcttatc

SEQ ID NO: 636303 - DNA, 25 bp, Homo sapien
tgtctgaaacagttcttatccaggg

SEQ ID NO: 636304 - DNA, 25 bp, Homo sapien
aattcccggcctggtccagctcctc

SEQ ID NO: 636305 - DNA, 25 bp, Homo sapien
cccggcctggtccagctcctctgaa

SEQ ID NO: 636306 - DNA, 25 bp, Homo sapien
ttaattcccggcctggtccagctcc

SEQ ID NO: 636307 - DNA, 25 bp, Homo sapien
ttcccggcctggtccagctcctctg

SEQ ID NO: 636308 - DNA, 25 bp, Homo sapien
gcagtgtagagtggccgcttctcca

SEQ ID NO: 636309 - DNA, 25 bp, Homo sapien
gcttctccagctgcgactgacacgg

SEQ ID NO: 636310 - DNA, 25 bp, Homo sapien
ccgcttctccagctgcgactgacac

SEQ ID NO: 636311 - DNA, 25 bp, Homo sapien
ttctccagctgcgactgacacggac

SEQ ID NO: 636312 - DNA, 25 bp, Homo sapien
ggaagaacacacgtcagctccaagc

SEQ ID NO: 636313 - DNA, 25 bp, Homo sapien
ctggaagaacacacgtcagctccaa

SEQ ID NO: 636314 - DNA, 25 bp, Homo sapien
agaacacacgtcagctccaagctcc

SEQ ID NO: 636315 - DNA, 25 bp, Homo sapien
gaacacacgtcagctccaagctcca

SEQ ID NO: 636316 - DNA, 25 bp, Homo sapien
ctggcattttatgtcagtggaagaa

SEQ ID NO: 636317 - DNA, 25 bp, Homo sapien
tattgtacgatcaagctggcatttt

SEQ ID NO: 636318 - DNA, 25 bp, Homo sapien
tagacagatttattgtacgatcaag

SEQ ID NO: 636319 - DNA, 25 bp, Homo sapien
aagctggcattttatgtcagtggaa

SEQ ID NO: 636320 - DNA, 25 bp, Homo sapien
ggcagggccgagaggcaggtatggg

SEQ ID NO: 636321 - DNA, 25 bp, Homo sapien
cagcagcagggttggacgaaatagt

SEQ ID NO: 636322 - DNA, 25 bp, Homo sapien
ggttggacgaaatagtttgtgctgt

SEQ ID NO: 636323 - DNA, 25 bp, Homo sapien
gccgagaggcaggtatgggcatcat

SEQ ID NO: 636324 - DNA, 25 bp, Homo sapien
ggtctgttcttgggaggtcttggat

SEQ ID NO: 636325 - DNA, 25 bp, Homo sapien
aggtctgttcttgggaggtcttgga

SEQ ID NO: 636326 - DNA, 25 bp, Homo sapien
gtctgttcttgggaggtcttggatt

SEQ ID NO: 636327 - DNA, 25 bp, Homo sapien
tctgttcttgggaggtcttggattc

SEQ ID NO: 636328 - DNA, 25 bp, Homo sapien
gctgactgcaacaaggtccctcttc

SEQ ID NO: 636329 - DNA, 25 bp, Homo sapien
ccaaactagcatgcatgaagagatc

SEQ ID NO: 636330 - DNA, 25 bp, Homo sapien
tgagaccccaggcaacatatagcag

SEQ ID NO: 636331 - DNA, 25 bp, Homo sapien
catggagatgtaggcatatgttccc

SEQ ID NO: 636332 - DNA, 25 bp, Homo sapien
ttattctatgctgctgacaggccag

SEQ ID NO: 636333 - DNA, 25 bp, Homo sapien
tttattctatgctgctgacaggcca

SEQ ID NO: 636334 - DNA, 25 bp, Homo sapien
atttattctatgctgctgacaggcc

SEQ ID NO: 636335 - DNA, 25 bp, Homo sapien
gagatgtacttcatacaccatacaa

SEQ ID NO: 636336 - DNA, 25 bp, Homo sapien
gactccatgcctttcatgtaataac

SEQ ID NO: 636337 - DNA, 25 bp, Homo sapien
tgatactggctgtgtcataaatagc

SEQ ID NO: 636338 - DNA, 25 bp, Homo sapien
tatttgtctgtagatatgtgcaatc

SEQ ID NO: 636339 - DNA, 25 bp, Homo sapien
gaatactgtgaggaacccagaatcc

SEQ ID NO: 636340 - DNA, 25 bp, Homo sapien
tccaatcctttagtccctggttcca

SEQ ID NO: 636341 - DNA, 25 bp, Homo sapien
tagtccctggttccaaaagttctgc

SEQ ID NO: 636342 - DNA, 25 bp, Homo sapien
aaaagttctgccttgaatactgtga

SEQ ID NO: 636343 - DNA, 25 bp, Homo sapien
tgagtgccccgacctgattggtact

SEQ ID NO: 636344 - DNA, 25 bp, Homo sapien
aggcttggtggtgtctccaatctct

SEQ ID NO: 636345 - DNA, 25 bp, Homo sapien
caagagagatttcacggatgcgggt

SEQ ID NO: 636346 - DNA, 25 bp, Homo sapien
cagtaacaaacacctgagtgccccg

SEQ ID NO: 636347 - DNA, 25 bp, Homo sapien
cttgtttgaaattgtagattaattt

SEQ ID NO: 636348 - DNA, 25 bp, Homo sapien
tgatacagtctgtgacatctccgtt

SEQ ID NO: 636349 - DNA, 25 bp, Homo sapien
cagtctgtgacatctccgtttgttg

SEQ ID NO: 636350 - DNA, 25 bp, Homo sapien
ctcaagatgattgactccccagttg

SEQ ID NO: 636351 - DNA, 25 bp, Homo sapien
tggtaaggtattgggtacgctgcaa

SEQ ID NO: 636352 - DNA, 25 bp, Homo sapien
aaaactccatgtcagggtgtcctac

SEQ ID NO: 636353 - DNA, 25 bp, Homo sapien
agaaaaactccatgtcagggtgtcc

SEQ ID NO: 636354 - DNA, 25 bp, Homo sapien
gaaaaactccatgtcagggtgtcct

SEQ ID NO: 636355 - DNA, 25 bp, Homo sapien
cattcacatacacggtggtgcctgg

SEQ ID NO: 636356 - DNA, 25 bp, Homo sapien
agcatcctctggcaacacgtcactg

SEQ ID NO: 636357 - DNA, 25 bp, Homo sapien
tccactggagttactctggggaagt

SEQ ID NO: 636358 - DNA, 25 bp, Homo sapien
cacgtcactgatgcgaatggaatag

SEQ ID NO: 636359 - DNA, 25 bp, Homo sapien
aatggaatagtcagtttgatcaacc

SEQ ID NO: 636360 - DNA, 25 bp, Homo sapien
ggttaggacatctccgggattgact

SEQ ID NO: 636361 - DNA, 25 bp, Homo sapien
gggacagagcagacatattgcaggc

SEQ ID NO: 636362 - DNA, 25 bp, Homo sapien
tgcaggccagggttaggacatctcc

SEQ ID NO: 636363 - DNA, 25 bp, Homo sapien
tctccgggattgactgacactaaag

SEQ ID NO: 636364 - DNA, 25 bp, Homo sapien
ctgccagttcaagcagcagatacag

SEQ ID NO: 636365 - DNA, 25 bp, Homo sapien
atacagcagtaaggaaggcagaggt

SEQ ID NO: 636366 - DNA, 25 bp, Homo sapien
agcagatacagcagtaaggaaggca

SEQ ID NO: 636367 - DNA, 25 bp, Homo sapien
cagatacagcagtaaggaaggcaga

SEQ ID NO: 636368 - DNA, 25 bp, Homo sapien
ctgtcctggagatgccctcgactca

SEQ ID NO: 636369 - DNA, 25 bp, Homo sapien
tgtggtgaaacctggagcttgctct

SEQ ID NO: 636370 - DNA, 25 bp, Homo sapien
actcagtgctccgagcagagaagac

SEQ ID NO: 636371 - DNA, 25 bp, Homo sapien
gaaacctggagcttgctctgcctga

SEQ ID NO: 636372 - DNA, 25 bp, Homo sapien
cacatgatgcgcaggtatgggtcta

SEQ ID NO: 636373 - DNA, 25 bp, Homo sapien
gagtaacatgcctacaaacacctgg

SEQ ID NO: 636374 - DNA, 25 bp, Homo sapien
taatgtccaagcatccacaggcagg

SEQ ID NO: 636375 - DNA, 25 bp, Homo sapien
gatgtctatagcctcacccacttgg

SEQ ID NO: 636376 - DNA, 25 bp, Homo sapien
ggtacatattagtgacatgatttat

SEQ ID NO: 636377 - DNA, 25 bp, Homo sapien
ccaggatacctgttacatttacttg

SEQ ID NO: 636378 - DNA, 25 bp, Homo sapien
gttgcagaatgcctccttattgaaa

SEQ ID NO: 636379 - DNA, 25 bp, Homo sapien
gattcttgatgttgatttataactg

SEQ ID NO: 636380 - DNA, 25 bp, Homo sapien
gactgtggcaatgtagaccctgatg

SEQ ID NO: 636381 - DNA, 25 bp, Homo sapien
caggaacttcagataggcagccaga

SEQ ID NO: 636382 - DNA, 25 bp, Homo sapien
ggaggtagtaaacgcaaactgccac

SEQ ID NO: 636383 - DNA, 25 bp, Homo sapien
ggctgaagatgtcccaaaggttgaa

SEQ ID NO: 636384 - DNA, 25 bp, Homo sapien
tgactatggagactgctttcctggg

SEQ ID NO: 636385 - DNA, 25 bp, Homo sapien
gagaaattagaatgccgggatagag

SEQ ID NO: 636386 - DNA, 25 bp, Homo sapien
tgagggctgcctgtattcggcataa

SEQ ID NO: 636387 - DNA, 25 bp, Homo sapien
gcaagcactcttccaactactctgg

SEQ ID NO: 636388 - DNA, 25 bp, Homo sapien
gcagcatttctaccacaagcagcag

SEQ ID NO: 636389 - DNA, 25 bp, Homo sapien
gagtctgtggtttatggccagtccc

SEQ ID NO: 636390 - DNA, 25 bp, Homo sapien
tcaggaccgtgaatagagacactgc

SEQ ID NO: 636391 - DNA, 25 bp, Homo sapien
tgtaaagggcagtcatcgagggctc

SEQ ID NO: 636392 - DNA, 25 bp, Homo sapien
cccaggaggagagctacgaggagtg

SEQ ID NO: 636393 - DNA, 25 bp, Homo sapien
ccagcagatgtagatggcagagaca

SEQ ID NO: 636394 - DNA, 25 bp, Homo sapien
gtttccagcagatgtagatggcaga

SEQ ID NO: 636395 - DNA, 25 bp, Homo sapien
gatgtagatggcagagacaccaacc

SEQ ID NO: 636396 - DNA, 25 bp, Homo sapien
tccttgggacaaagcgcagcagaaa

SEQ ID NO: 636397 - DNA, 25 bp, Homo sapien
tctttcgactggagtagagggaccc

SEQ ID NO: 636398 - DNA, 25 bp, Homo sapien
ggtaaaactccaagctcactgggtg

SEQ ID NO: 636399 - DNA, 25 bp, Homo sapien
aagaatagaagattgggccccagcc

SEQ ID NO: 636400 - DNA, 25 bp, Homo sapien
gaaccttctaagtagtggtgaccca

SEQ ID NO: 636401 - DNA, 25 bp, Homo sapien
tggtgacccatggagtgtaggattt

SEQ ID NO: 636402 - DNA, 25 bp, Homo sapien
caaatggccaattgttaccttgaac

SEQ ID NO: 636403 - DNA, 25 bp, Homo sapien
gacttgacgcacagtttctcctggt

SEQ ID NO: 636404 - DNA, 25 bp, Homo sapien
cttctggtgcgctgagatctccagg

SEQ ID NO: 636405 - DNA, 25 bp, Homo sapien
ggtgatatctgagccgtgctccttc

SEQ ID NO: 636406 - DNA, 25 bp, Homo sapien
tgctccttctggtgcgctgagatct

SEQ ID NO: 636407 - DNA, 25 bp, Homo sapien
catgggtgatatctgagccgtgctc

SEQ ID NO: 636408 - DNA, 25 bp, Homo sapien
tgagggtcgaagctgtttctgtccg

SEQ ID NO: 636409 - DNA, 25 bp, Homo sapien
ccttgttctctatgagggtcgaagc

SEQ ID NO: 636410 - DNA, 25 bp, Homo sapien
ggtcgaagctgtttctgtccgggac

SEQ ID NO: 636411 - DNA, 25 bp, Homo sapien
tctatgagggtcgaagctgtttctg

SEQ ID NO: 636412 - DNA, 25 bp, Homo sapien
gctgttgagtaacctccaaggtggg

SEQ ID NO: 636413 - DNA, 25 bp, Homo sapien
tgttgagtaacctccaaggtgggtg

SEQ ID NO: 636414 - DNA, 25 bp, Homo sapien
gggctgttgagtaacctccaaggtg

SEQ ID NO: 636415 - DNA, 25 bp, Homo sapien
ggctgttgagtaacctccaaggtgg

SEQ ID NO: 636416 - DNA, 25 bp, Homo sapien
atgtgggctatctcgcagatgactt

SEQ ID NO: 636417 - DNA, 25 bp, Homo sapien
gatgtgggctatctcgcagatgact

SEQ ID NO: 636418 - DNA, 25 bp, Homo sapien
aaggtgatgtgggctatctcgcaga

SEQ ID NO: 636419 - DNA, 25 bp, Homo sapien
ggtgatgtgggctatctcgcagatg

SEQ ID NO: 636420 - DNA, 25 bp, Homo sapien
actcgcaggtgaagctcactgtgtg

SEQ ID NO: 636421 - DNA, 25 bp, Homo sapien
gactcgcaggtgaagctcactgtgt

SEQ ID NO: 636422 - DNA, 25 bp, Homo sapien
aaacccaaatgataaaaggagcagc

SEQ ID NO: 636423 - DNA, 25 bp, Homo sapien
aaaacccaaatgataaaaggagcag

SEQ ID NO: 636424 - DNA, 25 bp, Homo sapien
aacccaaatgataaaaggagcagca

SEQ ID NO: 636425 - DNA, 25 bp, Homo sapien
cccaaatgataaaaggagcagcaac

SEQ ID NO: 636426 - DNA, 25 bp, Homo sapien
ggaacttcacacagtagtaggtgcc

SEQ ID NO: 636427 - DNA, 25 bp, Homo sapien
agggatcagggacgtcatagcacag

SEQ ID NO: 636428 - DNA, 25 bp, Homo sapien
atcagggacgtcatagcacagcgca

SEQ ID NO: 636429 - DNA, 25 bp, Homo sapien
acagggatcagggacgtcatagcac

SEQ ID NO: 636430 - DNA, 25 bp, Homo sapien
ggacgtcatagcacagcgcagagtg

SEQ ID NO: 636431 - DNA, 25 bp, Homo sapien
ctggaaaggagcacaaagcagtcat

SEQ ID NO: 636432 - DNA, 25 bp, Homo sapien
gagtcccagcaatagagtcagcagc

SEQ ID NO: 636433 - DNA, 25 bp, Homo sapien
gtgagtcccagcaatagagtcagca

SEQ ID NO: 636434 - DNA, 25 bp, Homo sapien
tgtgagtcccagcaatagagtcagc

SEQ ID NO: 636435 - DNA, 25 bp, Homo sapien
tgagtcccagcaatagagtcagcag

SEQ ID NO: 636436 - DNA, 25 bp, Homo sapien
agcatggtacttgcatctgctgctg

SEQ ID NO: 636437 - DNA, 25 bp, Homo sapien
gcatggtacttgcatctgctgctga

SEQ ID NO: 636438 - DNA, 25 bp, Homo sapien
tgtttcccacatcctagggaggtgt

SEQ ID NO: 636439 - DNA, 25 bp, Homo sapien
ggtgtcatgagtcactccccagagc

SEQ ID NO: 636440 - DNA, 25 bp, Homo sapien
gctcaggaccatgaatgaagactgc

SEQ ID NO: 636441 - DNA, 25 bp, Homo sapien
gactgcagtttgtggcttacggaga

SEQ ID NO: 636442 - DNA, 25 bp, Homo sapien
ggcaggagagactgggggttccatg

SEQ ID NO: 636443 - DNA, 25 bp, Homo sapien
gagccattcaaggaaggaagtaggc

SEQ ID NO: 636444 - DNA, 25 bp, Homo sapien
tcagagccattcaaggaaggaagta

SEQ ID NO: 636445 - DNA, 25 bp, Homo sapien
cagagccattcaaggaaggaagtag

SEQ ID NO: 636446 - DNA, 25 bp, Homo sapien
ttcctgggaggctgttgtattcctg

SEQ ID NO: 636447 - DNA, 25 bp, Homo sapien
ctgtgggtaacatgtccatatttaa

SEQ ID NO: 636448 - DNA, 25 bp, Homo sapien
cctgggaggctgttgtattcctggt

SEQ ID NO: 636449 - DNA, 25 bp, Homo sapien
tttaatcatctgctcatcatttaag

SEQ ID NO: 636450 - DNA, 25 bp, Homo sapien
tccagtagacatagatgacagagac

SEQ ID NO: 636451 - DNA, 25 bp, Homo sapien
ttccagtagacatagatgacagaga

SEQ ID NO: 636452 - DNA, 25 bp, Homo sapien
ggtctaatgccttgatctaattgtc

SEQ ID NO: 636453 - DNA, 25 bp, Homo sapien
cttaattagtttgggccagtcatct

SEQ ID NO: 636454 - DNA, 25 bp, Homo sapien
cagtcatctggtctaatgccttgat

SEQ ID NO: 636455 - DNA, 25 bp, Homo sapien
gccttgatctaattgtcttcaacaa

SEQ ID NO: 636456 - DNA, 25 bp, Homo sapien
ggctgttgagtaacctccaaggtgg

SEQ ID NO: 636457 - DNA, 25 bp, Homo sapien
gctgttgagtaacctccaaggtggg

SEQ ID NO: 636458 - DNA, 25 bp, Homo sapien
gggctgttgagtaacctccaaggtg

SEQ ID NO: 636459 - DNA, 25 bp, Homo sapien
tgttgagtaacctccaaggtgggtg

SEQ ID NO: 636460 - DNA, 25 bp, Homo sapien
gctgtaggacacactgtctcctgcg

SEQ ID NO: 636461 - DNA, 25 bp, Homo sapien
tgctgtaggacacactgtctcctgc

SEQ ID NO: 636462 - DNA, 25 bp, Homo sapien
atgctgtaggacacactgtctcctg

SEQ ID NO: 636463 - DNA, 25 bp, Homo sapien
actcgcaggtgaagctcactgtgtg

SEQ ID NO: 636464 - DNA, 25 bp, Homo sapien
gactcgcaggtgaagctcactgtgt

SEQ ID NO: 636465 - DNA, 25 bp, Homo sapien
gcagtagatagacctggataacaac

SEQ ID NO: 636466 - DNA, 25 bp, Homo sapien
caagccacaggatgttgcagtagat

SEQ ID NO: 636467 - DNA, 25 bp, Homo sapien
gccagggtccgtgggattttgatct

SEQ ID NO: 636468 - DNA, 25 bp, Homo sapien
tagacctggataacaactgaagcca

SEQ ID NO: 636469 - DNA, 25 bp, Homo sapien
aaacccaaatgataaaaggagcagc

SEQ ID NO: 636470 - DNA, 25 bp, Homo sapien
aaaacccaaatgataaaaggagcag

SEQ ID NO: 636471 - DNA, 25 bp, Homo sapien
aacccaaatgataaaaggagcagca

SEQ ID NO: 636472 - DNA, 25 bp, Homo sapien
cccaaatgataaaaggagcagcaac

SEQ ID NO: 636473 - DNA, 25 bp, Homo sapien
ggaacttcacacagtagtaggtgcc

SEQ ID NO: 636474 - DNA, 25 bp, Homo sapien
tctttctgattgtagattaattccc

SEQ ID NO: 636475 - DNA, 25 bp, Homo sapien
tttctgattgtagattaattcccgg

SEQ ID NO: 636476 - DNA, 25 bp, Homo sapien
ctgattgtagattaattcccggcct

SEQ ID NO: 636477 - DNA, 25 bp, Homo sapien
cccgtgggaagtggccttctttctg

SEQ ID NO: 636478 - DNA, 25 bp, Homo sapien
aagtcacagtgcagtgcagagtggc

SEQ ID NO: 636479 - DNA, 25 bp, Homo sapien
gactctccagctgcaactgatatgg

SEQ ID NO: 636480 - DNA, 25 bp, Homo sapien
atcacctgcagctcttcctcgccag

SEQ ID NO: 636481 - DNA, 25 bp, Homo sapien
atatggacttgtcaggctgaatcac

SEQ ID NO: 636482 - DNA, 25 bp, Homo sapien
ctggaaaggagcacaaagcagtcat

SEQ ID NO: 636483 - DNA, 25 bp, Homo sapien
ccagcagtagcgtcatcagcaggaa

SEQ ID NO: 636484 - DNA, 25 bp, Homo sapien
cccagcagtagcgtcatcagcagga

SEQ ID NO: 636485 - DNA, 25 bp, Homo sapien
ctctgtccaaacgtctgtgctggga

SEQ ID NO: 636486 - DNA, 25 bp, Homo sapien
tgccatgatatctgaggagggaatt

SEQ ID NO: 636487 - DNA, 25 bp, Homo sapien
gccatgatatctgaggagggaattt

SEQ ID NO: 636488 - DNA, 25 bp, Homo sapien
ctgccatgatatctgaggagggaat

SEQ ID NO: 636489 - DNA, 25 bp, Homo sapien
ccatgatatctgaggagggaatttg

SEQ ID NO: 636490 - DNA, 25 bp, Homo sapien
caatcttgcactgctgtgaaaagcg

SEQ ID NO: 636491 - DNA, 25 bp, Homo sapien
cgagggctgcctgtattcgttataa

SEQ ID NO: 636492 - DNA, 25 bp, Homo sapien
gctacagaagtgttcccggaagaga

SEQ ID NO: 636493 - DNA, 25 bp, Homo sapien
tgggtttccggctgcacagtcattc

SEQ ID NO: 636494 - DNA, 25 bp, Homo sapien
tctcgccttctagggaggtgccgtt

SEQ ID NO: 636495 - DNA, 25 bp, Homo sapien
tggtttacggtcagtctcaaggcga

SEQ ID NO: 636496 - DNA, 25 bp, Homo sapien
ggtgccgttaagtcagtgcccagag

SEQ ID NO: 636497 - DNA, 25 bp, Homo sapien
tgtttggagccaagtctagagaagc

SEQ ID NO: 636498 - DNA, 25 bp, Homo sapien
tgtggatttctctgaccccatggag

SEQ ID NO: 636499 - DNA, 25 bp, Homo sapien
tccccaagacttccgagggtgcgga

SEQ ID NO: 636500 - DNA, 25 bp, Homo sapien
tgcggagggagcttaactccacgga

SEQ ID NO: 636501 - DNA, 25 bp, Homo sapien
tctacagatagcctgcaagggacca

SEQ ID NO: 636502 - DNA, 25 bp, Homo sapien
cccaggaggacagctatgaggagca

SEQ ID NO: 636503 - DNA, 25 bp, Homo sapien
agcgcagtaagggatgatgccgggc

SEQ ID NO: 636504 - DNA, 25 bp, Homo sapien
acagctatgaggagcagcgcagtaa

SEQ ID NO: 636505 - DNA, 25 bp, Homo sapien
tccaggggacgtagatggggcccag

SEQ ID NO: 636506 - DNA, 25 bp, Homo sapien
ggaggccattgtaggggcctccact

SEQ ID NO: 636507 - DNA, 25 bp, Homo sapien
gggctatgagagagaccacttggga

SEQ ID NO: 636508 - DNA, 25 bp, Homo sapien
cacttgggaggccattgtaggggcc

SEQ ID NO: 636509 - DNA, 25 bp, Homo sapien
cagggaagacgaggggctatgagag

SEQ ID NO: 636510 - DNA, 25 bp, Homo sapien
agaggctccccattctcactcatcc

SEQ ID NO: 636511 - DNA, 25 bp, Homo sapien
aagaggctccccattctcactcatc

SEQ ID NO: 636512 - DNA, 25 bp, Homo sapien
catcctgtcccaggttgccagctta

SEQ ID NO: 636513 - DNA, 25 bp, Homo sapien
atcctgtcccaggttgccagcttat

SEQ ID NO: 636514 - DNA, 25 bp, Homo sapien
caggtattcatacatgtggcaacgg

SEQ ID NO: 636515 - DNA, 25 bp, Homo sapien
tagggagggtcacaaggttacttgc

SEQ ID NO: 636516 - DNA, 25 bp, Homo sapien
gagcagggattgtcattccattctg

SEQ ID NO: 636517 - DNA, 25 bp, Homo sapien
acttgaccctcacaagcctatggga

SEQ ID NO: 636518 - DNA, 25 bp, Homo sapien
cagtaagctgggatggcgtaaccac

SEQ ID NO: 636519 - DNA, 25 bp, Homo sapien
ttagttgggcacactcagttacggg

SEQ ID NO: 636520 - DNA, 25 bp, Homo sapien
tttttaacgcgagcagtttgggcca

SEQ ID NO: 636521 - DNA, 25 bp, Homo sapien
ttctcccttgaggaaagctgcactg

SEQ ID NO: 636522 - DNA, 25 bp, Homo sapien
cagatatgttcaccaggaaccagct

SEQ ID NO: 636523 - DNA, 25 bp, Homo sapien
gacctctagggcaaggcgtttgctg

SEQ ID NO: 636524 - DNA, 25 bp, Homo sapien
cttgttctctgtaagggtcgaggct

SEQ ID NO: 636525 - DNA, 25 bp, Homo sapien
tctctctggcacacgtttccattct

SEQ ID NO: 636526 - DNA, 25 bp, Homo sapien
ctgaaacagcacagggtagaagctc

SEQ ID NO: 636527 - DNA, 25 bp, Homo sapien
acagcacagggtagaagctctgatc

SEQ ID NO: 636528 - DNA, 25 bp, Homo sapien
agcacagggtagaagctctgatctt

SEQ ID NO: 636529 - DNA, 25 bp, Homo sapien
aaacagcacagggtagaagctctga

SEQ ID NO: 636530 - DNA, 25 bp, Homo sapien
gtcccctgaccgctgccaataaaat

SEQ ID NO: 636531 - DNA, 25 bp, Homo sapien
taaaatgatagtaagtgaccagcac

SEQ ID NO: 636532 - DNA, 25 bp, Homo sapien
ggcacgtgattgctggtcccctgac

SEQ ID NO: 636533 - DNA, 25 bp, Homo sapien
gataaatgaaactctctagcgcaga

SEQ ID NO: 636534 - DNA, 25 bp, Homo sapien
ggcttgggctgggtgtgagggtcct

SEQ ID NO: 636535 - DNA, 25 bp, Homo sapien
agccaggtgtgggcttgggctgggt

SEQ ID NO: 636536 - DNA, 25 bp, Homo sapien
aggtgtgggcttgggctgggtgtga

SEQ ID NO: 636537 - DNA, 25 bp, Homo sapien
cttgggctgggtgtgagggtcctct

SEQ ID NO: 636538 - DNA, 25 bp, Homo sapien
ctcagacaagttggcagtcccacga

SEQ ID NO: 636539 - DNA, 25 bp, Homo sapien
gagcgaacgtcccaggggtccagta

SEQ ID NO: 636540 - DNA, 25 bp, Homo sapien
ctgagagcgaacgtcccaggggtcc

SEQ ID NO: 636541 - DNA, 25 bp, Homo sapien
agatgacctgagagcgaacgtccca

SEQ ID NO: 636542 - DNA, 25 bp, Homo sapien
tgacctgagagcgaacgtcccaggg

SEQ ID NO: 636543 - DNA, 25 bp, Homo sapien
gtgaaactcactgtatgctcaggtg

SEQ ID NO: 636544 - DNA, 25 bp, Homo sapien
atgctcaggtgtggtcctcgccgca

SEQ ID NO: 636545 - DNA, 25 bp, Homo sapien
catgggactcacaggtgaaactcac

SEQ ID NO: 636546 - DNA, 25 bp, Homo sapien
tgggagagaagccatgggactcaca

SEQ ID NO: 636547 - DNA, 25 bp, Homo sapien
tctgagcagggctttatccggaaac

SEQ ID NO: 636548 - DNA, 25 bp, Homo sapien
ggctttatccggaaactctatcttg

SEQ ID NO: 636549 - DNA, 25 bp, Homo sapien
gcagggctttatccggaaactctat

SEQ ID NO: 636550 - DNA, 25 bp, Homo sapien
tatccggaaactctatcttgggtcc

SEQ ID NO: 636551 - DNA, 25 bp, Homo sapien
cttaaactccacgttctcagggctc

SEQ ID NO: 636552 - DNA, 25 bp, Homo sapien
ctggtccagacttaaactccacgtt

SEQ ID NO: 636553 - DNA, 25 bp, Homo sapien
tcagggctcccttttcgaaacttca

SEQ ID NO: 636554 - DNA, 25 bp, Homo sapien
aaagccatctcagtgcctggtccag

SEQ ID NO: 636555 - DNA, 25 bp, Homo sapien
gtgatgctactgatgcggatggaaa

SEQ ID NO: 636556 - DNA, 25 bp, Homo sapien
tggaaaagtccatgttgtttctctt

SEQ ID NO: 636557 - DNA, 25 bp, Homo sapien
ctactgatgcggatggaaaagtcca

SEQ ID NO: 636558 - DNA, 25 bp, Homo sapien
gtagtatgtgccgacatctgctggg

SEQ ID NO: 636559 - DNA, 25 bp, Homo sapien
ctgtgaccaacaggagcttctcagg

SEQ ID NO: 636560 - DNA, 25 bp, Homo sapien
cacaggacgggtcccacgggaagca

SEQ ID NO: 636561 - DNA, 25 bp, Homo sapien
gagtggctgtctttccaactgtgac

SEQ ID NO: 636562 - DNA, 25 bp, Homo sapien
aactcctctgaaccacaggacgggt

SEQ ID NO: 636563 - DNA, 25 bp, Homo sapien
ctgtagctcctcctcacctgccact

SEQ ID NO: 636564 - DNA, 25 bp, Homo sapien
tgtagctcctcctcacctgccactt

SEQ ID NO: 636565 - DNA, 25 bp, Homo sapien
ctgaaaaggagcacaaagcaatcat

SEQ ID NO: 636566 - DNA, 25 bp, Homo sapien
ggtacaccactgtgataaagctggt

SEQ ID NO: 636567 - DNA, 25 bp, Homo sapien
acttagtgacactgaaacgttctag

SEQ ID NO: 636568 - DNA, 25 bp, Homo sapien
taaagctggtccctgccataattcc

SEQ ID NO: 636569 - DNA, 25 bp, Homo sapien
caaacaagttgtgagcaccctgcca

SEQ ID NO: 636570 - DNA, 25 bp, Homo sapien
ttggacaatgtccagtccttgacct

SEQ ID NO: 636571 - DNA, 25 bp, Homo sapien
atgtccagtccttgaccttccttgg

SEQ ID NO: 636572 - DNA, 25 bp, Homo sapien
aaggtttgatgcctctggtagccag

SEQ ID NO: 636573 - DNA, 25 bp, Homo sapien
aatgtccagtccttgaccttccttg

SEQ ID NO: 636574 - DNA, 25 bp, Homo sapien
gcagtagagtcagaagcaggaaagg

SEQ ID NO: 636575 - DNA, 25 bp, Homo sapien
gaagcaggaaaggaccaggaggatg

SEQ ID NO: 636576 - DNA, 25 bp, Homo sapien
ctgtaagtcccagcagtagagtcag

SEQ ID NO: 636577 - DNA, 25 bp, Homo sapien
tgtaagtcccagcagtagagtcaga

SEQ ID NO: 636578 - DNA, 25 bp, Homo sapien
agcctgctctgttcaaacgtctgtt

SEQ ID NO: 636579 - DNA, 25 bp, Homo sapien
gaagcctgctctgttcaaacgtctg

SEQ ID NO: 636580 - DNA, 25 bp, Homo sapien
gctctgttcaaacgtctgttctggg

SEQ ID NO: 636581 - DNA, 25 bp, Homo sapien
cctgctctgttcaaacgtctgttct

SEQ ID NO: 636582 - DNA, 25 bp, Homo sapien
agtcctggtagcagaggaagtggca

SEQ ID NO: 636583 - DNA, 25 bp, Homo sapien
ggtagcagaggaagtggcaggggct

SEQ ID NO: 636584 - DNA, 25 bp, Homo sapien
ctgtgagtcctggtagcagaggaag

SEQ ID NO: 636585 - DNA, 25 bp, Homo sapien
tggtagcagaggaagtggcaggggc

SEQ ID NO: 636586 - DNA, 25 bp, Homo sapien
ctgcttcagtggatgttagatggca

SEQ ID NO: 636587 - DNA, 25 bp, Homo sapien
gcctctgcttcagtggatgttagat

SEQ ID NO: 636588 - DNA, 25 bp, Homo sapien
tctgcttcagtggatgttagatggc

SEQ ID NO: 636589 - DNA, 25 bp, Homo sapien
caaggagtggggcagtaggagctgg

SEQ ID NO: 636590 - DNA, 25 bp, Homo sapien
catctggtaggtgagcacatcatcc

SEQ ID NO: 636591 - DNA, 25 bp, Homo sapien
ccagcttgtccagtcgtaggtgcct

SEQ ID NO: 636592 - DNA, 25 bp, Homo sapien
gtttctatctgggacacatttctgt

SEQ ID NO: 636593 - DNA, 25 bp, Homo sapien
gctgcccatcatgcgccatctggta

SEQ ID NO: 636594 - DNA, 25 bp, Homo sapien
gttccctgcctttatgggctgttga

SEQ ID NO: 636595 - DNA, 25 bp, Homo sapien
ttccctgcctttatgggctgttgag

SEQ ID NO: 636596 - DNA, 25 bp, Homo sapien
ccctgcctttatgggctgttgagta

SEQ ID NO: 636597 - DNA, 25 bp, Homo sapien
gtgacgttcacctggttccctgcct

SEQ ID NO: 636598 - DNA, 25 bp, Homo sapien
agatgacctgaaggcaaaggtctcc

SEQ ID NO: 636599 - DNA, 25 bp, Homo sapien
gtccccctgtaaagtgatgtgggcc

SEQ ID NO: 636600 - DNA, 25 bp, Homo sapien
ctcgcagatgacctgaaggcaaagg

SEQ ID NO: 636601 - DNA, 25 bp, Homo sapien
cccctgtaaagtgatgtgggccacc

SEQ ID NO: 636602 - DNA, 25 bp, Homo sapien
ggtgctatagggcatactttctcct

SEQ ID NO: 636603 - DNA, 25 bp, Homo sapien
ctatagggcatactttctcctgcag

SEQ ID NO: 636604 - DNA, 25 bp, Homo sapien
tgcaggtgctatagggcatactttc

SEQ ID NO: 636605 - DNA, 25 bp, Homo sapien
ctgtgctgcaggtgctatagggcat

SEQ ID NO: 636606 - DNA, 25 bp, Homo sapien
ggtgaagctcactgtatgctcagct

SEQ ID NO: 636607 - DNA, 25 bp, Homo sapien
cagtgcatgataccacaggggcaga

SEQ ID NO: 636608 - DNA, 25 bp, Homo sapien
tgtggtcctcactgcagtgcatgat

SEQ ID NO: 636609 - DNA, 25 bp, Homo sapien
accatttcagggtggtgtttcaggg

SEQ ID NO: 636610 - DNA, 25 bp, Homo sapien
catcttctacaacaatcaccaggaa

SEQ ID NO: 636611 - DNA, 25 bp, Homo sapien
tcaccaggaagcatatatcacacat

SEQ ID NO: 636612 - DNA, 25 bp, Homo sapien
atcaccaggaagcatatatcacaca

SEQ ID NO: 636613 - DNA, 25 bp, Homo sapien
tcttctacaacaatcaccaggaagc

SEQ ID NO: 636614 - DNA, 25 bp, Homo sapien
tctttgtctagtctgaaatagttgt

SEQ ID NO: 636615 - DNA, 25 bp, Homo sapien
atagtccgtgttgtttctctttgtc

SEQ ID NO: 636616 - DNA, 25 bp, Homo sapien
ttgtctagtctgaaatagttgttac

SEQ ID NO: 636617 - DNA, 25 bp, Homo sapien
ttctctttgtctagtctgaaatagt

SEQ ID NO: 636618 - DNA, 25 bp, Homo sapien
ggactgtagattaattcgtggcctg

SEQ ID NO: 636619 - DNA, 25 bp, Homo sapien
ttctcttggactgtagattaattcg

SEQ ID NO: 636620 - DNA, 25 bp, Homo sapien
gaacagggaggtcgcagtgcagtgc

SEQ ID NO: 636621 - DNA, 25 bp, Homo sapien
catctctccagctgcgactgacatg

SEQ ID NO: 636622 - DNA, 25 bp, Homo sapien
gtttgtctggaatccctgaaagccc

SEQ ID NO: 636623 - DNA, 25 bp, Homo sapien
tgtttgtctggaatccctgaaagcc

SEQ ID NO: 636624 - DNA, 25 bp, Homo sapien
cttgtgtttgtctggaatccctgaa

SEQ ID NO: 636625 - DNA, 25 bp, Homo sapien
gagcacttgtgtttgtctggaatcc

SEQ ID NO: 636626 - DNA, 25 bp, Homo sapien
gaagccgtgatggactatgctgtga

SEQ ID NO: 636627 - DNA, 25 bp, Homo sapien
ggacagtgctatctggtccagatac

SEQ ID NO: 636628 - DNA, 25 bp, Homo sapien
tgagggacagtgctatctggtccag

SEQ ID NO: 636629 - DNA, 25 bp, Homo sapien
ggtttttgcaacctgaagaccagga

SEQ ID NO: 636630 - DNA, 25 bp, Homo sapien
acataggcagcagagacatcaacca

SEQ ID NO: 636631 - DNA, 25 bp, Homo sapien
tccggtggacataggcagcagagac

SEQ ID NO: 636632 - DNA, 25 bp, Homo sapien
tctgcttccggtggacataggcagc

SEQ ID NO: 636633 - DNA, 25 bp, Homo sapien
tggacataggcagcagagacatcaa

SEQ ID NO: 636634 - DNA, 25 bp, Homo sapien
tgaaggaggcctacactgtactcac

SEQ ID NO: 636635 - DNA, 25 bp, Homo sapien
atgaaggaggcctacactgtactca

SEQ ID NO: 636636 - DNA, 25 bp, Homo sapien
gatgaaggaggcctacactgtactc

SEQ ID NO: 636637 - DNA, 25 bp, Homo sapien
ctactgatgcggatggaatagtctg

SEQ ID NO: 636638 - DNA, 25 bp, Homo sapien
tctccggagcttcatacagtagtag

SEQ ID NO: 636639 - DNA, 25 bp, Homo sapien
gacttaatctccacgttggcaggaa

SEQ ID NO: 636640 - DNA, 25 bp, Homo sapien
taatttctggcctggacaagctcct

SEQ ID NO: 636641 - DNA, 25 bp, Homo sapien
gatttaagctccatgtcagggcccc

SEQ ID NO: 636642 - DNA, 25 bp, Homo sapien
tgtctgaaatgcaagctatcttggg

SEQ ID NO: 636643 - DNA, 25 bp, Homo sapien
gtgatgctagtgatgcacatggaaa

SEQ ID NO: 636644 - DNA, 25 bp, Homo sapien
aactgtagattagttcctgccctgt

SEQ ID NO: 636645 - DNA, 25 bp, Homo sapien
ccgcagctcctcctcacctgccgct

SEQ ID NO: 636646 - DNA, 25 bp, Homo sapien
cgcagctcctcctcacctgccgctc

SEQ ID NO: 636647 - DNA, 25 bp, Homo sapien
gagtgataagtttcacgtcttgcaa

SEQ ID NO: 636648 - DNA, 25 bp, Homo sapien
gtcactactaaattgcattcctgca

SEQ ID NO: 636649 - DNA, 25 bp, Homo sapien
ccactgaaccccgtacaggagtgat

SEQ ID NO: 636650 - DNA, 25 bp, Homo sapien
gcctttccaggtagtgggatactgc

SEQ ID NO: 636651 - DNA, 25 bp, Homo sapien
aacacttgtgttggtattgcctcat

SEQ ID NO: 636652 - DNA, 25 bp, Homo sapien
cataggtgcctttcttggctaacaa

SEQ ID NO: 636653 - DNA, 25 bp, Homo sapien
tatagcccagtagcatcataggtgc

SEQ ID NO: 636654 - DNA, 25 bp, Homo sapien
aagtcagaggtgattccttccatgg

SEQ ID NO: 636655 - DNA, 25 bp, Homo sapien
gaagaaaactcgtccctgactcagc

SEQ ID NO: 636656 - DNA, 25 bp, Homo sapien
gaagctcagtacatcagggtcaaga

SEQ ID NO: 636657 - DNA, 25 bp, Homo sapien
tccaaagctctgagggaaggaacac

SEQ ID NO: 636658 - DNA, 25 bp, Homo sapien
tcttggttggaagcagggccaatct

SEQ ID NO: 636659 - DNA, 25 bp, Homo sapien
cctgcagatgtaggtcactgtgaaa

SEQ ID NO: 636660 - DNA, 25 bp, Homo sapien
tcctgcagatgtaggtcactgtgaa

SEQ ID NO: 636661 - DNA, 25 bp, Homo sapien
cagatgtaggtcactgtgaaactca

SEQ ID NO: 636662 - DNA, 25 bp, Homo sapien
tgcagatgtaggtcactgtgaaact

SEQ ID NO: 636663 - DNA, 25 bp, Homo sapien
gctcccaatgggcttataagcggtg

SEQ ID NO: 636664 - DNA, 25 bp, Homo sapien
taatgtgggttgctcagtgcctttg

SEQ ID NO: 636665 - DNA, 25 bp, Homo sapien
gcactgatgcattcaccagcagcag

SEQ ID NO: 636666 - DNA, 25 bp, Homo sapien
tgtggacagtacgaggttagcccgt

SEQ ID NO: 636667 - DNA, 25 bp, Homo sapien
cacgaggcaagtaacagccaccaag

SEQ ID NO: 636668 - DNA, 25 bp, Homo sapien
caaggtgcacgttttgtggatagaa

SEQ ID NO: 636669 - DNA, 25 bp, Homo sapien
tagccaggcaaggtgcacgttttgt

SEQ ID NO: 636670 - DNA, 25 bp, Homo sapien
gatagaatctctgcacgaggcaagt

SEQ ID NO: 636671 - DNA, 25 bp, Homo sapien
gaggtggaagactgggacactgtca

SEQ ID NO: 636672 - DNA, 25 bp, Homo sapien
gaggaggtggaagactgggacactg

SEQ ID NO: 636673 - DNA, 25 bp, Homo sapien
ggaggtggaagactgggacactgtc

SEQ ID NO: 636674 - DNA, 25 bp, Homo sapien
ctggaggaggtggaagactgggaca

SEQ ID NO: 636675 - DNA, 25 bp, Homo sapien
aaaagagcaaaacctgagaatggaa

SEQ ID NO: 636676 - DNA, 25 bp, Homo sapien
aagactccgggtgttgaagccctgg

SEQ ID NO: 636677 - DNA, 25 bp, Homo sapien
gggcagggtaaggtgccctccacac

SEQ ID NO: 636678 - DNA, 25 bp, Homo sapien
gtaactggggtggtgcccgtggaga

SEQ ID NO: 636679 - DNA, 25 bp, Homo sapien
tggaaaaaccacgtcaacttgtgct

SEQ ID NO: 636680 - DNA, 25 bp, Homo sapien
catcatccatcagcgggacaagcac

SEQ ID NO: 636681 - DNA, 25 bp, Homo sapien
caaacgacgtgggagaacacatcat

SEQ ID NO: 636682 - DNA, 25 bp, Homo sapien
ggtcacattgtaggtgtgtccactg

SEQ ID NO: 636683 - DNA, 25 bp, Homo sapien
ctgggggtttgggagctcgtgtttg

SEQ ID NO: 636684 - DNA, 25 bp, Homo sapien
tgtttttaagccaggtcacagtaac

SEQ ID NO: 636685 - DNA, 25 bp, Homo sapien
ggagctcgtgtttgtttttaagcca

SEQ ID NO: 636686 - DNA, 25 bp, Homo sapien
tgggagctcgtgtttgtttttaagc

SEQ ID NO: 636687 - DNA, 25 bp, Homo sapien
cccagaggatgcataggtcaatcgg

SEQ ID NO: 636688 - DNA, 25 bp, Homo sapien
tgtgccaggctcagatcgctgaagg

SEQ ID NO: 636689 - DNA, 25 bp, Homo sapien
ctggtgtgtcgagaacccagaggat

SEQ ID NO: 636690 - DNA, 25 bp, Homo sapien
ggtcaatcggatccttgtgccaggc

SEQ ID NO: 636691 - DNA, 25 bp, Homo sapien
tgcaacttgtaaggctggacactct

SEQ ID NO: 636692 - DNA, 25 bp, Homo sapien
cttgcaacttgtaaggctggacact

SEQ ID NO: 636693 - DNA, 25 bp, Homo sapien
caacttgtaaggctggacactctgg

SEQ ID NO: 636694 - DNA, 25 bp, Homo sapien
aacttgtaaggctggacactctggc

SEQ ID NO: 636695 - DNA, 25 bp, Homo sapien
gtgagaacacgtagtgtttgagttt

SEQ ID NO: 636696 - DNA, 25 bp, Homo sapien
gaacacgtagtgtttgagtttctct

SEQ ID NO: 636697 - DNA, 25 bp, Homo sapien
agaacacgtagtgtttgagtttctc

SEQ ID NO: 636698 - DNA, 25 bp, Homo sapien
tgagaacacgtagtgtttgagtttc

SEQ ID NO: 636699 - DNA, 25 bp, Homo sapien
agagaacttgctatgggccccattg

SEQ ID NO: 636700 - DNA, 25 bp, Homo sapien
taatattgtcctacttgcagctcag

SEQ ID NO: 636701 - DNA, 25 bp, Homo sapien
caagcaggagtcaaggaaaggaatc

SEQ ID NO: 636702 - DNA, 25 bp, Homo sapien
caatggaaaacttgactcagaaagg

SEQ ID NO: 636703 - DNA, 25 bp, Homo sapien
tgtgagaactaactggtatggaccg

SEQ ID NO: 636704 - DNA, 25 bp, Homo sapien
cagtaaatgctctacgggtgtcacc

SEQ ID NO: 636705 - DNA, 25 bp, Homo sapien
tatgctgtttggaacctctgagacc

SEQ ID NO: 636706 - DNA, 25 bp, Homo sapien
cactaagctttgtattctcgggcag

SEQ ID NO: 636707 - DNA, 25 bp, Homo sapien
acccagcaagcaaactcacgctcct

SEQ ID NO: 636708 - DNA, 25 bp, Homo sapien
acgtgtgctccagagagtatgtccc

SEQ ID NO: 636709 - DNA, 25 bp, Homo sapien
agtgggggctgctcatcgtggacca

SEQ ID NO: 636710 - DNA, 25 bp, Homo sapien
tgggcttgcagggtgacgttggcct

SEQ ID NO: 636711 - DNA, 25 bp, Homo sapien
ccagaggtttcagtggtgatcttca

SEQ ID NO: 636712 - DNA, 25 bp, Homo sapien
gcaggtgggcgggatagaagtggag

SEQ ID NO: 636713 - DNA, 25 bp, Homo sapien
ttgcacatgtacatgggtcccagag

SEQ ID NO: 636714 - DNA, 25 bp, Homo sapien
agggtctggatcatgctcctgttct

SEQ ID NO: 636715 - DNA, 25 bp, Homo sapien
tgagacatcctgtcgggtcagtgtc

SEQ ID NO: 636716 - DNA, 25 bp, Homo sapien
gatctcagatgagacatcctgtcgg

SEQ ID NO: 636717 - DNA, 25 bp, Homo sapien
gcaggtgatctcagatgagacatcc

SEQ ID NO: 636718 - DNA, 25 bp, Homo sapien
gggtgacttcgcaggtgatctcaga

SEQ ID NO: 636719 - DNA, 25 bp, Homo sapien
ttgtcaggcaccaggcgctgagctg

SEQ ID NO: 636720 - DNA, 25 bp, Homo sapien
cgtaacattgaagtcccgggagaag

SEQ ID NO: 636721 - DNA, 25 bp, Homo sapien
gaagtcattgcctccattgtcaggc

SEQ ID NO: 636722 - DNA, 25 bp, Homo sapien
gaggctggatgttcatcactgtcct

SEQ ID NO: 636723 - DNA, 25 bp, Homo sapien
ttgaaggggacagcagtacagttga

SEQ ID NO: 636724 - DNA, 25 bp, Homo sapien
gttgaaaggcactgagtctccaggg

SEQ ID NO: 636725 - DNA, 25 bp, Homo sapien
gggacagcagtacagttgaaaggca

SEQ ID NO: 636726 - DNA, 25 bp, Homo sapien
cagtacagttgaaaggcactgagtc

SEQ ID NO: 636727 - DNA, 25 bp, Homo sapien
tgtgagatggaccagtcagagagat

SEQ ID NO: 636728 - DNA, 25 bp, Homo sapien
agatggaccagtcagagagatgaag

SEQ ID NO: 636729 - DNA, 25 bp, Homo sapien
ctgtgagatggaccagtcagagaga

SEQ ID NO: 636730 - DNA, 25 bp, Homo sapien
tgagatggaccagtcagagagatga

SEQ ID NO: 636731 - DNA, 25 bp, Homo sapien
gggcccgcccaggtgtggtagccat

SEQ ID NO: 636732 - DNA, 25 bp, Homo sapien
agggcccgcccaggtgtggtagcca

SEQ ID NO: 636733 - DNA, 25 bp, Homo sapien
taagcactcggtgtgtgacactgcg

SEQ ID NO: 636734 - DNA, 25 bp, Homo sapien
caagtcttacttgtgaggacccgga

SEQ ID NO: 636735 - DNA, 25 bp, Homo sapien
tcatggttacaaagctggtcagcgg

SEQ ID NO: 636736 - DNA, 25 bp, Homo sapien
tccaggcagtaggttcgccagccat

SEQ ID NO: 636737 - DNA, 25 bp, Homo sapien
tgcccgcatcttgctgtaattattt

SEQ ID NO: 636738 - DNA, 25 bp, Homo sapien
aattattttgtccaagcactgtggg

SEQ ID NO: 636739 - DNA, 25 bp, Homo sapien
taattattttgtccaagcactgtgg

SEQ ID NO: 636740 - DNA, 25 bp, Homo sapien
ttcagtgatccatggagcgccgact

SEQ ID NO: 636741 - DNA, 25 bp, Homo sapien
cagaaatttgcgcagggctcagctg

SEQ ID NO: 636742 - DNA, 25 bp, Homo sapien
cctggagtgggcgtgacatcatttc

SEQ ID NO: 636743 - DNA, 25 bp, Homo sapien
caagaaatccggaggtagctgggca

SEQ ID NO: 636744 - DNA, 25 bp, Homo sapien
tagaacacagcgtctgatgcatagt

SEQ ID NO: 636745 - DNA, 25 bp, Homo sapien
tgttagctacgtctagggaaggacc

SEQ ID NO: 636746 - DNA, 25 bp, Homo sapien
aggtgtatcccccttgcctagaaca

SEQ ID NO: 636747 - DNA, 25 bp, Homo sapien
ccacactgggatgttagctacgtct

SEQ ID NO: 636748 - DNA, 25 bp, Homo sapien
ggctggtaacaagcgtgtagggtca

SEQ ID NO: 636749 - DNA, 25 bp, Homo sapien
ggtaacaagcgtgtagggtcactgt

SEQ ID NO: 636750 - DNA, 25 bp, Homo sapien
gtgaggctggtaacaagcgtgtagg

SEQ ID NO: 636751 - DNA, 25 bp, Homo sapien
ctggtaacaagcgtgtagggtcact

SEQ ID NO: 636752 - DNA, 25 bp, Homo sapien
gtttactatggcacttagagctgga

SEQ ID NO: 636753 - DNA, 25 bp, Homo sapien
taaactatcagagcaacattggacc

SEQ ID NO: 636754 - DNA, 25 bp, Homo sapien
gctggaatggcttgttgttttgact

SEQ ID NO: 636755 - DNA, 25 bp, Homo sapien
tgaatgggcttgtctggaactgccg

SEQ ID NO: 636756 - DNA, 25 bp, Homo sapien
atttcttcttccaaggtgcctgtgg

SEQ ID NO: 636757 - DNA, 25 bp, Homo sapien
ttcttcttccaaggtgcctgtgggg

SEQ ID NO: 636758 - DNA, 25 bp, Homo sapien
tcttcttccaaggtgcctgtggggt

SEQ ID NO: 636759 - DNA, 25 bp, Homo sapien
tttcttcttccaaggtgcctgtggg

SEQ ID NO: 636760 - DNA, 25 bp, Homo sapien
tggcccatgggctcttcaggcaaga

SEQ ID NO: 636761 - DNA, 25 bp, Homo sapien
tccagacttatagaggcaagtgccg

SEQ ID NO: 636762 - DNA, 25 bp, Homo sapien
ttcgcctgtctcctcaacaagccag

SEQ ID NO: 636763 - DNA, 25 bp, Homo sapien
ccaaactcagggctataaacgttgt

SEQ ID NO: 636764 - DNA, 25 bp, Homo sapien
gattagataactgaaaccctgagat

SEQ ID NO: 636765 - DNA, 25 bp, Homo sapien
cagtgacgccatgtgggcctagaac

SEQ ID NO: 636766 - DNA, 25 bp, Homo sapien
agcctctttactccaggttccaagg

SEQ ID NO: 636767 - DNA, 25 bp, Homo sapien
caatgacctgtgaaagaagtgcctt

SEQ ID NO: 636768 - DNA, 25 bp, Homo sapien
gaagatgtacagaaggatcagagct

SEQ ID NO: 636769 - DNA, 25 bp, Homo sapien
gatttttccaggttgccttgccatc

SEQ ID NO: 636770 - DNA, 25 bp, Homo sapien
tgtacagaaggatcagagcttgtgt

SEQ ID NO: 636771 - DNA, 25 bp, Homo sapien
tccaggttgccttgccatcacttgt

SEQ ID NO: 636772 - DNA, 25 bp, Homo sapien
gctgcagaaacctgcgggtgatgca

SEQ ID NO: 636773 - DNA, 25 bp, Homo sapien
catctgtaatgcaaggcacaaggag

SEQ ID NO: 636774 - DNA, 25 bp, Homo sapien
tgatgcattgactcacgcgtggtcc

SEQ ID NO: 636775 - DNA, 25 bp, Homo sapien
cagttactaatccagtcaggcctgg

SEQ ID NO: 636776 - DNA, 25 bp, Homo sapien
ggactgatgtgacagccactgcagc

SEQ ID NO: 636777 - DNA, 25 bp, Homo sapien
aggtcccagggataccctgagttgg

SEQ ID NO: 636778 - DNA, 25 bp, Homo sapien
caggtcccagggataccctgagttg

SEQ ID NO: 636779 - DNA, 25 bp, Homo sapien
ggtcccagggataccctgagttgga

SEQ ID NO: 636780 - DNA, 25 bp, Homo sapien
tcccagggataccctgagttggatt

SEQ ID NO: 636781 - DNA, 25 bp, Homo sapien
gtgtgaatgcaagtgtgcatgggca

SEQ ID NO: 636782 - DNA, 25 bp, Homo sapien
atgcaagtgtgcatgggcatcttca

SEQ ID NO: 636783 - DNA, 25 bp, Homo sapien
tgaatgcaagtgtgcatgggcatct

SEQ ID NO: 636784 - DNA, 25 bp, Homo sapien
tgcaagtgtgcatgggcatcttcat

SEQ ID NO: 636785 - DNA, 25 bp, Homo sapien
gaatcttgctgcacttgttgggtag

SEQ ID NO: 636786 - DNA, 25 bp, Homo sapien
gggaatcttgctgcacttgttgggt

SEQ ID NO: 636787 - DNA, 25 bp, Homo sapien
gccaggggaatcttgctgcacttgt

SEQ ID NO: 636788 - DNA, 25 bp, Homo sapien
ttgctgcacttgttgggtagctggt

SEQ ID NO: 636789 - DNA, 25 bp, Homo sapien
ggcagctgcaggctcaaggttgctc

SEQ ID NO: 636790 - DNA, 25 bp, Homo sapien
tgtaggctcctcaccctccaggcag

SEQ ID NO: 636791 - DNA, 25 bp, Homo sapien
cccagccctgtaggctcctcaccct

SEQ ID NO: 636792 - DNA, 25 bp, Homo sapien
tgcaggctcaaggttgctctgagca

SEQ ID NO: 636793 - DNA, 25 bp, Homo sapien
ggtcactgccgtcttctccagatgg

SEQ ID NO: 636794 - DNA, 25 bp, Homo sapien
gggtcactgccgtcttctccagatg

SEQ ID NO: 636795 - DNA, 25 bp, Homo sapien
ggctggaactcaccccaggctaggc

SEQ ID NO: 636796 - DNA, 25 bp, Homo sapien
cagatggctggaactcaccccaggc

SEQ ID NO: 636797 - DNA, 25 bp, Homo sapien
taggacacactctctggctaagcaa

SEQ ID NO: 636798 - DNA, 25 bp, Homo sapien
cctgccttatgcaaatcgatgcaaa

SEQ ID NO: 636799 - DNA, 25 bp, Homo sapien
tctctggctaagcaagaattccagg

SEQ ID NO: 636800 - DNA, 25 bp, Homo sapien
gaattccaggtctgagctcccacct

SEQ ID NO: 636801 - DNA, 25 bp, Homo sapien
caggtatattgaggtgccctgcccc

SEQ ID NO: 636802 - DNA, 25 bp, Homo sapien
gatctagtggaattaaccagtcacc

SEQ ID NO: 636803 - DNA, 25 bp, Homo sapien
gcttgagtgtcaaggagctggcccc

SEQ ID NO: 636804 - DNA, 25 bp, Homo sapien
gccactgactagctgggaagcctta

SEQ ID NO: 636805 - DNA, 25 bp, Homo sapien
gtccagtgccagataaaccctcaag

SEQ ID NO: 636806 - DNA, 25 bp, Homo sapien
tcagagttgcccacttcaagggtag

SEQ ID NO: 636807 - DNA, 25 bp, Homo sapien
taattggttggaggctactcccagg

SEQ ID NO: 636808 - DNA, 25 bp, Homo sapien
tcaagcagagactcatgtgccagca

SEQ ID NO: 636809 - DNA, 25 bp, Homo sapien
tacattccagggtctacccaccagg

SEQ ID NO: 636810 - DNA, 25 bp, Homo sapien
tgtgattgcaaaggtaaggctgtcc

SEQ ID NO: 636811 - DNA, 25 bp, Homo sapien
tgggatcagctacctgtgaagacat

SEQ ID NO: 636812 - DNA, 25 bp, Homo sapien
caaacctggactgaatgattggtga

SEQ ID NO: 636813 - DNA, 25 bp, Homo sapien
tcaagatcaccaaaacaagagtggt

SEQ ID NO: 636814 - DNA, 25 bp, Homo sapien
gactgtgagatagacccaatgttct

SEQ ID NO: 636815 - DNA, 25 bp, Homo sapien
aatctctcctgtagcgaacttgacg

SEQ ID NO: 636816 - DNA, 25 bp, Homo sapien
ccttttgacacctaggactgtgaga

SEQ ID NO: 636817 - DNA, 25 bp, Homo sapien
gcatccgagcatttattcagccagc

SEQ ID NO: 636818 - DNA, 25 bp, Homo sapien
tgcagaaaccttaccgcagtggtgg

SEQ ID NO: 636819 - DNA, 25 bp, Homo sapien
taagtatccaccagatctcgggctg

SEQ ID NO: 636820 - DNA, 25 bp, Homo sapien
tttgaggaccacagctttagaggcc

SEQ ID NO: 636821 - DNA, 25 bp, Homo sapien
ggccaaccagagttaacaagcatgc

SEQ ID NO: 636822 - DNA, 25 bp, Homo sapien
caaggctcttgactagggccaacca

SEQ ID NO: 636823 - DNA, 25 bp, Homo sapien
tacacagcgggcatcatcagaacat

SEQ ID NO: 636824 - DNA, 25 bp, Homo sapien
tctgcattaccatggcctgtgaggc

SEQ ID NO: 636825 - DNA, 25 bp, Homo sapien
gcagtctggctgcttccggccacga

SEQ ID NO: 636826 - DNA, 25 bp, Homo sapien
gggccagtcctcttggcatttgtat

SEQ ID NO: 636827 - DNA, 25 bp, Homo sapien
tgggaacttgcagccgggtgcttgg

SEQ ID NO: 636828 - DNA, 25 bp, Homo sapien
caggtgcagacccatgaacatgagc

SEQ ID NO: 636829 - DNA, 25 bp, Homo sapien
atccaccacttgagcgctacacaga

SEQ ID NO: 636830 - DNA, 25 bp, Homo sapien
ctggatccaccacttgagcgctaca

SEQ ID NO: 636831 - DNA, 25 bp, Homo sapien
ttgagcgctacacagacttgcctga

SEQ ID NO: 636832 - DNA, 25 bp, Homo sapien
accacttgagcgctacacagacttg

SEQ ID NO: 636833 - DNA, 25 bp, Homo sapien
ggtgctggcgaggaaaggtatttgc

SEQ ID NO: 636834 - DNA, 25 bp, Homo sapien
tgcatcagataataggtaaagtgtc

SEQ ID NO: 636835 - DNA, 25 bp, Homo sapien
tgagctgtacagctggtgctggcga

SEQ ID NO: 636836 - DNA, 25 bp, Homo sapien
taggtaaagtgtcttgttattccat

SEQ ID NO: 636837 - DNA, 25 bp, Homo sapien
tcggcagcagcttgggttaccccta

SEQ ID NO: 636838 - DNA, 25 bp, Homo sapien
tgcagggtttcacagagctcggcag

SEQ ID NO: 636839 - DNA, 25 bp, Homo sapien
gccaacttggaaggattccccagcc

SEQ ID NO: 636840 - DNA, 25 bp, Homo sapien
ttacccctagggtcaggtcatcacc

SEQ ID NO: 636841 - DNA, 25 bp, Homo sapien
tgcccgaccggatatagtctactct

SEQ ID NO: 636842 - DNA, 25 bp, Homo sapien
caccgtgcccgaccggatatagtct

SEQ ID NO: 636843 - DNA, 25 bp, Homo sapien
tcttttaagcagtaagaggaagcaa

SEQ ID NO: 636844 - DNA, 25 bp, Homo sapien
ggatatagtctactcttttaagcag

SEQ ID NO: 636845 - DNA, 25 bp, Homo sapien
taggttactgagactccaccgaggg

SEQ ID NO: 636846 - DNA, 25 bp, Homo sapien
gagtaatatgagaccccagaccctt

SEQ ID NO: 636847 - DNA, 25 bp, Homo sapien
tataacccagtgattagcacagcag

SEQ ID NO: 636848 - DNA, 25 bp, Homo sapien
cataggtgcctttgtcttcgccagg

SEQ ID NO: 636849 - DNA, 25 bp, Homo sapien
cagatgagaaactaaatggcaagac

SEQ ID NO: 636850 - DNA, 25 bp, Homo sapien
ggaatctggacccaagtaagctggc

SEQ ID NO: 636851 - DNA, 25 bp, Homo sapien
ctactttaaaggacaggtgaaactg

SEQ ID NO: 636852 - DNA, 25 bp, Homo sapien
cctcctgtgtgccagacttttgata

SEQ ID NO: 636853 - DNA, 25 bp, Homo sapien
gcagcaggtatgattctcaaaccac

SEQ ID NO: 636854 - DNA, 25 bp, Homo sapien
ctcagagtgcagtccagggaccagc

SEQ ID NO: 636855 - DNA, 25 bp, Homo sapien
gagccctgaatgacggccttgaagc

SEQ ID NO: 636856 - DNA, 25 bp, Homo sapien
gctgcacgatttgtcaagagccctg

SEQ ID NO: 636857 - DNA, 25 bp, Homo sapien
agaagcaacaaggtggggagtccag

SEQ ID NO: 636858 - DNA, 25 bp, Homo sapien
tactgggaccggagtgtgatgcagg

SEQ ID NO: 636859 - DNA, 25 bp, Homo sapien
caggaagtacggagccagtgaggaa

SEQ ID NO: 636860 - DNA, 25 bp, Homo sapien
agaaatgaaggtactgggaccggag

SEQ ID NO: 636861 - DNA, 25 bp, Homo sapien
tcaaagtgtgatccctgaatcagta

SEQ ID NO: 636862 - DNA, 25 bp, Homo sapien
aatggcagtctattcagcggttctc

SEQ ID NO: 636863 - DNA, 25 bp, Homo sapien
cagtagcgtcagtatcacctgggac

SEQ ID NO: 636864 - DNA, 25 bp, Homo sapien
cttggcttgaatggcagtctattca

SEQ ID NO: 636865 - DNA, 25 bp, Homo sapien
caggcgtgagggtgactactttaac

SEQ ID NO: 636866 - DNA, 25 bp, Homo sapien
cattaccccgaaggaagcacagatc

SEQ ID NO: 636867 - DNA, 25 bp, Homo sapien
tacagctctgggacaaaacaatggc

SEQ ID NO: 636868 - DNA, 25 bp, Homo sapien
tagtctgagagaccgctggagtgca

SEQ ID NO: 636869 - DNA, 25 bp, Homo sapien
cctctgggaacaccgcggagttgct

SEQ ID NO: 636870 - DNA, 25 bp, Homo sapien
aaaaataggtcgttggcagctccag

SEQ ID NO: 636871 - DNA, 25 bp, Homo sapien
ggtggccctggtcaagtcgtgttct

SEQ ID NO: 636872 - DNA, 25 bp, Homo sapien
gctgagacctctaactccaaatggc

SEQ ID NO: 636873 - DNA, 25 bp, Homo sapien
ccagcctctcgccagtgggaagcgg

SEQ ID NO: 636874 - DNA, 25 bp, Homo sapien
cctccagcctctcgccagtgggaag

SEQ ID NO: 636875 - DNA, 25 bp, Homo sapien
ccccgactccttcgccgcctccagc

SEQ ID NO: 636876 - DNA, 25 bp, Homo sapien
ccgcctccagcctctcgccagtggg

SEQ ID NO: 636877 - DNA, 25 bp, Homo sapien
ctgaccccaggtgatccacctccca

SEQ ID NO: 636878 - DNA, 25 bp, Homo sapien
tgaccccaggtgatccacctcccaa

SEQ ID NO: 636879 - DNA, 25 bp, Homo sapien
gaaggatccagaatgcagcactgac

SEQ ID NO: 636880 - DNA, 25 bp, Homo sapien
ggcattcaatgcaggtggtcacacc

SEQ ID NO: 636881 - DNA, 25 bp, Homo sapien
tacagcaaacatatggtgaccaccc

SEQ ID NO: 636882 - DNA, 25 bp, Homo sapien
tctttgcctcgagggtggaagctcc

SEQ ID NO: 636883 - DNA, 25 bp, Homo sapien
cagattttattgtcgcctgcctggg

SEQ ID NO: 636884 - DNA, 25 bp, Homo sapien
gccagcgctacacaactccagattt

SEQ ID NO: 636885 - DNA, 25 bp, Homo sapien
tcttcaaacgctttataaacactag

SEQ ID NO: 636886 - DNA, 25 bp, Homo sapien
taattaagccgcctaaatctggctg

SEQ ID NO: 636887 - DNA, 25 bp, Homo sapien
ccaggtggagcatgacgggcagcca

SEQ ID NO: 636888 - DNA, 25 bp, Homo sapien
tgccaggtggagcatgacgggcagc

SEQ ID NO: 636889 - DNA, 25 bp, Homo sapien
gccaggtggagcatgacgggcagcc

SEQ ID NO: 636890 - DNA, 25 bp, Homo sapien
aggtggagcatgacgggcagccagc

SEQ ID NO: 636891 - DNA, 25 bp, Homo sapien
gattttcttacagcgaagacttgag

SEQ ID NO: 636892 - DNA, 25 bp, Homo sapien
ggctttctgagctgatccttgaaga

SEQ ID NO: 636893 - DNA, 25 bp, Homo sapien
tgtgaccccgctgtggtaagtccag

SEQ ID NO: 636894 - DNA, 25 bp, Homo sapien
gtcttatcgagacccaatgcctcag

SEQ ID NO: 636895 - DNA, 25 bp, Homo sapien
ttagcctggcaacctggagaatcca

SEQ ID NO: 636896 - DNA, 25 bp, Homo sapien
tgaccctgcatagctgagtctcgtg

SEQ ID NO: 636897 - DNA, 25 bp, Homo sapien
tgagcccctcacgtaggttttagag

SEQ ID NO: 636898 - DNA, 25 bp, Homo sapien
aataatgagtccttccggtgttcag

SEQ ID NO: 636899 - DNA, 25 bp, Homo sapien
ggacagtaatatgcaaagactattt

SEQ ID NO: 636900 - DNA, 25 bp, Homo sapien
aaatgatggtatctttgaagtcaga

SEQ ID NO: 636901 - DNA, 25 bp, Homo sapien
caatggggtaggaatctaatgaagg

SEQ ID NO: 636902 - DNA, 25 bp, Homo sapien
ctagctttggacagtaatatgcaaa

SEQ ID NO: 636903 - DNA, 25 bp, Homo sapien
atattggagcttcagagaggctact

SEQ ID NO: 636904 - DNA, 25 bp, Homo sapien
catgaggatattggagcttcagaga

SEQ ID NO: 636905 - DNA, 25 bp, Homo sapien
caggtggatggcatgaggatattgg

SEQ ID NO: 636906 - DNA, 25 bp, Homo sapien
ttaaaggattttatgcaggtggatg

SEQ ID NO: 636907 - DNA, 25 bp, Homo sapien
ttaattttcagggtcagcatgaggc

SEQ ID NO: 636908 - DNA, 25 bp, Homo sapien
cggccgccacctcctgtgcgtgcat

SEQ ID NO: 636909 - DNA, 25 bp, Homo sapien
ctcgcggccgccacctcctgtgcgt

SEQ ID NO: 636910 - DNA, 25 bp, Homo sapien
ccgccacctcctgtgcgtgcatcat

SEQ ID NO: 636911 - DNA, 25 bp, Homo sapien
tcgcggccgccacctcctgtgcgtg

SEQ ID NO: 636912 - DNA, 25 bp, Homo sapien
gaatcaagggaactcatttggcctc

SEQ ID NO: 636913 - DNA, 25 bp, Homo sapien
gaagactggaccctctactgtaagg

SEQ ID NO: 636914 - DNA, 25 bp, Homo sapien
gaaataacatactcccacgcagaag

SEQ ID NO: 636915 - DNA, 25 bp, Homo sapien
gaggctgctctcaatcatttccgaa

SEQ ID NO: 636916 - DNA, 25 bp, Homo sapien
gtaagcattcggatcttcctgagac

SEQ ID NO: 636917 - DNA, 25 bp, Homo sapien
aaagctctccagagtaagcattcgg

SEQ ID NO: 636918 - DNA, 25 bp, Homo sapien
gctctccagagtaagcattcggatc

SEQ ID NO: 636919 - DNA, 25 bp, Homo sapien
tccagagtaagcattcggatcttcc

SEQ ID NO: 636920 - DNA, 25 bp, Homo sapien
tgtacaggtcctcatggcccatgct

SEQ ID NO: 636921 - DNA, 25 bp, Homo sapien
agaaaaccgccatagcgcttctggt

SEQ ID NO: 636922 - DNA, 25 bp, Homo sapien
ccccatagcgtttgtacaggtcctc

SEQ ID NO: 636923 - DNA, 25 bp, Homo sapien
tcccacttgagcttgggacgaatgc

SEQ ID NO: 636924 - DNA, 25 bp, Homo sapien
ccttgtcattgagcccaagggtgga

SEQ ID NO: 636925 - DNA, 25 bp, Homo sapien
tcctcagcgagatagagtgtgccag

SEQ ID NO: 636926 - DNA, 25 bp, Homo sapien
ctaaacccgtcagagagacccctga

SEQ ID NO: 636927 - DNA, 25 bp, Homo sapien
tggcaccatcgttcagctgggcatc

SEQ ID NO: 636928 - DNA, 25 bp, Homo sapien
tcctgggtctttacagcacacaagg

SEQ ID NO: 636929 - DNA, 25 bp, Homo sapien
agcacacaaggagcaccgcgacagg

SEQ ID NO: 636930 - DNA, 25 bp, Homo sapien
aaggagcaccgcgacaggcagtccg

SEQ ID NO: 636931 - DNA, 25 bp, Homo sapien
gggattgataggtttgggaccatcc

SEQ ID NO: 636932 - DNA, 25 bp, Homo sapien
tggaggggaacatgaggaggcaggc

SEQ ID NO: 636933 - DNA, 25 bp, Homo sapien
tgtggtggaggggaacatgaggagg

SEQ ID NO: 636934 - DNA, 25 bp, Homo sapien
ggtggaggggaacatgaggaggcag

SEQ ID NO: 636935 - DNA, 25 bp, Homo sapien
ggaggggaacatgaggaggcaggca

SEQ ID NO: 636936 - DNA, 25 bp, Homo sapien
gcaaaaacagcattggcatccttgt

SEQ ID NO: 636937 - DNA, 25 bp, Homo sapien
tattgaatgataattctggttgatc

SEQ ID NO: 636938 - DNA, 25 bp, Homo sapien
tgtctttcatccattaactttatat

SEQ ID NO: 636939 - DNA, 25 bp, Homo sapien
gttaagatctctttatctcaggcaa

SEQ ID NO: 636940 - DNA, 25 bp, Homo sapien
cgaaagtgtaaagttcacccttgtg

SEQ ID NO: 636941 - DNA, 25 bp, Homo sapien
ttttgccccacactcgaaagtgtaa

SEQ ID NO: 636942 - DNA, 25 bp, Homo sapien
agcttttgccccacactcgaaagtg

SEQ ID NO: 636943 - DNA, 25 bp, Homo sapien
gacgttgaaaccatttcagaagctt

SEQ ID NO: 636944 - DNA, 25 bp, Homo sapien
cgcagatctcaaagcctgaagataa

SEQ ID NO: 636945 - DNA, 25 bp, Homo sapien
ccccacgcagatctcaaagcctgaa

SEQ ID NO: 636946 - DNA, 25 bp, Homo sapien
cacgcagatctcaaagcctgaagat

SEQ ID NO: 636947 - DNA, 25 bp, Homo sapien
ccacgcagatctcaaagcctgaaga

SEQ ID NO: 636948 - DNA, 25 bp, Homo sapien
aaaatagaacaaaggcaaggtgtgg

SEQ ID NO: 636949 - DNA, 25 bp, Homo sapien
tgcaaaaatagaacaaaggcaaggt

SEQ ID NO: 636950 - DNA, 25 bp, Homo sapien
aaatagaacaaaggcaaggtgtggt

SEQ ID NO: 636951 - DNA, 25 bp, Homo sapien
caaaaatagaacaaaggcaaggtgt

SEQ ID NO: 636952 - DNA, 25 bp, Homo sapien
ccttgactccggcttgggaggaggt

SEQ ID NO: 636953 - DNA, 25 bp, Homo sapien
caaagccccttcaaatggcagttct

SEQ ID NO: 636954 - DNA, 25 bp, Homo sapien
cagctgtgaacaccaccaaagcccc

SEQ ID NO: 636955 - DNA, 25 bp, Homo sapien
gcctccttgactccggcttgggagg

SEQ ID NO: 636956 - DNA, 25 bp, Homo sapien
gcagcttgaaggtggcactcttcat

SEQ ID NO: 636957 - DNA, 25 bp, Homo sapien
agcagcagcttgaaggtggcactct

SEQ ID NO: 636958 - DNA, 25 bp, Homo sapien
cttggcctggaccagcagcagcttg

SEQ ID NO: 636959 - DNA, 25 bp, Homo sapien
cagcagcttgaaggtggcactcttc

SEQ ID NO: 636960 - DNA, 25 bp, Homo sapien
gaacataagggtctttgagtttgga

SEQ ID NO: 636961 - DNA, 25 bp, Homo sapien
ggctcagtgatgcaccaatcatggt

SEQ ID NO: 636962 - DNA, 25 bp, Homo sapien
gggctcagtgatgcaccaatcatgg

SEQ ID NO: 636963 - DNA, 25 bp, Homo sapien
ctgggctcagtgatgcaccaatcat

SEQ ID NO: 636964 - DNA, 25 bp, Homo sapien
tgggctcagtgatgcaccaatcatg

SEQ ID NO: 636965 - DNA, 25 bp, Homo sapien
tcttgttagtgggtggcttccagcc

SEQ ID NO: 636966 - DNA, 25 bp, Homo sapien
caaagcctcgagcaaagataactgt

SEQ ID NO: 636967 - DNA, 25 bp, Homo sapien
taactgtttaagtggctgcggcagc

SEQ ID NO: 636968 - DNA, 25 bp, Homo sapien
tatcgcccaggaacccactgattga

SEQ ID NO: 636969 - DNA, 25 bp, Homo sapien
tcctggggtatccttttgagggctg

SEQ ID NO: 636970 - DNA, 25 bp, Homo sapien
tggtattgaaatgaggcctcctggg

SEQ ID NO: 636971 - DNA, 25 bp, Homo sapien
tctcagctgttacactcagtactcc

SEQ ID NO: 636972 - DNA, 25 bp, Homo sapien
gaggccacaatagctcccatctcag

SEQ ID NO: 636973 - DNA, 25 bp, Homo sapien
cagcttccaccaggatcagctcaag

SEQ ID NO: 636974 - DNA, 25 bp, Homo sapien
tccaccaggatcagctcaagatgca

SEQ ID NO: 636975 - DNA, 25 bp, Homo sapien
caccaggatcagctcaagatgcaga

SEQ ID NO: 636976 - DNA, 25 bp, Homo sapien
caggatcagctcaagatgcagacaa

SEQ ID NO: 636977 - DNA, 25 bp, Homo sapien
gccaagagactccagatctgacttg

SEQ ID NO: 636978 - DNA, 25 bp, Homo sapien
tggccaagagactccagatctgact

SEQ ID NO: 636979 - DNA, 25 bp, Homo sapien
agcagcaggagattgtgggctgatg

SEQ ID NO: 636980 - DNA, 25 bp, Homo sapien
gcaggagattgtgggctgatgtgga

SEQ ID NO: 636981 - DNA, 25 bp, Homo sapien
agctgcctgttattccctcaaagag

SEQ ID NO: 636982 - DNA, 25 bp, Homo sapien
tctgctgaccatgtgcgctgaccat

SEQ ID NO: 636983 - DNA, 25 bp, Homo sapien
tttgcctggtccactctgctgacca

SEQ ID NO: 636984 - DNA, 25 bp, Homo sapien
tcctactccatagctgtccccaaat

SEQ ID NO: 636985 - DNA, 25 bp, Homo sapien
gctaaagcccacacccgctgaaact

SEQ ID NO: 636986 - DNA, 25 bp, Homo sapien
ggtgtcctgatggtgccagctgcta

SEQ ID NO: 636987 - DNA, 25 bp, Homo sapien
aactcacagtctgttcttgccacca

SEQ ID NO: 636988 - DNA, 25 bp, Homo sapien
atggtgccagctgctaaagcccaca

SEQ ID NO: 636989 - DNA, 25 bp, Homo sapien
aatgaagtaacagaccacccatttc

SEQ ID NO: 636990 - DNA, 25 bp, Homo sapien
atgaagtaacagaccacccatttca

SEQ ID NO: 636991 - DNA, 25 bp, Homo sapien
tattactacagtctagataacccat

SEQ ID NO: 636992 - DNA, 25 bp, Homo sapien
acgatttctgccactctagactatt

SEQ ID NO: 636993 - DNA, 25 bp, Homo sapien
atacacctaatataaagggtacaat

SEQ ID NO: 636994 - DNA, 25 bp, Homo sapien
tgtggccctcagcaatcaattccca

SEQ ID NO: 636995 - DNA, 25 bp, Homo sapien
tacctgagacccatggaattgctgg

SEQ ID NO: 636996 - DNA, 25 bp, Homo sapien
tcatttattgctgaacactgcagca

SEQ ID NO: 636997 - DNA, 25 bp, Homo sapien
gccaaagaggctattatggactgaa

SEQ ID NO: 636998 - DNA, 25 bp, Homo sapien
aatgacttcccattcggtttcagag

SEQ ID NO: 636999 - DNA, 25 bp, Homo sapien
taaatgggagctttgggtactaaca

SEQ ID NO: 637000 - DNA, 25 bp, Homo sapien
cacaagatcactgggctggtagaag

SEQ ID NO: 637001 - DNA, 25 bp, Homo sapien
catttgggtctatcattcctgggaa

SEQ ID NO: 637002 - DNA, 25 bp, Homo sapien
tggtgcctagcacattacgggtgtt

SEQ ID NO: 637003 - DNA, 25 bp, Homo sapien
aagggatagtgatgcgcgggccgct

SEQ ID NO: 637004 - DNA, 25 bp, Homo sapien
tttattaggcgcctactgcggacgg

SEQ ID NO: 637005 - DNA, 25 bp, Homo sapien
tcacgcagatcaggcgagaagggat

SEQ ID NO: 637006 - DNA, 25 bp, Homo sapien
tactgcggacggttggtcttcacgc

SEQ ID NO: 637007 - DNA, 25 bp, Homo sapien
tgttctcgccagtgattgggtcccg

SEQ ID NO: 637008 - DNA, 25 bp, Homo sapien
caatggactgtttacacccgggcga

SEQ ID NO: 637009 - DNA, 25 bp, Homo sapien
gcaggtcacaatccaaggtccggct

SEQ ID NO: 637010 - DNA, 25 bp, Homo sapien
actgcctccgcgcttgggaagggaa

SEQ ID NO: 637011 - DNA, 25 bp, Homo sapien
tcgtgcagtttgaggagtgcgtcct

SEQ ID NO: 637012 - DNA, 25 bp, Homo sapien
tgagtcacggcaacaagagctcgca

SEQ ID NO: 637013 - DNA, 25 bp, Homo sapien
tcctgcagcgcaatgggttagccca

SEQ ID NO: 637014 - DNA, 25 bp, Homo sapien
ggcgccaccagaacgtcgtgcagtt

SEQ ID NO: 637015 - DNA, 25 bp, Homo sapien
aatcagtatgtcctgtcccggaggc

SEQ ID NO: 637016 - DNA, 25 bp, Homo sapien
tttcatgctacagctgacgagcgcc

SEQ ID NO: 637017 - DNA, 25 bp, Homo sapien
aaaaaccatattgtgcacagggacc

SEQ ID NO: 637018 - DNA, 25 bp, Homo sapien
aagtggccgactttggactaagcaa

SEQ ID NO: 637019 - DNA, 25 bp, Homo sapien
cgaggtcagcctgcatgtggattcc

SEQ ID NO: 637020 - DNA, 25 bp, Homo sapien
ctgtgttacaatgactgccccaaac

SEQ ID NO: 637021 - DNA, 25 bp, Homo sapien
caaggctgggatagtgtgaggtgcc

SEQ ID NO: 637022 - DNA, 25 bp, Homo sapien
tgtgaggtgcccatataaccgaggt

SEQ ID NO: 637023 - DNA, 25 bp, Homo sapien
ccagcactgagggaatgctgtcatt

SEQ ID NO: 637024 - DNA, 25 bp, Homo sapien
atgctgtcattaggccagcgtctgg

SEQ ID NO: 637025 - DNA, 25 bp, Homo sapien
cccagcactgagggaatgctgtcat

SEQ ID NO: 637026 - DNA, 25 bp, Homo sapien
gtcattaggccagcgtctggcacca

SEQ ID NO: 637027 - DNA, 25 bp, Homo sapien
catcatacgtgtctgtggtcctggt

SEQ ID NO: 637028 - DNA, 25 bp, Homo sapien
gggctccaataagagccaaaggcat

SEQ ID NO: 637029 - DNA, 25 bp, Homo sapien
aggaaagggctccaataagagccaa

SEQ ID NO: 637030 - DNA, 25 bp, Homo sapien
gagccaaaggcatcatacgtgtctg

SEQ ID NO: 637031 - DNA, 25 bp, Homo sapien
ctaaactgaaatccagatgacacca

SEQ ID NO: 637032 - DNA, 25 bp, Homo sapien
acatggtccagaggtcctcctccct

SEQ ID NO: 637033 - DNA, 25 bp, Homo sapien
aaactgaaatccagatgacaccact

SEQ ID NO: 637034 - DNA, 25 bp, Homo sapien
gacatggtccagaggtcctcctccc

SEQ ID NO: 637035 - DNA, 25 bp, Homo sapien
gggtaccaacaggtatagcaggaaa

SEQ ID NO: 637036 - DNA, 25 bp, Homo sapien
ccagggtaccaacaggtatagcagg

SEQ ID NO: 637037 - DNA, 25 bp, Homo sapien
accaacaggtatagcaggaaaagcc

SEQ ID NO: 637038 - DNA, 25 bp, Homo sapien
cagggtaccaacaggtatagcagga

SEQ ID NO: 637039 - DNA, 25 bp, Homo sapien
tctgtcctggcgtgttcctagttcc

SEQ ID NO: 637040 - DNA, 25 bp, Homo sapien
tcagtgcatttgtcttcaggatagg

SEQ ID NO: 637041 - DNA, 25 bp, Homo sapien
cctgggacaactgactcccgctcag

SEQ ID NO: 637042 - DNA, 25 bp, Homo sapien
cccgctcaggctctcagtgcatttg

SEQ ID NO: 637043 - DNA, 25 bp, Homo sapien
tctcagttttgctgcgaacaaagag

SEQ ID NO: 637044 - DNA, 25 bp, Homo sapien
gctgcgaacaaagagcaccttcaca

SEQ ID NO: 637045 - DNA, 25 bp, Homo sapien
taagtggcgcccgtttatctgggtc

SEQ ID NO: 637046 - DNA, 25 bp, Homo sapien
ttgtggtaagtggcgcccgtttatc

SEQ ID NO: 637047 - DNA, 25 bp, Homo sapien
caagtggttactgagaattagcagc

SEQ ID NO: 637048 - DNA, 25 bp, Homo sapien
aattcagcaagtggttactgagaat

SEQ ID NO: 637049 - DNA, 25 bp, Homo sapien
gacctaggtctttatacaaattcag

SEQ ID NO: 637050 - DNA, 25 bp, Homo sapien
ggacctaggtctttatacaaattca

SEQ ID NO: 637051 - DNA, 25 bp, Homo sapien
agtaagtgatggcaaagtagaggac

SEQ ID NO: 637052 - DNA, 25 bp, Homo sapien
aagaagtaagtgatggcaaagtaga

SEQ ID NO: 637053 - DNA, 25 bp, Homo sapien
agtagaggacacatgacttaagatg

SEQ ID NO: 637054 - DNA, 25 bp, Homo sapien
tgatggcaaagtagaggacacatga

SEQ ID NO: 637055 - DNA, 25 bp, Homo sapien
gaacccctccacgtgaaacagatgt

SEQ ID NO: 637056 - DNA, 25 bp, Homo sapien
gatgtatttgccaaagttggccgtc

SEQ ID NO: 637057 - DNA, 25 bp, Homo sapien
cacgtgaaacagatgtatttgccaa

SEQ ID NO: 637058 - DNA, 25 bp, Homo sapien
cacacttggatttcaaggaacccct

SEQ ID NO: 637059 - DNA, 25 bp, Homo sapien
gttatcccatttgtcagtactccca

SEQ ID NO: 637060 - DNA, 25 bp, Homo sapien
cgaagctcctgttgtatatgttgta

SEQ ID NO: 637061 - DNA, 25 bp, Homo sapien
cattttgcccgttctgtatacccga

SEQ ID NO: 637062 - DNA, 25 bp, Homo sapien
tcatggagcactgcgaagctcctgt

SEQ ID NO: 637063 - DNA, 25 bp, Homo sapien
cctttctattggagctgccagcttt

SEQ ID NO: 637064 - DNA, 25 bp, Homo sapien
ctcccgtttggcagtgtggaagctc

SEQ ID NO: 637065 - DNA, 25 bp, Homo sapien
tcccgtttggcagtgtggaagctct

SEQ ID NO: 637066 - DNA, 25 bp, Homo sapien
acatctggacctttctattggagct

SEQ ID NO: 637067 - DNA, 25 bp, Homo sapien
tatgacacctcacttccctagagaa

SEQ ID NO: 637068 - DNA, 25 bp, Homo sapien
ggacaggcaccaatttctttaaaga

SEQ ID NO: 637069 - DNA, 25 bp, Homo sapien
aagaaattcaatgtgggcaaggcat

SEQ ID NO: 637070 - DNA, 25 bp, Homo sapien
cattgagacttcagaagagcaggac

SEQ ID NO: 637071 - DNA, 25 bp, Homo sapien
gcccttgggcctcggagatgatcag

SEQ ID NO: 637072 - DNA, 25 bp, Homo sapien
ggcctcggagatgatcagaggtgaa

SEQ ID NO: 637073 - DNA, 25 bp, Homo sapien
ctcggagatgatcagaggtgaagaa

SEQ ID NO: 637074 - DNA, 25 bp, Homo sapien
ccttgggcctcggagatgatcagag

SEQ ID NO: 637075 - DNA, 25 bp, Homo sapien
tttaagctattgagagccccaggcc

SEQ ID NO: 637076 - DNA, 25 bp, Homo sapien
tttggccaggagaactaagaaggtc

SEQ ID NO: 637077 - DNA, 25 bp, Homo sapien
actggctgccgttgtcgtgttctca

SEQ ID NO: 637078 - DNA, 25 bp, Homo sapien
actttgccatgataacagggtgtcc

SEQ ID NO: 637079 - DNA, 25 bp, Homo sapien
gcctgccctcagtatagacgtatcc

SEQ ID NO: 637080 - DNA, 25 bp, Homo sapien
tgttaggtgcctgccctcagtatag

SEQ ID NO: 637081 - DNA, 25 bp, Homo sapien
cagtatagacgtatccaatgggaaa

SEQ ID NO: 637082 - DNA, 25 bp, Homo sapien
gccctcagtatagacgtatccaatg

SEQ ID NO: 637083 - DNA, 25 bp, Homo sapien
atggccaaatagtatagggccactg

SEQ ID NO: 637084 - DNA, 25 bp, Homo sapien
catttgtgggctcgccaccttcagg

SEQ ID NO: 637085 - DNA, 25 bp, Homo sapien
gcaatgctcttgtgttgtccctctg

SEQ ID NO: 637086 - DNA, 25 bp, Homo sapien
tttccgtttctatgtgaccaaggca

SEQ ID NO: 637087 - DNA, 25 bp, Homo sapien
aaatgcaggccagcgttttagcccc

SEQ ID NO: 637088 - DNA, 25 bp, Homo sapien
tgtaacatccctagtgaggctccag

SEQ ID NO: 637089 - DNA, 25 bp, Homo sapien
cagccttcgagacaacacgggtgta

SEQ ID NO: 637090 - DNA, 25 bp, Homo sapien
tctgttcattcgagactggccccgt

SEQ ID NO: 637091 - DNA, 25 bp, Homo sapien
tcaaggggcttctgtctggagaaat

SEQ ID NO: 637092 - DNA, 25 bp, Homo sapien
tctggagaaatgccctcaaagggta

SEQ ID NO: 637093 - DNA, 25 bp, Homo sapien
tgtctggagaaatgccctcaaaggg

SEQ ID NO: 637094 - DNA, 25 bp, Homo sapien
tggagaaatgccctcaaagggtaac

SEQ ID NO: 637095 - DNA, 25 bp, Homo sapien
cagtaggtgtggcattgaattggcc

SEQ ID NO: 637096 - DNA, 25 bp, Homo sapien
tggcattgaattggccagtgttagc

SEQ ID NO: 637097 - DNA, 25 bp, Homo sapien
cgagatgagtccactgccgttgcct

SEQ ID NO: 637098 - DNA, 25 bp, Homo sapien
gttagcatctacagccatcaccgag

SEQ ID NO: 637099 - DNA, 25 bp, Homo sapien
aggttatagacggtatcagcaggga

SEQ ID NO: 637100 - DNA, 25 bp, Homo sapien
ctaaggttatagacggtatcagcag

SEQ ID NO: 637101 - DNA, 25 bp, Homo sapien
gttatagacggtatcagcagggagg

SEQ ID NO: 637102 - DNA, 25 bp, Homo sapien
taaggttatagacggtatcagcagg

SEQ ID NO: 637103 - DNA, 25 bp, Homo sapien
cccctaatgtgtatgaatgactgag

SEQ ID NO: 637104 - DNA, 25 bp, Homo sapien
aagccaggcacaaagttagtttcca

SEQ ID NO: 637105 - DNA, 25 bp, Homo sapien
tatttaagttccttgaacactgtgg

SEQ ID NO: 637106 - DNA, 25 bp, Homo sapien
tctaggacctacgtgtgaacaactt

SEQ ID NO: 637107 - DNA, 25 bp, Homo sapien
attgttctgagggcgtggtgggcat

SEQ ID NO: 637108 - DNA, 25 bp, Homo sapien
cattgttctgagggcgtggtgggca

SEQ ID NO: 637109 - DNA, 25 bp, Homo sapien
ccattgttctgagggcgtggtgggc

SEQ ID NO: 637110 - DNA, 25 bp, Homo sapien
ttggaaaaggagtcaaaatacctga

SEQ ID NO: 637111 - DNA, 25 bp, Homo sapien
agaacttttgttccaggcaagaggg

SEQ ID NO: 637112 - DNA, 25 bp, Homo sapien
gtgttgcataattctggacaggcag

SEQ ID NO: 637113 - DNA, 25 bp, Homo sapien
aggcagcaaagcctgacctgtggat

SEQ ID NO: 637114 - DNA, 25 bp, Homo sapien
ctgtgttggtgagaggtagcgtgtg

SEQ ID NO: 637115 - DNA, 25 bp, Homo sapien
taaactcaatatatgcctcacactg

SEQ ID NO: 637116 - DNA, 25 bp, Homo sapien
tcaacagacaagaatagtgagtcca

SEQ ID NO: 637117 - DNA, 25 bp, Homo sapien
gcctcacactgtatacaaaagttaa

SEQ ID NO: 637118 - DNA, 25 bp, Homo sapien
aaattagatccacatgtatttagac

SEQ ID NO: 637119 - DNA, 25 bp, Homo sapien
cttccttctcccagcagccatggtg

SEQ ID NO: 637120 - DNA, 25 bp, Homo sapien
ctggcagcatcttccttctcccagc

SEQ ID NO: 637121 - DNA, 25 bp, Homo sapien
ttctcccagcagccatggtgctgtc

SEQ ID NO: 637122 - DNA, 25 bp, Homo sapien
ggcagcatcttccttctcccagcag

SEQ ID NO: 637123 - DNA, 25 bp, Homo sapien
tgaggcctgttgcttggcaacagcc

SEQ ID NO: 637124 - DNA, 25 bp, Homo sapien
agctgaggcctgttgcttggcaaca

SEQ ID NO: 637125 - DNA, 25 bp, Homo sapien
cctgttgcttggcaacagccagcat

SEQ ID NO: 637126 - DNA, 25 bp, Homo sapien
ggcctgttgcttggcaacagccagc

SEQ ID NO: 637127 - DNA, 25 bp, Homo sapien
tcaattacttttgggacatgcatga

SEQ ID NO: 637128 - DNA, 25 bp, Homo sapien
aattacttttgggacatgcatgatg

SEQ ID NO: 637129 - DNA, 25 bp, Homo sapien
gacatgcatgatgtgagcatacaaa

SEQ ID NO: 637130 - DNA, 25 bp, Homo sapien
tcctcaattacttttgggacatgca

SEQ ID NO: 637131 - DNA, 25 bp, Homo sapien
cccagcttgaaagttctgacctcat

SEQ ID NO: 637132 - DNA, 25 bp, Homo sapien
gatggggttgtctgcaccgctgtcc

SEQ ID NO: 637133 - DNA, 25 bp, Homo sapien
tccaccttccggtagtcccagcttg

SEQ ID NO: 637134 - DNA, 25 bp, Homo sapien
tgtctgcaccgctgtccttgtgcct

SEQ ID NO: 637135 - DNA, 25 bp, Homo sapien
tgagagctacagcacccagcctaca

SEQ ID NO: 637136 - DNA, 25 bp, Homo sapien
atggtgcggggggtctcactttcct

SEQ ID NO: 637137 - DNA, 25 bp, Homo sapien
actttcctgcctaggctcgtctcga

SEQ ID NO: 637138 - DNA, 25 bp, Homo sapien
cacccagcctacaacttctttatta

SEQ ID NO: 637139 - DNA, 25 bp, Homo sapien
ctgtgtttcctgggttcttggctag

SEQ ID NO: 637140 - DNA, 25 bp, Homo sapien
tgtgtttcctgggttcttggctagc

SEQ ID NO: 637141 - DNA, 25 bp, Homo sapien
gatttcttcaccagtgtcttattga

SEQ ID NO: 637142 - DNA, 25 bp, Homo sapien
ggacctgatttcttcaccagtgtct

SEQ ID NO: 637143 - DNA, 25 bp, Homo sapien
tgggacctgatttcttcaccagtgt

SEQ ID NO: 637144 - DNA, 25 bp, Homo sapien
tcttcaccagtgtcttattgaccat

SEQ ID NO: 637145 - DNA, 25 bp, Homo sapien
tctcgcttagcagtggagggcacaa

SEQ ID NO: 637146 - DNA, 25 bp, Homo sapien
ggcacaaggccctaggatcttggta

SEQ ID NO: 637147 - DNA, 25 bp, Homo sapien
cattaagcgcctcagcacaagtcct

SEQ ID NO: 637148 - DNA, 25 bp, Homo sapien
ctcaagtaacttcatgcggctccac

SEQ ID NO: 637149 - DNA, 25 bp, Homo sapien
gaagatgttccaggtctcactgtcc

SEQ ID NO: 637150 - DNA, 25 bp, Homo sapien
ccaagaaattgtgccacctgtgctg

SEQ ID NO: 637151 - DNA, 25 bp, Homo sapien
tgaatcccaacaataaccctaagag

SEQ ID NO: 637152 - DNA, 25 bp, Homo sapien
tctcaccggttcaggcaccaatctg

SEQ ID NO: 637153 - DNA, 25 bp, Homo sapien
gagctagatcccctagaaggcatct

SEQ ID NO: 637154 - DNA, 25 bp, Homo sapien
ctagaaggcatctatggctctgcac

SEQ ID NO: 637155 - DNA, 25 bp, Homo sapien
actagccaggcataggcagacacgg

SEQ ID NO: 637156 - DNA, 25 bp, Homo sapien
acacacacgagctagatcccctaga

SEQ ID NO: 637157 - DNA, 25 bp, Homo sapien
gggacccgggtcagctgcaatgtct

SEQ ID NO: 637158 - DNA, 25 bp, Homo sapien
ctcggtgggcacagtcataatacaa

SEQ ID NO: 637159 - DNA, 25 bp, Homo sapien
cagatgtgtctgatgcaggaggccc

SEQ ID NO: 637160 - DNA, 25 bp, Homo sapien
tattgtaccagaaggcctagggatc

SEQ ID NO: 637161 - DNA, 25 bp, Homo sapien
attcccctcccttgaccatatggga

SEQ ID NO: 637162 - DNA, 25 bp, Homo sapien
catatgggaacttctggatccctgc

SEQ ID NO: 637163 - DNA, 25 bp, Homo sapien
tactgctggtcaacaagtcctttca

SEQ ID NO: 637164 - DNA, 25 bp, Homo sapien
caagtcctttcagcgtcttcattcc

SEQ ID NO: 637165 - DNA, 25 bp, Homo sapien
catgggcggtaccaggtctgtggtt

SEQ ID NO: 637166 - DNA, 25 bp, Homo sapien
cacggggctctggatatgggggttc

SEQ ID NO: 637167 - DNA, 25 bp, Homo sapien
cagctgctctggatttttctggccc

SEQ ID NO: 637168 - DNA, 25 bp, Homo sapien
ctggatatgggggttccaagcagca

SEQ ID NO: 637169 - DNA, 25 bp, Homo sapien
ccttctctccagaactgtcatcaac

SEQ ID NO: 637170 - DNA, 25 bp, Homo sapien
ctctccagaactgtcatcaaccaag

SEQ ID NO: 637171 - DNA, 25 bp, Homo sapien
aagatgccaacagggaatgggttga

SEQ ID NO: 637172 - DNA, 25 bp, Homo sapien
caagatgccaacagggaatgggttg

SEQ ID NO: 637173 - DNA, 25 bp, Homo sapien
gaacaatcaacggagatatatcact

SEQ ID NO: 637174 - DNA, 25 bp, Homo sapien
gaccaaagaattcaatctttgactg

SEQ ID NO: 637175 - DNA, 25 bp, Homo sapien
cggagatatatcactaccttcagac

SEQ ID NO: 637176 - DNA, 25 bp, Homo sapien
ccaaagaattcaatctttgactgtg

SEQ ID NO: 637177 - DNA, 25 bp, Homo sapien
aactggaatagagctcatataggtg

SEQ ID NO: 637178 - DNA, 25 bp, Homo sapien
taggtgagagcacattcaaattctc

SEQ ID NO: 637179 - DNA, 25 bp, Homo sapien
tatagacacttactatgaaaactgg

SEQ ID NO: 637180 - DNA, 25 bp, Homo sapien
gacgtgaactaaggttatagacact

SEQ ID NO: 637181 - DNA, 25 bp, Homo sapien
attataaaccagtttcataggccac

SEQ ID NO: 637182 - DNA, 25 bp, Homo sapien
tataaaccagtttcataggccacaa

SEQ ID NO: 637183 - DNA, 25 bp, Homo sapien
ttataaaccagtttcataggccaca

SEQ ID NO: 637184 - DNA, 25 bp, Homo sapien
ggactatgtacagccttacgggaaa

SEQ ID NO: 637185 - DNA, 25 bp, Homo sapien
aaaggactatgtacagccttacggg

SEQ ID NO: 637186 - DNA, 25 bp, Homo sapien
taaaaggactatgtacagccttacg

SEQ ID NO: 637187 - DNA, 25 bp, Homo sapien
tatgtacagccttacgggaaacagg

SEQ ID NO: 637188 - DNA, 25 bp, Homo sapien
tagggccttggtgggcgcattcccg

SEQ ID NO: 637189 - DNA, 25 bp, Homo sapien
agggccttggtgggcgcattcccgg

SEQ ID NO: 637190 - DNA, 25 bp, Homo sapien
ctagggccttggtgggcgcattccc

SEQ ID NO: 637191 - DNA, 25 bp, Homo sapien
acgcctctgcggagctacttccata

SEQ ID NO: 637192 - DNA, 25 bp, Homo sapien
acgtggccctgaggaatcgagccca

SEQ ID NO: 637193 - DNA, 25 bp, Homo sapien
tcccatgagactccacgaacaacag

SEQ ID NO: 637194 - DNA, 25 bp, Homo sapien
gagactccacgaacaacagcataag

SEQ ID NO: 637195 - DNA, 25 bp, Homo sapien
tactaggcactgtcaaaccaaagag

SEQ ID NO: 637196 - DNA, 25 bp, Homo sapien
taactagggactactctgaggctga

SEQ ID NO: 637197 - DNA, 25 bp, Homo sapien
gaggccgctgccttagatattgaga

SEQ ID NO: 637198 - DNA, 25 bp, Homo sapien
tccataatagtacagcaaagcccag

SEQ ID NO: 637199 - DNA, 25 bp, Homo sapien
cattgggggacccataggaggtctc

SEQ ID NO: 637200 - DNA, 25 bp, Homo sapien
gggacccataggaggtctcatacca

SEQ ID NO: 637201 - DNA, 25 bp, Homo sapien
ggaggccgcattcccggagggggca

SEQ ID NO: 637202 - DNA, 25 bp, Homo sapien
cataggaggtctcataccaggaggt

SEQ ID NO: 637203 - DNA, 25 bp, Homo sapien
gccaggtgggtactgggttggagcc

SEQ ID NO: 637204 - DNA, 25 bp, Homo sapien
agcggctgcaacagtacctcttcct

SEQ ID NO: 637205 - DNA, 25 bp, Homo sapien
tggagccccggcaatactggctgtg

SEQ ID NO: 637206 - DNA, 25 bp, Homo sapien
gctgcagcggctgcaacagtacctc

SEQ ID NO: 637207 - DNA, 25 bp, Homo sapien
caagtggaactcgagcaataccagt

SEQ ID NO: 637208 - DNA, 25 bp, Homo sapien
cagcaagtggaactcgagcaatacc

SEQ ID NO: 637209 - DNA, 25 bp, Homo sapien
ccagcaagtggaactcgagcaatac

SEQ ID NO: 637210 - DNA, 25 bp, Homo sapien
agcctggggcatgggaaccccagct

SEQ ID NO: 637211 - DNA, 25 bp, Homo sapien
caaatatgctctgatgcccagtgat

SEQ ID NO: 637212 - DNA, 25 bp, Homo sapien
aaacaaatatgctctgatgcccagt

SEQ ID NO: 637213 - DNA, 25 bp, Homo sapien
aataaacaaatatgctctgatgccc

SEQ ID NO: 637214 - DNA, 25 bp, Homo sapien
aaataaacaaatatgctctgatgcc

SEQ ID NO: 637215 - DNA, 25 bp, Homo sapien
taagtctagagaaacatgccacaac

SEQ ID NO: 637216 - DNA, 25 bp, Homo sapien
actatgagttatccctgaagcaggg

SEQ ID NO: 637217 - DNA, 25 bp, Homo sapien
tctaatccgctaggtgacaatggac

SEQ ID NO: 637218 - DNA, 25 bp, Homo sapien
aataatcccacaatcccgggctgag

SEQ ID NO: 637219 - DNA, 25 bp, Homo sapien
cattaagaactgacccagatggctt

SEQ ID NO: 637220 - DNA, 25 bp, Homo sapien
ggttggcgcaaggtagattctcagt

SEQ ID NO: 637221 - DNA, 25 bp, Homo sapien
tgtcagtttcaccacttagtggctg

SEQ ID NO: 637222 - DNA, 25 bp, Homo sapien
taaggtctacctaggctttgtcgtc

SEQ ID NO: 637223 - DNA, 25 bp, Homo sapien
cccggcctcttgcagggtaacctct

SEQ ID NO: 637224 - DNA, 25 bp, Homo sapien
ccggcctcttgcagggtaacctctt

SEQ ID NO: 637225 - DNA, 25 bp, Homo sapien
cggcctcttgcagggtaacctcttt

SEQ ID NO: 637226 - DNA, 25 bp, Homo sapien
gcctcttgcagggtaacctctttaa

SEQ ID NO: 637227 - DNA, 25 bp, Homo sapien
cctctactgtcattgagaccagatt

SEQ ID NO: 637228 - DNA, 25 bp, Homo sapien
tctttgggaggaggtccctctactg

SEQ ID NO: 637229 - DNA, 25 bp, Homo sapien
agaccagattctcccctcgcagcag

SEQ ID NO: 637230 - DNA, 25 bp, Homo sapien
agcagcaccagaccgaggactcgct

SEQ ID NO: 637231 - DNA, 25 bp, Homo sapien
tattccacagcaaccgtgaaggccc

SEQ ID NO: 637232 - DNA, 25 bp, Homo sapien
taccatgccaagaggacacactgac

SEQ ID NO: 637233 - DNA, 25 bp, Homo sapien
cagaagaaatcagccccaaggagaa

SEQ ID NO: 637234 - DNA, 25 bp, Homo sapien
taaggtcttgccaacatcaggaggc

SEQ ID NO: 637235 - DNA, 25 bp, Homo sapien
cttacggaattgtagcaaagtagac

SEQ ID NO: 637236 - DNA, 25 bp, Homo sapien
tctccaattgtttgtataaatgcca

SEQ ID NO: 637237 - DNA, 25 bp, Homo sapien
agttagccaataacttacggaattg

SEQ ID NO: 637238 - DNA, 25 bp, Homo sapien
acccacatggggagctgagcactta

SEQ ID NO: 637239 - DNA, 25 bp, Homo sapien
aggctgcattgggagagccctttag

SEQ ID NO: 637240 - DNA, 25 bp, Homo sapien
tttcagaccaggctgcattgggaga

SEQ ID NO: 637241 - DNA, 25 bp, Homo sapien
agaccaggctgcattgggagagccc

SEQ ID NO: 637242 - DNA, 25 bp, Homo sapien
tcagaccaggctgcattgggagagc

SEQ ID NO: 637243 - DNA, 25 bp, Homo sapien
ggcaatgaggccagaaactcaagct

SEQ ID NO: 637244 - DNA, 25 bp, Homo sapien
aaactcaagctctcccccctcacac

SEQ ID NO: 637245 - DNA, 25 bp, Homo sapien
gctttacaaataggcaatgaggcca

SEQ ID NO: 637246 - DNA, 25 bp, Homo sapien
acagctttacaaataggcaatgagg

SEQ ID NO: 637247 - DNA, 25 bp, Homo sapien
taagtctgccctctaaaactggaga

SEQ ID NO: 637248 - DNA, 25 bp, Homo sapien
gagcaaggtttgctggactcaaaaa

SEQ ID NO: 637249 - DNA, 25 bp, Homo sapien
acatgagagccctttaccccagtac

SEQ ID NO: 637250 - DNA, 25 bp, Homo sapien
gatttcttagcgttcaatgtcccca

SEQ ID NO: 637251 - DNA, 25 bp, Homo sapien
ggtgccaatgaagatccggccgtcc

SEQ ID NO: 637252 - DNA, 25 bp, Homo sapien
aagatccggccgtcctgcaggatgc

SEQ ID NO: 637253 - DNA, 25 bp, Homo sapien
gccaatgaagatccggccgtcctgc

SEQ ID NO: 637254 - DNA, 25 bp, Homo sapien
gaagatccggccgtcctgcaggatg

SEQ ID NO: 637255 - DNA, 25 bp, Homo sapien
ggacagggatgagactctgctcttt

SEQ ID NO: 637256 - DNA, 25 bp, Homo sapien
tggacagggatgagactctgctctt

SEQ ID NO: 637257 - DNA, 25 bp, Homo sapien
aaacttcccatggcgttcttgtcca

SEQ ID NO: 637258 - DNA, 25 bp, Homo sapien
atggacagggatgagactctgctct

SEQ ID NO: 637259 - DNA, 25 bp, Homo sapien
tccacaacagactcggaagctcccg

SEQ ID NO: 637260 - DNA, 25 bp, Homo sapien
tccccgatcagtcgcggttcccact

SEQ ID NO: 637261 - DNA, 25 bp, Homo sapien
gactcggaagctcccgcgccgccag

SEQ ID NO: 637262 - DNA, 25 bp, Homo sapien
cctccccgatcagtcgcggttccca

SEQ ID NO: 637263 - DNA, 25 bp, Homo sapien
tgatggctctgatacccgccggatt

SEQ ID NO: 637264 - DNA, 25 bp, Homo sapien
acccgccggattcgcctcctcagag

SEQ ID NO: 637265 - DNA, 25 bp, Homo sapien
atggctctgatacccgccggattcg

SEQ ID NO: 637266 - DNA, 25 bp, Homo sapien
ttctgatggctctgatacccgccgg

SEQ ID NO: 637267 - DNA, 25 bp, Homo sapien
tagaaacctacttccggtccagctc

SEQ ID NO: 637268 - DNA, 25 bp, Homo sapien
gctaccggaaatgcagcaccacgta

SEQ ID NO: 637269 - DNA, 25 bp, Homo sapien
caccacgtaaaatgcggtcgggtag

SEQ ID NO: 637270 - DNA, 25 bp, Homo sapien
tgcagcaccacgtaaaatgcggtcg

SEQ ID NO: 637271 - DNA, 25 bp, Homo sapien
caaggagagcttccaccttggtgct

SEQ ID NO: 637272 - DNA, 25 bp, Homo sapien
gctgttcctcaaacccagcaaggag

SEQ ID NO: 637273 - DNA, 25 bp, Homo sapien
tttcttgttctcacggcagccagag

SEQ ID NO: 637274 - DNA, 25 bp, Homo sapien
ccttctaaacgtactgggatatcag

SEQ ID NO: 637275 - DNA, 25 bp, Homo sapien
tacactcaggtctatcagaaggatg

SEQ ID NO: 637276 - DNA, 25 bp, Homo sapien
tacatcctactgagaaagacatagt

SEQ ID NO: 637277 - DNA, 25 bp, Homo sapien
taaggccatgcaccattattgggat

SEQ ID NO: 637278 - DNA, 25 bp, Homo sapien
gagcagagacctgaacctacactca

SEQ ID NO: 637279 - DNA, 25 bp, Homo sapien
ttccacgagaatgcagattttatcc

SEQ ID NO: 637280 - DNA, 25 bp, Homo sapien
tcatgtctgtcaagaatcctctacc

SEQ ID NO: 637281 - DNA, 25 bp, Homo sapien
ctgagtgtttggctgttctccaaaa

SEQ ID NO: 637282 - DNA, 25 bp, Homo sapien
gattatgcaatgagagaatctcatg

SEQ ID NO: 637283 - DNA, 25 bp, Homo sapien
aaaaaatgggtaggacatggatagc

SEQ ID NO: 637284 - DNA, 25 bp, Homo sapien
gatgcaggtagcaatctgactttag

SEQ ID NO: 637285 - DNA, 25 bp, Homo sapien
caagacttcttggagtgaggcttag

SEQ ID NO: 637286 - DNA, 25 bp, Homo sapien
gaatgatggtgggttctgaactcaa

SEQ ID NO: 637287 - DNA, 25 bp, Homo sapien
gagagaaactctagtacgtttcaat

SEQ ID NO: 637288 - DNA, 25 bp, Homo sapien
tctttcttctgagagaaactctagt

SEQ ID NO: 637289 - DNA, 25 bp, Homo sapien
gccatagtcctggagtggagaattt

SEQ ID NO: 637290 - DNA, 25 bp, Homo sapien
ggaaaggtcctgatagtgacccttc

SEQ ID NO: 637291 - DNA, 25 bp, Homo sapien
gaatgaccttctggagttgtccccg

SEQ ID NO: 637292 - DNA, 25 bp, Homo sapien
tgttacccctgaaaaggtcatctgg

SEQ ID NO: 637293 - DNA, 25 bp, Homo sapien
tgacatcgggatgaagctccaccca

SEQ ID NO: 637294 - DNA, 25 bp, Homo sapien
agggctgacacatctctggaacttc

SEQ ID NO: 637295 - DNA, 25 bp, Homo sapien
agatttgacttatgactaaagcctc

SEQ ID NO: 637296 - DNA, 25 bp, Homo sapien
tgagatttgacttatgactaaagcc

SEQ ID NO: 637297 - DNA, 25 bp, Homo sapien
gagatttgacttatgactaaagcct

SEQ ID NO: 637298 - DNA, 25 bp, Homo sapien
gatgagatttgacttatgactaaag

SEQ ID NO: 637299 - DNA, 25 bp, Homo sapien
ataatgcttctcccctgagtgtgtc

SEQ ID NO: 637300 - DNA, 25 bp, Homo sapien
gacaaggaggagtgatttccggcta

SEQ ID NO: 637301 - DNA, 25 bp, Homo sapien
aaggcttctccatcgagtgtatacg

SEQ ID NO: 637302 - DNA, 25 bp, Homo sapien
tcaagcctttgtctagctgcacagg

SEQ ID NO: 637303 - DNA, 25 bp, Homo sapien
gaaggatgacttctcgctaaagcct

SEQ ID NO: 637304 - DNA, 25 bp, Homo sapien
tgagatctgagttctggctaaagcc

SEQ ID NO: 637305 - DNA, 25 bp, Homo sapien
taagcccaggaagatctgaagtaca

SEQ ID NO: 637306 - DNA, 25 bp, Homo sapien
aactgctgacaggagaaggccagaa

SEQ ID NO: 637307 - DNA, 25 bp, Homo sapien
tacatgggaatactgctgcccctgc

SEQ ID NO: 637308 - DNA, 25 bp, Homo sapien
ccttgcagaccagggtttggagcca

SEQ ID NO: 637309 - DNA, 25 bp, Homo sapien
aagtagggctgctgagttgttctgc

SEQ ID NO: 637310 - DNA, 25 bp, Homo sapien
tactgccatgcctataattgataat

SEQ ID NO: 637311 - DNA, 25 bp, Homo sapien
tagagtagccataagtagggctgct

SEQ ID NO: 637312 - DNA, 25 bp, Homo sapien
tgttttactgccatgcctataattg

SEQ ID NO: 637313 - DNA, 25 bp, Homo sapien
ccatgattttaggattctggcacca

SEQ ID NO: 637314 - DNA, 25 bp, Homo sapien
cacattggtatatactgtccacagc

SEQ ID NO: 637315 - DNA, 25 bp, Homo sapien
ggctgcccacctgtaaacaaagact

SEQ ID NO: 637316 - DNA, 25 bp, Homo sapien
tagtggtctctatgacacatgtgga

SEQ ID NO: 637317 - DNA, 25 bp, Homo sapien
ttgtttctatttctgacccgtcatc

SEQ ID NO: 637318 - DNA, 25 bp, Homo sapien
tactttgtgacgtgaactttttgcc

SEQ ID NO: 637319 - DNA, 25 bp, Homo sapien
tcttataagacttgtggtcattctg

SEQ ID NO: 637320 - DNA, 25 bp, Homo sapien
ttttgactgtgattcgctgccatct

SEQ ID NO: 637321 - DNA, 25 bp, Homo sapien
gccgagattgcacgattgcactcta

SEQ ID NO: 637322 - DNA, 25 bp, Homo sapien
cgagattgcacgattgcactctagc

SEQ ID NO: 637323 - DNA, 25 bp, Homo sapien
ctgggcaacaagagcgaaactccat

SEQ ID NO: 637324 - DNA, 25 bp, Homo sapien
agcctgggcaacaagagcgaaactc

SEQ ID NO: 637325 - DNA, 25 bp, Homo sapien
cgttcacatactgtttatggctgca

SEQ ID NO: 637326 - DNA, 25 bp, Homo sapien
tatggctgcaactcaatggcaagtt

SEQ ID NO: 637327 - DNA, 25 bp, Homo sapien
cagagggcttatcacctgtaaaaac

SEQ ID NO: 637328 - DNA, 25 bp, Homo sapien
cccctgatctagagttatgttgcaa

SEQ ID NO: 637329 - DNA, 25 bp, Homo sapien
ggctggagtgcaacggcacaatctc

SEQ ID NO: 637330 - DNA, 25 bp, Homo sapien
actccctggttcaagtgattctcct

SEQ ID NO: 637331 - DNA, 25 bp, Homo sapien
cagactgagtttcactctgtcacca

SEQ ID NO: 637332 - DNA, 25 bp, Homo sapien
gcaacctctgactccctggttcaag

SEQ ID NO: 637333 - DNA, 25 bp, Homo sapien
ttcacctgaaatgctcttacactag

SEQ ID NO: 637334 - DNA, 25 bp, Homo sapien
ttaaggtcttcgtgtcaataattcc

SEQ ID NO: 637335 - DNA, 25 bp, Homo sapien
gggcaggtacatcccttcattaagg

SEQ ID NO: 637336 - DNA, 25 bp, Homo sapien
cctcaccacattatgtctttagaca

SEQ ID NO: 637337 - DNA, 25 bp, Homo sapien
gagagaagattcctgtaattctcca

SEQ ID NO: 637338 - DNA, 25 bp, Homo sapien
gaagattcctgtaattctccagcat

SEQ ID NO: 637339 - DNA, 25 bp, Homo sapien
gagaagattcctgtaattctccagc

SEQ ID NO: 637340 - DNA, 25 bp, Homo sapien
ccaatgagagaagattcctgtaatt

SEQ ID NO: 637341 - DNA, 25 bp, Homo sapien
tctgcttctgtgaagatcacagtca

SEQ ID NO: 637342 - DNA, 25 bp, Homo sapien
ctggagagcctggatatgcaagttg

SEQ ID NO: 637343 - DNA, 25 bp, Homo sapien
taaattaatgtatagcaagccacca

SEQ ID NO: 637344 - DNA, 25 bp, Homo sapien
tatgaagttcttctgagcactactg

SEQ ID NO: 637345 - DNA, 25 bp, Homo sapien
tgcaagttgatgtaattcgtcagaa

SEQ ID NO: 637346 - DNA, 25 bp, Homo sapien
tttttctgggggcagtcagtatcat

SEQ ID NO: 637347 - DNA, 25 bp, Homo sapien
cagtcagtatcattagaaggcaagc

SEQ ID NO: 637348 - DNA, 25 bp, Homo sapien
ggcagtcagtatcattagaaggcaa

SEQ ID NO: 637349 - DNA, 25 bp, Homo sapien
ctgggggcagtcagtatcattagaa

SEQ ID NO: 637350 - DNA, 25 bp, Homo sapien
cgctccctgagcagctcttctgagc

SEQ ID NO: 637351 - DNA, 25 bp, Homo sapien
gacgctccctgagcagctcttctga

SEQ ID NO: 637352 - DNA, 25 bp, Homo sapien
catgacgctccctgagcagctcttc

SEQ ID NO: 637353 - DNA, 25 bp, Homo sapien
tgacgctccctgagcagctcttctg

SEQ ID NO: 637354 - DNA, 25 bp, Homo sapien
aatctcttcccagtattgatctccc

SEQ ID NO: 637355 - DNA, 25 bp, Homo sapien
aaatctcttcccagtattgatctcc

SEQ ID NO: 637356 - DNA, 25 bp, Homo sapien
atctcttcccagtattgatctccca

SEQ ID NO: 637357 - DNA, 25 bp, Homo sapien
cagtgtgtgccttgaaattctgcca

SEQ ID NO: 637358 - DNA, 25 bp, Homo sapien
cccagtgtgtgccttgaaattctgc

SEQ ID NO: 637359 - DNA, 25 bp, Homo sapien
gatgttatttcatctcaagatggag

SEQ ID NO: 637360 - DNA, 25 bp, Homo sapien
gtgtgccttgaaattctgccagagg

SEQ ID NO: 637361 - DNA, 25 bp, Homo sapien
catgtccgaagagggactgtggttc

SEQ ID NO: 637362 - DNA, 25 bp, Homo sapien
ttctgagaacagcatgtccgaagag

SEQ ID NO: 637363 - DNA, 25 bp, Homo sapien
aatgtgagtgaaagcgacgatgcca

SEQ ID NO: 637364 - DNA, 25 bp, Homo sapien
tctaagcattgcataattccaccat

SEQ ID NO: 637365 - DNA, 25 bp, Homo sapien
agttctcgggagcacagaagtcttt

SEQ ID NO: 637366 - DNA, 25 bp, Homo sapien
gataggaagttctcgggagcacaga

SEQ ID NO: 637367 - DNA, 25 bp, Homo sapien
ttctcaagagatcgtcctctcccag

SEQ ID NO: 637368 - DNA, 25 bp, Homo sapien
tcctttctcaagagatcgtcctctc

SEQ ID NO: 637369 - DNA, 25 bp, Homo sapien
ctggggccaaggagccgcggaggcc

SEQ ID NO: 637370 - DNA, 25 bp, Homo sapien
tggggccaaggagccgcggaggccg

SEQ ID NO: 637371 - DNA, 25 bp, Homo sapien
gccaaggagccgcggaggccgcgct

SEQ ID NO: 637372 - DNA, 25 bp, Homo sapien
aaggagccgcggaggccgcgctcac

SEQ ID NO: 637373 - DNA, 25 bp, Homo sapien
aggttctggctcccgagtgaagtct

SEQ ID NO: 637374 - DNA, 25 bp, Homo sapien
ggcccattctgcaaaaaaaagacta

SEQ ID NO: 637375 - DNA, 25 bp, Homo sapien
gtgcaacggttacttttccaggaca

SEQ ID NO: 637376 - DNA, 25 bp, Homo sapien
accgaccgacgccagaactacaatt

SEQ ID NO: 637377 - DNA, 25 bp, Homo sapien
ctcaggtgatggtaccagagtgagc

SEQ ID NO: 637378 - DNA, 25 bp, Homo sapien
acttcgaggttcaacatgagagtga

SEQ ID NO: 637379 - DNA, 25 bp, Homo sapien
tgaacttcaaccttagacttcgagg

SEQ ID NO: 637380 - DNA, 25 bp, Homo sapien
aggctcaggtgatggtaccagagtg

SEQ ID NO: 637381 - DNA, 25 bp, Homo sapien
tcagggcgatgatccgtatctgcat

SEQ ID NO: 637382 - DNA, 25 bp, Homo sapien
gcgatgatccgtatctgcatcatca

SEQ ID NO: 637383 - DNA, 25 bp, Homo sapien
tcacacagtcagggcgatgatccgt

SEQ ID NO: 637384 - DNA, 25 bp, Homo sapien
tcatcaggaggattggagtaaggat

SEQ ID NO: 637385 - DNA, 25 bp, Homo sapien
cagatggggactcagcattgggaag

SEQ ID NO: 637386 - DNA, 25 bp, Homo sapien
gtcagatggggactcagcattggga

SEQ ID NO: 637387 - DNA, 25 bp, Homo sapien
tcagatggggactcagcattgggaa

SEQ ID NO: 637388 - DNA, 25 bp, Homo sapien
agtcagatggggactcagcattggg

SEQ ID NO: 637389 - DNA, 25 bp, Homo sapien
gaagcagagacctagactcaggtgt

SEQ ID NO: 637390 - DNA, 25 bp, Homo sapien
cagagacctagactcaggtgtgggt

SEQ ID NO: 637391 - DNA, 25 bp, Homo sapien
agagacctagactcaggtgtgggta

SEQ ID NO: 637392 - DNA, 25 bp, Homo sapien
agcagagacctagactcaggtgtgg

SEQ ID NO: 637393 - DNA, 25 bp, Homo sapien
cactccatagctatgtgtacttttt

SEQ ID NO: 637394 - DNA, 25 bp, Homo sapien
cccactccatagctatgtgtacttt

SEQ ID NO: 637395 - DNA, 25 bp, Homo sapien
actccatagctatgtgtactttttt

SEQ ID NO: 637396 - DNA, 25 bp, Homo sapien
ccactccatagctatgtgtactttt

SEQ ID NO: 637397 - DNA, 25 bp, Homo sapien
ggcccagttcctcagattcagcgcg

SEQ ID NO: 637398 - DNA, 25 bp, Homo sapien
aggaccgagactcgcgagcttccgg

SEQ ID NO: 637399 - DNA, 25 bp, Homo sapien
tgccccgaatcgcaggttttgccgc

SEQ ID NO: 637400 - DNA, 25 bp, Homo sapien
tgccgcaatggcaagtcccaacttg

SEQ ID NO: 637401 - DNA, 25 bp, Homo sapien
ccgctggctcccgatcttccgcggg

SEQ ID NO: 637402 - DNA, 25 bp, Homo sapien
ggctcccgatcttccgcggggccca

SEQ ID NO: 637403 - DNA, 25 bp, Homo sapien
tccgcggggcccagacgccaaggtc

SEQ ID NO: 637404 - DNA, 25 bp, Homo sapien
ctggctcccgatcttccgcggggcc

SEQ ID NO: 637405 - DNA, 25 bp, Homo sapien
gcttctcacatggaccggggtcctg

SEQ ID NO: 637406 - DNA, 25 bp, Homo sapien
cacatggaccggggtcctgcactgg

SEQ ID NO: 637407 - DNA, 25 bp, Homo sapien
tgcttctcacatggaccggggtcct

SEQ ID NO: 637408 - DNA, 25 bp, Homo sapien
ttctcacatggaccggggtcctgca

SEQ ID NO: 637409 - DNA, 25 bp, Homo sapien
aaagcttgagatgaaccgttgcacg

SEQ ID NO: 637410 - DNA, 25 bp, Homo sapien
ccctgcaggaaccagttgggtcgga

SEQ ID NO: 637411 - DNA, 25 bp, Homo sapien
gaatgcaactgagatcctcccactg

SEQ ID NO: 637412 - DNA, 25 bp, Homo sapien
gtcctgcagtatggatgccagagaa

SEQ ID NO: 637413 - DNA, 25 bp, Homo sapien
ccatggaaatcaggttcgcctccct

SEQ ID NO: 637414 - DNA, 25 bp, Homo sapien
gtagacacctactgactggaaagag

SEQ ID NO: 637415 - DNA, 25 bp, Homo sapien
catgtctggaaccagtaagactccc

SEQ ID NO: 637416 - DNA, 25 bp, Homo sapien
caacaggctctgtgtatgtattggg

SEQ ID NO: 637417 - DNA, 25 bp, Homo sapien
gatttaggcttcacttcttgaaggg

SEQ ID NO: 637418 - DNA, 25 bp, Homo sapien
ggaccttggttactctccatgtagg

SEQ ID NO: 637419 - DNA, 25 bp, Homo sapien
tctatcaagacaactctggccaggc

SEQ ID NO: 637420 - DNA, 25 bp, Homo sapien
cactaagtctagctcacactggaag

SEQ ID NO: 637421 - DNA, 25 bp, Homo sapien
tgctgtccattaatgcattctgact

SEQ ID NO: 637422 - DNA, 25 bp, Homo sapien
ctattttgatgtattcacgacggtt

SEQ ID NO: 637423 - DNA, 25 bp, Homo sapien
cccctggtttagtggataagcacct

SEQ ID NO: 637424 - DNA, 25 bp, Homo sapien
ttctgactcgtaagtagacatgtgt

SEQ ID NO: 637425 - DNA, 25 bp, Homo sapien
tctctgtctgggatggacgccgcgc

SEQ ID NO: 637426 - DNA, 25 bp, Homo sapien
tgcccgtaactcatatgacaagaac

SEQ ID NO: 637427 - DNA, 25 bp, Homo sapien
tgacaagaacatcaggaaccggact

SEQ ID NO: 637428 - DNA, 25 bp, Homo sapien
gctctgctgcccgtaactcatatga

SEQ ID NO: 637429 - DNA, 25 bp, Homo sapien
tggaggagatcagtctgctgcagcc

SEQ ID NO: 637430 - DNA, 25 bp, Homo sapien
ggctcccgttccaggtgctgttgca

SEQ ID NO: 637431 - DNA, 25 bp, Homo sapien
tgaggttgcgttgacgctcgcgccc

SEQ ID NO: 637432 - DNA, 25 bp, Homo sapien
caaaggccggagatggtgtcgtccc

SEQ ID NO: 637433 - DNA, 25 bp, Homo sapien
gaatctggatgtcatgaaggaagca

SEQ ID NO: 637434 - DNA, 25 bp, Homo sapien
tgtcatgaaggaagcaatggttcag

SEQ ID NO: 637435 - DNA, 25 bp, Homo sapien
tgagactggagagataccacgaaag

SEQ ID NO: 637436 - DNA, 25 bp, Homo sapien
gataccacgaaagaatctggatgtc

SEQ ID NO: 637437 - DNA, 25 bp, Homo sapien
aaaagaaacggctggctgcacttgc

SEQ ID NO: 637438 - DNA, 25 bp, Homo sapien
agaaacggctggctgcacttgccct

SEQ ID NO: 637439 - DNA, 25 bp, Homo sapien
ttgccctcgcgtcttcagaaaacag

SEQ ID NO: 637440 - DNA, 25 bp, Homo sapien
tgcacttgccctcgcgtcttcagaa

SEQ ID NO: 637441 - DNA, 25 bp, Homo sapien
catcccaggaagattagaatgcaaa

SEQ ID NO: 637442 - DNA, 25 bp, Homo sapien
aacagttaatgaccctgaggaggca

SEQ ID NO: 637443 - DNA, 25 bp, Homo sapien
gggcataccatagcccaaggtgaca

SEQ ID NO: 637444 - DNA, 25 bp, Homo sapien
ccacagaagtggctccaagaaaaag

SEQ ID NO: 637445 - DNA, 25 bp, Homo sapien
cagtgaagtcatggcaagtagcata

SEQ ID NO: 637446 - DNA, 25 bp, Homo sapien
agtcatggcaagtagcatagccacc

SEQ ID NO: 637447 - DNA, 25 bp, Homo sapien
atggcaagtagcatagccacccatg

SEQ ID NO: 637448 - DNA, 25 bp, Homo sapien
aatgacagcctcagtgaagtcatgg

SEQ ID NO: 637449 - DNA, 25 bp, Homo sapien
tcaccacccaacagtctgtccccta

SEQ ID NO: 637450 - DNA, 25 bp, Homo sapien
gctccatcctaacaatccccatcac

SEQ ID NO: 637451 - DNA, 25 bp, Homo sapien
cacccaacagtctgtcccctaagga

SEQ ID NO: 637452 - DNA, 25 bp, Homo sapien
tccatcctaacaatccccatcacca

SEQ ID NO: 637453 - DNA, 25 bp, Homo sapien
catggtccactgcttagaggcacaa

SEQ ID NO: 637454 - DNA, 25 bp, Homo sapien
tggtacactgcactgaagggtatgg

SEQ ID NO: 637455 - DNA, 25 bp, Homo sapien
gaggcacaaggtctcttccctggta

SEQ ID NO: 637456 - DNA, 25 bp, Homo sapien
gggagtgtggtccttgcaaggttgg

SEQ ID NO: 637457 - DNA, 25 bp, Homo sapien
acttgatgaagtcggttgtggtgct

SEQ ID NO: 637458 - DNA, 25 bp, Homo sapien
agtctgcaggtgaccgatgacagac

SEQ ID NO: 637459 - DNA, 25 bp, Homo sapien
tgtagccgcccatgtctcgagtccg

SEQ ID NO: 637460 - DNA, 25 bp, Homo sapien
tgtggtgctgtagccgcccatgtct

SEQ ID NO: 637461 - DNA, 25 bp, Homo sapien
cagccagaaaaaaggcaatgcacag

SEQ ID NO: 637462 - DNA, 25 bp, Homo sapien
ggaaatggaagccaagaatgcgtga

SEQ ID NO: 637463 - DNA, 25 bp, Homo sapien
aaaagagagcccatgaagggaggta

SEQ ID NO: 637464 - DNA, 25 bp, Homo sapien
ggatgggaagcacatggacctgcca

SEQ ID NO: 637465 - DNA, 25 bp, Homo sapien
agggaacagcagatgggatctaaga

SEQ ID NO: 637466 - DNA, 25 bp, Homo sapien
cagcagatgggatctaagaggcaaa

SEQ ID NO: 637467 - DNA, 25 bp, Homo sapien
aacagcagatgggatctaagaggca

SEQ ID NO: 637468 - DNA, 25 bp, Homo sapien
cagatgggatctaagaggcaaaaga

SEQ ID NO: 637469 - DNA, 25 bp, Homo sapien
ctactctaaatcctgaagccagcac

SEQ ID NO: 637470 - DNA, 25 bp, Homo sapien
ttccccagagggtagtgccgaggtg

SEQ ID NO: 637471 - DNA, 25 bp, Homo sapien
actactctaaatcctgaagccagca

SEQ ID NO: 637472 - DNA, 25 bp, Homo sapien
agggtagtgccgaggtgctgacacc

SEQ ID NO: 637473 - DNA, 25 bp, Homo sapien
ttcaccgcatctgcgatcatgctgg

SEQ ID NO: 637474 - DNA, 25 bp, Homo sapien
cttcaccgcatctgcgatcatgctg

SEQ ID NO: 637475 - DNA, 25 bp, Homo sapien
ggattggctatattcctgcccactg

SEQ ID NO: 637476 - DNA, 25 bp, Homo sapien
tgttggaagccgacagcagcatggc

SEQ ID NO: 637477 - DNA, 25 bp, Homo sapien
aagatgccgcagcatgttggaagcc

SEQ ID NO: 637478 - DNA, 25 bp, Homo sapien
cagcatggccgtgggattggctata

SEQ ID NO: 637479 - DNA, 25 bp, Homo sapien
gccaagatcacttaggaagtggaga

SEQ ID NO: 637480 - DNA, 25 bp, Homo sapien
caggccaagatcacttaggaagtgg

SEQ ID NO: 637481 - DNA, 25 bp, Homo sapien
gaggggcaggctagacactgggagg

SEQ ID NO: 637482 - DNA, 25 bp, Homo sapien
tatgcagaggcttaggttggaaaag

SEQ ID NO: 637483 - DNA, 25 bp, Homo sapien
ggaatggcggacttgaggtcagagg

SEQ ID NO: 637484 - DNA, 25 bp, Homo sapien
ggagaggaatggcggacttgaggtc

SEQ ID NO: 637485 - DNA, 25 bp, Homo sapien
gaggaatggcggacttgaggtcaga

SEQ ID NO: 637486 - DNA, 25 bp, Homo sapien
aatggcggacttgaggtcagaggaa

SEQ ID NO: 637487 - DNA, 25 bp, Homo sapien
ctcaaagactgcgtattctgcacta

SEQ ID NO: 637488 - DNA, 25 bp, Homo sapien
cgtctcaaagactgcgtattctgca

SEQ ID NO: 637489 - DNA, 25 bp, Homo sapien
gcgtattctgcactatagctctcac

SEQ ID NO: 637490 - DNA, 25 bp, Homo sapien
aagactgcgtattctgcactatagc

SEQ ID NO: 637491 - DNA, 25 bp, Homo sapien
gccagattgtcaataatgttcccat

SEQ ID NO: 637492 - DNA, 25 bp, Homo sapien
gtcaataatgttcccatagagattg

SEQ ID NO: 637493 - DNA, 25 bp, Homo sapien
aataatgttcccatagagattgggc

SEQ ID NO: 637494 - DNA, 25 bp, Homo sapien
gattgtcaataatgttcccatagag

SEQ ID NO: 637495 - DNA, 25 bp, Homo sapien
gcagcagttgtctatgatcattgtc

SEQ ID NO: 637496 - DNA, 25 bp, Homo sapien
cagttgtctatgatcattgtctcaa

SEQ ID NO: 637497 - DNA, 25 bp, Homo sapien
actgcaggaacaacccatccccaag

SEQ ID NO: 637498 - DNA, 25 bp, Homo sapien
ctgcatgcagcagttgtctatgatc

SEQ ID NO: 637499 - DNA, 25 bp, Homo sapien
aggaacccatcctacacaaagccat

SEQ ID NO: 637500 - DNA, 25 bp, Homo sapien
atcctacacaaagccatgcccctca

SEQ ID NO: 637501 - DNA, 25 bp, Homo sapien
aggggacagaatcagccaagaaagt

SEQ ID NO: 637502 - DNA, 25 bp, Homo sapien
tgtccatgggccaaaggggacagaa

SEQ ID NO: 637503 - DNA, 25 bp, Homo sapien
tgcaatccgctgagacttggctcgt

SEQ ID NO: 637504 - DNA, 25 bp, Homo sapien
tgttggccttgtggacagcagtgac

SEQ ID NO: 637505 - DNA, 25 bp, Homo sapien
gacttggctcgtgtgacaatcttca

SEQ ID NO: 637506 - DNA, 25 bp, Homo sapien
ggcatagtcaaaggcgaactttgca

SEQ ID NO: 637507 - DNA, 25 bp, Homo sapien
cactgggaagggaaacaaggagctc

SEQ ID NO: 637508 - DNA, 25 bp, Homo sapien
gacactgggaagggaaacaaggagc

SEQ ID NO: 637509 - DNA, 25 bp, Homo sapien
tgggaagggaaacaaggagctccac

SEQ ID NO: 637510 - DNA, 25 bp, Homo sapien
ctaggtgacactgggaagggaaaca

SEQ ID NO: 637511 - DNA, 25 bp, Homo sapien
ccaggtctagattgttgtgccgagt

SEQ ID NO: 637512 - DNA, 25 bp, Homo sapien
tctgtctgctctcgaatgatcacca

SEQ ID NO: 637513 - DNA, 25 bp, Homo sapien
gctctcgaatgatcaccaggtctag

SEQ ID NO: 637514 - DNA, 25 bp, Homo sapien
tgccgagtcatatacccaggaagtg

SEQ ID NO: 637515 - DNA, 25 bp, Homo sapien
catggactacgttggcaaataagtc

SEQ ID NO: 637516 - DNA, 25 bp, Homo sapien
gttggcaaataagtccaacttacgc

SEQ ID NO: 637517 - DNA, 25 bp, Homo sapien
ttcacatggactacgttggcaaata

SEQ ID NO: 637518 - DNA, 25 bp, Homo sapien
gactacgttggcaaataagtccaac

SEQ ID NO: 637519 - DNA, 25 bp, Homo sapien
ggtgccctggcacctctcaaccatt

SEQ ID NO: 637520 - DNA, 25 bp, Homo sapien
tgccctggcacctctcaaccattca

SEQ ID NO: 637521 - DNA, 25 bp, Homo sapien
gtgccctggcacctctcaaccattc

SEQ ID NO: 637522 - DNA, 25 bp, Homo sapien
tagctcccccttatactccatcggg

SEQ ID NO: 637523 - DNA, 25 bp, Homo sapien
tactccatcggggtatgaatctttc

SEQ ID NO: 637524 - DNA, 25 bp, Homo sapien
gcatatcataggaggctagctcccc

SEQ ID NO: 637525 - DNA, 25 bp, Homo sapien
ctcagccgcatatcataggaggcta

SEQ ID NO: 637526 - DNA, 25 bp, Homo sapien
gtctaacccccttaggaacatcatg

SEQ ID NO: 637527 - DNA, 25 bp, Homo sapien
ggaactcagaccagtgtctaacccc

SEQ ID NO: 637528 - DNA, 25 bp, Homo sapien
gaacatcatgtaacccagactccca

SEQ ID NO: 637529 - DNA, 25 bp, Homo sapien
aagcccaagggaactcagaccagtg

SEQ ID NO: 637530 - DNA, 25 bp, Homo sapien
tccttcatggaactcagcacctgct

SEQ ID NO: 637531 - DNA, 25 bp, Homo sapien
tgaacacctccttgacggcgtgcat

SEQ ID NO: 637532 - DNA, 25 bp, Homo sapien
cccacaccgtctcccggaagcatgg

SEQ ID NO: 637533 - DNA, 25 bp, Homo sapien
atggtcacgggaaaggagccctcca

SEQ ID NO: 637534 - DNA, 25 bp, Homo sapien
tccttgacggcgtgcatcagctcag

SEQ ID NO: 637535 - DNA, 25 bp, Homo sapien
ggaagaggggagaagtaaagataga

SEQ ID NO: 637536 - DNA, 25 bp, Homo sapien
gaagaggggagaagtaaagatagag

SEQ ID NO: 637537 - DNA, 25 bp, Homo sapien
ctcaattgggggaagaggggagaag

SEQ ID NO: 637538 - DNA, 25 bp, Homo sapien
ctggctccgcgatgcagcgtgcgcc

SEQ ID NO: 637539 - DNA, 25 bp, Homo sapien
tgcgccgcggccgaggtactcagac

SEQ ID NO: 637540 - DNA, 25 bp, Homo sapien
ccgcgatgcagcgtgcgccgcggcc

SEQ ID NO: 637541 - DNA, 25 bp, Homo sapien
cgtgcgccgcggccgaggtactcag

SEQ ID NO: 637542 - DNA, 25 bp, Homo sapien
ctccatgccccagggttcccggcgg

SEQ ID NO: 637543 - DNA, 25 bp, Homo sapien
cagggttcccggcggagaccagcgc

SEQ ID NO: 637544 - DNA, 25 bp, Homo sapien
catgccccagggttcccggcggaga

SEQ ID NO: 637545 - DNA, 25 bp, Homo sapien
ccagggttcccggcggagaccagcg

SEQ ID NO: 637546 - DNA, 25 bp, Homo sapien
agcctgtaaggtcagctttgagaca

SEQ ID NO: 637547 - DNA, 25 bp, Homo sapien
aagcctgtaaggtcagctttgagac

SEQ ID NO: 637548 - DNA, 25 bp, Homo sapien
aaggtcagctttgagacatccagac

SEQ ID NO: 637549 - DNA, 25 bp, Homo sapien
tgtaaggtcagctttgagacatcca

SEQ ID NO: 637550 - DNA, 25 bp, Homo sapien
acagttgactttgccctgtttagga

SEQ ID NO: 637551 - DNA, 25 bp, Homo sapien
tgcccgacatgtcccggggcctcac

SEQ ID NO: 637552 - DNA, 25 bp, Homo sapien
gaacactacagttgactttgccctg

SEQ ID NO: 637553 - DNA, 25 bp, Homo sapien
cccgaacactacagttgactttgcc

SEQ ID NO: 637554 - DNA, 25 bp, Homo sapien
tcgggtcagccagcggactccgctc

SEQ ID NO: 637555 - DNA, 25 bp, Homo sapien
cagcggactccgctcaatgccgcca

SEQ ID NO: 637556 - DNA, 25 bp, Homo sapien
agcggactccgctcaatgccgccat

SEQ ID NO: 637557 - DNA, 25 bp, Homo sapien
gtcagccagcggactccgctcaatg

SEQ ID NO: 637558 - DNA, 25 bp, Homo sapien
tcccgcaggaagtcgcgtgggaagt

SEQ ID NO: 637559 - DNA, 25 bp, Homo sapien
tttcccgcaggaagtcgcgtgggaa

SEQ ID NO: 637560 - DNA, 25 bp, Homo sapien
ttcccgcaggaagtcgcgtgggaag

SEQ ID NO: 637561 - DNA, 25 bp, Homo sapien
gaaggtttcttaggactcacaggcc

SEQ ID NO: 637562 - DNA, 25 bp, Homo sapien
tcacctctgaaggtaaggagttact

SEQ ID NO: 637563 - DNA, 25 bp, Homo sapien
tgtcctcatccttggtgcttcatag

SEQ ID NO: 637564 - DNA, 25 bp, Homo sapien
catgaccgctcctactgcaaggaag

SEQ ID NO: 637565 - DNA, 25 bp, Homo sapien
tccaggtcccaccagaagatctaga

SEQ ID NO: 637566 - DNA, 25 bp, Homo sapien
ttctattaagaaacgcatccctccc

SEQ ID NO: 637567 - DNA, 25 bp, Homo sapien
tcatctgtaagagctacaggccagt

SEQ ID NO: 637568 - DNA, 25 bp, Homo sapien
aagatctagattttgggagacctga

SEQ ID NO: 637569 - DNA, 25 bp, Homo sapien
taagaccaaacaaacaggtagctgc

SEQ ID NO: 637570 - DNA, 25 bp, Homo sapien
gaactgggaattccatatctgctcc

SEQ ID NO: 637571 - DNA, 25 bp, Homo sapien
gcccaatccaagcaacactttttaa

SEQ ID NO: 637572 - DNA, 25 bp, Homo sapien
gttagatattctctgtgggcactgg

SEQ ID NO: 637573 - DNA, 25 bp, Homo sapien
atgtaatgtgtgtacaggtcttggt

SEQ ID NO: 637574 - DNA, 25 bp, Homo sapien
taatgtgtgtacaggtcttggtaaa

SEQ ID NO: 637575 - DNA, 25 bp, Homo sapien
ccggcagggcctaagagtctggatt

SEQ ID NO: 637576 - DNA, 25 bp, Homo sapien
gcctaagagtctggattcctcacca

SEQ ID NO: 637577 - DNA, 25 bp, Homo sapien
ctgtccaactcgcaatcagaaatca

SEQ ID NO: 637578 - DNA, 25 bp, Homo sapien
aggaggttcctgaaaggcacagatg

SEQ ID NO: 637579 - DNA, 25 bp, Homo sapien
ggaggttcctgaaaggcacagatgg

SEQ ID NO: 637580 - DNA, 25 bp, Homo sapien
tccaactcgcaatcagaaatcagga

SEQ ID NO: 637581 - DNA, 25 bp, Homo sapien
tggaaacctttagctaatctttagc

SEQ ID NO: 637582 - DNA, 25 bp, Homo sapien
catatcatagtagagctgttgcaga

SEQ ID NO: 637583 - DNA, 25 bp, Homo sapien
gaaatcccattatactcactgccac

SEQ ID NO: 637584 - DNA, 25 bp, Homo sapien
cactgccacttcaagattactgtag

SEQ ID NO: 637585 - DNA, 25 bp, Homo sapien
tggttgaacaagctctggaacatcc

SEQ ID NO: 637586 - DNA, 25 bp, Homo sapien
gttgaacaagctctggaacatccat

SEQ ID NO: 637587 - DNA, 25 bp, Homo sapien
tatgaactatcgaggcatgcaacaa

SEQ ID NO: 637588 - DNA, 25 bp, Homo sapien
atacaaagatatgaactatcgaggc

SEQ ID NO: 637589 - DNA, 25 bp, Homo sapien
ctgccctagggctcttaaaccgcag

SEQ ID NO: 637590 - DNA, 25 bp, Homo sapien
ttcccgtcttgacaggtccagcctg

SEQ ID NO: 637591 - DNA, 25 bp, Homo sapien
tactcttccccttcccgtcttgaca

SEQ ID NO: 637592 - DNA, 25 bp, Homo sapien
tgccctagggctcttaaaccgcagg

SEQ ID NO: 637593 - DNA, 25 bp, Homo sapien
tcttggtgagcacgaaattgcaggg

SEQ ID NO: 637594 - DNA, 25 bp, Homo sapien
gccagcagctcgcgcagcctctgtt

SEQ ID NO: 637595 - DNA, 25 bp, Homo sapien
gctccaggcgcctgcgaaggtccgg

SEQ ID NO: 637596 - DNA, 25 bp, Homo sapien
gagtcttggtgagcacgaaattgca

SEQ ID NO: 637597 - DNA, 25 bp, Homo sapien
tggggtcagcagacgccaataatcc

SEQ ID NO: 637598 - DNA, 25 bp, Homo sapien
ggcagtcaccatgtagtcccctggg

SEQ ID NO: 637599 - DNA, 25 bp, Homo sapien
aatggtagccctcggcactggcagt

SEQ ID NO: 637600 - DNA, 25 bp, Homo sapien
ccgacagttccgtgtcactgaatgg

SEQ ID NO: 637601 - DNA, 25 bp, Homo sapien
ccgtggtcacgtcatggttaatccc

SEQ ID NO: 637602 - DNA, 25 bp, Homo sapien
agcaatcccaagctccgtgtccttg

SEQ ID NO: 637603 - DNA, 25 bp, Homo sapien
gcaatgacagcgtcagcaatcccaa

SEQ ID NO: 637604 - DNA, 25 bp, Homo sapien
tggttaatcccatccacggcaatga

SEQ ID NO: 637605 - DNA, 25 bp, Homo sapien
aggtaggtgaggagggcgtctttgt

SEQ ID NO: 637606 - DNA, 25 bp, Homo sapien
ttcattctcgtgagggaacttgtca

SEQ ID NO: 637607 - DNA, 25 bp, Homo sapien
gagggcgtctttgttgttctcccac

SEQ ID NO: 637608 - DNA, 25 bp, Homo sapien
gggcaattcattctcgtgagggaac

SEQ ID NO: 637609 - DNA, 25 bp, Homo sapien
gtgtaggtagctgaagtcattcatg

SEQ ID NO: 637610 - DNA, 25 bp, Homo sapien
tgtgtaggtagctgaagtcattcat

SEQ ID NO: 637611 - DNA, 25 bp, Homo sapien
tgtaggtagctgaagtcattcatgc

SEQ ID NO: 637612 - DNA, 25 bp, Homo sapien
tcccggggaccgtgtgccagtcagc

SEQ ID NO: 637613 - DNA, 25 bp, Homo sapien
cgttgatgatgttgccgtgcacgga

SEQ ID NO: 637614 - DNA, 25 bp, Homo sapien
ccagtcagccccgttgatgatgttg

SEQ ID NO: 637615 - DNA, 25 bp, Homo sapien
tgttgccgtgcacggagaagtcctg

SEQ ID NO: 637616 - DNA, 25 bp, Homo sapien
ggccagattactgccagcatagaca

SEQ ID NO: 637617 - DNA, 25 bp, Homo sapien
catcatctggtgtgggcgtgagctc

SEQ ID NO: 637618 - DNA, 25 bp, Homo sapien
catccacttgattactgcccgcgtt

SEQ ID NO: 637619 - DNA, 25 bp, Homo sapien
tcgaatgggtaggacaccacgagct

SEQ ID NO: 637620 - DNA, 25 bp, Homo sapien
ggtggcattgggcagggtgtagtaa

SEQ ID NO: 637621 - DNA, 25 bp, Homo sapien
tggcattgggcagggtgtagtaagt

SEQ ID NO: 637622 - DNA, 25 bp, Homo sapien
gcattgggcagggtgtagtaagtgg

SEQ ID NO: 637623 - DNA, 25 bp, Homo sapien
tgggcagggtgtagtaagtgggcaa

SEQ ID NO: 637624 - DNA, 25 bp, Homo sapien
ccacagtggtgtgttgaggtcagca

SEQ ID NO: 637625 - DNA, 25 bp, Homo sapien
caaaattatggttaagatcgatgct

SEQ ID NO: 637626 - DNA, 25 bp, Homo sapien
taagatcgatgctctggttgttcca

SEQ ID NO: 637627 - DNA, 25 bp, Homo sapien
ctctggttgttccagcggccctcgg

SEQ ID NO: 637628 - DNA, 25 bp, Homo sapien
ccggtggtaggcgatctcatagcca

SEQ ID NO: 637629 - DNA, 25 bp, Homo sapien
tcacccgtgggttccctcgcaggaa

SEQ ID NO: 637630 - DNA, 25 bp, Homo sapien
agggcctcgttcccatgcatgccag

SEQ ID NO: 637631 - DNA, 25 bp, Homo sapien
gcagcaggtgaatgcgcatctcaga

SEQ ID NO: 637632 - DNA, 25 bp, Homo sapien
ggcttgcagcgggttcatgcctggg

SEQ ID NO: 637633 - DNA, 25 bp, Homo sapien
gggcttgcagcgggttcatgcctgg

SEQ ID NO: 637634 - DNA, 25 bp, Homo sapien
gcttgcagcgggttcatgcctgggg

SEQ ID NO: 637635 - DNA, 25 bp, Homo sapien
tgctccccaggcttgtccgacattt

SEQ ID NO: 637636 - DNA, 25 bp, Homo sapien
ccaggcttgtccgacatttccatca

SEQ ID NO: 637637 - DNA, 25 bp, Homo sapien
gggcattgctcttgtacctgcttca

SEQ ID NO: 637638 - DNA, 25 bp, Homo sapien
ccaatgctgtagatgcgggtgatgt

SEQ ID NO: 637639 - DNA, 25 bp, Homo sapien
atcacatgtgccatggaaagactta

SEQ ID NO: 637640 - DNA, 25 bp, Homo sapien
agagtgtagcgtggcatgaggcatg

SEQ ID NO: 637641 - DNA, 25 bp, Homo sapien
cttaaaaagtcagcgatggcccaca

SEQ ID NO: 637642 - DNA, 25 bp, Homo sapien
ggcatcccatcatggtacaggaggg

SEQ ID NO: 637643 - DNA, 25 bp, Homo sapien
tcccaggtcataggggttatatctg

SEQ ID NO: 637644 - DNA, 25 bp, Homo sapien
cagcaggggcatacaagcgcagtca

SEQ ID NO: 637645 - DNA, 25 bp, Homo sapien
catacaagcgcagtcacagcaggtt

SEQ ID NO: 637646 - DNA, 25 bp, Homo sapien
acagcaggttgtgccccggtgggaa

SEQ ID NO: 637647 - DNA, 25 bp, Homo sapien
gccttgtaattgtgatgctgaaagt

SEQ ID NO: 637648 - DNA, 25 bp, Homo sapien
cttcctcatggccttgtaattgtga

SEQ ID NO: 637649 - DNA, 25 bp, Homo sapien
catggccttgtaattgtgatgctga

SEQ ID NO: 637650 - DNA, 25 bp, Homo sapien
cctcatggccttgtaattgtgatgc

SEQ ID NO: 637651 - DNA, 25 bp, Homo sapien
ggatcccgacgcaggggcctcaagg

SEQ ID NO: 637652 - DNA, 25 bp, Homo sapien
gcctcaaggaataggtcattggggt

SEQ ID NO: 637653 - DNA, 25 bp, Homo sapien
ggggcctcaaggaataggtcattgg

SEQ ID NO: 637654 - DNA, 25 bp, Homo sapien
ctagagggtcagaggatcccgacgc

SEQ ID NO: 637655 - DNA, 25 bp, Homo sapien
agcaggcgaatgaagcgggccacct

SEQ ID NO: 637656 - DNA, 25 bp, Homo sapien
ctgggtctgaattggcaggaaatac

SEQ ID NO: 637657 - DNA, 25 bp, Homo sapien
atctctgcccggaggcaaggcgcgc

SEQ ID NO: 637658 - DNA, 25 bp, Homo sapien
gctccggcaggaggttcagcactgg

SEQ ID NO: 637659 - DNA, 25 bp, Homo sapien
gtcattgctgaactggaccttgtat

SEQ ID NO: 637660 - DNA, 25 bp, Homo sapien
gaccttgtatgatgtgacccagtca

SEQ ID NO: 637661 - DNA, 25 bp, Homo sapien
ccaggtccgactgtcattgctgaac

SEQ ID NO: 637662 - DNA, 25 bp, Homo sapien
tgaactggaccttgtatgatgtgac

SEQ ID NO: 637663 - DNA, 25 bp, Homo sapien
tgtgtgataacacccgagaagcggg

SEQ ID NO: 637664 - DNA, 25 bp, Homo sapien
tgaaaccatggatcggcgtcctgct

SEQ ID NO: 637665 - DNA, 25 bp, Homo sapien
agagttcctgccctgtgtgataaca

SEQ ID NO: 637666 - DNA, 25 bp, Homo sapien
catcatatagatcgccgtcctccag

SEQ ID NO: 637667 - DNA, 25 bp, Homo sapien
tggatgcctcaagccggctatctga

SEQ ID NO: 637668 - DNA, 25 bp, Homo sapien
ggctatctgaaactcgcagggactc

SEQ ID NO: 637669 - DNA, 25 bp, Homo sapien
gtgtggtccaagaccaaaggactgg

SEQ ID NO: 637670 - DNA, 25 bp, Homo sapien
aatgttgagccgtcctcggtgtggt

SEQ ID NO: 637671 - DNA, 25 bp, Homo sapien
gatgactcgaatccggacatgctgt

SEQ ID NO: 637672 - DNA, 25 bp, Homo sapien
cttcttgatgactcgaatccggaca

SEQ ID NO: 637673 - DNA, 25 bp, Homo sapien
tggggcgagttagagttagcttctt

SEQ ID NO: 637674 - DNA, 25 bp, Homo sapien
actcgaatccggacatgctgttctg

SEQ ID NO: 637675 - DNA, 25 bp, Homo sapien
cttggggtccgagaggcacagcatg

SEQ ID NO: 637676 - DNA, 25 bp, Homo sapien
gaagaatggtgaaaccccggatgga

SEQ ID NO: 637677 - DNA, 25 bp, Homo sapien
gcacagcatgggggaaaggaagaat

SEQ ID NO: 637678 - DNA, 25 bp, Homo sapien
cagcatgggggaaaggaagaatggt

SEQ ID NO: 637679 - DNA, 25 bp, Homo sapien
agaagacatgtgagcccacagcagg

SEQ ID NO: 637680 - DNA, 25 bp, Homo sapien
caggatctaacagccttcacaggac

SEQ ID NO: 637681 - DNA, 25 bp, Homo sapien
agcaggccacaccaccaggatctaa

SEQ ID NO: 637682 - DNA, 25 bp, Homo sapien
cagcccaagaagacatgtgagccca

SEQ ID NO: 637683 - DNA, 25 bp, Homo sapien
gaccttggtggtcccgggctgcgcg

SEQ ID NO: 637684 - DNA, 25 bp, Homo sapien
ggcggctgtgccgggctgctatgca

SEQ ID NO: 637685 - DNA, 25 bp, Homo sapien
tgtgccgggctgctatgcagggccg

SEQ ID NO: 637686 - DNA, 25 bp, Homo sapien
gcccagcaccgagttcctgggcgcc

SEQ ID NO: 637687 - DNA, 25 bp, Homo sapien
ggccgacggccggcgcgaaggcggc

SEQ ID NO: 637688 - DNA, 25 bp, Homo sapien
ccgacggccggcgcgaaggcggcca

SEQ ID NO: 637689 - DNA, 25 bp, Homo sapien
gacggccggcgcgaaggcggccagg

SEQ ID NO: 637690 - DNA, 25 bp, Homo sapien
cgacggccggcgcgaaggcggccag

SEQ ID NO: 637691 - DNA, 25 bp, Homo sapien
ccaggggcgcgcgggctacggcggg

SEQ ID NO: 637692 - DNA, 25 bp, Homo sapien
cgggtggcgggtcggtctcttcctg

SEQ ID NO: 637693 - DNA, 25 bp, Homo sapien
ggcggggattgagtgccaggggcgc

SEQ ID NO: 637694 - DNA, 25 bp, Homo sapien
gcgcgcgggctacggcgggtggcgg

SEQ ID NO: 637695 - DNA, 25 bp, Homo sapien
acaaaggtgttgggacattgcagta

SEQ ID NO: 637696 - DNA, 25 bp, Homo sapien
gtgttgggacattgcagtaaaggtt

SEQ ID NO: 637697 - DNA, 25 bp, Homo sapien
gttgggacattgcagtaaaggttat

SEQ ID NO: 637698 - DNA, 25 bp, Homo sapien
aaggtgttgggacattgcagtaaag

SEQ ID NO: 637699 - DNA, 25 bp, Homo sapien
caggtttcttagtgtgaaagctcca

SEQ ID NO: 637700 - DNA, 25 bp, Homo sapien
ccagaactgggatgggatttgaagc

SEQ ID NO: 637701 - DNA, 25 bp, Homo sapien
ctccagaactgggatgggatttgaa

SEQ ID NO: 637702 - DNA, 25 bp, Homo sapien
tttgaagcaagtgaaaaaggcttgg

SEQ ID NO: 637703 - DNA, 25 bp, Homo sapien
caacagagatctcactgaggctgcg

SEQ ID NO: 637704 - DNA, 25 bp, Homo sapien
aaaacaacagagatctcactgaggc

SEQ ID NO: 637705 - DNA, 25 bp, Homo sapien
cagagatctcactgaggctgcgtca

SEQ ID NO: 637706 - DNA, 25 bp, Homo sapien
tctcactgaggctgcgtcactcaaa

SEQ ID NO: 637707 - DNA, 25 bp, Homo sapien
tcaatccaggtgtacagttttctcc

SEQ ID NO: 637708 - DNA, 25 bp, Homo sapien
tgcaaatcaatccaggtgtacagtt

SEQ ID NO: 637709 - DNA, 25 bp, Homo sapien
aaatcaatccaggtgtacagttttc

SEQ ID NO: 637710 - DNA, 25 bp, Homo sapien
atccaggtgtacagttttctccagc

SEQ ID NO: 637711 - DNA, 25 bp, Homo sapien
gagtgacaaggggttgggcaaactg

SEQ ID NO: 637712 - DNA, 25 bp, Homo sapien
caaggggttgggcaaactggataca

SEQ ID NO: 637713 - DNA, 25 bp, Homo sapien
caaactggatacagctgaagacggc

SEQ ID NO: 637714 - DNA, 25 bp, Homo sapien
agctgaagacggctgccccaaggat

SEQ ID NO: 637715 - DNA, 25 bp, Homo sapien
gatggctagcaaggatcaacacttt

SEQ ID NO: 637716 - DNA, 25 bp, Homo sapien
aaaagtttcagaactgtgctgacgc

SEQ ID NO: 637717 - DNA, 25 bp, Homo sapien
cactgtctcatttggttcctctaaa

SEQ ID NO: 637718 - DNA, 25 bp, Homo sapien
gattcattagcttcccttcatttgc

SEQ ID NO: 637719 - DNA, 25 bp, Homo sapien
accagcaccaaagcggttggtctgt

SEQ ID NO: 637720 - DNA, 25 bp, Homo sapien
caccagcaccaaagcggttggtctg

SEQ ID NO: 637721 - DNA, 25 bp, Homo sapien
gtttcattccaaccacttactgtgt

SEQ ID NO: 637722 - DNA, 25 bp, Homo sapien
ggtttgggagcttctagtttcattc

SEQ ID NO: 637723 - DNA, 25 bp, Homo sapien
ctagtttcattccaaccacttactg

SEQ ID NO: 637724 - DNA, 25 bp, Homo sapien
ccaaccacttactgtgtgtccacta

SEQ ID NO: 637725 - DNA, 25 bp, Homo sapien
ataggggacccctccaggatctctg

SEQ ID NO: 637726 - DNA, 25 bp, Homo sapien
tacacatgttctggtgagggtagaa

SEQ ID NO: 637727 - DNA, 25 bp, Homo sapien
tgttaaatacacatgttctggtgag

SEQ ID NO: 637728 - DNA, 25 bp, Homo sapien
gtagaattaagtatgagacaggagg

SEQ ID NO: 637729 - DNA, 25 bp, Homo sapien
gtttgggatacccactgcacacagg

SEQ ID NO: 637730 - DNA, 25 bp, Homo sapien
ccccaatcttaagatcatggtttgg

SEQ ID NO: 637731 - DNA, 25 bp, Homo sapien
catggtttgggatacccactgcaca

SEQ ID NO: 637732 - DNA, 25 bp, Homo sapien
taagatcatggtttgggatacccac

SEQ ID NO: 637733 - DNA, 25 bp, Homo sapien
gacaccctagcccagtacctgaggt

SEQ ID NO: 637734 - DNA, 25 bp, Homo sapien
ccatgcctttattggtgacagcaat

SEQ ID NO: 637735 - DNA, 25 bp, Homo sapien
agcaatggacaagaacaataccagg

SEQ ID NO: 637736 - DNA, 25 bp, Homo sapien
aggcatagcagacaccctagcccag

SEQ ID NO: 637737 - DNA, 25 bp, Homo sapien
ccaggccatgtccccgaatgggcag

SEQ ID NO: 637738 - DNA, 25 bp, Homo sapien
gtttgtatgtgtggatcagtctctc

SEQ ID NO: 637739 - DNA, 25 bp, Homo sapien
aggccgtctgtccagtttgtatgtg

SEQ ID NO: 637740 - DNA, 25 bp, Homo sapien
tccccgaatgggcaggaggccgtct

SEQ ID NO: 637741 - DNA, 25 bp, Homo sapien
ggcatcccccggtggaccactgggc

SEQ ID NO: 637742 - DNA, 25 bp, Homo sapien
ggctgttaggaacatagcgtggcat

SEQ ID NO: 637743 - DNA, 25 bp, Homo sapien
ctgttaggaacatagcgtggcatcc

SEQ ID NO: 637744 - DNA, 25 bp, Homo sapien
gttaggaacatagcgtggcatcccc

SEQ ID NO: 637745 - DNA, 25 bp, Homo sapien
gactcagggactgctgtgaccaaac

SEQ ID NO: 637746 - DNA, 25 bp, Homo sapien
caaccagtgagctgattaatgaacc

SEQ ID NO: 637747 - DNA, 25 bp, Homo sapien
taccttcagacggtgaaacagtgac

SEQ ID NO: 637748 - DNA, 25 bp, Homo sapien
tcctctcagctcacctaggcatagg

SEQ ID NO: 637749 - DNA, 25 bp, Homo sapien
aggtacaagagggtgggggagctgc

SEQ ID NO: 637750 - DNA, 25 bp, Homo sapien
gtgggggagctgcagaagcacctac

SEQ ID NO: 637751 - DNA, 25 bp, Homo sapien
agggtgggggagctgcagaagcacc

SEQ ID NO: 637752 - DNA, 25 bp, Homo sapien
gaggtacaagagggtgggggagctg

SEQ ID NO: 637753 - DNA, 25 bp, Homo sapien
gtcctccactggattatagttgaag

SEQ ID NO: 637754 - DNA, 25 bp, Homo sapien
ccactggattatagttgaagaattc

SEQ ID NO: 637755 - DNA, 25 bp, Homo sapien
ggcatcgagaagtcctccactggat

SEQ ID NO: 637756 - DNA, 25 bp, Homo sapien
gtggcatcgagaagtcctccactgg

SEQ ID NO: 637757 - DNA, 25 bp, Homo sapien
tgaggaagcgggtagggaaaaggca

SEQ ID NO: 637758 - DNA, 25 bp, Homo sapien
tctgcccagtcctcaatccacgggt

SEQ ID NO: 637759 - DNA, 25 bp, Homo sapien
cctggaatggatgattcatctctgc

SEQ ID NO: 637760 - DNA, 25 bp, Homo sapien
aggccaggtgctccccgaagtctgg

SEQ ID NO: 637761 - DNA, 25 bp, Homo sapien
taatcggccttctaacatgactcgt

SEQ ID NO: 637762 - DNA, 25 bp, Homo sapien
tgagtcgtcaacaagtgcagcagga

SEQ ID NO: 637763 - DNA, 25 bp, Homo sapien
ctaagaagcctatggaacactgtcc

SEQ ID NO: 637764 - DNA, 25 bp, Homo sapien
gggtaggacccttgcaacatgctgc

SEQ ID NO: 637765 - DNA, 25 bp, Homo sapien
ggatagccacgcttgggcagctcca

SEQ ID NO: 637766 - DNA, 25 bp, Homo sapien
cagggggatagccacgcttgggcag

SEQ ID NO: 637767 - DNA, 25 bp, Homo sapien
agctccacgccccaggcgtcagcca

SEQ ID NO: 637768 - DNA, 25 bp, Homo sapien
gctccacgccccaggcgtcagccac

SEQ ID NO: 637769 - DNA, 25 bp, Homo sapien
gctgtactgcatgccggaagtgaaa

SEQ ID NO: 637770 - DNA, 25 bp, Homo sapien
ggaggtctaggacatcaaagcagtg

SEQ ID NO: 637771 - DNA, 25 bp, Homo sapien
gcgtagcactgtagaagttcccttc

SEQ ID NO: 637772 - DNA, 25 bp, Homo sapien
cagtggacaccatcccgatgacggt

SEQ ID NO: 637773 - DNA, 25 bp, Homo sapien
cagcctctaagagccacagaacgca

SEQ ID NO: 637774 - DNA, 25 bp, Homo sapien
ggtctgaaagcagggtgtcctatct

SEQ ID NO: 637775 - DNA, 25 bp, Homo sapien
tgagaaagtgcagcctctaagagcc

SEQ ID NO: 637776 - DNA, 25 bp, Homo sapien
tatctaccagtctgctatcccatct

SEQ ID NO: 637777 - DNA, 25 bp, Homo sapien
ctggcaggaggaaacccccagtgat

SEQ ID NO: 637778 - DNA, 25 bp, Homo sapien
tggcaggaggaaacccccagtgata

SEQ ID NO: 637779 - DNA, 25 bp, Homo sapien
ggcaggaggaaacccccagtgatac

SEQ ID NO: 637780 - DNA, 25 bp, Homo sapien
ctctggcaggaggaaacccccagtg

SEQ ID NO: 637781 - DNA, 25 bp, Homo sapien
cgaggggcatcgccatgttccacac

SEQ ID NO: 637782 - DNA, 25 bp, Homo sapien
gttccccgaggggcatcgccatgtt

SEQ ID NO: 637783 - DNA, 25 bp, Homo sapien
ccccgaggggcatcgccatgttcca

SEQ ID NO: 637784 - DNA, 25 bp, Homo sapien
ttccccgaggggcatcgccatgttc

SEQ ID NO: 637785 - DNA, 25 bp, Homo sapien
ctggcaatacttggtccatgcgcac

SEQ ID NO: 637786 - DNA, 25 bp, Homo sapien
tacttggtccatgcgcacaaacacc

SEQ ID NO: 637787 - DNA, 25 bp, Homo sapien
gcaatacttggtccatgcgcacaaa

SEQ ID NO: 637788 - DNA, 25 bp, Homo sapien
gctctccattgagcagcgaccatat

SEQ ID NO: 637789 - DNA, 25 bp, Homo sapien
gccgtacttccagccccaaccagta

SEQ ID NO: 637790 - DNA, 25 bp, Homo sapien
acacacagggtgggcaagagcacaa

SEQ ID NO: 637791 - DNA, 25 bp, Homo sapien
cagggtgggcaagagcacaagggtg

SEQ ID NO: 637792 - DNA, 25 bp, Homo sapien
agggtggactgcctcagccgtactt

SEQ ID NO: 637793 - DNA, 25 bp, Homo sapien
ggagttgatgatcaccaggtccggg

SEQ ID NO: 637794 - DNA, 25 bp, Homo sapien
cagaggcaggagttgatgatcacca

SEQ ID NO: 637795 - DNA, 25 bp, Homo sapien
gcaggagttgatgatcaccaggtcc

SEQ ID NO: 637796 - DNA, 25 bp, Homo sapien
agaggcaggagttgatgatcaccag

SEQ ID NO: 637797 - DNA, 25 bp, Homo sapien
ggtccatatgtcagctcttccagaa

SEQ ID NO: 637798 - DNA, 25 bp, Homo sapien
atgtcagctcttccagaacatcctc

SEQ ID NO: 637799 - DNA, 25 bp, Homo sapien
tcagctcttccagaacatcctcaag

SEQ ID NO: 637800 - DNA, 25 bp, Homo sapien
gctcttccagaacatcctcaaggta

SEQ ID NO: 637801 - DNA, 25 bp, Homo sapien
agaactggcggacctcacgatactg

SEQ ID NO: 637802 - DNA, 25 bp, Homo sapien
gagcccgagcagaactggcggacct

SEQ ID NO: 637803 - DNA, 25 bp, Homo sapien
gacctcacgatactgtgtcccgttg

SEQ ID NO: 637804 - DNA, 25 bp, Homo sapien
tactgtgtcccgttgtgcagctcgc

SEQ ID NO: 637805 - DNA, 25 bp, Homo sapien
caccactgacatggccaccaagctt

SEQ ID NO: 637806 - DNA, 25 bp, Homo sapien
ctactggtcagacccatgccaggga

SEQ ID NO: 637807 - DNA, 25 bp, Homo sapien
gcccacccaccactgacatggccac

SEQ ID NO: 637808 - DNA, 25 bp, Homo sapien
ccccaccctactggtcagacccatg

SEQ ID NO: 637809 - DNA, 25 bp, Homo sapien
gctgtgagcagtgagtctttctgga

SEQ ID NO: 637810 - DNA, 25 bp, Homo sapien
tgtgagcagtgagtctttctggagc

SEQ ID NO: 637811 - DNA, 25 bp, Homo sapien
gagcagtgagtctttctggagcaag

SEQ ID NO: 637812 - DNA, 25 bp, Homo sapien
cagctgtgagcagtgagtctttctg

SEQ ID NO: 637813 - DNA, 25 bp, Homo sapien
cagctctgtggttgacttagacgca

SEQ ID NO: 637814 - DNA, 25 bp, Homo sapien
tggtccagacacactgaacgggctg

SEQ ID NO: 637815 - DNA, 25 bp, Homo sapien
cagaaattaagtcggccaagtcacc

SEQ ID NO: 637816 - DNA, 25 bp, Homo sapien
ctggaagcgtcaccctagaagaggc

SEQ ID NO: 637817 - DNA, 25 bp, Homo sapien
cttccgaggcctggaagtggaccat

SEQ ID NO: 637818 - DNA, 25 bp, Homo sapien
gcagctgctggacttccgaggcctg

SEQ ID NO: 637819 - DNA, 25 bp, Homo sapien
caagatgaccacgaacttgttgtgt

SEQ ID NO: 637820 - DNA, 25 bp, Homo sapien
gaacttgttgtgtagcagctgctgg

SEQ ID NO: 637821 - DNA, 25 bp, Homo sapien
gcggcgcggctcctcgctcgacaga

SEQ ID NO: 637822 - DNA, 25 bp, Homo sapien
cctcgctcgacagacagaagaccat

SEQ ID NO: 637823 - DNA, 25 bp, Homo sapien
gctcctcgctcgacagacagaagac

SEQ ID NO: 637824 - DNA, 25 bp, Homo sapien
gcggctcctcgctcgacagacagaa

SEQ ID NO: 637825 - DNA, 25 bp, Homo sapien
gggagaggccactaagcagcgcgat

SEQ ID NO: 637826 - DNA, 25 bp, Homo sapien
agaggccactaagcagcgcgatggt

SEQ ID NO: 637827 - DNA, 25 bp, Homo sapien
gcagggagaggccactaagcagcgc

SEQ ID NO: 637828 - DNA, 25 bp, Homo sapien
cagcctcagggctagcccctccggg

SEQ ID NO: 637829 - DNA, 25 bp, Homo sapien
ggtcacacttggtaccagaggcagg

SEQ ID NO: 637830 - DNA, 25 bp, Homo sapien
ccagccttggtcacacttggtacca

SEQ ID NO: 637831 - DNA, 25 bp, Homo sapien
cagagccatggtggcgccagccttg

SEQ ID NO: 637832 - DNA, 25 bp, Homo sapien
gccttggtcacacttggtaccagag

SEQ ID NO: 637833 - DNA, 25 bp, Homo sapien
gtatgcctgcgcaccgcgcgcctgg

SEQ ID NO: 637834 - DNA, 25 bp, Homo sapien
gtgttcacccgcgacccgggtatgc

SEQ ID NO: 637835 - DNA, 25 bp, Homo sapien
ccagtcggccagtcggttctgcaaa

SEQ ID NO: 637836 - DNA, 25 bp, Homo sapien
agcgggctcctagccaagcctcatg

SEQ ID NO: 637837 - DNA, 25 bp, Homo sapien
ccgacggcgcctcaggcctcggcgc

SEQ ID NO: 637838 - DNA, 25 bp, Homo sapien
gctctccatgcgagcgtcgctgtgg

SEQ ID NO: 637839 - DNA, 25 bp, Homo sapien
tccaggttagccgtcggtgcacagc

SEQ ID NO: 637840 - DNA, 25 bp, Homo sapien
gcccagcgctctccatgcgagcgtc

SEQ ID NO: 637841 - DNA, 25 bp, Homo sapien
gcggcagccaagtgaggctgcccac

SEQ ID NO: 637842 - DNA, 25 bp, Homo sapien
ctgggcccacttggcgggcgcgaag

SEQ ID NO: 637843 - DNA, 25 bp, Homo sapien
cccagtgcccgaagggaaagcaagg

SEQ ID NO: 637844 - DNA, 25 bp, Homo sapien
cctggagcccgctctaggtgggtgt

SEQ ID NO: 637845 - DNA, 25 bp, Homo sapien
cgccctcccgcccacggcctggctt

SEQ ID NO: 637846 - DNA, 25 bp, Homo sapien
aactggaacccactcggggactctg

SEQ ID NO: 637847 - DNA, 25 bp, Homo sapien
tgccttttaccggtgagctgccccg

SEQ ID NO: 637848 - DNA, 25 bp, Homo sapien
ctgctacacggcgaactggaaccca

SEQ ID NO: 637849 - DNA, 25 bp, Homo sapien
cacagccgcctttgggcagggagcc

SEQ ID NO: 637850 - DNA, 25 bp, Homo sapien
ccggctggagtctcccggcggcgtt

SEQ ID NO: 637851 - DNA, 25 bp, Homo sapien
cgagcgtctgccacttagcgcacag

SEQ ID NO: 637852 - DNA, 25 bp, Homo sapien
ggcgttcgcccctgtcactactggc

SEQ ID NO: 637853 - DNA, 25 bp, Homo sapien
ctcagatctcgctgagggaggcagc

SEQ ID NO: 637854 - DNA, 25 bp, Homo sapien
cgaagcccaggtctgttagcctccg

SEQ ID NO: 637855 - DNA, 25 bp, Homo sapien
agtgcccagtctcctgccggaaagt

SEQ ID NO: 637856 - DNA, 25 bp, Homo sapien
tagcctccggaaagatgctcagatc

SEQ ID NO: 637857 - DNA, 25 bp, Homo sapien
caggcgagacagttgataatcactc

SEQ ID NO: 637858 - DNA, 25 bp, Homo sapien
ggcgagacagttgataatcactcag

SEQ ID NO: 637859 - DNA, 25 bp, Homo sapien
agcaggcgagacagttgataatcac

SEQ ID NO: 637860 - DNA, 25 bp, Homo sapien
cagcaggcgagacagttgataatca

SEQ ID NO: 637861 - DNA, 25 bp, Homo sapien
ttcgattcgattccaaggtccattt

SEQ ID NO: 637862 - DNA, 25 bp, Homo sapien
catccttaggtttaacgatttcctg

SEQ ID NO: 637863 - DNA, 25 bp, Homo sapien
tccaaggtccatttactgctgctga

SEQ ID NO: 637864 - DNA, 25 bp, Homo sapien
gattccaaggtccatttactgctgc

SEQ ID NO: 637865 - DNA, 25 bp, Homo sapien
gactctgtgagtgttcgcggccgct

SEQ ID NO: 637866 - DNA, 25 bp, Homo sapien
ccgactctgtgagtgttcgcggccg

SEQ ID NO: 637867 - DNA, 25 bp, Homo sapien
ctctgtgagtgttcgcggccgctgc

SEQ ID NO: 637868 - DNA, 25 bp, Homo sapien
gaggcggagccgctgtcctcgtccc

SEQ ID NO: 637869 - DNA, 25 bp, Homo sapien
aactttgcatgcgtccttctgggac

SEQ ID NO: 637870 - DNA, 25 bp, Homo sapien
ttagaacggcgagaacagaatttgc

SEQ ID NO: 637871 - DNA, 25 bp, Homo sapien
catcttttccgggtagaagcctgcg

SEQ ID NO: 637872 - DNA, 25 bp, Homo sapien
taggccaattgagaacgcaggtccc

SEQ ID NO: 637873 - DNA, 25 bp, Homo sapien
tcaacctgaacctagcaaatatcat

SEQ ID NO: 637874 - DNA, 25 bp, Homo sapien
aacctgaacctagcaaatatcattt

SEQ ID NO: 637875 - DNA, 25 bp, Homo sapien
caacctgaacctagcaaatatcatt

SEQ ID NO: 637876 - DNA, 25 bp, Homo sapien
tatattgatatacgacatttggcta

SEQ ID NO: 637877 - DNA, 25 bp, Homo sapien
ttgccactgtctagtttaagaacat

SEQ ID NO: 637878 - DNA, 25 bp, Homo sapien
gacatttggctaactggttcatcaa

SEQ ID NO: 637879 - DNA, 25 bp, Homo sapien
gtgcaatggtagagcgttttcctcg

SEQ ID NO: 637880 - DNA, 25 bp, Homo sapien
ttatacatatacaaccaaacgtgga

SEQ ID NO: 637881 - DNA, 25 bp, Homo sapien
acagaacagtgaaatttttgtatcc

SEQ ID NO: 637882 - DNA, 25 bp, Homo sapien
ccacggttgatccacagataccaag

SEQ ID NO: 637883 - DNA, 25 bp, Homo sapien
taccaagggatgaccgtagagtcat

SEQ ID NO: 637884 - DNA, 25 bp, Homo sapien
tatgtgccagctggattctacagga

SEQ ID NO: 637885 - DNA, 25 bp, Homo sapien
tgcagtgcacacctgacgaagtctc

SEQ ID NO: 637886 - DNA, 25 bp, Homo sapien
gacactgccatatgttccctaggga

SEQ ID NO: 637887 - DNA, 25 bp, Homo sapien
tatagggagccatcagactgcagtg

SEQ ID NO: 637888 - DNA, 25 bp, Homo sapien
cacctggcctgctgttttttctttt

SEQ ID NO: 637889 - DNA, 25 bp, Homo sapien
cacacctggcctgctgttttttctt

SEQ ID NO: 637890 - DNA, 25 bp, Homo sapien
ctggcctgctgttttttcttttact

SEQ ID NO: 637891 - DNA, 25 bp, Homo sapien
acacctggcctgctgttttttcttt

SEQ ID NO: 637892 - DNA, 25 bp, Homo sapien
aaagaactatcttgcatgtagccga

SEQ ID NO: 637893 - DNA, 25 bp, Homo sapien
tatctggacactgtggtgtggccca

SEQ ID NO: 637894 - DNA, 25 bp, Homo sapien
gcaacaaccatcaaaaattggctca

SEQ ID NO: 637895 - DNA, 25 bp, Homo sapien
tgtagccgaaaacacactattcctt

SEQ ID NO: 637896 - DNA, 25 bp, Homo sapien
tcagatgttttctcgctttgtcacc

SEQ ID NO: 637897 - DNA, 25 bp, Homo sapien
tatttttaaacaatagccatcctaa

SEQ ID NO: 637898 - DNA, 25 bp, Homo sapien
catcctaatgggtatgaaataggtt

SEQ ID NO: 637899 - DNA, 25 bp, Homo sapien
gccatcctaatgggtatgaaatagg

SEQ ID NO: 637900 - DNA, 25 bp, Homo sapien
ttttaaacaatagccatcctaatgg

SEQ ID NO: 637901 - DNA, 25 bp, Homo sapien
tgctttttcagttaccctatcatac

SEQ ID NO: 637902 - DNA, 25 bp, Homo sapien
gctttttcagttaccctatcatact

SEQ ID NO: 637903 - DNA, 25 bp, Homo sapien
tcagttaccctatcatacttgctct

SEQ ID NO: 637904 - DNA, 25 bp, Homo sapien
ttttcagttaccctatcatacttgc

SEQ ID NO: 637905 - DNA, 25 bp, Homo sapien
ggcctggatttcttattctagtatt

SEQ ID NO: 637906 - DNA, 25 bp, Homo sapien
gactacctagactatttgagttttg

SEQ ID NO: 637907 - DNA, 25 bp, Homo sapien
tcaatttgagaagactacctagact

SEQ ID NO: 637908 - DNA, 25 bp, Homo sapien
aataattcaatttgagaagactacc

SEQ ID NO: 637909 - DNA, 25 bp, Homo sapien
gctcagcctgtagatgtgtccctca

SEQ ID NO: 637910 - DNA, 25 bp, Homo sapien
catggaggcatgttcagggatcagc

SEQ ID NO: 637911 - DNA, 25 bp, Homo sapien
gcctcagagtccagataaagcagtt

SEQ ID NO: 637912 - DNA, 25 bp, Homo sapien
caagtccaagtcgatgcaggagggc

SEQ ID NO: 637913 - DNA, 25 bp, Homo sapien
ttcatcacccgagagaacctggagg

SEQ ID NO: 637914 - DNA, 25 bp, Homo sapien
gattacagtctgagggccaaacgtg

SEQ ID NO: 637915 - DNA, 25 bp, Homo sapien
tgcccgccagggaccatgtatgtat

SEQ ID NO: 637916 - DNA, 25 bp, Homo sapien
tggactcccggaagaactacaactg

SEQ ID NO: 637917 - DNA, 25 bp, Homo sapien
tatagtatcttagtgaatgtgttcc

SEQ ID NO: 637918 - DNA, 25 bp, Homo sapien
gatgttgttttacgacccacaatat

SEQ ID NO: 637919 - DNA, 25 bp, Homo sapien
tacgacccacaatatagtatcttag

SEQ ID NO: 637920 - DNA, 25 bp, Homo sapien
gaattttgataaggaatgtgaaatt

SEQ ID NO: 637921 - DNA, 25 bp, Homo sapien
gaaaaccaatgtcccctcagatatc

SEQ ID NO: 637922 - DNA, 25 bp, Homo sapien
cattttatagagcctgggtctccct

SEQ ID NO: 637923 - DNA, 25 bp, Homo sapien
gaaatcgcaacaggcctccctttta

SEQ ID NO: 637924 - DNA, 25 bp, Homo sapien
tcacaaagaagtctacactgaccac

SEQ ID NO: 637925 - DNA, 25 bp, Homo sapien
gacttctaggccctgaatgccaata

SEQ ID NO: 637926 - DNA, 25 bp, Homo sapien
tgggacccggagcatcttcagaaga

SEQ ID NO: 637927 - DNA, 25 bp, Homo sapien
tgaggtcatcgtgcccacagagcag

SEQ ID NO: 637928 - DNA, 25 bp, Homo sapien
acatgtgttagcttaagtgaggtca

SEQ ID NO: 637929 - DNA, 25 bp, Homo sapien
cattggcggaggtttattgtccgtg

SEQ ID NO: 637930 - DNA, 25 bp, Homo sapien
agacgcgaggccgtgcattggcgga

SEQ ID NO: 637931 - DNA, 25 bp, Homo sapien
cggaggtttattgtccgtgctgcag

SEQ ID NO: 637932 - DNA, 25 bp, Homo sapien
cgtgcattggcggaggtttattgtc

SEQ ID NO: 637933 - DNA, 25 bp, Homo sapien
gctgggcgggctcgaagggctcggg

SEQ ID NO: 637934 - DNA, 25 bp, Homo sapien
gcggcactcgggctcggtcacgcag

SEQ ID NO: 637935 - DNA, 25 bp, Homo sapien
tccagctgcgtggcgttgctccggt

SEQ ID NO: 637936 - DNA, 25 bp, Homo sapien
ggcggtgaaagccctcgcggcactc

SEQ ID NO: 637937 - DNA, 25 bp, Homo sapien
cgcctcagccgtgcccacgaagcag

SEQ ID NO: 637938 - DNA, 25 bp, Homo sapien
agctcgtccgcgcagcagatgctgg

SEQ ID NO: 637939 - DNA, 25 bp, Homo sapien
cagcaaacgccgaaggcggcgcagc

SEQ ID NO: 637940 - DNA, 25 bp, Homo sapien
cgtcgttgcagcaaacgccgaaggc

SEQ ID NO: 637941 - DNA, 25 bp, Homo sapien
ccgcccctcgggcagttctggaagt

SEQ ID NO: 637942 - DNA, 25 bp, Homo sapien
aagtagcacgcggaggagaaggcca

SEQ ID NO: 637943 - DNA, 25 bp, Homo sapien
tcagctccaggtcggacatggccct

SEQ ID NO: 637944 - DNA, 25 bp, Homo sapien
agctccaggtcggacatggccctct

SEQ ID NO: 637945 - DNA, 25 bp, Homo sapien
gactgcagcgctctggattcaggga

SEQ ID NO: 637946 - DNA, 25 bp, Homo sapien
gctgcaccagagatgagaatccctg

SEQ ID NO: 637947 - DNA, 25 bp, Homo sapien
tgggccgcggaatgacagcaattgc

SEQ ID NO: 637948 - DNA, 25 bp, Homo sapien
tatttatgtccgcaggtgttcccgt

SEQ ID NO: 637949 - DNA, 25 bp, Homo sapien
tgtcacccctcttggcacagacaga

SEQ ID NO: 637950 - DNA, 25 bp, Homo sapien
gagtgcattacagccaggtggagcc

SEQ ID NO: 637951 - DNA, 25 bp, Homo sapien
tgtgccactctggagatcttgtcac

SEQ ID NO: 637952 - DNA, 25 bp, Homo sapien
ggtgctcacttgatagccgggttaa

SEQ ID NO: 637953 - DNA, 25 bp, Homo sapien
tggacttaaactctgcgtgtttaca

SEQ ID NO: 637954 - DNA, 25 bp, Homo sapien
cctgagtcttctccgtccgtggact

SEQ ID NO: 637955 - DNA, 25 bp, Homo sapien
gagtcttctccgtccgtggacttaa

SEQ ID NO: 637956 - DNA, 25 bp, Homo sapien
cttaaactctgcgtgtttacagctg

SEQ ID NO: 637957 - DNA, 25 bp, Homo sapien
ggtggctccacctgtacccaggaca

SEQ ID NO: 637958 - DNA, 25 bp, Homo sapien
cagtggtgcctagcatgtttctggc

SEQ ID NO: 637959 - DNA, 25 bp, Homo sapien
tctggcaagggtagtgaaaagacca

SEQ ID NO: 637960 - DNA, 25 bp, Homo sapien
aggctggattttccaccagagcagt

SEQ ID NO: 637961 - DNA, 25 bp, Homo sapien
caacacagctgcttaaggggaggca

SEQ ID NO: 637962 - DNA, 25 bp, Homo sapien
ctgactgcacgctagggctctcggg

SEQ ID NO: 637963 - DNA, 25 bp, Homo sapien
gagcgccgtgctgacgctgactgca

SEQ ID NO: 637964 - DNA, 25 bp, Homo sapien
ggcagtccggccctcatctgggagc

SEQ ID NO: 637965 - DNA, 25 bp, Homo sapien
ctgagaccatgacagggtgaaggtg

SEQ ID NO: 637966 - DNA, 25 bp, Homo sapien
ctggggcttttctaagaacacaagc

SEQ ID NO: 637967 - DNA, 25 bp, Homo sapien
ggcttttctaagaacacaagcacac

SEQ ID NO: 637968 - DNA, 25 bp, Homo sapien
aatgcttttgctacatgctggggct

SEQ ID NO: 637969 - DNA, 25 bp, Homo sapien
aggagcctcgccagcgagggcggca

SEQ ID NO: 637970 - DNA, 25 bp, Homo sapien
cggagggtaagacaagattctggag

SEQ ID NO: 637971 - DNA, 25 bp, Homo sapien
acacaggagcctcgccagcgagggc

SEQ ID NO: 637972 - DNA, 25 bp, Homo sapien
gagggtaagacaagattctggagag

SEQ ID NO: 637973 - DNA, 25 bp, Homo sapien
tgtggactagagctctggacggcct

SEQ ID NO: 637974 - DNA, 25 bp, Homo sapien
cgcggctaagctcaagggtaaaata

SEQ ID NO: 637975 - DNA, 25 bp, Homo sapien
tcatgtgaaggctgcatcaaggtca

SEQ ID NO: 637976 - DNA, 25 bp, Homo sapien
ccaaacgtgcttagaagggaacagg

SEQ ID NO: 637977 - DNA, 25 bp, Homo sapien
taccctgtgagctccacttgtgtgg

SEQ ID NO: 637978 - DNA, 25 bp, Homo sapien
actgcatgaggaaacgctgcgctcc

SEQ ID NO: 637979 - DNA, 25 bp, Homo sapien
tcatcgacaggaatgacagcctggc

SEQ ID NO: 637980 - DNA, 25 bp, Homo sapien
cagtttgtgtcctttcaggtcatcg

SEQ ID NO: 637981 - DNA, 25 bp, Homo sapien
tttgttgccctattgccaccagcgc

SEQ ID NO: 637982 - DNA, 25 bp, Homo sapien
agcaatgtgctataccgtgaggtga

SEQ ID NO: 637983 - DNA, 25 bp, Homo sapien
cacttttggatgaccctgaaggcag

SEQ ID NO: 637984 - DNA, 25 bp, Homo sapien
gatctgggccacaatctagggtgag

SEQ ID NO: 637985 - DNA, 25 bp, Homo sapien
tggcaggctgtgcacgtcatgggca

SEQ ID NO: 637986 - DNA, 25 bp, Homo sapien
caaccggccgctggcaggctgtgca

SEQ ID NO: 637987 - DNA, 25 bp, Homo sapien
aggctgtgcacgtcatgggcaggga

SEQ ID NO: 637988 - DNA, 25 bp, Homo sapien
acgtcttggctagcaaccggccgct

SEQ ID NO: 637989 - DNA, 25 bp, Homo sapien
gaaaatactcttttgcaggaggcac

SEQ ID NO: 637990 - DNA, 25 bp, Homo sapien
caggaggcacattcggggcccagga

SEQ ID NO: 637991 - DNA, 25 bp, Homo sapien
ctggtacaccggctcctttttgaag

SEQ ID NO: 637992 - DNA, 25 bp, Homo sapien
agggtcggcacaggaggtggccgca

SEQ ID NO: 637993 - DNA, 25 bp, Homo sapien
gcagtacagagtctgaatgtttcct

SEQ ID NO: 637994 - DNA, 25 bp, Homo sapien
atgtttcctttagagaggatgctga

SEQ ID NO: 637995 - DNA, 25 bp, Homo sapien
gctgcccttacccaggtaggatgat

SEQ ID NO: 637996 - DNA, 25 bp, Homo sapien
gcccttacccaggtaggatgatggg

SEQ ID NO: 637997 - DNA, 25 bp, Homo sapien
gagtttaagttcataggcagcccct

SEQ ID NO: 637998 - DNA, 25 bp, Homo sapien
ctcaactacccctggaaaaggcaag

SEQ ID NO: 637999 - DNA, 25 bp, Homo sapien
tcccagggtgggtgttggaactgac

SEQ ID NO: 638000 - DNA, 25 bp, Homo sapien
ttccaaggctccaaggagatggcgg

SEQ ID NO: 638001 - DNA, 25 bp, Homo sapien
gcatagagccaagggtggatgccaa

SEQ ID NO: 638002 - DNA, 25 bp, Homo sapien
tgctccctcttgtgccaaggtgctg

SEQ ID NO: 638003 - DNA, 25 bp, Homo sapien
caggaagtgttgctccctcttgtgc

SEQ ID NO: 638004 - DNA, 25 bp, Homo sapien
ccctggtcagccgtgccgtgaagga

SEQ ID NO: 638005 - DNA, 25 bp, Homo sapien
tgtcgagagatgcgcacagcacaac

SEQ ID NO: 638006 - DNA, 25 bp, Homo sapien
tcgagagatgcgcacagcacaacat

SEQ ID NO: 638007 - DNA, 25 bp, Homo sapien
cgagagatgcgcacagcacaacatc

SEQ ID NO: 638008 - DNA, 25 bp, Homo sapien
gagagatgcgcacagcacaacatcc

SEQ ID NO: 638009 - DNA, 25 bp, Homo sapien
gggcgcacagagaacctccatgcaa

SEQ ID NO: 638010 - DNA, 25 bp, Homo sapien
ggcgcacagagaacctccatgcaat

SEQ ID NO: 638011 - DNA, 25 bp, Homo sapien
cgcacagagaacctccatgcaatat

SEQ ID NO: 638012 - DNA, 25 bp, Homo sapien
gggggcgcacagagaacctccatgc

SEQ ID NO: 638013 - DNA, 25 bp, Homo sapien
gctgggctcattggtggctttcatt

SEQ ID NO: 638014 - DNA, 25 bp, Homo sapien
ctgtcgagcagtccatatgtgtcag

SEQ ID NO: 638015 - DNA, 25 bp, Homo sapien
tcaggctgggctcattggtggcttt

SEQ ID NO: 638016 - DNA, 25 bp, Homo sapien
gcagtccatatgtgtcaggctgggc

SEQ ID NO: 638017 - DNA, 25 bp, Homo sapien
tggaagaagggatcactgccaatgc

SEQ ID NO: 638018 - DNA, 25 bp, Homo sapien
gagcaggaaatggtcaatccgggcc

SEQ ID NO: 638019 - DNA, 25 bp, Homo sapien
ggaagcatttacaccaaagttactg

SEQ ID NO: 638020 - DNA, 25 bp, Homo sapien
ttactgtctgggacatgttcagcct

SEQ ID NO: 638021 - DNA, 25 bp, Homo sapien
gagtgtggcttccatcgcgccaaaa

SEQ ID NO: 638022 - DNA, 25 bp, Homo sapien
gatacagatccttaagtgggccacg

SEQ ID NO: 638023 - DNA, 25 bp, Homo sapien
tcacagtcactttccatgggcaagg

SEQ ID NO: 638024 - DNA, 25 bp, Homo sapien
ttgatacaagggataccgccgcctg

SEQ ID NO: 638025 - DNA, 25 bp, Homo sapien
ctggtttttcagtaagactttgcct

SEQ ID NO: 638026 - DNA, 25 bp, Homo sapien
tggtttttcagtaagactttgccta

SEQ ID NO: 638027 - DNA, 25 bp, Homo sapien
gaaactgtcacatagactggtggct

SEQ ID NO: 638028 - DNA, 25 bp, Homo sapien
ccagctgtgaggtctatgttgatcc

SEQ ID NO: 638029 - DNA, 25 bp, Homo sapien
tctacttcgtaaccatcagctgata

SEQ ID NO: 638030 - DNA, 25 bp, Homo sapien
ggtgaacgcctccttgtctgggaca

SEQ ID NO: 638031 - DNA, 25 bp, Homo sapien
tgcagtgaattcttggtctgaactg

SEQ ID NO: 638032 - DNA, 25 bp, Homo sapien
gcagtgaattcttggtctgaactgt

SEQ ID NO: 638033 - DNA, 25 bp, Homo sapien
ctttgtggctgagaggatatcttcc

SEQ ID NO: 638034 - DNA, 25 bp, Homo sapien
tgagaggatatcttccaagcatcag

SEQ ID NO: 638035 - DNA, 25 bp, Homo sapien
tgtggctgagaggatatcttccaag

SEQ ID NO: 638036 - DNA, 25 bp, Homo sapien
gctgagaggatatcttccaagcatc

SEQ ID NO: 638037 - DNA, 25 bp, Homo sapien
ccgttacatgctccttggtgctggt

SEQ ID NO: 638038 - DNA, 25 bp, Homo sapien
ttgcctcttgtctggcactcctcgt

SEQ ID NO: 638039 - DNA, 25 bp, Homo sapien
ggctgctgcagatcttatcccacac

SEQ ID NO: 638040 - DNA, 25 bp, Homo sapien
gctggtccaagtagcttctcttgcc

SEQ ID NO: 638041 - DNA, 25 bp, Homo sapien
tttctgtgggaaacagtgatgtcca

SEQ ID NO: 638042 - DNA, 25 bp, Homo sapien
cagtaggattccgtaagaacctggt

SEQ ID NO: 638043 - DNA, 25 bp, Homo sapien
caataccctggacttttaaggtcag

SEQ ID NO: 638044 - DNA, 25 bp, Homo sapien
gtctttaataggtataatctcatca

SEQ ID NO: 638045 - DNA, 25 bp, Homo sapien
catgtgaacttagggtgactaggac

SEQ ID NO: 638046 - DNA, 25 bp, Homo sapien
gagggacagacactccatattaatg

SEQ ID NO: 638047 - DNA, 25 bp, Homo sapien
catgccacttagctatggaggtgga

SEQ ID NO: 638048 - DNA, 25 bp, Homo sapien
gaaggccttgaacgtcatgccaaaa

SEQ ID NO: 638049 - DNA, 25 bp, Homo sapien
tttgtttttggtgttgaggttcagc

SEQ ID NO: 638050 - DNA, 25 bp, Homo sapien
tgtttttggtgttgaggttcagcac

SEQ ID NO: 638051 - DNA, 25 bp, Homo sapien
ttgtttttggtgttgaggttcagca

SEQ ID NO: 638052 - DNA, 25 bp, Homo sapien
caggctaaagcacagtggtgtcatc

SEQ ID NO: 638053 - DNA, 25 bp, Homo sapien
gcctcctaaaggctgagataacagg

SEQ ID NO: 638054 - DNA, 25 bp, Homo sapien
gctaggactgcgggggcacaccacc

SEQ ID NO: 638055 - DNA, 25 bp, Homo sapien
tccaggctaaagcacagtggtgtca

SEQ ID NO: 638056 - DNA, 25 bp, Homo sapien
aaaactctgtgacataaggctggta

SEQ ID NO: 638057 - DNA, 25 bp, Homo sapien
tgtgacataaggctggtaaacagaa

SEQ ID NO: 638058 - DNA, 25 bp, Homo sapien
taatgtctgactatacttttattct

SEQ ID NO: 638059 - DNA, 25 bp, Homo sapien
aaaaattggctttatataatgtctg

SEQ ID NO: 638060 - DNA, 25 bp, Homo sapien
tatagctttgccatagaaatgcccc

SEQ ID NO: 638061 - DNA, 25 bp, Homo sapien
cctggtacagtatacacctatagct

SEQ ID NO: 638062 - DNA, 25 bp, Homo sapien
taatcattttgcaacacctggtaca

SEQ ID NO: 638063 - DNA, 25 bp, Homo sapien
tagctctaacctgccttggatacaa

SEQ ID NO: 638064 - DNA, 25 bp, Homo sapien
cgagttcgtttcagtagtgggagcc

SEQ ID NO: 638065 - DNA, 25 bp, Homo sapien
gagccatagcaatactggttcctgt

SEQ ID NO: 638066 - DNA, 25 bp, Homo sapien
tattgtgcagtccaaggagatccct

SEQ ID NO: 638067 - DNA, 25 bp, Homo sapien
taggataactctaccacacggtagc

SEQ ID NO: 638068 - DNA, 25 bp, Homo sapien
attgcaaaggaagccccccagaggt

SEQ ID NO: 638069 - DNA, 25 bp, Homo sapien
tctccatggcccctgatttatctgc

SEQ ID NO: 638070 - DNA, 25 bp, Homo sapien
ttttgccctggaaatgtcctcttgc

SEQ ID NO: 638071 - DNA, 25 bp, Homo sapien
gctgccttattctccaactccatgg

SEQ ID NO: 638072 - DNA, 25 bp, Homo sapien
tgcggcctaagtacctccagagatc

SEQ ID NO: 638073 - DNA, 25 bp, Homo sapien
tctaggaggcaaagacgcagccact

SEQ ID NO: 638074 - DNA, 25 bp, Homo sapien
ttcattcaggaagcgtaaggccgag

SEQ ID NO: 638075 - DNA, 25 bp, Homo sapien
tcaatgccaactgtaccatcgaggg

SEQ ID NO: 638076 - DNA, 25 bp, Homo sapien
gcaaaatgctcggtatcttacaagt

SEQ ID NO: 638077 - DNA, 25 bp, Homo sapien
gtatgacacacttcggactgcacca

SEQ ID NO: 638078 - DNA, 25 bp, Homo sapien
gctgcaatgtactggccttagagga

SEQ ID NO: 638079 - DNA, 25 bp, Homo sapien
cacggtattctggtcttagctgtag

SEQ ID NO: 638080 - DNA, 25 bp, Homo sapien
tatggtgcttgattagagctggacg

SEQ ID NO: 638081 - DNA, 25 bp, Homo sapien
tgtcagtattgatctctttggcagt

SEQ ID NO: 638082 - DNA, 25 bp, Homo sapien
tcacagatttgaccaggcaatttct

SEQ ID NO: 638083 - DNA, 25 bp, Homo sapien
tcagaatacagtcctcacagatttg

SEQ ID NO: 638084 - DNA, 25 bp, Homo sapien
gccagggatcacaaatgactgggtc

SEQ ID NO: 638085 - DNA, 25 bp, Homo sapien
cagcatatcacaagagccagggatc

SEQ ID NO: 638086 - DNA, 25 bp, Homo sapien
tcagcatatcacaagagccagggat

SEQ ID NO: 638087 - DNA, 25 bp, Homo sapien
aatgactgggtcagaattggtgcca

SEQ ID NO: 638088 - DNA, 25 bp, Homo sapien
agtggcatgataactgcagctttga

SEQ ID NO: 638089 - DNA, 25 bp, Homo sapien
gtcagttccaaaaggcaatgcccaa

SEQ ID NO: 638090 - DNA, 25 bp, Homo sapien
tcctagtttaagtgccccaagtata

SEQ ID NO: 638091 - DNA, 25 bp, Homo sapien
gagactaaaggctcacgccaacatg

SEQ ID NO: 638092 - DNA, 25 bp, Homo sapien
gagtagagcctcagacactcctgga

SEQ ID NO: 638093 - DNA, 25 bp, Homo sapien
actagagtctagaagttagaggagg

SEQ ID NO: 638094 - DNA, 25 bp, Homo sapien
cttcattttaaactagagtctagaa

SEQ ID NO: 638095 - DNA, 25 bp, Homo sapien
gagcagagccgaatagcttcatttt

SEQ ID NO: 638096 - DNA, 25 bp, Homo sapien
ttccacataccggtctgagcagagc

SEQ ID NO: 638097 - DNA, 25 bp, Homo sapien
ttaccagatctgatccctcaattct

SEQ ID NO: 638098 - DNA, 25 bp, Homo sapien
aacacatacaatttaccacttacca

SEQ ID NO: 638099 - DNA, 25 bp, Homo sapien
cacttaccagatctgatccctcaat

SEQ ID NO: 638100 - DNA, 25 bp, Homo sapien
acacatacaatttaccacttaccag

SEQ ID NO: 638101 - DNA, 25 bp, Homo sapien
tgagaggcgcggcagaatatctgac

SEQ ID NO: 638102 - DNA, 25 bp, Homo sapien
tcacaaactcaggagcggcgagagt

SEQ ID NO: 638103 - DNA, 25 bp, Homo sapien
taacagcaccgtgagacaagtactg

SEQ ID NO: 638104 - DNA, 25 bp, Homo sapien
taagcgattcgcaggcacatcaaag

SEQ ID NO: 638105 - DNA, 25 bp, Homo sapien
gagtctaggacctgcagagggaaaa

SEQ ID NO: 638106 - DNA, 25 bp, Homo sapien
tgcggccgaggctcaaaagactctg

SEQ ID NO: 638107 - DNA, 25 bp, Homo sapien
tcattaagcagcttagtcccggcgc

SEQ ID NO: 638108 - DNA, 25 bp, Homo sapien
ggcggcgacacagatactggctcct

SEQ ID NO: 638109 - DNA, 25 bp, Homo sapien
cattaaacagtcaccagtcatggga

SEQ ID NO: 638110 - DNA, 25 bp, Homo sapien
catgtgtcaaaatgccgagtgccca

SEQ ID NO: 638111 - DNA, 25 bp, Homo sapien
ccatggcctaggaggtgagcacaga

SEQ ID NO: 638112 - DNA, 25 bp, Homo sapien
ttaatagctgtgttagagccggaca

SEQ ID NO: 638113 - DNA, 25 bp, Homo sapien
atcttagcctcgtcgctctcgcagg

SEQ ID NO: 638114 - DNA, 25 bp, Homo sapien
tcagatttctgtggactcaatgcgc

SEQ ID NO: 638115 - DNA, 25 bp, Homo sapien
gctggttgcgctggtacatctccac

SEQ ID NO: 638116 - DNA, 25 bp, Homo sapien
gtccacggaaaccaaggaggcggca

SEQ ID NO: 638117 - DNA, 25 bp, Homo sapien
acttagtttcctctatccggggcag

SEQ ID NO: 638118 - DNA, 25 bp, Homo sapien
cagctcttcccgctgccgcatcagc

SEQ ID NO: 638119 - DNA, 25 bp, Homo sapien
tagtttcctctatccggggcaggaa

SEQ ID NO: 638120 - DNA, 25 bp, Homo sapien
tctatccggggcaggaagtcggcct

SEQ ID NO: 638121 - DNA, 25 bp, Homo sapien
agctcccgctcccacgccttctgcc

SEQ ID NO: 638122 - DNA, 25 bp, Homo sapien
ccacctgctgtagcttcccgctgca

SEQ ID NO: 638123 - DNA, 25 bp, Homo sapien
tcccacgccttctgccgctcctcca

SEQ ID NO: 638124 - DNA, 25 bp, Homo sapien
acctgctgtagcttcccgctgcagc

SEQ ID NO: 638125 - DNA, 25 bp, Homo sapien
tgacgacgacccactcttgctggag

SEQ ID NO: 638126 - DNA, 25 bp, Homo sapien
gagtcatggtccgagacttgtccag

SEQ ID NO: 638127 - DNA, 25 bp, Homo sapien
gaaattcttgggtacgacaggcttg

SEQ ID NO: 638128 - DNA, 25 bp, Homo sapien
tggaggcccgtccactatcggaggt

SEQ ID NO: 638129 - DNA, 25 bp, Homo sapien
gggtacccacgctcttcatggcaaa

SEQ ID NO: 638130 - DNA, 25 bp, Homo sapien
gttggcgagacccttgtcctctgag

SEQ ID NO: 638131 - DNA, 25 bp, Homo sapien
aaccacgttgccacagacatcggtg

SEQ ID NO: 638132 - DNA, 25 bp, Homo sapien
cccgcagctcaccattgaggtagag

SEQ ID NO: 638133 - DNA, 25 bp, Homo sapien
tgcctgttgcccacctgataaagcc

SEQ ID NO: 638134 - DNA, 25 bp, Homo sapien
tctttgctgcaaccccagaattttg

SEQ ID NO: 638135 - DNA, 25 bp, Homo sapien
gggagagcagtacctgaatccaaca

SEQ ID NO: 638136 - DNA, 25 bp, Homo sapien
gaatccaacagggaaccaacctcag

SEQ ID NO: 638137 - DNA, 25 bp, Homo sapien
agtggaagctcactaccagcgcagg

SEQ ID NO: 638138 - DNA, 25 bp, Homo sapien
aagctcactaccagcgcaggcttct

SEQ ID NO: 638139 - DNA, 25 bp, Homo sapien
ctaagtgttgcagtcagggcagaag

SEQ ID NO: 638140 - DNA, 25 bp, Homo sapien
cagaagtggaagctcactaccagcg

SEQ ID NO: 638141 - DNA, 25 bp, Homo sapien
gccgacgggtcctcaagcctgggac

SEQ ID NO: 638142 - DNA, 25 bp, Homo sapien
tttggaggggccgactgagccatcc

SEQ ID NO: 638143 - DNA, 25 bp, Homo sapien
catgtgcctcactctcgcagtcggg

SEQ ID NO: 638144 - DNA, 25 bp, Homo sapien
cccgaaccagctgcgcgactttgga

SEQ ID NO: 638145 - DNA, 25 bp, Homo sapien
tgagtccttctgtgggtgcgcgtcc

SEQ ID NO: 638146 - DNA, 25 bp, Homo sapien
tcagcttaccgtgaagccctctgag

SEQ ID NO: 638147 - DNA, 25 bp, Homo sapien
gaggaatgaaggacctaccttgcgg

SEQ ID NO: 638148 - DNA, 25 bp, Homo sapien
gccgaaccccgcaaagaattcactg

SEQ ID NO: 638149 - DNA, 25 bp, Homo sapien
acgtagggcacaaatgaagggcaca

SEQ ID NO: 638150 - DNA, 25 bp, Homo sapien
cccacaccaggaatgagagctctag

SEQ ID NO: 638151 - DNA, 25 bp, Homo sapien
gaagggcacaaacagcaagtacaca

SEQ ID NO: 638152 - DNA, 25 bp, Homo sapien
gaaagttcactaccaagcctgtcca

SEQ ID NO: 638153 - DNA, 25 bp, Homo sapien
cgcggggtctccgacacgggcgcca

SEQ ID NO: 638154 - DNA, 25 bp, Homo sapien
ggtctccgacacgggcgccaccggc

SEQ ID NO: 638155 - DNA, 25 bp, Homo sapien
caccggccccgcttgctggcgcagc

SEQ ID NO: 638156 - DNA, 25 bp, Homo sapien
cgccaccggccccgcttgctggcgc

SEQ ID NO: 638157 - DNA, 25 bp, Homo sapien
taattggtttcaatgttactgccgg

SEQ ID NO: 638158 - DNA, 25 bp, Homo sapien
tcaggacgacagacctaacttttgt

SEQ ID NO: 638159 - DNA, 25 bp, Homo sapien
tatttgtccacttaatcaggacgac

SEQ ID NO: 638160 - DNA, 25 bp, Homo sapien
tcgcggctgcctttagatttatcaa

SEQ ID NO: 638161 - DNA, 25 bp, Homo sapien
tggtgggatcataggtcatatggca

SEQ ID NO: 638162 - DNA, 25 bp, Homo sapien
tatgtacgtgcatagaaaattcagg

SEQ ID NO: 638163 - DNA, 25 bp, Homo sapien
aaggagtctaggcactaatgtaatt

SEQ ID NO: 638164 - DNA, 25 bp, Homo sapien
taaacatgggccaccttgagatggt

SEQ ID NO: 638165 - DNA, 25 bp, Homo sapien
cccaggctgatcttaaactctgggg

SEQ ID NO: 638166 - DNA, 25 bp, Homo sapien
caggctgatcttaaactctggggct

SEQ ID NO: 638167 - DNA, 25 bp, Homo sapien
gctgatcttaaactctggggctcaa

SEQ ID NO: 638168 - DNA, 25 bp, Homo sapien
ggctgatcttaaactctggggctca

SEQ ID NO: 638169 - DNA, 25 bp, Homo sapien
gcatgcacgcatgaagacttgaggg

SEQ ID NO: 638170 - DNA, 25 bp, Homo sapien
tcaaaggttatgtacaacgcacaac

SEQ ID NO: 638171 - DNA, 25 bp, Homo sapien
gcatctggctgtgcacttgctagct

SEQ ID NO: 638172 - DNA, 25 bp, Homo sapien
aaggattgtactgtgaaacgcctgc

SEQ ID NO: 638173 - DNA, 25 bp, Homo sapien
gacaagtacccgttgctgatggaag

SEQ ID NO: 638174 - DNA, 25 bp, Homo sapien
taaaggctgatgctccctaggactc

SEQ ID NO: 638175 - DNA, 25 bp, Homo sapien
tgagcaaccaggctaaggaccagtg

SEQ ID NO: 638176 - DNA, 25 bp, Homo sapien
tatggttctcacatccaccagtggg

SEQ ID NO: 638177 - DNA, 25 bp, Homo sapien
gcaacaggctattttcttgaatgaa

SEQ ID NO: 638178 - DNA, 25 bp, Homo sapien
cacctctcggatatattctgaagcc

SEQ ID NO: 638179 - DNA, 25 bp, Homo sapien
cataataagaacaggacttcaccag

SEQ ID NO: 638180 - DNA, 25 bp, Homo sapien
cctgcttatctaggatcctaggcca

SEQ ID NO: 638181 - DNA, 25 bp, Homo sapien
ctcacaggcctttaatctataactg

SEQ ID NO: 638182 - DNA, 25 bp, Homo sapien
tgaagatgtatagccaggtaggcca

SEQ ID NO: 638183 - DNA, 25 bp, Homo sapien
gatgaagatgtatagccaggtaggc

SEQ ID NO: 638184 - DNA, 25 bp, Homo sapien
atctataactgcctggccacaccat

SEQ ID NO: 638185 - DNA, 25 bp, Homo sapien
gcaggggactcccggccccaggcga

SEQ ID NO: 638186 - DNA, 25 bp, Homo sapien
aggctggggcttgggcaggggactc

SEQ ID NO: 638187 - DNA, 25 bp, Homo sapien
tcaggctggggcttgggcaggggac

SEQ ID NO: 638188 - DNA, 25 bp, Homo sapien
ctggggcttgggcaggggactcccg

SEQ ID NO: 638189 - DNA, 25 bp, Homo sapien
tcctctggggttatgtagatgaact

SEQ ID NO: 638190 - DNA, 25 bp, Homo sapien
cttgggcaagctcggcgatggacac

SEQ ID NO: 638191 - DNA, 25 bp, Homo sapien
ccgctgtcggatgaagttggccacg

SEQ ID NO: 638192 - DNA, 25 bp, Homo sapien
gaacttgccccggtcgtcaatcaca

SEQ ID NO: 638193 - DNA, 25 bp, Homo sapien
tgttatagtcccctcagccagcagg

SEQ ID NO: 638194 - DNA, 25 bp, Homo sapien
ctgttatagtcccctcagccagcag

SEQ ID NO: 638195 - DNA, 25 bp, Homo sapien
cagcaggtcctggatgcgatttatg

SEQ ID NO: 638196 - DNA, 25 bp, Homo sapien
ggtcctggatgcgatttatggtgtc

SEQ ID NO: 638197 - DNA, 25 bp, Homo sapien
tcatgccacgcccaaatgtgactct

SEQ ID NO: 638198 - DNA, 25 bp, Homo sapien
cagtctgtgcatgagagttgtcaag

SEQ ID NO: 638199 - DNA, 25 bp, Homo sapien
agaatagagataggcaccaatgtcc

SEQ ID NO: 638200 - DNA, 25 bp, Homo sapien
tgtttgcaacacaggctggtgcagt

SEQ ID NO: 638201 - DNA, 25 bp, Homo sapien
caggagacttctgtgcactactcac

SEQ ID NO: 638202 - DNA, 25 bp, Homo sapien
ccaggagacttctgtgcactactca

SEQ ID NO: 638203 - DNA, 25 bp, Homo sapien
gccaggagacttctgtgcactactc

SEQ ID NO: 638204 - DNA, 25 bp, Homo sapien
tagacggtgcatcaagactctatct

SEQ ID NO: 638205 - DNA, 25 bp, Homo sapien
acaaggtagacggtgcatcaagact

SEQ ID NO: 638206 - DNA, 25 bp, Homo sapien
caagactctatctttagggcaggtc

SEQ ID NO: 638207 - DNA, 25 bp, Homo sapien
cacagcaggccacgttccagggctt

SEQ ID NO: 638208 - DNA, 25 bp, Homo sapien
tcttccaagagcacaaccttggact

SEQ ID NO: 638209 - DNA, 25 bp, Homo sapien
cttccaagagcacaaccttggactg

SEQ ID NO: 638210 - DNA, 25 bp, Homo sapien
gagagcagataaaagcccgagcaag

SEQ ID NO: 638211 - DNA, 25 bp, Homo sapien
gggacacatgctgaacaagccatag

SEQ ID NO: 638212 - DNA, 25 bp, Homo sapien
aagtgcttcttcataccctcagtag

SEQ ID NO: 638213 - DNA, 25 bp, Homo sapien
tgctgaggacctactagaacaaggc

SEQ ID NO: 638214 - DNA, 25 bp, Homo sapien
caccaaaagtgagggctagaactgg

SEQ ID NO: 638215 - DNA, 25 bp, Homo sapien
gagccaccaaaagtgagggctagaa

SEQ ID NO: 638216 - DNA, 25 bp, Homo sapien
tgagggctagaactggggacctttc

SEQ ID NO: 638217 - DNA, 25 bp, Homo sapien
gccaccaaaagtgagggctagaact

SEQ ID NO: 638218 - DNA, 25 bp, Homo sapien
agttgatgaactctgtcaggaagct

SEQ ID NO: 638219 - DNA, 25 bp, Homo sapien
tagttgatgaactctgtcaggaagc

SEQ ID NO: 638220 - DNA, 25 bp, Homo sapien
tgtagttgatgaactctgtcaggaa

SEQ ID NO: 638221 - DNA, 25 bp, Homo sapien
gatgtagttgatgaactctgtcagg

SEQ ID NO: 638222 - DNA, 25 bp, Homo sapien
ggcctccttcagtttcaggtactcc

SEQ ID NO: 638223 - DNA, 25 bp, Homo sapien
ctccttcagtttcaggtactcctca

SEQ ID NO: 638224 - DNA, 25 bp, Homo sapien
ttcagtttcaggtactcctcatgct

SEQ ID NO: 638225 - DNA, 25 bp, Homo sapien
aaggcctccttcagtttcaggtact

SEQ ID NO: 638226 - DNA, 25 bp, Homo sapien
accaaactcaaggtacaaccttcag

SEQ ID NO: 638227 - DNA, 25 bp, Homo sapien
ccaaactcaaggtacaaccttcagg

SEQ ID NO: 638228 - DNA, 25 bp, Homo sapien
caccaaactcaaggtacaaccttca

SEQ ID NO: 638229 - DNA, 25 bp, Homo sapien
ttcttccactcagcttcgcgctggg

SEQ ID NO: 638230 - DNA, 25 bp, Homo sapien
gctgggactcgagtcgtttccgctc

SEQ ID NO: 638231 - DNA, 25 bp, Homo sapien
tcagcttcgcgctgggactcgagtc

SEQ ID NO: 638232 - DNA, 25 bp, Homo sapien
agtcgtttccgctcctcacgttcag

SEQ ID NO: 638233 - DNA, 25 bp, Homo sapien
ctggagagaggtcttcataggggca

SEQ ID NO: 638234 - DNA, 25 bp, Homo sapien
ttcataggggcacatccctcacccc

SEQ ID NO: 638235 - DNA, 25 bp, Homo sapien
agagtgtgcccaccgcccagacaga

SEQ ID NO: 638236 - DNA, 25 bp, Homo sapien
ccccggctagagtgtgcccaccgcc

SEQ ID NO: 638237 - DNA, 25 bp, Homo sapien
gacaggtgagtttccgctggcttct

SEQ ID NO: 638238 - DNA, 25 bp, Homo sapien
gggcctttcgcgcttgtttctcctc

SEQ ID NO: 638239 - DNA, 25 bp, Homo sapien
agcttccgcagtttcttagctccaa

SEQ ID NO: 638240 - DNA, 25 bp, Homo sapien
tcttagctccaattttccccgacag

SEQ ID NO: 638241 - DNA, 25 bp, Homo sapien
tcgacgctgggcctgtaggcggctg

SEQ ID NO: 638242 - DNA, 25 bp, Homo sapien
aggccacccgctgggctcgacgctg

SEQ ID NO: 638243 - DNA, 25 bp, Homo sapien
gcctgtaggcggctgcccaggtccc

SEQ ID NO: 638244 - DNA, 25 bp, Homo sapien
cgctgggctcgacgctgggcctgta

SEQ ID NO: 638245 - DNA, 25 bp, Homo sapien
tgctcagaggtagcttgtgggccca

SEQ ID NO: 638246 - DNA, 25 bp, Homo sapien
ccaccgattccaggtagggcactgc

SEQ ID NO: 638247 - DNA, 25 bp, Homo sapien
tgtatctgttctgtgccctggccaa

SEQ ID NO: 638248 - DNA, 25 bp, Homo sapien
caggcctttggaggtatggagttcc

SEQ ID NO: 638249 - DNA, 25 bp, Homo sapien
ggctgcgagtcaggaagaggataaa

SEQ ID NO: 638250 - DNA, 25 bp, Homo sapien
gccgctaccaagtaccacacaggcg

SEQ ID NO: 638251 - DNA, 25 bp, Homo sapien
ggaagaggataaagccgactagcag

SEQ ID NO: 638252 - DNA, 25 bp, Homo sapien
aagccgactagcagagccgccgcta

SEQ ID NO: 638253 - DNA, 25 bp, Homo sapien
agtgcagaaccactgcgtccaccct

SEQ ID NO: 638254 - DNA, 25 bp, Homo sapien
gtgcagaaccactgcgtccaccctg

SEQ ID NO: 638255 - DNA, 25 bp, Homo sapien
tcctttcggagaccccattgcagag

SEQ ID NO: 638256 - DNA, 25 bp, Homo sapien
tgaagatagcgtcccttaggcagga

SEQ ID NO: 638257 - DNA, 25 bp, Homo sapien
taggagagcgcaaacctccagggtc

SEQ ID NO: 638258 - DNA, 25 bp, Homo sapien
caaagagagtatcagcagaggttca

SEQ ID NO: 638259 - DNA, 25 bp, Homo sapien
gccaccagccggaagttttctgtca

SEQ ID NO: 638260 - DNA, 25 bp, Homo sapien
cactggacgccaaggagttttcggt

SEQ ID NO: 638261 - DNA, 25 bp, Homo sapien
tggccggaaactgagccgttcactt

SEQ ID NO: 638262 - DNA, 25 bp, Homo sapien
ccagcaaatcggacgctgtgggcta

SEQ ID NO: 638263 - DNA, 25 bp, Homo sapien
ggcccttgtgactgccttagccagg

SEQ ID NO: 638264 - DNA, 25 bp, Homo sapien
gaccccagcagtgcatatcctgtca

SEQ ID NO: 638265 - DNA, 25 bp, Homo sapien
gcagctcgtaccctgtactccagag

SEQ ID NO: 638266 - DNA, 25 bp, Homo sapien
tctgggtttcaagaggaacttggcc

SEQ ID NO: 638267 - DNA, 25 bp, Homo sapien
atgagccaccgagtgcagccactgt

SEQ ID NO: 638268 - DNA, 25 bp, Homo sapien
aaagtgcctattacagttggttagt

SEQ ID NO: 638269 - DNA, 25 bp, Homo sapien
tagaaaaagtgcctattacagttgg

SEQ ID NO: 638270 - DNA, 25 bp, Homo sapien
gtgcagccactgtatttctaaaagg

SEQ ID NO: 638271 - DNA, 25 bp, Homo sapien
gggttcaagcatagaatgttaattc

SEQ ID NO: 638272 - DNA, 25 bp, Homo sapien
cagggttcaagcatagaatgttaat

SEQ ID NO: 638273 - DNA, 25 bp, Homo sapien
agggttcaagcatagaatgttaatt

SEQ ID NO: 638274 - DNA, 25 bp, Homo sapien
ccagggttcaagcatagaatgttaa

SEQ ID NO: 638275 - DNA, 25 bp, Homo sapien
tataggcgtgagcaaaaaacatttg

SEQ ID NO: 638276 - DNA, 25 bp, Homo sapien
tagtggcatgactaccgttcatagc

SEQ ID NO: 638277 - DNA, 25 bp, Homo sapien
ggcatctatgtgactaatcccaatc

SEQ ID NO: 638278 - DNA, 25 bp, Homo sapien
cgtggttgaggttcagtaactggcc

SEQ ID NO: 638279 - DNA, 25 bp, Homo sapien
cttccgagtagctaggacctcaggt

SEQ ID NO: 638280 - DNA, 25 bp, Homo sapien
agccttccgagtagctaggacctca

SEQ ID NO: 638281 - DNA, 25 bp, Homo sapien
tccgagtagctaggacctcaggtgt

SEQ ID NO: 638282 - DNA, 25 bp, Homo sapien
gccttccgagtagctaggacctcag

SEQ ID NO: 638283 - DNA, 25 bp, Homo sapien
ccctttgtgagggtgtcgagtagcc

SEQ ID NO: 638284 - DNA, 25 bp, Homo sapien
gggaggaaccatgcaaatcgccttc

SEQ ID NO: 638285 - DNA, 25 bp, Homo sapien
cctcaccggcctgtctggaggagca

SEQ ID NO: 638286 - DNA, 25 bp, Homo sapien
ctgagaaactctggcaagtggacgc

SEQ ID NO: 638287 - DNA, 25 bp, Homo sapien
aaagaaaatccatcctgctcagtcc

SEQ ID NO: 638288 - DNA, 25 bp, Homo sapien
gctcttggcctaaagctaaaggata

SEQ ID NO: 638289 - DNA, 25 bp, Homo sapien
gaagctgccctgagcaacgctcttg

SEQ ID NO: 638290 - DNA, 25 bp, Homo sapien
tattctctaatgtgcgtccagcaag

SEQ ID NO: 638291 - DNA, 25 bp, Homo sapien
gacatccaagtacttggcttcaatg

SEQ ID NO: 638292 - DNA, 25 bp, Homo sapien
aatgattcggggcagcaggatatag

SEQ ID NO: 638293 - DNA, 25 bp, Homo sapien
gtgctcagcgtccatgacatccaag

SEQ ID NO: 638294 - DNA, 25 bp, Homo sapien
tcaaggcctgtgctcagcgtccatg

SEQ ID NO: 638295 - DNA, 25 bp, Homo sapien
atcatcttcatgtagggcagggagc

SEQ ID NO: 638296 - DNA, 25 bp, Homo sapien
gagctcatgccgaaggcacacagca

SEQ ID NO: 638297 - DNA, 25 bp, Homo sapien
ctgcaggcccgtgaagtagtggatc

SEQ ID NO: 638298 - DNA, 25 bp, Homo sapien
caccctccggatgtagtgtgtcggg

SEQ ID NO: 638299 - DNA, 25 bp, Homo sapien
ggttgccatcgagggaggtgagcgc

SEQ ID NO: 638300 - DNA, 25 bp, Homo sapien
gggatccactgaagcgggaccggca

SEQ ID NO: 638301 - DNA, 25 bp, Homo sapien
gaagaggccatagagcacgggcttg

SEQ ID NO: 638302 - DNA, 25 bp, Homo sapien
ccacgcgctggacgagctggttgcc

SEQ ID NO: 638303 - DNA, 25 bp, Homo sapien
ctaaggccagggctcgcacgtgcag

SEQ ID NO: 638304 - DNA, 25 bp, Homo sapien
gcatggatccaaggcagcccaaaca

SEQ ID NO: 638305 - DNA, 25 bp, Homo sapien
gacagccctgtgttgatgatggcga

SEQ ID NO: 638306 - DNA, 25 bp, Homo sapien
tagatgtgtccgttctccacacgct

SEQ ID NO: 638307 - DNA, 25 bp, Homo sapien
cagacgggcactcgtggacagagcc

SEQ ID NO: 638308 - DNA, 25 bp, Homo sapien
acgggcactcgtggacagagcccca

SEQ ID NO: 638309 - DNA, 25 bp, Homo sapien
cagcagacgggcactcgtggacaga

SEQ ID NO: 638310 - DNA, 25 bp, Homo sapien
gcagcagacgggcactcgtggacag

SEQ ID NO: 638311 - DNA, 25 bp, Homo sapien
gccctcagggacagcgactggatct

SEQ ID NO: 638312 - DNA, 25 bp, Homo sapien
atggcaccgctgacggccctcaggg

SEQ ID NO: 638313 - DNA, 25 bp, Homo sapien
gccaccaagttctgctcgatgaaga

SEQ ID NO: 638314 - DNA, 25 bp, Homo sapien
tctccggtgcattcaccaaggcggc

SEQ ID NO: 638315 - DNA, 25 bp, Homo sapien
agcgcctggggagctaccccacgtc

SEQ ID NO: 638316 - DNA, 25 bp, Homo sapien
tggggagctaccccacgtcacccac

SEQ ID NO: 638317 - DNA, 25 bp, Homo sapien
tactgctatgcctgcagcgcctggg

SEQ ID NO: 638318 - DNA, 25 bp, Homo sapien
ctactgctatgcctgcagcgcctgg

SEQ ID NO: 638319 - DNA, 25 bp, Homo sapien
ggagaaggcgagcaccgcgatgggc

SEQ ID NO: 638320 - DNA, 25 bp, Homo sapien
ctgatgagggagaaggcgagcaccg

SEQ ID NO: 638321 - DNA, 25 bp, Homo sapien
agggcgcagtcggacaggatctctc

SEQ ID NO: 638322 - DNA, 25 bp, Homo sapien
cggacaggatctctcgcacgcaggg

SEQ ID NO: 638323 - DNA, 25 bp, Homo sapien
gagcacagcctttgacccatgcggc

SEQ ID NO: 638324 - DNA, 25 bp, Homo sapien
agcctttgacccatgcggcccctcc

SEQ ID NO: 638325 - DNA, 25 bp, Homo sapien
atgagcacagcctttgacccatgcg

SEQ ID NO: 638326 - DNA, 25 bp, Homo sapien
acagcctttgacccatgcggcccct

SEQ ID NO: 638327 - DNA, 25 bp, Homo sapien
ttgaattggtagagggtgtagccca

SEQ ID NO: 638328 - DNA, 25 bp, Homo sapien
cttgaattggtagagggtgtagccc

SEQ ID NO: 638329 - DNA, 25 bp, Homo sapien
ttcttgaattggtagagggtgtagc

SEQ ID NO: 638330 - DNA, 25 bp, Homo sapien
ctcttcttgaattggtagagggtgt

SEQ ID NO: 638331 - DNA, 25 bp, Homo sapien
gggctggcgaggaagctggcgttga

SEQ ID NO: 638332 - DNA, 25 bp, Homo sapien
cagagcgtgcccagcatgatgagga

SEQ ID NO: 638333 - DNA, 25 bp, Homo sapien
tgagcacggcggtcgcctggcctga

SEQ ID NO: 638334 - DNA, 25 bp, Homo sapien
gtggaggctggcgttgaggctggcg

SEQ ID NO: 638335 - DNA, 25 bp, Homo sapien
tgtgatagtcgtccaagtaatgccc

SEQ ID NO: 638336 - DNA, 25 bp, Homo sapien
tagtcgtccaagtaatgcccatagt

SEQ ID NO: 638337 - DNA, 25 bp, Homo sapien
tgaagtcctttttgtgtgatagtcg

SEQ ID NO: 638338 - DNA, 25 bp, Homo sapien
tgcccatagtagtacttccagaaga

SEQ ID NO: 638339 - DNA, 25 bp, Homo sapien
ctctgacaccccatcacagtcggcc

SEQ ID NO: 638340 - DNA, 25 bp, Homo sapien
gggaccctgccgacgtgcccatgca

SEQ ID NO: 638341 - DNA, 25 bp, Homo sapien
ccccatcacagtcggcccagtgcct

SEQ ID NO: 638342 - DNA, 25 bp, Homo sapien
tgaggggaccctgccgacgtgccca

SEQ ID NO: 638343 - DNA, 25 bp, Homo sapien
gacggcatccagcacaaacgtgatg

SEQ ID NO: 638344 - DNA, 25 bp, Homo sapien
tggaaatgaagagggcgatgatctc

SEQ ID NO: 638345 - DNA, 25 bp, Homo sapien
tttaaccgtgcccttgacggcatcc

SEQ ID NO: 638346 - DNA, 25 bp, Homo sapien
gagggcgatgatctcctccgtcgac

SEQ ID NO: 638347 - DNA, 25 bp, Homo sapien
agcagctcacggaagggccagtcac

SEQ ID NO: 638348 - DNA, 25 bp, Homo sapien
ttacagggggctgaaccagatccca

SEQ ID NO: 638349 - DNA, 25 bp, Homo sapien
cagcaatatggtgggggcaccccca

SEQ ID NO: 638350 - DNA, 25 bp, Homo sapien
aaccagatcccaagccttgagggtc

SEQ ID NO: 638351 - DNA, 25 bp, Homo sapien
gaagaaactattccacaggcccgtc

SEQ ID NO: 638352 - DNA, 25 bp, Homo sapien
ttgaaaaaggcataaagcgcaagga

SEQ ID NO: 638353 - DNA, 25 bp, Homo sapien
ccatgcgtagaaggagttgaagtcc

SEQ ID NO: 638354 - DNA, 25 bp, Homo sapien
ttgaagagactcatgaccaggctga

SEQ ID NO: 638355 - DNA, 25 bp, Homo sapien
cagggcgggtcagggcccggcagga

SEQ ID NO: 638356 - DNA, 25 bp, Homo sapien
gggtctcaggcaccatctcccgcct

SEQ ID NO: 638357 - DNA, 25 bp, Homo sapien
cccggcaggaaccaggggtctcagg

SEQ ID NO: 638358 - DNA, 25 bp, Homo sapien
gcagggcgggtcagggcccggcagg

SEQ ID NO: 638359 - DNA, 25 bp, Homo sapien
tgcccagagaagagcgcgtagagca

SEQ ID NO: 638360 - DNA, 25 bp, Homo sapien
cagaatcaccaatggctgcccagag

SEQ ID NO: 638361 - DNA, 25 bp, Homo sapien
tgcccggctatggtcttctgcacgt

SEQ ID NO: 638362 - DNA, 25 bp, Homo sapien
tgctctgcccggctatggtcttctg

SEQ ID NO: 638363 - DNA, 25 bp, Homo sapien
ggtggtgatgtatttgcccacagcc

SEQ ID NO: 638364 - DNA, 25 bp, Homo sapien
attgagagacccgaaagcgatggtg

SEQ ID NO: 638365 - DNA, 25 bp, Homo sapien
gatggccccgtctgtgttctcgtca

SEQ ID NO: 638366 - DNA, 25 bp, Homo sapien
caggaggcaggcgaagtagaggaac

SEQ ID NO: 638367 - DNA, 25 bp, Homo sapien
tcagtgaagtccaaggggtacaagg

SEQ ID NO: 638368 - DNA, 25 bp, Homo sapien
gggtacaaggggaacctgcgtgcga

SEQ ID NO: 638369 - DNA, 25 bp, Homo sapien
cgatgtcctcccggatgcccttccc

SEQ ID NO: 638370 - DNA, 25 bp, Homo sapien
gggaacctgcgtgcgatgtcctccc

SEQ ID NO: 638371 - DNA, 25 bp, Homo sapien
acagagcgcctgttagccctgtccg

SEQ ID NO: 638372 - DNA, 25 bp, Homo sapien
agagcgcctgttagccctgtccggc

SEQ ID NO: 638373 - DNA, 25 bp, Homo sapien
aggacagagcgcctgttagccctgt

SEQ ID NO: 638374 - DNA, 25 bp, Homo sapien
aggagaggacagagcgcctgttagc

SEQ ID NO: 638375 - DNA, 25 bp, Homo sapien
cgttctcggcgccactggaccgtgg

SEQ ID NO: 638376 - DNA, 25 bp, Homo sapien
agggagactgtgctgcgttccttcg

SEQ ID NO: 638377 - DNA, 25 bp, Homo sapien
tgtgctgcgttccttcgttctcggc

SEQ ID NO: 638378 - DNA, 25 bp, Homo sapien
ttccttcgttctcggcgccactgga

SEQ ID NO: 638379 - DNA, 25 bp, Homo sapien
gctgtctctgatgcaccaaggcctc

SEQ ID NO: 638380 - DNA, 25 bp, Homo sapien
cacctccatcgcagtcttagtgctt

SEQ ID NO: 638381 - DNA, 25 bp, Homo sapien
agcttctggcggaaggcgatatccg

SEQ ID NO: 638382 - DNA, 25 bp, Homo sapien
catggtggcaaacgtgcgcgccacc

SEQ ID NO: 638383 - DNA, 25 bp, Homo sapien
gaggatgggagtcacccctagaaac

SEQ ID NO: 638384 - DNA, 25 bp, Homo sapien
ggaggatgggagtcacccctagaaa

SEQ ID NO: 638385 - DNA, 25 bp, Homo sapien
aggatgggagtcacccctagaaaca

SEQ ID NO: 638386 - DNA, 25 bp, Homo sapien
ggatgggagtcacccctagaaacag

SEQ ID NO: 638387 - DNA, 25 bp, Homo sapien
gctggtagcaggttttattccacaa

SEQ ID NO: 638388 - DNA, 25 bp, Homo sapien
ggtcagcagatcaccgcaactacca

SEQ ID NO: 638389 - DNA, 25 bp, Homo sapien
tgccatgatttcaaccaggtcagca

SEQ ID NO: 638390 - DNA, 25 bp, Homo sapien
acaaagttcaggcattagtgtactc

SEQ ID NO: 638391 - DNA, 25 bp, Homo sapien
aggcggctgatgcacacgtgccgct

SEQ ID NO: 638392 - DNA, 25 bp, Homo sapien
ccccagttctgtgggcgaaccaggc

SEQ ID NO: 638393 - DNA, 25 bp, Homo sapien
cgtgccgcttctgtagggccttcat

SEQ ID NO: 638394 - DNA, 25 bp, Homo sapien
tgacgaaccgaacctcacaggaatt

SEQ ID NO: 638395 - DNA, 25 bp, Homo sapien
tgaccccttggatggtatctgacag

SEQ ID NO: 638396 - DNA, 25 bp, Homo sapien
tggcggtgaccccttggatggtatc

SEQ ID NO: 638397 - DNA, 25 bp, Homo sapien
tgatgcagagccacgactgctggta

SEQ ID NO: 638398 - DNA, 25 bp, Homo sapien
gctggtaccgcacccctgtcactgt

SEQ ID NO: 638399 - DNA, 25 bp, Homo sapien
aagcggcgaagcatggtccgcagca

SEQ ID NO: 638400 - DNA, 25 bp, Homo sapien
agagcatggccatgagcaggtccag

SEQ ID NO: 638401 - DNA, 25 bp, Homo sapien
ggctcattgttgtcagggtccctgg

SEQ ID NO: 638402 - DNA, 25 bp, Homo sapien
tgggtgccccggcatcggtgaagag

SEQ ID NO: 638403 - DNA, 25 bp, Homo sapien
tcgcggtgcgcacggatctcttcct

SEQ ID NO: 638404 - DNA, 25 bp, Homo sapien
aggtggccgtctcgttcaggacgat

SEQ ID NO: 638405 - DNA, 25 bp, Homo sapien
atctaggtcgcggtgcgcacggatc

SEQ ID NO: 638406 - DNA, 25 bp, Homo sapien
ctgcgccaggaagccatctaggtcg

SEQ ID NO: 638407 - DNA, 25 bp, Homo sapien
ggtagaggccccaggaccacctgca

SEQ ID NO: 638408 - DNA, 25 bp, Homo sapien
aggaccacctgcaggacaggccatt

SEQ ID NO: 638409 - DNA, 25 bp, Homo sapien
ctcagcccccaggtagaggccccag

SEQ ID NO: 638410 - DNA, 25 bp, Homo sapien
cagcccccaggtagaggccccagga

SEQ ID NO: 638411 - DNA, 25 bp, Homo sapien
caggagcacacagccaccggaagtc

SEQ ID NO: 638412 - DNA, 25 bp, Homo sapien
acacagccaccggaagtcgcttcat

SEQ ID NO: 638413 - DNA, 25 bp, Homo sapien
cagccaccggaagtcgcttcattct

SEQ ID NO: 638414 - DNA, 25 bp, Homo sapien
agcacacagccaccggaagtcgctt

SEQ ID NO: 638415 - DNA, 25 bp, Homo sapien
ccccagtctgcccctgctgcagccc

SEQ ID NO: 638416 - DNA, 25 bp, Homo sapien
cagtcccgtgccttcccccagtctg

SEQ ID NO: 638417 - DNA, 25 bp, Homo sapien
cccagtctgcccctgctgcagcccc

SEQ ID NO: 638418 - DNA, 25 bp, Homo sapien
ctgcccagtcccgtgccttccccca

SEQ ID NO: 638419 - DNA, 25 bp, Homo sapien
ctcgggcttcgaaggtgtcatctgt

SEQ ID NO: 638420 - DNA, 25 bp, Homo sapien
tactctcgccagacacgatggagga

SEQ ID NO: 638421 - DNA, 25 bp, Homo sapien
gtggcctgcatctcaaggttgacat

SEQ ID NO: 638422 - DNA, 25 bp, Homo sapien
agttggcagtgtcgaaggcctcatc

SEQ ID NO: 638423 - DNA, 25 bp, Homo sapien
aatcctcgaagtatccattctgcga

SEQ ID NO: 638424 - DNA, 25 bp, Homo sapien
cctcgaagtatccattctgcgacat

SEQ ID NO: 638425 - DNA, 25 bp, Homo sapien
ttgaatcctcgaagtatccattctg

SEQ ID NO: 638426 - DNA, 25 bp, Homo sapien
gaatcctcgaagtatccattctgcg

SEQ ID NO: 638427 - DNA, 25 bp, Homo sapien
agccccatggaccaagccctggacc

SEQ ID NO: 638428 - DNA, 25 bp, Homo sapien
ggaagcagaaaggtcaccagcccca

SEQ ID NO: 638429 - DNA, 25 bp, Homo sapien
tggaccaagccctggacctcctgtg

SEQ ID NO: 638430 - DNA, 25 bp, Homo sapien
gaagcagaaaggtcaccagccccat

SEQ ID NO: 638431 - DNA, 25 bp, Homo sapien
tccttcgctcttccgagggatgcaa

SEQ ID NO: 638432 - DNA, 25 bp, Homo sapien
tcgctcttccgagggatgcaaccca

SEQ ID NO: 638433 - DNA, 25 bp, Homo sapien
cttcgctcttccgagggatgcaacc

SEQ ID NO: 638434 - DNA, 25 bp, Homo sapien
gctcttccgagggatgcaacccacg

SEQ ID NO: 638435 - DNA, 25 bp, Homo sapien
tcttcccaccgagttagtaccagta

SEQ ID NO: 638436 - DNA, 25 bp, Homo sapien
gatgtcttcccaccgagttagtacc

SEQ ID NO: 638437 - DNA, 25 bp, Homo sapien
atgtcttcccaccgagttagtacca

SEQ ID NO: 638438 - DNA, 25 bp, Homo sapien
tgtcttcccaccgagttagtaccag

SEQ ID NO: 638439 - DNA, 25 bp, Homo sapien
atccctcttctcactctcagaccgg

SEQ ID NO: 638440 - DNA, 25 bp, Homo sapien
ttctcactctcagaccggtcctggg

SEQ ID NO: 638441 - DNA, 25 bp, Homo sapien
catgttcgctaatccaggttttcct

SEQ ID NO: 638442 - DNA, 25 bp, Homo sapien
ccaaggcgggggatctctctgcaca

SEQ ID NO: 638443 - DNA, 25 bp, Homo sapien
gggaggagtatctgagggacacatg

SEQ ID NO: 638444 - DNA, 25 bp, Homo sapien
gtcccggccgcctggaagccagagc

SEQ ID NO: 638445 - DNA, 25 bp, Homo sapien
aagccagagccgttggtccaaaagg

SEQ ID NO: 638446 - DNA, 25 bp, Homo sapien
gtatctgagggacacatgggtcggg

SEQ ID NO: 638447 - DNA, 25 bp, Homo sapien
aaaatgagaccttccgaggcggcgg

SEQ ID NO: 638448 - DNA, 25 bp, Homo sapien
ggctcccaaaagctcggcgctcggg

SEQ ID NO: 638449 - DNA, 25 bp, Homo sapien
ctaatgaaaccaagcgcgcggtggc

SEQ ID NO: 638450 - DNA, 25 bp, Homo sapien
tgcatcagctgttcaaacctggtaa

SEQ ID NO: 638451 - DNA, 25 bp, Homo sapien
gcagacggcatccgcgttctccccg

SEQ ID NO: 638452 - DNA, 25 bp, Homo sapien
aggcagacggcatccgcgttctccc

SEQ ID NO: 638453 - DNA, 25 bp, Homo sapien
agacggcatccgcgttctccccggg

SEQ ID NO: 638454 - DNA, 25 bp, Homo sapien
ggcagacggcatccgcgttctcccc

SEQ ID NO: 638455 - DNA, 25 bp, Homo sapien
cggctgcagatggaacacgcgcctg

SEQ ID NO: 638456 - DNA, 25 bp, Homo sapien
cgcacggctgcagatggaacacgcg

SEQ ID NO: 638457 - DNA, 25 bp, Homo sapien
cacggctgcagatggaacacgcgcc

SEQ ID NO: 638458 - DNA, 25 bp, Homo sapien
ctgcagatggaacacgcgcctggtg

SEQ ID NO: 638459 - DNA, 25 bp, Homo sapien
ggcacactcgcgcactcacggccgg

SEQ ID NO: 638460 - DNA, 25 bp, Homo sapien
ggccgggctcctcacgcggcgctcc

SEQ ID NO: 638461 - DNA, 25 bp, Homo sapien
gcttctggaccccaaactcggcgac

SEQ ID NO: 638462 - DNA, 25 bp, Homo sapien
ggcgctccggcgcttctggacccca

SEQ ID NO: 638463 - DNA, 25 bp, Homo sapien
ggcaaatactggtgccccagatctc

SEQ ID NO: 638464 - DNA, 25 bp, Homo sapien
tgtcctgtgtagatcgtctgacgct

SEQ ID NO: 638465 - DNA, 25 bp, Homo sapien
tcgtctgacgctgaaggcaaatact

SEQ ID NO: 638466 - DNA, 25 bp, Homo sapien
gaaggcaaatactggtgccccagat

SEQ ID NO: 638467 - DNA, 25 bp, Homo sapien
gccttccttggacccttggcaggca

SEQ ID NO: 638468 - DNA, 25 bp, Homo sapien
ccttccttggacccttggcaggcat

SEQ ID NO: 638469 - DNA, 25 bp, Homo sapien
atagccttccttggacccttggcag

SEQ ID NO: 638470 - DNA, 25 bp, Homo sapien
tagccttccttggacccttggcagg

SEQ ID NO: 638471 - DNA, 25 bp, Homo sapien
ccgctgccttgaccggtgttctcag

SEQ ID NO: 638472 - DNA, 25 bp, Homo sapien
tgccttgaccggtgttctcagcctc

SEQ ID NO: 638473 - DNA, 25 bp, Homo sapien
gctcccgctgccttgaccggtgttc

SEQ ID NO: 638474 - DNA, 25 bp, Homo sapien
ctgccttgaccggtgttctcagcct

SEQ ID NO: 638475 - DNA, 25 bp, Homo sapien
ccatggctctcctcgctggtcccca

SEQ ID NO: 638476 - DNA, 25 bp, Homo sapien
catggctctcctcgctggtccccat

SEQ ID NO: 638477 - DNA, 25 bp, Homo sapien
tcacagcagcccacttagagaaatg

SEQ ID NO: 638478 - DNA, 25 bp, Homo sapien
caattatgaaggtcaggcatgggac

SEQ ID NO: 638479 - DNA, 25 bp, Homo sapien
gattctgaagcgaggcaagcccttg

SEQ ID NO: 638480 - DNA, 25 bp, Homo sapien
tttttcttgcgacctgaagggccca

SEQ ID NO: 638481 - DNA, 25 bp, Homo sapien
tcaatttcccggttggcttcttcca

SEQ ID NO: 638482 - DNA, 25 bp, Homo sapien
caaagaggtcatgatactcctgctg

SEQ ID NO: 638483 - DNA, 25 bp, Homo sapien
cgtagtcattcatgaactggtccat

SEQ ID NO: 638484 - DNA, 25 bp, Homo sapien
gctcctggttatacttctcaatttc

SEQ ID NO: 638485 - DNA, 25 bp, Homo sapien
atctcattaaggaagagagctctga

SEQ ID NO: 638486 - DNA, 25 bp, Homo sapien
tatctcattaaggaagagagctctg

SEQ ID NO: 638487 - DNA, 25 bp, Homo sapien
ggtatctcattaaggaagagagctc

SEQ ID NO: 638488 - DNA, 25 bp, Homo sapien
ctggtatctcattaaggaagagagc

SEQ ID NO: 638489 - DNA, 25 bp, Homo sapien
aagggaggctgcctgagcccagagc

SEQ ID NO: 638490 - DNA, 25 bp, Homo sapien
ggaggctgcctgagcccagagcggc

SEQ ID NO: 638491 - DNA, 25 bp, Homo sapien
ctggaggacaagggaggctgcctga

SEQ ID NO: 638492 - DNA, 25 bp, Homo sapien
tggaggacaagggaggctgcctgag

SEQ ID NO: 638493 - DNA, 25 bp, Homo sapien
ttaacaaattgggtgccattataaa

SEQ ID NO: 638494 - DNA, 25 bp, Homo sapien
ttataaaagtagcctgcaggtaggg

SEQ ID NO: 638495 - DNA, 25 bp, Homo sapien
tagcctgcaggtaggggttccaagt

SEQ ID NO: 638496 - DNA, 25 bp, Homo sapien
aaattgggtgccattataaaagtag

SEQ ID NO: 638497 - DNA, 25 bp, Homo sapien
agagctaggcaagccgaggacagcc

SEQ ID NO: 638498 - DNA, 25 bp, Homo sapien
aatacagagctaggcaagccgagga

SEQ ID NO: 638499 - DNA, 25 bp, Homo sapien
gcatgtcctacaaacagctcctcac

SEQ ID NO: 638500 - DNA, 25 bp, Homo sapien
gctcctcactcagagaatccaaaat

SEQ ID NO: 638501 - DNA, 25 bp, Homo sapien
ctcctgatctcctgttgcgtcagca

SEQ ID NO: 638502 - DNA, 25 bp, Homo sapien
cctgttgcgtcagcatccccctggt

SEQ ID NO: 638503 - DNA, 25 bp, Homo sapien
gttgcgtcagcatccccctggtctt

SEQ ID NO: 638504 - DNA, 25 bp, Homo sapien
tcctgatctcctgttgcgtcagcat

SEQ ID NO: 638505 - DNA, 25 bp, Homo sapien
gtcaggtctgtctgggctctggaaa

SEQ ID NO: 638506 - DNA, 25 bp, Homo sapien
ggtctgtctgggctctggaaaccac

SEQ ID NO: 638507 - DNA, 25 bp, Homo sapien
gtgtcaggtctgtctgggctctgga

SEQ ID NO: 638508 - DNA, 25 bp, Homo sapien
atctgtgtcaggtctgtctgggctc

SEQ ID NO: 638509 - DNA, 25 bp, Homo sapien
gatgaacacaaggtagcactcctgc

SEQ ID NO: 638510 - DNA, 25 bp, Homo sapien
gccagtgtgttgtagcagacctcca

SEQ ID NO: 638511 - DNA, 25 bp, Homo sapien
cttcagggagcagccgatgaacaca

SEQ ID NO: 638512 - DNA, 25 bp, Homo sapien
tccaaaactggcatgatgctcaagg

SEQ ID NO: 638513 - DNA, 25 bp, Homo sapien
gaatacacattagtccctgagagcc

SEQ ID NO: 638514 - DNA, 25 bp, Homo sapien
tgccttgaaaggatacagctatgct

SEQ ID NO: 638515 - DNA, 25 bp, Homo sapien
tgcaagagacagaactgatgtgact

SEQ ID NO: 638516 - DNA, 25 bp, Homo sapien
gctaagactgtgacaatgcagatgg

SEQ ID NO: 638517 - DNA, 25 bp, Homo sapien
agtccctggtggttgctggaatagc

SEQ ID NO: 638518 - DNA, 25 bp, Homo sapien
ctaagaccctgagcgtgagacatcc

SEQ ID NO: 638519 - DNA, 25 bp, Homo sapien
tacagcagtgttgcacgaaggtcac

SEQ ID NO: 638520 - DNA, 25 bp, Homo sapien
tggacactattatcccagaagggaa

SEQ ID NO: 638521 - DNA, 25 bp, Homo sapien
gacccatgtaattctcccatctgaa

SEQ ID NO: 638522 - DNA, 25 bp, Homo sapien
gcagaaactgatagctgccgacccc

SEQ ID NO: 638523 - DNA, 25 bp, Homo sapien
caagcaaaagctatgagctaaggac

SEQ ID NO: 638524 - DNA, 25 bp, Homo sapien
tctatgcttggagccctcagtggtc

SEQ ID NO: 638525 - DNA, 25 bp, Homo sapien
caagggctccagaggtctaaactga

SEQ ID NO: 638526 - DNA, 25 bp, Homo sapien
ccatgactggctcaagaggtgtgga

SEQ ID NO: 638527 - DNA, 25 bp, Homo sapien
caggaggacccagactaagtaggcc

SEQ ID NO: 638528 - DNA, 25 bp, Homo sapien
gatcctcaggcctactagtcagaag

SEQ ID NO: 638529 - DNA, 25 bp, Homo sapien
tagatgtttccggagaagggacttg

SEQ ID NO: 638530 - DNA, 25 bp, Homo sapien
ggacttggcttgatggaggactgaa

SEQ ID NO: 638531 - DNA, 25 bp, Homo sapien
ggatgtggtagatgtttccggagaa

SEQ ID NO: 638532 - DNA, 25 bp, Homo sapien
acttggcttgatggaggactgaatt

SEQ ID NO: 638533 - DNA, 25 bp, Homo sapien
caaaccatacgcagatctgaaccat

SEQ ID NO: 638534 - DNA, 25 bp, Homo sapien
ggacggccaaaccatacgcagatct

SEQ ID NO: 638535 - DNA, 25 bp, Homo sapien
tttacatttggccacaaagcgagtc

SEQ ID NO: 638536 - DNA, 25 bp, Homo sapien
tttggccacaaagcgagtcttctcc

SEQ ID NO: 638537 - DNA, 25 bp, Homo sapien
taggggatagactgatccagcattc

SEQ ID NO: 638538 - DNA, 25 bp, Homo sapien
gactgatccagcattcaatttacct

SEQ ID NO: 638539 - DNA, 25 bp, Homo sapien
gggatagactgatccagcattcaat

SEQ ID NO: 638540 - DNA, 25 bp, Homo sapien
gatagactgatccagcattcaattt

SEQ ID NO: 638541 - DNA, 25 bp, Homo sapien
ttctggccaagctttaacaatgtct

SEQ ID NO: 638542 - DNA, 25 bp, Homo sapien
tgtccatgctatacaggaataagtg

SEQ ID NO: 638543 - DNA, 25 bp, Homo sapien
gaataagtgtagcacgatgcctaag

SEQ ID NO: 638544 - DNA, 25 bp, Homo sapien
taaacatgagagattaattctggcc

SEQ ID NO: 638545 - DNA, 25 bp, Homo sapien
gatcgtagcatctcaggacttgaaa

SEQ ID NO: 638546 - DNA, 25 bp, Homo sapien
attaaatatcgagatcgtagcatct

SEQ ID NO: 638547 - DNA, 25 bp, Homo sapien
gagatcgtagcatctcaggacttga

SEQ ID NO: 638548 - DNA, 25 bp, Homo sapien
tatcgagatcgtagcatctcaggac

SEQ ID NO: 638549 - DNA, 25 bp, Homo sapien
ccagcctagattcgctttttttggt

SEQ ID NO: 638550 - DNA, 25 bp, Homo sapien
gaatcttggctaccatccttcaatg

SEQ ID NO: 638551 - DNA, 25 bp, Homo sapien
ccttctctacgttctctatgccatt

SEQ ID NO: 638552 - DNA, 25 bp, Homo sapien
aatgcctcaaaatggtacacgatgg

SEQ ID NO: 638553 - DNA, 25 bp, Homo sapien
catctaaagcacttcggccaggcgt

SEQ ID NO: 638554 - DNA, 25 bp, Homo sapien
cagtagaaagactctgtgggccaca

SEQ ID NO: 638555 - DNA, 25 bp, Homo sapien
tctgtgggccacagacagagtgctg

SEQ ID NO: 638556 - DNA, 25 bp, Homo sapien
ccacagacagagtgctgtatctgag

SEQ ID NO: 638557 - DNA, 25 bp, Homo sapien
tcttagatacagtagaaagactctg

SEQ ID NO: 638558 - DNA, 25 bp, Homo sapien
ctgctccgtggtgtgactggtgaat

SEQ ID NO: 638559 - DNA, 25 bp, Homo sapien
aacaaggagagggtgccgctgctcc

SEQ ID NO: 638560 - DNA, 25 bp, Homo sapien
gtgaataccacgttactcaccaggc

SEQ ID NO: 638561 - DNA, 25 bp, Homo sapien
agctgaacaaggagagggtgccgct

SEQ ID NO: 638562 - DNA, 25 bp, Homo sapien
cctcaaagagtgcactgccaagata

SEQ ID NO: 638563 - DNA, 25 bp, Homo sapien
cacagggagccacatgattccaaga

SEQ ID NO: 638564 - DNA, 25 bp, Homo sapien
tgccaagatactgtgcacagggagc

SEQ ID NO: 638565 - DNA, 25 bp, Homo sapien
tgccatttaccttcaccagttcaga

SEQ ID NO: 638566 - DNA, 25 bp, Homo sapien
ccatcgcgcccggtgagagtaggtt

SEQ ID NO: 638567 - DNA, 25 bp, Homo sapien
gcgcccggtgagagtaggtttataa

SEQ ID NO: 638568 - DNA, 25 bp, Homo sapien
cccggtgagagtaggtttataaatg

SEQ ID NO: 638569 - DNA, 25 bp, Homo sapien
tcgcgcccggtgagagtaggtttat

SEQ ID NO: 638570 - DNA, 25 bp, Homo sapien
gcctggaaagcttgatgccagaatc

SEQ ID NO: 638571 - DNA, 25 bp, Homo sapien
ctgtgttcgcatggccatttggaaa

SEQ ID NO: 638572 - DNA, 25 bp, Homo sapien
aaaggtcactctgcagtgcactctg

SEQ ID NO: 638573 - DNA, 25 bp, Homo sapien
ggaaaggtcactctgcagtgcactc

SEQ ID NO: 638574 - DNA, 25 bp, Homo sapien
agtatctcacttgaccactggccca

SEQ ID NO: 638575 - DNA, 25 bp, Homo sapien
taaagctcttctcaaggacactgct

SEQ ID NO: 638576 - DNA, 25 bp, Homo sapien
tcagggtccttctcacttacagagc

SEQ ID NO: 638577 - DNA, 25 bp, Homo sapien
tctcagcagcaaataaggaggaact

SEQ ID NO: 638578 - DNA, 25 bp, Homo sapien
taatctcctaagctagaaacctagg

SEQ ID NO: 638579 - DNA, 25 bp, Homo sapien
tctatttgaaggacaggtaccacca

SEQ ID NO: 638580 - DNA, 25 bp, Homo sapien
acatctagtctgtcaccagatccta

SEQ ID NO: 638581 - DNA, 25 bp, Homo sapien
taggagtcatcctagatacctcttt

SEQ ID NO: 638582 - DNA, 25 bp, Homo sapien
catttcatcctgtttctgaggtgca

SEQ ID NO: 638583 - DNA, 25 bp, Homo sapien
tcatcctgtttctgaggtgcagtgc

SEQ ID NO: 638584 - DNA, 25 bp, Homo sapien
ctccatttcatcctgtttctgaggt

SEQ ID NO: 638585 - DNA, 25 bp, Homo sapien
tttcatcctgtttctgaggtgcagt

SEQ ID NO: 638586 - DNA, 25 bp, Homo sapien
aacagggacctctgaaagctggacc

SEQ ID NO: 638587 - DNA, 25 bp, Homo sapien
tggacctgagactacctggtacagc

SEQ ID NO: 638588 - DNA, 25 bp, Homo sapien
tacgatcagcaggatgaaactgtgc

SEQ ID NO: 638589 - DNA, 25 bp, Homo sapien
aactctggtatgctctgttgtctcc

SEQ ID NO: 638590 - DNA, 25 bp, Homo sapien
cttgtgaacactggtcaagacattt

SEQ ID NO: 638591 - DNA, 25 bp, Homo sapien
tgaacactggtcaagacatttagga

SEQ ID NO: 638592 - DNA, 25 bp, Homo sapien
ttgtgaacactggtcaagacattta

SEQ ID NO: 638593 - DNA, 25 bp, Homo sapien
aacactggtcaagacatttaggaaa

SEQ ID NO: 638594 - DNA, 25 bp, Homo sapien
tggaatgctgaaggagggatactgg

SEQ ID NO: 638595 - DNA, 25 bp, Homo sapien
cacagaagtccctacatggccaatt

SEQ ID NO: 638596 - DNA, 25 bp, Homo sapien
gcagcactgagcactaaggatagcc

SEQ ID NO: 638597 - DNA, 25 bp, Homo sapien
tgggactttacagctttccgtcaaa

SEQ ID NO: 638598 - DNA, 25 bp, Homo sapien
gcctggacaacatcaataacatctg

SEQ ID NO: 638599 - DNA, 25 bp, Homo sapien
ctccacacatgctgtgatggcacca

SEQ ID NO: 638600 - DNA, 25 bp, Homo sapien
gggcctggacaacatcaataacatc

SEQ ID NO: 638601 - DNA, 25 bp, Homo sapien
gcagggcctggacaacatcaataac

SEQ ID NO: 638602 - DNA, 25 bp, Homo sapien
cattcagagctgtccatgatttggc

SEQ ID NO: 638603 - DNA, 25 bp, Homo sapien
cttgtaacaccaccagcagtctggt

SEQ ID NO: 638604 - DNA, 25 bp, Homo sapien
cagagcggttctgctgggcctctag

SEQ ID NO: 638605 - DNA, 25 bp, Homo sapien
ttcttgcggatgtaggctgactggc

SEQ ID NO: 638606 - DNA, 25 bp, Homo sapien
agtgcctaggcaggcccaagttaga

SEQ ID NO: 638607 - DNA, 25 bp, Homo sapien
atgtaagctccataagtgcagagat

SEQ ID NO: 638608 - DNA, 25 bp, Homo sapien
tgataccagtcccaccaaggccagt

SEQ ID NO: 638609 - DNA, 25 bp, Homo sapien
ggctgactaccatgctgataccagt

SEQ ID NO: 638610 - DNA, 25 bp, Homo sapien
cacattccttatgcagagtgaccag

SEQ ID NO: 638611 - DNA, 25 bp, Homo sapien
aaaagcacagagctcgctagcgtga

SEQ ID NO: 638612 - DNA, 25 bp, Homo sapien
cctgggaggccggttacaatgctga

SEQ ID NO: 638613 - DNA, 25 bp, Homo sapien
agctcgctagcgtgacagcctggga

SEQ ID NO: 638614 - DNA, 25 bp, Homo sapien
ggacctacctgcttgagaccacaga

SEQ ID NO: 638615 - DNA, 25 bp, Homo sapien
aaaaatgccccaggctacactggtg

SEQ ID NO: 638616 - DNA, 25 bp, Homo sapien
tgaccttaggccaatgacagaacct

SEQ ID NO: 638617 - DNA, 25 bp, Homo sapien
caagcattgtgggtgtgaacctcag

SEQ ID NO: 638618 - DNA, 25 bp, Homo sapien
tatcattacatttcaggatccaagg

SEQ ID NO: 638619 - DNA, 25 bp, Homo sapien
caaggaagtggagagtcctgtaaca

SEQ ID NO: 638620 - DNA, 25 bp, Homo sapien
ttcccagcatatctggtgagctcct

SEQ ID NO: 638621 - DNA, 25 bp, Homo sapien
ttttgttaactgacacaaaagattc

SEQ ID NO: 638622 - DNA, 25 bp, Homo sapien
gtgagtagtgttgatttcagcttgc

SEQ ID NO: 638623 - DNA, 25 bp, Homo sapien
tgctgatggcgaaatgctggagaaa

SEQ ID NO: 638624 - DNA, 25 bp, Homo sapien
caggaagatgggtccgcatcacagg

SEQ ID NO: 638625 - DNA, 25 bp, Homo sapien
ctgctgatggcgaaatgctggagaa

SEQ ID NO: 638626 - DNA, 25 bp, Homo sapien
cagtccagctctgggagtttggctg

SEQ ID NO: 638627 - DNA, 25 bp, Homo sapien
cactgaagagcttctgtgcactgga

SEQ ID NO: 638628 - DNA, 25 bp, Homo sapien
agggaactccgtttctccccagcag

SEQ ID NO: 638629 - DNA, 25 bp, Homo sapien
gctgagagtaactttagggaactcc

SEQ ID NO: 638630 - DNA, 25 bp, Homo sapien
tttattatctggcataacgcgtgat

SEQ ID NO: 638631 - DNA, 25 bp, Homo sapien
ctggcataacgcgtgatgtagttgt

SEQ ID NO: 638632 - DNA, 25 bp, Homo sapien
gggctacctcctgctgtttcacatt

SEQ ID NO: 638633 - DNA, 25 bp, Homo sapien
cataacgcgtgatgtagttgtccac

SEQ ID NO: 638634 - DNA, 25 bp, Homo sapien
gcttcaatattcagtggatcatcaa

SEQ ID NO: 638635 - DNA, 25 bp, Homo sapien
tgcagcttcaatattcagtggatca

SEQ ID NO: 638636 - DNA, 25 bp, Homo sapien
tgttctgcagcttcaatattcagtg

SEQ ID NO: 638637 - DNA, 25 bp, Homo sapien
tcagtggatcatcaaaattcaaaaa

SEQ ID NO: 638638 - DNA, 25 bp, Homo sapien
ggaggcaccatgttgtacacatcgg

SEQ ID NO: 638639 - DNA, 25 bp, Homo sapien
ctctcagtaaactcagacatatttc

SEQ ID NO: 638640 - DNA, 25 bp, Homo sapien
cacatcgggaactttcggtttcaag

SEQ ID NO: 638641 - DNA, 25 bp, Homo sapien
ccagtgccgtcaattgaatgttctc

SEQ ID NO: 638642 - DNA, 25 bp, Homo sapien
ggcaccggctacctgcaagttggca

SEQ ID NO: 638643 - DNA, 25 bp, Homo sapien
tgttgaccctttcagaagccaagac

SEQ ID NO: 638644 - DNA, 25 bp, Homo sapien
cataatgcgaggcatcctgcagaga

SEQ ID NO: 638645 - DNA, 25 bp, Homo sapien
cctgctaagcgggaggataacctga

SEQ ID NO: 638646 - DNA, 25 bp, Homo sapien
tcttcctggatcacttttaaagaga

SEQ ID NO: 638647 - DNA, 25 bp, Homo sapien
ttcctggatcacttttaaagagatc

SEQ ID NO: 638648 - DNA, 25 bp, Homo sapien
cttcctggatcacttttaaagagat

SEQ ID NO: 638649 - DNA, 25 bp, Homo sapien
gcttggtatatcttcgatttgggga

SEQ ID NO: 638650 - DNA, 25 bp, Homo sapien
ttgcttgatccatggaaatgaactg

SEQ ID NO: 638651 - DNA, 25 bp, Homo sapien
gcttgatccatggaaatgaactggg

SEQ ID NO: 638652 - DNA, 25 bp, Homo sapien
tggtatatcttcgatttggggaaaa

SEQ ID NO: 638653 - DNA, 25 bp, Homo sapien
tgaccagaagccctttctaggtaag

SEQ ID NO: 638654 - DNA, 25 bp, Homo sapien
ctgaccagaagccctttctaggtaa

SEQ ID NO: 638655 - DNA, 25 bp, Homo sapien
gaccagaagccctttctaggtaagc

SEQ ID NO: 638656 - DNA, 25 bp, Homo sapien
gtgtgagcaactttccgaccaaaaa

SEQ ID NO: 638657 - DNA, 25 bp, Homo sapien
aaagccactgactagtaaaacacct

SEQ ID NO: 638658 - DNA, 25 bp, Homo sapien
taagcgtcttgagaatgcccaggcc

SEQ ID NO: 638659 - DNA, 25 bp, Homo sapien
gacatactgccctgtggtagtggag

SEQ ID NO: 638660 - DNA, 25 bp, Homo sapien
gatccttggaaatgatgatacttct

SEQ ID NO: 638661 - DNA, 25 bp, Homo sapien
catgtgatccttggaaatgatgata

SEQ ID NO: 638662 - DNA, 25 bp, Homo sapien
atggaattcatgtgatccttggaaa

SEQ ID NO: 638663 - DNA, 25 bp, Homo sapien
tgatgatacttctatgacgacagtg

SEQ ID NO: 638664 - DNA, 25 bp, Homo sapien
taccctccaacaagtagcctggctt

SEQ ID NO: 638665 - DNA, 25 bp, Homo sapien
ctccaacaagtagcctggctttctg

SEQ ID NO: 638666 - DNA, 25 bp, Homo sapien
cagccacagccagcgactatctagg

SEQ ID NO: 638667 - DNA, 25 bp, Homo sapien
cgactatctaggttcaagctctgga

SEQ ID NO: 638668 - DNA, 25 bp, Homo sapien
ctcaaccacaacaggccacagtgct

SEQ ID NO: 638669 - DNA, 25 bp, Homo sapien
gtgctgccccgtagcctgttcactg

SEQ ID NO: 638670 - DNA, 25 bp, Homo sapien
caactcctgccacaagatgactcta

SEQ ID NO: 638671 - DNA, 25 bp, Homo sapien
gaatctgtagatgtgccttctctgc

SEQ ID NO: 638672 - DNA, 25 bp, Homo sapien
tgagtggttagtacctgcacccttc

SEQ ID NO: 638673 - DNA, 25 bp, Homo sapien
tgtcacgaggtagaaactgctcctg

SEQ ID NO: 638674 - DNA, 25 bp, Homo sapien
tgctgctgagtggttagtacctgca

SEQ ID NO: 638675 - DNA, 25 bp, Homo sapien
ttccagagataagagggctccatag

SEQ ID NO: 638676 - DNA, 25 bp, Homo sapien
tttagaaacaagtccagtgccactt

SEQ ID NO: 638677 - DNA, 25 bp, Homo sapien
tagaaacaagtccagtgccacttga

SEQ ID NO: 638678 - DNA, 25 bp, Homo sapien
gaaacaagtccagtgccacttgaaa

SEQ ID NO: 638679 - DNA, 25 bp, Homo sapien
tttttagaaacaagtccagtgccac

SEQ ID NO: 638680 - DNA, 25 bp, Homo sapien
cctcaggccaggactgtagattgct

SEQ ID NO: 638681 - DNA, 25 bp, Homo sapien
tcaggccaggactgtagattgctgg

SEQ ID NO: 638682 - DNA, 25 bp, Homo sapien
aggccaggactgtagattgctggaa

SEQ ID NO: 638683 - DNA, 25 bp, Homo sapien
gctggaataaagatatgctccttct

SEQ ID NO: 638684 - DNA, 25 bp, Homo sapien
ctgttagataagtgcccaggaaaga

SEQ ID NO: 638685 - DNA, 25 bp, Homo sapien
actgcttgctgggttttctcagaca

SEQ ID NO: 638686 - DNA, 25 bp, Homo sapien
gctgggttttctcagacaattttac

SEQ ID NO: 638687 - DNA, 25 bp, Homo sapien
tgcttgctgggttttctcagacaat

SEQ ID NO: 638688 - DNA, 25 bp, Homo sapien
cctcactgcttgctgggttttctca

SEQ ID NO: 638689 - DNA, 25 bp, Homo sapien
gacctgaggtccagctaatgagctt

SEQ ID NO: 638690 - DNA, 25 bp, Homo sapien
gtgggctctctcactaggacctgag

SEQ ID NO: 638691 - DNA, 25 bp, Homo sapien
taatgagcttatgacaagcagaggg

SEQ ID NO: 638692 - DNA, 25 bp, Homo sapien
cacacctgagatgtctgctggtcac

SEQ ID NO: 638693 - DNA, 25 bp, Homo sapien
gactacggagctggtttctgtggta

SEQ ID NO: 638694 - DNA, 25 bp, Homo sapien
tcaggactacggagctggtttctgt

SEQ ID NO: 638695 - DNA, 25 bp, Homo sapien
actacggagctggtttctgtggtaa

SEQ ID NO: 638696 - DNA, 25 bp, Homo sapien
aggactacggagctggtttctgtgg

SEQ ID NO: 638697 - DNA, 25 bp, Homo sapien
gctcattttactattgggtagctta

SEQ ID NO: 638698 - DNA, 25 bp, Homo sapien
tgctttctaaagatcacatatactt

SEQ ID NO: 638699 - DNA, 25 bp, Homo sapien
agtgctgtgatcatcagttctaata

SEQ ID NO: 638700 - DNA, 25 bp, Homo sapien
cataaattaggttatacaccctttg

SEQ ID NO: 638701 - DNA, 25 bp, Homo sapien
cacagatcctaaacaaccattgcct

SEQ ID NO: 638702 - DNA, 25 bp, Homo sapien
gagaaaaccacagatcctaaacaac

SEQ ID NO: 638703 - DNA, 25 bp, Homo sapien
caggaatgtcatagacggccataca

SEQ ID NO: 638704 - DNA, 25 bp, Homo sapien
tctttaactaagatctgagaagtca

SEQ ID NO: 638705 - DNA, 25 bp, Homo sapien
gatcagttaccagcccaaaactttc

SEQ ID NO: 638706 - DNA, 25 bp, Homo sapien
gaaaccagttagatcagttaccagc

SEQ ID NO: 638707 - DNA, 25 bp, Homo sapien
tgagaaaccagttagatcagttacc

SEQ ID NO: 638708 - DNA, 25 bp, Homo sapien
cagttagatcagttaccagcccaaa

SEQ ID NO: 638709 - DNA, 25 bp, Homo sapien
taagctatcttcactgtccagcggt

SEQ ID NO: 638710 - DNA, 25 bp, Homo sapien
tatcttcactgtccagcggtacaat

SEQ ID NO: 638711 - DNA, 25 bp, Homo sapien
ttcacaaaggataagctatcttcac

SEQ ID NO: 638712 - DNA, 25 bp, Homo sapien
aaaggataagctatcttcactgtcc

SEQ ID NO: 638713 - DNA, 25 bp, Homo sapien
gattattcacagcatgtatatgaaa

SEQ ID NO: 638714 - DNA, 25 bp, Homo sapien
ccctgattattcacagcatgtatat

SEQ ID NO: 638715 - DNA, 25 bp, Homo sapien
ctgattattcacagcatgtatatga

SEQ ID NO: 638716 - DNA, 25 bp, Homo sapien
ttattcacagcatgtatatgaaaag

SEQ ID NO: 638717 - DNA, 25 bp, Homo sapien
ctgcgccccgccctcagtgaagcaa

SEQ ID NO: 638718 - DNA, 25 bp, Homo sapien
ctcagtgaagcaatctttgtggtga

SEQ ID NO: 638719 - DNA, 25 bp, Homo sapien
cgccccgccctcagtgaagcaatct

SEQ ID NO: 638720 - DNA, 25 bp, Homo sapien
ggctctaggtggaagactggcctgg

SEQ ID NO: 638721 - DNA, 25 bp, Homo sapien
tctaacccagatcccagagtttgct

SEQ ID NO: 638722 - DNA, 25 bp, Homo sapien
taaacggaatcaactcaaaggaatc

SEQ ID NO: 638723 - DNA, 25 bp, Homo sapien
cagggctgccttaaacggaatcaac

SEQ ID NO: 638724 - DNA, 25 bp, Homo sapien
tcaactcaaaggaatctaacccaga

SEQ ID NO: 638725 - DNA, 25 bp, Homo sapien
aacagcagcatatatctgggacaat

SEQ ID NO: 638726 - DNA, 25 bp, Homo sapien
agcagcatatatctgggacaatagc

SEQ ID NO: 638727 - DNA, 25 bp, Homo sapien
ctttgttagactggaagttttagca

SEQ ID NO: 638728 - DNA, 25 bp, Homo sapien
gttttagcataacatgcaatgccag

SEQ ID NO: 638729 - DNA, 25 bp, Homo sapien
gaagagaaggggctcatccaagggt

SEQ ID NO: 638730 - DNA, 25 bp, Homo sapien
aagagaaggggctcatccaagggtc

SEQ ID NO: 638731 - DNA, 25 bp, Homo sapien
agagaaggggctcatccaagggtcc

SEQ ID NO: 638732 - DNA, 25 bp, Homo sapien
tcacagaaaattcatggctgaccca

SEQ ID NO: 638733 - DNA, 25 bp, Homo sapien
cagaaaattcatggctgacccaaac

SEQ ID NO: 638734 - DNA, 25 bp, Homo sapien
aaggaaggtgataggagtttgaaag

SEQ ID NO: 638735 - DNA, 25 bp, Homo sapien
cttatagaagaagcaataagggcct

SEQ ID NO: 638736 - DNA, 25 bp, Homo sapien
agttttcttgggcagcttgctgtca

SEQ ID NO: 638737 - DNA, 25 bp, Homo sapien
tgttcagttttcttgggcagcttgc

SEQ ID NO: 638738 - DNA, 25 bp, Homo sapien
ttcttgggcagcttgctgtcaccac

SEQ ID NO: 638739 - DNA, 25 bp, Homo sapien
atttgttcagttttcttgggcagct

SEQ ID NO: 638740 - DNA, 25 bp, Homo sapien
caagaggtccctttggtgagacaca

SEQ ID NO: 638741 - DNA, 25 bp, Homo sapien
aaaagtatgttctcgaacaagcaag

SEQ ID NO: 638742 - DNA, 25 bp, Homo sapien
cctttggtgagacacactgggctac

SEQ ID NO: 638743 - DNA, 25 bp, Homo sapien
ccaagtaaggaacatgagtagctcc

SEQ ID NO: 638744 - DNA, 25 bp, Homo sapien
ttttgtgagagtcccacagctctct

SEQ ID NO: 638745 - DNA, 25 bp, Homo sapien
ttttttgtgagagtcccacagctct

SEQ ID NO: 638746 - DNA, 25 bp, Homo sapien
ttgtgagagtcccacagctctctga

SEQ ID NO: 638747 - DNA, 25 bp, Homo sapien
ggattttttgtgagagtcccacagc

SEQ ID NO: 638748 - DNA, 25 bp, Homo sapien
tgtgtagtgcataaaccttgtgtca

SEQ ID NO: 638749 - DNA, 25 bp, Homo sapien
cctgacctcgtgaagtatttttatg

SEQ ID NO: 638750 - DNA, 25 bp, Homo sapien
ccttgtgtcagagtactcccatgtc

SEQ ID NO: 638751 - DNA, 25 bp, Homo sapien
tgctggcactgatgactgtcttttc

SEQ ID NO: 638752 - DNA, 25 bp, Homo sapien
tgccagcattcaggttttctcgtgt

SEQ ID NO: 638753 - DNA, 25 bp, Homo sapien
atgtgcttggcaaagctcccgccgg

SEQ ID NO: 638754 - DNA, 25 bp, Homo sapien
cagaagggaagttaaagttgccagc

SEQ ID NO: 638755 - DNA, 25 bp, Homo sapien
gggaccagtgcttcgtaccagatgt

SEQ ID NO: 638756 - DNA, 25 bp, Homo sapien
gcttttctgagggacacttgcggcc

SEQ ID NO: 638757 - DNA, 25 bp, Homo sapien
cagtcgaccgaatatccttggctgg

SEQ ID NO: 638758 - DNA, 25 bp, Homo sapien
ccttggctggttggaaacggatgcc

SEQ ID NO: 638759 - DNA, 25 bp, Homo sapien
taagcttgctgtccatgatacagtg

SEQ ID NO: 638760 - DNA, 25 bp, Homo sapien
ccttcatggcaccaatcagagttgg

SEQ ID NO: 638761 - DNA, 25 bp, Homo sapien
tctcagctccatagaaggccactca

SEQ ID NO: 638762 - DNA, 25 bp, Homo sapien
gatgtcccttatgttcttgtctcag

SEQ ID NO: 638763 - DNA, 25 bp, Homo sapien
tcctaaattgccctcagtgagcgcc

SEQ ID NO: 638764 - DNA, 25 bp, Homo sapien
tatggctagagatcattccatgact

SEQ ID NO: 638765 - DNA, 25 bp, Homo sapien
gctagagatcattccatgactgaaa

SEQ ID NO: 638766 - DNA, 25 bp, Homo sapien
tatatggctagagatcattccatga

SEQ ID NO: 638767 - DNA, 25 bp, Homo sapien
tggctagagatcattccatgactga

SEQ ID NO: 638768 - DNA, 25 bp, Homo sapien
gaaacataagagcattgtattgtgg

SEQ ID NO: 638769 - DNA, 25 bp, Homo sapien
taaaggtagccggatgcgatggctc

SEQ ID NO: 638770 - DNA, 25 bp, Homo sapien
gtaacaacaaagatcaattccagct

SEQ ID NO: 638771 - DNA, 25 bp, Homo sapien
aattccagctccataccatcagcag

SEQ ID NO: 638772 - DNA, 25 bp, Homo sapien
tgtggataattattcctacgtctat

SEQ ID NO: 638773 - DNA, 25 bp, Homo sapien
taactggtgcccagtagaattcctg

SEQ ID NO: 638774 - DNA, 25 bp, Homo sapien
gtgcccagtagaattcctggcacca

SEQ ID NO: 638775 - DNA, 25 bp, Homo sapien
tcctacgtctattaactggtgccca

SEQ ID NO: 638776 - DNA, 25 bp, Homo sapien
ctgtgtcaaaattagcgaagaagct

SEQ ID NO: 638777 - DNA, 25 bp, Homo sapien
aagctagtccactgatgttcaaaag

SEQ ID NO: 638778 - DNA, 25 bp, Homo sapien
ccgcctgagattctgaaagttctag

SEQ ID NO: 638779 - DNA, 25 bp, Homo sapien
tagcgaagaagctagtccactgatg

SEQ ID NO: 638780 - DNA, 25 bp, Homo sapien
aagaacaccgaaggcctctggtcag

SEQ ID NO: 638781 - DNA, 25 bp, Homo sapien
ttcaggtccaaagtaccagtgctgg

SEQ ID NO: 638782 - DNA, 25 bp, Homo sapien
tctcacagcaagagtataagaggcc

SEQ ID NO: 638783 - DNA, 25 bp, Homo sapien
gaccagggccaacatcagtgtaaca

SEQ ID NO: 638784 - DNA, 25 bp, Homo sapien
aactctccagagacataggatccat

SEQ ID NO: 638785 - DNA, 25 bp, Homo sapien
atagattcaaactcacatcctgcaa

SEQ ID NO: 638786 - DNA, 25 bp, Homo sapien
agacataggatccatcttgctgtag

SEQ ID NO: 638787 - DNA, 25 bp, Homo sapien
tgctgtagacattccatagattcaa

SEQ ID NO: 638788 - DNA, 25 bp, Homo sapien
gacaggatgatttgttatagcacaa

SEQ ID NO: 638789 - DNA, 25 bp, Homo sapien
ggatgatttgttatagcacaactta

SEQ ID NO: 638790 - DNA, 25 bp, Homo sapien
ttgacaggatgatttgttatagcac

SEQ ID NO: 638791 - DNA, 25 bp, Homo sapien
gatttgttatagcacaacttatata

SEQ ID NO: 638792 - DNA, 25 bp, Homo sapien
ctagcactggtatggctcttgggtc

SEQ ID NO: 638793 - DNA, 25 bp, Homo sapien
cactggtatggctcttgggtccacc

SEQ ID NO: 638794 - DNA, 25 bp, Homo sapien
tcattaggcgccgaaactcttgcag

SEQ ID NO: 638795 - DNA, 25 bp, Homo sapien
tagacatcattaggcgccgaaactc

SEQ ID NO: 638796 - DNA, 25 bp, Homo sapien
tttactactgagcctgtggtggctg

SEQ ID NO: 638797 - DNA, 25 bp, Homo sapien
caagggacttttactactgagcctg

SEQ ID NO: 638798 - DNA, 25 bp, Homo sapien
ggacttttactactgagcctgtggt

SEQ ID NO: 638799 - DNA, 25 bp, Homo sapien
ttttactactgagcctgtggtggct

SEQ ID NO: 638800 - DNA, 25 bp, Homo sapien
gtgatatgccacactatttgataac

SEQ ID NO: 638801 - DNA, 25 bp, Homo sapien
aagatgggataatgttatgttgctc

SEQ ID NO: 638802 - DNA, 25 bp, Homo sapien
tccccatccattgaagtttttaaca

SEQ ID NO: 638803 - DNA, 25 bp, Homo sapien
acaggcacaatccactatgccagca

SEQ ID NO: 638804 - DNA, 25 bp, Homo sapien
cctttggtgatccatttaaagagca

SEQ ID NO: 638805 - DNA, 25 bp, Homo sapien
ctttggtgatccatttaaagagcac

SEQ ID NO: 638806 - DNA, 25 bp, Homo sapien
gcctttggtgatccatttaaagagc

SEQ ID NO: 638807 - DNA, 25 bp, Homo sapien
cagcctttggtgatccatttaaaga

SEQ ID NO: 638808 - DNA, 25 bp, Homo sapien
agcaaaaaacgagggaacagccagt

SEQ ID NO: 638809 - DNA, 25 bp, Homo sapien
cagagatcactcatcatggattatc

SEQ ID NO: 638810 - DNA, 25 bp, Homo sapien
tatggtcaatgaatagggaagtcag

SEQ ID NO: 638811 - DNA, 25 bp, Homo sapien
tgaacctttattggccattgtaggg

SEQ ID NO: 638812 - DNA, 25 bp, Homo sapien
cagtctaactggtgaaaacaggcac

SEQ ID NO: 638813 - DNA, 25 bp, Homo sapien
ggcactatcctcgaatcctttcaga

SEQ ID NO: 638814 - DNA, 25 bp, Homo sapien
gttaccacacacatgactgcactga

SEQ ID NO: 638815 - DNA, 25 bp, Homo sapien
agtattctgctgagtaccgactggg

SEQ ID NO: 638816 - DNA, 25 bp, Homo sapien
ccgcgcccagccgtgcccgactaat

SEQ ID NO: 638817 - DNA, 25 bp, Homo sapien
ggcagtcatcaggccatcagagtgg

SEQ ID NO: 638818 - DNA, 25 bp, Homo sapien
gcagtcatcaggccatcagagtgga

SEQ ID NO: 638819 - DNA, 25 bp, Homo sapien
atgccctcaagtgcaaaggcctgta

SEQ ID NO: 638820 - DNA, 25 bp, Homo sapien
aaggcctgtacaattggccatttct

SEQ ID NO: 638821 - DNA, 25 bp, Homo sapien
caaacatatcaaatatctgcaagtg

SEQ ID NO: 638822 - DNA, 25 bp, Homo sapien
tttctccaccacaaacatatcaaat

SEQ ID NO: 638823 - DNA, 25 bp, Homo sapien
tctactacagtctcgaaccatgtcc

SEQ ID NO: 638824 - DNA, 25 bp, Homo sapien
cttgggagctgtaaggaatgccaat

SEQ ID NO: 638825 - DNA, 25 bp, Homo sapien
cgaaccatgtccacaaagctggtaa

SEQ ID NO: 638826 - DNA, 25 bp, Homo sapien
tttaaattcttctgcggcttcttca

SEQ ID NO: 638827 - DNA, 25 bp, Homo sapien
tgtgccacataaggtaagagatagc

SEQ ID NO: 638828 - DNA, 25 bp, Homo sapien
gatggacgctatccgatttaatcaa

SEQ ID NO: 638829 - DNA, 25 bp, Homo sapien
tacaggattacagtacagatggacg

SEQ ID NO: 638830 - DNA, 25 bp, Homo sapien
gatagcgaaagtttacaggattaca

SEQ ID NO: 638831 - DNA, 25 bp, Homo sapien
agttattgtgtgcagtggtgagctt

SEQ ID NO: 638832 - DNA, 25 bp, Homo sapien
aacgatactgcttgtccctttagga

SEQ ID NO: 638833 - DNA, 25 bp, Homo sapien
caactgcaggcccaacgatactgct

SEQ ID NO: 638834 - DNA, 25 bp, Homo sapien
gctttgtacgcaggaaagactggga

SEQ ID NO: 638835 - DNA, 25 bp, Homo sapien
ggtattctgattgtacaaaccaaat

SEQ ID NO: 638836 - DNA, 25 bp, Homo sapien
actggtattctgattgtacaaacca

SEQ ID NO: 638837 - DNA, 25 bp, Homo sapien
tcttcagaaaatcccgttttctcaa

SEQ ID NO: 638838 - DNA, 25 bp, Homo sapien
ttcttcagaaaatcccgttttctca

SEQ ID NO: 638839 - DNA, 25 bp, Homo sapien
gtcaggatgctctgaacctgccgaa

SEQ ID NO: 638840 - DNA, 25 bp, Homo sapien
tgcagaggatcccatccggccgaga

SEQ ID NO: 638841 - DNA, 25 bp, Homo sapien
agaggatcccatccggccgagactt

SEQ ID NO: 638842 - DNA, 25 bp, Homo sapien
tctgaacctgccgaagtcgactgca

SEQ ID NO: 638843 - DNA, 25 bp, Homo sapien
tagtgagaagcagacgagagacagc

SEQ ID NO: 638844 - DNA, 25 bp, Homo sapien
taaaaagagctcattgcaggactgc

SEQ ID NO: 638845 - DNA, 25 bp, Homo sapien
tattcgtaggagaatgcgcaaccag

SEQ ID NO: 638846 - DNA, 25 bp, Homo sapien
cattaatctagactttcggtgctga

SEQ ID NO: 638847 - DNA, 25 bp, Homo sapien
tgctaagtagggtctcacctaggtt

SEQ ID NO: 638848 - DNA, 25 bp, Homo sapien
caaacatcaaatgggcactaggtgc

SEQ ID NO: 638849 - DNA, 25 bp, Homo sapien
caggtccctaggtcattctgttaat

SEQ ID NO: 638850 - DNA, 25 bp, Homo sapien
tgttacagacatctacaggtcccta

SEQ ID NO: 638851 - DNA, 25 bp, Homo sapien
tgagccgttcagcaaagaaccgtcc

SEQ ID NO: 638852 - DNA, 25 bp, Homo sapien
gctgtccctagggaagccattgtgg

SEQ ID NO: 638853 - DNA, 25 bp, Homo sapien
ggcctctacagagggcgccgttcct

SEQ ID NO: 638854 - DNA, 25 bp, Homo sapien
tcccgaggaagccatgtcggaccac

SEQ ID NO: 638855 - DNA, 25 bp, Homo sapien
tgccggcgcggggggtacacgtcca

SEQ ID NO: 638856 - DNA, 25 bp, Homo sapien
tgacggagggtgacccgcggctgga

SEQ ID NO: 638857 - DNA, 25 bp, Homo sapien
acggagggtgacccgcggctggagc

SEQ ID NO: 638858 - DNA, 25 bp, Homo sapien
ctgacggagggtgacccgcggctgg

SEQ ID NO: 638859 - DNA, 25 bp, Homo sapien
cggcggacgactggcggcggaggag

SEQ ID NO: 638860 - DNA, 25 bp, Homo sapien
ctgcgagggtctcagttgcccgcag

SEQ ID NO: 638861 - DNA, 25 bp, Homo sapien
ccgcagggcggctccacgctagctg

SEQ ID NO: 638862 - DNA, 25 bp, Homo sapien
agggcggctccacgctagctgcggc

SEQ ID NO: 638863 - DNA, 25 bp, Homo sapien
gtctcagttgcccgcagggcggctc

SEQ ID NO: 638864 - DNA, 25 bp, Homo sapien
ttgggagcgcgtgtccgcagggtga

SEQ ID NO: 638865 - DNA, 25 bp, Homo sapien
gggagcgcgtgtccgcagggtgagg

SEQ ID NO: 638866 - DNA, 25 bp, Homo sapien
tgttgggagcgcgtgtccgcagggt

SEQ ID NO: 638867 - DNA, 25 bp, Homo sapien
cggatgttgggagcgcgtgtccgca

SEQ ID NO: 638868 - DNA, 25 bp, Homo sapien
agggcatcctctgaggcaaagaagg

SEQ ID NO: 638869 - DNA, 25 bp, Homo sapien
caaagaaggccagaatgccagcaaa

SEQ ID NO: 638870 - DNA, 25 bp, Homo sapien
ctagaacttgacaagggcatcctct

SEQ ID NO: 638871 - DNA, 25 bp, Homo sapien
atgccagcaaacgaagatgcatctt

SEQ ID NO: 638872 - DNA, 25 bp, Homo sapien
ttccagtacatccctataagtttgt

SEQ ID NO: 638873 - DNA, 25 bp, Homo sapien
gcttaaatgcctcttatgtacatct

SEQ ID NO: 638874 - DNA, 25 bp, Homo sapien
gggcaaggatggttttgatcaattt

SEQ ID NO: 638875 - DNA, 25 bp, Homo sapien
ctggagagatggaattagctttctc

SEQ ID NO: 638876 - DNA, 25 bp, Homo sapien
gtctcaatcatgacccagcccagat

SEQ ID NO: 638877 - DNA, 25 bp, Homo sapien
gctagaaacaagacattgctactcc

SEQ ID NO: 638878 - DNA, 25 bp, Homo sapien
gggtcaaggaccataaaaggctaca

SEQ ID NO: 638879 - DNA, 25 bp, Homo sapien
cagagtaacaactaccagacaagaa

SEQ ID NO: 638880 - DNA, 25 bp, Homo sapien
cgcagccgaggccaaggaatgtgac

SEQ ID NO: 638881 - DNA, 25 bp, Homo sapien
gctgggtgggcgagcaatgccagca

SEQ ID NO: 638882 - DNA, 25 bp, Homo sapien
tgaccggccctgtgtcaacggcggt

SEQ ID NO: 638883 - DNA, 25 bp, Homo sapien
aacggcggtcgctgcaaccctggca

SEQ ID NO: 638884 - DNA, 25 bp, Homo sapien
acagataaaacacatctcagccctg

SEQ ID NO: 638885 - DNA, 25 bp, Homo sapien
tagaccatgagactacgtagcaaag

SEQ ID NO: 638886 - DNA, 25 bp, Homo sapien
gccagcatgccttgtttctacagga

SEQ ID NO: 638887 - DNA, 25 bp, Homo sapien
tctacaggatgcatgctagaccatg

SEQ ID NO: 638888 - DNA, 25 bp, Homo sapien
ttcttattcacaacattcccacttg

SEQ ID NO: 638889 - DNA, 25 bp, Homo sapien
tcccacttgagtcttcatattcttc

SEQ ID NO: 638890 - DNA, 25 bp, Homo sapien
gtccttgtcttttcagatcctcata

SEQ ID NO: 638891 - DNA, 25 bp, Homo sapien
tccagtgtcaggctgccatcattct

SEQ ID NO: 638892 - DNA, 25 bp, Homo sapien
ggcccacaaggagacagcatcttca

SEQ ID NO: 638893 - DNA, 25 bp, Homo sapien
gcaatttgaatttggcccacaagga

SEQ ID NO: 638894 - DNA, 25 bp, Homo sapien
ctgcaatttgaatttggcccacaag

SEQ ID NO: 638895 - DNA, 25 bp, Homo sapien
cccacaaggagacagcatcttcaat

SEQ ID NO: 638896 - DNA, 25 bp, Homo sapien
agcagtgtttgggatgcccaaacac

SEQ ID NO: 638897 - DNA, 25 bp, Homo sapien
gtcacattagcaaagtgagcagtgt

SEQ ID NO: 638898 - DNA, 25 bp, Homo sapien
ggatgcccaaacacctcatgccatg

SEQ ID NO: 638899 - DNA, 25 bp, Homo sapien
gtttgggatgcccaaacacctcatg

SEQ ID NO: 638900 - DNA, 25 bp, Homo sapien
gcttatatagccagtagggaatgcg

SEQ ID NO: 638901 - DNA, 25 bp, Homo sapien
aggctttgcgcccttggtaggtgta

SEQ ID NO: 638902 - DNA, 25 bp, Homo sapien
atagccagtagggaatgcgtttgcc

SEQ ID NO: 638903 - DNA, 25 bp, Homo sapien
gtttccacaaatctcacagttatag

SEQ ID NO: 638904 - DNA, 25 bp, Homo sapien
tcactctcactcttactgatctgct
